(19) United States
(12) Patent Application Publication
(10) Pub. No.: US 2005/0136395 A1
(43) Pub. Date: Jun. 23, 2005

(54) Methods for genetic analysis of SARS virus

(75) Inventors: Michael P. Mittmann, Palo Alto, CA (US); Eric B. Schell, Mountain View, CA (US)

Correspondence Address: AFFYMETRIX, INC;ATTN: CHIEF IP COUNSEL, LEGAL DEPT., 3380 CENTRAL EXPRESSWAY, SANTA CLARA, CA, 95051, US

(73) Assignee: Affymetrix, INC, Santa Clara, CA (US)

(21) Appl. No.: 10/843,527

(22) Filed: May 10, 2004

Related U.S. Application Data
(60) Provisional application No. 60/469,545, filed on May 8, 2003.

(51) Int. Cl. C12Q 1/70; C12Q 1/68; C12P 19/34

(52) U.S. Cl. 435/5; 435/6; 435/91.2

(57) ABSTRACT

The invention provides arrays and probes for resequencing a SARS virus using an array of probes that are complementary to a SARS reference sequence and to each possible single nucleotide substitution of the reference sequence. Methods of identifying mutations in viral sequences and methods of characterizing viral isolates are also provided. The invention also provides high throughput methods to monitor epidemics and pandemics caused by pathogens such as viruses.

### RELATED APPLICTIONS

[0001] The present application claims priority to U.S. Provisional Application No. 60/469,545, filed May 8, 2003, the disclosure of which is incorporated herein by reference in its entirety.

### FIELD OF THE INVENTION

[0002] Pools of nucleic acid sequences and arrays of nucleic acid sequences that are useful for detecting sequence variation in the SARS virus are provided. High throughput methods for using sequence variation detection for analysis and monitoring of viruses and viral outbreaks are provided. The invention relates to diverse fields, including viral genetics, epidemiology, medicine, and medical diagnostics.

### REFERENCE TO SEQUENCE LISTING

[0003] The Sequence Listing submitted on compact disk is hereby incorporated by reference. The file on the disk is named 3602.1seqlist.txt the file is 32.8 MB and the date of creation is May 10, 2004.

### BACKGROUND

[0004] Severe acute respiratory syndrome (SARS) captured the attention of the world in the Spring of 2003. The syndrome arose in China in late 2002 and was spread around the world by travelers. Nearly 800 people were killed and 8,000 infected during the initial outbreak. This previously unknown disease has had its most severe impact in Hong Kong and China, but has also been identified in patients in Canada, the United States, Europe and other Asian countries. The rapid global spread of the disease highlights the increasing risk for pandemics created by increasing globalization and travel. An individual infected with a disease can easily travel to any major city in a matter of hours. Monitoring disease outbreaks of both old diseases such as influenza and new diseases such as SARS will continue to be important to world health and stability. Single nucleotide polymorphism (SNP) has been used extensively for genetic analysis.

[0005] Fast and reliable hybridization-based polymorphism detection assays have been developed. (See Wang, et al., Large-Scale Identification, Mapping, and Genotyping of Single-Nucleotide Polymorphism's in the Human Genome, Science 280:1077-1082, 1998; Gingeras, et al., Simultaneous Genotyping and Species Identification Using Hybridization Pattern Recognition Analysis of Generic Mycobacterium DNA Arrays, Genome Research 8:435-448, 1998; Halushka, et al., Patterns of Single-Nucleotide Polymorphisms in Candidate Genes for Blood-Pressure Homeostasis, Nature Genetics 22:239-247, 1999; Cutler, et al., High throughput variation detection and genotyping using microarrays. Genome Research 11(11): 1913-25, 2001, (Cutler et al., 2001) all incorporated herein by reference in their entireties.

### SUMMARY OF THE INVENTION

[0006] In one embodiment a microarray for resequencing different isolates of the coronavirus-like virus that causes severe acute respiratory syndrome (SARS) is disclosed. The array may comprise 1 or more probes corresponding to SEQ ID NOS. 1-238,192. In one embodiment the array comprises probes corresponding to each of the sequences in SEQ ID NOS. 1-238,192 and may in addition comprise a collection of control probes, for example, Tag-IQ-EX and 60 mer as disclosed in U.S. patent application Ser. No. 10/619,739.

[0007] The probes for the array were selected using the publicly available SARS sequences published by researchers at the British Columbia Cancer Center, the US Centers for Disease Control sequence, and sequences published by scientists from Asia.

[0008] Probes are included for the entire 29,700 nucleotide sequence of the SARS virus. The array is designed for rapid resequencing of the virus. The array may be used to identify mutations in the virus from different isolates. Resequencing may be used to categorize viral isolates into subtypes, and also, to compare the sequence to specific clinical data. In some embodiments sequence may be combined with additional data, such as clinical data, to determine why one strain is more dangerous than another. The sequence obtained may also be used to track the virus' evolution over time in different populations and different areas.

[0009] The invention provides an array of oligonucleotide probes immobilized on a solid support for analysis of a target sequence from a coronavirus. The array comprises at least four sets of oligonucleotide probes 9 to 35 nucleotides in length. In a preferred embodiment probes are 20 nucleotides in length. In another preferred embodiment probes are 25 nucleotides in length. A first probe set has a probe corresponding to each nucleotide in a reference sequence from a SARS virus. A probe is related to its corresponding nucleotide by being exactly complementary to a subsequence of the reference sequence that includes the corresponding nucleotide. Thus, each probe has a position, designated an interrogation position, that is occupied by a complementary nucleotide to the corresponding nucleotide. The three additional probe sets each have a corresponding probe for each probe in the first probe set. Thus, for each nucleotide in the reference sequence, there are four corresponding probes, one from each of the probe sets. The three corresponding probes in the three additional probe sets are identical to the corresponding probe from the first probe or a subsequence thereof that includes the interrogation position, except that the interrogation position is occupied by a different nucleotide in each of the four corresponding probes. Both strands of the sequence may be tiled on an array in this manner to detect polymorphism on either or both strands.

[0010] In another aspect, the invention provides methods for comparing a target nucleic acid from a SARS virus with a reference sequence from a second SARS virus having a predetermined sequence of nucleotides. The target nucleic acid is hybridized to an array of oligonucleotide probes as described above. The relative specific binding of the probes in the array to the target is determined to indicate whether the target sequence is the same or different from the reference sequence.

[0011] In some applications, the target sequence has a substituted nucleotide relative to the reference sequence in at least one undetermined position, and the relative specific binding of the probes indicates the location of the position and the nucleotide occupying the position in the target sequence. In some applications the target sequence has a substituted nucleotide relative to the reference sequence in at least one position, the substitution conferring drug resistance to the SARS virus, and the relative specific binding of the probes reveals the substitution.

[0012] In some embodiments methods of monitoring viral isolates from different individuals are disclosed. Many of the methods may have at least one step that is performed in a high throughput assay that may involve one or more robots. Many of the methods involve resequencing a viral isolate on a SARS resequencing array and comparing the sequence of the isolate to one or more other sequences. In some embodiments the frequency of a particular mutation is determined. In some embodiments a particular mutation or mutations may be associated with a phenotype, for example, a super spreader phenotype.

### DETAILED DESCRIPTION OF THE INVENTION

(A) General

[0013] The present invention has many preferred embodiments and relies on many patents, applications and other references for details known to those of the art. Therefore, when a patent, application, or other reference is cited or repeated below, it should be understood that it is incorporated by reference in its entirety for all purposes as well as for the proposition that is recited.

[0014] As used in this application, the singular form “a,” “an,” and “the” include plural references unless the context clearly dictates otherwise. For example, the term “an agent” includes a plurality of agents, including mixtures thereof.

[0015] An individual is not limited to a human being but may also be other organisms including but not limited to mammals, plants, bacteria, or cells derived from any of the above.

[0016] Throughout this disclosure, various aspects of this invention can be presented in a range format. It should be understood that the description in range format is merely for convenience and brevity and should not be construed as an inflexible limitation on the scope of the invention.

[0017] Accordingly, the description of a range should be considered to have specifically disclosed all the possible subranges as well as individual numerical values within that range. For example, description of a range such as from 1 to 6 should be considered to have specifically disclosed subranges such as from 1 to 3, from 1 to 4, from 1 to 5, from 2 to 4, from 2 to 6, from 3 to 6 etc., as well as individual numbers within that range, for example, 1, 2, 3, 4, 5, and 6. This applies regardless of the breadth of the range.

[0018] The practice of the present invention may employ, unless otherwise indicated, conventional techniques and descriptions of organic chemistry, polymer technology, molecular biology (including recombinant techniques), cell biology, biochemistry, and immunology, which are within the skill of the art. Such conventional techniques include polymer array synthesis, hybridization, ligation, and detection of hybridization using a label. Specific illustrations of suitable techniques can be had by reference to the example herein below. However, other equivalent conventional procedures can, of course, also be used. Such conventional techniques and descriptions can be found in standard laboratory manuals such as Genome Analysis: A Laboratory Manual Series (Vols. I-IV), Using Antibodies: A Laboratory Manual, Cells: A Laboratory Manual, PCR Primer: A Laboratory Manual, and Molecular Cloning: A Laboratory Manual (all from Cold Spring Harbor Laboratory Press), Stryer, L. (1995) Biochemistry (4th Ed.) Freeman, New York, Gait, “Oligonucleotide Synthesis: A Practical Approach” 1984, IRL Press, London, Nelson and Cox (2000), Lehninger, Principles of Biochemistry 3^{rd} Ed., W.H. Freeman Pub., New York, N.Y. and Berg et al. (2002) Biochemistry, 5^{th} Ed., W.H. Freeman Pub., New York, N.Y., all of which are herein incorporated in their entirety by reference for all purposes.

[0019] The present invention can employ solid substrates, including arrays in some preferred embodiments. Methods and techniques applicable to polymer (including protein) array synthesis have been described in U.S. Ser. No. 09/536,841, WO 00/58516, U.S. Pat. Nos. 5,143,854, 5,242,974, 5,252,743, 5,324,633, 5,384,261, 5,405,783, 5,424,186, 5,451,683, 5,482,867, 5,491,074, 5,527,681, 5,550,215, 5,571,639, 5,578,832, 5,593,839, 5,599,695, 5,624,711, 5,631,734, 5,795,716, 5,831,070, 5,837,832, 5,856,101, 5,858,659, 5,936,324, 5,968,740, 5,974,164, 5,981,185, 5,981,956, 6,025,601, 6,033,860, 6,040,193, 6,090,555, 6,136,269, 6,269,846 and 6,428,752, in PCT Applications Nos. PCT/US99/00730 (International Publication No. WO 99/36760) and PCT/US01/04285 (International Publication No. WO 01/58593), which are all incorporated herein by reference in their entirety for all purposes.

[0020] Patents that describe synthesis techniques in specific embodiments include U.S. Pat. Nos. 5,412,087, 6,153,743, 6,147,205, 6,262,216, 6,310,189, 5,889,165, and 5,959,098. Nucleic acid arrays are described in many of the above patents, but the same techniques are applied to polypeptide arrays.

[0021] Nucleic acid arrays that are useful in the present invention include those that are commercially available from Affymetrix (Santa Clara, Calif.) under the brand name GeneChip®. Example arrays are shown on the website at affymetrix.com. Example arrays are shown on the website at affymetrix.com. Arrays are disclosed in U.S. Pat. Nos. 6,610,482.

[0022] The present invention also contemplates many uses for polymers attached to solid substrates. These uses include gene expression monitoring, profiling, library screening, genotyping and diagnostics. Gene expression monitoring and profiling methods can be shown in U.S. Pat. Nos. 5,800,992, 6,013,449, 6,020,135, 6,033,860, 6,040,138, 6,177,248 and 6,309,822. Genotyping and uses therefore are shown in U.S. Ser. Nos. 10/442,021, 10/013,598 (U.S. Patent Application Publication 20030036069), and U.S. Pat. Nos. 5,856,092, 6,300,063, 5,858,659, 6,284,460, 6,361,947, 6,368,799 and 6,333,179. Other uses are embodied in U.S. Pat. Nos. 5,871,928, 5,902,723, 6,045,996, 5,541,061, and 6,197,506.

[0023] The present invention also contemplates sample preparation methods in certain preferred embodiments. Prior to or concurrent with genotyping, the genomic sample may be amplified by a variety of mechanisms, some of which may employ PCR. See, for example, PCR Technology: Principles and Applications for DNA Amplification (Ed. H.A. Erlich, Freeman Press, NY, N.Y., 1992); PCR Protocols: A Guide to Methods and Applications (Eds. Innis, et al., Academic Press, San Diego, Calif., 1990); Mattila et al., Nucleic Acids Res. 19, 4967 (1991); Eckert et al., PCR Methods and Applications 1, 17 (1991); PCR (Eds. McPherson et al., IRL Press, Oxford); and U.S. Pat. Nos. 4,683,202, 4,683,195, 4,800,159 4,965,188, and 5,333,675, and each of which is incorporated herein by reference in their entireties for all purposes. The sample may be amplified on the array. See, for example, U.S. Pat. No. 6,300,070 and U.S. Ser. No. 09/513,300, which are incorporated herein by reference.

[0024] Other suitable amplification methods include the ligase chain reaction (LCR) (for example, Wu and Wallace, Genomics 4, 560 (1989), Landegren et al., Science 241, 1077 (1988) and Barringer et al. Gene 89:117 (1990)), transcription amplification (Kwoh et al., Proc. Natl. Acad. Sci. USA 86, 1173 (1989) and WO88/10315), self-sustained sequence replication (Guatelli et al., Proc. Nat. Acad. Sci. USA, 87, 1874 (1990) and WO90/06995), selective amplification of target polynucleotide sequences (U.S. Pat. No. 6,410,276), consensus sequence primed polymerase chain reaction (CP-PCR) (U.S. Pat. No. 4,437,975), arbitrarily primed polymerase chain reaction (AP-PCR) (U.S. Pat. Nos. 5,413,909, 5,861,245) and nucleic acid based sequence amplification (NABSA). (See, U.S. Pat. Nos. 5,409,818, 5,554,517, and 6,063,603, each of which is incorporated herein by reference). Other amplification methods that may be used are described in, U.S. Pat. Nos. 5,242,794, 5,494,810, 4,988,617 and in U.S. Ser. No. 09/854,317, each of which is incorporated herein by reference.

[0025] Additional methods of sample preparation and techniques for reducing the complexity of a nucleic sample are described in Dong et al., Genome Research 11, 1418 (2001), in U.S. Pat. Nos. 6,361,947, 6,391,592 and U.S. Ser. Nos. 09/916,135, 09/920,491 (U.S. Patent Application Publication 20030096235), 09/910,292 (U.S. Patent Application Publication 20030082543), and 10/013,598.

[0026] Methods for conducting polynucleotide hybridization assays have been well developed in the art. Hybridization assay procedures and conditions will vary depending on the application and are selected in accordance with the general binding methods known including those referred to in: Maniatis et al. Molecular Cloning: A Laboratory Manual (2^{nd} Ed. Cold Spring Harbor, N.Y, 1989); Berger and Kimmel Methods in Enzymology, Vol. 152, Guide to Molecular Cloning Techniques (Academic Press, Inc., San Diego, Calif., 1987); Young and Davism, P.N.A.S, 80: 1194 (1983). Methods and apparatus for carrying out repeated and controlled hybridization reactions have been described in U.S. Pat. Nos. 5,871,928, 5,874,219, 6,045,996 and 6,386,749, 6,391,623 each of which are incorporated herein by reference.

[0027] The present invention also contemplates signal detection of hybridization between ligands in certain preferred embodiments. See U.S. Pat. Nos. 5,143,854, 5,578,832; 5,631,734; 5,834,758; 5,936,324; 5,981,956; 6,025,601; 6,141,096; 6,185,030; 6,201,639; 6,218,803; and 6,225,625, in U.S. Ser. No. 10/389,194 and in PCT Application PCT/US99/06097 (published as WO99/47964), each of which also is hereby incorporated by reference in its entirety for all purposes.

[0028] Methods and apparatus for signal detection and processing of intensity data are disclosed in, for example, U.S. Pat. Nos. 5,143,854, 5,547,839, 5,578,832, 5,631,734, 5,800,992, 5,834,758; 5,856,092, 5,902,723, 5,936,324, 5,981,956, 6,025,601, 6,090,555, 6,141,096, 6,185,030, 6,201,639; 6,218,803; and 6,225,625, in U.S. Ser. Nos. 10/389,194, 60/493,495 and in PCT Application PCT/US99/06097 (published as WO99/47964), each of which also is hereby incorporated by reference in its entirety for all purposes.

[0029] The practice of the present invention may also employ conventional biology methods, software and systems. Computer software products of the invention typically include computer readable medium having computer-executable instructions for performing the logic steps of the method of the invention. Suitable computer readable medium include floppy disk, CD-ROM/DVD/DVD-ROM, hard-disk drive, flash memory, ROM/RAM, magnetic tapes and etc. The computer executable instructions may be written in a suitable computer language or combination of several languages. Basic computational biology methods are described in, for example Setubal and Meidanis et al., Introduction to Computational Biology Methods (PWS Publishing Company, Boston, 1997); Salzberg, Searles, Kasif, (Ed.), Computational Methods in Molecular Biology, (Elsevier, Amsterdam, 1998); Rashidi and Buehler, Bioinformatics Basics: Application in Biological Science and Medicine (CRC Press, London, 2000) and Ouelette and Bzevanis Bioinformatics: A Practical Guide for Analysis of Gene and Proteins (Wiley & Sons, Inc., 2^{nd} ed., 2001). See U.S. Pat. No. 6,420,108.

[0030] The present invention may also make use of various computer program products and software for a variety of purposes, such as probe design, management of data, analysis, and instrument operation. See, U.S. Pat. Nos. 5,593,839, 5,795,716, 5,733,729, 5,974,164, 6,066,454, 6,090,555, 6,185,561, 6,188,783, 6,223,127, 6,229,911 and 6,308,170.

[0031] Additionally, the present invention may have preferred embodiments that include methods for providing genetic information over networks such as the Internet as shown in U.S. Ser. Nos. 10/197,621, 10/063,559 (United States Publication No. 20020183936), 10/065,856, 10/065,868, 10/328,818, 10/328,872, 10/423,403, and 60/482,389.

B. Definitions

[0032] The phrase “massively parallel screening” refers to the simultaneous screening of from about 100, 1000, 10,000 or 100,000 to 1000, 10,000, 100,000, 1,000,000 or 3,000,000 or more different nucleic acid hybridizations.

[0033] As used herein a “probe” is defined as a nucleic acid capable of binding to a target nucleic acid of complementary sequence through one or more types of chemical bonds, usually through complementary base pairing, usually through hydrogen bond formation. As used herein, a probe may include natural (i.e. A, G, U, C, or T) or modified bases (7-deazaguanosine, inosine, etc.). In addition, a linkage other than a phosphodiester bond may join the bases in probes, so long as it does not interfere with hybridization. Thus, probes may be peptide nucleic acids in which the constituent bases are joined by peptide bonds rather than phosphodiester linkages.

[0034] The term “match,” “perfect match,” “perfect match probe” or “perfect match control” refers to a nucleic acid that has a sequence that is designed to be perfectly complementary to a particular target sequence. The nucleic acid is typically perfectly complementary to a portion (subsequence) of the target sequence. A perfect match (PM) probe can be a “test probe”, a “normalization control” probe, an expression level control probe and the like. A perfect match control or perfect match is, however, distinguished from a “mismatch” or “mismatch probe.”

[0035] The term “mismatch,” “mismatch control” or “mismatch probe” refers to a nucleic acid whose sequence is deliberately designed not to be perfectly complementary to a particular target sequence. As a non-limiting example, for each mismatch (MM) control in a high-density probe array there typically exists a corresponding perfect match (PM) probe that is perfectly complementary to the same particular target sequence. The mismatch may comprise one or more bases. While the mismatch(es) may be located anywhere in the mismatch probe, terminal mismatches are less desirable because a terminal mismatch is less likely to prevent hybridization of the target sequence. In a particularly preferred embodiment, the mismatch is located at or near the center of the probe such that the mismatch is most likely to destabilize the duplex with the target sequence under the test hybridization conditions. A homo-mismatch substitutes an adenine (A) for a thymine (T) and vice versa and a guanine (G) for a cytosine (C) and vice versa. For example, if the target sequence was: AGGTCCA, a probe designed with a single homo-mismatch at the central, or fourth position, would result in the following sequence: TCCTGGT.

[0036] A genetic map is a map that presents the order of specific sequences on a chromosome.

[0037] Genetic variation refers to variation in the sequence of the same region between two or more organisms.

[0038] Nucleic acids according to the present invention may include any polymer or oligomer of pyrimidine and purine bases, preferably cytosine, thymine, and uracil, and adenine and guanine, respectively. (See Albert L. Lehninger, Principles of Biochemistry, at 793-800 (Worth Pub. 1982) which is herein incorporated in its entirety for all purposes). Indeed, the present invention contemplates any deoxyribonucleotide, ribonucleotide or peptide nucleic acid component, and any chemical variants thereof, such as methylated, hydroxymethylated or glucosylated forms of these bases, and the like. The polymers or oligomers may be heterogeneous or homogeneous in composition, and may be isolated from naturally occurring sources or may be artificially or synthetically produced. In addition, the nucleic acids may be DNA or RNA, or a mixture thereof, and may exist permanently or transitionally in single-stranded or double-stranded form, including homoduplex, heteroduplex, and hybrid states.

[0039] An “oligonucleotide” or “polynucleotide” is a nucleic acid ranging from at least 2, preferably at least 8, 15 or 20 nucleotides in length, but may be up to 50, 100, 1000, or 5000 nucleotides long or a compound that specifically hybridizes to a polynucleotide. Polynucleotides of the present invention include sequences of deoxyribonucleic acid (DNA) or ribonucleic acid (RNA) or mimetics thereof which may be isolated from natural sources, recombinantly produced or artificially synthesized. A further example of a polynucleotide of the present invention may be a peptide nucleic acid (PNA). (See U.S. Pat. No. 6,156,501 which is hereby incorporated by reference in its entirety.) The invention also encompasses situations in which there is a nontraditional base pairing such as Hoogsteen base pairing which has been identified in certain tRNA molecules and postulated to exist in a triple helix. “Polynucleotide” and “oligonucleotide” are used interchangeably in this application.

[0040] A genome is all the genetic material of an organism. In some instances, the term genome may refer to the chromosomal DNA. Genome may be multichromosomal such that the DNA is cellularly distributed among a plurality of individual chromosomes. For example, in human there are 22 pairs of chromosomes plus a gender associated XX or XY pair. DNA derived from the genetic material in the chromosomes of a particular organism is genomic DNA. The term genome may also refer to genetic materials from organisms that do not have chromosomal structure. In addition, the term genome may refer to mitochondria DNA. A genomic library is a collection of DNA fragments representing the whole or a portion of a genome. Frequently, a genomic library is a collection of clones made from a set of randomly generated, sometimes overlapping DNA fragments representing the entire genome or a portion of the genome of an organism.

[0041] The term “chromosome” refers to the heredity-bearing gene carrier of a cell which is derived from chromatin and which comprises DNA and protein components (especially histones). The conventional internationally recognized individual human genome chromosome numbering system is employed herein. The size of an individual chromosome can vary from one type to another within a given multi-chromosomal genome and from one genome to another. In the case of the human genome, the entire DNA mass of a given chromosome is usually greater than about 100,000,000 bp. For example, the size of the entire human genome is about 3×10⁹ bp. The largest chromosome, chromosome no. 1, contains about 2.4×10⁸ bp while the smallest chromosome, chromosome no. 22, contains about 5.3×10⁷ bp.

[0042] A “chromosomal region” is a portion of a chromosome. The actual physical size or extent of any individual chromosomal region can vary greatly. The term “region” is not necessarily definitive of a particular one or more genes because a region need not take into specific account the particular coding segments (exons) of an individual gene.

[0043] An “allele” refers to one specific form of a genetic sequence (such as a gene) within a cell, an individual or within a population, the specific form differing from other forms of the same gene in the sequence of at least one, and frequently more than one, variant sites within the sequence of the gene. The sequences at these variant sites that differ between different alleles are termed “variances”, “polymorphisms”, or “mutations”. At each autosomal specific chromosomal location or “locus” an individual possesses two alleles, one inherited from one parent and one from the other parent, for example one from the mother and one from the father. An individual is “heterozygous” at a locus if it has two different alleles at that locus. An individual is “homozygous” at a locus if it has two identical alleles at that locus.

[0044] Polymorphism refers to the occurrence of two or more genetically determined alternative sequences or alleles in a population. A polymorphic marker or site is the locus at which divergence occurs. Preferred markers have at least two alleles, each occurring at a frequency of preferably greater than 1%, and more preferably greater than 10% or 20% of a selected population. A polymorphism may comprise one or more base changes, an insertion, a repeat, or a deletion. A polymorphic locus may be as small as one base pair. Polymorphic markers include restriction fragment length polymorphisms, variable number of tandem repeats (VNTR's), hypervariable regions, minisatellites, dinucleotide repeats, trinucleotide repeats, tetranucleotide repeats, simple sequence repeats, and insertion elements such as Alu. The first identified allelic form is arbitrarily designated as the reference form and other allelic forms are designated as alternative or variant alleles. The allelic form occurring most frequently in a selected population is sometimes referred to as the wildtype form. A diallelic polymorphism has two forms. A triallelic polymorphism has three forms. A polymorphism between two nucleic acids can occur naturally, or be caused by exposure to or contact with chemicals, enzymes, or other agents, or exposure to agents that cause damage to nucleic acids, for example, ultraviolet radiation, mutagens or carcinogens.

[0045] Single nucleotide polymorphisms (SNPs) are positions at which two alternative bases occur at appreciable frequency (>1%) in a given population. SNPs are the most common type of human genetic variation. A polymorphic site is frequently preceded by and followed by highly conserved sequences (e.g., sequences that vary in less than 1/100 or 1/1000 members of the populations).

[0046] A SNP may arise due to substitution of one nucleotide for another at the polymorphic site. A transition is the replacement of one purine by another purine or one pyrimidine by another pyrimidine. A transversion is the replacement of a purine by a pyrimidine or vice versa. SNPs can also arise from a deletion of a nucleotide or an insertion of a nucleotide relative to a reference allele.

[0047] The term “genotyping” refers to the determination of the genetic information an individual carries at one or more positions in the genome. For example, genotyping may comprise the determination of which allele or alleles an individual carries for a single SNP or the determination of which allele or alleles an individual carries for a plurality of SNPs. For example, a particular nucleotide in a genome may be an A in some individuals and a C in other individuals. Those individuals who have an A at the position have the A allele and those who have a C have the C allele. In a diploid organism the individual will have two copies of the sequence containing the polymorphic position so the individual may have an A allele and a C allele or alternatively two copies of the A allele or two copies of the C allele. Those individuals who have two copies of the C allele are homozygous for the C allele, those individuals who have two copies of the A allele are homozygous for the C allele, and those individuals who have one copy of each allele are heterozygous. The array may be designed to distinguish between each of these three possible outcomes. A polymorphic location may have two or more possible alleles and the array may be designed to distinguish between all possible combinations.

[0048] As used herein, a “probe” is a molecule for detecting a target molecule. A probe may refer to a nucleic acid, such as an oligonucleotide, capable of binding to a target nucleic acid of complementary sequence through one or more types of chemical bonds, usually through complementary base pairing, usually through hydrogen bond formation. As used herein, a probe may include natural (i.e., A, G, U, C, or T) or modified bases (7-deazaguanosine, inosine, etc.). In addition, the bases in probes may be joined by a linkage other than a phosphodiester bond, so long as the bond does not prevent hybridization. Thus, probes may be peptide nucleic acids in which the constituent bases are joined by peptide bonds rather than phosphodiester linkages. Other examples of probes include antibodies used to detect peptides or other molecules, any ligands for detecting its binding partners.

[0049] An “array” comprises a support, preferably solid, with nucleic acid probes attached to the support. Preferred arrays typically comprise a plurality of different nucleic acid probes that are coupled to a surface of a substrate in different, known locations. These arrays, also described as “microarrays” or colloquially “chips” have been generally described in the art, for example, U.S. Pat. Nos. 5,143,854, 5,445,934, 5,744,305, 5,677,195, 5,800,992, 6,040,193, 5,424,186 and Fodor et al., Science, 251:767-777 (1991), each of which is incorporated by reference in its entirety for all purposes.

[0050] Arrays may generally be produced using a variety of techniques, such as mechanical synthesis methods or light directed synthesis methods that incorporate a combination of photolithographic methods and solid phase synthesis methods. Techniques for the synthesis of these arrays using mechanical synthesis methods are described in, e.g., U.S. Pat. Nos. 5,384,261, and 6,040,193, which are incorporated herein by reference in their entirety for all purposes. Although a planar array surface is preferred, the array may be fabricated on a surface of virtually any shape or even a multiplicity of surfaces. Arrays may be nucleic acids on beads, gels, polymeric surfaces, fibers such as fiber optics, glass or any other appropriate substrate. (See U.S. Pat. Nos. 5,770,358, 5,789,162, 5,708,153, 6,040,193 and 5,800,992, which are hereby incorporated by reference in their entirety for all purposes.)

[0051] A resequencing array is an array of nucleic acid probes with four probes tiled for both the forward and reverse strand for each individual base in a sequence. The central position of each probe varies to incorporate each of the four possible nucleotides, A, C, G or T. See, GeneChip CustomSeq Resequencing Arrays Data Sheet, available from Affymetrix, Inc. part no. 701225 Rev. 2. Arrays are designed based on the sequence to be resequenced. A known sequence is selected and the array is designed using that sequence as a reference sequence.

[0052] Assays for amplification of the known sequence are also designed, for example primers for long range PCR may be designed to amplify regions of the sequence. For RNA viruses a first reverse transcriptase step may be used to generate double stranded DNA from the single stranded RNA. A resequencing array for the SARS virus was designed to resequence the approximately 29,000 base sequence published for the SARS virus. The resequencing array may be designed to resequence an entire genome, such as the genome of the SARS virus; one or more regions of a genome, for example, selected regions of a genome such as those coding for a protein or RNA of interest; a conserved region from multiple genomes; or multiple genomes, such as the genome of a first SARS isolate and the genome of a second SARS isolate, or the genome of SARS and the genome of a second coronavirus. Resequencing arrays and methods of genetic analysis using resequencing arrays is described in Cutler, et al, Genome Res. 11(11): 1913-25 (2001) and Warrington, et al., Hum Mutat 19:402-9 (2002) and in US Patent Pub. No. 20030124539 each of which is incorporated herein by reference in its entirety.

[0053] A resequencing array has probes to a reference sequence from a SARS virus tiled so that each nucleic acid position in the reference sequence is interrogated by a probe set of at least four perfect match probes. Each of the four probes is a perfect match to a different sequence and the sequences differ at the interrogation position, which is typically the central base of the probe. For example, nucleotide 13 in a 25 nucleotide probe. The first probe of the four probes is perfectly complementary to the reference sequence and each of the remaining three probes is perfectly complementary to a different single base mutation at the interrogation position so that at least one probe of the four probes is perfectly complementary to each of the four possible bases present at the interrogation position.

[0054] Arrays may be packaged in such a manner as to allow for diagnostic use or can be an all-inclusive device; e.g., U.S. Pat. Nos. 5,856,174 and 5,922,591 incorporated in their entirety by reference for all purposes. Preferred arrays are commercially available from Affymetrix (Santa Clara, Calif.) under the brand name GeneChip® and are directed to a variety of purposes, including genotyping and gene expression monitoring for a variety of eukaryotic and prokaryotic species. The number of probes on a solid support may be varied by changing the size of the individual features. In some embodiments the feature size is 20 by 25 microns square, in other embodiments features may be, for example, 8 by 8, 5 by 5 or 3 by 3 microns square, resulting in about 2,600,000, 6,600,000 or 18,000,000 individual probe features.

[0055] Hybridization probes are oligonucleotides capable of binding in a base-specific manner to a complementary strand of nucleic acid. Such probes include peptide nucleic acids, as described in Nielsen et al., Science 254, 1497-1500 (1991), and other nucleic acid analogs and nucleic acid mimetics. See U.S. patent application Ser. No. 08/630,427, filed Apr. 3, 1996.

[0056] The term hybridization refers to the process in which two single-stranded nucleic acids bind non-covalently to form a double-stranded nucleic acid; triple-stranded hybridization is also theoretically possible. Complementary sequences in the nucleic acids pair with each other to form a double helix. The resulting double-stranded nucleic acid is a “hybrid.” Hybridization may be between, for example tow complementary or partially complementary sequences. The hybrid may have double-stranded regions and single stranded regions. The hybrid may be, for example, DNA:DNA, RNA:DNA or DNA:RNA. Hybrids may also be formed between modified nucleic acids. One or both of the nucleic acids may be immobilized on a solid support. Hybridization techniques may be used to detect and isolate specific sequences, measure homology, or define other characteristics of one or both strands.

[0057] The stability of a hybrid depends on a variety of factors including the length of complementarity, the presence of mismatches within the complementary region, the temperature and the concentration of salt in the reaction. Hybridizations are usually performed under stringent conditions, for example, at a salt concentration of no more than 1 M and a temperature of at least 25° C. For example, conditions of 5×SSPE (750 mM NaCl, 50 mM NaPhosphate, 5 mM EDTA, pH 7.4) or 100 mM MES, 1 M Na, 20 mM EDTA, 0.01% Tween-20 and a temperature of 25-50° C. are suitable for allele-specific probe hybridizations. In a particularly preferred embodiment hybridizations are performed at 40-50° C. Acetylated BSA and herring sperm DNA may be added to hybridization reactions. Hybridization conditions suitable for microarrays are described in the Gene Expression Technical Manual and the GeneChip Mapping Assay Manual.

[0058] The term “complementary” as used herein refers to the hybridization or base pairing between nucleotides or nucleic acids, such as, for instance, between the two strands of a double stranded DNA molecule or between an oligonucleotide primer and a primer binding site on a single stranded nucleic acid to be sequenced or amplified. Complementary nucleotides are, generally, A and T (or A and U), or C and G. Two single stranded RNA or DNA molecules are said to be complementary when the nucleotides of one strand, optimally aligned and compared and with appropriate nucleotide insertions or deletions, pair with at least about 80% of the nucleotides of the other strand, usually at least about 90% to 95%, and more preferably from about 98 to 100%. Alternatively, complementarity exists when an RNA or DNA strand will hybridize under selective hybridization conditions to its complement. Typically, selective hybridization will occur when there is at least about 65% complementary over a stretch of at least 14 to 25 nucleotides, preferably at least about 75%, more preferably at least about 90% complementary. See, M. Kanehisa Nucleic Acids Res. 12:203 (1984), incorporated herein by reference.

[0059] The term “isolated nucleic acid” as used herein mean an object species invention that is the predominant species present (i.e., on a molar basis it is more abundant than any other individual species in the composition). Preferably, an isolated nucleic acid comprises at least about 50, 80 or 90% (on a molar basis) of all macromolecular species present. Most preferably, the object species is purified to essential homogeneity (contaminant species cannot be detected in the composition by conventional detection methods).

[0060] The term “label” as used herein refers to a luminescent label, a light scattering label or a radioactive label. Fluorescent labels include, inter alia, the commercially available fluorescein phosphoramidites such as Fluoreprime (Pharmacia), Fluoredite (Millipore) and FAM (ABI). See U.S. Pat. No. 6,287,778.

[0061] The term “solid support”, “support”, and “substrate” as used herein are used interchangeably and refer to a material or group of materials having a rigid or semi-rigid surface or surfaces. In many embodiments, at least one surface of the solid support will be substantially flat, although in some embodiments it may be desirable to physically separate synthesis regions for different compounds with, for example, wells, raised regions, pins, etched trenches, or the like. According to other embodiments, the solid support(s) will take the form of beads, resins, gels, microspheres, or other geometric configurations. See U.S. Pat. No. 5,744,305 for exemplary substrates.

[0062] The term “target” as used herein refers to a molecule that has an affinity for a given probe. Targets may be naturally-occurring or man-made molecules. Also, they can be employed in their unaltered state or as aggregates with other species. Targets may be attached, covalently or noncovalently, to a binding member, either directly or via a specific binding substance. Examples of targets which can be employed by this invention include, but are not restricted to, antibodies, cell membrane receptors, monoclonal antibodies and antisera reactive with specific antigenic determinants (such as on viruses, cells or other materials), drugs, oligonucleotides, nucleic acids, peptides, cofactors, lectins, sugars, polysaccharides, cells, cellular membranes, and organelles. Targets are sometimes referred to in the art as anti-probes. As the term targets is used herein, no difference in meaning is intended. A “Probe Target Pair” is formed when two macromolecules have combined through molecular recognition to form a complex.

C. SARS Virus Resequencing Array

[0063] Infections diseases spread by the respiratory route are a serious threat to the health of people around the world. Epidemics of such diseases can be devastating to communities, particularly if there are no effective vaccines or drugs. The recently discovered SARS virus is an example of a dangerous disease epidemic. The disease is easily transmitted, particularly as a nosocomial infection, and has proven fatal in a relatively large percentage of cases. Because of the dangerous nature of this disease measures will need to be taken to prevent and control future epidemics. These measures will benefit from a better understanding of the genome of the virus and variations between different isolates. Researchers identified the virus as a relative of known coronaviruses. See, Zhu and Chen J. Infect. Dis. 189: 1676-8, 2004.

[0064] Rapid efforts have been undertaken to determine the nature of the SARS virus which has been identified as the etiological agent of the SARS outbreak of 2003. See, Ksiazek et al. N. Engl. J. Med. 348, 1947 (2003), Peiris et al., Lancet 361, 1319 (2003), and Drosten et al., N. Engl. J. Med. (2003). See also Xu et al. N. Engl. J. Med. 350:1366-7, 2004, Heymann and Rodier, Emerg Infect Dis 10:173-5, 2004 and Hughes, Emerg Infect Dis 10:171-2, 2004.

[0065] SARS has been identified by hybridization analysis to be a relative of the coronavirus family, having sequence similarity to several coronaviruses. Subsequently, the entire genomes of several isolates of the virus were sequenced. As with many viruses, the currently available sequencing data suggests that the virus mutates rapidly. The genomes currently available show considerable variation, however the two isolates available from the United States vary only in 8 nucleotides. Variations occur in the enzymes that replicate the virus and in proteins that sit on the outer surface of the viral particle. As with many viruses, mutation allows the virus to defeat the host's defenses and often confer resistance to drugs so it is important to identify mutations and to correlate them with clinical phenotypes. Mutations may also be responsible for differences in pathogenicity and infectivity. The methods presently disclosed may be used to rapidly identify mutations in a sample isolate by comparing that sequence to a reference sequence. The sample isolate is hybridized to an array of probes. The array of probes comprises the entire sequence of the reference genome tiled so that there is a probe to interrogate each position of the sequence for each possible single nucleotide substitution (see U.S. Pat. Nos. 5,837,832 and 5,861,242 which are incorporated herein by reference).

[0066] The arrays described herein may be used to determine sequence variation among SARS samples. The arrays and genetic information obtained by using the arrays may also be used to categorize different isolates of the virus into subtypes. Also disclosed are methods of comparing patient outcome with the pathogen subtypes, allowing for better understanding of strains that are the most dangerous and to develop therapies and drugs. Methods are also disclosed for using a resequencing array to determine how a virus, for example, the SARS virus, is evolving over time, during its spread into different geographies and populations.

[0067] The methods provide an array of oligonucleotide probes immobilized on a solid support for analysis of a target sequence from a SARS virus. The array comprises oligonucleotide probes 9-35 nucleotides in length. The probes are present in sets of 8 probes that are related. A first referenced probe in the set comprises a sequence corresponding to the sequence of the reference sequence. A second reference probe is the complement of the first probe. This way both strands are analyzed. Three of the remaining 6 probes are identical to the first probe except for a single nucleotide, the interrogation position, which is varied so that each of the possible 4 bases is represented. The remaining 3 probes are identical to the second probe save for variation at the interrogation position to each of the other three possible bases. For example, if the interrogation position has a G in the reference sample there will be a reference probe with a C that is perfectly complementary to the reference sequence, a non-reference probe with an A, a non-reference probe with a G and a non-reference probe with a T at that position, the latter three probes being complementary to mutation at that position to T, C and A respectively. If the interrogation position is mutated hybridization will occur at one of the non-reference probes.

[0068] Monitoring viruses, both newly emerging viruses and well established viruses such as influenza is an important measure taken to control the spread an impact of viruses. In some embodiments arrays such as those disclosed could be used for rapid analysis of many viral samples to identify which isolate or isolates are present in an individual and to identify sequence variation between isolates. In some embodiments a single array may be used to resequence or detect known variations in a plurality of different viruses. For example, an array may have probes to one or more SARS strains and one or more influenza strains and subtypes. Arrays may, for example, include probes to detect and distinguish between strains and subtypes of avian influenza, “bird flu”, which can be highly pathogenic, for example influenza A viruses of subtypes H5 and H7. Avian influenza has been known to infect humans. Arrays may be designed to identify variation or detect known variants in the virus that causes foot and mouth disease in cloven-hoofed animals.

[0069] Resequencing arrays may also be used in studies to determine the origin of a virus. Viruses that impact humans often originated in other organisms, such as apes or chickens, and make the jump to humans as a result of close human contact with an infected organism. Tracing a virus back to its origins is a difficult task that would require isolation of virus from a variety of potential sources, sequencing of the virus from these sources and comparison of the sequences to look for relatedness. The resequencing array presently disclosed may be used to simplify this process. Virus from many sources could be rapidly resequenced to identify differences using an array as disclosed.

[0070] Vaccination has proven to be an effective means of controlling the outbreak of some diseases. The presently disclosed methods may be used as part of a method to develop a vaccine or to determine the effectiveness of a vaccine. One of the ways that viruses evade the immune response is to mutate to a form that is unrecognizable to the antibodies of the response. Mutations in the proteins that make the outer surface or coat of the virus, for example, can change the antigenic response allowing the virus to escape recognition. Resequencing many isolates of a virus may provide information about mutations that confer immune response resistance and provide researchers with information about what regions of the virus are more stable and therefore better antigenic targets.

[0071] In one embodiment the methods are used to track transmission of disease from patient to patient or from location to location. Isolates from individuals may be compared to identify those isolates that are similar to determine the likely source of infection. The methods may be used to trace an outbreak to a particular source of infection. For example, a SARS outbreak in 2004 that resulted in nine cases was traced to a medical student who caught SARS while studying SARS in a laboratory. There have been at least three outbreaks of SARS that seem to have originated from laboratory research on the virus. See, Normile, Science 304:659-661, 2004. In one aspect a SARS resequencing array may be used to monitor laboratory personnel or healthcare workers for exposure on a regular basis, daily or weekly, for example, in order to identify infection early. A resequencing analysis of SARS isolates from individuals who were infected from the same source should show a high degree of similarity between the isolates at the sequence level.

[0072] In some embodiments the methods may be used to identify and characterize “super spreader” strains, also known as “super transmitter”. See, Riley et al. Science 300:1884-5, 2003. Viral nucleic acid may be isolated from individuals suspected of carrying a more virulent strain of the virus and a resequencing array may be used to identify polymorphisms characteristic of the isolate.

[0073] In some embodiments an array may have probes for resequencing one or more viruses or pathogens and probes for genotyping one or more human polymorphisms. During outbreaks of disease such as the SARS outbreak some individuals have an increased likelihood of contracting the disease relative to the general population and some individuals experience symptoms that are more or less severe that expected. Genetic variation likely accounts for variation in the susceptibility to disease and the severity of symptoms. An array that genotypes human polymorphisms that are associated with this variation would allow diagnosis of infection and prediction of outcome simultaneously. For example, if individuals that carry allele A of SNP 1 are more likely to suffer a relapse during a SARS infection than individuals who carry allele B of SNP 1 a single array may be used to determine if the individual has the infection and if the individual is at risk for relapse, suggesting a different course of treatment. Similarly the array may contain probes to genotype one or more SNPs that predict response of an individual to a particular drug treatment regime.

[0074] In another embodiment reference sequences characteristic of other pathogens may be included on an array. The symptoms of SARS are common to several other diseases and patients who are suspected of having a SARS infection may be infected with a different pathogen, such as influenza or Mycobacterium tuberculosis. See, for example, CDC, MMWR Morb Mortal Wkly Rep., 53:321-2, 2004.

[0075] In some embodiments the methods disclosed eliminate the need to culture the virus outside of the host prior to sequencing. Mutations can accumulate while the virus is being cultured for sequencing. These mutations may be adaptations to laboratory culture and may not have been present in the virus isolated from the patient. Direct analysis of the virus without laboratory cell culture may be performed using the methods presently disclosed. Viral nucleic acid may be isolated from the host, amplified and analyzed on a resequencing array without the need for cell culture.

[0076] Epidemics and newly-emerging infections such as SARS are becoming an increasing threat to the health of people around the world and affecting international travel and trade. Factors such as, globalization, the growth of mega cities and increases in international travel amplify the potential for rapid spread of infections. The methods presently disclosed are particularly useful for early, rapid and extensive monitoring of sequence variation occurring in viral isolates. In many embodiments high throughput methods for resequencing viruses are contemplated.

[0077] A database of viral sequences may be developed. Resequencing analysis in combination with high throughput methods may be used to generate sequence variation information from a large number of viral isolates. The sequence variation information may be used to generate a database of sequence variation information. The sequence variation information may be coupled to additional information, for example, information about the geographic location where the sample was isolated, clinical information about the patient such as duration of illness, effectiveness of treatment, morbidity, mortality, and degree of transmission and biographical information about the patient, for example, age, gender, health, and other socioeconomic facts.

[0078] Early sequence monitoring of many isolates in parallel may be used to rapidly identify isolates and mutations. Some isolates of a given virus may have more severe phenotypes than other isolates, for example, higher morbidity or mortality rates and drug resistance. When a new outbreak occurs rapid resequencing of isolates from affected individuals may be used to identify individuals infected with isolates known to have more dangerous phenotypes and steps can be taken to aggressively contain the spread of those isolates. For example, a plurality of individuals may be identified as having symptoms of a disease. Isolates of the virus responsible from the disease may be isolated from each of the affected individuals and resequenced to identify variation. The variation may be compared against a database of variation and phenotypes associated with these variations to identify individuals who have strains of the virus that are known to be, for example, more easily transmitted than other strains. Aggressive steps may be taken to insure that those individuals infected with the more transmittable strain are isolated so that transmission is limited. Resources may also be allocated to identifying people that were likely to have been contacted by individuals with the easily transmitted strain in order to minimize the spread of strains with more severe phenotypes.

[0079] Multiple genomes may be tiled on a single array, for example, one array may have an influenza virus genome and a SARS virus genome. Several different species of a single genus of viruses may be tiled on an array, for example, an array may comprise probes to resequence the SARS coronavirus, human coronavirus, bovine coronavirus, and rat coronavirus. Regions of interest from several different viruses may be tiled on an array, for example, an array may be designed to resequence a replicase gene from several different viruses. Regions of a virus may be selected for resequencing such as the ORFs. Regions of a virus that are known to confer drug resistance may be tiled on a resequencing array, see, for example U.S. Pat. No. 5,861,242. Viral isolates from clinical samples may be resequenced to identify mutation and then the mutations may be correlated with phenotypes such as drug resistance to a particular drug, severity of illness, increased risk of mortality, increased risk of transmission, etc. This information may be used to select a treatment for a patient or to predict length of treatment.

[0080] Another virus that may be monitored by the methods disclosed is the influenza virus. Influenza is caused by a virus that attacks mainly the upper respiratory tract—the nose, throat and bronchi and rarely also the lungs. The infection usually lasts for about a week. It is characterized by sudden onset of high fever, myalgia, headache and severe malaise, non-productive cough, sore throat, and rhinitis. Most people recover within one to two weeks without requiring any medical treatment. In the very young, the elderly and people suffering from medical conditions such as lung diseases, diabetes, cancer, kidney or heart problems, influenza poses a serious risk. In these people, the infection may lead to severe complications of underlying diseases, pneumonia and death.

[0081] Influenza rapidly spreads around the world in seasonal epidemics and imposes a considerable economic burden in the form of hospital and other health care costs and lost productivity. In the United States of America, for example, recent estimates put the cost of influenza epidemics to the economy at US$ 71-167 billion per year (see World Health Organization web site). Annual influenza epidemics are thought to result in between three and five million cases of severe illness and between 250,000 and 500,000 deaths every year around the world. Vaccination is the principal measure for preventing influenza and reducing the impact of epidemics.

[0082] Constant genetic changes in influenza viruses mean that the vaccines' virus composition must be adjusted annually to include the most recent circulating influenza A(H3N2), A(H1N1) and influenza B viruses. The World Health Organization constantly monitors the influenza viruses circulating in humans to rapidly identify new strains. The 3 most virulent strains in circulation are used to generate a vaccine each year. In some embodiments a resequencing array designed to resequence one or more isolates of influenza virus is disclosed and methods for high throughput analysis of influenza virus mutations. A database of sequence variation generated by resequencing analysis using a resequencing array is also contemplated. Methods for monitoring viruses by variation detection using resequencing arrays are also contemplated.

[0083] For additional descriptions and methods relating to resequencing arrays see U.S. patent application Ser. Nos. 10/658,879, 60/417,190, 09/381,480, 60/409,396, 5,861,242, 6,027,880, 5,837,832, 6,723,503 and PCT Pub. No. 03/060526 each of which is incorporated herein by reference in its entirety.

[0084] The SARS virus has sequence features that are typical of the coronavirus family and sequences that distinguish this virus from other known coronaviruses. For additional information about the SARS virus see, Rota et al. Science 300:1394-1399, 2003 at sciencexpress.org, 10.1126/science.1085952 and Marra et al. Science 300:1399-1404, 2003, each of which is incorporated herein by reference.

[0085] In one embodiment an array of probes wherein each of the sequences listed in SEQ ID NOS 1-238,192 is present on the array. In one embodiment the arrays also comprise control probes such as Tag-IQ-EX probes.

[0086] In some embodiments the array may be used for rapid resequencing of SARS virus isolates from a collection of individuals. The array may be used in combination with high throughput methods, such as those disclosed in US 02/41478. Using an array as disclosed, the sequence of SARS virus isolates from at least 40 different individuals may be determined in a single day by two laboratory personnel.

[0087] U.S. Pat. Nos. 5,800,992 and 6,040,138 describe methods for making arrays of nucleic acid probes that can be used to detect the presence of a nucleic acid containing a specific nucleotide sequence. Methods of forming high-density arrays of nucleic acids, peptides and other polymer sequences with a minimal number of synthetic steps are known. The nucleic acid array can be synthesized on a solid substrate by a variety of methods, including, but not limited to, light-directed chemical coupling, and mechanically directed coupling.

[0088] In many embodiments pairs are present in perfect match and mismatch pairs, one probe in each pair being a perfect match to the target sequence and the other probe being identical to the perfect match probe except that the central base is a homo-mismatch. Mismatch probes provide a control for non-specific binding or cross-hybridization to a nucleic acid in the sample other than the target to which the probe is directed. Thus, mismatch probes indicate whether hybridization is or is not specific. For example, if the target is present, the perfect match probes should be consistently brighter than the mismatch probes because fluorescence intensity, or brightness, corresponds to binding affinity. (See e.g., U.S. Pat. No. 5,324,633, which is incorporated herein for all purposes.) Finally, the difference in intensity between the perfect match and the mismatch probe (I(PM)-I(MM)) provides a good measure of the concentration of the hybridized material. See PCT No. WO 98/11223, which is incorporated herein by reference for all purposes.

[0089] In a preferred embodiment, the hybridized nucleic acids are detected by detecting one or more labels attached to the sample nucleic acids. The labels may be incorporated by any of a number of means well known to those of skill in the art. In one embodiment, the label is simultaneously incorporated during the amplification step in the preparation of the sample nucleic acids. Thus, for example, polymerase chain reaction (PCR) with labeled primers or labeled nucleotides will provide a labeled amplification product. In another embodiment, transcription amplification, as described above, using a labeled nucleotide (e.g. fluorescein-labeled UTP and/or CTP) incorporates a label into the transcribed nucleic acids. In another embodiment PCR amplification products are fragmented and labeled by terminal deoxy transferase and labeled dNTPs.

[0090] Alternatively, a label may be added directly to the original nucleic acid sample (e.g., mRNA, polyA mRNA, cDNA, etc.) or to the amplification product after the amplification is completed. Means of attaching labels to nucleic acids are well known to those of skill in the art and include, for example, nick translation or end-labeling (e.g. with a labeled RNA) by kinasing the nucleic acid and subsequent attachment (ligation) of a nucleic acid linker joining the sample nucleic acid to a label (e.g., a fluorophore). In another embodiment label is added to the end of fragments using terminal deoxytransferase.

[0091] Detectable labels suitable for use in the present invention include any composition detectable by spectroscopic, photochemical, biochemical, immunochemical, electrical, optical or chemical means. Useful labels in the present invention include, but are not limited to: biotin for staining with labeled streptavidin conjugate; anti-biotin antibodies, magnetic beads (e.g., Dynabeads™); fluorescent dyes (e.g., fluorescein, texas red, rhodamine, green fluorescent protein, and the like); radiolabels (e.g., ³H, ¹²⁵I, ³⁵S, ⁴C, or ³²P); phosphorescent labels; enzymes (e.g., horse radish peroxidase, alkaline phosphatase and others commonly used in an ELISA); and colorimetric labels such as colloidal gold or colored glass or plastic (e.g., polystyrene, polypropylene, latex, etc.) beads. Patents teaching the use of such labels include U.S. Pat. Nos. 3,817,837; 3,850,752; 3,939,350; 3,996,345; 4,277,437; 4,275,149; and 4,366,241, each of which is hereby incorporated by reference in its entirety for all purposes.

[0092] Means of detecting such labels are well known to those of skill in the art. Thus, for example, radiolabels may be detected using photographic film or scintillation counters; fluorescent markers may be detected using a photodetector to detect emitted light. Enzymatic labels are typically detected by providing the enzyme with a substrate and detecting the reaction product produced by the action of the enzyme on the substrate, and calorimetric labels are detected by simply visualizing the colored label.

### EXAMPLE

[0093] An array was designed to interrogate 29,774 bases of SARS sequence, the array is available as a CustomSeq™ product from Affymetrix, Inc, Santa Clara, Calif. part number 520016. The array has features that are 25×20 microns in size. The array design resequences the SARS second revision of the sequence provided by Canada's GSC (SARS_v2), as well as the variants that occur in any two of the following sequences:
[0094] 1) The US CDC sequence from 4/16 (SARS_CDC)
[0095] 2) The Canada GSC sequence from 4/12 (SARS_v1)
[0096] 3) The HKU sequence from the Coronavirus study group from 4/16 (HKU#39849_{—}2003_{—}04_{—}16)
[0097] 4) The sequence from the Chinese University of Hong Kong from 4/16 (U_HK_SARS_{—}03_{—}04_{—}16)
   From a multiple alignment of those 5 sequences, the second Canadian sequence appeared to be the best consensus sequence. It had only two variations that did not occur in at least one other sequence. The first variation is that two of the other sequences had 16 additional bases at the beginning of the sequence. Those 16 bases were pre-pended to the Canadian sequence. Then, since the last 24 bases of the sequence were a Poly-A tail, and the virus was assumed to be circular the last 12 bases were moved to the beginning of the sequence. An array was designed to resequence that full length.

[0098] Additional regions were added to resequence variants that occurred in more than one sequence. These were:
[0099] 1) SARS_CDC and HKU#39849_{—}2003_{—}04_{—}16 have a single base variant at 7915
[0100] 2) HKU#39849_{—}2003_{—}04_{—}16 and U_HK_SARS_{—}03_{—}04_{—}16 have a single base variant at 19049
[0101] 3) All three of the non-Canadian sequences have a single base variant at 23205
[0102] 4) All but SARS_v2 have a single base variant at 25283

[0103] Additionally, since HKU#39849_{—}2003_{—}04_{—}16 has a two base variant between positions 13478 and 13481 (relative to SRS_v2) a probe set was added to resequence that region. The CDC sequence had a 9 base insertion at 2835, which was not included as it has two ambiguous bases in it. The sequences are available with the following GenBank accession numbers, U_HK_SARS_{—}03_{—}04_{—}16 is now available as AY278554 (SEQ ID NO 238,193), HKU#39849_{—}2003_{—}04_{—}16 is now available as AY278491 (SEQ ID NO 238,194), SARS_v2 is now available as AY274119 (SEQ ID NO 238,195) and SARS_CDC is now available as AY278741 (SEQ ID NO 238,196). Each of the GenBank entries is incorporated herein by reference in its entirety. SARS_v1 has been retired from GenBank.

### CONCLUSION

[0104] The inventions herein provide a pool of unique nucleic acid sequences, which may be used to identify and detect variation in viral sequence such as SARS. Arrays for resequencing SARS are provided. These arrays and the resequencing data can be used for a variety of types of analyses. Databases of viral sequences generated by high throughput resequencing analysis are provided.

[0105] The above description is illustrative and not restrictive. Many variations of the invention will become apparent to those of skill in the art upon review of this disclosure. The scope of the invention should, therefore, be determined not with reference to the above description, but instead be determined with reference to the appended claims along with their full scope of equivalents.

1. An array comprising a plurality of nucleic acid probes, wherein said plurality of nucleic acid probes comprises each of the sequences listed in SEQ ID Nos. 1-238,192 wherein each different sequence is attached to the surface of the array in a different localized area.

2. A method of identifying mutations in an isolate of SARS virus comprising:
hybridizing nucleic acid derived from the isolate to the array of claim 1; and
analyzing the hybridization pattern to estimate at least 1000 bases of the sequence of the isolate.

3. A method of identifying genetic variation in a plurality of isolates of SARS virus comprising:
hybridizing nucleic acids derived from each of a plurality of isolates of the SARS virus to the array claim 1 to generate a hybridization pattern for each isolate;
analyzing the hybridization pattern for each isolate to determine a sequence of at least 1000 bases for each isolate; and
comparing the sequences to identify genetic variation.

4. An array of nucleic acid probes immobilized on a solid support, the array comprising:
(1) a first probe set comprising a plurality of probes, each probe comprising a segment of at least ten nucleotides exactly complementary to a subsequence of a SARS virus reference sequence, the segment including at least one interrogation position complementary to a corresponding nucleotide in the SARS virus reference sequence; and
(2) second, third and fourth probe sets, each probe set comprising a corresponding probe for each probe in the first probe set, the probes in the second, third and fourth probe sets being identical to the corresponding probe from the first probe set or a subsequence of at least ten nucleotides thereof that includes the interrogation position, except that the interrogation position is occupied by a different nucleotide in each of the four corresponding probes from the four probe sets.

5. The array of claim 4, wherein the probes in the first probe set have a single interrogation position, and the array further comprises a fifth probe set comprising:
a probe for each interrogation position in the first probe set, each probe in the fifth probe set being identical to a sequence comprising a corresponding probe from the first probe set or a subsequence of at least ten nucleotides thereof that includes the interrogation position, except that the interrogation position is deleted in the corresponding probe from the fifth probe set.

6. The array of claim 4, wherein the probes in the first probe set have a single interrogation position, and the array further comprises a fifth probe set comprising:
a probe for each interrogation position in the first probe set, each probe in the fifth probe set being identical to a sequence comprising the corresponding probe from the first probe set or a subsequence of at least ten nucleotides thereof that includes the interrogation position, except that an additional nucleotide is inserted adjacent to the single interrogation position in the corresponding probe from the first probe set.

7. The array of claim 4, wherein the first probe set has at least three interrogation positions respectively corresponding to each of three nucleotides in the reference sequence that are positions of known variation.

8. The array of claim 4, wherein the first probe set has at least 50 interrogation positions respectively corresponding to each of 50 nucleotides in the reference sequence that are positions of known variation.

9. The array of claim 4, wherein the array has between 10,000 and 1,000,000 probes.

10. The array of claim 4, wherein the array has between 1,000,000 and 2,600,000 probes.

11. The array of claim 4, wherein the array has between 2,600,000 probes and 20,000,000 probes.

12. The array of claim 4, wherein the segment in each probe of the first probe set that is exactly complementary to the subsequence of the reference sequence is 9 to 35 nucleotides.

13. The array of claim 4 wherein the array interrogates at least 1000 contiguous bases of a SARS virus for variation.

14. The array of claim 4 further comprising:
(1) a fifth probe set comprising a plurality of probes, each probe comprising a segment of at least ten nucleotides exactly complementary to a subsequence of a second reference sequence, the segment including at least one interrogation position complementary to a corresponding nucleotide in the second reference sequence; and
(2) sixth, seventh and eighth probe sets, wherein the sixth, seventh and eigth probe sets each comprise a corresponding probe for each probe in the fifth probe set, the probes in the sixth, seventh and eighth probe sets being identical to the corresponding probe from the fifth probe set, or a subsequence of at least ten nucleotides thereof that includes the interrogation position, except that the interrogation position is occupied by a different nucleotide in each of the four corresponding probes from the fifth, sixth, seventh and eighth probe sets.

15. The array of claim 14 wherein the second reference sequence is an influenza viral sequence.

16. A method of monitoring genetic variation of SARS virus in a population of individuals comprising:
acquiring viral isolates from a plurality of individuals suspected of being infected with the virus;
estimating the sequence of at least one virus in each viral isolate by hybridizing nucleic acid derived from the viral isolate to the array of claim 4; and
comparing the estimated sequences to identify the presence or absence of variation between individual isolates.

17. The method of claim 16 wherein one or more steps of the method are performed in a high throughput assay.

18. A method of generating a database of viral sequences comprising:
isolating viral samples from a plurality of sources;
hybridizing nucleic acid derived from each of the viral samples to the array of claim 4 to generate a hybridization pattern for each viral sample;
determining the sequence of each viral sample from the hybridization pattern; and
combining the sequence of each viral sample from each source in the plurality of sources into a database of viral sequences.

19. A method of controlling an outbreak of SARS comprising:
estimating the sequence of isolates of SARS virus from a plurality of affected individuals using the array of claim 4;
comparing the sequences to a database of sequences of viral strains that are associated with high rates of transmission;
identifying one or more individuals carrying an isolate of the virus that is known to be associated with high rates of transmission; and
minimizing the contact between said one or more individuals and unaffected individuals.

20. A method of limiting the mortality or morbidity resulting from an outbreak of SARS comprising:
estimating the sequence of isolated of SARS virus from affected individuals using the array of claim 4;
comparing the sequences to a database of SARS virus sequences that are associated with high rates or mortality or morbidity;
identifying one or more individuals carrying a SARS virus that is associated with high rates of mortality or morbidity; and
minimizing the contact between said one or more individuals and unaffected individuals.

21. A method of monitoring an outbreak of a disease caused by a virus of interest comprising:
isolating a nucleic acid sample from each of a plurality of individuals suspected of being infected with the virus of interest;
amplifying viral nucleic acid from the virus of interest in each of the nucleic acid samples;
hybridizing the amplified nucleic acids to a resequencing array comprising probes to a reference sequence of the virus of interest;
estimating at least part of the sequence of the virus of interest in each of the samples; and
comparing the sequences to determine the variation between individual isolates.

22. The method of claim 21 wherein the virus of interest is a SARS virus.

23. The method of claim 21 wherein the virus of interest is an influenza virus.

24. The method of claim 21 wherein one or more steps of the method are performed in a high throughput assay.

25. An array of nucleic acid probes immobilized on a solid support, the array comprising at least two sets of probes,
(1) a first probe set comprising a plurality of probes wherein each probe comprises a segment of at least ten nucleotides that is perfectly complementary to a subsequence of a first reference sequence, the subsequence including at least one interrogation position complementary to a corresponding nucleotide in the first reference sequence,
(2) a second probe set comprising a plurality of probes wherein each probe comprises a subsequence of at least ten nucleotides that is perfectly complementary to a subsequence of a second reference sequence, the subsequence including at least one interrogation position complementary to a corresponding nucleotide in the second reference sequence, wherein the first reference sequence is a first isolate of a SARS virus and the second reference sequence is a second isolate of a SARS virus.

26. The array of claim 25, wherein the first reference sequence is from a super spreader isolate of SARS.

27. A method of comparing a target nucleic acid with a reference sequence, the method comprising:
(a) hybridizing a sample comprising the target nucleic acid to the array of claim 25;
(b) comparing the hybridization pattern of the two corresponding probes from the first and second probe sets;
(c) assigning a nucleotide in the target sequence as the complement of the interrogation position of the probe having the greater hybridization; and
(d) repeating (b) and (c) by comparing the hybridization pattern of a further two corresponding probes from the first and second probe sets until each nucleotide of interest in the target sequence has been assigned.

28. A method of comparing a target nucleic acid with a reference sequence comprising a predetermined sequence of nucleotides, the method comprising:
(a) hybridizing a sample comprising the target nucleic acid to an array of nucleic acid probes immobilized on a solid support, the array comprising at least four sets of probes,
(1) a first probe set comprising a plurality of probes, each probe comprising a segment of at least nine nucleotides exactly complementary to a subsequence of a reference sequence, the segment including at least one interrogation position complementary to a corresponding nucleotide in the reference sequence,
(2) second, third and fourth probe sets, each set comprising a probe for each interrogation position in the first probe set, each probe comprising a corresponding probe for each probe in the first probe set, the probes in the second, third and fourth probe sets being identical to a sequence comprising the corresponding probe from the first probe set or a subsequence of at least nine nucleotides thereof that includes the interrogation position, except that the interrogation position is occupied by a different nucleotide in each of the four corresponding probes from the four probe sets;
provided the array does not consist of a complete set of probes of a given length, wherein a complete set is all permutations of nucleotides A, C, G and T/U;
wherein the reference sequence is a SARS virus
(b) comparing the relative specific binding of four corresponding probes from the first, second, third and fourth probe sets;
(c) assigning a nucleotide in the target sequence as the complement of the interrogation position of the probe having the greatest specific binding;
(d) repeating (b) and (c) by comparing the relative specific binding of a further four corresponding probes from the first, second, third and fourth probe sets until each nucleotide of interest in the target sequence has been assigned.

29. The method of claim 28 wherein one or more steps of the method are performed in a high throughput assay.

The application's sequence listing, which the Patent Office published only in electronic form, follows.

SEQUENCE LISTING (238196 sequences)

SEQ ID NO: 1 - DNA, 25 bp, SARS Virus
ttttttttttaaaaatccaaaaatg

SEQ ID NO: 2 - DNA, 25 bp, SARS Virus
tttttttttaataatccaaaaatgg

SEQ ID NO: 3 - DNA, 25 bp, SARS Virus
ttttttttaataatccaaaaatgga

SEQ ID NO: 4 - DNA, 25 bp, SARS Virus
tttttttaataaaccaaaaatggat

SEQ ID NO: 5 - DNA, 25 bp, SARS Virus
ttttttaataatacaaaaatggatg

SEQ ID NO: 6 - DNA, 25 bp, SARS Virus
tttttaataatcaaaaaatggatgg

SEQ ID NO: 7 - DNA, 25 bp, SARS Virus
ttttaataatccaaaaatggatggg

SEQ ID NO: 8 - DNA, 25 bp, SARS Virus
tttaataatccaaaaatggatgggt

SEQ ID NO: 9 - DNA, 25 bp, SARS Virus
ttaataatccaaaaatggatgggtc

SEQ ID NO: 10 - DNA, 25 bp, SARS Virus
taataatccaaaaatggatgggtcc

SEQ ID NO: 11 - DNA, 25 bp, SARS Virus
aataatccaaaaatggatgggtcct

SEQ ID NO: 12 - DNA, 25 bp, SARS Virus
ataatccaaaaaaggatgggtcctt

SEQ ID NO: 13 - DNA, 25 bp, SARS Virus
taatccaaaaatagatgggtccttt

SEQ ID NO: 14 - DNA, 25 bp, SARS Virus
aatccaaaaatgaatgggtcctttt

SEQ ID NO: 15 - DNA, 25 bp, SARS Virus
atccaaaaatggatgggtccttttc

SEQ ID NO: 16 - DNA, 25 bp, SARS Virus
tccaaaaatggaagggtccttttcg

SEQ ID NO: 17 - DNA, 25 bp, SARS Virus
ccaaaaatggataggtccttttcgg

SEQ ID NO: 18 - DNA, 25 bp, SARS Virus
caaaaatggatgagtccttttcggt

SEQ ID NO: 19 - DNA, 25 bp, SARS Virus
aaaaatggatggatccttttcggtt

SEQ ID NO: 20 - DNA, 25 bp, SARS Virus
aaaatggatgggaccttttcggttg

SEQ ID NO: 21 - DNA, 25 bp, SARS Virus
aaatggatgggtacttttcggttgg

SEQ ID NO: 22 - DNA, 25 bp, SARS Virus
aatggatgggtcattttcggttggt

SEQ ID NO: 23 - DNA, 25 bp, SARS Virus
atggatgggtccatttcggttggtt

SEQ ID NO: 24 - DNA, 25 bp, SARS Virus
tggatgggtcctattcggttggttg

SEQ ID NO: 25 - DNA, 25 bp, SARS Virus
ggatgggtccttatcggttggttgg

SEQ ID NO: 26 - DNA, 25 bp, SARS Virus
gatgggtcctttacggttggttgga

SEQ ID NO: 27 - DNA, 25 bp, SARS Virus
atgggtccttttaggttggttggag

SEQ ID NO: 28 - DNA, 25 bp, SARS Virus
tgggtccttttcagttggttggagc

SEQ ID NO: 29 - DNA, 25 bp, SARS Virus
gggtccttttcgattggttggagct

SEQ ID NO: 30 - DNA, 25 bp, SARS Virus
ggtccttttcggatggttggagcta

SEQ ID NO: 31 - DNA, 25 bp, SARS Virus
gtccttttcggtaggttggagctag

SEQ ID NO: 32 - DNA, 25 bp, SARS Virus
tccttttcggttagttggagctaga

SEQ ID NO: 33 - DNA, 25 bp, SARS Virus
ccttttcggttgattggagctagag

SEQ ID NO: 34 - DNA, 25 bp, SARS Virus
cttttcggttggatggagctagaga

SEQ ID NO: 35 - DNA, 25 bp, SARS Virus
ttttcggttggtaggagctagagaa

SEQ ID NO: 36 - DNA, 25 bp, SARS Virus
tttcggttggttagagctagagaac

SEQ ID NO: 37 - DNA, 25 bp, SARS Virus
ttcggttggttgaagctagagaaca

SEQ ID NO: 38 - DNA, 25 bp, SARS Virus
tcggttggttggagctagagaacat

SEQ ID NO: 39 - DNA, 25 bp, SARS Virus
cggttggttggaactagagaacatc

SEQ ID NO: 40 - DNA, 25 bp, SARS Virus
ggttggttggagatagagaacatct

SEQ ID NO: 41 - DNA, 25 bp, SARS Virus
gttggttggagcaagagaacatcta

SEQ ID NO: 42 - DNA, 25 bp, SARS Virus
ttggttggagctagagaacatctag

SEQ ID NO: 43 - DNA, 25 bp, SARS Virus
tggttggagctaaagaacatctaga

SEQ ID NO: 44 - DNA, 25 bp, SARS Virus
ggttggagctagagaacatctagac

SEQ ID NO: 45 - DNA, 25 bp, SARS Virus
gttggagctagaaaacatctagaca

SEQ ID NO: 46 - DNA, 25 bp, SARS Virus
ttggagctagagaacatctagacaa

SEQ ID NO: 47 - DNA, 25 bp, SARS Virus
tggagctagagaacatctagacaag

SEQ ID NO: 48 - DNA, 25 bp, SARS Virus
ggagctagagaaaatctagacaaga

SEQ ID NO: 49 - DNA, 25 bp, SARS Virus
gagctagagaacatctagacaagag

SEQ ID NO: 50 - DNA, 25 bp, SARS Virus
agctagagaacaactagacaagaga

SEQ ID NO: 51 - DNA, 25 bp, SARS Virus
gctagagaacatatagacaagagat

SEQ ID NO: 52 - DNA, 25 bp, SARS Virus
ctagagaacatcaagacaagagatt

SEQ ID NO: 53 - DNA, 25 bp, SARS Virus
tagagaacatctagacaagagattt

SEQ ID NO: 54 - DNA, 25 bp, SARS Virus
agagaacatctaaacaagagatttg

SEQ ID NO: 55 - DNA, 25 bp, SARS Virus
gagaacatctagacaagagatttgc

SEQ ID NO: 56 - DNA, 25 bp, SARS Virus
agaacatctagaaaagagatttgct

SEQ ID NO: 57 - DNA, 25 bp, SARS Virus
gaacatctagacaagagatttgctt

SEQ ID NO: 58 - DNA, 25 bp, SARS Virus
aacatctagacaagagatttgcttg

SEQ ID NO: 59 - DNA, 25 bp, SARS Virus
acatctagacaaaagatttgcttga

SEQ ID NO: 60 - DNA, 25 bp, SARS Virus
catctagacaagagatttgcttgaa

SEQ ID NO: 61 - DNA, 25 bp, SARS Virus
atctagacaagaaatttgcttgaaa

SEQ ID NO: 62 - DNA, 25 bp, SARS Virus
tctagacaagagatttgcttgaaat

SEQ ID NO: 63 - DNA, 25 bp, SARS Virus
ctagacaagagaattgcttgaaatt

SEQ ID NO: 64 - DNA, 25 bp, SARS Virus
tagacaagagatatgcttgaaattt

SEQ ID NO: 65 - DNA, 25 bp, SARS Virus
agacaagagattagcttgaaatttt

SEQ ID NO: 66 - DNA, 25 bp, SARS Virus
gacaagagatttacttgaaatttta

SEQ ID NO: 67 - DNA, 25 bp, SARS Virus
acaagagatttgattgaaattttag

SEQ ID NO: 68 - DNA, 25 bp, SARS Virus
caagagatttgcatgaaattttaga

SEQ ID NO: 69 - DNA, 25 bp, SARS Virus
aagagatttgctagaaattttagac

SEQ ID NO: 70 - DNA, 25 bp, SARS Virus
agagatttgcttaaaattttagaca

SEQ ID NO: 71 - DNA, 25 bp, SARS Virus
gagatttgcttgaaattttagacac

SEQ ID NO: 72 - DNA, 25 bp, SARS Virus
agatttgcttgaaattttagacaca

SEQ ID NO: 73 - DNA, 25 bp, SARS Virus
gatttgcttgaaattttagacacat

SEQ ID NO: 74 - DNA, 25 bp, SARS Virus
atttgcttgaaaatttagacacatc

SEQ ID NO: 75 - DNA, 25 bp, SARS Virus
tttgcttgaaatattagacacatcg

SEQ ID NO: 76 - DNA, 25 bp, SARS Virus
ttgcttgaaattatagacacatcga

SEQ ID NO: 77 - DNA, 25 bp, SARS Virus
tgcttgaaatttaagacacatcgac

SEQ ID NO: 78 - DNA, 25 bp, SARS Virus
gcttgaaattttagacacatcgaca

SEQ ID NO: 79 - DNA, 25 bp, SARS Virus
cttgaaattttaaacacatcgacag

SEQ ID NO: 80 - DNA, 25 bp, SARS Virus
ttgaaattttagacacatcgacagc

SEQ ID NO: 81 - DNA, 25 bp, SARS Virus
tgaaattttagaaacatcgacagcg

SEQ ID NO: 82 - DNA, 25 bp, SARS Virus
gaaattttagacacatcgacagcga

SEQ ID NO: 83 - DNA, 25 bp, SARS Virus
aaattttagacaaatcgacagcgag

SEQ ID NO: 84 - DNA, 25 bp, SARS Virus
aattttagacacatcgacagcgagc

SEQ ID NO: 85 - DNA, 25 bp, SARS Virus
attttagacacaacgacagcgagcc

SEQ ID NO: 86 - DNA, 25 bp, SARS Virus
ttttagacacatagacagcgagccg

SEQ ID NO: 87 - DNA, 25 bp, SARS Virus
tttagacacatcaacagcgagccga

SEQ ID NO: 88 - DNA, 25 bp, SARS Virus
ttagacacatcgacagcgagccgac

SEQ ID NO: 89 - DNA, 25 bp, SARS Virus
tagacacatcgaaagcgagccgacg

SEQ ID NO: 90 - DNA, 25 bp, SARS Virus
agacacatcgacagcgagccgacgt

SEQ ID NO: 91 - DNA, 25 bp, SARS Virus
gacacatcgacaacgagccgacgta

SEQ ID NO: 92 - DNA, 25 bp, SARS Virus
acacatcgacagagagccgacgtac

SEQ ID NO: 93 - DNA, 25 bp, SARS Virus
cacatcgacagcaagccgacgtacg

SEQ ID NO: 94 - DNA, 25 bp, SARS Virus
acatcgacagcgagccgacgtacgg

SEQ ID NO: 95 - DNA, 25 bp, SARS Virus
catcgacagcgaaccgacgtacgga

SEQ ID NO: 96 - DNA, 25 bp, SARS Virus
atcgacagcgagacgacgtacggat

SEQ ID NO: 97 - DNA, 25 bp, SARS Virus
tcgacagcgagcagacgtacggatc

SEQ ID NO: 98 - DNA, 25 bp, SARS Virus
cgacagcgagccaacgtacggatca

SEQ ID NO: 99 - DNA, 25 bp, SARS Virus
gacagcgagccgacgtacggatcac

SEQ ID NO: 100 - DNA, 25 bp, SARS Virus
acagcgagccgaagtacggatcacg

SEQ ID NO: 101 - DNA, 25 bp, SARS Virus
cagcgagccgacatacggatcacgt

SEQ ID NO: 102 - DNA, 25 bp, SARS Virus
agcgagccgacgaacggatcacgtg

SEQ ID NO: 103 - DNA, 25 bp, SARS Virus
gcgagccgacgtacggatcacgtgg

SEQ ID NO: 104 - DNA, 25 bp, SARS Virus
cgagccgacgtaaggatcacgtgga

SEQ ID NO: 105 - DNA, 25 bp, SARS Virus
gagccgacgtacagatcacgtggat

SEQ ID NO: 106 - DNA, 25 bp, SARS Virus
agccgacgtacgaatcacgtggatg

SEQ ID NO: 107 - DNA, 25 bp, SARS Virus
gccgacgtacggatcacgtggatgc

SEQ ID NO: 108 - DNA, 25 bp, SARS Virus
ccgacgtacggaacacgtggatgcg

SEQ ID NO: 109 - DNA, 25 bp, SARS Virus
cgacgtacggataacgtggatgcgt

SEQ ID NO: 110 - DNA, 25 bp, SARS Virus
gacgtacggatcacgtggatgcgtc

SEQ ID NO: 111 - DNA, 25 bp, SARS Virus
acgtacggatcaagtggatgcgtca

SEQ ID NO: 112 - DNA, 25 bp, SARS Virus
cgtacggatcacatggatgcgtcat

SEQ ID NO: 113 - DNA, 25 bp, SARS Virus
gtacggatcacgaggatgcgtcata

SEQ ID NO: 114 - DNA, 25 bp, SARS Virus
tacggatcacgtagatgcgtcatat

SEQ ID NO: 115 - DNA, 25 bp, SARS Virus
acggatcacgtgaatgcgtcatatt

SEQ ID NO: 116 - DNA, 25 bp, SARS Virus
cggatcacgtggatgcgtcatattt

SEQ ID NO: 117 - DNA, 25 bp, SARS Virus
ggatcacgtggaagcgtcatatttg

SEQ ID NO: 118 - DNA, 25 bp, SARS Virus
gatcacgtggatacgtcatatttgt

SEQ ID NO: 119 - DNA, 25 bp, SARS Virus
atcacgtggatgagtcatatttgtt

SEQ ID NO: 120 - DNA, 25 bp, SARS Virus
tcacgtggatgcatcatatttgtta

SEQ ID NO: 121 - DNA, 25 bp, SARS Virus
cacgtggatgcgacatatttgttat

SEQ ID NO: 122 - DNA, 25 bp, SARS Virus
acgtggatgcgtaatatttgttatt

SEQ ID NO: 123 - DNA, 25 bp, SARS Virus
cgtggatgcgtcatatttgttatta

SEQ ID NO: 124 - DNA, 25 bp, SARS Virus
gtggatgcgtcaaatttgttattat

SEQ ID NO: 125 - DNA, 25 bp, SARS Virus
tggatgcgtcatatttgttattatt

SEQ ID NO: 126 - DNA, 25 bp, SARS Virus
ggatgcgtcataattgttattattt

SEQ ID NO: 127 - DNA, 25 bp, SARS Virus
gatgcgtcatatatgttattattta

SEQ ID NO: 128 - DNA, 25 bp, SARS Virus
atgcgtcatattagttattatttaa

SEQ ID NO: 129 - DNA, 25 bp, SARS Virus
tgcgtcatatttattattatttaaa

SEQ ID NO: 130 - DNA, 25 bp, SARS Virus
gcgtcatatttgatattatttaaaa

SEQ ID NO: 131 - DNA, 25 bp, SARS Virus
cgtcatatttgtaattatttaaaat

SEQ ID NO: 132 - DNA, 25 bp, SARS Virus
gtcatatttgttattatttaaaatg

SEQ ID NO: 133 - DNA, 25 bp, SARS Virus
tcatatttgttaatatttaaaatga

SEQ ID NO: 134 - DNA, 25 bp, SARS Virus
catatttgttataatttaaaatgac

SEQ ID NO: 135 - DNA, 25 bp, SARS Virus
atatttgttattatttaaaatgaca

SEQ ID NO: 136 - DNA, 25 bp, SARS Virus
tatttgttattaattaaaatgacag

SEQ ID NO: 137 - DNA, 25 bp, SARS Virus
atttgttattatataaaatgacagc

SEQ ID NO: 138 - DNA, 25 bp, SARS Virus
tttgttattattaaaaatgacagca

SEQ ID NO: 139 - DNA, 25 bp, SARS Virus
ttgttattatttaaaatgacagcaa

SEQ ID NO: 140 - DNA, 25 bp, SARS Virus
tgttattatttaaaatgacagcaac

SEQ ID NO: 141 - DNA, 25 bp, SARS Virus
gttattatttaaaatgacagcaact

SEQ ID NO: 142 - DNA, 25 bp, SARS Virus
ttattatttaaaatgacagcaactg

SEQ ID NO: 143 - DNA, 25 bp, SARS Virus
tattatttaaaaagacagcaactgt

SEQ ID NO: 144 - DNA, 25 bp, SARS Virus
attatttaaaataacagcaactgtt

SEQ ID NO: 145 - DNA, 25 bp, SARS Virus
ttatttaaaatgacagcaactgttc

SEQ ID NO: 146 - DNA, 25 bp, SARS Virus
tatttaaaatgaaagcaactgttct

SEQ ID NO: 147 - DNA, 25 bp, SARS Virus
atttaaaatgacagcaactgttctt

SEQ ID NO: 148 - DNA, 25 bp, SARS Virus
tttaaaatgacaacaactgttcttt

SEQ ID NO: 149 - DNA, 25 bp, SARS Virus
ttaaaatgacagaaactgttctttg

SEQ ID NO: 150 - DNA, 25 bp, SARS Virus
taaaatgacagcaactgttctttgc

SEQ ID NO: 151 - DNA, 25 bp, SARS Virus
aaaatgacagcaactgttctttgct

SEQ ID NO: 152 - DNA, 25 bp, SARS Virus
aaatgacagcaaatgttctttgctc

SEQ ID NO: 153 - DNA, 25 bp, SARS Virus
aatgacagcaacagttctttgctca

SEQ ID NO: 154 - DNA, 25 bp, SARS Virus
atgacagcaactattctttgctcat

SEQ ID NO: 155 - DNA, 25 bp, SARS Virus
tgacagcaactgatctttgctcatt

SEQ ID NO: 156 - DNA, 25 bp, SARS Virus
gacagcaactgtactttgctcattg

SEQ ID NO: 157 - DNA, 25 bp, SARS Virus
acagcaactgttatttgctcattga

SEQ ID NO: 158 - DNA, 25 bp, SARS Virus
cagcaactgttcattgctcattgag

SEQ ID NO: 159 - DNA, 25 bp, SARS Virus
agcaactgttctatgctcattgagc

SEQ ID NO: 160 - DNA, 25 bp, SARS Virus
gcaactgttcttagctcattgagca

SEQ ID NO: 161 - DNA, 25 bp, SARS Virus
caactgttctttactcattgagcag

SEQ ID NO: 162 - DNA, 25 bp, SARS Virus
aactgttctttgatcattgagcagg

SEQ ID NO: 163 - DNA, 25 bp, SARS Virus
actgttctttgcacattgagcaggg

SEQ ID NO: 164 - DNA, 25 bp, SARS Virus
ctgttctttgctaattgagcaggga

SEQ ID NO: 165 - DNA, 25 bp, SARS Virus
tgttctttgctcattgagcagggag

SEQ ID NO: 166 - DNA, 25 bp, SARS Virus
gttctttgctcaatgagcagggaga

SEQ ID NO: 167 - DNA, 25 bp, SARS Virus
ttctttgctcatagagcagggagaa

SEQ ID NO: 168 - DNA, 25 bp, SARS Virus
tctttgctcattaagcagggagaag

SEQ ID NO: 169 - DNA, 25 bp, SARS Virus
ctttgctcattgagcagggagaaga

SEQ ID NO: 170 - DNA, 25 bp, SARS Virus
tttgctcattgaacagggagaagac

SEQ ID NO: 171 - DNA, 25 bp, SARS Virus
ttgctcattgagaagggagaagacg

SEQ ID NO: 172 - DNA, 25 bp, SARS Virus
tgctcattgagcagggagaagacgt

SEQ ID NO: 173 - DNA, 25 bp, SARS Virus
gctcattgagcaaggagaagacgtc

SEQ ID NO: 174 - DNA, 25 bp, SARS Virus
ctcattgagcagagagaagacgtct

SEQ ID NO: 175 - DNA, 25 bp, SARS Virus
tcattgagcaggaagaagacgtctg

SEQ ID NO: 176 - DNA, 25 bp, SARS Virus
cattgagcagggagaagacgtctga

SEQ ID NO: 177 - DNA, 25 bp, SARS Virus
attgagcagggaaaagacgtctgac

SEQ ID NO: 178 - DNA, 25 bp, SARS Virus
ttgagcagggagaagacgtctgacg

SEQ ID NO: 179 - DNA, 25 bp, SARS Virus
tgagcagggagaagacgtctgacga

SEQ ID NO: 180 - DNA, 25 bp, SARS Virus
gagcagggagaaaacgtctgacgaa

SEQ ID NO: 181 - DNA, 25 bp, SARS Virus
agcagggagaagacgtctgacgaat

SEQ ID NO: 182 - DNA, 25 bp, SARS Virus
gcagggagaagaagtctgacgaatg

SEQ ID NO: 183 - DNA, 25 bp, SARS Virus
cagggagaagacatctgacgaatgc

SEQ ID NO: 184 - DNA, 25 bp, SARS Virus
agggagaagacgactgacgaatgcc

SEQ ID NO: 185 - DNA, 25 bp, SARS Virus
gggagaagacgtatgacgaatgcca

SEQ ID NO: 186 - DNA, 25 bp, SARS Virus
ggagaagacgtcagacgaatgccaa

SEQ ID NO: 187 - DNA, 25 bp, SARS Virus
gagaagacgtctaacgaatgccaaa

SEQ ID NO: 188 - DNA, 25 bp, SARS Virus
agaagacgtctgacgaatgccaaag

SEQ ID NO: 189 - DNA, 25 bp, SARS Virus
gaagacgtctgaagaatgccaaagc

SEQ ID NO: 190 - DNA, 25 bp, SARS Virus
aagacgtctgacaaatgccaaagca

SEQ ID NO: 191 - DNA, 25 bp, SARS Virus
agacgtctgacgaatgccaaagcag

SEQ ID NO: 192 - DNA, 25 bp, SARS Virus
gacgtctgacgaatgccaaagcagg

SEQ ID NO: 193 - DNA, 25 bp, SARS Virus
acgtctgacgaaagccaaagcaggc

SEQ ID NO: 194 - DNA, 25 bp, SARS Virus
cgtctgacgaataccaaagcaggca

SEQ ID NO: 195 - DNA, 25 bp, SARS Virus
gtctgacgaatgacaaagcaggcac

SEQ ID NO: 196 - DNA, 25 bp, SARS Virus
tctgacgaatgcaaaagcaggcaca

SEQ ID NO: 197 - DNA, 25 bp, SARS Virus
ctgacgaatgccaaagcaggcacaa

SEQ ID NO: 198 - DNA, 25 bp, SARS Virus
tgacgaatgccaaagcaggcacaac

SEQ ID NO: 199 - DNA, 25 bp, SARS Virus
gacgaatgccaaagcaggcacaacg

SEQ ID NO: 200 - DNA, 25 bp, SARS Virus
acgaatgccaaaacaggcacaacgt

SEQ ID NO: 201 - DNA, 25 bp, SARS Virus
cgaatgccaaagaaggcacaacgtc

SEQ ID NO: 202 - DNA, 25 bp, SARS Virus
gaatgccaaagcaggcacaacgtca

SEQ ID NO: 203 - DNA, 25 bp, SARS Virus
aatgccaaagcaagcacaacgtcag

SEQ ID NO: 204 - DNA, 25 bp, SARS Virus
atgccaaagcagacacaacgtcagc

SEQ ID NO: 205 - DNA, 25 bp, SARS Virus
tgccaaagcaggaacaacgtcagct

SEQ ID NO: 206 - DNA, 25 bp, SARS Virus
gccaaagcaggcacaacgtcagcta

SEQ ID NO: 207 - DNA, 25 bp, SARS Virus
ccaaagcaggcaaaacgtcagctag

SEQ ID NO: 208 - DNA, 25 bp, SARS Virus
caaagcaggcacaacgtcagctagt

SEQ ID NO: 209 - DNA, 25 bp, SARS Virus
aaagcaggcacaacgtcagctagta

SEQ ID NO: 210 - DNA, 25 bp, SARS Virus
aagcaggcacaaagtcagctagtag

SEQ ID NO: 211 - DNA, 25 bp, SARS Virus
agcaggcacaacatcagctagtagt

SEQ ID NO: 212 - DNA, 25 bp, SARS Virus
gcaggcacaacgacagctagtagtc

SEQ ID NO: 213 - DNA, 25 bp, SARS Virus
caggcacaacgtaagctagtagtcg

SEQ ID NO: 214 - DNA, 25 bp, SARS Virus
aggcacaacgtcagctagtagtcgt

SEQ ID NO: 215 - DNA, 25 bp, SARS Virus
ggcacaacgtcaactagtagtcgta

SEQ ID NO: 216 - DNA, 25 bp, SARS Virus
gcacaacgtcagatagtagtcgtat

SEQ ID NO: 217 - DNA, 25 bp, SARS Virus
cacaacgtcagcaagtagtcgtatg

SEQ ID NO: 218 - DNA, 25 bp, SARS Virus
acaacgtcagctagtagtcgtatgg

SEQ ID NO: 219 - DNA, 25 bp, SARS Virus
caacgtcagctaatagtcgtatgga

SEQ ID NO: 220 - DNA, 25 bp, SARS Virus
aacgtcagctagaagtcgtatggat

SEQ ID NO: 221 - DNA, 25 bp, SARS Virus
acgtcagctagtagtcgtatggatc

SEQ ID NO: 222 - DNA, 25 bp, SARS Virus
cgtcagctagtaatcgtatggatcc

SEQ ID NO: 223 - DNA, 25 bp, SARS Virus
gtcagctagtagacgtatggatcca

SEQ ID NO: 224 - DNA, 25 bp, SARS Virus
tcagctagtagtagtatggatccaa

SEQ ID NO: 225 - DNA, 25 bp, SARS Virus
cagctagtagtcatatggatccaaa

SEQ ID NO: 226 - DNA, 25 bp, SARS Virus
agctagtagtcgaatggatccaaag

SEQ ID NO: 227 - DNA, 25 bp, SARS Virus
gctagtagtcgtatggatccaaagc

SEQ ID NO: 228 - DNA, 25 bp, SARS Virus
ctagtagtcgtaaggatccaaagca

SEQ ID NO: 229 - DNA, 25 bp, SARS Virus
tagtagtcgtatagatccaaagcag

SEQ ID NO: 230 - DNA, 25 bp, SARS Virus
agtagtcgtatgaatccaaagcagg

SEQ ID NO: 231 - DNA, 25 bp, SARS Virus
gtagtcgtatggatccaaagcaggc

SEQ ID NO: 232 - DNA, 25 bp, SARS Virus
tagtcgtatggaaccaaagcaggcc

SEQ ID NO: 233 - DNA, 25 bp, SARS Virus
agtcgtatggatacaaagcaggccc

SEQ ID NO: 234 - DNA, 25 bp, SARS Virus
gtcgtatggatcaaaagcaggccca

SEQ ID NO: 235 - DNA, 25 bp, SARS Virus
tcgtatggatccaaagcaggcccac

SEQ ID NO: 236 - DNA, 25 bp, SARS Virus
cgtatggatccaaagcaggcccaca

SEQ ID NO: 237 - DNA, 25 bp, SARS Virus
gtatggatccaaagcaggcccacac

SEQ ID NO: 238 - DNA, 25 bp, SARS Virus
tatggatccaaaacaggcccacact

SEQ ID NO: 239 - DNA, 25 bp, SARS Virus
atggatccaaagaaggcccacactg

SEQ ID NO: 240 - DNA, 25 bp, SARS Virus
tggatccaaagcaggcccacactgg

SEQ ID NO: 241 - DNA, 25 bp, SARS Virus
ggatccaaagcaagcccacactggc

SEQ ID NO: 242 - DNA, 25 bp, SARS Virus
gatccaaagcagacccacactggct

SEQ ID NO: 243 - DNA, 25 bp, SARS Virus
atccaaagcaggaccacactggctt

SEQ ID NO: 244 - DNA, 25 bp, SARS Virus
tccaaagcaggcacacactggcttt

SEQ ID NO: 245 - DNA, 25 bp, SARS Virus
ccaaagcaggccaacactggctttc

SEQ ID NO: 246 - DNA, 25 bp, SARS Virus
caaagcaggcccacactggctttcc

SEQ ID NO: 247 - DNA, 25 bp, SARS Virus
aaagcaggcccaaactggctttcca

SEQ ID NO: 248 - DNA, 25 bp, SARS Virus
aagcaggcccacactggctttccat

SEQ ID NO: 249 - DNA, 25 bp, SARS Virus
agcaggcccacaatggctttccatt

SEQ ID NO: 250 - DNA, 25 bp, SARS Virus
gcaggcccacacaggctttccattc

SEQ ID NO: 251 - DNA, 25 bp, SARS Virus
caggcccacactagctttccattct

SEQ ID NO: 252 - DNA, 25 bp, SARS Virus
aggcccacactgactttccattcta

SEQ ID NO: 253 - DNA, 25 bp, SARS Virus
ggcccacactggatttccattctac

SEQ ID NO: 254 - DNA, 25 bp, SARS Virus
gcccacactggcattccattctacc

SEQ ID NO: 255 - DNA, 25 bp, SARS Virus
cccacactggctatccattctacct

SEQ ID NO: 256 - DNA, 25 bp, SARS Virus
ccacactggcttaccattctacctc

SEQ ID NO: 257 - DNA, 25 bp, SARS Virus
cacactggctttacattctacctct

SEQ ID NO: 258 - DNA, 25 bp, SARS Virus
acactggctttcaattctacctctc

SEQ ID NO: 259 - DNA, 25 bp, SARS Virus
cactggctttccattctacctctcg

SEQ ID NO: 260 - DNA, 25 bp, SARS Virus
actggctttccaatctacctctcgg

SEQ ID NO: 261 - DNA, 25 bp, SARS Virus
ctggctttccatactacctctcgga

SEQ ID NO: 262 - DNA, 25 bp, SARS Virus
tggctttccattatacctctcggaa

SEQ ID NO: 263 - DNA, 25 bp, SARS Virus
ggctttccattcaacctctcggaac

SEQ ID NO: 264 - DNA, 25 bp, SARS Virus
gctttccattctacctctcggaaca

SEQ ID NO: 265 - DNA, 25 bp, SARS Virus
ctttccattctaactctcggaacaa

SEQ ID NO: 266 - DNA, 25 bp, SARS Virus
tttccattctacatctcggaacaag

SEQ ID NO: 267 - DNA, 25 bp, SARS Virus
ttccattctaccactcggaacaaga

SEQ ID NO: 268 - DNA, 25 bp, SARS Virus
tccattctacctatcggaacaagaa

SEQ ID NO: 269 - DNA, 25 bp, SARS Virus
ccattctacctcacggaacaagaac

SEQ ID NO: 270 - DNA, 25 bp, SARS Virus
cattctacctctaggaacaagaacc

SEQ ID NO: 271 - DNA, 25 bp, SARS Virus
attctacctctcagaacaagaacca

SEQ ID NO: 272 - DNA, 25 bp, SARS Virus
ttctacctctcgaaacaagaaccac

SEQ ID NO: 273 - DNA, 25 bp, SARS Virus
tctacctctcggaacaagaaccaca

SEQ ID NO: 274 - DNA, 25 bp, SARS Virus
ctacctctcggaacaagaaccacag

SEQ ID NO: 275 - DNA, 25 bp, SARS Virus
tacctctcggaaaaagaaccacagt

SEQ ID NO: 276 - DNA, 25 bp, SARS Virus
acctctcggaacaagaaccacagtt

SEQ ID NO: 277 - DNA, 25 bp, SARS Virus
ttttttttttaacaatccaaaaatg

SEQ ID NO: 278 - DNA, 25 bp, SARS Virus
tttttttttaatcatccaaaaatgg

SEQ ID NO: 279 - DNA, 25 bp, SARS Virus
ttttttttaatactccaaaaatgga

SEQ ID NO: 280 - DNA, 25 bp, SARS Virus
tttttttaataacccaaaaatggat

SEQ ID NO: 281 - DNA, 25 bp, SARS Virus
ttttttaataatccaaaaatggatg

SEQ ID NO: 282 - DNA, 25 bp, SARS Virus
tttttaataatccaaaaatggatgg

SEQ ID NO: 283 - DNA, 25 bp, SARS Virus
ttttaataatcccaaaatggatggg

SEQ ID NO: 284 - DNA, 25 bp, SARS Virus
tttaataatccacaaatggatgggt

SEQ ID NO: 285 - DNA, 25 bp, SARS Virus
ttaataatccaacaatggatgggtc

SEQ ID NO: 286 - DNA, 25 bp, SARS Virus
taataatccaaacatggatgggtcc

SEQ ID NO: 287 - DNA, 25 bp, SARS Virus
aataatccaaaactggatgggtcct

SEQ ID NO: 288 - DNA, 25 bp, SARS Virus
ataatccaaaaacggatgggtcctt

SEQ ID NO: 289 - DNA, 25 bp, SARS Virus
taatccaaaaatcgatgggtccttt

SEQ ID NO: 290 - DNA, 25 bp, SARS Virus
aatccaaaaatgcatgggtcctttt

SEQ ID NO: 291 - DNA, 25 bp, SARS Virus
atccaaaaatggctgggtccttttc

SEQ ID NO: 292 - DNA, 25 bp, SARS Virus
tccaaaaatggacgggtccttttcg

SEQ ID NO: 293 - DNA, 25 bp, SARS Virus
ccaaaaatggatcggtccttttcgg

SEQ ID NO: 294 - DNA, 25 bp, SARS Virus
caaaaatggatgcgtccttttcggt

SEQ ID NO: 295 - DNA, 25 bp, SARS Virus
aaaaatggatggctccttttcggtt

SEQ ID NO: 296 - DNA, 25 bp, SARS Virus
aaaatggatgggcccttttcggttg

SEQ ID NO: 297 - DNA, 25 bp, SARS Virus
aaatggatgggtccttttcggttgg

SEQ ID NO: 298 - DNA, 25 bp, SARS Virus
aatggatgggtccttttcggttggt

SEQ ID NO: 299 - DNA, 25 bp, SARS Virus
atggatgggtccctttcggttggtt

SEQ ID NO: 300 - DNA, 25 bp, SARS Virus
tggatgggtcctcttcggttggttg

SEQ ID NO: 301 - DNA, 25 bp, SARS Virus
ggatgggtccttctcggttggttgg

SEQ ID NO: 302 - DNA, 25 bp, SARS Virus
gatgggtcctttccggttggttgga

SEQ ID NO: 303 - DNA, 25 bp, SARS Virus
atgggtccttttcggttggttggag

SEQ ID NO: 304 - DNA, 25 bp, SARS Virus
tgggtccttttccgttggttggagc

SEQ ID NO: 305 - DNA, 25 bp, SARS Virus
gggtccttttcgcttggttggagct

SEQ ID NO: 306 - DNA, 25 bp, SARS Virus
ggtccttttcggctggttggagcta

SEQ ID NO: 307 - DNA, 25 bp, SARS Virus
gtccttttcggtcggttggagctag

SEQ ID NO: 308 - DNA, 25 bp, SARS Virus
tccttttcggttcgttggagctaga

SEQ ID NO: 309 - DNA, 25 bp, SARS Virus
ccttttcggttgcttggagctagag

SEQ ID NO: 310 - DNA, 25 bp, SARS Virus
cttttcggttggctggagctagaga

SEQ ID NO: 311 - DNA, 25 bp, SARS Virus
ttttcggttggtcggagctagagaa

SEQ ID NO: 312 - DNA, 25 bp, SARS Virus
tttcggttggttcgagctagagaac

SEQ ID NO: 313 - DNA, 25 bp, SARS Virus
ttcggttggttgcagctagagaaca

SEQ ID NO: 314 - DNA, 25 bp, SARS Virus
tcggttggttggcgctagagaacat

SEQ ID NO: 315 - DNA, 25 bp, SARS Virus
cggttggttggacctagagaacatc

SEQ ID NO: 316 - DNA, 25 bp, SARS Virus
ggttggttggagctagagaacatct

SEQ ID NO: 317 - DNA, 25 bp, SARS Virus
gttggttggagccagagaacatcta

SEQ ID NO: 318 - DNA, 25 bp, SARS Virus
ttggttggagctcgagaacatctag

SEQ ID NO: 319 - DNA, 25 bp, SARS Virus
tggttggagctacagaacatctaga

SEQ ID NO: 320 - DNA, 25 bp, SARS Virus
ggttggagctagcgaacatctagac

SEQ ID NO: 321 - DNA, 25 bp, SARS Virus
gttggagctagacaacatctagaca

SEQ ID NO: 322 - DNA, 25 bp, SARS Virus
ttggagctagagcacatctagacaa

SEQ ID NO: 323 - DNA, 25 bp, SARS Virus
tggagctagagaccatctagacaag

SEQ ID NO: 324 - DNA, 25 bp, SARS Virus
ggagctagagaacatctagacaaga

SEQ ID NO: 325 - DNA, 25 bp, SARS Virus
gagctagagaacctctagacaagag

SEQ ID NO: 326 - DNA, 25 bp, SARS Virus
agctagagaacacctagacaagaga

SEQ ID NO: 327 - DNA, 25 bp, SARS Virus
gctagagaacatctagacaagagat

SEQ ID NO: 328 - DNA, 25 bp, SARS Virus
ctagagaacatccagacaagagatt

SEQ ID NO: 329 - DNA, 25 bp, SARS Virus
tagagaacatctcgacaagagattt

SEQ ID NO: 330 - DNA, 25 bp, SARS Virus
agagaacatctacacaagagatttg

SEQ ID NO: 331 - DNA, 25 bp, SARS Virus
gagaacatctagccaagagatttgc

SEQ ID NO: 332 - DNA, 25 bp, SARS Virus
agaacatctagacaagagatttgct

SEQ ID NO: 333 - DNA, 25 bp, SARS Virus
gaacatctagaccagagatttgctt

SEQ ID NO: 334 - DNA, 25 bp, SARS Virus
aacatctagacacgagatttgcttg

SEQ ID NO: 335 - DNA, 25 bp, SARS Virus
acatctagacaacagatttgcttga

SEQ ID NO: 336 - DNA, 25 bp, SARS Virus
catctagacaagcgatttgcttgaa

SEQ ID NO: 337 - DNA, 25 bp, SARS Virus
atctagacaagacatttgcttgaaa

SEQ ID NO: 338 - DNA, 25 bp, SARS Virus
tctagacaagagctttgcttgaaat

SEQ ID NO: 339 - DNA, 25 bp, SARS Virus
ctagacaagagacttgcttgaaatt

SEQ ID NO: 340 - DNA, 25 bp, SARS Virus
tagacaagagatctgcttgaaattt

SEQ ID NO: 341 - DNA, 25 bp, SARS Virus
agacaagagattcgcttgaaatttt

SEQ ID NO: 342 - DNA, 25 bp, SARS Virus
gacaagagatttccttgaaatttta

SEQ ID NO: 343 - DNA, 25 bp, SARS Virus
acaagagatttgcttgaaattttag

SEQ ID NO: 344 - DNA, 25 bp, SARS Virus
caagagatttgcctgaaattttaga

SEQ ID NO: 345 - DNA, 25 bp, SARS Virus
aagagatttgctcgaaattttagac

SEQ ID NO: 346 - DNA, 25 bp, SARS Virus
agagatttgcttcaaattttagaca

SEQ ID NO: 347 - DNA, 25 bp, SARS Virus
gagatttgcttgcaattttagacac

SEQ ID NO: 348 - DNA, 25 bp, SARS Virus
agatttgcttgacattttagacaca

SEQ ID NO: 349 - DNA, 25 bp, SARS Virus
gatttgcttgaacttttagacacat

SEQ ID NO: 350 - DNA, 25 bp, SARS Virus
atttgcttgaaactttagacacatc

SEQ ID NO: 351 - DNA, 25 bp, SARS Virus
tttgcttgaaatcttagacacatcg

SEQ ID NO: 352 - DNA, 25 bp, SARS Virus
ttgcttgaaattctagacacatcga

SEQ ID NO: 353 - DNA, 25 bp, SARS Virus
tgcttgaaatttcagacacatcgac

SEQ ID NO: 354 - DNA, 25 bp, SARS Virus
gcttgaaattttcgacacatcgaca

SEQ ID NO: 355 - DNA, 25 bp, SARS Virus
cttgaaattttacacacatcgacag

SEQ ID NO: 356 - DNA, 25 bp, SARS Virus
ttgaaattttagccacatcgacagc

SEQ ID NO: 357 - DNA, 25 bp, SARS Virus
tgaaattttagacacatcgacagcg

SEQ ID NO: 358 - DNA, 25 bp, SARS Virus
gaaattttagacccatcgacagcga

SEQ ID NO: 359 - DNA, 25 bp, SARS Virus
aaattttagacacatcgacagcgag

SEQ ID NO: 360 - DNA, 25 bp, SARS Virus
aattttagacacctcgacagcgagc

SEQ ID NO: 361 - DNA, 25 bp, SARS Virus
attttagacacaccgacagcgagcc

SEQ ID NO: 362 - DNA, 25 bp, SARS Virus
ttttagacacatcgacagcgagccg

SEQ ID NO: 363 - DNA, 25 bp, SARS Virus
tttagacacatccacagcgagccga

SEQ ID NO: 364 - DNA, 25 bp, SARS Virus
ttagacacatcgccagcgagccgac

SEQ ID NO: 365 - DNA, 25 bp, SARS Virus
tagacacatcgacagcgagccgacg

SEQ ID NO: 366 - DNA, 25 bp, SARS Virus
agacacatcgaccgcgagccgacgt

SEQ ID NO: 367 - DNA, 25 bp, SARS Virus
gacacatcgacaccgagccgacgta

SEQ ID NO: 368 - DNA, 25 bp, SARS Virus
acacatcgacagcgagccgacgtac

SEQ ID NO: 369 - DNA, 25 bp, SARS Virus
cacatcgacagccagccgacgtacg

SEQ ID NO: 370 - DNA, 25 bp, SARS Virus
acatcgacagcgcgccgacgtacgg

SEQ ID NO: 371 - DNA, 25 bp, SARS Virus
catcgacagcgacccgacgtacgga

SEQ ID NO: 372 - DNA, 25 bp, SARS Virus
atcgacagcgagccgacgtacggat

SEQ ID NO: 373 - DNA, 25 bp, SARS Virus
tcgacagcgagccgacgtacggatc

SEQ ID NO: 374 - DNA, 25 bp, SARS Virus
cgacagcgagcccacgtacggatca

SEQ ID NO: 375 - DNA, 25 bp, SARS Virus
gacagcgagccgccgtacggatcac

SEQ ID NO: 376 - DNA, 25 bp, SARS Virus
acagcgagccgacgtacggatcacg

SEQ ID NO: 377 - DNA, 25 bp, SARS Virus
cagcgagccgacctacggatcacgt

SEQ ID NO: 378 - DNA, 25 bp, SARS Virus
agcgagccgacgcacggatcacgtg

SEQ ID NO: 379 - DNA, 25 bp, SARS Virus
gcgagccgacgtccggatcacgtgg

SEQ ID NO: 380 - DNA, 25 bp, SARS Virus
cgagccgacgtacggatcacgtgga

SEQ ID NO: 381 - DNA, 25 bp, SARS Virus
gagccgacgtaccgatcacgtggat

SEQ ID NO: 382 - DNA, 25 bp, SARS Virus
agccgacgtacgcatcacgtggatg

SEQ ID NO: 383 - DNA, 25 bp, SARS Virus
gccgacgtacggctcacgtggatgc

SEQ ID NO: 384 - DNA, 25 bp, SARS Virus
ccgacgtacggaccacgtggatgcg

SEQ ID NO: 385 - DNA, 25 bp, SARS Virus
cgacgtacggatcacgtggatgcgt

SEQ ID NO: 386 - DNA, 25 bp, SARS Virus
gacgtacggatcccgtggatgcgtc

SEQ ID NO: 387 - DNA, 25 bp, SARS Virus
acgtacggatcacgtggatgcgtca

SEQ ID NO: 388 - DNA, 25 bp, SARS Virus
cgtacggatcacctggatgcgtcat

SEQ ID NO: 389 - DNA, 25 bp, SARS Virus
gtacggatcacgcggatgcgtcata

SEQ ID NO: 390 - DNA, 25 bp, SARS Virus
tacggatcacgtcgatgcgtcatat

SEQ ID NO: 391 - DNA, 25 bp, SARS Virus
acggatcacgtgcatgcgtcatatt

SEQ ID NO: 392 - DNA, 25 bp, SARS Virus
cggatcacgtggctgcgtcatattt

SEQ ID NO: 393 - DNA, 25 bp, SARS Virus
ggatcacgtggacgcgtcatatttg

SEQ ID NO: 394 - DNA, 25 bp, SARS Virus
gatcacgtggatccgtcatatttgt

SEQ ID NO: 395 - DNA, 25 bp, SARS Virus
atcacgtggatgcgtcatatttgtt

SEQ ID NO: 396 - DNA, 25 bp, SARS Virus
tcacgtggatgcctcatatttgtta

SEQ ID NO: 397 - DNA, 25 bp, SARS Virus
cacgtggatgcgccatatttgttat

SEQ ID NO: 398 - DNA, 25 bp, SARS Virus
acgtggatgcgtcatatttgttatt

SEQ ID NO: 399 - DNA, 25 bp, SARS Virus
cgtggatgcgtcctatttgttatta

SEQ ID NO: 400 - DNA, 25 bp, SARS Virus
gtggatgcgtcacatttgttattat

SEQ ID NO: 401 - DNA, 25 bp, SARS Virus
tggatgcgtcatctttgttattatt

SEQ ID NO: 402 - DNA, 25 bp, SARS Virus
ggatgcgtcatacttgttattattt

SEQ ID NO: 403 - DNA, 25 bp, SARS Virus
gatgcgtcatatctgttattattta

SEQ ID NO: 404 - DNA, 25 bp, SARS Virus
atgcgtcatattcgttattatttaa

SEQ ID NO: 405 - DNA, 25 bp, SARS Virus
tgcgtcatatttcttattatttaaa

SEQ ID NO: 406 - DNA, 25 bp, SARS Virus
gcgtcatatttgctattatttaaaa

SEQ ID NO: 407 - DNA, 25 bp, SARS Virus
cgtcatatttgtcattatttaaaat

SEQ ID NO: 408 - DNA, 25 bp, SARS Virus
gtcatatttgttcttatttaaaatg

SEQ ID NO: 409 - DNA, 25 bp, SARS Virus
tcatatttgttactatttaaaatga

SEQ ID NO: 410 - DNA, 25 bp, SARS Virus
catatttgttatcatttaaaatgac

SEQ ID NO: 411 - DNA, 25 bp, SARS Virus
atatttgttattctttaaaatgaca

SEQ ID NO: 412 - DNA, 25 bp, SARS Virus
tatttgttattacttaaaatgacag

SEQ ID NO: 413 - DNA, 25 bp, SARS Virus
atttgttattatctaaaatgacagc

SEQ ID NO: 414 - DNA, 25 bp, SARS Virus
tttgttattattcaaaatgacagca

SEQ ID NO: 415 - DNA, 25 bp, SARS Virus
ttgttattatttcaaatgacagcaa

SEQ ID NO: 416 - DNA, 25 bp, SARS Virus
tgttattatttacaatgacagcaac

SEQ ID NO: 417 - DNA, 25 bp, SARS Virus
gttattatttaacatgacagcaact

SEQ ID NO: 418 - DNA, 25 bp, SARS Virus
ttattatttaaactgacagcaactg

SEQ ID NO: 419 - DNA, 25 bp, SARS Virus
tattatttaaaacgacagcaactgt

SEQ ID NO: 420 - DNA, 25 bp, SARS Virus
attatttaaaatcacagcaactgtt

SEQ ID NO: 421 - DNA, 25 bp, SARS Virus
ttatttaaaatgccagcaactgttc

SEQ ID NO: 422 - DNA, 25 bp, SARS Virus
tatttaaaatgacagcaactgttct

SEQ ID NO: 423 - DNA, 25 bp, SARS Virus
atttaaaatgaccgcaactgttctt

SEQ ID NO: 424 - DNA, 25 bp, SARS Virus
tttaaaatgacaccaactgttcttt

SEQ ID NO: 425 - DNA, 25 bp, SARS Virus
ttaaaatgacagcaactgttctttg

SEQ ID NO: 426 - DNA, 25 bp, SARS Virus
taaaatgacagccactgttctttgc

SEQ ID NO: 427 - DNA, 25 bp, SARS Virus
aaaatgacagcacctgttctttgct

SEQ ID NO: 428 - DNA, 25 bp, SARS Virus
aaatgacagcaactgttctttgctc

SEQ ID NO: 429 - DNA, 25 bp, SARS Virus
aatgacagcaaccgttctttgctca

SEQ ID NO: 430 - DNA, 25 bp, SARS Virus
atgacagcaactcttctttgctcat

SEQ ID NO: 431 - DNA, 25 bp, SARS Virus
tgacagcaactgctctttgctcatt

SEQ ID NO: 432 - DNA, 25 bp, SARS Virus
gacagcaactgtcctttgctcattg

SEQ ID NO: 433 - DNA, 25 bp, SARS Virus
acagcaactgttctttgctcattga

SEQ ID NO: 434 - DNA, 25 bp, SARS Virus
cagcaactgttccttgctcattgag

SEQ ID NO: 435 - DNA, 25 bp, SARS Virus
agcaactgttctctgctcattgagc

SEQ ID NO: 436 - DNA, 25 bp, SARS Virus
gcaactgttcttcgctcattgagca

SEQ ID NO: 437 - DNA, 25 bp, SARS Virus
caactgttctttcctcattgagcag

SEQ ID NO: 438 - DNA, 25 bp, SARS Virus
aactgttctttgctcattgagcagg

SEQ ID NO: 439 - DNA, 25 bp, SARS Virus
actgttctttgcccattgagcaggg

SEQ ID NO: 440 - DNA, 25 bp, SARS Virus
ctgttctttgctcattgagcaggga

SEQ ID NO: 441 - DNA, 25 bp, SARS Virus
tgttctttgctccttgagcagggag

SEQ ID NO: 442 - DNA, 25 bp, SARS Virus
gttctttgctcactgagcagggaga

SEQ ID NO: 443 - DNA, 25 bp, SARS Virus
ttctttgctcatcgagcagggagaa

SEQ ID NO: 444 - DNA, 25 bp, SARS Virus
tctttgctcattcagcagggagaag

SEQ ID NO: 445 - DNA, 25 bp, SARS Virus
ctttgctcattgcgcagggagaaga

SEQ ID NO: 446 - DNA, 25 bp, SARS Virus
tttgctcattgaccagggagaagac

SEQ ID NO: 447 - DNA, 25 bp, SARS Virus
ttgctcattgagcagggagaagacg

SEQ ID NO: 448 - DNA, 25 bp, SARS Virus
tgctcattgagccgggagaagacgt

SEQ ID NO: 449 - DNA, 25 bp, SARS Virus
gctcattgagcacggagaagacgtc

SEQ ID NO: 450 - DNA, 25 bp, SARS Virus
ctcattgagcagcgagaagacgtct

SEQ ID NO: 451 - DNA, 25 bp, SARS Virus
tcattgagcaggcagaagacgtctg

SEQ ID NO: 452 - DNA, 25 bp, SARS Virus
cattgagcagggcgaagacgtctga

SEQ ID NO: 453 - DNA, 25 bp, SARS Virus
attgagcagggacaagacgtctgac

SEQ ID NO: 454 - DNA, 25 bp, SARS Virus
ttgagcagggagcagacgtctgacg

SEQ ID NO: 455 - DNA, 25 bp, SARS Virus
tgagcagggagacgacgtctgacga

SEQ ID NO: 456 - DNA, 25 bp, SARS Virus
gagcagggagaacacgtctgacgaa

SEQ ID NO: 457 - DNA, 25 bp, SARS Virus
agcagggagaagccgtctgacgaat

SEQ ID NO: 458 - DNA, 25 bp, SARS Virus
gcagggagaagacgtctgacgaatg

SEQ ID NO: 459 - DNA, 25 bp, SARS Virus
cagggagaagacctctgacgaatgc

SEQ ID NO: 460 - DNA, 25 bp, SARS Virus
agggagaagacgcctgacgaatgcc

SEQ ID NO: 461 - DNA, 25 bp, SARS Virus
gggagaagacgtctgacgaatgcca

SEQ ID NO: 462 - DNA, 25 bp, SARS Virus
ggagaagacgtccgacgaatgccaa

SEQ ID NO: 463 - DNA, 25 bp, SARS Virus
gagaagacgtctcacgaatgccaaa

SEQ ID NO: 464 - DNA, 25 bp, SARS Virus
agaagacgtctgccgaatgccaaag

SEQ ID NO: 465 - DNA, 25 bp, SARS Virus
gaagacgtctgacgaatgccaaagc

SEQ ID NO: 466 - DNA, 25 bp, SARS Virus
aagacgtctgaccaatgccaaagca

SEQ ID NO: 467 - DNA, 25 bp, SARS Virus
agacgtctgacgcatgccaaagcag

SEQ ID NO: 468 - DNA, 25 bp, SARS Virus
gacgtctgacgactgccaaagcagg

SEQ ID NO: 469 - DNA, 25 bp, SARS Virus
acgtctgacgaacgccaaagcaggc

SEQ ID NO: 470 - DNA, 25 bp, SARS Virus
cgtctgacgaatcccaaagcaggca

SEQ ID NO: 471 - DNA, 25 bp, SARS Virus
gtctgacgaatgccaaagcaggcac

SEQ ID NO: 472 - DNA, 25 bp, SARS Virus
tctgacgaatgccaaagcaggcaca

SEQ ID NO: 473 - DNA, 25 bp, SARS Virus
ctgacgaatgcccaagcaggcacaa

SEQ ID NO: 474 - DNA, 25 bp, SARS Virus
tgacgaatgccacagcaggcacaac

SEQ ID NO: 475 - DNA, 25 bp, SARS Virus
gacgaatgccaacgcaggcacaacg

SEQ ID NO: 476 - DNA, 25 bp, SARS Virus
acgaatgccaaaccaggcacaacgt

SEQ ID NO: 477 - DNA, 25 bp, SARS Virus
cgaatgccaaagcaggcacaacgtc

SEQ ID NO: 478 - DNA, 25 bp, SARS Virus
gaatgccaaagccggcacaacgtca

SEQ ID NO: 479 - DNA, 25 bp, SARS Virus
aatgccaaagcacgcacaacgtcag

SEQ ID NO: 480 - DNA, 25 bp, SARS Virus
atgccaaagcagccacaacgtcagc

SEQ ID NO: 481 - DNA, 25 bp, SARS Virus
tgccaaagcaggcacaacgtcagct

SEQ ID NO: 482 - DNA, 25 bp, SARS Virus
gccaaagcaggcccaacgtcagcta

SEQ ID NO: 483 - DNA, 25 bp, SARS Virus
ccaaagcaggcacaacgtcagctag

SEQ ID NO: 484 - DNA, 25 bp, SARS Virus
caaagcaggcaccacgtcagctagt

SEQ ID NO: 485 - DNA, 25 bp, SARS Virus
aaagcaggcacaccgtcagctagta

SEQ ID NO: 486 - DNA, 25 bp, SARS Virus
aagcaggcacaacgtcagctagtag

SEQ ID NO: 487 - DNA, 25 bp, SARS Virus
agcaggcacaacctcagctagtagt

SEQ ID NO: 488 - DNA, 25 bp, SARS Virus
gcaggcacaacgccagctagtagtc

SEQ ID NO: 489 - DNA, 25 bp, SARS Virus
caggcacaacgtcagctagtagtcg

SEQ ID NO: 490 - DNA, 25 bp, SARS Virus
aggcacaacgtccgctagtagtcgt

SEQ ID NO: 491 - DNA, 25 bp, SARS Virus
ggcacaacgtcacctagtagtcgta

SEQ ID NO: 492 - DNA, 25 bp, SARS Virus
gcacaacgtcagctagtagtcgtat

SEQ ID NO: 493 - DNA, 25 bp, SARS Virus
cacaacgtcagccagtagtcgtatg

SEQ ID NO: 494 - DNA, 25 bp, SARS Virus
acaacgtcagctcgtagtcgtatgg

SEQ ID NO: 495 - DNA, 25 bp, SARS Virus
caacgtcagctactagtcgtatgga

SEQ ID NO: 496 - DNA, 25 bp, SARS Virus
aacgtcagctagcagtcgtatggat

SEQ ID NO: 497 - DNA, 25 bp, SARS Virus
acgtcagctagtcgtcgtatggatc

SEQ ID NO: 498 - DNA, 25 bp, SARS Virus
cgtcagctagtactcgtatggatcc

SEQ ID NO: 499 - DNA, 25 bp, SARS Virus
gtcagctagtagccgtatggatcca

SEQ ID NO: 500 - DNA, 25 bp, SARS Virus
tcagctagtagtcgtatggatccaa

SEQ ID NO: 501 - DNA, 25 bp, SARS Virus
cagctagtagtcctatggatccaaa

SEQ ID NO: 502 - DNA, 25 bp, SARS Virus
agctagtagtcgcatggatccaaag

SEQ ID NO: 503 - DNA, 25 bp, SARS Virus
gctagtagtcgtctggatccaaagc

SEQ ID NO: 504 - DNA, 25 bp, SARS Virus
ctagtagtcgtacggatccaaagca

SEQ ID NO: 505 - DNA, 25 bp, SARS Virus
tagtagtcgtatcgatccaaagcag

SEQ ID NO: 506 - DNA, 25 bp, SARS Virus
agtagtcgtatgcatccaaagcagg

SEQ ID NO: 507 - DNA, 25 bp, SARS Virus
gtagtcgtatggctccaaagcaggc

SEQ ID NO: 508 - DNA, 25 bp, SARS Virus
tagtcgtatggacccaaagcaggcc

SEQ ID NO: 509 - DNA, 25 bp, SARS Virus
agtcgtatggatccaaagcaggccc

SEQ ID NO: 510 - DNA, 25 bp, SARS Virus
gtcgtatggatccaaagcaggccca

SEQ ID NO: 511 - DNA, 25 bp, SARS Virus
tcgtatggatcccaagcaggcccac

SEQ ID NO: 512 - DNA, 25 bp, SARS Virus
cgtatggatccacagcaggcccaca

SEQ ID NO: 513 - DNA, 25 bp, SARS Virus
gtatggatccaacgcaggcccacac

SEQ ID NO: 514 - DNA, 25 bp, SARS Virus
tatggatccaaaccaggcccacact

SEQ ID NO: 515 - DNA, 25 bp, SARS Virus
atggatccaaagcaggcccacactg

SEQ ID NO: 516 - DNA, 25 bp, SARS Virus
tggatccaaagccggcccacactgg

SEQ ID NO: 517 - DNA, 25 bp, SARS Virus
ggatccaaagcacgcccacactggc

SEQ ID NO: 518 - DNA, 25 bp, SARS Virus
gatccaaagcagccccacactggct

SEQ ID NO: 519 - DNA, 25 bp, SARS Virus
atccaaagcaggcccacactggctt

SEQ ID NO: 520 - DNA, 25 bp, SARS Virus
tccaaagcaggcccacactggcttt

SEQ ID NO: 521 - DNA, 25 bp, SARS Virus
ccaaagcaggcccacactggctttc

SEQ ID NO: 522 - DNA, 25 bp, SARS Virus
caaagcaggcccccactggctttcc

SEQ ID NO: 523 - DNA, 25 bp, SARS Virus
aaagcaggcccacactggctttcca

SEQ ID NO: 524 - DNA, 25 bp, SARS Virus
aagcaggcccaccctggctttccat

SEQ ID NO: 525 - DNA, 25 bp, SARS Virus
agcaggcccacactggctttccatt

SEQ ID NO: 526 - DNA, 25 bp, SARS Virus
gcaggcccacaccggctttccattc

SEQ ID NO: 527 - DNA, 25 bp, SARS Virus
caggcccacactcgctttccattct

SEQ ID NO: 528 - DNA, 25 bp, SARS Virus
aggcccacactgcctttccattcta

SEQ ID NO: 529 - DNA, 25 bp, SARS Virus
ggcccacactggctttccattctac

SEQ ID NO: 530 - DNA, 25 bp, SARS Virus
gcccacactggccttccattctacc

SEQ ID NO: 531 - DNA, 25 bp, SARS Virus
cccacactggctctccattctacct

SEQ ID NO: 532 - DNA, 25 bp, SARS Virus
ccacactggcttcccattctacctc

SEQ ID NO: 533 - DNA, 25 bp, SARS Virus
cacactggctttccattctacctct

SEQ ID NO: 534 - DNA, 25 bp, SARS Virus
acactggctttccattctacctctc

SEQ ID NO: 535 - DNA, 25 bp, SARS Virus
cactggctttcccttctacctctcg

SEQ ID NO: 536 - DNA, 25 bp, SARS Virus
actggctttccactctacctctcgg

SEQ ID NO: 537 - DNA, 25 bp, SARS Virus
ctggctttccatcctacctctcgga

SEQ ID NO: 538 - DNA, 25 bp, SARS Virus
tggctttccattctacctctcggaa

SEQ ID NO: 539 - DNA, 25 bp, SARS Virus
ggctttccattccacctctcggaac

SEQ ID NO: 540 - DNA, 25 bp, SARS Virus
gctttccattctccctctcggaaca

SEQ ID NO: 541 - DNA, 25 bp, SARS Virus
ctttccattctacctctcggaacaa

SEQ ID NO: 542 - DNA, 25 bp, SARS Virus
tttccattctacctctcggaacaag

SEQ ID NO: 543 - DNA, 25 bp, SARS Virus
ttccattctacccctcggaacaaga

SEQ ID NO: 544 - DNA, 25 bp, SARS Virus
tccattctacctctcggaacaagaa

SEQ ID NO: 545 - DNA, 25 bp, SARS Virus
ccattctacctcccggaacaagaac

SEQ ID NO: 546 - DNA, 25 bp, SARS Virus
cattctacctctcggaacaagaacc

SEQ ID NO: 547 - DNA, 25 bp, SARS Virus
attctacctctccgaacaagaacca

SEQ ID NO: 548 - DNA, 25 bp, SARS Virus
ttctacctctcgcaacaagaaccac

SEQ ID NO: 549 - DNA, 25 bp, SARS Virus
tctacctctcggcacaagaaccaca

SEQ ID NO: 550 - DNA, 25 bp, SARS Virus
ctacctctcggaccaagaaccacag

SEQ ID NO: 551 - DNA, 25 bp, SARS Virus
tacctctcggaacaagaaccacagt

SEQ ID NO: 552 - DNA, 25 bp, SARS Virus
acctctcggaaccagaaccacagtt

SEQ ID NO: 553 - DNA, 25 bp, SARS Virus
ttttttttttaagaatccaaaaatg

SEQ ID NO: 554 - DNA, 25 bp, SARS Virus
tttttttttaatgatccaaaaatgg

SEQ ID NO: 555 - DNA, 25 bp, SARS Virus
ttttttttaatagtccaaaaatgga

SEQ ID NO: 556 - DNA, 25 bp, SARS Virus
tttttttaataagccaaaaatggat

SEQ ID NO: 557 - DNA, 25 bp, SARS Virus
ttttttaataatgcaaaaatggatg

SEQ ID NO: 558 - DNA, 25 bp, SARS Virus
tttttaataatcgaaaaatggatgg

SEQ ID NO: 559 - DNA, 25 bp, SARS Virus
ttttaataatccgaaaatggatggg

SEQ ID NO: 560 - DNA, 25 bp, SARS Virus
tttaataatccagaaatggatgggt

SEQ ID NO: 561 - DNA, 25 bp, SARS Virus
ttaataatccaagaatggatgggtc

SEQ ID NO: 562 - DNA, 25 bp, SARS Virus
taataatccaaagatggatgggtcc

SEQ ID NO: 563 - DNA, 25 bp, SARS Virus
aataatccaaaagtggatgggtcct

SEQ ID NO: 564 - DNA, 25 bp, SARS Virus
ataatccaaaaagggatgggtcctt

SEQ ID NO: 565 - DNA, 25 bp, SARS Virus
taatccaaaaatggatgggtccttt

SEQ ID NO: 566 - DNA, 25 bp, SARS Virus
aatccaaaaatggatgggtcctttt

SEQ ID NO: 567 - DNA, 25 bp, SARS Virus
atccaaaaatgggtgggtccttttc

SEQ ID NO: 568 - DNA, 25 bp, SARS Virus
tccaaaaatggaggggtccttttcg

SEQ ID NO: 569 - DNA, 25 bp, SARS Virus
ccaaaaatggatgggtccttttcgg

SEQ ID NO: 570 - DNA, 25 bp, SARS Virus
caaaaatggatgggtccttttcggt

SEQ ID NO: 571 - DNA, 25 bp, SARS Virus
aaaaatggatgggtccttttcggtt

SEQ ID NO: 572 - DNA, 25 bp, SARS Virus
aaaatggatggggccttttcggttg

SEQ ID NO: 573 - DNA, 25 bp, SARS Virus
aaatggatgggtgcttttcggttgg

SEQ ID NO: 574 - DNA, 25 bp, SARS Virus
aatggatgggtcgttttcggttggt

SEQ ID NO: 575 - DNA, 25 bp, SARS Virus
atggatgggtccgtttcggttggtt

SEQ ID NO: 576 - DNA, 25 bp, SARS Virus
tggatgggtcctgttcggttggttg

SEQ ID NO: 577 - DNA, 25 bp, SARS Virus
ggatgggtccttgtcggttggttgg

SEQ ID NO: 578 - DNA, 25 bp, SARS Virus
gatgggtcctttgcggttggttgga

SEQ ID NO: 579 - DNA, 25 bp, SARS Virus
atgggtccttttgggttggttggag

SEQ ID NO: 580 - DNA, 25 bp, SARS Virus
tgggtccttttcggttggttggagc

SEQ ID NO: 581 - DNA, 25 bp, SARS Virus
gggtccttttcggttggttggagct

SEQ ID NO: 582 - DNA, 25 bp, SARS Virus
ggtccttttcgggtggttggagcta

SEQ ID NO: 583 - DNA, 25 bp, SARS Virus
gtccttttcggtgggttggagctag

SEQ ID NO: 584 - DNA, 25 bp, SARS Virus
tccttttcggttggttggagctaga

SEQ ID NO: 585 - DNA, 25 bp, SARS Virus
ccttttcggttggttggagctagag

SEQ ID NO: 586 - DNA, 25 bp, SARS Virus
cttttcggttgggtggagctagaga

SEQ ID NO: 587 - DNA, 25 bp, SARS Virus
ttttcggttggtgggagctagagaa

SEQ ID NO: 588 - DNA, 25 bp, SARS Virus
tttcggttggttggagctagagaac

SEQ ID NO: 589 - DNA, 25 bp, SARS Virus
ttcggttggttggagctagagaaca

SEQ ID NO: 590 - DNA, 25 bp, SARS Virus
tcggttggttggggctagagaacat

SEQ ID NO: 591 - DNA, 25 bp, SARS Virus
cggttggttggagctagagaacatc

SEQ ID NO: 592 - DNA, 25 bp, SARS Virus
ggttggttggaggtagagaacatct

SEQ ID NO: 593 - DNA, 25 bp, SARS Virus
gttggttggagcgagagaacatcta

SEQ ID NO: 594 - DNA, 25 bp, SARS Virus
ttggttggagctggagaacatctag

SEQ ID NO: 595 - DNA, 25 bp, SARS Virus
tggttggagctagagaacatctaga

SEQ ID NO: 596 - DNA, 25 bp, SARS Virus
ggttggagctagggaacatctagac

SEQ ID NO: 597 - DNA, 25 bp, SARS Virus
gttggagctagagaacatctagaca

SEQ ID NO: 598 - DNA, 25 bp, SARS Virus
ttggagctagaggacatctagacaa

SEQ ID NO: 599 - DNA, 25 bp, SARS Virus
tggagctagagagcatctagacaag

SEQ ID NO: 600 - DNA, 25 bp, SARS Virus
ggagctagagaagatctagacaaga

SEQ ID NO: 601 - DNA, 25 bp, SARS Virus
gagctagagaacgtctagacaagag

SEQ ID NO: 602 - DNA, 25 bp, SARS Virus
agctagagaacagctagacaagaga

SEQ ID NO: 603 - DNA, 25 bp, SARS Virus
gctagagaacatgtagacaagagat

SEQ ID NO: 604 - DNA, 25 bp, SARS Virus
ctagagaacatcgagacaagagatt

SEQ ID NO: 605 - DNA, 25 bp, SARS Virus
tagagaacatctggacaagagattt

SEQ ID NO: 606 - DNA, 25 bp, SARS Virus
agagaacatctagacaagagatttg

SEQ ID NO: 607 - DNA, 25 bp, SARS Virus
gagaacatctaggcaagagatttgc

SEQ ID NO: 608 - DNA, 25 bp, SARS Virus
agaacatctagagaagagatttgct

SEQ ID NO: 609 - DNA, 25 bp, SARS Virus
gaacatctagacgagagatttgctt

SEQ ID NO: 610 - DNA, 25 bp, SARS Virus
aacatctagacaggagatttgcttg

SEQ ID NO: 611 - DNA, 25 bp, SARS Virus
acatctagacaagagatttgcttga

SEQ ID NO: 612 - DNA, 25 bp, SARS Virus
catctagacaagggatttgcttgaa

SEQ ID NO: 613 - DNA, 25 bp, SARS Virus
atctagacaagagatttgcttgaaa

SEQ ID NO: 614 - DNA, 25 bp, SARS Virus
tctagacaagaggtttgcttgaaat

SEQ ID NO: 615 - DNA, 25 bp, SARS Virus
ctagacaagagagttgcttgaaatt

SEQ ID NO: 616 - DNA, 25 bp, SARS Virus
tagacaagagatgtgcttgaaattt

SEQ ID NO: 617 - DNA, 25 bp, SARS Virus
agacaagagattggcttgaaatttt

SEQ ID NO: 618 - DNA, 25 bp, SARS Virus
gacaagagatttgcttgaaatttta

SEQ ID NO: 619 - DNA, 25 bp, SARS Virus
acaagagatttggttgaaattttag

SEQ ID NO: 620 - DNA, 25 bp, SARS Virus
caagagatttgcgtgaaattttaga

SEQ ID NO: 621 - DNA, 25 bp, SARS Virus
aagagatttgctggaaattttagac

SEQ ID NO: 622 - DNA, 25 bp, SARS Virus
agagatttgcttgaaattttagaca

SEQ ID NO: 623 - DNA, 25 bp, SARS Virus
gagatttgcttggaattttagacac

SEQ ID NO: 624 - DNA, 25 bp, SARS Virus
agatttgcttgagattttagacaca

SEQ ID NO: 625 - DNA, 25 bp, SARS Virus
gatttgcttgaagttttagacacat

SEQ ID NO: 626 - DNA, 25 bp, SARS Virus
atttgcttgaaagtttagacacatc

SEQ ID NO: 627 - DNA, 25 bp, SARS Virus
tttgcttgaaatgttagacacatcg

SEQ ID NO: 628 - DNA, 25 bp, SARS Virus
ttgcttgaaattgtagacacatcga

SEQ ID NO: 629 - DNA, 25 bp, SARS Virus
tgcttgaaatttgagacacatcgac

SEQ ID NO: 630 - DNA, 25 bp, SARS Virus
gcttgaaattttggacacatcgaca

SEQ ID NO: 631 - DNA, 25 bp, SARS Virus
cttgaaattttagacacatcgacag

SEQ ID NO: 632 - DNA, 25 bp, SARS Virus
ttgaaattttaggcacatcgacagc

SEQ ID NO: 633 - DNA, 25 bp, SARS Virus
tgaaattttagagacatcgacagcg

SEQ ID NO: 634 - DNA, 25 bp, SARS Virus
gaaattttagacgcatcgacagcga

SEQ ID NO: 635 - DNA, 25 bp, SARS Virus
aaattttagacagatcgacagcgag

SEQ ID NO: 636 - DNA, 25 bp, SARS Virus
aattttagacacgtcgacagcgagc

SEQ ID NO: 637 - DNA, 25 bp, SARS Virus
attttagacacagcgacagcgagcc

SEQ ID NO: 638 - DNA, 25 bp, SARS Virus
ttttagacacatggacagcgagccg

SEQ ID NO: 639 - DNA, 25 bp, SARS Virus
tttagacacatcgacagcgagccga

SEQ ID NO: 640 - DNA, 25 bp, SARS Virus
ttagacacatcggcagcgagccgac

SEQ ID NO: 641 - DNA, 25 bp, SARS Virus
tagacacatcgagagcgagccgacg

SEQ ID NO: 642 - DNA, 25 bp, SARS Virus
agacacatcgacggcgagccgacgt

SEQ ID NO: 643 - DNA, 25 bp, SARS Virus
gacacatcgacagcgagccgacgta

SEQ ID NO: 644 - DNA, 25 bp, SARS Virus
acacatcgacagggagccgacgtac

SEQ ID NO: 645 - DNA, 25 bp, SARS Virus
cacatcgacagcgagccgacgtacg

SEQ ID NO: 646 - DNA, 25 bp, SARS Virus
acatcgacagcgggccgacgtacgg

SEQ ID NO: 647 - DNA, 25 bp, SARS Virus
catcgacagcgagccgacgtacgga

SEQ ID NO: 648 - DNA, 25 bp, SARS Virus
atcgacagcgaggcgacgtacggat

SEQ ID NO: 649 - DNA, 25 bp, SARS Virus
tcgacagcgagcggacgtacggatc

SEQ ID NO: 650 - DNA, 25 bp, SARS Virus
cgacagcgagccgacgtacggatca

SEQ ID NO: 651 - DNA, 25 bp, SARS Virus
gacagcgagccggcgtacggatcac

SEQ ID NO: 652 - DNA, 25 bp, SARS Virus
acagcgagccgaggtacggatcacg

SEQ ID NO: 653 - DNA, 25 bp, SARS Virus
cagcgagccgacgtacggatcacgt

SEQ ID NO: 654 - DNA, 25 bp, SARS Virus
agcgagccgacggacggatcacgtg

SEQ ID NO: 655 - DNA, 25 bp, SARS Virus
gcgagccgacgtgcggatcacgtgg

SEQ ID NO: 656 - DNA, 25 bp, SARS Virus
cgagccgacgtagggatcacgtgga

SEQ ID NO: 657 - DNA, 25 bp, SARS Virus
gagccgacgtacggatcacgtggat

SEQ ID NO: 658 - DNA, 25 bp, SARS Virus
agccgacgtacggatcacgtggatg

SEQ ID NO: 659 - DNA, 25 bp, SARS Virus
gccgacgtacgggtcacgtggatgc

SEQ ID NO: 660 - DNA, 25 bp, SARS Virus
ccgacgtacggagcacgtggatgcg

SEQ ID NO: 661 - DNA, 25 bp, SARS Virus
cgacgtacggatgacgtggatgcgt

SEQ ID NO: 662 - DNA, 25 bp, SARS Virus
gacgtacggatcgcgtggatgcgtc

SEQ ID NO: 663 - DNA, 25 bp, SARS Virus
acgtacggatcaggtggatgcgtca

SEQ ID NO: 664 - DNA, 25 bp, SARS Virus
cgtacggatcacgtggatgcgtcat

SEQ ID NO: 665 - DNA, 25 bp, SARS Virus
gtacggatcacggggatgcgtcata

SEQ ID NO: 666 - DNA, 25 bp, SARS Virus
tacggatcacgtggatgcgtcatat

SEQ ID NO: 667 - DNA, 25 bp, SARS Virus
acggatcacgtggatgcgtcatatt

SEQ ID NO: 668 - DNA, 25 bp, SARS Virus
cggatcacgtgggtgcgtcatattt

SEQ ID NO: 669 - DNA, 25 bp, SARS Virus
ggatcacgtggaggcgtcatatttg

SEQ ID NO: 670 - DNA, 25 bp, SARS Virus
gatcacgtggatgcgtcatatttgt

SEQ ID NO: 671 - DNA, 25 bp, SARS Virus
atcacgtggatgggtcatatttgtt

SEQ ID NO: 672 - DNA, 25 bp, SARS Virus
tcacgtggatgcgtcatatttgtta

SEQ ID NO: 673 - DNA, 25 bp, SARS Virus
cacgtggatgcggcatatttgttat

SEQ ID NO: 674 - DNA, 25 bp, SARS Virus
acgtggatgcgtgatatttgttatt

SEQ ID NO: 675 - DNA, 25 bp, SARS Virus
cgtggatgcgtcgtatttgttatta

SEQ ID NO: 676 - DNA, 25 bp, SARS Virus
gtggatgcgtcagatttgttattat

SEQ ID NO: 677 - DNA, 25 bp, SARS Virus
tggatgcgtcatgtttgttattatt

SEQ ID NO: 678 - DNA, 25 bp, SARS Virus
ggatgcgtcatagttgttattattt

SEQ ID NO: 679 - DNA, 25 bp, SARS Virus
gatgcgtcatatgtgttattattta

SEQ ID NO: 680 - DNA, 25 bp, SARS Virus
atgcgtcatattggttattatttaa

SEQ ID NO: 681 - DNA, 25 bp, SARS Virus
tgcgtcatatttgttattatttaaa

SEQ ID NO: 682 - DNA, 25 bp, SARS Virus
gcgtcatatttggtattatttaaaa

SEQ ID NO: 683 - DNA, 25 bp, SARS Virus
cgtcatatttgtgattatttaaaat

SEQ ID NO: 684 - DNA, 25 bp, SARS Virus
gtcatatttgttgttatttaaaatg

SEQ ID NO: 685 - DNA, 25 bp, SARS Virus
tcatatttgttagtatttaaaatga

SEQ ID NO: 686 - DNA, 25 bp, SARS Virus
catatttgttatgatttaaaatgac

SEQ ID NO: 687 - DNA, 25 bp, SARS Virus
atatttgttattgtttaaaatgaca

SEQ ID NO: 688 - DNA, 25 bp, SARS Virus
tatttgttattagttaaaatgacag

SEQ ID NO: 689 - DNA, 25 bp, SARS Virus
atttgttattatgtaaaatgacagc

SEQ ID NO: 690 - DNA, 25 bp, SARS Virus
tttgttattattgaaaatgacagca

SEQ ID NO: 691 - DNA, 25 bp, SARS Virus
ttgttattatttgaaatgacagcaa

SEQ ID NO: 692 - DNA, 25 bp, SARS Virus
tgttattatttagaatgacagcaac

SEQ ID NO: 693 - DNA, 25 bp, SARS Virus
gttattatttaagatgacagcaact

SEQ ID NO: 694 - DNA, 25 bp, SARS Virus
ttattatttaaagtgacagcaactg

SEQ ID NO: 695 - DNA, 25 bp, SARS Virus
tattatttaaaaggacagcaactgt

SEQ ID NO: 696 - DNA, 25 bp, SARS Virus
attatttaaaatgacagcaactgtt

SEQ ID NO: 697 - DNA, 25 bp, SARS Virus
ttatttaaaatggcagcaactgttc

SEQ ID NO: 698 - DNA, 25 bp, SARS Virus
tatttaaaatgagagcaactgttct

SEQ ID NO: 699 - DNA, 25 bp, SARS Virus
atttaaaatgacggcaactgttctt

SEQ ID NO: 700 - DNA, 25 bp, SARS Virus
tttaaaatgacagcaactgttcttt

SEQ ID NO: 701 - DNA, 25 bp, SARS Virus
ttaaaatgacaggaactgttctttg

SEQ ID NO: 702 - DNA, 25 bp, SARS Virus
taaaatgacagcgactgttctttgc

SEQ ID NO: 703 - DNA, 25 bp, SARS Virus
aaaatgacagcagctgttctttgct

SEQ ID NO: 704 - DNA, 25 bp, SARS Virus
aaatgacagcaagtgttctttgctc

SEQ ID NO: 705 - DNA, 25 bp, SARS Virus
aatgacagcaacggttctttgctca

SEQ ID NO: 706 - DNA, 25 bp, SARS Virus
atgacagcaactgttctttgctcat

SEQ ID NO: 707 - DNA, 25 bp, SARS Virus
tgacagcaactggtctttgctcatt

SEQ ID NO: 708 - DNA, 25 bp, SARS Virus
gacagcaactgtgctttgctcattg

SEQ ID NO: 709 - DNA, 25 bp, SARS Virus
acagcaactgttgtttgctcattga

SEQ ID NO: 710 - DNA, 25 bp, SARS Virus
cagcaactgttcgttgctcattgag

SEQ ID NO: 711 - DNA, 25 bp, SARS Virus
agcaactgttctgtgctcattgagc

SEQ ID NO: 712 - DNA, 25 bp, SARS Virus
gcaactgttcttggctcattgagca

SEQ ID NO: 713 - DNA, 25 bp, SARS Virus
caactgttctttgctcattgagcag

SEQ ID NO: 714 - DNA, 25 bp, SARS Virus
aactgttctttggtcattgagcagg

SEQ ID NO: 715 - DNA, 25 bp, SARS Virus
actgttctttgcgcattgagcaggg

SEQ ID NO: 716 - DNA, 25 bp, SARS Virus
ctgttctttgctgattgagcaggga

SEQ ID NO: 717 - DNA, 25 bp, SARS Virus
tgttctttgctcgttgagcagggag

SEQ ID NO: 718 - DNA, 25 bp, SARS Virus
gttctttgctcagtgagcagggaga

SEQ ID NO: 719 - DNA, 25 bp, SARS Virus
ttctttgctcatggagcagggagaa

SEQ ID NO: 720 - DNA, 25 bp, SARS Virus
tctttgctcattgagcagggagaag

SEQ ID NO: 721 - DNA, 25 bp, SARS Virus
ctttgctcattgggcagggagaaga

SEQ ID NO: 722 - DNA, 25 bp, SARS Virus
tttgctcattgagcagggagaagac

SEQ ID NO: 723 - DNA, 25 bp, SARS Virus
ttgctcattgaggagggagaagacg

SEQ ID NO: 724 - DNA, 25 bp, SARS Virus
tgctcattgagcggggagaagacgt

SEQ ID NO: 725 - DNA, 25 bp, SARS Virus
gctcattgagcagggagaagacgtc

SEQ ID NO: 726 - DNA, 25 bp, SARS Virus
ctcattgagcagggagaagacgtct

SEQ ID NO: 727 - DNA, 25 bp, SARS Virus
tcattgagcagggagaagacgtctg

SEQ ID NO: 728 - DNA, 25 bp, SARS Virus
cattgagcagggggaagacgtctga

SEQ ID NO: 729 - DNA, 25 bp, SARS Virus
attgagcagggagaagacgtctgac

SEQ ID NO: 730 - DNA, 25 bp, SARS Virus
ttgagcagggaggagacgtctgacg

SEQ ID NO: 731 - DNA, 25 bp, SARS Virus
tgagcagggagaggacgtctgacga

SEQ ID NO: 732 - DNA, 25 bp, SARS Virus
gagcagggagaagacgtctgacgaa

SEQ ID NO: 733 - DNA, 25 bp, SARS Virus
agcagggagaaggcgtctgacgaat

SEQ ID NO: 734 - DNA, 25 bp, SARS Virus
gcagggagaagaggtctgacgaatg

SEQ ID NO: 735 - DNA, 25 bp, SARS Virus
cagggagaagacgtctgacgaatgc

SEQ ID NO: 736 - DNA, 25 bp, SARS Virus
agggagaagacggctgacgaatgcc

SEQ ID NO: 737 - DNA, 25 bp, SARS Virus
gggagaagacgtgtgacgaatgcca

SEQ ID NO: 738 - DNA, 25 bp, SARS Virus
ggagaagacgtcggacgaatgccaa

SEQ ID NO: 739 - DNA, 25 bp, SARS Virus
gagaagacgtctgacgaatgccaaa

SEQ ID NO: 740 - DNA, 25 bp, SARS Virus
agaagacgtctggcgaatgccaaag

SEQ ID NO: 741 - DNA, 25 bp, SARS Virus
gaagacgtctgaggaatgccaaagc

SEQ ID NO: 742 - DNA, 25 bp, SARS Virus
aagacgtctgacgaatgccaaagca

SEQ ID NO: 743 - DNA, 25 bp, SARS Virus
agacgtctgacggatgccaaagcag

SEQ ID NO: 744 - DNA, 25 bp, SARS Virus
gacgtctgacgagtgccaaagcagg

SEQ ID NO: 745 - DNA, 25 bp, SARS Virus
acgtctgacgaaggccaaagcaggc

SEQ ID NO: 746 - DNA, 25 bp, SARS Virus
cgtctgacgaatgccaaagcaggca

SEQ ID NO: 747 - DNA, 25 bp, SARS Virus
gtctgacgaatggcaaagcaggcac

SEQ ID NO: 748 - DNA, 25 bp, SARS Virus
tctgacgaatgcgaaagcaggcaca

SEQ ID NO: 749 - DNA, 25 bp, SARS Virus
ctgacgaatgccgaagcaggcacaa

SEQ ID NO: 750 - DNA, 25 bp, SARS Virus
tgacgaatgccagagcaggcacaac

SEQ ID NO: 751 - DNA, 25 bp, SARS Virus
gacgaatgccaaggcaggcacaacg

SEQ ID NO: 752 - DNA, 25 bp, SARS Virus
acgaatgccaaagcaggcacaacgt

SEQ ID NO: 753 - DNA, 25 bp, SARS Virus
cgaatgccaaaggaggcacaacgtc

SEQ ID NO: 754 - DNA, 25 bp, SARS Virus
gaatgccaaagcgggcacaacgtca

SEQ ID NO: 755 - DNA, 25 bp, SARS Virus
aatgccaaagcaggcacaacgtcag

SEQ ID NO: 756 - DNA, 25 bp, SARS Virus
atgccaaagcaggcacaacgtcagc

SEQ ID NO: 757 - DNA, 25 bp, SARS Virus
tgccaaagcagggacaacgtcagct

SEQ ID NO: 758 - DNA, 25 bp, SARS Virus
gccaaagcaggcgcaacgtcagcta

SEQ ID NO: 759 - DNA, 25 bp, SARS Virus
ccaaagcaggcagaacgtcagctag

SEQ ID NO: 760 - DNA, 25 bp, SARS Virus
caaagcaggcacgacgtcagctagt

SEQ ID NO: 761 - DNA, 25 bp, SARS Virus
aaagcaggcacagcgtcagctagta

SEQ ID NO: 762 - DNA, 25 bp, SARS Virus
aagcaggcacaaggtcagctagtag

SEQ ID NO: 763 - DNA, 25 bp, SARS Virus
agcaggcacaacgtcagctagtagt

SEQ ID NO: 764 - DNA, 25 bp, SARS Virus
gcaggcacaacggcagctagtagtc

SEQ ID NO: 765 - DNA, 25 bp, SARS Virus
caggcacaacgtgagctagtagtcg

SEQ ID NO: 766 - DNA, 25 bp, SARS Virus
aggcacaacgtcggctagtagtcgt

SEQ ID NO: 767 - DNA, 25 bp, SARS Virus
ggcacaacgtcagctagtagtcgta

SEQ ID NO: 768 - DNA, 25 bp, SARS Virus
gcacaacgtcaggtagtagtcgtat

SEQ ID NO: 769 - DNA, 25 bp, SARS Virus
cacaacgtcagcgagtagtcgtatg

SEQ ID NO: 770 - DNA, 25 bp, SARS Virus
acaacgtcagctggtagtcgtatgg

SEQ ID NO: 771 - DNA, 25 bp, SARS Virus
caacgtcagctagtagtcgtatgga

SEQ ID NO: 772 - DNA, 25 bp, SARS Virus
aacgtcagctaggagtcgtatggat

SEQ ID NO: 773 - DNA, 25 bp, SARS Virus
acgtcagctagtggtcgtatggatc

SEQ ID NO: 774 - DNA, 25 bp, SARS Virus
cgtcagctagtagtcgtatggatcc

SEQ ID NO: 775 - DNA, 25 bp, SARS Virus
gtcagctagtaggcgtatggatcca

SEQ ID NO: 776 - DNA, 25 bp, SARS Virus
tcagctagtagtggtatggatccaa

SEQ ID NO: 777 - DNA, 25 bp, SARS Virus
cagctagtagtcgtatggatccaaa

SEQ ID NO: 778 - DNA, 25 bp, SARS Virus
agctagtagtcggatggatccaaag

SEQ ID NO: 779 - DNA, 25 bp, SARS Virus
gctagtagtcgtgtggatccaaagc

SEQ ID NO: 780 - DNA, 25 bp, SARS Virus
ctagtagtcgtagggatccaaagca

SEQ ID NO: 781 - DNA, 25 bp, SARS Virus
tagtagtcgtatggatccaaagcag

SEQ ID NO: 782 - DNA, 25 bp, SARS Virus
agtagtcgtatggatccaaagcagg

SEQ ID NO: 783 - DNA, 25 bp, SARS Virus
gtagtcgtatgggtccaaagcaggc

SEQ ID NO: 784 - DNA, 25 bp, SARS Virus
tagtcgtatggagccaaagcaggcc

SEQ ID NO: 785 - DNA, 25 bp, SARS Virus
agtcgtatggatgcaaagcaggccc

SEQ ID NO: 786 - DNA, 25 bp, SARS Virus
gtcgtatggatcgaaagcaggccca

SEQ ID NO: 787 - DNA, 25 bp, SARS Virus
tcgtatggatccgaagcaggcccac

SEQ ID NO: 788 - DNA, 25 bp, SARS Virus
cgtatggatccagagcaggcccaca

SEQ ID NO: 789 - DNA, 25 bp, SARS Virus
gtatggatccaaggcaggcccacac

SEQ ID NO: 790 - DNA, 25 bp, SARS Virus
tatggatccaaagcaggcccacact

SEQ ID NO: 791 - DNA, 25 bp, SARS Virus
atggatccaaaggaggcccacactg

SEQ ID NO: 792 - DNA, 25 bp, SARS Virus
tggatccaaagcgggcccacactgg

SEQ ID NO: 793 - DNA, 25 bp, SARS Virus
ggatccaaagcaggcccacactggc

SEQ ID NO: 794 - DNA, 25 bp, SARS Virus
gatccaaagcaggcccacactggct

SEQ ID NO: 795 - DNA, 25 bp, SARS Virus
atccaaagcagggccacactggctt

SEQ ID NO: 796 - DNA, 25 bp, SARS Virus
tccaaagcaggcgcacactggcttt

SEQ ID NO: 797 - DNA, 25 bp, SARS Virus
ccaaagcaggccgacactggctttc

SEQ ID NO: 798 - DNA, 25 bp, SARS Virus
caaagcaggcccgcactggctttcc

SEQ ID NO: 799 - DNA, 25 bp, SARS Virus
aaagcaggcccagactggctttcca

SEQ ID NO: 800 - DNA, 25 bp, SARS Virus
aagcaggcccacgctggctttccat

SEQ ID NO: 801 - DNA, 25 bp, SARS Virus
agcaggcccacagtggctttccatt

SEQ ID NO: 802 - DNA, 25 bp, SARS Virus
gcaggcccacacgggctttccattc

SEQ ID NO: 803 - DNA, 25 bp, SARS Virus
caggcccacactggctttccattct

SEQ ID NO: 804 - DNA, 25 bp, SARS Virus
aggcccacactggctttccattcta

SEQ ID NO: 805 - DNA, 25 bp, SARS Virus
ggcccacactgggtttccattctac

SEQ ID NO: 806 - DNA, 25 bp, SARS Virus
gcccacactggcgttccattctacc

SEQ ID NO: 807 - DNA, 25 bp, SARS Virus
cccacactggctgtccattctacct

SEQ ID NO: 808 - DNA, 25 bp, SARS Virus
ccacactggcttgccattctacctc

SEQ ID NO: 809 - DNA, 25 bp, SARS Virus
cacactggctttgcattctacctct

SEQ ID NO: 810 - DNA, 25 bp, SARS Virus
acactggctttcgattctacctctc

SEQ ID NO: 811 - DNA, 25 bp, SARS Virus
cactggctttccgttctacctctcg

SEQ ID NO: 812 - DNA, 25 bp, SARS Virus
actggctttccagtctacctctcgg

SEQ ID NO: 813 - DNA, 25 bp, SARS Virus
ctggctttccatgctacctctcgga

SEQ ID NO: 814 - DNA, 25 bp, SARS Virus
tggctttccattgtacctctcggaa

SEQ ID NO: 815 - DNA, 25 bp, SARS Virus
ggctttccattcgacctctcggaac

SEQ ID NO: 816 - DNA, 25 bp, SARS Virus
gctttccattctgcctctcggaaca

SEQ ID NO: 817 - DNA, 25 bp, SARS Virus
ctttccattctagctctcggaacaa

SEQ ID NO: 818 - DNA, 25 bp, SARS Virus
tttccattctacgtctcggaacaag

SEQ ID NO: 819 - DNA, 25 bp, SARS Virus
ttccattctaccgctcggaacaaga

SEQ ID NO: 820 - DNA, 25 bp, SARS Virus
tccattctacctgtcggaacaagaa

SEQ ID NO: 821 - DNA, 25 bp, SARS Virus
ccattctacctcgcggaacaagaac

SEQ ID NO: 822 - DNA, 25 bp, SARS Virus
cattctacctctgggaacaagaacc

SEQ ID NO: 823 - DNA, 25 bp, SARS Virus
attctacctctcggaacaagaacca

SEQ ID NO: 824 - DNA, 25 bp, SARS Virus
ttctacctctcggaacaagaaccac

SEQ ID NO: 825 - DNA, 25 bp, SARS Virus
tctacctctcgggacaagaaccaca

SEQ ID NO: 826 - DNA, 25 bp, SARS Virus
ctacctctcggagcaagaaccacag

SEQ ID NO: 827 - DNA, 25 bp, SARS Virus
tacctctcggaagaagaaccacagt

SEQ ID NO: 828 - DNA, 25 bp, SARS Virus
acctctcggaacgagaaccacagtt

SEQ ID NO: 829 - DNA, 25 bp, SARS Virus
ttttttttttaataatccaaaaatg

SEQ ID NO: 830 - DNA, 25 bp, SARS Virus
tttttttttaattatccaaaaatgg

SEQ ID NO: 831 - DNA, 25 bp, SARS Virus
ttttttttaatattccaaaaatgga

SEQ ID NO: 832 - DNA, 25 bp, SARS Virus
tttttttaataatccaaaaatggat

SEQ ID NO: 833 - DNA, 25 bp, SARS Virus
ttttttaataattcaaaaatggatg

SEQ ID NO: 834 - DNA, 25 bp, SARS Virus
tttttaataatctaaaaatggatgg

SEQ ID NO: 835 - DNA, 25 bp, SARS Virus
ttttaataatcctaaaatggatggg

SEQ ID NO: 836 - DNA, 25 bp, SARS Virus
tttaataatccataaatggatgggt

SEQ ID NO: 837 - DNA, 25 bp, SARS Virus
ttaataatccaataatggatgggtc

SEQ ID NO: 838 - DNA, 25 bp, SARS Virus
taataatccaaatatggatgggtcc

SEQ ID NO: 839 - DNA, 25 bp, SARS Virus
aataatccaaaattggatgggtcct

SEQ ID NO: 840 - DNA, 25 bp, SARS Virus
ataatccaaaaatggatgggtcctt

SEQ ID NO: 841 - DNA, 25 bp, SARS Virus
taatccaaaaattgatgggtccttt

SEQ ID NO: 842 - DNA, 25 bp, SARS Virus
aatccaaaaatgtatgggtcctttt

SEQ ID NO: 843 - DNA, 25 bp, SARS Virus
atccaaaaatggttgggtccttttc

SEQ ID NO: 844 - DNA, 25 bp, SARS Virus
tccaaaaatggatgggtccttttcg

SEQ ID NO: 845 - DNA, 25 bp, SARS Virus
ccaaaaatggattggtccttttcgg

SEQ ID NO: 846 - DNA, 25 bp, SARS Virus
caaaaatggatgtgtccttttcggt

SEQ ID NO: 847 - DNA, 25 bp, SARS Virus
aaaaatggatggttccttttcggtt

SEQ ID NO: 848 - DNA, 25 bp, SARS Virus
aaaatggatgggtccttttcggttg

SEQ ID NO: 849 - DNA, 25 bp, SARS Virus
aaatggatgggttcttttcggttgg

SEQ ID NO: 850 - DNA, 25 bp, SARS Virus
aatggatgggtctttttcggttggt

SEQ ID NO: 851 - DNA, 25 bp, SARS Virus
atggatgggtccttttcggttggtt

SEQ ID NO: 852 - DNA, 25 bp, SARS Virus
tggatgggtccttttcggttggttg

SEQ ID NO: 853 - DNA, 25 bp, SARS Virus
ggatgggtccttttcggttggttgg

SEQ ID NO: 854 - DNA, 25 bp, SARS Virus
gatgggtccttttcggttggttgga

SEQ ID NO: 855 - DNA, 25 bp, SARS Virus
atgggtcctttttggttggttggag

SEQ ID NO: 856 - DNA, 25 bp, SARS Virus
tgggtccttttctgttggttggagc

SEQ ID NO: 857 - DNA, 25 bp, SARS Virus
gggtccttttcgtttggttggagct

SEQ ID NO: 858 - DNA, 25 bp, SARS Virus
ggtccttttcggttggttggagcta

SEQ ID NO: 859 - DNA, 25 bp, SARS Virus
gtccttttcggttggttggagctag

SEQ ID NO: 860 - DNA, 25 bp, SARS Virus
tccttttcggtttgttggagctaga

SEQ ID NO: 861 - DNA, 25 bp, SARS Virus
ccttttcggttgtttggagctagag

SEQ ID NO: 862 - DNA, 25 bp, SARS Virus
cttttcggttggttggagctagaga

SEQ ID NO: 863 - DNA, 25 bp, SARS Virus
ttttcggttggttggagctagagaa

SEQ ID NO: 864 - DNA, 25 bp, SARS Virus
tttcggttggtttgagctagagaac

SEQ ID NO: 865 - DNA, 25 bp, SARS Virus
ttcggttggttgtagctagagaaca

SEQ ID NO: 866 - DNA, 25 bp, SARS Virus
tcggttggttggtgctagagaacat

SEQ ID NO: 867 - DNA, 25 bp, SARS Virus
cggttggttggatctagagaacatc

SEQ ID NO: 868 - DNA, 25 bp, SARS Virus
ggttggttggagttagagaacatct

SEQ ID NO: 869 - DNA, 25 bp, SARS Virus
gttggttggagctagagaacatcta

SEQ ID NO: 870 - DNA, 25 bp, SARS Virus
ttggttggagcttgagaacatctag

SEQ ID NO: 871 - DNA, 25 bp, SARS Virus
tggttggagctatagaacatctaga

SEQ ID NO: 872 - DNA, 25 bp, SARS Virus
ggttggagctagtgaacatctagac

SEQ ID NO: 873 - DNA, 25 bp, SARS Virus
gttggagctagataacatctagaca

SEQ ID NO: 874 - DNA, 25 bp, SARS Virus
ttggagctagagtacatctagacaa

SEQ ID NO: 875 - DNA, 25 bp, SARS Virus
tggagctagagatcatctagacaag

SEQ ID NO: 876 - DNA, 25 bp, SARS Virus
ggagctagagaatatctagacaaga

SEQ ID NO: 877 - DNA, 25 bp, SARS Virus
gagctagagaacttctagacaagag

SEQ ID NO: 878 - DNA, 25 bp, SARS Virus
agctagagaacatctagacaagaga

SEQ ID NO: 879 - DNA, 25 bp, SARS Virus
gctagagaacatttagacaagagat

SEQ ID NO: 880 - DNA, 25 bp, SARS Virus
ctagagaacatctagacaagagatt

SEQ ID NO: 881 - DNA, 25 bp, SARS Virus
tagagaacatcttgacaagagattt

SEQ ID NO: 882 - DNA, 25 bp, SARS Virus
agagaacatctatacaagagatttg

SEQ ID NO: 883 - DNA, 25 bp, SARS Virus
gagaacatctagtcaagagatttgc

SEQ ID NO: 884 - DNA, 25 bp, SARS Virus
agaacatctagataagagatttgct

SEQ ID NO: 885 - DNA, 25 bp, SARS Virus
gaacatctagactagagatttgctt

SEQ ID NO: 886 - DNA, 25 bp, SARS Virus
aacatctagacatgagatttgcttg

SEQ ID NO: 887 - DNA, 25 bp, SARS Virus
acatctagacaatagatttgcttga

SEQ ID NO: 888 - DNA, 25 bp, SARS Virus
catctagacaagtgatttgcttgaa

SEQ ID NO: 889 - DNA, 25 bp, SARS Virus
atctagacaagatatttgcttgaaa

SEQ ID NO: 890 - DNA, 25 bp, SARS Virus
tctagacaagagttttgcttgaaat

SEQ ID NO: 891 - DNA, 25 bp, SARS Virus
ctagacaagagatttgcttgaaatt

SEQ ID NO: 892 - DNA, 25 bp, SARS Virus
tagacaagagatttgcttgaaattt

SEQ ID NO: 893 - DNA, 25 bp, SARS Virus
agacaagagatttgcttgaaatttt

SEQ ID NO: 894 - DNA, 25 bp, SARS Virus
gacaagagattttcttgaaatttta

SEQ ID NO: 895 - DNA, 25 bp, SARS Virus
acaagagatttgtttgaaattttag

SEQ ID NO: 896 - DNA, 25 bp, SARS Virus
caagagatttgcttgaaattttaga

SEQ ID NO: 897 - DNA, 25 bp, SARS Virus
aagagatttgcttgaaattttagac

SEQ ID NO: 898 - DNA, 25 bp, SARS Virus
agagatttgctttaaattttagaca

SEQ ID NO: 899 - DNA, 25 bp, SARS Virus
gagatttgcttgtaattttagacac

SEQ ID NO: 900 - DNA, 25 bp, SARS Virus
agatttgcttgatattttagacaca

SEQ ID NO: 901 - DNA, 25 bp, SARS Virus
gatttgcttgaatttttagacacat

SEQ ID NO: 902 - DNA, 25 bp, SARS Virus
atttgcttgaaattttagacacatc

SEQ ID NO: 903 - DNA, 25 bp, SARS Virus
tttgcttgaaattttagacacatcg

SEQ ID NO: 904 - DNA, 25 bp, SARS Virus
ttgcttgaaattttagacacatcga

SEQ ID NO: 905 - DNA, 25 bp, SARS Virus
tgcttgaaattttagacacatcgac

SEQ ID NO: 906 - DNA, 25 bp, SARS Virus
gcttgaaatttttgacacatcgaca

SEQ ID NO: 907 - DNA, 25 bp, SARS Virus
cttgaaattttatacacatcgacag

SEQ ID NO: 908 - DNA, 25 bp, SARS Virus
ttgaaattttagtcacatcgacagc

SEQ ID NO: 909 - DNA, 25 bp, SARS Virus
tgaaattttagatacatcgacagcg

SEQ ID NO: 910 - DNA, 25 bp, SARS Virus
gaaattttagactcatcgacagcga

SEQ ID NO: 911 - DNA, 25 bp, SARS Virus
aaattttagacatatcgacagcgag

SEQ ID NO: 912 - DNA, 25 bp, SARS Virus
aattttagacacttcgacagcgagc

SEQ ID NO: 913 - DNA, 25 bp, SARS Virus
attttagacacatcgacagcgagcc

SEQ ID NO: 914 - DNA, 25 bp, SARS Virus
ttttagacacattgacagcgagccg

SEQ ID NO: 915 - DNA, 25 bp, SARS Virus
tttagacacatctacagcgagccga

SEQ ID NO: 916 - DNA, 25 bp, SARS Virus
ttagacacatcgtcagcgagccgac

SEQ ID NO: 917 - DNA, 25 bp, SARS Virus
tagacacatcgatagcgagccgacg

SEQ ID NO: 918 - DNA, 25 bp, SARS Virus
agacacatcgactgcgagccgacgt

SEQ ID NO: 919 - DNA, 25 bp, SARS Virus
gacacatcgacatcgagccgacgta

SEQ ID NO: 920 - DNA, 25 bp, SARS Virus
acacatcgacagtgagccgacgtac

SEQ ID NO: 921 - DNA, 25 bp, SARS Virus
cacatcgacagctagccgacgtacg

SEQ ID NO: 922 - DNA, 25 bp, SARS Virus
acatcgacagcgtgccgacgtacgg

SEQ ID NO: 923 - DNA, 25 bp, SARS Virus
catcgacagcgatccgacgtacgga

SEQ ID NO: 924 - DNA, 25 bp, SARS Virus
atcgacagcgagtcgacgtacggat

SEQ ID NO: 925 - DNA, 25 bp, SARS Virus
tcgacagcgagctgacgtacggatc

SEQ ID NO: 926 - DNA, 25 bp, SARS Virus
cgacagcgagcctacgtacggatca

SEQ ID NO: 927 - DNA, 25 bp, SARS Virus
gacagcgagccgtcgtacggatcac

SEQ ID NO: 928 - DNA, 25 bp, SARS Virus
acagcgagccgatgtacggatcacg

SEQ ID NO: 929 - DNA, 25 bp, SARS Virus
cagcgagccgacttacggatcacgt

SEQ ID NO: 930 - DNA, 25 bp, SARS Virus
agcgagccgacgtacggatcacgtg

SEQ ID NO: 931 - DNA, 25 bp, SARS Virus
gcgagccgacgttcggatcacgtgg

SEQ ID NO: 932 - DNA, 25 bp, SARS Virus
cgagccgacgtatggatcacgtgga

SEQ ID NO: 933 - DNA, 25 bp, SARS Virus
gagccgacgtactgatcacgtggat

SEQ ID NO: 934 - DNA, 25 bp, SARS Virus
agccgacgtacgtatcacgtggatg

SEQ ID NO: 935 - DNA, 25 bp, SARS Virus
gccgacgtacggttcacgtggatgc

SEQ ID NO: 936 - DNA, 25 bp, SARS Virus
ccgacgtacggatcacgtggatgcg

SEQ ID NO: 937 - DNA, 25 bp, SARS Virus
cgacgtacggattacgtggatgcgt

SEQ ID NO: 938 - DNA, 25 bp, SARS Virus
gacgtacggatctcgtggatgcgtc

SEQ ID NO: 939 - DNA, 25 bp, SARS Virus
acgtacggatcatgtggatgcgtca

SEQ ID NO: 940 - DNA, 25 bp, SARS Virus
cgtacggatcacttggatgcgtcat

SEQ ID NO: 941 - DNA, 25 bp, SARS Virus
gtacggatcacgtggatgcgtcata

SEQ ID NO: 942 - DNA, 25 bp, SARS Virus
tacggatcacgttgatgcgtcatat

SEQ ID NO: 943 - DNA, 25 bp, SARS Virus
acggatcacgtgtatgcgtcatatt

SEQ ID NO: 944 - DNA, 25 bp, SARS Virus
cggatcacgtggttgcgtcatattt

SEQ ID NO: 945 - DNA, 25 bp, SARS Virus
ggatcacgtggatgcgtcatatttg

SEQ ID NO: 946 - DNA, 25 bp, SARS Virus
gatcacgtggattcgtcatatttgt

SEQ ID NO: 947 - DNA, 25 bp, SARS Virus
atcacgtggatgtgtcatatttgtt

SEQ ID NO: 948 - DNA, 25 bp, SARS Virus
tcacgtggatgcttcatatttgtta

SEQ ID NO: 949 - DNA, 25 bp, SARS Virus
cacgtggatgcgtcatatttgttat

SEQ ID NO: 950 - DNA, 25 bp, SARS Virus
acgtggatgcgttatatttgttatt

SEQ ID NO: 951 - DNA, 25 bp, SARS Virus
cgtggatgcgtcttatttgttatta

SEQ ID NO: 952 - DNA, 25 bp, SARS Virus
gtggatgcgtcatatttgttattat

SEQ ID NO: 953 - DNA, 25 bp, SARS Virus
tggatgcgtcatttttgttattatt

SEQ ID NO: 954 - DNA, 25 bp, SARS Virus
ggatgcgtcatatttgttattattt

SEQ ID NO: 955 - DNA, 25 bp, SARS Virus
gatgcgtcatatttgttattattta

SEQ ID NO: 956 - DNA, 25 bp, SARS Virus
atgcgtcatatttgttattatttaa

SEQ ID NO: 957 - DNA, 25 bp, SARS Virus
tgcgtcatattttttattatttaaa

SEQ ID NO: 958 - DNA, 25 bp, SARS Virus
gcgtcatatttgttattatttaaaa

SEQ ID NO: 959 - DNA, 25 bp, SARS Virus
cgtcatatttgttattatttaaaat

SEQ ID NO: 960 - DNA, 25 bp, SARS Virus
gtcatatttgtttttatttaaaatg

SEQ ID NO: 961 - DNA, 25 bp, SARS Virus
tcatatttgttattatttaaaatga

SEQ ID NO: 962 - DNA, 25 bp, SARS Virus
catatttgttattatttaaaatgac

SEQ ID NO: 963 - DNA, 25 bp, SARS Virus
atatttgttattttttaaaatgaca

SEQ ID NO: 964 - DNA, 25 bp, SARS Virus
tatttgttattatttaaaatgacag

SEQ ID NO: 965 - DNA, 25 bp, SARS Virus
atttgttattatttaaaatgacagc

SEQ ID NO: 966 - DNA, 25 bp, SARS Virus
tttgttattatttaaaatgacagca

SEQ ID NO: 967 - DNA, 25 bp, SARS Virus
ttgttattattttaaatgacagcaa

SEQ ID NO: 968 - DNA, 25 bp, SARS Virus
tgttattatttataatgacagcaac

SEQ ID NO: 969 - DNA, 25 bp, SARS Virus
gttattatttaatatgacagcaact

SEQ ID NO: 970 - DNA, 25 bp, SARS Virus
ttattatttaaattgacagcaactg

SEQ ID NO: 971 - DNA, 25 bp, SARS Virus
tattatttaaaatgacagcaactgt

SEQ ID NO: 972 - DNA, 25 bp, SARS Virus
attatttaaaattacagcaactgtt

SEQ ID NO: 973 - DNA, 25 bp, SARS Virus
ttatttaaaatgtcagcaactgttc

SEQ ID NO: 974 - DNA, 25 bp, SARS Virus
tatttaaaatgatagcaactgttct

SEQ ID NO: 975 - DNA, 25 bp, SARS Virus
atttaaaatgactgcaactgttctt

SEQ ID NO: 976 - DNA, 25 bp, SARS Virus
tttaaaatgacatcaactgttcttt

SEQ ID NO: 977 - DNA, 25 bp, SARS Virus
ttaaaatgacagtaactgttctttg

SEQ ID NO: 978 - DNA, 25 bp, SARS Virus
taaaatgacagctactgttctttgc

SEQ ID NO: 979 - DNA, 25 bp, SARS Virus
aaaatgacagcatctgttctttgct

SEQ ID NO: 980 - DNA, 25 bp, SARS Virus
aaatgacagcaattgttctttgctc

SEQ ID NO: 981 - DNA, 25 bp, SARS Virus
aatgacagcaactgttctttgctca

SEQ ID NO: 982 - DNA, 25 bp, SARS Virus
atgacagcaacttttctttgctcat

SEQ ID NO: 983 - DNA, 25 bp, SARS Virus
tgacagcaactgttctttgctcatt

SEQ ID NO: 984 - DNA, 25 bp, SARS Virus
gacagcaactgttctttgctcattg

SEQ ID NO: 985 - DNA, 25 bp, SARS Virus
acagcaactgttttttgctcattga

SEQ ID NO: 986 - DNA, 25 bp, SARS Virus
cagcaactgttctttgctcattgag

SEQ ID NO: 987 - DNA, 25 bp, SARS Virus
agcaactgttctttgctcattgagc

SEQ ID NO: 988 - DNA, 25 bp, SARS Virus
gcaactgttctttgctcattgagca

SEQ ID NO: 989 - DNA, 25 bp, SARS Virus
caactgttcttttctcattgagcag

SEQ ID NO: 990 - DNA, 25 bp, SARS Virus
aactgttctttgttcattgagcagg

SEQ ID NO: 991 - DNA, 25 bp, SARS Virus
actgttctttgctcattgagcaggg

SEQ ID NO: 992 - DNA, 25 bp, SARS Virus
ctgttctttgcttattgagcaggga

SEQ ID NO: 993 - DNA, 25 bp, SARS Virus
tgttctttgctctttgagcagggag

SEQ ID NO: 994 - DNA, 25 bp, SARS Virus
gttctttgctcattgagcagggaga

SEQ ID NO: 995 - DNA, 25 bp, SARS Virus
ttctttgctcattgagcagggagaa

SEQ ID NO: 996 - DNA, 25 bp, SARS Virus
tctttgctcatttagcagggagaag

SEQ ID NO: 997 - DNA, 25 bp, SARS Virus
ctttgctcattgtgcagggagaaga

SEQ ID NO: 998 - DNA, 25 bp, SARS Virus
tttgctcattgatcagggagaagac

SEQ ID NO: 999 - DNA, 25 bp, SARS Virus
ttgctcattgagtagggagaagacg

SEQ ID NO: 1000 - DNA, 25 bp, SARS Virus
tgctcattgagctgggagaagacgt

SEQ ID NO: 1001 - DNA, 25 bp, SARS Virus
gctcattgagcatggagaagacgtc

SEQ ID NO: 1002 - DNA, 25 bp, SARS Virus
ctcattgagcagtgagaagacgtct

SEQ ID NO: 1003 - DNA, 25 bp, SARS Virus
tcattgagcaggtagaagacgtctg

SEQ ID NO: 1004 - DNA, 25 bp, SARS Virus
cattgagcagggtgaagacgtctga

SEQ ID NO: 1005 - DNA, 25 bp, SARS Virus
attgagcagggataagacgtctgac

SEQ ID NO: 1006 - DNA, 25 bp, SARS Virus
ttgagcagggagtagacgtctgacg

SEQ ID NO: 1007 - DNA, 25 bp, SARS Virus
tgagcagggagatgacgtctgacga

SEQ ID NO: 1008 - DNA, 25 bp, SARS Virus
gagcagggagaatacgtctgacgaa

SEQ ID NO: 1009 - DNA, 25 bp, SARS Virus
agcagggagaagtcgtctgacgaat

SEQ ID NO: 1010 - DNA, 25 bp, SARS Virus
gcagggagaagatgtctgacgaatg

SEQ ID NO: 1011 - DNA, 25 bp, SARS Virus
cagggagaagacttctgacgaatgc

SEQ ID NO: 1012 - DNA, 25 bp, SARS Virus
agggagaagacgtctgacgaatgcc

SEQ ID NO: 1013 - DNA, 25 bp, SARS Virus
gggagaagacgtttgacgaatgcca

SEQ ID NO: 1014 - DNA, 25 bp, SARS Virus
ggagaagacgtctgacgaatgccaa

SEQ ID NO: 1015 - DNA, 25 bp, SARS Virus
gagaagacgtcttacgaatgccaaa

SEQ ID NO: 1016 - DNA, 25 bp, SARS Virus
agaagacgtctgtcgaatgccaaag

SEQ ID NO: 1017 - DNA, 25 bp, SARS Virus
gaagacgtctgatgaatgccaaagc

SEQ ID NO: 1018 - DNA, 25 bp, SARS Virus
aagacgtctgactaatgccaaagca

SEQ ID NO: 1019 - DNA, 25 bp, SARS Virus
agacgtctgacgtatgccaaagcag

SEQ ID NO: 1020 - DNA, 25 bp, SARS Virus
gacgtctgacgattgccaaagcagg

SEQ ID NO: 1021 - DNA, 25 bp, SARS Virus
acgtctgacgaatgccaaagcaggc

SEQ ID NO: 1022 - DNA, 25 bp, SARS Virus
cgtctgacgaattccaaagcaggca

SEQ ID NO: 1023 - DNA, 25 bp, SARS Virus
gtctgacgaatgtcaaagcaggcac

SEQ ID NO: 1024 - DNA, 25 bp, SARS Virus
tctgacgaatgctaaagcaggcaca

SEQ ID NO: 1025 - DNA, 25 bp, SARS Virus
ctgacgaatgcctaagcaggcacaa

SEQ ID NO: 1026 - DNA, 25 bp, SARS Virus
tgacgaatgccatagcaggcacaac

SEQ ID NO: 1027 - DNA, 25 bp, SARS Virus
gacgaatgccaatgcaggcacaacg

SEQ ID NO: 1028 - DNA, 25 bp, SARS Virus
acgaatgccaaatcaggcacaacgt

SEQ ID NO: 1029 - DNA, 25 bp, SARS Virus
cgaatgccaaagtaggcacaacgtc

SEQ ID NO: 1030 - DNA, 25 bp, SARS Virus
gaatgccaaagctggcacaacgtca

SEQ ID NO: 1031 - DNA, 25 bp, SARS Virus
aatgccaaagcatgcacaacgtcag

SEQ ID NO: 1032 - DNA, 25 bp, SARS Virus
atgccaaagcagtcacaacgtcagc

SEQ ID NO: 1033 - DNA, 25 bp, SARS Virus
tgccaaagcaggtacaacgtcagct

SEQ ID NO: 1034 - DNA, 25 bp, SARS Virus
gccaaagcaggctcaacgtcagcta

SEQ ID NO: 1035 - DNA, 25 bp, SARS Virus
ccaaagcaggcataacgtcagctag

SEQ ID NO: 1036 - DNA, 25 bp, SARS Virus
caaagcaggcactacgtcagctagt

SEQ ID NO: 1037 - DNA, 25 bp, SARS Virus
aaagcaggcacatcgtcagctagta

SEQ ID NO: 1038 - DNA, 25 bp, SARS Virus
aagcaggcacaatgtcagctagtag

SEQ ID NO: 1039 - DNA, 25 bp, SARS Virus
agcaggcacaacttcagctagtagt

SEQ ID NO: 1040 - DNA, 25 bp, SARS Virus
gcaggcacaacgtcagctagtagtc

SEQ ID NO: 1041 - DNA, 25 bp, SARS Virus
caggcacaacgttagctagtagtcg

SEQ ID NO: 1042 - DNA, 25 bp, SARS Virus
aggcacaacgtctgctagtagtcgt

SEQ ID NO: 1043 - DNA, 25 bp, SARS Virus
ggcacaacgtcatctagtagtcgta

SEQ ID NO: 1044 - DNA, 25 bp, SARS Virus
gcacaacgtcagttagtagtcgtat

SEQ ID NO: 1045 - DNA, 25 bp, SARS Virus
cacaacgtcagctagtagtcgtatg

SEQ ID NO: 1046 - DNA, 25 bp, SARS Virus
acaacgtcagcttgtagtcgtatgg

SEQ ID NO: 1047 - DNA, 25 bp, SARS Virus
caacgtcagctattagtcgtatgga

SEQ ID NO: 1048 - DNA, 25 bp, SARS Virus
aacgtcagctagtagtcgtatggat

SEQ ID NO: 1049 - DNA, 25 bp, SARS Virus
acgtcagctagttgtcgtatggatc

SEQ ID NO: 1050 - DNA, 25 bp, SARS Virus
cgtcagctagtattcgtatggatcc

SEQ ID NO: 1051 - DNA, 25 bp, SARS Virus
gtcagctagtagtcgtatggatcca

SEQ ID NO: 1052 - DNA, 25 bp, SARS Virus
tcagctagtagttgtatggatccaa

SEQ ID NO: 1053 - DNA, 25 bp, SARS Virus
cagctagtagtcttatggatccaaa

SEQ ID NO: 1054 - DNA, 25 bp, SARS Virus
agctagtagtcgtatggatccaaag

SEQ ID NO: 1055 - DNA, 25 bp, SARS Virus
gctagtagtcgtttggatccaaagc

SEQ ID NO: 1056 - DNA, 25 bp, SARS Virus
ctagtagtcgtatggatccaaagca

SEQ ID NO: 1057 - DNA, 25 bp, SARS Virus
tagtagtcgtattgatccaaagcag

SEQ ID NO: 1058 - DNA, 25 bp, SARS Virus
agtagtcgtatgtatccaaagcagg

SEQ ID NO: 1059 - DNA, 25 bp, SARS Virus
gtagtcgtatggttccaaagcaggc

SEQ ID NO: 1060 - DNA, 25 bp, SARS Virus
tagtcgtatggatccaaagcaggcc

SEQ ID NO: 1061 - DNA, 25 bp, SARS Virus
agtcgtatggattcaaagcaggccc

SEQ ID NO: 1062 - DNA, 25 bp, SARS Virus
gtcgtatggatctaaagcaggccca

SEQ ID NO: 1063 - DNA, 25 bp, SARS Virus
tcgtatggatcctaagcaggcccac

SEQ ID NO: 1064 - DNA, 25 bp, SARS Virus
cgtatggatccatagcaggcccaca

SEQ ID NO: 1065 - DNA, 25 bp, SARS Virus
gtatggatccaatgcaggcccacac

SEQ ID NO: 1066 - DNA, 25 bp, SARS Virus
tatggatccaaatcaggcccacact

SEQ ID NO: 1067 - DNA, 25 bp, SARS Virus
atggatccaaagtaggcccacactg

SEQ ID NO: 1068 - DNA, 25 bp, SARS Virus
tggatccaaagctggcccacactgg

SEQ ID NO: 1069 - DNA, 25 bp, SARS Virus
ggatccaaagcatgcccacactggc

SEQ ID NO: 1070 - DNA, 25 bp, SARS Virus
gatccaaagcagtcccacactggct

SEQ ID NO: 1071 - DNA, 25 bp, SARS Virus
atccaaagcaggtccacactggctt

SEQ ID NO: 1072 - DNA, 25 bp, SARS Virus
tccaaagcaggctcacactggcttt

SEQ ID NO: 1073 - DNA, 25 bp, SARS Virus
ccaaagcaggcctacactggctttc

SEQ ID NO: 1074 - DNA, 25 bp, SARS Virus
caaagcaggccctcactggctttcc

SEQ ID NO: 1075 - DNA, 25 bp, SARS Virus
aaagcaggcccatactggctttcca

SEQ ID NO: 1076 - DNA, 25 bp, SARS Virus
aagcaggcccactctggctttccat

SEQ ID NO: 1077 - DNA, 25 bp, SARS Virus
agcaggcccacattggctttccatt

SEQ ID NO: 1078 - DNA, 25 bp, SARS Virus
gcaggcccacactggctttccattc

SEQ ID NO: 1079 - DNA, 25 bp, SARS Virus
caggcccacacttgctttccattct

SEQ ID NO: 1080 - DNA, 25 bp, SARS Virus
aggcccacactgtctttccattcta

SEQ ID NO: 1081 - DNA, 25 bp, SARS Virus
ggcccacactggttttccattctac

SEQ ID NO: 1082 - DNA, 25 bp, SARS Virus
gcccacactggctttccattctacc

SEQ ID NO: 1083 - DNA, 25 bp, SARS Virus
cccacactggctttccattctacct

SEQ ID NO: 1084 - DNA, 25 bp, SARS Virus
ccacactggctttccattctacctc

SEQ ID NO: 1085 - DNA, 25 bp, SARS Virus
cacactggcttttcattctacctct

SEQ ID NO: 1086 - DNA, 25 bp, SARS Virus
acactggctttctattctacctctc

SEQ ID NO: 1087 - DNA, 25 bp, SARS Virus
cactggctttcctttctacctctcg

SEQ ID NO: 1088 - DNA, 25 bp, SARS Virus
actggctttccattctacctctcgg

SEQ ID NO: 1089 - DNA, 25 bp, SARS Virus
ctggctttccattctacctctcgga

SEQ ID NO: 1090 - DNA, 25 bp, SARS Virus
tggctttccattttacctctcggaa

SEQ ID NO: 1091 - DNA, 25 bp, SARS Virus
ggctttccattctacctctcggaac

SEQ ID NO: 1092 - DNA, 25 bp, SARS Virus
gctttccattcttcctctcggaaca

SEQ ID NO: 1093 - DNA, 25 bp, SARS Virus
ctttccattctatctctcggaacaa

SEQ ID NO: 1094 - DNA, 25 bp, SARS Virus
tttccattctacttctcggaacaag

SEQ ID NO: 1095 - DNA, 25 bp, SARS Virus
ttccattctacctctcggaacaaga

SEQ ID NO: 1096 - DNA, 25 bp, SARS Virus
tccattctacctttcggaacaagaa

SEQ ID NO: 1097 - DNA, 25 bp, SARS Virus
ccattctacctctcggaacaagaac

SEQ ID NO: 1098 - DNA, 25 bp, SARS Virus
cattctacctcttggaacaagaacc

SEQ ID NO: 1099 - DNA, 25 bp, SARS Virus
attctacctctctgaacaagaacca

SEQ ID NO: 1100 - DNA, 25 bp, SARS Virus
ttctacctctcgtaacaagaaccac

SEQ ID NO: 1101 - DNA, 25 bp, SARS Virus
tctacctctcggtacaagaaccaca

SEQ ID NO: 1102 - DNA, 25 bp, SARS Virus
ctacctctcggatcaagaaccacag

SEQ ID NO: 1103 - DNA, 25 bp, SARS Virus
tacctctcggaataagaaccacagt

SEQ ID NO: 1104 - DNA, 25 bp, SARS Virus
acctctcggaactagaaccacagtt

SEQ ID NO: 1105 - DNA, 25 bp, SARS Virus
cctctcggaacaagaaccacagttg

SEQ ID NO: 1106 - DNA, 25 bp, SARS Virus
ctctcggaacaaaaaccacagttgc

SEQ ID NO: 1107 - DNA, 25 bp, SARS Virus
tctcggaacaagaaccacagttgct

SEQ ID NO: 1108 - DNA, 25 bp, SARS Virus
ctcggaacaagaaccacagttgctc

SEQ ID NO: 1109 - DNA, 25 bp, SARS Virus
tcggaacaagaaacacagttgctct

SEQ ID NO: 1110 - DNA, 25 bp, SARS Virus
cggaacaagaacaacagttgctctt

SEQ ID NO: 1111 - DNA, 25 bp, SARS Virus
ggaacaagaaccacagttgctcttt

SEQ ID NO: 1112 - DNA, 25 bp, SARS Virus
gaacaagaaccaaagttgctctttt

SEQ ID NO: 1113 - DNA, 25 bp, SARS Virus
aacaagaaccacagttgctcttttg

SEQ ID NO: 1114 - DNA, 25 bp, SARS Virus
acaagaaccacaattgctcttttgt

SEQ ID NO: 1115 - DNA, 25 bp, SARS Virus
caagaaccacagatgctcttttgtg

SEQ ID NO: 1116 - DNA, 25 bp, SARS Virus
aagaaccacagtagctcttttgtgt

SEQ ID NO: 1117 - DNA, 25 bp, SARS Virus
agaaccacagttactcttttgtgtg

SEQ ID NO: 1118 - DNA, 25 bp, SARS Virus
gaaccacagttgatcttttgtgtgc

SEQ ID NO: 1119 - DNA, 25 bp, SARS Virus
aaccacagttgcacttttgtgtgca

SEQ ID NO: 1120 - DNA, 25 bp, SARS Virus
accacagttgctattttgtgtgcag

SEQ ID NO: 1121 - DNA, 25 bp, SARS Virus
ccacagttgctcatttgtgtgcagg

SEQ ID NO: 1122 - DNA, 25 bp, SARS Virus
cacagttgctctattgtgtgcaggt

SEQ ID NO: 1123 - DNA, 25 bp, SARS Virus
acagttgctcttatgtgtgcaggtt

SEQ ID NO: 1124 - DNA, 25 bp, SARS Virus
cagttgctctttagtgtgcaggttg

SEQ ID NO: 1125 - DNA, 25 bp, SARS Virus
agttgctcttttatgtgcaggttga

SEQ ID NO: 1126 - DNA, 25 bp, SARS Virus
gttgctcttttgagtgcaggttgag

SEQ ID NO: 1127 - DNA, 25 bp, SARS Virus
ttgctcttttgtatgcaggttgagt

SEQ ID NO: 1128 - DNA, 25 bp, SARS Virus
tgctcttttgtgagcaggttgagtc

SEQ ID NO: 1129 - DNA, 25 bp, SARS Virus
gctcttttgtgtacaggttgagtca

SEQ ID NO: 1130 - DNA, 25 bp, SARS Virus
ctcttttgtgtgaaggttgagtcaa

SEQ ID NO: 1131 - DNA, 25 bp, SARS Virus
tcttttgtgtgcaggttgagtcaaa

SEQ ID NO: 1132 - DNA, 25 bp, SARS Virus
cttttgtgtgcaagttgagtcaaac

SEQ ID NO: 1133 - DNA, 25 bp, SARS Virus
ttttgtgtgcagattgagtcaaacg

SEQ ID NO: 1134 - DNA, 25 bp, SARS Virus
tttgtgtgcaggatgagtcaaacgg

SEQ ID NO: 1135 - DNA, 25 bp, SARS Virus
ttgtgtgcaggtagagtcaaacgga

SEQ ID NO: 1136 - DNA, 25 bp, SARS Virus
tgtgtgcaggttaagtcaaacggac

SEQ ID NO: 1137 - DNA, 25 bp, SARS Virus
gtgtgcaggttgagtcaaacggaca

SEQ ID NO: 1138 - DNA, 25 bp, SARS Virus
tgtgcaggttgaatcaaacggacag

SEQ ID NO: 1139 - DNA, 25 bp, SARS Virus
gtgcaggttgagacaaacggacagg

SEQ ID NO: 1140 - DNA, 25 bp, SARS Virus
tgcaggttgagtaaaacggacagga

SEQ ID NO: 1141 - DNA, 25 bp, SARS Virus
gcaggttgagtcaaacggacaggaa

SEQ ID NO: 1142 - DNA, 25 bp, SARS Virus
caggttgagtcaaacggacaggaag

SEQ ID NO: 1143 - DNA, 25 bp, SARS Virus
aggttgagtcaaacggacaggaagt

SEQ ID NO: 1144 - DNA, 25 bp, SARS Virus
ggttgagtcaaaaggacaggaagtc

SEQ ID NO: 1145 - DNA, 25 bp, SARS Virus
gttgagtcaaacagacaggaagtcc

SEQ ID NO: 1146 - DNA, 25 bp, SARS Virus
ttgagtcaaacgaacaggaagtcca

SEQ ID NO: 1147 - DNA, 25 bp, SARS Virus
tgagtcaaacggacaggaagtccaa

SEQ ID NO: 1148 - DNA, 25 bp, SARS Virus
gagtcaaacggaaaggaagtccaat

SEQ ID NO: 1149 - DNA, 25 bp, SARS Virus
agtcaaacggacaggaagtccaatc

SEQ ID NO: 1150 - DNA, 25 bp, SARS Virus
gtcaaacggacaagaagtccaatct

SEQ ID NO: 1151 - DNA, 25 bp, SARS Virus
tcaaacggacagaaagtccaatctc

SEQ ID NO: 1152 - DNA, 25 bp, SARS Virus
caaacggacaggaagtccaatctct

SEQ ID NO: 1153 - DNA, 25 bp, SARS Virus
aaacggacaggaagtccaatctctg

SEQ ID NO: 1154 - DNA, 25 bp, SARS Virus
aacggacaggaaatccaatctctgc

SEQ ID NO: 1155 - DNA, 25 bp, SARS Virus
acggacaggaagaccaatctctgca

SEQ ID NO: 1156 - DNA, 25 bp, SARS Virus
cggacaggaagtacaatctctgcac

SEQ ID NO: 1157 - DNA, 25 bp, SARS Virus
ggacaggaagtcaaatctctgcacg

SEQ ID NO: 1158 - DNA, 25 bp, SARS Virus
gacaggaagtccaatctctgcacga

SEQ ID NO: 1159 - DNA, 25 bp, SARS Virus
acaggaagtccaatctctgcacgat

SEQ ID NO: 1160 - DNA, 25 bp, SARS Virus
caggaagtccaaactctgcacgatc

SEQ ID NO: 1161 - DNA, 25 bp, SARS Virus
aggaagtccaatatctgcacgatca

SEQ ID NO: 1162 - DNA, 25 bp, SARS Virus
ggaagtccaatcactgcacgatcac

SEQ ID NO: 1163 - DNA, 25 bp, SARS Virus
gaagtccaatctatgcacgatcacg

SEQ ID NO: 1164 - DNA, 25 bp, SARS Virus
aagtccaatctcagcacgatcacgc

SEQ ID NO: 1165 - DNA, 25 bp, SARS Virus
agtccaatctctacacgatcacgca

SEQ ID NO: 1166 - DNA, 25 bp, SARS Virus
gtccaatctctgaacgatcacgcac

SEQ ID NO: 1167 - DNA, 25 bp, SARS Virus
tccaatctctgcacgatcacgcacc

SEQ ID NO: 1168 - DNA, 25 bp, SARS Virus
ccaatctctgcaagatcacgcaccg

SEQ ID NO: 1169 - DNA, 25 bp, SARS Virus
caatctctgcacaatcacgcaccga

SEQ ID NO: 1170 - DNA, 25 bp, SARS Virus
aatctctgcacgatcacgcaccgaa

SEQ ID NO: 1171 - DNA, 25 bp, SARS Virus
atctctgcacgaacacgcaccgaag

SEQ ID NO: 1172 - DNA, 25 bp, SARS Virus
tctctgcacgataacgcaccgaagc

SEQ ID NO: 1173 - DNA, 25 bp, SARS Virus
ctctgcacgatcacgcaccgaagcc

SEQ ID NO: 1174 - DNA, 25 bp, SARS Virus
tctgcacgatcaagcaccgaagccc

SEQ ID NO: 1175 - DNA, 25 bp, SARS Virus
ctgcacgatcacacaccgaagcccc

SEQ ID NO: 1176 - DNA, 25 bp, SARS Virus
tgcacgatcacgaaccgaagcccct

SEQ ID NO: 1177 - DNA, 25 bp, SARS Virus
gcacgatcacgcaccgaagcccctg

SEQ ID NO: 1178 - DNA, 25 bp, SARS Virus
cacgatcacgcaacgaagcccctga

SEQ ID NO: 1179 - DNA, 25 bp, SARS Virus
acgatcacgcacagaagcccctgag

SEQ ID NO: 1180 - DNA, 25 bp, SARS Virus
cgatcacgcaccaaagcccctgaga

SEQ ID NO: 1181 - DNA, 25 bp, SARS Virus
gatcacgcaccgaagcccctgagac

SEQ ID NO: 1182 - DNA, 25 bp, SARS Virus
atcacgcaccgaagcccctgagaca

SEQ ID NO: 1183 - DNA, 25 bp, SARS Virus
tcacgcaccgaaacccctgagacac

SEQ ID NO: 1184 - DNA, 25 bp, SARS Virus
cacgcaccgaagaccctgagacacc

SEQ ID NO: 1185 - DNA, 25 bp, SARS Virus
acgcaccgaagcacctgagacacct

SEQ ID NO: 1186 - DNA, 25 bp, SARS Virus
cgcaccgaagccactgagacacctt

SEQ ID NO: 1187 - DNA, 25 bp, SARS Virus
gcaccgaagcccatgagacaccttc

SEQ ID NO: 1188 - DNA, 25 bp, SARS Virus
caccgaagccccagagacaccttct

SEQ ID NO: 1189 - DNA, 25 bp, SARS Virus
accgaagcccctaagacaccttctc

SEQ ID NO: 1190 - DNA, 25 bp, SARS Virus
ccgaagcccctgagacaccttctcc

SEQ ID NO: 1191 - DNA, 25 bp, SARS Virus
cgaagcccctgaaacaccttctccg

SEQ ID NO: 1192 - DNA, 25 bp, SARS Virus
gaagcccctgagacaccttctccgg

SEQ ID NO: 1193 - DNA, 25 bp, SARS Virus
aagcccctgagaaaccttctccggg

SEQ ID NO: 1194 - DNA, 25 bp, SARS Virus
agcccctgagacaccttctccggga

SEQ ID NO: 1195 - DNA, 25 bp, SARS Virus
gcccctgagacaacttctccgggat

SEQ ID NO: 1196 - DNA, 25 bp, SARS Virus
cccctgagacacattctccgggata

SEQ ID NO: 1197 - DNA, 25 bp, SARS Virus
ccctgagacaccatctccgggatag

SEQ ID NO: 1198 - DNA, 25 bp, SARS Virus
cctgagacacctactccgggatagc

SEQ ID NO: 1199 - DNA, 25 bp, SARS Virus
ctgagacaccttatccgggatagcc

SEQ ID NO: 1200 - DNA, 25 bp, SARS Virus
tgagacaccttcaccgggatagcct

SEQ ID NO: 1201 - DNA, 25 bp, SARS Virus
gagacaccttctacgggatagcctc

SEQ ID NO: 1202 - DNA, 25 bp, SARS Virus
agacaccttctcagggatagcctcc

SEQ ID NO: 1203 - DNA, 25 bp, SARS Virus
gacaccttctccaggatagcctccg

SEQ ID NO: 1204 - DNA, 25 bp, SARS Virus
acaccttctccgagatagcctccgt

SEQ ID NO: 1205 - DNA, 25 bp, SARS Virus
caccttctccggaatagcctccgtg

SEQ ID NO: 1206 - DNA, 25 bp, SARS Virus
accttctccgggatagcctccgtgc

SEQ ID NO: 1207 - DNA, 25 bp, SARS Virus
ccttctccgggaaagcctccgtgca

SEQ ID NO: 1208 - DNA, 25 bp, SARS Virus
cttctccgggatagcctccgtgcac

SEQ ID NO: 1209 - DNA, 25 bp, SARS Virus
ttctccgggataacctccgtgcact

SEQ ID NO: 1210 - DNA, 25 bp, SARS Virus
tctccgggatagactccgtgcactt

SEQ ID NO: 1211 - DNA, 25 bp, SARS Virus
ctccgggatagcatccgtgcacttg

SEQ ID NO: 1212 - DNA, 25 bp, SARS Virus
tccgggatagccaccgtgcacttgt

SEQ ID NO: 1213 - DNA, 25 bp, SARS Virus
ccgggatagcctacgtgcacttgtg

SEQ ID NO: 1214 - DNA, 25 bp, SARS Virus
cgggatagcctcagtgcacttgtgg

SEQ ID NO: 1215 - DNA, 25 bp, SARS Virus
gggatagcctccatgcacttgtgga

SEQ ID NO: 1216 - DNA, 25 bp, SARS Virus
ggatagcctccgagcacttgtggag

SEQ ID NO: 1217 - DNA, 25 bp, SARS Virus
gatagcctccgtacacttgtggagt

SEQ ID NO: 1218 - DNA, 25 bp, SARS Virus
atagcctccgtgaacttgtggagtt

SEQ ID NO: 1219 - DNA, 25 bp, SARS Virus
tagcctccgtgcacttgtggagttt

SEQ ID NO: 1220 - DNA, 25 bp, SARS Virus
agcctccgtgcaattgtggagtttt

SEQ ID NO: 1221 - DNA, 25 bp, SARS Virus
gcctccgtgcacatgtggagttttt

SEQ ID NO: 1222 - DNA, 25 bp, SARS Virus
cctccgtgcactagtggagttttta

SEQ ID NO: 1223 - DNA, 25 bp, SARS Virus
ctccgtgcacttatggagtttttac

SEQ ID NO: 1224 - DNA, 25 bp, SARS Virus
tccgtgcacttgaggagtttttacc

SEQ ID NO: 1225 - DNA, 25 bp, SARS Virus
ccgtgcacttgtagagtttttaccg

SEQ ID NO: 1226 - DNA, 25 bp, SARS Virus
cgtgcacttgtgaagtttttaccgt

SEQ ID NO: 1227 - DNA, 25 bp, SARS Virus
gtgcacttgtggagtttttaccgtg

SEQ ID NO: 1228 - DNA, 25 bp, SARS Virus
tgcacttgtggaatttttaccgtga

SEQ ID NO: 1229 - DNA, 25 bp, SARS Virus
gcacttgtggagattttaccgtgaa

SEQ ID NO: 1230 - DNA, 25 bp, SARS Virus
cacttgtggagtatttaccgtgaac

SEQ ID NO: 1231 - DNA, 25 bp, SARS Virus
acttgtggagttattaccgtgaaca

SEQ ID NO: 1232 - DNA, 25 bp, SARS Virus
cttgtggagtttataccgtgaacac

SEQ ID NO: 1233 - DNA, 25 bp, SARS Virus
ttgtggagttttaaccgtgaacacc

SEQ ID NO: 1234 - DNA, 25 bp, SARS Virus
tgtggagtttttaccgtgaacacca

SEQ ID NO: 1235 - DNA, 25 bp, SARS Virus
gtggagtttttaacgtgaacaccag

SEQ ID NO: 1236 - DNA, 25 bp, SARS Virus
tggagtttttacagtgaacaccaga

SEQ ID NO: 1237 - DNA, 25 bp, SARS Virus
ggagtttttaccatgaacaccagat

SEQ ID NO: 1238 - DNA, 25 bp, SARS Virus
gagtttttaccgagaacaccagatc

SEQ ID NO: 1239 - DNA, 25 bp, SARS Virus
agtttttaccgtaaacaccagatca

SEQ ID NO: 1240 - DNA, 25 bp, SARS Virus
gtttttaccgtgaacaccagatcat

SEQ ID NO: 1241 - DNA, 25 bp, SARS Virus
tttttaccgtgaacaccagatcatc

SEQ ID NO: 1242 - DNA, 25 bp, SARS Virus
ttttaccgtgaaaaccagatcatct

SEQ ID NO: 1243 - DNA, 25 bp, SARS Virus
tttaccgtgaacaccagatcatctc

SEQ ID NO: 1244 - DNA, 25 bp, SARS Virus
ttaccgtgaacaacagatcatctcg

SEQ ID NO: 1245 - DNA, 25 bp, SARS Virus
taccgtgaacacaagatcatctcga

SEQ ID NO: 1246 - DNA, 25 bp, SARS Virus
accgtgaacaccagatcatctcgac

SEQ ID NO: 1247 - DNA, 25 bp, SARS Virus
ccgtgaacaccaaatcatctcgacc

SEQ ID NO: 1248 - DNA, 25 bp, SARS Virus
cgtgaacaccagatcatctcgacct

SEQ ID NO: 1249 - DNA, 25 bp, SARS Virus
gtgaacaccagaacatctcgacctt

SEQ ID NO: 1250 - DNA, 25 bp, SARS Virus
tgaacaccagataatctcgaccttt

SEQ ID NO: 1251 - DNA, 25 bp, SARS Virus
gaacaccagatcatctcgacctttt

SEQ ID NO: 1252 - DNA, 25 bp, SARS Virus
aacaccagatcaactcgaccttttt

SEQ ID NO: 1253 - DNA, 25 bp, SARS Virus
acaccagatcatatcgacctttttc

SEQ ID NO: 1254 - DNA, 25 bp, SARS Virus
caccagatcatcacgacctttttcc

SEQ ID NO: 1255 - DNA, 25 bp, SARS Virus
accagatcatctagacctttttccg

SEQ ID NO: 1256 - DNA, 25 bp, SARS Virus
ccagatcatctcaacctttttccgc

SEQ ID NO: 1257 - DNA, 25 bp, SARS Virus
cagatcatctcgacctttttccgca

SEQ ID NO: 1258 - DNA, 25 bp, SARS Virus
agatcatctcgaactttttccgcat

SEQ ID NO: 1259 - DNA, 25 bp, SARS Virus
gatcatctcgacatttttccgcatg

SEQ ID NO: 1260 - DNA, 25 bp, SARS Virus
atcatctcgaccattttccgcatga

SEQ ID NO: 1261 - DNA, 25 bp, SARS Virus
tcatctcgacctatttccgcatgac

SEQ ID NO: 1262 - DNA, 25 bp, SARS Virus
catctcgaccttattccgcatgacg

SEQ ID NO: 1263 - DNA, 25 bp, SARS Virus
atctcgacctttatccgcatgacgg

SEQ ID NO: 1264 - DNA, 25 bp, SARS Virus
tctcgaccttttaccgcatgacggg

SEQ ID NO: 1265 - DNA, 25 bp, SARS Virus
ctcgacctttttacgcatgacgggg

SEQ ID NO: 1266 - DNA, 25 bp, SARS Virus
tcgacctttttcagcatgacggggt

SEQ ID NO: 1267 - DNA, 25 bp, SARS Virus
cgacctttttccacatgacggggtc

SEQ ID NO: 1268 - DNA, 25 bp, SARS Virus
gacctttttccgaatgacggggtcg

SEQ ID NO: 1269 - DNA, 25 bp, SARS Virus
acctttttccgcatgacggggtcga

SEQ ID NO: 1270 - DNA, 25 bp, SARS Virus
cctttttccgcaagacggggtcgaa

SEQ ID NO: 1271 - DNA, 25 bp, SARS Virus
ctttttccgcataacggggtcgaac

SEQ ID NO: 1272 - DNA, 25 bp, SARS Virus
tttttccgcatgacggggtcgaact

SEQ ID NO: 1273 - DNA, 25 bp, SARS Virus
ttttccgcatgaaggggtcgaactt

SEQ ID NO: 1274 - DNA, 25 bp, SARS Virus
tttccgcatgacagggtcgaacttg

SEQ ID NO: 1275 - DNA, 25 bp, SARS Virus
ttccgcatgacgaggtcgaacttgt

SEQ ID NO: 1276 - DNA, 25 bp, SARS Virus
tccgcatgacggagtcgaacttgtc

SEQ ID NO: 1277 - DNA, 25 bp, SARS Virus
ccgcatgacgggatcgaacttgtcg

SEQ ID NO: 1278 - DNA, 25 bp, SARS Virus
cgcatgacggggacgaacttgtcgg

SEQ ID NO: 1279 - DNA, 25 bp, SARS Virus
gcatgacggggtagaacttgtcggg

SEQ ID NO: 1280 - DNA, 25 bp, SARS Virus
catgacggggtcaaacttgtcggga

SEQ ID NO: 1281 - DNA, 25 bp, SARS Virus
atgacggggtcgaacttgtcgggat

SEQ ID NO: 1282 - DNA, 25 bp, SARS Virus
tgacggggtcgaacttgtcgggata

SEQ ID NO: 1283 - DNA, 25 bp, SARS Virus
gacggggtcgaaattgtcgggatac

SEQ ID NO: 1284 - DNA, 25 bp, SARS Virus
acggggtcgaacatgtcgggataca

SEQ ID NO: 1285 - DNA, 25 bp, SARS Virus
cggggtcgaactagtcgggatacac

SEQ ID NO: 1286 - DNA, 25 bp, SARS Virus
ggggtcgaacttatcgggatacaca

SEQ ID NO: 1287 - DNA, 25 bp, SARS Virus
gggtcgaacttgacgggatacacaa

SEQ ID NO: 1288 - DNA, 25 bp, SARS Virus
ggtcgaacttgtagggatacacaag

SEQ ID NO: 1289 - DNA, 25 bp, SARS Virus
gtcgaacttgtcaggatacacaagt

SEQ ID NO: 1290 - DNA, 25 bp, SARS Virus
tcgaacttgtcgagatacacaagta

SEQ ID NO: 1291 - DNA, 25 bp, SARS Virus
cgaacttgtcggaatacacaagtaa

SEQ ID NO: 1292 - DNA, 25 bp, SARS Virus
gaacttgtcgggatacacaagtaat

SEQ ID NO: 1293 - DNA, 25 bp, SARS Virus
aacttgtcgggaaacacaagtaatt

SEQ ID NO: 1294 - DNA, 25 bp, SARS Virus
acttgtcgggatacacaagtaattt

SEQ ID NO: 1295 - DNA, 25 bp, SARS Virus
cttgtcgggataaacaagtaatttg

SEQ ID NO: 1296 - DNA, 25 bp, SARS Virus
ttgtcgggatacacaagtaatttgc

SEQ ID NO: 1297 - DNA, 25 bp, SARS Virus
tgtcgggatacaaaagtaatttgca

SEQ ID NO: 1298 - DNA, 25 bp, SARS Virus
gtcgggatacacaagtaatttgcaa

SEQ ID NO: 1299 - DNA, 25 bp, SARS Virus
tcgggatacacaagtaatttgcaag

SEQ ID NO: 1300 - DNA, 25 bp, SARS Virus
cgggatacacaaataatttgcaaga

SEQ ID NO: 1301 - DNA, 25 bp, SARS Virus
gggatacacaagaaatttgcaagac

SEQ ID NO: 1302 - DNA, 25 bp, SARS Virus
ggatacacaagtaatttgcaagact

SEQ ID NO: 1303 - DNA, 25 bp, SARS Virus
gatacacaagtaatttgcaagacta

SEQ ID NO: 1304 - DNA, 25 bp, SARS Virus
atacacaagtaaattgcaagactac

SEQ ID NO: 1305 - DNA, 25 bp, SARS Virus
tacacaagtaatatgcaagactacg

SEQ ID NO: 1306 - DNA, 25 bp, SARS Virus
acacaagtaattagcaagactacgg

SEQ ID NO: 1307 - DNA, 25 bp, SARS Virus
cacaagtaatttacaagactacgga

SEQ ID NO: 1308 - DNA, 25 bp, SARS Virus
acaagtaatttgaaagactacggaa

SEQ ID NO: 1309 - DNA, 25 bp, SARS Virus
caagtaatttgcaagactacggaat

SEQ ID NO: 1310 - DNA, 25 bp, SARS Virus
aagtaatttgcaagactacggaatt

SEQ ID NO: 1311 - DNA, 25 bp, SARS Virus
agtaatttgcaaaactacggaattc

SEQ ID NO: 1312 - DNA, 25 bp, SARS Virus
gtaatttgcaagactacggaattcg

SEQ ID NO: 1313 - DNA, 25 bp, SARS Virus
taatttgcaagaatacggaattcgt

SEQ ID NO: 1314 - DNA, 25 bp, SARS Virus
aatttgcaagacaacggaattcgtg

SEQ ID NO: 1315 - DNA, 25 bp, SARS Virus
atttgcaagactacggaattcgtgg

SEQ ID NO: 1316 - DNA, 25 bp, SARS Virus
tttgcaagactaaggaattcgtggt

SEQ ID NO: 1317 - DNA, 25 bp, SARS Virus
ttgcaagactacagaattcgtggtt

SEQ ID NO: 1318 - DNA, 25 bp, SARS Virus
tgcaagactacgaaattcgtggtta

SEQ ID NO: 1319 - DNA, 25 bp, SARS Virus
gcaagactacggaattcgtggttag

SEQ ID NO: 1320 - DNA, 25 bp, SARS Virus
caagactacggaattcgtggttagt

SEQ ID NO: 1321 - DNA, 25 bp, SARS Virus
aagactacggaaatcgtggttagtg

SEQ ID NO: 1322 - DNA, 25 bp, SARS Virus
agactacggaatacgtggttagtgc

SEQ ID NO: 1323 - DNA, 25 bp, SARS Virus
gactacggaattagtggttagtgcc

SEQ ID NO: 1324 - DNA, 25 bp, SARS Virus
actacggaattcatggttagtgccg

SEQ ID NO: 1325 - DNA, 25 bp, SARS Virus
ctacggaattcgaggttagtgccgg

SEQ ID NO: 1326 - DNA, 25 bp, SARS Virus
tacggaattcgtagttagtgccggt

SEQ ID NO: 1327 - DNA, 25 bp, SARS Virus
acggaattcgtgattagtgccggtg

SEQ ID NO: 1328 - DNA, 25 bp, SARS Virus
cggaattcgtggatagtgccggtgt

SEQ ID NO: 1329 - DNA, 25 bp, SARS Virus
ggaattcgtggtaagtgccggtgtt

SEQ ID NO: 1330 - DNA, 25 bp, SARS Virus
gaattcgtggttagtgccggtgttc

SEQ ID NO: 1331 - DNA, 25 bp, SARS Virus
aattcgtggttaatgccggtgttcc

SEQ ID NO: 1332 - DNA, 25 bp, SARS Virus
attcgtggttagagccggtgttcca

SEQ ID NO: 1333 - DNA, 25 bp, SARS Virus
ttcgtggttagtaccggtgttccag

SEQ ID NO: 1334 - DNA, 25 bp, SARS Virus
tcgtggttagtgacggtgttccagc

SEQ ID NO: 1335 - DNA, 25 bp, SARS Virus
cgtggttagtgcaggtgttccagca

SEQ ID NO: 1336 - DNA, 25 bp, SARS Virus
gtggttagtgccagtgttccagcaa

SEQ ID NO: 1337 - DNA, 25 bp, SARS Virus
tggttagtgccgatgttccagcaac

SEQ ID NO: 1338 - DNA, 25 bp, SARS Virus
ggttagtgccggagttccagcaact

SEQ ID NO: 1339 - DNA, 25 bp, SARS Virus
gttagtgccggtattccagcaactc

SEQ ID NO: 1340 - DNA, 25 bp, SARS Virus
ttagtgccggtgatccagcaactcg

SEQ ID NO: 1341 - DNA, 25 bp, SARS Virus
tagtgccggtgtaccagcaactcga

SEQ ID NO: 1342 - DNA, 25 bp, SARS Virus
agtgccggtgttacagcaactcgac

SEQ ID NO: 1343 - DNA, 25 bp, SARS Virus
gtgccggtgttcaagcaactcgacc

SEQ ID NO: 1344 - DNA, 25 bp, SARS Virus
tgccggtgttccagcaactcgacca

SEQ ID NO: 1345 - DNA, 25 bp, SARS Virus
gccggtgttccaacaactcgaccaa

SEQ ID NO: 1346 - DNA, 25 bp, SARS Virus
ccggtgttccagaaactcgaccaac

SEQ ID NO: 1347 - DNA, 25 bp, SARS Virus
cggtgttccagcaactcgaccaacg

SEQ ID NO: 1348 - DNA, 25 bp, SARS Virus
ggtgttccagcaactcgaccaacgt

SEQ ID NO: 1349 - DNA, 25 bp, SARS Virus
gtgttccagcaaatcgaccaacgtc

SEQ ID NO: 1350 - DNA, 25 bp, SARS Virus
tgttccagcaacacgaccaacgtct

SEQ ID NO: 1351 - DNA, 25 bp, SARS Virus
gttccagcaactagaccaacgtctt

SEQ ID NO: 1352 - DNA, 25 bp, SARS Virus
ttccagcaactcaaccaacgtcttt

SEQ ID NO: 1353 - DNA, 25 bp, SARS Virus
tccagcaactcgaccaacgtcttta

SEQ ID NO: 1354 - DNA, 25 bp, SARS Virus
ccagcaactcgaacaacgtctttac

SEQ ID NO: 1355 - DNA, 25 bp, SARS Virus
cagcaactcgacaaacgtctttacc

SEQ ID NO: 1356 - DNA, 25 bp, SARS Virus
agcaactcgaccaacgtctttacct

SEQ ID NO: 1357 - DNA, 25 bp, SARS Virus
gcaactcgaccaacgtctttacctg

SEQ ID NO: 1358 - DNA, 25 bp, SARS Virus
caactcgaccaaagtctttacctgc

SEQ ID NO: 1359 - DNA, 25 bp, SARS Virus
aactcgaccaacatctttacctgcc

SEQ ID NO: 1360 - DNA, 25 bp, SARS Virus
actcgaccaacgactttacctgccg

SEQ ID NO: 1361 - DNA, 25 bp, SARS Virus
ctcgaccaacgtatttacctgccgt

SEQ ID NO: 1362 - DNA, 25 bp, SARS Virus
tcgaccaacgtcattacctgccgta

SEQ ID NO: 1363 - DNA, 25 bp, SARS Virus
cgaccaacgtctatacctgccgtaa

SEQ ID NO: 1364 - DNA, 25 bp, SARS Virus
gaccaacgtcttaacctgccgtaag

SEQ ID NO: 1365 - DNA, 25 bp, SARS Virus
accaacgtctttacctgccgtaagt

SEQ ID NO: 1366 - DNA, 25 bp, SARS Virus
ccaacgtctttaactgccgtaagtc

SEQ ID NO: 1367 - DNA, 25 bp, SARS Virus
caacgtctttacatgccgtaagtca

SEQ ID NO: 1368 - DNA, 25 bp, SARS Virus
aacgtctttaccagccgtaagtcat

SEQ ID NO: 1369 - DNA, 25 bp, SARS Virus
acgtctttacctaccgtaagtcatg

SEQ ID NO: 1370 - DNA, 25 bp, SARS Virus
cgtctttacctgacgtaagtcatgc

SEQ ID NO: 1371 - DNA, 25 bp, SARS Virus
gtctttacctgcagtaagtcatgcc

SEQ ID NO: 1372 - DNA, 25 bp, SARS Virus
tctttacctgccataagtcatgcca

SEQ ID NO: 1373 - DNA, 25 bp, SARS Virus
ctttacctgccgaaagtcatgccag

SEQ ID NO: 1374 - DNA, 25 bp, SARS Virus
tttacctgccgtaagtcatgccagc

SEQ ID NO: 1375 - DNA, 25 bp, SARS Virus
ttacctgccgtaagtcatgccagca

SEQ ID NO: 1376 - DNA, 25 bp, SARS Virus
tacctgccgtaaatcatgccagcat

SEQ ID NO: 1377 - DNA, 25 bp, SARS Virus
acctgccgtaagacatgccagcatc

SEQ ID NO: 1378 - DNA, 25 bp, SARS Virus
cctgccgtaagtaatgccagcatcg

SEQ ID NO: 1379 - DNA, 25 bp, SARS Virus
ctgccgtaagtcatgccagcatcgc

SEQ ID NO: 1380 - DNA, 25 bp, SARS Virus
tgccgtaagtcaagccagcatcgcc

SEQ ID NO: 1381 - DNA, 25 bp, SARS Virus
gccgtaagtcataccagcatcgcca

SEQ ID NO: 1382 - DNA, 25 bp, SARS Virus
ccgtaagtcatgacagcatcgccat

SEQ ID NO: 1383 - DNA, 25 bp, SARS Virus
cgtaagtcatgcaagcatcgccata

SEQ ID NO: 1384 - DNA, 25 bp, SARS Virus
gtaagtcatgccagcatcgccatat

SEQ ID NO: 1385 - DNA, 25 bp, SARS Virus
taagtcatgccaacatcgccatatt

SEQ ID NO: 1386 - DNA, 25 bp, SARS Virus
aagtcatgccagaatcgccatattg

SEQ ID NO: 1387 - DNA, 25 bp, SARS Virus
agtcatgccagcatcgccatattgt

SEQ ID NO: 1388 - DNA, 25 bp, SARS Virus
gtcatgccagcaacgccatattgtg

SEQ ID NO: 1389 - DNA, 25 bp, SARS Virus
tcatgccagcatagccatattgtga

SEQ ID NO: 1390 - DNA, 25 bp, SARS Virus
catgccagcatcaccatattgtgac

SEQ ID NO: 1391 - DNA, 25 bp, SARS Virus
atgccagcatcgacatattgtgacc

SEQ ID NO: 1392 - DNA, 25 bp, SARS Virus
tgccagcatcgcaatattgtgaccc

SEQ ID NO: 1393 - DNA, 25 bp, SARS Virus
gccagcatcgccatattgtgaccct

SEQ ID NO: 1394 - DNA, 25 bp, SARS Virus
ccagcatcgccaaattgtgaccctc

SEQ ID NO: 1395 - DNA, 25 bp, SARS Virus
cagcatcgccatattgtgaccctca

SEQ ID NO: 1396 - DNA, 25 bp, SARS Virus
agcatcgccataatgtgaccctcat

SEQ ID NO: 1397 - DNA, 25 bp, SARS Virus
gcatcgccatatagtgaccctcatg

SEQ ID NO: 1398 - DNA, 25 bp, SARS Virus
catcgccatattatgaccctcatga

SEQ ID NO: 1399 - DNA, 25 bp, SARS Virus
atcgccatattgagaccctcatgag

SEQ ID NO: 1400 - DNA, 25 bp, SARS Virus
tcgccatattgtaaccctcatgagc

SEQ ID NO: 1401 - DNA, 25 bp, SARS Virus
cgccatattgtgaccctcatgagca

SEQ ID NO: 1402 - DNA, 25 bp, SARS Virus
gccatattgtgaacctcatgagcac

SEQ ID NO: 1403 - DNA, 25 bp, SARS Virus
ccatattgtgacactcatgagcacg

SEQ ID NO: 1404 - DNA, 25 bp, SARS Virus
catattgtgaccatcatgagcacgg

SEQ ID NO: 1405 - DNA, 25 bp, SARS Virus
atattgtgacccacatgagcacggt

SEQ ID NO: 1406 - DNA, 25 bp, SARS Virus
tattgtgaccctaatgagcacggtg

SEQ ID NO: 1407 - DNA, 25 bp, SARS Virus
attgtgaccctcatgagcacggtgt

SEQ ID NO: 1408 - DNA, 25 bp, SARS Virus
ttgtgaccctcaagagcacggtgta

SEQ ID NO: 1409 - DNA, 25 bp, SARS Virus
tgtgaccctcataagcacggtgtac

SEQ ID NO: 1410 - DNA, 25 bp, SARS Virus
gtgaccctcatgagcacggtgtaca

SEQ ID NO: 1411 - DNA, 25 bp, SARS Virus
tgaccctcatgaacacggtgtacac

SEQ ID NO: 1412 - DNA, 25 bp, SARS Virus
gaccctcatgagaacggtgtacacc

SEQ ID NO: 1413 - DNA, 25 bp, SARS Virus
accctcatgagcacggtgtacaccc

SEQ ID NO: 1414 - DNA, 25 bp, SARS Virus
ccctcatgagcaaggtgtacacccg

SEQ ID NO: 1415 - DNA, 25 bp, SARS Virus
cctcatgagcacagtgtacacccgc

SEQ ID NO: 1416 - DNA, 25 bp, SARS Virus
ctcatgagcacgatgtacacccgct

SEQ ID NO: 1417 - DNA, 25 bp, SARS Virus
tcatgagcacggagtacacccgctt

SEQ ID NO: 1418 - DNA, 25 bp, SARS Virus
catgagcacggtatacacccgcttt

SEQ ID NO: 1419 - DNA, 25 bp, SARS Virus
atgagcacggtgaacacccgctttg

SEQ ID NO: 1420 - DNA, 25 bp, SARS Virus
tgagcacggtgtacacccgctttgg

SEQ ID NO: 1421 - DNA, 25 bp, SARS Virus
gagcacggtgtaaacccgctttggg

SEQ ID NO: 1422 - DNA, 25 bp, SARS Virus
agcacggtgtacacccgctttgggg

SEQ ID NO: 1423 - DNA, 25 bp, SARS Virus
gcacggtgtacaaccgctttggggt

SEQ ID NO: 1424 - DNA, 25 bp, SARS Virus
cacggtgtacacacgctttggggtt

SEQ ID NO: 1425 - DNA, 25 bp, SARS Virus
acggtgtacaccagctttggggtta

SEQ ID NO: 1426 - DNA, 25 bp, SARS Virus
cggtgtacacccactttggggttaa

SEQ ID NO: 1427 - DNA, 25 bp, SARS Virus
ggtgtacacccgatttggggttaac

SEQ ID NO: 1428 - DNA, 25 bp, SARS Virus
gtgtacacccgcattggggttaacg

SEQ ID NO: 1429 - DNA, 25 bp, SARS Virus
tgtacacccgctatggggttaacgt

SEQ ID NO: 1430 - DNA, 25 bp, SARS Virus
gtacacccgcttaggggttaacgta

SEQ ID NO: 1431 - DNA, 25 bp, SARS Virus
tacacccgctttagggttaacgtat

SEQ ID NO: 1432 - DNA, 25 bp, SARS Virus
acacccgctttgaggttaacgtatg

SEQ ID NO: 1433 - DNA, 25 bp, SARS Virus
cacccgctttggagttaacgtatgg

SEQ ID NO: 1434 - DNA, 25 bp, SARS Virus
acccgctttgggattaacgtatggc

SEQ ID NO: 1435 - DNA, 25 bp, SARS Virus
cccgctttggggataacgtatggcg

SEQ ID NO: 1436 - DNA, 25 bp, SARS Virus
ccgctttggggtaaacgtatggcgt

SEQ ID NO: 1437 - DNA, 25 bp, SARS Virus
cgctttggggttaacgtatggcgtt

SEQ ID NO: 1438 - DNA, 25 bp, SARS Virus
gctttggggttaacgtatggcgtta

SEQ ID NO: 1439 - DNA, 25 bp, SARS Virus
ctttggggttaaagtatggcgttac

SEQ ID NO: 1440 - DNA, 25 bp, SARS Virus
tttggggttaacatatggcgttaca

SEQ ID NO: 1441 - DNA, 25 bp, SARS Virus
ttggggttaacgaatggcgttacaa

SEQ ID NO: 1442 - DNA, 25 bp, SARS Virus
tggggttaacgtatggcgttacaag

SEQ ID NO: 1443 - DNA, 25 bp, SARS Virus
ggggttaacgtaaggcgttacaaga

SEQ ID NO: 1444 - DNA, 25 bp, SARS Virus
gggttaacgtatagcgttacaagaa

SEQ ID NO: 1445 - DNA, 25 bp, SARS Virus
ggttaacgtatgacgttacaagaag

SEQ ID NO: 1446 - DNA, 25 bp, SARS Virus
gttaacgtatggagttacaagaaga

SEQ ID NO: 1447 - DNA, 25 bp, SARS Virus
ttaacgtatggcattacaagaagaa

SEQ ID NO: 1448 - DNA, 25 bp, SARS Virus
taacgtatggcgatacaagaagaag

SEQ ID NO: 1449 - DNA, 25 bp, SARS Virus
aacgtatggcgtaacaagaagaagc

SEQ ID NO: 1450 - DNA, 25 bp, SARS Virus
acgtatggcgttacaagaagaagca

SEQ ID NO: 1451 - DNA, 25 bp, SARS Virus
cgtatggcgttaaaagaagaagcat

SEQ ID NO: 1452 - DNA, 25 bp, SARS Virus
gtatggcgttacaagaagaagcatt

SEQ ID NO: 1453 - DNA, 25 bp, SARS Virus
tatggcgttacaagaagaagcattc

SEQ ID NO: 1454 - DNA, 25 bp, SARS Virus
atggcgttacaaaaagaagcattct

SEQ ID NO: 1455 - DNA, 25 bp, SARS Virus
tggcgttacaagaagaagcattctt

SEQ ID NO: 1456 - DNA, 25 bp, SARS Virus
ggcgttacaagaagaagcattcttg

SEQ ID NO: 1457 - DNA, 25 bp, SARS Virus
gcgttacaagaaaaagcattcttgc

SEQ ID NO: 1458 - DNA, 25 bp, SARS Virus
cgttacaagaagaagcattcttgcc

SEQ ID NO: 1459 - DNA, 25 bp, SARS Virus
gttacaagaagaagcattcttgcca

SEQ ID NO: 1460 - DNA, 25 bp, SARS Virus
ttacaagaagaaacattcttgccat

SEQ ID NO: 1461 - DNA, 25 bp, SARS Virus
tacaagaagaagaattcttgccatt

SEQ ID NO: 1462 - DNA, 25 bp, SARS Virus
acaagaagaagcattcttgccatta

SEQ ID NO: 1463 - DNA, 25 bp, SARS Virus
caagaagaagcaatcttgccattat

SEQ ID NO: 1464 - DNA, 25 bp, SARS Virus
aagaagaagcatacttgccattatt

SEQ ID NO: 1465 - DNA, 25 bp, SARS Virus
agaagaagcattattgccattattc

SEQ ID NO: 1466 - DNA, 25 bp, SARS Virus
gaagaagcattcatgccattattcc

SEQ ID NO: 1467 - DNA, 25 bp, SARS Virus
aagaagcattctagccattattccc

SEQ ID NO: 1468 - DNA, 25 bp, SARS Virus
agaagcattcttaccattattccct

SEQ ID NO: 1469 - DNA, 25 bp, SARS Virus
gaagcattcttgacattattccctc

SEQ ID NO: 1470 - DNA, 25 bp, SARS Virus
aagcattcttgcaattattccctcg

SEQ ID NO: 1471 - DNA, 25 bp, SARS Virus
agcattcttgccattattccctcgg

SEQ ID NO: 1472 - DNA, 25 bp, SARS Virus
gcattcttgccaatattccctcggc

SEQ ID NO: 1473 - DNA, 25 bp, SARS Virus
cattcttgccataattccctcggcc

SEQ ID NO: 1474 - DNA, 25 bp, SARS Virus
attcttgccattattccctcggcca

SEQ ID NO: 1475 - DNA, 25 bp, SARS Virus
ttcttgccattaatccctcggccac

SEQ ID NO: 1476 - DNA, 25 bp, SARS Virus
tcttgccattataccctcggccacc

SEQ ID NO: 1477 - DNA, 25 bp, SARS Virus
cttgccattattacctcggccacca

SEQ ID NO: 1478 - DNA, 25 bp, SARS Virus
ttgccattattcactcggccaccag

SEQ ID NO: 1479 - DNA, 25 bp, SARS Virus
tgccattattccatcggccaccagt

SEQ ID NO: 1480 - DNA, 25 bp, SARS Virus
gccattattcccacggccaccagta

SEQ ID NO: 1481 - DNA, 25 bp, SARS Virus
ccattattccctaggccaccagtat

SEQ ID NO: 1482 - DNA, 25 bp, SARS Virus
cattattccctcagccaccagtatc

SEQ ID NO: 1483 - DNA, 25 bp, SARS Virus
attattccctcgaccaccagtatcg

SEQ ID NO: 1484 - DNA, 25 bp, SARS Virus
ttattccctcggacaccagtatcga

SEQ ID NO: 1485 - DNA, 25 bp, SARS Virus
tattccctcggcaaccagtatcgat

SEQ ID NO: 1486 - DNA, 25 bp, SARS Virus
attccctcggccaccagtatcgata

SEQ ID NO: 1487 - DNA, 25 bp, SARS Virus
ttccctcggccaacagtatcgatac

SEQ ID NO: 1488 - DNA, 25 bp, SARS Virus
tccctcggccacaagtatcgatacc

SEQ ID NO: 1489 - DNA, 25 bp, SARS Virus
ccctcggccaccagtatcgataccg

SEQ ID NO: 1490 - DNA, 25 bp, SARS Virus
cctcggccaccaatatcgataccgt

SEQ ID NO: 1491 - DNA, 25 bp, SARS Virus
ctcggccaccagaatcgataccgta

SEQ ID NO: 1492 - DNA, 25 bp, SARS Virus
tcggccaccagtatcgataccgtag

SEQ ID NO: 1493 - DNA, 25 bp, SARS Virus
cggccaccagtaacgataccgtagc

SEQ ID NO: 1494 - DNA, 25 bp, SARS Virus
ggccaccagtatagataccgtagct

SEQ ID NO: 1495 - DNA, 25 bp, SARS Virus
gccaccagtatcaataccgtagcta

SEQ ID NO: 1496 - DNA, 25 bp, SARS Virus
ccaccagtatcgataccgtagctag

SEQ ID NO: 1497 - DNA, 25 bp, SARS Virus
caccagtatcgaaaccgtagctaga

SEQ ID NO: 1498 - DNA, 25 bp, SARS Virus
accagtatcgataccgtagctagat

SEQ ID NO: 1499 - DNA, 25 bp, SARS Virus
ccagtatcgataacgtagctagatt

SEQ ID NO: 1500 - DNA, 25 bp, SARS Virus
cagtatcgatacagtagctagattt

SEQ ID NO: 1501 - DNA, 25 bp, SARS Virus
agtatcgataccatagctagatttc

SEQ ID NO: 1502 - DNA, 25 bp, SARS Virus
gtatcgataccgaagctagatttca

SEQ ID NO: 1503 - DNA, 25 bp, SARS Virus
tatcgataccgtagctagatttcag

SEQ ID NO: 1504 - DNA, 25 bp, SARS Virus
atcgataccgtaactagatttcaga

SEQ ID NO: 1505 - DNA, 25 bp, SARS Virus
tcgataccgtagatagatttcagaa

SEQ ID NO: 1506 - DNA, 25 bp, SARS Virus
cgataccgtagcaagatttcagaat

SEQ ID NO: 1507 - DNA, 25 bp, SARS Virus
gataccgtagctagatttcagaata

SEQ ID NO: 1508 - DNA, 25 bp, SARS Virus
ataccgtagctaaatttcagaatac

SEQ ID NO: 1509 - DNA, 25 bp, SARS Virus
taccgtagctagatttcagaatact

SEQ ID NO: 1510 - DNA, 25 bp, SARS Virus
accgtagctagaattcagaatactg

SEQ ID NO: 1511 - DNA, 25 bp, SARS Virus
ccgtagctagatatcagaatactga

SEQ ID NO: 1512 - DNA, 25 bp, SARS Virus
cgtagctagattacagaatactgaa

SEQ ID NO: 1513 - DNA, 25 bp, SARS Virus
gtagctagatttaagaatactgaat

SEQ ID NO: 1514 - DNA, 25 bp, SARS Virus
tagctagatttcagaatactgaatc

SEQ ID NO: 1515 - DNA, 25 bp, SARS Virus
agctagatttcaaaatactgaatcc

SEQ ID NO: 1516 - DNA, 25 bp, SARS Virus
gctagatttcagaatactgaatcca

SEQ ID NO: 1517 - DNA, 25 bp, SARS Virus
ctagatttcagaatactgaatccac

SEQ ID NO: 1518 - DNA, 25 bp, SARS Virus
tagatttcagaaaactgaatccact

SEQ ID NO: 1519 - DNA, 25 bp, SARS Virus
agatttcagaatactgaatccactg

SEQ ID NO: 1520 - DNA, 25 bp, SARS Virus
gatttcagaataatgaatccactgc

SEQ ID NO: 1521 - DNA, 25 bp, SARS Virus
atttcagaatacagaatccactgct

SEQ ID NO: 1522 - DNA, 25 bp, SARS Virus
tttcagaatactaaatccactgctc

SEQ ID NO: 1523 - DNA, 25 bp, SARS Virus
ttcagaatactgaatccactgctcg

SEQ ID NO: 1524 - DNA, 25 bp, SARS Virus
tcagaatactgaatccactgctcga

SEQ ID NO: 1525 - DNA, 25 bp, SARS Virus
cagaatactgaaaccactgctcgaa

SEQ ID NO: 1526 - DNA, 25 bp, SARS Virus
agaatactgaatacactgctcgaac

SEQ ID NO: 1527 - DNA, 25 bp, SARS Virus
gaatactgaatcaactgctcgaacc

SEQ ID NO: 1528 - DNA, 25 bp, SARS Virus
aatactgaatccactgctcgaaccg

SEQ ID NO: 1529 - DNA, 25 bp, SARS Virus
atactgaatccaatgctcgaaccgt

SEQ ID NO: 1530 - DNA, 25 bp, SARS Virus
tactgaatccacagctcgaaccgtg

SEQ ID NO: 1531 - DNA, 25 bp, SARS Virus
actgaatccactactcgaaccgtga

SEQ ID NO: 1532 - DNA, 25 bp, SARS Virus
ctgaatccactgatcgaaccgtgac

SEQ ID NO: 1533 - DNA, 25 bp, SARS Virus
tgaatccactgcacgaaccgtgact

SEQ ID NO: 1534 - DNA, 25 bp, SARS Virus
gaatccactgctagaaccgtgacta

SEQ ID NO: 1535 - DNA, 25 bp, SARS Virus
aatccactgctcaaaccgtgactag

SEQ ID NO: 1536 - DNA, 25 bp, SARS Virus
atccactgctcgaaccgtgactagg

SEQ ID NO: 1537 - DNA, 25 bp, SARS Virus
tccactgctcgaaccgtgactaggg

SEQ ID NO: 1538 - DNA, 25 bp, SARS Virus
ccactgctcgaaacgtgactagggt

SEQ ID NO: 1539 - DNA, 25 bp, SARS Virus
cactgctcgaacagtgactagggta

SEQ ID NO: 1540 - DNA, 25 bp, SARS Virus
actgctcgaaccatgactagggtaa

SEQ ID NO: 1541 - DNA, 25 bp, SARS Virus
ctgctcgaaccgagactagggtaac

SEQ ID NO: 1542 - DNA, 25 bp, SARS Virus
tgctcgaaccgtaactagggtaact

SEQ ID NO: 1543 - DNA, 25 bp, SARS Virus
gctcgaaccgtgactagggtaactt

SEQ ID NO: 1544 - DNA, 25 bp, SARS Virus
ctcgaaccgtgaatagggtaacttc

SEQ ID NO: 1545 - DNA, 25 bp, SARS Virus
tcgaaccgtgacaagggtaacttct

SEQ ID NO: 1546 - DNA, 25 bp, SARS Virus
cgaaccgtgactagggtaacttcta

SEQ ID NO: 1547 - DNA, 25 bp, SARS Virus
gaaccgtgactaaggtaacttctaa

SEQ ID NO: 1548 - DNA, 25 bp, SARS Virus
aaccgtgactagagtaacttctaat

SEQ ID NO: 1549 - DNA, 25 bp, SARS Virus
accgtgactaggataacttctaata

SEQ ID NO: 1550 - DNA, 25 bp, SARS Virus
ccgtgactagggaaacttctaatac

SEQ ID NO: 1551 - DNA, 25 bp, SARS Virus
cgtgactagggtaacttctaatact

SEQ ID NO: 1552 - DNA, 25 bp, SARS Virus
gtgactagggtaacttctaatactt

SEQ ID NO: 1553 - DNA, 25 bp, SARS Virus
tgactagggtaaattctaatacttg

SEQ ID NO: 1554 - DNA, 25 bp, SARS Virus
gactagggtaacatctaatacttgt

SEQ ID NO: 1555 - DNA, 25 bp, SARS Virus
actagggtaactactaatacttgtt

SEQ ID NO: 1556 - DNA, 25 bp, SARS Virus
ctagggtaacttataatacttgttt

SEQ ID NO: 1557 - DNA, 25 bp, SARS Virus
tagggtaacttcaaatacttgtttt

SEQ ID NO: 1558 - DNA, 25 bp, SARS Virus
agggtaacttctaatacttgttttg

SEQ ID NO: 1559 - DNA, 25 bp, SARS Virus
gggtaacttctaatacttgttttga

SEQ ID NO: 1560 - DNA, 25 bp, SARS Virus
ggtaacttctaaaacttgttttgac

SEQ ID NO: 1561 - DNA, 25 bp, SARS Virus
gtaacttctaatacttgttttgacc

SEQ ID NO: 1562 - DNA, 25 bp, SARS Virus
taacttctaataattgttttgacct

SEQ ID NO: 1563 - DNA, 25 bp, SARS Virus
aacttctaatacatgttttgacctt

SEQ ID NO: 1564 - DNA, 25 bp, SARS Virus
acttctaatactagttttgaccttg

SEQ ID NO: 1565 - DNA, 25 bp, SARS Virus
cttctaatacttattttgaccttgt

SEQ ID NO: 1566 - DNA, 25 bp, SARS Virus
ttctaatacttgatttgaccttgtg

SEQ ID NO: 1567 - DNA, 25 bp, SARS Virus
tctaatacttgtattgaccttgtga

SEQ ID NO: 1568 - DNA, 25 bp, SARS Virus
ctaatacttgttatgaccttgtgat

SEQ ID NO: 1569 - DNA, 25 bp, SARS Virus
taatacttgtttagaccttgtgatt

SEQ ID NO: 1570 - DNA, 25 bp, SARS Virus
aatacttgttttaaccttgtgattc

SEQ ID NO: 1571 - DNA, 25 bp, SARS Virus
atacttgttttgaccttgtgattcg

SEQ ID NO: 1572 - DNA, 25 bp, SARS Virus
tacttgttttgaacttgtgattcgt

SEQ ID NO: 1573 - DNA, 25 bp, SARS Virus
acttgttttgacattgtgattcgta

SEQ ID NO: 1574 - DNA, 25 bp, SARS Virus
cttgttttgaccatgtgattcgtac

SEQ ID NO: 1575 - DNA, 25 bp, SARS Virus
ttgttttgacctagtgattcgtacc

SEQ ID NO: 1576 - DNA, 25 bp, SARS Virus
tgttttgaccttatgattcgtaccg

SEQ ID NO: 1577 - DNA, 25 bp, SARS Virus
gttttgaccttgagattcgtaccgt

SEQ ID NO: 1578 - DNA, 25 bp, SARS Virus
ttttgaccttgtaattcgtaccgtc

SEQ ID NO: 1579 - DNA, 25 bp, SARS Virus
tttgaccttgtgattcgtaccgtca

SEQ ID NO: 1580 - DNA, 25 bp, SARS Virus
ttgaccttgtgaatcgtaccgtcac

SEQ ID NO: 1581 - DNA, 25 bp, SARS Virus
tgaccttgtgatacgtaccgtcacc

SEQ ID NO: 1582 - DNA, 25 bp, SARS Virus
gaccttgtgattagtaccgtcacca

SEQ ID NO: 1583 - DNA, 25 bp, SARS Virus
accttgtgattcataccgtcaccac

SEQ ID NO: 1584 - DNA, 25 bp, SARS Virus
ccttgtgattcgaaccgtcaccacg

SEQ ID NO: 1585 - DNA, 25 bp, SARS Virus
cttgtgattcgtaccgtcaccacgt

SEQ ID NO: 1586 - DNA, 25 bp, SARS Virus
ttgtgattcgtaacgtcaccacgtg

SEQ ID NO: 1587 - DNA, 25 bp, SARS Virus
tgtgattcgtacagtcaccacgtga

SEQ ID NO: 1588 - DNA, 25 bp, SARS Virus
gtgattcgtaccatcaccacgtgag

SEQ ID NO: 1589 - DNA, 25 bp, SARS Virus
tgattcgtaccgacaccacgtgagg

SEQ ID NO: 1590 - DNA, 25 bp, SARS Virus
gattcgtaccgtaaccacgtgaggc

SEQ ID NO: 1591 - DNA, 25 bp, SARS Virus
attcgtaccgtcaccacgtgaggca

SEQ ID NO: 1592 - DNA, 25 bp, SARS Virus
ttcgtaccgtcaacacgtgaggcac

SEQ ID NO: 1593 - DNA, 25 bp, SARS Virus
cctctcggaacacgaaccacagttg

SEQ ID NO: 1594 - DNA, 25 bp, SARS Virus
ctctcggaacaacaaccacagttgc

SEQ ID NO: 1595 - DNA, 25 bp, SARS Virus
tctcggaacaagcaccacagttgct

SEQ ID NO: 1596 - DNA, 25 bp, SARS Virus
ctcggaacaagacccacagttgctc

SEQ ID NO: 1597 - DNA, 25 bp, SARS Virus
tcggaacaagaaccacagttgctct

SEQ ID NO: 1598 - DNA, 25 bp, SARS Virus
cggaacaagaaccacagttgctctt

SEQ ID NO: 1599 - DNA, 25 bp, SARS Virus
ggaacaagaaccccagttgctcttt

SEQ ID NO: 1600 - DNA, 25 bp, SARS Virus
gaacaagaaccacagttgctctttt

SEQ ID NO: 1601 - DNA, 25 bp, SARS Virus
aacaagaaccaccgttgctcttttg

SEQ ID NO: 1602 - DNA, 25 bp, SARS Virus
acaagaaccacacttgctcttttgt

SEQ ID NO: 1603 - DNA, 25 bp, SARS Virus
caagaaccacagctgctcttttgtg

SEQ ID NO: 1604 - DNA, 25 bp, SARS Virus
aagaaccacagtcgctcttttgtgt

SEQ ID NO: 1605 - DNA, 25 bp, SARS Virus
agaaccacagttcctcttttgtgtg

SEQ ID NO: 1606 - DNA, 25 bp, SARS Virus
gaaccacagttgctcttttgtgtgc

SEQ ID NO: 1607 - DNA, 25 bp, SARS Virus
aaccacagttgcccttttgtgtgca

SEQ ID NO: 1608 - DNA, 25 bp, SARS Virus
accacagttgctcttttgtgtgcag

SEQ ID NO: 1609 - DNA, 25 bp, SARS Virus
ccacagttgctcctttgtgtgcagg

SEQ ID NO: 1610 - DNA, 25 bp, SARS Virus
cacagttgctctcttgtgtgcaggt

SEQ ID NO: 1611 - DNA, 25 bp, SARS Virus
acagttgctcttctgtgtgcaggtt

SEQ ID NO: 1612 - DNA, 25 bp, SARS Virus
cagttgctctttcgtgtgcaggttg

SEQ ID NO: 1613 - DNA, 25 bp, SARS Virus
agttgctcttttctgtgcaggttga

SEQ ID NO: 1614 - DNA, 25 bp, SARS Virus
gttgctcttttgcgtgcaggttgag

SEQ ID NO: 1615 - DNA, 25 bp, SARS Virus
ttgctcttttgtctgcaggttgagt

SEQ ID NO: 1616 - DNA, 25 bp, SARS Virus
tgctcttttgtgcgcaggttgagtc

SEQ ID NO: 1617 - DNA, 25 bp, SARS Virus
gctcttttgtgtccaggttgagtca

SEQ ID NO: 1618 - DNA, 25 bp, SARS Virus
ctcttttgtgtgcaggttgagtcaa

SEQ ID NO: 1619 - DNA, 25 bp, SARS Virus
tcttttgtgtgccggttgagtcaaa

SEQ ID NO: 1620 - DNA, 25 bp, SARS Virus
cttttgtgtgcacgttgagtcaaac

SEQ ID NO: 1621 - DNA, 25 bp, SARS Virus
ttttgtgtgcagcttgagtcaaacg

SEQ ID NO: 1622 - DNA, 25 bp, SARS Virus
tttgtgtgcaggctgagtcaaacgg

SEQ ID NO: 1623 - DNA, 25 bp, SARS Virus
ttgtgtgcaggtcgagtcaaacgga

SEQ ID NO: 1624 - DNA, 25 bp, SARS Virus
tgtgtgcaggttcagtcaaacggac

SEQ ID NO: 1625 - DNA, 25 bp, SARS Virus
gtgtgcaggttgcgtcaaacggaca

SEQ ID NO: 1626 - DNA, 25 bp, SARS Virus
tgtgcaggttgactcaaacggacag

SEQ ID NO: 1627 - DNA, 25 bp, SARS Virus
gtgcaggttgagccaaacggacagg

SEQ ID NO: 1628 - DNA, 25 bp, SARS Virus
tgcaggttgagtcaaacggacagga

SEQ ID NO: 1629 - DNA, 25 bp, SARS Virus
gcaggttgagtccaacggacaggaa

SEQ ID NO: 1630 - DNA, 25 bp, SARS Virus
caggttgagtcacacggacaggaag

SEQ ID NO: 1631 - DNA, 25 bp, SARS Virus
aggttgagtcaaccggacaggaagt

SEQ ID NO: 1632 - DNA, 25 bp, SARS Virus
ggttgagtcaaacggacaggaagtc

SEQ ID NO: 1633 - DNA, 25 bp, SARS Virus
gttgagtcaaaccgacaggaagtcc

SEQ ID NO: 1634 - DNA, 25 bp, SARS Virus
ttgagtcaaacgcacaggaagtcca

SEQ ID NO: 1635 - DNA, 25 bp, SARS Virus
tgagtcaaacggccaggaagtccaa

SEQ ID NO: 1636 - DNA, 25 bp, SARS Virus
gagtcaaacggacaggaagtccaat

SEQ ID NO: 1637 - DNA, 25 bp, SARS Virus
agtcaaacggaccggaagtccaatc

SEQ ID NO: 1638 - DNA, 25 bp, SARS Virus
gtcaaacggacacgaagtccaatct

SEQ ID NO: 1639 - DNA, 25 bp, SARS Virus
tcaaacggacagcaagtccaatctc

SEQ ID NO: 1640 - DNA, 25 bp, SARS Virus
caaacggacaggcagtccaatctct

SEQ ID NO: 1641 - DNA, 25 bp, SARS Virus
aaacggacaggacgtccaatctctg

SEQ ID NO: 1642 - DNA, 25 bp, SARS Virus
aacggacaggaactccaatctctgc

SEQ ID NO: 1643 - DNA, 25 bp, SARS Virus
acggacaggaagcccaatctctgca

SEQ ID NO: 1644 - DNA, 25 bp, SARS Virus
cggacaggaagtccaatctctgcac

SEQ ID NO: 1645 - DNA, 25 bp, SARS Virus
ggacaggaagtccaatctctgcacg

SEQ ID NO: 1646 - DNA, 25 bp, SARS Virus
gacaggaagtcccatctctgcacga

SEQ ID NO: 1647 - DNA, 25 bp, SARS Virus
acaggaagtccactctctgcacgat

SEQ ID NO: 1648 - DNA, 25 bp, SARS Virus
caggaagtccaacctctgcacgatc

SEQ ID NO: 1649 - DNA, 25 bp, SARS Virus
aggaagtccaatctctgcacgatca

SEQ ID NO: 1650 - DNA, 25 bp, SARS Virus
ggaagtccaatccctgcacgatcac

SEQ ID NO: 1651 - DNA, 25 bp, SARS Virus
gaagtccaatctctgcacgatcacg

SEQ ID NO: 1652 - DNA, 25 bp, SARS Virus
aagtccaatctccgcacgatcacgc

SEQ ID NO: 1653 - DNA, 25 bp, SARS Virus
agtccaatctctccacgatcacgca

SEQ ID NO: 1654 - DNA, 25 bp, SARS Virus
gtccaatctctgcacgatcacgcac

SEQ ID NO: 1655 - DNA, 25 bp, SARS Virus
tccaatctctgcccgatcacgcacc

SEQ ID NO: 1656 - DNA, 25 bp, SARS Virus
ccaatctctgcacgatcacgcaccg

SEQ ID NO: 1657 - DNA, 25 bp, SARS Virus
caatctctgcaccatcacgcaccga

SEQ ID NO: 1658 - DNA, 25 bp, SARS Virus
aatctctgcacgctcacgcaccgaa

SEQ ID NO: 1659 - DNA, 25 bp, SARS Virus
atctctgcacgaccacgcaccgaag

SEQ ID NO: 1660 - DNA, 25 bp, SARS Virus
tctctgcacgatcacgcaccgaagc

SEQ ID NO: 1661 - DNA, 25 bp, SARS Virus
ctctgcacgatcccgcaccgaagcc

SEQ ID NO: 1662 - DNA, 25 bp, SARS Virus
tctgcacgatcacgcaccgaagccc

SEQ ID NO: 1663 - DNA, 25 bp, SARS Virus
ctgcacgatcacccaccgaagcccc

SEQ ID NO: 1664 - DNA, 25 bp, SARS Virus
tgcacgatcacgcaccgaagcccct

SEQ ID NO: 1665 - DNA, 25 bp, SARS Virus
gcacgatcacgccccgaagcccctg

SEQ ID NO: 1666 - DNA, 25 bp, SARS Virus
cacgatcacgcaccgaagcccctga

SEQ ID NO: 1667 - DNA, 25 bp, SARS Virus
acgatcacgcaccgaagcccctgag

SEQ ID NO: 1668 - DNA, 25 bp, SARS Virus
cgatcacgcacccaagcccctgaga

SEQ ID NO: 1669 - DNA, 25 bp, SARS Virus
gatcacgcaccgcagcccctgagac

SEQ ID NO: 1670 - DNA, 25 bp, SARS Virus
atcacgcaccgacgcccctgagaca

SEQ ID NO: 1671 - DNA, 25 bp, SARS Virus
tcacgcaccgaaccccctgagacac

SEQ ID NO: 1672 - DNA, 25 bp, SARS Virus
cacgcaccgaagcccctgagacacc

SEQ ID NO: 1673 - DNA, 25 bp, SARS Virus
acgcaccgaagcccctgagacacct

SEQ ID NO: 1674 - DNA, 25 bp, SARS Virus
cgcaccgaagcccctgagacacctt

SEQ ID NO: 1675 - DNA, 25 bp, SARS Virus
gcaccgaagcccctgagacaccttc

SEQ ID NO: 1676 - DNA, 25 bp, SARS Virus
caccgaagcccccgagacaccttct

SEQ ID NO: 1677 - DNA, 25 bp, SARS Virus
accgaagcccctcagacaccttctc

SEQ ID NO: 1678 - DNA, 25 bp, SARS Virus
ccgaagcccctgcgacaccttctcc

SEQ ID NO: 1679 - DNA, 25 bp, SARS Virus
cgaagcccctgacacaccttctccg

SEQ ID NO: 1680 - DNA, 25 bp, SARS Virus
gaagcccctgagccaccttctccgg

SEQ ID NO: 1681 - DNA, 25 bp, SARS Virus
aagcccctgagacaccttctccggg

SEQ ID NO: 1682 - DNA, 25 bp, SARS Virus
agcccctgagaccccttctccggga

SEQ ID NO: 1683 - DNA, 25 bp, SARS Virus
gcccctgagacaccttctccgggat

SEQ ID NO: 1684 - DNA, 25 bp, SARS Virus
cccctgagacaccttctccgggata

SEQ ID NO: 1685 - DNA, 25 bp, SARS Virus
ccctgagacaccctctccgggatag

SEQ ID NO: 1686 - DNA, 25 bp, SARS Virus
cctgagacacctcctccgggatagc

SEQ ID NO: 1687 - DNA, 25 bp, SARS Virus
ctgagacaccttctccgggatagcc

SEQ ID NO: 1688 - DNA, 25 bp, SARS Virus
tgagacaccttccccgggatagcct

SEQ ID NO: 1689 - DNA, 25 bp, SARS Virus
gagacaccttctccgggatagcctc

SEQ ID NO: 1690 - DNA, 25 bp, SARS Virus
agacaccttctccgggatagcctcc

SEQ ID NO: 1691 - DNA, 25 bp, SARS Virus
gacaccttctcccggatagcctccg

SEQ ID NO: 1692 - DNA, 25 bp, SARS Virus
acaccttctccgcgatagcctccgt

SEQ ID NO: 1693 - DNA, 25 bp, SARS Virus
caccttctccggcatagcctccgtg

SEQ ID NO: 1694 - DNA, 25 bp, SARS Virus
accttctccgggctagcctccgtgc

SEQ ID NO: 1695 - DNA, 25 bp, SARS Virus
ccttctccgggacagcctccgtgca

SEQ ID NO: 1696 - DNA, 25 bp, SARS Virus
cttctccgggatcgcctccgtgcac

SEQ ID NO: 1697 - DNA, 25 bp, SARS Virus
ttctccgggataccctccgtgcact

SEQ ID NO: 1698 - DNA, 25 bp, SARS Virus
tctccgggatagcctccgtgcactt

SEQ ID NO: 1699 - DNA, 25 bp, SARS Virus
ctccgggatagcctccgtgcacttg

SEQ ID NO: 1700 - DNA, 25 bp, SARS Virus
tccgggatagcccccgtgcacttgt

SEQ ID NO: 1701 - DNA, 25 bp, SARS Virus
ccgggatagcctccgtgcacttgtg

SEQ ID NO: 1702 - DNA, 25 bp, SARS Virus
cgggatagcctccgtgcacttgtgg

SEQ ID NO: 1703 - DNA, 25 bp, SARS Virus
gggatagcctccctgcacttgtgga

SEQ ID NO: 1704 - DNA, 25 bp, SARS Virus
ggatagcctccgcgcacttgtggag

SEQ ID NO: 1705 - DNA, 25 bp, SARS Virus
gatagcctccgtccacttgtggagt

SEQ ID NO: 1706 - DNA, 25 bp, SARS Virus
atagcctccgtgcacttgtggagtt

SEQ ID NO: 1707 - DNA, 25 bp, SARS Virus
tagcctccgtgcccttgtggagttt

SEQ ID NO: 1708 - DNA, 25 bp, SARS Virus
agcctccgtgcacttgtggagtttt

SEQ ID NO: 1709 - DNA, 25 bp, SARS Virus
gcctccgtgcacctgtggagttttt

SEQ ID NO: 1710 - DNA, 25 bp, SARS Virus
cctccgtgcactcgtggagttttta

SEQ ID NO: 1711 - DNA, 25 bp, SARS Virus
ctccgtgcacttctggagtttttac

SEQ ID NO: 1712 - DNA, 25 bp, SARS Virus
tccgtgcacttgcggagtttttacc

SEQ ID NO: 1713 - DNA, 25 bp, SARS Virus
ccgtgcacttgtcgagtttttaccg

SEQ ID NO: 1714 - DNA, 25 bp, SARS Virus
cgtgcacttgtgcagtttttaccgt

SEQ ID NO: 1715 - DNA, 25 bp, SARS Virus
gtgcacttgtggcgtttttaccgtg

SEQ ID NO: 1716 - DNA, 25 bp, SARS Virus
tgcacttgtggactttttaccgtga

SEQ ID NO: 1717 - DNA, 25 bp, SARS Virus
gcacttgtggagcttttaccgtgaa

SEQ ID NO: 1718 - DNA, 25 bp, SARS Virus
cacttgtggagtctttaccgtgaac

SEQ ID NO: 1719 - DNA, 25 bp, SARS Virus
acttgtggagttcttaccgtgaaca

SEQ ID NO: 1720 - DNA, 25 bp, SARS Virus
cttgtggagtttctaccgtgaacac

SEQ ID NO: 1721 - DNA, 25 bp, SARS Virus
ttgtggagttttcaccgtgaacacc

SEQ ID NO: 1722 - DNA, 25 bp, SARS Virus
tgtggagtttttcccgtgaacacca

SEQ ID NO: 1723 - DNA, 25 bp, SARS Virus
gtggagtttttaccgtgaacaccag

SEQ ID NO: 1724 - DNA, 25 bp, SARS Virus
tggagtttttaccgtgaacaccaga

SEQ ID NO: 1725 - DNA, 25 bp, SARS Virus
ggagtttttaccctgaacaccagat

SEQ ID NO: 1726 - DNA, 25 bp, SARS Virus
gagtttttaccgcgaacaccagatc

SEQ ID NO: 1727 - DNA, 25 bp, SARS Virus
agtttttaccgtcaacaccagatca

SEQ ID NO: 1728 - DNA, 25 bp, SARS Virus
gtttttaccgtgcacaccagatcat

SEQ ID NO: 1729 - DNA, 25 bp, SARS Virus
tttttaccgtgaccaccagatcatc

SEQ ID NO: 1730 - DNA, 25 bp, SARS Virus
ttttaccgtgaacaccagatcatct

SEQ ID NO: 1731 - DNA, 25 bp, SARS Virus
tttaccgtgaaccccagatcatctc

SEQ ID NO: 1732 - DNA, 25 bp, SARS Virus
ttaccgtgaacaccagatcatctcg

SEQ ID NO: 1733 - DNA, 25 bp, SARS Virus
taccgtgaacaccagatcatctcga

SEQ ID NO: 1734 - DNA, 25 bp, SARS Virus
accgtgaacacccgatcatctcgac

SEQ ID NO: 1735 - DNA, 25 bp, SARS Virus
ccgtgaacaccacatcatctcgacc

SEQ ID NO: 1736 - DNA, 25 bp, SARS Virus
cgtgaacaccagctcatctcgacct

SEQ ID NO: 1737 - DNA, 25 bp, SARS Virus
gtgaacaccagaccatctcgacctt

SEQ ID NO: 1738 - DNA, 25 bp, SARS Virus
tgaacaccagatcatctcgaccttt

SEQ ID NO: 1739 - DNA, 25 bp, SARS Virus
gaacaccagatcctctcgacctttt

SEQ ID NO: 1740 - DNA, 25 bp, SARS Virus
aacaccagatcacctcgaccttttt

SEQ ID NO: 1741 - DNA, 25 bp, SARS Virus
acaccagatcatctcgacctttttc

SEQ ID NO: 1742 - DNA, 25 bp, SARS Virus
caccagatcatcccgacctttttcc

SEQ ID NO: 1743 - DNA, 25 bp, SARS Virus
accagatcatctcgacctttttccg

SEQ ID NO: 1744 - DNA, 25 bp, SARS Virus
ccagatcatctccacctttttccgc

SEQ ID NO: 1745 - DNA, 25 bp, SARS Virus
cagatcatctcgccctttttccgca

SEQ ID NO: 1746 - DNA, 25 bp, SARS Virus
agatcatctcgacctttttccgcat

SEQ ID NO: 1747 - DNA, 25 bp, SARS Virus
gatcatctcgacctttttccgcatg

SEQ ID NO: 1748 - DNA, 25 bp, SARS Virus
atcatctcgacccttttccgcatga

SEQ ID NO: 1749 - DNA, 25 bp, SARS Virus
tcatctcgacctctttccgcatgac

SEQ ID NO: 1750 - DNA, 25 bp, SARS Virus
catctcgaccttcttccgcatgacg

SEQ ID NO: 1751 - DNA, 25 bp, SARS Virus
atctcgacctttctccgcatgacgg

SEQ ID NO: 1752 - DNA, 25 bp, SARS Virus
tctcgaccttttcccgcatgacggg

SEQ ID NO: 1753 - DNA, 25 bp, SARS Virus
ctcgacctttttccgcatgacgggg

SEQ ID NO: 1754 - DNA, 25 bp, SARS Virus
tcgacctttttccgcatgacggggt

SEQ ID NO: 1755 - DNA, 25 bp, SARS Virus
cgacctttttccccatgacggggtc

SEQ ID NO: 1756 - DNA, 25 bp, SARS Virus
gacctttttccgcatgacggggtcg

SEQ ID NO: 1757 - DNA, 25 bp, SARS Virus
acctttttccgcctgacggggtcga

SEQ ID NO: 1758 - DNA, 25 bp, SARS Virus
cctttttccgcacgacggggtcgaa

SEQ ID NO: 1759 - DNA, 25 bp, SARS Virus
ctttttccgcatcacggggtcgaac

SEQ ID NO: 1760 - DNA, 25 bp, SARS Virus
tttttccgcatgccggggtcgaact

SEQ ID NO: 1761 - DNA, 25 bp, SARS Virus
ttttccgcatgacggggtcgaactt

SEQ ID NO: 1762 - DNA, 25 bp, SARS Virus
tttccgcatgaccgggtcgaacttg

SEQ ID NO: 1763 - DNA, 25 bp, SARS Virus
ttccgcatgacgcggtcgaacttgt

SEQ ID NO: 1764 - DNA, 25 bp, SARS Virus
tccgcatgacggcgtcgaacttgtc

SEQ ID NO: 1765 - DNA, 25 bp, SARS Virus
ccgcatgacgggctcgaacttgtcg

SEQ ID NO: 1766 - DNA, 25 bp, SARS Virus
cgcatgacggggccgaacttgtcgg

SEQ ID NO: 1767 - DNA, 25 bp, SARS Virus
gcatgacggggtcgaacttgtcggg

SEQ ID NO: 1768 - DNA, 25 bp, SARS Virus
catgacggggtccaacttgtcggga

SEQ ID NO: 1769 - DNA, 25 bp, SARS Virus
atgacggggtcgcacttgtcgggat

SEQ ID NO: 1770 - DNA, 25 bp, SARS Virus
tgacggggtcgaccttgtcgggata

SEQ ID NO: 1771 - DNA, 25 bp, SARS Virus
gacggggtcgaacttgtcgggatac

SEQ ID NO: 1772 - DNA, 25 bp, SARS Virus
acggggtcgaacctgtcgggataca

SEQ ID NO: 1773 - DNA, 25 bp, SARS Virus
cggggtcgaactcgtcgggatacac

SEQ ID NO: 1774 - DNA, 25 bp, SARS Virus
ggggtcgaacttctcgggatacaca

SEQ ID NO: 1775 - DNA, 25 bp, SARS Virus
gggtcgaacttgccgggatacacaa

SEQ ID NO: 1776 - DNA, 25 bp, SARS Virus
ggtcgaacttgtcgggatacacaag

SEQ ID NO: 1777 - DNA, 25 bp, SARS Virus
gtcgaacttgtccggatacacaagt

SEQ ID NO: 1778 - DNA, 25 bp, SARS Virus
tcgaacttgtcgcgatacacaagta

SEQ ID NO: 1779 - DNA, 25 bp, SARS Virus
cgaacttgtcggcatacacaagtaa

SEQ ID NO: 1780 - DNA, 25 bp, SARS Virus
gaacttgtcgggctacacaagtaat

SEQ ID NO: 1781 - DNA, 25 bp, SARS Virus
aacttgtcgggacacacaagtaatt

SEQ ID NO: 1782 - DNA, 25 bp, SARS Virus
acttgtcgggatccacaagtaattt

SEQ ID NO: 1783 - DNA, 25 bp, SARS Virus
cttgtcgggatacacaagtaatttg

SEQ ID NO: 1784 - DNA, 25 bp, SARS Virus
ttgtcgggatacccaagtaatttgc

SEQ ID NO: 1785 - DNA, 25 bp, SARS Virus
tgtcgggatacacaagtaatttgca

SEQ ID NO: 1786 - DNA, 25 bp, SARS Virus
gtcgggatacaccagtaatttgcaa

SEQ ID NO: 1787 - DNA, 25 bp, SARS Virus
tcgggatacacacgtaatttgcaag

SEQ ID NO: 1788 - DNA, 25 bp, SARS Virus
cgggatacacaactaatttgcaaga

SEQ ID NO: 1789 - DNA, 25 bp, SARS Virus
gggatacacaagcaatttgcaagac

SEQ ID NO: 1790 - DNA, 25 bp, SARS Virus
ggatacacaagtcatttgcaagact

SEQ ID NO: 1791 - DNA, 25 bp, SARS Virus
gatacacaagtactttgcaagacta

SEQ ID NO: 1792 - DNA, 25 bp, SARS Virus
atacacaagtaacttgcaagactac

SEQ ID NO: 1793 - DNA, 25 bp, SARS Virus
tacacaagtaatctgcaagactacg

SEQ ID NO: 1794 - DNA, 25 bp, SARS Virus
acacaagtaattcgcaagactacgg

SEQ ID NO: 1795 - DNA, 25 bp, SARS Virus
cacaagtaatttccaagactacgga

SEQ ID NO: 1796 - DNA, 25 bp, SARS Virus
acaagtaatttgcaagactacggaa

SEQ ID NO: 1797 - DNA, 25 bp, SARS Virus
caagtaatttgccagactacggaat

SEQ ID NO: 1798 - DNA, 25 bp, SARS Virus
aagtaatttgcacgactacggaatt

SEQ ID NO: 1799 - DNA, 25 bp, SARS Virus
agtaatttgcaacactacggaattc

SEQ ID NO: 1800 - DNA, 25 bp, SARS Virus
gtaatttgcaagcctacggaattcg

SEQ ID NO: 1801 - DNA, 25 bp, SARS Virus
taatttgcaagactacggaattcgt

SEQ ID NO: 1802 - DNA, 25 bp, SARS Virus
aatttgcaagaccacggaattcgtg

SEQ ID NO: 1803 - DNA, 25 bp, SARS Virus
atttgcaagactccggaattcgtgg

SEQ ID NO: 1804 - DNA, 25 bp, SARS Virus
tttgcaagactacggaattcgtggt

SEQ ID NO: 1805 - DNA, 25 bp, SARS Virus
ttgcaagactaccgaattcgtggtt

SEQ ID NO: 1806 - DNA, 25 bp, SARS Virus
tgcaagactacgcaattcgtggtta

SEQ ID NO: 1807 - DNA, 25 bp, SARS Virus
gcaagactacggcattcgtggttag

SEQ ID NO: 1808 - DNA, 25 bp, SARS Virus
caagactacggacttcgtggttagt

SEQ ID NO: 1809 - DNA, 25 bp, SARS Virus
aagactacggaactcgtggttagtg

SEQ ID NO: 1810 - DNA, 25 bp, SARS Virus
agactacggaatccgtggttagtgc

SEQ ID NO: 1811 - DNA, 25 bp, SARS Virus
gactacggaattcgtggttagtgcc

SEQ ID NO: 1812 - DNA, 25 bp, SARS Virus
actacggaattcctggttagtgccg

SEQ ID NO: 1813 - DNA, 25 bp, SARS Virus
ctacggaattcgcggttagtgccgg

SEQ ID NO: 1814 - DNA, 25 bp, SARS Virus
tacggaattcgtcgttagtgccggt

SEQ ID NO: 1815 - DNA, 25 bp, SARS Virus
acggaattcgtgcttagtgccggtg

SEQ ID NO: 1816 - DNA, 25 bp, SARS Virus
cggaattcgtggctagtgccggtgt

SEQ ID NO: 1817 - DNA, 25 bp, SARS Virus
ggaattcgtggtcagtgccggtgtt

SEQ ID NO: 1818 - DNA, 25 bp, SARS Virus
gaattcgtggttcgtgccggtgttc

SEQ ID NO: 1819 - DNA, 25 bp, SARS Virus
aattcgtggttactgccggtgttcc

SEQ ID NO: 1820 - DNA, 25 bp, SARS Virus
attcgtggttagcgccggtgttcca

SEQ ID NO: 1821 - DNA, 25 bp, SARS Virus
ttcgtggttagtcccggtgttccag

SEQ ID NO: 1822 - DNA, 25 bp, SARS Virus
tcgtggttagtgccggtgttccagc

SEQ ID NO: 1823 - DNA, 25 bp, SARS Virus
cgtggttagtgccggtgttccagca

SEQ ID NO: 1824 - DNA, 25 bp, SARS Virus
gtggttagtgcccgtgttccagcaa

SEQ ID NO: 1825 - DNA, 25 bp, SARS Virus
tggttagtgccgctgttccagcaac

SEQ ID NO: 1826 - DNA, 25 bp, SARS Virus
ggttagtgccggcgttccagcaact

SEQ ID NO: 1827 - DNA, 25 bp, SARS Virus
gttagtgccggtcttccagcaactc

SEQ ID NO: 1828 - DNA, 25 bp, SARS Virus
ttagtgccggtgctccagcaactcg

SEQ ID NO: 1829 - DNA, 25 bp, SARS Virus
tagtgccggtgtcccagcaactcga

SEQ ID NO: 1830 - DNA, 25 bp, SARS Virus
agtgccggtgttccagcaactcgac

SEQ ID NO: 1831 - DNA, 25 bp, SARS Virus
gtgccggtgttccagcaactcgacc

SEQ ID NO: 1832 - DNA, 25 bp, SARS Virus
tgccggtgttcccgcaactcgacca

SEQ ID NO: 1833 - DNA, 25 bp, SARS Virus
gccggtgttccaccaactcgaccaa

SEQ ID NO: 1834 - DNA, 25 bp, SARS Virus
ccggtgttccagcaactcgaccaac

SEQ ID NO: 1835 - DNA, 25 bp, SARS Virus
cggtgttccagccactcgaccaacg

SEQ ID NO: 1836 - DNA, 25 bp, SARS Virus
ggtgttccagcacctcgaccaacgt

SEQ ID NO: 1837 - DNA, 25 bp, SARS Virus
gtgttccagcaactcgaccaacgtc

SEQ ID NO: 1838 - DNA, 25 bp, SARS Virus
tgttccagcaacccgaccaacgtct

SEQ ID NO: 1839 - DNA, 25 bp, SARS Virus
gttccagcaactcgaccaacgtctt

SEQ ID NO: 1840 - DNA, 25 bp, SARS Virus
ttccagcaactccaccaacgtcttt

SEQ ID NO: 1841 - DNA, 25 bp, SARS Virus
tccagcaactcgcccaacgtcttta

SEQ ID NO: 1842 - DNA, 25 bp, SARS Virus
ccagcaactcgaccaacgtctttac

SEQ ID NO: 1843 - DNA, 25 bp, SARS Virus
cagcaactcgaccaacgtctttacc

SEQ ID NO: 1844 - DNA, 25 bp, SARS Virus
agcaactcgacccacgtctttacct

SEQ ID NO: 1845 - DNA, 25 bp, SARS Virus
gcaactcgaccaccgtctttacctg

SEQ ID NO: 1846 - DNA, 25 bp, SARS Virus
caactcgaccaacgtctttacctgc

SEQ ID NO: 1847 - DNA, 25 bp, SARS Virus
aactcgaccaacctctttacctgcc

SEQ ID NO: 1848 - DNA, 25 bp, SARS Virus
actcgaccaacgcctttacctgccg

SEQ ID NO: 1849 - DNA, 25 bp, SARS Virus
ctcgaccaacgtctttacctgccgt

SEQ ID NO: 1850 - DNA, 25 bp, SARS Virus
tcgaccaacgtccttacctgccgta

SEQ ID NO: 1851 - DNA, 25 bp, SARS Virus
cgaccaacgtctctacctgccgtaa

SEQ ID NO: 1852 - DNA, 25 bp, SARS Virus
gaccaacgtcttcacctgccgtaag

SEQ ID NO: 1853 - DNA, 25 bp, SARS Virus
accaacgtctttccctgccgtaagt

SEQ ID NO: 1854 - DNA, 25 bp, SARS Virus
ccaacgtctttacctgccgtaagtc

SEQ ID NO: 1855 - DNA, 25 bp, SARS Virus
caacgtctttacctgccgtaagtca

SEQ ID NO: 1856 - DNA, 25 bp, SARS Virus
aacgtctttacccgccgtaagtcat

SEQ ID NO: 1857 - DNA, 25 bp, SARS Virus
acgtctttacctcccgtaagtcatg

SEQ ID NO: 1858 - DNA, 25 bp, SARS Virus
cgtctttacctgccgtaagtcatgc

SEQ ID NO: 1859 - DNA, 25 bp, SARS Virus
gtctttacctgccgtaagtcatgcc

SEQ ID NO: 1860 - DNA, 25 bp, SARS Virus
tctttacctgccctaagtcatgcca

SEQ ID NO: 1861 - DNA, 25 bp, SARS Virus
ctttacctgccgcaagtcatgccag

SEQ ID NO: 1862 - DNA, 25 bp, SARS Virus
tttacctgccgtcagtcatgccagc

SEQ ID NO: 1863 - DNA, 25 bp, SARS Virus
ttacctgccgtacgtcatgccagca

SEQ ID NO: 1864 - DNA, 25 bp, SARS Virus
tacctgccgtaactcatgccagcat

SEQ ID NO: 1865 - DNA, 25 bp, SARS Virus
acctgccgtaagccatgccagcatc

SEQ ID NO: 1866 - DNA, 25 bp, SARS Virus
cctgccgtaagtcatgccagcatcg

SEQ ID NO: 1867 - DNA, 25 bp, SARS Virus
ctgccgtaagtcctgccagcatcgc

SEQ ID NO: 1868 - DNA, 25 bp, SARS Virus
tgccgtaagtcacgccagcatcgcc

SEQ ID NO: 1869 - DNA, 25 bp, SARS Virus
gccgtaagtcatcccagcatcgcca

SEQ ID NO: 1870 - DNA, 25 bp, SARS Virus
ccgtaagtcatgccagcatcgccat

SEQ ID NO: 1871 - DNA, 25 bp, SARS Virus
cgtaagtcatgccagcatcgccata

SEQ ID NO: 1872 - DNA, 25 bp, SARS Virus
gtaagtcatgcccgcatcgccatat

SEQ ID NO: 1873 - DNA, 25 bp, SARS Virus
taagtcatgccaccatcgccatatt

SEQ ID NO: 1874 - DNA, 25 bp, SARS Virus
aagtcatgccagcatcgccatattg

SEQ ID NO: 1875 - DNA, 25 bp, SARS Virus
agtcatgccagcctcgccatattgt

SEQ ID NO: 1876 - DNA, 25 bp, SARS Virus
gtcatgccagcaccgccatattgtg

SEQ ID NO: 1877 - DNA, 25 bp, SARS Virus
tcatgccagcatcgccatattgtga

SEQ ID NO: 1878 - DNA, 25 bp, SARS Virus
catgccagcatccccatattgtgac

SEQ ID NO: 1879 - DNA, 25 bp, SARS Virus
atgccagcatcgccatattgtgacc

SEQ ID NO: 1880 - DNA, 25 bp, SARS Virus
tgccagcatcgccatattgtgaccc

SEQ ID NO: 1881 - DNA, 25 bp, SARS Virus
gccagcatcgccctattgtgaccct

SEQ ID NO: 1882 - DNA, 25 bp, SARS Virus
ccagcatcgccacattgtgaccctc

SEQ ID NO: 1883 - DNA, 25 bp, SARS Virus
cagcatcgccatcttgtgaccctca

SEQ ID NO: 1884 - DNA, 25 bp, SARS Virus
agcatcgccatactgtgaccctcat

SEQ ID NO: 1885 - DNA, 25 bp, SARS Virus
gcatcgccatatcgtgaccctcatg

SEQ ID NO: 1886 - DNA, 25 bp, SARS Virus
catcgccatattctgaccctcatga

SEQ ID NO: 1887 - DNA, 25 bp, SARS Virus
atcgccatattgcgaccctcatgag

SEQ ID NO: 1888 - DNA, 25 bp, SARS Virus
tcgccatattgtcaccctcatgagc

SEQ ID NO: 1889 - DNA, 25 bp, SARS Virus
cgccatattgtgcccctcatgagca

SEQ ID NO: 1890 - DNA, 25 bp, SARS Virus
gccatattgtgaccctcatgagcac

SEQ ID NO: 1891 - DNA, 25 bp, SARS Virus
ccatattgtgaccctcatgagcacg

SEQ ID NO: 1892 - DNA, 25 bp, SARS Virus
catattgtgaccctcatgagcacgg

SEQ ID NO: 1893 - DNA, 25 bp, SARS Virus
atattgtgacccccatgagcacggt

SEQ ID NO: 1894 - DNA, 25 bp, SARS Virus
tattgtgaccctcatgagcacggtg

SEQ ID NO: 1895 - DNA, 25 bp, SARS Virus
attgtgaccctcctgagcacggtgt

SEQ ID NO: 1896 - DNA, 25 bp, SARS Virus
ttgtgaccctcacgagcacggtgta

SEQ ID NO: 1897 - DNA, 25 bp, SARS Virus
tgtgaccctcatcagcacggtgtac

SEQ ID NO: 1898 - DNA, 25 bp, SARS Virus
gtgaccctcatgcgcacggtgtaca

SEQ ID NO: 1899 - DNA, 25 bp, SARS Virus
tgaccctcatgaccacggtgtacac

SEQ ID NO: 1900 - DNA, 25 bp, SARS Virus
gaccctcatgagcacggtgtacacc

SEQ ID NO: 1901 - DNA, 25 bp, SARS Virus
accctcatgagcccggtgtacaccc

SEQ ID NO: 1902 - DNA, 25 bp, SARS Virus
ccctcatgagcacggtgtacacccg

SEQ ID NO: 1903 - DNA, 25 bp, SARS Virus
cctcatgagcaccgtgtacacccgc

SEQ ID NO: 1904 - DNA, 25 bp, SARS Virus
ctcatgagcacgctgtacacccgct

SEQ ID NO: 1905 - DNA, 25 bp, SARS Virus
tcatgagcacggcgtacacccgctt

SEQ ID NO: 1906 - DNA, 25 bp, SARS Virus
catgagcacggtctacacccgcttt

SEQ ID NO: 1907 - DNA, 25 bp, SARS Virus
atgagcacggtgcacacccgctttg

SEQ ID NO: 1908 - DNA, 25 bp, SARS Virus
tgagcacggtgtccacccgctttgg

SEQ ID NO: 1909 - DNA, 25 bp, SARS Virus
gagcacggtgtacacccgctttggg

SEQ ID NO: 1910 - DNA, 25 bp, SARS Virus
agcacggtgtacccccgctttgggg

SEQ ID NO: 1911 - DNA, 25 bp, SARS Virus
gcacggtgtacacccgctttggggt

SEQ ID NO: 1912 - DNA, 25 bp, SARS Virus
cacggtgtacacccgctttggggtt

SEQ ID NO: 1913 - DNA, 25 bp, SARS Virus
acggtgtacacccgctttggggtta

SEQ ID NO: 1914 - DNA, 25 bp, SARS Virus
cggtgtacaccccctttggggttaa

SEQ ID NO: 1915 - DNA, 25 bp, SARS Virus
ggtgtacacccgctttggggttaac

SEQ ID NO: 1916 - DNA, 25 bp, SARS Virus
gtgtacacccgccttggggttaacg

SEQ ID NO: 1917 - DNA, 25 bp, SARS Virus
tgtacacccgctctggggttaacgt

SEQ ID NO: 1918 - DNA, 25 bp, SARS Virus
gtacacccgcttcggggttaacgta

SEQ ID NO: 1919 - DNA, 25 bp, SARS Virus
tacacccgctttcgggttaacgtat

SEQ ID NO: 1920 - DNA, 25 bp, SARS Virus
acacccgctttgcggttaacgtatg

SEQ ID NO: 1921 - DNA, 25 bp, SARS Virus
cacccgctttggcgttaacgtatgg

SEQ ID NO: 1922 - DNA, 25 bp, SARS Virus
acccgctttgggcttaacgtatggc

SEQ ID NO: 1923 - DNA, 25 bp, SARS Virus
cccgctttggggctaacgtatggcg

SEQ ID NO: 1924 - DNA, 25 bp, SARS Virus
ccgctttggggtcaacgtatggcgt

SEQ ID NO: 1925 - DNA, 25 bp, SARS Virus
cgctttggggttcacgtatggcgtt

SEQ ID NO: 1926 - DNA, 25 bp, SARS Virus
gctttggggttaccgtatggcgtta

SEQ ID NO: 1927 - DNA, 25 bp, SARS Virus
ctttggggttaacgtatggcgttac

SEQ ID NO: 1928 - DNA, 25 bp, SARS Virus
tttggggttaacctatggcgttaca

SEQ ID NO: 1929 - DNA, 25 bp, SARS Virus
ttggggttaacgcatggcgttacaa

SEQ ID NO: 1930 - DNA, 25 bp, SARS Virus
tggggttaacgtctggcgttacaag

SEQ ID NO: 1931 - DNA, 25 bp, SARS Virus
ggggttaacgtacggcgttacaaga

SEQ ID NO: 1932 - DNA, 25 bp, SARS Virus
gggttaacgtatcgcgttacaagaa

SEQ ID NO: 1933 - DNA, 25 bp, SARS Virus
ggttaacgtatgccgttacaagaag

SEQ ID NO: 1934 - DNA, 25 bp, SARS Virus
gttaacgtatggcgttacaagaaga

SEQ ID NO: 1935 - DNA, 25 bp, SARS Virus
ttaacgtatggccttacaagaagaa

SEQ ID NO: 1936 - DNA, 25 bp, SARS Virus
taacgtatggcgctacaagaagaag

SEQ ID NO: 1937 - DNA, 25 bp, SARS Virus
aacgtatggcgtcacaagaagaagc

SEQ ID NO: 1938 - DNA, 25 bp, SARS Virus
acgtatggcgttccaagaagaagca

SEQ ID NO: 1939 - DNA, 25 bp, SARS Virus
cgtatggcgttacaagaagaagcat

SEQ ID NO: 1940 - DNA, 25 bp, SARS Virus
gtatggcgttaccagaagaagcatt

SEQ ID NO: 1941 - DNA, 25 bp, SARS Virus
tatggcgttacacgaagaagcattc

SEQ ID NO: 1942 - DNA, 25 bp, SARS Virus
atggcgttacaacaagaagcattct

SEQ ID NO: 1943 - DNA, 25 bp, SARS Virus
tggcgttacaagcagaagcattctt

SEQ ID NO: 1944 - DNA, 25 bp, SARS Virus
ggcgttacaagacgaagcattcttg

SEQ ID NO: 1945 - DNA, 25 bp, SARS Virus
gcgttacaagaacaagcattcttgc

SEQ ID NO: 1946 - DNA, 25 bp, SARS Virus
cgttacaagaagcagcattcttgcc

SEQ ID NO: 1947 - DNA, 25 bp, SARS Virus
gttacaagaagacgcattcttgcca

SEQ ID NO: 1948 - DNA, 25 bp, SARS Virus
ttacaagaagaaccattcttgccat

SEQ ID NO: 1949 - DNA, 25 bp, SARS Virus
tacaagaagaagcattcttgccatt

SEQ ID NO: 1950 - DNA, 25 bp, SARS Virus
acaagaagaagccttcttgccatta

SEQ ID NO: 1951 - DNA, 25 bp, SARS Virus
caagaagaagcactcttgccattat

SEQ ID NO: 1952 - DNA, 25 bp, SARS Virus
aagaagaagcatccttgccattatt

SEQ ID NO: 1953 - DNA, 25 bp, SARS Virus
agaagaagcattcttgccattattc

SEQ ID NO: 1954 - DNA, 25 bp, SARS Virus
gaagaagcattcctgccattattcc

SEQ ID NO: 1955 - DNA, 25 bp, SARS Virus
aagaagcattctcgccattattccc

SEQ ID NO: 1956 - DNA, 25 bp, SARS Virus
agaagcattcttcccattattccct

SEQ ID NO: 1957 - DNA, 25 bp, SARS Virus
gaagcattcttgccattattccctc

SEQ ID NO: 1958 - DNA, 25 bp, SARS Virus
aagcattcttgccattattccctcg

SEQ ID NO: 1959 - DNA, 25 bp, SARS Virus
agcattcttgcccttattccctcgg

SEQ ID NO: 1960 - DNA, 25 bp, SARS Virus
gcattcttgccactattccctcggc

SEQ ID NO: 1961 - DNA, 25 bp, SARS Virus
cattcttgccatcattccctcggcc

SEQ ID NO: 1962 - DNA, 25 bp, SARS Virus
attcttgccattcttccctcggcca

SEQ ID NO: 1963 - DNA, 25 bp, SARS Virus
ttcttgccattactccctcggccac

SEQ ID NO: 1964 - DNA, 25 bp, SARS Virus
tcttgccattatcccctcggccacc

SEQ ID NO: 1965 - DNA, 25 bp, SARS Virus
cttgccattattccctcggccacca

SEQ ID NO: 1966 - DNA, 25 bp, SARS Virus
ttgccattattccctcggccaccag

SEQ ID NO: 1967 - DNA, 25 bp, SARS Virus
tgccattattccctcggccaccagt

SEQ ID NO: 1968 - DNA, 25 bp, SARS Virus
gccattattcccccggccaccagta

SEQ ID NO: 1969 - DNA, 25 bp, SARS Virus
ccattattccctcggccaccagtat

SEQ ID NO: 1970 - DNA, 25 bp, SARS Virus
cattattccctccgccaccagtatc

SEQ ID NO: 1971 - DNA, 25 bp, SARS Virus
attattccctcgcccaccagtatcg

SEQ ID NO: 1972 - DNA, 25 bp, SARS Virus
ttattccctcggccaccagtatcga

SEQ ID NO: 1973 - DNA, 25 bp, SARS Virus
tattccctcggccaccagtatcgat

SEQ ID NO: 1974 - DNA, 25 bp, SARS Virus
attccctcggcccccagtatcgata

SEQ ID NO: 1975 - DNA, 25 bp, SARS Virus
ttccctcggccaccagtatcgatac

SEQ ID NO: 1976 - DNA, 25 bp, SARS Virus
tccctcggccaccagtatcgatacc

SEQ ID NO: 1977 - DNA, 25 bp, SARS Virus
ccctcggccacccgtatcgataccg

SEQ ID NO: 1978 - DNA, 25 bp, SARS Virus
cctcggccaccactatcgataccgt

SEQ ID NO: 1979 - DNA, 25 bp, SARS Virus
ctcggccaccagcatcgataccgta

SEQ ID NO: 1980 - DNA, 25 bp, SARS Virus
tcggccaccagtctcgataccgtag

SEQ ID NO: 1981 - DNA, 25 bp, SARS Virus
cggccaccagtaccgataccgtagc

SEQ ID NO: 1982 - DNA, 25 bp, SARS Virus
ggccaccagtatcgataccgtagct

SEQ ID NO: 1983 - DNA, 25 bp, SARS Virus
gccaccagtatccataccgtagcta

SEQ ID NO: 1984 - DNA, 25 bp, SARS Virus
ccaccagtatcgctaccgtagctag

SEQ ID NO: 1985 - DNA, 25 bp, SARS Virus
caccagtatcgacaccgtagctaga

SEQ ID NO: 1986 - DNA, 25 bp, SARS Virus
accagtatcgatcccgtagctagat

SEQ ID NO: 1987 - DNA, 25 bp, SARS Virus
ccagtatcgataccgtagctagatt

SEQ ID NO: 1988 - DNA, 25 bp, SARS Virus
cagtatcgataccgtagctagattt

SEQ ID NO: 1989 - DNA, 25 bp, SARS Virus
agtatcgataccctagctagatttc

SEQ ID NO: 1990 - DNA, 25 bp, SARS Virus
gtatcgataccgcagctagatttca

SEQ ID NO: 1991 - DNA, 25 bp, SARS Virus
tatcgataccgtcgctagatttcag

SEQ ID NO: 1992 - DNA, 25 bp, SARS Virus
atcgataccgtacctagatttcaga

SEQ ID NO: 1993 - DNA, 25 bp, SARS Virus
tcgataccgtagctagatttcagaa

SEQ ID NO: 1994 - DNA, 25 bp, SARS Virus
cgataccgtagccagatttcagaat

SEQ ID NO: 1995 - DNA, 25 bp, SARS Virus
gataccgtagctcgatttcagaata

SEQ ID NO: 1996 - DNA, 25 bp, SARS Virus
ataccgtagctacatttcagaatac

SEQ ID NO: 1997 - DNA, 25 bp, SARS Virus
taccgtagctagctttcagaatact

SEQ ID NO: 1998 - DNA, 25 bp, SARS Virus
accgtagctagacttcagaatactg

SEQ ID NO: 1999 - DNA, 25 bp, SARS Virus
ccgtagctagatctcagaatactga

SEQ ID NO: 2000 - DNA, 25 bp, SARS Virus
cgtagctagattccagaatactgaa

SEQ ID NO: 2001 - DNA, 25 bp, SARS Virus
gtagctagatttcagaatactgaat

SEQ ID NO: 2002 - DNA, 25 bp, SARS Virus
tagctagatttccgaatactgaatc

SEQ ID NO: 2003 - DNA, 25 bp, SARS Virus
agctagatttcacaatactgaatcc

SEQ ID NO: 2004 - DNA, 25 bp, SARS Virus
gctagatttcagcatactgaatcca

SEQ ID NO: 2005 - DNA, 25 bp, SARS Virus
ctagatttcagactactgaatccac

SEQ ID NO: 2006 - DNA, 25 bp, SARS Virus
tagatttcagaacactgaatccact

SEQ ID NO: 2007 - DNA, 25 bp, SARS Virus
agatttcagaatcctgaatccactg

SEQ ID NO: 2008 - DNA, 25 bp, SARS Virus
gatttcagaatactgaatccactgc

SEQ ID NO: 2009 - DNA, 25 bp, SARS Virus
atttcagaataccgaatccactgct

SEQ ID NO: 2010 - DNA, 25 bp, SARS Virus
tttcagaatactcaatccactgctc

SEQ ID NO: 2011 - DNA, 25 bp, SARS Virus
ttcagaatactgcatccactgctcg

SEQ ID NO: 2012 - DNA, 25 bp, SARS Virus
tcagaatactgactccactgctcga

SEQ ID NO: 2013 - DNA, 25 bp, SARS Virus
cagaatactgaacccactgctcgaa

SEQ ID NO: 2014 - DNA, 25 bp, SARS Virus
agaatactgaatccactgctcgaac

SEQ ID NO: 2015 - DNA, 25 bp, SARS Virus
gaatactgaatccactgctcgaacc

SEQ ID NO: 2016 - DNA, 25 bp, SARS Virus
aatactgaatcccctgctcgaaccg

SEQ ID NO: 2017 - DNA, 25 bp, SARS Virus
atactgaatccactgctcgaaccgt

SEQ ID NO: 2018 - DNA, 25 bp, SARS Virus
tactgaatccaccgctcgaaccgtg

SEQ ID NO: 2019 - DNA, 25 bp, SARS Virus
actgaatccactcctcgaaccgtga

SEQ ID NO: 2020 - DNA, 25 bp, SARS Virus
ctgaatccactgctcgaaccgtgac

SEQ ID NO: 2021 - DNA, 25 bp, SARS Virus
tgaatccactgcccgaaccgtgact

SEQ ID NO: 2022 - DNA, 25 bp, SARS Virus
gaatccactgctcgaaccgtgacta

SEQ ID NO: 2023 - DNA, 25 bp, SARS Virus
aatccactgctccaaccgtgactag

SEQ ID NO: 2024 - DNA, 25 bp, SARS Virus
atccactgctcgcaccgtgactagg

SEQ ID NO: 2025 - DNA, 25 bp, SARS Virus
tccactgctcgacccgtgactaggg

SEQ ID NO: 2026 - DNA, 25 bp, SARS Virus
ccactgctcgaaccgtgactagggt

SEQ ID NO: 2027 - DNA, 25 bp, SARS Virus
cactgctcgaaccgtgactagggta

SEQ ID NO: 2028 - DNA, 25 bp, SARS Virus
actgctcgaaccctgactagggtaa

SEQ ID NO: 2029 - DNA, 25 bp, SARS Virus
ctgctcgaaccgcgactagggtaac

SEQ ID NO: 2030 - DNA, 25 bp, SARS Virus
tgctcgaaccgtcactagggtaact

SEQ ID NO: 2031 - DNA, 25 bp, SARS Virus
gctcgaaccgtgcctagggtaactt

SEQ ID NO: 2032 - DNA, 25 bp, SARS Virus
ctcgaaccgtgactagggtaacttc

SEQ ID NO: 2033 - DNA, 25 bp, SARS Virus
tcgaaccgtgaccagggtaacttct

SEQ ID NO: 2034 - DNA, 25 bp, SARS Virus
cgaaccgtgactcgggtaacttcta

SEQ ID NO: 2035 - DNA, 25 bp, SARS Virus
gaaccgtgactacggtaacttctaa

SEQ ID NO: 2036 - DNA, 25 bp, SARS Virus
aaccgtgactagcgtaacttctaat

SEQ ID NO: 2037 - DNA, 25 bp, SARS Virus
accgtgactaggctaacttctaata

SEQ ID NO: 2038 - DNA, 25 bp, SARS Virus
ccgtgactagggcaacttctaatac

SEQ ID NO: 2039 - DNA, 25 bp, SARS Virus
cgtgactagggtcacttctaatact

SEQ ID NO: 2040 - DNA, 25 bp, SARS Virus
gtgactagggtaccttctaatactt

SEQ ID NO: 2041 - DNA, 25 bp, SARS Virus
tgactagggtaacttctaatacttg

SEQ ID NO: 2042 - DNA, 25 bp, SARS Virus
gactagggtaacctctaatacttgt

SEQ ID NO: 2043 - DNA, 25 bp, SARS Virus
actagggtaactcctaatacttgtt

SEQ ID NO: 2044 - DNA, 25 bp, SARS Virus
ctagggtaacttctaatacttgttt

SEQ ID NO: 2045 - DNA, 25 bp, SARS Virus
tagggtaacttccaatacttgtttt

SEQ ID NO: 2046 - DNA, 25 bp, SARS Virus
agggtaacttctcatacttgttttg

SEQ ID NO: 2047 - DNA, 25 bp, SARS Virus
gggtaacttctactacttgttttga

SEQ ID NO: 2048 - DNA, 25 bp, SARS Virus
ggtaacttctaacacttgttttgac

SEQ ID NO: 2049 - DNA, 25 bp, SARS Virus
gtaacttctaatccttgttttgacc

SEQ ID NO: 2050 - DNA, 25 bp, SARS Virus
taacttctaatacttgttttgacct

SEQ ID NO: 2051 - DNA, 25 bp, SARS Virus
aacttctaatacctgttttgacctt

SEQ ID NO: 2052 - DNA, 25 bp, SARS Virus
acttctaatactcgttttgaccttg

SEQ ID NO: 2053 - DNA, 25 bp, SARS Virus
cttctaatacttcttttgaccttgt

SEQ ID NO: 2054 - DNA, 25 bp, SARS Virus
ttctaatacttgctttgaccttgtg

SEQ ID NO: 2055 - DNA, 25 bp, SARS Virus
tctaatacttgtcttgaccttgtga

SEQ ID NO: 2056 - DNA, 25 bp, SARS Virus
ctaatacttgttctgaccttgtgat

SEQ ID NO: 2057 - DNA, 25 bp, SARS Virus
taatacttgtttcgaccttgtgatt

SEQ ID NO: 2058 - DNA, 25 bp, SARS Virus
aatacttgttttcaccttgtgattc

SEQ ID NO: 2059 - DNA, 25 bp, SARS Virus
atacttgttttgcccttgtgattcg

SEQ ID NO: 2060 - DNA, 25 bp, SARS Virus
tacttgttttgaccttgtgattcgt

SEQ ID NO: 2061 - DNA, 25 bp, SARS Virus
acttgttttgaccttgtgattcgta

SEQ ID NO: 2062 - DNA, 25 bp, SARS Virus
cttgttttgaccctgtgattcgtac

SEQ ID NO: 2063 - DNA, 25 bp, SARS Virus
ttgttttgacctcgtgattcgtacc

SEQ ID NO: 2064 - DNA, 25 bp, SARS Virus
tgttttgaccttctgattcgtaccg

SEQ ID NO: 2065 - DNA, 25 bp, SARS Virus
gttttgaccttgcgattcgtaccgt

SEQ ID NO: 2066 - DNA, 25 bp, SARS Virus
ttttgaccttgtcattcgtaccgtc

SEQ ID NO: 2067 - DNA, 25 bp, SARS Virus
tttgaccttgtgcttcgtaccgtca

SEQ ID NO: 2068 - DNA, 25 bp, SARS Virus
ttgaccttgtgactcgtaccgtcac

SEQ ID NO: 2069 - DNA, 25 bp, SARS Virus
tgaccttgtgatccgtaccgtcacc

SEQ ID NO: 2070 - DNA, 25 bp, SARS Virus
gaccttgtgattcgtaccgtcacca

SEQ ID NO: 2071 - DNA, 25 bp, SARS Virus
accttgtgattcctaccgtcaccac

SEQ ID NO: 2072 - DNA, 25 bp, SARS Virus
ccttgtgattcgcaccgtcaccacg

SEQ ID NO: 2073 - DNA, 25 bp, SARS Virus
cttgtgattcgtcccgtcaccacgt

SEQ ID NO: 2074 - DNA, 25 bp, SARS Virus
ttgtgattcgtaccgtcaccacgtg

SEQ ID NO: 2075 - DNA, 25 bp, SARS Virus
tgtgattcgtaccgtcaccacgtga

SEQ ID NO: 2076 - DNA, 25 bp, SARS Virus
gtgattcgtaccctcaccacgtgag

SEQ ID NO: 2077 - DNA, 25 bp, SARS Virus
tgattcgtaccgccaccacgtgagg

SEQ ID NO: 2078 - DNA, 25 bp, SARS Virus
gattcgtaccgtcaccacgtgaggc

SEQ ID NO: 2079 - DNA, 25 bp, SARS Virus
attcgtaccgtccccacgtgaggca

SEQ ID NO: 2080 - DNA, 25 bp, SARS Virus
ttcgtaccgtcaccacgtgaggcac

SEQ ID NO: 2081 - DNA, 25 bp, SARS Virus
cctctcggaacaggaaccacagttg

SEQ ID NO: 2082 - DNA, 25 bp, SARS Virus
ctctcggaacaagaaccacagttgc

SEQ ID NO: 2083 - DNA, 25 bp, SARS Virus
tctcggaacaaggaccacagttgct

SEQ ID NO: 2084 - DNA, 25 bp, SARS Virus
ctcggaacaagagccacagttgctc

SEQ ID NO: 2085 - DNA, 25 bp, SARS Virus
tcggaacaagaagcacagttgctct

SEQ ID NO: 2086 - DNA, 25 bp, SARS Virus
cggaacaagaacgacagttgctctt

SEQ ID NO: 2087 - DNA, 25 bp, SARS Virus
ggaacaagaaccgcagttgctcttt

SEQ ID NO: 2088 - DNA, 25 bp, SARS Virus
gaacaagaaccagagttgctctttt

SEQ ID NO: 2089 - DNA, 25 bp, SARS Virus
aacaagaaccacggttgctcttttg

SEQ ID NO: 2090 - DNA, 25 bp, SARS Virus
acaagaaccacagttgctcttttgt

SEQ ID NO: 2091 - DNA, 25 bp, SARS Virus
caagaaccacaggtgctcttttgtg

SEQ ID NO: 2092 - DNA, 25 bp, SARS Virus
aagaaccacagtggctcttttgtgt

SEQ ID NO: 2093 - DNA, 25 bp, SARS Virus
agaaccacagttgctcttttgtgtg

SEQ ID NO: 2094 - DNA, 25 bp, SARS Virus
gaaccacagttggtcttttgtgtgc

SEQ ID NO: 2095 - DNA, 25 bp, SARS Virus
aaccacagttgcgcttttgtgtgca

SEQ ID NO: 2096 - DNA, 25 bp, SARS Virus
accacagttgctgttttgtgtgcag

SEQ ID NO: 2097 - DNA, 25 bp, SARS Virus
ccacagttgctcgtttgtgtgcagg

SEQ ID NO: 2098 - DNA, 25 bp, SARS Virus
cacagttgctctgttgtgtgcaggt

SEQ ID NO: 2099 - DNA, 25 bp, SARS Virus
acagttgctcttgtgtgtgcaggtt

SEQ ID NO: 2100 - DNA, 25 bp, SARS Virus
cagttgctctttggtgtgcaggttg

SEQ ID NO: 2101 - DNA, 25 bp, SARS Virus
agttgctcttttgtgtgcaggttga

SEQ ID NO: 2102 - DNA, 25 bp, SARS Virus
gttgctcttttgggtgcaggttgag

SEQ ID NO: 2103 - DNA, 25 bp, SARS Virus
ttgctcttttgtgtgcaggttgagt

SEQ ID NO: 2104 - DNA, 25 bp, SARS Virus
tgctcttttgtgggcaggttgagtc

SEQ ID NO: 2105 - DNA, 25 bp, SARS Virus
gctcttttgtgtgcaggttgagtca

SEQ ID NO: 2106 - DNA, 25 bp, SARS Virus
ctcttttgtgtggaggttgagtcaa

SEQ ID NO: 2107 - DNA, 25 bp, SARS Virus
tcttttgtgtgcgggttgagtcaaa

SEQ ID NO: 2108 - DNA, 25 bp, SARS Virus
cttttgtgtgcaggttgagtcaaac

SEQ ID NO: 2109 - DNA, 25 bp, SARS Virus
ttttgtgtgcaggttgagtcaaacg

SEQ ID NO: 2110 - DNA, 25 bp, SARS Virus
tttgtgtgcagggtgagtcaaacgg

SEQ ID NO: 2111 - DNA, 25 bp, SARS Virus
ttgtgtgcaggtggagtcaaacgga

SEQ ID NO: 2112 - DNA, 25 bp, SARS Virus
tgtgtgcaggttgagtcaaacggac

SEQ ID NO: 2113 - DNA, 25 bp, SARS Virus
gtgtgcaggttgggtcaaacggaca

SEQ ID NO: 2114 - DNA, 25 bp, SARS Virus
tgtgcaggttgagtcaaacggacag

SEQ ID NO: 2115 - DNA, 25 bp, SARS Virus
gtgcaggttgaggcaaacggacagg

SEQ ID NO: 2116 - DNA, 25 bp, SARS Virus
tgcaggttgagtgaaacggacagga

SEQ ID NO: 2117 - DNA, 25 bp, SARS Virus
gcaggttgagtcgaacggacaggaa

SEQ ID NO: 2118 - DNA, 25 bp, SARS Virus
caggttgagtcagacggacaggaag

SEQ ID NO: 2119 - DNA, 25 bp, SARS Virus
aggttgagtcaagcggacaggaagt

SEQ ID NO: 2120 - DNA, 25 bp, SARS Virus
ggttgagtcaaagggacaggaagtc

SEQ ID NO: 2121 - DNA, 25 bp, SARS Virus
gttgagtcaaacggacaggaagtcc

SEQ ID NO: 2122 - DNA, 25 bp, SARS Virus
ttgagtcaaacggacaggaagtcca

SEQ ID NO: 2123 - DNA, 25 bp, SARS Virus
tgagtcaaacgggcaggaagtccaa

SEQ ID NO: 2124 - DNA, 25 bp, SARS Virus
gagtcaaacggagaggaagtccaat

SEQ ID NO: 2125 - DNA, 25 bp, SARS Virus
agtcaaacggacgggaagtccaatc

SEQ ID NO: 2126 - DNA, 25 bp, SARS Virus
gtcaaacggacaggaagtccaatct

SEQ ID NO: 2127 - DNA, 25 bp, SARS Virus
tcaaacggacaggaagtccaatctc

SEQ ID NO: 2128 - DNA, 25 bp, SARS Virus
caaacggacagggagtccaatctct

SEQ ID NO: 2129 - DNA, 25 bp, SARS Virus
aaacggacaggaggtccaatctctg

SEQ ID NO: 2130 - DNA, 25 bp, SARS Virus
aacggacaggaagtccaatctctgc

SEQ ID NO: 2131 - DNA, 25 bp, SARS Virus
acggacaggaaggccaatctctgca

SEQ ID NO: 2132 - DNA, 25 bp, SARS Virus
cggacaggaagtgcaatctctgcac

SEQ ID NO: 2133 - DNA, 25 bp, SARS Virus
ggacaggaagtcgaatctctgcacg

SEQ ID NO: 2134 - DNA, 25 bp, SARS Virus
gacaggaagtccgatctctgcacga

SEQ ID NO: 2135 - DNA, 25 bp, SARS Virus
acaggaagtccagtctctgcacgat

SEQ ID NO: 2136 - DNA, 25 bp, SARS Virus
caggaagtccaagctctgcacgatc

SEQ ID NO: 2137 - DNA, 25 bp, SARS Virus
aggaagtccaatgtctgcacgatca

SEQ ID NO: 2138 - DNA, 25 bp, SARS Virus
ggaagtccaatcgctgcacgatcac

SEQ ID NO: 2139 - DNA, 25 bp, SARS Virus
gaagtccaatctgtgcacgatcacg

SEQ ID NO: 2140 - DNA, 25 bp, SARS Virus
aagtccaatctcggcacgatcacgc

SEQ ID NO: 2141 - DNA, 25 bp, SARS Virus
agtccaatctctgcacgatcacgca

SEQ ID NO: 2142 - DNA, 25 bp, SARS Virus
gtccaatctctggacgatcacgcac

SEQ ID NO: 2143 - DNA, 25 bp, SARS Virus
tccaatctctgcgcgatcacgcacc

SEQ ID NO: 2144 - DNA, 25 bp, SARS Virus
ccaatctctgcaggatcacgcaccg

SEQ ID NO: 2145 - DNA, 25 bp, SARS Virus
caatctctgcacgatcacgcaccga

SEQ ID NO: 2146 - DNA, 25 bp, SARS Virus
aatctctgcacggtcacgcaccgaa

SEQ ID NO: 2147 - DNA, 25 bp, SARS Virus
atctctgcacgagcacgcaccgaag

SEQ ID NO: 2148 - DNA, 25 bp, SARS Virus
tctctgcacgatgacgcaccgaagc

SEQ ID NO: 2149 - DNA, 25 bp, SARS Virus
ctctgcacgatcgcgcaccgaagcc

SEQ ID NO: 2150 - DNA, 25 bp, SARS Virus
tctgcacgatcaggcaccgaagccc

SEQ ID NO: 2151 - DNA, 25 bp, SARS Virus
ctgcacgatcacgcaccgaagcccc

SEQ ID NO: 2152 - DNA, 25 bp, SARS Virus
tgcacgatcacggaccgaagcccct

SEQ ID NO: 2153 - DNA, 25 bp, SARS Virus
gcacgatcacgcgccgaagcccctg

SEQ ID NO: 2154 - DNA, 25 bp, SARS Virus
cacgatcacgcagcgaagcccctga

SEQ ID NO: 2155 - DNA, 25 bp, SARS Virus
acgatcacgcacggaagcccctgag

SEQ ID NO: 2156 - DNA, 25 bp, SARS Virus
cgatcacgcaccgaagcccctgaga

SEQ ID NO: 2157 - DNA, 25 bp, SARS Virus
gatcacgcaccggagcccctgagac

SEQ ID NO: 2158 - DNA, 25 bp, SARS Virus
atcacgcaccgaggcccctgagaca

SEQ ID NO: 2159 - DNA, 25 bp, SARS Virus
tcacgcaccgaagcccctgagacac

SEQ ID NO: 2160 - DNA, 25 bp, SARS Virus
cacgcaccgaaggccctgagacacc

SEQ ID NO: 2161 - DNA, 25 bp, SARS Virus
acgcaccgaagcgcctgagacacct

SEQ ID NO: 2162 - DNA, 25 bp, SARS Virus
cgcaccgaagccgctgagacacctt

SEQ ID NO: 2163 - DNA, 25 bp, SARS Virus
gcaccgaagcccgtgagacaccttc

SEQ ID NO: 2164 - DNA, 25 bp, SARS Virus
caccgaagccccggagacaccttct

SEQ ID NO: 2165 - DNA, 25 bp, SARS Virus
accgaagcccctgagacaccttctc

SEQ ID NO: 2166 - DNA, 25 bp, SARS Virus
ccgaagcccctgggacaccttctcc

SEQ ID NO: 2167 - DNA, 25 bp, SARS Virus
cgaagcccctgagacaccttctccg

SEQ ID NO: 2168 - DNA, 25 bp, SARS Virus
gaagcccctgaggcaccttctccgg

SEQ ID NO: 2169 - DNA, 25 bp, SARS Virus
aagcccctgagagaccttctccggg

SEQ ID NO: 2170 - DNA, 25 bp, SARS Virus
agcccctgagacgccttctccggga

SEQ ID NO: 2171 - DNA, 25 bp, SARS Virus
gcccctgagacagcttctccgggat

SEQ ID NO: 2172 - DNA, 25 bp, SARS Virus
cccctgagacacgttctccgggata

SEQ ID NO: 2173 - DNA, 25 bp, SARS Virus
ccctgagacaccgtctccgggatag

SEQ ID NO: 2174 - DNA, 25 bp, SARS Virus
cctgagacacctgctccgggatagc

SEQ ID NO: 2175 - DNA, 25 bp, SARS Virus
ctgagacaccttgtccgggatagcc

SEQ ID NO: 2176 - DNA, 25 bp, SARS Virus
tgagacaccttcgccgggatagcct

SEQ ID NO: 2177 - DNA, 25 bp, SARS Virus
gagacaccttctgcgggatagcctc

SEQ ID NO: 2178 - DNA, 25 bp, SARS Virus
agacaccttctcggggatagcctcc

SEQ ID NO: 2179 - DNA, 25 bp, SARS Virus
gacaccttctccgggatagcctccg

SEQ ID NO: 2180 - DNA, 25 bp, SARS Virus
acaccttctccgggatagcctccgt

SEQ ID NO: 2181 - DNA, 25 bp, SARS Virus
caccttctccgggatagcctccgtg

SEQ ID NO: 2182 - DNA, 25 bp, SARS Virus
accttctccggggtagcctccgtgc

SEQ ID NO: 2183 - DNA, 25 bp, SARS Virus
ccttctccgggagagcctccgtgca

SEQ ID NO: 2184 - DNA, 25 bp, SARS Virus
cttctccgggatggcctccgtgcac

SEQ ID NO: 2185 - DNA, 25 bp, SARS Virus
ttctccgggatagcctccgtgcact

SEQ ID NO: 2186 - DNA, 25 bp, SARS Virus
tctccgggataggctccgtgcactt

SEQ ID NO: 2187 - DNA, 25 bp, SARS Virus
ctccgggatagcgtccgtgcacttg

SEQ ID NO: 2188 - DNA, 25 bp, SARS Virus
tccgggatagccgccgtgcacttgt

SEQ ID NO: 2189 - DNA, 25 bp, SARS Virus
ccgggatagcctgcgtgcacttgtg

SEQ ID NO: 2190 - DNA, 25 bp, SARS Virus
cgggatagcctcggtgcacttgtgg

SEQ ID NO: 2191 - DNA, 25 bp, SARS Virus
gggatagcctccgtgcacttgtgga

SEQ ID NO: 2192 - DNA, 25 bp, SARS Virus
ggatagcctccgggcacttgtggag

SEQ ID NO: 2193 - DNA, 25 bp, SARS Virus
gatagcctccgtgcacttgtggagt

SEQ ID NO: 2194 - DNA, 25 bp, SARS Virus
atagcctccgtggacttgtggagtt

SEQ ID NO: 2195 - DNA, 25 bp, SARS Virus
tagcctccgtgcgcttgtggagttt

SEQ ID NO: 2196 - DNA, 25 bp, SARS Virus
agcctccgtgcagttgtggagtttt

SEQ ID NO: 2197 - DNA, 25 bp, SARS Virus
gcctccgtgcacgtgtggagttttt

SEQ ID NO: 2198 - DNA, 25 bp, SARS Virus
cctccgtgcactggtggagttttta

SEQ ID NO: 2199 - DNA, 25 bp, SARS Virus
ctccgtgcacttgtggagtttttac

SEQ ID NO: 2200 - DNA, 25 bp, SARS Virus
tccgtgcacttggggagtttttacc

SEQ ID NO: 2201 - DNA, 25 bp, SARS Virus
ccgtgcacttgtggagtttttaccg

SEQ ID NO: 2202 - DNA, 25 bp, SARS Virus
cgtgcacttgtggagtttttaccgt

SEQ ID NO: 2203 - DNA, 25 bp, SARS Virus
gtgcacttgtggggtttttaccgtg

SEQ ID NO: 2204 - DNA, 25 bp, SARS Virus
tgcacttgtggagtttttaccgtga

SEQ ID NO: 2205 - DNA, 25 bp, SARS Virus
gcacttgtggaggttttaccgtgaa

SEQ ID NO: 2206 - DNA, 25 bp, SARS Virus
cacttgtggagtgtttaccgtgaac

SEQ ID NO: 2207 - DNA, 25 bp, SARS Virus
acttgtggagttgttaccgtgaaca

SEQ ID NO: 2208 - DNA, 25 bp, SARS Virus
cttgtggagtttgtaccgtgaacac

SEQ ID NO: 2209 - DNA, 25 bp, SARS Virus
ttgtggagttttgaccgtgaacacc

SEQ ID NO: 2210 - DNA, 25 bp, SARS Virus
tgtggagtttttgccgtgaacacca

SEQ ID NO: 2211 - DNA, 25 bp, SARS Virus
gtggagtttttagcgtgaacaccag

SEQ ID NO: 2212 - DNA, 25 bp, SARS Virus
tggagtttttacggtgaacaccaga

SEQ ID NO: 2213 - DNA, 25 bp, SARS Virus
ggagtttttaccgtgaacaccagat

SEQ ID NO: 2214 - DNA, 25 bp, SARS Virus
gagtttttaccgggaacaccagatc

SEQ ID NO: 2215 - DNA, 25 bp, SARS Virus
agtttttaccgtgaacaccagatca

SEQ ID NO: 2216 - DNA, 25 bp, SARS Virus
gtttttaccgtggacaccagatcat

SEQ ID NO: 2217 - DNA, 25 bp, SARS Virus
tttttaccgtgagcaccagatcatc

SEQ ID NO: 2218 - DNA, 25 bp, SARS Virus
ttttaccgtgaagaccagatcatct

SEQ ID NO: 2219 - DNA, 25 bp, SARS Virus
tttaccgtgaacgccagatcatctc

SEQ ID NO: 2220 - DNA, 25 bp, SARS Virus
ttaccgtgaacagcagatcatctcg

SEQ ID NO: 2221 - DNA, 25 bp, SARS Virus
taccgtgaacacgagatcatctcga

SEQ ID NO: 2222 - DNA, 25 bp, SARS Virus
accgtgaacaccggatcatctcgac

SEQ ID NO: 2223 - DNA, 25 bp, SARS Virus
ccgtgaacaccagatcatctcgacc

SEQ ID NO: 2224 - DNA, 25 bp, SARS Virus
cgtgaacaccaggtcatctcgacct

SEQ ID NO: 2225 - DNA, 25 bp, SARS Virus
gtgaacaccagagcatctcgacctt

SEQ ID NO: 2226 - DNA, 25 bp, SARS Virus
tgaacaccagatgatctcgaccttt

SEQ ID NO: 2227 - DNA, 25 bp, SARS Virus
gaacaccagatcgtctcgacctttt

SEQ ID NO: 2228 - DNA, 25 bp, SARS Virus
aacaccagatcagctcgaccttttt

SEQ ID NO: 2229 - DNA, 25 bp, SARS Virus
acaccagatcatgtcgacctttttc

SEQ ID NO: 2230 - DNA, 25 bp, SARS Virus
caccagatcatcgcgacctttttcc

SEQ ID NO: 2231 - DNA, 25 bp, SARS Virus
accagatcatctggacctttttccg

SEQ ID NO: 2232 - DNA, 25 bp, SARS Virus
ccagatcatctcgacctttttccgc

SEQ ID NO: 2233 - DNA, 25 bp, SARS Virus
cagatcatctcggcctttttccgca

SEQ ID NO: 2234 - DNA, 25 bp, SARS Virus
agatcatctcgagctttttccgcat

SEQ ID NO: 2235 - DNA, 25 bp, SARS Virus
gatcatctcgacgtttttccgcatg

SEQ ID NO: 2236 - DNA, 25 bp, SARS Virus
atcatctcgaccgttttccgcatga

SEQ ID NO: 2237 - DNA, 25 bp, SARS Virus
tcatctcgacctgtttccgcatgac

SEQ ID NO: 2238 - DNA, 25 bp, SARS Virus
catctcgaccttgttccgcatgacg

SEQ ID NO: 2239 - DNA, 25 bp, SARS Virus
atctcgacctttgtccgcatgacgg

SEQ ID NO: 2240 - DNA, 25 bp, SARS Virus
tctcgaccttttgccgcatgacggg

SEQ ID NO: 2241 - DNA, 25 bp, SARS Virus
ctcgacctttttgcgcatgacgggg

SEQ ID NO: 2242 - DNA, 25 bp, SARS Virus
tcgacctttttcggcatgacggggt

SEQ ID NO: 2243 - DNA, 25 bp, SARS Virus
cgacctttttccgcatgacggggtc

SEQ ID NO: 2244 - DNA, 25 bp, SARS Virus
gacctttttccggatgacggggtcg

SEQ ID NO: 2245 - DNA, 25 bp, SARS Virus
acctttttccgcgtgacggggtcga

SEQ ID NO: 2246 - DNA, 25 bp, SARS Virus
cctttttccgcaggacggggtcgaa

SEQ ID NO: 2247 - DNA, 25 bp, SARS Virus
ctttttccgcatgacggggtcgaac

SEQ ID NO: 2248 - DNA, 25 bp, SARS Virus
tttttccgcatggcggggtcgaact

SEQ ID NO: 2249 - DNA, 25 bp, SARS Virus
ttttccgcatgagggggtcgaactt

SEQ ID NO: 2250 - DNA, 25 bp, SARS Virus
tttccgcatgacggggtcgaacttg

SEQ ID NO: 2251 - DNA, 25 bp, SARS Virus
ttccgcatgacggggtcgaacttgt

SEQ ID NO: 2252 - DNA, 25 bp, SARS Virus
tccgcatgacggggtcgaacttgtc

SEQ ID NO: 2253 - DNA, 25 bp, SARS Virus
ccgcatgacggggtcgaacttgtcg

SEQ ID NO: 2254 - DNA, 25 bp, SARS Virus
cgcatgacgggggcgaacttgtcgg

SEQ ID NO: 2255 - DNA, 25 bp, SARS Virus
gcatgacggggtggaacttgtcggg

SEQ ID NO: 2256 - DNA, 25 bp, SARS Virus
catgacggggtcgaacttgtcggga

SEQ ID NO: 2257 - DNA, 25 bp, SARS Virus
atgacggggtcggacttgtcgggat

SEQ ID NO: 2258 - DNA, 25 bp, SARS Virus
tgacggggtcgagcttgtcgggata

SEQ ID NO: 2259 - DNA, 25 bp, SARS Virus
gacggggtcgaagttgtcgggatac

SEQ ID NO: 2260 - DNA, 25 bp, SARS Virus
acggggtcgaacgtgtcgggataca

SEQ ID NO: 2261 - DNA, 25 bp, SARS Virus
cggggtcgaactggtcgggatacac

SEQ ID NO: 2262 - DNA, 25 bp, SARS Virus
ggggtcgaacttgtcgggatacaca

SEQ ID NO: 2263 - DNA, 25 bp, SARS Virus
gggtcgaacttggcgggatacacaa

SEQ ID NO: 2264 - DNA, 25 bp, SARS Virus
ggtcgaacttgtggggatacacaag

SEQ ID NO: 2265 - DNA, 25 bp, SARS Virus
gtcgaacttgtcgggatacacaagt

SEQ ID NO: 2266 - DNA, 25 bp, SARS Virus
tcgaacttgtcgggatacacaagta

SEQ ID NO: 2267 - DNA, 25 bp, SARS Virus
cgaacttgtcgggatacacaagtaa

SEQ ID NO: 2268 - DNA, 25 bp, SARS Virus
gaacttgtcggggtacacaagtaat

SEQ ID NO: 2269 - DNA, 25 bp, SARS Virus
aacttgtcgggagacacaagtaatt

SEQ ID NO: 2270 - DNA, 25 bp, SARS Virus
acttgtcgggatgcacaagtaattt

SEQ ID NO: 2271 - DNA, 25 bp, SARS Virus
cttgtcgggatagacaagtaatttg

SEQ ID NO: 2272 - DNA, 25 bp, SARS Virus
ttgtcgggatacgcaagtaatttgc

SEQ ID NO: 2273 - DNA, 25 bp, SARS Virus
tgtcgggatacagaagtaatttgca

SEQ ID NO: 2274 - DNA, 25 bp, SARS Virus
gtcgggatacacgagtaatttgcaa

SEQ ID NO: 2275 - DNA, 25 bp, SARS Virus
tcgggatacacaggtaatttgcaag

SEQ ID NO: 2276 - DNA, 25 bp, SARS Virus
cgggatacacaagtaatttgcaaga

SEQ ID NO: 2277 - DNA, 25 bp, SARS Virus
gggatacacaaggaatttgcaagac

SEQ ID NO: 2278 - DNA, 25 bp, SARS Virus
ggatacacaagtgatttgcaagact

SEQ ID NO: 2279 - DNA, 25 bp, SARS Virus
gatacacaagtagtttgcaagacta

SEQ ID NO: 2280 - DNA, 25 bp, SARS Virus
atacacaagtaagttgcaagactac

SEQ ID NO: 2281 - DNA, 25 bp, SARS Virus
tacacaagtaatgtgcaagactacg

SEQ ID NO: 2282 - DNA, 25 bp, SARS Virus
acacaagtaattggcaagactacgg

SEQ ID NO: 2283 - DNA, 25 bp, SARS Virus
cacaagtaatttgcaagactacgga

SEQ ID NO: 2284 - DNA, 25 bp, SARS Virus
acaagtaatttggaagactacggaa

SEQ ID NO: 2285 - DNA, 25 bp, SARS Virus
caagtaatttgcgagactacggaat

SEQ ID NO: 2286 - DNA, 25 bp, SARS Virus
aagtaatttgcaggactacggaatt

SEQ ID NO: 2287 - DNA, 25 bp, SARS Virus
agtaatttgcaagactacggaattc

SEQ ID NO: 2288 - DNA, 25 bp, SARS Virus
gtaatttgcaaggctacggaattcg

SEQ ID NO: 2289 - DNA, 25 bp, SARS Virus
taatttgcaagagtacggaattcgt

SEQ ID NO: 2290 - DNA, 25 bp, SARS Virus
aatttgcaagacgacggaattcgtg

SEQ ID NO: 2291 - DNA, 25 bp, SARS Virus
atttgcaagactgcggaattcgtgg

SEQ ID NO: 2292 - DNA, 25 bp, SARS Virus
tttgcaagactagggaattcgtggt

SEQ ID NO: 2293 - DNA, 25 bp, SARS Virus
ttgcaagactacggaattcgtggtt

SEQ ID NO: 2294 - DNA, 25 bp, SARS Virus
tgcaagactacggaattcgtggtta

SEQ ID NO: 2295 - DNA, 25 bp, SARS Virus
gcaagactacgggattcgtggttag

SEQ ID NO: 2296 - DNA, 25 bp, SARS Virus
caagactacggagttcgtggttagt

SEQ ID NO: 2297 - DNA, 25 bp, SARS Virus
aagactacggaagtcgtggttagtg

SEQ ID NO: 2298 - DNA, 25 bp, SARS Virus
agactacggaatgcgtggttagtgc

SEQ ID NO: 2299 - DNA, 25 bp, SARS Virus
gactacggaattggtggttagtgcc

SEQ ID NO: 2300 - DNA, 25 bp, SARS Virus
actacggaattcgtggttagtgccg

SEQ ID NO: 2301 - DNA, 25 bp, SARS Virus
ctacggaattcggggttagtgccgg

SEQ ID NO: 2302 - DNA, 25 bp, SARS Virus
tacggaattcgtggttagtgccggt

SEQ ID NO: 2303 - DNA, 25 bp, SARS Virus
acggaattcgtggttagtgccggtg

SEQ ID NO: 2304 - DNA, 25 bp, SARS Virus
cggaattcgtgggtagtgccggtgt

SEQ ID NO: 2305 - DNA, 25 bp, SARS Virus
ggaattcgtggtgagtgccggtgtt

SEQ ID NO: 2306 - DNA, 25 bp, SARS Virus
gaattcgtggttggtgccggtgttc

SEQ ID NO: 2307 - DNA, 25 bp, SARS Virus
aattcgtggttagtgccggtgttcc

SEQ ID NO: 2308 - DNA, 25 bp, SARS Virus
attcgtggttagggccggtgttcca

SEQ ID NO: 2309 - DNA, 25 bp, SARS Virus
ttcgtggttagtgccggtgttccag

SEQ ID NO: 2310 - DNA, 25 bp, SARS Virus
tcgtggttagtggcggtgttccagc

SEQ ID NO: 2311 - DNA, 25 bp, SARS Virus
cgtggttagtgcgggtgttccagca

SEQ ID NO: 2312 - DNA, 25 bp, SARS Virus
gtggttagtgccggtgttccagcaa

SEQ ID NO: 2313 - DNA, 25 bp, SARS Virus
tggttagtgccggtgttccagcaac

SEQ ID NO: 2314 - DNA, 25 bp, SARS Virus
ggttagtgccggggttccagcaact

SEQ ID NO: 2315 - DNA, 25 bp, SARS Virus
gttagtgccggtgttccagcaactc

SEQ ID NO: 2316 - DNA, 25 bp, SARS Virus
ttagtgccggtggtccagcaactcg

SEQ ID NO: 2317 - DNA, 25 bp, SARS Virus
tagtgccggtgtgccagcaactcga

SEQ ID NO: 2318 - DNA, 25 bp, SARS Virus
agtgccggtgttgcagcaactcgac

SEQ ID NO: 2319 - DNA, 25 bp, SARS Virus
gtgccggtgttcgagcaactcgacc

SEQ ID NO: 2320 - DNA, 25 bp, SARS Virus
tgccggtgttccggcaactcgacca

SEQ ID NO: 2321 - DNA, 25 bp, SARS Virus
gccggtgttccagcaactcgaccaa

SEQ ID NO: 2322 - DNA, 25 bp, SARS Virus
ccggtgttccaggaactcgaccaac

SEQ ID NO: 2323 - DNA, 25 bp, SARS Virus
cggtgttccagcgactcgaccaacg

SEQ ID NO: 2324 - DNA, 25 bp, SARS Virus
ggtgttccagcagctcgaccaacgt

SEQ ID NO: 2325 - DNA, 25 bp, SARS Virus
gtgttccagcaagtcgaccaacgtc

SEQ ID NO: 2326 - DNA, 25 bp, SARS Virus
tgttccagcaacgcgaccaacgtct

SEQ ID NO: 2327 - DNA, 25 bp, SARS Virus
gttccagcaactggaccaacgtctt

SEQ ID NO: 2328 - DNA, 25 bp, SARS Virus
ttccagcaactcgaccaacgtcttt

SEQ ID NO: 2329 - DNA, 25 bp, SARS Virus
tccagcaactcggccaacgtcttta

SEQ ID NO: 2330 - DNA, 25 bp, SARS Virus
ccagcaactcgagcaacgtctttac

SEQ ID NO: 2331 - DNA, 25 bp, SARS Virus
cagcaactcgacgaacgtctttacc

SEQ ID NO: 2332 - DNA, 25 bp, SARS Virus
agcaactcgaccgacgtctttacct

SEQ ID NO: 2333 - DNA, 25 bp, SARS Virus
gcaactcgaccagcgtctttacctg

SEQ ID NO: 2334 - DNA, 25 bp, SARS Virus
caactcgaccaaggtctttacctgc

SEQ ID NO: 2335 - DNA, 25 bp, SARS Virus
aactcgaccaacgtctttacctgcc

SEQ ID NO: 2336 - DNA, 25 bp, SARS Virus
actcgaccaacggctttacctgccg

SEQ ID NO: 2337 - DNA, 25 bp, SARS Virus
ctcgaccaacgtgtttacctgccgt

SEQ ID NO: 2338 - DNA, 25 bp, SARS Virus
tcgaccaacgtcgttacctgccgta

SEQ ID NO: 2339 - DNA, 25 bp, SARS Virus
cgaccaacgtctgtacctgccgtaa

SEQ ID NO: 2340 - DNA, 25 bp, SARS Virus
gaccaacgtcttgacctgccgtaag

SEQ ID NO: 2341 - DNA, 25 bp, SARS Virus
accaacgtctttgcctgccgtaagt

SEQ ID NO: 2342 - DNA, 25 bp, SARS Virus
ccaacgtctttagctgccgtaagtc

SEQ ID NO: 2343 - DNA, 25 bp, SARS Virus
caacgtctttacgtgccgtaagtca

SEQ ID NO: 2344 - DNA, 25 bp, SARS Virus
aacgtctttaccggccgtaagtcat

SEQ ID NO: 2345 - DNA, 25 bp, SARS Virus
acgtctttacctgccgtaagtcatg

SEQ ID NO: 2346 - DNA, 25 bp, SARS Virus
cgtctttacctggcgtaagtcatgc

SEQ ID NO: 2347 - DNA, 25 bp, SARS Virus
gtctttacctgcggtaagtcatgcc

SEQ ID NO: 2348 - DNA, 25 bp, SARS Virus
tctttacctgccgtaagtcatgcca

SEQ ID NO: 2349 - DNA, 25 bp, SARS Virus
ctttacctgccggaagtcatgccag

SEQ ID NO: 2350 - DNA, 25 bp, SARS Virus
tttacctgccgtgagtcatgccagc

SEQ ID NO: 2351 - DNA, 25 bp, SARS Virus
ttacctgccgtaggtcatgccagca

SEQ ID NO: 2352 - DNA, 25 bp, SARS Virus
tacctgccgtaagtcatgccagcat

SEQ ID NO: 2353 - DNA, 25 bp, SARS Virus
acctgccgtaaggcatgccagcatc

SEQ ID NO: 2354 - DNA, 25 bp, SARS Virus
cctgccgtaagtgatgccagcatcg

SEQ ID NO: 2355 - DNA, 25 bp, SARS Virus
ctgccgtaagtcgtgccagcatcgc

SEQ ID NO: 2356 - DNA, 25 bp, SARS Virus
tgccgtaagtcaggccagcatcgcc

SEQ ID NO: 2357 - DNA, 25 bp, SARS Virus
gccgtaagtcatgccagcatcgcca

SEQ ID NO: 2358 - DNA, 25 bp, SARS Virus
ccgtaagtcatggcagcatcgccat

SEQ ID NO: 2359 - DNA, 25 bp, SARS Virus
cgtaagtcatgcgagcatcgccata

SEQ ID NO: 2360 - DNA, 25 bp, SARS Virus
gtaagtcatgccggcatcgccatat

SEQ ID NO: 2361 - DNA, 25 bp, SARS Virus
taagtcatgccagcatcgccatatt

SEQ ID NO: 2362 - DNA, 25 bp, SARS Virus
aagtcatgccaggatcgccatattg

SEQ ID NO: 2363 - DNA, 25 bp, SARS Virus
agtcatgccagcgtcgccatattgt

SEQ ID NO: 2364 - DNA, 25 bp, SARS Virus
gtcatgccagcagcgccatattgtg

SEQ ID NO: 2365 - DNA, 25 bp, SARS Virus
tcatgccagcatggccatattgtga

SEQ ID NO: 2366 - DNA, 25 bp, SARS Virus
catgccagcatcgccatattgtgac

SEQ ID NO: 2367 - DNA, 25 bp, SARS Virus
atgccagcatcggcatattgtgacc

SEQ ID NO: 2368 - DNA, 25 bp, SARS Virus
tgccagcatcgcgatattgtgaccc

SEQ ID NO: 2369 - DNA, 25 bp, SARS Virus
gccagcatcgccgtattgtgaccct

SEQ ID NO: 2370 - DNA, 25 bp, SARS Virus
ccagcatcgccagattgtgaccctc

SEQ ID NO: 2371 - DNA, 25 bp, SARS Virus
cagcatcgccatgttgtgaccctca

SEQ ID NO: 2372 - DNA, 25 bp, SARS Virus
agcatcgccatagtgtgaccctcat

SEQ ID NO: 2373 - DNA, 25 bp, SARS Virus
gcatcgccatatggtgaccctcatg

SEQ ID NO: 2374 - DNA, 25 bp, SARS Virus
catcgccatattgtgaccctcatga

SEQ ID NO: 2375 - DNA, 25 bp, SARS Virus
atcgccatattgggaccctcatgag

SEQ ID NO: 2376 - DNA, 25 bp, SARS Virus
tcgccatattgtgaccctcatgagc

SEQ ID NO: 2377 - DNA, 25 bp, SARS Virus
cgccatattgtggccctcatgagca

SEQ ID NO: 2378 - DNA, 25 bp, SARS Virus
gccatattgtgagcctcatgagcac

SEQ ID NO: 2379 - DNA, 25 bp, SARS Virus
ccatattgtgacgctcatgagcacg

SEQ ID NO: 2380 - DNA, 25 bp, SARS Virus
catattgtgaccgtcatgagcacgg

SEQ ID NO: 2381 - DNA, 25 bp, SARS Virus
atattgtgacccgcatgagcacggt

SEQ ID NO: 2382 - DNA, 25 bp, SARS Virus
tattgtgaccctgatgagcacggtg

SEQ ID NO: 2383 - DNA, 25 bp, SARS Virus
attgtgaccctcgtgagcacggtgt

SEQ ID NO: 2384 - DNA, 25 bp, SARS Virus
ttgtgaccctcaggagcacggtgta

SEQ ID NO: 2385 - DNA, 25 bp, SARS Virus
tgtgaccctcatgagcacggtgtac

SEQ ID NO: 2386 - DNA, 25 bp, SARS Virus
gtgaccctcatgggcacggtgtaca

SEQ ID NO: 2387 - DNA, 25 bp, SARS Virus
tgaccctcatgagcacggtgtacac

SEQ ID NO: 2388 - DNA, 25 bp, SARS Virus
gaccctcatgaggacggtgtacacc

SEQ ID NO: 2389 - DNA, 25 bp, SARS Virus
accctcatgagcgcggtgtacaccc

SEQ ID NO: 2390 - DNA, 25 bp, SARS Virus
ccctcatgagcagggtgtacacccg

SEQ ID NO: 2391 - DNA, 25 bp, SARS Virus
cctcatgagcacggtgtacacccgc

SEQ ID NO: 2392 - DNA, 25 bp, SARS Virus
ctcatgagcacggtgtacacccgct

SEQ ID NO: 2393 - DNA, 25 bp, SARS Virus
tcatgagcacggggtacacccgctt

SEQ ID NO: 2394 - DNA, 25 bp, SARS Virus
catgagcacggtgtacacccgcttt

SEQ ID NO: 2395 - DNA, 25 bp, SARS Virus
atgagcacggtggacacccgctttg

SEQ ID NO: 2396 - DNA, 25 bp, SARS Virus
tgagcacggtgtgcacccgctttgg

SEQ ID NO: 2397 - DNA, 25 bp, SARS Virus
gagcacggtgtagacccgctttggg

SEQ ID NO: 2398 - DNA, 25 bp, SARS Virus
agcacggtgtacgcccgctttgggg

SEQ ID NO: 2399 - DNA, 25 bp, SARS Virus
gcacggtgtacagccgctttggggt

SEQ ID NO: 2400 - DNA, 25 bp, SARS Virus
cacggtgtacacgcgctttggggtt

SEQ ID NO: 2401 - DNA, 25 bp, SARS Virus
acggtgtacaccggctttggggtta

SEQ ID NO: 2402 - DNA, 25 bp, SARS Virus
cggtgtacacccgctttggggttaa

SEQ ID NO: 2403 - DNA, 25 bp, SARS Virus
ggtgtacacccggtttggggttaac

SEQ ID NO: 2404 - DNA, 25 bp, SARS Virus
gtgtacacccgcgttggggttaacg

SEQ ID NO: 2405 - DNA, 25 bp, SARS Virus
tgtacacccgctgtggggttaacgt

SEQ ID NO: 2406 - DNA, 25 bp, SARS Virus
gtacacccgcttgggggttaacgta

SEQ ID NO: 2407 - DNA, 25 bp, SARS Virus
tacacccgctttggggttaacgtat

SEQ ID NO: 2408 - DNA, 25 bp, SARS Virus
acacccgctttggggttaacgtatg

SEQ ID NO: 2409 - DNA, 25 bp, SARS Virus
cacccgctttggggttaacgtatgg

SEQ ID NO: 2410 - DNA, 25 bp, SARS Virus
acccgctttggggttaacgtatggc

SEQ ID NO: 2411 - DNA, 25 bp, SARS Virus
cccgctttgggggtaacgtatggcg

SEQ ID NO: 2412 - DNA, 25 bp, SARS Virus
ccgctttggggtgaacgtatggcgt

SEQ ID NO: 2413 - DNA, 25 bp, SARS Virus
cgctttggggttgacgtatggcgtt

SEQ ID NO: 2414 - DNA, 25 bp, SARS Virus
gctttggggttagcgtatggcgtta

SEQ ID NO: 2415 - DNA, 25 bp, SARS Virus
ctttggggttaaggtatggcgttac

SEQ ID NO: 2416 - DNA, 25 bp, SARS Virus
tttggggttaacgtatggcgttaca

SEQ ID NO: 2417 - DNA, 25 bp, SARS Virus
ttggggttaacggatggcgttacaa

SEQ ID NO: 2418 - DNA, 25 bp, SARS Virus
tggggttaacgtgtggcgttacaag

SEQ ID NO: 2419 - DNA, 25 bp, SARS Virus
ggggttaacgtagggcgttacaaga

SEQ ID NO: 2420 - DNA, 25 bp, SARS Virus
gggttaacgtatggcgttacaagaa

SEQ ID NO: 2421 - DNA, 25 bp, SARS Virus
ggttaacgtatggcgttacaagaag

SEQ ID NO: 2422 - DNA, 25 bp, SARS Virus
gttaacgtatggggttacaagaaga

SEQ ID NO: 2423 - DNA, 25 bp, SARS Virus
ttaacgtatggcgttacaagaagaa

SEQ ID NO: 2424 - DNA, 25 bp, SARS Virus
taacgtatggcggtacaagaagaag

SEQ ID NO: 2425 - DNA, 25 bp, SARS Virus
aacgtatggcgtgacaagaagaagc

SEQ ID NO: 2426 - DNA, 25 bp, SARS Virus
acgtatggcgttgcaagaagaagca

SEQ ID NO: 2427 - DNA, 25 bp, SARS Virus
cgtatggcgttagaagaagaagcat

SEQ ID NO: 2428 - DNA, 25 bp, SARS Virus
gtatggcgttacgagaagaagcatt

SEQ ID NO: 2429 - DNA, 25 bp, SARS Virus
tatggcgttacaggaagaagcattc

SEQ ID NO: 2430 - DNA, 25 bp, SARS Virus
atggcgttacaagaagaagcattct

SEQ ID NO: 2431 - DNA, 25 bp, SARS Virus
tggcgttacaaggagaagcattctt

SEQ ID NO: 2432 - DNA, 25 bp, SARS Virus
ggcgttacaagaggaagcattcttg

SEQ ID NO: 2433 - DNA, 25 bp, SARS Virus
gcgttacaagaagaagcattcttgc

SEQ ID NO: 2434 - DNA, 25 bp, SARS Virus
cgttacaagaaggagcattcttgcc

SEQ ID NO: 2435 - DNA, 25 bp, SARS Virus
gttacaagaagaggcattcttgcca

SEQ ID NO: 2436 - DNA, 25 bp, SARS Virus
ttacaagaagaagcattcttgccat

SEQ ID NO: 2437 - DNA, 25 bp, SARS Virus
tacaagaagaaggattcttgccatt

SEQ ID NO: 2438 - DNA, 25 bp, SARS Virus
acaagaagaagcgttcttgccatta

SEQ ID NO: 2439 - DNA, 25 bp, SARS Virus
caagaagaagcagtcttgccattat

SEQ ID NO: 2440 - DNA, 25 bp, SARS Virus
aagaagaagcatgcttgccattatt

SEQ ID NO: 2441 - DNA, 25 bp, SARS Virus
agaagaagcattgttgccattattc

SEQ ID NO: 2442 - DNA, 25 bp, SARS Virus
gaagaagcattcgtgccattattcc

SEQ ID NO: 2443 - DNA, 25 bp, SARS Virus
aagaagcattctggccattattccc

SEQ ID NO: 2444 - DNA, 25 bp, SARS Virus
agaagcattcttgccattattccct

SEQ ID NO: 2445 - DNA, 25 bp, SARS Virus
gaagcattcttggcattattccctc

SEQ ID NO: 2446 - DNA, 25 bp, SARS Virus
aagcattcttgcgattattccctcg

SEQ ID NO: 2447 - DNA, 25 bp, SARS Virus
agcattcttgccgttattccctcgg

SEQ ID NO: 2448 - DNA, 25 bp, SARS Virus
gcattcttgccagtattccctcggc

SEQ ID NO: 2449 - DNA, 25 bp, SARS Virus
cattcttgccatgattccctcggcc

SEQ ID NO: 2450 - DNA, 25 bp, SARS Virus
attcttgccattgttccctcggcca

SEQ ID NO: 2451 - DNA, 25 bp, SARS Virus
ttcttgccattagtccctcggccac

SEQ ID NO: 2452 - DNA, 25 bp, SARS Virus
tcttgccattatgccctcggccacc

SEQ ID NO: 2453 - DNA, 25 bp, SARS Virus
cttgccattattgcctcggccacca

SEQ ID NO: 2454 - DNA, 25 bp, SARS Virus
ttgccattattcgctcggccaccag

SEQ ID NO: 2455 - DNA, 25 bp, SARS Virus
tgccattattccgtcggccaccagt

SEQ ID NO: 2456 - DNA, 25 bp, SARS Virus
gccattattcccgcggccaccagta

SEQ ID NO: 2457 - DNA, 25 bp, SARS Virus
ccattattccctgggccaccagtat

SEQ ID NO: 2458 - DNA, 25 bp, SARS Virus
cattattccctcggccaccagtatc

SEQ ID NO: 2459 - DNA, 25 bp, SARS Virus
attattccctcggccaccagtatcg

SEQ ID NO: 2460 - DNA, 25 bp, SARS Virus
ttattccctcgggcaccagtatcga

SEQ ID NO: 2461 - DNA, 25 bp, SARS Virus
tattccctcggcgaccagtatcgat

SEQ ID NO: 2462 - DNA, 25 bp, SARS Virus
attccctcggccgccagtatcgata

SEQ ID NO: 2463 - DNA, 25 bp, SARS Virus
ttccctcggccagcagtatcgatac

SEQ ID NO: 2464 - DNA, 25 bp, SARS Virus
tccctcggccacgagtatcgatacc

SEQ ID NO: 2465 - DNA, 25 bp, SARS Virus
ccctcggccaccggtatcgataccg

SEQ ID NO: 2466 - DNA, 25 bp, SARS Virus
cctcggccaccagtatcgataccgt

SEQ ID NO: 2467 - DNA, 25 bp, SARS Virus
ctcggccaccaggatcgataccgta

SEQ ID NO: 2468 - DNA, 25 bp, SARS Virus
tcggccaccagtgtcgataccgtag

SEQ ID NO: 2469 - DNA, 25 bp, SARS Virus
cggccaccagtagcgataccgtagc

SEQ ID NO: 2470 - DNA, 25 bp, SARS Virus
ggccaccagtatggataccgtagct

SEQ ID NO: 2471 - DNA, 25 bp, SARS Virus
gccaccagtatcgataccgtagcta

SEQ ID NO: 2472 - DNA, 25 bp, SARS Virus
ccaccagtatcggtaccgtagctag

SEQ ID NO: 2473 - DNA, 25 bp, SARS Virus
caccagtatcgagaccgtagctaga

SEQ ID NO: 2474 - DNA, 25 bp, SARS Virus
accagtatcgatgccgtagctagat

SEQ ID NO: 2475 - DNA, 25 bp, SARS Virus
ccagtatcgatagcgtagctagatt

SEQ ID NO: 2476 - DNA, 25 bp, SARS Virus
cagtatcgatacggtagctagattt

SEQ ID NO: 2477 - DNA, 25 bp, SARS Virus
agtatcgataccgtagctagatttc

SEQ ID NO: 2478 - DNA, 25 bp, SARS Virus
gtatcgataccggagctagatttca

SEQ ID NO: 2479 - DNA, 25 bp, SARS Virus
tatcgataccgtggctagatttcag

SEQ ID NO: 2480 - DNA, 25 bp, SARS Virus
atcgataccgtagctagatttcaga

SEQ ID NO: 2481 - DNA, 25 bp, SARS Virus
tcgataccgtaggtagatttcagaa

SEQ ID NO: 2482 - DNA, 25 bp, SARS Virus
cgataccgtagcgagatttcagaat

SEQ ID NO: 2483 - DNA, 25 bp, SARS Virus
gataccgtagctggatttcagaata

SEQ ID NO: 2484 - DNA, 25 bp, SARS Virus
ataccgtagctagatttcagaatac

SEQ ID NO: 2485 - DNA, 25 bp, SARS Virus
taccgtagctaggtttcagaatact

SEQ ID NO: 2486 - DNA, 25 bp, SARS Virus
accgtagctagagttcagaatactg

SEQ ID NO: 2487 - DNA, 25 bp, SARS Virus
ccgtagctagatgtcagaatactga

SEQ ID NO: 2488 - DNA, 25 bp, SARS Virus
cgtagctagattgcagaatactgaa

SEQ ID NO: 2489 - DNA, 25 bp, SARS Virus
gtagctagatttgagaatactgaat

SEQ ID NO: 2490 - DNA, 25 bp, SARS Virus
tagctagatttcggaatactgaatc

SEQ ID NO: 2491 - DNA, 25 bp, SARS Virus
agctagatttcagaatactgaatcc

SEQ ID NO: 2492 - DNA, 25 bp, SARS Virus
gctagatttcaggatactgaatcca

SEQ ID NO: 2493 - DNA, 25 bp, SARS Virus
ctagatttcagagtactgaatccac

SEQ ID NO: 2494 - DNA, 25 bp, SARS Virus
tagatttcagaagactgaatccact

SEQ ID NO: 2495 - DNA, 25 bp, SARS Virus
agatttcagaatgctgaatccactg

SEQ ID NO: 2496 - DNA, 25 bp, SARS Virus
gatttcagaatagtgaatccactgc

SEQ ID NO: 2497 - DNA, 25 bp, SARS Virus
atttcagaatacggaatccactgct

SEQ ID NO: 2498 - DNA, 25 bp, SARS Virus
tttcagaatactgaatccactgctc

SEQ ID NO: 2499 - DNA, 25 bp, SARS Virus
ttcagaatactggatccactgctcg

SEQ ID NO: 2500 - DNA, 25 bp, SARS Virus
tcagaatactgagtccactgctcga

SEQ ID NO: 2501 - DNA, 25 bp, SARS Virus
cagaatactgaagccactgctcgaa

SEQ ID NO: 2502 - DNA, 25 bp, SARS Virus
agaatactgaatgcactgctcgaac

SEQ ID NO: 2503 - DNA, 25 bp, SARS Virus
gaatactgaatcgactgctcgaacc

SEQ ID NO: 2504 - DNA, 25 bp, SARS Virus
aatactgaatccgctgctcgaaccg

SEQ ID NO: 2505 - DNA, 25 bp, SARS Virus
atactgaatccagtgctcgaaccgt

SEQ ID NO: 2506 - DNA, 25 bp, SARS Virus
tactgaatccacggctcgaaccgtg

SEQ ID NO: 2507 - DNA, 25 bp, SARS Virus
actgaatccactgctcgaaccgtga

SEQ ID NO: 2508 - DNA, 25 bp, SARS Virus
ctgaatccactggtcgaaccgtgac

SEQ ID NO: 2509 - DNA, 25 bp, SARS Virus
tgaatccactgcgcgaaccgtgact

SEQ ID NO: 2510 - DNA, 25 bp, SARS Virus
gaatccactgctggaaccgtgacta

SEQ ID NO: 2511 - DNA, 25 bp, SARS Virus
aatccactgctcgaaccgtgactag

SEQ ID NO: 2512 - DNA, 25 bp, SARS Virus
atccactgctcggaccgtgactagg

SEQ ID NO: 2513 - DNA, 25 bp, SARS Virus
tccactgctcgagccgtgactaggg

SEQ ID NO: 2514 - DNA, 25 bp, SARS Virus
ccactgctcgaagcgtgactagggt

SEQ ID NO: 2515 - DNA, 25 bp, SARS Virus
cactgctcgaacggtgactagggta

SEQ ID NO: 2516 - DNA, 25 bp, SARS Virus
actgctcgaaccgtgactagggtaa

SEQ ID NO: 2517 - DNA, 25 bp, SARS Virus
ctgctcgaaccgggactagggtaac

SEQ ID NO: 2518 - DNA, 25 bp, SARS Virus
tgctcgaaccgtgactagggtaact

SEQ ID NO: 2519 - DNA, 25 bp, SARS Virus
gctcgaaccgtggctagggtaactt

SEQ ID NO: 2520 - DNA, 25 bp, SARS Virus
ctcgaaccgtgagtagggtaacttc

SEQ ID NO: 2521 - DNA, 25 bp, SARS Virus
tcgaaccgtgacgagggtaacttct

SEQ ID NO: 2522 - DNA, 25 bp, SARS Virus
cgaaccgtgactggggtaacttcta

SEQ ID NO: 2523 - DNA, 25 bp, SARS Virus
gaaccgtgactagggtaacttctaa

SEQ ID NO: 2524 - DNA, 25 bp, SARS Virus
aaccgtgactagggtaacttctaat

SEQ ID NO: 2525 - DNA, 25 bp, SARS Virus
accgtgactagggtaacttctaata

SEQ ID NO: 2526 - DNA, 25 bp, SARS Virus
ccgtgactaggggaacttctaatac

SEQ ID NO: 2527 - DNA, 25 bp, SARS Virus
cgtgactagggtgacttctaatact

SEQ ID NO: 2528 - DNA, 25 bp, SARS Virus
gtgactagggtagcttctaatactt

SEQ ID NO: 2529 - DNA, 25 bp, SARS Virus
tgactagggtaagttctaatacttg

SEQ ID NO: 2530 - DNA, 25 bp, SARS Virus
gactagggtaacgtctaatacttgt

SEQ ID NO: 2531 - DNA, 25 bp, SARS Virus
actagggtaactgctaatacttgtt

SEQ ID NO: 2532 - DNA, 25 bp, SARS Virus
ctagggtaacttgtaatacttgttt

SEQ ID NO: 2533 - DNA, 25 bp, SARS Virus
tagggtaacttcgaatacttgtttt

SEQ ID NO: 2534 - DNA, 25 bp, SARS Virus
agggtaacttctgatacttgttttg

SEQ ID NO: 2535 - DNA, 25 bp, SARS Virus
gggtaacttctagtacttgttttga

SEQ ID NO: 2536 - DNA, 25 bp, SARS Virus
ggtaacttctaagacttgttttgac

SEQ ID NO: 2537 - DNA, 25 bp, SARS Virus
gtaacttctaatgcttgttttgacc

SEQ ID NO: 2538 - DNA, 25 bp, SARS Virus
taacttctaatagttgttttgacct

SEQ ID NO: 2539 - DNA, 25 bp, SARS Virus
aacttctaatacgtgttttgacctt

SEQ ID NO: 2540 - DNA, 25 bp, SARS Virus
acttctaatactggttttgaccttg

SEQ ID NO: 2541 - DNA, 25 bp, SARS Virus
cttctaatacttgttttgaccttgt

SEQ ID NO: 2542 - DNA, 25 bp, SARS Virus
ttctaatacttggtttgaccttgtg

SEQ ID NO: 2543 - DNA, 25 bp, SARS Virus
tctaatacttgtgttgaccttgtga

SEQ ID NO: 2544 - DNA, 25 bp, SARS Virus
ctaatacttgttgtgaccttgtgat

SEQ ID NO: 2545 - DNA, 25 bp, SARS Virus
taatacttgtttggaccttgtgatt

SEQ ID NO: 2546 - DNA, 25 bp, SARS Virus
aatacttgttttgaccttgtgattc

SEQ ID NO: 2547 - DNA, 25 bp, SARS Virus
atacttgttttggccttgtgattcg

SEQ ID NO: 2548 - DNA, 25 bp, SARS Virus
tacttgttttgagcttgtgattcgt

SEQ ID NO: 2549 - DNA, 25 bp, SARS Virus
acttgttttgacgttgtgattcgta

SEQ ID NO: 2550 - DNA, 25 bp, SARS Virus
cttgttttgaccgtgtgattcgtac

SEQ ID NO: 2551 - DNA, 25 bp, SARS Virus
ttgttttgacctggtgattcgtacc

SEQ ID NO: 2552 - DNA, 25 bp, SARS Virus
tgttttgaccttgtgattcgtaccg

SEQ ID NO: 2553 - DNA, 25 bp, SARS Virus
gttttgaccttgggattcgtaccgt

SEQ ID NO: 2554 - DNA, 25 bp, SARS Virus
ttttgaccttgtgattcgtaccgtc

SEQ ID NO: 2555 - DNA, 25 bp, SARS Virus
tttgaccttgtggttcgtaccgtca

SEQ ID NO: 2556 - DNA, 25 bp, SARS Virus
ttgaccttgtgagtcgtaccgtcac

SEQ ID NO: 2557 - DNA, 25 bp, SARS Virus
tgaccttgtgatgcgtaccgtcacc

SEQ ID NO: 2558 - DNA, 25 bp, SARS Virus
gaccttgtgattggtaccgtcacca

SEQ ID NO: 2559 - DNA, 25 bp, SARS Virus
accttgtgattcgtaccgtcaccac

SEQ ID NO: 2560 - DNA, 25 bp, SARS Virus
ccttgtgattcggaccgtcaccacg

SEQ ID NO: 2561 - DNA, 25 bp, SARS Virus
cttgtgattcgtgccgtcaccacgt

SEQ ID NO: 2562 - DNA, 25 bp, SARS Virus
ttgtgattcgtagcgtcaccacgtg

SEQ ID NO: 2563 - DNA, 25 bp, SARS Virus
tgtgattcgtacggtcaccacgtga

SEQ ID NO: 2564 - DNA, 25 bp, SARS Virus
gtgattcgtaccgtcaccacgtgag

SEQ ID NO: 2565 - DNA, 25 bp, SARS Virus
tgattcgtaccggcaccacgtgagg

SEQ ID NO: 2566 - DNA, 25 bp, SARS Virus
gattcgtaccgtgaccacgtgaggc

SEQ ID NO: 2567 - DNA, 25 bp, SARS Virus
attcgtaccgtcgccacgtgaggca

SEQ ID NO: 2568 - DNA, 25 bp, SARS Virus
ttcgtaccgtcagcacgtgaggcac

SEQ ID NO: 2569 - DNA, 25 bp, SARS Virus
cctctcggaacatgaaccacagttg

SEQ ID NO: 2570 - DNA, 25 bp, SARS Virus
ctctcggaacaataaccacagttgc

SEQ ID NO: 2571 - DNA, 25 bp, SARS Virus
tctcggaacaagtaccacagttgct

SEQ ID NO: 2572 - DNA, 25 bp, SARS Virus
ctcggaacaagatccacagttgctc

SEQ ID NO: 2573 - DNA, 25 bp, SARS Virus
tcggaacaagaatcacagttgctct

SEQ ID NO: 2574 - DNA, 25 bp, SARS Virus
cggaacaagaactacagttgctctt

SEQ ID NO: 2575 - DNA, 25 bp, SARS Virus
ggaacaagaacctcagttgctcttt

SEQ ID NO: 2576 - DNA, 25 bp, SARS Virus
gaacaagaaccatagttgctctttt

SEQ ID NO: 2577 - DNA, 25 bp, SARS Virus
aacaagaaccactgttgctcttttg

SEQ ID NO: 2578 - DNA, 25 bp, SARS Virus
acaagaaccacatttgctcttttgt

SEQ ID NO: 2579 - DNA, 25 bp, SARS Virus
caagaaccacagttgctcttttgtg

SEQ ID NO: 2580 - DNA, 25 bp, SARS Virus
aagaaccacagttgctcttttgtgt

SEQ ID NO: 2581 - DNA, 25 bp, SARS Virus
agaaccacagtttctcttttgtgtg

SEQ ID NO: 2582 - DNA, 25 bp, SARS Virus
gaaccacagttgttcttttgtgtgc

SEQ ID NO: 2583 - DNA, 25 bp, SARS Virus
aaccacagttgctcttttgtgtgca

SEQ ID NO: 2584 - DNA, 25 bp, SARS Virus
accacagttgcttttttgtgtgcag

SEQ ID NO: 2585 - DNA, 25 bp, SARS Virus
ccacagttgctcttttgtgtgcagg

SEQ ID NO: 2586 - DNA, 25 bp, SARS Virus
cacagttgctcttttgtgtgcaggt

SEQ ID NO: 2587 - DNA, 25 bp, SARS Virus
acagttgctcttttgtgtgcaggtt

SEQ ID NO: 2588 - DNA, 25 bp, SARS Virus
cagttgctcttttgtgtgcaggttg

SEQ ID NO: 2589 - DNA, 25 bp, SARS Virus
agttgctcttttttgtgcaggttga

SEQ ID NO: 2590 - DNA, 25 bp, SARS Virus
gttgctcttttgtgtgcaggttgag

SEQ ID NO: 2591 - DNA, 25 bp, SARS Virus
ttgctcttttgtttgcaggttgagt

SEQ ID NO: 2592 - DNA, 25 bp, SARS Virus
tgctcttttgtgtgcaggttgagtc

SEQ ID NO: 2593 - DNA, 25 bp, SARS Virus
gctcttttgtgttcaggttgagtca

SEQ ID NO: 2594 - DNA, 25 bp, SARS Virus
ctcttttgtgtgtaggttgagtcaa

SEQ ID NO: 2595 - DNA, 25 bp, SARS Virus
tcttttgtgtgctggttgagtcaaa

SEQ ID NO: 2596 - DNA, 25 bp, SARS Virus
cttttgtgtgcatgttgagtcaaac

SEQ ID NO: 2597 - DNA, 25 bp, SARS Virus
ttttgtgtgcagtttgagtcaaacg

SEQ ID NO: 2598 - DNA, 25 bp, SARS Virus
tttgtgtgcaggttgagtcaaacgg

SEQ ID NO: 2599 - DNA, 25 bp, SARS Virus
ttgtgtgcaggttgagtcaaacgga

SEQ ID NO: 2600 - DNA, 25 bp, SARS Virus
tgtgtgcaggtttagtcaaacggac

SEQ ID NO: 2601 - DNA, 25 bp, SARS Virus
gtgtgcaggttgtgtcaaacggaca

SEQ ID NO: 2602 - DNA, 25 bp, SARS Virus
tgtgcaggttgattcaaacggacag

SEQ ID NO: 2603 - DNA, 25 bp, SARS Virus
gtgcaggttgagtcaaacggacagg

SEQ ID NO: 2604 - DNA, 25 bp, SARS Virus
tgcaggttgagttaaacggacagga

SEQ ID NO: 2605 - DNA, 25 bp, SARS Virus
gcaggttgagtctaacggacaggaa

SEQ ID NO: 2606 - DNA, 25 bp, SARS Virus
caggttgagtcatacggacaggaag

SEQ ID NO: 2607 - DNA, 25 bp, SARS Virus
aggttgagtcaatcggacaggaagt

SEQ ID NO: 2608 - DNA, 25 bp, SARS Virus
ggttgagtcaaatggacaggaagtc

SEQ ID NO: 2609 - DNA, 25 bp, SARS Virus
gttgagtcaaactgacaggaagtcc

SEQ ID NO: 2610 - DNA, 25 bp, SARS Virus
ttgagtcaaacgtacaggaagtcca

SEQ ID NO: 2611 - DNA, 25 bp, SARS Virus
tgagtcaaacggtcaggaagtccaa

SEQ ID NO: 2612 - DNA, 25 bp, SARS Virus
gagtcaaacggataggaagtccaat

SEQ ID NO: 2613 - DNA, 25 bp, SARS Virus
agtcaaacggactggaagtccaatc

SEQ ID NO: 2614 - DNA, 25 bp, SARS Virus
gtcaaacggacatgaagtccaatct

SEQ ID NO: 2615 - DNA, 25 bp, SARS Virus
tcaaacggacagtaagtccaatctc

SEQ ID NO: 2616 - DNA, 25 bp, SARS Virus
caaacggacaggtagtccaatctct

SEQ ID NO: 2617 - DNA, 25 bp, SARS Virus
aaacggacaggatgtccaatctctg

SEQ ID NO: 2618 - DNA, 25 bp, SARS Virus
aacggacaggaattccaatctctgc

SEQ ID NO: 2619 - DNA, 25 bp, SARS Virus
acggacaggaagtccaatctctgca

SEQ ID NO: 2620 - DNA, 25 bp, SARS Virus
cggacaggaagttcaatctctgcac

SEQ ID NO: 2621 - DNA, 25 bp, SARS Virus
ggacaggaagtctaatctctgcacg

SEQ ID NO: 2622 - DNA, 25 bp, SARS Virus
gacaggaagtcctatctctgcacga

SEQ ID NO: 2623 - DNA, 25 bp, SARS Virus
acaggaagtccattctctgcacgat

SEQ ID NO: 2624 - DNA, 25 bp, SARS Virus
caggaagtccaatctctgcacgatc

SEQ ID NO: 2625 - DNA, 25 bp, SARS Virus
aggaagtccaatttctgcacgatca

SEQ ID NO: 2626 - DNA, 25 bp, SARS Virus
ggaagtccaatctctgcacgatcac

SEQ ID NO: 2627 - DNA, 25 bp, SARS Virus
gaagtccaatctttgcacgatcacg

SEQ ID NO: 2628 - DNA, 25 bp, SARS Virus
aagtccaatctctgcacgatcacgc

SEQ ID NO: 2629 - DNA, 25 bp, SARS Virus
agtccaatctcttcacgatcacgca

SEQ ID NO: 2630 - DNA, 25 bp, SARS Virus
gtccaatctctgtacgatcacgcac

SEQ ID NO: 2631 - DNA, 25 bp, SARS Virus
tccaatctctgctcgatcacgcacc

SEQ ID NO: 2632 - DNA, 25 bp, SARS Virus
ccaatctctgcatgatcacgcaccg

SEQ ID NO: 2633 - DNA, 25 bp, SARS Virus
caatctctgcactatcacgcaccga

SEQ ID NO: 2634 - DNA, 25 bp, SARS Virus
aatctctgcacgttcacgcaccgaa

SEQ ID NO: 2635 - DNA, 25 bp, SARS Virus
atctctgcacgatcacgcaccgaag

SEQ ID NO: 2636 - DNA, 25 bp, SARS Virus
tctctgcacgattacgcaccgaagc

SEQ ID NO: 2637 - DNA, 25 bp, SARS Virus
ctctgcacgatctcgcaccgaagcc

SEQ ID NO: 2638 - DNA, 25 bp, SARS Virus
tctgcacgatcatgcaccgaagccc

SEQ ID NO: 2639 - DNA, 25 bp, SARS Virus
ctgcacgatcactcaccgaagcccc

SEQ ID NO: 2640 - DNA, 25 bp, SARS Virus
tgcacgatcacgtaccgaagcccct

SEQ ID NO: 2641 - DNA, 25 bp, SARS Virus
gcacgatcacgctccgaagcccctg

SEQ ID NO: 2642 - DNA, 25 bp, SARS Virus
cacgatcacgcatcgaagcccctga

SEQ ID NO: 2643 - DNA, 25 bp, SARS Virus
acgatcacgcactgaagcccctgag

SEQ ID NO: 2644 - DNA, 25 bp, SARS Virus
cgatcacgcacctaagcccctgaga

SEQ ID NO: 2645 - DNA, 25 bp, SARS Virus
gatcacgcaccgtagcccctgagac

SEQ ID NO: 2646 - DNA, 25 bp, SARS Virus
atcacgcaccgatgcccctgagaca

SEQ ID NO: 2647 - DNA, 25 bp, SARS Virus
tcacgcaccgaatcccctgagacac

SEQ ID NO: 2648 - DNA, 25 bp, SARS Virus
cacgcaccgaagtccctgagacacc

SEQ ID NO: 2649 - DNA, 25 bp, SARS Virus
acgcaccgaagctcctgagacacct

SEQ ID NO: 2650 - DNA, 25 bp, SARS Virus
cgcaccgaagcctctgagacacctt

SEQ ID NO: 2651 - DNA, 25 bp, SARS Virus
gcaccgaagcccttgagacaccttc

SEQ ID NO: 2652 - DNA, 25 bp, SARS Virus
caccgaagcccctgagacaccttct

SEQ ID NO: 2653 - DNA, 25 bp, SARS Virus
accgaagccccttagacaccttctc

SEQ ID NO: 2654 - DNA, 25 bp, SARS Virus
ccgaagcccctgtgacaccttctcc

SEQ ID NO: 2655 - DNA, 25 bp, SARS Virus
cgaagcccctgatacaccttctccg

SEQ ID NO: 2656 - DNA, 25 bp, SARS Virus
gaagcccctgagtcaccttctccgg

SEQ ID NO: 2657 - DNA, 25 bp, SARS Virus
aagcccctgagataccttctccggg

SEQ ID NO: 2658 - DNA, 25 bp, SARS Virus
agcccctgagactccttctccggga

SEQ ID NO: 2659 - DNA, 25 bp, SARS Virus
gcccctgagacatcttctccgggat

SEQ ID NO: 2660 - DNA, 25 bp, SARS Virus
cccctgagacactttctccgggata

SEQ ID NO: 2661 - DNA, 25 bp, SARS Virus
ccctgagacaccttctccgggatag

SEQ ID NO: 2662 - DNA, 25 bp, SARS Virus
cctgagacaccttctccgggatagc

SEQ ID NO: 2663 - DNA, 25 bp, SARS Virus
ctgagacaccttttccgggatagcc

SEQ ID NO: 2664 - DNA, 25 bp, SARS Virus
tgagacaccttctccgggatagcct

SEQ ID NO: 2665 - DNA, 25 bp, SARS Virus
gagacaccttcttcgggatagcctc

SEQ ID NO: 2666 - DNA, 25 bp, SARS Virus
agacaccttctctgggatagcctcc

SEQ ID NO: 2667 - DNA, 25 bp, SARS Virus
gacaccttctcctggatagcctccg

SEQ ID NO: 2668 - DNA, 25 bp, SARS Virus
acaccttctccgtgatagcctccgt

SEQ ID NO: 2669 - DNA, 25 bp, SARS Virus
caccttctccggtatagcctccgtg

SEQ ID NO: 2670 - DNA, 25 bp, SARS Virus
accttctccgggttagcctccgtgc

SEQ ID NO: 2671 - DNA, 25 bp, SARS Virus
ccttctccgggatagcctccgtgca

SEQ ID NO: 2672 - DNA, 25 bp, SARS Virus
cttctccgggattgcctccgtgcac

SEQ ID NO: 2673 - DNA, 25 bp, SARS Virus
ttctccgggatatcctccgtgcact

SEQ ID NO: 2674 - DNA, 25 bp, SARS Virus
tctccgggatagtctccgtgcactt

SEQ ID NO: 2675 - DNA, 25 bp, SARS Virus
ctccgggatagcttccgtgcacttg

SEQ ID NO: 2676 - DNA, 25 bp, SARS Virus
tccgggatagcctccgtgcacttgt

SEQ ID NO: 2677 - DNA, 25 bp, SARS Virus
ccgggatagccttcgtgcacttgtg

SEQ ID NO: 2678 - DNA, 25 bp, SARS Virus
cgggatagcctctgtgcacttgtgg

SEQ ID NO: 2679 - DNA, 25 bp, SARS Virus
gggatagcctccttgcacttgtgga

SEQ ID NO: 2680 - DNA, 25 bp, SARS Virus
ggatagcctccgtgcacttgtggag

SEQ ID NO: 2681 - DNA, 25 bp, SARS Virus
gatagcctccgttcacttgtggagt

SEQ ID NO: 2682 - DNA, 25 bp, SARS Virus
atagcctccgtgtacttgtggagtt

SEQ ID NO: 2683 - DNA, 25 bp, SARS Virus
tagcctccgtgctcttgtggagttt

SEQ ID NO: 2684 - DNA, 25 bp, SARS Virus
agcctccgtgcatttgtggagtttt

SEQ ID NO: 2685 - DNA, 25 bp, SARS Virus
gcctccgtgcacttgtggagttttt

SEQ ID NO: 2686 - DNA, 25 bp, SARS Virus
cctccgtgcacttgtggagttttta

SEQ ID NO: 2687 - DNA, 25 bp, SARS Virus
ctccgtgcacttttggagtttttac

SEQ ID NO: 2688 - DNA, 25 bp, SARS Virus
tccgtgcacttgtggagtttttacc

SEQ ID NO: 2689 - DNA, 25 bp, SARS Virus
ccgtgcacttgttgagtttttaccg

SEQ ID NO: 2690 - DNA, 25 bp, SARS Virus
cgtgcacttgtgtagtttttaccgt

SEQ ID NO: 2691 - DNA, 25 bp, SARS Virus
gtgcacttgtggtgtttttaccgtg

SEQ ID NO: 2692 - DNA, 25 bp, SARS Virus
tgcacttgtggattttttaccgtga

SEQ ID NO: 2693 - DNA, 25 bp, SARS Virus
gcacttgtggagtttttaccgtgaa

SEQ ID NO: 2694 - DNA, 25 bp, SARS Virus
cacttgtggagtttttaccgtgaac

SEQ ID NO: 2695 - DNA, 25 bp, SARS Virus
acttgtggagtttttaccgtgaaca

SEQ ID NO: 2696 - DNA, 25 bp, SARS Virus
cttgtggagtttttaccgtgaacac

SEQ ID NO: 2697 - DNA, 25 bp, SARS Virus
ttgtggagtttttaccgtgaacacc

SEQ ID NO: 2698 - DNA, 25 bp, SARS Virus
tgtggagttttttccgtgaacacca

SEQ ID NO: 2699 - DNA, 25 bp, SARS Virus
gtggagtttttatcgtgaacaccag

SEQ ID NO: 2700 - DNA, 25 bp, SARS Virus
tggagtttttactgtgaacaccaga

SEQ ID NO: 2701 - DNA, 25 bp, SARS Virus
ggagtttttaccttgaacaccagat

SEQ ID NO: 2702 - DNA, 25 bp, SARS Virus
gagtttttaccgtgaacaccagatc

SEQ ID NO: 2703 - DNA, 25 bp, SARS Virus
agtttttaccgttaacaccagatca

SEQ ID NO: 2704 - DNA, 25 bp, SARS Virus
gtttttaccgtgtacaccagatcat

SEQ ID NO: 2705 - DNA, 25 bp, SARS Virus
tttttaccgtgatcaccagatcatc

SEQ ID NO: 2706 - DNA, 25 bp, SARS Virus
ttttaccgtgaataccagatcatct

SEQ ID NO: 2707 - DNA, 25 bp, SARS Virus
tttaccgtgaactccagatcatctc

SEQ ID NO: 2708 - DNA, 25 bp, SARS Virus
ttaccgtgaacatcagatcatctcg

SEQ ID NO: 2709 - DNA, 25 bp, SARS Virus
taccgtgaacactagatcatctcga

SEQ ID NO: 2710 - DNA, 25 bp, SARS Virus
accgtgaacacctgatcatctcgac

SEQ ID NO: 2711 - DNA, 25 bp, SARS Virus
ccgtgaacaccatatcatctcgacc

SEQ ID NO: 2712 - DNA, 25 bp, SARS Virus
cgtgaacaccagttcatctcgacct

SEQ ID NO: 2713 - DNA, 25 bp, SARS Virus
gtgaacaccagatcatctcgacctt

SEQ ID NO: 2714 - DNA, 25 bp, SARS Virus
tgaacaccagattatctcgaccttt

SEQ ID NO: 2715 - DNA, 25 bp, SARS Virus
gaacaccagatcttctcgacctttt

SEQ ID NO: 2716 - DNA, 25 bp, SARS Virus
aacaccagatcatctcgaccttttt

SEQ ID NO: 2717 - DNA, 25 bp, SARS Virus
acaccagatcatttcgacctttttc

SEQ ID NO: 2718 - DNA, 25 bp, SARS Virus
caccagatcatctcgacctttttcc

SEQ ID NO: 2719 - DNA, 25 bp, SARS Virus
accagatcatcttgacctttttccg

SEQ ID NO: 2720 - DNA, 25 bp, SARS Virus
ccagatcatctctacctttttccgc

SEQ ID NO: 2721 - DNA, 25 bp, SARS Virus
cagatcatctcgtcctttttccgca

SEQ ID NO: 2722 - DNA, 25 bp, SARS Virus
agatcatctcgatctttttccgcat

SEQ ID NO: 2723 - DNA, 25 bp, SARS Virus
gatcatctcgacttttttccgcatg

SEQ ID NO: 2724 - DNA, 25 bp, SARS Virus
atcatctcgacctttttccgcatga

SEQ ID NO: 2725 - DNA, 25 bp, SARS Virus
tcatctcgacctttttccgcatgac

SEQ ID NO: 2726 - DNA, 25 bp, SARS Virus
catctcgacctttttccgcatgacg

SEQ ID NO: 2727 - DNA, 25 bp, SARS Virus
atctcgacctttttccgcatgacgg

SEQ ID NO: 2728 - DNA, 25 bp, SARS Virus
tctcgacctttttccgcatgacggg

SEQ ID NO: 2729 - DNA, 25 bp, SARS Virus
ctcgaccttttttcgcatgacgggg

SEQ ID NO: 2730 - DNA, 25 bp, SARS Virus
tcgacctttttctgcatgacggggt

SEQ ID NO: 2731 - DNA, 25 bp, SARS Virus
cgacctttttcctcatgacggggtc

SEQ ID NO: 2732 - DNA, 25 bp, SARS Virus
gacctttttccgtatgacggggtcg

SEQ ID NO: 2733 - DNA, 25 bp, SARS Virus
acctttttccgcttgacggggtcga

SEQ ID NO: 2734 - DNA, 25 bp, SARS Virus
cctttttccgcatgacggggtcgaa

SEQ ID NO: 2735 - DNA, 25 bp, SARS Virus
ctttttccgcattacggggtcgaac

SEQ ID NO: 2736 - DNA, 25 bp, SARS Virus
tttttccgcatgtcggggtcgaact

SEQ ID NO: 2737 - DNA, 25 bp, SARS Virus
ttttccgcatgatggggtcgaactt

SEQ ID NO: 2738 - DNA, 25 bp, SARS Virus
tttccgcatgactgggtcgaacttg

SEQ ID NO: 2739 - DNA, 25 bp, SARS Virus
ttccgcatgacgtggtcgaacttgt

SEQ ID NO: 2740 - DNA, 25 bp, SARS Virus
tccgcatgacggtgtcgaacttgtc

SEQ ID NO: 2741 - DNA, 25 bp, SARS Virus
ccgcatgacgggttcgaacttgtcg

SEQ ID NO: 2742 - DNA, 25 bp, SARS Virus
cgcatgacggggtcgaacttgtcgg

SEQ ID NO: 2743 - DNA, 25 bp, SARS Virus
gcatgacggggttgaacttgtcggg

SEQ ID NO: 2744 - DNA, 25 bp, SARS Virus
catgacggggtctaacttgtcggga

SEQ ID NO: 2745 - DNA, 25 bp, SARS Virus
atgacggggtcgtacttgtcgggat

SEQ ID NO: 2746 - DNA, 25 bp, SARS Virus
tgacggggtcgatcttgtcgggata

SEQ ID NO: 2747 - DNA, 25 bp, SARS Virus
gacggggtcgaatttgtcgggatac

SEQ ID NO: 2748 - DNA, 25 bp, SARS Virus
acggggtcgaacttgtcgggataca

SEQ ID NO: 2749 - DNA, 25 bp, SARS Virus
cggggtcgaacttgtcgggatacac

SEQ ID NO: 2750 - DNA, 25 bp, SARS Virus
ggggtcgaacttttcgggatacaca

SEQ ID NO: 2751 - DNA, 25 bp, SARS Virus
gggtcgaacttgtcgggatacacaa

SEQ ID NO: 2752 - DNA, 25 bp, SARS Virus
ggtcgaacttgttgggatacacaag

SEQ ID NO: 2753 - DNA, 25 bp, SARS Virus
gtcgaacttgtctggatacacaagt

SEQ ID NO: 2754 - DNA, 25 bp, SARS Virus
tcgaacttgtcgtgatacacaagta

SEQ ID NO: 2755 - DNA, 25 bp, SARS Virus
cgaacttgtcggtatacacaagtaa

SEQ ID NO: 2756 - DNA, 25 bp, SARS Virus
gaacttgtcgggttacacaagtaat

SEQ ID NO: 2757 - DNA, 25 bp, SARS Virus
aacttgtcgggatacacaagtaatt

SEQ ID NO: 2758 - DNA, 25 bp, SARS Virus
acttgtcgggattcacaagtaattt

SEQ ID NO: 2759 - DNA, 25 bp, SARS Virus
cttgtcgggatatacaagtaatttg

SEQ ID NO: 2760 - DNA, 25 bp, SARS Virus
ttgtcgggatactcaagtaatttgc

SEQ ID NO: 2761 - DNA, 25 bp, SARS Virus
tgtcgggatacataagtaatttgca

SEQ ID NO: 2762 - DNA, 25 bp, SARS Virus
gtcgggatacactagtaatttgcaa

SEQ ID NO: 2763 - DNA, 25 bp, SARS Virus
tcgggatacacatgtaatttgcaag

SEQ ID NO: 2764 - DNA, 25 bp, SARS Virus
cgggatacacaattaatttgcaaga

SEQ ID NO: 2765 - DNA, 25 bp, SARS Virus
gggatacacaagtaatttgcaagac

SEQ ID NO: 2766 - DNA, 25 bp, SARS Virus
ggatacacaagttatttgcaagact

SEQ ID NO: 2767 - DNA, 25 bp, SARS Virus
gatacacaagtattttgcaagacta

SEQ ID NO: 2768 - DNA, 25 bp, SARS Virus
atacacaagtaatttgcaagactac

SEQ ID NO: 2769 - DNA, 25 bp, SARS Virus
tacacaagtaatttgcaagactacg

SEQ ID NO: 2770 - DNA, 25 bp, SARS Virus
acacaagtaatttgcaagactacgg

SEQ ID NO: 2771 - DNA, 25 bp, SARS Virus
cacaagtaattttcaagactacgga

SEQ ID NO: 2772 - DNA, 25 bp, SARS Virus
acaagtaatttgtaagactacggaa

SEQ ID NO: 2773 - DNA, 25 bp, SARS Virus
caagtaatttgctagactacggaat

SEQ ID NO: 2774 - DNA, 25 bp, SARS Virus
aagtaatttgcatgactacggaatt

SEQ ID NO: 2775 - DNA, 25 bp, SARS Virus
agtaatttgcaatactacggaattc

SEQ ID NO: 2776 - DNA, 25 bp, SARS Virus
gtaatttgcaagtctacggaattcg

SEQ ID NO: 2777 - DNA, 25 bp, SARS Virus
taatttgcaagattacggaattcgt

SEQ ID NO: 2778 - DNA, 25 bp, SARS Virus
aatttgcaagactacggaattcgtg

SEQ ID NO: 2779 - DNA, 25 bp, SARS Virus
atttgcaagacttcggaattcgtgg

SEQ ID NO: 2780 - DNA, 25 bp, SARS Virus
tttgcaagactatggaattcgtggt

SEQ ID NO: 2781 - DNA, 25 bp, SARS Virus
ttgcaagactactgaattcgtggtt

SEQ ID NO: 2782 - DNA, 25 bp, SARS Virus
tgcaagactacgtaattcgtggtta

SEQ ID NO: 2783 - DNA, 25 bp, SARS Virus
gcaagactacggtattcgtggttag

SEQ ID NO: 2784 - DNA, 25 bp, SARS Virus
caagactacggatttcgtggttagt

SEQ ID NO: 2785 - DNA, 25 bp, SARS Virus
aagactacggaattcgtggttagtg

SEQ ID NO: 2786 - DNA, 25 bp, SARS Virus
agactacggaattcgtggttagtgc

SEQ ID NO: 2787 - DNA, 25 bp, SARS Virus
gactacggaatttgtggttagtgcc

SEQ ID NO: 2788 - DNA, 25 bp, SARS Virus
actacggaattcttggttagtgccg

SEQ ID NO: 2789 - DNA, 25 bp, SARS Virus
ctacggaattcgtggttagtgccgg

SEQ ID NO: 2790 - DNA, 25 bp, SARS Virus
tacggaattcgttgttagtgccggt

SEQ ID NO: 2791 - DNA, 25 bp, SARS Virus
acggaattcgtgtttagtgccggtg

SEQ ID NO: 2792 - DNA, 25 bp, SARS Virus
cggaattcgtggttagtgccggtgt

SEQ ID NO: 2793 - DNA, 25 bp, SARS Virus
ggaattcgtggttagtgccggtgtt

SEQ ID NO: 2794 - DNA, 25 bp, SARS Virus
gaattcgtggtttgtgccggtgttc

SEQ ID NO: 2795 - DNA, 25 bp, SARS Virus
aattcgtggttattgccggtgttcc

SEQ ID NO: 2796 - DNA, 25 bp, SARS Virus
attcgtggttagtgccggtgttcca

SEQ ID NO: 2797 - DNA, 25 bp, SARS Virus
ttcgtggttagttccggtgttccag

SEQ ID NO: 2798 - DNA, 25 bp, SARS Virus
tcgtggttagtgtcggtgttccagc

SEQ ID NO: 2799 - DNA, 25 bp, SARS Virus
cgtggttagtgctggtgttccagca

SEQ ID NO: 2800 - DNA, 25 bp, SARS Virus
gtggttagtgcctgtgttccagcaa

SEQ ID NO: 2801 - DNA, 25 bp, SARS Virus
tggttagtgccgttgttccagcaac

SEQ ID NO: 2802 - DNA, 25 bp, SARS Virus
ggttagtgccggtgttccagcaact

SEQ ID NO: 2803 - DNA, 25 bp, SARS Virus
gttagtgccggttttccagcaactc

SEQ ID NO: 2804 - DNA, 25 bp, SARS Virus
ttagtgccggtgttccagcaactcg

SEQ ID NO: 2805 - DNA, 25 bp, SARS Virus
tagtgccggtgttccagcaactcga

SEQ ID NO: 2806 - DNA, 25 bp, SARS Virus
agtgccggtgtttcagcaactcgac

SEQ ID NO: 2807 - DNA, 25 bp, SARS Virus
gtgccggtgttctagcaactcgacc

SEQ ID NO: 2808 - DNA, 25 bp, SARS Virus
tgccggtgttcctgcaactcgacca

SEQ ID NO: 2809 - DNA, 25 bp, SARS Virus
gccggtgttccatcaactcgaccaa

SEQ ID NO: 2810 - DNA, 25 bp, SARS Virus
ccggtgttccagtaactcgaccaac

SEQ ID NO: 2811 - DNA, 25 bp, SARS Virus
cggtgttccagctactcgaccaacg

SEQ ID NO: 2812 - DNA, 25 bp, SARS Virus
ggtgttccagcatctcgaccaacgt

SEQ ID NO: 2813 - DNA, 25 bp, SARS Virus
gtgttccagcaattcgaccaacgtc

SEQ ID NO: 2814 - DNA, 25 bp, SARS Virus
tgttccagcaactcgaccaacgtct

SEQ ID NO: 2815 - DNA, 25 bp, SARS Virus
gttccagcaacttgaccaacgtctt

SEQ ID NO: 2816 - DNA, 25 bp, SARS Virus
ttccagcaactctaccaacgtcttt

SEQ ID NO: 2817 - DNA, 25 bp, SARS Virus
tccagcaactcgtccaacgtcttta

SEQ ID NO: 2818 - DNA, 25 bp, SARS Virus
ccagcaactcgatcaacgtctttac

SEQ ID NO: 2819 - DNA, 25 bp, SARS Virus
cagcaactcgactaacgtctttacc

SEQ ID NO: 2820 - DNA, 25 bp, SARS Virus
agcaactcgacctacgtctttacct

SEQ ID NO: 2821 - DNA, 25 bp, SARS Virus
gcaactcgaccatcgtctttacctg

SEQ ID NO: 2822 - DNA, 25 bp, SARS Virus
caactcgaccaatgtctttacctgc

SEQ ID NO: 2823 - DNA, 25 bp, SARS Virus
aactcgaccaacttctttacctgcc

SEQ ID NO: 2824 - DNA, 25 bp, SARS Virus
actcgaccaacgtctttacctgccg

SEQ ID NO: 2825 - DNA, 25 bp, SARS Virus
ctcgaccaacgtttttacctgccgt

SEQ ID NO: 2826 - DNA, 25 bp, SARS Virus
tcgaccaacgtctttacctgccgta

SEQ ID NO: 2827 - DNA, 25 bp, SARS Virus
cgaccaacgtctttacctgccgtaa

SEQ ID NO: 2828 - DNA, 25 bp, SARS Virus
gaccaacgtctttacctgccgtaag

SEQ ID NO: 2829 - DNA, 25 bp, SARS Virus
accaacgtcttttcctgccgtaagt

SEQ ID NO: 2830 - DNA, 25 bp, SARS Virus
ccaacgtctttatctgccgtaagtc

SEQ ID NO: 2831 - DNA, 25 bp, SARS Virus
caacgtctttacttgccgtaagtca

SEQ ID NO: 2832 - DNA, 25 bp, SARS Virus
aacgtctttacctgccgtaagtcat

SEQ ID NO: 2833 - DNA, 25 bp, SARS Virus
acgtctttaccttccgtaagtcatg

SEQ ID NO: 2834 - DNA, 25 bp, SARS Virus
cgtctttacctgtcgtaagtcatgc

SEQ ID NO: 2835 - DNA, 25 bp, SARS Virus
gtctttacctgctgtaagtcatgcc

SEQ ID NO: 2836 - DNA, 25 bp, SARS Virus
tctttacctgccttaagtcatgcca

SEQ ID NO: 2837 - DNA, 25 bp, SARS Virus
ctttacctgccgtaagtcatgccag

SEQ ID NO: 2838 - DNA, 25 bp, SARS Virus
tttacctgccgttagtcatgccagc

SEQ ID NO: 2839 - DNA, 25 bp, SARS Virus
ttacctgccgtatgtcatgccagca

SEQ ID NO: 2840 - DNA, 25 bp, SARS Virus
tacctgccgtaattcatgccagcat

SEQ ID NO: 2841 - DNA, 25 bp, SARS Virus
acctgccgtaagtcatgccagcatc

SEQ ID NO: 2842 - DNA, 25 bp, SARS Virus
cctgccgtaagttatgccagcatcg

SEQ ID NO: 2843 - DNA, 25 bp, SARS Virus
ctgccgtaagtcttgccagcatcgc

SEQ ID NO: 2844 - DNA, 25 bp, SARS Virus
tgccgtaagtcatgccagcatcgcc

SEQ ID NO: 2845 - DNA, 25 bp, SARS Virus
gccgtaagtcattccagcatcgcca

SEQ ID NO: 2846 - DNA, 25 bp, SARS Virus
ccgtaagtcatgtcagcatcgccat

SEQ ID NO: 2847 - DNA, 25 bp, SARS Virus
cgtaagtcatgctagcatcgccata

SEQ ID NO: 2848 - DNA, 25 bp, SARS Virus
gtaagtcatgcctgcatcgccatat

SEQ ID NO: 2849 - DNA, 25 bp, SARS Virus
taagtcatgccatcatcgccatatt

SEQ ID NO: 2850 - DNA, 25 bp, SARS Virus
aagtcatgccagtatcgccatattg

SEQ ID NO: 2851 - DNA, 25 bp, SARS Virus
agtcatgccagcttcgccatattgt

SEQ ID NO: 2852 - DNA, 25 bp, SARS Virus
gtcatgccagcatcgccatattgtg

SEQ ID NO: 2853 - DNA, 25 bp, SARS Virus
tcatgccagcattgccatattgtga

SEQ ID NO: 2854 - DNA, 25 bp, SARS Virus
catgccagcatctccatattgtgac

SEQ ID NO: 2855 - DNA, 25 bp, SARS Virus
atgccagcatcgtcatattgtgacc

SEQ ID NO: 2856 - DNA, 25 bp, SARS Virus
tgccagcatcgctatattgtgaccc

SEQ ID NO: 2857 - DNA, 25 bp, SARS Virus
gccagcatcgccttattgtgaccct

SEQ ID NO: 2858 - DNA, 25 bp, SARS Virus
ccagcatcgccatattgtgaccctc

SEQ ID NO: 2859 - DNA, 25 bp, SARS Virus
cagcatcgccattttgtgaccctca

SEQ ID NO: 2860 - DNA, 25 bp, SARS Virus
agcatcgccatattgtgaccctcat

SEQ ID NO: 2861 - DNA, 25 bp, SARS Virus
gcatcgccatattgtgaccctcatg

SEQ ID NO: 2862 - DNA, 25 bp, SARS Virus
catcgccatattttgaccctcatga

SEQ ID NO: 2863 - DNA, 25 bp, SARS Virus
atcgccatattgtgaccctcatgag

SEQ ID NO: 2864 - DNA, 25 bp, SARS Virus
tcgccatattgttaccctcatgagc

SEQ ID NO: 2865 - DNA, 25 bp, SARS Virus
cgccatattgtgtccctcatgagca

SEQ ID NO: 2866 - DNA, 25 bp, SARS Virus
gccatattgtgatcctcatgagcac

SEQ ID NO: 2867 - DNA, 25 bp, SARS Virus
ccatattgtgactctcatgagcacg

SEQ ID NO: 2868 - DNA, 25 bp, SARS Virus
catattgtgaccttcatgagcacgg

SEQ ID NO: 2869 - DNA, 25 bp, SARS Virus
atattgtgaccctcatgagcacggt

SEQ ID NO: 2870 - DNA, 25 bp, SARS Virus
tattgtgacccttatgagcacggtg

SEQ ID NO: 2871 - DNA, 25 bp, SARS Virus
attgtgaccctcttgagcacggtgt

SEQ ID NO: 2872 - DNA, 25 bp, SARS Virus
ttgtgaccctcatgagcacggtgta

SEQ ID NO: 2873 - DNA, 25 bp, SARS Virus
tgtgaccctcattagcacggtgtac

SEQ ID NO: 2874 - DNA, 25 bp, SARS Virus
gtgaccctcatgtgcacggtgtaca

SEQ ID NO: 2875 - DNA, 25 bp, SARS Virus
tgaccctcatgatcacggtgtacac

SEQ ID NO: 2876 - DNA, 25 bp, SARS Virus
gaccctcatgagtacggtgtacacc

SEQ ID NO: 2877 - DNA, 25 bp, SARS Virus
accctcatgagctcggtgtacaccc

SEQ ID NO: 2878 - DNA, 25 bp, SARS Virus
ccctcatgagcatggtgtacacccg

SEQ ID NO: 2879 - DNA, 25 bp, SARS Virus
cctcatgagcactgtgtacacccgc

SEQ ID NO: 2880 - DNA, 25 bp, SARS Virus
ctcatgagcacgttgtacacccgct

SEQ ID NO: 2881 - DNA, 25 bp, SARS Virus
tcatgagcacggtgtacacccgctt

SEQ ID NO: 2882 - DNA, 25 bp, SARS Virus
catgagcacggtttacacccgcttt

SEQ ID NO: 2883 - DNA, 25 bp, SARS Virus
atgagcacggtgtacacccgctttg

SEQ ID NO: 2884 - DNA, 25 bp, SARS Virus
tgagcacggtgttcacccgctttgg

SEQ ID NO: 2885 - DNA, 25 bp, SARS Virus
gagcacggtgtatacccgctttggg

SEQ ID NO: 2886 - DNA, 25 bp, SARS Virus
agcacggtgtactcccgctttgggg

SEQ ID NO: 2887 - DNA, 25 bp, SARS Virus
gcacggtgtacatccgctttggggt

SEQ ID NO: 2888 - DNA, 25 bp, SARS Virus
cacggtgtacactcgctttggggtt

SEQ ID NO: 2889 - DNA, 25 bp, SARS Virus
acggtgtacacctgctttggggtta

SEQ ID NO: 2890 - DNA, 25 bp, SARS Virus
cggtgtacaccctctttggggttaa

SEQ ID NO: 2891 - DNA, 25 bp, SARS Virus
ggtgtacacccgttttggggttaac

SEQ ID NO: 2892 - DNA, 25 bp, SARS Virus
gtgtacacccgctttggggttaacg

SEQ ID NO: 2893 - DNA, 25 bp, SARS Virus
tgtacacccgctttggggttaacgt

SEQ ID NO: 2894 - DNA, 25 bp, SARS Virus
gtacacccgctttggggttaacgta

SEQ ID NO: 2895 - DNA, 25 bp, SARS Virus
tacacccgcttttgggttaacgtat

SEQ ID NO: 2896 - DNA, 25 bp, SARS Virus
acacccgctttgtggttaacgtatg

SEQ ID NO: 2897 - DNA, 25 bp, SARS Virus
cacccgctttggtgttaacgtatgg

SEQ ID NO: 2898 - DNA, 25 bp, SARS Virus
acccgctttgggtttaacgtatggc

SEQ ID NO: 2899 - DNA, 25 bp, SARS Virus
cccgctttggggttaacgtatggcg

SEQ ID NO: 2900 - DNA, 25 bp, SARS Virus
ccgctttggggttaacgtatggcgt

SEQ ID NO: 2901 - DNA, 25 bp, SARS Virus
cgctttggggtttacgtatggcgtt

SEQ ID NO: 2902 - DNA, 25 bp, SARS Virus
gctttggggttatcgtatggcgtta

SEQ ID NO: 2903 - DNA, 25 bp, SARS Virus
ctttggggttaatgtatggcgttac

SEQ ID NO: 2904 - DNA, 25 bp, SARS Virus
tttggggttaacttatggcgttaca

SEQ ID NO: 2905 - DNA, 25 bp, SARS Virus
ttggggttaacgtatggcgttacaa

SEQ ID NO: 2906 - DNA, 25 bp, SARS Virus
tggggttaacgtttggcgttacaag

SEQ ID NO: 2907 - DNA, 25 bp, SARS Virus
ggggttaacgtatggcgttacaaga

SEQ ID NO: 2908 - DNA, 25 bp, SARS Virus
gggttaacgtattgcgttacaagaa

SEQ ID NO: 2909 - DNA, 25 bp, SARS Virus
ggttaacgtatgtcgttacaagaag

SEQ ID NO: 2910 - DNA, 25 bp, SARS Virus
gttaacgtatggtgttacaagaaga

SEQ ID NO: 2911 - DNA, 25 bp, SARS Virus
ttaacgtatggctttacaagaagaa

SEQ ID NO: 2912 - DNA, 25 bp, SARS Virus
taacgtatggcgttacaagaagaag

SEQ ID NO: 2913 - DNA, 25 bp, SARS Virus
aacgtatggcgttacaagaagaagc

SEQ ID NO: 2914 - DNA, 25 bp, SARS Virus
acgtatggcgtttcaagaagaagca

SEQ ID NO: 2915 - DNA, 25 bp, SARS Virus
cgtatggcgttataagaagaagcat

SEQ ID NO: 2916 - DNA, 25 bp, SARS Virus
gtatggcgttactagaagaagcatt

SEQ ID NO: 2917 - DNA, 25 bp, SARS Virus
tatggcgttacatgaagaagcattc

SEQ ID NO: 2918 - DNA, 25 bp, SARS Virus
atggcgttacaataagaagcattct

SEQ ID NO: 2919 - DNA, 25 bp, SARS Virus
tggcgttacaagtagaagcattctt

SEQ ID NO: 2920 - DNA, 25 bp, SARS Virus
ggcgttacaagatgaagcattcttg

SEQ ID NO: 2921 - DNA, 25 bp, SARS Virus
gcgttacaagaataagcattcttgc

SEQ ID NO: 2922 - DNA, 25 bp, SARS Virus
cgttacaagaagtagcattcttgcc

SEQ ID NO: 2923 - DNA, 25 bp, SARS Virus
gttacaagaagatgcattcttgcca

SEQ ID NO: 2924 - DNA, 25 bp, SARS Virus
ttacaagaagaatcattcttgccat

SEQ ID NO: 2925 - DNA, 25 bp, SARS Virus
tacaagaagaagtattcttgccatt

SEQ ID NO: 2926 - DNA, 25 bp, SARS Virus
acaagaagaagctttcttgccatta

SEQ ID NO: 2927 - DNA, 25 bp, SARS Virus
caagaagaagcattcttgccattat

SEQ ID NO: 2928 - DNA, 25 bp, SARS Virus
aagaagaagcattcttgccattatt

SEQ ID NO: 2929 - DNA, 25 bp, SARS Virus
agaagaagcatttttgccattattc

SEQ ID NO: 2930 - DNA, 25 bp, SARS Virus
gaagaagcattcttgccattattcc

SEQ ID NO: 2931 - DNA, 25 bp, SARS Virus
aagaagcattcttgccattattccc

SEQ ID NO: 2932 - DNA, 25 bp, SARS Virus
agaagcattctttccattattccct

SEQ ID NO: 2933 - DNA, 25 bp, SARS Virus
gaagcattcttgtcattattccctc

SEQ ID NO: 2934 - DNA, 25 bp, SARS Virus
aagcattcttgctattattccctcg

SEQ ID NO: 2935 - DNA, 25 bp, SARS Virus
agcattcttgcctttattccctcgg

SEQ ID NO: 2936 - DNA, 25 bp, SARS Virus
gcattcttgccattattccctcggc

SEQ ID NO: 2937 - DNA, 25 bp, SARS Virus
cattcttgccattattccctcggcc

SEQ ID NO: 2938 - DNA, 25 bp, SARS Virus
attcttgccatttttccctcggcca

SEQ ID NO: 2939 - DNA, 25 bp, SARS Virus
ttcttgccattattccctcggccac

SEQ ID NO: 2940 - DNA, 25 bp, SARS Virus
tcttgccattattccctcggccacc

SEQ ID NO: 2941 - DNA, 25 bp, SARS Virus
cttgccattatttcctcggccacca

SEQ ID NO: 2942 - DNA, 25 bp, SARS Virus
ttgccattattctctcggccaccag

SEQ ID NO: 2943 - DNA, 25 bp, SARS Virus
tgccattattccttcggccaccagt

SEQ ID NO: 2944 - DNA, 25 bp, SARS Virus
gccattattccctcggccaccagta

SEQ ID NO: 2945 - DNA, 25 bp, SARS Virus
ccattattcccttggccaccagtat

SEQ ID NO: 2946 - DNA, 25 bp, SARS Virus
cattattccctctgccaccagtatc

SEQ ID NO: 2947 - DNA, 25 bp, SARS Virus
attattccctcgtccaccagtatcg

SEQ ID NO: 2948 - DNA, 25 bp, SARS Virus
ttattccctcggtcaccagtatcga

SEQ ID NO: 2949 - DNA, 25 bp, SARS Virus
tattccctcggctaccagtatcgat

SEQ ID NO: 2950 - DNA, 25 bp, SARS Virus
attccctcggcctccagtatcgata

SEQ ID NO: 2951 - DNA, 25 bp, SARS Virus
ttccctcggccatcagtatcgatac

SEQ ID NO: 2952 - DNA, 25 bp, SARS Virus
tccctcggccactagtatcgatacc

SEQ ID NO: 2953 - DNA, 25 bp, SARS Virus
ccctcggccacctgtatcgataccg

SEQ ID NO: 2954 - DNA, 25 bp, SARS Virus
cctcggccaccattatcgataccgt

SEQ ID NO: 2955 - DNA, 25 bp, SARS Virus
ctcggccaccagtatcgataccgta

SEQ ID NO: 2956 - DNA, 25 bp, SARS Virus
tcggccaccagtttcgataccgtag

SEQ ID NO: 2957 - DNA, 25 bp, SARS Virus
cggccaccagtatcgataccgtagc

SEQ ID NO: 2958 - DNA, 25 bp, SARS Virus
ggccaccagtattgataccgtagct

SEQ ID NO: 2959 - DNA, 25 bp, SARS Virus
gccaccagtatctataccgtagcta

SEQ ID NO: 2960 - DNA, 25 bp, SARS Virus
ccaccagtatcgttaccgtagctag

SEQ ID NO: 2961 - DNA, 25 bp, SARS Virus
caccagtatcgataccgtagctaga

SEQ ID NO: 2962 - DNA, 25 bp, SARS Virus
accagtatcgattccgtagctagat

SEQ ID NO: 2963 - DNA, 25 bp, SARS Virus
ccagtatcgatatcgtagctagatt

SEQ ID NO: 2964 - DNA, 25 bp, SARS Virus
cagtatcgatactgtagctagattt

SEQ ID NO: 2965 - DNA, 25 bp, SARS Virus
agtatcgataccttagctagatttc

SEQ ID NO: 2966 - DNA, 25 bp, SARS Virus
gtatcgataccgtagctagatttca

SEQ ID NO: 2967 - DNA, 25 bp, SARS Virus
tatcgataccgttgctagatttcag

SEQ ID NO: 2968 - DNA, 25 bp, SARS Virus
atcgataccgtatctagatttcaga

SEQ ID NO: 2969 - DNA, 25 bp, SARS Virus
tcgataccgtagttagatttcagaa

SEQ ID NO: 2970 - DNA, 25 bp, SARS Virus
cgataccgtagctagatttcagaat

SEQ ID NO: 2971 - DNA, 25 bp, SARS Virus
gataccgtagcttgatttcagaata

SEQ ID NO: 2972 - DNA, 25 bp, SARS Virus
ataccgtagctatatttcagaatac

SEQ ID NO: 2973 - DNA, 25 bp, SARS Virus
taccgtagctagttttcagaatact

SEQ ID NO: 2974 - DNA, 25 bp, SARS Virus
accgtagctagatttcagaatactg

SEQ ID NO: 2975 - DNA, 25 bp, SARS Virus
ccgtagctagatttcagaatactga

SEQ ID NO: 2976 - DNA, 25 bp, SARS Virus
cgtagctagatttcagaatactgaa

SEQ ID NO: 2977 - DNA, 25 bp, SARS Virus
gtagctagattttagaatactgaat

SEQ ID NO: 2978 - DNA, 25 bp, SARS Virus
tagctagatttctgaatactgaatc

SEQ ID NO: 2979 - DNA, 25 bp, SARS Virus
agctagatttcataatactgaatcc

SEQ ID NO: 2980 - DNA, 25 bp, SARS Virus
gctagatttcagtatactgaatcca

SEQ ID NO: 2981 - DNA, 25 bp, SARS Virus
ctagatttcagattactgaatccac

SEQ ID NO: 2982 - DNA, 25 bp, SARS Virus
tagatttcagaatactgaatccact

SEQ ID NO: 2983 - DNA, 25 bp, SARS Virus
agatttcagaattctgaatccactg

SEQ ID NO: 2984 - DNA, 25 bp, SARS Virus
gatttcagaatattgaatccactgc

SEQ ID NO: 2985 - DNA, 25 bp, SARS Virus
atttcagaatactgaatccactgct

SEQ ID NO: 2986 - DNA, 25 bp, SARS Virus
tttcagaatacttaatccactgctc

SEQ ID NO: 2987 - DNA, 25 bp, SARS Virus
ttcagaatactgtatccactgctcg

SEQ ID NO: 2988 - DNA, 25 bp, SARS Virus
tcagaatactgattccactgctcga

SEQ ID NO: 2989 - DNA, 25 bp, SARS Virus
cagaatactgaatccactgctcgaa

SEQ ID NO: 2990 - DNA, 25 bp, SARS Virus
agaatactgaattcactgctcgaac

SEQ ID NO: 2991 - DNA, 25 bp, SARS Virus
gaatactgaatctactgctcgaacc

SEQ ID NO: 2992 - DNA, 25 bp, SARS Virus
aatactgaatcctctgctcgaaccg

SEQ ID NO: 2993 - DNA, 25 bp, SARS Virus
atactgaatccattgctcgaaccgt

SEQ ID NO: 2994 - DNA, 25 bp, SARS Virus
tactgaatccactgctcgaaccgtg

SEQ ID NO: 2995 - DNA, 25 bp, SARS Virus
actgaatccacttctcgaaccgtga

SEQ ID NO: 2996 - DNA, 25 bp, SARS Virus
ctgaatccactgttcgaaccgtgac

SEQ ID NO: 2997 - DNA, 25 bp, SARS Virus
tgaatccactgctcgaaccgtgact

SEQ ID NO: 2998 - DNA, 25 bp, SARS Virus
gaatccactgcttgaaccgtgacta

SEQ ID NO: 2999 - DNA, 25 bp, SARS Virus
aatccactgctctaaccgtgactag

SEQ ID NO: 3000 - DNA, 25 bp, SARS Virus
atccactgctcgtaccgtgactagg

SEQ ID NO: 3001 - DNA, 25 bp, SARS Virus
tccactgctcgatccgtgactaggg

SEQ ID NO: 3002 - DNA, 25 bp, SARS Virus
ccactgctcgaatcgtgactagggt

SEQ ID NO: 3003 - DNA, 25 bp, SARS Virus
cactgctcgaactgtgactagggta

SEQ ID NO: 3004 - DNA, 25 bp, SARS Virus
actgctcgaaccttgactagggtaa

SEQ ID NO: 3005 - DNA, 25 bp, SARS Virus
ctgctcgaaccgtgactagggtaac

SEQ ID NO: 3006 - DNA, 25 bp, SARS Virus
tgctcgaaccgttactagggtaact

SEQ ID NO: 3007 - DNA, 25 bp, SARS Virus
gctcgaaccgtgtctagggtaactt

SEQ ID NO: 3008 - DNA, 25 bp, SARS Virus
ctcgaaccgtgattagggtaacttc

SEQ ID NO: 3009 - DNA, 25 bp, SARS Virus
tcgaaccgtgactagggtaacttct

SEQ ID NO: 3010 - DNA, 25 bp, SARS Virus
cgaaccgtgacttgggtaacttcta

SEQ ID NO: 3011 - DNA, 25 bp, SARS Virus
gaaccgtgactatggtaacttctaa

SEQ ID NO: 3012 - DNA, 25 bp, SARS Virus
aaccgtgactagtgtaacttctaat

SEQ ID NO: 3013 - DNA, 25 bp, SARS Virus
accgtgactaggttaacttctaata

SEQ ID NO: 3014 - DNA, 25 bp, SARS Virus
ccgtgactagggtaacttctaatac

SEQ ID NO: 3015 - DNA, 25 bp, SARS Virus
cgtgactagggttacttctaatact

SEQ ID NO: 3016 - DNA, 25 bp, SARS Virus
gtgactagggtatcttctaatactt

SEQ ID NO: 3017 - DNA, 25 bp, SARS Virus
tgactagggtaatttctaatacttg

SEQ ID NO: 3018 - DNA, 25 bp, SARS Virus
gactagggtaacttctaatacttgt

SEQ ID NO: 3019 - DNA, 25 bp, SARS Virus
actagggtaacttctaatacttgtt

SEQ ID NO: 3020 - DNA, 25 bp, SARS Virus
ctagggtaacttttaatacttgttt

SEQ ID NO: 3021 - DNA, 25 bp, SARS Virus
tagggtaacttctaatacttgtttt

SEQ ID NO: 3022 - DNA, 25 bp, SARS Virus
agggtaacttcttatacttgttttg

SEQ ID NO: 3023 - DNA, 25 bp, SARS Virus
gggtaacttctattacttgttttga

SEQ ID NO: 3024 - DNA, 25 bp, SARS Virus
ggtaacttctaatacttgttttgac

SEQ ID NO: 3025 - DNA, 25 bp, SARS Virus
gtaacttctaattcttgttttgacc

SEQ ID NO: 3026 - DNA, 25 bp, SARS Virus
taacttctaatatttgttttgacct

SEQ ID NO: 3027 - DNA, 25 bp, SARS Virus
aacttctaatacttgttttgacctt

SEQ ID NO: 3028 - DNA, 25 bp, SARS Virus
acttctaatacttgttttgaccttg

SEQ ID NO: 3029 - DNA, 25 bp, SARS Virus
cttctaatactttttttgaccttgt

SEQ ID NO: 3030 - DNA, 25 bp, SARS Virus
ttctaatacttgttttgaccttgtg

SEQ ID NO: 3031 - DNA, 25 bp, SARS Virus
tctaatacttgttttgaccttgtga

SEQ ID NO: 3032 - DNA, 25 bp, SARS Virus
ctaatacttgttttgaccttgtgat

SEQ ID NO: 3033 - DNA, 25 bp, SARS Virus
taatacttgttttgaccttgtgatt

SEQ ID NO: 3034 - DNA, 25 bp, SARS Virus
aatacttgtttttaccttgtgattc

SEQ ID NO: 3035 - DNA, 25 bp, SARS Virus
atacttgttttgtccttgtgattcg

SEQ ID NO: 3036 - DNA, 25 bp, SARS Virus
tacttgttttgatcttgtgattcgt

SEQ ID NO: 3037 - DNA, 25 bp, SARS Virus
acttgttttgactttgtgattcgta

SEQ ID NO: 3038 - DNA, 25 bp, SARS Virus
cttgttttgaccttgtgattcgtac

SEQ ID NO: 3039 - DNA, 25 bp, SARS Virus
ttgttttgaccttgtgattcgtacc

SEQ ID NO: 3040 - DNA, 25 bp, SARS Virus
tgttttgaccttttgattcgtaccg

SEQ ID NO: 3041 - DNA, 25 bp, SARS Virus
gttttgaccttgtgattcgtaccgt

SEQ ID NO: 3042 - DNA, 25 bp, SARS Virus
ttttgaccttgttattcgtaccgtc

SEQ ID NO: 3043 - DNA, 25 bp, SARS Virus
tttgaccttgtgtttcgtaccgtca

SEQ ID NO: 3044 - DNA, 25 bp, SARS Virus
ttgaccttgtgattcgtaccgtcac

SEQ ID NO: 3045 - DNA, 25 bp, SARS Virus
tgaccttgtgattcgtaccgtcacc

SEQ ID NO: 3046 - DNA, 25 bp, SARS Virus
gaccttgtgatttgtaccgtcacca

SEQ ID NO: 3047 - DNA, 25 bp, SARS Virus
accttgtgattcttaccgtcaccac

SEQ ID NO: 3048 - DNA, 25 bp, SARS Virus
ccttgtgattcgtaccgtcaccacg

SEQ ID NO: 3049 - DNA, 25 bp, SARS Virus
cttgtgattcgttccgtcaccacgt

SEQ ID NO: 3050 - DNA, 25 bp, SARS Virus
ttgtgattcgtatcgtcaccacgtg

SEQ ID NO: 3051 - DNA, 25 bp, SARS Virus
tgtgattcgtactgtcaccacgtga

SEQ ID NO: 3052 - DNA, 25 bp, SARS Virus
gtgattcgtaccttcaccacgtgag

SEQ ID NO: 3053 - DNA, 25 bp, SARS Virus
tgattcgtaccgtcaccacgtgagg

SEQ ID NO: 3054 - DNA, 25 bp, SARS Virus
gattcgtaccgttaccacgtgaggc

SEQ ID NO: 3055 - DNA, 25 bp, SARS Virus
attcgtaccgtctccacgtgaggca

SEQ ID NO: 3056 - DNA, 25 bp, SARS Virus
ttcgtaccgtcatcacgtgaggcac

SEQ ID NO: 3057 - DNA, 25 bp, SARS Virus
tcgtaccgtcacaacgtgaggcact

SEQ ID NO: 3058 - DNA, 25 bp, SARS Virus
cgtaccgtcaccacgtgaggcactt

SEQ ID NO: 3059 - DNA, 25 bp, SARS Virus
gtaccgtcaccaagtgaggcacttg

SEQ ID NO: 3060 - DNA, 25 bp, SARS Virus
taccgtcaccacatgaggcacttga

SEQ ID NO: 3061 - DNA, 25 bp, SARS Virus
accgtcaccacgagaggcacttgag

SEQ ID NO: 3062 - DNA, 25 bp, SARS Virus
ccgtcaccacgtaaggcacttgagt

SEQ ID NO: 3063 - DNA, 25 bp, SARS Virus
cgtcaccacgtgaggcacttgagtg

SEQ ID NO: 3064 - DNA, 25 bp, SARS Virus
gtcaccacgtgaagcacttgagtga

SEQ ID NO: 3065 - DNA, 25 bp, SARS Virus
tcaccacgtgagacacttgagtgag

SEQ ID NO: 3066 - DNA, 25 bp, SARS Virus
caccacgtgaggaacttgagtgagc

SEQ ID NO: 3067 - DNA, 25 bp, SARS Virus
accacgtgaggcacttgagtgagca

SEQ ID NO: 3068 - DNA, 25 bp, SARS Virus
ccacgtgaggcaattgagtgagcac

SEQ ID NO: 3069 - DNA, 25 bp, SARS Virus
cacgtgaggcacatgagtgagcact

SEQ ID NO: 3070 - DNA, 25 bp, SARS Virus
acgtgaggcactagagtgagcactc

SEQ ID NO: 3071 - DNA, 25 bp, SARS Virus
cgtgaggcacttaagtgagcactcg

SEQ ID NO: 3072 - DNA, 25 bp, SARS Virus
gtgaggcacttgagtgagcactcga

SEQ ID NO: 3073 - DNA, 25 bp, SARS Virus
tgaggcacttgaatgagcactcgag

SEQ ID NO: 3074 - DNA, 25 bp, SARS Virus
gaggcacttgagagagcactcgagt

SEQ ID NO: 3075 - DNA, 25 bp, SARS Virus
aggcacttgagtaagcactcgagtt

SEQ ID NO: 3076 - DNA, 25 bp, SARS Virus
ggcacttgagtgagcactcgagtta

SEQ ID NO: 3077 - DNA, 25 bp, SARS Virus
gcacttgagtgaacactcgagttac

SEQ ID NO: 3078 - DNA, 25 bp, SARS Virus
cacttgagtgagaactcgagttacc

SEQ ID NO: 3079 - DNA, 25 bp, SARS Virus
acttgagtgagcactcgagttacct

SEQ ID NO: 3080 - DNA, 25 bp, SARS Virus
cttgagtgagcaatcgagttacctc

SEQ ID NO: 3081 - DNA, 25 bp, SARS Virus
ttgagtgagcacacgagttacctcc

SEQ ID NO: 3082 - DNA, 25 bp, SARS Virus
tgagtgagcactagagttacctcca

SEQ ID NO: 3083 - DNA, 25 bp, SARS Virus
gagtgagcactcaagttacctccac

SEQ ID NO: 3084 - DNA, 25 bp, SARS Virus
agtgagcactcgagttacctccacg

SEQ ID NO: 3085 - DNA, 25 bp, SARS Virus
gtgagcactcgaattacctccacgt

SEQ ID NO: 3086 - DNA, 25 bp, SARS Virus
tgagcactcgagatacctccacgtc

SEQ ID NO: 3087 - DNA, 25 bp, SARS Virus
gagcactcgagtaacctccacgtca

SEQ ID NO: 3088 - DNA, 25 bp, SARS Virus
agcactcgagttacctccacgtcag

SEQ ID NO: 3089 - DNA, 25 bp, SARS Virus
gcactcgagttaactccacgtcagt

SEQ ID NO: 3090 - DNA, 25 bp, SARS Virus
cactcgagttacatccacgtcagtg

SEQ ID NO: 3091 - DNA, 25 bp, SARS Virus
actcgagttaccaccacgtcagtga

SEQ ID NO: 3092 - DNA, 25 bp, SARS Virus
ctcgagttacctacacgtcagtgag

SEQ ID NO: 3093 - DNA, 25 bp, SARS Virus
tcgagttacctcaacgtcagtgagc

SEQ ID NO: 3094 - DNA, 25 bp, SARS Virus
cgagttacctccacgtcagtgagcg

SEQ ID NO: 3095 - DNA, 25 bp, SARS Virus
gagttacctccaagtcagtgagcga

SEQ ID NO: 3096 - DNA, 25 bp, SARS Virus
agttacctccacatcagtgagcgat

SEQ ID NO: 3097 - DNA, 25 bp, SARS Virus
gttacctccacgacagtgagcgata

SEQ ID NO: 3098 - DNA, 25 bp, SARS Virus
ttacctccacgtaagtgagcgatac

SEQ ID NO: 3099 - DNA, 25 bp, SARS Virus
tacctccacgtcagtgagcgataca

SEQ ID NO: 3100 - DNA, 25 bp, SARS Virus
acctccacgtcaatgagcgatacag

SEQ ID NO: 3101 - DNA, 25 bp, SARS Virus
cctccacgtcagagagcgatacagc

SEQ ID NO: 3102 - DNA, 25 bp, SARS Virus
ctccacgtcagtaagcgatacagct

SEQ ID NO: 3103 - DNA, 25 bp, SARS Virus
tccacgtcagtgagcgatacagctg

SEQ ID NO: 3104 - DNA, 25 bp, SARS Virus
ccacgtcagtgaacgatacagctgt

SEQ ID NO: 3105 - DNA, 25 bp, SARS Virus
cacgtcagtgagagatacagctgtt

SEQ ID NO: 3106 - DNA, 25 bp, SARS Virus
acgtcagtgagcaatacagctgttg

SEQ ID NO: 3107 - DNA, 25 bp, SARS Virus
cgtcagtgagcgatacagctgttgt

SEQ ID NO: 3108 - DNA, 25 bp, SARS Virus
gtcagtgagcgaaacagctgttgtt

SEQ ID NO: 3109 - DNA, 25 bp, SARS Virus
tcagtgagcgatacagctgttgtta

SEQ ID NO: 3110 - DNA, 25 bp, SARS Virus
cagtgagcgataaagctgttgttaa

SEQ ID NO: 3111 - DNA, 25 bp, SARS Virus
agtgagcgatacagctgttgttaaa

SEQ ID NO: 3112 - DNA, 25 bp, SARS Virus
gtgagcgatacaactgttgttaaag

SEQ ID NO: 3113 - DNA, 25 bp, SARS Virus
tgagcgatacagatgttgttaaaga

SEQ ID NO: 3114 - DNA, 25 bp, SARS Virus
gagcgatacagcagttgttaaagac

SEQ ID NO: 3115 - DNA, 25 bp, SARS Virus
agcgatacagctattgttaaagaca

SEQ ID NO: 3116 - DNA, 25 bp, SARS Virus
gcgatacagctgatgttaaagacac

SEQ ID NO: 3117 - DNA, 25 bp, SARS Virus
cgatacagctgtagttaaagacacc

SEQ ID NO: 3118 - DNA, 25 bp, SARS Virus
gatacagctgttattaaagacaccg

SEQ ID NO: 3119 - DNA, 25 bp, SARS Virus
atacagctgttgataaagacaccgg

SEQ ID NO: 3120 - DNA, 25 bp, SARS Virus
tacagctgttgtaaaagacaccggg

SEQ ID NO: 3121 - DNA, 25 bp, SARS Virus
acagctgttgttaaagacaccgggt

SEQ ID NO: 3122 - DNA, 25 bp, SARS Virus
cagctgttgttaaagacaccgggtc

SEQ ID NO: 3123 - DNA, 25 bp, SARS Virus
agctgttgttaaagacaccgggtct

SEQ ID NO: 3124 - DNA, 25 bp, SARS Virus
gctgttgttaaaaacaccgggtcta

SEQ ID NO: 3125 - DNA, 25 bp, SARS Virus
ctgttgttaaagacaccgggtctac

SEQ ID NO: 3126 - DNA, 25 bp, SARS Virus
tgttgttaaagaaaccgggtctacc

SEQ ID NO: 3127 - DNA, 25 bp, SARS Virus
gttgttaaagacaccgggtctaccc

SEQ ID NO: 3128 - DNA, 25 bp, SARS Virus
ttgttaaagacaacgggtctaccca

SEQ ID NO: 3129 - DNA, 25 bp, SARS Virus
tgttaaagacacagggtctacccat

SEQ ID NO: 3130 - DNA, 25 bp, SARS Virus
gttaaagacaccaggtctacccatg

SEQ ID NO: 3131 - DNA, 25 bp, SARS Virus
ttaaagacaccgagtctacccatgg

SEQ ID NO: 3132 - DNA, 25 bp, SARS Virus
taaagacaccggatctacccatggg

SEQ ID NO: 3133 - DNA, 25 bp, SARS Virus
aaagacaccgggactacccatggga

SEQ ID NO: 3134 - DNA, 25 bp, SARS Virus
aagacaccgggtatacccatgggag

SEQ ID NO: 3135 - DNA, 25 bp, SARS Virus
agacaccgggtcaacccatgggaga

SEQ ID NO: 3136 - DNA, 25 bp, SARS Virus
gacaccgggtctacccatgggagaa

SEQ ID NO: 3137 - DNA, 25 bp, SARS Virus
acaccgggtctaaccatgggagaac

SEQ ID NO: 3138 - DNA, 25 bp, SARS Virus
caccgggtctacacatgggagaact

SEQ ID NO: 3139 - DNA, 25 bp, SARS Virus
accgggtctaccaatgggagaacta

SEQ ID NO: 3140 - DNA, 25 bp, SARS Virus
ccgggtctacccatgggagaactaa

SEQ ID NO: 3141 - DNA, 25 bp, SARS Virus
cgggtctacccaagggagaactaac

SEQ ID NO: 3142 - DNA, 25 bp, SARS Virus
gggtctacccataggagaactaacg

SEQ ID NO: 3143 - DNA, 25 bp, SARS Virus
ggtctacccatgagagaactaacgt

SEQ ID NO: 3144 - DNA, 25 bp, SARS Virus
gtctacccatggaagaactaacgta

SEQ ID NO: 3145 - DNA, 25 bp, SARS Virus
tctacccatgggagaactaacgtag

SEQ ID NO: 3146 - DNA, 25 bp, SARS Virus
ctacccatgggaaaactaacgtagt

SEQ ID NO: 3147 - DNA, 25 bp, SARS Virus
tacccatgggagaactaacgtagtt

SEQ ID NO: 3148 - DNA, 25 bp, SARS Virus
acccatgggagaactaacgtagttt

SEQ ID NO: 3149 - DNA, 25 bp, SARS Virus
cccatgggagaaataacgtagtttc

SEQ ID NO: 3150 - DNA, 25 bp, SARS Virus
ccatgggagaacaaacgtagtttct

SEQ ID NO: 3151 - DNA, 25 bp, SARS Virus
catgggagaactaacgtagtttcta

SEQ ID NO: 3152 - DNA, 25 bp, SARS Virus
atgggagaactaacgtagtttctaa

SEQ ID NO: 3153 - DNA, 25 bp, SARS Virus
tgggagaactaaagtagtttctaaa

SEQ ID NO: 3154 - DNA, 25 bp, SARS Virus
gggagaactaacatagtttctaaaa

SEQ ID NO: 3155 - DNA, 25 bp, SARS Virus
ggagaactaacgaagtttctaaaag

SEQ ID NO: 3156 - DNA, 25 bp, SARS Virus
gagaactaacgtagtttctaaaaga

SEQ ID NO: 3157 - DNA, 25 bp, SARS Virus
agaactaacgtaatttctaaaagag

SEQ ID NO: 3158 - DNA, 25 bp, SARS Virus
gaactaacgtagattctaaaagagc

SEQ ID NO: 3159 - DNA, 25 bp, SARS Virus
aactaacgtagtatctaaaagagcg

SEQ ID NO: 3160 - DNA, 25 bp, SARS Virus
actaacgtagttactaaaagagcgt

SEQ ID NO: 3161 - DNA, 25 bp, SARS Virus
ctaacgtagtttataaaagagcgtg

SEQ ID NO: 3162 - DNA, 25 bp, SARS Virus
taacgtagtttcaaaaagagcgtgc

SEQ ID NO: 3163 - DNA, 25 bp, SARS Virus
aacgtagtttctaaaagagcgtgcg

SEQ ID NO: 3164 - DNA, 25 bp, SARS Virus
acgtagtttctaaaagagcgtgcgc

SEQ ID NO: 3165 - DNA, 25 bp, SARS Virus
cgtagtttctaaaagagcgtgcgcg

SEQ ID NO: 3166 - DNA, 25 bp, SARS Virus
gtagtttctaaaagagcgtgcgcgc

SEQ ID NO: 3167 - DNA, 25 bp, SARS Virus
tagtttctaaaaaagcgtgcgcgcc

SEQ ID NO: 3168 - DNA, 25 bp, SARS Virus
agtttctaaaagagcgtgcgcgccc

SEQ ID NO: 3169 - DNA, 25 bp, SARS Virus
gtttctaaaagaacgtgcgcgcccg

SEQ ID NO: 3170 - DNA, 25 bp, SARS Virus
tttctaaaagagagtgcgcgcccgt

SEQ ID NO: 3171 - DNA, 25 bp, SARS Virus
ttctaaaagagcatgcgcgcccgtt

SEQ ID NO: 3172 - DNA, 25 bp, SARS Virus
tctaaaagagcgagcgcgcccgttc

SEQ ID NO: 3173 - DNA, 25 bp, SARS Virus
ctaaaagagcgtacgcgcccgttca

SEQ ID NO: 3174 - DNA, 25 bp, SARS Virus
taaaagagcgtgagcgcccgttcag

SEQ ID NO: 3175 - DNA, 25 bp, SARS Virus
aaaagagcgtgcacgcccgttcagt

SEQ ID NO: 3176 - DNA, 25 bp, SARS Virus
aaagagcgtgcgagcccgttcagtt

SEQ ID NO: 3177 - DNA, 25 bp, SARS Virus
aagagcgtgcgcacccgttcagtta

SEQ ID NO: 3178 - DNA, 25 bp, SARS Virus
agagcgtgcgcgaccgttcagttac

SEQ ID NO: 3179 - DNA, 25 bp, SARS Virus
gagcgtgcgcgcacgttcagttaca

SEQ ID NO: 3180 - DNA, 25 bp, SARS Virus
agcgtgcgcgccagttcagttacac

SEQ ID NO: 3181 - DNA, 25 bp, SARS Virus
gcgtgcgcgcccattcagttacacg

SEQ ID NO: 3182 - DNA, 25 bp, SARS Virus
cgtgcgcgcccgatcagttacacgt

SEQ ID NO: 3183 - DNA, 25 bp, SARS Virus
gtgcgcgcccgtacagttacacgtg

SEQ ID NO: 3184 - DNA, 25 bp, SARS Virus
tgcgcgcccgttaagttacacgtga

SEQ ID NO: 3185 - DNA, 25 bp, SARS Virus
gcgcgcccgttcagttacacgtgag

SEQ ID NO: 3186 - DNA, 25 bp, SARS Virus
cgcgcccgttcaattacacgtgaga

SEQ ID NO: 3187 - DNA, 25 bp, SARS Virus
gcgcccgttcagatacacgtgagaa

SEQ ID NO: 3188 - DNA, 25 bp, SARS Virus
cgcccgttcagtaacacgtgagaaa

SEQ ID NO: 3189 - DNA, 25 bp, SARS Virus
gcccgttcagttacacgtgagaaag

SEQ ID NO: 3190 - DNA, 25 bp, SARS Virus
cccgttcagttaaacgtgagaaagg

SEQ ID NO: 3191 - DNA, 25 bp, SARS Virus
ccgttcagttacacgtgagaaaggc

SEQ ID NO: 3192 - DNA, 25 bp, SARS Virus
cgttcagttacaagtgagaaaggct

SEQ ID NO: 3193 - DNA, 25 bp, SARS Virus
gttcagttacacatgagaaaggctt

SEQ ID NO: 3194 - DNA, 25 bp, SARS Virus
ttcagttacacgagagaaaggcttg

SEQ ID NO: 3195 - DNA, 25 bp, SARS Virus
tcagttacacgtaagaaaggcttgt

SEQ ID NO: 3196 - DNA, 25 bp, SARS Virus
cagttacacgtgagaaaggcttgtt

SEQ ID NO: 3197 - DNA, 25 bp, SARS Virus
agttacacgtgaaaaaggcttgttg

SEQ ID NO: 3198 - DNA, 25 bp, SARS Virus
gttacacgtgagaaaggcttgttga

SEQ ID NO: 3199 - DNA, 25 bp, SARS Virus
ttacacgtgagaaaggcttgttgaa

SEQ ID NO: 3200 - DNA, 25 bp, SARS Virus
tacacgtgagaaaggcttgttgaac

SEQ ID NO: 3201 - DNA, 25 bp, SARS Virus
acacgtgagaaaagcttgttgaact

SEQ ID NO: 3202 - DNA, 25 bp, SARS Virus
cacgtgagaaagacttgttgaacta

SEQ ID NO: 3203 - DNA, 25 bp, SARS Virus
acgtgagaaaggattgttgaactaa

SEQ ID NO: 3204 - DNA, 25 bp, SARS Virus
cgtgagaaaggcatgttgaactaat

SEQ ID NO: 3205 - DNA, 25 bp, SARS Virus
gtgagaaaggctagttgaactaatg

SEQ ID NO: 3206 - DNA, 25 bp, SARS Virus
tgagaaaggcttattgaactaatgt

SEQ ID NO: 3207 - DNA, 25 bp, SARS Virus
gagaaaggcttgatgaactaatgta

SEQ ID NO: 3208 - DNA, 25 bp, SARS Virus
agaaaggcttgtagaactaatgtag

SEQ ID NO: 3209 - DNA, 25 bp, SARS Virus
gaaaggcttgttaaactaatgtagc

SEQ ID NO: 3210 - DNA, 25 bp, SARS Virus
aaaggcttgttgaactaatgtagct

SEQ ID NO: 3211 - DNA, 25 bp, SARS Virus
aaggcttgttgaactaatgtagctc

SEQ ID NO: 3212 - DNA, 25 bp, SARS Virus
aggcttgttgaaataatgtagctca

SEQ ID NO: 3213 - DNA, 25 bp, SARS Virus
ggcttgttgaacaaatgtagctcag

SEQ ID NO: 3214 - DNA, 25 bp, SARS Virus
gcttgttgaactaatgtagctcagc

SEQ ID NO: 3215 - DNA, 25 bp, SARS Virus
cttgttgaactaatgtagctcagct

SEQ ID NO: 3216 - DNA, 25 bp, SARS Virus
ttgttgaactaaagtagctcagctt

SEQ ID NO: 3217 - DNA, 25 bp, SARS Virus
tgttgaactaatatagctcagcttc

SEQ ID NO: 3218 - DNA, 25 bp, SARS Virus
gttgaactaatgaagctcagcttct

SEQ ID NO: 3219 - DNA, 25 bp, SARS Virus
ttgaactaatgtagctcagcttctc

SEQ ID NO: 3220 - DNA, 25 bp, SARS Virus
tgaactaatgtaactcagcttctct

SEQ ID NO: 3221 - DNA, 25 bp, SARS Virus
gaactaatgtagatcagcttctctc

SEQ ID NO: 3222 - DNA, 25 bp, SARS Virus
aactaatgtagcacagcttctctcc

SEQ ID NO: 3223 - DNA, 25 bp, SARS Virus
actaatgtagctaagcttctctcca

SEQ ID NO: 3224 - DNA, 25 bp, SARS Virus
ctaatgtagctcagcttctctccac

SEQ ID NO: 3225 - DNA, 25 bp, SARS Virus
taatgtagctcaacttctctccaca

SEQ ID NO: 3226 - DNA, 25 bp, SARS Virus
aatgtagctcagattctctccacag

SEQ ID NO: 3227 - DNA, 25 bp, SARS Virus
atgtagctcagcatctctccacaga

SEQ ID NO: 3228 - DNA, 25 bp, SARS Virus
tgtagctcagctactctccacagat

SEQ ID NO: 3229 - DNA, 25 bp, SARS Virus
gtagctcagcttatctccacagatg

SEQ ID NO: 3230 - DNA, 25 bp, SARS Virus
tagctcagcttcactccacagatga

SEQ ID NO: 3231 - DNA, 25 bp, SARS Virus
agctcagcttctatccacagatgac

SEQ ID NO: 3232 - DNA, 25 bp, SARS Virus
gctcagcttctcaccacagatgacg

SEQ ID NO: 3233 - DNA, 25 bp, SARS Virus
ctcagcttctctacacagatgacga

SEQ ID NO: 3234 - DNA, 25 bp, SARS Virus
tcagcttctctcaacagatgacgac

SEQ ID NO: 3235 - DNA, 25 bp, SARS Virus
cagcttctctccacagatgacgacg

SEQ ID NO: 3236 - DNA, 25 bp, SARS Virus
agcttctctccaaagatgacgacgg

SEQ ID NO: 3237 - DNA, 25 bp, SARS Virus
gcttctctccacagatgacgacggc

SEQ ID NO: 3238 - DNA, 25 bp, SARS Virus
cttctctccacaaatgacgacggca

SEQ ID NO: 3239 - DNA, 25 bp, SARS Virus
ttctctccacagatgacgacggcac

SEQ ID NO: 3240 - DNA, 25 bp, SARS Virus
tctctccacagaagacgacggcact

SEQ ID NO: 3241 - DNA, 25 bp, SARS Virus
ctctccacagataacgacggcactg

SEQ ID NO: 3242 - DNA, 25 bp, SARS Virus
tctccacagatgacgacggcactgg

SEQ ID NO: 3243 - DNA, 25 bp, SARS Virus
ctccacagatgaagacggcactggt

SEQ ID NO: 3244 - DNA, 25 bp, SARS Virus
tccacagatgacaacggcactggta

SEQ ID NO: 3245 - DNA, 25 bp, SARS Virus
ccacagatgacgacggcactggtac

SEQ ID NO: 3246 - DNA, 25 bp, SARS Virus
cacagatgacgaaggcactggtact

SEQ ID NO: 3247 - DNA, 25 bp, SARS Virus
acagatgacgacagcactggtactc

SEQ ID NO: 3248 - DNA, 25 bp, SARS Virus
cagatgacgacgacactggtactcg

SEQ ID NO: 3249 - DNA, 25 bp, SARS Virus
agatgacgacggaactggtactcgt

SEQ ID NO: 3250 - DNA, 25 bp, SARS Virus
gatgacgacggcactggtactcgta

SEQ ID NO: 3251 - DNA, 25 bp, SARS Virus
atgacgacggcaatggtactcgtac

SEQ ID NO: 3252 - DNA, 25 bp, SARS Virus
tgacgacggcacaggtactcgtact

SEQ ID NO: 3253 - DNA, 25 bp, SARS Virus
gacgacggcactagtactcgtactt

SEQ ID NO: 3254 - DNA, 25 bp, SARS Virus
acgacggcactgatactcgtacttt

SEQ ID NO: 3255 - DNA, 25 bp, SARS Virus
cgacggcactggaactcgtacttta

SEQ ID NO: 3256 - DNA, 25 bp, SARS Virus
gacggcactggtactcgtactttaa

SEQ ID NO: 3257 - DNA, 25 bp, SARS Virus
acggcactggtaatcgtactttaac

SEQ ID NO: 3258 - DNA, 25 bp, SARS Virus
cggcactggtacacgtactttaacg

SEQ ID NO: 3259 - DNA, 25 bp, SARS Virus
ggcactggtactagtactttaacgg

SEQ ID NO: 3260 - DNA, 25 bp, SARS Virus
gcactggtactcatactttaacgga

SEQ ID NO: 3261 - DNA, 25 bp, SARS Virus
cactggtactcgaactttaacggac

SEQ ID NO: 3262 - DNA, 25 bp, SARS Virus
actggtactcgtactttaacggacc

SEQ ID NO: 3263 - DNA, 25 bp, SARS Virus
ctggtactcgtaatttaacggacca

SEQ ID NO: 3264 - DNA, 25 bp, SARS Virus
tggtactcgtacattaacggaccaa

SEQ ID NO: 3265 - DNA, 25 bp, SARS Virus
ggtactcgtactataacggaccaag

SEQ ID NO: 3266 - DNA, 25 bp, SARS Virus
gtactcgtacttaaacggaccaagt

SEQ ID NO: 3267 - DNA, 25 bp, SARS Virus
tactcgtactttaacggaccaagtg

SEQ ID NO: 3268 - DNA, 25 bp, SARS Virus
actcgtactttaacggaccaagtga

SEQ ID NO: 3269 - DNA, 25 bp, SARS Virus
ctcgtactttaaaggaccaagtgac

SEQ ID NO: 3270 - DNA, 25 bp, SARS Virus
tcgtactttaacagaccaagtgact

SEQ ID NO: 3271 - DNA, 25 bp, SARS Virus
cgtactttaacgaaccaagtgactc

SEQ ID NO: 3272 - DNA, 25 bp, SARS Virus
gtactttaacggaccaagtgactcg

SEQ ID NO: 3273 - DNA, 25 bp, SARS Virus
tactttaacggaacaagtgactcgc

SEQ ID NO: 3274 - DNA, 25 bp, SARS Virus
actttaacggacaaagtgactcgcg

SEQ ID NO: 3275 - DNA, 25 bp, SARS Virus
ctttaacggaccaagtgactcgcga

SEQ ID NO: 3276 - DNA, 25 bp, SARS Virus
tttaacggaccaagtgactcgcgag

SEQ ID NO: 3277 - DNA, 25 bp, SARS Virus
ttaacggaccaaatgactcgcgaga

SEQ ID NO: 3278 - DNA, 25 bp, SARS Virus
taacggaccaagagactcgcgagac

SEQ ID NO: 3279 - DNA, 25 bp, SARS Virus
aacggaccaagtaactcgcgagact

SEQ ID NO: 3280 - DNA, 25 bp, SARS Virus
acggaccaagtgactcgcgagacta

SEQ ID NO: 3281 - DNA, 25 bp, SARS Virus
cggaccaagtgaatcgcgagactat

SEQ ID NO: 3282 - DNA, 25 bp, SARS Virus
ggaccaagtgacacgcgagactatt

SEQ ID NO: 3283 - DNA, 25 bp, SARS Virus
gaccaagtgactagcgagactattc

SEQ ID NO: 3284 - DNA, 25 bp, SARS Virus
accaagtgactcacgagactattct

SEQ ID NO: 3285 - DNA, 25 bp, SARS Virus
ccaagtgactcgagagactattctc

SEQ ID NO: 3286 - DNA, 25 bp, SARS Virus
caagtgactcgcaagactattctcg

SEQ ID NO: 3287 - DNA, 25 bp, SARS Virus
aagtgactcgcgagactattctcga

SEQ ID NO: 3288 - DNA, 25 bp, SARS Virus
agtgactcgcgaaactattctcgat

SEQ ID NO: 3289 - DNA, 25 bp, SARS Virus
gtgactcgcgagactattctcgatg

SEQ ID NO: 3290 - DNA, 25 bp, SARS Virus
tgactcgcgagaatattctcgatgc

SEQ ID NO: 3291 - DNA, 25 bp, SARS Virus
gactcgcgagacaattctcgatgct

SEQ ID NO: 3292 - DNA, 25 bp, SARS Virus
actcgcgagactattctcgatgctc

SEQ ID NO: 3293 - DNA, 25 bp, SARS Virus
ctcgcgagactaatctcgatgctcg

SEQ ID NO: 3294 - DNA, 25 bp, SARS Virus
tcgcgagactatactcgatgctcgt

SEQ ID NO: 3295 - DNA, 25 bp, SARS Virus
cgcgagactattatcgatgctcgtg

SEQ ID NO: 3296 - DNA, 25 bp, SARS Virus
gcgagactattcacgatgctcgtgg

SEQ ID NO: 3297 - DNA, 25 bp, SARS Virus
cgagactattctagatgctcgtggt

SEQ ID NO: 3298 - DNA, 25 bp, SARS Virus
gagactattctcaatgctcgtggtc

SEQ ID NO: 3299 - DNA, 25 bp, SARS Virus
agactattctcgatgctcgtggtct

SEQ ID NO: 3300 - DNA, 25 bp, SARS Virus
gactattctcgaagctcgtggtctg

SEQ ID NO: 3301 - DNA, 25 bp, SARS Virus
actattctcgatactcgtggtctgt

SEQ ID NO: 3302 - DNA, 25 bp, SARS Virus
ctattctcgatgatcgtggtctgtg

SEQ ID NO: 3303 - DNA, 25 bp, SARS Virus
tattctcgatgcacgtggtctgtgg

SEQ ID NO: 3304 - DNA, 25 bp, SARS Virus
attctcgatgctagtggtctgtggg

SEQ ID NO: 3305 - DNA, 25 bp, SARS Virus
ttctcgatgctcatggtctgtggga

SEQ ID NO: 3306 - DNA, 25 bp, SARS Virus
tctcgatgctcgaggtctgtgggaa

SEQ ID NO: 3307 - DNA, 25 bp, SARS Virus
ctcgatgctcgtagtctgtgggaag

SEQ ID NO: 3308 - DNA, 25 bp, SARS Virus
tcgatgctcgtgatctgtgggaagc

SEQ ID NO: 3309 - DNA, 25 bp, SARS Virus
cgatgctcgtggactgtgggaagct

SEQ ID NO: 3310 - DNA, 25 bp, SARS Virus
gatgctcgtggtatgtgggaagctt

SEQ ID NO: 3311 - DNA, 25 bp, SARS Virus
atgctcgtggtcagtgggaagcttt

SEQ ID NO: 3312 - DNA, 25 bp, SARS Virus
tgctcgtggtctatgggaagcttta

SEQ ID NO: 3313 - DNA, 25 bp, SARS Virus
gctcgtggtctgagggaagctttaa

SEQ ID NO: 3314 - DNA, 25 bp, SARS Virus
ctcgtggtctgtaggaagctttaat

SEQ ID NO: 3315 - DNA, 25 bp, SARS Virus
tcgtggtctgtgagaagctttaatt

SEQ ID NO: 3316 - DNA, 25 bp, SARS Virus
cgtggtctgtggaaagctttaattc

SEQ ID NO: 3317 - DNA, 25 bp, SARS Virus
gtggtctgtgggaagctttaattct

SEQ ID NO: 3318 - DNA, 25 bp, SARS Virus
tggtctgtgggaagctttaattctc

SEQ ID NO: 3319 - DNA, 25 bp, SARS Virus
ggtctgtgggaaactttaattctca

SEQ ID NO: 3320 - DNA, 25 bp, SARS Virus
gtctgtgggaagatttaattctcac

SEQ ID NO: 3321 - DNA, 25 bp, SARS Virus
tctgtgggaagcattaattctcacg

SEQ ID NO: 3322 - DNA, 25 bp, SARS Virus
ctgtgggaagctataattctcacgg

SEQ ID NO: 3323 - DNA, 25 bp, SARS Virus
tgtgggaagcttaaattctcacggt

SEQ ID NO: 3324 - DNA, 25 bp, SARS Virus
gtgggaagctttaattctcacggtt

SEQ ID NO: 3325 - DNA, 25 bp, SARS Virus
tgggaagctttaattctcacggttc

SEQ ID NO: 3326 - DNA, 25 bp, SARS Virus
gggaagctttaaatctcacggttct

SEQ ID NO: 3327 - DNA, 25 bp, SARS Virus
ggaagctttaatactcacggttctt

SEQ ID NO: 3328 - DNA, 25 bp, SARS Virus
gaagctttaattatcacggttcttt

SEQ ID NO: 3329 - DNA, 25 bp, SARS Virus
aagctttaattcacacggttcttta

SEQ ID NO: 3330 - DNA, 25 bp, SARS Virus
agctttaattctaacggttctttaa

SEQ ID NO: 3331 - DNA, 25 bp, SARS Virus
gctttaattctcacggttctttaaa

SEQ ID NO: 3332 - DNA, 25 bp, SARS Virus
ctttaattctcaaggttctttaaac

SEQ ID NO: 3333 - DNA, 25 bp, SARS Virus
tttaattctcacagttctttaaact

SEQ ID NO: 3334 - DNA, 25 bp, SARS Virus
ttaattctcacgattctttaaactg

SEQ ID NO: 3335 - DNA, 25 bp, SARS Virus
taattctcacggatctttaaactgt

SEQ ID NO: 3336 - DNA, 25 bp, SARS Virus
aattctcacggtactttaaactgtg

SEQ ID NO: 3337 - DNA, 25 bp, SARS Virus
attctcacggttatttaaactgtga

SEQ ID NO: 3338 - DNA, 25 bp, SARS Virus
ttctcacggttcattaaactgtgaa

SEQ ID NO: 3339 - DNA, 25 bp, SARS Virus
tctcacggttctataaactgtgaaa

SEQ ID NO: 3340 - DNA, 25 bp, SARS Virus
ctcacggttcttaaaactgtgaaag

SEQ ID NO: 3341 - DNA, 25 bp, SARS Virus
tcacggttctttaaactgtgaaagt

SEQ ID NO: 3342 - DNA, 25 bp, SARS Virus
cacggttctttaaactgtgaaagtt

SEQ ID NO: 3343 - DNA, 25 bp, SARS Virus
acggttctttaaactgtgaaagttt

SEQ ID NO: 3344 - DNA, 25 bp, SARS Virus
cggttctttaaaatgtgaaagtttc

SEQ ID NO: 3345 - DNA, 25 bp, SARS Virus
ggttctttaaacagtgaaagtttcc

SEQ ID NO: 3346 - DNA, 25 bp, SARS Virus
gttctttaaactatgaaagtttccc

SEQ ID NO: 3347 - DNA, 25 bp, SARS Virus
ttctttaaactgagaaagtttcccc

SEQ ID NO: 3348 - DNA, 25 bp, SARS Virus
tctttaaactgtaaaagtttcccct

SEQ ID NO: 3349 - DNA, 25 bp, SARS Virus
ctttaaactgtgaaagtttcccctt

SEQ ID NO: 3350 - DNA, 25 bp, SARS Virus
tttaaactgtgaaagtttcccctta

SEQ ID NO: 3351 - DNA, 25 bp, SARS Virus
ttaaactgtgaaagtttccccttac

SEQ ID NO: 3352 - DNA, 25 bp, SARS Virus
taaactgtgaaaatttccccttacg

SEQ ID NO: 3353 - DNA, 25 bp, SARS Virus
aaactgtgaaagattccccttacgg

SEQ ID NO: 3354 - DNA, 25 bp, SARS Virus
aactgtgaaagtatccccttacggg

SEQ ID NO: 3355 - DNA, 25 bp, SARS Virus
actgtgaaagttaccccttacgggt

SEQ ID NO: 3356 - DNA, 25 bp, SARS Virus
ctgtgaaagtttacccttacgggtt

SEQ ID NO: 3357 - DNA, 25 bp, SARS Virus
tgtgaaagtttcaccttacgggttt

SEQ ID NO: 3358 - DNA, 25 bp, SARS Virus
gtgaaagtttccacttacgggtttc

SEQ ID NO: 3359 - DNA, 25 bp, SARS Virus
tgaaagtttcccattacgggtttca

SEQ ID NO: 3360 - DNA, 25 bp, SARS Virus
gaaagtttccccatacgggtttcaa

SEQ ID NO: 3361 - DNA, 25 bp, SARS Virus
aaagtttcccctaacgggtttcaaa

SEQ ID NO: 3362 - DNA, 25 bp, SARS Virus
aagtttccccttacgggtttcaaac

SEQ ID NO: 3363 - DNA, 25 bp, SARS Virus
agtttccccttaagggtttcaaaca

SEQ ID NO: 3364 - DNA, 25 bp, SARS Virus
gtttccccttacaggtttcaaacac

SEQ ID NO: 3365 - DNA, 25 bp, SARS Virus
tttccccttacgagtttcaaacaca

SEQ ID NO: 3366 - DNA, 25 bp, SARS Virus
ttccccttacggatttcaaacacaa

SEQ ID NO: 3367 - DNA, 25 bp, SARS Virus
tccccttacgggattcaaacacaaa

SEQ ID NO: 3368 - DNA, 25 bp, SARS Virus
ccccttacgggtatcaaacacaaag

SEQ ID NO: 3369 - DNA, 25 bp, SARS Virus
cccttacgggttacaaacacaaagg

SEQ ID NO: 3370 - DNA, 25 bp, SARS Virus
ccttacgggtttaaaacacaaagga

SEQ ID NO: 3371 - DNA, 25 bp, SARS Virus
cttacgggtttcaaacacaaaggag

SEQ ID NO: 3372 - DNA, 25 bp, SARS Virus
ttacgggtttcaaacacaaaggaga

SEQ ID NO: 3373 - DNA, 25 bp, SARS Virus
tacgggtttcaaacacaaaggagaa

SEQ ID NO: 3374 - DNA, 25 bp, SARS Virus
acgggtttcaaaaacaaaggagaat

SEQ ID NO: 3375 - DNA, 25 bp, SARS Virus
cgggtttcaaacacaaaggagaatt

SEQ ID NO: 3376 - DNA, 25 bp, SARS Virus
gggtttcaaacaaaaaggagaattg

SEQ ID NO: 3377 - DNA, 25 bp, SARS Virus
ggtttcaaacacaaaggagaattga

SEQ ID NO: 3378 - DNA, 25 bp, SARS Virus
gtttcaaacacaaaggagaattgag

SEQ ID NO: 3379 - DNA, 25 bp, SARS Virus
tttcaaacacaaaggagaattgagt

SEQ ID NO: 3380 - DNA, 25 bp, SARS Virus
ttcaaacacaaaagagaattgagtt

SEQ ID NO: 3381 - DNA, 25 bp, SARS Virus
tcaaacacaaagaagaattgagttt

SEQ ID NO: 3382 - DNA, 25 bp, SARS Virus
caaacacaaaggagaattgagtttt

SEQ ID NO: 3383 - DNA, 25 bp, SARS Virus
aaacacaaaggaaaattgagttttc

SEQ ID NO: 3384 - DNA, 25 bp, SARS Virus
aacacaaaggagaattgagttttca

SEQ ID NO: 3385 - DNA, 25 bp, SARS Virus
acacaaaggagaattgagttttcag

SEQ ID NO: 3386 - DNA, 25 bp, SARS Virus
cacaaaggagaaatgagttttcagt

SEQ ID NO: 3387 - DNA, 25 bp, SARS Virus
acaaaggagaatagagttttcagtt

SEQ ID NO: 3388 - DNA, 25 bp, SARS Virus
caaaggagaattaagttttcagttt

SEQ ID NO: 3389 - DNA, 25 bp, SARS Virus
aaaggagaattgagttttcagtttc

SEQ ID NO: 3390 - DNA, 25 bp, SARS Virus
aaggagaattgaattttcagtttca

SEQ ID NO: 3391 - DNA, 25 bp, SARS Virus
aggagaattgagatttcagtttcag

SEQ ID NO: 3392 - DNA, 25 bp, SARS Virus
ggagaattgagtattcagtttcagt

SEQ ID NO: 3393 - DNA, 25 bp, SARS Virus
gagaattgagttatcagtttcagta

SEQ ID NO: 3394 - DNA, 25 bp, SARS Virus
agaattgagtttacagtttcagtaa

SEQ ID NO: 3395 - DNA, 25 bp, SARS Virus
gaattgagttttaagtttcagtaag

SEQ ID NO: 3396 - DNA, 25 bp, SARS Virus
aattgagttttcagtttcagtaagt

SEQ ID NO: 3397 - DNA, 25 bp, SARS Virus
attgagttttcaatttcagtaagtt

SEQ ID NO: 3398 - DNA, 25 bp, SARS Virus
ttgagttttcagattcagtaagttg

SEQ ID NO: 3399 - DNA, 25 bp, SARS Virus
tgagttttcagtatcagtaagttgg

SEQ ID NO: 3400 - DNA, 25 bp, SARS Virus
gagttttcagttacagtaagttggt

SEQ ID NO: 3401 - DNA, 25 bp, SARS Virus
agttttcagtttaagtaagttggtg

SEQ ID NO: 3402 - DNA, 25 bp, SARS Virus
gttttcagtttcagtaagttggtgc

SEQ ID NO: 3403 - DNA, 25 bp, SARS Virus
ttttcagtttcaataagttggtgca

SEQ ID NO: 3404 - DNA, 25 bp, SARS Virus
tttcagtttcagaaagttggtgcac

SEQ ID NO: 3405 - DNA, 25 bp, SARS Virus
ttcagtttcagtaagttggtgcaca

SEQ ID NO: 3406 - DNA, 25 bp, SARS Virus
tcagtttcagtaagttggtgcacaa

SEQ ID NO: 3407 - DNA, 25 bp, SARS Virus
cagtttcagtaaattggtgcacaac

SEQ ID NO: 3408 - DNA, 25 bp, SARS Virus
agtttcagtaagatggtgcacaact

SEQ ID NO: 3409 - DNA, 25 bp, SARS Virus
gtttcagtaagtaggtgcacaactt

SEQ ID NO: 3410 - DNA, 25 bp, SARS Virus
tttcagtaagttagtgcacaacttt

SEQ ID NO: 3411 - DNA, 25 bp, SARS Virus
ttcagtaagttgatgcacaactttt

SEQ ID NO: 3412 - DNA, 25 bp, SARS Virus
tcagtaagttggagcacaacttttc

SEQ ID NO: 3413 - DNA, 25 bp, SARS Virus
cagtaagttggtacacaacttttct

SEQ ID NO: 3414 - DNA, 25 bp, SARS Virus
agtaagttggtgaacaacttttctt

SEQ ID NO: 3415 - DNA, 25 bp, SARS Virus
gtaagttggtgcacaacttttcttt

SEQ ID NO: 3416 - DNA, 25 bp, SARS Virus
taagttggtgcaaaacttttctttt

SEQ ID NO: 3417 - DNA, 25 bp, SARS Virus
aagttggtgcacaacttttcttttt

SEQ ID NO: 3418 - DNA, 25 bp, SARS Virus
agttggtgcacaacttttctttttc

SEQ ID NO: 3419 - DNA, 25 bp, SARS Virus
gttggtgcacaaattttctttttct

SEQ ID NO: 3420 - DNA, 25 bp, SARS Virus
ttggtgcacaacatttctttttctg

SEQ ID NO: 3421 - DNA, 25 bp, SARS Virus
tggtgcacaactattctttttctga

SEQ ID NO: 3422 - DNA, 25 bp, SARS Virus
ggtgcacaacttatctttttctgac

SEQ ID NO: 3423 - DNA, 25 bp, SARS Virus
gtgcacaactttactttttctgact

SEQ ID NO: 3424 - DNA, 25 bp, SARS Virus
tgcacaacttttatttttctgactc

SEQ ID NO: 3425 - DNA, 25 bp, SARS Virus
gcacaacttttcattttctgactcc

SEQ ID NO: 3426 - DNA, 25 bp, SARS Virus
cacaacttttctatttctgactccc

SEQ ID NO: 3427 - DNA, 25 bp, SARS Virus
acaacttttcttattctgactccca

SEQ ID NO: 3428 - DNA, 25 bp, SARS Virus
caacttttctttatctgactcccaa

SEQ ID NO: 3429 - DNA, 25 bp, SARS Virus
aacttttcttttactgactcccaaa

SEQ ID NO: 3430 - DNA, 25 bp, SARS Virus
acttttctttttatgactcccaaag

SEQ ID NO: 3431 - DNA, 25 bp, SARS Virus
cttttctttttcagactcccaaagt

SEQ ID NO: 3432 - DNA, 25 bp, SARS Virus
ttttctttttctaactcccaaagta

SEQ ID NO: 3433 - DNA, 25 bp, SARS Virus
tttctttttctgactcccaaagtac

SEQ ID NO: 3434 - DNA, 25 bp, SARS Virus
ttctttttctgaatcccaaagtacc

SEQ ID NO: 3435 - DNA, 25 bp, SARS Virus
tctttttctgacacccaaagtaccc

SEQ ID NO: 3436 - DNA, 25 bp, SARS Virus
ctttttctgactaccaaagtacccc

SEQ ID NO: 3437 - DNA, 25 bp, SARS Virus
tttttctgactcacaaagtaccccg

SEQ ID NO: 3438 - DNA, 25 bp, SARS Virus
ttttctgactccaaaagtaccccgc

SEQ ID NO: 3439 - DNA, 25 bp, SARS Virus
tttctgactcccaaagtaccccgca

SEQ ID NO: 3440 - DNA, 25 bp, SARS Virus
ttctgactcccaaagtaccccgcat

SEQ ID NO: 3441 - DNA, 25 bp, SARS Virus
tctgactcccaaagtaccccgcata

SEQ ID NO: 3442 - DNA, 25 bp, SARS Virus
ctgactcccaaaataccccgcatat

SEQ ID NO: 3443 - DNA, 25 bp, SARS Virus
tgactcccaaagaaccccgcatatg

SEQ ID NO: 3444 - DNA, 25 bp, SARS Virus
gactcccaaagtaccccgcatatgc

SEQ ID NO: 3445 - DNA, 25 bp, SARS Virus
actcccaaagtaacccgcatatgcg

SEQ ID NO: 3446 - DNA, 25 bp, SARS Virus
ctcccaaagtacaccgcatatgcga

SEQ ID NO: 3447 - DNA, 25 bp, SARS Virus
tcccaaagtaccacgcatatgcgag

SEQ ID NO: 3448 - DNA, 25 bp, SARS Virus
cccaaagtacccagcatatgcgaga

SEQ ID NO: 3449 - DNA, 25 bp, SARS Virus
ccaaagtaccccacatatgcgagac

SEQ ID NO: 3450 - DNA, 25 bp, SARS Virus
caaagtaccccgaatatgcgagaca

SEQ ID NO: 3451 - DNA, 25 bp, SARS Virus
aaagtaccccgcatatgcgagacac

SEQ ID NO: 3452 - DNA, 25 bp, SARS Virus
aagtaccccgcaaatgcgagacaca

SEQ ID NO: 3453 - DNA, 25 bp, SARS Virus
agtaccccgcatatgcgagacacat

SEQ ID NO: 3454 - DNA, 25 bp, SARS Virus
gtaccccgcataagcgagacacatg

SEQ ID NO: 3455 - DNA, 25 bp, SARS Virus
taccccgcatatacgagacacatgg

SEQ ID NO: 3456 - DNA, 25 bp, SARS Virus
accccgcatatgagagacacatggg

SEQ ID NO: 3457 - DNA, 25 bp, SARS Virus
ccccgcatatgcaagacacatggga

SEQ ID NO: 3458 - DNA, 25 bp, SARS Virus
cccgcatatgcgagacacatgggac

SEQ ID NO: 3459 - DNA, 25 bp, SARS Virus
ccgcatatgcgaaacacatgggaca

SEQ ID NO: 3460 - DNA, 25 bp, SARS Virus
cgcatatgcgagacacatgggacaa

SEQ ID NO: 3461 - DNA, 25 bp, SARS Virus
gcatatgcgagaaacatgggacaac

SEQ ID NO: 3462 - DNA, 25 bp, SARS Virus
catatgcgagacacatgggacaacg

SEQ ID NO: 3463 - DNA, 25 bp, SARS Virus
atatgcgagacaaatgggacaacgt

SEQ ID NO: 3464 - DNA, 25 bp, SARS Virus
tatgcgagacacatgggacaacgta

SEQ ID NO: 3465 - DNA, 25 bp, SARS Virus
atgcgagacacaagggacaacgtag

SEQ ID NO: 3466 - DNA, 25 bp, SARS Virus
tgcgagacacataggacaacgtaga

SEQ ID NO: 3467 - DNA, 25 bp, SARS Virus
gcgagacacatgagacaacgtagag

SEQ ID NO: 3468 - DNA, 25 bp, SARS Virus
cgagacacatggaacaacgtagagg

SEQ ID NO: 3469 - DNA, 25 bp, SARS Virus
gagacacatgggacaacgtagaggt

SEQ ID NO: 3470 - DNA, 25 bp, SARS Virus
agacacatgggaaaacgtagaggtg

SEQ ID NO: 3471 - DNA, 25 bp, SARS Virus
gacacatgggacaacgtagaggtgt

SEQ ID NO: 3472 - DNA, 25 bp, SARS Virus
acacatgggacaacgtagaggtgtc

SEQ ID NO: 3473 - DNA, 25 bp, SARS Virus
cacatgggacaaagtagaggtgtcc

SEQ ID NO: 3474 - DNA, 25 bp, SARS Virus
acatgggacaacatagaggtgtcct

SEQ ID NO: 3475 - DNA, 25 bp, SARS Virus
catgggacaacgaagaggtgtcctc

SEQ ID NO: 3476 - DNA, 25 bp, SARS Virus
atgggacaacgtagaggtgtcctca

SEQ ID NO: 3477 - DNA, 25 bp, SARS Virus
tgggacaacgtaaaggtgtcctcac

SEQ ID NO: 3478 - DNA, 25 bp, SARS Virus
gggacaacgtagaggtgtcctcaca

SEQ ID NO: 3479 - DNA, 25 bp, SARS Virus
ggacaacgtagaagtgtcctcacat

SEQ ID NO: 3480 - DNA, 25 bp, SARS Virus
gacaacgtagagatgtcctcacatt

SEQ ID NO: 3481 - DNA, 25 bp, SARS Virus
acaacgtagaggagtcctcacattg

SEQ ID NO: 3482 - DNA, 25 bp, SARS Virus
caacgtagaggtatcctcacattgt

SEQ ID NO: 3483 - DNA, 25 bp, SARS Virus
aacgtagaggtgacctcacattgtt

SEQ ID NO: 3484 - DNA, 25 bp, SARS Virus
acgtagaggtgtactcacattgtta

SEQ ID NO: 3485 - DNA, 25 bp, SARS Virus
cgtagaggtgtcatcacattgttat

SEQ ID NO: 3486 - DNA, 25 bp, SARS Virus
gtagaggtgtccacacattgttata

SEQ ID NO: 3487 - DNA, 25 bp, SARS Virus
tagaggtgtcctaacattgttatac

SEQ ID NO: 3488 - DNA, 25 bp, SARS Virus
agaggtgtcctcacattgttatacg

SEQ ID NO: 3489 - DNA, 25 bp, SARS Virus
gaggtgtcctcaaattgttatacgt

SEQ ID NO: 3490 - DNA, 25 bp, SARS Virus
aggtgtcctcacattgttatacgtg

SEQ ID NO: 3491 - DNA, 25 bp, SARS Virus
ggtgtcctcacaatgttatacgtga

SEQ ID NO: 3492 - DNA, 25 bp, SARS Virus
gtgtcctcacatagttatacgtgaa

SEQ ID NO: 3493 - DNA, 25 bp, SARS Virus
tgtcctcacattattatacgtgaac

SEQ ID NO: 3494 - DNA, 25 bp, SARS Virus
gtcctcacattgatatacgtgaaca

SEQ ID NO: 3495 - DNA, 25 bp, SARS Virus
tcctcacattgtaatacgtgaacag

SEQ ID NO: 3496 - DNA, 25 bp, SARS Virus
cctcacattgttatacgtgaacaga

SEQ ID NO: 3497 - DNA, 25 bp, SARS Virus
ctcacattgttaaacgtgaacagat

SEQ ID NO: 3498 - DNA, 25 bp, SARS Virus
tcacattgttatacgtgaacagatg

SEQ ID NO: 3499 - DNA, 25 bp, SARS Virus
cacattgttataagtgaacagatgg

SEQ ID NO: 3500 - DNA, 25 bp, SARS Virus
acattgttatacatgaacagatgga

SEQ ID NO: 3501 - DNA, 25 bp, SARS Virus
cattgttatacgagaacagatggaa

SEQ ID NO: 3502 - DNA, 25 bp, SARS Virus
attgttatacgtaaacagatggaac

SEQ ID NO: 3503 - DNA, 25 bp, SARS Virus
ttgttatacgtgaacagatggaact

SEQ ID NO: 3504 - DNA, 25 bp, SARS Virus
tgttatacgtgaacagatggaacta

SEQ ID NO: 3505 - DNA, 25 bp, SARS Virus
gttatacgtgaaaagatggaactac

SEQ ID NO: 3506 - DNA, 25 bp, SARS Virus
ttatacgtgaacagatggaactact

SEQ ID NO: 3507 - DNA, 25 bp, SARS Virus
tatacgtgaacaaatggaactactt

SEQ ID NO: 3508 - DNA, 25 bp, SARS Virus
atacgtgaacagatggaactacttt

SEQ ID NO: 3509 - DNA, 25 bp, SARS Virus
tacgtgaacagaaggaactacttta

SEQ ID NO: 3510 - DNA, 25 bp, SARS Virus
acgtgaacagatagaactactttac

SEQ ID NO: 3511 - DNA, 25 bp, SARS Virus
cgtgaacagatgaaactactttaca

SEQ ID NO: 3512 - DNA, 25 bp, SARS Virus
gtgaacagatggaactactttacat

SEQ ID NO: 3513 - DNA, 25 bp, SARS Virus
tgaacagatggaactactttacatt

SEQ ID NO: 3514 - DNA, 25 bp, SARS Virus
gaacagatggaaatactttacatta

SEQ ID NO: 3515 - DNA, 25 bp, SARS Virus
aacagatggaacaactttacattag

SEQ ID NO: 3516 - DNA, 25 bp, SARS Virus
acagatggaactactttacattagt

SEQ ID NO: 3517 - DNA, 25 bp, SARS Virus
cagatggaactaatttacattagta

SEQ ID NO: 3518 - DNA, 25 bp, SARS Virus
agatggaactacattacattagtaa

SEQ ID NO: 3519 - DNA, 25 bp, SARS Virus
gatggaactactatacattagtaac

SEQ ID NO: 3520 - DNA, 25 bp, SARS Virus
atggaactacttaacattagtaacg

SEQ ID NO: 3521 - DNA, 25 bp, SARS Virus
tggaactactttacattagtaacgc

SEQ ID NO: 3522 - DNA, 25 bp, SARS Virus
ggaactactttaaattagtaacgct

SEQ ID NO: 3523 - DNA, 25 bp, SARS Virus
gaactactttacattagtaacgcta

SEQ ID NO: 3524 - DNA, 25 bp, SARS Virus
aactactttacaatagtaacgctac

SEQ ID NO: 3525 - DNA, 25 bp, SARS Virus
actactttacataagtaacgctact

SEQ ID NO: 3526 - DNA, 25 bp, SARS Virus
ctactttacattagtaacgctactt

SEQ ID NO: 3527 - DNA, 25 bp, SARS Virus
tactttacattaataacgctacttc

SEQ ID NO: 3528 - DNA, 25 bp, SARS Virus
actttacattagaaacgctacttca

SEQ ID NO: 3529 - DNA, 25 bp, SARS Virus
ctttacattagtaacgctacttcaa

SEQ ID NO: 3530 - DNA, 25 bp, SARS Virus
tttacattagtaacgctacttcaaa

SEQ ID NO: 3531 - DNA, 25 bp, SARS Virus
ttacattagtaaagctacttcaaag

SEQ ID NO: 3532 - DNA, 25 bp, SARS Virus
tacattagtaacactacttcaaagt

SEQ ID NO: 3533 - DNA, 25 bp, SARS Virus
acattagtaacgatacttcaaagta

SEQ ID NO: 3534 - DNA, 25 bp, SARS Virus
cattagtaacgcaacttcaaagtac

SEQ ID NO: 3535 - DNA, 25 bp, SARS Virus
attagtaacgctacttcaaagtacc

SEQ ID NO: 3536 - DNA, 25 bp, SARS Virus
ttagtaacgctaattcaaagtaccg

SEQ ID NO: 3537 - DNA, 25 bp, SARS Virus
tagtaacgctacatcaaagtaccgt

SEQ ID NO: 3538 - DNA, 25 bp, SARS Virus
agtaacgctactacaaagtaccgtc

SEQ ID NO: 3539 - DNA, 25 bp, SARS Virus
gtaacgctacttaaaagtaccgtct

SEQ ID NO: 3540 - DNA, 25 bp, SARS Virus
taacgctacttcaaagtaccgtctg

SEQ ID NO: 3541 - DNA, 25 bp, SARS Virus
aacgctacttcaaagtaccgtctgc

SEQ ID NO: 3542 - DNA, 25 bp, SARS Virus
acgctacttcaaagtaccgtctgca

SEQ ID NO: 3543 - DNA, 25 bp, SARS Virus
cgctacttcaaaataccgtctgcac

SEQ ID NO: 3544 - DNA, 25 bp, SARS Virus
gctacttcaaagaaccgtctgcacg

SEQ ID NO: 3545 - DNA, 25 bp, SARS Virus
tcgtaccgtcaccacgtgaggcact

SEQ ID NO: 3546 - DNA, 25 bp, SARS Virus
cgtaccgtcaccccgtgaggcactt

SEQ ID NO: 3547 - DNA, 25 bp, SARS Virus
gtaccgtcaccacgtgaggcacttg

SEQ ID NO: 3548 - DNA, 25 bp, SARS Virus
taccgtcaccacctgaggcacttga

SEQ ID NO: 3549 - DNA, 25 bp, SARS Virus
accgtcaccacgcgaggcacttgag

SEQ ID NO: 3550 - DNA, 25 bp, SARS Virus
ccgtcaccacgtcaggcacttgagt

SEQ ID NO: 3551 - DNA, 25 bp, SARS Virus
cgtcaccacgtgcggcacttgagtg

SEQ ID NO: 3552 - DNA, 25 bp, SARS Virus
gtcaccacgtgacgcacttgagtga

SEQ ID NO: 3553 - DNA, 25 bp, SARS Virus
tcaccacgtgagccacttgagtgag

SEQ ID NO: 3554 - DNA, 25 bp, SARS Virus
caccacgtgaggcacttgagtgagc

SEQ ID NO: 3555 - DNA, 25 bp, SARS Virus
accacgtgaggcccttgagtgagca

SEQ ID NO: 3556 - DNA, 25 bp, SARS Virus
ccacgtgaggcacttgagtgagcac

SEQ ID NO: 3557 - DNA, 25 bp, SARS Virus
cacgtgaggcacctgagtgagcact

SEQ ID NO: 3558 - DNA, 25 bp, SARS Virus
acgtgaggcactcgagtgagcactc

SEQ ID NO: 3559 - DNA, 25 bp, SARS Virus
cgtgaggcacttcagtgagcactcg

SEQ ID NO: 3560 - DNA, 25 bp, SARS Virus
gtgaggcacttgcgtgagcactcga

SEQ ID NO: 3561 - DNA, 25 bp, SARS Virus
tgaggcacttgactgagcactcgag

SEQ ID NO: 3562 - DNA, 25 bp, SARS Virus
gaggcacttgagcgagcactcgagt

SEQ ID NO: 3563 - DNA, 25 bp, SARS Virus
aggcacttgagtcagcactcgagtt

SEQ ID NO: 3564 - DNA, 25 bp, SARS Virus
ggcacttgagtgcgcactcgagtta

SEQ ID NO: 3565 - DNA, 25 bp, SARS Virus
gcacttgagtgaccactcgagttac

SEQ ID NO: 3566 - DNA, 25 bp, SARS Virus
cacttgagtgagcactcgagttacc

SEQ ID NO: 3567 - DNA, 25 bp, SARS Virus
acttgagtgagccctcgagttacct

SEQ ID NO: 3568 - DNA, 25 bp, SARS Virus
cttgagtgagcactcgagttacctc

SEQ ID NO: 3569 - DNA, 25 bp, SARS Virus
ttgagtgagcacccgagttacctcc

SEQ ID NO: 3570 - DNA, 25 bp, SARS Virus
tgagtgagcactcgagttacctcca

SEQ ID NO: 3571 - DNA, 25 bp, SARS Virus
gagtgagcactccagttacctccac

SEQ ID NO: 3572 - DNA, 25 bp, SARS Virus
agtgagcactcgcgttacctccacg

SEQ ID NO: 3573 - DNA, 25 bp, SARS Virus
gtgagcactcgacttacctccacgt

SEQ ID NO: 3574 - DNA, 25 bp, SARS Virus
tgagcactcgagctacctccacgtc

SEQ ID NO: 3575 - DNA, 25 bp, SARS Virus
gagcactcgagtcacctccacgtca

SEQ ID NO: 3576 - DNA, 25 bp, SARS Virus
agcactcgagttccctccacgtcag

SEQ ID NO: 3577 - DNA, 25 bp, SARS Virus
gcactcgagttacctccacgtcagt

SEQ ID NO: 3578 - DNA, 25 bp, SARS Virus
cactcgagttacctccacgtcagtg

SEQ ID NO: 3579 - DNA, 25 bp, SARS Virus
actcgagttacccccacgtcagtga

SEQ ID NO: 3580 - DNA, 25 bp, SARS Virus
ctcgagttacctccacgtcagtgag

SEQ ID NO: 3581 - DNA, 25 bp, SARS Virus
tcgagttacctccacgtcagtgagc

SEQ ID NO: 3582 - DNA, 25 bp, SARS Virus
cgagttacctccccgtcagtgagcg

SEQ ID NO: 3583 - DNA, 25 bp, SARS Virus
gagttacctccacgtcagtgagcga

SEQ ID NO: 3584 - DNA, 25 bp, SARS Virus
agttacctccacctcagtgagcgat

SEQ ID NO: 3585 - DNA, 25 bp, SARS Virus
gttacctccacgccagtgagcgata

SEQ ID NO: 3586 - DNA, 25 bp, SARS Virus
ttacctccacgtcagtgagcgatac

SEQ ID NO: 3587 - DNA, 25 bp, SARS Virus
tacctccacgtccgtgagcgataca

SEQ ID NO: 3588 - DNA, 25 bp, SARS Virus
acctccacgtcactgagcgatacag

SEQ ID NO: 3589 - DNA, 25 bp, SARS Virus
cctccacgtcagcgagcgatacagc

SEQ ID NO: 3590 - DNA, 25 bp, SARS Virus
ctccacgtcagtcagcgatacagct

SEQ ID NO: 3591 - DNA, 25 bp, SARS Virus
tccacgtcagtgcgcgatacagctg

SEQ ID NO: 3592 - DNA, 25 bp, SARS Virus
ccacgtcagtgaccgatacagctgt

SEQ ID NO: 3593 - DNA, 25 bp, SARS Virus
cacgtcagtgagcgatacagctgtt

SEQ ID NO: 3594 - DNA, 25 bp, SARS Virus
acgtcagtgagccatacagctgttg

SEQ ID NO: 3595 - DNA, 25 bp, SARS Virus
cgtcagtgagcgctacagctgttgt

SEQ ID NO: 3596 - DNA, 25 bp, SARS Virus
gtcagtgagcgacacagctgttgtt

SEQ ID NO: 3597 - DNA, 25 bp, SARS Virus
tcagtgagcgatccagctgttgtta

SEQ ID NO: 3598 - DNA, 25 bp, SARS Virus
cagtgagcgatacagctgttgttaa

SEQ ID NO: 3599 - DNA, 25 bp, SARS Virus
agtgagcgataccgctgttgttaaa

SEQ ID NO: 3600 - DNA, 25 bp, SARS Virus
gtgagcgatacacctgttgttaaag

SEQ ID NO: 3601 - DNA, 25 bp, SARS Virus
tgagcgatacagctgttgttaaaga

SEQ ID NO: 3602 - DNA, 25 bp, SARS Virus
gagcgatacagccgttgttaaagac

SEQ ID NO: 3603 - DNA, 25 bp, SARS Virus
agcgatacagctcttgttaaagaca

SEQ ID NO: 3604 - DNA, 25 bp, SARS Virus
gcgatacagctgctgttaaagacac

SEQ ID NO: 3605 - DNA, 25 bp, SARS Virus
cgatacagctgtcgttaaagacacc

SEQ ID NO: 3606 - DNA, 25 bp, SARS Virus
gatacagctgttcttaaagacaccg

SEQ ID NO: 3607 - DNA, 25 bp, SARS Virus
atacagctgttgctaaagacaccgg

SEQ ID NO: 3608 - DNA, 25 bp, SARS Virus
tacagctgttgtcaaagacaccggg

SEQ ID NO: 3609 - DNA, 25 bp, SARS Virus
acagctgttgttcaagacaccgggt

SEQ ID NO: 3610 - DNA, 25 bp, SARS Virus
cagctgttgttacagacaccgggtc

SEQ ID NO: 3611 - DNA, 25 bp, SARS Virus
agctgttgttaacgacaccgggtct

SEQ ID NO: 3612 - DNA, 25 bp, SARS Virus
gctgttgttaaacacaccgggtcta

SEQ ID NO: 3613 - DNA, 25 bp, SARS Virus
ctgttgttaaagccaccgggtctac

SEQ ID NO: 3614 - DNA, 25 bp, SARS Virus
tgttgttaaagacaccgggtctacc

SEQ ID NO: 3615 - DNA, 25 bp, SARS Virus
gttgttaaagaccccgggtctaccc

SEQ ID NO: 3616 - DNA, 25 bp, SARS Virus
ttgttaaagacaccgggtctaccca

SEQ ID NO: 3617 - DNA, 25 bp, SARS Virus
tgttaaagacaccgggtctacccat

SEQ ID NO: 3618 - DNA, 25 bp, SARS Virus
gttaaagacacccggtctacccatg

SEQ ID NO: 3619 - DNA, 25 bp, SARS Virus
ttaaagacaccgcgtctacccatgg

SEQ ID NO: 3620 - DNA, 25 bp, SARS Virus
taaagacaccggctctacccatggg

SEQ ID NO: 3621 - DNA, 25 bp, SARS Virus
aaagacaccgggcctacccatggga

SEQ ID NO: 3622 - DNA, 25 bp, SARS Virus
aagacaccgggtctacccatgggag

SEQ ID NO: 3623 - DNA, 25 bp, SARS Virus
agacaccgggtccacccatgggaga

SEQ ID NO: 3624 - DNA, 25 bp, SARS Virus
gacaccgggtctccccatgggagaa

SEQ ID NO: 3625 - DNA, 25 bp, SARS Virus
acaccgggtctacccatgggagaac

SEQ ID NO: 3626 - DNA, 25 bp, SARS Virus
caccgggtctacccatgggagaact

SEQ ID NO: 3627 - DNA, 25 bp, SARS Virus
accgggtctacccatgggagaacta

SEQ ID NO: 3628 - DNA, 25 bp, SARS Virus
ccgggtctacccctgggagaactaa

SEQ ID NO: 3629 - DNA, 25 bp, SARS Virus
cgggtctacccacgggagaactaac

SEQ ID NO: 3630 - DNA, 25 bp, SARS Virus
gggtctacccatcggagaactaacg

SEQ ID NO: 3631 - DNA, 25 bp, SARS Virus
ggtctacccatgcgagaactaacgt

SEQ ID NO: 3632 - DNA, 25 bp, SARS Virus
gtctacccatggcagaactaacgta

SEQ ID NO: 3633 - DNA, 25 bp, SARS Virus
tctacccatgggcgaactaacgtag

SEQ ID NO: 3634 - DNA, 25 bp, SARS Virus
ctacccatgggacaactaacgtagt

SEQ ID NO: 3635 - DNA, 25 bp, SARS Virus
tacccatgggagcactaacgtagtt

SEQ ID NO: 3636 - DNA, 25 bp, SARS Virus
acccatgggagacctaacgtagttt

SEQ ID NO: 3637 - DNA, 25 bp, SARS Virus
cccatgggagaactaacgtagtttc

SEQ ID NO: 3638 - DNA, 25 bp, SARS Virus
ccatgggagaaccaacgtagtttct

SEQ ID NO: 3639 - DNA, 25 bp, SARS Virus
catgggagaactcacgtagtttcta

SEQ ID NO: 3640 - DNA, 25 bp, SARS Virus
atgggagaactaccgtagtttctaa

SEQ ID NO: 3641 - DNA, 25 bp, SARS Virus
tgggagaactaacgtagtttctaaa

SEQ ID NO: 3642 - DNA, 25 bp, SARS Virus
gggagaactaacctagtttctaaaa

SEQ ID NO: 3643 - DNA, 25 bp, SARS Virus
ggagaactaacgcagtttctaaaag

SEQ ID NO: 3644 - DNA, 25 bp, SARS Virus
gagaactaacgtcgtttctaaaaga

SEQ ID NO: 3645 - DNA, 25 bp, SARS Virus
agaactaacgtactttctaaaagag

SEQ ID NO: 3646 - DNA, 25 bp, SARS Virus
gaactaacgtagcttctaaaagagc

SEQ ID NO: 3647 - DNA, 25 bp, SARS Virus
aactaacgtagtctctaaaagagcg

SEQ ID NO: 3648 - DNA, 25 bp, SARS Virus
actaacgtagttcctaaaagagcgt

SEQ ID NO: 3649 - DNA, 25 bp, SARS Virus
ctaacgtagtttctaaaagagcgtg

SEQ ID NO: 3650 - DNA, 25 bp, SARS Virus
taacgtagtttccaaaagagcgtgc

SEQ ID NO: 3651 - DNA, 25 bp, SARS Virus
aacgtagtttctcaaagagcgtgcg

SEQ ID NO: 3652 - DNA, 25 bp, SARS Virus
acgtagtttctacaagagcgtgcgc

SEQ ID NO: 3653 - DNA, 25 bp, SARS Virus
cgtagtttctaacagagcgtgcgcg

SEQ ID NO: 3654 - DNA, 25 bp, SARS Virus
gtagtttctaaacgagcgtgcgcgc

SEQ ID NO: 3655 - DNA, 25 bp, SARS Virus
tagtttctaaaacagcgtgcgcgcc

SEQ ID NO: 3656 - DNA, 25 bp, SARS Virus
agtttctaaaagcgcgtgcgcgccc

SEQ ID NO: 3657 - DNA, 25 bp, SARS Virus
gtttctaaaagaccgtgcgcgcccg

SEQ ID NO: 3658 - DNA, 25 bp, SARS Virus
tttctaaaagagcgtgcgcgcccgt

SEQ ID NO: 3659 - DNA, 25 bp, SARS Virus
ttctaaaagagcctgcgcgcccgtt

SEQ ID NO: 3660 - DNA, 25 bp, SARS Virus
tctaaaagagcgcgcgcgcccgttc

SEQ ID NO: 3661 - DNA, 25 bp, SARS Virus
ctaaaagagcgtccgcgcccgttca

SEQ ID NO: 3662 - DNA, 25 bp, SARS Virus
taaaagagcgtgcgcgcccgttcag

SEQ ID NO: 3663 - DNA, 25 bp, SARS Virus
aaaagagcgtgcccgcccgttcagt

SEQ ID NO: 3664 - DNA, 25 bp, SARS Virus
aaagagcgtgcgcgcccgttcagtt

SEQ ID NO: 3665 - DNA, 25 bp, SARS Virus
aagagcgtgcgcccccgttcagtta

SEQ ID NO: 3666 - DNA, 25 bp, SARS Virus
agagcgtgcgcgcccgttcagttac

SEQ ID NO: 3667 - DNA, 25 bp, SARS Virus
gagcgtgcgcgcccgttcagttaca

SEQ ID NO: 3668 - DNA, 25 bp, SARS Virus
agcgtgcgcgcccgttcagttacac

SEQ ID NO: 3669 - DNA, 25 bp, SARS Virus
gcgtgcgcgccccttcagttacacg

SEQ ID NO: 3670 - DNA, 25 bp, SARS Virus
cgtgcgcgcccgctcagttacacgt

SEQ ID NO: 3671 - DNA, 25 bp, SARS Virus
gtgcgcgcccgtccagttacacgtg

SEQ ID NO: 3672 - DNA, 25 bp, SARS Virus
tgcgcgcccgttcagttacacgtga

SEQ ID NO: 3673 - DNA, 25 bp, SARS Virus
gcgcgcccgttccgttacacgtgag

SEQ ID NO: 3674 - DNA, 25 bp, SARS Virus
cgcgcccgttcacttacacgtgaga

SEQ ID NO: 3675 - DNA, 25 bp, SARS Virus
gcgcccgttcagctacacgtgagaa

SEQ ID NO: 3676 - DNA, 25 bp, SARS Virus
cgcccgttcagtcacacgtgagaaa

SEQ ID NO: 3677 - DNA, 25 bp, SARS Virus
gcccgttcagttccacgtgagaaag

SEQ ID NO: 3678 - DNA, 25 bp, SARS Virus
cccgttcagttacacgtgagaaagg

SEQ ID NO: 3679 - DNA, 25 bp, SARS Virus
ccgttcagttacccgtgagaaaggc

SEQ ID NO: 3680 - DNA, 25 bp, SARS Virus
cgttcagttacacgtgagaaaggct

SEQ ID NO: 3681 - DNA, 25 bp, SARS Virus
gttcagttacacctgagaaaggctt

SEQ ID NO: 3682 - DNA, 25 bp, SARS Virus
ttcagttacacgcgagaaaggcttg

SEQ ID NO: 3683 - DNA, 25 bp, SARS Virus
tcagttacacgtcagaaaggcttgt

SEQ ID NO: 3684 - DNA, 25 bp, SARS Virus
cagttacacgtgcgaaaggcttgtt

SEQ ID NO: 3685 - DNA, 25 bp, SARS Virus
agttacacgtgacaaaggcttgttg

SEQ ID NO: 3686 - DNA, 25 bp, SARS Virus
gttacacgtgagcaaggcttgttga

SEQ ID NO: 3687 - DNA, 25 bp, SARS Virus
ttacacgtgagacaggcttgttgaa

SEQ ID NO: 3688 - DNA, 25 bp, SARS Virus
tacacgtgagaacggcttgttgaac

SEQ ID NO: 3689 - DNA, 25 bp, SARS Virus
acacgtgagaaacgcttgttgaact

SEQ ID NO: 3690 - DNA, 25 bp, SARS Virus
cacgtgagaaagccttgttgaacta

SEQ ID NO: 3691 - DNA, 25 bp, SARS Virus
acgtgagaaaggcttgttgaactaa

SEQ ID NO: 3692 - DNA, 25 bp, SARS Virus
cgtgagaaaggcctgttgaactaat

SEQ ID NO: 3693 - DNA, 25 bp, SARS Virus
gtgagaaaggctcgttgaactaatg

SEQ ID NO: 3694 - DNA, 25 bp, SARS Virus
tgagaaaggcttcttgaactaatgt

SEQ ID NO: 3695 - DNA, 25 bp, SARS Virus
gagaaaggcttgctgaactaatgta

SEQ ID NO: 3696 - DNA, 25 bp, SARS Virus
agaaaggcttgtcgaactaatgtag

SEQ ID NO: 3697 - DNA, 25 bp, SARS Virus
gaaaggcttgttcaactaatgtagc

SEQ ID NO: 3698 - DNA, 25 bp, SARS Virus
aaaggcttgttgcactaatgtagct

SEQ ID NO: 3699 - DNA, 25 bp, SARS Virus
aaggcttgttgacctaatgtagctc

SEQ ID NO: 3700 - DNA, 25 bp, SARS Virus
aggcttgttgaactaatgtagctca

SEQ ID NO: 3701 - DNA, 25 bp, SARS Virus
ggcttgttgaaccaatgtagctcag

SEQ ID NO: 3702 - DNA, 25 bp, SARS Virus
gcttgttgaactcatgtagctcagc

SEQ ID NO: 3703 - DNA, 25 bp, SARS Virus
cttgttgaactactgtagctcagct

SEQ ID NO: 3704 - DNA, 25 bp, SARS Virus
ttgttgaactaacgtagctcagctt

SEQ ID NO: 3705 - DNA, 25 bp, SARS Virus
tgttgaactaatctagctcagcttc

SEQ ID NO: 3706 - DNA, 25 bp, SARS Virus
gttgaactaatgcagctcagcttct

SEQ ID NO: 3707 - DNA, 25 bp, SARS Virus
ttgaactaatgtcgctcagcttctc

SEQ ID NO: 3708 - DNA, 25 bp, SARS Virus
tgaactaatgtacctcagcttctct

SEQ ID NO: 3709 - DNA, 25 bp, SARS Virus
gaactaatgtagctcagcttctctc

SEQ ID NO: 3710 - DNA, 25 bp, SARS Virus
aactaatgtagcccagcttctctcc

SEQ ID NO: 3711 - DNA, 25 bp, SARS Virus
actaatgtagctcagcttctctcca

SEQ ID NO: 3712 - DNA, 25 bp, SARS Virus
ctaatgtagctccgcttctctccac

SEQ ID NO: 3713 - DNA, 25 bp, SARS Virus
taatgtagctcaccttctctccaca

SEQ ID NO: 3714 - DNA, 25 bp, SARS Virus
aatgtagctcagcttctctccacag

SEQ ID NO: 3715 - DNA, 25 bp, SARS Virus
atgtagctcagcctctctccacaga

SEQ ID NO: 3716 - DNA, 25 bp, SARS Virus
tgtagctcagctcctctccacagat

SEQ ID NO: 3717 - DNA, 25 bp, SARS Virus
gtagctcagcttctctccacagatg

SEQ ID NO: 3718 - DNA, 25 bp, SARS Virus
tagctcagcttccctccacagatga

SEQ ID NO: 3719 - DNA, 25 bp, SARS Virus
agctcagcttctctccacagatgac

SEQ ID NO: 3720 - DNA, 25 bp, SARS Virus
gctcagcttctccccacagatgacg

SEQ ID NO: 3721 - DNA, 25 bp, SARS Virus
ctcagcttctctccacagatgacga

SEQ ID NO: 3722 - DNA, 25 bp, SARS Virus
tcagcttctctccacagatgacgac

SEQ ID NO: 3723 - DNA, 25 bp, SARS Virus
cagcttctctccccagatgacgacg

SEQ ID NO: 3724 - DNA, 25 bp, SARS Virus
agcttctctccacagatgacgacgg

SEQ ID NO: 3725 - DNA, 25 bp, SARS Virus
gcttctctccaccgatgacgacggc

SEQ ID NO: 3726 - DNA, 25 bp, SARS Virus
cttctctccacacatgacgacggca

SEQ ID NO: 3727 - DNA, 25 bp, SARS Virus
ttctctccacagctgacgacggcac

SEQ ID NO: 3728 - DNA, 25 bp, SARS Virus
tctctccacagacgacgacggcact

SEQ ID NO: 3729 - DNA, 25 bp, SARS Virus
ctctccacagatcacgacggcactg

SEQ ID NO: 3730 - DNA, 25 bp, SARS Virus
tctccacagatgccgacggcactgg

SEQ ID NO: 3731 - DNA, 25 bp, SARS Virus
ctccacagatgacgacggcactggt

SEQ ID NO: 3732 - DNA, 25 bp, SARS Virus
tccacagatgaccacggcactggta

SEQ ID NO: 3733 - DNA, 25 bp, SARS Virus
ccacagatgacgccggcactggtac

SEQ ID NO: 3734 - DNA, 25 bp, SARS Virus
cacagatgacgacggcactggtact

SEQ ID NO: 3735 - DNA, 25 bp, SARS Virus
acagatgacgaccgcactggtactc

SEQ ID NO: 3736 - DNA, 25 bp, SARS Virus
cagatgacgacgccactggtactcg

SEQ ID NO: 3737 - DNA, 25 bp, SARS Virus
agatgacgacggcactggtactcgt

SEQ ID NO: 3738 - DNA, 25 bp, SARS Virus
gatgacgacggccctggtactcgta

SEQ ID NO: 3739 - DNA, 25 bp, SARS Virus
atgacgacggcactggtactcgtac

SEQ ID NO: 3740 - DNA, 25 bp, SARS Virus
tgacgacggcaccggtactcgtact

SEQ ID NO: 3741 - DNA, 25 bp, SARS Virus
gacgacggcactcgtactcgtactt

SEQ ID NO: 3742 - DNA, 25 bp, SARS Virus
acgacggcactgctactcgtacttt

SEQ ID NO: 3743 - DNA, 25 bp, SARS Virus
cgacggcactggcactcgtacttta

SEQ ID NO: 3744 - DNA, 25 bp, SARS Virus
gacggcactggtcctcgtactttaa

SEQ ID NO: 3745 - DNA, 25 bp, SARS Virus
acggcactggtactcgtactttaac

SEQ ID NO: 3746 - DNA, 25 bp, SARS Virus
cggcactggtacccgtactttaacg

SEQ ID NO: 3747 - DNA, 25 bp, SARS Virus
ggcactggtactcgtactttaacgg

SEQ ID NO: 3748 - DNA, 25 bp, SARS Virus
gcactggtactcctactttaacgga

SEQ ID NO: 3749 - DNA, 25 bp, SARS Virus
cactggtactcgcactttaacggac

SEQ ID NO: 3750 - DNA, 25 bp, SARS Virus
actggtactcgtcctttaacggacc

SEQ ID NO: 3751 - DNA, 25 bp, SARS Virus
ctggtactcgtactttaacggacca

SEQ ID NO: 3752 - DNA, 25 bp, SARS Virus
tggtactcgtaccttaacggaccaa

SEQ ID NO: 3753 - DNA, 25 bp, SARS Virus
ggtactcgtactctaacggaccaag

SEQ ID NO: 3754 - DNA, 25 bp, SARS Virus
gtactcgtacttcaacggaccaagt

SEQ ID NO: 3755 - DNA, 25 bp, SARS Virus
tactcgtactttcacggaccaagtg

SEQ ID NO: 3756 - DNA, 25 bp, SARS Virus
actcgtactttaccggaccaagtga

SEQ ID NO: 3757 - DNA, 25 bp, SARS Virus
ctcgtactttaacggaccaagtgac

SEQ ID NO: 3758 - DNA, 25 bp, SARS Virus
tcgtactttaaccgaccaagtgact

SEQ ID NO: 3759 - DNA, 25 bp, SARS Virus
cgtactttaacgcaccaagtgactc

SEQ ID NO: 3760 - DNA, 25 bp, SARS Virus
gtactttaacggcccaagtgactcg

SEQ ID NO: 3761 - DNA, 25 bp, SARS Virus
tactttaacggaccaagtgactcgc

SEQ ID NO: 3762 - DNA, 25 bp, SARS Virus
actttaacggaccaagtgactcgcg

SEQ ID NO: 3763 - DNA, 25 bp, SARS Virus
ctttaacggacccagtgactcgcga

SEQ ID NO: 3764 - DNA, 25 bp, SARS Virus
tttaacggaccacgtgactcgcgag

SEQ ID NO: 3765 - DNA, 25 bp, SARS Virus
ttaacggaccaactgactcgcgaga

SEQ ID NO: 3766 - DNA, 25 bp, SARS Virus
taacggaccaagcgactcgcgagac

SEQ ID NO: 3767 - DNA, 25 bp, SARS Virus
aacggaccaagtcactcgcgagact

SEQ ID NO: 3768 - DNA, 25 bp, SARS Virus
acggaccaagtgcctcgcgagacta

SEQ ID NO: 3769 - DNA, 25 bp, SARS Virus
cggaccaagtgactcgcgagactat

SEQ ID NO: 3770 - DNA, 25 bp, SARS Virus
ggaccaagtgacccgcgagactatt

SEQ ID NO: 3771 - DNA, 25 bp, SARS Virus
gaccaagtgactcgcgagactattc

SEQ ID NO: 3772 - DNA, 25 bp, SARS Virus
accaagtgactcccgagactattct

SEQ ID NO: 3773 - DNA, 25 bp, SARS Virus
ccaagtgactcgcgagactattctc

SEQ ID NO: 3774 - DNA, 25 bp, SARS Virus
caagtgactcgccagactattctcg

SEQ ID NO: 3775 - DNA, 25 bp, SARS Virus
aagtgactcgcgcgactattctcga

SEQ ID NO: 3776 - DNA, 25 bp, SARS Virus
agtgactcgcgacactattctcgat

SEQ ID NO: 3777 - DNA, 25 bp, SARS Virus
gtgactcgcgagcctattctcgatg

SEQ ID NO: 3778 - DNA, 25 bp, SARS Virus
tgactcgcgagactattctcgatgc

SEQ ID NO: 3779 - DNA, 25 bp, SARS Virus
gactcgcgagaccattctcgatgct

SEQ ID NO: 3780 - DNA, 25 bp, SARS Virus
actcgcgagactcttctcgatgctc

SEQ ID NO: 3781 - DNA, 25 bp, SARS Virus
ctcgcgagactactctcgatgctcg

SEQ ID NO: 3782 - DNA, 25 bp, SARS Virus
tcgcgagactatcctcgatgctcgt

SEQ ID NO: 3783 - DNA, 25 bp, SARS Virus
cgcgagactattctcgatgctcgtg

SEQ ID NO: 3784 - DNA, 25 bp, SARS Virus
gcgagactattcccgatgctcgtgg

SEQ ID NO: 3785 - DNA, 25 bp, SARS Virus
cgagactattctcgatgctcgtggt

SEQ ID NO: 3786 - DNA, 25 bp, SARS Virus
gagactattctccatgctcgtggtc

SEQ ID NO: 3787 - DNA, 25 bp, SARS Virus
agactattctcgctgctcgtggtct

SEQ ID NO: 3788 - DNA, 25 bp, SARS Virus
gactattctcgacgctcgtggtctg

SEQ ID NO: 3789 - DNA, 25 bp, SARS Virus
actattctcgatcctcgtggtctgt

SEQ ID NO: 3790 - DNA, 25 bp, SARS Virus
ctattctcgatgctcgtggtctgtg

SEQ ID NO: 3791 - DNA, 25 bp, SARS Virus
tattctcgatgcccgtggtctgtgg

SEQ ID NO: 3792 - DNA, 25 bp, SARS Virus
attctcgatgctcgtggtctgtggg

SEQ ID NO: 3793 - DNA, 25 bp, SARS Virus
ttctcgatgctcctggtctgtggga

SEQ ID NO: 3794 - DNA, 25 bp, SARS Virus
tctcgatgctcgcggtctgtgggaa

SEQ ID NO: 3795 - DNA, 25 bp, SARS Virus
ctcgatgctcgtcgtctgtgggaag

SEQ ID NO: 3796 - DNA, 25 bp, SARS Virus
tcgatgctcgtgctctgtgggaagc

SEQ ID NO: 3797 - DNA, 25 bp, SARS Virus
cgatgctcgtggcctgtgggaagct

SEQ ID NO: 3798 - DNA, 25 bp, SARS Virus
gatgctcgtggtctgtgggaagctt

SEQ ID NO: 3799 - DNA, 25 bp, SARS Virus
atgctcgtggtccgtgggaagcttt

SEQ ID NO: 3800 - DNA, 25 bp, SARS Virus
tgctcgtggtctctgggaagcttta

SEQ ID NO: 3801 - DNA, 25 bp, SARS Virus
gctcgtggtctgcgggaagctttaa

SEQ ID NO: 3802 - DNA, 25 bp, SARS Virus
ctcgtggtctgtcggaagctttaat

SEQ ID NO: 3803 - DNA, 25 bp, SARS Virus
tcgtggtctgtgcgaagctttaatt

SEQ ID NO: 3804 - DNA, 25 bp, SARS Virus
cgtggtctgtggcaagctttaattc

SEQ ID NO: 3805 - DNA, 25 bp, SARS Virus
gtggtctgtgggcagctttaattct

SEQ ID NO: 3806 - DNA, 25 bp, SARS Virus
tggtctgtgggacgctttaattctc

SEQ ID NO: 3807 - DNA, 25 bp, SARS Virus
ggtctgtgggaacctttaattctca

SEQ ID NO: 3808 - DNA, 25 bp, SARS Virus
gtctgtgggaagctttaattctcac

SEQ ID NO: 3809 - DNA, 25 bp, SARS Virus
tctgtgggaagccttaattctcacg

SEQ ID NO: 3810 - DNA, 25 bp, SARS Virus
ctgtgggaagctctaattctcacgg

SEQ ID NO: 3811 - DNA, 25 bp, SARS Virus
tgtgggaagcttcaattctcacggt

SEQ ID NO: 3812 - DNA, 25 bp, SARS Virus
gtgggaagctttcattctcacggtt

SEQ ID NO: 3813 - DNA, 25 bp, SARS Virus
tgggaagctttacttctcacggttc

SEQ ID NO: 3814 - DNA, 25 bp, SARS Virus
gggaagctttaactctcacggttct

SEQ ID NO: 3815 - DNA, 25 bp, SARS Virus
ggaagctttaatcctcacggttctt

SEQ ID NO: 3816 - DNA, 25 bp, SARS Virus
gaagctttaattctcacggttcttt

SEQ ID NO: 3817 - DNA, 25 bp, SARS Virus
aagctttaattcccacggttcttta

SEQ ID NO: 3818 - DNA, 25 bp, SARS Virus
agctttaattctcacggttctttaa

SEQ ID NO: 3819 - DNA, 25 bp, SARS Virus
gctttaattctcccggttctttaaa

SEQ ID NO: 3820 - DNA, 25 bp, SARS Virus
ctttaattctcacggttctttaaac

SEQ ID NO: 3821 - DNA, 25 bp, SARS Virus
tttaattctcaccgttctttaaact

SEQ ID NO: 3822 - DNA, 25 bp, SARS Virus
ttaattctcacgcttctttaaactg

SEQ ID NO: 3823 - DNA, 25 bp, SARS Virus
taattctcacggctctttaaactgt

SEQ ID NO: 3824 - DNA, 25 bp, SARS Virus
aattctcacggtcctttaaactgtg

SEQ ID NO: 3825 - DNA, 25 bp, SARS Virus
attctcacggttctttaaactgtga

SEQ ID NO: 3826 - DNA, 25 bp, SARS Virus
ttctcacggttccttaaactgtgaa

SEQ ID NO: 3827 - DNA, 25 bp, SARS Virus
tctcacggttctctaaactgtgaaa

SEQ ID NO: 3828 - DNA, 25 bp, SARS Virus
ctcacggttcttcaaactgtgaaag

SEQ ID NO: 3829 - DNA, 25 bp, SARS Virus
tcacggttctttcaactgtgaaagt

SEQ ID NO: 3830 - DNA, 25 bp, SARS Virus
cacggttctttacactgtgaaagtt

SEQ ID NO: 3831 - DNA, 25 bp, SARS Virus
acggttctttaacctgtgaaagttt

SEQ ID NO: 3832 - DNA, 25 bp, SARS Virus
cggttctttaaactgtgaaagtttc

SEQ ID NO: 3833 - DNA, 25 bp, SARS Virus
ggttctttaaaccgtgaaagtttcc

SEQ ID NO: 3834 - DNA, 25 bp, SARS Virus
gttctttaaactctgaaagtttccc

SEQ ID NO: 3835 - DNA, 25 bp, SARS Virus
ttctttaaactgcgaaagtttcccc

SEQ ID NO: 3836 - DNA, 25 bp, SARS Virus
tctttaaactgtcaaagtttcccct

SEQ ID NO: 3837 - DNA, 25 bp, SARS Virus
ctttaaactgtgcaagtttcccctt

SEQ ID NO: 3838 - DNA, 25 bp, SARS Virus
tttaaactgtgacagtttcccctta

SEQ ID NO: 3839 - DNA, 25 bp, SARS Virus
ttaaactgtgaacgtttccccttac

SEQ ID NO: 3840 - DNA, 25 bp, SARS Virus
taaactgtgaaactttccccttacg

SEQ ID NO: 3841 - DNA, 25 bp, SARS Virus
aaactgtgaaagcttccccttacgg

SEQ ID NO: 3842 - DNA, 25 bp, SARS Virus
aactgtgaaagtctccccttacggg

SEQ ID NO: 3843 - DNA, 25 bp, SARS Virus
actgtgaaagttcccccttacgggt

SEQ ID NO: 3844 - DNA, 25 bp, SARS Virus
ctgtgaaagtttccccttacgggtt

SEQ ID NO: 3845 - DNA, 25 bp, SARS Virus
tgtgaaagtttccccttacgggttt

SEQ ID NO: 3846 - DNA, 25 bp, SARS Virus
gtgaaagtttccccttacgggtttc

SEQ ID NO: 3847 - DNA, 25 bp, SARS Virus
tgaaagtttccccttacgggtttca

SEQ ID NO: 3848 - DNA, 25 bp, SARS Virus
gaaagtttccccctacgggtttcaa

SEQ ID NO: 3849 - DNA, 25 bp, SARS Virus
aaagtttcccctcacgggtttcaaa

SEQ ID NO: 3850 - DNA, 25 bp, SARS Virus
aagtttccccttccgggtttcaaac

SEQ ID NO: 3851 - DNA, 25 bp, SARS Virus
agtttccccttacgggtttcaaaca

SEQ ID NO: 3852 - DNA, 25 bp, SARS Virus
gtttccccttaccggtttcaaacac

SEQ ID NO: 3853 - DNA, 25 bp, SARS Virus
tttccccttacgcgtttcaaacaca

SEQ ID NO: 3854 - DNA, 25 bp, SARS Virus
ttccccttacggctttcaaacacaa

SEQ ID NO: 3855 - DNA, 25 bp, SARS Virus
tccccttacgggcttcaaacacaaa

SEQ ID NO: 3856 - DNA, 25 bp, SARS Virus
ccccttacgggtctcaaacacaaag

SEQ ID NO: 3857 - DNA, 25 bp, SARS Virus
cccttacgggttccaaacacaaagg

SEQ ID NO: 3858 - DNA, 25 bp, SARS Virus
ccttacgggtttcaaacacaaagga

SEQ ID NO: 3859 - DNA, 25 bp, SARS Virus
cttacgggtttccaacacaaaggag

SEQ ID NO: 3860 - DNA, 25 bp, SARS Virus
ttacgggtttcacacacaaaggaga

SEQ ID NO: 3861 - DNA, 25 bp, SARS Virus
tacgggtttcaaccacaaaggagaa

SEQ ID NO: 3862 - DNA, 25 bp, SARS Virus
acgggtttcaaacacaaaggagaat

SEQ ID NO: 3863 - DNA, 25 bp, SARS Virus
cgggtttcaaacccaaaggagaatt

SEQ ID NO: 3864 - DNA, 25 bp, SARS Virus
gggtttcaaacacaaaggagaattg

SEQ ID NO: 3865 - DNA, 25 bp, SARS Virus
ggtttcaaacaccaaggagaattga

SEQ ID NO: 3866 - DNA, 25 bp, SARS Virus
gtttcaaacacacaggagaattgag

SEQ ID NO: 3867 - DNA, 25 bp, SARS Virus
tttcaaacacaacggagaattgagt

SEQ ID NO: 3868 - DNA, 25 bp, SARS Virus
ttcaaacacaaacgagaattgagtt

SEQ ID NO: 3869 - DNA, 25 bp, SARS Virus
tcaaacacaaagcagaattgagttt

SEQ ID NO: 3870 - DNA, 25 bp, SARS Virus
caaacacaaaggcgaattgagtttt

SEQ ID NO: 3871 - DNA, 25 bp, SARS Virus
aaacacaaaggacaattgagttttc

SEQ ID NO: 3872 - DNA, 25 bp, SARS Virus
aacacaaaggagcattgagttttca

SEQ ID NO: 3873 - DNA, 25 bp, SARS Virus
acacaaaggagacttgagttttcag

SEQ ID NO: 3874 - DNA, 25 bp, SARS Virus
cacaaaggagaactgagttttcagt

SEQ ID NO: 3875 - DNA, 25 bp, SARS Virus
acaaaggagaatcgagttttcagtt

SEQ ID NO: 3876 - DNA, 25 bp, SARS Virus
caaaggagaattcagttttcagttt

SEQ ID NO: 3877 - DNA, 25 bp, SARS Virus
aaaggagaattgcgttttcagtttc

SEQ ID NO: 3878 - DNA, 25 bp, SARS Virus
aaggagaattgacttttcagtttca

SEQ ID NO: 3879 - DNA, 25 bp, SARS Virus
aggagaattgagctttcagtttcag

SEQ ID NO: 3880 - DNA, 25 bp, SARS Virus
ggagaattgagtcttcagtttcagt

SEQ ID NO: 3881 - DNA, 25 bp, SARS Virus
gagaattgagttctcagtttcagta

SEQ ID NO: 3882 - DNA, 25 bp, SARS Virus
agaattgagtttccagtttcagtaa

SEQ ID NO: 3883 - DNA, 25 bp, SARS Virus
gaattgagttttcagtttcagtaag

SEQ ID NO: 3884 - DNA, 25 bp, SARS Virus
aattgagttttccgtttcagtaagt

SEQ ID NO: 3885 - DNA, 25 bp, SARS Virus
attgagttttcactttcagtaagtt

SEQ ID NO: 3886 - DNA, 25 bp, SARS Virus
ttgagttttcagcttcagtaagttg

SEQ ID NO: 3887 - DNA, 25 bp, SARS Virus
tgagttttcagtctcagtaagttgg

SEQ ID NO: 3888 - DNA, 25 bp, SARS Virus
gagttttcagttccagtaagttggt

SEQ ID NO: 3889 - DNA, 25 bp, SARS Virus
agttttcagtttcagtaagttggtg

SEQ ID NO: 3890 - DNA, 25 bp, SARS Virus
gttttcagtttccgtaagttggtgc

SEQ ID NO: 3891 - DNA, 25 bp, SARS Virus
ttttcagtttcactaagttggtgca

SEQ ID NO: 3892 - DNA, 25 bp, SARS Virus
tttcagtttcagcaagttggtgcac

SEQ ID NO: 3893 - DNA, 25 bp, SARS Virus
ttcagtttcagtcagttggtgcaca

SEQ ID NO: 3894 - DNA, 25 bp, SARS Virus
tcagtttcagtacgttggtgcacaa

SEQ ID NO: 3895 - DNA, 25 bp, SARS Virus
cagtttcagtaacttggtgcacaac

SEQ ID NO: 3896 - DNA, 25 bp, SARS Virus
agtttcagtaagctggtgcacaact

SEQ ID NO: 3897 - DNA, 25 bp, SARS Virus
gtttcagtaagtcggtgcacaactt

SEQ ID NO: 3898 - DNA, 25 bp, SARS Virus
tttcagtaagttcgtgcacaacttt

SEQ ID NO: 3899 - DNA, 25 bp, SARS Virus
ttcagtaagttgctgcacaactttt

SEQ ID NO: 3900 - DNA, 25 bp, SARS Virus
tcagtaagttggcgcacaacttttc

SEQ ID NO: 3901 - DNA, 25 bp, SARS Virus
cagtaagttggtccacaacttttct

SEQ ID NO: 3902 - DNA, 25 bp, SARS Virus
agtaagttggtgcacaacttttctt

SEQ ID NO: 3903 - DNA, 25 bp, SARS Virus
gtaagttggtgcccaacttttcttt

SEQ ID NO: 3904 - DNA, 25 bp, SARS Virus
taagttggtgcacaacttttctttt

SEQ ID NO: 3905 - DNA, 25 bp, SARS Virus
aagttggtgcaccacttttcttttt

SEQ ID NO: 3906 - DNA, 25 bp, SARS Virus
agttggtgcacaccttttctttttc

SEQ ID NO: 3907 - DNA, 25 bp, SARS Virus
gttggtgcacaacttttctttttct

SEQ ID NO: 3908 - DNA, 25 bp, SARS Virus
ttggtgcacaacctttctttttctg

SEQ ID NO: 3909 - DNA, 25 bp, SARS Virus
tggtgcacaactcttctttttctga

SEQ ID NO: 3910 - DNA, 25 bp, SARS Virus
ggtgcacaacttctctttttctgac

SEQ ID NO: 3911 - DNA, 25 bp, SARS Virus
gtgcacaactttcctttttctgact

SEQ ID NO: 3912 - DNA, 25 bp, SARS Virus
tgcacaacttttctttttctgactc

SEQ ID NO: 3913 - DNA, 25 bp, SARS Virus
gcacaacttttccttttctgactcc

SEQ ID NO: 3914 - DNA, 25 bp, SARS Virus
cacaacttttctctttctgactccc

SEQ ID NO: 3915 - DNA, 25 bp, SARS Virus
acaacttttcttcttctgactccca

SEQ ID NO: 3916 - DNA, 25 bp, SARS Virus
caacttttctttctctgactcccaa

SEQ ID NO: 3917 - DNA, 25 bp, SARS Virus
aacttttcttttcctgactcccaaa

SEQ ID NO: 3918 - DNA, 25 bp, SARS Virus
acttttctttttctgactcccaaag

SEQ ID NO: 3919 - DNA, 25 bp, SARS Virus
cttttctttttccgactcccaaagt

SEQ ID NO: 3920 - DNA, 25 bp, SARS Virus
ttttctttttctcactcccaaagta

SEQ ID NO: 3921 - DNA, 25 bp, SARS Virus
tttctttttctgcctcccaaagtac

SEQ ID NO: 3922 - DNA, 25 bp, SARS Virus
ttctttttctgactcccaaagtacc

SEQ ID NO: 3923 - DNA, 25 bp, SARS Virus
tctttttctgacccccaaagtaccc

SEQ ID NO: 3924 - DNA, 25 bp, SARS Virus
ctttttctgactcccaaagtacccc

SEQ ID NO: 3925 - DNA, 25 bp, SARS Virus
tttttctgactcccaaagtaccccg

SEQ ID NO: 3926 - DNA, 25 bp, SARS Virus
ttttctgactcccaaagtaccccgc

SEQ ID NO: 3927 - DNA, 25 bp, SARS Virus
tttctgactccccaagtaccccgca

SEQ ID NO: 3928 - DNA, 25 bp, SARS Virus
ttctgactcccacagtaccccgcat

SEQ ID NO: 3929 - DNA, 25 bp, SARS Virus
tctgactcccaacgtaccccgcata

SEQ ID NO: 3930 - DNA, 25 bp, SARS Virus
ctgactcccaaactaccccgcatat

SEQ ID NO: 3931 - DNA, 25 bp, SARS Virus
tgactcccaaagcaccccgcatatg

SEQ ID NO: 3932 - DNA, 25 bp, SARS Virus
gactcccaaagtcccccgcatatgc

SEQ ID NO: 3933 - DNA, 25 bp, SARS Virus
actcccaaagtaccccgcatatgcg

SEQ ID NO: 3934 - DNA, 25 bp, SARS Virus
ctcccaaagtaccccgcatatgcga

SEQ ID NO: 3935 - DNA, 25 bp, SARS Virus
tcccaaagtaccccgcatatgcgag

SEQ ID NO: 3936 - DNA, 25 bp, SARS Virus
cccaaagtaccccgcatatgcgaga

SEQ ID NO: 3937 - DNA, 25 bp, SARS Virus
ccaaagtaccccccatatgcgagac

SEQ ID NO: 3938 - DNA, 25 bp, SARS Virus
caaagtaccccgcatatgcgagaca

SEQ ID NO: 3939 - DNA, 25 bp, SARS Virus
aaagtaccccgcctatgcgagacac

SEQ ID NO: 3940 - DNA, 25 bp, SARS Virus
aagtaccccgcacatgcgagacaca

SEQ ID NO: 3941 - DNA, 25 bp, SARS Virus
agtaccccgcatctgcgagacacat

SEQ ID NO: 3942 - DNA, 25 bp, SARS Virus
gtaccccgcatacgcgagacacatg

SEQ ID NO: 3943 - DNA, 25 bp, SARS Virus
taccccgcatatccgagacacatgg

SEQ ID NO: 3944 - DNA, 25 bp, SARS Virus
accccgcatatgcgagacacatggg

SEQ ID NO: 3945 - DNA, 25 bp, SARS Virus
ccccgcatatgccagacacatggga

SEQ ID NO: 3946 - DNA, 25 bp, SARS Virus
cccgcatatgcgcgacacatgggac

SEQ ID NO: 3947 - DNA, 25 bp, SARS Virus
ccgcatatgcgacacacatgggaca

SEQ ID NO: 3948 - DNA, 25 bp, SARS Virus
cgcatatgcgagccacatgggacaa

SEQ ID NO: 3949 - DNA, 25 bp, SARS Virus
gcatatgcgagacacatgggacaac

SEQ ID NO: 3950 - DNA, 25 bp, SARS Virus
catatgcgagacccatgggacaacg

SEQ ID NO: 3951 - DNA, 25 bp, SARS Virus
atatgcgagacacatgggacaacgt

SEQ ID NO: 3952 - DNA, 25 bp, SARS Virus
tatgcgagacacctgggacaacgta

SEQ ID NO: 3953 - DNA, 25 bp, SARS Virus
atgcgagacacacgggacaacgtag

SEQ ID NO: 3954 - DNA, 25 bp, SARS Virus
tgcgagacacatcggacaacgtaga

SEQ ID NO: 3955 - DNA, 25 bp, SARS Virus
gcgagacacatgcgacaacgtagag

SEQ ID NO: 3956 - DNA, 25 bp, SARS Virus
cgagacacatggcacaacgtagagg

SEQ ID NO: 3957 - DNA, 25 bp, SARS Virus
gagacacatgggccaacgtagaggt

SEQ ID NO: 3958 - DNA, 25 bp, SARS Virus
agacacatgggacaacgtagaggtg

SEQ ID NO: 3959 - DNA, 25 bp, SARS Virus
gacacatgggaccacgtagaggtgt

SEQ ID NO: 3960 - DNA, 25 bp, SARS Virus
acacatgggacaccgtagaggtgtc

SEQ ID NO: 3961 - DNA, 25 bp, SARS Virus
cacatgggacaacgtagaggtgtcc

SEQ ID NO: 3962 - DNA, 25 bp, SARS Virus
acatgggacaacctagaggtgtcct

SEQ ID NO: 3963 - DNA, 25 bp, SARS Virus
catgggacaacgcagaggtgtcctc

SEQ ID NO: 3964 - DNA, 25 bp, SARS Virus
atgggacaacgtcgaggtgtcctca

SEQ ID NO: 3965 - DNA, 25 bp, SARS Virus
tgggacaacgtacaggtgtcctcac

SEQ ID NO: 3966 - DNA, 25 bp, SARS Virus
gggacaacgtagcggtgtcctcaca

SEQ ID NO: 3967 - DNA, 25 bp, SARS Virus
ggacaacgtagacgtgtcctcacat

SEQ ID NO: 3968 - DNA, 25 bp, SARS Virus
gacaacgtagagctgtcctcacatt

SEQ ID NO: 3969 - DNA, 25 bp, SARS Virus
acaacgtagaggcgtcctcacattg

SEQ ID NO: 3970 - DNA, 25 bp, SARS Virus
caacgtagaggtctcctcacattgt

SEQ ID NO: 3971 - DNA, 25 bp, SARS Virus
aacgtagaggtgccctcacattgtt

SEQ ID NO: 3972 - DNA, 25 bp, SARS Virus
acgtagaggtgtcctcacattgtta

SEQ ID NO: 3973 - DNA, 25 bp, SARS Virus
cgtagaggtgtcctcacattgttat

SEQ ID NO: 3974 - DNA, 25 bp, SARS Virus
gtagaggtgtccccacattgttata

SEQ ID NO: 3975 - DNA, 25 bp, SARS Virus
tagaggtgtcctcacattgttatac

SEQ ID NO: 3976 - DNA, 25 bp, SARS Virus
agaggtgtcctcccattgttatacg

SEQ ID NO: 3977 - DNA, 25 bp, SARS Virus
gaggtgtcctcacattgttatacgt

SEQ ID NO: 3978 - DNA, 25 bp, SARS Virus
aggtgtcctcaccttgttatacgtg

SEQ ID NO: 3979 - DNA, 25 bp, SARS Virus
ggtgtcctcacactgttatacgtga

SEQ ID NO: 3980 - DNA, 25 bp, SARS Virus
gtgtcctcacatcgttatacgtgaa

SEQ ID NO: 3981 - DNA, 25 bp, SARS Virus
tgtcctcacattcttatacgtgaac

SEQ ID NO: 3982 - DNA, 25 bp, SARS Virus
gtcctcacattgctatacgtgaaca

SEQ ID NO: 3983 - DNA, 25 bp, SARS Virus
tcctcacattgtcatacgtgaacag

SEQ ID NO: 3984 - DNA, 25 bp, SARS Virus
cctcacattgttctacgtgaacaga

SEQ ID NO: 3985 - DNA, 25 bp, SARS Virus
ctcacattgttacacgtgaacagat

SEQ ID NO: 3986 - DNA, 25 bp, SARS Virus
tcacattgttatccgtgaacagatg

SEQ ID NO: 3987 - DNA, 25 bp, SARS Virus
cacattgttatacgtgaacagatgg

SEQ ID NO: 3988 - DNA, 25 bp, SARS Virus
acattgttatacctgaacagatgga

SEQ ID NO: 3989 - DNA, 25 bp, SARS Virus
cattgttatacgcgaacagatggaa

SEQ ID NO: 3990 - DNA, 25 bp, SARS Virus
attgttatacgtcaacagatggaac

SEQ ID NO: 3991 - DNA, 25 bp, SARS Virus
ttgttatacgtgcacagatggaact

SEQ ID NO: 3992 - DNA, 25 bp, SARS Virus
tgttatacgtgaccagatggaacta

SEQ ID NO: 3993 - DNA, 25 bp, SARS Virus
gttatacgtgaacagatggaactac

SEQ ID NO: 3994 - DNA, 25 bp, SARS Virus
ttatacgtgaaccgatggaactact

SEQ ID NO: 3995 - DNA, 25 bp, SARS Virus
tatacgtgaacacatggaactactt

SEQ ID NO: 3996 - DNA, 25 bp, SARS Virus
atacgtgaacagctggaactacttt

SEQ ID NO: 3997 - DNA, 25 bp, SARS Virus
tacgtgaacagacggaactacttta

SEQ ID NO: 3998 - DNA, 25 bp, SARS Virus
acgtgaacagatcgaactactttac

SEQ ID NO: 3999 - DNA, 25 bp, SARS Virus
cgtgaacagatgcaactactttaca

SEQ ID NO: 4000 - DNA, 25 bp, SARS Virus
gtgaacagatggcactactttacat

SEQ ID NO: 4001 - DNA, 25 bp, SARS Virus
tgaacagatggacctactttacatt

SEQ ID NO: 4002 - DNA, 25 bp, SARS Virus
gaacagatggaactactttacatta

SEQ ID NO: 4003 - DNA, 25 bp, SARS Virus
aacagatggaaccactttacattag

SEQ ID NO: 4004 - DNA, 25 bp, SARS Virus
acagatggaactcctttacattagt

SEQ ID NO: 4005 - DNA, 25 bp, SARS Virus
cagatggaactactttacattagta

SEQ ID NO: 4006 - DNA, 25 bp, SARS Virus
agatggaactaccttacattagtaa

SEQ ID NO: 4007 - DNA, 25 bp, SARS Virus
gatggaactactctacattagtaac

SEQ ID NO: 4008 - DNA, 25 bp, SARS Virus
atggaactacttcacattagtaacg

SEQ ID NO: 4009 - DNA, 25 bp, SARS Virus
tggaactactttccattagtaacgc

SEQ ID NO: 4010 - DNA, 25 bp, SARS Virus
ggaactactttacattagtaacgct

SEQ ID NO: 4011 - DNA, 25 bp, SARS Virus
gaactactttaccttagtaacgcta

SEQ ID NO: 4012 - DNA, 25 bp, SARS Virus
aactactttacactagtaacgctac

SEQ ID NO: 4013 - DNA, 25 bp, SARS Virus
actactttacatcagtaacgctact

SEQ ID NO: 4014 - DNA, 25 bp, SARS Virus
ctactttacattcgtaacgctactt

SEQ ID NO: 4015 - DNA, 25 bp, SARS Virus
tactttacattactaacgctacttc

SEQ ID NO: 4016 - DNA, 25 bp, SARS Virus
actttacattagcaacgctacttca

SEQ ID NO: 4017 - DNA, 25 bp, SARS Virus
ctttacattagtcacgctacttcaa

SEQ ID NO: 4018 - DNA, 25 bp, SARS Virus
tttacattagtaccgctacttcaaa

SEQ ID NO: 4019 - DNA, 25 bp, SARS Virus
ttacattagtaacgctacttcaaag

SEQ ID NO: 4020 - DNA, 25 bp, SARS Virus
tacattagtaaccctacttcaaagt

SEQ ID NO: 4021 - DNA, 25 bp, SARS Virus
acattagtaacgctacttcaaagta

SEQ ID NO: 4022 - DNA, 25 bp, SARS Virus
cattagtaacgccacttcaaagtac

SEQ ID NO: 4023 - DNA, 25 bp, SARS Virus
attagtaacgctccttcaaagtacc

SEQ ID NO: 4024 - DNA, 25 bp, SARS Virus
ttagtaacgctacttcaaagtaccg

SEQ ID NO: 4025 - DNA, 25 bp, SARS Virus
tagtaacgctacctcaaagtaccgt

SEQ ID NO: 4026 - DNA, 25 bp, SARS Virus
agtaacgctactccaaagtaccgtc

SEQ ID NO: 4027 - DNA, 25 bp, SARS Virus
gtaacgctacttcaaagtaccgtct

SEQ ID NO: 4028 - DNA, 25 bp, SARS Virus
taacgctacttccaagtaccgtctg

SEQ ID NO: 4029 - DNA, 25 bp, SARS Virus
aacgctacttcacagtaccgtctgc

SEQ ID NO: 4030 - DNA, 25 bp, SARS Virus
acgctacttcaacgtaccgtctgca

SEQ ID NO: 4031 - DNA, 25 bp, SARS Virus
cgctacttcaaactaccgtctgcac

SEQ ID NO: 4032 - DNA, 25 bp, SARS Virus
gctacttcaaagcaccgtctgcacg

SEQ ID NO: 4033 - DNA, 25 bp, SARS Virus
tcgtaccgtcacgacgtgaggcact

SEQ ID NO: 4034 - DNA, 25 bp, SARS Virus
cgtaccgtcaccgcgtgaggcactt

SEQ ID NO: 4035 - DNA, 25 bp, SARS Virus
gtaccgtcaccaggtgaggcacttg

SEQ ID NO: 4036 - DNA, 25 bp, SARS Virus
taccgtcaccacgtgaggcacttga

SEQ ID NO: 4037 - DNA, 25 bp, SARS Virus
accgtcaccacgggaggcacttgag

SEQ ID NO: 4038 - DNA, 25 bp, SARS Virus
ccgtcaccacgtgaggcacttgagt

SEQ ID NO: 4039 - DNA, 25 bp, SARS Virus
cgtcaccacgtggggcacttgagtg

SEQ ID NO: 4040 - DNA, 25 bp, SARS Virus
gtcaccacgtgaggcacttgagtga

SEQ ID NO: 4041 - DNA, 25 bp, SARS Virus
tcaccacgtgaggcacttgagtgag

SEQ ID NO: 4042 - DNA, 25 bp, SARS Virus
caccacgtgagggacttgagtgagc

SEQ ID NO: 4043 - DNA, 25 bp, SARS Virus
accacgtgaggcgcttgagtgagca

SEQ ID NO: 4044 - DNA, 25 bp, SARS Virus
ccacgtgaggcagttgagtgagcac

SEQ ID NO: 4045 - DNA, 25 bp, SARS Virus
cacgtgaggcacgtgagtgagcact

SEQ ID NO: 4046 - DNA, 25 bp, SARS Virus
acgtgaggcactggagtgagcactc

SEQ ID NO: 4047 - DNA, 25 bp, SARS Virus
cgtgaggcacttgagtgagcactcg

SEQ ID NO: 4048 - DNA, 25 bp, SARS Virus
gtgaggcacttgggtgagcactcga

SEQ ID NO: 4049 - DNA, 25 bp, SARS Virus
tgaggcacttgagtgagcactcgag

SEQ ID NO: 4050 - DNA, 25 bp, SARS Virus
gaggcacttgagggagcactcgagt

SEQ ID NO: 4051 - DNA, 25 bp, SARS Virus
aggcacttgagtgagcactcgagtt

SEQ ID NO: 4052 - DNA, 25 bp, SARS Virus
ggcacttgagtgggcactcgagtta

SEQ ID NO: 4053 - DNA, 25 bp, SARS Virus
gcacttgagtgagcactcgagttac

SEQ ID NO: 4054 - DNA, 25 bp, SARS Virus
cacttgagtgaggactcgagttacc

SEQ ID NO: 4055 - DNA, 25 bp, SARS Virus
acttgagtgagcgctcgagttacct

SEQ ID NO: 4056 - DNA, 25 bp, SARS Virus
cttgagtgagcagtcgagttacctc

SEQ ID NO: 4057 - DNA, 25 bp, SARS Virus
ttgagtgagcacgcgagttacctcc

SEQ ID NO: 4058 - DNA, 25 bp, SARS Virus
tgagtgagcactggagttacctcca

SEQ ID NO: 4059 - DNA, 25 bp, SARS Virus
gagtgagcactcgagttacctccac

SEQ ID NO: 4060 - DNA, 25 bp, SARS Virus
agtgagcactcgggttacctccacg

SEQ ID NO: 4061 - DNA, 25 bp, SARS Virus
gtgagcactcgagttacctccacgt

SEQ ID NO: 4062 - DNA, 25 bp, SARS Virus
tgagcactcgaggtacctccacgtc

SEQ ID NO: 4063 - DNA, 25 bp, SARS Virus
gagcactcgagtgacctccacgtca

SEQ ID NO: 4064 - DNA, 25 bp, SARS Virus
agcactcgagttgcctccacgtcag

SEQ ID NO: 4065 - DNA, 25 bp, SARS Virus
gcactcgagttagctccacgtcagt

SEQ ID NO: 4066 - DNA, 25 bp, SARS Virus
cactcgagttacgtccacgtcagtg

SEQ ID NO: 4067 - DNA, 25 bp, SARS Virus
actcgagttaccgccacgtcagtga

SEQ ID NO: 4068 - DNA, 25 bp, SARS Virus
ctcgagttacctgcacgtcagtgag

SEQ ID NO: 4069 - DNA, 25 bp, SARS Virus
tcgagttacctcgacgtcagtgagc

SEQ ID NO: 4070 - DNA, 25 bp, SARS Virus
cgagttacctccgcgtcagtgagcg

SEQ ID NO: 4071 - DNA, 25 bp, SARS Virus
gagttacctccaggtcagtgagcga

SEQ ID NO: 4072 - DNA, 25 bp, SARS Virus
agttacctccacgtcagtgagcgat

SEQ ID NO: 4073 - DNA, 25 bp, SARS Virus
gttacctccacggcagtgagcgata

SEQ ID NO: 4074 - DNA, 25 bp, SARS Virus
ttacctccacgtgagtgagcgatac

SEQ ID NO: 4075 - DNA, 25 bp, SARS Virus
tacctccacgtcggtgagcgataca

SEQ ID NO: 4076 - DNA, 25 bp, SARS Virus
acctccacgtcagtgagcgatacag

SEQ ID NO: 4077 - DNA, 25 bp, SARS Virus
cctccacgtcagggagcgatacagc

SEQ ID NO: 4078 - DNA, 25 bp, SARS Virus
ctccacgtcagtgagcgatacagct

SEQ ID NO: 4079 - DNA, 25 bp, SARS Virus
tccacgtcagtgggcgatacagctg

SEQ ID NO: 4080 - DNA, 25 bp, SARS Virus
ccacgtcagtgagcgatacagctgt

SEQ ID NO: 4081 - DNA, 25 bp, SARS Virus
cacgtcagtgagggatacagctgtt

SEQ ID NO: 4082 - DNA, 25 bp, SARS Virus
acgtcagtgagcgatacagctgttg

SEQ ID NO: 4083 - DNA, 25 bp, SARS Virus
cgtcagtgagcggtacagctgttgt

SEQ ID NO: 4084 - DNA, 25 bp, SARS Virus
gtcagtgagcgagacagctgttgtt

SEQ ID NO: 4085 - DNA, 25 bp, SARS Virus
tcagtgagcgatgcagctgttgtta

SEQ ID NO: 4086 - DNA, 25 bp, SARS Virus
cagtgagcgatagagctgttgttaa

SEQ ID NO: 4087 - DNA, 25 bp, SARS Virus
agtgagcgatacggctgttgttaaa

SEQ ID NO: 4088 - DNA, 25 bp, SARS Virus
gtgagcgatacagctgttgttaaag

SEQ ID NO: 4089 - DNA, 25 bp, SARS Virus
tgagcgatacaggtgttgttaaaga

SEQ ID NO: 4090 - DNA, 25 bp, SARS Virus
gagcgatacagcggttgttaaagac

SEQ ID NO: 4091 - DNA, 25 bp, SARS Virus
agcgatacagctgttgttaaagaca

SEQ ID NO: 4092 - DNA, 25 bp, SARS Virus
gcgatacagctggtgttaaagacac

SEQ ID NO: 4093 - DNA, 25 bp, SARS Virus
cgatacagctgtggttaaagacacc

SEQ ID NO: 4094 - DNA, 25 bp, SARS Virus
gatacagctgttgttaaagacaccg

SEQ ID NO: 4095 - DNA, 25 bp, SARS Virus
atacagctgttggtaaagacaccgg

SEQ ID NO: 4096 - DNA, 25 bp, SARS Virus
tacagctgttgtgaaagacaccggg

SEQ ID NO: 4097 - DNA, 25 bp, SARS Virus
acagctgttgttgaagacaccgggt

SEQ ID NO: 4098 - DNA, 25 bp, SARS Virus
cagctgttgttagagacaccgggtc

SEQ ID NO: 4099 - DNA, 25 bp, SARS Virus
agctgttgttaaggacaccgggtct

SEQ ID NO: 4100 - DNA, 25 bp, SARS Virus
gctgttgttaaagacaccgggtcta

SEQ ID NO: 4101 - DNA, 25 bp, SARS Virus
ctgttgttaaaggcaccgggtctac

SEQ ID NO: 4102 - DNA, 25 bp, SARS Virus
tgttgttaaagagaccgggtctacc

SEQ ID NO: 4103 - DNA, 25 bp, SARS Virus
gttgttaaagacgccgggtctaccc

SEQ ID NO: 4104 - DNA, 25 bp, SARS Virus
ttgttaaagacagcgggtctaccca

SEQ ID NO: 4105 - DNA, 25 bp, SARS Virus
tgttaaagacacggggtctacccat

SEQ ID NO: 4106 - DNA, 25 bp, SARS Virus
gttaaagacaccgggtctacccatg

SEQ ID NO: 4107 - DNA, 25 bp, SARS Virus
ttaaagacaccgggtctacccatgg

SEQ ID NO: 4108 - DNA, 25 bp, SARS Virus
taaagacaccgggtctacccatggg

SEQ ID NO: 4109 - DNA, 25 bp, SARS Virus
aaagacaccggggctacccatggga

SEQ ID NO: 4110 - DNA, 25 bp, SARS Virus
aagacaccgggtgtacccatgggag

SEQ ID NO: 4111 - DNA, 25 bp, SARS Virus
agacaccgggtcgacccatgggaga

SEQ ID NO: 4112 - DNA, 25 bp, SARS Virus
gacaccgggtctgcccatgggagaa

SEQ ID NO: 4113 - DNA, 25 bp, SARS Virus
acaccgggtctagccatgggagaac

SEQ ID NO: 4114 - DNA, 25 bp, SARS Virus
caccgggtctacgcatgggagaact

SEQ ID NO: 4115 - DNA, 25 bp, SARS Virus
accgggtctaccgatgggagaacta

SEQ ID NO: 4116 - DNA, 25 bp, SARS Virus
ccgggtctacccgtgggagaactaa

SEQ ID NO: 4117 - DNA, 25 bp, SARS Virus
cgggtctacccaggggagaactaac

SEQ ID NO: 4118 - DNA, 25 bp, SARS Virus
gggtctacccatgggagaactaacg

SEQ ID NO: 4119 - DNA, 25 bp, SARS Virus
ggtctacccatgggagaactaacgt

SEQ ID NO: 4120 - DNA, 25 bp, SARS Virus
gtctacccatgggagaactaacgta

SEQ ID NO: 4121 - DNA, 25 bp, SARS Virus
tctacccatgggggaactaacgtag

SEQ ID NO: 4122 - DNA, 25 bp, SARS Virus
ctacccatgggagaactaacgtagt

SEQ ID NO: 4123 - DNA, 25 bp, SARS Virus
tacccatgggaggactaacgtagtt

SEQ ID NO: 4124 - DNA, 25 bp, SARS Virus
acccatgggagagctaacgtagttt

SEQ ID NO: 4125 - DNA, 25 bp, SARS Virus
cccatgggagaagtaacgtagtttc

SEQ ID NO: 4126 - DNA, 25 bp, SARS Virus
ccatgggagaacgaacgtagtttct

SEQ ID NO: 4127 - DNA, 25 bp, SARS Virus
catgggagaactgacgtagtttcta

SEQ ID NO: 4128 - DNA, 25 bp, SARS Virus
atgggagaactagcgtagtttctaa

SEQ ID NO: 4129 - DNA, 25 bp, SARS Virus
tgggagaactaaggtagtttctaaa

SEQ ID NO: 4130 - DNA, 25 bp, SARS Virus
gggagaactaacgtagtttctaaaa

SEQ ID NO: 4131 - DNA, 25 bp, SARS Virus
ggagaactaacggagtttctaaaag

SEQ ID NO: 4132 - DNA, 25 bp, SARS Virus
gagaactaacgtggtttctaaaaga

SEQ ID NO: 4133 - DNA, 25 bp, SARS Virus
agaactaacgtagtttctaaaagag

SEQ ID NO: 4134 - DNA, 25 bp, SARS Virus
gaactaacgtaggttctaaaagagc

SEQ ID NO: 4135 - DNA, 25 bp, SARS Virus
aactaacgtagtgtctaaaagagcg

SEQ ID NO: 4136 - DNA, 25 bp, SARS Virus
actaacgtagttgctaaaagagcgt

SEQ ID NO: 4137 - DNA, 25 bp, SARS Virus
ctaacgtagtttgtaaaagagcgtg

SEQ ID NO: 4138 - DNA, 25 bp, SARS Virus
taacgtagtttcgaaaagagcgtgc

SEQ ID NO: 4139 - DNA, 25 bp, SARS Virus
aacgtagtttctgaaagagcgtgcg

SEQ ID NO: 4140 - DNA, 25 bp, SARS Virus
acgtagtttctagaagagcgtgcgc

SEQ ID NO: 4141 - DNA, 25 bp, SARS Virus
cgtagtttctaagagagcgtgcgcg

SEQ ID NO: 4142 - DNA, 25 bp, SARS Virus
gtagtttctaaaggagcgtgcgcgc

SEQ ID NO: 4143 - DNA, 25 bp, SARS Virus
tagtttctaaaagagcgtgcgcgcc

SEQ ID NO: 4144 - DNA, 25 bp, SARS Virus
agtttctaaaagggcgtgcgcgccc

SEQ ID NO: 4145 - DNA, 25 bp, SARS Virus
gtttctaaaagagcgtgcgcgcccg

SEQ ID NO: 4146 - DNA, 25 bp, SARS Virus
tttctaaaagagggtgcgcgcccgt

SEQ ID NO: 4147 - DNA, 25 bp, SARS Virus
ttctaaaagagcgtgcgcgcccgtt

SEQ ID NO: 4148 - DNA, 25 bp, SARS Virus
tctaaaagagcgggcgcgcccgttc

SEQ ID NO: 4149 - DNA, 25 bp, SARS Virus
ctaaaagagcgtgcgcgcccgttca

SEQ ID NO: 4150 - DNA, 25 bp, SARS Virus
taaaagagcgtgggcgcccgttcag

SEQ ID NO: 4151 - DNA, 25 bp, SARS Virus
aaaagagcgtgcgcgcccgttcagt

SEQ ID NO: 4152 - DNA, 25 bp, SARS Virus
aaagagcgtgcgggcccgttcagtt

SEQ ID NO: 4153 - DNA, 25 bp, SARS Virus
aagagcgtgcgcgcccgttcagtta

SEQ ID NO: 4154 - DNA, 25 bp, SARS Virus
agagcgtgcgcggccgttcagttac

SEQ ID NO: 4155 - DNA, 25 bp, SARS Virus
gagcgtgcgcgcgcgttcagttaca

SEQ ID NO: 4156 - DNA, 25 bp, SARS Virus
agcgtgcgcgccggttcagttacac

SEQ ID NO: 4157 - DNA, 25 bp, SARS Virus
gcgtgcgcgcccgttcagttacacg

SEQ ID NO: 4158 - DNA, 25 bp, SARS Virus
cgtgcgcgcccggtcagttacacgt

SEQ ID NO: 4159 - DNA, 25 bp, SARS Virus
gtgcgcgcccgtgcagttacacgtg

SEQ ID NO: 4160 - DNA, 25 bp, SARS Virus
tgcgcgcccgttgagttacacgtga

SEQ ID NO: 4161 - DNA, 25 bp, SARS Virus
gcgcgcccgttcggttacacgtgag

SEQ ID NO: 4162 - DNA, 25 bp, SARS Virus
cgcgcccgttcagttacacgtgaga

SEQ ID NO: 4163 - DNA, 25 bp, SARS Virus
gcgcccgttcaggtacacgtgagaa

SEQ ID NO: 4164 - DNA, 25 bp, SARS Virus
cgcccgttcagtgacacgtgagaaa

SEQ ID NO: 4165 - DNA, 25 bp, SARS Virus
gcccgttcagttgcacgtgagaaag

SEQ ID NO: 4166 - DNA, 25 bp, SARS Virus
cccgttcagttagacgtgagaaagg

SEQ ID NO: 4167 - DNA, 25 bp, SARS Virus
ccgttcagttacgcgtgagaaaggc

SEQ ID NO: 4168 - DNA, 25 bp, SARS Virus
cgttcagttacaggtgagaaaggct

SEQ ID NO: 4169 - DNA, 25 bp, SARS Virus
gttcagttacacgtgagaaaggctt

SEQ ID NO: 4170 - DNA, 25 bp, SARS Virus
ttcagttacacgggagaaaggcttg

SEQ ID NO: 4171 - DNA, 25 bp, SARS Virus
tcagttacacgtgagaaaggcttgt

SEQ ID NO: 4172 - DNA, 25 bp, SARS Virus
cagttacacgtgggaaaggcttgtt

SEQ ID NO: 4173 - DNA, 25 bp, SARS Virus
agttacacgtgagaaaggcttgttg

SEQ ID NO: 4174 - DNA, 25 bp, SARS Virus
gttacacgtgaggaaggcttgttga

SEQ ID NO: 4175 - DNA, 25 bp, SARS Virus
ttacacgtgagagaggcttgttgaa

SEQ ID NO: 4176 - DNA, 25 bp, SARS Virus
tacacgtgagaagggcttgttgaac

SEQ ID NO: 4177 - DNA, 25 bp, SARS Virus
acacgtgagaaaggcttgttgaact

SEQ ID NO: 4178 - DNA, 25 bp, SARS Virus
cacgtgagaaaggcttgttgaacta

SEQ ID NO: 4179 - DNA, 25 bp, SARS Virus
acgtgagaaagggttgttgaactaa

SEQ ID NO: 4180 - DNA, 25 bp, SARS Virus
cgtgagaaaggcgtgttgaactaat

SEQ ID NO: 4181 - DNA, 25 bp, SARS Virus
gtgagaaaggctggttgaactaatg

SEQ ID NO: 4182 - DNA, 25 bp, SARS Virus
tgagaaaggcttgttgaactaatgt

SEQ ID NO: 4183 - DNA, 25 bp, SARS Virus
gagaaaggcttggtgaactaatgta

SEQ ID NO: 4184 - DNA, 25 bp, SARS Virus
agaaaggcttgtggaactaatgtag

SEQ ID NO: 4185 - DNA, 25 bp, SARS Virus
gaaaggcttgttgaactaatgtagc

SEQ ID NO: 4186 - DNA, 25 bp, SARS Virus
aaaggcttgttggactaatgtagct

SEQ ID NO: 4187 - DNA, 25 bp, SARS Virus
aaggcttgttgagctaatgtagctc

SEQ ID NO: 4188 - DNA, 25 bp, SARS Virus
aggcttgttgaagtaatgtagctca

SEQ ID NO: 4189 - DNA, 25 bp, SARS Virus
ggcttgttgaacgaatgtagctcag

SEQ ID NO: 4190 - DNA, 25 bp, SARS Virus
gcttgttgaactgatgtagctcagc

SEQ ID NO: 4191 - DNA, 25 bp, SARS Virus
cttgttgaactagtgtagctcagct

SEQ ID NO: 4192 - DNA, 25 bp, SARS Virus
ttgttgaactaaggtagctcagctt

SEQ ID NO: 4193 - DNA, 25 bp, SARS Virus
tgttgaactaatgtagctcagcttc

SEQ ID NO: 4194 - DNA, 25 bp, SARS Virus
gttgaactaatggagctcagcttct

SEQ ID NO: 4195 - DNA, 25 bp, SARS Virus
ttgaactaatgtggctcagcttctc

SEQ ID NO: 4196 - DNA, 25 bp, SARS Virus
tgaactaatgtagctcagcttctct

SEQ ID NO: 4197 - DNA, 25 bp, SARS Virus
gaactaatgtaggtcagcttctctc

SEQ ID NO: 4198 - DNA, 25 bp, SARS Virus
aactaatgtagcgcagcttctctcc

SEQ ID NO: 4199 - DNA, 25 bp, SARS Virus
actaatgtagctgagcttctctcca

SEQ ID NO: 4200 - DNA, 25 bp, SARS Virus
ctaatgtagctcggcttctctccac

SEQ ID NO: 4201 - DNA, 25 bp, SARS Virus
taatgtagctcagcttctctccaca

SEQ ID NO: 4202 - DNA, 25 bp, SARS Virus
aatgtagctcaggttctctccacag

SEQ ID NO: 4203 - DNA, 25 bp, SARS Virus
atgtagctcagcgtctctccacaga

SEQ ID NO: 4204 - DNA, 25 bp, SARS Virus
tgtagctcagctgctctccacagat

SEQ ID NO: 4205 - DNA, 25 bp, SARS Virus
gtagctcagcttgtctccacagatg

SEQ ID NO: 4206 - DNA, 25 bp, SARS Virus
tagctcagcttcgctccacagatga

SEQ ID NO: 4207 - DNA, 25 bp, SARS Virus
agctcagcttctgtccacagatgac

SEQ ID NO: 4208 - DNA, 25 bp, SARS Virus
gctcagcttctcgccacagatgacg

SEQ ID NO: 4209 - DNA, 25 bp, SARS Virus
ctcagcttctctgcacagatgacga

SEQ ID NO: 4210 - DNA, 25 bp, SARS Virus
tcagcttctctcgacagatgacgac

SEQ ID NO: 4211 - DNA, 25 bp, SARS Virus
cagcttctctccgcagatgacgacg

SEQ ID NO: 4212 - DNA, 25 bp, SARS Virus
agcttctctccagagatgacgacgg

SEQ ID NO: 4213 - DNA, 25 bp, SARS Virus
gcttctctccacggatgacgacggc

SEQ ID NO: 4214 - DNA, 25 bp, SARS Virus
cttctctccacagatgacgacggca

SEQ ID NO: 4215 - DNA, 25 bp, SARS Virus
ttctctccacaggtgacgacggcac

SEQ ID NO: 4216 - DNA, 25 bp, SARS Virus
tctctccacagaggacgacggcact

SEQ ID NO: 4217 - DNA, 25 bp, SARS Virus
ctctccacagatgacgacggcactg

SEQ ID NO: 4218 - DNA, 25 bp, SARS Virus
tctccacagatggcgacggcactgg

SEQ ID NO: 4219 - DNA, 25 bp, SARS Virus
ctccacagatgaggacggcactggt

SEQ ID NO: 4220 - DNA, 25 bp, SARS Virus
tccacagatgacgacggcactggta

SEQ ID NO: 4221 - DNA, 25 bp, SARS Virus
ccacagatgacggcggcactggtac

SEQ ID NO: 4222 - DNA, 25 bp, SARS Virus
cacagatgacgagggcactggtact

SEQ ID NO: 4223 - DNA, 25 bp, SARS Virus
acagatgacgacggcactggtactc

SEQ ID NO: 4224 - DNA, 25 bp, SARS Virus
cagatgacgacggcactggtactcg

SEQ ID NO: 4225 - DNA, 25 bp, SARS Virus
agatgacgacgggactggtactcgt

SEQ ID NO: 4226 - DNA, 25 bp, SARS Virus
gatgacgacggcgctggtactcgta

SEQ ID NO: 4227 - DNA, 25 bp, SARS Virus
atgacgacggcagtggtactcgtac

SEQ ID NO: 4228 - DNA, 25 bp, SARS Virus
tgacgacggcacgggtactcgtact

SEQ ID NO: 4229 - DNA, 25 bp, SARS Virus
gacgacggcactggtactcgtactt

SEQ ID NO: 4230 - DNA, 25 bp, SARS Virus
acgacggcactggtactcgtacttt

SEQ ID NO: 4231 - DNA, 25 bp, SARS Virus
cgacggcactgggactcgtacttta

SEQ ID NO: 4232 - DNA, 25 bp, SARS Virus
gacggcactggtgctcgtactttaa

SEQ ID NO: 4233 - DNA, 25 bp, SARS Virus
acggcactggtagtcgtactttaac

SEQ ID NO: 4234 - DNA, 25 bp, SARS Virus
cggcactggtacgcgtactttaacg

SEQ ID NO: 4235 - DNA, 25 bp, SARS Virus
ggcactggtactggtactttaacgg

SEQ ID NO: 4236 - DNA, 25 bp, SARS Virus
gcactggtactcgtactttaacgga

SEQ ID NO: 4237 - DNA, 25 bp, SARS Virus
cactggtactcggactttaacggac

SEQ ID NO: 4238 - DNA, 25 bp, SARS Virus
actggtactcgtgctttaacggacc

SEQ ID NO: 4239 - DNA, 25 bp, SARS Virus
ctggtactcgtagtttaacggacca

SEQ ID NO: 4240 - DNA, 25 bp, SARS Virus
tggtactcgtacgttaacggaccaa

SEQ ID NO: 4241 - DNA, 25 bp, SARS Virus
ggtactcgtactgtaacggaccaag

SEQ ID NO: 4242 - DNA, 25 bp, SARS Virus
gtactcgtacttgaacggaccaagt

SEQ ID NO: 4243 - DNA, 25 bp, SARS Virus
tactcgtactttgacggaccaagtg

SEQ ID NO: 4244 - DNA, 25 bp, SARS Virus
actcgtactttagcggaccaagtga

SEQ ID NO: 4245 - DNA, 25 bp, SARS Virus
ctcgtactttaagggaccaagtgac

SEQ ID NO: 4246 - DNA, 25 bp, SARS Virus
tcgtactttaacggaccaagtgact

SEQ ID NO: 4247 - DNA, 25 bp, SARS Virus
cgtactttaacggaccaagtgactc

SEQ ID NO: 4248 - DNA, 25 bp, SARS Virus
gtactttaacgggccaagtgactcg

SEQ ID NO: 4249 - DNA, 25 bp, SARS Virus
tactttaacggagcaagtgactcgc

SEQ ID NO: 4250 - DNA, 25 bp, SARS Virus
actttaacggacgaagtgactcgcg

SEQ ID NO: 4251 - DNA, 25 bp, SARS Virus
ctttaacggaccgagtgactcgcga

SEQ ID NO: 4252 - DNA, 25 bp, SARS Virus
tttaacggaccaggtgactcgcgag

SEQ ID NO: 4253 - DNA, 25 bp, SARS Virus
ttaacggaccaagtgactcgcgaga

SEQ ID NO: 4254 - DNA, 25 bp, SARS Virus
taacggaccaagggactcgcgagac

SEQ ID NO: 4255 - DNA, 25 bp, SARS Virus
aacggaccaagtgactcgcgagact

SEQ ID NO: 4256 - DNA, 25 bp, SARS Virus
acggaccaagtggctcgcgagacta

SEQ ID NO: 4257 - DNA, 25 bp, SARS Virus
cggaccaagtgagtcgcgagactat

SEQ ID NO: 4258 - DNA, 25 bp, SARS Virus
ggaccaagtgacgcgcgagactatt

SEQ ID NO: 4259 - DNA, 25 bp, SARS Virus
gaccaagtgactggcgagactattc

SEQ ID NO: 4260 - DNA, 25 bp, SARS Virus
accaagtgactcgcgagactattct

SEQ ID NO: 4261 - DNA, 25 bp, SARS Virus
ccaagtgactcgggagactattctc

SEQ ID NO: 4262 - DNA, 25 bp, SARS Virus
caagtgactcgcgagactattctcg

SEQ ID NO: 4263 - DNA, 25 bp, SARS Virus
aagtgactcgcgggactattctcga

SEQ ID NO: 4264 - DNA, 25 bp, SARS Virus
agtgactcgcgagactattctcgat

SEQ ID NO: 4265 - DNA, 25 bp, SARS Virus
gtgactcgcgaggctattctcgatg

SEQ ID NO: 4266 - DNA, 25 bp, SARS Virus
tgactcgcgagagtattctcgatgc

SEQ ID NO: 4267 - DNA, 25 bp, SARS Virus
gactcgcgagacgattctcgatgct

SEQ ID NO: 4268 - DNA, 25 bp, SARS Virus
actcgcgagactgttctcgatgctc

SEQ ID NO: 4269 - DNA, 25 bp, SARS Virus
ctcgcgagactagtctcgatgctcg

SEQ ID NO: 4270 - DNA, 25 bp, SARS Virus
tcgcgagactatgctcgatgctcgt

SEQ ID NO: 4271 - DNA, 25 bp, SARS Virus
cgcgagactattgtcgatgctcgtg

SEQ ID NO: 4272 - DNA, 25 bp, SARS Virus
gcgagactattcgcgatgctcgtgg

SEQ ID NO: 4273 - DNA, 25 bp, SARS Virus
cgagactattctggatgctcgtggt

SEQ ID NO: 4274 - DNA, 25 bp, SARS Virus
gagactattctcgatgctcgtggtc

SEQ ID NO: 4275 - DNA, 25 bp, SARS Virus
agactattctcggtgctcgtggtct

SEQ ID NO: 4276 - DNA, 25 bp, SARS Virus
gactattctcgaggctcgtggtctg

SEQ ID NO: 4277 - DNA, 25 bp, SARS Virus
actattctcgatgctcgtggtctgt

SEQ ID NO: 4278 - DNA, 25 bp, SARS Virus
ctattctcgatggtcgtggtctgtg

SEQ ID NO: 4279 - DNA, 25 bp, SARS Virus
tattctcgatgcgcgtggtctgtgg

SEQ ID NO: 4280 - DNA, 25 bp, SARS Virus
attctcgatgctggtggtctgtggg

SEQ ID NO: 4281 - DNA, 25 bp, SARS Virus
ttctcgatgctcgtggtctgtggga

SEQ ID NO: 4282 - DNA, 25 bp, SARS Virus
tctcgatgctcggggtctgtgggaa

SEQ ID NO: 4283 - DNA, 25 bp, SARS Virus
ctcgatgctcgtggtctgtgggaag

SEQ ID NO: 4284 - DNA, 25 bp, SARS Virus
tcgatgctcgtggtctgtgggaagc

SEQ ID NO: 4285 - DNA, 25 bp, SARS Virus
cgatgctcgtgggctgtgggaagct

SEQ ID NO: 4286 - DNA, 25 bp, SARS Virus
gatgctcgtggtgtgtgggaagctt

SEQ ID NO: 4287 - DNA, 25 bp, SARS Virus
atgctcgtggtcggtgggaagcttt

SEQ ID NO: 4288 - DNA, 25 bp, SARS Virus
tgctcgtggtctgtgggaagcttta

SEQ ID NO: 4289 - DNA, 25 bp, SARS Virus
gctcgtggtctgggggaagctttaa

SEQ ID NO: 4290 - DNA, 25 bp, SARS Virus
ctcgtggtctgtgggaagctttaat

SEQ ID NO: 4291 - DNA, 25 bp, SARS Virus
tcgtggtctgtgggaagctttaatt

SEQ ID NO: 4292 - DNA, 25 bp, SARS Virus
cgtggtctgtgggaagctttaattc

SEQ ID NO: 4293 - DNA, 25 bp, SARS Virus
gtggtctgtggggagctttaattct

SEQ ID NO: 4294 - DNA, 25 bp, SARS Virus
tggtctgtgggaggctttaattctc

SEQ ID NO: 4295 - DNA, 25 bp, SARS Virus
ggtctgtgggaagctttaattctca

SEQ ID NO: 4296 - DNA, 25 bp, SARS Virus
gtctgtgggaaggtttaattctcac

SEQ ID NO: 4297 - DNA, 25 bp, SARS Virus
tctgtgggaagcgttaattctcacg

SEQ ID NO: 4298 - DNA, 25 bp, SARS Virus
ctgtgggaagctgtaattctcacgg

SEQ ID NO: 4299 - DNA, 25 bp, SARS Virus
tgtgggaagcttgaattctcacggt

SEQ ID NO: 4300 - DNA, 25 bp, SARS Virus
gtgggaagctttgattctcacggtt

SEQ ID NO: 4301 - DNA, 25 bp, SARS Virus
tgggaagctttagttctcacggttc

SEQ ID NO: 4302 - DNA, 25 bp, SARS Virus
gggaagctttaagtctcacggttct

SEQ ID NO: 4303 - DNA, 25 bp, SARS Virus
ggaagctttaatgctcacggttctt

SEQ ID NO: 4304 - DNA, 25 bp, SARS Virus
gaagctttaattgtcacggttcttt

SEQ ID NO: 4305 - DNA, 25 bp, SARS Virus
aagctttaattcgcacggttcttta

SEQ ID NO: 4306 - DNA, 25 bp, SARS Virus
agctttaattctgacggttctttaa

SEQ ID NO: 4307 - DNA, 25 bp, SARS Virus
gctttaattctcgcggttctttaaa

SEQ ID NO: 4308 - DNA, 25 bp, SARS Virus
ctttaattctcagggttctttaaac

SEQ ID NO: 4309 - DNA, 25 bp, SARS Virus
tttaattctcacggttctttaaact

SEQ ID NO: 4310 - DNA, 25 bp, SARS Virus
ttaattctcacggttctttaaactg

SEQ ID NO: 4311 - DNA, 25 bp, SARS Virus
taattctcacgggtctttaaactgt

SEQ ID NO: 4312 - DNA, 25 bp, SARS Virus
aattctcacggtgctttaaactgtg

SEQ ID NO: 4313 - DNA, 25 bp, SARS Virus
attctcacggttgtttaaactgtga

SEQ ID NO: 4314 - DNA, 25 bp, SARS Virus
ttctcacggttcgttaaactgtgaa

SEQ ID NO: 4315 - DNA, 25 bp, SARS Virus
tctcacggttctgtaaactgtgaaa

SEQ ID NO: 4316 - DNA, 25 bp, SARS Virus
ctcacggttcttgaaactgtgaaag

SEQ ID NO: 4317 - DNA, 25 bp, SARS Virus
tcacggttctttgaactgtgaaagt

SEQ ID NO: 4318 - DNA, 25 bp, SARS Virus
cacggttctttagactgtgaaagtt

SEQ ID NO: 4319 - DNA, 25 bp, SARS Virus
acggttctttaagctgtgaaagttt

SEQ ID NO: 4320 - DNA, 25 bp, SARS Virus
cggttctttaaagtgtgaaagtttc

SEQ ID NO: 4321 - DNA, 25 bp, SARS Virus
ggttctttaaacggtgaaagtttcc

SEQ ID NO: 4322 - DNA, 25 bp, SARS Virus
gttctttaaactgtgaaagtttccc

SEQ ID NO: 4323 - DNA, 25 bp, SARS Virus
ttctttaaactgggaaagtttcccc

SEQ ID NO: 4324 - DNA, 25 bp, SARS Virus
tctttaaactgtgaaagtttcccct

SEQ ID NO: 4325 - DNA, 25 bp, SARS Virus
ctttaaactgtggaagtttcccctt

SEQ ID NO: 4326 - DNA, 25 bp, SARS Virus
tttaaactgtgagagtttcccctta

SEQ ID NO: 4327 - DNA, 25 bp, SARS Virus
ttaaactgtgaaggtttccccttac

SEQ ID NO: 4328 - DNA, 25 bp, SARS Virus
taaactgtgaaagtttccccttacg

SEQ ID NO: 4329 - DNA, 25 bp, SARS Virus
aaactgtgaaaggttccccttacgg

SEQ ID NO: 4330 - DNA, 25 bp, SARS Virus
aactgtgaaagtgtccccttacggg

SEQ ID NO: 4331 - DNA, 25 bp, SARS Virus
actgtgaaagttgccccttacgggt

SEQ ID NO: 4332 - DNA, 25 bp, SARS Virus
ctgtgaaagtttgcccttacgggtt

SEQ ID NO: 4333 - DNA, 25 bp, SARS Virus
tgtgaaagtttcgccttacgggttt

SEQ ID NO: 4334 - DNA, 25 bp, SARS Virus
gtgaaagtttccgcttacgggtttc

SEQ ID NO: 4335 - DNA, 25 bp, SARS Virus
tgaaagtttcccgttacgggtttca

SEQ ID NO: 4336 - DNA, 25 bp, SARS Virus
gaaagtttccccgtacgggtttcaa

SEQ ID NO: 4337 - DNA, 25 bp, SARS Virus
aaagtttcccctgacgggtttcaaa

SEQ ID NO: 4338 - DNA, 25 bp, SARS Virus
aagtttccccttgcgggtttcaaac

SEQ ID NO: 4339 - DNA, 25 bp, SARS Virus
agtttccccttaggggtttcaaaca

SEQ ID NO: 4340 - DNA, 25 bp, SARS Virus
gtttccccttacgggtttcaaacac

SEQ ID NO: 4341 - DNA, 25 bp, SARS Virus
tttccccttacgggtttcaaacaca

SEQ ID NO: 4342 - DNA, 25 bp, SARS Virus
ttccccttacgggtttcaaacacaa

SEQ ID NO: 4343 - DNA, 25 bp, SARS Virus
tccccttacggggttcaaacacaaa

SEQ ID NO: 4344 - DNA, 25 bp, SARS Virus
ccccttacgggtgtcaaacacaaag

SEQ ID NO: 4345 - DNA, 25 bp, SARS Virus
cccttacgggttgcaaacacaaagg

SEQ ID NO: 4346 - DNA, 25 bp, SARS Virus
ccttacgggtttgaaacacaaagga

SEQ ID NO: 4347 - DNA, 25 bp, SARS Virus
cttacgggtttcgaacacaaaggag

SEQ ID NO: 4348 - DNA, 25 bp, SARS Virus
ttacgggtttcagacacaaaggaga

SEQ ID NO: 4349 - DNA, 25 bp, SARS Virus
tacgggtttcaagcacaaaggagaa

SEQ ID NO: 4350 - DNA, 25 bp, SARS Virus
acgggtttcaaagacaaaggagaat

SEQ ID NO: 4351 - DNA, 25 bp, SARS Virus
cgggtttcaaacgcaaaggagaatt

SEQ ID NO: 4352 - DNA, 25 bp, SARS Virus
gggtttcaaacagaaaggagaattg

SEQ ID NO: 4353 - DNA, 25 bp, SARS Virus
ggtttcaaacacgaaggagaattga

SEQ ID NO: 4354 - DNA, 25 bp, SARS Virus
gtttcaaacacagaggagaattgag

SEQ ID NO: 4355 - DNA, 25 bp, SARS Virus
tttcaaacacaagggagaattgagt

SEQ ID NO: 4356 - DNA, 25 bp, SARS Virus
ttcaaacacaaaggagaattgagtt

SEQ ID NO: 4357 - DNA, 25 bp, SARS Virus
tcaaacacaaaggagaattgagttt

SEQ ID NO: 4358 - DNA, 25 bp, SARS Virus
caaacacaaaggggaattgagtttt

SEQ ID NO: 4359 - DNA, 25 bp, SARS Virus
aaacacaaaggagaattgagttttc

SEQ ID NO: 4360 - DNA, 25 bp, SARS Virus
aacacaaaggaggattgagttttca

SEQ ID NO: 4361 - DNA, 25 bp, SARS Virus
acacaaaggagagttgagttttcag

SEQ ID NO: 4362 - DNA, 25 bp, SARS Virus
cacaaaggagaagtgagttttcagt

SEQ ID NO: 4363 - DNA, 25 bp, SARS Virus
acaaaggagaatggagttttcagtt

SEQ ID NO: 4364 - DNA, 25 bp, SARS Virus
caaaggagaattgagttttcagttt

SEQ ID NO: 4365 - DNA, 25 bp, SARS Virus
aaaggagaattgggttttcagtttc

SEQ ID NO: 4366 - DNA, 25 bp, SARS Virus
aaggagaattgagttttcagtttca

SEQ ID NO: 4367 - DNA, 25 bp, SARS Virus
aggagaattgaggtttcagtttcag

SEQ ID NO: 4368 - DNA, 25 bp, SARS Virus
ggagaattgagtgttcagtttcagt

SEQ ID NO: 4369 - DNA, 25 bp, SARS Virus
gagaattgagttgtcagtttcagta

SEQ ID NO: 4370 - DNA, 25 bp, SARS Virus
agaattgagtttgcagtttcagtaa

SEQ ID NO: 4371 - DNA, 25 bp, SARS Virus
gaattgagttttgagtttcagtaag

SEQ ID NO: 4372 - DNA, 25 bp, SARS Virus
aattgagttttcggtttcagtaagt

SEQ ID NO: 4373 - DNA, 25 bp, SARS Virus
attgagttttcagtttcagtaagtt

SEQ ID NO: 4374 - DNA, 25 bp, SARS Virus
ttgagttttcaggttcagtaagttg

SEQ ID NO: 4375 - DNA, 25 bp, SARS Virus
tgagttttcagtgtcagtaagttgg

SEQ ID NO: 4376 - DNA, 25 bp, SARS Virus
gagttttcagttgcagtaagttggt

SEQ ID NO: 4377 - DNA, 25 bp, SARS Virus
agttttcagtttgagtaagttggtg

SEQ ID NO: 4378 - DNA, 25 bp, SARS Virus
gttttcagtttcggtaagttggtgc

SEQ ID NO: 4379 - DNA, 25 bp, SARS Virus
ttttcagtttcagtaagttggtgca

SEQ ID NO: 4380 - DNA, 25 bp, SARS Virus
tttcagtttcaggaagttggtgcac

SEQ ID NO: 4381 - DNA, 25 bp, SARS Virus
ttcagtttcagtgagttggtgcaca

SEQ ID NO: 4382 - DNA, 25 bp, SARS Virus
tcagtttcagtaggttggtgcacaa

SEQ ID NO: 4383 - DNA, 25 bp, SARS Virus
cagtttcagtaagttggtgcacaac

SEQ ID NO: 4384 - DNA, 25 bp, SARS Virus
agtttcagtaaggtggtgcacaact

SEQ ID NO: 4385 - DNA, 25 bp, SARS Virus
gtttcagtaagtgggtgcacaactt

SEQ ID NO: 4386 - DNA, 25 bp, SARS Virus
tttcagtaagttggtgcacaacttt

SEQ ID NO: 4387 - DNA, 25 bp, SARS Virus
ttcagtaagttggtgcacaactttt

SEQ ID NO: 4388 - DNA, 25 bp, SARS Virus
tcagtaagttggggcacaacttttc

SEQ ID NO: 4389 - DNA, 25 bp, SARS Virus
cagtaagttggtgcacaacttttct

SEQ ID NO: 4390 - DNA, 25 bp, SARS Virus
agtaagttggtggacaacttttctt

SEQ ID NO: 4391 - DNA, 25 bp, SARS Virus
gtaagttggtgcgcaacttttcttt

SEQ ID NO: 4392 - DNA, 25 bp, SARS Virus
taagttggtgcagaacttttctttt

SEQ ID NO: 4393 - DNA, 25 bp, SARS Virus
aagttggtgcacgacttttcttttt

SEQ ID NO: 4394 - DNA, 25 bp, SARS Virus
agttggtgcacagcttttctttttc

SEQ ID NO: 4395 - DNA, 25 bp, SARS Virus
gttggtgcacaagttttctttttct

SEQ ID NO: 4396 - DNA, 25 bp, SARS Virus
ttggtgcacaacgtttctttttctg

SEQ ID NO: 4397 - DNA, 25 bp, SARS Virus
tggtgcacaactgttctttttctga

SEQ ID NO: 4398 - DNA, 25 bp, SARS Virus
ggtgcacaacttgtctttttctgac

SEQ ID NO: 4399 - DNA, 25 bp, SARS Virus
gtgcacaactttgctttttctgact

SEQ ID NO: 4400 - DNA, 25 bp, SARS Virus
tgcacaacttttgtttttctgactc

SEQ ID NO: 4401 - DNA, 25 bp, SARS Virus
gcacaacttttcgttttctgactcc

SEQ ID NO: 4402 - DNA, 25 bp, SARS Virus
cacaacttttctgtttctgactccc

SEQ ID NO: 4403 - DNA, 25 bp, SARS Virus
acaacttttcttgttctgactccca

SEQ ID NO: 4404 - DNA, 25 bp, SARS Virus
caacttttctttgtctgactcccaa

SEQ ID NO: 4405 - DNA, 25 bp, SARS Virus
aacttttcttttgctgactcccaaa

SEQ ID NO: 4406 - DNA, 25 bp, SARS Virus
acttttctttttgtgactcccaaag

SEQ ID NO: 4407 - DNA, 25 bp, SARS Virus
cttttctttttcggactcccaaagt

SEQ ID NO: 4408 - DNA, 25 bp, SARS Virus
ttttctttttctgactcccaaagta

SEQ ID NO: 4409 - DNA, 25 bp, SARS Virus
tttctttttctggctcccaaagtac

SEQ ID NO: 4410 - DNA, 25 bp, SARS Virus
ttctttttctgagtcccaaagtacc

SEQ ID NO: 4411 - DNA, 25 bp, SARS Virus
tctttttctgacgcccaaagtaccc

SEQ ID NO: 4412 - DNA, 25 bp, SARS Virus
ctttttctgactgccaaagtacccc

SEQ ID NO: 4413 - DNA, 25 bp, SARS Virus
tttttctgactcgcaaagtaccccg

SEQ ID NO: 4414 - DNA, 25 bp, SARS Virus
ttttctgactccgaaagtaccccgc

SEQ ID NO: 4415 - DNA, 25 bp, SARS Virus
tttctgactcccgaagtaccccgca

SEQ ID NO: 4416 - DNA, 25 bp, SARS Virus
ttctgactcccagagtaccccgcat

SEQ ID NO: 4417 - DNA, 25 bp, SARS Virus
tctgactcccaaggtaccccgcata

SEQ ID NO: 4418 - DNA, 25 bp, SARS Virus
ctgactcccaaagtaccccgcatat

SEQ ID NO: 4419 - DNA, 25 bp, SARS Virus
tgactcccaaaggaccccgcatatg

SEQ ID NO: 4420 - DNA, 25 bp, SARS Virus
gactcccaaagtgccccgcatatgc

SEQ ID NO: 4421 - DNA, 25 bp, SARS Virus
actcccaaagtagcccgcatatgcg

SEQ ID NO: 4422 - DNA, 25 bp, SARS Virus
ctcccaaagtacgccgcatatgcga

SEQ ID NO: 4423 - DNA, 25 bp, SARS Virus
tcccaaagtaccgcgcatatgcgag

SEQ ID NO: 4424 - DNA, 25 bp, SARS Virus
cccaaagtacccggcatatgcgaga

SEQ ID NO: 4425 - DNA, 25 bp, SARS Virus
ccaaagtaccccgcatatgcgagac

SEQ ID NO: 4426 - DNA, 25 bp, SARS Virus
caaagtaccccggatatgcgagaca

SEQ ID NO: 4427 - DNA, 25 bp, SARS Virus
aaagtaccccgcgtatgcgagacac

SEQ ID NO: 4428 - DNA, 25 bp, SARS Virus
aagtaccccgcagatgcgagacaca

SEQ ID NO: 4429 - DNA, 25 bp, SARS Virus
agtaccccgcatgtgcgagacacat

SEQ ID NO: 4430 - DNA, 25 bp, SARS Virus
gtaccccgcataggcgagacacatg

SEQ ID NO: 4431 - DNA, 25 bp, SARS Virus
taccccgcatatgcgagacacatgg

SEQ ID NO: 4432 - DNA, 25 bp, SARS Virus
accccgcatatgggagacacatggg

SEQ ID NO: 4433 - DNA, 25 bp, SARS Virus
ccccgcatatgcgagacacatggga

SEQ ID NO: 4434 - DNA, 25 bp, SARS Virus
cccgcatatgcgggacacatgggac

SEQ ID NO: 4435 - DNA, 25 bp, SARS Virus
ccgcatatgcgagacacatgggaca

SEQ ID NO: 4436 - DNA, 25 bp, SARS Virus
cgcatatgcgaggcacatgggacaa

SEQ ID NO: 4437 - DNA, 25 bp, SARS Virus
gcatatgcgagagacatgggacaac

SEQ ID NO: 4438 - DNA, 25 bp, SARS Virus
catatgcgagacgcatgggacaacg

SEQ ID NO: 4439 - DNA, 25 bp, SARS Virus
atatgcgagacagatgggacaacgt

SEQ ID NO: 4440 - DNA, 25 bp, SARS Virus
tatgcgagacacgtgggacaacgta

SEQ ID NO: 4441 - DNA, 25 bp, SARS Virus
atgcgagacacaggggacaacgtag

SEQ ID NO: 4442 - DNA, 25 bp, SARS Virus
tgcgagacacatgggacaacgtaga

SEQ ID NO: 4443 - DNA, 25 bp, SARS Virus
gcgagacacatgggacaacgtagag

SEQ ID NO: 4444 - DNA, 25 bp, SARS Virus
cgagacacatgggacaacgtagagg

SEQ ID NO: 4445 - DNA, 25 bp, SARS Virus
gagacacatggggcaacgtagaggt

SEQ ID NO: 4446 - DNA, 25 bp, SARS Virus
agacacatgggagaacgtagaggtg

SEQ ID NO: 4447 - DNA, 25 bp, SARS Virus
gacacatgggacgacgtagaggtgt

SEQ ID NO: 4448 - DNA, 25 bp, SARS Virus
acacatgggacagcgtagaggtgtc

SEQ ID NO: 4449 - DNA, 25 bp, SARS Virus
cacatgggacaaggtagaggtgtcc

SEQ ID NO: 4450 - DNA, 25 bp, SARS Virus
acatgggacaacgtagaggtgtcct

SEQ ID NO: 4451 - DNA, 25 bp, SARS Virus
catgggacaacggagaggtgtcctc

SEQ ID NO: 4452 - DNA, 25 bp, SARS Virus
atgggacaacgtggaggtgtcctca

SEQ ID NO: 4453 - DNA, 25 bp, SARS Virus
tgggacaacgtagaggtgtcctcac

SEQ ID NO: 4454 - DNA, 25 bp, SARS Virus
gggacaacgtaggggtgtcctcaca

SEQ ID NO: 4455 - DNA, 25 bp, SARS Virus
ggacaacgtagaggtgtcctcacat

SEQ ID NO: 4456 - DNA, 25 bp, SARS Virus
gacaacgtagaggtgtcctcacatt

SEQ ID NO: 4457 - DNA, 25 bp, SARS Virus
acaacgtagaggggtcctcacattg

SEQ ID NO: 4458 - DNA, 25 bp, SARS Virus
caacgtagaggtgtcctcacattgt

SEQ ID NO: 4459 - DNA, 25 bp, SARS Virus
aacgtagaggtggcctcacattgtt

SEQ ID NO: 4460 - DNA, 25 bp, SARS Virus
acgtagaggtgtgctcacattgtta

SEQ ID NO: 4461 - DNA, 25 bp, SARS Virus
cgtagaggtgtcgtcacattgttat

SEQ ID NO: 4462 - DNA, 25 bp, SARS Virus
gtagaggtgtccgcacattgttata

SEQ ID NO: 4463 - DNA, 25 bp, SARS Virus
tagaggtgtcctgacattgttatac

SEQ ID NO: 4464 - DNA, 25 bp, SARS Virus
agaggtgtcctcgcattgttatacg

SEQ ID NO: 4465 - DNA, 25 bp, SARS Virus
gaggtgtcctcagattgttatacgt

SEQ ID NO: 4466 - DNA, 25 bp, SARS Virus
aggtgtcctcacgttgttatacgtg

SEQ ID NO: 4467 - DNA, 25 bp, SARS Virus
ggtgtcctcacagtgttatacgtga

SEQ ID NO: 4468 - DNA, 25 bp, SARS Virus
gtgtcctcacatggttatacgtgaa

SEQ ID NO: 4469 - DNA, 25 bp, SARS Virus
tgtcctcacattgttatacgtgaac

SEQ ID NO: 4470 - DNA, 25 bp, SARS Virus
gtcctcacattggtatacgtgaaca

SEQ ID NO: 4471 - DNA, 25 bp, SARS Virus
tcctcacattgtgatacgtgaacag

SEQ ID NO: 4472 - DNA, 25 bp, SARS Virus
cctcacattgttgtacgtgaacaga

SEQ ID NO: 4473 - DNA, 25 bp, SARS Virus
ctcacattgttagacgtgaacagat

SEQ ID NO: 4474 - DNA, 25 bp, SARS Virus
tcacattgttatgcgtgaacagatg

SEQ ID NO: 4475 - DNA, 25 bp, SARS Virus
cacattgttataggtgaacagatgg

SEQ ID NO: 4476 - DNA, 25 bp, SARS Virus
acattgttatacgtgaacagatgga

SEQ ID NO: 4477 - DNA, 25 bp, SARS Virus
cattgttatacgggaacagatggaa

SEQ ID NO: 4478 - DNA, 25 bp, SARS Virus
attgttatacgtgaacagatggaac

SEQ ID NO: 4479 - DNA, 25 bp, SARS Virus
ttgttatacgtggacagatggaact

SEQ ID NO: 4480 - DNA, 25 bp, SARS Virus
tgttatacgtgagcagatggaacta

SEQ ID NO: 4481 - DNA, 25 bp, SARS Virus
gttatacgtgaagagatggaactac

SEQ ID NO: 4482 - DNA, 25 bp, SARS Virus
ttatacgtgaacggatggaactact

SEQ ID NO: 4483 - DNA, 25 bp, SARS Virus
tatacgtgaacagatggaactactt

SEQ ID NO: 4484 - DNA, 25 bp, SARS Virus
atacgtgaacaggtggaactacttt

SEQ ID NO: 4485 - DNA, 25 bp, SARS Virus
tacgtgaacagagggaactacttta

SEQ ID NO: 4486 - DNA, 25 bp, SARS Virus
acgtgaacagatggaactactttac

SEQ ID NO: 4487 - DNA, 25 bp, SARS Virus
cgtgaacagatggaactactttaca

SEQ ID NO: 4488 - DNA, 25 bp, SARS Virus
gtgaacagatgggactactttacat

SEQ ID NO: 4489 - DNA, 25 bp, SARS Virus
tgaacagatggagctactttacatt

SEQ ID NO: 4490 - DNA, 25 bp, SARS Virus
gaacagatggaagtactttacatta

SEQ ID NO: 4491 - DNA, 25 bp, SARS Virus
aacagatggaacgactttacattag

SEQ ID NO: 4492 - DNA, 25 bp, SARS Virus
acagatggaactgctttacattagt

SEQ ID NO: 4493 - DNA, 25 bp, SARS Virus
cagatggaactagtttacattagta

SEQ ID NO: 4494 - DNA, 25 bp, SARS Virus
agatggaactacgttacattagtaa

SEQ ID NO: 4495 - DNA, 25 bp, SARS Virus
gatggaactactgtacattagtaac

SEQ ID NO: 4496 - DNA, 25 bp, SARS Virus
atggaactacttgacattagtaacg

SEQ ID NO: 4497 - DNA, 25 bp, SARS Virus
tggaactactttgcattagtaacgc

SEQ ID NO: 4498 - DNA, 25 bp, SARS Virus
ggaactactttagattagtaacgct

SEQ ID NO: 4499 - DNA, 25 bp, SARS Virus
gaactactttacgttagtaacgcta

SEQ ID NO: 4500 - DNA, 25 bp, SARS Virus
aactactttacagtagtaacgctac

SEQ ID NO: 4501 - DNA, 25 bp, SARS Virus
actactttacatgagtaacgctact

SEQ ID NO: 4502 - DNA, 25 bp, SARS Virus
ctactttacattggtaacgctactt

SEQ ID NO: 4503 - DNA, 25 bp, SARS Virus
tactttacattagtaacgctacttc

SEQ ID NO: 4504 - DNA, 25 bp, SARS Virus
actttacattaggaacgctacttca

SEQ ID NO: 4505 - DNA, 25 bp, SARS Virus
ctttacattagtgacgctacttcaa

SEQ ID NO: 4506 - DNA, 25 bp, SARS Virus
tttacattagtagcgctacttcaaa

SEQ ID NO: 4507 - DNA, 25 bp, SARS Virus
ttacattagtaaggctacttcaaag

SEQ ID NO: 4508 - DNA, 25 bp, SARS Virus
tacattagtaacgctacttcaaagt

SEQ ID NO: 4509 - DNA, 25 bp, SARS Virus
acattagtaacggtacttcaaagta

SEQ ID NO: 4510 - DNA, 25 bp, SARS Virus
cattagtaacgcgacttcaaagtac

SEQ ID NO: 4511 - DNA, 25 bp, SARS Virus
attagtaacgctgcttcaaagtacc

SEQ ID NO: 4512 - DNA, 25 bp, SARS Virus
ttagtaacgctagttcaaagtaccg

SEQ ID NO: 4513 - DNA, 25 bp, SARS Virus
tagtaacgctacgtcaaagtaccgt

SEQ ID NO: 4514 - DNA, 25 bp, SARS Virus
agtaacgctactgcaaagtaccgtc

SEQ ID NO: 4515 - DNA, 25 bp, SARS Virus
gtaacgctacttgaaagtaccgtct

SEQ ID NO: 4516 - DNA, 25 bp, SARS Virus
taacgctacttcgaagtaccgtctg

SEQ ID NO: 4517 - DNA, 25 bp, SARS Virus
aacgctacttcagagtaccgtctgc

SEQ ID NO: 4518 - DNA, 25 bp, SARS Virus
acgctacttcaaggtaccgtctgca

SEQ ID NO: 4519 - DNA, 25 bp, SARS Virus
cgctacttcaaagtaccgtctgcac

SEQ ID NO: 4520 - DNA, 25 bp, SARS Virus
gctacttcaaaggaccgtctgcacg

SEQ ID NO: 4521 - DNA, 25 bp, SARS Virus
tcgtaccgtcactacgtgaggcact

SEQ ID NO: 4522 - DNA, 25 bp, SARS Virus
cgtaccgtcacctcgtgaggcactt

SEQ ID NO: 4523 - DNA, 25 bp, SARS Virus
gtaccgtcaccatgtgaggcacttg

SEQ ID NO: 4524 - DNA, 25 bp, SARS Virus
taccgtcaccacttgaggcacttga

SEQ ID NO: 4525 - DNA, 25 bp, SARS Virus
accgtcaccacgtgaggcacttgag

SEQ ID NO: 4526 - DNA, 25 bp, SARS Virus
ccgtcaccacgttaggcacttgagt

SEQ ID NO: 4527 - DNA, 25 bp, SARS Virus
cgtcaccacgtgtggcacttgagtg

SEQ ID NO: 4528 - DNA, 25 bp, SARS Virus
gtcaccacgtgatgcacttgagtga

SEQ ID NO: 4529 - DNA, 25 bp, SARS Virus
tcaccacgtgagtcacttgagtgag

SEQ ID NO: 4530 - DNA, 25 bp, SARS Virus
caccacgtgaggtacttgagtgagc

SEQ ID NO: 4531 - DNA, 25 bp, SARS Virus
accacgtgaggctcttgagtgagca

SEQ ID NO: 4532 - DNA, 25 bp, SARS Virus
ccacgtgaggcatttgagtgagcac

SEQ ID NO: 4533 - DNA, 25 bp, SARS Virus
cacgtgaggcacttgagtgagcact

SEQ ID NO: 4534 - DNA, 25 bp, SARS Virus
acgtgaggcacttgagtgagcactc

SEQ ID NO: 4535 - DNA, 25 bp, SARS Virus
cgtgaggcactttagtgagcactcg

SEQ ID NO: 4536 - DNA, 25 bp, SARS Virus
gtgaggcacttgtgtgagcactcga

SEQ ID NO: 4537 - DNA, 25 bp, SARS Virus
tgaggcacttgattgagcactcgag

SEQ ID NO: 4538 - DNA, 25 bp, SARS Virus
gaggcacttgagtgagcactcgagt

SEQ ID NO: 4539 - DNA, 25 bp, SARS Virus
aggcacttgagttagcactcgagtt

SEQ ID NO: 4540 - DNA, 25 bp, SARS Virus
ggcacttgagtgtgcactcgagtta

SEQ ID NO: 4541 - DNA, 25 bp, SARS Virus
gcacttgagtgatcactcgagttac

SEQ ID NO: 4542 - DNA, 25 bp, SARS Virus
cacttgagtgagtactcgagttacc

SEQ ID NO: 4543 - DNA, 25 bp, SARS Virus
acttgagtgagctctcgagttacct

SEQ ID NO: 4544 - DNA, 25 bp, SARS Virus
cttgagtgagcattcgagttacctc

SEQ ID NO: 4545 - DNA, 25 bp, SARS Virus
ttgagtgagcactcgagttacctcc

SEQ ID NO: 4546 - DNA, 25 bp, SARS Virus
tgagtgagcacttgagttacctcca

SEQ ID NO: 4547 - DNA, 25 bp, SARS Virus
gagtgagcactctagttacctccac

SEQ ID NO: 4548 - DNA, 25 bp, SARS Virus
agtgagcactcgtgttacctccacg

SEQ ID NO: 4549 - DNA, 25 bp, SARS Virus
gtgagcactcgatttacctccacgt

SEQ ID NO: 4550 - DNA, 25 bp, SARS Virus
tgagcactcgagttacctccacgtc

SEQ ID NO: 4551 - DNA, 25 bp, SARS Virus
gagcactcgagttacctccacgtca

SEQ ID NO: 4552 - DNA, 25 bp, SARS Virus
agcactcgagtttcctccacgtcag

SEQ ID NO: 4553 - DNA, 25 bp, SARS Virus
gcactcgagttatctccacgtcagt

SEQ ID NO: 4554 - DNA, 25 bp, SARS Virus
cactcgagttacttccacgtcagtg

SEQ ID NO: 4555 - DNA, 25 bp, SARS Virus
actcgagttacctccacgtcagtga

SEQ ID NO: 4556 - DNA, 25 bp, SARS Virus
ctcgagttaccttcacgtcagtgag

SEQ ID NO: 4557 - DNA, 25 bp, SARS Virus
tcgagttacctctacgtcagtgagc

SEQ ID NO: 4558 - DNA, 25 bp, SARS Virus
cgagttacctcctcgtcagtgagcg

SEQ ID NO: 4559 - DNA, 25 bp, SARS Virus
gagttacctccatgtcagtgagcga

SEQ ID NO: 4560 - DNA, 25 bp, SARS Virus
agttacctccacttcagtgagcgat

SEQ ID NO: 4561 - DNA, 25 bp, SARS Virus
gttacctccacgtcagtgagcgata

SEQ ID NO: 4562 - DNA, 25 bp, SARS Virus
ttacctccacgttagtgagcgatac

SEQ ID NO: 4563 - DNA, 25 bp, SARS Virus
tacctccacgtctgtgagcgataca

SEQ ID NO: 4564 - DNA, 25 bp, SARS Virus
acctccacgtcattgagcgatacag

SEQ ID NO: 4565 - DNA, 25 bp, SARS Virus
cctccacgtcagtgagcgatacagc

SEQ ID NO: 4566 - DNA, 25 bp, SARS Virus
ctccacgtcagttagcgatacagct

SEQ ID NO: 4567 - DNA, 25 bp, SARS Virus
tccacgtcagtgtgcgatacagctg

SEQ ID NO: 4568 - DNA, 25 bp, SARS Virus
ccacgtcagtgatcgatacagctgt

SEQ ID NO: 4569 - DNA, 25 bp, SARS Virus
cacgtcagtgagtgatacagctgtt

SEQ ID NO: 4570 - DNA, 25 bp, SARS Virus
acgtcagtgagctatacagctgttg

SEQ ID NO: 4571 - DNA, 25 bp, SARS Virus
cgtcagtgagcgttacagctgttgt

SEQ ID NO: 4572 - DNA, 25 bp, SARS Virus
gtcagtgagcgatacagctgttgtt

SEQ ID NO: 4573 - DNA, 25 bp, SARS Virus
tcagtgagcgattcagctgttgtta

SEQ ID NO: 4574 - DNA, 25 bp, SARS Virus
cagtgagcgatatagctgttgttaa

SEQ ID NO: 4575 - DNA, 25 bp, SARS Virus
agtgagcgatactgctgttgttaaa

SEQ ID NO: 4576 - DNA, 25 bp, SARS Virus
gtgagcgatacatctgttgttaaag

SEQ ID NO: 4577 - DNA, 25 bp, SARS Virus
tgagcgatacagttgttgttaaaga

SEQ ID NO: 4578 - DNA, 25 bp, SARS Virus
gagcgatacagctgttgttaaagac

SEQ ID NO: 4579 - DNA, 25 bp, SARS Virus
agcgatacagcttttgttaaagaca

SEQ ID NO: 4580 - DNA, 25 bp, SARS Virus
gcgatacagctgttgttaaagacac

SEQ ID NO: 4581 - DNA, 25 bp, SARS Virus
cgatacagctgttgttaaagacacc

SEQ ID NO: 4582 - DNA, 25 bp, SARS Virus
gatacagctgtttttaaagacaccg

SEQ ID NO: 4583 - DNA, 25 bp, SARS Virus
atacagctgttgttaaagacaccgg

SEQ ID NO: 4584 - DNA, 25 bp, SARS Virus
tacagctgttgttaaagacaccggg

SEQ ID NO: 4585 - DNA, 25 bp, SARS Virus
acagctgttgtttaagacaccgggt

SEQ ID NO: 4586 - DNA, 25 bp, SARS Virus
cagctgttgttatagacaccgggtc

SEQ ID NO: 4587 - DNA, 25 bp, SARS Virus
agctgttgttaatgacaccgggtct

SEQ ID NO: 4588 - DNA, 25 bp, SARS Virus
gctgttgttaaatacaccgggtcta

SEQ ID NO: 4589 - DNA, 25 bp, SARS Virus
ctgttgttaaagtcaccgggtctac

SEQ ID NO: 4590 - DNA, 25 bp, SARS Virus
tgttgttaaagataccgggtctacc

SEQ ID NO: 4591 - DNA, 25 bp, SARS Virus
gttgttaaagactccgggtctaccc

SEQ ID NO: 4592 - DNA, 25 bp, SARS Virus
ttgttaaagacatcgggtctaccca

SEQ ID NO: 4593 - DNA, 25 bp, SARS Virus
tgttaaagacactgggtctacccat

SEQ ID NO: 4594 - DNA, 25 bp, SARS Virus
gttaaagacacctggtctacccatg

SEQ ID NO: 4595 - DNA, 25 bp, SARS Virus
ttaaagacaccgtgtctacccatgg

SEQ ID NO: 4596 - DNA, 25 bp, SARS Virus
taaagacaccggttctacccatggg

SEQ ID NO: 4597 - DNA, 25 bp, SARS Virus
aaagacaccgggtctacccatggga

SEQ ID NO: 4598 - DNA, 25 bp, SARS Virus
aagacaccgggtttacccatgggag

SEQ ID NO: 4599 - DNA, 25 bp, SARS Virus
agacaccgggtctacccatgggaga

SEQ ID NO: 4600 - DNA, 25 bp, SARS Virus
gacaccgggtcttcccatgggagaa

SEQ ID NO: 4601 - DNA, 25 bp, SARS Virus
acaccgggtctatccatgggagaac

SEQ ID NO: 4602 - DNA, 25 bp, SARS Virus
caccgggtctactcatgggagaact

SEQ ID NO: 4603 - DNA, 25 bp, SARS Virus
accgggtctacctatgggagaacta

SEQ ID NO: 4604 - DNA, 25 bp, SARS Virus
ccgggtctacccttgggagaactaa

SEQ ID NO: 4605 - DNA, 25 bp, SARS Virus
cgggtctacccatgggagaactaac

SEQ ID NO: 4606 - DNA, 25 bp, SARS Virus
gggtctacccattggagaactaacg

SEQ ID NO: 4607 - DNA, 25 bp, SARS Virus
ggtctacccatgtgagaactaacgt

SEQ ID NO: 4608 - DNA, 25 bp, SARS Virus
gtctacccatggtagaactaacgta

SEQ ID NO: 4609 - DNA, 25 bp, SARS Virus
tctacccatgggtgaactaacgtag

SEQ ID NO: 4610 - DNA, 25 bp, SARS Virus
ctacccatgggataactaacgtagt

SEQ ID NO: 4611 - DNA, 25 bp, SARS Virus
tacccatgggagtactaacgtagtt

SEQ ID NO: 4612 - DNA, 25 bp, SARS Virus
acccatgggagatctaacgtagttt

SEQ ID NO: 4613 - DNA, 25 bp, SARS Virus
cccatgggagaattaacgtagtttc

SEQ ID NO: 4614 - DNA, 25 bp, SARS Virus
ccatgggagaactaacgtagtttct

SEQ ID NO: 4615 - DNA, 25 bp, SARS Virus
catgggagaacttacgtagtttcta

SEQ ID NO: 4616 - DNA, 25 bp, SARS Virus
atgggagaactatcgtagtttctaa

SEQ ID NO: 4617 - DNA, 25 bp, SARS Virus
tgggagaactaatgtagtttctaaa

SEQ ID NO: 4618 - DNA, 25 bp, SARS Virus
gggagaactaacttagtttctaaaa

SEQ ID NO: 4619 - DNA, 25 bp, SARS Virus
ggagaactaacgtagtttctaaaag

SEQ ID NO: 4620 - DNA, 25 bp, SARS Virus
gagaactaacgttgtttctaaaaga

SEQ ID NO: 4621 - DNA, 25 bp, SARS Virus
agaactaacgtattttctaaaagag

SEQ ID NO: 4622 - DNA, 25 bp, SARS Virus
gaactaacgtagtttctaaaagagc

SEQ ID NO: 4623 - DNA, 25 bp, SARS Virus
aactaacgtagtttctaaaagagcg

SEQ ID NO: 4624 - DNA, 25 bp, SARS Virus
actaacgtagtttctaaaagagcgt

SEQ ID NO: 4625 - DNA, 25 bp, SARS Virus
ctaacgtagtttttaaaagagcgtg

SEQ ID NO: 4626 - DNA, 25 bp, SARS Virus
taacgtagtttctaaaagagcgtgc

SEQ ID NO: 4627 - DNA, 25 bp, SARS Virus
aacgtagtttcttaaagagcgtgcg

SEQ ID NO: 4628 - DNA, 25 bp, SARS Virus
acgtagtttctataagagcgtgcgc

SEQ ID NO: 4629 - DNA, 25 bp, SARS Virus
cgtagtttctaatagagcgtgcgcg

SEQ ID NO: 4630 - DNA, 25 bp, SARS Virus
gtagtttctaaatgagcgtgcgcgc

SEQ ID NO: 4631 - DNA, 25 bp, SARS Virus
tagtttctaaaatagcgtgcgcgcc

SEQ ID NO: 4632 - DNA, 25 bp, SARS Virus
agtttctaaaagtgcgtgcgcgccc

SEQ ID NO: 4633 - DNA, 25 bp, SARS Virus
gtttctaaaagatcgtgcgcgcccg

SEQ ID NO: 4634 - DNA, 25 bp, SARS Virus
tttctaaaagagtgtgcgcgcccgt

SEQ ID NO: 4635 - DNA, 25 bp, SARS Virus
ttctaaaagagcttgcgcgcccgtt

SEQ ID NO: 4636 - DNA, 25 bp, SARS Virus
tctaaaagagcgtgcgcgcccgttc

SEQ ID NO: 4637 - DNA, 25 bp, SARS Virus
ctaaaagagcgttcgcgcccgttca

SEQ ID NO: 4638 - DNA, 25 bp, SARS Virus
taaaagagcgtgtgcgcccgttcag

SEQ ID NO: 4639 - DNA, 25 bp, SARS Virus
aaaagagcgtgctcgcccgttcagt

SEQ ID NO: 4640 - DNA, 25 bp, SARS Virus
aaagagcgtgcgtgcccgttcagtt

SEQ ID NO: 4641 - DNA, 25 bp, SARS Virus
aagagcgtgcgctcccgttcagtta

SEQ ID NO: 4642 - DNA, 25 bp, SARS Virus
agagcgtgcgcgtccgttcagttac

SEQ ID NO: 4643 - DNA, 25 bp, SARS Virus
gagcgtgcgcgctcgttcagttaca

SEQ ID NO: 4644 - DNA, 25 bp, SARS Virus
agcgtgcgcgcctgttcagttacac

SEQ ID NO: 4645 - DNA, 25 bp, SARS Virus
gcgtgcgcgccctttcagttacacg

SEQ ID NO: 4646 - DNA, 25 bp, SARS Virus
cgtgcgcgcccgttcagttacacgt

SEQ ID NO: 4647 - DNA, 25 bp, SARS Virus
gtgcgcgcccgttcagttacacgtg

SEQ ID NO: 4648 - DNA, 25 bp, SARS Virus
tgcgcgcccgtttagttacacgtga

SEQ ID NO: 4649 - DNA, 25 bp, SARS Virus
gcgcgcccgttctgttacacgtgag

SEQ ID NO: 4650 - DNA, 25 bp, SARS Virus
cgcgcccgttcatttacacgtgaga

SEQ ID NO: 4651 - DNA, 25 bp, SARS Virus
gcgcccgttcagttacacgtgagaa

SEQ ID NO: 4652 - DNA, 25 bp, SARS Virus
cgcccgttcagttacacgtgagaaa

SEQ ID NO: 4653 - DNA, 25 bp, SARS Virus
gcccgttcagtttcacgtgagaaag

SEQ ID NO: 4654 - DNA, 25 bp, SARS Virus
cccgttcagttatacgtgagaaagg

SEQ ID NO: 4655 - DNA, 25 bp, SARS Virus
ccgttcagttactcgtgagaaaggc

SEQ ID NO: 4656 - DNA, 25 bp, SARS Virus
cgttcagttacatgtgagaaaggct

SEQ ID NO: 4657 - DNA, 25 bp, SARS Virus
gttcagttacacttgagaaaggctt

SEQ ID NO: 4658 - DNA, 25 bp, SARS Virus
ttcagttacacgtgagaaaggcttg

SEQ ID NO: 4659 - DNA, 25 bp, SARS Virus
tcagttacacgttagaaaggcttgt

SEQ ID NO: 4660 - DNA, 25 bp, SARS Virus
cagttacacgtgtgaaaggcttgtt

SEQ ID NO: 4661 - DNA, 25 bp, SARS Virus
agttacacgtgataaaggcttgttg

SEQ ID NO: 4662 - DNA, 25 bp, SARS Virus
gttacacgtgagtaaggcttgttga

SEQ ID NO: 4663 - DNA, 25 bp, SARS Virus
ttacacgtgagataggcttgttgaa

SEQ ID NO: 4664 - DNA, 25 bp, SARS Virus
tacacgtgagaatggcttgttgaac

SEQ ID NO: 4665 - DNA, 25 bp, SARS Virus
acacgtgagaaatgcttgttgaact

SEQ ID NO: 4666 - DNA, 25 bp, SARS Virus
cacgtgagaaagtcttgttgaacta

SEQ ID NO: 4667 - DNA, 25 bp, SARS Virus
acgtgagaaaggtttgttgaactaa

SEQ ID NO: 4668 - DNA, 25 bp, SARS Virus
cgtgagaaaggcttgttgaactaat

SEQ ID NO: 4669 - DNA, 25 bp, SARS Virus
gtgagaaaggcttgttgaactaatg

SEQ ID NO: 4670 - DNA, 25 bp, SARS Virus
tgagaaaggctttttgaactaatgt

SEQ ID NO: 4671 - DNA, 25 bp, SARS Virus
gagaaaggcttgttgaactaatgta

SEQ ID NO: 4672 - DNA, 25 bp, SARS Virus
agaaaggcttgttgaactaatgtag

SEQ ID NO: 4673 - DNA, 25 bp, SARS Virus
gaaaggcttgtttaactaatgtagc

SEQ ID NO: 4674 - DNA, 25 bp, SARS Virus
aaaggcttgttgtactaatgtagct

SEQ ID NO: 4675 - DNA, 25 bp, SARS Virus
aaggcttgttgatctaatgtagctc

SEQ ID NO: 4676 - DNA, 25 bp, SARS Virus
aggcttgttgaattaatgtagctca

SEQ ID NO: 4677 - DNA, 25 bp, SARS Virus
ggcttgttgaactaatgtagctcag

SEQ ID NO: 4678 - DNA, 25 bp, SARS Virus
gcttgttgaacttatgtagctcagc

SEQ ID NO: 4679 - DNA, 25 bp, SARS Virus
cttgttgaactattgtagctcagct

SEQ ID NO: 4680 - DNA, 25 bp, SARS Virus
ttgttgaactaatgtagctcagctt

SEQ ID NO: 4681 - DNA, 25 bp, SARS Virus
tgttgaactaatttagctcagcttc

SEQ ID NO: 4682 - DNA, 25 bp, SARS Virus
gttgaactaatgtagctcagcttct

SEQ ID NO: 4683 - DNA, 25 bp, SARS Virus
ttgaactaatgttgctcagcttctc

SEQ ID NO: 4684 - DNA, 25 bp, SARS Virus
tgaactaatgtatctcagcttctct

SEQ ID NO: 4685 - DNA, 25 bp, SARS Virus
gaactaatgtagttcagcttctctc

SEQ ID NO: 4686 - DNA, 25 bp, SARS Virus
aactaatgtagctcagcttctctcc

SEQ ID NO: 4687 - DNA, 25 bp, SARS Virus
actaatgtagcttagcttctctcca

SEQ ID NO: 4688 - DNA, 25 bp, SARS Virus
ctaatgtagctctgcttctctccac

SEQ ID NO: 4689 - DNA, 25 bp, SARS Virus
taatgtagctcatcttctctccaca

SEQ ID NO: 4690 - DNA, 25 bp, SARS Virus
aatgtagctcagtttctctccacag

SEQ ID NO: 4691 - DNA, 25 bp, SARS Virus
atgtagctcagcttctctccacaga

SEQ ID NO: 4692 - DNA, 25 bp, SARS Virus
tgtagctcagcttctctccacagat

SEQ ID NO: 4693 - DNA, 25 bp, SARS Virus
gtagctcagcttttctccacagatg

SEQ ID NO: 4694 - DNA, 25 bp, SARS Virus
tagctcagcttctctccacagatga

SEQ ID NO: 4695 - DNA, 25 bp, SARS Virus
agctcagcttctttccacagatgac

SEQ ID NO: 4696 - DNA, 25 bp, SARS Virus
gctcagcttctctccacagatgacg

SEQ ID NO: 4697 - DNA, 25 bp, SARS Virus
ctcagcttctcttcacagatgacga

SEQ ID NO: 4698 - DNA, 25 bp, SARS Virus
tcagcttctctctacagatgacgac

SEQ ID NO: 4699 - DNA, 25 bp, SARS Virus
cagcttctctcctcagatgacgacg

SEQ ID NO: 4700 - DNA, 25 bp, SARS Virus
agcttctctccatagatgacgacgg

SEQ ID NO: 4701 - DNA, 25 bp, SARS Virus
gcttctctccactgatgacgacggc

SEQ ID NO: 4702 - DNA, 25 bp, SARS Virus
cttctctccacatatgacgacggca

SEQ ID NO: 4703 - DNA, 25 bp, SARS Virus
ttctctccacagttgacgacggcac

SEQ ID NO: 4704 - DNA, 25 bp, SARS Virus
tctctccacagatgacgacggcact

SEQ ID NO: 4705 - DNA, 25 bp, SARS Virus
ctctccacagattacgacggcactg

SEQ ID NO: 4706 - DNA, 25 bp, SARS Virus
tctccacagatgtcgacggcactgg

SEQ ID NO: 4707 - DNA, 25 bp, SARS Virus
ctccacagatgatgacggcactggt

SEQ ID NO: 4708 - DNA, 25 bp, SARS Virus
tccacagatgactacggcactggta

SEQ ID NO: 4709 - DNA, 25 bp, SARS Virus
ccacagatgacgtcggcactggtac

SEQ ID NO: 4710 - DNA, 25 bp, SARS Virus
cacagatgacgatggcactggtact

SEQ ID NO: 4711 - DNA, 25 bp, SARS Virus
acagatgacgactgcactggtactc

SEQ ID NO: 4712 - DNA, 25 bp, SARS Virus
cagatgacgacgtcactggtactcg

SEQ ID NO: 4713 - DNA, 25 bp, SARS Virus
agatgacgacggtactggtactcgt

SEQ ID NO: 4714 - DNA, 25 bp, SARS Virus
gatgacgacggctctggtactcgta

SEQ ID NO: 4715 - DNA, 25 bp, SARS Virus
atgacgacggcattggtactcgtac

SEQ ID NO: 4716 - DNA, 25 bp, SARS Virus
tgacgacggcactggtactcgtact

SEQ ID NO: 4717 - DNA, 25 bp, SARS Virus
gacgacggcacttgtactcgtactt

SEQ ID NO: 4718 - DNA, 25 bp, SARS Virus
acgacggcactgttactcgtacttt

SEQ ID NO: 4719 - DNA, 25 bp, SARS Virus
cgacggcactggtactcgtacttta

SEQ ID NO: 4720 - DNA, 25 bp, SARS Virus
gacggcactggttctcgtactttaa

SEQ ID NO: 4721 - DNA, 25 bp, SARS Virus
acggcactggtattcgtactttaac

SEQ ID NO: 4722 - DNA, 25 bp, SARS Virus
cggcactggtactcgtactttaacg

SEQ ID NO: 4723 - DNA, 25 bp, SARS Virus
ggcactggtacttgtactttaacgg

SEQ ID NO: 4724 - DNA, 25 bp, SARS Virus
gcactggtactcttactttaacgga

SEQ ID NO: 4725 - DNA, 25 bp, SARS Virus
cactggtactcgtactttaacggac

SEQ ID NO: 4726 - DNA, 25 bp, SARS Virus
actggtactcgttctttaacggacc

SEQ ID NO: 4727 - DNA, 25 bp, SARS Virus
ctggtactcgtattttaacggacca

SEQ ID NO: 4728 - DNA, 25 bp, SARS Virus
tggtactcgtactttaacggaccaa

SEQ ID NO: 4729 - DNA, 25 bp, SARS Virus
ggtactcgtactttaacggaccaag

SEQ ID NO: 4730 - DNA, 25 bp, SARS Virus
gtactcgtactttaacggaccaagt

SEQ ID NO: 4731 - DNA, 25 bp, SARS Virus
tactcgtacttttacggaccaagtg

SEQ ID NO: 4732 - DNA, 25 bp, SARS Virus
actcgtactttatcggaccaagtga

SEQ ID NO: 4733 - DNA, 25 bp, SARS Virus
ctcgtactttaatggaccaagtgac

SEQ ID NO: 4734 - DNA, 25 bp, SARS Virus
tcgtactttaactgaccaagtgact

SEQ ID NO: 4735 - DNA, 25 bp, SARS Virus
cgtactttaacgtaccaagtgactc

SEQ ID NO: 4736 - DNA, 25 bp, SARS Virus
gtactttaacggtccaagtgactcg

SEQ ID NO: 4737 - DNA, 25 bp, SARS Virus
tactttaacggatcaagtgactcgc

SEQ ID NO: 4738 - DNA, 25 bp, SARS Virus
actttaacggactaagtgactcgcg

SEQ ID NO: 4739 - DNA, 25 bp, SARS Virus
ctttaacggacctagtgactcgcga

SEQ ID NO: 4740 - DNA, 25 bp, SARS Virus
tttaacggaccatgtgactcgcgag

SEQ ID NO: 4741 - DNA, 25 bp, SARS Virus
ttaacggaccaattgactcgcgaga

SEQ ID NO: 4742 - DNA, 25 bp, SARS Virus
taacggaccaagtgactcgcgagac

SEQ ID NO: 4743 - DNA, 25 bp, SARS Virus
aacggaccaagttactcgcgagact

SEQ ID NO: 4744 - DNA, 25 bp, SARS Virus
acggaccaagtgtctcgcgagacta

SEQ ID NO: 4745 - DNA, 25 bp, SARS Virus
cggaccaagtgattcgcgagactat

SEQ ID NO: 4746 - DNA, 25 bp, SARS Virus
ggaccaagtgactcgcgagactatt

SEQ ID NO: 4747 - DNA, 25 bp, SARS Virus
gaccaagtgacttgcgagactattc

SEQ ID NO: 4748 - DNA, 25 bp, SARS Virus
accaagtgactctcgagactattct

SEQ ID NO: 4749 - DNA, 25 bp, SARS Virus
ccaagtgactcgtgagactattctc

SEQ ID NO: 4750 - DNA, 25 bp, SARS Virus
caagtgactcgctagactattctcg

SEQ ID NO: 4751 - DNA, 25 bp, SARS Virus
aagtgactcgcgtgactattctcga

SEQ ID NO: 4752 - DNA, 25 bp, SARS Virus
agtgactcgcgatactattctcgat

SEQ ID NO: 4753 - DNA, 25 bp, SARS Virus
gtgactcgcgagtctattctcgatg

SEQ ID NO: 4754 - DNA, 25 bp, SARS Virus
tgactcgcgagattattctcgatgc

SEQ ID NO: 4755 - DNA, 25 bp, SARS Virus
gactcgcgagactattctcgatgct

SEQ ID NO: 4756 - DNA, 25 bp, SARS Virus
actcgcgagacttttctcgatgctc

SEQ ID NO: 4757 - DNA, 25 bp, SARS Virus
ctcgcgagactattctcgatgctcg

SEQ ID NO: 4758 - DNA, 25 bp, SARS Virus
tcgcgagactattctcgatgctcgt

SEQ ID NO: 4759 - DNA, 25 bp, SARS Virus
cgcgagactattttcgatgctcgtg

SEQ ID NO: 4760 - DNA, 25 bp, SARS Virus
gcgagactattctcgatgctcgtgg

SEQ ID NO: 4761 - DNA, 25 bp, SARS Virus
cgagactattcttgatgctcgtggt

SEQ ID NO: 4762 - DNA, 25 bp, SARS Virus
gagactattctctatgctcgtggtc

SEQ ID NO: 4763 - DNA, 25 bp, SARS Virus
agactattctcgttgctcgtggtct

SEQ ID NO: 4764 - DNA, 25 bp, SARS Virus
gactattctcgatgctcgtggtctg

SEQ ID NO: 4765 - DNA, 25 bp, SARS Virus
actattctcgattctcgtggtctgt

SEQ ID NO: 4766 - DNA, 25 bp, SARS Virus
ctattctcgatgttcgtggtctgtg

SEQ ID NO: 4767 - DNA, 25 bp, SARS Virus
tattctcgatgctcgtggtctgtgg

SEQ ID NO: 4768 - DNA, 25 bp, SARS Virus
attctcgatgcttgtggtctgtggg

SEQ ID NO: 4769 - DNA, 25 bp, SARS Virus
ttctcgatgctcttggtctgtggga

SEQ ID NO: 4770 - DNA, 25 bp, SARS Virus
tctcgatgctcgtggtctgtgggaa

SEQ ID NO: 4771 - DNA, 25 bp, SARS Virus
ctcgatgctcgttgtctgtgggaag

SEQ ID NO: 4772 - DNA, 25 bp, SARS Virus
tcgatgctcgtgttctgtgggaagc

SEQ ID NO: 4773 - DNA, 25 bp, SARS Virus
cgatgctcgtggtctgtgggaagct

SEQ ID NO: 4774 - DNA, 25 bp, SARS Virus
gatgctcgtggtttgtgggaagctt

SEQ ID NO: 4775 - DNA, 25 bp, SARS Virus
atgctcgtggtctgtgggaagcttt

SEQ ID NO: 4776 - DNA, 25 bp, SARS Virus
tgctcgtggtctttgggaagcttta

SEQ ID NO: 4777 - DNA, 25 bp, SARS Virus
gctcgtggtctgtgggaagctttaa

SEQ ID NO: 4778 - DNA, 25 bp, SARS Virus
ctcgtggtctgttggaagctttaat

SEQ ID NO: 4779 - DNA, 25 bp, SARS Virus
tcgtggtctgtgtgaagctttaatt

SEQ ID NO: 4780 - DNA, 25 bp, SARS Virus
cgtggtctgtggtaagctttaattc

SEQ ID NO: 4781 - DNA, 25 bp, SARS Virus
gtggtctgtgggtagctttaattct

SEQ ID NO: 4782 - DNA, 25 bp, SARS Virus
tggtctgtgggatgctttaattctc

SEQ ID NO: 4783 - DNA, 25 bp, SARS Virus
ggtctgtgggaatctttaattctca

SEQ ID NO: 4784 - DNA, 25 bp, SARS Virus
gtctgtgggaagttttaattctcac

SEQ ID NO: 4785 - DNA, 25 bp, SARS Virus
tctgtgggaagctttaattctcacg

SEQ ID NO: 4786 - DNA, 25 bp, SARS Virus
ctgtgggaagctttaattctcacgg

SEQ ID NO: 4787 - DNA, 25 bp, SARS Virus
tgtgggaagctttaattctcacggt

SEQ ID NO: 4788 - DNA, 25 bp, SARS Virus
gtgggaagcttttattctcacggtt

SEQ ID NO: 4789 - DNA, 25 bp, SARS Virus
tgggaagctttatttctcacggttc

SEQ ID NO: 4790 - DNA, 25 bp, SARS Virus
gggaagctttaattctcacggttct

SEQ ID NO: 4791 - DNA, 25 bp, SARS Virus
ggaagctttaattctcacggttctt

SEQ ID NO: 4792 - DNA, 25 bp, SARS Virus
gaagctttaattttcacggttcttt

SEQ ID NO: 4793 - DNA, 25 bp, SARS Virus
aagctttaattctcacggttcttta

SEQ ID NO: 4794 - DNA, 25 bp, SARS Virus
agctttaattcttacggttctttaa

SEQ ID NO: 4795 - DNA, 25 bp, SARS Virus
gctttaattctctcggttctttaaa

SEQ ID NO: 4796 - DNA, 25 bp, SARS Virus
ctttaattctcatggttctttaaac

SEQ ID NO: 4797 - DNA, 25 bp, SARS Virus
tttaattctcactgttctttaaact

SEQ ID NO: 4798 - DNA, 25 bp, SARS Virus
ttaattctcacgtttctttaaactg

SEQ ID NO: 4799 - DNA, 25 bp, SARS Virus
taattctcacggttctttaaactgt

SEQ ID NO: 4800 - DNA, 25 bp, SARS Virus
aattctcacggttctttaaactgtg

SEQ ID NO: 4801 - DNA, 25 bp, SARS Virus
attctcacggttttttaaactgtga

SEQ ID NO: 4802 - DNA, 25 bp, SARS Virus
ttctcacggttctttaaactgtgaa

SEQ ID NO: 4803 - DNA, 25 bp, SARS Virus
tctcacggttctttaaactgtgaaa

SEQ ID NO: 4804 - DNA, 25 bp, SARS Virus
ctcacggttctttaaactgtgaaag

SEQ ID NO: 4805 - DNA, 25 bp, SARS Virus
tcacggttcttttaactgtgaaagt

SEQ ID NO: 4806 - DNA, 25 bp, SARS Virus
cacggttctttatactgtgaaagtt

SEQ ID NO: 4807 - DNA, 25 bp, SARS Virus
acggttctttaatctgtgaaagttt

SEQ ID NO: 4808 - DNA, 25 bp, SARS Virus
cggttctttaaattgtgaaagtttc

SEQ ID NO: 4809 - DNA, 25 bp, SARS Virus
ggttctttaaactgtgaaagtttcc

SEQ ID NO: 4810 - DNA, 25 bp, SARS Virus
gttctttaaactttgaaagtttccc

SEQ ID NO: 4811 - DNA, 25 bp, SARS Virus
ttctttaaactgtgaaagtttcccc

SEQ ID NO: 4812 - DNA, 25 bp, SARS Virus
tctttaaactgttaaagtttcccct

SEQ ID NO: 4813 - DNA, 25 bp, SARS Virus
ctttaaactgtgtaagtttcccctt

SEQ ID NO: 4814 - DNA, 25 bp, SARS Virus
tttaaactgtgatagtttcccctta

SEQ ID NO: 4815 - DNA, 25 bp, SARS Virus
ttaaactgtgaatgtttccccttac

SEQ ID NO: 4816 - DNA, 25 bp, SARS Virus
taaactgtgaaattttccccttacg

SEQ ID NO: 4817 - DNA, 25 bp, SARS Virus
aaactgtgaaagtttccccttacgg

SEQ ID NO: 4818 - DNA, 25 bp, SARS Virus
aactgtgaaagtttccccttacggg

SEQ ID NO: 4819 - DNA, 25 bp, SARS Virus
actgtgaaagtttccccttacgggt

SEQ ID NO: 4820 - DNA, 25 bp, SARS Virus
ctgtgaaagttttcccttacgggtt

SEQ ID NO: 4821 - DNA, 25 bp, SARS Virus
tgtgaaagtttctccttacgggttt

SEQ ID NO: 4822 - DNA, 25 bp, SARS Virus
gtgaaagtttcctcttacgggtttc

SEQ ID NO: 4823 - DNA, 25 bp, SARS Virus
tgaaagtttccctttacgggtttca

SEQ ID NO: 4824 - DNA, 25 bp, SARS Virus
gaaagtttccccttacgggtttcaa

SEQ ID NO: 4825 - DNA, 25 bp, SARS Virus
aaagtttccccttacgggtttcaaa

SEQ ID NO: 4826 - DNA, 25 bp, SARS Virus
aagtttcccctttcgggtttcaaac

SEQ ID NO: 4827 - DNA, 25 bp, SARS Virus
agtttccccttatgggtttcaaaca

SEQ ID NO: 4828 - DNA, 25 bp, SARS Virus
gtttccccttactggtttcaaacac

SEQ ID NO: 4829 - DNA, 25 bp, SARS Virus
tttccccttacgtgtttcaaacaca

SEQ ID NO: 4830 - DNA, 25 bp, SARS Virus
ttccccttacggttttcaaacacaa

SEQ ID NO: 4831 - DNA, 25 bp, SARS Virus
tccccttacgggtttcaaacacaaa

SEQ ID NO: 4832 - DNA, 25 bp, SARS Virus
ccccttacgggtttcaaacacaaag

SEQ ID NO: 4833 - DNA, 25 bp, SARS Virus
cccttacgggtttcaaacacaaagg

SEQ ID NO: 4834 - DNA, 25 bp, SARS Virus
ccttacgggttttaaacacaaagga

SEQ ID NO: 4835 - DNA, 25 bp, SARS Virus
cttacgggtttctaacacaaaggag

SEQ ID NO: 4836 - DNA, 25 bp, SARS Virus
ttacgggtttcatacacaaaggaga

SEQ ID NO: 4837 - DNA, 25 bp, SARS Virus
tacgggtttcaatcacaaaggagaa

SEQ ID NO: 4838 - DNA, 25 bp, SARS Virus
acgggtttcaaatacaaaggagaat

SEQ ID NO: 4839 - DNA, 25 bp, SARS Virus
cgggtttcaaactcaaaggagaatt

SEQ ID NO: 4840 - DNA, 25 bp, SARS Virus
gggtttcaaacataaaggagaattg

SEQ ID NO: 4841 - DNA, 25 bp, SARS Virus
ggtttcaaacactaaggagaattga

SEQ ID NO: 4842 - DNA, 25 bp, SARS Virus
gtttcaaacacataggagaattgag

SEQ ID NO: 4843 - DNA, 25 bp, SARS Virus
tttcaaacacaatggagaattgagt

SEQ ID NO: 4844 - DNA, 25 bp, SARS Virus
ttcaaacacaaatgagaattgagtt

SEQ ID NO: 4845 - DNA, 25 bp, SARS Virus
tcaaacacaaagtagaattgagttt

SEQ ID NO: 4846 - DNA, 25 bp, SARS Virus
caaacacaaaggtgaattgagtttt

SEQ ID NO: 4847 - DNA, 25 bp, SARS Virus
aaacacaaaggataattgagttttc

SEQ ID NO: 4848 - DNA, 25 bp, SARS Virus
aacacaaaggagtattgagttttca

SEQ ID NO: 4849 - DNA, 25 bp, SARS Virus
acacaaaggagatttgagttttcag

SEQ ID NO: 4850 - DNA, 25 bp, SARS Virus
cacaaaggagaattgagttttcagt

SEQ ID NO: 4851 - DNA, 25 bp, SARS Virus
acaaaggagaattgagttttcagtt

SEQ ID NO: 4852 - DNA, 25 bp, SARS Virus
caaaggagaatttagttttcagttt

SEQ ID NO: 4853 - DNA, 25 bp, SARS Virus
aaaggagaattgtgttttcagtttc

SEQ ID NO: 4854 - DNA, 25 bp, SARS Virus
aaggagaattgatttttcagtttca

SEQ ID NO: 4855 - DNA, 25 bp, SARS Virus
aggagaattgagttttcagtttcag

SEQ ID NO: 4856 - DNA, 25 bp, SARS Virus
ggagaattgagttttcagtttcagt

SEQ ID NO: 4857 - DNA, 25 bp, SARS Virus
gagaattgagttttcagtttcagta

SEQ ID NO: 4858 - DNA, 25 bp, SARS Virus
agaattgagttttcagtttcagtaa

SEQ ID NO: 4859 - DNA, 25 bp, SARS Virus
gaattgagtttttagtttcagtaag

SEQ ID NO: 4860 - DNA, 25 bp, SARS Virus
aattgagttttctgtttcagtaagt

SEQ ID NO: 4861 - DNA, 25 bp, SARS Virus
attgagttttcattttcagtaagtt

SEQ ID NO: 4862 - DNA, 25 bp, SARS Virus
ttgagttttcagtttcagtaagttg

SEQ ID NO: 4863 - DNA, 25 bp, SARS Virus
tgagttttcagtttcagtaagttgg

SEQ ID NO: 4864 - DNA, 25 bp, SARS Virus
gagttttcagtttcagtaagttggt

SEQ ID NO: 4865 - DNA, 25 bp, SARS Virus
agttttcagttttagtaagttggtg

SEQ ID NO: 4866 - DNA, 25 bp, SARS Virus
gttttcagtttctgtaagttggtgc

SEQ ID NO: 4867 - DNA, 25 bp, SARS Virus
ttttcagtttcattaagttggtgca

SEQ ID NO: 4868 - DNA, 25 bp, SARS Virus
tttcagtttcagtaagttggtgcac

SEQ ID NO: 4869 - DNA, 25 bp, SARS Virus
ttcagtttcagttagttggtgcaca

SEQ ID NO: 4870 - DNA, 25 bp, SARS Virus
tcagtttcagtatgttggtgcacaa

SEQ ID NO: 4871 - DNA, 25 bp, SARS Virus
cagtttcagtaatttggtgcacaac

SEQ ID NO: 4872 - DNA, 25 bp, SARS Virus
agtttcagtaagttggtgcacaact

SEQ ID NO: 4873 - DNA, 25 bp, SARS Virus
gtttcagtaagttggtgcacaactt

SEQ ID NO: 4874 - DNA, 25 bp, SARS Virus
tttcagtaagtttgtgcacaacttt

SEQ ID NO: 4875 - DNA, 25 bp, SARS Virus
ttcagtaagttgttgcacaactttt

SEQ ID NO: 4876 - DNA, 25 bp, SARS Virus
tcagtaagttggtgcacaacttttc

SEQ ID NO: 4877 - DNA, 25 bp, SARS Virus
cagtaagttggttcacaacttttct

SEQ ID NO: 4878 - DNA, 25 bp, SARS Virus
agtaagttggtgtacaacttttctt

SEQ ID NO: 4879 - DNA, 25 bp, SARS Virus
gtaagttggtgctcaacttttcttt

SEQ ID NO: 4880 - DNA, 25 bp, SARS Virus
taagttggtgcataacttttctttt

SEQ ID NO: 4881 - DNA, 25 bp, SARS Virus
aagttggtgcactacttttcttttt

SEQ ID NO: 4882 - DNA, 25 bp, SARS Virus
agttggtgcacatcttttctttttc

SEQ ID NO: 4883 - DNA, 25 bp, SARS Virus
gttggtgcacaatttttctttttct

SEQ ID NO: 4884 - DNA, 25 bp, SARS Virus
ttggtgcacaacttttctttttctg

SEQ ID NO: 4885 - DNA, 25 bp, SARS Virus
tggtgcacaacttttctttttctga

SEQ ID NO: 4886 - DNA, 25 bp, SARS Virus
ggtgcacaacttttctttttctgac

SEQ ID NO: 4887 - DNA, 25 bp, SARS Virus
gtgcacaacttttctttttctgact

SEQ ID NO: 4888 - DNA, 25 bp, SARS Virus
tgcacaacttttttttttctgactc

SEQ ID NO: 4889 - DNA, 25 bp, SARS Virus
gcacaacttttctttttctgactcc

SEQ ID NO: 4890 - DNA, 25 bp, SARS Virus
cacaacttttctttttctgactccc

SEQ ID NO: 4891 - DNA, 25 bp, SARS Virus
acaacttttctttttctgactccca

SEQ ID NO: 4892 - DNA, 25 bp, SARS Virus
caacttttctttttctgactcccaa

SEQ ID NO: 4893 - DNA, 25 bp, SARS Virus
aacttttctttttctgactcccaaa

SEQ ID NO: 4894 - DNA, 25 bp, SARS Virus
acttttctttttttgactcccaaag

SEQ ID NO: 4895 - DNA, 25 bp, SARS Virus
cttttctttttctgactcccaaagt

SEQ ID NO: 4896 - DNA, 25 bp, SARS Virus
ttttctttttcttactcccaaagta

SEQ ID NO: 4897 - DNA, 25 bp, SARS Virus
tttctttttctgtctcccaaagtac

SEQ ID NO: 4898 - DNA, 25 bp, SARS Virus
ttctttttctgattcccaaagtacc

SEQ ID NO: 4899 - DNA, 25 bp, SARS Virus
tctttttctgactcccaaagtaccc

SEQ ID NO: 4900 - DNA, 25 bp, SARS Virus
ctttttctgacttccaaagtacccc

SEQ ID NO: 4901 - DNA, 25 bp, SARS Virus
tttttctgactctcaaagtaccccg

SEQ ID NO: 4902 - DNA, 25 bp, SARS Virus
ttttctgactcctaaagtaccccgc

SEQ ID NO: 4903 - DNA, 25 bp, SARS Virus
tttctgactccctaagtaccccgca

SEQ ID NO: 4904 - DNA, 25 bp, SARS Virus
ttctgactcccatagtaccccgcat

SEQ ID NO: 4905 - DNA, 25 bp, SARS Virus
tctgactcccaatgtaccccgcata

SEQ ID NO: 4906 - DNA, 25 bp, SARS Virus
ctgactcccaaattaccccgcatat

SEQ ID NO: 4907 - DNA, 25 bp, SARS Virus
tgactcccaaagtaccccgcatatg

SEQ ID NO: 4908 - DNA, 25 bp, SARS Virus
gactcccaaagttccccgcatatgc

SEQ ID NO: 4909 - DNA, 25 bp, SARS Virus
actcccaaagtatcccgcatatgcg

SEQ ID NO: 4910 - DNA, 25 bp, SARS Virus
ctcccaaagtactccgcatatgcga

SEQ ID NO: 4911 - DNA, 25 bp, SARS Virus
tcccaaagtacctcgcatatgcgag

SEQ ID NO: 4912 - DNA, 25 bp, SARS Virus
cccaaagtaccctgcatatgcgaga

SEQ ID NO: 4913 - DNA, 25 bp, SARS Virus
ccaaagtacccctcatatgcgagac

SEQ ID NO: 4914 - DNA, 25 bp, SARS Virus
caaagtaccccgtatatgcgagaca

SEQ ID NO: 4915 - DNA, 25 bp, SARS Virus
aaagtaccccgcttatgcgagacac

SEQ ID NO: 4916 - DNA, 25 bp, SARS Virus
aagtaccccgcatatgcgagacaca

SEQ ID NO: 4917 - DNA, 25 bp, SARS Virus
agtaccccgcatttgcgagacacat

SEQ ID NO: 4918 - DNA, 25 bp, SARS Virus
gtaccccgcatatgcgagacacatg

SEQ ID NO: 4919 - DNA, 25 bp, SARS Virus
taccccgcatattcgagacacatgg

SEQ ID NO: 4920 - DNA, 25 bp, SARS Virus
accccgcatatgtgagacacatggg

SEQ ID NO: 4921 - DNA, 25 bp, SARS Virus
ccccgcatatgctagacacatggga

SEQ ID NO: 4922 - DNA, 25 bp, SARS Virus
cccgcatatgcgtgacacatgggac

SEQ ID NO: 4923 - DNA, 25 bp, SARS Virus
ccgcatatgcgatacacatgggaca

SEQ ID NO: 4924 - DNA, 25 bp, SARS Virus
cgcatatgcgagtcacatgggacaa

SEQ ID NO: 4925 - DNA, 25 bp, SARS Virus
gcatatgcgagatacatgggacaac

SEQ ID NO: 4926 - DNA, 25 bp, SARS Virus
catatgcgagactcatgggacaacg

SEQ ID NO: 4927 - DNA, 25 bp, SARS Virus
atatgcgagacatatgggacaacgt

SEQ ID NO: 4928 - DNA, 25 bp, SARS Virus
tatgcgagacacttgggacaacgta

SEQ ID NO: 4929 - DNA, 25 bp, SARS Virus
atgcgagacacatgggacaacgtag

SEQ ID NO: 4930 - DNA, 25 bp, SARS Virus
tgcgagacacattggacaacgtaga

SEQ ID NO: 4931 - DNA, 25 bp, SARS Virus
gcgagacacatgtgacaacgtagag

SEQ ID NO: 4932 - DNA, 25 bp, SARS Virus
cgagacacatggtacaacgtagagg

SEQ ID NO: 4933 - DNA, 25 bp, SARS Virus
gagacacatgggtcaacgtagaggt

SEQ ID NO: 4934 - DNA, 25 bp, SARS Virus
agacacatgggataacgtagaggtg

SEQ ID NO: 4935 - DNA, 25 bp, SARS Virus
gacacatgggactacgtagaggtgt

SEQ ID NO: 4936 - DNA, 25 bp, SARS Virus
acacatgggacatcgtagaggtgtc

SEQ ID NO: 4937 - DNA, 25 bp, SARS Virus
cacatgggacaatgtagaggtgtcc

SEQ ID NO: 4938 - DNA, 25 bp, SARS Virus
acatgggacaacttagaggtgtcct

SEQ ID NO: 4939 - DNA, 25 bp, SARS Virus
catgggacaacgtagaggtgtcctc

SEQ ID NO: 4940 - DNA, 25 bp, SARS Virus
atgggacaacgttgaggtgtcctca

SEQ ID NO: 4941 - DNA, 25 bp, SARS Virus
tgggacaacgtataggtgtcctcac

SEQ ID NO: 4942 - DNA, 25 bp, SARS Virus
gggacaacgtagtggtgtcctcaca

SEQ ID NO: 4943 - DNA, 25 bp, SARS Virus
ggacaacgtagatgtgtcctcacat

SEQ ID NO: 4944 - DNA, 25 bp, SARS Virus
gacaacgtagagttgtcctcacatt

SEQ ID NO: 4945 - DNA, 25 bp, SARS Virus
acaacgtagaggtgtcctcacattg

SEQ ID NO: 4946 - DNA, 25 bp, SARS Virus
caacgtagaggtttcctcacattgt

SEQ ID NO: 4947 - DNA, 25 bp, SARS Virus
aacgtagaggtgtcctcacattgtt

SEQ ID NO: 4948 - DNA, 25 bp, SARS Virus
acgtagaggtgttctcacattgtta

SEQ ID NO: 4949 - DNA, 25 bp, SARS Virus
cgtagaggtgtcttcacattgttat

SEQ ID NO: 4950 - DNA, 25 bp, SARS Virus
gtagaggtgtcctcacattgttata

SEQ ID NO: 4951 - DNA, 25 bp, SARS Virus
tagaggtgtccttacattgttatac

SEQ ID NO: 4952 - DNA, 25 bp, SARS Virus
agaggtgtcctctcattgttatacg

SEQ ID NO: 4953 - DNA, 25 bp, SARS Virus
gaggtgtcctcatattgttatacgt

SEQ ID NO: 4954 - DNA, 25 bp, SARS Virus
aggtgtcctcactttgttatacgtg

SEQ ID NO: 4955 - DNA, 25 bp, SARS Virus
ggtgtcctcacattgttatacgtga

SEQ ID NO: 4956 - DNA, 25 bp, SARS Virus
gtgtcctcacattgttatacgtgaa

SEQ ID NO: 4957 - DNA, 25 bp, SARS Virus
tgtcctcacatttttatacgtgaac

SEQ ID NO: 4958 - DNA, 25 bp, SARS Virus
gtcctcacattgttatacgtgaaca

SEQ ID NO: 4959 - DNA, 25 bp, SARS Virus
tcctcacattgttatacgtgaacag

SEQ ID NO: 4960 - DNA, 25 bp, SARS Virus
cctcacattgttttacgtgaacaga

SEQ ID NO: 4961 - DNA, 25 bp, SARS Virus
ctcacattgttatacgtgaacagat

SEQ ID NO: 4962 - DNA, 25 bp, SARS Virus
tcacattgttattcgtgaacagatg

SEQ ID NO: 4963 - DNA, 25 bp, SARS Virus
cacattgttatatgtgaacagatgg

SEQ ID NO: 4964 - DNA, 25 bp, SARS Virus
acattgttatacttgaacagatgga

SEQ ID NO: 4965 - DNA, 25 bp, SARS Virus
cattgttatacgtgaacagatggaa

SEQ ID NO: 4966 - DNA, 25 bp, SARS Virus
attgttatacgttaacagatggaac

SEQ ID NO: 4967 - DNA, 25 bp, SARS Virus
ttgttatacgtgtacagatggaact

SEQ ID NO: 4968 - DNA, 25 bp, SARS Virus
tgttatacgtgatcagatggaacta

SEQ ID NO: 4969 - DNA, 25 bp, SARS Virus
gttatacgtgaatagatggaactac

SEQ ID NO: 4970 - DNA, 25 bp, SARS Virus
ttatacgtgaactgatggaactact

SEQ ID NO: 4971 - DNA, 25 bp, SARS Virus
tatacgtgaacatatggaactactt

SEQ ID NO: 4972 - DNA, 25 bp, SARS Virus
atacgtgaacagttggaactacttt

SEQ ID NO: 4973 - DNA, 25 bp, SARS Virus
tacgtgaacagatggaactacttta

SEQ ID NO: 4974 - DNA, 25 bp, SARS Virus
acgtgaacagattgaactactttac

SEQ ID NO: 4975 - DNA, 25 bp, SARS Virus
cgtgaacagatgtaactactttaca

SEQ ID NO: 4976 - DNA, 25 bp, SARS Virus
gtgaacagatggtactactttacat

SEQ ID NO: 4977 - DNA, 25 bp, SARS Virus
tgaacagatggatctactttacatt

SEQ ID NO: 4978 - DNA, 25 bp, SARS Virus
gaacagatggaattactttacatta

SEQ ID NO: 4979 - DNA, 25 bp, SARS Virus
aacagatggaactactttacattag

SEQ ID NO: 4980 - DNA, 25 bp, SARS Virus
acagatggaacttctttacattagt

SEQ ID NO: 4981 - DNA, 25 bp, SARS Virus
cagatggaactattttacattagta

SEQ ID NO: 4982 - DNA, 25 bp, SARS Virus
agatggaactactttacattagtaa

SEQ ID NO: 4983 - DNA, 25 bp, SARS Virus
gatggaactactttacattagtaac

SEQ ID NO: 4984 - DNA, 25 bp, SARS Virus
atggaactactttacattagtaacg

SEQ ID NO: 4985 - DNA, 25 bp, SARS Virus
tggaactacttttcattagtaacgc

SEQ ID NO: 4986 - DNA, 25 bp, SARS Virus
ggaactactttatattagtaacgct

SEQ ID NO: 4987 - DNA, 25 bp, SARS Virus
gaactactttactttagtaacgcta

SEQ ID NO: 4988 - DNA, 25 bp, SARS Virus
aactactttacattagtaacgctac

SEQ ID NO: 4989 - DNA, 25 bp, SARS Virus
actactttacattagtaacgctact

SEQ ID NO: 4990 - DNA, 25 bp, SARS Virus
ctactttacatttgtaacgctactt

SEQ ID NO: 4991 - DNA, 25 bp, SARS Virus
tactttacattattaacgctacttc

SEQ ID NO: 4992 - DNA, 25 bp, SARS Virus
actttacattagtaacgctacttca

SEQ ID NO: 4993 - DNA, 25 bp, SARS Virus
ctttacattagttacgctacttcaa

SEQ ID NO: 4994 - DNA, 25 bp, SARS Virus
tttacattagtatcgctacttcaaa

SEQ ID NO: 4995 - DNA, 25 bp, SARS Virus
ttacattagtaatgctacttcaaag

SEQ ID NO: 4996 - DNA, 25 bp, SARS Virus
tacattagtaactctacttcaaagt

SEQ ID NO: 4997 - DNA, 25 bp, SARS Virus
acattagtaacgttacttcaaagta

SEQ ID NO: 4998 - DNA, 25 bp, SARS Virus
cattagtaacgctacttcaaagtac

SEQ ID NO: 4999 - DNA, 25 bp, SARS Virus
attagtaacgcttcttcaaagtacc

SEQ ID NO: 5000 - DNA, 25 bp, SARS Virus
ttagtaacgctatttcaaagtaccg

SEQ ID NO: 5001 - DNA, 25 bp, SARS Virus
tagtaacgctacttcaaagtaccgt

SEQ ID NO: 5002 - DNA, 25 bp, SARS Virus
agtaacgctacttcaaagtaccgtc

SEQ ID NO: 5003 - DNA, 25 bp, SARS Virus
gtaacgctactttaaagtaccgtct

SEQ ID NO: 5004 - DNA, 25 bp, SARS Virus
taacgctacttctaagtaccgtctg

SEQ ID NO: 5005 - DNA, 25 bp, SARS Virus
aacgctacttcatagtaccgtctgc

SEQ ID NO: 5006 - DNA, 25 bp, SARS Virus
acgctacttcaatgtaccgtctgca

SEQ ID NO: 5007 - DNA, 25 bp, SARS Virus
cgctacttcaaattaccgtctgcac

SEQ ID NO: 5008 - DNA, 25 bp, SARS Virus
gctacttcaaagtaccgtctgcacg

SEQ ID NO: 5009 - DNA, 25 bp, SARS Virus
ctacttcaaagtaccgtctgcacgc

SEQ ID NO: 5010 - DNA, 25 bp, SARS Virus
tacttcaaagtaacgtctgcacgct

SEQ ID NO: 5011 - DNA, 25 bp, SARS Virus
acttcaaagtacagtctgcacgctg

SEQ ID NO: 5012 - DNA, 25 bp, SARS Virus
cttcaaagtaccatctgcacgctga

SEQ ID NO: 5013 - DNA, 25 bp, SARS Virus
ttcaaagtaccgactgcacgctgaa

SEQ ID NO: 5014 - DNA, 25 bp, SARS Virus
tcaaagtaccgtatgcacgctgaaa

SEQ ID NO: 5015 - DNA, 25 bp, SARS Virus
caaagtaccgtcagcacgctgaaag

SEQ ID NO: 5016 - DNA, 25 bp, SARS Virus
aaagtaccgtctacacgctgaaaga

SEQ ID NO: 5017 - DNA, 25 bp, SARS Virus
aagtaccgtctgaacgctgaaagac

SEQ ID NO: 5018 - DNA, 25 bp, SARS Virus
agtaccgtctgcacgctgaaagact

SEQ ID NO: 5019 - DNA, 25 bp, SARS Virus
gtaccgtctgcaagctgaaagactt

SEQ ID NO: 5020 - DNA, 25 bp, SARS Virus
taccgtctgcacactgaaagacttt

SEQ ID NO: 5021 - DNA, 25 bp, SARS Virus
accgtctgcacgatgaaagactttc

SEQ ID NO: 5022 - DNA, 25 bp, SARS Virus
ccgtctgcacgcagaaagactttcg

SEQ ID NO: 5023 - DNA, 25 bp, SARS Virus
cgtctgcacgctaaaagactttcgg

SEQ ID NO: 5024 - DNA, 25 bp, SARS Virus
gtctgcacgctgaaagactttcggt

SEQ ID NO: 5025 - DNA, 25 bp, SARS Virus
tctgcacgctgaaagactttcggtg

SEQ ID NO: 5026 - DNA, 25 bp, SARS Virus
ctgcacgctgaaagactttcggtga

SEQ ID NO: 5027 - DNA, 25 bp, SARS Virus
tgcacgctgaaaaactttcggtgaa

SEQ ID NO: 5028 - DNA, 25 bp, SARS Virus
gcacgctgaaagactttcggtgaac

SEQ ID NO: 5029 - DNA, 25 bp, SARS Virus
cacgctgaaagaatttcggtgaaca

SEQ ID NO: 5030 - DNA, 25 bp, SARS Virus
acgctgaaagacattcggtgaacac

SEQ ID NO: 5031 - DNA, 25 bp, SARS Virus
cgctgaaagactatcggtgaacact

SEQ ID NO: 5032 - DNA, 25 bp, SARS Virus
gctgaaagacttacggtgaacactt

SEQ ID NO: 5033 - DNA, 25 bp, SARS Virus
ctgaaagactttaggtgaacacttg

SEQ ID NO: 5034 - DNA, 25 bp, SARS Virus
tgaaagactttcagtgaacacttgt

SEQ ID NO: 5035 - DNA, 25 bp, SARS Virus
gaaagactttcgatgaacacttgta

SEQ ID NO: 5036 - DNA, 25 bp, SARS Virus
aaagactttcggagaacacttgtaa

SEQ ID NO: 5037 - DNA, 25 bp, SARS Virus
aagactttcggtaaacacttgtaac

SEQ ID NO: 5038 - DNA, 25 bp, SARS Virus
agactttcggtgaacacttgtaaca

SEQ ID NO: 5039 - DNA, 25 bp, SARS Virus
gactttcggtgaacacttgtaacac

SEQ ID NO: 5040 - DNA, 25 bp, SARS Virus
actttcggtgaaaacttgtaacacc

SEQ ID NO: 5041 - DNA, 25 bp, SARS Virus
ctttcggtgaacacttgtaacaccg

SEQ ID NO: 5042 - DNA, 25 bp, SARS Virus
tttcggtgaacaattgtaacaccgt

SEQ ID NO: 5043 - DNA, 25 bp, SARS Virus
ttcggtgaacacatgtaacaccgtg

SEQ ID NO: 5044 - DNA, 25 bp, SARS Virus
tcggtgaacactagtaacaccgtga

SEQ ID NO: 5045 - DNA, 25 bp, SARS Virus
cggtgaacacttataacaccgtgac

SEQ ID NO: 5046 - DNA, 25 bp, SARS Virus
ggtgaacacttgaaacaccgtgact

SEQ ID NO: 5047 - DNA, 25 bp, SARS Virus
gtgaacacttgtaacaccgtgactt

SEQ ID NO: 5048 - DNA, 25 bp, SARS Virus
tgaacacttgtaacaccgtgacttt

SEQ ID NO: 5049 - DNA, 25 bp, SARS Virus
gaacacttgtaaaaccgtgactttt

SEQ ID NO: 5050 - DNA, 25 bp, SARS Virus
aacacttgtaacaccgtgactttta

SEQ ID NO: 5051 - DNA, 25 bp, SARS Virus
acacttgtaacaacgtgacttttaa

SEQ ID NO: 5052 - DNA, 25 bp, SARS Virus
cacttgtaacacagtgacttttaaa

SEQ ID NO: 5053 - DNA, 25 bp, SARS Virus
acttgtaacaccatgacttttaaat

SEQ ID NO: 5054 - DNA, 25 bp, SARS Virus
cttgtaacaccgagacttttaaatc

SEQ ID NO: 5055 - DNA, 25 bp, SARS Virus
ttgtaacaccgtaacttttaaatca

SEQ ID NO: 5056 - DNA, 25 bp, SARS Virus
tgtaacaccgtgacttttaaatcaa

SEQ ID NO: 5057 - DNA, 25 bp, SARS Virus
gtaacaccgtgaattttaaatcaat

SEQ ID NO: 5058 - DNA, 25 bp, SARS Virus
taacaccgtgacatttaaatcaata

SEQ ID NO: 5059 - DNA, 25 bp, SARS Virus
aacaccgtgactattaaatcaataa

SEQ ID NO: 5060 - DNA, 25 bp, SARS Virus
acaccgtgacttataaatcaataac

SEQ ID NO: 5061 - DNA, 25 bp, SARS Virus
caccgtgactttaaaatcaataact

SEQ ID NO: 5062 - DNA, 25 bp, SARS Virus
accgtgacttttaaatcaataactt

SEQ ID NO: 5063 - DNA, 25 bp, SARS Virus
ccgtgacttttaaatcaataacttc

SEQ ID NO: 5064 - DNA, 25 bp, SARS Virus
cgtgacttttaaatcaataacttcc

SEQ ID NO: 5065 - DNA, 25 bp, SARS Virus
gtgacttttaaaacaataacttcct

SEQ ID NO: 5066 - DNA, 25 bp, SARS Virus
tgacttttaaataaataacttcctg

SEQ ID NO: 5067 - DNA, 25 bp, SARS Virus
gacttttaaatcaataacttcctgg

SEQ ID NO: 5068 - DNA, 25 bp, SARS Virus
acttttaaatcaataacttcctgga

SEQ ID NO: 5069 - DNA, 25 bp, SARS Virus
cttttaaatcaaaaacttcctggat

SEQ ID NO: 5070 - DNA, 25 bp, SARS Virus
ttttaaatcaataacttcctggatg

SEQ ID NO: 5071 - DNA, 25 bp, SARS Virus
tttaaatcaataacttcctggatga

SEQ ID NO: 5072 - DNA, 25 bp, SARS Virus
ttaaatcaataaattcctggatgat

SEQ ID NO: 5073 - DNA, 25 bp, SARS Virus
taaatcaataacatcctggatgatg

SEQ ID NO: 5074 - DNA, 25 bp, SARS Virus
aaatcaataactacctggatgatgt

SEQ ID NO: 5075 - DNA, 25 bp, SARS Virus
aatcaataacttactggatgatgta

SEQ ID NO: 5076 - DNA, 25 bp, SARS Virus
atcaataacttcatggatgatgtac

SEQ ID NO: 5077 - DNA, 25 bp, SARS Virus
tcaataacttccaggatgatgtaca

SEQ ID NO: 5078 - DNA, 25 bp, SARS Virus
caataacttcctagatgatgtacac

SEQ ID NO: 5079 - DNA, 25 bp, SARS Virus
aataacttcctgaatgatgtacacc

SEQ ID NO: 5080 - DNA, 25 bp, SARS Virus
ataacttcctggatgatgtacaccc

SEQ ID NO: 5081 - DNA, 25 bp, SARS Virus
taacttcctggaagatgtacaccca

SEQ ID NO: 5082 - DNA, 25 bp, SARS Virus
aacttcctggataatgtacacccat

SEQ ID NO: 5083 - DNA, 25 bp, SARS Virus
acttcctggatgatgtacacccatg

SEQ ID NO: 5084 - DNA, 25 bp, SARS Virus
cttcctggatgaagtacacccatgg

SEQ ID NO: 5085 - DNA, 25 bp, SARS Virus
ttcctggatgatatacacccatgga

SEQ ID NO: 5086 - DNA, 25 bp, SARS Virus
tcctggatgatgaacacccatggat

SEQ ID NO: 5087 - DNA, 25 bp, SARS Virus
cctggatgatgtacacccatggatg

SEQ ID NO: 5088 - DNA, 25 bp, SARS Virus
ctggatgatgtaaacccatggatgg

SEQ ID NO: 5089 - DNA, 25 bp, SARS Virus
tggatgatgtacacccatggatgga

SEQ ID NO: 5090 - DNA, 25 bp, SARS Virus
ggatgatgtacaaccatggatggat

SEQ ID NO: 5091 - DNA, 25 bp, SARS Virus
gatgatgtacacacatggatggatg

SEQ ID NO: 5092 - DNA, 25 bp, SARS Virus
atgatgtacaccaatggatggatga

SEQ ID NO: 5093 - DNA, 25 bp, SARS Virus
tgatgtacacccatggatggatgat

SEQ ID NO: 5094 - DNA, 25 bp, SARS Virus
gatgtacacccaaggatggatgatt

SEQ ID NO: 5095 - DNA, 25 bp, SARS Virus
atgtacacccatagatggatgatta

SEQ ID NO: 5096 - DNA, 25 bp, SARS Virus
tgtacacccatgaatggatgattac

SEQ ID NO: 5097 - DNA, 25 bp, SARS Virus
gtacacccatggatggatgattacg

SEQ ID NO: 5098 - DNA, 25 bp, SARS Virus
tacacccatggaaggatgattacga

SEQ ID NO: 5099 - DNA, 25 bp, SARS Virus
acacccatggatagatgattacgac

SEQ ID NO: 5100 - DNA, 25 bp, SARS Virus
cacccatggatgaatgattacgaca

SEQ ID NO: 5101 - DNA, 25 bp, SARS Virus
acccatggatggatgattacgacat

SEQ ID NO: 5102 - DNA, 25 bp, SARS Virus
cccatggatggaagattacgacatc

SEQ ID NO: 5103 - DNA, 25 bp, SARS Virus
ccatggatggataattacgacatca

SEQ ID NO: 5104 - DNA, 25 bp, SARS Virus
catggatggatgattacgacatcac

SEQ ID NO: 5105 - DNA, 25 bp, SARS Virus
atggatggatgaatacgacatcact

SEQ ID NO: 5106 - DNA, 25 bp, SARS Virus
tggatggatgataacgacatcactt

SEQ ID NO: 5107 - DNA, 25 bp, SARS Virus
ggatggatgattacgacatcacttt

SEQ ID NO: 5108 - DNA, 25 bp, SARS Virus
gatggatgattaagacatcactttt

SEQ ID NO: 5109 - DNA, 25 bp, SARS Virus
atggatgattacaacatcactttta

SEQ ID NO: 5110 - DNA, 25 bp, SARS Virus
tggatgattacgacatcacttttac

SEQ ID NO: 5111 - DNA, 25 bp, SARS Virus
ggatgattacgaaatcacttttacg

SEQ ID NO: 5112 - DNA, 25 bp, SARS Virus
gatgattacgacatcacttttacgg

SEQ ID NO: 5113 - DNA, 25 bp, SARS Virus
atgattacgacaacacttttacggt

SEQ ID NO: 5114 - DNA, 25 bp, SARS Virus
tgattacgacataacttttacggta

SEQ ID NO: 5115 - DNA, 25 bp, SARS Virus
gattacgacatcacttttacggtac

SEQ ID NO: 5116 - DNA, 25 bp, SARS Virus
attacgacatcaattttacggtaca

SEQ ID NO: 5117 - DNA, 25 bp, SARS Virus
ttacgacatcacatttacggtacag

SEQ ID NO: 5118 - DNA, 25 bp, SARS Virus
tacgacatcactattacggtacagg

SEQ ID NO: 5119 - DNA, 25 bp, SARS Virus
acgacatcacttatacggtacagga

SEQ ID NO: 5120 - DNA, 25 bp, SARS Virus
cgacatcactttaacggtacaggac

SEQ ID NO: 5121 - DNA, 25 bp, SARS Virus
gacatcacttttacggtacaggacg

SEQ ID NO: 5122 - DNA, 25 bp, SARS Virus
acatcacttttaaggtacaggacgg

SEQ ID NO: 5123 - DNA, 25 bp, SARS Virus
catcacttttacagtacaggacgga

SEQ ID NO: 5124 - DNA, 25 bp, SARS Virus
atcacttttacgatacaggacggac

SEQ ID NO: 5125 - DNA, 25 bp, SARS Virus
tcacttttacggaacaggacggaca

SEQ ID NO: 5126 - DNA, 25 bp, SARS Virus
cacttttacggtacaggacggacag

SEQ ID NO: 5127 - DNA, 25 bp, SARS Virus
acttttacggtaaaggacggacagt

SEQ ID NO: 5128 - DNA, 25 bp, SARS Virus
cttttacggtacaggacggacagtt

SEQ ID NO: 5129 - DNA, 25 bp, SARS Virus
ttttacggtacaagacggacagttc

SEQ ID NO: 5130 - DNA, 25 bp, SARS Virus
tttacggtacagaacggacagttct

SEQ ID NO: 5131 - DNA, 25 bp, SARS Virus
ttacggtacaggacggacagttctg

SEQ ID NO: 5132 - DNA, 25 bp, SARS Virus
tacggtacaggaaggacagttctgg

SEQ ID NO: 5133 - DNA, 25 bp, SARS Virus
acggtacaggacagacagttctggg

SEQ ID NO: 5134 - DNA, 25 bp, SARS Virus
cggtacaggacgaacagttctgggt

SEQ ID NO: 5135 - DNA, 25 bp, SARS Virus
ggtacaggacggacagttctgggtc

SEQ ID NO: 5136 - DNA, 25 bp, SARS Virus
gtacaggacggaaagttctgggtct

SEQ ID NO: 5137 - DNA, 25 bp, SARS Virus
tacaggacggacagttctgggtctc

SEQ ID NO: 5138 - DNA, 25 bp, SARS Virus
acaggacggacaattctgggtctct

SEQ ID NO: 5139 - DNA, 25 bp, SARS Virus
caggacggacagatctgggtctcta

SEQ ID NO: 5140 - DNA, 25 bp, SARS Virus
aggacggacagtactgggtctctaa

SEQ ID NO: 5141 - DNA, 25 bp, SARS Virus
ggacggacagttatgggtctctaac

SEQ ID NO: 5142 - DNA, 25 bp, SARS Virus
gacggacagttcagggtctctaacc

SEQ ID NO: 5143 - DNA, 25 bp, SARS Virus
acggacagttctaggtctctaacct

SEQ ID NO: 5144 - DNA, 25 bp, SARS Virus
cggacagttctgagtctctaacctg

SEQ ID NO: 5145 - DNA, 25 bp, SARS Virus
ggacagttctggatctctaacctgg

SEQ ID NO: 5146 - DNA, 25 bp, SARS Virus
gacagttctgggactctaacctgga

SEQ ID NO: 5147 - DNA, 25 bp, SARS Virus
acagttctgggtatctaacctggac

SEQ ID NO: 5148 - DNA, 25 bp, SARS Virus
cagttctgggtcactaacctggact

SEQ ID NO: 5149 - DNA, 25 bp, SARS Virus
agttctgggtctataacctggactc

SEQ ID NO: 5150 - DNA, 25 bp, SARS Virus
gttctgggtctcaaacctggactcg

SEQ ID NO: 5151 - DNA, 25 bp, SARS Virus
ttctgggtctctaacctggactcgt

SEQ ID NO: 5152 - DNA, 25 bp, SARS Virus
tctgggtctctaacctggactcgta

SEQ ID NO: 5153 - DNA, 25 bp, SARS Virus
ctgggtctctaaactggactcgtat

SEQ ID NO: 5154 - DNA, 25 bp, SARS Virus
tgggtctctaacatggactcgtatc

SEQ ID NO: 5155 - DNA, 25 bp, SARS Virus
gggtctctaaccaggactcgtatca

SEQ ID NO: 5156 - DNA, 25 bp, SARS Virus
ggtctctaacctagactcgtatcac

SEQ ID NO: 5157 - DNA, 25 bp, SARS Virus
gtctctaacctgaactcgtatcaca

SEQ ID NO: 5158 - DNA, 25 bp, SARS Virus
tctctaacctggactcgtatcacaa

SEQ ID NO: 5159 - DNA, 25 bp, SARS Virus
ctctaacctggaatcgtatcacaac

SEQ ID NO: 5160 - DNA, 25 bp, SARS Virus
tctaacctggacacgtatcacaacg

SEQ ID NO: 5161 - DNA, 25 bp, SARS Virus
ctaacctggactagtatcacaacgt

SEQ ID NO: 5162 - DNA, 25 bp, SARS Virus
taacctggactcatatcacaacgtc

SEQ ID NO: 5163 - DNA, 25 bp, SARS Virus
aacctggactcgaatcacaacgtct

SEQ ID NO: 5164 - DNA, 25 bp, SARS Virus
acctggactcgtatcacaacgtcta

SEQ ID NO: 5165 - DNA, 25 bp, SARS Virus
cctggactcgtaacacaacgtctaa

SEQ ID NO: 5166 - DNA, 25 bp, SARS Virus
ctggactcgtataacaacgtctaat

SEQ ID NO: 5167 - DNA, 25 bp, SARS Virus
tggactcgtatcacaacgtctaata

SEQ ID NO: 5168 - DNA, 25 bp, SARS Virus
ggactcgtatcaaaacgtctaatag

SEQ ID NO: 5169 - DNA, 25 bp, SARS Virus
gactcgtatcacaacgtctaatagt

SEQ ID NO: 5170 - DNA, 25 bp, SARS Virus
actcgtatcacaacgtctaatagtg

SEQ ID NO: 5171 - DNA, 25 bp, SARS Virus
ctcgtatcacaaagtctaatagtgt

SEQ ID NO: 5172 - DNA, 25 bp, SARS Virus
tcgtatcacaacatctaatagtgtt

SEQ ID NO: 5173 - DNA, 25 bp, SARS Virus
cgtatcacaacgactaatagtgttg

SEQ ID NO: 5174 - DNA, 25 bp, SARS Virus
gtatcacaacgtataatagtgttgg

SEQ ID NO: 5175 - DNA, 25 bp, SARS Virus
tatcacaacgtcaaatagtgttggt

SEQ ID NO: 5176 - DNA, 25 bp, SARS Virus
atcacaacgtctaatagtgttggtg

SEQ ID NO: 5177 - DNA, 25 bp, SARS Virus
tcacaacgtctaatagtgttggtga

SEQ ID NO: 5178 - DNA, 25 bp, SARS Virus
cacaacgtctaaaagtgttggtgag

SEQ ID NO: 5179 - DNA, 25 bp, SARS Virus
acaacgtctaatagtgttggtgagt

SEQ ID NO: 5180 - DNA, 25 bp, SARS Virus
caacgtctaataatgttggtgagtt

SEQ ID NO: 5181 - DNA, 25 bp, SARS Virus
aacgtctaatagagttggtgagttt

SEQ ID NO: 5182 - DNA, 25 bp, SARS Virus
acgtctaatagtattggtgagtttg

SEQ ID NO: 5183 - DNA, 25 bp, SARS Virus
cgtctaatagtgatggtgagtttgt

SEQ ID NO: 5184 - DNA, 25 bp, SARS Virus
gtctaatagtgtaggtgagtttgta

SEQ ID NO: 5185 - DNA, 25 bp, SARS Virus
tctaatagtgttagtgagtttgtaa

SEQ ID NO: 5186 - DNA, 25 bp, SARS Virus
ctaatagtgttgatgagtttgtaac

SEQ ID NO: 5187 - DNA, 25 bp, SARS Virus
taatagtgttggagagtttgtaact

SEQ ID NO: 5188 - DNA, 25 bp, SARS Virus
aatagtgttggtaagtttgtaactt

SEQ ID NO: 5189 - DNA, 25 bp, SARS Virus
atagtgttggtgagtttgtaacttt

SEQ ID NO: 5190 - DNA, 25 bp, SARS Virus
tagtgttggtgaatttgtaactttg

SEQ ID NO: 5191 - DNA, 25 bp, SARS Virus
agtgttggtgagattgtaactttga

SEQ ID NO: 5192 - DNA, 25 bp, SARS Virus
gtgttggtgagtatgtaactttgag

SEQ ID NO: 5193 - DNA, 25 bp, SARS Virus
tgttggtgagttagtaactttgagc

SEQ ID NO: 5194 - DNA, 25 bp, SARS Virus
gttggtgagtttataactttgagct

SEQ ID NO: 5195 - DNA, 25 bp, SARS Virus
ttggtgagtttgaaactttgagctg

SEQ ID NO: 5196 - DNA, 25 bp, SARS Virus
tggtgagtttgtaactttgagctga

SEQ ID NO: 5197 - DNA, 25 bp, SARS Virus
ggtgagtttgtaactttgagctgag

SEQ ID NO: 5198 - DNA, 25 bp, SARS Virus
gtgagtttgtaaatttgagctgagg

SEQ ID NO: 5199 - DNA, 25 bp, SARS Virus
tgagtttgtaacattgagctgaggc

SEQ ID NO: 5200 - DNA, 25 bp, SARS Virus
gagtttgtaactatgagctgaggcg

SEQ ID NO: 5201 - DNA, 25 bp, SARS Virus
agtttgtaacttagagctgaggcgt

SEQ ID NO: 5202 - DNA, 25 bp, SARS Virus
gtttgtaactttaagctgaggcgtt

SEQ ID NO: 5203 - DNA, 25 bp, SARS Virus
tttgtaactttgagctgaggcgttc

SEQ ID NO: 5204 - DNA, 25 bp, SARS Virus
ttgtaactttgaactgaggcgttcc

SEQ ID NO: 5205 - DNA, 25 bp, SARS Virus
tgtaactttgagatgaggcgttccc

SEQ ID NO: 5206 - DNA, 25 bp, SARS Virus
gtaactttgagcagaggcgttccct

SEQ ID NO: 5207 - DNA, 25 bp, SARS Virus
taactttgagctaaggcgttccctc

SEQ ID NO: 5208 - DNA, 25 bp, SARS Virus
aactttgagctgaggcgttccctcc

SEQ ID NO: 5209 - DNA, 25 bp, SARS Virus
actttgagctgaagcgttccctcca

SEQ ID NO: 5210 - DNA, 25 bp, SARS Virus
ctttgagctgagacgttccctccat

SEQ ID NO: 5211 - DNA, 25 bp, SARS Virus
tttgagctgaggagttccctccatc

SEQ ID NO: 5212 - DNA, 25 bp, SARS Virus
ttgagctgaggcattccctccatcc

SEQ ID NO: 5213 - DNA, 25 bp, SARS Virus
tgagctgaggcgatccctccatcct

SEQ ID NO: 5214 - DNA, 25 bp, SARS Virus
gagctgaggcgtaccctccatcctg

SEQ ID NO: 5215 - DNA, 25 bp, SARS Virus
agctgaggcgttacctccatcctga

SEQ ID NO: 5216 - DNA, 25 bp, SARS Virus
gctgaggcgttcactccatcctgat

SEQ ID NO: 5217 - DNA, 25 bp, SARS Virus
ctgaggcgttccatccatcctgatc

SEQ ID NO: 5218 - DNA, 25 bp, SARS Virus
tgaggcgttcccaccatcctgatct

SEQ ID NO: 5219 - DNA, 25 bp, SARS Virus
gaggcgttccctacatcctgatcta

SEQ ID NO: 5220 - DNA, 25 bp, SARS Virus
aggcgttccctcaatcctgatctac

SEQ ID NO: 5221 - DNA, 25 bp, SARS Virus
ggcgttccctccatcctgatctaca

SEQ ID NO: 5222 - DNA, 25 bp, SARS Virus
gcgttccctccaacctgatctacaa

SEQ ID NO: 5223 - DNA, 25 bp, SARS Virus
cgttccctccatactgatctacaaa

SEQ ID NO: 5224 - DNA, 25 bp, SARS Virus
gttccctccatcatgatctacaaaa

SEQ ID NO: 5225 - DNA, 25 bp, SARS Virus
ttccctccatccagatctacaaaac

SEQ ID NO: 5226 - DNA, 25 bp, SARS Virus
tccctccatcctaatctacaaaacc

SEQ ID NO: 5227 - DNA, 25 bp, SARS Virus
ccctccatcctgatctacaaaacct

SEQ ID NO: 5228 - DNA, 25 bp, SARS Virus
cctccatcctgaactacaaaacctc

SEQ ID NO: 5229 - DNA, 25 bp, SARS Virus
ctccatcctgatatacaaaacctcc

SEQ ID NO: 5230 - DNA, 25 bp, SARS Virus
tccatcctgatcaacaaaacctccg

SEQ ID NO: 5231 - DNA, 25 bp, SARS Virus
ccatcctgatctacaaaacctccga

SEQ ID NO: 5232 - DNA, 25 bp, SARS Virus
catcctgatctaaaaaacctccgac

SEQ ID NO: 5233 - DNA, 25 bp, SARS Virus
atcctgatctacaaaacctccgaca

SEQ ID NO: 5234 - DNA, 25 bp, SARS Virus
tcctgatctacaaaacctccgacac

SEQ ID NO: 5235 - DNA, 25 bp, SARS Virus
cctgatctacaaaacctccgacaca

SEQ ID NO: 5236 - DNA, 25 bp, SARS Virus
ctgatctacaaaacctccgacacac

SEQ ID NO: 5237 - DNA, 25 bp, SARS Virus
tgatctacaaaaactccgacacaca

SEQ ID NO: 5238 - DNA, 25 bp, SARS Virus
gatctacaaaacatccgacacacaa

SEQ ID NO: 5239 - DNA, 25 bp, SARS Virus
atctacaaaaccaccgacacacaaa

SEQ ID NO: 5240 - DNA, 25 bp, SARS Virus
tctacaaaacctacgacacacaaac

SEQ ID NO: 5241 - DNA, 25 bp, SARS Virus
ctacaaaacctcagacacacaaacg

SEQ ID NO: 5242 - DNA, 25 bp, SARS Virus
tacaaaacctccaacacacaaacgg

SEQ ID NO: 5243 - DNA, 25 bp, SARS Virus
acaaaacctccgacacacaaacgga

SEQ ID NO: 5244 - DNA, 25 bp, SARS Virus
caaaacctccgaaacacaaacggat

SEQ ID NO: 5245 - DNA, 25 bp, SARS Virus
aaaacctccgacacacaaacggata

SEQ ID NO: 5246 - DNA, 25 bp, SARS Virus
aaacctccgacaaacaaacggatac

SEQ ID NO: 5247 - DNA, 25 bp, SARS Virus
aacctccgacacacaaacggataca

SEQ ID NO: 5248 - DNA, 25 bp, SARS Virus
acctccgacacaaaaacggatacaa

SEQ ID NO: 5249 - DNA, 25 bp, SARS Virus
cctccgacacacaaacggatacaac

SEQ ID NO: 5250 - DNA, 25 bp, SARS Virus
ctccgacacacaaacggatacaacc

SEQ ID NO: 5251 - DNA, 25 bp, SARS Virus
tccgacacacaaacggatacaaccg

SEQ ID NO: 5252 - DNA, 25 bp, SARS Virus
ccgacacacaaaaggatacaaccga

SEQ ID NO: 5253 - DNA, 25 bp, SARS Virus
cgacacacaaacagatacaaccgac

SEQ ID NO: 5254 - DNA, 25 bp, SARS Virus
gacacacaaacgaatacaaccgacg

SEQ ID NO: 5255 - DNA, 25 bp, SARS Virus
acacacaaacggatacaaccgacga

SEQ ID NO: 5256 - DNA, 25 bp, SARS Virus
cacacaaacggaaacaaccgacgat

SEQ ID NO: 5257 - DNA, 25 bp, SARS Virus
acacaaacggatacaaccgacgata

SEQ ID NO: 5258 - DNA, 25 bp, SARS Virus
cacaaacggataaaaccgacgatat

SEQ ID NO: 5259 - DNA, 25 bp, SARS Virus
acaaacggatacaaccgacgatatt

SEQ ID NO: 5260 - DNA, 25 bp, SARS Virus
caaacggatacaaccgacgatatta

SEQ ID NO: 5261 - DNA, 25 bp, SARS Virus
aaacggatacaaacgacgatattat

SEQ ID NO: 5262 - DNA, 25 bp, SARS Virus
aacggatacaacagacgatattatt

SEQ ID NO: 5263 - DNA, 25 bp, SARS Virus
acggatacaaccaacgatattattc

SEQ ID NO: 5264 - DNA, 25 bp, SARS Virus
cggatacaaccgacgatattattcg

SEQ ID NO: 5265 - DNA, 25 bp, SARS Virus
ggatacaaccgaagatattattcgc

SEQ ID NO: 5266 - DNA, 25 bp, SARS Virus
gatacaaccgacaatattattcgca

SEQ ID NO: 5267 - DNA, 25 bp, SARS Virus
atacaaccgacgatattattcgcac

SEQ ID NO: 5268 - DNA, 25 bp, SARS Virus
tacaaccgacgaaattattcgcacg

SEQ ID NO: 5269 - DNA, 25 bp, SARS Virus
acaaccgacgatattattcgcacgg

SEQ ID NO: 5270 - DNA, 25 bp, SARS Virus
caaccgacgataatattcgcacgga

SEQ ID NO: 5271 - DNA, 25 bp, SARS Virus
aaccgacgatataattcgcacggat

SEQ ID NO: 5272 - DNA, 25 bp, SARS Virus
accgacgatattattcgcacggatg

SEQ ID NO: 5273 - DNA, 25 bp, SARS Virus
ccgacgatattaatcgcacggatga

SEQ ID NO: 5274 - DNA, 25 bp, SARS Virus
cgacgatattatacgcacggatgac

SEQ ID NO: 5275 - DNA, 25 bp, SARS Virus
gacgatattattagcacggatgacc

SEQ ID NO: 5276 - DNA, 25 bp, SARS Virus
acgatattattcacacggatgaccc

SEQ ID NO: 5277 - DNA, 25 bp, SARS Virus
cgatattattcgaacggatgaccca

SEQ ID NO: 5278 - DNA, 25 bp, SARS Virus
gatattattcgcacggatgacccaa

SEQ ID NO: 5279 - DNA, 25 bp, SARS Virus
atattattcgcaaggatgacccaag

SEQ ID NO: 5280 - DNA, 25 bp, SARS Virus
tattattcgcacagatgacccaagg

SEQ ID NO: 5281 - DNA, 25 bp, SARS Virus
attattcgcacgaatgacccaagga

SEQ ID NO: 5282 - DNA, 25 bp, SARS Virus
ttattcgcacggatgacccaaggag

SEQ ID NO: 5283 - DNA, 25 bp, SARS Virus
tattcgcacggaagacccaaggagc

SEQ ID NO: 5284 - DNA, 25 bp, SARS Virus
attcgcacggataacccaaggagca

SEQ ID NO: 5285 - DNA, 25 bp, SARS Virus
ttcgcacggatgacccaaggagcac

SEQ ID NO: 5286 - DNA, 25 bp, SARS Virus
tcgcacggatgaaccaaggagcacg

SEQ ID NO: 5287 - DNA, 25 bp, SARS Virus
cgcacggatgacacaaggagcacga

SEQ ID NO: 5288 - DNA, 25 bp, SARS Virus
gcacggatgaccaaaggagcacgat

SEQ ID NO: 5289 - DNA, 25 bp, SARS Virus
cacggatgacccaaggagcacgatc

SEQ ID NO: 5290 - DNA, 25 bp, SARS Virus
acggatgacccaaggagcacgatca

SEQ ID NO: 5291 - DNA, 25 bp, SARS Virus
cggatgacccaaagagcacgatcac

SEQ ID NO: 5292 - DNA, 25 bp, SARS Virus
ggatgacccaagaagcacgatcacg

SEQ ID NO: 5293 - DNA, 25 bp, SARS Virus
gatgacccaaggagcacgatcacga

SEQ ID NO: 5294 - DNA, 25 bp, SARS Virus
atgacccaaggaacacgatcacgac

SEQ ID NO: 5295 - DNA, 25 bp, SARS Virus
tgacccaaggagaacgatcacgact

SEQ ID NO: 5296 - DNA, 25 bp, SARS Virus
gacccaaggagcacgatcacgacta

SEQ ID NO: 5297 - DNA, 25 bp, SARS Virus
acccaaggagcaagatcacgactat

SEQ ID NO: 5298 - DNA, 25 bp, SARS Virus
cccaaggagcacaatcacgactata

SEQ ID NO: 5299 - DNA, 25 bp, SARS Virus
ccaaggagcacgatcacgactataa

SEQ ID NO: 5300 - DNA, 25 bp, SARS Virus
caaggagcacgaacacgactataac

SEQ ID NO: 5301 - DNA, 25 bp, SARS Virus
aaggagcacgataacgactataacc

SEQ ID NO: 5302 - DNA, 25 bp, SARS Virus
aggagcacgatcacgactataaccg

SEQ ID NO: 5303 - DNA, 25 bp, SARS Virus
ggagcacgatcaagactataaccga

SEQ ID NO: 5304 - DNA, 25 bp, SARS Virus
gagcacgatcacaactataaccgag

SEQ ID NO: 5305 - DNA, 25 bp, SARS Virus
agcacgatcacgactataaccgagt

SEQ ID NO: 5306 - DNA, 25 bp, SARS Virus
gcacgatcacgaatataaccgagtc

SEQ ID NO: 5307 - DNA, 25 bp, SARS Virus
cacgatcacgacaataaccgagtcc

SEQ ID NO: 5308 - DNA, 25 bp, SARS Virus
acgatcacgactataaccgagtccg

SEQ ID NO: 5309 - DNA, 25 bp, SARS Virus
cgatcacgactaaaaccgagtccgg

SEQ ID NO: 5310 - DNA, 25 bp, SARS Virus
gatcacgactataaccgagtccggt

SEQ ID NO: 5311 - DNA, 25 bp, SARS Virus
atcacgactataaccgagtccggta

SEQ ID NO: 5312 - DNA, 25 bp, SARS Virus
tcacgactataaacgagtccggtat

SEQ ID NO: 5313 - DNA, 25 bp, SARS Virus
cacgactataacagagtccggtatg

SEQ ID NO: 5314 - DNA, 25 bp, SARS Virus
acgactataaccaagtccggtatga

SEQ ID NO: 5315 - DNA, 25 bp, SARS Virus
cgactataaccgagtccggtatgac

SEQ ID NO: 5316 - DNA, 25 bp, SARS Virus
gactataaccgaatccggtatgacc

SEQ ID NO: 5317 - DNA, 25 bp, SARS Virus
actataaccgagaccggtatgaccg

SEQ ID NO: 5318 - DNA, 25 bp, SARS Virus
ctataaccgagtacggtatgaccgt

SEQ ID NO: 5319 - DNA, 25 bp, SARS Virus
tataaccgagtcaggtatgaccgta

SEQ ID NO: 5320 - DNA, 25 bp, SARS Virus
ataaccgagtccagtatgaccgtaa

SEQ ID NO: 5321 - DNA, 25 bp, SARS Virus
taaccgagtccgatatgaccgtaat

SEQ ID NO: 5322 - DNA, 25 bp, SARS Virus
aaccgagtccggaatgaccgtaatg

SEQ ID NO: 5323 - DNA, 25 bp, SARS Virus
accgagtccggtatgaccgtaatga

SEQ ID NO: 5324 - DNA, 25 bp, SARS Virus
ccgagtccggtaagaccgtaatgac

SEQ ID NO: 5325 - DNA, 25 bp, SARS Virus
cgagtccggtataaccgtaatgacc

SEQ ID NO: 5326 - DNA, 25 bp, SARS Virus
gagtccggtatgaccgtaatgacca

SEQ ID NO: 5327 - DNA, 25 bp, SARS Virus
agtccggtatgaacgtaatgaccac

SEQ ID NO: 5328 - DNA, 25 bp, SARS Virus
gtccggtatgacagtaatgaccact

SEQ ID NO: 5329 - DNA, 25 bp, SARS Virus
tccggtatgaccataatgaccactg

SEQ ID NO: 5330 - DNA, 25 bp, SARS Virus
ccggtatgaccgaaatgaccactgt

SEQ ID NO: 5331 - DNA, 25 bp, SARS Virus
cggtatgaccgtaatgaccactgtt

SEQ ID NO: 5332 - DNA, 25 bp, SARS Virus
ggtatgaccgtaatgaccactgtta

SEQ ID NO: 5333 - DNA, 25 bp, SARS Virus
gtatgaccgtaaagaccactgttac

SEQ ID NO: 5334 - DNA, 25 bp, SARS Virus
tatgaccgtaataaccactgttaca

SEQ ID NO: 5335 - DNA, 25 bp, SARS Virus
atgaccgtaatgaccactgttacac

SEQ ID NO: 5336 - DNA, 25 bp, SARS Virus
tgaccgtaatgaacactgttacacc

SEQ ID NO: 5337 - DNA, 25 bp, SARS Virus
gaccgtaatgacaactgttacacct

SEQ ID NO: 5338 - DNA, 25 bp, SARS Virus
accgtaatgaccactgttacacctc

SEQ ID NO: 5339 - DNA, 25 bp, SARS Virus
ccgtaatgaccaatgttacacctct

SEQ ID NO: 5340 - DNA, 25 bp, SARS Virus
cgtaatgaccacagttacacctctg

SEQ ID NO: 5341 - DNA, 25 bp, SARS Virus
gtaatgaccactattacacctctgg

SEQ ID NO: 5342 - DNA, 25 bp, SARS Virus
taatgaccactgatacacctctgga

SEQ ID NO: 5343 - DNA, 25 bp, SARS Virus
aatgaccactgtaacacctctggaa

SEQ ID NO: 5344 - DNA, 25 bp, SARS Virus
atgaccactgttacacctctggaac

SEQ ID NO: 5345 - DNA, 25 bp, SARS Virus
tgaccactgttaaacctctggaact

SEQ ID NO: 5346 - DNA, 25 bp, SARS Virus
gaccactgttacacctctggaactt

SEQ ID NO: 5347 - DNA, 25 bp, SARS Virus
accactgttacaactctggaactta

SEQ ID NO: 5348 - DNA, 25 bp, SARS Virus
ccactgttacacatctggaacttac

SEQ ID NO: 5349 - DNA, 25 bp, SARS Virus
cactgttacaccactggaacttact

SEQ ID NO: 5350 - DNA, 25 bp, SARS Virus
actgttacacctatggaacttactc

SEQ ID NO: 5351 - DNA, 25 bp, SARS Virus
ctgttacacctcaggaacttactcc

SEQ ID NO: 5352 - DNA, 25 bp, SARS Virus
tgttacacctctagaacttactcct

SEQ ID NO: 5353 - DNA, 25 bp, SARS Virus
gttacacctctgaaacttactccta

SEQ ID NO: 5354 - DNA, 25 bp, SARS Virus
ttacacctctggaacttactcctag

SEQ ID NO: 5355 - DNA, 25 bp, SARS Virus
tacacctctggaacttactcctaga

SEQ ID NO: 5356 - DNA, 25 bp, SARS Virus
acacctctggaaattactcctagag

SEQ ID NO: 5357 - DNA, 25 bp, SARS Virus
cacctctggaacatactcctagagg

SEQ ID NO: 5358 - DNA, 25 bp, SARS Virus
acctctggaactaactcctagagga

SEQ ID NO: 5359 - DNA, 25 bp, SARS Virus
cctctggaacttactcctagaggaa

SEQ ID NO: 5360 - DNA, 25 bp, SARS Virus
ctctggaacttaatcctagaggaac

SEQ ID NO: 5361 - DNA, 25 bp, SARS Virus
tctggaacttacacctagaggaact

SEQ ID NO: 5362 - DNA, 25 bp, SARS Virus
ctggaacttactactagaggaactc

SEQ ID NO: 5363 - DNA, 25 bp, SARS Virus
tggaacttactcatagaggaactct

SEQ ID NO: 5364 - DNA, 25 bp, SARS Virus
ggaacttactccaagaggaactcta

SEQ ID NO: 5365 - DNA, 25 bp, SARS Virus
gaacttactcctagaggaactctat

SEQ ID NO: 5366 - DNA, 25 bp, SARS Virus
aacttactcctaaaggaactctatg

SEQ ID NO: 5367 - DNA, 25 bp, SARS Virus
acttactcctagaggaactctatga

SEQ ID NO: 5368 - DNA, 25 bp, SARS Virus
cttactcctagaagaactctatgac

SEQ ID NO: 5369 - DNA, 25 bp, SARS Virus
ttactcctagagaaactctatgact

SEQ ID NO: 5370 - DNA, 25 bp, SARS Virus
tactcctagaggaactctatgactc

SEQ ID NO: 5371 - DNA, 25 bp, SARS Virus
actcctagaggaactctatgactca

SEQ ID NO: 5372 - DNA, 25 bp, SARS Virus
ctcctagaggaaatctatgactcag

SEQ ID NO: 5373 - DNA, 25 bp, SARS Virus
tcctagaggaacactatgactcagc

SEQ ID NO: 5374 - DNA, 25 bp, SARS Virus
cctagaggaactatatgactcagca

SEQ ID NO: 5375 - DNA, 25 bp, SARS Virus
ctagaggaactcaatgactcagcac

SEQ ID NO: 5376 - DNA, 25 bp, SARS Virus
tagaggaactctatgactcagcact

SEQ ID NO: 5377 - DNA, 25 bp, SARS Virus
agaggaactctaagactcagcactt

SEQ ID NO: 5378 - DNA, 25 bp, SARS Virus
gaggaactctataactcagcacttg

SEQ ID NO: 5379 - DNA, 25 bp, SARS Virus
aggaactctatgactcagcacttgc

SEQ ID NO: 5380 - DNA, 25 bp, SARS Virus
ggaactctatgaatcagcacttgca

SEQ ID NO: 5381 - DNA, 25 bp, SARS Virus
gaactctatgacacagcacttgcac

SEQ ID NO: 5382 - DNA, 25 bp, SARS Virus
aactctatgactaagcacttgcaca

SEQ ID NO: 5383 - DNA, 25 bp, SARS Virus
actctatgactcagcacttgcacaa

SEQ ID NO: 5384 - DNA, 25 bp, SARS Virus
ctctatgactcaacacttgcacaat

SEQ ID NO: 5385 - DNA, 25 bp, SARS Virus
tctatgactcagaacttgcacaatt

SEQ ID NO: 5386 - DNA, 25 bp, SARS Virus
ctatgactcagcacttgcacaattg

SEQ ID NO: 5387 - DNA, 25 bp, SARS Virus
tatgactcagcaattgcacaattgt

SEQ ID NO: 5388 - DNA, 25 bp, SARS Virus
atgactcagcacatgcacaattgta

SEQ ID NO: 5389 - DNA, 25 bp, SARS Virus
tgactcagcactagcacaattgtaa

SEQ ID NO: 5390 - DNA, 25 bp, SARS Virus
gactcagcacttacacaattgtaat

SEQ ID NO: 5391 - DNA, 25 bp, SARS Virus
actcagcacttgaacaattgtaatt

SEQ ID NO: 5392 - DNA, 25 bp, SARS Virus
ctcagcacttgcacaattgtaattg

SEQ ID NO: 5393 - DNA, 25 bp, SARS Virus
tcagcacttgcaaaattgtaattgt

SEQ ID NO: 5394 - DNA, 25 bp, SARS Virus
cagcacttgcacaattgtaattgta

SEQ ID NO: 5395 - DNA, 25 bp, SARS Virus
agcacttgcacaattgtaattgtaa

SEQ ID NO: 5396 - DNA, 25 bp, SARS Virus
gcacttgcacaaatgtaattgtaac

SEQ ID NO: 5397 - DNA, 25 bp, SARS Virus
cacttgcacaatagtaattgtaaca

SEQ ID NO: 5398 - DNA, 25 bp, SARS Virus
acttgcacaattataattgtaacaa

SEQ ID NO: 5399 - DNA, 25 bp, SARS Virus
cttgcacaattgaaattgtaacaac

SEQ ID NO: 5400 - DNA, 25 bp, SARS Virus
ttgcacaattgtaattgtaacaacc

SEQ ID NO: 5401 - DNA, 25 bp, SARS Virus
tgcacaattgtaattgtaacaaccg

SEQ ID NO: 5402 - DNA, 25 bp, SARS Virus
gcacaattgtaaatgtaacaaccgc

SEQ ID NO: 5403 - DNA, 25 bp, SARS Virus
cacaattgtaatagtaacaaccgct

SEQ ID NO: 5404 - DNA, 25 bp, SARS Virus
acaattgtaattataacaaccgcta

SEQ ID NO: 5405 - DNA, 25 bp, SARS Virus
caattgtaattgaaacaaccgctaa

SEQ ID NO: 5406 - DNA, 25 bp, SARS Virus
aattgtaattgtaacaaccgctaaa

SEQ ID NO: 5407 - DNA, 25 bp, SARS Virus
attgtaattgtaacaaccgctaaaa

SEQ ID NO: 5408 - DNA, 25 bp, SARS Virus
ttgtaattgtaaaaaccgctaaaag

SEQ ID NO: 5409 - DNA, 25 bp, SARS Virus
tgtaattgtaacaaccgctaaaagt

SEQ ID NO: 5410 - DNA, 25 bp, SARS Virus
gtaattgtaacaaccgctaaaagta

SEQ ID NO: 5411 - DNA, 25 bp, SARS Virus
taattgtaacaaacgctaaaagtaa

SEQ ID NO: 5412 - DNA, 25 bp, SARS Virus
aattgtaacaacagctaaaagtaaa

SEQ ID NO: 5413 - DNA, 25 bp, SARS Virus
attgtaacaaccactaaaagtaaac

SEQ ID NO: 5414 - DNA, 25 bp, SARS Virus
ttgtaacaaccgataaaagtaaact

SEQ ID NO: 5415 - DNA, 25 bp, SARS Virus
tgtaacaaccgcaaaaagtaaactt

SEQ ID NO: 5416 - DNA, 25 bp, SARS Virus
gtaacaaccgctaaaagtaaactta

SEQ ID NO: 5417 - DNA, 25 bp, SARS Virus
taacaaccgctaaaagtaaacttac

SEQ ID NO: 5418 - DNA, 25 bp, SARS Virus
aacaaccgctaaaagtaaacttact

SEQ ID NO: 5419 - DNA, 25 bp, SARS Virus
acaaccgctaaaagtaaacttactt

SEQ ID NO: 5420 - DNA, 25 bp, SARS Virus
caaccgctaaaaataaacttacttc

SEQ ID NO: 5421 - DNA, 25 bp, SARS Virus
aaccgctaaaagaaaacttacttct

SEQ ID NO: 5422 - DNA, 25 bp, SARS Virus
accgctaaaagtaaacttacttctc

SEQ ID NO: 5423 - DNA, 25 bp, SARS Virus
ccgctaaaagtaaacttacttctcc

SEQ ID NO: 5424 - DNA, 25 bp, SARS Virus
cgctaaaagtaaacttacttctcca

SEQ ID NO: 5425 - DNA, 25 bp, SARS Virus
gctaaaagtaaaattacttctccaa

SEQ ID NO: 5426 - DNA, 25 bp, SARS Virus
ctaaaagtaaacatacttctccaac

SEQ ID NO: 5427 - DNA, 25 bp, SARS Virus
taaaagtaaactaacttctccaacg

SEQ ID NO: 5428 - DNA, 25 bp, SARS Virus
aaaagtaaacttacttctccaacgg

SEQ ID NO: 5429 - DNA, 25 bp, SARS Virus
aaagtaaacttaattctccaacggt

SEQ ID NO: 5430 - DNA, 25 bp, SARS Virus
aagtaaacttacatctccaacggta

SEQ ID NO: 5431 - DNA, 25 bp, SARS Virus
agtaaacttactactccaacggtag

SEQ ID NO: 5432 - DNA, 25 bp, SARS Virus
gtaaacttacttatccaacggtagt

SEQ ID NO: 5433 - DNA, 25 bp, SARS Virus
taaacttacttcaccaacggtagta

SEQ ID NO: 5434 - DNA, 25 bp, SARS Virus
aaacttacttctacaacggtagtaa

SEQ ID NO: 5435 - DNA, 25 bp, SARS Virus
aacttacttctcaaacggtagtaaa

SEQ ID NO: 5436 - DNA, 25 bp, SARS Virus
acttacttctccaacggtagtaaaa

SEQ ID NO: 5437 - DNA, 25 bp, SARS Virus
cttacttctccaacggtagtaaaac

SEQ ID NO: 5438 - DNA, 25 bp, SARS Virus
ttacttctccaaaggtagtaaaacc

SEQ ID NO: 5439 - DNA, 25 bp, SARS Virus
tacttctccaacagtagtaaaaccg

SEQ ID NO: 5440 - DNA, 25 bp, SARS Virus
acttctccaacgatagtaaaaccgt

SEQ ID NO: 5441 - DNA, 25 bp, SARS Virus
cttctccaacggaagtaaaaccgta

SEQ ID NO: 5442 - DNA, 25 bp, SARS Virus
ttctccaacggtagtaaaaccgtag

SEQ ID NO: 5443 - DNA, 25 bp, SARS Virus
tctccaacggtaataaaaccgtaga

SEQ ID NO: 5444 - DNA, 25 bp, SARS Virus
ctccaacggtagaaaaaccgtagaa

SEQ ID NO: 5445 - DNA, 25 bp, SARS Virus
tccaacggtagtaaaaccgtagaaa

SEQ ID NO: 5446 - DNA, 25 bp, SARS Virus
ccaacggtagtaaaaccgtagaaag

SEQ ID NO: 5447 - DNA, 25 bp, SARS Virus
caacggtagtaaaaccgtagaaaga

SEQ ID NO: 5448 - DNA, 25 bp, SARS Virus
aacggtagtaaaaccgtagaaagag

SEQ ID NO: 5449 - DNA, 25 bp, SARS Virus
acggtagtaaaaacgtagaaagaga

SEQ ID NO: 5450 - DNA, 25 bp, SARS Virus
cggtagtaaaacagtagaaagagac

SEQ ID NO: 5451 - DNA, 25 bp, SARS Virus
ggtagtaaaaccatagaaagagacg

SEQ ID NO: 5452 - DNA, 25 bp, SARS Virus
gtagtaaaaccgaagaaagagacga

SEQ ID NO: 5453 - DNA, 25 bp, SARS Virus
tagtaaaaccgtagaaagagacgaa

SEQ ID NO: 5454 - DNA, 25 bp, SARS Virus
agtaaaaccgtaaaaagagacgaag

SEQ ID NO: 5455 - DNA, 25 bp, SARS Virus
gtaaaaccgtagaaagagacgaaga

SEQ ID NO: 5456 - DNA, 25 bp, SARS Virus
taaaaccgtagaaagagacgaagat

SEQ ID NO: 5457 - DNA, 25 bp, SARS Virus
aaaaccgtagaaagagacgaagatg

SEQ ID NO: 5458 - DNA, 25 bp, SARS Virus
aaaccgtagaaaaagacgaagatgt

SEQ ID NO: 5459 - DNA, 25 bp, SARS Virus
aaccgtagaaagagacgaagatgtt

SEQ ID NO: 5460 - DNA, 25 bp, SARS Virus
accgtagaaagaaacgaagatgttc

SEQ ID NO: 5461 - DNA, 25 bp, SARS Virus
ccgtagaaagagacgaagatgttca

SEQ ID NO: 5462 - DNA, 25 bp, SARS Virus
cgtagaaagagaagaagatgttcac

SEQ ID NO: 5463 - DNA, 25 bp, SARS Virus
gtagaaagagacaaagatgttcacg

SEQ ID NO: 5464 - DNA, 25 bp, SARS Virus
tagaaagagacgaagatgttcacgg

SEQ ID NO: 5465 - DNA, 25 bp, SARS Virus
agaaagagacgaagatgttcacgga

SEQ ID NO: 5466 - DNA, 25 bp, SARS Virus
gaaagagacgaaaatgttcacggaa

SEQ ID NO: 5467 - DNA, 25 bp, SARS Virus
aaagagacgaagatgttcacggaaa

SEQ ID NO: 5468 - DNA, 25 bp, SARS Virus
aagagacgaagaagttcacggaaat

SEQ ID NO: 5469 - DNA, 25 bp, SARS Virus
agagacgaagatattcacggaaata

SEQ ID NO: 5470 - DNA, 25 bp, SARS Virus
gagacgaagatgatcacggaaataa

SEQ ID NO: 5471 - DNA, 25 bp, SARS Virus
agacgaagatgtacacggaaataac

SEQ ID NO: 5472 - DNA, 25 bp, SARS Virus
gacgaagatgttaacggaaataact

SEQ ID NO: 5473 - DNA, 25 bp, SARS Virus
acgaagatgttcacggaaataactg

SEQ ID NO: 5474 - DNA, 25 bp, SARS Virus
cgaagatgttcaaggaaataactgt

SEQ ID NO: 5475 - DNA, 25 bp, SARS Virus
gaagatgttcacagaaataactgtg

SEQ ID NO: 5476 - DNA, 25 bp, SARS Virus
aagatgttcacgaaaataactgtga

SEQ ID NO: 5477 - DNA, 25 bp, SARS Virus
agatgttcacggaaataactgtgat

SEQ ID NO: 5478 - DNA, 25 bp, SARS Virus
gatgttcacggaaataactgtgata

SEQ ID NO: 5479 - DNA, 25 bp, SARS Virus
atgttcacggaaataactgtgatat

SEQ ID NO: 5480 - DNA, 25 bp, SARS Virus
tgttcacggaaaaaactgtgatatt

SEQ ID NO: 5481 - DNA, 25 bp, SARS Virus
gttcacggaaataactgtgatattt

SEQ ID NO: 5482 - DNA, 25 bp, SARS Virus
ttcacggaaataactgtgatatttc

SEQ ID NO: 5483 - DNA, 25 bp, SARS Virus
tcacggaaataaatgtgatatttct

SEQ ID NO: 5484 - DNA, 25 bp, SARS Virus
cacggaaataacagtgatatttctc

SEQ ID NO: 5485 - DNA, 25 bp, SARS Virus
acggaaataactatgatatttctca

SEQ ID NO: 5486 - DNA, 25 bp, SARS Virus
cggaaataactgagatatttctcag

SEQ ID NO: 5487 - DNA, 25 bp, SARS Virus
ggaaataactgtaatatttctcaga

SEQ ID NO: 5488 - DNA, 25 bp, SARS Virus
gaaataactgtgatatttctcagaa

SEQ ID NO: 5489 - DNA, 25 bp, SARS Virus
aaataactgtgaaatttctcagaac

SEQ ID NO: 5490 - DNA, 25 bp, SARS Virus
aataactgtgatatttctcagaact

SEQ ID NO: 5491 - DNA, 25 bp, SARS Virus
ataactgtgataattctcagaacta

SEQ ID NO: 5492 - DNA, 25 bp, SARS Virus
taactgtgatatatctcagaactaa

SEQ ID NO: 5493 - DNA, 25 bp, SARS Virus
aactgtgatattactcagaactaat

SEQ ID NO: 5494 - DNA, 25 bp, SARS Virus
actgtgatatttatcagaactaatg

SEQ ID NO: 5495 - DNA, 25 bp, SARS Virus
ctgtgatatttcacagaactaatgt

SEQ ID NO: 5496 - DNA, 25 bp, SARS Virus
tgtgatatttctaagaactaatgtt

SEQ ID NO: 5497 - DNA, 25 bp, SARS Virus
ctacttcaaagtcccgtctgcacgc

SEQ ID NO: 5498 - DNA, 25 bp, SARS Virus
tacttcaaagtaccgtctgcacgct

SEQ ID NO: 5499 - DNA, 25 bp, SARS Virus
acttcaaagtaccgtctgcacgctg

SEQ ID NO: 5500 - DNA, 25 bp, SARS Virus
cttcaaagtaccctctgcacgctga

SEQ ID NO: 5501 - DNA, 25 bp, SARS Virus
ttcaaagtaccgcctgcacgctgaa

SEQ ID NO: 5502 - DNA, 25 bp, SARS Virus
tcaaagtaccgtctgcacgctgaaa

SEQ ID NO: 5503 - DNA, 25 bp, SARS Virus
caaagtaccgtccgcacgctgaaag

SEQ ID NO: 5504 - DNA, 25 bp, SARS Virus
aaagtaccgtctccacgctgaaaga

SEQ ID NO: 5505 - DNA, 25 bp, SARS Virus
aagtaccgtctgcacgctgaaagac

SEQ ID NO: 5506 - DNA, 25 bp, SARS Virus
agtaccgtctgcccgctgaaagact

SEQ ID NO: 5507 - DNA, 25 bp, SARS Virus
gtaccgtctgcacgctgaaagactt

SEQ ID NO: 5508 - DNA, 25 bp, SARS Virus
taccgtctgcaccctgaaagacttt

SEQ ID NO: 5509 - DNA, 25 bp, SARS Virus
accgtctgcacgctgaaagactttc

SEQ ID NO: 5510 - DNA, 25 bp, SARS Virus
ccgtctgcacgccgaaagactttcg

SEQ ID NO: 5511 - DNA, 25 bp, SARS Virus
cgtctgcacgctcaaagactttcgg

SEQ ID NO: 5512 - DNA, 25 bp, SARS Virus
gtctgcacgctgcaagactttcggt

SEQ ID NO: 5513 - DNA, 25 bp, SARS Virus
tctgcacgctgacagactttcggtg

SEQ ID NO: 5514 - DNA, 25 bp, SARS Virus
ctgcacgctgaacgactttcggtga

SEQ ID NO: 5515 - DNA, 25 bp, SARS Virus
tgcacgctgaaacactttcggtgaa

SEQ ID NO: 5516 - DNA, 25 bp, SARS Virus
gcacgctgaaagcctttcggtgaac

SEQ ID NO: 5517 - DNA, 25 bp, SARS Virus
cacgctgaaagactttcggtgaaca

SEQ ID NO: 5518 - DNA, 25 bp, SARS Virus
acgctgaaagaccttcggtgaacac

SEQ ID NO: 5519 - DNA, 25 bp, SARS Virus
cgctgaaagactctcggtgaacact

SEQ ID NO: 5520 - DNA, 25 bp, SARS Virus
gctgaaagacttccggtgaacactt

SEQ ID NO: 5521 - DNA, 25 bp, SARS Virus
ctgaaagactttcggtgaacacttg

SEQ ID NO: 5522 - DNA, 25 bp, SARS Virus
tgaaagactttccgtgaacacttgt

SEQ ID NO: 5523 - DNA, 25 bp, SARS Virus
gaaagactttcgctgaacacttgta

SEQ ID NO: 5524 - DNA, 25 bp, SARS Virus
aaagactttcggcgaacacttgtaa

SEQ ID NO: 5525 - DNA, 25 bp, SARS Virus
aagactttcggtcaacacttgtaac

SEQ ID NO: 5526 - DNA, 25 bp, SARS Virus
agactttcggtgcacacttgtaaca

SEQ ID NO: 5527 - DNA, 25 bp, SARS Virus
gactttcggtgaccacttgtaacac

SEQ ID NO: 5528 - DNA, 25 bp, SARS Virus
actttcggtgaacacttgtaacacc

SEQ ID NO: 5529 - DNA, 25 bp, SARS Virus
ctttcggtgaacccttgtaacaccg

SEQ ID NO: 5530 - DNA, 25 bp, SARS Virus
tttcggtgaacacttgtaacaccgt

SEQ ID NO: 5531 - DNA, 25 bp, SARS Virus
ttcggtgaacacctgtaacaccgtg

SEQ ID NO: 5532 - DNA, 25 bp, SARS Virus
tcggtgaacactcgtaacaccgtga

SEQ ID NO: 5533 - DNA, 25 bp, SARS Virus
cggtgaacacttctaacaccgtgac

SEQ ID NO: 5534 - DNA, 25 bp, SARS Virus
ggtgaacacttgcaacaccgtgact

SEQ ID NO: 5535 - DNA, 25 bp, SARS Virus
gtgaacacttgtcacaccgtgactt

SEQ ID NO: 5536 - DNA, 25 bp, SARS Virus
tgaacacttgtaccaccgtgacttt

SEQ ID NO: 5537 - DNA, 25 bp, SARS Virus
gaacacttgtaacaccgtgactttt

SEQ ID NO: 5538 - DNA, 25 bp, SARS Virus
aacacttgtaaccccgtgactttta

SEQ ID NO: 5539 - DNA, 25 bp, SARS Virus
acacttgtaacaccgtgacttttaa

SEQ ID NO: 5540 - DNA, 25 bp, SARS Virus
cacttgtaacaccgtgacttttaaa

SEQ ID NO: 5541 - DNA, 25 bp, SARS Virus
acttgtaacaccctgacttttaaat

SEQ ID NO: 5542 - DNA, 25 bp, SARS Virus
cttgtaacaccgcgacttttaaatc

SEQ ID NO: 5543 - DNA, 25 bp, SARS Virus
ttgtaacaccgtcacttttaaatca

SEQ ID NO: 5544 - DNA, 25 bp, SARS Virus
tgtaacaccgtgccttttaaatcaa

SEQ ID NO: 5545 - DNA, 25 bp, SARS Virus
gtaacaccgtgacttttaaatcaat

SEQ ID NO: 5546 - DNA, 25 bp, SARS Virus
taacaccgtgacctttaaatcaata

SEQ ID NO: 5547 - DNA, 25 bp, SARS Virus
aacaccgtgactcttaaatcaataa

SEQ ID NO: 5548 - DNA, 25 bp, SARS Virus
acaccgtgacttctaaatcaataac

SEQ ID NO: 5549 - DNA, 25 bp, SARS Virus
caccgtgactttcaaatcaataact

SEQ ID NO: 5550 - DNA, 25 bp, SARS Virus
accgtgacttttcaatcaataactt

SEQ ID NO: 5551 - DNA, 25 bp, SARS Virus
ccgtgacttttacatcaataacttc

SEQ ID NO: 5552 - DNA, 25 bp, SARS Virus
cgtgacttttaactcaataacttcc

SEQ ID NO: 5553 - DNA, 25 bp, SARS Virus
gtgacttttaaaccaataacttcct

SEQ ID NO: 5554 - DNA, 25 bp, SARS Virus
tgacttttaaatcaataacttcctg

SEQ ID NO: 5555 - DNA, 25 bp, SARS Virus
gacttttaaatccataacttcctgg

SEQ ID NO: 5556 - DNA, 25 bp, SARS Virus
acttttaaatcactaacttcctgga

SEQ ID NO: 5557 - DNA, 25 bp, SARS Virus
cttttaaatcaacaacttcctggat

SEQ ID NO: 5558 - DNA, 25 bp, SARS Virus
ttttaaatcaatcacttcctggatg

SEQ ID NO: 5559 - DNA, 25 bp, SARS Virus
tttaaatcaataccttcctggatga

SEQ ID NO: 5560 - DNA, 25 bp, SARS Virus
ttaaatcaataacttcctggatgat

SEQ ID NO: 5561 - DNA, 25 bp, SARS Virus
taaatcaataacctcctggatgatg

SEQ ID NO: 5562 - DNA, 25 bp, SARS Virus
aaatcaataactccctggatgatgt

SEQ ID NO: 5563 - DNA, 25 bp, SARS Virus
aatcaataacttcctggatgatgta

SEQ ID NO: 5564 - DNA, 25 bp, SARS Virus
atcaataacttcctggatgatgtac

SEQ ID NO: 5565 - DNA, 25 bp, SARS Virus
tcaataacttcccggatgatgtaca

SEQ ID NO: 5566 - DNA, 25 bp, SARS Virus
caataacttcctcgatgatgtacac

SEQ ID NO: 5567 - DNA, 25 bp, SARS Virus
aataacttcctgcatgatgtacacc

SEQ ID NO: 5568 - DNA, 25 bp, SARS Virus
ataacttcctggctgatgtacaccc

SEQ ID NO: 5569 - DNA, 25 bp, SARS Virus
taacttcctggacgatgtacaccca

SEQ ID NO: 5570 - DNA, 25 bp, SARS Virus
aacttcctggatcatgtacacccat

SEQ ID NO: 5571 - DNA, 25 bp, SARS Virus
acttcctggatgctgtacacccatg

SEQ ID NO: 5572 - DNA, 25 bp, SARS Virus
cttcctggatgacgtacacccatgg

SEQ ID NO: 5573 - DNA, 25 bp, SARS Virus
ttcctggatgatctacacccatgga

SEQ ID NO: 5574 - DNA, 25 bp, SARS Virus
tcctggatgatgcacacccatggat

SEQ ID NO: 5575 - DNA, 25 bp, SARS Virus
cctggatgatgtccacccatggatg

SEQ ID NO: 5576 - DNA, 25 bp, SARS Virus
ctggatgatgtacacccatggatgg

SEQ ID NO: 5577 - DNA, 25 bp, SARS Virus
tggatgatgtacccccatggatgga

SEQ ID NO: 5578 - DNA, 25 bp, SARS Virus
ggatgatgtacacccatggatggat

SEQ ID NO: 5579 - DNA, 25 bp, SARS Virus
gatgatgtacacccatggatggatg

SEQ ID NO: 5580 - DNA, 25 bp, SARS Virus
atgatgtacacccatggatggatga

SEQ ID NO: 5581 - DNA, 25 bp, SARS Virus
tgatgtacacccctggatggatgat

SEQ ID NO: 5582 - DNA, 25 bp, SARS Virus
gatgtacacccacggatggatgatt

SEQ ID NO: 5583 - DNA, 25 bp, SARS Virus
atgtacacccatcgatggatgatta

SEQ ID NO: 5584 - DNA, 25 bp, SARS Virus
tgtacacccatgcatggatgattac

SEQ ID NO: 5585 - DNA, 25 bp, SARS Virus
gtacacccatggctggatgattacg

SEQ ID NO: 5586 - DNA, 25 bp, SARS Virus
tacacccatggacggatgattacga

SEQ ID NO: 5587 - DNA, 25 bp, SARS Virus
acacccatggatcgatgattacgac

SEQ ID NO: 5588 - DNA, 25 bp, SARS Virus
cacccatggatgcatgattacgaca

SEQ ID NO: 5589 - DNA, 25 bp, SARS Virus
acccatggatggctgattacgacat

SEQ ID NO: 5590 - DNA, 25 bp, SARS Virus
cccatggatggacgattacgacatc

SEQ ID NO: 5591 - DNA, 25 bp, SARS Virus
ccatggatggatcattacgacatca

SEQ ID NO: 5592 - DNA, 25 bp, SARS Virus
catggatggatgcttacgacatcac

SEQ ID NO: 5593 - DNA, 25 bp, SARS Virus
atggatggatgactacgacatcact

SEQ ID NO: 5594 - DNA, 25 bp, SARS Virus
tggatggatgatcacgacatcactt

SEQ ID NO: 5595 - DNA, 25 bp, SARS Virus
ggatggatgattccgacatcacttt

SEQ ID NO: 5596 - DNA, 25 bp, SARS Virus
gatggatgattacgacatcactttt

SEQ ID NO: 5597 - DNA, 25 bp, SARS Virus
atggatgattaccacatcactttta

SEQ ID NO: 5598 - DNA, 25 bp, SARS Virus
tggatgattacgccatcacttttac

SEQ ID NO: 5599 - DNA, 25 bp, SARS Virus
ggatgattacgacatcacttttacg

SEQ ID NO: 5600 - DNA, 25 bp, SARS Virus
gatgattacgacctcacttttacgg

SEQ ID NO: 5601 - DNA, 25 bp, SARS Virus
atgattacgacaccacttttacggt

SEQ ID NO: 5602 - DNA, 25 bp, SARS Virus
tgattacgacatcacttttacggta

SEQ ID NO: 5603 - DNA, 25 bp, SARS Virus
gattacgacatcccttttacggtac

SEQ ID NO: 5604 - DNA, 25 bp, SARS Virus
attacgacatcacttttacggtaca

SEQ ID NO: 5605 - DNA, 25 bp, SARS Virus
ttacgacatcacctttacggtacag

SEQ ID NO: 5606 - DNA, 25 bp, SARS Virus
tacgacatcactcttacggtacagg

SEQ ID NO: 5607 - DNA, 25 bp, SARS Virus
acgacatcacttctacggtacagga

SEQ ID NO: 5608 - DNA, 25 bp, SARS Virus
cgacatcactttcacggtacaggac

SEQ ID NO: 5609 - DNA, 25 bp, SARS Virus
gacatcacttttccggtacaggacg

SEQ ID NO: 5610 - DNA, 25 bp, SARS Virus
acatcacttttacggtacaggacgg

SEQ ID NO: 5611 - DNA, 25 bp, SARS Virus
catcacttttaccgtacaggacgga

SEQ ID NO: 5612 - DNA, 25 bp, SARS Virus
atcacttttacgctacaggacggac

SEQ ID NO: 5613 - DNA, 25 bp, SARS Virus
tcacttttacggcacaggacggaca

SEQ ID NO: 5614 - DNA, 25 bp, SARS Virus
cacttttacggtccaggacggacag

SEQ ID NO: 5615 - DNA, 25 bp, SARS Virus
acttttacggtacaggacggacagt

SEQ ID NO: 5616 - DNA, 25 bp, SARS Virus
cttttacggtaccggacggacagtt

SEQ ID NO: 5617 - DNA, 25 bp, SARS Virus
ttttacggtacacgacggacagttc

SEQ ID NO: 5618 - DNA, 25 bp, SARS Virus
tttacggtacagcacggacagttct

SEQ ID NO: 5619 - DNA, 25 bp, SARS Virus
ttacggtacaggccggacagttctg

SEQ ID NO: 5620 - DNA, 25 bp, SARS Virus
tacggtacaggacggacagttctgg

SEQ ID NO: 5621 - DNA, 25 bp, SARS Virus
acggtacaggaccgacagttctggg

SEQ ID NO: 5622 - DNA, 25 bp, SARS Virus
cggtacaggacgcacagttctgggt

SEQ ID NO: 5623 - DNA, 25 bp, SARS Virus
ggtacaggacggccagttctgggtc

SEQ ID NO: 5624 - DNA, 25 bp, SARS Virus
gtacaggacggacagttctgggtct

SEQ ID NO: 5625 - DNA, 25 bp, SARS Virus
tacaggacggaccgttctgggtctc

SEQ ID NO: 5626 - DNA, 25 bp, SARS Virus
acaggacggacacttctgggtctct

SEQ ID NO: 5627 - DNA, 25 bp, SARS Virus
caggacggacagctctgggtctcta

SEQ ID NO: 5628 - DNA, 25 bp, SARS Virus
aggacggacagtcctgggtctctaa

SEQ ID NO: 5629 - DNA, 25 bp, SARS Virus
ggacggacagttctgggtctctaac

SEQ ID NO: 5630 - DNA, 25 bp, SARS Virus
gacggacagttccgggtctctaacc

SEQ ID NO: 5631 - DNA, 25 bp, SARS Virus
acggacagttctcggtctctaacct

SEQ ID NO: 5632 - DNA, 25 bp, SARS Virus
cggacagttctgcgtctctaacctg

SEQ ID NO: 5633 - DNA, 25 bp, SARS Virus
ggacagttctggctctctaacctgg

SEQ ID NO: 5634 - DNA, 25 bp, SARS Virus
gacagttctgggcctctaacctgga

SEQ ID NO: 5635 - DNA, 25 bp, SARS Virus
acagttctgggtctctaacctggac

SEQ ID NO: 5636 - DNA, 25 bp, SARS Virus
cagttctgggtccctaacctggact

SEQ ID NO: 5637 - DNA, 25 bp, SARS Virus
agttctgggtctctaacctggactc

SEQ ID NO: 5638 - DNA, 25 bp, SARS Virus
gttctgggtctccaacctggactcg

SEQ ID NO: 5639 - DNA, 25 bp, SARS Virus
ttctgggtctctcacctggactcgt

SEQ ID NO: 5640 - DNA, 25 bp, SARS Virus
tctgggtctctaccctggactcgta

SEQ ID NO: 5641 - DNA, 25 bp, SARS Virus
ctgggtctctaacctggactcgtat

SEQ ID NO: 5642 - DNA, 25 bp, SARS Virus
tgggtctctaacctggactcgtatc

SEQ ID NO: 5643 - DNA, 25 bp, SARS Virus
gggtctctaacccggactcgtatca

SEQ ID NO: 5644 - DNA, 25 bp, SARS Virus
ggtctctaacctcgactcgtatcac

SEQ ID NO: 5645 - DNA, 25 bp, SARS Virus
gtctctaacctgcactcgtatcaca

SEQ ID NO: 5646 - DNA, 25 bp, SARS Virus
tctctaacctggcctcgtatcacaa

SEQ ID NO: 5647 - DNA, 25 bp, SARS Virus
ctctaacctggactcgtatcacaac

SEQ ID NO: 5648 - DNA, 25 bp, SARS Virus
tctaacctggacccgtatcacaacg

SEQ ID NO: 5649 - DNA, 25 bp, SARS Virus
ctaacctggactcgtatcacaacgt

SEQ ID NO: 5650 - DNA, 25 bp, SARS Virus
taacctggactcctatcacaacgtc

SEQ ID NO: 5651 - DNA, 25 bp, SARS Virus
aacctggactcgcatcacaacgtct

SEQ ID NO: 5652 - DNA, 25 bp, SARS Virus
acctggactcgtctcacaacgtcta

SEQ ID NO: 5653 - DNA, 25 bp, SARS Virus
cctggactcgtaccacaacgtctaa

SEQ ID NO: 5654 - DNA, 25 bp, SARS Virus
ctggactcgtatcacaacgtctaat

SEQ ID NO: 5655 - DNA, 25 bp, SARS Virus
tggactcgtatcccaacgtctaata

SEQ ID NO: 5656 - DNA, 25 bp, SARS Virus
ggactcgtatcacaacgtctaatag

SEQ ID NO: 5657 - DNA, 25 bp, SARS Virus
gactcgtatcaccacgtctaatagt

SEQ ID NO: 5658 - DNA, 25 bp, SARS Virus
actcgtatcacaccgtctaatagtg

SEQ ID NO: 5659 - DNA, 25 bp, SARS Virus
ctcgtatcacaacgtctaatagtgt

SEQ ID NO: 5660 - DNA, 25 bp, SARS Virus
tcgtatcacaacctctaatagtgtt

SEQ ID NO: 5661 - DNA, 25 bp, SARS Virus
cgtatcacaacgcctaatagtgttg

SEQ ID NO: 5662 - DNA, 25 bp, SARS Virus
gtatcacaacgtctaatagtgttgg

SEQ ID NO: 5663 - DNA, 25 bp, SARS Virus
tatcacaacgtccaatagtgttggt

SEQ ID NO: 5664 - DNA, 25 bp, SARS Virus
atcacaacgtctcatagtgttggtg

SEQ ID NO: 5665 - DNA, 25 bp, SARS Virus
tcacaacgtctactagtgttggtga

SEQ ID NO: 5666 - DNA, 25 bp, SARS Virus
cacaacgtctaacagtgttggtgag

SEQ ID NO: 5667 - DNA, 25 bp, SARS Virus
acaacgtctaatcgtgttggtgagt

SEQ ID NO: 5668 - DNA, 25 bp, SARS Virus
caacgtctaatactgttggtgagtt

SEQ ID NO: 5669 - DNA, 25 bp, SARS Virus
aacgtctaatagcgttggtgagttt

SEQ ID NO: 5670 - DNA, 25 bp, SARS Virus
acgtctaatagtcttggtgagtttg

SEQ ID NO: 5671 - DNA, 25 bp, SARS Virus
cgtctaatagtgctggtgagtttgt

SEQ ID NO: 5672 - DNA, 25 bp, SARS Virus
gtctaatagtgtcggtgagtttgta

SEQ ID NO: 5673 - DNA, 25 bp, SARS Virus
tctaatagtgttcgtgagtttgtaa

SEQ ID NO: 5674 - DNA, 25 bp, SARS Virus
ctaatagtgttgctgagtttgtaac

SEQ ID NO: 5675 - DNA, 25 bp, SARS Virus
taatagtgttggcgagtttgtaact

SEQ ID NO: 5676 - DNA, 25 bp, SARS Virus
aatagtgttggtcagtttgtaactt

SEQ ID NO: 5677 - DNA, 25 bp, SARS Virus
atagtgttggtgcgtttgtaacttt

SEQ ID NO: 5678 - DNA, 25 bp, SARS Virus
tagtgttggtgactttgtaactttg

SEQ ID NO: 5679 - DNA, 25 bp, SARS Virus
agtgttggtgagcttgtaactttga

SEQ ID NO: 5680 - DNA, 25 bp, SARS Virus
gtgttggtgagtctgtaactttgag

SEQ ID NO: 5681 - DNA, 25 bp, SARS Virus
tgttggtgagttcgtaactttgagc

SEQ ID NO: 5682 - DNA, 25 bp, SARS Virus
gttggtgagtttctaactttgagct

SEQ ID NO: 5683 - DNA, 25 bp, SARS Virus
ttggtgagtttgcaactttgagctg

SEQ ID NO: 5684 - DNA, 25 bp, SARS Virus
tggtgagtttgtcactttgagctga

SEQ ID NO: 5685 - DNA, 25 bp, SARS Virus
ggtgagtttgtacctttgagctgag

SEQ ID NO: 5686 - DNA, 25 bp, SARS Virus
gtgagtttgtaactttgagctgagg

SEQ ID NO: 5687 - DNA, 25 bp, SARS Virus
tgagtttgtaaccttgagctgaggc

SEQ ID NO: 5688 - DNA, 25 bp, SARS Virus
gagtttgtaactctgagctgaggcg

SEQ ID NO: 5689 - DNA, 25 bp, SARS Virus
agtttgtaacttcgagctgaggcgt

SEQ ID NO: 5690 - DNA, 25 bp, SARS Virus
gtttgtaactttcagctgaggcgtt

SEQ ID NO: 5691 - DNA, 25 bp, SARS Virus
tttgtaactttgcgctgaggcgttc

SEQ ID NO: 5692 - DNA, 25 bp, SARS Virus
ttgtaactttgacctgaggcgttcc

SEQ ID NO: 5693 - DNA, 25 bp, SARS Virus
tgtaactttgagctgaggcgttccc

SEQ ID NO: 5694 - DNA, 25 bp, SARS Virus
gtaactttgagccgaggcgttccct

SEQ ID NO: 5695 - DNA, 25 bp, SARS Virus
taactttgagctcaggcgttccctc

SEQ ID NO: 5696 - DNA, 25 bp, SARS Virus
aactttgagctgcggcgttccctcc

SEQ ID NO: 5697 - DNA, 25 bp, SARS Virus
actttgagctgacgcgttccctcca

SEQ ID NO: 5698 - DNA, 25 bp, SARS Virus
ctttgagctgagccgttccctccat

SEQ ID NO: 5699 - DNA, 25 bp, SARS Virus
tttgagctgaggcgttccctccatc

SEQ ID NO: 5700 - DNA, 25 bp, SARS Virus
ttgagctgaggccttccctccatcc

SEQ ID NO: 5701 - DNA, 25 bp, SARS Virus
tgagctgaggcgctccctccatcct

SEQ ID NO: 5702 - DNA, 25 bp, SARS Virus
gagctgaggcgtcccctccatcctg

SEQ ID NO: 5703 - DNA, 25 bp, SARS Virus
agctgaggcgttccctccatcctga

SEQ ID NO: 5704 - DNA, 25 bp, SARS Virus
gctgaggcgttccctccatcctgat

SEQ ID NO: 5705 - DNA, 25 bp, SARS Virus
ctgaggcgttccctccatcctgatc

SEQ ID NO: 5706 - DNA, 25 bp, SARS Virus
tgaggcgttccccccatcctgatct

SEQ ID NO: 5707 - DNA, 25 bp, SARS Virus
gaggcgttccctccatcctgatcta

SEQ ID NO: 5708 - DNA, 25 bp, SARS Virus
aggcgttccctccatcctgatctac

SEQ ID NO: 5709 - DNA, 25 bp, SARS Virus
ggcgttccctccctcctgatctaca

SEQ ID NO: 5710 - DNA, 25 bp, SARS Virus
gcgttccctccaccctgatctacaa

SEQ ID NO: 5711 - DNA, 25 bp, SARS Virus
cgttccctccatcctgatctacaaa

SEQ ID NO: 5712 - DNA, 25 bp, SARS Virus
gttccctccatcctgatctacaaaa

SEQ ID NO: 5713 - DNA, 25 bp, SARS Virus
ttccctccatcccgatctacaaaac

SEQ ID NO: 5714 - DNA, 25 bp, SARS Virus
tccctccatcctcatctacaaaacc

SEQ ID NO: 5715 - DNA, 25 bp, SARS Virus
ccctccatcctgctctacaaaacct

SEQ ID NO: 5716 - DNA, 25 bp, SARS Virus
cctccatcctgacctacaaaacctc

SEQ ID NO: 5717 - DNA, 25 bp, SARS Virus
ctccatcctgatctacaaaacctcc

SEQ ID NO: 5718 - DNA, 25 bp, SARS Virus
tccatcctgatccacaaaacctccg

SEQ ID NO: 5719 - DNA, 25 bp, SARS Virus
ccatcctgatctccaaaacctccga

SEQ ID NO: 5720 - DNA, 25 bp, SARS Virus
catcctgatctacaaaacctccgac

SEQ ID NO: 5721 - DNA, 25 bp, SARS Virus
atcctgatctaccaaacctccgaca

SEQ ID NO: 5722 - DNA, 25 bp, SARS Virus
tcctgatctacacaacctccgacac

SEQ ID NO: 5723 - DNA, 25 bp, SARS Virus
cctgatctacaacacctccgacaca

SEQ ID NO: 5724 - DNA, 25 bp, SARS Virus
ctgatctacaaaccctccgacacac

SEQ ID NO: 5725 - DNA, 25 bp, SARS Virus
tgatctacaaaacctccgacacaca

SEQ ID NO: 5726 - DNA, 25 bp, SARS Virus
gatctacaaaacctccgacacacaa

SEQ ID NO: 5727 - DNA, 25 bp, SARS Virus
atctacaaaacccccgacacacaaa

SEQ ID NO: 5728 - DNA, 25 bp, SARS Virus
tctacaaaacctccgacacacaaac

SEQ ID NO: 5729 - DNA, 25 bp, SARS Virus
ctacaaaacctccgacacacaaacg

SEQ ID NO: 5730 - DNA, 25 bp, SARS Virus
tacaaaacctcccacacacaaacgg

SEQ ID NO: 5731 - DNA, 25 bp, SARS Virus
acaaaacctccgccacacaaacgga

SEQ ID NO: 5732 - DNA, 25 bp, SARS Virus
caaaacctccgacacacaaacggat

SEQ ID NO: 5733 - DNA, 25 bp, SARS Virus
aaaacctccgacccacaaacggata

SEQ ID NO: 5734 - DNA, 25 bp, SARS Virus
aaacctccgacacacaaacggatac

SEQ ID NO: 5735 - DNA, 25 bp, SARS Virus
aacctccgacacccaaacggataca

SEQ ID NO: 5736 - DNA, 25 bp, SARS Virus
acctccgacacacaaacggatacaa

SEQ ID NO: 5737 - DNA, 25 bp, SARS Virus
cctccgacacaccaacggatacaac

SEQ ID NO: 5738 - DNA, 25 bp, SARS Virus
ctccgacacacacacggatacaacc

SEQ ID NO: 5739 - DNA, 25 bp, SARS Virus
tccgacacacaaccggatacaaccg

SEQ ID NO: 5740 - DNA, 25 bp, SARS Virus
ccgacacacaaacggatacaaccga

SEQ ID NO: 5741 - DNA, 25 bp, SARS Virus
cgacacacaaaccgatacaaccgac

SEQ ID NO: 5742 - DNA, 25 bp, SARS Virus
gacacacaaacgcatacaaccgacg

SEQ ID NO: 5743 - DNA, 25 bp, SARS Virus
acacacaaacggctacaaccgacga

SEQ ID NO: 5744 - DNA, 25 bp, SARS Virus
cacacaaacggacacaaccgacgat

SEQ ID NO: 5745 - DNA, 25 bp, SARS Virus
acacaaacggatccaaccgacgata

SEQ ID NO: 5746 - DNA, 25 bp, SARS Virus
cacaaacggatacaaccgacgatat

SEQ ID NO: 5747 - DNA, 25 bp, SARS Virus
acaaacggataccaccgacgatatt

SEQ ID NO: 5748 - DNA, 25 bp, SARS Virus
caaacggatacacccgacgatatta

SEQ ID NO: 5749 - DNA, 25 bp, SARS Virus
aaacggatacaaccgacgatattat

SEQ ID NO: 5750 - DNA, 25 bp, SARS Virus
aacggatacaaccgacgatattatt

SEQ ID NO: 5751 - DNA, 25 bp, SARS Virus
acggatacaacccacgatattattc

SEQ ID NO: 5752 - DNA, 25 bp, SARS Virus
cggatacaaccgccgatattattcg

SEQ ID NO: 5753 - DNA, 25 bp, SARS Virus
ggatacaaccgacgatattattcgc

SEQ ID NO: 5754 - DNA, 25 bp, SARS Virus
gatacaaccgaccatattattcgca

SEQ ID NO: 5755 - DNA, 25 bp, SARS Virus
atacaaccgacgctattattcgcac

SEQ ID NO: 5756 - DNA, 25 bp, SARS Virus
tacaaccgacgacattattcgcacg

SEQ ID NO: 5757 - DNA, 25 bp, SARS Virus
acaaccgacgatcttattcgcacgg

SEQ ID NO: 5758 - DNA, 25 bp, SARS Virus
caaccgacgatactattcgcacgga

SEQ ID NO: 5759 - DNA, 25 bp, SARS Virus
aaccgacgatatcattcgcacggat

SEQ ID NO: 5760 - DNA, 25 bp, SARS Virus
accgacgatattcttcgcacggatg

SEQ ID NO: 5761 - DNA, 25 bp, SARS Virus
ccgacgatattactcgcacggatga

SEQ ID NO: 5762 - DNA, 25 bp, SARS Virus
cgacgatattatccgcacggatgac

SEQ ID NO: 5763 - DNA, 25 bp, SARS Virus
gacgatattattcgcacggatgacc

SEQ ID NO: 5764 - DNA, 25 bp, SARS Virus
acgatattattcccacggatgaccc

SEQ ID NO: 5765 - DNA, 25 bp, SARS Virus
cgatattattcgcacggatgaccca

SEQ ID NO: 5766 - DNA, 25 bp, SARS Virus
gatattattcgcccggatgacccaa

SEQ ID NO: 5767 - DNA, 25 bp, SARS Virus
atattattcgcacggatgacccaag

SEQ ID NO: 5768 - DNA, 25 bp, SARS Virus
tattattcgcaccgatgacccaagg

SEQ ID NO: 5769 - DNA, 25 bp, SARS Virus
attattcgcacgcatgacccaagga

SEQ ID NO: 5770 - DNA, 25 bp, SARS Virus
ttattcgcacggctgacccaaggag

SEQ ID NO: 5771 - DNA, 25 bp, SARS Virus
tattcgcacggacgacccaaggagc

SEQ ID NO: 5772 - DNA, 25 bp, SARS Virus
attcgcacggatcacccaaggagca

SEQ ID NO: 5773 - DNA, 25 bp, SARS Virus
ttcgcacggatgccccaaggagcac

SEQ ID NO: 5774 - DNA, 25 bp, SARS Virus
tcgcacggatgacccaaggagcacg

SEQ ID NO: 5775 - DNA, 25 bp, SARS Virus
cgcacggatgacccaaggagcacga

SEQ ID NO: 5776 - DNA, 25 bp, SARS Virus
gcacggatgacccaaggagcacgat

SEQ ID NO: 5777 - DNA, 25 bp, SARS Virus
cacggatgaccccaggagcacgatc

SEQ ID NO: 5778 - DNA, 25 bp, SARS Virus
acggatgacccacggagcacgatca

SEQ ID NO: 5779 - DNA, 25 bp, SARS Virus
cggatgacccaacgagcacgatcac

SEQ ID NO: 5780 - DNA, 25 bp, SARS Virus
ggatgacccaagcagcacgatcacg

SEQ ID NO: 5781 - DNA, 25 bp, SARS Virus
gatgacccaaggcgcacgatcacga

SEQ ID NO: 5782 - DNA, 25 bp, SARS Virus
atgacccaaggaccacgatcacgac

SEQ ID NO: 5783 - DNA, 25 bp, SARS Virus
tgacccaaggagcacgatcacgact

SEQ ID NO: 5784 - DNA, 25 bp, SARS Virus
gacccaaggagcccgatcacgacta

SEQ ID NO: 5785 - DNA, 25 bp, SARS Virus
acccaaggagcacgatcacgactat

SEQ ID NO: 5786 - DNA, 25 bp, SARS Virus
cccaaggagcaccatcacgactata

SEQ ID NO: 5787 - DNA, 25 bp, SARS Virus
ccaaggagcacgctcacgactataa

SEQ ID NO: 5788 - DNA, 25 bp, SARS Virus
caaggagcacgaccacgactataac

SEQ ID NO: 5789 - DNA, 25 bp, SARS Virus
aaggagcacgatcacgactataacc

SEQ ID NO: 5790 - DNA, 25 bp, SARS Virus
aggagcacgatcccgactataaccg

SEQ ID NO: 5791 - DNA, 25 bp, SARS Virus
ggagcacgatcacgactataaccga

SEQ ID NO: 5792 - DNA, 25 bp, SARS Virus
gagcacgatcaccactataaccgag

SEQ ID NO: 5793 - DNA, 25 bp, SARS Virus
agcacgatcacgcctataaccgagt

SEQ ID NO: 5794 - DNA, 25 bp, SARS Virus
gcacgatcacgactataaccgagtc

SEQ ID NO: 5795 - DNA, 25 bp, SARS Virus
cacgatcacgaccataaccgagtcc

SEQ ID NO: 5796 - DNA, 25 bp, SARS Virus
acgatcacgactctaaccgagtccg

SEQ ID NO: 5797 - DNA, 25 bp, SARS Virus
cgatcacgactacaaccgagtccgg

SEQ ID NO: 5798 - DNA, 25 bp, SARS Virus
gatcacgactatcaccgagtccggt

SEQ ID NO: 5799 - DNA, 25 bp, SARS Virus
atcacgactatacccgagtccggta

SEQ ID NO: 5800 - DNA, 25 bp, SARS Virus
tcacgactataaccgagtccggtat

SEQ ID NO: 5801 - DNA, 25 bp, SARS Virus
cacgactataaccgagtccggtatg

SEQ ID NO: 5802 - DNA, 25 bp, SARS Virus
acgactataacccagtccggtatga

SEQ ID NO: 5803 - DNA, 25 bp, SARS Virus
cgactataaccgcgtccggtatgac

SEQ ID NO: 5804 - DNA, 25 bp, SARS Virus
gactataaccgactccggtatgacc

SEQ ID NO: 5805 - DNA, 25 bp, SARS Virus
actataaccgagcccggtatgaccg

SEQ ID NO: 5806 - DNA, 25 bp, SARS Virus
ctataaccgagtccggtatgaccgt

SEQ ID NO: 5807 - DNA, 25 bp, SARS Virus
tataaccgagtccggtatgaccgta

SEQ ID NO: 5808 - DNA, 25 bp, SARS Virus
ataaccgagtcccgtatgaccgtaa

SEQ ID NO: 5809 - DNA, 25 bp, SARS Virus
taaccgagtccgctatgaccgtaat

SEQ ID NO: 5810 - DNA, 25 bp, SARS Virus
aaccgagtccggcatgaccgtaatg

SEQ ID NO: 5811 - DNA, 25 bp, SARS Virus
accgagtccggtctgaccgtaatga

SEQ ID NO: 5812 - DNA, 25 bp, SARS Virus
ccgagtccggtacgaccgtaatgac

SEQ ID NO: 5813 - DNA, 25 bp, SARS Virus
cgagtccggtatcaccgtaatgacc

SEQ ID NO: 5814 - DNA, 25 bp, SARS Virus
gagtccggtatgcccgtaatgacca

SEQ ID NO: 5815 - DNA, 25 bp, SARS Virus
agtccggtatgaccgtaatgaccac

SEQ ID NO: 5816 - DNA, 25 bp, SARS Virus
gtccggtatgaccgtaatgaccact

SEQ ID NO: 5817 - DNA, 25 bp, SARS Virus
tccggtatgaccctaatgaccactg

SEQ ID NO: 5818 - DNA, 25 bp, SARS Virus
ccggtatgaccgcaatgaccactgt

SEQ ID NO: 5819 - DNA, 25 bp, SARS Virus
cggtatgaccgtcatgaccactgtt

SEQ ID NO: 5820 - DNA, 25 bp, SARS Virus
ggtatgaccgtactgaccactgtta

SEQ ID NO: 5821 - DNA, 25 bp, SARS Virus
gtatgaccgtaacgaccactgttac

SEQ ID NO: 5822 - DNA, 25 bp, SARS Virus
tatgaccgtaatcaccactgttaca

SEQ ID NO: 5823 - DNA, 25 bp, SARS Virus
atgaccgtaatgcccactgttacac

SEQ ID NO: 5824 - DNA, 25 bp, SARS Virus
tgaccgtaatgaccactgttacacc

SEQ ID NO: 5825 - DNA, 25 bp, SARS Virus
gaccgtaatgaccactgttacacct

SEQ ID NO: 5826 - DNA, 25 bp, SARS Virus
accgtaatgacccctgttacacctc

SEQ ID NO: 5827 - DNA, 25 bp, SARS Virus
ccgtaatgaccactgttacacctct

SEQ ID NO: 5828 - DNA, 25 bp, SARS Virus
cgtaatgaccaccgttacacctctg

SEQ ID NO: 5829 - DNA, 25 bp, SARS Virus
gtaatgaccactcttacacctctgg

SEQ ID NO: 5830 - DNA, 25 bp, SARS Virus
taatgaccactgctacacctctgga

SEQ ID NO: 5831 - DNA, 25 bp, SARS Virus
aatgaccactgtcacacctctggaa

SEQ ID NO: 5832 - DNA, 25 bp, SARS Virus
atgaccactgttccacctctggaac

SEQ ID NO: 5833 - DNA, 25 bp, SARS Virus
tgaccactgttacacctctggaact

SEQ ID NO: 5834 - DNA, 25 bp, SARS Virus
gaccactgttacccctctggaactt

SEQ ID NO: 5835 - DNA, 25 bp, SARS Virus
accactgttacacctctggaactta

SEQ ID NO: 5836 - DNA, 25 bp, SARS Virus
ccactgttacacctctggaacttac

SEQ ID NO: 5837 - DNA, 25 bp, SARS Virus
cactgttacacccctggaacttact

SEQ ID NO: 5838 - DNA, 25 bp, SARS Virus
actgttacacctctggaacttactc

SEQ ID NO: 5839 - DNA, 25 bp, SARS Virus
ctgttacacctccggaacttactcc

SEQ ID NO: 5840 - DNA, 25 bp, SARS Virus
tgttacacctctcgaacttactcct

SEQ ID NO: 5841 - DNA, 25 bp, SARS Virus
gttacacctctgcaacttactccta

SEQ ID NO: 5842 - DNA, 25 bp, SARS Virus
ttacacctctggcacttactcctag

SEQ ID NO: 5843 - DNA, 25 bp, SARS Virus
tacacctctggaccttactcctaga

SEQ ID NO: 5844 - DNA, 25 bp, SARS Virus
acacctctggaacttactcctagag

SEQ ID NO: 5845 - DNA, 25 bp, SARS Virus
cacctctggaacctactcctagagg

SEQ ID NO: 5846 - DNA, 25 bp, SARS Virus
acctctggaactcactcctagagga

SEQ ID NO: 5847 - DNA, 25 bp, SARS Virus
cctctggaacttcctcctagaggaa

SEQ ID NO: 5848 - DNA, 25 bp, SARS Virus
ctctggaacttactcctagaggaac

SEQ ID NO: 5849 - DNA, 25 bp, SARS Virus
tctggaacttacccctagaggaact

SEQ ID NO: 5850 - DNA, 25 bp, SARS Virus
ctggaacttactcctagaggaactc

SEQ ID NO: 5851 - DNA, 25 bp, SARS Virus
tggaacttactcctagaggaactct

SEQ ID NO: 5852 - DNA, 25 bp, SARS Virus
ggaacttactcccagaggaactcta

SEQ ID NO: 5853 - DNA, 25 bp, SARS Virus
gaacttactcctcgaggaactctat

SEQ ID NO: 5854 - DNA, 25 bp, SARS Virus
aacttactcctacaggaactctatg

SEQ ID NO: 5855 - DNA, 25 bp, SARS Virus
acttactcctagcggaactctatga

SEQ ID NO: 5856 - DNA, 25 bp, SARS Virus
cttactcctagacgaactctatgac

SEQ ID NO: 5857 - DNA, 25 bp, SARS Virus
ttactcctagagcaactctatgact

SEQ ID NO: 5858 - DNA, 25 bp, SARS Virus
tactcctagaggcactctatgactc

SEQ ID NO: 5859 - DNA, 25 bp, SARS Virus
actcctagaggacctctatgactca

SEQ ID NO: 5860 - DNA, 25 bp, SARS Virus
ctcctagaggaactctatgactcag

SEQ ID NO: 5861 - DNA, 25 bp, SARS Virus
tcctagaggaaccctatgactcagc

SEQ ID NO: 5862 - DNA, 25 bp, SARS Virus
cctagaggaactctatgactcagca

SEQ ID NO: 5863 - DNA, 25 bp, SARS Virus
ctagaggaactccatgactcagcac

SEQ ID NO: 5864 - DNA, 25 bp, SARS Virus
tagaggaactctctgactcagcact

SEQ ID NO: 5865 - DNA, 25 bp, SARS Virus
agaggaactctacgactcagcactt

SEQ ID NO: 5866 - DNA, 25 bp, SARS Virus
gaggaactctatcactcagcacttg

SEQ ID NO: 5867 - DNA, 25 bp, SARS Virus
aggaactctatgcctcagcacttgc

SEQ ID NO: 5868 - DNA, 25 bp, SARS Virus
ggaactctatgactcagcacttgca

SEQ ID NO: 5869 - DNA, 25 bp, SARS Virus
gaactctatgacccagcacttgcac

SEQ ID NO: 5870 - DNA, 25 bp, SARS Virus
aactctatgactcagcacttgcaca

SEQ ID NO: 5871 - DNA, 25 bp, SARS Virus
actctatgactccgcacttgcacaa

SEQ ID NO: 5872 - DNA, 25 bp, SARS Virus
ctctatgactcaccacttgcacaat

SEQ ID NO: 5873 - DNA, 25 bp, SARS Virus
tctatgactcagcacttgcacaatt

SEQ ID NO: 5874 - DNA, 25 bp, SARS Virus
ctatgactcagcccttgcacaattg

SEQ ID NO: 5875 - DNA, 25 bp, SARS Virus
tatgactcagcacttgcacaattgt

SEQ ID NO: 5876 - DNA, 25 bp, SARS Virus
atgactcagcacctgcacaattgta

SEQ ID NO: 5877 - DNA, 25 bp, SARS Virus
tgactcagcactcgcacaattgtaa

SEQ ID NO: 5878 - DNA, 25 bp, SARS Virus
gactcagcacttccacaattgtaat

SEQ ID NO: 5879 - DNA, 25 bp, SARS Virus
actcagcacttgcacaattgtaatt

SEQ ID NO: 5880 - DNA, 25 bp, SARS Virus
ctcagcacttgcccaattgtaattg

SEQ ID NO: 5881 - DNA, 25 bp, SARS Virus
tcagcacttgcacaattgtaattgt

SEQ ID NO: 5882 - DNA, 25 bp, SARS Virus
cagcacttgcaccattgtaattgta

SEQ ID NO: 5883 - DNA, 25 bp, SARS Virus
agcacttgcacacttgtaattgtaa

SEQ ID NO: 5884 - DNA, 25 bp, SARS Virus
gcacttgcacaactgtaattgtaac

SEQ ID NO: 5885 - DNA, 25 bp, SARS Virus
cacttgcacaatcgtaattgtaaca

SEQ ID NO: 5886 - DNA, 25 bp, SARS Virus
acttgcacaattctaattgtaacaa

SEQ ID NO: 5887 - DNA, 25 bp, SARS Virus
cttgcacaattgcaattgtaacaac

SEQ ID NO: 5888 - DNA, 25 bp, SARS Virus
ttgcacaattgtcattgtaacaacc

SEQ ID NO: 5889 - DNA, 25 bp, SARS Virus
tgcacaattgtacttgtaacaaccg

SEQ ID NO: 5890 - DNA, 25 bp, SARS Virus
gcacaattgtaactgtaacaaccgc

SEQ ID NO: 5891 - DNA, 25 bp, SARS Virus
cacaattgtaatcgtaacaaccgct

SEQ ID NO: 5892 - DNA, 25 bp, SARS Virus
acaattgtaattctaacaaccgcta

SEQ ID NO: 5893 - DNA, 25 bp, SARS Virus
caattgtaattgcaacaaccgctaa

SEQ ID NO: 5894 - DNA, 25 bp, SARS Virus
aattgtaattgtcacaaccgctaaa

SEQ ID NO: 5895 - DNA, 25 bp, SARS Virus
attgtaattgtaccaaccgctaaaa

SEQ ID NO: 5896 - DNA, 25 bp, SARS Virus
ttgtaattgtaacaaccgctaaaag

SEQ ID NO: 5897 - DNA, 25 bp, SARS Virus
tgtaattgtaaccaccgctaaaagt

SEQ ID NO: 5898 - DNA, 25 bp, SARS Virus
gtaattgtaacacccgctaaaagta

SEQ ID NO: 5899 - DNA, 25 bp, SARS Virus
taattgtaacaaccgctaaaagtaa

SEQ ID NO: 5900 - DNA, 25 bp, SARS Virus
aattgtaacaaccgctaaaagtaaa

SEQ ID NO: 5901 - DNA, 25 bp, SARS Virus
attgtaacaacccctaaaagtaaac

SEQ ID NO: 5902 - DNA, 25 bp, SARS Virus
ttgtaacaaccgctaaaagtaaact

SEQ ID NO: 5903 - DNA, 25 bp, SARS Virus
tgtaacaaccgccaaaagtaaactt

SEQ ID NO: 5904 - DNA, 25 bp, SARS Virus
gtaacaaccgctcaaagtaaactta

SEQ ID NO: 5905 - DNA, 25 bp, SARS Virus
taacaaccgctacaagtaaacttac

SEQ ID NO: 5906 - DNA, 25 bp, SARS Virus
aacaaccgctaacagtaaacttact

SEQ ID NO: 5907 - DNA, 25 bp, SARS Virus
acaaccgctaaacgtaaacttactt

SEQ ID NO: 5908 - DNA, 25 bp, SARS Virus
caaccgctaaaactaaacttacttc

SEQ ID NO: 5909 - DNA, 25 bp, SARS Virus
aaccgctaaaagcaaacttacttct

SEQ ID NO: 5910 - DNA, 25 bp, SARS Virus
accgctaaaagtcaacttacttctc

SEQ ID NO: 5911 - DNA, 25 bp, SARS Virus
ccgctaaaagtacacttacttctcc

SEQ ID NO: 5912 - DNA, 25 bp, SARS Virus
cgctaaaagtaaccttacttctcca

SEQ ID NO: 5913 - DNA, 25 bp, SARS Virus
gctaaaagtaaacttacttctccaa

SEQ ID NO: 5914 - DNA, 25 bp, SARS Virus
ctaaaagtaaacctacttctccaac

SEQ ID NO: 5915 - DNA, 25 bp, SARS Virus
taaaagtaaactcacttctccaacg

SEQ ID NO: 5916 - DNA, 25 bp, SARS Virus
aaaagtaaacttccttctccaacgg

SEQ ID NO: 5917 - DNA, 25 bp, SARS Virus
aaagtaaacttacttctccaacggt

SEQ ID NO: 5918 - DNA, 25 bp, SARS Virus
aagtaaacttacctctccaacggta

SEQ ID NO: 5919 - DNA, 25 bp, SARS Virus
agtaaacttactcctccaacggtag

SEQ ID NO: 5920 - DNA, 25 bp, SARS Virus
gtaaacttacttctccaacggtagt

SEQ ID NO: 5921 - DNA, 25 bp, SARS Virus
taaacttacttccccaacggtagta

SEQ ID NO: 5922 - DNA, 25 bp, SARS Virus
aaacttacttctccaacggtagtaa

SEQ ID NO: 5923 - DNA, 25 bp, SARS Virus
aacttacttctccaacggtagtaaa

SEQ ID NO: 5924 - DNA, 25 bp, SARS Virus
acttacttctcccacggtagtaaaa

SEQ ID NO: 5925 - DNA, 25 bp, SARS Virus
cttacttctccaccggtagtaaaac

SEQ ID NO: 5926 - DNA, 25 bp, SARS Virus
ttacttctccaacggtagtaaaacc

SEQ ID NO: 5927 - DNA, 25 bp, SARS Virus
tacttctccaaccgtagtaaaaccg

SEQ ID NO: 5928 - DNA, 25 bp, SARS Virus
acttctccaacgctagtaaaaccgt

SEQ ID NO: 5929 - DNA, 25 bp, SARS Virus
cttctccaacggcagtaaaaccgta

SEQ ID NO: 5930 - DNA, 25 bp, SARS Virus
ttctccaacggtcgtaaaaccgtag

SEQ ID NO: 5931 - DNA, 25 bp, SARS Virus
tctccaacggtactaaaaccgtaga

SEQ ID NO: 5932 - DNA, 25 bp, SARS Virus
ctccaacggtagcaaaaccgtagaa

SEQ ID NO: 5933 - DNA, 25 bp, SARS Virus
tccaacggtagtcaaaccgtagaaa

SEQ ID NO: 5934 - DNA, 25 bp, SARS Virus
ccaacggtagtacaaccgtagaaag

SEQ ID NO: 5935 - DNA, 25 bp, SARS Virus
caacggtagtaacaccgtagaaaga

SEQ ID NO: 5936 - DNA, 25 bp, SARS Virus
aacggtagtaaacccgtagaaagag

SEQ ID NO: 5937 - DNA, 25 bp, SARS Virus
acggtagtaaaaccgtagaaagaga

SEQ ID NO: 5938 - DNA, 25 bp, SARS Virus
cggtagtaaaaccgtagaaagagac

SEQ ID NO: 5939 - DNA, 25 bp, SARS Virus
ggtagtaaaaccctagaaagagacg

SEQ ID NO: 5940 - DNA, 25 bp, SARS Virus
gtagtaaaaccgcagaaagagacga

SEQ ID NO: 5941 - DNA, 25 bp, SARS Virus
tagtaaaaccgtcgaaagagacgaa

SEQ ID NO: 5942 - DNA, 25 bp, SARS Virus
agtaaaaccgtacaaagagacgaag

SEQ ID NO: 5943 - DNA, 25 bp, SARS Virus
gtaaaaccgtagcaagagacgaaga

SEQ ID NO: 5944 - DNA, 25 bp, SARS Virus
taaaaccgtagacagagacgaagat

SEQ ID NO: 5945 - DNA, 25 bp, SARS Virus
aaaaccgtagaacgagacgaagatg

SEQ ID NO: 5946 - DNA, 25 bp, SARS Virus
aaaccgtagaaacagacgaagatgt

SEQ ID NO: 5947 - DNA, 25 bp, SARS Virus
aaccgtagaaagcgacgaagatgtt

SEQ ID NO: 5948 - DNA, 25 bp, SARS Virus
accgtagaaagacacgaagatgttc

SEQ ID NO: 5949 - DNA, 25 bp, SARS Virus
ccgtagaaagagccgaagatgttca

SEQ ID NO: 5950 - DNA, 25 bp, SARS Virus
cgtagaaagagacgaagatgttcac

SEQ ID NO: 5951 - DNA, 25 bp, SARS Virus
gtagaaagagaccaagatgttcacg

SEQ ID NO: 5952 - DNA, 25 bp, SARS Virus
tagaaagagacgcagatgttcacgg

SEQ ID NO: 5953 - DNA, 25 bp, SARS Virus
agaaagagacgacgatgttcacgga

SEQ ID NO: 5954 - DNA, 25 bp, SARS Virus
gaaagagacgaacatgttcacggaa

SEQ ID NO: 5955 - DNA, 25 bp, SARS Virus
aaagagacgaagctgttcacggaaa

SEQ ID NO: 5956 - DNA, 25 bp, SARS Virus
aagagacgaagacgttcacggaaat

SEQ ID NO: 5957 - DNA, 25 bp, SARS Virus
agagacgaagatcttcacggaaata

SEQ ID NO: 5958 - DNA, 25 bp, SARS Virus
gagacgaagatgctcacggaaataa

SEQ ID NO: 5959 - DNA, 25 bp, SARS Virus
agacgaagatgtccacggaaataac

SEQ ID NO: 5960 - DNA, 25 bp, SARS Virus
gacgaagatgttcacggaaataact

SEQ ID NO: 5961 - DNA, 25 bp, SARS Virus
acgaagatgttcccggaaataactg

SEQ ID NO: 5962 - DNA, 25 bp, SARS Virus
cgaagatgttcacggaaataactgt

SEQ ID NO: 5963 - DNA, 25 bp, SARS Virus
gaagatgttcaccgaaataactgtg

SEQ ID NO: 5964 - DNA, 25 bp, SARS Virus
aagatgttcacgcaaataactgtga

SEQ ID NO: 5965 - DNA, 25 bp, SARS Virus
agatgttcacggcaataactgtgat

SEQ ID NO: 5966 - DNA, 25 bp, SARS Virus
gatgttcacggacataactgtgata

SEQ ID NO: 5967 - DNA, 25 bp, SARS Virus
atgttcacggaactaactgtgatat

SEQ ID NO: 5968 - DNA, 25 bp, SARS Virus
tgttcacggaaacaactgtgatatt

SEQ ID NO: 5969 - DNA, 25 bp, SARS Virus
gttcacggaaatcactgtgatattt

SEQ ID NO: 5970 - DNA, 25 bp, SARS Virus
ttcacggaaatacctgtgatatttc

SEQ ID NO: 5971 - DNA, 25 bp, SARS Virus
tcacggaaataactgtgatatttct

SEQ ID NO: 5972 - DNA, 25 bp, SARS Virus
cacggaaataaccgtgatatttctc

SEQ ID NO: 5973 - DNA, 25 bp, SARS Virus
acggaaataactctgatatttctca

SEQ ID NO: 5974 - DNA, 25 bp, SARS Virus
cggaaataactgcgatatttctcag

SEQ ID NO: 5975 - DNA, 25 bp, SARS Virus
ggaaataactgtcatatttctcaga

SEQ ID NO: 5976 - DNA, 25 bp, SARS Virus
gaaataactgtgctatttctcagaa

SEQ ID NO: 5977 - DNA, 25 bp, SARS Virus
aaataactgtgacatttctcagaac

SEQ ID NO: 5978 - DNA, 25 bp, SARS Virus
aataactgtgatctttctcagaact

SEQ ID NO: 5979 - DNA, 25 bp, SARS Virus
ataactgtgatacttctcagaacta

SEQ ID NO: 5980 - DNA, 25 bp, SARS Virus
taactgtgatatctctcagaactaa

SEQ ID NO: 5981 - DNA, 25 bp, SARS Virus
aactgtgatattcctcagaactaat

SEQ ID NO: 5982 - DNA, 25 bp, SARS Virus
actgtgatatttctcagaactaatg

SEQ ID NO: 5983 - DNA, 25 bp, SARS Virus
ctgtgatatttcccagaactaatgt

SEQ ID NO: 5984 - DNA, 25 bp, SARS Virus
tgtgatatttctcagaactaatgtt

SEQ ID NO: 5985 - DNA, 25 bp, SARS Virus
ctacttcaaagtgccgtctgcacgc

SEQ ID NO: 5986 - DNA, 25 bp, SARS Virus
tacttcaaagtagcgtctgcacgct

SEQ ID NO: 5987 - DNA, 25 bp, SARS Virus
acttcaaagtacggtctgcacgctg

SEQ ID NO: 5988 - DNA, 25 bp, SARS Virus
cttcaaagtaccgtctgcacgctga

SEQ ID NO: 5989 - DNA, 25 bp, SARS Virus
ttcaaagtaccggctgcacgctgaa

SEQ ID NO: 5990 - DNA, 25 bp, SARS Virus
tcaaagtaccgtgtgcacgctgaaa

SEQ ID NO: 5991 - DNA, 25 bp, SARS Virus
caaagtaccgtcggcacgctgaaag

SEQ ID NO: 5992 - DNA, 25 bp, SARS Virus
aaagtaccgtctgcacgctgaaaga

SEQ ID NO: 5993 - DNA, 25 bp, SARS Virus
aagtaccgtctggacgctgaaagac

SEQ ID NO: 5994 - DNA, 25 bp, SARS Virus
agtaccgtctgcgcgctgaaagact

SEQ ID NO: 5995 - DNA, 25 bp, SARS Virus
gtaccgtctgcaggctgaaagactt

SEQ ID NO: 5996 - DNA, 25 bp, SARS Virus
taccgtctgcacgctgaaagacttt

SEQ ID NO: 5997 - DNA, 25 bp, SARS Virus
accgtctgcacggtgaaagactttc

SEQ ID NO: 5998 - DNA, 25 bp, SARS Virus
ccgtctgcacgcggaaagactttcg

SEQ ID NO: 5999 - DNA, 25 bp, SARS Virus
cgtctgcacgctgaaagactttcgg

SEQ ID NO: 6000 - DNA, 25 bp, SARS Virus
gtctgcacgctggaagactttcggt

SEQ ID NO: 6001 - DNA, 25 bp, SARS Virus
tctgcacgctgagagactttcggtg

SEQ ID NO: 6002 - DNA, 25 bp, SARS Virus
ctgcacgctgaaggactttcggtga

SEQ ID NO: 6003 - DNA, 25 bp, SARS Virus
tgcacgctgaaagactttcggtgaa

SEQ ID NO: 6004 - DNA, 25 bp, SARS Virus
gcacgctgaaaggctttcggtgaac

SEQ ID NO: 6005 - DNA, 25 bp, SARS Virus
cacgctgaaagagtttcggtgaaca

SEQ ID NO: 6006 - DNA, 25 bp, SARS Virus
acgctgaaagacgttcggtgaacac

SEQ ID NO: 6007 - DNA, 25 bp, SARS Virus
cgctgaaagactgtcggtgaacact

SEQ ID NO: 6008 - DNA, 25 bp, SARS Virus
gctgaaagacttgcggtgaacactt

SEQ ID NO: 6009 - DNA, 25 bp, SARS Virus
ctgaaagactttgggtgaacacttg

SEQ ID NO: 6010 - DNA, 25 bp, SARS Virus
tgaaagactttcggtgaacacttgt

SEQ ID NO: 6011 - DNA, 25 bp, SARS Virus
gaaagactttcggtgaacacttgta

SEQ ID NO: 6012 - DNA, 25 bp, SARS Virus
aaagactttcggggaacacttgtaa

SEQ ID NO: 6013 - DNA, 25 bp, SARS Virus
aagactttcggtgaacacttgtaac

SEQ ID NO: 6014 - DNA, 25 bp, SARS Virus
agactttcggtggacacttgtaaca

SEQ ID NO: 6015 - DNA, 25 bp, SARS Virus
gactttcggtgagcacttgtaacac

SEQ ID NO: 6016 - DNA, 25 bp, SARS Virus
actttcggtgaagacttgtaacacc

SEQ ID NO: 6017 - DNA, 25 bp, SARS Virus
ctttcggtgaacgcttgtaacaccg

SEQ ID NO: 6018 - DNA, 25 bp, SARS Virus
tttcggtgaacagttgtaacaccgt

SEQ ID NO: 6019 - DNA, 25 bp, SARS Virus
ttcggtgaacacgtgtaacaccgtg

SEQ ID NO: 6020 - DNA, 25 bp, SARS Virus
tcggtgaacactggtaacaccgtga

SEQ ID NO: 6021 - DNA, 25 bp, SARS Virus
cggtgaacacttgtaacaccgtgac

SEQ ID NO: 6022 - DNA, 25 bp, SARS Virus
ggtgaacacttggaacaccgtgact

SEQ ID NO: 6023 - DNA, 25 bp, SARS Virus
gtgaacacttgtgacaccgtgactt

SEQ ID NO: 6024 - DNA, 25 bp, SARS Virus
tgaacacttgtagcaccgtgacttt

SEQ ID NO: 6025 - DNA, 25 bp, SARS Virus
gaacacttgtaagaccgtgactttt

SEQ ID NO: 6026 - DNA, 25 bp, SARS Virus
aacacttgtaacgccgtgactttta

SEQ ID NO: 6027 - DNA, 25 bp, SARS Virus
acacttgtaacagcgtgacttttaa

SEQ ID NO: 6028 - DNA, 25 bp, SARS Virus
cacttgtaacacggtgacttttaaa

SEQ ID NO: 6029 - DNA, 25 bp, SARS Virus
acttgtaacaccgtgacttttaaat

SEQ ID NO: 6030 - DNA, 25 bp, SARS Virus
cttgtaacaccgggacttttaaatc

SEQ ID NO: 6031 - DNA, 25 bp, SARS Virus
ttgtaacaccgtgacttttaaatca

SEQ ID NO: 6032 - DNA, 25 bp, SARS Virus
tgtaacaccgtggcttttaaatcaa

SEQ ID NO: 6033 - DNA, 25 bp, SARS Virus
gtaacaccgtgagttttaaatcaat

SEQ ID NO: 6034 - DNA, 25 bp, SARS Virus
taacaccgtgacgtttaaatcaata

SEQ ID NO: 6035 - DNA, 25 bp, SARS Virus
aacaccgtgactgttaaatcaataa

SEQ ID NO: 6036 - DNA, 25 bp, SARS Virus
acaccgtgacttgtaaatcaataac

SEQ ID NO: 6037 - DNA, 25 bp, SARS Virus
caccgtgactttgaaatcaataact

SEQ ID NO: 6038 - DNA, 25 bp, SARS Virus
accgtgacttttgaatcaataactt

SEQ ID NO: 6039 - DNA, 25 bp, SARS Virus
ccgtgacttttagatcaataacttc

SEQ ID NO: 6040 - DNA, 25 bp, SARS Virus
cgtgacttttaagtcaataacttcc

SEQ ID NO: 6041 - DNA, 25 bp, SARS Virus
gtgacttttaaagcaataacttcct

SEQ ID NO: 6042 - DNA, 25 bp, SARS Virus
tgacttttaaatgaataacttcctg

SEQ ID NO: 6043 - DNA, 25 bp, SARS Virus
gacttttaaatcgataacttcctgg

SEQ ID NO: 6044 - DNA, 25 bp, SARS Virus
acttttaaatcagtaacttcctgga

SEQ ID NO: 6045 - DNA, 25 bp, SARS Virus
cttttaaatcaagaacttcctggat

SEQ ID NO: 6046 - DNA, 25 bp, SARS Virus
ttttaaatcaatgacttcctggatg

SEQ ID NO: 6047 - DNA, 25 bp, SARS Virus
tttaaatcaatagcttcctggatga

SEQ ID NO: 6048 - DNA, 25 bp, SARS Virus
ttaaatcaataagttcctggatgat

SEQ ID NO: 6049 - DNA, 25 bp, SARS Virus
taaatcaataacgtcctggatgatg

SEQ ID NO: 6050 - DNA, 25 bp, SARS Virus
aaatcaataactgcctggatgatgt

SEQ ID NO: 6051 - DNA, 25 bp, SARS Virus
aatcaataacttgctggatgatgta

SEQ ID NO: 6052 - DNA, 25 bp, SARS Virus
atcaataacttcgtggatgatgtac

SEQ ID NO: 6053 - DNA, 25 bp, SARS Virus
tcaataacttccgggatgatgtaca

SEQ ID NO: 6054 - DNA, 25 bp, SARS Virus
caataacttcctggatgatgtacac

SEQ ID NO: 6055 - DNA, 25 bp, SARS Virus
aataacttcctggatgatgtacacc

SEQ ID NO: 6056 - DNA, 25 bp, SARS Virus
ataacttcctgggtgatgtacaccc

SEQ ID NO: 6057 - DNA, 25 bp, SARS Virus
taacttcctggaggatgtacaccca

SEQ ID NO: 6058 - DNA, 25 bp, SARS Virus
aacttcctggatgatgtacacccat

SEQ ID NO: 6059 - DNA, 25 bp, SARS Virus
acttcctggatggtgtacacccatg

SEQ ID NO: 6060 - DNA, 25 bp, SARS Virus
cttcctggatgaggtacacccatgg

SEQ ID NO: 6061 - DNA, 25 bp, SARS Virus
ttcctggatgatgtacacccatgga

SEQ ID NO: 6062 - DNA, 25 bp, SARS Virus
tcctggatgatggacacccatggat

SEQ ID NO: 6063 - DNA, 25 bp, SARS Virus
cctggatgatgtgcacccatggatg

SEQ ID NO: 6064 - DNA, 25 bp, SARS Virus
ctggatgatgtagacccatggatgg

SEQ ID NO: 6065 - DNA, 25 bp, SARS Virus
tggatgatgtacgcccatggatgga

SEQ ID NO: 6066 - DNA, 25 bp, SARS Virus
ggatgatgtacagccatggatggat

SEQ ID NO: 6067 - DNA, 25 bp, SARS Virus
gatgatgtacacgcatggatggatg

SEQ ID NO: 6068 - DNA, 25 bp, SARS Virus
atgatgtacaccgatggatggatga

SEQ ID NO: 6069 - DNA, 25 bp, SARS Virus
tgatgtacacccgtggatggatgat

SEQ ID NO: 6070 - DNA, 25 bp, SARS Virus
gatgtacacccagggatggatgatt

SEQ ID NO: 6071 - DNA, 25 bp, SARS Virus
atgtacacccatggatggatgatta

SEQ ID NO: 6072 - DNA, 25 bp, SARS Virus
tgtacacccatggatggatgattac

SEQ ID NO: 6073 - DNA, 25 bp, SARS Virus
gtacacccatgggtggatgattacg

SEQ ID NO: 6074 - DNA, 25 bp, SARS Virus
tacacccatggagggatgattacga

SEQ ID NO: 6075 - DNA, 25 bp, SARS Virus
acacccatggatggatgattacgac

SEQ ID NO: 6076 - DNA, 25 bp, SARS Virus
cacccatggatggatgattacgaca

SEQ ID NO: 6077 - DNA, 25 bp, SARS Virus
acccatggatgggtgattacgacat

SEQ ID NO: 6078 - DNA, 25 bp, SARS Virus
cccatggatggaggattacgacatc

SEQ ID NO: 6079 - DNA, 25 bp, SARS Virus
ccatggatggatgattacgacatca

SEQ ID NO: 6080 - DNA, 25 bp, SARS Virus
catggatggatggttacgacatcac

SEQ ID NO: 6081 - DNA, 25 bp, SARS Virus
atggatggatgagtacgacatcact

SEQ ID NO: 6082 - DNA, 25 bp, SARS Virus
tggatggatgatgacgacatcactt

SEQ ID NO: 6083 - DNA, 25 bp, SARS Virus
ggatggatgattgcgacatcacttt

SEQ ID NO: 6084 - DNA, 25 bp, SARS Virus
gatggatgattaggacatcactttt

SEQ ID NO: 6085 - DNA, 25 bp, SARS Virus
atggatgattacgacatcactttta

SEQ ID NO: 6086 - DNA, 25 bp, SARS Virus
tggatgattacggcatcacttttac

SEQ ID NO: 6087 - DNA, 25 bp, SARS Virus
ggatgattacgagatcacttttacg

SEQ ID NO: 6088 - DNA, 25 bp, SARS Virus
gatgattacgacgtcacttttacgg

SEQ ID NO: 6089 - DNA, 25 bp, SARS Virus
atgattacgacagcacttttacggt

SEQ ID NO: 6090 - DNA, 25 bp, SARS Virus
tgattacgacatgacttttacggta

SEQ ID NO: 6091 - DNA, 25 bp, SARS Virus
gattacgacatcgcttttacggtac

SEQ ID NO: 6092 - DNA, 25 bp, SARS Virus
attacgacatcagttttacggtaca

SEQ ID NO: 6093 - DNA, 25 bp, SARS Virus
ttacgacatcacgtttacggtacag

SEQ ID NO: 6094 - DNA, 25 bp, SARS Virus
tacgacatcactgttacggtacagg

SEQ ID NO: 6095 - DNA, 25 bp, SARS Virus
acgacatcacttgtacggtacagga

SEQ ID NO: 6096 - DNA, 25 bp, SARS Virus
cgacatcactttgacggtacaggac

SEQ ID NO: 6097 - DNA, 25 bp, SARS Virus
gacatcacttttgcggtacaggacg

SEQ ID NO: 6098 - DNA, 25 bp, SARS Virus
acatcacttttagggtacaggacgg

SEQ ID NO: 6099 - DNA, 25 bp, SARS Virus
catcacttttacggtacaggacgga

SEQ ID NO: 6100 - DNA, 25 bp, SARS Virus
atcacttttacggtacaggacggac

SEQ ID NO: 6101 - DNA, 25 bp, SARS Virus
tcacttttacgggacaggacggaca

SEQ ID NO: 6102 - DNA, 25 bp, SARS Virus
cacttttacggtgcaggacggacag

SEQ ID NO: 6103 - DNA, 25 bp, SARS Virus
acttttacggtagaggacggacagt

SEQ ID NO: 6104 - DNA, 25 bp, SARS Virus
cttttacggtacgggacggacagtt

SEQ ID NO: 6105 - DNA, 25 bp, SARS Virus
ttttacggtacaggacggacagttc

SEQ ID NO: 6106 - DNA, 25 bp, SARS Virus
tttacggtacaggacggacagttct

SEQ ID NO: 6107 - DNA, 25 bp, SARS Virus
ttacggtacagggcggacagttctg

SEQ ID NO: 6108 - DNA, 25 bp, SARS Virus
tacggtacaggagggacagttctgg

SEQ ID NO: 6109 - DNA, 25 bp, SARS Virus
acggtacaggacggacagttctggg

SEQ ID NO: 6110 - DNA, 25 bp, SARS Virus
cggtacaggacggacagttctgggt

SEQ ID NO: 6111 - DNA, 25 bp, SARS Virus
ggtacaggacgggcagttctgggtc

SEQ ID NO: 6112 - DNA, 25 bp, SARS Virus
gtacaggacggagagttctgggtct

SEQ ID NO: 6113 - DNA, 25 bp, SARS Virus
tacaggacggacggttctgggtctc

SEQ ID NO: 6114 - DNA, 25 bp, SARS Virus
acaggacggacagttctgggtctct

SEQ ID NO: 6115 - DNA, 25 bp, SARS Virus
caggacggacaggtctgggtctcta

SEQ ID NO: 6116 - DNA, 25 bp, SARS Virus
aggacggacagtgctgggtctctaa

SEQ ID NO: 6117 - DNA, 25 bp, SARS Virus
ggacggacagttgtgggtctctaac

SEQ ID NO: 6118 - DNA, 25 bp, SARS Virus
gacggacagttcggggtctctaacc

SEQ ID NO: 6119 - DNA, 25 bp, SARS Virus
acggacagttctgggtctctaacct

SEQ ID NO: 6120 - DNA, 25 bp, SARS Virus
cggacagttctgggtctctaacctg

SEQ ID NO: 6121 - DNA, 25 bp, SARS Virus
ggacagttctgggtctctaacctgg

SEQ ID NO: 6122 - DNA, 25 bp, SARS Virus
gacagttctggggctctaacctgga

SEQ ID NO: 6123 - DNA, 25 bp, SARS Virus
acagttctgggtgtctaacctggac

SEQ ID NO: 6124 - DNA, 25 bp, SARS Virus
cagttctgggtcgctaacctggact

SEQ ID NO: 6125 - DNA, 25 bp, SARS Virus
agttctgggtctgtaacctggactc

SEQ ID NO: 6126 - DNA, 25 bp, SARS Virus
gttctgggtctcgaacctggactcg

SEQ ID NO: 6127 - DNA, 25 bp, SARS Virus
ttctgggtctctgacctggactcgt

SEQ ID NO: 6128 - DNA, 25 bp, SARS Virus
tctgggtctctagcctggactcgta

SEQ ID NO: 6129 - DNA, 25 bp, SARS Virus
ctgggtctctaagctggactcgtat

SEQ ID NO: 6130 - DNA, 25 bp, SARS Virus
tgggtctctaacgtggactcgtatc

SEQ ID NO: 6131 - DNA, 25 bp, SARS Virus
gggtctctaaccgggactcgtatca

SEQ ID NO: 6132 - DNA, 25 bp, SARS Virus
ggtctctaacctggactcgtatcac

SEQ ID NO: 6133 - DNA, 25 bp, SARS Virus
gtctctaacctggactcgtatcaca

SEQ ID NO: 6134 - DNA, 25 bp, SARS Virus
tctctaacctgggctcgtatcacaa

SEQ ID NO: 6135 - DNA, 25 bp, SARS Virus
ctctaacctggagtcgtatcacaac

SEQ ID NO: 6136 - DNA, 25 bp, SARS Virus
tctaacctggacgcgtatcacaacg

SEQ ID NO: 6137 - DNA, 25 bp, SARS Virus
ctaacctggactggtatcacaacgt

SEQ ID NO: 6138 - DNA, 25 bp, SARS Virus
taacctggactcgtatcacaacgtc

SEQ ID NO: 6139 - DNA, 25 bp, SARS Virus
aacctggactcggatcacaacgtct

SEQ ID NO: 6140 - DNA, 25 bp, SARS Virus
acctggactcgtgtcacaacgtcta

SEQ ID NO: 6141 - DNA, 25 bp, SARS Virus
cctggactcgtagcacaacgtctaa

SEQ ID NO: 6142 - DNA, 25 bp, SARS Virus
ctggactcgtatgacaacgtctaat

SEQ ID NO: 6143 - DNA, 25 bp, SARS Virus
tggactcgtatcgcaacgtctaata

SEQ ID NO: 6144 - DNA, 25 bp, SARS Virus
ggactcgtatcagaacgtctaatag

SEQ ID NO: 6145 - DNA, 25 bp, SARS Virus
gactcgtatcacgacgtctaatagt

SEQ ID NO: 6146 - DNA, 25 bp, SARS Virus
actcgtatcacagcgtctaatagtg

SEQ ID NO: 6147 - DNA, 25 bp, SARS Virus
ctcgtatcacaaggtctaatagtgt

SEQ ID NO: 6148 - DNA, 25 bp, SARS Virus
tcgtatcacaacgtctaatagtgtt

SEQ ID NO: 6149 - DNA, 25 bp, SARS Virus
cgtatcacaacggctaatagtgttg

SEQ ID NO: 6150 - DNA, 25 bp, SARS Virus
gtatcacaacgtgtaatagtgttgg

SEQ ID NO: 6151 - DNA, 25 bp, SARS Virus
tatcacaacgtcgaatagtgttggt

SEQ ID NO: 6152 - DNA, 25 bp, SARS Virus
atcacaacgtctgatagtgttggtg

SEQ ID NO: 6153 - DNA, 25 bp, SARS Virus
tcacaacgtctagtagtgttggtga

SEQ ID NO: 6154 - DNA, 25 bp, SARS Virus
cacaacgtctaagagtgttggtgag

SEQ ID NO: 6155 - DNA, 25 bp, SARS Virus
acaacgtctaatggtgttggtgagt

SEQ ID NO: 6156 - DNA, 25 bp, SARS Virus
caacgtctaatagtgttggtgagtt

SEQ ID NO: 6157 - DNA, 25 bp, SARS Virus
aacgtctaatagggttggtgagttt

SEQ ID NO: 6158 - DNA, 25 bp, SARS Virus
acgtctaatagtgttggtgagtttg

SEQ ID NO: 6159 - DNA, 25 bp, SARS Virus
cgtctaatagtggtggtgagtttgt

SEQ ID NO: 6160 - DNA, 25 bp, SARS Virus
gtctaatagtgtgggtgagtttgta

SEQ ID NO: 6161 - DNA, 25 bp, SARS Virus
tctaatagtgttggtgagtttgtaa

SEQ ID NO: 6162 - DNA, 25 bp, SARS Virus
ctaatagtgttggtgagtttgtaac

SEQ ID NO: 6163 - DNA, 25 bp, SARS Virus
taatagtgttggggagtttgtaact

SEQ ID NO: 6164 - DNA, 25 bp, SARS Virus
aatagtgttggtgagtttgtaactt

SEQ ID NO: 6165 - DNA, 25 bp, SARS Virus
atagtgttggtgggtttgtaacttt

SEQ ID NO: 6166 - DNA, 25 bp, SARS Virus
tagtgttggtgagtttgtaactttg

SEQ ID NO: 6167 - DNA, 25 bp, SARS Virus
agtgttggtgaggttgtaactttga

SEQ ID NO: 6168 - DNA, 25 bp, SARS Virus
gtgttggtgagtgtgtaactttgag

SEQ ID NO: 6169 - DNA, 25 bp, SARS Virus
tgttggtgagttggtaactttgagc

SEQ ID NO: 6170 - DNA, 25 bp, SARS Virus
gttggtgagtttgtaactttgagct

SEQ ID NO: 6171 - DNA, 25 bp, SARS Virus
ttggtgagtttggaactttgagctg

SEQ ID NO: 6172 - DNA, 25 bp, SARS Virus
tggtgagtttgtgactttgagctga

SEQ ID NO: 6173 - DNA, 25 bp, SARS Virus
ggtgagtttgtagctttgagctgag

SEQ ID NO: 6174 - DNA, 25 bp, SARS Virus
gtgagtttgtaagtttgagctgagg

SEQ ID NO: 6175 - DNA, 25 bp, SARS Virus
tgagtttgtaacgttgagctgaggc

SEQ ID NO: 6176 - DNA, 25 bp, SARS Virus
gagtttgtaactgtgagctgaggcg

SEQ ID NO: 6177 - DNA, 25 bp, SARS Virus
agtttgtaacttggagctgaggcgt

SEQ ID NO: 6178 - DNA, 25 bp, SARS Virus
gtttgtaactttgagctgaggcgtt

SEQ ID NO: 6179 - DNA, 25 bp, SARS Virus
tttgtaactttgggctgaggcgttc

SEQ ID NO: 6180 - DNA, 25 bp, SARS Virus
ttgtaactttgagctgaggcgttcc

SEQ ID NO: 6181 - DNA, 25 bp, SARS Virus
tgtaactttgaggtgaggcgttccc

SEQ ID NO: 6182 - DNA, 25 bp, SARS Virus
gtaactttgagcggaggcgttccct

SEQ ID NO: 6183 - DNA, 25 bp, SARS Virus
taactttgagctgaggcgttccctc

SEQ ID NO: 6184 - DNA, 25 bp, SARS Virus
aactttgagctggggcgttccctcc

SEQ ID NO: 6185 - DNA, 25 bp, SARS Virus
actttgagctgaggcgttccctcca

SEQ ID NO: 6186 - DNA, 25 bp, SARS Virus
ctttgagctgaggcgttccctccat

SEQ ID NO: 6187 - DNA, 25 bp, SARS Virus
tttgagctgaggggttccctccatc

SEQ ID NO: 6188 - DNA, 25 bp, SARS Virus
ttgagctgaggcgttccctccatcc

SEQ ID NO: 6189 - DNA, 25 bp, SARS Virus
tgagctgaggcggtccctccatcct

SEQ ID NO: 6190 - DNA, 25 bp, SARS Virus
gagctgaggcgtgccctccatcctg

SEQ ID NO: 6191 - DNA, 25 bp, SARS Virus
agctgaggcgttgcctccatcctga

SEQ ID NO: 6192 - DNA, 25 bp, SARS Virus
gctgaggcgttcgctccatcctgat

SEQ ID NO: 6193 - DNA, 25 bp, SARS Virus
ctgaggcgttccgtccatcctgatc

SEQ ID NO: 6194 - DNA, 25 bp, SARS Virus
tgaggcgttcccgccatcctgatct

SEQ ID NO: 6195 - DNA, 25 bp, SARS Virus
gaggcgttccctgcatcctgatcta

SEQ ID NO: 6196 - DNA, 25 bp, SARS Virus
aggcgttccctcgatcctgatctac

SEQ ID NO: 6197 - DNA, 25 bp, SARS Virus
ggcgttccctccgtcctgatctaca

SEQ ID NO: 6198 - DNA, 25 bp, SARS Virus
gcgttccctccagcctgatctacaa

SEQ ID NO: 6199 - DNA, 25 bp, SARS Virus
cgttccctccatgctgatctacaaa

SEQ ID NO: 6200 - DNA, 25 bp, SARS Virus
gttccctccatcgtgatctacaaaa

SEQ ID NO: 6201 - DNA, 25 bp, SARS Virus
ttccctccatccggatctacaaaac

SEQ ID NO: 6202 - DNA, 25 bp, SARS Virus
tccctccatcctgatctacaaaacc

SEQ ID NO: 6203 - DNA, 25 bp, SARS Virus
ccctccatcctggtctacaaaacct

SEQ ID NO: 6204 - DNA, 25 bp, SARS Virus
cctccatcctgagctacaaaacctc

SEQ ID NO: 6205 - DNA, 25 bp, SARS Virus
ctccatcctgatgtacaaaacctcc

SEQ ID NO: 6206 - DNA, 25 bp, SARS Virus
tccatcctgatcgacaaaacctccg

SEQ ID NO: 6207 - DNA, 25 bp, SARS Virus
ccatcctgatctgcaaaacctccga

SEQ ID NO: 6208 - DNA, 25 bp, SARS Virus
catcctgatctagaaaacctccgac

SEQ ID NO: 6209 - DNA, 25 bp, SARS Virus
atcctgatctacgaaacctccgaca

SEQ ID NO: 6210 - DNA, 25 bp, SARS Virus
tcctgatctacagaacctccgacac

SEQ ID NO: 6211 - DNA, 25 bp, SARS Virus
cctgatctacaagacctccgacaca

SEQ ID NO: 6212 - DNA, 25 bp, SARS Virus
ctgatctacaaagcctccgacacac

SEQ ID NO: 6213 - DNA, 25 bp, SARS Virus
tgatctacaaaagctccgacacaca

SEQ ID NO: 6214 - DNA, 25 bp, SARS Virus
gatctacaaaacgtccgacacacaa

SEQ ID NO: 6215 - DNA, 25 bp, SARS Virus
atctacaaaaccgccgacacacaaa

SEQ ID NO: 6216 - DNA, 25 bp, SARS Virus
tctacaaaacctgcgacacacaaac

SEQ ID NO: 6217 - DNA, 25 bp, SARS Virus
ctacaaaacctcggacacacaaacg

SEQ ID NO: 6218 - DNA, 25 bp, SARS Virus
tacaaaacctccgacacacaaacgg

SEQ ID NO: 6219 - DNA, 25 bp, SARS Virus
acaaaacctccggcacacaaacgga

SEQ ID NO: 6220 - DNA, 25 bp, SARS Virus
caaaacctccgagacacaaacggat

SEQ ID NO: 6221 - DNA, 25 bp, SARS Virus
aaaacctccgacgcacaaacggata

SEQ ID NO: 6222 - DNA, 25 bp, SARS Virus
aaacctccgacagacaaacggatac

SEQ ID NO: 6223 - DNA, 25 bp, SARS Virus
aacctccgacacgcaaacggataca

SEQ ID NO: 6224 - DNA, 25 bp, SARS Virus
acctccgacacagaaacggatacaa

SEQ ID NO: 6225 - DNA, 25 bp, SARS Virus
cctccgacacacgaacggatacaac

SEQ ID NO: 6226 - DNA, 25 bp, SARS Virus
ctccgacacacagacggatacaacc

SEQ ID NO: 6227 - DNA, 25 bp, SARS Virus
tccgacacacaagcggatacaaccg

SEQ ID NO: 6228 - DNA, 25 bp, SARS Virus
ccgacacacaaagggatacaaccga

SEQ ID NO: 6229 - DNA, 25 bp, SARS Virus
cgacacacaaacggatacaaccgac

SEQ ID NO: 6230 - DNA, 25 bp, SARS Virus
gacacacaaacggatacaaccgacg

SEQ ID NO: 6231 - DNA, 25 bp, SARS Virus
acacacaaacgggtacaaccgacga

SEQ ID NO: 6232 - DNA, 25 bp, SARS Virus
cacacaaacggagacaaccgacgat

SEQ ID NO: 6233 - DNA, 25 bp, SARS Virus
acacaaacggatgcaaccgacgata

SEQ ID NO: 6234 - DNA, 25 bp, SARS Virus
cacaaacggatagaaccgacgatat

SEQ ID NO: 6235 - DNA, 25 bp, SARS Virus
acaaacggatacgaccgacgatatt

SEQ ID NO: 6236 - DNA, 25 bp, SARS Virus
caaacggatacagccgacgatatta

SEQ ID NO: 6237 - DNA, 25 bp, SARS Virus
aaacggatacaagcgacgatattat

SEQ ID NO: 6238 - DNA, 25 bp, SARS Virus
aacggatacaacggacgatattatt

SEQ ID NO: 6239 - DNA, 25 bp, SARS Virus
acggatacaaccgacgatattattc

SEQ ID NO: 6240 - DNA, 25 bp, SARS Virus
cggatacaaccggcgatattattcg

SEQ ID NO: 6241 - DNA, 25 bp, SARS Virus
ggatacaaccgaggatattattcgc

SEQ ID NO: 6242 - DNA, 25 bp, SARS Virus
gatacaaccgacgatattattcgca

SEQ ID NO: 6243 - DNA, 25 bp, SARS Virus
atacaaccgacggtattattcgcac

SEQ ID NO: 6244 - DNA, 25 bp, SARS Virus
tacaaccgacgagattattcgcacg

SEQ ID NO: 6245 - DNA, 25 bp, SARS Virus
acaaccgacgatgttattcgcacgg

SEQ ID NO: 6246 - DNA, 25 bp, SARS Virus
caaccgacgatagtattcgcacgga

SEQ ID NO: 6247 - DNA, 25 bp, SARS Virus
aaccgacgatatgattcgcacggat

SEQ ID NO: 6248 - DNA, 25 bp, SARS Virus
accgacgatattgttcgcacggatg

SEQ ID NO: 6249 - DNA, 25 bp, SARS Virus
ccgacgatattagtcgcacggatga

SEQ ID NO: 6250 - DNA, 25 bp, SARS Virus
cgacgatattatgcgcacggatgac

SEQ ID NO: 6251 - DNA, 25 bp, SARS Virus
gacgatattattggcacggatgacc

SEQ ID NO: 6252 - DNA, 25 bp, SARS Virus
acgatattattcgcacggatgaccc

SEQ ID NO: 6253 - DNA, 25 bp, SARS Virus
cgatattattcggacggatgaccca

SEQ ID NO: 6254 - DNA, 25 bp, SARS Virus
gatattattcgcgcggatgacccaa

SEQ ID NO: 6255 - DNA, 25 bp, SARS Virus
atattattcgcagggatgacccaag

SEQ ID NO: 6256 - DNA, 25 bp, SARS Virus
tattattcgcacggatgacccaagg

SEQ ID NO: 6257 - DNA, 25 bp, SARS Virus
attattcgcacggatgacccaagga

SEQ ID NO: 6258 - DNA, 25 bp, SARS Virus
ttattcgcacgggtgacccaaggag

SEQ ID NO: 6259 - DNA, 25 bp, SARS Virus
tattcgcacggaggacccaaggagc

SEQ ID NO: 6260 - DNA, 25 bp, SARS Virus
attcgcacggatgacccaaggagca

SEQ ID NO: 6261 - DNA, 25 bp, SARS Virus
ttcgcacggatggcccaaggagcac

SEQ ID NO: 6262 - DNA, 25 bp, SARS Virus
tcgcacggatgagccaaggagcacg

SEQ ID NO: 6263 - DNA, 25 bp, SARS Virus
cgcacggatgacgcaaggagcacga

SEQ ID NO: 6264 - DNA, 25 bp, SARS Virus
gcacggatgaccgaaggagcacgat

SEQ ID NO: 6265 - DNA, 25 bp, SARS Virus
cacggatgacccgaggagcacgatc

SEQ ID NO: 6266 - DNA, 25 bp, SARS Virus
acggatgacccagggagcacgatca

SEQ ID NO: 6267 - DNA, 25 bp, SARS Virus
cggatgacccaaggagcacgatcac

SEQ ID NO: 6268 - DNA, 25 bp, SARS Virus
ggatgacccaaggagcacgatcacg

SEQ ID NO: 6269 - DNA, 25 bp, SARS Virus
gatgacccaaggggcacgatcacga

SEQ ID NO: 6270 - DNA, 25 bp, SARS Virus
atgacccaaggagcacgatcacgac

SEQ ID NO: 6271 - DNA, 25 bp, SARS Virus
tgacccaaggaggacgatcacgact

SEQ ID NO: 6272 - DNA, 25 bp, SARS Virus
gacccaaggagcgcgatcacgacta

SEQ ID NO: 6273 - DNA, 25 bp, SARS Virus
acccaaggagcaggatcacgactat

SEQ ID NO: 6274 - DNA, 25 bp, SARS Virus
cccaaggagcacgatcacgactata

SEQ ID NO: 6275 - DNA, 25 bp, SARS Virus
ccaaggagcacggtcacgactataa

SEQ ID NO: 6276 - DNA, 25 bp, SARS Virus
caaggagcacgagcacgactataac

SEQ ID NO: 6277 - DNA, 25 bp, SARS Virus
aaggagcacgatgacgactataacc

SEQ ID NO: 6278 - DNA, 25 bp, SARS Virus
aggagcacgatcgcgactataaccg

SEQ ID NO: 6279 - DNA, 25 bp, SARS Virus
ggagcacgatcaggactataaccga

SEQ ID NO: 6280 - DNA, 25 bp, SARS Virus
gagcacgatcacgactataaccgag

SEQ ID NO: 6281 - DNA, 25 bp, SARS Virus
agcacgatcacggctataaccgagt

SEQ ID NO: 6282 - DNA, 25 bp, SARS Virus
gcacgatcacgagtataaccgagtc

SEQ ID NO: 6283 - DNA, 25 bp, SARS Virus
cacgatcacgacgataaccgagtcc

SEQ ID NO: 6284 - DNA, 25 bp, SARS Virus
acgatcacgactgtaaccgagtccg

SEQ ID NO: 6285 - DNA, 25 bp, SARS Virus
cgatcacgactagaaccgagtccgg

SEQ ID NO: 6286 - DNA, 25 bp, SARS Virus
gatcacgactatgaccgagtccggt

SEQ ID NO: 6287 - DNA, 25 bp, SARS Virus
atcacgactatagccgagtccggta

SEQ ID NO: 6288 - DNA, 25 bp, SARS Virus
tcacgactataagcgagtccggtat

SEQ ID NO: 6289 - DNA, 25 bp, SARS Virus
cacgactataacggagtccggtatg

SEQ ID NO: 6290 - DNA, 25 bp, SARS Virus
acgactataaccgagtccggtatga

SEQ ID NO: 6291 - DNA, 25 bp, SARS Virus
cgactataaccgggtccggtatgac

SEQ ID NO: 6292 - DNA, 25 bp, SARS Virus
gactataaccgagtccggtatgacc

SEQ ID NO: 6293 - DNA, 25 bp, SARS Virus
actataaccgaggccggtatgaccg

SEQ ID NO: 6294 - DNA, 25 bp, SARS Virus
ctataaccgagtgcggtatgaccgt

SEQ ID NO: 6295 - DNA, 25 bp, SARS Virus
tataaccgagtcgggtatgaccgta

SEQ ID NO: 6296 - DNA, 25 bp, SARS Virus
ataaccgagtccggtatgaccgtaa

SEQ ID NO: 6297 - DNA, 25 bp, SARS Virus
taaccgagtccggtatgaccgtaat

SEQ ID NO: 6298 - DNA, 25 bp, SARS Virus
aaccgagtccgggatgaccgtaatg

SEQ ID NO: 6299 - DNA, 25 bp, SARS Virus
accgagtccggtgtgaccgtaatga

SEQ ID NO: 6300 - DNA, 25 bp, SARS Virus
ccgagtccggtaggaccgtaatgac

SEQ ID NO: 6301 - DNA, 25 bp, SARS Virus
cgagtccggtatgaccgtaatgacc

SEQ ID NO: 6302 - DNA, 25 bp, SARS Virus
gagtccggtatggccgtaatgacca

SEQ ID NO: 6303 - DNA, 25 bp, SARS Virus
agtccggtatgagcgtaatgaccac

SEQ ID NO: 6304 - DNA, 25 bp, SARS Virus
gtccggtatgacggtaatgaccact

SEQ ID NO: 6305 - DNA, 25 bp, SARS Virus
tccggtatgaccgtaatgaccactg

SEQ ID NO: 6306 - DNA, 25 bp, SARS Virus
ccggtatgaccggaatgaccactgt

SEQ ID NO: 6307 - DNA, 25 bp, SARS Virus
cggtatgaccgtgatgaccactgtt

SEQ ID NO: 6308 - DNA, 25 bp, SARS Virus
ggtatgaccgtagtgaccactgtta

SEQ ID NO: 6309 - DNA, 25 bp, SARS Virus
gtatgaccgtaaggaccactgttac

SEQ ID NO: 6310 - DNA, 25 bp, SARS Virus
tatgaccgtaatgaccactgttaca

SEQ ID NO: 6311 - DNA, 25 bp, SARS Virus
atgaccgtaatggccactgttacac

SEQ ID NO: 6312 - DNA, 25 bp, SARS Virus
tgaccgtaatgagcactgttacacc

SEQ ID NO: 6313 - DNA, 25 bp, SARS Virus
gaccgtaatgacgactgttacacct

SEQ ID NO: 6314 - DNA, 25 bp, SARS Virus
accgtaatgaccgctgttacacctc

SEQ ID NO: 6315 - DNA, 25 bp, SARS Virus
ccgtaatgaccagtgttacacctct

SEQ ID NO: 6316 - DNA, 25 bp, SARS Virus
cgtaatgaccacggttacacctctg

SEQ ID NO: 6317 - DNA, 25 bp, SARS Virus
gtaatgaccactgttacacctctgg

SEQ ID NO: 6318 - DNA, 25 bp, SARS Virus
taatgaccactggtacacctctgga

SEQ ID NO: 6319 - DNA, 25 bp, SARS Virus
aatgaccactgtgacacctctggaa

SEQ ID NO: 6320 - DNA, 25 bp, SARS Virus
atgaccactgttgcacctctggaac

SEQ ID NO: 6321 - DNA, 25 bp, SARS Virus
tgaccactgttagacctctggaact

SEQ ID NO: 6322 - DNA, 25 bp, SARS Virus
gaccactgttacgcctctggaactt

SEQ ID NO: 6323 - DNA, 25 bp, SARS Virus
accactgttacagctctggaactta

SEQ ID NO: 6324 - DNA, 25 bp, SARS Virus
ccactgttacacgtctggaacttac

SEQ ID NO: 6325 - DNA, 25 bp, SARS Virus
cactgttacaccgctggaacttact

SEQ ID NO: 6326 - DNA, 25 bp, SARS Virus
actgttacacctgtggaacttactc

SEQ ID NO: 6327 - DNA, 25 bp, SARS Virus
ctgttacacctcgggaacttactcc

SEQ ID NO: 6328 - DNA, 25 bp, SARS Virus
tgttacacctctggaacttactcct

SEQ ID NO: 6329 - DNA, 25 bp, SARS Virus
gttacacctctggaacttactccta

SEQ ID NO: 6330 - DNA, 25 bp, SARS Virus
ttacacctctgggacttactcctag

SEQ ID NO: 6331 - DNA, 25 bp, SARS Virus
tacacctctggagcttactcctaga

SEQ ID NO: 6332 - DNA, 25 bp, SARS Virus
acacctctggaagttactcctagag

SEQ ID NO: 6333 - DNA, 25 bp, SARS Virus
cacctctggaacgtactcctagagg

SEQ ID NO: 6334 - DNA, 25 bp, SARS Virus
acctctggaactgactcctagagga

SEQ ID NO: 6335 - DNA, 25 bp, SARS Virus
cctctggaacttgctcctagaggaa

SEQ ID NO: 6336 - DNA, 25 bp, SARS Virus
ctctggaacttagtcctagaggaac

SEQ ID NO: 6337 - DNA, 25 bp, SARS Virus
tctggaacttacgcctagaggaact

SEQ ID NO: 6338 - DNA, 25 bp, SARS Virus
ctggaacttactgctagaggaactc

SEQ ID NO: 6339 - DNA, 25 bp, SARS Virus
tggaacttactcgtagaggaactct

SEQ ID NO: 6340 - DNA, 25 bp, SARS Virus
ggaacttactccgagaggaactcta

SEQ ID NO: 6341 - DNA, 25 bp, SARS Virus
gaacttactcctggaggaactctat

SEQ ID NO: 6342 - DNA, 25 bp, SARS Virus
aacttactcctagaggaactctatg

SEQ ID NO: 6343 - DNA, 25 bp, SARS Virus
acttactcctaggggaactctatga

SEQ ID NO: 6344 - DNA, 25 bp, SARS Virus
cttactcctagaggaactctatgac

SEQ ID NO: 6345 - DNA, 25 bp, SARS Virus
ttactcctagaggaactctatgact

SEQ ID NO: 6346 - DNA, 25 bp, SARS Virus
tactcctagagggactctatgactc

SEQ ID NO: 6347 - DNA, 25 bp, SARS Virus
actcctagaggagctctatgactca

SEQ ID NO: 6348 - DNA, 25 bp, SARS Virus
ctcctagaggaagtctatgactcag

SEQ ID NO: 6349 - DNA, 25 bp, SARS Virus
tcctagaggaacgctatgactcagc

SEQ ID NO: 6350 - DNA, 25 bp, SARS Virus
cctagaggaactgtatgactcagca

SEQ ID NO: 6351 - DNA, 25 bp, SARS Virus
ctagaggaactcgatgactcagcac

SEQ ID NO: 6352 - DNA, 25 bp, SARS Virus
tagaggaactctgtgactcagcact

SEQ ID NO: 6353 - DNA, 25 bp, SARS Virus
agaggaactctaggactcagcactt

SEQ ID NO: 6354 - DNA, 25 bp, SARS Virus
gaggaactctatgactcagcacttg

SEQ ID NO: 6355 - DNA, 25 bp, SARS Virus
aggaactctatggctcagcacttgc

SEQ ID NO: 6356 - DNA, 25 bp, SARS Virus
ggaactctatgagtcagcacttgca

SEQ ID NO: 6357 - DNA, 25 bp, SARS Virus
gaactctatgacgcagcacttgcac

SEQ ID NO: 6358 - DNA, 25 bp, SARS Virus
aactctatgactgagcacttgcaca

SEQ ID NO: 6359 - DNA, 25 bp, SARS Virus
actctatgactcggcacttgcacaa

SEQ ID NO: 6360 - DNA, 25 bp, SARS Virus
ctctatgactcagcacttgcacaat

SEQ ID NO: 6361 - DNA, 25 bp, SARS Virus
tctatgactcaggacttgcacaatt

SEQ ID NO: 6362 - DNA, 25 bp, SARS Virus
ctatgactcagcgcttgcacaattg

SEQ ID NO: 6363 - DNA, 25 bp, SARS Virus
tatgactcagcagttgcacaattgt

SEQ ID NO: 6364 - DNA, 25 bp, SARS Virus
atgactcagcacgtgcacaattgta

SEQ ID NO: 6365 - DNA, 25 bp, SARS Virus
tgactcagcactggcacaattgtaa

SEQ ID NO: 6366 - DNA, 25 bp, SARS Virus
gactcagcacttgcacaattgtaat

SEQ ID NO: 6367 - DNA, 25 bp, SARS Virus
actcagcacttggacaattgtaatt

SEQ ID NO: 6368 - DNA, 25 bp, SARS Virus
ctcagcacttgcgcaattgtaattg

SEQ ID NO: 6369 - DNA, 25 bp, SARS Virus
tcagcacttgcagaattgtaattgt

SEQ ID NO: 6370 - DNA, 25 bp, SARS Virus
cagcacttgcacgattgtaattgta

SEQ ID NO: 6371 - DNA, 25 bp, SARS Virus
agcacttgcacagttgtaattgtaa

SEQ ID NO: 6372 - DNA, 25 bp, SARS Virus
gcacttgcacaagtgtaattgtaac

SEQ ID NO: 6373 - DNA, 25 bp, SARS Virus
cacttgcacaatggtaattgtaaca

SEQ ID NO: 6374 - DNA, 25 bp, SARS Virus
acttgcacaattgtaattgtaacaa

SEQ ID NO: 6375 - DNA, 25 bp, SARS Virus
cttgcacaattggaattgtaacaac

SEQ ID NO: 6376 - DNA, 25 bp, SARS Virus
ttgcacaattgtgattgtaacaacc

SEQ ID NO: 6377 - DNA, 25 bp, SARS Virus
tgcacaattgtagttgtaacaaccg

SEQ ID NO: 6378 - DNA, 25 bp, SARS Virus
gcacaattgtaagtgtaacaaccgc

SEQ ID NO: 6379 - DNA, 25 bp, SARS Virus
cacaattgtaatggtaacaaccgct

SEQ ID NO: 6380 - DNA, 25 bp, SARS Virus
acaattgtaattgtaacaaccgcta

SEQ ID NO: 6381 - DNA, 25 bp, SARS Virus
caattgtaattggaacaaccgctaa

SEQ ID NO: 6382 - DNA, 25 bp, SARS Virus
aattgtaattgtgacaaccgctaaa

SEQ ID NO: 6383 - DNA, 25 bp, SARS Virus
attgtaattgtagcaaccgctaaaa

SEQ ID NO: 6384 - DNA, 25 bp, SARS Virus
ttgtaattgtaagaaccgctaaaag

SEQ ID NO: 6385 - DNA, 25 bp, SARS Virus
tgtaattgtaacgaccgctaaaagt

SEQ ID NO: 6386 - DNA, 25 bp, SARS Virus
gtaattgtaacagccgctaaaagta

SEQ ID NO: 6387 - DNA, 25 bp, SARS Virus
taattgtaacaagcgctaaaagtaa

SEQ ID NO: 6388 - DNA, 25 bp, SARS Virus
aattgtaacaacggctaaaagtaaa

SEQ ID NO: 6389 - DNA, 25 bp, SARS Virus
attgtaacaaccgctaaaagtaaac

SEQ ID NO: 6390 - DNA, 25 bp, SARS Virus
ttgtaacaaccggtaaaagtaaact

SEQ ID NO: 6391 - DNA, 25 bp, SARS Virus
tgtaacaaccgcgaaaagtaaactt

SEQ ID NO: 6392 - DNA, 25 bp, SARS Virus
gtaacaaccgctgaaagtaaactta

SEQ ID NO: 6393 - DNA, 25 bp, SARS Virus
taacaaccgctagaagtaaacttac

SEQ ID NO: 6394 - DNA, 25 bp, SARS Virus
aacaaccgctaagagtaaacttact

SEQ ID NO: 6395 - DNA, 25 bp, SARS Virus
acaaccgctaaaggtaaacttactt

SEQ ID NO: 6396 - DNA, 25 bp, SARS Virus
caaccgctaaaagtaaacttacttc

SEQ ID NO: 6397 - DNA, 25 bp, SARS Virus
aaccgctaaaaggaaacttacttct

SEQ ID NO: 6398 - DNA, 25 bp, SARS Virus
accgctaaaagtgaacttacttctc

SEQ ID NO: 6399 - DNA, 25 bp, SARS Virus
ccgctaaaagtagacttacttctcc

SEQ ID NO: 6400 - DNA, 25 bp, SARS Virus
cgctaaaagtaagcttacttctcca

SEQ ID NO: 6401 - DNA, 25 bp, SARS Virus
gctaaaagtaaagttacttctccaa

SEQ ID NO: 6402 - DNA, 25 bp, SARS Virus
ctaaaagtaaacgtacttctccaac

SEQ ID NO: 6403 - DNA, 25 bp, SARS Virus
taaaagtaaactgacttctccaacg

SEQ ID NO: 6404 - DNA, 25 bp, SARS Virus
aaaagtaaacttgcttctccaacgg

SEQ ID NO: 6405 - DNA, 25 bp, SARS Virus
aaagtaaacttagttctccaacggt

SEQ ID NO: 6406 - DNA, 25 bp, SARS Virus
aagtaaacttacgtctccaacggta

SEQ ID NO: 6407 - DNA, 25 bp, SARS Virus
agtaaacttactgctccaacggtag

SEQ ID NO: 6408 - DNA, 25 bp, SARS Virus
gtaaacttacttgtccaacggtagt

SEQ ID NO: 6409 - DNA, 25 bp, SARS Virus
taaacttacttcgccaacggtagta

SEQ ID NO: 6410 - DNA, 25 bp, SARS Virus
aaacttacttctgcaacggtagtaa

SEQ ID NO: 6411 - DNA, 25 bp, SARS Virus
aacttacttctcgaacggtagtaaa

SEQ ID NO: 6412 - DNA, 25 bp, SARS Virus
acttacttctccgacggtagtaaaa

SEQ ID NO: 6413 - DNA, 25 bp, SARS Virus
cttacttctccagcggtagtaaaac

SEQ ID NO: 6414 - DNA, 25 bp, SARS Virus
ttacttctccaagggtagtaaaacc

SEQ ID NO: 6415 - DNA, 25 bp, SARS Virus
tacttctccaacggtagtaaaaccg

SEQ ID NO: 6416 - DNA, 25 bp, SARS Virus
acttctccaacggtagtaaaaccgt

SEQ ID NO: 6417 - DNA, 25 bp, SARS Virus
cttctccaacgggagtaaaaccgta

SEQ ID NO: 6418 - DNA, 25 bp, SARS Virus
ttctccaacggtggtaaaaccgtag

SEQ ID NO: 6419 - DNA, 25 bp, SARS Virus
tctccaacggtagtaaaaccgtaga

SEQ ID NO: 6420 - DNA, 25 bp, SARS Virus
ctccaacggtaggaaaaccgtagaa

SEQ ID NO: 6421 - DNA, 25 bp, SARS Virus
tccaacggtagtgaaaccgtagaaa

SEQ ID NO: 6422 - DNA, 25 bp, SARS Virus
ccaacggtagtagaaccgtagaaag

SEQ ID NO: 6423 - DNA, 25 bp, SARS Virus
caacggtagtaagaccgtagaaaga

SEQ ID NO: 6424 - DNA, 25 bp, SARS Virus
aacggtagtaaagccgtagaaagag

SEQ ID NO: 6425 - DNA, 25 bp, SARS Virus
acggtagtaaaagcgtagaaagaga

SEQ ID NO: 6426 - DNA, 25 bp, SARS Virus
cggtagtaaaacggtagaaagagac

SEQ ID NO: 6427 - DNA, 25 bp, SARS Virus
ggtagtaaaaccgtagaaagagacg

SEQ ID NO: 6428 - DNA, 25 bp, SARS Virus
gtagtaaaaccggagaaagagacga

SEQ ID NO: 6429 - DNA, 25 bp, SARS Virus
tagtaaaaccgtggaaagagacgaa

SEQ ID NO: 6430 - DNA, 25 bp, SARS Virus
agtaaaaccgtagaaagagacgaag

SEQ ID NO: 6431 - DNA, 25 bp, SARS Virus
gtaaaaccgtaggaagagacgaaga

SEQ ID NO: 6432 - DNA, 25 bp, SARS Virus
taaaaccgtagagagagacgaagat

SEQ ID NO: 6433 - DNA, 25 bp, SARS Virus
aaaaccgtagaaggagacgaagatg

SEQ ID NO: 6434 - DNA, 25 bp, SARS Virus
aaaccgtagaaagagacgaagatgt

SEQ ID NO: 6435 - DNA, 25 bp, SARS Virus
aaccgtagaaagggacgaagatgtt

SEQ ID NO: 6436 - DNA, 25 bp, SARS Virus
accgtagaaagagacgaagatgttc

SEQ ID NO: 6437 - DNA, 25 bp, SARS Virus
ccgtagaaagaggcgaagatgttca

SEQ ID NO: 6438 - DNA, 25 bp, SARS Virus
cgtagaaagagaggaagatgttcac

SEQ ID NO: 6439 - DNA, 25 bp, SARS Virus
gtagaaagagacgaagatgttcacg

SEQ ID NO: 6440 - DNA, 25 bp, SARS Virus
tagaaagagacggagatgttcacgg

SEQ ID NO: 6441 - DNA, 25 bp, SARS Virus
agaaagagacgaggatgttcacgga

SEQ ID NO: 6442 - DNA, 25 bp, SARS Virus
gaaagagacgaagatgttcacggaa

SEQ ID NO: 6443 - DNA, 25 bp, SARS Virus
aaagagacgaaggtgttcacggaaa

SEQ ID NO: 6444 - DNA, 25 bp, SARS Virus
aagagacgaagaggttcacggaaat

SEQ ID NO: 6445 - DNA, 25 bp, SARS Virus
agagacgaagatgttcacggaaata

SEQ ID NO: 6446 - DNA, 25 bp, SARS Virus
gagacgaagatggtcacggaaataa

SEQ ID NO: 6447 - DNA, 25 bp, SARS Virus
agacgaagatgtgcacggaaataac

SEQ ID NO: 6448 - DNA, 25 bp, SARS Virus
gacgaagatgttgacggaaataact

SEQ ID NO: 6449 - DNA, 25 bp, SARS Virus
acgaagatgttcgcggaaataactg

SEQ ID NO: 6450 - DNA, 25 bp, SARS Virus
cgaagatgttcagggaaataactgt

SEQ ID NO: 6451 - DNA, 25 bp, SARS Virus
gaagatgttcacggaaataactgtg

SEQ ID NO: 6452 - DNA, 25 bp, SARS Virus
aagatgttcacggaaataactgtga

SEQ ID NO: 6453 - DNA, 25 bp, SARS Virus
agatgttcacgggaataactgtgat

SEQ ID NO: 6454 - DNA, 25 bp, SARS Virus
gatgttcacggagataactgtgata

SEQ ID NO: 6455 - DNA, 25 bp, SARS Virus
atgttcacggaagtaactgtgatat

SEQ ID NO: 6456 - DNA, 25 bp, SARS Virus
tgttcacggaaagaactgtgatatt

SEQ ID NO: 6457 - DNA, 25 bp, SARS Virus
gttcacggaaatgactgtgatattt

SEQ ID NO: 6458 - DNA, 25 bp, SARS Virus
ttcacggaaatagctgtgatatttc

SEQ ID NO: 6459 - DNA, 25 bp, SARS Virus
tcacggaaataagtgtgatatttct

SEQ ID NO: 6460 - DNA, 25 bp, SARS Virus
cacggaaataacggtgatatttctc

SEQ ID NO: 6461 - DNA, 25 bp, SARS Virus
acggaaataactgtgatatttctca

SEQ ID NO: 6462 - DNA, 25 bp, SARS Virus
cggaaataactgggatatttctcag

SEQ ID NO: 6463 - DNA, 25 bp, SARS Virus
ggaaataactgtgatatttctcaga

SEQ ID NO: 6464 - DNA, 25 bp, SARS Virus
gaaataactgtggtatttctcagaa

SEQ ID NO: 6465 - DNA, 25 bp, SARS Virus
aaataactgtgagatttctcagaac

SEQ ID NO: 6466 - DNA, 25 bp, SARS Virus
aataactgtgatgtttctcagaact

SEQ ID NO: 6467 - DNA, 25 bp, SARS Virus
ataactgtgatagttctcagaacta

SEQ ID NO: 6468 - DNA, 25 bp, SARS Virus
taactgtgatatgtctcagaactaa

SEQ ID NO: 6469 - DNA, 25 bp, SARS Virus
aactgtgatattgctcagaactaat

SEQ ID NO: 6470 - DNA, 25 bp, SARS Virus
actgtgatatttgtcagaactaatg

SEQ ID NO: 6471 - DNA, 25 bp, SARS Virus
ctgtgatatttcgcagaactaatgt

SEQ ID NO: 6472 - DNA, 25 bp, SARS Virus
tgtgatatttctgagaactaatgtt

SEQ ID NO: 6473 - DNA, 25 bp, SARS Virus
ctacttcaaagttccgtctgcacgc

SEQ ID NO: 6474 - DNA, 25 bp, SARS Virus
tacttcaaagtatcgtctgcacgct

SEQ ID NO: 6475 - DNA, 25 bp, SARS Virus
acttcaaagtactgtctgcacgctg

SEQ ID NO: 6476 - DNA, 25 bp, SARS Virus
cttcaaagtaccttctgcacgctga

SEQ ID NO: 6477 - DNA, 25 bp, SARS Virus
ttcaaagtaccgtctgcacgctgaa

SEQ ID NO: 6478 - DNA, 25 bp, SARS Virus
tcaaagtaccgtttgcacgctgaaa

SEQ ID NO: 6479 - DNA, 25 bp, SARS Virus
caaagtaccgtctgcacgctgaaag

SEQ ID NO: 6480 - DNA, 25 bp, SARS Virus
aaagtaccgtcttcacgctgaaaga

SEQ ID NO: 6481 - DNA, 25 bp, SARS Virus
aagtaccgtctgtacgctgaaagac

SEQ ID NO: 6482 - DNA, 25 bp, SARS Virus
agtaccgtctgctcgctgaaagact

SEQ ID NO: 6483 - DNA, 25 bp, SARS Virus
gtaccgtctgcatgctgaaagactt

SEQ ID NO: 6484 - DNA, 25 bp, SARS Virus
taccgtctgcactctgaaagacttt

SEQ ID NO: 6485 - DNA, 25 bp, SARS Virus
accgtctgcacgttgaaagactttc

SEQ ID NO: 6486 - DNA, 25 bp, SARS Virus
ccgtctgcacgctgaaagactttcg

SEQ ID NO: 6487 - DNA, 25 bp, SARS Virus
cgtctgcacgcttaaagactttcgg

SEQ ID NO: 6488 - DNA, 25 bp, SARS Virus
gtctgcacgctgtaagactttcggt

SEQ ID NO: 6489 - DNA, 25 bp, SARS Virus
tctgcacgctgatagactttcggtg

SEQ ID NO: 6490 - DNA, 25 bp, SARS Virus
ctgcacgctgaatgactttcggtga

SEQ ID NO: 6491 - DNA, 25 bp, SARS Virus
tgcacgctgaaatactttcggtgaa

SEQ ID NO: 6492 - DNA, 25 bp, SARS Virus
gcacgctgaaagtctttcggtgaac

SEQ ID NO: 6493 - DNA, 25 bp, SARS Virus
cacgctgaaagattttcggtgaaca

SEQ ID NO: 6494 - DNA, 25 bp, SARS Virus
acgctgaaagactttcggtgaacac

SEQ ID NO: 6495 - DNA, 25 bp, SARS Virus
cgctgaaagactttcggtgaacact

SEQ ID NO: 6496 - DNA, 25 bp, SARS Virus
gctgaaagactttcggtgaacactt

SEQ ID NO: 6497 - DNA, 25 bp, SARS Virus
ctgaaagacttttggtgaacacttg

SEQ ID NO: 6498 - DNA, 25 bp, SARS Virus
tgaaagactttctgtgaacacttgt

SEQ ID NO: 6499 - DNA, 25 bp, SARS Virus
gaaagactttcgttgaacacttgta

SEQ ID NO: 6500 - DNA, 25 bp, SARS Virus
aaagactttcggtgaacacttgtaa

SEQ ID NO: 6501 - DNA, 25 bp, SARS Virus
aagactttcggttaacacttgtaac

SEQ ID NO: 6502 - DNA, 25 bp, SARS Virus
agactttcggtgtacacttgtaaca

SEQ ID NO: 6503 - DNA, 25 bp, SARS Virus
gactttcggtgatcacttgtaacac

SEQ ID NO: 6504 - DNA, 25 bp, SARS Virus
actttcggtgaatacttgtaacacc

SEQ ID NO: 6505 - DNA, 25 bp, SARS Virus
ctttcggtgaactcttgtaacaccg

SEQ ID NO: 6506 - DNA, 25 bp, SARS Virus
tttcggtgaacatttgtaacaccgt

SEQ ID NO: 6507 - DNA, 25 bp, SARS Virus
ttcggtgaacacttgtaacaccgtg

SEQ ID NO: 6508 - DNA, 25 bp, SARS Virus
tcggtgaacacttgtaacaccgtga

SEQ ID NO: 6509 - DNA, 25 bp, SARS Virus
cggtgaacacttttaacaccgtgac

SEQ ID NO: 6510 - DNA, 25 bp, SARS Virus
ggtgaacacttgtaacaccgtgact

SEQ ID NO: 6511 - DNA, 25 bp, SARS Virus
gtgaacacttgttacaccgtgactt

SEQ ID NO: 6512 - DNA, 25 bp, SARS Virus
tgaacacttgtatcaccgtgacttt

SEQ ID NO: 6513 - DNA, 25 bp, SARS Virus
gaacacttgtaataccgtgactttt

SEQ ID NO: 6514 - DNA, 25 bp, SARS Virus
aacacttgtaactccgtgactttta

SEQ ID NO: 6515 - DNA, 25 bp, SARS Virus
acacttgtaacatcgtgacttttaa

SEQ ID NO: 6516 - DNA, 25 bp, SARS Virus
cacttgtaacactgtgacttttaaa

SEQ ID NO: 6517 - DNA, 25 bp, SARS Virus
acttgtaacaccttgacttttaaat

SEQ ID NO: 6518 - DNA, 25 bp, SARS Virus
cttgtaacaccgtgacttttaaatc

SEQ ID NO: 6519 - DNA, 25 bp, SARS Virus
ttgtaacaccgttacttttaaatca

SEQ ID NO: 6520 - DNA, 25 bp, SARS Virus
tgtaacaccgtgtcttttaaatcaa

SEQ ID NO: 6521 - DNA, 25 bp, SARS Virus
gtaacaccgtgatttttaaatcaat

SEQ ID NO: 6522 - DNA, 25 bp, SARS Virus
taacaccgtgacttttaaatcaata

SEQ ID NO: 6523 - DNA, 25 bp, SARS Virus
aacaccgtgacttttaaatcaataa

SEQ ID NO: 6524 - DNA, 25 bp, SARS Virus
acaccgtgacttttaaatcaataac

SEQ ID NO: 6525 - DNA, 25 bp, SARS Virus
caccgtgacttttaaatcaataact

SEQ ID NO: 6526 - DNA, 25 bp, SARS Virus
accgtgactttttaatcaataactt

SEQ ID NO: 6527 - DNA, 25 bp, SARS Virus
ccgtgacttttatatcaataacttc

SEQ ID NO: 6528 - DNA, 25 bp, SARS Virus
cgtgacttttaattcaataacttcc

SEQ ID NO: 6529 - DNA, 25 bp, SARS Virus
gtgacttttaaatcaataacttcct

SEQ ID NO: 6530 - DNA, 25 bp, SARS Virus
tgacttttaaattaataacttcctg

SEQ ID NO: 6531 - DNA, 25 bp, SARS Virus
gacttttaaatctataacttcctgg

SEQ ID NO: 6532 - DNA, 25 bp, SARS Virus
acttttaaatcattaacttcctgga

SEQ ID NO: 6533 - DNA, 25 bp, SARS Virus
cttttaaatcaataacttcctggat

SEQ ID NO: 6534 - DNA, 25 bp, SARS Virus
ttttaaatcaattacttcctggatg

SEQ ID NO: 6535 - DNA, 25 bp, SARS Virus
tttaaatcaatatcttcctggatga

SEQ ID NO: 6536 - DNA, 25 bp, SARS Virus
ttaaatcaataatttcctggatgat

SEQ ID NO: 6537 - DNA, 25 bp, SARS Virus
taaatcaataacttcctggatgatg

SEQ ID NO: 6538 - DNA, 25 bp, SARS Virus
aaatcaataacttcctggatgatgt

SEQ ID NO: 6539 - DNA, 25 bp, SARS Virus
aatcaataactttctggatgatgta

SEQ ID NO: 6540 - DNA, 25 bp, SARS Virus
atcaataacttcttggatgatgtac

SEQ ID NO: 6541 - DNA, 25 bp, SARS Virus
tcaataacttcctggatgatgtaca

SEQ ID NO: 6542 - DNA, 25 bp, SARS Virus
caataacttccttgatgatgtacac

SEQ ID NO: 6543 - DNA, 25 bp, SARS Virus
aataacttcctgtatgatgtacacc

SEQ ID NO: 6544 - DNA, 25 bp, SARS Virus
ataacttcctggttgatgtacaccc

SEQ ID NO: 6545 - DNA, 25 bp, SARS Virus
taacttcctggatgatgtacaccca

SEQ ID NO: 6546 - DNA, 25 bp, SARS Virus
aacttcctggattatgtacacccat

SEQ ID NO: 6547 - DNA, 25 bp, SARS Virus
acttcctggatgttgtacacccatg

SEQ ID NO: 6548 - DNA, 25 bp, SARS Virus
cttcctggatgatgtacacccatgg

SEQ ID NO: 6549 - DNA, 25 bp, SARS Virus
ttcctggatgatttacacccatgga

SEQ ID NO: 6550 - DNA, 25 bp, SARS Virus
tcctggatgatgtacacccatggat

SEQ ID NO: 6551 - DNA, 25 bp, SARS Virus
cctggatgatgttcacccatggatg

SEQ ID NO: 6552 - DNA, 25 bp, SARS Virus
ctggatgatgtatacccatggatgg

SEQ ID NO: 6553 - DNA, 25 bp, SARS Virus
tggatgatgtactcccatggatgga

SEQ ID NO: 6554 - DNA, 25 bp, SARS Virus
ggatgatgtacatccatggatggat

SEQ ID NO: 6555 - DNA, 25 bp, SARS Virus
gatgatgtacactcatggatggatg

SEQ ID NO: 6556 - DNA, 25 bp, SARS Virus
atgatgtacacctatggatggatga

SEQ ID NO: 6557 - DNA, 25 bp, SARS Virus
tgatgtacacccttggatggatgat

SEQ ID NO: 6558 - DNA, 25 bp, SARS Virus
gatgtacacccatggatggatgatt

SEQ ID NO: 6559 - DNA, 25 bp, SARS Virus
atgtacacccattgatggatgatta

SEQ ID NO: 6560 - DNA, 25 bp, SARS Virus
tgtacacccatgtatggatgattac

SEQ ID NO: 6561 - DNA, 25 bp, SARS Virus
gtacacccatggttggatgattacg

SEQ ID NO: 6562 - DNA, 25 bp, SARS Virus
tacacccatggatggatgattacga

SEQ ID NO: 6563 - DNA, 25 bp, SARS Virus
acacccatggattgatgattacgac

SEQ ID NO: 6564 - DNA, 25 bp, SARS Virus
cacccatggatgtatgattacgaca

SEQ ID NO: 6565 - DNA, 25 bp, SARS Virus
acccatggatggttgattacgacat

SEQ ID NO: 6566 - DNA, 25 bp, SARS Virus
cccatggatggatgattacgacatc

SEQ ID NO: 6567 - DNA, 25 bp, SARS Virus
ccatggatggattattacgacatca

SEQ ID NO: 6568 - DNA, 25 bp, SARS Virus
catggatggatgtttacgacatcac

SEQ ID NO: 6569 - DNA, 25 bp, SARS Virus
atggatggatgattacgacatcact

SEQ ID NO: 6570 - DNA, 25 bp, SARS Virus
tggatggatgattacgacatcactt

SEQ ID NO: 6571 - DNA, 25 bp, SARS Virus
ggatggatgatttcgacatcacttt

SEQ ID NO: 6572 - DNA, 25 bp, SARS Virus
gatggatgattatgacatcactttt

SEQ ID NO: 6573 - DNA, 25 bp, SARS Virus
atggatgattactacatcactttta

SEQ ID NO: 6574 - DNA, 25 bp, SARS Virus
tggatgattacgtcatcacttttac

SEQ ID NO: 6575 - DNA, 25 bp, SARS Virus
ggatgattacgatatcacttttacg

SEQ ID NO: 6576 - DNA, 25 bp, SARS Virus
gatgattacgacttcacttttacgg

SEQ ID NO: 6577 - DNA, 25 bp, SARS Virus
atgattacgacatcacttttacggt

SEQ ID NO: 6578 - DNA, 25 bp, SARS Virus
tgattacgacattacttttacggta

SEQ ID NO: 6579 - DNA, 25 bp, SARS Virus
gattacgacatctcttttacggtac

SEQ ID NO: 6580 - DNA, 25 bp, SARS Virus
attacgacatcatttttacggtaca

SEQ ID NO: 6581 - DNA, 25 bp, SARS Virus
ttacgacatcacttttacggtacag

SEQ ID NO: 6582 - DNA, 25 bp, SARS Virus
tacgacatcacttttacggtacagg

SEQ ID NO: 6583 - DNA, 25 bp, SARS Virus
acgacatcacttttacggtacagga

SEQ ID NO: 6584 - DNA, 25 bp, SARS Virus
cgacatcacttttacggtacaggac

SEQ ID NO: 6585 - DNA, 25 bp, SARS Virus
gacatcactttttcggtacaggacg

SEQ ID NO: 6586 - DNA, 25 bp, SARS Virus
acatcacttttatggtacaggacgg

SEQ ID NO: 6587 - DNA, 25 bp, SARS Virus
catcacttttactgtacaggacgga

SEQ ID NO: 6588 - DNA, 25 bp, SARS Virus
atcacttttacgttacaggacggac

SEQ ID NO: 6589 - DNA, 25 bp, SARS Virus
tcacttttacggtacaggacggaca

SEQ ID NO: 6590 - DNA, 25 bp, SARS Virus
cacttttacggttcaggacggacag

SEQ ID NO: 6591 - DNA, 25 bp, SARS Virus
acttttacggtataggacggacagt

SEQ ID NO: 6592 - DNA, 25 bp, SARS Virus
cttttacggtactggacggacagtt

SEQ ID NO: 6593 - DNA, 25 bp, SARS Virus
ttttacggtacatgacggacagttc

SEQ ID NO: 6594 - DNA, 25 bp, SARS Virus
tttacggtacagtacggacagttct

SEQ ID NO: 6595 - DNA, 25 bp, SARS Virus
ttacggtacaggtcggacagttctg

SEQ ID NO: 6596 - DNA, 25 bp, SARS Virus
tacggtacaggatggacagttctgg

SEQ ID NO: 6597 - DNA, 25 bp, SARS Virus
acggtacaggactgacagttctggg

SEQ ID NO: 6598 - DNA, 25 bp, SARS Virus
cggtacaggacgtacagttctgggt

SEQ ID NO: 6599 - DNA, 25 bp, SARS Virus
ggtacaggacggtcagttctgggtc

SEQ ID NO: 6600 - DNA, 25 bp, SARS Virus
gtacaggacggatagttctgggtct

SEQ ID NO: 6601 - DNA, 25 bp, SARS Virus
tacaggacggactgttctgggtctc

SEQ ID NO: 6602 - DNA, 25 bp, SARS Virus
acaggacggacatttctgggtctct

SEQ ID NO: 6603 - DNA, 25 bp, SARS Virus
caggacggacagttctgggtctcta

SEQ ID NO: 6604 - DNA, 25 bp, SARS Virus
aggacggacagttctgggtctctaa

SEQ ID NO: 6605 - DNA, 25 bp, SARS Virus
ggacggacagttttgggtctctaac

SEQ ID NO: 6606 - DNA, 25 bp, SARS Virus
gacggacagttctgggtctctaacc

SEQ ID NO: 6607 - DNA, 25 bp, SARS Virus
acggacagttcttggtctctaacct

SEQ ID NO: 6608 - DNA, 25 bp, SARS Virus
cggacagttctgtgtctctaacctg

SEQ ID NO: 6609 - DNA, 25 bp, SARS Virus
ggacagttctggttctctaacctgg

SEQ ID NO: 6610 - DNA, 25 bp, SARS Virus
gacagttctgggtctctaacctgga

SEQ ID NO: 6611 - DNA, 25 bp, SARS Virus
acagttctgggtttctaacctggac

SEQ ID NO: 6612 - DNA, 25 bp, SARS Virus
cagttctgggtctctaacctggact

SEQ ID NO: 6613 - DNA, 25 bp, SARS Virus
agttctgggtctttaacctggactc

SEQ ID NO: 6614 - DNA, 25 bp, SARS Virus
gttctgggtctctaacctggactcg

SEQ ID NO: 6615 - DNA, 25 bp, SARS Virus
ttctgggtctcttacctggactcgt

SEQ ID NO: 6616 - DNA, 25 bp, SARS Virus
tctgggtctctatcctggactcgta

SEQ ID NO: 6617 - DNA, 25 bp, SARS Virus
ctgggtctctaatctggactcgtat

SEQ ID NO: 6618 - DNA, 25 bp, SARS Virus
tgggtctctaacttggactcgtatc

SEQ ID NO: 6619 - DNA, 25 bp, SARS Virus
gggtctctaacctggactcgtatca

SEQ ID NO: 6620 - DNA, 25 bp, SARS Virus
ggtctctaaccttgactcgtatcac

SEQ ID NO: 6621 - DNA, 25 bp, SARS Virus
gtctctaacctgtactcgtatcaca

SEQ ID NO: 6622 - DNA, 25 bp, SARS Virus
tctctaacctggtctcgtatcacaa

SEQ ID NO: 6623 - DNA, 25 bp, SARS Virus
ctctaacctggattcgtatcacaac

SEQ ID NO: 6624 - DNA, 25 bp, SARS Virus
tctaacctggactcgtatcacaacg

SEQ ID NO: 6625 - DNA, 25 bp, SARS Virus
ctaacctggacttgtatcacaacgt

SEQ ID NO: 6626 - DNA, 25 bp, SARS Virus
taacctggactcttatcacaacgtc

SEQ ID NO: 6627 - DNA, 25 bp, SARS Virus
aacctggactcgtatcacaacgtct

SEQ ID NO: 6628 - DNA, 25 bp, SARS Virus
acctggactcgtttcacaacgtcta

SEQ ID NO: 6629 - DNA, 25 bp, SARS Virus
cctggactcgtatcacaacgtctaa

SEQ ID NO: 6630 - DNA, 25 bp, SARS Virus
ctggactcgtattacaacgtctaat

SEQ ID NO: 6631 - DNA, 25 bp, SARS Virus
tggactcgtatctcaacgtctaata

SEQ ID NO: 6632 - DNA, 25 bp, SARS Virus
ggactcgtatcataacgtctaatag

SEQ ID NO: 6633 - DNA, 25 bp, SARS Virus
gactcgtatcactacgtctaatagt

SEQ ID NO: 6634 - DNA, 25 bp, SARS Virus
actcgtatcacatcgtctaatagtg

SEQ ID NO: 6635 - DNA, 25 bp, SARS Virus
ctcgtatcacaatgtctaatagtgt

SEQ ID NO: 6636 - DNA, 25 bp, SARS Virus
tcgtatcacaacttctaatagtgtt

SEQ ID NO: 6637 - DNA, 25 bp, SARS Virus
cgtatcacaacgtctaatagtgttg

SEQ ID NO: 6638 - DNA, 25 bp, SARS Virus
gtatcacaacgtttaatagtgttgg

SEQ ID NO: 6639 - DNA, 25 bp, SARS Virus
tatcacaacgtctaatagtgttggt

SEQ ID NO: 6640 - DNA, 25 bp, SARS Virus
atcacaacgtcttatagtgttggtg

SEQ ID NO: 6641 - DNA, 25 bp, SARS Virus
tcacaacgtctattagtgttggtga

SEQ ID NO: 6642 - DNA, 25 bp, SARS Virus
cacaacgtctaatagtgttggtgag

SEQ ID NO: 6643 - DNA, 25 bp, SARS Virus
acaacgtctaattgtgttggtgagt

SEQ ID NO: 6644 - DNA, 25 bp, SARS Virus
caacgtctaatattgttggtgagtt

SEQ ID NO: 6645 - DNA, 25 bp, SARS Virus
aacgtctaatagtgttggtgagttt

SEQ ID NO: 6646 - DNA, 25 bp, SARS Virus
acgtctaatagttttggtgagtttg

SEQ ID NO: 6647 - DNA, 25 bp, SARS Virus
cgtctaatagtgttggtgagtttgt

SEQ ID NO: 6648 - DNA, 25 bp, SARS Virus
gtctaatagtgttggtgagtttgta

SEQ ID NO: 6649 - DNA, 25 bp, SARS Virus
tctaatagtgtttgtgagtttgtaa

SEQ ID NO: 6650 - DNA, 25 bp, SARS Virus
ctaatagtgttgttgagtttgtaac

SEQ ID NO: 6651 - DNA, 25 bp, SARS Virus
taatagtgttggtgagtttgtaact

SEQ ID NO: 6652 - DNA, 25 bp, SARS Virus
aatagtgttggttagtttgtaactt

SEQ ID NO: 6653 - DNA, 25 bp, SARS Virus
atagtgttggtgtgtttgtaacttt

SEQ ID NO: 6654 - DNA, 25 bp, SARS Virus
tagtgttggtgattttgtaactttg

SEQ ID NO: 6655 - DNA, 25 bp, SARS Virus
agtgttggtgagtttgtaactttga

SEQ ID NO: 6656 - DNA, 25 bp, SARS Virus
gtgttggtgagtttgtaactttgag

SEQ ID NO: 6657 - DNA, 25 bp, SARS Virus
tgttggtgagtttgtaactttgagc

SEQ ID NO: 6658 - DNA, 25 bp, SARS Virus
gttggtgagtttttaactttgagct

SEQ ID NO: 6659 - DNA, 25 bp, SARS Virus
ttggtgagtttgtaactttgagctg

SEQ ID NO: 6660 - DNA, 25 bp, SARS Virus
tggtgagtttgttactttgagctga

SEQ ID NO: 6661 - DNA, 25 bp, SARS Virus
ggtgagtttgtatctttgagctgag

SEQ ID NO: 6662 - DNA, 25 bp, SARS Virus
gtgagtttgtaattttgagctgagg

SEQ ID NO: 6663 - DNA, 25 bp, SARS Virus
tgagtttgtaactttgagctgaggc

SEQ ID NO: 6664 - DNA, 25 bp, SARS Virus
gagtttgtaactttgagctgaggcg

SEQ ID NO: 6665 - DNA, 25 bp, SARS Virus
agtttgtaactttgagctgaggcgt

SEQ ID NO: 6666 - DNA, 25 bp, SARS Virus
gtttgtaacttttagctgaggcgtt

SEQ ID NO: 6667 - DNA, 25 bp, SARS Virus
tttgtaactttgtgctgaggcgttc

SEQ ID NO: 6668 - DNA, 25 bp, SARS Virus
ttgtaactttgatctgaggcgttcc

SEQ ID NO: 6669 - DNA, 25 bp, SARS Virus
tgtaactttgagttgaggcgttccc

SEQ ID NO: 6670 - DNA, 25 bp, SARS Virus
gtaactttgagctgaggcgttccct

SEQ ID NO: 6671 - DNA, 25 bp, SARS Virus
taactttgagcttaggcgttccctc

SEQ ID NO: 6672 - DNA, 25 bp, SARS Virus
aactttgagctgtggcgttccctcc

SEQ ID NO: 6673 - DNA, 25 bp, SARS Virus
actttgagctgatgcgttccctcca

SEQ ID NO: 6674 - DNA, 25 bp, SARS Virus
ctttgagctgagtcgttccctccat

SEQ ID NO: 6675 - DNA, 25 bp, SARS Virus
tttgagctgaggtgttccctccatc

SEQ ID NO: 6676 - DNA, 25 bp, SARS Virus
ttgagctgaggctttccctccatcc

SEQ ID NO: 6677 - DNA, 25 bp, SARS Virus
tgagctgaggcgttccctccatcct

SEQ ID NO: 6678 - DNA, 25 bp, SARS Virus
gagctgaggcgttccctccatcctg

SEQ ID NO: 6679 - DNA, 25 bp, SARS Virus
agctgaggcgtttcctccatcctga

SEQ ID NO: 6680 - DNA, 25 bp, SARS Virus
gctgaggcgttctctccatcctgat

SEQ ID NO: 6681 - DNA, 25 bp, SARS Virus
ctgaggcgttccttccatcctgatc

SEQ ID NO: 6682 - DNA, 25 bp, SARS Virus
tgaggcgttccctccatcctgatct

SEQ ID NO: 6683 - DNA, 25 bp, SARS Virus
gaggcgttcccttcatcctgatcta

SEQ ID NO: 6684 - DNA, 25 bp, SARS Virus
aggcgttccctctatcctgatctac

SEQ ID NO: 6685 - DNA, 25 bp, SARS Virus
ggcgttccctccttcctgatctaca

SEQ ID NO: 6686 - DNA, 25 bp, SARS Virus
gcgttccctccatcctgatctacaa

SEQ ID NO: 6687 - DNA, 25 bp, SARS Virus
cgttccctccattctgatctacaaa

SEQ ID NO: 6688 - DNA, 25 bp, SARS Virus
gttccctccatcttgatctacaaaa

SEQ ID NO: 6689 - DNA, 25 bp, SARS Virus
ttccctccatcctgatctacaaaac

SEQ ID NO: 6690 - DNA, 25 bp, SARS Virus
tccctccatccttatctacaaaacc

SEQ ID NO: 6691 - DNA, 25 bp, SARS Virus
ccctccatcctgttctacaaaacct

SEQ ID NO: 6692 - DNA, 25 bp, SARS Virus
cctccatcctgatctacaaaacctc

SEQ ID NO: 6693 - DNA, 25 bp, SARS Virus
ctccatcctgatttacaaaacctcc

SEQ ID NO: 6694 - DNA, 25 bp, SARS Virus
tccatcctgatctacaaaacctccg

SEQ ID NO: 6695 - DNA, 25 bp, SARS Virus
ccatcctgatcttcaaaacctccga

SEQ ID NO: 6696 - DNA, 25 bp, SARS Virus
catcctgatctataaaacctccgac

SEQ ID NO: 6697 - DNA, 25 bp, SARS Virus
atcctgatctactaaacctccgaca

SEQ ID NO: 6698 - DNA, 25 bp, SARS Virus
tcctgatctacataacctccgacac

SEQ ID NO: 6699 - DNA, 25 bp, SARS Virus
cctgatctacaatacctccgacaca

SEQ ID NO: 6700 - DNA, 25 bp, SARS Virus
ctgatctacaaatcctccgacacac

SEQ ID NO: 6701 - DNA, 25 bp, SARS Virus
tgatctacaaaatctccgacacaca

SEQ ID NO: 6702 - DNA, 25 bp, SARS Virus
gatctacaaaacttccgacacacaa

SEQ ID NO: 6703 - DNA, 25 bp, SARS Virus
atctacaaaacctccgacacacaaa

SEQ ID NO: 6704 - DNA, 25 bp, SARS Virus
tctacaaaaccttcgacacacaaac

SEQ ID NO: 6705 - DNA, 25 bp, SARS Virus
ctacaaaacctctgacacacaaacg

SEQ ID NO: 6706 - DNA, 25 bp, SARS Virus
tacaaaacctcctacacacaaacgg

SEQ ID NO: 6707 - DNA, 25 bp, SARS Virus
acaaaacctccgtcacacaaacgga

SEQ ID NO: 6708 - DNA, 25 bp, SARS Virus
caaaacctccgatacacaaacggat

SEQ ID NO: 6709 - DNA, 25 bp, SARS Virus
aaaacctccgactcacaaacggata

SEQ ID NO: 6710 - DNA, 25 bp, SARS Virus
aaacctccgacatacaaacggatac

SEQ ID NO: 6711 - DNA, 25 bp, SARS Virus
aacctccgacactcaaacggataca

SEQ ID NO: 6712 - DNA, 25 bp, SARS Virus
acctccgacacataaacggatacaa

SEQ ID NO: 6713 - DNA, 25 bp, SARS Virus
cctccgacacactaacggatacaac

SEQ ID NO: 6714 - DNA, 25 bp, SARS Virus
ctccgacacacatacggatacaacc

SEQ ID NO: 6715 - DNA, 25 bp, SARS Virus
tccgacacacaatcggatacaaccg

SEQ ID NO: 6716 - DNA, 25 bp, SARS Virus
ccgacacacaaatggatacaaccga

SEQ ID NO: 6717 - DNA, 25 bp, SARS Virus
cgacacacaaactgatacaaccgac

SEQ ID NO: 6718 - DNA, 25 bp, SARS Virus
gacacacaaacgtatacaaccgacg

SEQ ID NO: 6719 - DNA, 25 bp, SARS Virus
acacacaaacggttacaaccgacga

SEQ ID NO: 6720 - DNA, 25 bp, SARS Virus
cacacaaacggatacaaccgacgat

SEQ ID NO: 6721 - DNA, 25 bp, SARS Virus
acacaaacggattcaaccgacgata

SEQ ID NO: 6722 - DNA, 25 bp, SARS Virus
cacaaacggatataaccgacgatat

SEQ ID NO: 6723 - DNA, 25 bp, SARS Virus
acaaacggatactaccgacgatatt

SEQ ID NO: 6724 - DNA, 25 bp, SARS Virus
caaacggatacatccgacgatatta

SEQ ID NO: 6725 - DNA, 25 bp, SARS Virus
aaacggatacaatcgacgatattat

SEQ ID NO: 6726 - DNA, 25 bp, SARS Virus
aacggatacaactgacgatattatt

SEQ ID NO: 6727 - DNA, 25 bp, SARS Virus
acggatacaacctacgatattattc

SEQ ID NO: 6728 - DNA, 25 bp, SARS Virus
cggatacaaccgtcgatattattcg

SEQ ID NO: 6729 - DNA, 25 bp, SARS Virus
ggatacaaccgatgatattattcgc

SEQ ID NO: 6730 - DNA, 25 bp, SARS Virus
gatacaaccgactatattattcgca

SEQ ID NO: 6731 - DNA, 25 bp, SARS Virus
atacaaccgacgttattattcgcac

SEQ ID NO: 6732 - DNA, 25 bp, SARS Virus
tacaaccgacgatattattcgcacg

SEQ ID NO: 6733 - DNA, 25 bp, SARS Virus
acaaccgacgattttattcgcacgg

SEQ ID NO: 6734 - DNA, 25 bp, SARS Virus
caaccgacgatattattcgcacgga

SEQ ID NO: 6735 - DNA, 25 bp, SARS Virus
aaccgacgatattattcgcacggat

SEQ ID NO: 6736 - DNA, 25 bp, SARS Virus
accgacgatatttttcgcacggatg

SEQ ID NO: 6737 - DNA, 25 bp, SARS Virus
ccgacgatattattcgcacggatga

SEQ ID NO: 6738 - DNA, 25 bp, SARS Virus
cgacgatattattcgcacggatgac

SEQ ID NO: 6739 - DNA, 25 bp, SARS Virus
gacgatattatttgcacggatgacc

SEQ ID NO: 6740 - DNA, 25 bp, SARS Virus
acgatattattctcacggatgaccc

SEQ ID NO: 6741 - DNA, 25 bp, SARS Virus
cgatattattcgtacggatgaccca

SEQ ID NO: 6742 - DNA, 25 bp, SARS Virus
gatattattcgctcggatgacccaa

SEQ ID NO: 6743 - DNA, 25 bp, SARS Virus
atattattcgcatggatgacccaag

SEQ ID NO: 6744 - DNA, 25 bp, SARS Virus
tattattcgcactgatgacccaagg

SEQ ID NO: 6745 - DNA, 25 bp, SARS Virus
attattcgcacgtatgacccaagga

SEQ ID NO: 6746 - DNA, 25 bp, SARS Virus
ttattcgcacggttgacccaaggag

SEQ ID NO: 6747 - DNA, 25 bp, SARS Virus
tattcgcacggatgacccaaggagc

SEQ ID NO: 6748 - DNA, 25 bp, SARS Virus
attcgcacggattacccaaggagca

SEQ ID NO: 6749 - DNA, 25 bp, SARS Virus
ttcgcacggatgtcccaaggagcac

SEQ ID NO: 6750 - DNA, 25 bp, SARS Virus
tcgcacggatgatccaaggagcacg

SEQ ID NO: 6751 - DNA, 25 bp, SARS Virus
cgcacggatgactcaaggagcacga

SEQ ID NO: 6752 - DNA, 25 bp, SARS Virus
gcacggatgacctaaggagcacgat

SEQ ID NO: 6753 - DNA, 25 bp, SARS Virus
cacggatgaccctaggagcacgatc

SEQ ID NO: 6754 - DNA, 25 bp, SARS Virus
acggatgacccatggagcacgatca

SEQ ID NO: 6755 - DNA, 25 bp, SARS Virus
cggatgacccaatgagcacgatcac

SEQ ID NO: 6756 - DNA, 25 bp, SARS Virus
ggatgacccaagtagcacgatcacg

SEQ ID NO: 6757 - DNA, 25 bp, SARS Virus
gatgacccaaggtgcacgatcacga

SEQ ID NO: 6758 - DNA, 25 bp, SARS Virus
atgacccaaggatcacgatcacgac

SEQ ID NO: 6759 - DNA, 25 bp, SARS Virus
tgacccaaggagtacgatcacgact

SEQ ID NO: 6760 - DNA, 25 bp, SARS Virus
gacccaaggagctcgatcacgacta

SEQ ID NO: 6761 - DNA, 25 bp, SARS Virus
acccaaggagcatgatcacgactat

SEQ ID NO: 6762 - DNA, 25 bp, SARS Virus
cccaaggagcactatcacgactata

SEQ ID NO: 6763 - DNA, 25 bp, SARS Virus
ccaaggagcacgttcacgactataa

SEQ ID NO: 6764 - DNA, 25 bp, SARS Virus
caaggagcacgatcacgactataac

SEQ ID NO: 6765 - DNA, 25 bp, SARS Virus
aaggagcacgattacgactataacc

SEQ ID NO: 6766 - DNA, 25 bp, SARS Virus
aggagcacgatctcgactataaccg

SEQ ID NO: 6767 - DNA, 25 bp, SARS Virus
ggagcacgatcatgactataaccga

SEQ ID NO: 6768 - DNA, 25 bp, SARS Virus
gagcacgatcactactataaccgag

SEQ ID NO: 6769 - DNA, 25 bp, SARS Virus
agcacgatcacgtctataaccgagt

SEQ ID NO: 6770 - DNA, 25 bp, SARS Virus
gcacgatcacgattataaccgagtc

SEQ ID NO: 6771 - DNA, 25 bp, SARS Virus
cacgatcacgactataaccgagtcc

SEQ ID NO: 6772 - DNA, 25 bp, SARS Virus
acgatcacgactttaaccgagtccg

SEQ ID NO: 6773 - DNA, 25 bp, SARS Virus
cgatcacgactataaccgagtccgg

SEQ ID NO: 6774 - DNA, 25 bp, SARS Virus
gatcacgactattaccgagtccggt

SEQ ID NO: 6775 - DNA, 25 bp, SARS Virus
atcacgactatatccgagtccggta

SEQ ID NO: 6776 - DNA, 25 bp, SARS Virus
tcacgactataatcgagtccggtat

SEQ ID NO: 6777 - DNA, 25 bp, SARS Virus
cacgactataactgagtccggtatg

SEQ ID NO: 6778 - DNA, 25 bp, SARS Virus
acgactataacctagtccggtatga

SEQ ID NO: 6779 - DNA, 25 bp, SARS Virus
cgactataaccgtgtccggtatgac

SEQ ID NO: 6780 - DNA, 25 bp, SARS Virus
gactataaccgattccggtatgacc

SEQ ID NO: 6781 - DNA, 25 bp, SARS Virus
actataaccgagtccggtatgaccg

SEQ ID NO: 6782 - DNA, 25 bp, SARS Virus
ctataaccgagttcggtatgaccgt

SEQ ID NO: 6783 - DNA, 25 bp, SARS Virus
tataaccgagtctggtatgaccgta

SEQ ID NO: 6784 - DNA, 25 bp, SARS Virus
ataaccgagtcctgtatgaccgtaa

SEQ ID NO: 6785 - DNA, 25 bp, SARS Virus
taaccgagtccgttatgaccgtaat

SEQ ID NO: 6786 - DNA, 25 bp, SARS Virus
aaccgagtccggtatgaccgtaatg

SEQ ID NO: 6787 - DNA, 25 bp, SARS Virus
accgagtccggtttgaccgtaatga

SEQ ID NO: 6788 - DNA, 25 bp, SARS Virus
ccgagtccggtatgaccgtaatgac

SEQ ID NO: 6789 - DNA, 25 bp, SARS Virus
cgagtccggtattaccgtaatgacc

SEQ ID NO: 6790 - DNA, 25 bp, SARS Virus
gagtccggtatgtccgtaatgacca

SEQ ID NO: 6791 - DNA, 25 bp, SARS Virus
agtccggtatgatcgtaatgaccac

SEQ ID NO: 6792 - DNA, 25 bp, SARS Virus
gtccggtatgactgtaatgaccact

SEQ ID NO: 6793 - DNA, 25 bp, SARS Virus
tccggtatgaccttaatgaccactg

SEQ ID NO: 6794 - DNA, 25 bp, SARS Virus
ccggtatgaccgtaatgaccactgt

SEQ ID NO: 6795 - DNA, 25 bp, SARS Virus
cggtatgaccgttatgaccactgtt

SEQ ID NO: 6796 - DNA, 25 bp, SARS Virus
ggtatgaccgtattgaccactgtta

SEQ ID NO: 6797 - DNA, 25 bp, SARS Virus
gtatgaccgtaatgaccactgttac

SEQ ID NO: 6798 - DNA, 25 bp, SARS Virus
tatgaccgtaattaccactgttaca

SEQ ID NO: 6799 - DNA, 25 bp, SARS Virus
atgaccgtaatgtccactgttacac

SEQ ID NO: 6800 - DNA, 25 bp, SARS Virus
tgaccgtaatgatcactgttacacc

SEQ ID NO: 6801 - DNA, 25 bp, SARS Virus
gaccgtaatgactactgttacacct

SEQ ID NO: 6802 - DNA, 25 bp, SARS Virus
accgtaatgacctctgttacacctc

SEQ ID NO: 6803 - DNA, 25 bp, SARS Virus
ccgtaatgaccattgttacacctct

SEQ ID NO: 6804 - DNA, 25 bp, SARS Virus
cgtaatgaccactgttacacctctg

SEQ ID NO: 6805 - DNA, 25 bp, SARS Virus
gtaatgaccacttttacacctctgg

SEQ ID NO: 6806 - DNA, 25 bp, SARS Virus
taatgaccactgttacacctctgga

SEQ ID NO: 6807 - DNA, 25 bp, SARS Virus
aatgaccactgttacacctctggaa

SEQ ID NO: 6808 - DNA, 25 bp, SARS Virus
atgaccactgtttcacctctggaac

SEQ ID NO: 6809 - DNA, 25 bp, SARS Virus
tgaccactgttatacctctggaact

SEQ ID NO: 6810 - DNA, 25 bp, SARS Virus
gaccactgttactcctctggaactt

SEQ ID NO: 6811 - DNA, 25 bp, SARS Virus
accactgttacatctctggaactta

SEQ ID NO: 6812 - DNA, 25 bp, SARS Virus
ccactgttacacttctggaacttac

SEQ ID NO: 6813 - DNA, 25 bp, SARS Virus
cactgttacacctctggaacttact

SEQ ID NO: 6814 - DNA, 25 bp, SARS Virus
actgttacacctttggaacttactc

SEQ ID NO: 6815 - DNA, 25 bp, SARS Virus
ctgttacacctctggaacttactcc

SEQ ID NO: 6816 - DNA, 25 bp, SARS Virus
tgttacacctcttgaacttactcct

SEQ ID NO: 6817 - DNA, 25 bp, SARS Virus
gttacacctctgtaacttactccta

SEQ ID NO: 6818 - DNA, 25 bp, SARS Virus
ttacacctctggtacttactcctag

SEQ ID NO: 6819 - DNA, 25 bp, SARS Virus
tacacctctggatcttactcctaga

SEQ ID NO: 6820 - DNA, 25 bp, SARS Virus
acacctctggaatttactcctagag

SEQ ID NO: 6821 - DNA, 25 bp, SARS Virus
cacctctggaacttactcctagagg

SEQ ID NO: 6822 - DNA, 25 bp, SARS Virus
acctctggaacttactcctagagga

SEQ ID NO: 6823 - DNA, 25 bp, SARS Virus
cctctggaactttctcctagaggaa

SEQ ID NO: 6824 - DNA, 25 bp, SARS Virus
ctctggaacttattcctagaggaac

SEQ ID NO: 6825 - DNA, 25 bp, SARS Virus
tctggaacttactcctagaggaact

SEQ ID NO: 6826 - DNA, 25 bp, SARS Virus
ctggaacttacttctagaggaactc

SEQ ID NO: 6827 - DNA, 25 bp, SARS Virus
tggaacttactcttagaggaactct

SEQ ID NO: 6828 - DNA, 25 bp, SARS Virus
ggaacttactcctagaggaactcta

SEQ ID NO: 6829 - DNA, 25 bp, SARS Virus
gaacttactccttgaggaactctat

SEQ ID NO: 6830 - DNA, 25 bp, SARS Virus
aacttactcctataggaactctatg

SEQ ID NO: 6831 - DNA, 25 bp, SARS Virus
acttactcctagtggaactctatga

SEQ ID NO: 6832 - DNA, 25 bp, SARS Virus
cttactcctagatgaactctatgac

SEQ ID NO: 6833 - DNA, 25 bp, SARS Virus
ttactcctagagtaactctatgact

SEQ ID NO: 6834 - DNA, 25 bp, SARS Virus
tactcctagaggtactctatgactc

SEQ ID NO: 6835 - DNA, 25 bp, SARS Virus
actcctagaggatctctatgactca

SEQ ID NO: 6836 - DNA, 25 bp, SARS Virus
ctcctagaggaattctatgactcag

SEQ ID NO: 6837 - DNA, 25 bp, SARS Virus
tcctagaggaactctatgactcagc

SEQ ID NO: 6838 - DNA, 25 bp, SARS Virus
cctagaggaactttatgactcagca

SEQ ID NO: 6839 - DNA, 25 bp, SARS Virus
ctagaggaactctatgactcagcac

SEQ ID NO: 6840 - DNA, 25 bp, SARS Virus
tagaggaactctttgactcagcact

SEQ ID NO: 6841 - DNA, 25 bp, SARS Virus
agaggaactctatgactcagcactt

SEQ ID NO: 6842 - DNA, 25 bp, SARS Virus
gaggaactctattactcagcacttg

SEQ ID NO: 6843 - DNA, 25 bp, SARS Virus
aggaactctatgtctcagcacttgc

SEQ ID NO: 6844 - DNA, 25 bp, SARS Virus
ggaactctatgattcagcacttgca

SEQ ID NO: 6845 - DNA, 25 bp, SARS Virus
gaactctatgactcagcacttgcac

SEQ ID NO: 6846 - DNA, 25 bp, SARS Virus
aactctatgacttagcacttgcaca

SEQ ID NO: 6847 - DNA, 25 bp, SARS Virus
actctatgactctgcacttgcacaa

SEQ ID NO: 6848 - DNA, 25 bp, SARS Virus
ctctatgactcatcacttgcacaat

SEQ ID NO: 6849 - DNA, 25 bp, SARS Virus
tctatgactcagtacttgcacaatt

SEQ ID NO: 6850 - DNA, 25 bp, SARS Virus
ctatgactcagctcttgcacaattg

SEQ ID NO: 6851 - DNA, 25 bp, SARS Virus
tatgactcagcatttgcacaattgt

SEQ ID NO: 6852 - DNA, 25 bp, SARS Virus
atgactcagcacttgcacaattgta

SEQ ID NO: 6853 - DNA, 25 bp, SARS Virus
tgactcagcacttgcacaattgtaa

SEQ ID NO: 6854 - DNA, 25 bp, SARS Virus
gactcagcactttcacaattgtaat

SEQ ID NO: 6855 - DNA, 25 bp, SARS Virus
actcagcacttgtacaattgtaatt

SEQ ID NO: 6856 - DNA, 25 bp, SARS Virus
ctcagcacttgctcaattgtaattg

SEQ ID NO: 6857 - DNA, 25 bp, SARS Virus
tcagcacttgcataattgtaattgt

SEQ ID NO: 6858 - DNA, 25 bp, SARS Virus
cagcacttgcactattgtaattgta

SEQ ID NO: 6859 - DNA, 25 bp, SARS Virus
agcacttgcacatttgtaattgtaa

SEQ ID NO: 6860 - DNA, 25 bp, SARS Virus
gcacttgcacaattgtaattgtaac

SEQ ID NO: 6861 - DNA, 25 bp, SARS Virus
cacttgcacaattgtaattgtaaca

SEQ ID NO: 6862 - DNA, 25 bp, SARS Virus
acttgcacaattttaattgtaacaa

SEQ ID NO: 6863 - DNA, 25 bp, SARS Virus
cttgcacaattgtaattgtaacaac

SEQ ID NO: 6864 - DNA, 25 bp, SARS Virus
ttgcacaattgttattgtaacaacc

SEQ ID NO: 6865 - DNA, 25 bp, SARS Virus
tgcacaattgtatttgtaacaaccg

SEQ ID NO: 6866 - DNA, 25 bp, SARS Virus
gcacaattgtaattgtaacaaccgc

SEQ ID NO: 6867 - DNA, 25 bp, SARS Virus
cacaattgtaattgtaacaaccgct

SEQ ID NO: 6868 - DNA, 25 bp, SARS Virus
acaattgtaattttaacaaccgcta

SEQ ID NO: 6869 - DNA, 25 bp, SARS Virus
caattgtaattgtaacaaccgctaa

SEQ ID NO: 6870 - DNA, 25 bp, SARS Virus
aattgtaattgttacaaccgctaaa

SEQ ID NO: 6871 - DNA, 25 bp, SARS Virus
attgtaattgtatcaaccgctaaaa

SEQ ID NO: 6872 - DNA, 25 bp, SARS Virus
ttgtaattgtaataaccgctaaaag

SEQ ID NO: 6873 - DNA, 25 bp, SARS Virus
tgtaattgtaactaccgctaaaagt

SEQ ID NO: 6874 - DNA, 25 bp, SARS Virus
gtaattgtaacatccgctaaaagta

SEQ ID NO: 6875 - DNA, 25 bp, SARS Virus
taattgtaacaatcgctaaaagtaa

SEQ ID NO: 6876 - DNA, 25 bp, SARS Virus
aattgtaacaactgctaaaagtaaa

SEQ ID NO: 6877 - DNA, 25 bp, SARS Virus
attgtaacaacctctaaaagtaaac

SEQ ID NO: 6878 - DNA, 25 bp, SARS Virus
ttgtaacaaccgttaaaagtaaact

SEQ ID NO: 6879 - DNA, 25 bp, SARS Virus
tgtaacaaccgctaaaagtaaactt

SEQ ID NO: 6880 - DNA, 25 bp, SARS Virus
gtaacaaccgcttaaagtaaactta

SEQ ID NO: 6881 - DNA, 25 bp, SARS Virus
taacaaccgctataagtaaacttac

SEQ ID NO: 6882 - DNA, 25 bp, SARS Virus
aacaaccgctaatagtaaacttact

SEQ ID NO: 6883 - DNA, 25 bp, SARS Virus
acaaccgctaaatgtaaacttactt

SEQ ID NO: 6884 - DNA, 25 bp, SARS Virus
caaccgctaaaattaaacttacttc

SEQ ID NO: 6885 - DNA, 25 bp, SARS Virus
aaccgctaaaagtaaacttacttct

SEQ ID NO: 6886 - DNA, 25 bp, SARS Virus
accgctaaaagttaacttacttctc

SEQ ID NO: 6887 - DNA, 25 bp, SARS Virus
ccgctaaaagtatacttacttctcc

SEQ ID NO: 6888 - DNA, 25 bp, SARS Virus
cgctaaaagtaatcttacttctcca

SEQ ID NO: 6889 - DNA, 25 bp, SARS Virus
gctaaaagtaaatttacttctccaa

SEQ ID NO: 6890 - DNA, 25 bp, SARS Virus
ctaaaagtaaacttacttctccaac

SEQ ID NO: 6891 - DNA, 25 bp, SARS Virus
taaaagtaaacttacttctccaacg

SEQ ID NO: 6892 - DNA, 25 bp, SARS Virus
aaaagtaaactttcttctccaacgg

SEQ ID NO: 6893 - DNA, 25 bp, SARS Virus
aaagtaaacttatttctccaacggt

SEQ ID NO: 6894 - DNA, 25 bp, SARS Virus
aagtaaacttacttctccaacggta

SEQ ID NO: 6895 - DNA, 25 bp, SARS Virus
agtaaacttacttctccaacggtag

SEQ ID NO: 6896 - DNA, 25 bp, SARS Virus
gtaaacttacttttccaacggtagt

SEQ ID NO: 6897 - DNA, 25 bp, SARS Virus
taaacttacttctccaacggtagta

SEQ ID NO: 6898 - DNA, 25 bp, SARS Virus
aaacttacttcttcaacggtagtaa

SEQ ID NO: 6899 - DNA, 25 bp, SARS Virus
aacttacttctctaacggtagtaaa

SEQ ID NO: 6900 - DNA, 25 bp, SARS Virus
acttacttctcctacggtagtaaaa

SEQ ID NO: 6901 - DNA, 25 bp, SARS Virus
cttacttctccatcggtagtaaaac

SEQ ID NO: 6902 - DNA, 25 bp, SARS Virus
ttacttctccaatggtagtaaaacc

SEQ ID NO: 6903 - DNA, 25 bp, SARS Virus
tacttctccaactgtagtaaaaccg

SEQ ID NO: 6904 - DNA, 25 bp, SARS Virus
acttctccaacgttagtaaaaccgt

SEQ ID NO: 6905 - DNA, 25 bp, SARS Virus
cttctccaacggtagtaaaaccgta

SEQ ID NO: 6906 - DNA, 25 bp, SARS Virus
ttctccaacggttgtaaaaccgtag

SEQ ID NO: 6907 - DNA, 25 bp, SARS Virus
tctccaacggtattaaaaccgtaga

SEQ ID NO: 6908 - DNA, 25 bp, SARS Virus
ctccaacggtagtaaaaccgtagaa

SEQ ID NO: 6909 - DNA, 25 bp, SARS Virus
tccaacggtagttaaaccgtagaaa

SEQ ID NO: 6910 - DNA, 25 bp, SARS Virus
ccaacggtagtataaccgtagaaag

SEQ ID NO: 6911 - DNA, 25 bp, SARS Virus
caacggtagtaataccgtagaaaga

SEQ ID NO: 6912 - DNA, 25 bp, SARS Virus
aacggtagtaaatccgtagaaagag

SEQ ID NO: 6913 - DNA, 25 bp, SARS Virus
acggtagtaaaatcgtagaaagaga

SEQ ID NO: 6914 - DNA, 25 bp, SARS Virus
cggtagtaaaactgtagaaagagac

SEQ ID NO: 6915 - DNA, 25 bp, SARS Virus
ggtagtaaaaccttagaaagagacg

SEQ ID NO: 6916 - DNA, 25 bp, SARS Virus
gtagtaaaaccgtagaaagagacga

SEQ ID NO: 6917 - DNA, 25 bp, SARS Virus
tagtaaaaccgttgaaagagacgaa

SEQ ID NO: 6918 - DNA, 25 bp, SARS Virus
agtaaaaccgtataaagagacgaag

SEQ ID NO: 6919 - DNA, 25 bp, SARS Virus
gtaaaaccgtagtaagagacgaaga

SEQ ID NO: 6920 - DNA, 25 bp, SARS Virus
taaaaccgtagatagagacgaagat

SEQ ID NO: 6921 - DNA, 25 bp, SARS Virus
aaaaccgtagaatgagacgaagatg

SEQ ID NO: 6922 - DNA, 25 bp, SARS Virus
aaaccgtagaaatagacgaagatgt

SEQ ID NO: 6923 - DNA, 25 bp, SARS Virus
aaccgtagaaagtgacgaagatgtt

SEQ ID NO: 6924 - DNA, 25 bp, SARS Virus
accgtagaaagatacgaagatgttc

SEQ ID NO: 6925 - DNA, 25 bp, SARS Virus
ccgtagaaagagtcgaagatgttca

SEQ ID NO: 6926 - DNA, 25 bp, SARS Virus
cgtagaaagagatgaagatgttcac

SEQ ID NO: 6927 - DNA, 25 bp, SARS Virus
gtagaaagagactaagatgttcacg

SEQ ID NO: 6928 - DNA, 25 bp, SARS Virus
tagaaagagacgtagatgttcacgg

SEQ ID NO: 6929 - DNA, 25 bp, SARS Virus
agaaagagacgatgatgttcacgga

SEQ ID NO: 6930 - DNA, 25 bp, SARS Virus
gaaagagacgaatatgttcacggaa

SEQ ID NO: 6931 - DNA, 25 bp, SARS Virus
aaagagacgaagttgttcacggaaa

SEQ ID NO: 6932 - DNA, 25 bp, SARS Virus
aagagacgaagatgttcacggaaat

SEQ ID NO: 6933 - DNA, 25 bp, SARS Virus
agagacgaagattttcacggaaata

SEQ ID NO: 6934 - DNA, 25 bp, SARS Virus
gagacgaagatgttcacggaaataa

SEQ ID NO: 6935 - DNA, 25 bp, SARS Virus
agacgaagatgttcacggaaataac

SEQ ID NO: 6936 - DNA, 25 bp, SARS Virus
gacgaagatgtttacggaaataact

SEQ ID NO: 6937 - DNA, 25 bp, SARS Virus
acgaagatgttctcggaaataactg

SEQ ID NO: 6938 - DNA, 25 bp, SARS Virus
cgaagatgttcatggaaataactgt

SEQ ID NO: 6939 - DNA, 25 bp, SARS Virus
gaagatgttcactgaaataactgtg

SEQ ID NO: 6940 - DNA, 25 bp, SARS Virus
aagatgttcacgtaaataactgtga

SEQ ID NO: 6941 - DNA, 25 bp, SARS Virus
agatgttcacggtaataactgtgat

SEQ ID NO: 6942 - DNA, 25 bp, SARS Virus
gatgttcacggatataactgtgata

SEQ ID NO: 6943 - DNA, 25 bp, SARS Virus
atgttcacggaattaactgtgatat

SEQ ID NO: 6944 - DNA, 25 bp, SARS Virus
tgttcacggaaataactgtgatatt

SEQ ID NO: 6945 - DNA, 25 bp, SARS Virus
gttcacggaaattactgtgatattt

SEQ ID NO: 6946 - DNA, 25 bp, SARS Virus
ttcacggaaatatctgtgatatttc

SEQ ID NO: 6947 - DNA, 25 bp, SARS Virus
tcacggaaataattgtgatatttct

SEQ ID NO: 6948 - DNA, 25 bp, SARS Virus
cacggaaataactgtgatatttctc

SEQ ID NO: 6949 - DNA, 25 bp, SARS Virus
acggaaataactttgatatttctca

SEQ ID NO: 6950 - DNA, 25 bp, SARS Virus
cggaaataactgtgatatttctcag

SEQ ID NO: 6951 - DNA, 25 bp, SARS Virus
ggaaataactgttatatttctcaga

SEQ ID NO: 6952 - DNA, 25 bp, SARS Virus
gaaataactgtgttatttctcagaa

SEQ ID NO: 6953 - DNA, 25 bp, SARS Virus
aaataactgtgatatttctcagaac

SEQ ID NO: 6954 - DNA, 25 bp, SARS Virus
aataactgtgatttttctcagaact

SEQ ID NO: 6955 - DNA, 25 bp, SARS Virus
ataactgtgatatttctcagaacta

SEQ ID NO: 6956 - DNA, 25 bp, SARS Virus
taactgtgatatttctcagaactaa

SEQ ID NO: 6957 - DNA, 25 bp, SARS Virus
aactgtgatatttctcagaactaat

SEQ ID NO: 6958 - DNA, 25 bp, SARS Virus
actgtgatatttttcagaactaatg

SEQ ID NO: 6959 - DNA, 25 bp, SARS Virus
ctgtgatatttctcagaactaatgt

SEQ ID NO: 6960 - DNA, 25 bp, SARS Virus
tgtgatatttcttagaactaatgtt

SEQ ID NO: 6961 - DNA, 25 bp, SARS Virus
gtgatatttctcagaactaatgttc

SEQ ID NO: 6962 - DNA, 25 bp, SARS Virus
tgatatttctcaaaactaatgttca

SEQ ID NO: 6963 - DNA, 25 bp, SARS Virus
gatatttctcagaactaatgttcag

SEQ ID NO: 6964 - DNA, 25 bp, SARS Virus
atatttctcagaactaatgttcaga

SEQ ID NO: 6965 - DNA, 25 bp, SARS Virus
tatttctcagaaataatgttcagaa

SEQ ID NO: 6966 - DNA, 25 bp, SARS Virus
atttctcagaacaaatgttcagaaa

SEQ ID NO: 6967 - DNA, 25 bp, SARS Virus
tttctcagaactaatgttcagaaag

SEQ ID NO: 6968 - DNA, 25 bp, SARS Virus
ttctcagaactaatgttcagaaagt

SEQ ID NO: 6969 - DNA, 25 bp, SARS Virus
tctcagaactaaagttcagaaagtt

SEQ ID NO: 6970 - DNA, 25 bp, SARS Virus
ctcagaactaatattcagaaagttt

SEQ ID NO: 6971 - DNA, 25 bp, SARS Virus
tcagaactaatgatcagaaagtttt

SEQ ID NO: 6972 - DNA, 25 bp, SARS Virus
cagaactaatgtacagaaagttttg

SEQ ID NO: 6973 - DNA, 25 bp, SARS Virus
agaactaatgttaagaaagttttgg

SEQ ID NO: 6974 - DNA, 25 bp, SARS Virus
gaactaatgttcagaaagttttggt

SEQ ID NO: 6975 - DNA, 25 bp, SARS Virus
aactaatgttcaaaaagttttggta

SEQ ID NO: 6976 - DNA, 25 bp, SARS Virus
actaatgttcagaaagttttggtaa

SEQ ID NO: 6977 - DNA, 25 bp, SARS Virus
ctaatgttcagaaagttttggtaac

SEQ ID NO: 6978 - DNA, 25 bp, SARS Virus
taatgttcagaaagttttggtaaca

SEQ ID NO: 6979 - DNA, 25 bp, SARS Virus
aatgttcagaaaattttggtaacaa

SEQ ID NO: 6980 - DNA, 25 bp, SARS Virus
atgttcagaaagatttggtaacaac

SEQ ID NO: 6981 - DNA, 25 bp, SARS Virus
tgttcagaaagtattggtaacaact

SEQ ID NO: 6982 - DNA, 25 bp, SARS Virus
gttcagaaagttatggtaacaactc

SEQ ID NO: 6983 - DNA, 25 bp, SARS Virus
ttcagaaagtttaggtaacaactca

SEQ ID NO: 6984 - DNA, 25 bp, SARS Virus
tcagaaagttttagtaacaactcag

SEQ ID NO: 6985 - DNA, 25 bp, SARS Virus
cagaaagttttgataacaactcagg

SEQ ID NO: 6986 - DNA, 25 bp, SARS Virus
agaaagttttggaaacaactcagga

SEQ ID NO: 6987 - DNA, 25 bp, SARS Virus
gaaagttttggtaacaactcaggac

SEQ ID NO: 6988 - DNA, 25 bp, SARS Virus
aaagttttggtaacaactcaggacg

SEQ ID NO: 6989 - DNA, 25 bp, SARS Virus
aagttttggtaaaaactcaggacgc

SEQ ID NO: 6990 - DNA, 25 bp, SARS Virus
agttttggtaacaactcaggacgcc

SEQ ID NO: 6991 - DNA, 25 bp, SARS Virus
gttttggtaacaactcaggacgcca

SEQ ID NO: 6992 - DNA, 25 bp, SARS Virus
ttttggtaacaaatcaggacgccat

SEQ ID NO: 6993 - DNA, 25 bp, SARS Virus
tttggtaacaacacaggacgccatt

SEQ ID NO: 6994 - DNA, 25 bp, SARS Virus
ttggtaacaactaaggacgccattg

SEQ ID NO: 6995 - DNA, 25 bp, SARS Virus
tggtaacaactcaggacgccattga

SEQ ID NO: 6996 - DNA, 25 bp, SARS Virus
ggtaacaactcaagacgccattgat

SEQ ID NO: 6997 - DNA, 25 bp, SARS Virus
gtaacaactcagaacgccattgata

SEQ ID NO: 6998 - DNA, 25 bp, SARS Virus
taacaactcaggacgccattgatat

SEQ ID NO: 6999 - DNA, 25 bp, SARS Virus
aacaactcaggaagccattgatatt

SEQ ID NO: 7000 - DNA, 25 bp, SARS Virus
acaactcaggacaccattgatattt

SEQ ID NO: 7001 - DNA, 25 bp, SARS Virus
caactcaggacgacattgatatttc

SEQ ID NO: 7002 - DNA, 25 bp, SARS Virus
aactcaggacgcaattgatatttca

SEQ ID NO: 7003 - DNA, 25 bp, SARS Virus
actcaggacgccattgatatttcaa

SEQ ID NO: 7004 - DNA, 25 bp, SARS Virus
ctcaggacgccaatgatatttcaat

SEQ ID NO: 7005 - DNA, 25 bp, SARS Virus
tcaggacgccatagatatttcaatg

SEQ ID NO: 7006 - DNA, 25 bp, SARS Virus
caggacgccattaatatttcaatgg

SEQ ID NO: 7007 - DNA, 25 bp, SARS Virus
aggacgccattgatatttcaatggt

SEQ ID NO: 7008 - DNA, 25 bp, SARS Virus
ggacgccattgaaatttcaatggtt

SEQ ID NO: 7009 - DNA, 25 bp, SARS Virus
gacgccattgatatttcaatggttc

SEQ ID NO: 7010 - DNA, 25 bp, SARS Virus
acgccattgataattcaatggttcc

SEQ ID NO: 7011 - DNA, 25 bp, SARS Virus
cgccattgatatatcaatggttccc

SEQ ID NO: 7012 - DNA, 25 bp, SARS Virus
gccattgatattacaatggttccct

SEQ ID NO: 7013 - DNA, 25 bp, SARS Virus
ccattgatatttaaatggttccctt

SEQ ID NO: 7014 - DNA, 25 bp, SARS Virus
cattgatatttcaatggttcccttt

SEQ ID NO: 7015 - DNA, 25 bp, SARS Virus
attgatatttcaatggttccctttc

SEQ ID NO: 7016 - DNA, 25 bp, SARS Virus
ttgatatttcaaaggttccctttcg

SEQ ID NO: 7017 - DNA, 25 bp, SARS Virus
tgatatttcaatagttccctttcgg

SEQ ID NO: 7018 - DNA, 25 bp, SARS Virus
gatatttcaatgattccctttcggg

SEQ ID NO: 7019 - DNA, 25 bp, SARS Virus
atatttcaatggatccctttcgggc

SEQ ID NO: 7020 - DNA, 25 bp, SARS Virus
tatttcaatggtaccctttcgggca

SEQ ID NO: 7021 - DNA, 25 bp, SARS Virus
atttcaatggttacctttcgggcat

SEQ ID NO: 7022 - DNA, 25 bp, SARS Virus
tttcaatggttcactttcgggcatt

SEQ ID NO: 7023 - DNA, 25 bp, SARS Virus
ttcaatggttccatttcgggcattt

SEQ ID NO: 7024 - DNA, 25 bp, SARS Virus
tcaatggttcccattcgggcatttt

SEQ ID NO: 7025 - DNA, 25 bp, SARS Virus
caatggttccctatcgggcattttc

SEQ ID NO: 7026 - DNA, 25 bp, SARS Virus
aatggttcccttacgggcattttcc

SEQ ID NO: 7027 - DNA, 25 bp, SARS Virus
atggttccctttagggcattttcca

SEQ ID NO: 7028 - DNA, 25 bp, SARS Virus
tggttccctttcaggcattttccac

SEQ ID NO: 7029 - DNA, 25 bp, SARS Virus
ggttccctttcgagcattttccacg

SEQ ID NO: 7030 - DNA, 25 bp, SARS Virus
gttccctttcggacattttccacga

SEQ ID NO: 7031 - DNA, 25 bp, SARS Virus
ttccctttcgggaattttccacgaa

SEQ ID NO: 7032 - DNA, 25 bp, SARS Virus
tccctttcgggcattttccacgaac

SEQ ID NO: 7033 - DNA, 25 bp, SARS Virus
ccctttcgggcaatttccacgaacc

SEQ ID NO: 7034 - DNA, 25 bp, SARS Virus
cctttcgggcatattccacgaacct

SEQ ID NO: 7035 - DNA, 25 bp, SARS Virus
ctttcgggcattatccacgaacctt

SEQ ID NO: 7036 - DNA, 25 bp, SARS Virus
tttcgggcatttaccacgaaccttg

SEQ ID NO: 7037 - DNA, 25 bp, SARS Virus
ttcgggcattttacacgaaccttgt

SEQ ID NO: 7038 - DNA, 25 bp, SARS Virus
tcgggcattttcaacgaaccttgta

SEQ ID NO: 7039 - DNA, 25 bp, SARS Virus
cgggcattttccacgaaccttgtaa

SEQ ID NO: 7040 - DNA, 25 bp, SARS Virus
gggcattttccaagaaccttgtaac

SEQ ID NO: 7041 - DNA, 25 bp, SARS Virus
ggcattttccacaaaccttgtaacc

SEQ ID NO: 7042 - DNA, 25 bp, SARS Virus
gcattttccacgaaccttgtaacct

SEQ ID NO: 7043 - DNA, 25 bp, SARS Virus
cattttccacgaaccttgtaacctg

SEQ ID NO: 7044 - DNA, 25 bp, SARS Virus
attttccacgaaacttgtaacctgt

SEQ ID NO: 7045 - DNA, 25 bp, SARS Virus
ttttccacgaacattgtaacctgtt

SEQ ID NO: 7046 - DNA, 25 bp, SARS Virus
tttccacgaaccatgtaacctgttg

SEQ ID NO: 7047 - DNA, 25 bp, SARS Virus
ttccacgaacctagtaacctgttgt

SEQ ID NO: 7048 - DNA, 25 bp, SARS Virus
tccacgaaccttataacctgttgtc

SEQ ID NO: 7049 - DNA, 25 bp, SARS Virus
ccacgaaccttgaaacctgttgtct

SEQ ID NO: 7050 - DNA, 25 bp, SARS Virus
cacgaaccttgtaacctgttgtctc

SEQ ID NO: 7051 - DNA, 25 bp, SARS Virus
acgaaccttgtaacctgttgtctct

SEQ ID NO: 7052 - DNA, 25 bp, SARS Virus
cgaaccttgtaaactgttgtctcta

SEQ ID NO: 7053 - DNA, 25 bp, SARS Virus
gaaccttgtaacatgttgtctctag

SEQ ID NO: 7054 - DNA, 25 bp, SARS Virus
aaccttgtaaccagttgtctctagt

SEQ ID NO: 7055 - DNA, 25 bp, SARS Virus
accttgtaacctattgtctctagtc

SEQ ID NO: 7056 - DNA, 25 bp, SARS Virus
ccttgtaacctgatgtctctagtca

SEQ ID NO: 7057 - DNA, 25 bp, SARS Virus
cttgtaacctgtagtctctagtcaa

SEQ ID NO: 7058 - DNA, 25 bp, SARS Virus
ttgtaacctgttatctctagtcaaa

SEQ ID NO: 7059 - DNA, 25 bp, SARS Virus
tgtaacctgttgactctagtcaaaa

SEQ ID NO: 7060 - DNA, 25 bp, SARS Virus
gtaacctgttgtatctagtcaaaat

SEQ ID NO: 7061 - DNA, 25 bp, SARS Virus
taacctgttgtcactagtcaaaatt

SEQ ID NO: 7062 - DNA, 25 bp, SARS Virus
aacctgttgtctatagtcaaaattg

SEQ ID NO: 7063 - DNA, 25 bp, SARS Virus
acctgttgtctcaagtcaaaattgt

SEQ ID NO: 7064 - DNA, 25 bp, SARS Virus
cctgttgtctctagtcaaaattgtg

SEQ ID NO: 7065 - DNA, 25 bp, SARS Virus
ctgttgtctctaatcaaaattgtgg

SEQ ID NO: 7066 - DNA, 25 bp, SARS Virus
tgttgtctctagacaaaattgtggt

SEQ ID NO: 7067 - DNA, 25 bp, SARS Virus
gttgtctctagtaaaaattgtggtg

SEQ ID NO: 7068 - DNA, 25 bp, SARS Virus
ttgtctctagtcaaaattgtggtga

SEQ ID NO: 7069 - DNA, 25 bp, SARS Virus
tgtctctagtcaaaattgtggtgac

SEQ ID NO: 7070 - DNA, 25 bp, SARS Virus
gtctctagtcaaaattgtggtgaca

SEQ ID NO: 7071 - DNA, 25 bp, SARS Virus
tctctagtcaaaattgtggtgacac

SEQ ID NO: 7072 - DNA, 25 bp, SARS Virus
ctctagtcaaaaatgtggtgacaca

SEQ ID NO: 7073 - DNA, 25 bp, SARS Virus
tctagtcaaaatagtggtgacacac

SEQ ID NO: 7074 - DNA, 25 bp, SARS Virus
ctagtcaaaattatggtgacacacc

SEQ ID NO: 7075 - DNA, 25 bp, SARS Virus
tagtcaaaattgaggtgacacacca

SEQ ID NO: 7076 - DNA, 25 bp, SARS Virus
agtcaaaattgtagtgacacaccaa

SEQ ID NO: 7077 - DNA, 25 bp, SARS Virus
gtcaaaattgtgatgacacaccaaa

SEQ ID NO: 7078 - DNA, 25 bp, SARS Virus
tcaaaattgtggagacacaccaaaa

SEQ ID NO: 7079 - DNA, 25 bp, SARS Virus
caaaattgtggtaacacaccaaaag

SEQ ID NO: 7080 - DNA, 25 bp, SARS Virus
aaaattgtggtgacacaccaaaagg

SEQ ID NO: 7081 - DNA, 25 bp, SARS Virus
aaattgtggtgaaacaccaaaaggg

SEQ ID NO: 7082 - DNA, 25 bp, SARS Virus
aattgtggtgacacaccaaaaggga

SEQ ID NO: 7083 - DNA, 25 bp, SARS Virus
attgtggtgacaaaccaaaagggag

SEQ ID NO: 7084 - DNA, 25 bp, SARS Virus
ttgtggtgacacaccaaaagggagt

SEQ ID NO: 7085 - DNA, 25 bp, SARS Virus
tgtggtgacacaacaaaagggagtg

SEQ ID NO: 7086 - DNA, 25 bp, SARS Virus
gtggtgacacacaaaaagggagtgt

SEQ ID NO: 7087 - DNA, 25 bp, SARS Virus
tggtgacacaccaaaagggagtgtc

SEQ ID NO: 7088 - DNA, 25 bp, SARS Virus
ggtgacacaccaaaagggagtgtcc

SEQ ID NO: 7089 - DNA, 25 bp, SARS Virus
gtgacacaccaaaagggagtgtccg

SEQ ID NO: 7090 - DNA, 25 bp, SARS Virus
tgacacaccaaaagggagtgtccga

SEQ ID NO: 7091 - DNA, 25 bp, SARS Virus
gacacaccaaaaaggagtgtccgac

SEQ ID NO: 7092 - DNA, 25 bp, SARS Virus
acacaccaaaagagagtgtccgacg

SEQ ID NO: 7093 - DNA, 25 bp, SARS Virus
cacaccaaaaggaagtgtccgacga

SEQ ID NO: 7094 - DNA, 25 bp, SARS Virus
acaccaaaagggagtgtccgacgac

SEQ ID NO: 7095 - DNA, 25 bp, SARS Virus
caccaaaagggaatgtccgacgacc

SEQ ID NO: 7096 - DNA, 25 bp, SARS Virus
accaaaagggagagtccgacgacca

SEQ ID NO: 7097 - DNA, 25 bp, SARS Virus
ccaaaagggagtatccgacgaccac

SEQ ID NO: 7098 - DNA, 25 bp, SARS Virus
caaaagggagtgaccgacgaccaca

SEQ ID NO: 7099 - DNA, 25 bp, SARS Virus
aaaagggagtgtacgacgaccacaa

SEQ ID NO: 7100 - DNA, 25 bp, SARS Virus
aaagggagtgtcagacgaccacaat

SEQ ID NO: 7101 - DNA, 25 bp, SARS Virus
aagggagtgtccaacgaccacaata

SEQ ID NO: 7102 - DNA, 25 bp, SARS Virus
agggagtgtccgacgaccacaatag

SEQ ID NO: 7103 - DNA, 25 bp, SARS Virus
gggagtgtccgaagaccacaatagt

SEQ ID NO: 7104 - DNA, 25 bp, SARS Virus
ggagtgtccgacaaccacaatagtc

SEQ ID NO: 7105 - DNA, 25 bp, SARS Virus
gagtgtccgacgaccacaatagtct

SEQ ID NO: 7106 - DNA, 25 bp, SARS Virus
agtgtccgacgaacacaatagtcta

SEQ ID NO: 7107 - DNA, 25 bp, SARS Virus
gtgtccgacgacaacaatagtctag

SEQ ID NO: 7108 - DNA, 25 bp, SARS Virus
tgtccgacgaccacaatagtctagt

SEQ ID NO: 7109 - DNA, 25 bp, SARS Virus
gtccgacgaccaaaatagtctagtt

SEQ ID NO: 7110 - DNA, 25 bp, SARS Virus
tccgacgaccacaatagtctagtta

SEQ ID NO: 7111 - DNA, 25 bp, SARS Virus
ccgacgaccacaatagtctagttaa

SEQ ID NO: 7112 - DNA, 25 bp, SARS Virus
cgacgaccacaaaagtctagttaaa

SEQ ID NO: 7113 - DNA, 25 bp, SARS Virus
gacgaccacaatagtctagttaaaa

SEQ ID NO: 7114 - DNA, 25 bp, SARS Virus
acgaccacaataatctagttaaaaa

SEQ ID NO: 7115 - DNA, 25 bp, SARS Virus
cgaccacaatagactagttaaaaac

SEQ ID NO: 7116 - DNA, 25 bp, SARS Virus
gaccacaatagtatagttaaaaacg

SEQ ID NO: 7117 - DNA, 25 bp, SARS Virus
accacaatagtcaagttaaaaacgc

SEQ ID NO: 7118 - DNA, 25 bp, SARS Virus
ccacaatagtctagttaaaaacgcg

SEQ ID NO: 7119 - DNA, 25 bp, SARS Virus
cacaatagtctaattaaaaacgcgc

SEQ ID NO: 7120 - DNA, 25 bp, SARS Virus
acaatagtctagataaaaacgcgcg

SEQ ID NO: 7121 - DNA, 25 bp, SARS Virus
caatagtctagtaaaaaacgcgcgt

SEQ ID NO: 7122 - DNA, 25 bp, SARS Virus
aatagtctagttaaaaacgcgcgtg

SEQ ID NO: 7123 - DNA, 25 bp, SARS Virus
atagtctagttaaaaacgcgcgtgt

SEQ ID NO: 7124 - DNA, 25 bp, SARS Virus
tagtctagttaaaaacgcgcgtgtg

SEQ ID NO: 7125 - DNA, 25 bp, SARS Virus
agtctagttaaaaacgcgcgtgtga

SEQ ID NO: 7126 - DNA, 25 bp, SARS Virus
gtctagttaaaaacgcgcgtgtgaa

SEQ ID NO: 7127 - DNA, 25 bp, SARS Virus
tctagttaaaaaagcgcgtgtgaac

SEQ ID NO: 7128 - DNA, 25 bp, SARS Virus
ctagttaaaaacacgcgtgtgaact

SEQ ID NO: 7129 - DNA, 25 bp, SARS Virus
tagttaaaaacgagcgtgtgaacta

SEQ ID NO: 7130 - DNA, 25 bp, SARS Virus
agttaaaaacgcacgtgtgaactac

SEQ ID NO: 7131 - DNA, 25 bp, SARS Virus
gttaaaaacgcgagtgtgaactacg

SEQ ID NO: 7132 - DNA, 25 bp, SARS Virus
ttaaaaacgcgcatgtgaactacgt

SEQ ID NO: 7133 - DNA, 25 bp, SARS Virus
taaaaacgcgcgagtgaactacgtc

SEQ ID NO: 7134 - DNA, 25 bp, SARS Virus
aaaaacgcgcgtatgaactacgtcg

SEQ ID NO: 7135 - DNA, 25 bp, SARS Virus
aaaacgcgcgtgagaactacgtcgt

SEQ ID NO: 7136 - DNA, 25 bp, SARS Virus
aaacgcgcgtgtaaactacgtcgtt

SEQ ID NO: 7137 - DNA, 25 bp, SARS Virus
aacgcgcgtgtgaactacgtcgttt

SEQ ID NO: 7138 - DNA, 25 bp, SARS Virus
acgcgcgtgtgaactacgtcgtttg

SEQ ID NO: 7139 - DNA, 25 bp, SARS Virus
cgcgcgtgtgaaatacgtcgtttgg

SEQ ID NO: 7140 - DNA, 25 bp, SARS Virus
gcgcgtgtgaacaacgtcgtttggt

SEQ ID NO: 7141 - DNA, 25 bp, SARS Virus
cgcgtgtgaactacgtcgtttggtg

SEQ ID NO: 7142 - DNA, 25 bp, SARS Virus
gcgtgtgaactaagtcgtttggtga

SEQ ID NO: 7143 - DNA, 25 bp, SARS Virus
cgtgtgaactacatcgtttggtgag

SEQ ID NO: 7144 - DNA, 25 bp, SARS Virus
gtgtgaactacgacgtttggtgagt

SEQ ID NO: 7145 - DNA, 25 bp, SARS Virus
tgtgaactacgtagtttggtgagtt

SEQ ID NO: 7146 - DNA, 25 bp, SARS Virus
gtgaactacgtcatttggtgagtta

SEQ ID NO: 7147 - DNA, 25 bp, SARS Virus
tgaactacgtcgattggtgagttaa

SEQ ID NO: 7148 - DNA, 25 bp, SARS Virus
gaactacgtcgtatggtgagttaag

SEQ ID NO: 7149 - DNA, 25 bp, SARS Virus
aactacgtcgttaggtgagttaagg

SEQ ID NO: 7150 - DNA, 25 bp, SARS Virus
actacgtcgtttagtgagttaagga

SEQ ID NO: 7151 - DNA, 25 bp, SARS Virus
ctacgtcgtttgatgagttaaggac

SEQ ID NO: 7152 - DNA, 25 bp, SARS Virus
tacgtcgtttggagagttaaggact

SEQ ID NO: 7153 - DNA, 25 bp, SARS Virus
acgtcgtttggtaagttaaggacta

SEQ ID NO: 7154 - DNA, 25 bp, SARS Virus
cgtcgtttggtgagttaaggactaa

SEQ ID NO: 7155 - DNA, 25 bp, SARS Virus
gtcgtttggtgaattaaggactaaa

SEQ ID NO: 7156 - DNA, 25 bp, SARS Virus
tcgtttggtgagataaggactaaac

SEQ ID NO: 7157 - DNA, 25 bp, SARS Virus
cgtttggtgagtaaaggactaaacg

SEQ ID NO: 7158 - DNA, 25 bp, SARS Virus
gtttggtgagttaaggactaaacgt

SEQ ID NO: 7159 - DNA, 25 bp, SARS Virus
tttggtgagttaaggactaaacgtt

SEQ ID NO: 7160 - DNA, 25 bp, SARS Virus
ttggtgagttaaagactaaacgttt

SEQ ID NO: 7161 - DNA, 25 bp, SARS Virus
tggtgagttaagaactaaacgtttc

SEQ ID NO: 7162 - DNA, 25 bp, SARS Virus
ggtgagttaaggactaaacgtttct

SEQ ID NO: 7163 - DNA, 25 bp, SARS Virus
gtgagttaaggaataaacgtttctc

SEQ ID NO: 7164 - DNA, 25 bp, SARS Virus
tgagttaaggacaaaacgtttctcg

SEQ ID NO: 7165 - DNA, 25 bp, SARS Virus
gagttaaggactaaacgtttctcgt

SEQ ID NO: 7166 - DNA, 25 bp, SARS Virus
agttaaggactaaacgtttctcgtc

SEQ ID NO: 7167 - DNA, 25 bp, SARS Virus
gttaaggactaaacgtttctcgtcg

SEQ ID NO: 7168 - DNA, 25 bp, SARS Virus
ttaaggactaaaagtttctcgtcga

SEQ ID NO: 7169 - DNA, 25 bp, SARS Virus
taaggactaaacatttctcgtcgac

SEQ ID NO: 7170 - DNA, 25 bp, SARS Virus
aaggactaaacgattctcgtcgaca

SEQ ID NO: 7171 - DNA, 25 bp, SARS Virus
aggactaaacgtatctcgtcgacag

SEQ ID NO: 7172 - DNA, 25 bp, SARS Virus
ggactaaacgttactcgtcgacagt

SEQ ID NO: 7173 - DNA, 25 bp, SARS Virus
gactaaacgtttatcgtcgacagtg

SEQ ID NO: 7174 - DNA, 25 bp, SARS Virus
actaaacgtttcacgtcgacagtgg

SEQ ID NO: 7175 - DNA, 25 bp, SARS Virus
ctaaacgtttctagtcgacagtggt

SEQ ID NO: 7176 - DNA, 25 bp, SARS Virus
taaacgtttctcatcgacagtggta

SEQ ID NO: 7177 - DNA, 25 bp, SARS Virus
aaacgtttctcgacgacagtggtat

SEQ ID NO: 7178 - DNA, 25 bp, SARS Virus
aacgtttctcgtagacagtggtatg

SEQ ID NO: 7179 - DNA, 25 bp, SARS Virus
acgtttctcgtcaacagtggtatga

SEQ ID NO: 7180 - DNA, 25 bp, SARS Virus
cgtttctcgtcgacagtggtatgaa

SEQ ID NO: 7181 - DNA, 25 bp, SARS Virus
gtttctcgtcgaaagtggtatgaac

SEQ ID NO: 7182 - DNA, 25 bp, SARS Virus
tttctcgtcgacagtggtatgaact

SEQ ID NO: 7183 - DNA, 25 bp, SARS Virus
ttctcgtcgacaatggtatgaacta

SEQ ID NO: 7184 - DNA, 25 bp, SARS Virus
tctcgtcgacagaggtatgaactac

SEQ ID NO: 7185 - DNA, 25 bp, SARS Virus
ctcgtcgacagtagtatgaactacc

SEQ ID NO: 7186 - DNA, 25 bp, SARS Virus
tcgtcgacagtgatatgaactacca

SEQ ID NO: 7187 - DNA, 25 bp, SARS Virus
cgtcgacagtggaatgaactaccat

SEQ ID NO: 7188 - DNA, 25 bp, SARS Virus
gtcgacagtggtatgaactaccata

SEQ ID NO: 7189 - DNA, 25 bp, SARS Virus
tcgacagtggtaagaactaccataa

SEQ ID NO: 7190 - DNA, 25 bp, SARS Virus
cgacagtggtataaactaccataaa

SEQ ID NO: 7191 - DNA, 25 bp, SARS Virus
gacagtggtatgaactaccataaag

SEQ ID NO: 7192 - DNA, 25 bp, SARS Virus
acagtggtatgaactaccataaaga

SEQ ID NO: 7193 - DNA, 25 bp, SARS Virus
cagtggtatgaaataccataaagac

SEQ ID NO: 7194 - DNA, 25 bp, SARS Virus
agtggtatgaacaaccataaagact

SEQ ID NO: 7195 - DNA, 25 bp, SARS Virus
gtggtatgaactaccataaagactt

SEQ ID NO: 7196 - DNA, 25 bp, SARS Virus
tggtatgaactaacataaagacttg

SEQ ID NO: 7197 - DNA, 25 bp, SARS Virus
ggtatgaactacaataaagacttgt

SEQ ID NO: 7198 - DNA, 25 bp, SARS Virus
gtatgaactaccataaagacttgtc

SEQ ID NO: 7199 - DNA, 25 bp, SARS Virus
tatgaactaccaaaaagacttgtca

SEQ ID NO: 7200 - DNA, 25 bp, SARS Virus
atgaactaccataaagacttgtcag

SEQ ID NO: 7201 - DNA, 25 bp, SARS Virus
tgaactaccataaagacttgtcagt

SEQ ID NO: 7202 - DNA, 25 bp, SARS Virus
gaactaccataaagacttgtcagta

SEQ ID NO: 7203 - DNA, 25 bp, SARS Virus
aactaccataaaaacttgtcagtaa

SEQ ID NO: 7204 - DNA, 25 bp, SARS Virus
actaccataaagacttgtcagtaat

SEQ ID NO: 7205 - DNA, 25 bp, SARS Virus
ctaccataaagaattgtcagtaatg

SEQ ID NO: 7206 - DNA, 25 bp, SARS Virus
taccataaagacatgtcagtaatgc

SEQ ID NO: 7207 - DNA, 25 bp, SARS Virus
accataaagactagtcagtaatgca

SEQ ID NO: 7208 - DNA, 25 bp, SARS Virus
ccataaagacttatcagtaatgcag

SEQ ID NO: 7209 - DNA, 25 bp, SARS Virus
cataaagacttgacagtaatgcaga

SEQ ID NO: 7210 - DNA, 25 bp, SARS Virus
ataaagacttgtaagtaatgcagaa

SEQ ID NO: 7211 - DNA, 25 bp, SARS Virus
taaagacttgtcagtaatgcagaac

SEQ ID NO: 7212 - DNA, 25 bp, SARS Virus
aaagacttgtcaataatgcagaaca

SEQ ID NO: 7213 - DNA, 25 bp, SARS Virus
aagacttgtcagaaatgcagaacag

SEQ ID NO: 7214 - DNA, 25 bp, SARS Virus
agacttgtcagtaatgcagaacagc

SEQ ID NO: 7215 - DNA, 25 bp, SARS Virus
gacttgtcagtaatgcagaacagct

SEQ ID NO: 7216 - DNA, 25 bp, SARS Virus
acttgtcagtaaagcagaacagctg

SEQ ID NO: 7217 - DNA, 25 bp, SARS Virus
cttgtcagtaatacagaacagctgc

SEQ ID NO: 7218 - DNA, 25 bp, SARS Virus
ttgtcagtaatgaagaacagctgcg

SEQ ID NO: 7219 - DNA, 25 bp, SARS Virus
tgtcagtaatgcagaacagctgcgg

SEQ ID NO: 7220 - DNA, 25 bp, SARS Virus
gtcagtaatgcaaaacagctgcggt

SEQ ID NO: 7221 - DNA, 25 bp, SARS Virus
tcagtaatgcagaacagctgcggta

SEQ ID NO: 7222 - DNA, 25 bp, SARS Virus
cagtaatgcagaacagctgcggtac

SEQ ID NO: 7223 - DNA, 25 bp, SARS Virus
agtaatgcagaaaagctgcggtacc

SEQ ID NO: 7224 - DNA, 25 bp, SARS Virus
gtaatgcagaacagctgcggtacca

SEQ ID NO: 7225 - DNA, 25 bp, SARS Virus
taatgcagaacaactgcggtaccaa

SEQ ID NO: 7226 - DNA, 25 bp, SARS Virus
aatgcagaacagatgcggtaccaaa

SEQ ID NO: 7227 - DNA, 25 bp, SARS Virus
atgcagaacagcagcggtaccaaat

SEQ ID NO: 7228 - DNA, 25 bp, SARS Virus
tgcagaacagctacggtaccaaata

SEQ ID NO: 7229 - DNA, 25 bp, SARS Virus
gcagaacagctgaggtaccaaatat

SEQ ID NO: 7230 - DNA, 25 bp, SARS Virus
cagaacagctgcagtaccaaatatg

SEQ ID NO: 7231 - DNA, 25 bp, SARS Virus
agaacagctgcgataccaaatatga

SEQ ID NO: 7232 - DNA, 25 bp, SARS Virus
gaacagctgcggaaccaaatatgaa

SEQ ID NO: 7233 - DNA, 25 bp, SARS Virus
aacagctgcggtaccaaatatgaag

SEQ ID NO: 7234 - DNA, 25 bp, SARS Virus
acagctgcggtaacaaatatgaagt

SEQ ID NO: 7235 - DNA, 25 bp, SARS Virus
cagctgcggtacaaaatatgaagtc

SEQ ID NO: 7236 - DNA, 25 bp, SARS Virus
agctgcggtaccaaatatgaagtct

SEQ ID NO: 7237 - DNA, 25 bp, SARS Virus
gctgcggtaccaaatatgaagtctg

SEQ ID NO: 7238 - DNA, 25 bp, SARS Virus
ctgcggtaccaaatatgaagtctgg

SEQ ID NO: 7239 - DNA, 25 bp, SARS Virus
tgcggtaccaaaaatgaagtctgga

SEQ ID NO: 7240 - DNA, 25 bp, SARS Virus
gcggtaccaaatatgaagtctggac

SEQ ID NO: 7241 - DNA, 25 bp, SARS Virus
cggtaccaaataagaagtctggacg

SEQ ID NO: 7242 - DNA, 25 bp, SARS Virus
ggtaccaaatataaagtctggacga

SEQ ID NO: 7243 - DNA, 25 bp, SARS Virus
gtaccaaatatgaagtctggacgag

SEQ ID NO: 7244 - DNA, 25 bp, SARS Virus
taccaaatatgaagtctggacgagt

SEQ ID NO: 7245 - DNA, 25 bp, SARS Virus
accaaatatgaaatctggacgagtg

SEQ ID NO: 7246 - DNA, 25 bp, SARS Virus
ccaaatatgaagactggacgagtgg

SEQ ID NO: 7247 - DNA, 25 bp, SARS Virus
caaatatgaagtatggacgagtggt

SEQ ID NO: 7248 - DNA, 25 bp, SARS Virus
aaatatgaagtcaggacgagtggtt

SEQ ID NO: 7249 - DNA, 25 bp, SARS Virus
aatatgaagtctagacgagtggttg

SEQ ID NO: 7250 - DNA, 25 bp, SARS Virus
atatgaagtctgaacgagtggttgt

SEQ ID NO: 7251 - DNA, 25 bp, SARS Virus
tatgaagtctggacgagtggttgtc

SEQ ID NO: 7252 - DNA, 25 bp, SARS Virus
atgaagtctggaagagtggttgtca

SEQ ID NO: 7253 - DNA, 25 bp, SARS Virus
tgaagtctggacaagtggttgtcac

SEQ ID NO: 7254 - DNA, 25 bp, SARS Virus
gaagtctggacgagtggttgtcaca

SEQ ID NO: 7255 - DNA, 25 bp, SARS Virus
aagtctggacgaatggttgtcacag

SEQ ID NO: 7256 - DNA, 25 bp, SARS Virus
agtctggacgagaggttgtcacagt

SEQ ID NO: 7257 - DNA, 25 bp, SARS Virus
gtctggacgagtagttgtcacagta

SEQ ID NO: 7258 - DNA, 25 bp, SARS Virus
tctggacgagtgattgtcacagtaa

SEQ ID NO: 7259 - DNA, 25 bp, SARS Virus
ctggacgagtggatgtcacagtaat

SEQ ID NO: 7260 - DNA, 25 bp, SARS Virus
tggacgagtggtagtcacagtaata

SEQ ID NO: 7261 - DNA, 25 bp, SARS Virus
ggacgagtggttatcacagtaataa

SEQ ID NO: 7262 - DNA, 25 bp, SARS Virus
gacgagtggttgacacagtaataat

SEQ ID NO: 7263 - DNA, 25 bp, SARS Virus
acgagtggttgtaacagtaataata

SEQ ID NO: 7264 - DNA, 25 bp, SARS Virus
cgagtggttgtcacagtaataatac

SEQ ID NO: 7265 - DNA, 25 bp, SARS Virus
gagtggttgtcaaagtaataatacc

SEQ ID NO: 7266 - DNA, 25 bp, SARS Virus
agtggttgtcacagtaataataccg

SEQ ID NO: 7267 - DNA, 25 bp, SARS Virus
gtggttgtcacaataataataccgt

SEQ ID NO: 7268 - DNA, 25 bp, SARS Virus
tggttgtcacagaaataataccgta

SEQ ID NO: 7269 - DNA, 25 bp, SARS Virus
ggttgtcacagtaataataccgtat

SEQ ID NO: 7270 - DNA, 25 bp, SARS Virus
gttgtcacagtaataataccgtata

SEQ ID NO: 7271 - DNA, 25 bp, SARS Virus
ttgtcacagtaaaaataccgtatac

SEQ ID NO: 7272 - DNA, 25 bp, SARS Virus
tgtcacagtaataataccgtataca

SEQ ID NO: 7273 - DNA, 25 bp, SARS Virus
gtcacagtaataataccgtatacat

SEQ ID NO: 7274 - DNA, 25 bp, SARS Virus
tcacagtaataaaaccgtatacatt

SEQ ID NO: 7275 - DNA, 25 bp, SARS Virus
cacagtaataataccgtatacattg

SEQ ID NO: 7276 - DNA, 25 bp, SARS Virus
acagtaataataacgtatacattga

SEQ ID NO: 7277 - DNA, 25 bp, SARS Virus
cagtaataatacagtatacattgac

SEQ ID NO: 7278 - DNA, 25 bp, SARS Virus
agtaataataccatatacattgacc

SEQ ID NO: 7279 - DNA, 25 bp, SARS Virus
gtaataataccgaatacattgacca

SEQ ID NO: 7280 - DNA, 25 bp, SARS Virus
taataataccgtatacattgaccac

SEQ ID NO: 7281 - DNA, 25 bp, SARS Virus
aataataccgtaaacattgaccacc

SEQ ID NO: 7282 - DNA, 25 bp, SARS Virus
ataataccgtatacattgaccacca

SEQ ID NO: 7283 - DNA, 25 bp, SARS Virus
taataccgtataaattgaccaccag

SEQ ID NO: 7284 - DNA, 25 bp, SARS Virus
aataccgtatacattgaccaccaga

SEQ ID NO: 7285 - DNA, 25 bp, SARS Virus
ataccgtatacaatgaccaccagaa

SEQ ID NO: 7286 - DNA, 25 bp, SARS Virus
taccgtatacatagaccaccagaac

SEQ ID NO: 7287 - DNA, 25 bp, SARS Virus
accgtatacattaaccaccagaaca

SEQ ID NO: 7288 - DNA, 25 bp, SARS Virus
ccgtatacattgaccaccagaacat

SEQ ID NO: 7289 - DNA, 25 bp, SARS Virus
cgtatacattgaacaccagaacatg

SEQ ID NO: 7290 - DNA, 25 bp, SARS Virus
gtatacattgacaaccagaacatgt

SEQ ID NO: 7291 - DNA, 25 bp, SARS Virus
tatacattgaccaccagaacatgtt

SEQ ID NO: 7292 - DNA, 25 bp, SARS Virus
atacattgaccaacagaacatgttg

SEQ ID NO: 7293 - DNA, 25 bp, SARS Virus
tacattgaccacaagaacatgttgt

SEQ ID NO: 7294 - DNA, 25 bp, SARS Virus
acattgaccaccagaacatgttgtc

SEQ ID NO: 7295 - DNA, 25 bp, SARS Virus
cattgaccaccaaaacatgttgtct

SEQ ID NO: 7296 - DNA, 25 bp, SARS Virus
attgaccaccagaacatgttgtctg

SEQ ID NO: 7297 - DNA, 25 bp, SARS Virus
ttgaccaccagaacatgttgtctga

SEQ ID NO: 7298 - DNA, 25 bp, SARS Virus
tgaccaccagaaaatgttgtctgaa

SEQ ID NO: 7299 - DNA, 25 bp, SARS Virus
gaccaccagaacatgttgtctgaag

SEQ ID NO: 7300 - DNA, 25 bp, SARS Virus
accaccagaacaagttgtctgaaga

SEQ ID NO: 7301 - DNA, 25 bp, SARS Virus
ccaccagaacatattgtctgaagag

SEQ ID NO: 7302 - DNA, 25 bp, SARS Virus
caccagaacatgatgtctgaagagt

SEQ ID NO: 7303 - DNA, 25 bp, SARS Virus
accagaacatgtagtctgaagagtc

SEQ ID NO: 7304 - DNA, 25 bp, SARS Virus
ccagaacatgttatctgaagagtca

SEQ ID NO: 7305 - DNA, 25 bp, SARS Virus
cagaacatgttgactgaagagtcac

SEQ ID NO: 7306 - DNA, 25 bp, SARS Virus
agaacatgttgtatgaagagtcacc

SEQ ID NO: 7307 - DNA, 25 bp, SARS Virus
gaacatgttgtcagaagagtcacca

SEQ ID NO: 7308 - DNA, 25 bp, SARS Virus
aacatgttgtctaaagagtcaccaa

SEQ ID NO: 7309 - DNA, 25 bp, SARS Virus
acatgttgtctgaagagtcaccaac

SEQ ID NO: 7310 - DNA, 25 bp, SARS Virus
catgttgtctgaagagtcaccaaca

SEQ ID NO: 7311 - DNA, 25 bp, SARS Virus
atgttgtctgaaaagtcaccaacag

SEQ ID NO: 7312 - DNA, 25 bp, SARS Virus
tgttgtctgaagagtcaccaacaga

SEQ ID NO: 7313 - DNA, 25 bp, SARS Virus
gttgtctgaagaatcaccaacagat

SEQ ID NO: 7314 - DNA, 25 bp, SARS Virus
ttgtctgaagagacaccaacagatt

SEQ ID NO: 7315 - DNA, 25 bp, SARS Virus
tgtctgaagagtaaccaacagatta

SEQ ID NO: 7316 - DNA, 25 bp, SARS Virus
gtctgaagagtcaccaacagattag

SEQ ID NO: 7317 - DNA, 25 bp, SARS Virus
tctgaagagtcaacaacagattaga

SEQ ID NO: 7318 - DNA, 25 bp, SARS Virus
ctgaagagtcacaaacagattagaa

SEQ ID NO: 7319 - DNA, 25 bp, SARS Virus
tgaagagtcaccaacagattagaaa

SEQ ID NO: 7320 - DNA, 25 bp, SARS Virus
gaagagtcaccaacagattagaaaa

SEQ ID NO: 7321 - DNA, 25 bp, SARS Virus
aagagtcaccaaaagattagaaaac

SEQ ID NO: 7322 - DNA, 25 bp, SARS Virus
agagtcaccaacagattagaaaacc

SEQ ID NO: 7323 - DNA, 25 bp, SARS Virus
gagtcaccaacaaattagaaaaccc

SEQ ID NO: 7324 - DNA, 25 bp, SARS Virus
agtcaccaacagattagaaaacccg

SEQ ID NO: 7325 - DNA, 25 bp, SARS Virus
gtcaccaacagaatagaaaacccgt

SEQ ID NO: 7326 - DNA, 25 bp, SARS Virus
tcaccaacagataagaaaacccgtg

SEQ ID NO: 7327 - DNA, 25 bp, SARS Virus
caccaacagattagaaaacccgtga

SEQ ID NO: 7328 - DNA, 25 bp, SARS Virus
accaacagattaaaaaacccgtgat

SEQ ID NO: 7329 - DNA, 25 bp, SARS Virus
ccaacagattagaaaacccgtgatg

SEQ ID NO: 7330 - DNA, 25 bp, SARS Virus
caacagattagaaaacccgtgatga

SEQ ID NO: 7331 - DNA, 25 bp, SARS Virus
aacagattagaaaacccgtgatgac

SEQ ID NO: 7332 - DNA, 25 bp, SARS Virus
acagattagaaaacccgtgatgaca

SEQ ID NO: 7333 - DNA, 25 bp, SARS Virus
cagattagaaaaaccgtgatgacaa

SEQ ID NO: 7334 - DNA, 25 bp, SARS Virus
agattagaaaacacgtgatgacaac

SEQ ID NO: 7335 - DNA, 25 bp, SARS Virus
gattagaaaaccagtgatgacaact

SEQ ID NO: 7336 - DNA, 25 bp, SARS Virus
attagaaaacccatgatgacaactt

SEQ ID NO: 7337 - DNA, 25 bp, SARS Virus
ttagaaaacccgagatgacaacttt

SEQ ID NO: 7338 - DNA, 25 bp, SARS Virus
tagaaaacccgtaatgacaactttt

SEQ ID NO: 7339 - DNA, 25 bp, SARS Virus
agaaaacccgtgatgacaacttttt

SEQ ID NO: 7340 - DNA, 25 bp, SARS Virus
gaaaacccgtgaagacaactttttg

SEQ ID NO: 7341 - DNA, 25 bp, SARS Virus
aaaacccgtgataacaactttttga

SEQ ID NO: 7342 - DNA, 25 bp, SARS Virus
aaacccgtgatgacaactttttgag

SEQ ID NO: 7343 - DNA, 25 bp, SARS Virus
aacccgtgatgaaaactttttgagt

SEQ ID NO: 7344 - DNA, 25 bp, SARS Virus
acccgtgatgacaactttttgagtc

SEQ ID NO: 7345 - DNA, 25 bp, SARS Virus
cccgtgatgacaactttttgagtcc

SEQ ID NO: 7346 - DNA, 25 bp, SARS Virus
ccgtgatgacaaatttttgagtccg

SEQ ID NO: 7347 - DNA, 25 bp, SARS Virus
cgtgatgacaacattttgagtccgg

SEQ ID NO: 7348 - DNA, 25 bp, SARS Virus
gtgatgacaactatttgagtccgga

SEQ ID NO: 7349 - DNA, 25 bp, SARS Virus
tgatgacaacttattgagtccggat

SEQ ID NO: 7350 - DNA, 25 bp, SARS Virus
gatgacaactttatgagtccggata

SEQ ID NO: 7351 - DNA, 25 bp, SARS Virus
atgacaacttttagagtccggatag

SEQ ID NO: 7352 - DNA, 25 bp, SARS Virus
tgacaactttttaagtccggataga

SEQ ID NO: 7353 - DNA, 25 bp, SARS Virus
gacaactttttgagtccggatagaa

SEQ ID NO: 7354 - DNA, 25 bp, SARS Virus
acaactttttgaatccggatagaaa

SEQ ID NO: 7355 - DNA, 25 bp, SARS Virus
caactttttgagaccggatagaaac

SEQ ID NO: 7356 - DNA, 25 bp, SARS Virus
aactttttgagtacggatagaaact

SEQ ID NO: 7357 - DNA, 25 bp, SARS Virus
actttttgagtcaggatagaaactt

SEQ ID NO: 7358 - DNA, 25 bp, SARS Virus
ctttttgagtccagatagaaactta

SEQ ID NO: 7359 - DNA, 25 bp, SARS Virus
tttttgagtccgaatagaaacttac

SEQ ID NO: 7360 - DNA, 25 bp, SARS Virus
ttttgagtccggatagaaacttacc

SEQ ID NO: 7361 - DNA, 25 bp, SARS Virus
tttgagtccggaaagaaacttacct

SEQ ID NO: 7362 - DNA, 25 bp, SARS Virus
ttgagtccggatagaaacttaccta

SEQ ID NO: 7363 - DNA, 25 bp, SARS Virus
tgagtccggataaaaacttacctaa

SEQ ID NO: 7364 - DNA, 25 bp, SARS Virus
gagtccggatagaaacttacctaac

SEQ ID NO: 7365 - DNA, 25 bp, SARS Virus
agtccggatagaaacttacctaact

SEQ ID NO: 7366 - DNA, 25 bp, SARS Virus
gtccggatagaaacttacctaactc

SEQ ID NO: 7367 - DNA, 25 bp, SARS Virus
tccggatagaaaattacctaactcc

SEQ ID NO: 7368 - DNA, 25 bp, SARS Virus
ccggatagaaacatacctaactccg

SEQ ID NO: 7369 - DNA, 25 bp, SARS Virus
cggatagaaactaacctaactccgc

SEQ ID NO: 7370 - DNA, 25 bp, SARS Virus
ggatagaaacttacctaactccgct

SEQ ID NO: 7371 - DNA, 25 bp, SARS Virus
gatagaaacttaactaactccgctt

SEQ ID NO: 7372 - DNA, 25 bp, SARS Virus
atagaaacttacataactccgcttt

SEQ ID NO: 7373 - DNA, 25 bp, SARS Virus
tagaaacttaccaaactccgctttg

SEQ ID NO: 7374 - DNA, 25 bp, SARS Virus
agaaacttacctaactccgctttga

SEQ ID NO: 7375 - DNA, 25 bp, SARS Virus
gaaacttacctaactccgctttgaa

SEQ ID NO: 7376 - DNA, 25 bp, SARS Virus
aaacttacctaaatccgctttgaat

SEQ ID NO: 7377 - DNA, 25 bp, SARS Virus
aacttacctaacaccgctttgaatc

SEQ ID NO: 7378 - DNA, 25 bp, SARS Virus
acttacctaactacgctttgaatca

SEQ ID NO: 7379 - DNA, 25 bp, SARS Virus
cttacctaactcagctttgaatcac

SEQ ID NO: 7380 - DNA, 25 bp, SARS Virus
ttacctaactccactttgaatcacg

SEQ ID NO: 7381 - DNA, 25 bp, SARS Virus
tacctaactccgatttgaatcacgt

SEQ ID NO: 7382 - DNA, 25 bp, SARS Virus
acctaactccgcattgaatcacgtc

SEQ ID NO: 7383 - DNA, 25 bp, SARS Virus
cctaactccgctatgaatcacgtcc

SEQ ID NO: 7384 - DNA, 25 bp, SARS Virus
ctaactccgcttagaatcacgtcct

SEQ ID NO: 7385 - DNA, 25 bp, SARS Virus
taactccgctttaaatcacgtcctc

SEQ ID NO: 7386 - DNA, 25 bp, SARS Virus
aactccgctttgaatcacgtcctca

SEQ ID NO: 7387 - DNA, 25 bp, SARS Virus
actccgctttgaatcacgtcctcaa

SEQ ID NO: 7388 - DNA, 25 bp, SARS Virus
ctccgctttgaaacacgtcctcaac

SEQ ID NO: 7389 - DNA, 25 bp, SARS Virus
tccgctttgaataacgtcctcaact

SEQ ID NO: 7390 - DNA, 25 bp, SARS Virus
ccgctttgaatcacgtcctcaactt

SEQ ID NO: 7391 - DNA, 25 bp, SARS Virus
cgctttgaatcaagtcctcaactta

SEQ ID NO: 7392 - DNA, 25 bp, SARS Virus
gctttgaatcacatcctcaacttaa

SEQ ID NO: 7393 - DNA, 25 bp, SARS Virus
ctttgaatcacgacctcaacttaaa

SEQ ID NO: 7394 - DNA, 25 bp, SARS Virus
tttgaatcacgtactcaacttaaag

SEQ ID NO: 7395 - DNA, 25 bp, SARS Virus
ttgaatcacgtcatcaacttaaaga

SEQ ID NO: 7396 - DNA, 25 bp, SARS Virus
tgaatcacgtccacaacttaaagag

SEQ ID NO: 7397 - DNA, 25 bp, SARS Virus
gaatcacgtcctaaacttaaagagt

SEQ ID NO: 7398 - DNA, 25 bp, SARS Virus
aatcacgtcctcaacttaaagagtt

SEQ ID NO: 7399 - DNA, 25 bp, SARS Virus
atcacgtcctcaacttaaagagttc

SEQ ID NO: 7400 - DNA, 25 bp, SARS Virus
tcacgtcctcaaattaaagagttcc

SEQ ID NO: 7401 - DNA, 25 bp, SARS Virus
cacgtcctcaacataaagagttcct

SEQ ID NO: 7402 - DNA, 25 bp, SARS Virus
acgtcctcaactaaaagagttccta

SEQ ID NO: 7403 - DNA, 25 bp, SARS Virus
cgtcctcaacttaaagagttcctac

SEQ ID NO: 7404 - DNA, 25 bp, SARS Virus
gtcctcaacttaaagagttcctacg

SEQ ID NO: 7405 - DNA, 25 bp, SARS Virus
tcctcaacttaaagagttcctacga

SEQ ID NO: 7406 - DNA, 25 bp, SARS Virus
cctcaacttaaaaagttcctacgaa

SEQ ID NO: 7407 - DNA, 25 bp, SARS Virus
ctcaacttaaagagttcctacgaac

SEQ ID NO: 7408 - DNA, 25 bp, SARS Virus
tcaacttaaagaattcctacgaacc

SEQ ID NO: 7409 - DNA, 25 bp, SARS Virus
caacttaaagagatcctacgaaccc

SEQ ID NO: 7410 - DNA, 25 bp, SARS Virus
aacttaaagagtacctacgaaccct

SEQ ID NO: 7411 - DNA, 25 bp, SARS Virus
acttaaagagttactacgaaccctc

SEQ ID NO: 7412 - DNA, 25 bp, SARS Virus
cttaaagagttcatacgaaccctct

SEQ ID NO: 7413 - DNA, 25 bp, SARS Virus
ttaaagagttccaacgaaccctcta

SEQ ID NO: 7414 - DNA, 25 bp, SARS Virus
taaagagttcctacgaaccctctaa

SEQ ID NO: 7415 - DNA, 25 bp, SARS Virus
aaagagttcctaagaaccctctaag

SEQ ID NO: 7416 - DNA, 25 bp, SARS Virus
aagagttcctacaaaccctctaaga

SEQ ID NO: 7417 - DNA, 25 bp, SARS Virus
agagttcctacgaaccctctaagag

SEQ ID NO: 7418 - DNA, 25 bp, SARS Virus
gagttcctacgaaccctctaagagt

SEQ ID NO: 7419 - DNA, 25 bp, SARS Virus
agttcctacgaaacctctaagagtt

SEQ ID NO: 7420 - DNA, 25 bp, SARS Virus
gttcctacgaacactctaagagttt

SEQ ID NO: 7421 - DNA, 25 bp, SARS Virus
ttcctacgaaccatctaagagttta

SEQ ID NO: 7422 - DNA, 25 bp, SARS Virus
tcctacgaacccactaagagtttaa

SEQ ID NO: 7423 - DNA, 25 bp, SARS Virus
cctacgaaccctataagagtttaaa

SEQ ID NO: 7424 - DNA, 25 bp, SARS Virus
ctacgaaccctcaaagagtttaaag

SEQ ID NO: 7425 - DNA, 25 bp, SARS Virus
tacgaaccctctaagagtttaaaga

SEQ ID NO: 7426 - DNA, 25 bp, SARS Virus
acgaaccctctaagagtttaaagag

SEQ ID NO: 7427 - DNA, 25 bp, SARS Virus
cgaaccctctaaaagtttaaagagt

SEQ ID NO: 7428 - DNA, 25 bp, SARS Virus
gaaccctctaagagtttaaagagta

SEQ ID NO: 7429 - DNA, 25 bp, SARS Virus
aaccctctaagaatttaaagagtaa

SEQ ID NO: 7430 - DNA, 25 bp, SARS Virus
accctctaagagattaaagagtaat

SEQ ID NO: 7431 - DNA, 25 bp, SARS Virus
ccctctaagagtataaagagtaatg

SEQ ID NO: 7432 - DNA, 25 bp, SARS Virus
cctctaagagttaaaagagtaatgt

SEQ ID NO: 7433 - DNA, 25 bp, SARS Virus
ctctaagagtttaaagagtaatgtc

SEQ ID NO: 7434 - DNA, 25 bp, SARS Virus
tctaagagtttaaagagtaatgtcc

SEQ ID NO: 7435 - DNA, 25 bp, SARS Virus
ctaagagtttaaagagtaatgtcca

SEQ ID NO: 7436 - DNA, 25 bp, SARS Virus
taagagtttaaaaagtaatgtccac

SEQ ID NO: 7437 - DNA, 25 bp, SARS Virus
aagagtttaaagagtaatgtccaca

SEQ ID NO: 7438 - DNA, 25 bp, SARS Virus
agagtttaaagaataatgtccacaa

SEQ ID NO: 7439 - DNA, 25 bp, SARS Virus
gagtttaaagagaaatgtccacaaa

SEQ ID NO: 7440 - DNA, 25 bp, SARS Virus
agtttaaagagtaatgtccacaaaa

SEQ ID NO: 7441 - DNA, 25 bp, SARS Virus
gtttaaagagtaatgtccacaaaaa

SEQ ID NO: 7442 - DNA, 25 bp, SARS Virus
tttaaagagtaaagtccacaaaaac

SEQ ID NO: 7443 - DNA, 25 bp, SARS Virus
ttaaagagtaatatccacaaaaact

SEQ ID NO: 7444 - DNA, 25 bp, SARS Virus
taaagagtaatgaccacaaaaactg

SEQ ID NO: 7445 - DNA, 25 bp, SARS Virus
aaagagtaatgtacacaaaaactgt

SEQ ID NO: 7446 - DNA, 25 bp, SARS Virus
aagagtaatgtcaacaaaaactgta

SEQ ID NO: 7447 - DNA, 25 bp, SARS Virus
agagtaatgtccacaaaaactgtag

SEQ ID NO: 7448 - DNA, 25 bp, SARS Virus
gagtaatgtccaaaaaaactgtagc

SEQ ID NO: 7449 - DNA, 25 bp, SARS Virus
gtgatatttctccgaactaatgttc

SEQ ID NO: 7450 - DNA, 25 bp, SARS Virus
tgatatttctcacaactaatgttca

SEQ ID NO: 7451 - DNA, 25 bp, SARS Virus
gatatttctcagcactaatgttcag

SEQ ID NO: 7452 - DNA, 25 bp, SARS Virus
atatttctcagacctaatgttcaga

SEQ ID NO: 7453 - DNA, 25 bp, SARS Virus
tatttctcagaactaatgttcagaa

SEQ ID NO: 7454 - DNA, 25 bp, SARS Virus
atttctcagaaccaatgttcagaaa

SEQ ID NO: 7455 - DNA, 25 bp, SARS Virus
tttctcagaactcatgttcagaaag

SEQ ID NO: 7456 - DNA, 25 bp, SARS Virus
ttctcagaactactgttcagaaagt

SEQ ID NO: 7457 - DNA, 25 bp, SARS Virus
tctcagaactaacgttcagaaagtt

SEQ ID NO: 7458 - DNA, 25 bp, SARS Virus
ctcagaactaatcttcagaaagttt

SEQ ID NO: 7459 - DNA, 25 bp, SARS Virus
tcagaactaatgctcagaaagtttt

SEQ ID NO: 7460 - DNA, 25 bp, SARS Virus
cagaactaatgtccagaaagttttg

SEQ ID NO: 7461 - DNA, 25 bp, SARS Virus
agaactaatgttcagaaagttttgg

SEQ ID NO: 7462 - DNA, 25 bp, SARS Virus
gaactaatgttccgaaagttttggt

SEQ ID NO: 7463 - DNA, 25 bp, SARS Virus
aactaatgttcacaaagttttggta

SEQ ID NO: 7464 - DNA, 25 bp, SARS Virus
actaatgttcagcaagttttggtaa

SEQ ID NO: 7465 - DNA, 25 bp, SARS Virus
ctaatgttcagacagttttggtaac

SEQ ID NO: 7466 - DNA, 25 bp, SARS Virus
taatgttcagaacgttttggtaaca

SEQ ID NO: 7467 - DNA, 25 bp, SARS Virus
aatgttcagaaacttttggtaacaa

SEQ ID NO: 7468 - DNA, 25 bp, SARS Virus
atgttcagaaagctttggtaacaac

SEQ ID NO: 7469 - DNA, 25 bp, SARS Virus
tgttcagaaagtcttggtaacaact

SEQ ID NO: 7470 - DNA, 25 bp, SARS Virus
gttcagaaagttctggtaacaactc

SEQ ID NO: 7471 - DNA, 25 bp, SARS Virus
ttcagaaagtttcggtaacaactca

SEQ ID NO: 7472 - DNA, 25 bp, SARS Virus
tcagaaagttttcgtaacaactcag

SEQ ID NO: 7473 - DNA, 25 bp, SARS Virus
cagaaagttttgctaacaactcagg

SEQ ID NO: 7474 - DNA, 25 bp, SARS Virus
agaaagttttggcaacaactcagga

SEQ ID NO: 7475 - DNA, 25 bp, SARS Virus
gaaagttttggtcacaactcaggac

SEQ ID NO: 7476 - DNA, 25 bp, SARS Virus
aaagttttggtaccaactcaggacg

SEQ ID NO: 7477 - DNA, 25 bp, SARS Virus
aagttttggtaacaactcaggacgc

SEQ ID NO: 7478 - DNA, 25 bp, SARS Virus
agttttggtaaccactcaggacgcc

SEQ ID NO: 7479 - DNA, 25 bp, SARS Virus
gttttggtaacacctcaggacgcca

SEQ ID NO: 7480 - DNA, 25 bp, SARS Virus
ttttggtaacaactcaggacgccat

SEQ ID NO: 7481 - DNA, 25 bp, SARS Virus
tttggtaacaacccaggacgccatt

SEQ ID NO: 7482 - DNA, 25 bp, SARS Virus
ttggtaacaactcaggacgccattg

SEQ ID NO: 7483 - DNA, 25 bp, SARS Virus
tggtaacaactccggacgccattga

SEQ ID NO: 7484 - DNA, 25 bp, SARS Virus
ggtaacaactcacgacgccattgat

SEQ ID NO: 7485 - DNA, 25 bp, SARS Virus
gtaacaactcagcacgccattgata

SEQ ID NO: 7486 - DNA, 25 bp, SARS Virus
taacaactcaggccgccattgatat

SEQ ID NO: 7487 - DNA, 25 bp, SARS Virus
aacaactcaggacgccattgatatt

SEQ ID NO: 7488 - DNA, 25 bp, SARS Virus
acaactcaggaccccattgatattt

SEQ ID NO: 7489 - DNA, 25 bp, SARS Virus
caactcaggacgccattgatatttc

SEQ ID NO: 7490 - DNA, 25 bp, SARS Virus
aactcaggacgccattgatatttca

SEQ ID NO: 7491 - DNA, 25 bp, SARS Virus
actcaggacgcccttgatatttcaa

SEQ ID NO: 7492 - DNA, 25 bp, SARS Virus
ctcaggacgccactgatatttcaat

SEQ ID NO: 7493 - DNA, 25 bp, SARS Virus
tcaggacgccatcgatatttcaatg

SEQ ID NO: 7494 - DNA, 25 bp, SARS Virus
caggacgccattcatatttcaatgg

SEQ ID NO: 7495 - DNA, 25 bp, SARS Virus
aggacgccattgctatttcaatggt

SEQ ID NO: 7496 - DNA, 25 bp, SARS Virus
ggacgccattgacatttcaatggtt

SEQ ID NO: 7497 - DNA, 25 bp, SARS Virus
gacgccattgatctttcaatggttc

SEQ ID NO: 7498 - DNA, 25 bp, SARS Virus
acgccattgatacttcaatggttcc

SEQ ID NO: 7499 - DNA, 25 bp, SARS Virus
cgccattgatatctcaatggttccc

SEQ ID NO: 7500 - DNA, 25 bp, SARS Virus
gccattgatattccaatggttccct

SEQ ID NO: 7501 - DNA, 25 bp, SARS Virus
ccattgatatttcaatggttccctt

SEQ ID NO: 7502 - DNA, 25 bp, SARS Virus
cattgatatttccatggttcccttt

SEQ ID NO: 7503 - DNA, 25 bp, SARS Virus
attgatatttcactggttccctttc

SEQ ID NO: 7504 - DNA, 25 bp, SARS Virus
ttgatatttcaacggttccctttcg

SEQ ID NO: 7505 - DNA, 25 bp, SARS Virus
tgatatttcaatcgttccctttcgg

SEQ ID NO: 7506 - DNA, 25 bp, SARS Virus
gatatttcaatgcttccctttcggg

SEQ ID NO: 7507 - DNA, 25 bp, SARS Virus
atatttcaatggctccctttcgggc

SEQ ID NO: 7508 - DNA, 25 bp, SARS Virus
tatttcaatggtcccctttcgggca

SEQ ID NO: 7509 - DNA, 25 bp, SARS Virus
atttcaatggttccctttcgggcat

SEQ ID NO: 7510 - DNA, 25 bp, SARS Virus
tttcaatggttccctttcgggcatt

SEQ ID NO: 7511 - DNA, 25 bp, SARS Virus
ttcaatggttccctttcgggcattt

SEQ ID NO: 7512 - DNA, 25 bp, SARS Virus
tcaatggttccccttcgggcatttt

SEQ ID NO: 7513 - DNA, 25 bp, SARS Virus
caatggttccctctcgggcattttc

SEQ ID NO: 7514 - DNA, 25 bp, SARS Virus
aatggttcccttccgggcattttcc

SEQ ID NO: 7515 - DNA, 25 bp, SARS Virus
atggttccctttcgggcattttcca

SEQ ID NO: 7516 - DNA, 25 bp, SARS Virus
tggttccctttccggcattttccac

SEQ ID NO: 7517 - DNA, 25 bp, SARS Virus
ggttccctttcgcgcattttccacg

SEQ ID NO: 7518 - DNA, 25 bp, SARS Virus
gttccctttcggccattttccacga

SEQ ID NO: 7519 - DNA, 25 bp, SARS Virus
ttccctttcgggcattttccacgaa

SEQ ID NO: 7520 - DNA, 25 bp, SARS Virus
tccctttcgggccttttccacgaac

SEQ ID NO: 7521 - DNA, 25 bp, SARS Virus
ccctttcgggcactttccacgaacc

SEQ ID NO: 7522 - DNA, 25 bp, SARS Virus
cctttcgggcatcttccacgaacct

SEQ ID NO: 7523 - DNA, 25 bp, SARS Virus
ctttcgggcattctccacgaacctt

SEQ ID NO: 7524 - DNA, 25 bp, SARS Virus
tttcgggcatttcccacgaaccttg

SEQ ID NO: 7525 - DNA, 25 bp, SARS Virus
ttcgggcattttccacgaaccttgt

SEQ ID NO: 7526 - DNA, 25 bp, SARS Virus
tcgggcattttccacgaaccttgta

SEQ ID NO: 7527 - DNA, 25 bp, SARS Virus
cgggcattttccccgaaccttgtaa

SEQ ID NO: 7528 - DNA, 25 bp, SARS Virus
gggcattttccacgaaccttgtaac

SEQ ID NO: 7529 - DNA, 25 bp, SARS Virus
ggcattttccaccaaccttgtaacc

SEQ ID NO: 7530 - DNA, 25 bp, SARS Virus
gcattttccacgcaccttgtaacct

SEQ ID NO: 7531 - DNA, 25 bp, SARS Virus
cattttccacgacccttgtaacctg

SEQ ID NO: 7532 - DNA, 25 bp, SARS Virus
attttccacgaaccttgtaacctgt

SEQ ID NO: 7533 - DNA, 25 bp, SARS Virus
ttttccacgaaccttgtaacctgtt

SEQ ID NO: 7534 - DNA, 25 bp, SARS Virus
tttccacgaaccctgtaacctgttg

SEQ ID NO: 7535 - DNA, 25 bp, SARS Virus
ttccacgaacctcgtaacctgttgt

SEQ ID NO: 7536 - DNA, 25 bp, SARS Virus
tccacgaaccttctaacctgttgtc

SEQ ID NO: 7537 - DNA, 25 bp, SARS Virus
ccacgaaccttgcaacctgttgtct

SEQ ID NO: 7538 - DNA, 25 bp, SARS Virus
cacgaaccttgtcacctgttgtctc

SEQ ID NO: 7539 - DNA, 25 bp, SARS Virus
acgaaccttgtaccctgttgtctct

SEQ ID NO: 7540 - DNA, 25 bp, SARS Virus
cgaaccttgtaacctgttgtctcta

SEQ ID NO: 7541 - DNA, 25 bp, SARS Virus
gaaccttgtaacctgttgtctctag

SEQ ID NO: 7542 - DNA, 25 bp, SARS Virus
aaccttgtaacccgttgtctctagt

SEQ ID NO: 7543 - DNA, 25 bp, SARS Virus
accttgtaacctcttgtctctagtc

SEQ ID NO: 7544 - DNA, 25 bp, SARS Virus
ccttgtaacctgctgtctctagtca

SEQ ID NO: 7545 - DNA, 25 bp, SARS Virus
cttgtaacctgtcgtctctagtcaa

SEQ ID NO: 7546 - DNA, 25 bp, SARS Virus
ttgtaacctgttctctctagtcaaa

SEQ ID NO: 7547 - DNA, 25 bp, SARS Virus
tgtaacctgttgcctctagtcaaaa

SEQ ID NO: 7548 - DNA, 25 bp, SARS Virus
gtaacctgttgtctctagtcaaaat

SEQ ID NO: 7549 - DNA, 25 bp, SARS Virus
taacctgttgtccctagtcaaaatt

SEQ ID NO: 7550 - DNA, 25 bp, SARS Virus
aacctgttgtctctagtcaaaattg

SEQ ID NO: 7551 - DNA, 25 bp, SARS Virus
acctgttgtctccagtcaaaattgt

SEQ ID NO: 7552 - DNA, 25 bp, SARS Virus
cctgttgtctctcgtcaaaattgtg

SEQ ID NO: 7553 - DNA, 25 bp, SARS Virus
ctgttgtctctactcaaaattgtgg

SEQ ID NO: 7554 - DNA, 25 bp, SARS Virus
tgttgtctctagccaaaattgtggt

SEQ ID NO: 7555 - DNA, 25 bp, SARS Virus
gttgtctctagtcaaaattgtggtg

SEQ ID NO: 7556 - DNA, 25 bp, SARS Virus
ttgtctctagtccaaattgtggtga

SEQ ID NO: 7557 - DNA, 25 bp, SARS Virus
tgtctctagtcacaattgtggtgac

SEQ ID NO: 7558 - DNA, 25 bp, SARS Virus
gtctctagtcaacattgtggtgaca

SEQ ID NO: 7559 - DNA, 25 bp, SARS Virus
tctctagtcaaacttgtggtgacac

SEQ ID NO: 7560 - DNA, 25 bp, SARS Virus
ctctagtcaaaactgtggtgacaca

SEQ ID NO: 7561 - DNA, 25 bp, SARS Virus
tctagtcaaaatcgtggtgacacac

SEQ ID NO: 7562 - DNA, 25 bp, SARS Virus
ctagtcaaaattctggtgacacacc

SEQ ID NO: 7563 - DNA, 25 bp, SARS Virus
tagtcaaaattgcggtgacacacca

SEQ ID NO: 7564 - DNA, 25 bp, SARS Virus
agtcaaaattgtcgtgacacaccaa

SEQ ID NO: 7565 - DNA, 25 bp, SARS Virus
gtcaaaattgtgctgacacaccaaa

SEQ ID NO: 7566 - DNA, 25 bp, SARS Virus
tcaaaattgtggcgacacaccaaaa

SEQ ID NO: 7567 - DNA, 25 bp, SARS Virus
caaaattgtggtcacacaccaaaag

SEQ ID NO: 7568 - DNA, 25 bp, SARS Virus
aaaattgtggtgccacaccaaaagg

SEQ ID NO: 7569 - DNA, 25 bp, SARS Virus
aaattgtggtgacacaccaaaaggg

SEQ ID NO: 7570 - DNA, 25 bp, SARS Virus
aattgtggtgacccaccaaaaggga

SEQ ID NO: 7571 - DNA, 25 bp, SARS Virus
attgtggtgacacaccaaaagggag

SEQ ID NO: 7572 - DNA, 25 bp, SARS Virus
ttgtggtgacaccccaaaagggagt

SEQ ID NO: 7573 - DNA, 25 bp, SARS Virus
tgtggtgacacaccaaaagggagtg

SEQ ID NO: 7574 - DNA, 25 bp, SARS Virus
gtggtgacacaccaaaagggagtgt

SEQ ID NO: 7575 - DNA, 25 bp, SARS Virus
tggtgacacacccaaagggagtgtc

SEQ ID NO: 7576 - DNA, 25 bp, SARS Virus
ggtgacacaccacaagggagtgtcc

SEQ ID NO: 7577 - DNA, 25 bp, SARS Virus
gtgacacaccaacagggagtgtccg

SEQ ID NO: 7578 - DNA, 25 bp, SARS Virus
tgacacaccaaacgggagtgtccga

SEQ ID NO: 7579 - DNA, 25 bp, SARS Virus
gacacaccaaaacggagtgtccgac

SEQ ID NO: 7580 - DNA, 25 bp, SARS Virus
acacaccaaaagcgagtgtccgacg

SEQ ID NO: 7581 - DNA, 25 bp, SARS Virus
cacaccaaaaggcagtgtccgacga

SEQ ID NO: 7582 - DNA, 25 bp, SARS Virus
acaccaaaagggcgtgtccgacgac

SEQ ID NO: 7583 - DNA, 25 bp, SARS Virus
caccaaaagggactgtccgacgacc

SEQ ID NO: 7584 - DNA, 25 bp, SARS Virus
accaaaagggagcgtccgacgacca

SEQ ID NO: 7585 - DNA, 25 bp, SARS Virus
ccaaaagggagtctccgacgaccac

SEQ ID NO: 7586 - DNA, 25 bp, SARS Virus
caaaagggagtgcccgacgaccaca

SEQ ID NO: 7587 - DNA, 25 bp, SARS Virus
aaaagggagtgtccgacgaccacaa

SEQ ID NO: 7588 - DNA, 25 bp, SARS Virus
aaagggagtgtccgacgaccacaat

SEQ ID NO: 7589 - DNA, 25 bp, SARS Virus
aagggagtgtcccacgaccacaata

SEQ ID NO: 7590 - DNA, 25 bp, SARS Virus
agggagtgtccgccgaccacaatag

SEQ ID NO: 7591 - DNA, 25 bp, SARS Virus
gggagtgtccgacgaccacaatagt

SEQ ID NO: 7592 - DNA, 25 bp, SARS Virus
ggagtgtccgaccaccacaatagtc

SEQ ID NO: 7593 - DNA, 25 bp, SARS Virus
gagtgtccgacgcccacaatagtct

SEQ ID NO: 7594 - DNA, 25 bp, SARS Virus
agtgtccgacgaccacaatagtcta

SEQ ID NO: 7595 - DNA, 25 bp, SARS Virus
gtgtccgacgaccacaatagtctag

SEQ ID NO: 7596 - DNA, 25 bp, SARS Virus
tgtccgacgaccccaatagtctagt

SEQ ID NO: 7597 - DNA, 25 bp, SARS Virus
gtccgacgaccacaatagtctagtt

SEQ ID NO: 7598 - DNA, 25 bp, SARS Virus
tccgacgaccaccatagtctagtta

SEQ ID NO: 7599 - DNA, 25 bp, SARS Virus
ccgacgaccacactagtctagttaa

SEQ ID NO: 7600 - DNA, 25 bp, SARS Virus
cgacgaccacaacagtctagttaaa

SEQ ID NO: 7601 - DNA, 25 bp, SARS Virus
gacgaccacaatcgtctagttaaaa

SEQ ID NO: 7602 - DNA, 25 bp, SARS Virus
acgaccacaatactctagttaaaaa

SEQ ID NO: 7603 - DNA, 25 bp, SARS Virus
cgaccacaatagcctagttaaaaac

SEQ ID NO: 7604 - DNA, 25 bp, SARS Virus
gaccacaatagtctagttaaaaacg

SEQ ID NO: 7605 - DNA, 25 bp, SARS Virus
accacaatagtccagttaaaaacgc

SEQ ID NO: 7606 - DNA, 25 bp, SARS Virus
ccacaatagtctcgttaaaaacgcg

SEQ ID NO: 7607 - DNA, 25 bp, SARS Virus
cacaatagtctacttaaaaacgcgc

SEQ ID NO: 7608 - DNA, 25 bp, SARS Virus
acaatagtctagctaaaaacgcgcg

SEQ ID NO: 7609 - DNA, 25 bp, SARS Virus
caatagtctagtcaaaaacgcgcgt

SEQ ID NO: 7610 - DNA, 25 bp, SARS Virus
aatagtctagttcaaaacgcgcgtg

SEQ ID NO: 7611 - DNA, 25 bp, SARS Virus
atagtctagttacaaacgcgcgtgt

SEQ ID NO: 7612 - DNA, 25 bp, SARS Virus
tagtctagttaacaacgcgcgtgtg

SEQ ID NO: 7613 - DNA, 25 bp, SARS Virus
agtctagttaaacacgcgcgtgtga

SEQ ID NO: 7614 - DNA, 25 bp, SARS Virus
gtctagttaaaaccgcgcgtgtgaa

SEQ ID NO: 7615 - DNA, 25 bp, SARS Virus
tctagttaaaaacgcgcgtgtgaac

SEQ ID NO: 7616 - DNA, 25 bp, SARS Virus
ctagttaaaaacccgcgtgtgaact

SEQ ID NO: 7617 - DNA, 25 bp, SARS Virus
tagttaaaaacgcgcgtgtgaacta

SEQ ID NO: 7618 - DNA, 25 bp, SARS Virus
agttaaaaacgcccgtgtgaactac

SEQ ID NO: 7619 - DNA, 25 bp, SARS Virus
gttaaaaacgcgcgtgtgaactacg

SEQ ID NO: 7620 - DNA, 25 bp, SARS Virus
ttaaaaacgcgcctgtgaactacgt

SEQ ID NO: 7621 - DNA, 25 bp, SARS Virus
taaaaacgcgcgcgtgaactacgtc

SEQ ID NO: 7622 - DNA, 25 bp, SARS Virus
aaaaacgcgcgtctgaactacgtcg

SEQ ID NO: 7623 - DNA, 25 bp, SARS Virus
aaaacgcgcgtgcgaactacgtcgt

SEQ ID NO: 7624 - DNA, 25 bp, SARS Virus
aaacgcgcgtgtcaactacgtcgtt

SEQ ID NO: 7625 - DNA, 25 bp, SARS Virus
aacgcgcgtgtgcactacgtcgttt

SEQ ID NO: 7626 - DNA, 25 bp, SARS Virus
acgcgcgtgtgacctacgtcgtttg

SEQ ID NO: 7627 - DNA, 25 bp, SARS Virus
cgcgcgtgtgaactacgtcgtttgg

SEQ ID NO: 7628 - DNA, 25 bp, SARS Virus
gcgcgtgtgaaccacgtcgtttggt

SEQ ID NO: 7629 - DNA, 25 bp, SARS Virus
cgcgtgtgaactccgtcgtttggtg

SEQ ID NO: 7630 - DNA, 25 bp, SARS Virus
gcgtgtgaactacgtcgtttggtga

SEQ ID NO: 7631 - DNA, 25 bp, SARS Virus
cgtgtgaactacctcgtttggtgag

SEQ ID NO: 7632 - DNA, 25 bp, SARS Virus
gtgtgaactacgccgtttggtgagt

SEQ ID NO: 7633 - DNA, 25 bp, SARS Virus
tgtgaactacgtcgtttggtgagtt

SEQ ID NO: 7634 - DNA, 25 bp, SARS Virus
gtgaactacgtcctttggtgagtta

SEQ ID NO: 7635 - DNA, 25 bp, SARS Virus
tgaactacgtcgcttggtgagttaa

SEQ ID NO: 7636 - DNA, 25 bp, SARS Virus
gaactacgtcgtctggtgagttaag

SEQ ID NO: 7637 - DNA, 25 bp, SARS Virus
aactacgtcgttcggtgagttaagg

SEQ ID NO: 7638 - DNA, 25 bp, SARS Virus
actacgtcgtttcgtgagttaagga

SEQ ID NO: 7639 - DNA, 25 bp, SARS Virus
ctacgtcgtttgctgagttaaggac

SEQ ID NO: 7640 - DNA, 25 bp, SARS Virus
tacgtcgtttggcgagttaaggact

SEQ ID NO: 7641 - DNA, 25 bp, SARS Virus
acgtcgtttggtcagttaaggacta

SEQ ID NO: 7642 - DNA, 25 bp, SARS Virus
cgtcgtttggtgcgttaaggactaa

SEQ ID NO: 7643 - DNA, 25 bp, SARS Virus
gtcgtttggtgacttaaggactaaa

SEQ ID NO: 7644 - DNA, 25 bp, SARS Virus
tcgtttggtgagctaaggactaaac

SEQ ID NO: 7645 - DNA, 25 bp, SARS Virus
cgtttggtgagtcaaggactaaacg

SEQ ID NO: 7646 - DNA, 25 bp, SARS Virus
gtttggtgagttcaggactaaacgt

SEQ ID NO: 7647 - DNA, 25 bp, SARS Virus
tttggtgagttacggactaaacgtt

SEQ ID NO: 7648 - DNA, 25 bp, SARS Virus
ttggtgagttaacgactaaacgttt

SEQ ID NO: 7649 - DNA, 25 bp, SARS Virus
tggtgagttaagcactaaacgtttc

SEQ ID NO: 7650 - DNA, 25 bp, SARS Virus
ggtgagttaaggcctaaacgtttct

SEQ ID NO: 7651 - DNA, 25 bp, SARS Virus
gtgagttaaggactaaacgtttctc

SEQ ID NO: 7652 - DNA, 25 bp, SARS Virus
tgagttaaggaccaaacgtttctcg

SEQ ID NO: 7653 - DNA, 25 bp, SARS Virus
gagttaaggactcaacgtttctcgt

SEQ ID NO: 7654 - DNA, 25 bp, SARS Virus
agttaaggactacacgtttctcgtc

SEQ ID NO: 7655 - DNA, 25 bp, SARS Virus
gttaaggactaaccgtttctcgtcg

SEQ ID NO: 7656 - DNA, 25 bp, SARS Virus
ttaaggactaaacgtttctcgtcga

SEQ ID NO: 7657 - DNA, 25 bp, SARS Virus
taaggactaaacctttctcgtcgac

SEQ ID NO: 7658 - DNA, 25 bp, SARS Virus
aaggactaaacgcttctcgtcgaca

SEQ ID NO: 7659 - DNA, 25 bp, SARS Virus
aggactaaacgtctctcgtcgacag

SEQ ID NO: 7660 - DNA, 25 bp, SARS Virus
ggactaaacgttcctcgtcgacagt

SEQ ID NO: 7661 - DNA, 25 bp, SARS Virus
gactaaacgtttctcgtcgacagtg

SEQ ID NO: 7662 - DNA, 25 bp, SARS Virus
actaaacgtttcccgtcgacagtgg

SEQ ID NO: 7663 - DNA, 25 bp, SARS Virus
ctaaacgtttctcgtcgacagtggt

SEQ ID NO: 7664 - DNA, 25 bp, SARS Virus
taaacgtttctcctcgacagtggta

SEQ ID NO: 7665 - DNA, 25 bp, SARS Virus
aaacgtttctcgccgacagtggtat

SEQ ID NO: 7666 - DNA, 25 bp, SARS Virus
aacgtttctcgtcgacagtggtatg

SEQ ID NO: 7667 - DNA, 25 bp, SARS Virus
acgtttctcgtccacagtggtatga

SEQ ID NO: 7668 - DNA, 25 bp, SARS Virus
cgtttctcgtcgccagtggtatgaa

SEQ ID NO: 7669 - DNA, 25 bp, SARS Virus
gtttctcgtcgacagtggtatgaac

SEQ ID NO: 7670 - DNA, 25 bp, SARS Virus
tttctcgtcgaccgtggtatgaact

SEQ ID NO: 7671 - DNA, 25 bp, SARS Virus
ttctcgtcgacactggtatgaacta

SEQ ID NO: 7672 - DNA, 25 bp, SARS Virus
tctcgtcgacagcggtatgaactac

SEQ ID NO: 7673 - DNA, 25 bp, SARS Virus
ctcgtcgacagtcgtatgaactacc

SEQ ID NO: 7674 - DNA, 25 bp, SARS Virus
tcgtcgacagtgctatgaactacca

SEQ ID NO: 7675 - DNA, 25 bp, SARS Virus
cgtcgacagtggcatgaactaccat

SEQ ID NO: 7676 - DNA, 25 bp, SARS Virus
gtcgacagtggtctgaactaccata

SEQ ID NO: 7677 - DNA, 25 bp, SARS Virus
tcgacagtggtacgaactaccataa

SEQ ID NO: 7678 - DNA, 25 bp, SARS Virus
cgacagtggtatcaactaccataaa

SEQ ID NO: 7679 - DNA, 25 bp, SARS Virus
gacagtggtatgcactaccataaag

SEQ ID NO: 7680 - DNA, 25 bp, SARS Virus
acagtggtatgacctaccataaaga

SEQ ID NO: 7681 - DNA, 25 bp, SARS Virus
cagtggtatgaactaccataaagac

SEQ ID NO: 7682 - DNA, 25 bp, SARS Virus
agtggtatgaaccaccataaagact

SEQ ID NO: 7683 - DNA, 25 bp, SARS Virus
gtggtatgaactcccataaagactt

SEQ ID NO: 7684 - DNA, 25 bp, SARS Virus
tggtatgaactaccataaagacttg

SEQ ID NO: 7685 - DNA, 25 bp, SARS Virus
ggtatgaactaccataaagacttgt

SEQ ID NO: 7686 - DNA, 25 bp, SARS Virus
gtatgaactaccctaaagacttgtc

SEQ ID NO: 7687 - DNA, 25 bp, SARS Virus
tatgaactaccacaaagacttgtca

SEQ ID NO: 7688 - DNA, 25 bp, SARS Virus
atgaactaccatcaagacttgtcag

SEQ ID NO: 7689 - DNA, 25 bp, SARS Virus
tgaactaccatacagacttgtcagt

SEQ ID NO: 7690 - DNA, 25 bp, SARS Virus
gaactaccataacgacttgtcagta

SEQ ID NO: 7691 - DNA, 25 bp, SARS Virus
aactaccataaacacttgtcagtaa

SEQ ID NO: 7692 - DNA, 25 bp, SARS Virus
actaccataaagccttgtcagtaat

SEQ ID NO: 7693 - DNA, 25 bp, SARS Virus
ctaccataaagacttgtcagtaatg

SEQ ID NO: 7694 - DNA, 25 bp, SARS Virus
taccataaagacctgtcagtaatgc

SEQ ID NO: 7695 - DNA, 25 bp, SARS Virus
accataaagactcgtcagtaatgca

SEQ ID NO: 7696 - DNA, 25 bp, SARS Virus
ccataaagacttctcagtaatgcag

SEQ ID NO: 7697 - DNA, 25 bp, SARS Virus
cataaagacttgccagtaatgcaga

SEQ ID NO: 7698 - DNA, 25 bp, SARS Virus
ataaagacttgtcagtaatgcagaa

SEQ ID NO: 7699 - DNA, 25 bp, SARS Virus
taaagacttgtccgtaatgcagaac

SEQ ID NO: 7700 - DNA, 25 bp, SARS Virus
aaagacttgtcactaatgcagaaca

SEQ ID NO: 7701 - DNA, 25 bp, SARS Virus
aagacttgtcagcaatgcagaacag

SEQ ID NO: 7702 - DNA, 25 bp, SARS Virus
agacttgtcagtcatgcagaacagc

SEQ ID NO: 7703 - DNA, 25 bp, SARS Virus
gacttgtcagtactgcagaacagct

SEQ ID NO: 7704 - DNA, 25 bp, SARS Virus
acttgtcagtaacgcagaacagctg

SEQ ID NO: 7705 - DNA, 25 bp, SARS Virus
cttgtcagtaatccagaacagctgc

SEQ ID NO: 7706 - DNA, 25 bp, SARS Virus
ttgtcagtaatgcagaacagctgcg

SEQ ID NO: 7707 - DNA, 25 bp, SARS Virus
tgtcagtaatgccgaacagctgcgg

SEQ ID NO: 7708 - DNA, 25 bp, SARS Virus
gtcagtaatgcacaacagctgcggt

SEQ ID NO: 7709 - DNA, 25 bp, SARS Virus
tcagtaatgcagcacagctgcggta

SEQ ID NO: 7710 - DNA, 25 bp, SARS Virus
cagtaatgcagaccagctgcggtac

SEQ ID NO: 7711 - DNA, 25 bp, SARS Virus
agtaatgcagaacagctgcggtacc

SEQ ID NO: 7712 - DNA, 25 bp, SARS Virus
gtaatgcagaaccgctgcggtacca

SEQ ID NO: 7713 - DNA, 25 bp, SARS Virus
taatgcagaacacctgcggtaccaa

SEQ ID NO: 7714 - DNA, 25 bp, SARS Virus
aatgcagaacagctgcggtaccaaa

SEQ ID NO: 7715 - DNA, 25 bp, SARS Virus
atgcagaacagccgcggtaccaaat

SEQ ID NO: 7716 - DNA, 25 bp, SARS Virus
tgcagaacagctccggtaccaaata

SEQ ID NO: 7717 - DNA, 25 bp, SARS Virus
gcagaacagctgcggtaccaaatat

SEQ ID NO: 7718 - DNA, 25 bp, SARS Virus
cagaacagctgccgtaccaaatatg

SEQ ID NO: 7719 - DNA, 25 bp, SARS Virus
agaacagctgcgctaccaaatatga

SEQ ID NO: 7720 - DNA, 25 bp, SARS Virus
gaacagctgcggcaccaaatatgaa

SEQ ID NO: 7721 - DNA, 25 bp, SARS Virus
aacagctgcggtcccaaatatgaag

SEQ ID NO: 7722 - DNA, 25 bp, SARS Virus
acagctgcggtaccaaatatgaagt

SEQ ID NO: 7723 - DNA, 25 bp, SARS Virus
cagctgcggtaccaaatatgaagtc

SEQ ID NO: 7724 - DNA, 25 bp, SARS Virus
agctgcggtacccaatatgaagtct

SEQ ID NO: 7725 - DNA, 25 bp, SARS Virus
gctgcggtaccacatatgaagtctg

SEQ ID NO: 7726 - DNA, 25 bp, SARS Virus
ctgcggtaccaactatgaagtctgg

SEQ ID NO: 7727 - DNA, 25 bp, SARS Virus
tgcggtaccaaacatgaagtctgga

SEQ ID NO: 7728 - DNA, 25 bp, SARS Virus
gcggtaccaaatctgaagtctggac

SEQ ID NO: 7729 - DNA, 25 bp, SARS Virus
cggtaccaaatacgaagtctggacg

SEQ ID NO: 7730 - DNA, 25 bp, SARS Virus
ggtaccaaatatcaagtctggacga

SEQ ID NO: 7731 - DNA, 25 bp, SARS Virus
gtaccaaatatgcagtctggacgag

SEQ ID NO: 7732 - DNA, 25 bp, SARS Virus
taccaaatatgacgtctggacgagt

SEQ ID NO: 7733 - DNA, 25 bp, SARS Virus
accaaatatgaactctggacgagtg

SEQ ID NO: 7734 - DNA, 25 bp, SARS Virus
ccaaatatgaagcctggacgagtgg

SEQ ID NO: 7735 - DNA, 25 bp, SARS Virus
caaatatgaagtctggacgagtggt

SEQ ID NO: 7736 - DNA, 25 bp, SARS Virus
aaatatgaagtccggacgagtggtt

SEQ ID NO: 7737 - DNA, 25 bp, SARS Virus
aatatgaagtctcgacgagtggttg

SEQ ID NO: 7738 - DNA, 25 bp, SARS Virus
atatgaagtctgcacgagtggttgt

SEQ ID NO: 7739 - DNA, 25 bp, SARS Virus
tatgaagtctggccgagtggttgtc

SEQ ID NO: 7740 - DNA, 25 bp, SARS Virus
atgaagtctggacgagtggttgtca

SEQ ID NO: 7741 - DNA, 25 bp, SARS Virus
tgaagtctggaccagtggttgtcac

SEQ ID NO: 7742 - DNA, 25 bp, SARS Virus
gaagtctggacgcgtggttgtcaca

SEQ ID NO: 7743 - DNA, 25 bp, SARS Virus
aagtctggacgactggttgtcacag

SEQ ID NO: 7744 - DNA, 25 bp, SARS Virus
agtctggacgagcggttgtcacagt

SEQ ID NO: 7745 - DNA, 25 bp, SARS Virus
gtctggacgagtcgttgtcacagta

SEQ ID NO: 7746 - DNA, 25 bp, SARS Virus
tctggacgagtgcttgtcacagtaa

SEQ ID NO: 7747 - DNA, 25 bp, SARS Virus
ctggacgagtggctgtcacagtaat

SEQ ID NO: 7748 - DNA, 25 bp, SARS Virus
tggacgagtggtcgtcacagtaata

SEQ ID NO: 7749 - DNA, 25 bp, SARS Virus
ggacgagtggttctcacagtaataa

SEQ ID NO: 7750 - DNA, 25 bp, SARS Virus
gacgagtggttgccacagtaataat

SEQ ID NO: 7751 - DNA, 25 bp, SARS Virus
acgagtggttgtcacagtaataata

SEQ ID NO: 7752 - DNA, 25 bp, SARS Virus
cgagtggttgtcccagtaataatac

SEQ ID NO: 7753 - DNA, 25 bp, SARS Virus
gagtggttgtcacagtaataatacc

SEQ ID NO: 7754 - DNA, 25 bp, SARS Virus
agtggttgtcaccgtaataataccg

SEQ ID NO: 7755 - DNA, 25 bp, SARS Virus
gtggttgtcacactaataataccgt

SEQ ID NO: 7756 - DNA, 25 bp, SARS Virus
tggttgtcacagcaataataccgta

SEQ ID NO: 7757 - DNA, 25 bp, SARS Virus
ggttgtcacagtcataataccgtat

SEQ ID NO: 7758 - DNA, 25 bp, SARS Virus
gttgtcacagtactaataccgtata

SEQ ID NO: 7759 - DNA, 25 bp, SARS Virus
ttgtcacagtaacaataccgtatac

SEQ ID NO: 7760 - DNA, 25 bp, SARS Virus
tgtcacagtaatcataccgtataca

SEQ ID NO: 7761 - DNA, 25 bp, SARS Virus
gtcacagtaatactaccgtatacat

SEQ ID NO: 7762 - DNA, 25 bp, SARS Virus
tcacagtaataacaccgtatacatt

SEQ ID NO: 7763 - DNA, 25 bp, SARS Virus
cacagtaataatcccgtatacattg

SEQ ID NO: 7764 - DNA, 25 bp, SARS Virus
acagtaataataccgtatacattga

SEQ ID NO: 7765 - DNA, 25 bp, SARS Virus
cagtaataataccgtatacattgac

SEQ ID NO: 7766 - DNA, 25 bp, SARS Virus
agtaataataccctatacattgacc

SEQ ID NO: 7767 - DNA, 25 bp, SARS Virus
gtaataataccgcatacattgacca

SEQ ID NO: 7768 - DNA, 25 bp, SARS Virus
taataataccgtctacattgaccac

SEQ ID NO: 7769 - DNA, 25 bp, SARS Virus
aataataccgtacacattgaccacc

SEQ ID NO: 7770 - DNA, 25 bp, SARS Virus
ataataccgtatccattgaccacca

SEQ ID NO: 7771 - DNA, 25 bp, SARS Virus
taataccgtatacattgaccaccag

SEQ ID NO: 7772 - DNA, 25 bp, SARS Virus
aataccgtataccttgaccaccaga

SEQ ID NO: 7773 - DNA, 25 bp, SARS Virus
ataccgtatacactgaccaccagaa

SEQ ID NO: 7774 - DNA, 25 bp, SARS Virus
taccgtatacatcgaccaccagaac

SEQ ID NO: 7775 - DNA, 25 bp, SARS Virus
accgtatacattcaccaccagaaca

SEQ ID NO: 7776 - DNA, 25 bp, SARS Virus
ccgtatacattgcccaccagaacat

SEQ ID NO: 7777 - DNA, 25 bp, SARS Virus
cgtatacattgaccaccagaacatg

SEQ ID NO: 7778 - DNA, 25 bp, SARS Virus
gtatacattgaccaccagaacatgt

SEQ ID NO: 7779 - DNA, 25 bp, SARS Virus
tatacattgacccccagaacatgtt

SEQ ID NO: 7780 - DNA, 25 bp, SARS Virus
atacattgaccaccagaacatgttg

SEQ ID NO: 7781 - DNA, 25 bp, SARS Virus
tacattgaccaccagaacatgttgt

SEQ ID NO: 7782 - DNA, 25 bp, SARS Virus
acattgaccacccgaacatgttgtc

SEQ ID NO: 7783 - DNA, 25 bp, SARS Virus
cattgaccaccacaacatgttgtct

SEQ ID NO: 7784 - DNA, 25 bp, SARS Virus
attgaccaccagcacatgttgtctg

SEQ ID NO: 7785 - DNA, 25 bp, SARS Virus
ttgaccaccagaccatgttgtctga

SEQ ID NO: 7786 - DNA, 25 bp, SARS Virus
tgaccaccagaacatgttgtctgaa

SEQ ID NO: 7787 - DNA, 25 bp, SARS Virus
gaccaccagaacctgttgtctgaag

SEQ ID NO: 7788 - DNA, 25 bp, SARS Virus
accaccagaacacgttgtctgaaga

SEQ ID NO: 7789 - DNA, 25 bp, SARS Virus
ccaccagaacatcttgtctgaagag

SEQ ID NO: 7790 - DNA, 25 bp, SARS Virus
caccagaacatgctgtctgaagagt

SEQ ID NO: 7791 - DNA, 25 bp, SARS Virus
accagaacatgtcgtctgaagagtc

SEQ ID NO: 7792 - DNA, 25 bp, SARS Virus
ccagaacatgttctctgaagagtca

SEQ ID NO: 7793 - DNA, 25 bp, SARS Virus
cagaacatgttgcctgaagagtcac

SEQ ID NO: 7794 - DNA, 25 bp, SARS Virus
agaacatgttgtctgaagagtcacc

SEQ ID NO: 7795 - DNA, 25 bp, SARS Virus
gaacatgttgtccgaagagtcacca

SEQ ID NO: 7796 - DNA, 25 bp, SARS Virus
aacatgttgtctcaagagtcaccaa

SEQ ID NO: 7797 - DNA, 25 bp, SARS Virus
acatgttgtctgcagagtcaccaac

SEQ ID NO: 7798 - DNA, 25 bp, SARS Virus
catgttgtctgacgagtcaccaaca

SEQ ID NO: 7799 - DNA, 25 bp, SARS Virus
atgttgtctgaacagtcaccaacag

SEQ ID NO: 7800 - DNA, 25 bp, SARS Virus
tgttgtctgaagcgtcaccaacaga

SEQ ID NO: 7801 - DNA, 25 bp, SARS Virus
gttgtctgaagactcaccaacagat

SEQ ID NO: 7802 - DNA, 25 bp, SARS Virus
ttgtctgaagagccaccaacagatt

SEQ ID NO: 7803 - DNA, 25 bp, SARS Virus
tgtctgaagagtcaccaacagatta

SEQ ID NO: 7804 - DNA, 25 bp, SARS Virus
gtctgaagagtccccaacagattag

SEQ ID NO: 7805 - DNA, 25 bp, SARS Virus
tctgaagagtcaccaacagattaga

SEQ ID NO: 7806 - DNA, 25 bp, SARS Virus
ctgaagagtcaccaacagattagaa

SEQ ID NO: 7807 - DNA, 25 bp, SARS Virus
tgaagagtcacccacagattagaaa

SEQ ID NO: 7808 - DNA, 25 bp, SARS Virus
gaagagtcaccaccagattagaaaa

SEQ ID NO: 7809 - DNA, 25 bp, SARS Virus
aagagtcaccaacagattagaaaac

SEQ ID NO: 7810 - DNA, 25 bp, SARS Virus
agagtcaccaaccgattagaaaacc

SEQ ID NO: 7811 - DNA, 25 bp, SARS Virus
gagtcaccaacacattagaaaaccc

SEQ ID NO: 7812 - DNA, 25 bp, SARS Virus
agtcaccaacagcttagaaaacccg

SEQ ID NO: 7813 - DNA, 25 bp, SARS Virus
gtcaccaacagactagaaaacccgt

SEQ ID NO: 7814 - DNA, 25 bp, SARS Virus
tcaccaacagatcagaaaacccgtg

SEQ ID NO: 7815 - DNA, 25 bp, SARS Virus
caccaacagattcgaaaacccgtga

SEQ ID NO: 7816 - DNA, 25 bp, SARS Virus
accaacagattacaaaacccgtgat

SEQ ID NO: 7817 - DNA, 25 bp, SARS Virus
ccaacagattagcaaacccgtgatg

SEQ ID NO: 7818 - DNA, 25 bp, SARS Virus
caacagattagacaacccgtgatga

SEQ ID NO: 7819 - DNA, 25 bp, SARS Virus
aacagattagaacacccgtgatgac

SEQ ID NO: 7820 - DNA, 25 bp, SARS Virus
acagattagaaaccccgtgatgaca

SEQ ID NO: 7821 - DNA, 25 bp, SARS Virus
cagattagaaaacccgtgatgacaa

SEQ ID NO: 7822 - DNA, 25 bp, SARS Virus
agattagaaaacccgtgatgacaac

SEQ ID NO: 7823 - DNA, 25 bp, SARS Virus
gattagaaaacccgtgatgacaact

SEQ ID NO: 7824 - DNA, 25 bp, SARS Virus
attagaaaacccctgatgacaactt

SEQ ID NO: 7825 - DNA, 25 bp, SARS Virus
ttagaaaacccgcgatgacaacttt

SEQ ID NO: 7826 - DNA, 25 bp, SARS Virus
tagaaaacccgtcatgacaactttt

SEQ ID NO: 7827 - DNA, 25 bp, SARS Virus
agaaaacccgtgctgacaacttttt

SEQ ID NO: 7828 - DNA, 25 bp, SARS Virus
gaaaacccgtgacgacaactttttg

SEQ ID NO: 7829 - DNA, 25 bp, SARS Virus
aaaacccgtgatcacaactttttga

SEQ ID NO: 7830 - DNA, 25 bp, SARS Virus
aaacccgtgatgccaactttttgag

SEQ ID NO: 7831 - DNA, 25 bp, SARS Virus
aacccgtgatgacaactttttgagt

SEQ ID NO: 7832 - DNA, 25 bp, SARS Virus
acccgtgatgaccactttttgagtc

SEQ ID NO: 7833 - DNA, 25 bp, SARS Virus
cccgtgatgacacctttttgagtcc

SEQ ID NO: 7834 - DNA, 25 bp, SARS Virus
ccgtgatgacaactttttgagtccg

SEQ ID NO: 7835 - DNA, 25 bp, SARS Virus
cgtgatgacaaccttttgagtccgg

SEQ ID NO: 7836 - DNA, 25 bp, SARS Virus
gtgatgacaactctttgagtccgga

SEQ ID NO: 7837 - DNA, 25 bp, SARS Virus
tgatgacaacttcttgagtccggat

SEQ ID NO: 7838 - DNA, 25 bp, SARS Virus
gatgacaactttctgagtccggata

SEQ ID NO: 7839 - DNA, 25 bp, SARS Virus
atgacaacttttcgagtccggatag

SEQ ID NO: 7840 - DNA, 25 bp, SARS Virus
tgacaactttttcagtccggataga

SEQ ID NO: 7841 - DNA, 25 bp, SARS Virus
gacaactttttgcgtccggatagaa

SEQ ID NO: 7842 - DNA, 25 bp, SARS Virus
acaactttttgactccggatagaaa

SEQ ID NO: 7843 - DNA, 25 bp, SARS Virus
caactttttgagcccggatagaaac

SEQ ID NO: 7844 - DNA, 25 bp, SARS Virus
aactttttgagtccggatagaaact

SEQ ID NO: 7845 - DNA, 25 bp, SARS Virus
actttttgagtccggatagaaactt

SEQ ID NO: 7846 - DNA, 25 bp, SARS Virus
ctttttgagtcccgatagaaactta

SEQ ID NO: 7847 - DNA, 25 bp, SARS Virus
tttttgagtccgcatagaaacttac

SEQ ID NO: 7848 - DNA, 25 bp, SARS Virus
ttttgagtccggctagaaacttacc

SEQ ID NO: 7849 - DNA, 25 bp, SARS Virus
tttgagtccggacagaaacttacct

SEQ ID NO: 7850 - DNA, 25 bp, SARS Virus
ttgagtccggatcgaaacttaccta

SEQ ID NO: 7851 - DNA, 25 bp, SARS Virus
tgagtccggatacaaacttacctaa

SEQ ID NO: 7852 - DNA, 25 bp, SARS Virus
gagtccggatagcaacttacctaac

SEQ ID NO: 7853 - DNA, 25 bp, SARS Virus
agtccggatagacacttacctaact

SEQ ID NO: 7854 - DNA, 25 bp, SARS Virus
gtccggatagaaccttacctaactc

SEQ ID NO: 7855 - DNA, 25 bp, SARS Virus
tccggatagaaacttacctaactcc

SEQ ID NO: 7856 - DNA, 25 bp, SARS Virus
ccggatagaaacctacctaactccg

SEQ ID NO: 7857 - DNA, 25 bp, SARS Virus
cggatagaaactcacctaactccgc

SEQ ID NO: 7858 - DNA, 25 bp, SARS Virus
ggatagaaacttccctaactccgct

SEQ ID NO: 7859 - DNA, 25 bp, SARS Virus
gatagaaacttacctaactccgctt

SEQ ID NO: 7860 - DNA, 25 bp, SARS Virus
atagaaacttacctaactccgcttt

SEQ ID NO: 7861 - DNA, 25 bp, SARS Virus
tagaaacttacccaactccgctttg

SEQ ID NO: 7862 - DNA, 25 bp, SARS Virus
agaaacttacctcactccgctttga

SEQ ID NO: 7863 - DNA, 25 bp, SARS Virus
gaaacttacctacctccgctttgaa

SEQ ID NO: 7864 - DNA, 25 bp, SARS Virus
aaacttacctaactccgctttgaat

SEQ ID NO: 7865 - DNA, 25 bp, SARS Virus
aacttacctaaccccgctttgaatc

SEQ ID NO: 7866 - DNA, 25 bp, SARS Virus
acttacctaactccgctttgaatca

SEQ ID NO: 7867 - DNA, 25 bp, SARS Virus
cttacctaactccgctttgaatcac

SEQ ID NO: 7868 - DNA, 25 bp, SARS Virus
ttacctaactcccctttgaatcacg

SEQ ID NO: 7869 - DNA, 25 bp, SARS Virus
tacctaactccgctttgaatcacgt

SEQ ID NO: 7870 - DNA, 25 bp, SARS Virus
acctaactccgccttgaatcacgtc

SEQ ID NO: 7871 - DNA, 25 bp, SARS Virus
cctaactccgctctgaatcacgtcc

SEQ ID NO: 7872 - DNA, 25 bp, SARS Virus
ctaactccgcttcgaatcacgtcct

SEQ ID NO: 7873 - DNA, 25 bp, SARS Virus
taactccgctttcaatcacgtcctc

SEQ ID NO: 7874 - DNA, 25 bp, SARS Virus
aactccgctttgcatcacgtcctca

SEQ ID NO: 7875 - DNA, 25 bp, SARS Virus
actccgctttgactcacgtcctcaa

SEQ ID NO: 7876 - DNA, 25 bp, SARS Virus
ctccgctttgaaccacgtcctcaac

SEQ ID NO: 7877 - DNA, 25 bp, SARS Virus
tccgctttgaatcacgtcctcaact

SEQ ID NO: 7878 - DNA, 25 bp, SARS Virus
ccgctttgaatcccgtcctcaactt

SEQ ID NO: 7879 - DNA, 25 bp, SARS Virus
cgctttgaatcacgtcctcaactta

SEQ ID NO: 7880 - DNA, 25 bp, SARS Virus
gctttgaatcacctcctcaacttaa

SEQ ID NO: 7881 - DNA, 25 bp, SARS Virus
ctttgaatcacgccctcaacttaaa

SEQ ID NO: 7882 - DNA, 25 bp, SARS Virus
tttgaatcacgtcctcaacttaaag

SEQ ID NO: 7883 - DNA, 25 bp, SARS Virus
ttgaatcacgtcctcaacttaaaga

SEQ ID NO: 7884 - DNA, 25 bp, SARS Virus
tgaatcacgtccccaacttaaagag

SEQ ID NO: 7885 - DNA, 25 bp, SARS Virus
gaatcacgtcctcaacttaaagagt

SEQ ID NO: 7886 - DNA, 25 bp, SARS Virus
aatcacgtcctccacttaaagagtt

SEQ ID NO: 7887 - DNA, 25 bp, SARS Virus
atcacgtcctcaccttaaagagttc

SEQ ID NO: 7888 - DNA, 25 bp, SARS Virus
tcacgtcctcaacttaaagagttcc

SEQ ID NO: 7889 - DNA, 25 bp, SARS Virus
cacgtcctcaacctaaagagttcct

SEQ ID NO: 7890 - DNA, 25 bp, SARS Virus
acgtcctcaactcaaagagttccta

SEQ ID NO: 7891 - DNA, 25 bp, SARS Virus
cgtcctcaacttcaagagttcctac

SEQ ID NO: 7892 - DNA, 25 bp, SARS Virus
gtcctcaacttacagagttcctacg

SEQ ID NO: 7893 - DNA, 25 bp, SARS Virus
tcctcaacttaacgagttcctacga

SEQ ID NO: 7894 - DNA, 25 bp, SARS Virus
cctcaacttaaacagttcctacgaa

SEQ ID NO: 7895 - DNA, 25 bp, SARS Virus
ctcaacttaaagcgttcctacgaac

SEQ ID NO: 7896 - DNA, 25 bp, SARS Virus
tcaacttaaagacttcctacgaacc

SEQ ID NO: 7897 - DNA, 25 bp, SARS Virus
caacttaaagagctcctacgaaccc

SEQ ID NO: 7898 - DNA, 25 bp, SARS Virus
aacttaaagagtccctacgaaccct

SEQ ID NO: 7899 - DNA, 25 bp, SARS Virus
acttaaagagttcctacgaaccctc

SEQ ID NO: 7900 - DNA, 25 bp, SARS Virus
cttaaagagttcctacgaaccctct

SEQ ID NO: 7901 - DNA, 25 bp, SARS Virus
ttaaagagttcccacgaaccctcta

SEQ ID NO: 7902 - DNA, 25 bp, SARS Virus
taaagagttcctccgaaccctctaa

SEQ ID NO: 7903 - DNA, 25 bp, SARS Virus
aaagagttcctacgaaccctctaag

SEQ ID NO: 7904 - DNA, 25 bp, SARS Virus
aagagttcctaccaaccctctaaga

SEQ ID NO: 7905 - DNA, 25 bp, SARS Virus
agagttcctacgcaccctctaagag

SEQ ID NO: 7906 - DNA, 25 bp, SARS Virus
gagttcctacgacccctctaagagt

SEQ ID NO: 7907 - DNA, 25 bp, SARS Virus
agttcctacgaaccctctaagagtt

SEQ ID NO: 7908 - DNA, 25 bp, SARS Virus
gttcctacgaaccctctaagagttt

SEQ ID NO: 7909 - DNA, 25 bp, SARS Virus
ttcctacgaaccctctaagagttta

SEQ ID NO: 7910 - DNA, 25 bp, SARS Virus
tcctacgaaccccctaagagtttaa

SEQ ID NO: 7911 - DNA, 25 bp, SARS Virus
cctacgaaccctctaagagtttaaa

SEQ ID NO: 7912 - DNA, 25 bp, SARS Virus
ctacgaaccctccaagagtttaaag

SEQ ID NO: 7913 - DNA, 25 bp, SARS Virus
tacgaaccctctcagagtttaaaga

SEQ ID NO: 7914 - DNA, 25 bp, SARS Virus
acgaaccctctacgagtttaaagag

SEQ ID NO: 7915 - DNA, 25 bp, SARS Virus
cgaaccctctaacagtttaaagagt

SEQ ID NO: 7916 - DNA, 25 bp, SARS Virus
gaaccctctaagcgtttaaagagta

SEQ ID NO: 7917 - DNA, 25 bp, SARS Virus
aaccctctaagactttaaagagtaa

SEQ ID NO: 7918 - DNA, 25 bp, SARS Virus
accctctaagagcttaaagagtaat

SEQ ID NO: 7919 - DNA, 25 bp, SARS Virus
ccctctaagagtctaaagagtaatg

SEQ ID NO: 7920 - DNA, 25 bp, SARS Virus
cctctaagagttcaaagagtaatgt

SEQ ID NO: 7921 - DNA, 25 bp, SARS Virus
ctctaagagtttcaagagtaatgtc

SEQ ID NO: 7922 - DNA, 25 bp, SARS Virus
tctaagagtttacagagtaatgtcc

SEQ ID NO: 7923 - DNA, 25 bp, SARS Virus
ctaagagtttaacgagtaatgtcca

SEQ ID NO: 7924 - DNA, 25 bp, SARS Virus
taagagtttaaacagtaatgtccac

SEQ ID NO: 7925 - DNA, 25 bp, SARS Virus
aagagtttaaagcgtaatgtccaca

SEQ ID NO: 7926 - DNA, 25 bp, SARS Virus
agagtttaaagactaatgtccacaa

SEQ ID NO: 7927 - DNA, 25 bp, SARS Virus
gagtttaaagagcaatgtccacaaa

SEQ ID NO: 7928 - DNA, 25 bp, SARS Virus
agtttaaagagtcatgtccacaaaa

SEQ ID NO: 7929 - DNA, 25 bp, SARS Virus
gtttaaagagtactgtccacaaaaa

SEQ ID NO: 7930 - DNA, 25 bp, SARS Virus
tttaaagagtaacgtccacaaaaac

SEQ ID NO: 7931 - DNA, 25 bp, SARS Virus
ttaaagagtaatctccacaaaaact

SEQ ID NO: 7932 - DNA, 25 bp, SARS Virus
taaagagtaatgcccacaaaaactg

SEQ ID NO: 7933 - DNA, 25 bp, SARS Virus
aaagagtaatgtccacaaaaactgt

SEQ ID NO: 7934 - DNA, 25 bp, SARS Virus
aagagtaatgtccacaaaaactgta

SEQ ID NO: 7935 - DNA, 25 bp, SARS Virus
agagtaatgtccccaaaaactgtag

SEQ ID NO: 7936 - DNA, 25 bp, SARS Virus
gagtaatgtccacaaaaactgtagc

SEQ ID NO: 7937 - DNA, 25 bp, SARS Virus
gtgatatttctcggaactaatgttc

SEQ ID NO: 7938 - DNA, 25 bp, SARS Virus
tgatatttctcagaactaatgttca

SEQ ID NO: 7939 - DNA, 25 bp, SARS Virus
gatatttctcaggactaatgttcag

SEQ ID NO: 7940 - DNA, 25 bp, SARS Virus
atatttctcagagctaatgttcaga

SEQ ID NO: 7941 - DNA, 25 bp, SARS Virus
tatttctcagaagtaatgttcagaa

SEQ ID NO: 7942 - DNA, 25 bp, SARS Virus
atttctcagaacgaatgttcagaaa

SEQ ID NO: 7943 - DNA, 25 bp, SARS Virus
tttctcagaactgatgttcagaaag

SEQ ID NO: 7944 - DNA, 25 bp, SARS Virus
ttctcagaactagtgttcagaaagt

SEQ ID NO: 7945 - DNA, 25 bp, SARS Virus
tctcagaactaaggttcagaaagtt

SEQ ID NO: 7946 - DNA, 25 bp, SARS Virus
ctcagaactaatgttcagaaagttt

SEQ ID NO: 7947 - DNA, 25 bp, SARS Virus
tcagaactaatggtcagaaagtttt

SEQ ID NO: 7948 - DNA, 25 bp, SARS Virus
cagaactaatgtgcagaaagttttg

SEQ ID NO: 7949 - DNA, 25 bp, SARS Virus
agaactaatgttgagaaagttttgg

SEQ ID NO: 7950 - DNA, 25 bp, SARS Virus
gaactaatgttcggaaagttttggt

SEQ ID NO: 7951 - DNA, 25 bp, SARS Virus
aactaatgttcagaaagttttggta

SEQ ID NO: 7952 - DNA, 25 bp, SARS Virus
actaatgttcaggaagttttggtaa

SEQ ID NO: 7953 - DNA, 25 bp, SARS Virus
ctaatgttcagagagttttggtaac

SEQ ID NO: 7954 - DNA, 25 bp, SARS Virus
taatgttcagaaggttttggtaaca

SEQ ID NO: 7955 - DNA, 25 bp, SARS Virus
aatgttcagaaagttttggtaacaa

SEQ ID NO: 7956 - DNA, 25 bp, SARS Virus
atgttcagaaaggtttggtaacaac

SEQ ID NO: 7957 - DNA, 25 bp, SARS Virus
tgttcagaaagtgttggtaacaact

SEQ ID NO: 7958 - DNA, 25 bp, SARS Virus
gttcagaaagttgtggtaacaactc

SEQ ID NO: 7959 - DNA, 25 bp, SARS Virus
ttcagaaagtttgggtaacaactca

SEQ ID NO: 7960 - DNA, 25 bp, SARS Virus
tcagaaagttttggtaacaactcag

SEQ ID NO: 7961 - DNA, 25 bp, SARS Virus
cagaaagttttggtaacaactcagg

SEQ ID NO: 7962 - DNA, 25 bp, SARS Virus
agaaagttttgggaacaactcagga

SEQ ID NO: 7963 - DNA, 25 bp, SARS Virus
gaaagttttggtgacaactcaggac

SEQ ID NO: 7964 - DNA, 25 bp, SARS Virus
aaagttttggtagcaactcaggacg

SEQ ID NO: 7965 - DNA, 25 bp, SARS Virus
aagttttggtaagaactcaggacgc

SEQ ID NO: 7966 - DNA, 25 bp, SARS Virus
agttttggtaacgactcaggacgcc

SEQ ID NO: 7967 - DNA, 25 bp, SARS Virus
gttttggtaacagctcaggacgcca

SEQ ID NO: 7968 - DNA, 25 bp, SARS Virus
ttttggtaacaagtcaggacgccat

SEQ ID NO: 7969 - DNA, 25 bp, SARS Virus
tttggtaacaacgcaggacgccatt

SEQ ID NO: 7970 - DNA, 25 bp, SARS Virus
ttggtaacaactgaggacgccattg

SEQ ID NO: 7971 - DNA, 25 bp, SARS Virus
tggtaacaactcgggacgccattga

SEQ ID NO: 7972 - DNA, 25 bp, SARS Virus
ggtaacaactcaggacgccattgat

SEQ ID NO: 7973 - DNA, 25 bp, SARS Virus
gtaacaactcaggacgccattgata

SEQ ID NO: 7974 - DNA, 25 bp, SARS Virus
taacaactcagggcgccattgatat

SEQ ID NO: 7975 - DNA, 25 bp, SARS Virus
aacaactcaggaggccattgatatt

SEQ ID NO: 7976 - DNA, 25 bp, SARS Virus
acaactcaggacgccattgatattt

SEQ ID NO: 7977 - DNA, 25 bp, SARS Virus
caactcaggacggcattgatatttc

SEQ ID NO: 7978 - DNA, 25 bp, SARS Virus
aactcaggacgcgattgatatttca

SEQ ID NO: 7979 - DNA, 25 bp, SARS Virus
actcaggacgccgttgatatttcaa

SEQ ID NO: 7980 - DNA, 25 bp, SARS Virus
ctcaggacgccagtgatatttcaat

SEQ ID NO: 7981 - DNA, 25 bp, SARS Virus
tcaggacgccatggatatttcaatg

SEQ ID NO: 7982 - DNA, 25 bp, SARS Virus
caggacgccattgatatttcaatgg

SEQ ID NO: 7983 - DNA, 25 bp, SARS Virus
aggacgccattggtatttcaatggt

SEQ ID NO: 7984 - DNA, 25 bp, SARS Virus
ggacgccattgagatttcaatggtt

SEQ ID NO: 7985 - DNA, 25 bp, SARS Virus
gacgccattgatgtttcaatggttc

SEQ ID NO: 7986 - DNA, 25 bp, SARS Virus
acgccattgatagttcaatggttcc

SEQ ID NO: 7987 - DNA, 25 bp, SARS Virus
cgccattgatatgtcaatggttccc

SEQ ID NO: 7988 - DNA, 25 bp, SARS Virus
gccattgatattgcaatggttccct

SEQ ID NO: 7989 - DNA, 25 bp, SARS Virus
ccattgatatttgaatggttccctt

SEQ ID NO: 7990 - DNA, 25 bp, SARS Virus
cattgatatttcgatggttcccttt

SEQ ID NO: 7991 - DNA, 25 bp, SARS Virus
attgatatttcagtggttccctttc

SEQ ID NO: 7992 - DNA, 25 bp, SARS Virus
ttgatatttcaagggttccctttcg

SEQ ID NO: 7993 - DNA, 25 bp, SARS Virus
tgatatttcaatggttccctttcgg

SEQ ID NO: 7994 - DNA, 25 bp, SARS Virus
gatatttcaatggttccctttcggg

SEQ ID NO: 7995 - DNA, 25 bp, SARS Virus
atatttcaatgggtccctttcgggc

SEQ ID NO: 7996 - DNA, 25 bp, SARS Virus
tatttcaatggtgccctttcgggca

SEQ ID NO: 7997 - DNA, 25 bp, SARS Virus
atttcaatggttgcctttcgggcat

SEQ ID NO: 7998 - DNA, 25 bp, SARS Virus
tttcaatggttcgctttcgggcatt

SEQ ID NO: 7999 - DNA, 25 bp, SARS Virus
ttcaatggttccgtttcgggcattt

SEQ ID NO: 8000 - DNA, 25 bp, SARS Virus
tcaatggttcccgttcgggcatttt

SEQ ID NO: 8001 - DNA, 25 bp, SARS Virus
caatggttccctgtcgggcattttc

SEQ ID NO: 8002 - DNA, 25 bp, SARS Virus
aatggttcccttgcgggcattttcc

SEQ ID NO: 8003 - DNA, 25 bp, SARS Virus
atggttccctttggggcattttcca

SEQ ID NO: 8004 - DNA, 25 bp, SARS Virus
tggttccctttcgggcattttccac

SEQ ID NO: 8005 - DNA, 25 bp, SARS Virus
ggttccctttcgggcattttccacg

SEQ ID NO: 8006 - DNA, 25 bp, SARS Virus
gttccctttcgggcattttccacga

SEQ ID NO: 8007 - DNA, 25 bp, SARS Virus
ttccctttcggggattttccacgaa

SEQ ID NO: 8008 - DNA, 25 bp, SARS Virus
tccctttcgggcgttttccacgaac

SEQ ID NO: 8009 - DNA, 25 bp, SARS Virus
ccctttcgggcagtttccacgaacc

SEQ ID NO: 8010 - DNA, 25 bp, SARS Virus
cctttcgggcatgttccacgaacct

SEQ ID NO: 8011 - DNA, 25 bp, SARS Virus
ctttcgggcattgtccacgaacctt

SEQ ID NO: 8012 - DNA, 25 bp, SARS Virus
tttcgggcatttgccacgaaccttg

SEQ ID NO: 8013 - DNA, 25 bp, SARS Virus
ttcgggcattttgcacgaaccttgt

SEQ ID NO: 8014 - DNA, 25 bp, SARS Virus
tcgggcattttcgacgaaccttgta

SEQ ID NO: 8015 - DNA, 25 bp, SARS Virus
cgggcattttccgcgaaccttgtaa

SEQ ID NO: 8016 - DNA, 25 bp, SARS Virus
gggcattttccaggaaccttgtaac

SEQ ID NO: 8017 - DNA, 25 bp, SARS Virus
ggcattttccacgaaccttgtaacc

SEQ ID NO: 8018 - DNA, 25 bp, SARS Virus
gcattttccacggaccttgtaacct

SEQ ID NO: 8019 - DNA, 25 bp, SARS Virus
cattttccacgagccttgtaacctg

SEQ ID NO: 8020 - DNA, 25 bp, SARS Virus
attttccacgaagcttgtaacctgt

SEQ ID NO: 8021 - DNA, 25 bp, SARS Virus
ttttccacgaacgttgtaacctgtt

SEQ ID NO: 8022 - DNA, 25 bp, SARS Virus
tttccacgaaccgtgtaacctgttg

SEQ ID NO: 8023 - DNA, 25 bp, SARS Virus
ttccacgaacctggtaacctgttgt

SEQ ID NO: 8024 - DNA, 25 bp, SARS Virus
tccacgaaccttgtaacctgttgtc

SEQ ID NO: 8025 - DNA, 25 bp, SARS Virus
ccacgaaccttggaacctgttgtct

SEQ ID NO: 8026 - DNA, 25 bp, SARS Virus
cacgaaccttgtgacctgttgtctc

SEQ ID NO: 8027 - DNA, 25 bp, SARS Virus
acgaaccttgtagcctgttgtctct

SEQ ID NO: 8028 - DNA, 25 bp, SARS Virus
cgaaccttgtaagctgttgtctcta

SEQ ID NO: 8029 - DNA, 25 bp, SARS Virus
gaaccttgtaacgtgttgtctctag

SEQ ID NO: 8030 - DNA, 25 bp, SARS Virus
aaccttgtaaccggttgtctctagt

SEQ ID NO: 8031 - DNA, 25 bp, SARS Virus
accttgtaacctgttgtctctagtc

SEQ ID NO: 8032 - DNA, 25 bp, SARS Virus
ccttgtaacctggtgtctctagtca

SEQ ID NO: 8033 - DNA, 25 bp, SARS Virus
cttgtaacctgtggtctctagtcaa

SEQ ID NO: 8034 - DNA, 25 bp, SARS Virus
ttgtaacctgttgtctctagtcaaa

SEQ ID NO: 8035 - DNA, 25 bp, SARS Virus
tgtaacctgttggctctagtcaaaa

SEQ ID NO: 8036 - DNA, 25 bp, SARS Virus
gtaacctgttgtgtctagtcaaaat

SEQ ID NO: 8037 - DNA, 25 bp, SARS Virus
taacctgttgtcgctagtcaaaatt

SEQ ID NO: 8038 - DNA, 25 bp, SARS Virus
aacctgttgtctgtagtcaaaattg

SEQ ID NO: 8039 - DNA, 25 bp, SARS Virus
acctgttgtctcgagtcaaaattgt

SEQ ID NO: 8040 - DNA, 25 bp, SARS Virus
cctgttgtctctggtcaaaattgtg

SEQ ID NO: 8041 - DNA, 25 bp, SARS Virus
ctgttgtctctagtcaaaattgtgg

SEQ ID NO: 8042 - DNA, 25 bp, SARS Virus
tgttgtctctaggcaaaattgtggt

SEQ ID NO: 8043 - DNA, 25 bp, SARS Virus
gttgtctctagtgaaaattgtggtg

SEQ ID NO: 8044 - DNA, 25 bp, SARS Virus
ttgtctctagtcgaaattgtggtga

SEQ ID NO: 8045 - DNA, 25 bp, SARS Virus
tgtctctagtcagaattgtggtgac

SEQ ID NO: 8046 - DNA, 25 bp, SARS Virus
gtctctagtcaagattgtggtgaca

SEQ ID NO: 8047 - DNA, 25 bp, SARS Virus
tctctagtcaaagttgtggtgacac

SEQ ID NO: 8048 - DNA, 25 bp, SARS Virus
ctctagtcaaaagtgtggtgacaca

SEQ ID NO: 8049 - DNA, 25 bp, SARS Virus
tctagtcaaaatggtggtgacacac

SEQ ID NO: 8050 - DNA, 25 bp, SARS Virus
ctagtcaaaattgtggtgacacacc

SEQ ID NO: 8051 - DNA, 25 bp, SARS Virus
tagtcaaaattggggtgacacacca

SEQ ID NO: 8052 - DNA, 25 bp, SARS Virus
agtcaaaattgtggtgacacaccaa

SEQ ID NO: 8053 - DNA, 25 bp, SARS Virus
gtcaaaattgtggtgacacaccaaa

SEQ ID NO: 8054 - DNA, 25 bp, SARS Virus
tcaaaattgtggggacacaccaaaa

SEQ ID NO: 8055 - DNA, 25 bp, SARS Virus
caaaattgtggtgacacaccaaaag

SEQ ID NO: 8056 - DNA, 25 bp, SARS Virus
aaaattgtggtggcacaccaaaagg

SEQ ID NO: 8057 - DNA, 25 bp, SARS Virus
aaattgtggtgagacaccaaaaggg

SEQ ID NO: 8058 - DNA, 25 bp, SARS Virus
aattgtggtgacgcaccaaaaggga

SEQ ID NO: 8059 - DNA, 25 bp, SARS Virus
attgtggtgacagaccaaaagggag

SEQ ID NO: 8060 - DNA, 25 bp, SARS Virus
ttgtggtgacacgccaaaagggagt

SEQ ID NO: 8061 - DNA, 25 bp, SARS Virus
tgtggtgacacagcaaaagggagtg

SEQ ID NO: 8062 - DNA, 25 bp, SARS Virus
gtggtgacacacgaaaagggagtgt

SEQ ID NO: 8063 - DNA, 25 bp, SARS Virus
tggtgacacaccgaaagggagtgtc

SEQ ID NO: 8064 - DNA, 25 bp, SARS Virus
ggtgacacaccagaagggagtgtcc

SEQ ID NO: 8065 - DNA, 25 bp, SARS Virus
gtgacacaccaagagggagtgtccg

SEQ ID NO: 8066 - DNA, 25 bp, SARS Virus
tgacacaccaaaggggagtgtccga

SEQ ID NO: 8067 - DNA, 25 bp, SARS Virus
gacacaccaaaagggagtgtccgac

SEQ ID NO: 8068 - DNA, 25 bp, SARS Virus
acacaccaaaagggagtgtccgacg

SEQ ID NO: 8069 - DNA, 25 bp, SARS Virus
cacaccaaaagggagtgtccgacga

SEQ ID NO: 8070 - DNA, 25 bp, SARS Virus
acaccaaaagggggtgtccgacgac

SEQ ID NO: 8071 - DNA, 25 bp, SARS Virus
caccaaaagggagtgtccgacgacc

SEQ ID NO: 8072 - DNA, 25 bp, SARS Virus
accaaaagggagggtccgacgacca

SEQ ID NO: 8073 - DNA, 25 bp, SARS Virus
ccaaaagggagtgtccgacgaccac

SEQ ID NO: 8074 - DNA, 25 bp, SARS Virus
caaaagggagtggccgacgaccaca

SEQ ID NO: 8075 - DNA, 25 bp, SARS Virus
aaaagggagtgtgcgacgaccacaa

SEQ ID NO: 8076 - DNA, 25 bp, SARS Virus
aaagggagtgtcggacgaccacaat

SEQ ID NO: 8077 - DNA, 25 bp, SARS Virus
aagggagtgtccgacgaccacaata

SEQ ID NO: 8078 - DNA, 25 bp, SARS Virus
agggagtgtccggcgaccacaatag

SEQ ID NO: 8079 - DNA, 25 bp, SARS Virus
gggagtgtccgaggaccacaatagt

SEQ ID NO: 8080 - DNA, 25 bp, SARS Virus
ggagtgtccgacgaccacaatagtc

SEQ ID NO: 8081 - DNA, 25 bp, SARS Virus
gagtgtccgacggccacaatagtct

SEQ ID NO: 8082 - DNA, 25 bp, SARS Virus
agtgtccgacgagcacaatagtcta

SEQ ID NO: 8083 - DNA, 25 bp, SARS Virus
gtgtccgacgacgacaatagtctag

SEQ ID NO: 8084 - DNA, 25 bp, SARS Virus
tgtccgacgaccgcaatagtctagt

SEQ ID NO: 8085 - DNA, 25 bp, SARS Virus
gtccgacgaccagaatagtctagtt

SEQ ID NO: 8086 - DNA, 25 bp, SARS Virus
tccgacgaccacgatagtctagtta

SEQ ID NO: 8087 - DNA, 25 bp, SARS Virus
ccgacgaccacagtagtctagttaa

SEQ ID NO: 8088 - DNA, 25 bp, SARS Virus
cgacgaccacaagagtctagttaaa

SEQ ID NO: 8089 - DNA, 25 bp, SARS Virus
gacgaccacaatggtctagttaaaa

SEQ ID NO: 8090 - DNA, 25 bp, SARS Virus
acgaccacaatagtctagttaaaaa

SEQ ID NO: 8091 - DNA, 25 bp, SARS Virus
cgaccacaataggctagttaaaaac

SEQ ID NO: 8092 - DNA, 25 bp, SARS Virus
gaccacaatagtgtagttaaaaacg

SEQ ID NO: 8093 - DNA, 25 bp, SARS Virus
accacaatagtcgagttaaaaacgc

SEQ ID NO: 8094 - DNA, 25 bp, SARS Virus
ccacaatagtctggttaaaaacgcg

SEQ ID NO: 8095 - DNA, 25 bp, SARS Virus
cacaatagtctagttaaaaacgcgc

SEQ ID NO: 8096 - DNA, 25 bp, SARS Virus
acaatagtctaggtaaaaacgcgcg

SEQ ID NO: 8097 - DNA, 25 bp, SARS Virus
caatagtctagtgaaaaacgcgcgt

SEQ ID NO: 8098 - DNA, 25 bp, SARS Virus
aatagtctagttgaaaacgcgcgtg

SEQ ID NO: 8099 - DNA, 25 bp, SARS Virus
atagtctagttagaaacgcgcgtgt

SEQ ID NO: 8100 - DNA, 25 bp, SARS Virus
tagtctagttaagaacgcgcgtgtg

SEQ ID NO: 8101 - DNA, 25 bp, SARS Virus
agtctagttaaagacgcgcgtgtga

SEQ ID NO: 8102 - DNA, 25 bp, SARS Virus
gtctagttaaaagcgcgcgtgtgaa

SEQ ID NO: 8103 - DNA, 25 bp, SARS Virus
tctagttaaaaaggcgcgtgtgaac

SEQ ID NO: 8104 - DNA, 25 bp, SARS Virus
ctagttaaaaacgcgcgtgtgaact

SEQ ID NO: 8105 - DNA, 25 bp, SARS Virus
tagttaaaaacgggcgtgtgaacta

SEQ ID NO: 8106 - DNA, 25 bp, SARS Virus
agttaaaaacgcgcgtgtgaactac

SEQ ID NO: 8107 - DNA, 25 bp, SARS Virus
gttaaaaacgcgggtgtgaactacg

SEQ ID NO: 8108 - DNA, 25 bp, SARS Virus
ttaaaaacgcgcgtgtgaactacgt

SEQ ID NO: 8109 - DNA, 25 bp, SARS Virus
taaaaacgcgcgggtgaactacgtc

SEQ ID NO: 8110 - DNA, 25 bp, SARS Virus
aaaaacgcgcgtgtgaactacgtcg

SEQ ID NO: 8111 - DNA, 25 bp, SARS Virus
aaaacgcgcgtgggaactacgtcgt

SEQ ID NO: 8112 - DNA, 25 bp, SARS Virus
aaacgcgcgtgtgaactacgtcgtt

SEQ ID NO: 8113 - DNA, 25 bp, SARS Virus
aacgcgcgtgtggactacgtcgttt

SEQ ID NO: 8114 - DNA, 25 bp, SARS Virus
acgcgcgtgtgagctacgtcgtttg

SEQ ID NO: 8115 - DNA, 25 bp, SARS Virus
cgcgcgtgtgaagtacgtcgtttgg

SEQ ID NO: 8116 - DNA, 25 bp, SARS Virus
gcgcgtgtgaacgacgtcgtttggt

SEQ ID NO: 8117 - DNA, 25 bp, SARS Virus
cgcgtgtgaactgcgtcgtttggtg

SEQ ID NO: 8118 - DNA, 25 bp, SARS Virus
gcgtgtgaactaggtcgtttggtga

SEQ ID NO: 8119 - DNA, 25 bp, SARS Virus
cgtgtgaactacgtcgtttggtgag

SEQ ID NO: 8120 - DNA, 25 bp, SARS Virus
gtgtgaactacggcgtttggtgagt

SEQ ID NO: 8121 - DNA, 25 bp, SARS Virus
tgtgaactacgtggtttggtgagtt

SEQ ID NO: 8122 - DNA, 25 bp, SARS Virus
gtgaactacgtcgtttggtgagtta

SEQ ID NO: 8123 - DNA, 25 bp, SARS Virus
tgaactacgtcggttggtgagttaa

SEQ ID NO: 8124 - DNA, 25 bp, SARS Virus
gaactacgtcgtgtggtgagttaag

SEQ ID NO: 8125 - DNA, 25 bp, SARS Virus
aactacgtcgttgggtgagttaagg

SEQ ID NO: 8126 - DNA, 25 bp, SARS Virus
actacgtcgtttggtgagttaagga

SEQ ID NO: 8127 - DNA, 25 bp, SARS Virus
ctacgtcgtttggtgagttaaggac

SEQ ID NO: 8128 - DNA, 25 bp, SARS Virus
tacgtcgtttggggagttaaggact

SEQ ID NO: 8129 - DNA, 25 bp, SARS Virus
acgtcgtttggtgagttaaggacta

SEQ ID NO: 8130 - DNA, 25 bp, SARS Virus
cgtcgtttggtgggttaaggactaa

SEQ ID NO: 8131 - DNA, 25 bp, SARS Virus
gtcgtttggtgagttaaggactaaa

SEQ ID NO: 8132 - DNA, 25 bp, SARS Virus
tcgtttggtgaggtaaggactaaac

SEQ ID NO: 8133 - DNA, 25 bp, SARS Virus
cgtttggtgagtgaaggactaaacg

SEQ ID NO: 8134 - DNA, 25 bp, SARS Virus
gtttggtgagttgaggactaaacgt

SEQ ID NO: 8135 - DNA, 25 bp, SARS Virus
tttggtgagttagggactaaacgtt

SEQ ID NO: 8136 - DNA, 25 bp, SARS Virus
ttggtgagttaaggactaaacgttt

SEQ ID NO: 8137 - DNA, 25 bp, SARS Virus
tggtgagttaaggactaaacgtttc

SEQ ID NO: 8138 - DNA, 25 bp, SARS Virus
ggtgagttaagggctaaacgtttct

SEQ ID NO: 8139 - DNA, 25 bp, SARS Virus
gtgagttaaggagtaaacgtttctc

SEQ ID NO: 8140 - DNA, 25 bp, SARS Virus
tgagttaaggacgaaacgtttctcg

SEQ ID NO: 8141 - DNA, 25 bp, SARS Virus
gagttaaggactgaacgtttctcgt

SEQ ID NO: 8142 - DNA, 25 bp, SARS Virus
agttaaggactagacgtttctcgtc

SEQ ID NO: 8143 - DNA, 25 bp, SARS Virus
gttaaggactaagcgtttctcgtcg

SEQ ID NO: 8144 - DNA, 25 bp, SARS Virus
ttaaggactaaaggtttctcgtcga

SEQ ID NO: 8145 - DNA, 25 bp, SARS Virus
taaggactaaacgtttctcgtcgac

SEQ ID NO: 8146 - DNA, 25 bp, SARS Virus
aaggactaaacggttctcgtcgaca

SEQ ID NO: 8147 - DNA, 25 bp, SARS Virus
aggactaaacgtgtctcgtcgacag

SEQ ID NO: 8148 - DNA, 25 bp, SARS Virus
ggactaaacgttgctcgtcgacagt

SEQ ID NO: 8149 - DNA, 25 bp, SARS Virus
gactaaacgtttgtcgtcgacagtg

SEQ ID NO: 8150 - DNA, 25 bp, SARS Virus
actaaacgtttcgcgtcgacagtgg

SEQ ID NO: 8151 - DNA, 25 bp, SARS Virus
ctaaacgtttctggtcgacagtggt

SEQ ID NO: 8152 - DNA, 25 bp, SARS Virus
taaacgtttctcgtcgacagtggta

SEQ ID NO: 8153 - DNA, 25 bp, SARS Virus
aaacgtttctcggcgacagtggtat

SEQ ID NO: 8154 - DNA, 25 bp, SARS Virus
aacgtttctcgtggacagtggtatg

SEQ ID NO: 8155 - DNA, 25 bp, SARS Virus
acgtttctcgtcgacagtggtatga

SEQ ID NO: 8156 - DNA, 25 bp, SARS Virus
cgtttctcgtcggcagtggtatgaa

SEQ ID NO: 8157 - DNA, 25 bp, SARS Virus
gtttctcgtcgagagtggtatgaac

SEQ ID NO: 8158 - DNA, 25 bp, SARS Virus
tttctcgtcgacggtggtatgaact

SEQ ID NO: 8159 - DNA, 25 bp, SARS Virus
ttctcgtcgacagtggtatgaacta

SEQ ID NO: 8160 - DNA, 25 bp, SARS Virus
tctcgtcgacaggggtatgaactac

SEQ ID NO: 8161 - DNA, 25 bp, SARS Virus
ctcgtcgacagtggtatgaactacc

SEQ ID NO: 8162 - DNA, 25 bp, SARS Virus
tcgtcgacagtggtatgaactacca

SEQ ID NO: 8163 - DNA, 25 bp, SARS Virus
cgtcgacagtgggatgaactaccat

SEQ ID NO: 8164 - DNA, 25 bp, SARS Virus
gtcgacagtggtgtgaactaccata

SEQ ID NO: 8165 - DNA, 25 bp, SARS Virus
tcgacagtggtaggaactaccataa

SEQ ID NO: 8166 - DNA, 25 bp, SARS Virus
cgacagtggtatgaactaccataaa

SEQ ID NO: 8167 - DNA, 25 bp, SARS Virus
gacagtggtatggactaccataaag

SEQ ID NO: 8168 - DNA, 25 bp, SARS Virus
acagtggtatgagctaccataaaga

SEQ ID NO: 8169 - DNA, 25 bp, SARS Virus
cagtggtatgaagtaccataaagac

SEQ ID NO: 8170 - DNA, 25 bp, SARS Virus
agtggtatgaacgaccataaagact

SEQ ID NO: 8171 - DNA, 25 bp, SARS Virus
gtggtatgaactgccataaagactt

SEQ ID NO: 8172 - DNA, 25 bp, SARS Virus
tggtatgaactagcataaagacttg

SEQ ID NO: 8173 - DNA, 25 bp, SARS Virus
ggtatgaactacgataaagacttgt

SEQ ID NO: 8174 - DNA, 25 bp, SARS Virus
gtatgaactaccgtaaagacttgtc

SEQ ID NO: 8175 - DNA, 25 bp, SARS Virus
tatgaactaccagaaagacttgtca

SEQ ID NO: 8176 - DNA, 25 bp, SARS Virus
atgaactaccatgaagacttgtcag

SEQ ID NO: 8177 - DNA, 25 bp, SARS Virus
tgaactaccatagagacttgtcagt

SEQ ID NO: 8178 - DNA, 25 bp, SARS Virus
gaactaccataaggacttgtcagta

SEQ ID NO: 8179 - DNA, 25 bp, SARS Virus
aactaccataaagacttgtcagtaa

SEQ ID NO: 8180 - DNA, 25 bp, SARS Virus
actaccataaaggcttgtcagtaat

SEQ ID NO: 8181 - DNA, 25 bp, SARS Virus
ctaccataaagagttgtcagtaatg

SEQ ID NO: 8182 - DNA, 25 bp, SARS Virus
taccataaagacgtgtcagtaatgc

SEQ ID NO: 8183 - DNA, 25 bp, SARS Virus
accataaagactggtcagtaatgca

SEQ ID NO: 8184 - DNA, 25 bp, SARS Virus
ccataaagacttgtcagtaatgcag

SEQ ID NO: 8185 - DNA, 25 bp, SARS Virus
cataaagacttggcagtaatgcaga

SEQ ID NO: 8186 - DNA, 25 bp, SARS Virus
ataaagacttgtgagtaatgcagaa

SEQ ID NO: 8187 - DNA, 25 bp, SARS Virus
taaagacttgtcggtaatgcagaac

SEQ ID NO: 8188 - DNA, 25 bp, SARS Virus
aaagacttgtcagtaatgcagaaca

SEQ ID NO: 8189 - DNA, 25 bp, SARS Virus
aagacttgtcaggaatgcagaacag

SEQ ID NO: 8190 - DNA, 25 bp, SARS Virus
agacttgtcagtgatgcagaacagc

SEQ ID NO: 8191 - DNA, 25 bp, SARS Virus
gacttgtcagtagtgcagaacagct

SEQ ID NO: 8192 - DNA, 25 bp, SARS Virus
acttgtcagtaaggcagaacagctg

SEQ ID NO: 8193 - DNA, 25 bp, SARS Virus
cttgtcagtaatgcagaacagctgc

SEQ ID NO: 8194 - DNA, 25 bp, SARS Virus
ttgtcagtaatggagaacagctgcg

SEQ ID NO: 8195 - DNA, 25 bp, SARS Virus
tgtcagtaatgcggaacagctgcgg

SEQ ID NO: 8196 - DNA, 25 bp, SARS Virus
gtcagtaatgcagaacagctgcggt

SEQ ID NO: 8197 - DNA, 25 bp, SARS Virus
tcagtaatgcaggacagctgcggta

SEQ ID NO: 8198 - DNA, 25 bp, SARS Virus
cagtaatgcagagcagctgcggtac

SEQ ID NO: 8199 - DNA, 25 bp, SARS Virus
agtaatgcagaagagctgcggtacc

SEQ ID NO: 8200 - DNA, 25 bp, SARS Virus
gtaatgcagaacggctgcggtacca

SEQ ID NO: 8201 - DNA, 25 bp, SARS Virus
taatgcagaacagctgcggtaccaa

SEQ ID NO: 8202 - DNA, 25 bp, SARS Virus
aatgcagaacaggtgcggtaccaaa

SEQ ID NO: 8203 - DNA, 25 bp, SARS Virus
atgcagaacagcggcggtaccaaat

SEQ ID NO: 8204 - DNA, 25 bp, SARS Virus
tgcagaacagctgcggtaccaaata

SEQ ID NO: 8205 - DNA, 25 bp, SARS Virus
gcagaacagctggggtaccaaatat

SEQ ID NO: 8206 - DNA, 25 bp, SARS Virus
cagaacagctgcggtaccaaatatg

SEQ ID NO: 8207 - DNA, 25 bp, SARS Virus
agaacagctgcggtaccaaatatga

SEQ ID NO: 8208 - DNA, 25 bp, SARS Virus
gaacagctgcgggaccaaatatgaa

SEQ ID NO: 8209 - DNA, 25 bp, SARS Virus
aacagctgcggtgccaaatatgaag

SEQ ID NO: 8210 - DNA, 25 bp, SARS Virus
acagctgcggtagcaaatatgaagt

SEQ ID NO: 8211 - DNA, 25 bp, SARS Virus
cagctgcggtacgaaatatgaagtc

SEQ ID NO: 8212 - DNA, 25 bp, SARS Virus
agctgcggtaccgaatatgaagtct

SEQ ID NO: 8213 - DNA, 25 bp, SARS Virus
gctgcggtaccagatatgaagtctg

SEQ ID NO: 8214 - DNA, 25 bp, SARS Virus
ctgcggtaccaagtatgaagtctgg

SEQ ID NO: 8215 - DNA, 25 bp, SARS Virus
tgcggtaccaaagatgaagtctgga

SEQ ID NO: 8216 - DNA, 25 bp, SARS Virus
gcggtaccaaatgtgaagtctggac

SEQ ID NO: 8217 - DNA, 25 bp, SARS Virus
cggtaccaaataggaagtctggacg

SEQ ID NO: 8218 - DNA, 25 bp, SARS Virus
ggtaccaaatatgaagtctggacga

SEQ ID NO: 8219 - DNA, 25 bp, SARS Virus
gtaccaaatatggagtctggacgag

SEQ ID NO: 8220 - DNA, 25 bp, SARS Virus
taccaaatatgaggtctggacgagt

SEQ ID NO: 8221 - DNA, 25 bp, SARS Virus
accaaatatgaagtctggacgagtg

SEQ ID NO: 8222 - DNA, 25 bp, SARS Virus
ccaaatatgaaggctggacgagtgg

SEQ ID NO: 8223 - DNA, 25 bp, SARS Virus
caaatatgaagtgtggacgagtggt

SEQ ID NO: 8224 - DNA, 25 bp, SARS Virus
aaatatgaagtcgggacgagtggtt

SEQ ID NO: 8225 - DNA, 25 bp, SARS Virus
aatatgaagtctggacgagtggttg

SEQ ID NO: 8226 - DNA, 25 bp, SARS Virus
atatgaagtctggacgagtggttgt

SEQ ID NO: 8227 - DNA, 25 bp, SARS Virus
tatgaagtctgggcgagtggttgtc

SEQ ID NO: 8228 - DNA, 25 bp, SARS Virus
atgaagtctggaggagtggttgtca

SEQ ID NO: 8229 - DNA, 25 bp, SARS Virus
tgaagtctggacgagtggttgtcac

SEQ ID NO: 8230 - DNA, 25 bp, SARS Virus
gaagtctggacgggtggttgtcaca

SEQ ID NO: 8231 - DNA, 25 bp, SARS Virus
aagtctggacgagtggttgtcacag

SEQ ID NO: 8232 - DNA, 25 bp, SARS Virus
agtctggacgaggggttgtcacagt

SEQ ID NO: 8233 - DNA, 25 bp, SARS Virus
gtctggacgagtggttgtcacagta

SEQ ID NO: 8234 - DNA, 25 bp, SARS Virus
tctggacgagtggttgtcacagtaa

SEQ ID NO: 8235 - DNA, 25 bp, SARS Virus
ctggacgagtgggtgtcacagtaat

SEQ ID NO: 8236 - DNA, 25 bp, SARS Virus
tggacgagtggtggtcacagtaata

SEQ ID NO: 8237 - DNA, 25 bp, SARS Virus
ggacgagtggttgtcacagtaataa

SEQ ID NO: 8238 - DNA, 25 bp, SARS Virus
gacgagtggttggcacagtaataat

SEQ ID NO: 8239 - DNA, 25 bp, SARS Virus
acgagtggttgtgacagtaataata

SEQ ID NO: 8240 - DNA, 25 bp, SARS Virus
cgagtggttgtcgcagtaataatac

SEQ ID NO: 8241 - DNA, 25 bp, SARS Virus
gagtggttgtcagagtaataatacc

SEQ ID NO: 8242 - DNA, 25 bp, SARS Virus
agtggttgtcacggtaataataccg

SEQ ID NO: 8243 - DNA, 25 bp, SARS Virus
gtggttgtcacagtaataataccgt

SEQ ID NO: 8244 - DNA, 25 bp, SARS Virus
tggttgtcacaggaataataccgta

SEQ ID NO: 8245 - DNA, 25 bp, SARS Virus
ggttgtcacagtgataataccgtat

SEQ ID NO: 8246 - DNA, 25 bp, SARS Virus
gttgtcacagtagtaataccgtata

SEQ ID NO: 8247 - DNA, 25 bp, SARS Virus
ttgtcacagtaagaataccgtatac

SEQ ID NO: 8248 - DNA, 25 bp, SARS Virus
tgtcacagtaatgataccgtataca

SEQ ID NO: 8249 - DNA, 25 bp, SARS Virus
gtcacagtaatagtaccgtatacat

SEQ ID NO: 8250 - DNA, 25 bp, SARS Virus
tcacagtaataagaccgtatacatt

SEQ ID NO: 8251 - DNA, 25 bp, SARS Virus
cacagtaataatgccgtatacattg

SEQ ID NO: 8252 - DNA, 25 bp, SARS Virus
acagtaataatagcgtatacattga

SEQ ID NO: 8253 - DNA, 25 bp, SARS Virus
cagtaataatacggtatacattgac

SEQ ID NO: 8254 - DNA, 25 bp, SARS Virus
agtaataataccgtatacattgacc

SEQ ID NO: 8255 - DNA, 25 bp, SARS Virus
gtaataataccggatacattgacca

SEQ ID NO: 8256 - DNA, 25 bp, SARS Virus
taataataccgtgtacattgaccac

SEQ ID NO: 8257 - DNA, 25 bp, SARS Virus
aataataccgtagacattgaccacc

SEQ ID NO: 8258 - DNA, 25 bp, SARS Virus
ataataccgtatgcattgaccacca

SEQ ID NO: 8259 - DNA, 25 bp, SARS Virus
taataccgtatagattgaccaccag

SEQ ID NO: 8260 - DNA, 25 bp, SARS Virus
aataccgtatacgttgaccaccaga

SEQ ID NO: 8261 - DNA, 25 bp, SARS Virus
ataccgtatacagtgaccaccagaa

SEQ ID NO: 8262 - DNA, 25 bp, SARS Virus
taccgtatacatggaccaccagaac

SEQ ID NO: 8263 - DNA, 25 bp, SARS Virus
accgtatacattgaccaccagaaca

SEQ ID NO: 8264 - DNA, 25 bp, SARS Virus
ccgtatacattggccaccagaacat

SEQ ID NO: 8265 - DNA, 25 bp, SARS Virus
cgtatacattgagcaccagaacatg

SEQ ID NO: 8266 - DNA, 25 bp, SARS Virus
gtatacattgacgaccagaacatgt

SEQ ID NO: 8267 - DNA, 25 bp, SARS Virus
tatacattgaccgccagaacatgtt

SEQ ID NO: 8268 - DNA, 25 bp, SARS Virus
atacattgaccagcagaacatgttg

SEQ ID NO: 8269 - DNA, 25 bp, SARS Virus
tacattgaccacgagaacatgttgt

SEQ ID NO: 8270 - DNA, 25 bp, SARS Virus
acattgaccaccggaacatgttgtc

SEQ ID NO: 8271 - DNA, 25 bp, SARS Virus
cattgaccaccagaacatgttgtct

SEQ ID NO: 8272 - DNA, 25 bp, SARS Virus
attgaccaccaggacatgttgtctg

SEQ ID NO: 8273 - DNA, 25 bp, SARS Virus
ttgaccaccagagcatgttgtctga

SEQ ID NO: 8274 - DNA, 25 bp, SARS Virus
tgaccaccagaagatgttgtctgaa

SEQ ID NO: 8275 - DNA, 25 bp, SARS Virus
gaccaccagaacgtgttgtctgaag

SEQ ID NO: 8276 - DNA, 25 bp, SARS Virus
accaccagaacaggttgtctgaaga

SEQ ID NO: 8277 - DNA, 25 bp, SARS Virus
ccaccagaacatgttgtctgaagag

SEQ ID NO: 8278 - DNA, 25 bp, SARS Virus
caccagaacatggtgtctgaagagt

SEQ ID NO: 8279 - DNA, 25 bp, SARS Virus
accagaacatgtggtctgaagagtc

SEQ ID NO: 8280 - DNA, 25 bp, SARS Virus
ccagaacatgttgtctgaagagtca

SEQ ID NO: 8281 - DNA, 25 bp, SARS Virus
cagaacatgttggctgaagagtcac

SEQ ID NO: 8282 - DNA, 25 bp, SARS Virus
agaacatgttgtgtgaagagtcacc

SEQ ID NO: 8283 - DNA, 25 bp, SARS Virus
gaacatgttgtcggaagagtcacca

SEQ ID NO: 8284 - DNA, 25 bp, SARS Virus
aacatgttgtctgaagagtcaccaa

SEQ ID NO: 8285 - DNA, 25 bp, SARS Virus
acatgttgtctggagagtcaccaac

SEQ ID NO: 8286 - DNA, 25 bp, SARS Virus
catgttgtctgaggagtcaccaaca

SEQ ID NO: 8287 - DNA, 25 bp, SARS Virus
atgttgtctgaagagtcaccaacag

SEQ ID NO: 8288 - DNA, 25 bp, SARS Virus
tgttgtctgaagggtcaccaacaga

SEQ ID NO: 8289 - DNA, 25 bp, SARS Virus
gttgtctgaagagtcaccaacagat

SEQ ID NO: 8290 - DNA, 25 bp, SARS Virus
ttgtctgaagaggcaccaacagatt

SEQ ID NO: 8291 - DNA, 25 bp, SARS Virus
tgtctgaagagtgaccaacagatta

SEQ ID NO: 8292 - DNA, 25 bp, SARS Virus
gtctgaagagtcgccaacagattag

SEQ ID NO: 8293 - DNA, 25 bp, SARS Virus
tctgaagagtcagcaacagattaga

SEQ ID NO: 8294 - DNA, 25 bp, SARS Virus
ctgaagagtcacgaacagattagaa

SEQ ID NO: 8295 - DNA, 25 bp, SARS Virus
tgaagagtcaccgacagattagaaa

SEQ ID NO: 8296 - DNA, 25 bp, SARS Virus
gaagagtcaccagcagattagaaaa

SEQ ID NO: 8297 - DNA, 25 bp, SARS Virus
aagagtcaccaagagattagaaaac

SEQ ID NO: 8298 - DNA, 25 bp, SARS Virus
agagtcaccaacggattagaaaacc

SEQ ID NO: 8299 - DNA, 25 bp, SARS Virus
gagtcaccaacagattagaaaaccc

SEQ ID NO: 8300 - DNA, 25 bp, SARS Virus
agtcaccaacaggttagaaaacccg

SEQ ID NO: 8301 - DNA, 25 bp, SARS Virus
gtcaccaacagagtagaaaacccgt

SEQ ID NO: 8302 - DNA, 25 bp, SARS Virus
tcaccaacagatgagaaaacccgtg

SEQ ID NO: 8303 - DNA, 25 bp, SARS Virus
caccaacagattggaaaacccgtga

SEQ ID NO: 8304 - DNA, 25 bp, SARS Virus
accaacagattagaaaacccgtgat

SEQ ID NO: 8305 - DNA, 25 bp, SARS Virus
ccaacagattaggaaacccgtgatg

SEQ ID NO: 8306 - DNA, 25 bp, SARS Virus
caacagattagagaacccgtgatga

SEQ ID NO: 8307 - DNA, 25 bp, SARS Virus
aacagattagaagacccgtgatgac

SEQ ID NO: 8308 - DNA, 25 bp, SARS Virus
acagattagaaagcccgtgatgaca

SEQ ID NO: 8309 - DNA, 25 bp, SARS Virus
cagattagaaaagccgtgatgacaa

SEQ ID NO: 8310 - DNA, 25 bp, SARS Virus
agattagaaaacgcgtgatgacaac

SEQ ID NO: 8311 - DNA, 25 bp, SARS Virus
gattagaaaaccggtgatgacaact

SEQ ID NO: 8312 - DNA, 25 bp, SARS Virus
attagaaaacccgtgatgacaactt

SEQ ID NO: 8313 - DNA, 25 bp, SARS Virus
ttagaaaacccgggatgacaacttt

SEQ ID NO: 8314 - DNA, 25 bp, SARS Virus
tagaaaacccgtgatgacaactttt

SEQ ID NO: 8315 - DNA, 25 bp, SARS Virus
agaaaacccgtggtgacaacttttt

SEQ ID NO: 8316 - DNA, 25 bp, SARS Virus
gaaaacccgtgaggacaactttttg

SEQ ID NO: 8317 - DNA, 25 bp, SARS Virus
aaaacccgtgatgacaactttttga

SEQ ID NO: 8318 - DNA, 25 bp, SARS Virus
aaacccgtgatggcaactttttgag

SEQ ID NO: 8319 - DNA, 25 bp, SARS Virus
aacccgtgatgagaactttttgagt

SEQ ID NO: 8320 - DNA, 25 bp, SARS Virus
acccgtgatgacgactttttgagtc

SEQ ID NO: 8321 - DNA, 25 bp, SARS Virus
cccgtgatgacagctttttgagtcc

SEQ ID NO: 8322 - DNA, 25 bp, SARS Virus
ccgtgatgacaagtttttgagtccg

SEQ ID NO: 8323 - DNA, 25 bp, SARS Virus
cgtgatgacaacgttttgagtccgg

SEQ ID NO: 8324 - DNA, 25 bp, SARS Virus
gtgatgacaactgtttgagtccgga

SEQ ID NO: 8325 - DNA, 25 bp, SARS Virus
tgatgacaacttgttgagtccggat

SEQ ID NO: 8326 - DNA, 25 bp, SARS Virus
gatgacaactttgtgagtccggata

SEQ ID NO: 8327 - DNA, 25 bp, SARS Virus
atgacaacttttggagtccggatag

SEQ ID NO: 8328 - DNA, 25 bp, SARS Virus
tgacaactttttgagtccggataga

SEQ ID NO: 8329 - DNA, 25 bp, SARS Virus
gacaactttttgggtccggatagaa

SEQ ID NO: 8330 - DNA, 25 bp, SARS Virus
acaactttttgagtccggatagaaa

SEQ ID NO: 8331 - DNA, 25 bp, SARS Virus
caactttttgaggccggatagaaac

SEQ ID NO: 8332 - DNA, 25 bp, SARS Virus
aactttttgagtgcggatagaaact

SEQ ID NO: 8333 - DNA, 25 bp, SARS Virus
actttttgagtcgggatagaaactt

SEQ ID NO: 8334 - DNA, 25 bp, SARS Virus
ctttttgagtccggatagaaactta

SEQ ID NO: 8335 - DNA, 25 bp, SARS Virus
tttttgagtccggatagaaacttac

SEQ ID NO: 8336 - DNA, 25 bp, SARS Virus
ttttgagtccgggtagaaacttacc

SEQ ID NO: 8337 - DNA, 25 bp, SARS Virus
tttgagtccggagagaaacttacct

SEQ ID NO: 8338 - DNA, 25 bp, SARS Virus
ttgagtccggatggaaacttaccta

SEQ ID NO: 8339 - DNA, 25 bp, SARS Virus
tgagtccggatagaaacttacctaa

SEQ ID NO: 8340 - DNA, 25 bp, SARS Virus
gagtccggataggaacttacctaac

SEQ ID NO: 8341 - DNA, 25 bp, SARS Virus
agtccggatagagacttacctaact

SEQ ID NO: 8342 - DNA, 25 bp, SARS Virus
gtccggatagaagcttacctaactc

SEQ ID NO: 8343 - DNA, 25 bp, SARS Virus
tccggatagaaagttacctaactcc

SEQ ID NO: 8344 - DNA, 25 bp, SARS Virus
ccggatagaaacgtacctaactccg

SEQ ID NO: 8345 - DNA, 25 bp, SARS Virus
cggatagaaactgacctaactccgc

SEQ ID NO: 8346 - DNA, 25 bp, SARS Virus
ggatagaaacttgcctaactccgct

SEQ ID NO: 8347 - DNA, 25 bp, SARS Virus
gatagaaacttagctaactccgctt

SEQ ID NO: 8348 - DNA, 25 bp, SARS Virus
atagaaacttacgtaactccgcttt

SEQ ID NO: 8349 - DNA, 25 bp, SARS Virus
tagaaacttaccgaactccgctttg

SEQ ID NO: 8350 - DNA, 25 bp, SARS Virus
agaaacttacctgactccgctttga

SEQ ID NO: 8351 - DNA, 25 bp, SARS Virus
gaaacttacctagctccgctttgaa

SEQ ID NO: 8352 - DNA, 25 bp, SARS Virus
aaacttacctaagtccgctttgaat

SEQ ID NO: 8353 - DNA, 25 bp, SARS Virus
aacttacctaacgccgctttgaatc

SEQ ID NO: 8354 - DNA, 25 bp, SARS Virus
acttacctaactgcgctttgaatca

SEQ ID NO: 8355 - DNA, 25 bp, SARS Virus
cttacctaactcggctttgaatcac

SEQ ID NO: 8356 - DNA, 25 bp, SARS Virus
ttacctaactccgctttgaatcacg

SEQ ID NO: 8357 - DNA, 25 bp, SARS Virus
tacctaactccggtttgaatcacgt

SEQ ID NO: 8358 - DNA, 25 bp, SARS Virus
acctaactccgcgttgaatcacgtc

SEQ ID NO: 8359 - DNA, 25 bp, SARS Virus
cctaactccgctgtgaatcacgtcc

SEQ ID NO: 8360 - DNA, 25 bp, SARS Virus
ctaactccgcttggaatcacgtcct

SEQ ID NO: 8361 - DNA, 25 bp, SARS Virus
taactccgctttgaatcacgtcctc

SEQ ID NO: 8362 - DNA, 25 bp, SARS Virus
aactccgctttggatcacgtcctca

SEQ ID NO: 8363 - DNA, 25 bp, SARS Virus
actccgctttgagtcacgtcctcaa

SEQ ID NO: 8364 - DNA, 25 bp, SARS Virus
ctccgctttgaagcacgtcctcaac

SEQ ID NO: 8365 - DNA, 25 bp, SARS Virus
tccgctttgaatgacgtcctcaact

SEQ ID NO: 8366 - DNA, 25 bp, SARS Virus
ccgctttgaatcgcgtcctcaactt

SEQ ID NO: 8367 - DNA, 25 bp, SARS Virus
cgctttgaatcaggtcctcaactta

SEQ ID NO: 8368 - DNA, 25 bp, SARS Virus
gctttgaatcacgtcctcaacttaa

SEQ ID NO: 8369 - DNA, 25 bp, SARS Virus
ctttgaatcacggcctcaacttaaa

SEQ ID NO: 8370 - DNA, 25 bp, SARS Virus
tttgaatcacgtgctcaacttaaag

SEQ ID NO: 8371 - DNA, 25 bp, SARS Virus
ttgaatcacgtcgtcaacttaaaga

SEQ ID NO: 8372 - DNA, 25 bp, SARS Virus
tgaatcacgtccgcaacttaaagag

SEQ ID NO: 8373 - DNA, 25 bp, SARS Virus
gaatcacgtcctgaacttaaagagt

SEQ ID NO: 8374 - DNA, 25 bp, SARS Virus
aatcacgtcctcgacttaaagagtt

SEQ ID NO: 8375 - DNA, 25 bp, SARS Virus
atcacgtcctcagcttaaagagttc

SEQ ID NO: 8376 - DNA, 25 bp, SARS Virus
tcacgtcctcaagttaaagagttcc

SEQ ID NO: 8377 - DNA, 25 bp, SARS Virus
cacgtcctcaacgtaaagagttcct

SEQ ID NO: 8378 - DNA, 25 bp, SARS Virus
acgtcctcaactgaaagagttccta

SEQ ID NO: 8379 - DNA, 25 bp, SARS Virus
cgtcctcaacttgaagagttcctac

SEQ ID NO: 8380 - DNA, 25 bp, SARS Virus
gtcctcaacttagagagttcctacg

SEQ ID NO: 8381 - DNA, 25 bp, SARS Virus
tcctcaacttaaggagttcctacga

SEQ ID NO: 8382 - DNA, 25 bp, SARS Virus
cctcaacttaaagagttcctacgaa

SEQ ID NO: 8383 - DNA, 25 bp, SARS Virus
ctcaacttaaagggttcctacgaac

SEQ ID NO: 8384 - DNA, 25 bp, SARS Virus
tcaacttaaagagttcctacgaacc

SEQ ID NO: 8385 - DNA, 25 bp, SARS Virus
caacttaaagaggtcctacgaaccc

SEQ ID NO: 8386 - DNA, 25 bp, SARS Virus
aacttaaagagtgcctacgaaccct

SEQ ID NO: 8387 - DNA, 25 bp, SARS Virus
acttaaagagttgctacgaaccctc

SEQ ID NO: 8388 - DNA, 25 bp, SARS Virus
cttaaagagttcgtacgaaccctct

SEQ ID NO: 8389 - DNA, 25 bp, SARS Virus
ttaaagagttccgacgaaccctcta

SEQ ID NO: 8390 - DNA, 25 bp, SARS Virus
taaagagttcctgcgaaccctctaa

SEQ ID NO: 8391 - DNA, 25 bp, SARS Virus
aaagagttcctaggaaccctctaag

SEQ ID NO: 8392 - DNA, 25 bp, SARS Virus
aagagttcctacgaaccctctaaga

SEQ ID NO: 8393 - DNA, 25 bp, SARS Virus
agagttcctacggaccctctaagag

SEQ ID NO: 8394 - DNA, 25 bp, SARS Virus
gagttcctacgagccctctaagagt

SEQ ID NO: 8395 - DNA, 25 bp, SARS Virus
agttcctacgaagcctctaagagtt

SEQ ID NO: 8396 - DNA, 25 bp, SARS Virus
gttcctacgaacgctctaagagttt

SEQ ID NO: 8397 - DNA, 25 bp, SARS Virus
ttcctacgaaccgtctaagagttta

SEQ ID NO: 8398 - DNA, 25 bp, SARS Virus
tcctacgaacccgctaagagtttaa

SEQ ID NO: 8399 - DNA, 25 bp, SARS Virus
cctacgaaccctgtaagagtttaaa

SEQ ID NO: 8400 - DNA, 25 bp, SARS Virus
ctacgaaccctcgaagagtttaaag

SEQ ID NO: 8401 - DNA, 25 bp, SARS Virus
tacgaaccctctgagagtttaaaga

SEQ ID NO: 8402 - DNA, 25 bp, SARS Virus
acgaaccctctaggagtttaaagag

SEQ ID NO: 8403 - DNA, 25 bp, SARS Virus
cgaaccctctaagagtttaaagagt

SEQ ID NO: 8404 - DNA, 25 bp, SARS Virus
gaaccctctaagggtttaaagagta

SEQ ID NO: 8405 - DNA, 25 bp, SARS Virus
aaccctctaagagtttaaagagtaa

SEQ ID NO: 8406 - DNA, 25 bp, SARS Virus
accctctaagaggttaaagagtaat

SEQ ID NO: 8407 - DNA, 25 bp, SARS Virus
ccctctaagagtgtaaagagtaatg

SEQ ID NO: 8408 - DNA, 25 bp, SARS Virus
cctctaagagttgaaagagtaatgt

SEQ ID NO: 8409 - DNA, 25 bp, SARS Virus
ctctaagagtttgaagagtaatgtc

SEQ ID NO: 8410 - DNA, 25 bp, SARS Virus
tctaagagtttagagagtaatgtcc

SEQ ID NO: 8411 - DNA, 25 bp, SARS Virus
ctaagagtttaaggagtaatgtcca

SEQ ID NO: 8412 - DNA, 25 bp, SARS Virus
taagagtttaaagagtaatgtccac

SEQ ID NO: 8413 - DNA, 25 bp, SARS Virus
aagagtttaaagggtaatgtccaca

SEQ ID NO: 8414 - DNA, 25 bp, SARS Virus
agagtttaaagagtaatgtccacaa

SEQ ID NO: 8415 - DNA, 25 bp, SARS Virus
gagtttaaagaggaatgtccacaaa

SEQ ID NO: 8416 - DNA, 25 bp, SARS Virus
agtttaaagagtgatgtccacaaaa

SEQ ID NO: 8417 - DNA, 25 bp, SARS Virus
gtttaaagagtagtgtccacaaaaa

SEQ ID NO: 8418 - DNA, 25 bp, SARS Virus
tttaaagagtaaggtccacaaaaac

SEQ ID NO: 8419 - DNA, 25 bp, SARS Virus
ttaaagagtaatgtccacaaaaact

SEQ ID NO: 8420 - DNA, 25 bp, SARS Virus
taaagagtaatggccacaaaaactg

SEQ ID NO: 8421 - DNA, 25 bp, SARS Virus
aaagagtaatgtgcacaaaaactgt

SEQ ID NO: 8422 - DNA, 25 bp, SARS Virus
aagagtaatgtcgacaaaaactgta

SEQ ID NO: 8423 - DNA, 25 bp, SARS Virus
agagtaatgtccgcaaaaactgtag

SEQ ID NO: 8424 - DNA, 25 bp, SARS Virus
gagtaatgtccagaaaaactgtagc

SEQ ID NO: 8425 - DNA, 25 bp, SARS Virus
gtgatatttctctgaactaatgttc

SEQ ID NO: 8426 - DNA, 25 bp, SARS Virus
tgatatttctcataactaatgttca

SEQ ID NO: 8427 - DNA, 25 bp, SARS Virus
gatatttctcagtactaatgttcag

SEQ ID NO: 8428 - DNA, 25 bp, SARS Virus
atatttctcagatctaatgttcaga

SEQ ID NO: 8429 - DNA, 25 bp, SARS Virus
tatttctcagaattaatgttcagaa

SEQ ID NO: 8430 - DNA, 25 bp, SARS Virus
atttctcagaactaatgttcagaaa

SEQ ID NO: 8431 - DNA, 25 bp, SARS Virus
tttctcagaacttatgttcagaaag

SEQ ID NO: 8432 - DNA, 25 bp, SARS Virus
ttctcagaactattgttcagaaagt

SEQ ID NO: 8433 - DNA, 25 bp, SARS Virus
tctcagaactaatgttcagaaagtt

SEQ ID NO: 8434 - DNA, 25 bp, SARS Virus
ctcagaactaattttcagaaagttt

SEQ ID NO: 8435 - DNA, 25 bp, SARS Virus
tcagaactaatgttcagaaagtttt

SEQ ID NO: 8436 - DNA, 25 bp, SARS Virus
cagaactaatgttcagaaagttttg

SEQ ID NO: 8437 - DNA, 25 bp, SARS Virus
agaactaatgtttagaaagttttgg

SEQ ID NO: 8438 - DNA, 25 bp, SARS Virus
gaactaatgttctgaaagttttggt

SEQ ID NO: 8439 - DNA, 25 bp, SARS Virus
aactaatgttcataaagttttggta

SEQ ID NO: 8440 - DNA, 25 bp, SARS Virus
actaatgttcagtaagttttggtaa

SEQ ID NO: 8441 - DNA, 25 bp, SARS Virus
ctaatgttcagatagttttggtaac

SEQ ID NO: 8442 - DNA, 25 bp, SARS Virus
taatgttcagaatgttttggtaaca

SEQ ID NO: 8443 - DNA, 25 bp, SARS Virus
aatgttcagaaatttttggtaacaa

SEQ ID NO: 8444 - DNA, 25 bp, SARS Virus
atgttcagaaagttttggtaacaac

SEQ ID NO: 8445 - DNA, 25 bp, SARS Virus
tgttcagaaagttttggtaacaact

SEQ ID NO: 8446 - DNA, 25 bp, SARS Virus
gttcagaaagttttggtaacaactc

SEQ ID NO: 8447 - DNA, 25 bp, SARS Virus
ttcagaaagttttggtaacaactca

SEQ ID NO: 8448 - DNA, 25 bp, SARS Virus
tcagaaagtttttgtaacaactcag

SEQ ID NO: 8449 - DNA, 25 bp, SARS Virus
cagaaagttttgttaacaactcagg

SEQ ID NO: 8450 - DNA, 25 bp, SARS Virus
agaaagttttggtaacaactcagga

SEQ ID NO: 8451 - DNA, 25 bp, SARS Virus
gaaagttttggttacaactcaggac

SEQ ID NO: 8452 - DNA, 25 bp, SARS Virus
aaagttttggtatcaactcaggacg

SEQ ID NO: 8453 - DNA, 25 bp, SARS Virus
aagttttggtaataactcaggacgc

SEQ ID NO: 8454 - DNA, 25 bp, SARS Virus
agttttggtaactactcaggacgcc

SEQ ID NO: 8455 - DNA, 25 bp, SARS Virus
gttttggtaacatctcaggacgcca

SEQ ID NO: 8456 - DNA, 25 bp, SARS Virus
ttttggtaacaattcaggacgccat

SEQ ID NO: 8457 - DNA, 25 bp, SARS Virus
tttggtaacaactcaggacgccatt

SEQ ID NO: 8458 - DNA, 25 bp, SARS Virus
ttggtaacaacttaggacgccattg

SEQ ID NO: 8459 - DNA, 25 bp, SARS Virus
tggtaacaactctggacgccattga

SEQ ID NO: 8460 - DNA, 25 bp, SARS Virus
ggtaacaactcatgacgccattgat

SEQ ID NO: 8461 - DNA, 25 bp, SARS Virus
gtaacaactcagtacgccattgata

SEQ ID NO: 8462 - DNA, 25 bp, SARS Virus
taacaactcaggtcgccattgatat

SEQ ID NO: 8463 - DNA, 25 bp, SARS Virus
aacaactcaggatgccattgatatt

SEQ ID NO: 8464 - DNA, 25 bp, SARS Virus
acaactcaggactccattgatattt

SEQ ID NO: 8465 - DNA, 25 bp, SARS Virus
caactcaggacgtcattgatatttc

SEQ ID NO: 8466 - DNA, 25 bp, SARS Virus
aactcaggacgctattgatatttca

SEQ ID NO: 8467 - DNA, 25 bp, SARS Virus
actcaggacgcctttgatatttcaa

SEQ ID NO: 8468 - DNA, 25 bp, SARS Virus
ctcaggacgccattgatatttcaat

SEQ ID NO: 8469 - DNA, 25 bp, SARS Virus
tcaggacgccattgatatttcaatg

SEQ ID NO: 8470 - DNA, 25 bp, SARS Virus
caggacgccatttatatttcaatgg

SEQ ID NO: 8471 - DNA, 25 bp, SARS Virus
aggacgccattgttatttcaatggt

SEQ ID NO: 8472 - DNA, 25 bp, SARS Virus
ggacgccattgatatttcaatggtt

SEQ ID NO: 8473 - DNA, 25 bp, SARS Virus
gacgccattgatttttcaatggttc

SEQ ID NO: 8474 - DNA, 25 bp, SARS Virus
acgccattgatatttcaatggttcc

SEQ ID NO: 8475 - DNA, 25 bp, SARS Virus
cgccattgatatttcaatggttccc

SEQ ID NO: 8476 - DNA, 25 bp, SARS Virus
gccattgatatttcaatggttccct

SEQ ID NO: 8477 - DNA, 25 bp, SARS Virus
ccattgatattttaatggttccctt

SEQ ID NO: 8478 - DNA, 25 bp, SARS Virus
cattgatatttctatggttcccttt

SEQ ID NO: 8479 - DNA, 25 bp, SARS Virus
attgatatttcattggttccctttc

SEQ ID NO: 8480 - DNA, 25 bp, SARS Virus
ttgatatttcaatggttccctttcg

SEQ ID NO: 8481 - DNA, 25 bp, SARS Virus
tgatatttcaattgttccctttcgg

SEQ ID NO: 8482 - DNA, 25 bp, SARS Virus
gatatttcaatgtttccctttcggg

SEQ ID NO: 8483 - DNA, 25 bp, SARS Virus
atatttcaatggttccctttcgggc

SEQ ID NO: 8484 - DNA, 25 bp, SARS Virus
tatttcaatggttccctttcgggca

SEQ ID NO: 8485 - DNA, 25 bp, SARS Virus
atttcaatggtttcctttcgggcat

SEQ ID NO: 8486 - DNA, 25 bp, SARS Virus
tttcaatggttctctttcgggcatt

SEQ ID NO: 8487 - DNA, 25 bp, SARS Virus
ttcaatggttccttttcgggcattt

SEQ ID NO: 8488 - DNA, 25 bp, SARS Virus
tcaatggttccctttcgggcatttt

SEQ ID NO: 8489 - DNA, 25 bp, SARS Virus
caatggttccctttcgggcattttc

SEQ ID NO: 8490 - DNA, 25 bp, SARS Virus
aatggttccctttcgggcattttcc

SEQ ID NO: 8491 - DNA, 25 bp, SARS Virus
atggttcccttttgggcattttcca

SEQ ID NO: 8492 - DNA, 25 bp, SARS Virus
tggttccctttctggcattttccac

SEQ ID NO: 8493 - DNA, 25 bp, SARS Virus
ggttccctttcgtgcattttccacg

SEQ ID NO: 8494 - DNA, 25 bp, SARS Virus
gttccctttcggtcattttccacga

SEQ ID NO: 8495 - DNA, 25 bp, SARS Virus
ttccctttcgggtattttccacgaa

SEQ ID NO: 8496 - DNA, 25 bp, SARS Virus
tccctttcgggctttttccacgaac

SEQ ID NO: 8497 - DNA, 25 bp, SARS Virus
ccctttcgggcattttccacgaacc

SEQ ID NO: 8498 - DNA, 25 bp, SARS Virus
cctttcgggcattttccacgaacct

SEQ ID NO: 8499 - DNA, 25 bp, SARS Virus
ctttcgggcattttccacgaacctt

SEQ ID NO: 8500 - DNA, 25 bp, SARS Virus
tttcgggcattttccacgaaccttg

SEQ ID NO: 8501 - DNA, 25 bp, SARS Virus
ttcgggcatttttcacgaaccttgt

SEQ ID NO: 8502 - DNA, 25 bp, SARS Virus
tcgggcattttctacgaaccttgta

SEQ ID NO: 8503 - DNA, 25 bp, SARS Virus
cgggcattttcctcgaaccttgtaa

SEQ ID NO: 8504 - DNA, 25 bp, SARS Virus
gggcattttccatgaaccttgtaac

SEQ ID NO: 8505 - DNA, 25 bp, SARS Virus
ggcattttccactaaccttgtaacc

SEQ ID NO: 8506 - DNA, 25 bp, SARS Virus
gcattttccacgtaccttgtaacct

SEQ ID NO: 8507 - DNA, 25 bp, SARS Virus
cattttccacgatccttgtaacctg

SEQ ID NO: 8508 - DNA, 25 bp, SARS Virus
attttccacgaatcttgtaacctgt

SEQ ID NO: 8509 - DNA, 25 bp, SARS Virus
ttttccacgaactttgtaacctgtt

SEQ ID NO: 8510 - DNA, 25 bp, SARS Virus
tttccacgaaccttgtaacctgttg

SEQ ID NO: 8511 - DNA, 25 bp, SARS Virus
ttccacgaaccttgtaacctgttgt

SEQ ID NO: 8512 - DNA, 25 bp, SARS Virus
tccacgaaccttttaacctgttgtc

SEQ ID NO: 8513 - DNA, 25 bp, SARS Virus
ccacgaaccttgtaacctgttgtct

SEQ ID NO: 8514 - DNA, 25 bp, SARS Virus
cacgaaccttgttacctgttgtctc

SEQ ID NO: 8515 - DNA, 25 bp, SARS Virus
acgaaccttgtatcctgttgtctct

SEQ ID NO: 8516 - DNA, 25 bp, SARS Virus
cgaaccttgtaatctgttgtctcta

SEQ ID NO: 8517 - DNA, 25 bp, SARS Virus
gaaccttgtaacttgttgtctctag

SEQ ID NO: 8518 - DNA, 25 bp, SARS Virus
aaccttgtaacctgttgtctctagt

SEQ ID NO: 8519 - DNA, 25 bp, SARS Virus
accttgtaaccttttgtctctagtc

SEQ ID NO: 8520 - DNA, 25 bp, SARS Virus
ccttgtaacctgttgtctctagtca

SEQ ID NO: 8521 - DNA, 25 bp, SARS Virus
cttgtaacctgttgtctctagtcaa

SEQ ID NO: 8522 - DNA, 25 bp, SARS Virus
ttgtaacctgttttctctagtcaaa

SEQ ID NO: 8523 - DNA, 25 bp, SARS Virus
tgtaacctgttgtctctagtcaaaa

SEQ ID NO: 8524 - DNA, 25 bp, SARS Virus
gtaacctgttgtttctagtcaaaat

SEQ ID NO: 8525 - DNA, 25 bp, SARS Virus
taacctgttgtctctagtcaaaatt

SEQ ID NO: 8526 - DNA, 25 bp, SARS Virus
aacctgttgtctttagtcaaaattg

SEQ ID NO: 8527 - DNA, 25 bp, SARS Virus
acctgttgtctctagtcaaaattgt

SEQ ID NO: 8528 - DNA, 25 bp, SARS Virus
cctgttgtctcttgtcaaaattgtg

SEQ ID NO: 8529 - DNA, 25 bp, SARS Virus
ctgttgtctctattcaaaattgtgg

SEQ ID NO: 8530 - DNA, 25 bp, SARS Virus
tgttgtctctagtcaaaattgtggt

SEQ ID NO: 8531 - DNA, 25 bp, SARS Virus
gttgtctctagttaaaattgtggtg

SEQ ID NO: 8532 - DNA, 25 bp, SARS Virus
ttgtctctagtctaaattgtggtga

SEQ ID NO: 8533 - DNA, 25 bp, SARS Virus
tgtctctagtcataattgtggtgac

SEQ ID NO: 8534 - DNA, 25 bp, SARS Virus
gtctctagtcaatattgtggtgaca

SEQ ID NO: 8535 - DNA, 25 bp, SARS Virus
tctctagtcaaatttgtggtgacac

SEQ ID NO: 8536 - DNA, 25 bp, SARS Virus
ctctagtcaaaattgtggtgacaca

SEQ ID NO: 8537 - DNA, 25 bp, SARS Virus
tctagtcaaaattgtggtgacacac

SEQ ID NO: 8538 - DNA, 25 bp, SARS Virus
ctagtcaaaattttggtgacacacc

SEQ ID NO: 8539 - DNA, 25 bp, SARS Virus
tagtcaaaattgtggtgacacacca

SEQ ID NO: 8540 - DNA, 25 bp, SARS Virus
agtcaaaattgttgtgacacaccaa

SEQ ID NO: 8541 - DNA, 25 bp, SARS Virus
gtcaaaattgtgttgacacaccaaa

SEQ ID NO: 8542 - DNA, 25 bp, SARS Virus
tcaaaattgtggtgacacaccaaaa

SEQ ID NO: 8543 - DNA, 25 bp, SARS Virus
caaaattgtggttacacaccaaaag

SEQ ID NO: 8544 - DNA, 25 bp, SARS Virus
aaaattgtggtgtcacaccaaaagg

SEQ ID NO: 8545 - DNA, 25 bp, SARS Virus
aaattgtggtgatacaccaaaaggg

SEQ ID NO: 8546 - DNA, 25 bp, SARS Virus
aattgtggtgactcaccaaaaggga

SEQ ID NO: 8547 - DNA, 25 bp, SARS Virus
attgtggtgacataccaaaagggag

SEQ ID NO: 8548 - DNA, 25 bp, SARS Virus
ttgtggtgacactccaaaagggagt

SEQ ID NO: 8549 - DNA, 25 bp, SARS Virus
tgtggtgacacatcaaaagggagtg

SEQ ID NO: 8550 - DNA, 25 bp, SARS Virus
gtggtgacacactaaaagggagtgt

SEQ ID NO: 8551 - DNA, 25 bp, SARS Virus
tggtgacacacctaaagggagtgtc

SEQ ID NO: 8552 - DNA, 25 bp, SARS Virus
ggtgacacaccataagggagtgtcc

SEQ ID NO: 8553 - DNA, 25 bp, SARS Virus
gtgacacaccaatagggagtgtccg

SEQ ID NO: 8554 - DNA, 25 bp, SARS Virus
tgacacaccaaatgggagtgtccga

SEQ ID NO: 8555 - DNA, 25 bp, SARS Virus
gacacaccaaaatggagtgtccgac

SEQ ID NO: 8556 - DNA, 25 bp, SARS Virus
acacaccaaaagtgagtgtccgacg

SEQ ID NO: 8557 - DNA, 25 bp, SARS Virus
cacaccaaaaggtagtgtccgacga

SEQ ID NO: 8558 - DNA, 25 bp, SARS Virus
acaccaaaagggtgtgtccgacgac

SEQ ID NO: 8559 - DNA, 25 bp, SARS Virus
caccaaaagggattgtccgacgacc

SEQ ID NO: 8560 - DNA, 25 bp, SARS Virus
accaaaagggagtgtccgacgacca

SEQ ID NO: 8561 - DNA, 25 bp, SARS Virus
ccaaaagggagtttccgacgaccac

SEQ ID NO: 8562 - DNA, 25 bp, SARS Virus
caaaagggagtgtccgacgaccaca

SEQ ID NO: 8563 - DNA, 25 bp, SARS Virus
aaaagggagtgttcgacgaccacaa

SEQ ID NO: 8564 - DNA, 25 bp, SARS Virus
aaagggagtgtctgacgaccacaat

SEQ ID NO: 8565 - DNA, 25 bp, SARS Virus
aagggagtgtcctacgaccacaata

SEQ ID NO: 8566 - DNA, 25 bp, SARS Virus
agggagtgtccgtcgaccacaatag

SEQ ID NO: 8567 - DNA, 25 bp, SARS Virus
gggagtgtccgatgaccacaatagt

SEQ ID NO: 8568 - DNA, 25 bp, SARS Virus
ggagtgtccgactaccacaatagtc

SEQ ID NO: 8569 - DNA, 25 bp, SARS Virus
gagtgtccgacgtccacaatagtct

SEQ ID NO: 8570 - DNA, 25 bp, SARS Virus
agtgtccgacgatcacaatagtcta

SEQ ID NO: 8571 - DNA, 25 bp, SARS Virus
gtgtccgacgactacaatagtctag

SEQ ID NO: 8572 - DNA, 25 bp, SARS Virus
tgtccgacgacctcaatagtctagt

SEQ ID NO: 8573 - DNA, 25 bp, SARS Virus
gtccgacgaccataatagtctagtt

SEQ ID NO: 8574 - DNA, 25 bp, SARS Virus
tccgacgaccactatagtctagtta

SEQ ID NO: 8575 - DNA, 25 bp, SARS Virus
ccgacgaccacattagtctagttaa

SEQ ID NO: 8576 - DNA, 25 bp, SARS Virus
cgacgaccacaatagtctagttaaa

SEQ ID NO: 8577 - DNA, 25 bp, SARS Virus
gacgaccacaattgtctagttaaaa

SEQ ID NO: 8578 - DNA, 25 bp, SARS Virus
acgaccacaatattctagttaaaaa

SEQ ID NO: 8579 - DNA, 25 bp, SARS Virus
cgaccacaatagtctagttaaaaac

SEQ ID NO: 8580 - DNA, 25 bp, SARS Virus
gaccacaatagtttagttaaaaacg

SEQ ID NO: 8581 - DNA, 25 bp, SARS Virus
accacaatagtctagttaaaaacgc

SEQ ID NO: 8582 - DNA, 25 bp, SARS Virus
ccacaatagtcttgttaaaaacgcg

SEQ ID NO: 8583 - DNA, 25 bp, SARS Virus
cacaatagtctatttaaaaacgcgc

SEQ ID NO: 8584 - DNA, 25 bp, SARS Virus
acaatagtctagttaaaaacgcgcg

SEQ ID NO: 8585 - DNA, 25 bp, SARS Virus
caatagtctagttaaaaacgcgcgt

SEQ ID NO: 8586 - DNA, 25 bp, SARS Virus
aatagtctagtttaaaacgcgcgtg

SEQ ID NO: 8587 - DNA, 25 bp, SARS Virus
atagtctagttataaacgcgcgtgt

SEQ ID NO: 8588 - DNA, 25 bp, SARS Virus
tagtctagttaataacgcgcgtgtg

SEQ ID NO: 8589 - DNA, 25 bp, SARS Virus
agtctagttaaatacgcgcgtgtga

SEQ ID NO: 8590 - DNA, 25 bp, SARS Virus
gtctagttaaaatcgcgcgtgtgaa

SEQ ID NO: 8591 - DNA, 25 bp, SARS Virus
tctagttaaaaatgcgcgtgtgaac

SEQ ID NO: 8592 - DNA, 25 bp, SARS Virus
ctagttaaaaactcgcgtgtgaact

SEQ ID NO: 8593 - DNA, 25 bp, SARS Virus
tagttaaaaacgtgcgtgtgaacta

SEQ ID NO: 8594 - DNA, 25 bp, SARS Virus
agttaaaaacgctcgtgtgaactac

SEQ ID NO: 8595 - DNA, 25 bp, SARS Virus
gttaaaaacgcgtgtgtgaactacg

SEQ ID NO: 8596 - DNA, 25 bp, SARS Virus
ttaaaaacgcgcttgtgaactacgt

SEQ ID NO: 8597 - DNA, 25 bp, SARS Virus
taaaaacgcgcgtgtgaactacgtc

SEQ ID NO: 8598 - DNA, 25 bp, SARS Virus
aaaaacgcgcgtttgaactacgtcg

SEQ ID NO: 8599 - DNA, 25 bp, SARS Virus
aaaacgcgcgtgtgaactacgtcgt

SEQ ID NO: 8600 - DNA, 25 bp, SARS Virus
aaacgcgcgtgttaactacgtcgtt

SEQ ID NO: 8601 - DNA, 25 bp, SARS Virus
aacgcgcgtgtgtactacgtcgttt

SEQ ID NO: 8602 - DNA, 25 bp, SARS Virus
acgcgcgtgtgatctacgtcgtttg

SEQ ID NO: 8603 - DNA, 25 bp, SARS Virus
cgcgcgtgtgaattacgtcgtttgg

SEQ ID NO: 8604 - DNA, 25 bp, SARS Virus
gcgcgtgtgaactacgtcgtttggt

SEQ ID NO: 8605 - DNA, 25 bp, SARS Virus
cgcgtgtgaacttcgtcgtttggtg

SEQ ID NO: 8606 - DNA, 25 bp, SARS Virus
gcgtgtgaactatgtcgtttggtga

SEQ ID NO: 8607 - DNA, 25 bp, SARS Virus
cgtgtgaactacttcgtttggtgag

SEQ ID NO: 8608 - DNA, 25 bp, SARS Virus
gtgtgaactacgtcgtttggtgagt

SEQ ID NO: 8609 - DNA, 25 bp, SARS Virus
tgtgaactacgttgtttggtgagtt

SEQ ID NO: 8610 - DNA, 25 bp, SARS Virus
gtgaactacgtcttttggtgagtta

SEQ ID NO: 8611 - DNA, 25 bp, SARS Virus
tgaactacgtcgtttggtgagttaa

SEQ ID NO: 8612 - DNA, 25 bp, SARS Virus
gaactacgtcgtttggtgagttaag

SEQ ID NO: 8613 - DNA, 25 bp, SARS Virus
aactacgtcgtttggtgagttaagg

SEQ ID NO: 8614 - DNA, 25 bp, SARS Virus
actacgtcgttttgtgagttaagga

SEQ ID NO: 8615 - DNA, 25 bp, SARS Virus
ctacgtcgtttgttgagttaaggac

SEQ ID NO: 8616 - DNA, 25 bp, SARS Virus
tacgtcgtttggtgagttaaggact

SEQ ID NO: 8617 - DNA, 25 bp, SARS Virus
acgtcgtttggttagttaaggacta

SEQ ID NO: 8618 - DNA, 25 bp, SARS Virus
cgtcgtttggtgtgttaaggactaa

SEQ ID NO: 8619 - DNA, 25 bp, SARS Virus
gtcgtttggtgatttaaggactaaa

SEQ ID NO: 8620 - DNA, 25 bp, SARS Virus
tcgtttggtgagttaaggactaaac

SEQ ID NO: 8621 - DNA, 25 bp, SARS Virus
cgtttggtgagttaaggactaaacg

SEQ ID NO: 8622 - DNA, 25 bp, SARS Virus
gtttggtgagtttaggactaaacgt

SEQ ID NO: 8623 - DNA, 25 bp, SARS Virus
tttggtgagttatggactaaacgtt

SEQ ID NO: 8624 - DNA, 25 bp, SARS Virus
ttggtgagttaatgactaaacgttt

SEQ ID NO: 8625 - DNA, 25 bp, SARS Virus
tggtgagttaagtactaaacgtttc

SEQ ID NO: 8626 - DNA, 25 bp, SARS Virus
ggtgagttaaggtctaaacgtttct

SEQ ID NO: 8627 - DNA, 25 bp, SARS Virus
gtgagttaaggattaaacgtttctc

SEQ ID NO: 8628 - DNA, 25 bp, SARS Virus
tgagttaaggactaaacgtttctcg

SEQ ID NO: 8629 - DNA, 25 bp, SARS Virus
gagttaaggacttaacgtttctcgt

SEQ ID NO: 8630 - DNA, 25 bp, SARS Virus
agttaaggactatacgtttctcgtc

SEQ ID NO: 8631 - DNA, 25 bp, SARS Virus
gttaaggactaatcgtttctcgtcg

SEQ ID NO: 8632 - DNA, 25 bp, SARS Virus
ttaaggactaaatgtttctcgtcga

SEQ ID NO: 8633 - DNA, 25 bp, SARS Virus
taaggactaaacttttctcgtcgac

SEQ ID NO: 8634 - DNA, 25 bp, SARS Virus
aaggactaaacgtttctcgtcgaca

SEQ ID NO: 8635 - DNA, 25 bp, SARS Virus
aggactaaacgtttctcgtcgacag

SEQ ID NO: 8636 - DNA, 25 bp, SARS Virus
ggactaaacgtttctcgtcgacagt

SEQ ID NO: 8637 - DNA, 25 bp, SARS Virus
gactaaacgtttttcgtcgacagtg

SEQ ID NO: 8638 - DNA, 25 bp, SARS Virus
actaaacgtttctcgtcgacagtgg

SEQ ID NO: 8639 - DNA, 25 bp, SARS Virus
ctaaacgtttcttgtcgacagtggt

SEQ ID NO: 8640 - DNA, 25 bp, SARS Virus
taaacgtttctcttcgacagtggta

SEQ ID NO: 8641 - DNA, 25 bp, SARS Virus
aaacgtttctcgtcgacagtggtat

SEQ ID NO: 8642 - DNA, 25 bp, SARS Virus
aacgtttctcgttgacagtggtatg

SEQ ID NO: 8643 - DNA, 25 bp, SARS Virus
acgtttctcgtctacagtggtatga

SEQ ID NO: 8644 - DNA, 25 bp, SARS Virus
cgtttctcgtcgtcagtggtatgaa

SEQ ID NO: 8645 - DNA, 25 bp, SARS Virus
gtttctcgtcgatagtggtatgaac

SEQ ID NO: 8646 - DNA, 25 bp, SARS Virus
tttctcgtcgactgtggtatgaact

SEQ ID NO: 8647 - DNA, 25 bp, SARS Virus
ttctcgtcgacattggtatgaacta

SEQ ID NO: 8648 - DNA, 25 bp, SARS Virus
tctcgtcgacagtggtatgaactac

SEQ ID NO: 8649 - DNA, 25 bp, SARS Virus
ctcgtcgacagttgtatgaactacc

SEQ ID NO: 8650 - DNA, 25 bp, SARS Virus
tcgtcgacagtgttatgaactacca

SEQ ID NO: 8651 - DNA, 25 bp, SARS Virus
cgtcgacagtggtatgaactaccat

SEQ ID NO: 8652 - DNA, 25 bp, SARS Virus
gtcgacagtggtttgaactaccata

SEQ ID NO: 8653 - DNA, 25 bp, SARS Virus
tcgacagtggtatgaactaccataa

SEQ ID NO: 8654 - DNA, 25 bp, SARS Virus
cgacagtggtattaactaccataaa

SEQ ID NO: 8655 - DNA, 25 bp, SARS Virus
gacagtggtatgtactaccataaag

SEQ ID NO: 8656 - DNA, 25 bp, SARS Virus
acagtggtatgatctaccataaaga

SEQ ID NO: 8657 - DNA, 25 bp, SARS Virus
cagtggtatgaattaccataaagac

SEQ ID NO: 8658 - DNA, 25 bp, SARS Virus
agtggtatgaactaccataaagact

SEQ ID NO: 8659 - DNA, 25 bp, SARS Virus
gtggtatgaacttccataaagactt

SEQ ID NO: 8660 - DNA, 25 bp, SARS Virus
tggtatgaactatcataaagacttg

SEQ ID NO: 8661 - DNA, 25 bp, SARS Virus
ggtatgaactactataaagacttgt

SEQ ID NO: 8662 - DNA, 25 bp, SARS Virus
gtatgaactaccttaaagacttgtc

SEQ ID NO: 8663 - DNA, 25 bp, SARS Virus
tatgaactaccataaagacttgtca

SEQ ID NO: 8664 - DNA, 25 bp, SARS Virus
atgaactaccattaagacttgtcag

SEQ ID NO: 8665 - DNA, 25 bp, SARS Virus
tgaactaccatatagacttgtcagt

SEQ ID NO: 8666 - DNA, 25 bp, SARS Virus
gaactaccataatgacttgtcagta

SEQ ID NO: 8667 - DNA, 25 bp, SARS Virus
aactaccataaatacttgtcagtaa

SEQ ID NO: 8668 - DNA, 25 bp, SARS Virus
actaccataaagtcttgtcagtaat

SEQ ID NO: 8669 - DNA, 25 bp, SARS Virus
ctaccataaagatttgtcagtaatg

SEQ ID NO: 8670 - DNA, 25 bp, SARS Virus
taccataaagacttgtcagtaatgc

SEQ ID NO: 8671 - DNA, 25 bp, SARS Virus
accataaagacttgtcagtaatgca

SEQ ID NO: 8672 - DNA, 25 bp, SARS Virus
ccataaagacttttcagtaatgcag

SEQ ID NO: 8673 - DNA, 25 bp, SARS Virus
cataaagacttgtcagtaatgcaga

SEQ ID NO: 8674 - DNA, 25 bp, SARS Virus
ataaagacttgttagtaatgcagaa

SEQ ID NO: 8675 - DNA, 25 bp, SARS Virus
taaagacttgtctgtaatgcagaac

SEQ ID NO: 8676 - DNA, 25 bp, SARS Virus
aaagacttgtcattaatgcagaaca

SEQ ID NO: 8677 - DNA, 25 bp, SARS Virus
aagacttgtcagtaatgcagaacag

SEQ ID NO: 8678 - DNA, 25 bp, SARS Virus
agacttgtcagttatgcagaacagc

SEQ ID NO: 8679 - DNA, 25 bp, SARS Virus
gacttgtcagtattgcagaacagct

SEQ ID NO: 8680 - DNA, 25 bp, SARS Virus
acttgtcagtaatgcagaacagctg

SEQ ID NO: 8681 - DNA, 25 bp, SARS Virus
cttgtcagtaattcagaacagctgc

SEQ ID NO: 8682 - DNA, 25 bp, SARS Virus
ttgtcagtaatgtagaacagctgcg

SEQ ID NO: 8683 - DNA, 25 bp, SARS Virus
tgtcagtaatgctgaacagctgcgg

SEQ ID NO: 8684 - DNA, 25 bp, SARS Virus
gtcagtaatgcataacagctgcggt

SEQ ID NO: 8685 - DNA, 25 bp, SARS Virus
tcagtaatgcagtacagctgcggta

SEQ ID NO: 8686 - DNA, 25 bp, SARS Virus
cagtaatgcagatcagctgcggtac

SEQ ID NO: 8687 - DNA, 25 bp, SARS Virus
agtaatgcagaatagctgcggtacc

SEQ ID NO: 8688 - DNA, 25 bp, SARS Virus
gtaatgcagaactgctgcggtacca

SEQ ID NO: 8689 - DNA, 25 bp, SARS Virus
taatgcagaacatctgcggtaccaa

SEQ ID NO: 8690 - DNA, 25 bp, SARS Virus
aatgcagaacagttgcggtaccaaa

SEQ ID NO: 8691 - DNA, 25 bp, SARS Virus
atgcagaacagctgcggtaccaaat

SEQ ID NO: 8692 - DNA, 25 bp, SARS Virus
tgcagaacagcttcggtaccaaata

SEQ ID NO: 8693 - DNA, 25 bp, SARS Virus
gcagaacagctgtggtaccaaatat

SEQ ID NO: 8694 - DNA, 25 bp, SARS Virus
cagaacagctgctgtaccaaatatg

SEQ ID NO: 8695 - DNA, 25 bp, SARS Virus
agaacagctgcgttaccaaatatga

SEQ ID NO: 8696 - DNA, 25 bp, SARS Virus
gaacagctgcggtaccaaatatgaa

SEQ ID NO: 8697 - DNA, 25 bp, SARS Virus
aacagctgcggttccaaatatgaag

SEQ ID NO: 8698 - DNA, 25 bp, SARS Virus
acagctgcggtatcaaatatgaagt

SEQ ID NO: 8699 - DNA, 25 bp, SARS Virus
cagctgcggtactaaatatgaagtc

SEQ ID NO: 8700 - DNA, 25 bp, SARS Virus
agctgcggtacctaatatgaagtct

SEQ ID NO: 8701 - DNA, 25 bp, SARS Virus
gctgcggtaccatatatgaagtctg

SEQ ID NO: 8702 - DNA, 25 bp, SARS Virus
ctgcggtaccaattatgaagtctgg

SEQ ID NO: 8703 - DNA, 25 bp, SARS Virus
tgcggtaccaaatatgaagtctgga

SEQ ID NO: 8704 - DNA, 25 bp, SARS Virus
gcggtaccaaatttgaagtctggac

SEQ ID NO: 8705 - DNA, 25 bp, SARS Virus
cggtaccaaatatgaagtctggacg

SEQ ID NO: 8706 - DNA, 25 bp, SARS Virus
ggtaccaaatattaagtctggacga

SEQ ID NO: 8707 - DNA, 25 bp, SARS Virus
gtaccaaatatgtagtctggacgag

SEQ ID NO: 8708 - DNA, 25 bp, SARS Virus
taccaaatatgatgtctggacgagt

SEQ ID NO: 8709 - DNA, 25 bp, SARS Virus
accaaatatgaattctggacgagtg

SEQ ID NO: 8710 - DNA, 25 bp, SARS Virus
ccaaatatgaagtctggacgagtgg

SEQ ID NO: 8711 - DNA, 25 bp, SARS Virus
caaatatgaagtttggacgagtggt

SEQ ID NO: 8712 - DNA, 25 bp, SARS Virus
aaatatgaagtctggacgagtggtt

SEQ ID NO: 8713 - DNA, 25 bp, SARS Virus
aatatgaagtcttgacgagtggttg

SEQ ID NO: 8714 - DNA, 25 bp, SARS Virus
atatgaagtctgtacgagtggttgt

SEQ ID NO: 8715 - DNA, 25 bp, SARS Virus
tatgaagtctggtcgagtggttgtc

SEQ ID NO: 8716 - DNA, 25 bp, SARS Virus
atgaagtctggatgagtggttgtca

SEQ ID NO: 8717 - DNA, 25 bp, SARS Virus
tgaagtctggactagtggttgtcac

SEQ ID NO: 8718 - DNA, 25 bp, SARS Virus
gaagtctggacgtgtggttgtcaca

SEQ ID NO: 8719 - DNA, 25 bp, SARS Virus
aagtctggacgattggttgtcacag

SEQ ID NO: 8720 - DNA, 25 bp, SARS Virus
agtctggacgagtggttgtcacagt

SEQ ID NO: 8721 - DNA, 25 bp, SARS Virus
gtctggacgagttgttgtcacagta

SEQ ID NO: 8722 - DNA, 25 bp, SARS Virus
tctggacgagtgtttgtcacagtaa

SEQ ID NO: 8723 - DNA, 25 bp, SARS Virus
ctggacgagtggttgtcacagtaat

SEQ ID NO: 8724 - DNA, 25 bp, SARS Virus
tggacgagtggttgtcacagtaata

SEQ ID NO: 8725 - DNA, 25 bp, SARS Virus
ggacgagtggttttcacagtaataa

SEQ ID NO: 8726 - DNA, 25 bp, SARS Virus
gacgagtggttgtcacagtaataat

SEQ ID NO: 8727 - DNA, 25 bp, SARS Virus
acgagtggttgttacagtaataata

SEQ ID NO: 8728 - DNA, 25 bp, SARS Virus
cgagtggttgtctcagtaataatac

SEQ ID NO: 8729 - DNA, 25 bp, SARS Virus
gagtggttgtcatagtaataatacc

SEQ ID NO: 8730 - DNA, 25 bp, SARS Virus
agtggttgtcactgtaataataccg

SEQ ID NO: 8731 - DNA, 25 bp, SARS Virus
gtggttgtcacattaataataccgt

SEQ ID NO: 8732 - DNA, 25 bp, SARS Virus
tggttgtcacagtaataataccgta

SEQ ID NO: 8733 - DNA, 25 bp, SARS Virus
ggttgtcacagttataataccgtat

SEQ ID NO: 8734 - DNA, 25 bp, SARS Virus
gttgtcacagtattaataccgtata

SEQ ID NO: 8735 - DNA, 25 bp, SARS Virus
ttgtcacagtaataataccgtatac

SEQ ID NO: 8736 - DNA, 25 bp, SARS Virus
tgtcacagtaattataccgtataca

SEQ ID NO: 8737 - DNA, 25 bp, SARS Virus
gtcacagtaatattaccgtatacat

SEQ ID NO: 8738 - DNA, 25 bp, SARS Virus
tcacagtaataataccgtatacatt

SEQ ID NO: 8739 - DNA, 25 bp, SARS Virus
cacagtaataattccgtatacattg

SEQ ID NO: 8740 - DNA, 25 bp, SARS Virus
acagtaataatatcgtatacattga

SEQ ID NO: 8741 - DNA, 25 bp, SARS Virus
cagtaataatactgtatacattgac

SEQ ID NO: 8742 - DNA, 25 bp, SARS Virus
agtaataataccttatacattgacc

SEQ ID NO: 8743 - DNA, 25 bp, SARS Virus
gtaataataccgtatacattgacca

SEQ ID NO: 8744 - DNA, 25 bp, SARS Virus
taataataccgtttacattgaccac

SEQ ID NO: 8745 - DNA, 25 bp, SARS Virus
aataataccgtatacattgaccacc

SEQ ID NO: 8746 - DNA, 25 bp, SARS Virus
ataataccgtattcattgaccacca

SEQ ID NO: 8747 - DNA, 25 bp, SARS Virus
taataccgtatatattgaccaccag

SEQ ID NO: 8748 - DNA, 25 bp, SARS Virus
aataccgtatactttgaccaccaga

SEQ ID NO: 8749 - DNA, 25 bp, SARS Virus
ataccgtatacattgaccaccagaa

SEQ ID NO: 8750 - DNA, 25 bp, SARS Virus
taccgtatacattgaccaccagaac

SEQ ID NO: 8751 - DNA, 25 bp, SARS Virus
accgtatacatttaccaccagaaca

SEQ ID NO: 8752 - DNA, 25 bp, SARS Virus
ccgtatacattgtccaccagaacat

SEQ ID NO: 8753 - DNA, 25 bp, SARS Virus
cgtatacattgatcaccagaacatg

SEQ ID NO: 8754 - DNA, 25 bp, SARS Virus
gtatacattgactaccagaacatgt

SEQ ID NO: 8755 - DNA, 25 bp, SARS Virus
tatacattgacctccagaacatgtt

SEQ ID NO: 8756 - DNA, 25 bp, SARS Virus
atacattgaccatcagaacatgttg

SEQ ID NO: 8757 - DNA, 25 bp, SARS Virus
tacattgaccactagaacatgttgt

SEQ ID NO: 8758 - DNA, 25 bp, SARS Virus
acattgaccacctgaacatgttgtc

SEQ ID NO: 8759 - DNA, 25 bp, SARS Virus
cattgaccaccataacatgttgtct

SEQ ID NO: 8760 - DNA, 25 bp, SARS Virus
attgaccaccagtacatgttgtctg

SEQ ID NO: 8761 - DNA, 25 bp, SARS Virus
ttgaccaccagatcatgttgtctga

SEQ ID NO: 8762 - DNA, 25 bp, SARS Virus
tgaccaccagaatatgttgtctgaa

SEQ ID NO: 8763 - DNA, 25 bp, SARS Virus
gaccaccagaacttgttgtctgaag

SEQ ID NO: 8764 - DNA, 25 bp, SARS Virus
accaccagaacatgttgtctgaaga

SEQ ID NO: 8765 - DNA, 25 bp, SARS Virus
ccaccagaacattttgtctgaagag

SEQ ID NO: 8766 - DNA, 25 bp, SARS Virus
caccagaacatgttgtctgaagagt

SEQ ID NO: 8767 - DNA, 25 bp, SARS Virus
accagaacatgttgtctgaagagtc

SEQ ID NO: 8768 - DNA, 25 bp, SARS Virus
ccagaacatgttttctgaagagtca

SEQ ID NO: 8769 - DNA, 25 bp, SARS Virus
cagaacatgttgtctgaagagtcac

SEQ ID NO: 8770 - DNA, 25 bp, SARS Virus
agaacatgttgtttgaagagtcacc

SEQ ID NO: 8771 - DNA, 25 bp, SARS Virus
gaacatgttgtctgaagagtcacca

SEQ ID NO: 8772 - DNA, 25 bp, SARS Virus
aacatgttgtcttaagagtcaccaa

SEQ ID NO: 8773 - DNA, 25 bp, SARS Virus
acatgttgtctgtagagtcaccaac

SEQ ID NO: 8774 - DNA, 25 bp, SARS Virus
catgttgtctgatgagtcaccaaca

SEQ ID NO: 8775 - DNA, 25 bp, SARS Virus
atgttgtctgaatagtcaccaacag

SEQ ID NO: 8776 - DNA, 25 bp, SARS Virus
tgttgtctgaagtgtcaccaacaga

SEQ ID NO: 8777 - DNA, 25 bp, SARS Virus
gttgtctgaagattcaccaacagat

SEQ ID NO: 8778 - DNA, 25 bp, SARS Virus
ttgtctgaagagtcaccaacagatt

SEQ ID NO: 8779 - DNA, 25 bp, SARS Virus
tgtctgaagagttaccaacagatta

SEQ ID NO: 8780 - DNA, 25 bp, SARS Virus
gtctgaagagtctccaacagattag

SEQ ID NO: 8781 - DNA, 25 bp, SARS Virus
tctgaagagtcatcaacagattaga

SEQ ID NO: 8782 - DNA, 25 bp, SARS Virus
ctgaagagtcactaacagattagaa

SEQ ID NO: 8783 - DNA, 25 bp, SARS Virus
tgaagagtcacctacagattagaaa

SEQ ID NO: 8784 - DNA, 25 bp, SARS Virus
gaagagtcaccatcagattagaaaa

SEQ ID NO: 8785 - DNA, 25 bp, SARS Virus
aagagtcaccaatagattagaaaac

SEQ ID NO: 8786 - DNA, 25 bp, SARS Virus
agagtcaccaactgattagaaaacc

SEQ ID NO: 8787 - DNA, 25 bp, SARS Virus
gagtcaccaacatattagaaaaccc

SEQ ID NO: 8788 - DNA, 25 bp, SARS Virus
agtcaccaacagtttagaaaacccg

SEQ ID NO: 8789 - DNA, 25 bp, SARS Virus
gtcaccaacagattagaaaacccgt

SEQ ID NO: 8790 - DNA, 25 bp, SARS Virus
tcaccaacagattagaaaacccgtg

SEQ ID NO: 8791 - DNA, 25 bp, SARS Virus
caccaacagatttgaaaacccgtga

SEQ ID NO: 8792 - DNA, 25 bp, SARS Virus
accaacagattataaaacccgtgat

SEQ ID NO: 8793 - DNA, 25 bp, SARS Virus
ccaacagattagtaaacccgtgatg

SEQ ID NO: 8794 - DNA, 25 bp, SARS Virus
caacagattagataacccgtgatga

SEQ ID NO: 8795 - DNA, 25 bp, SARS Virus
aacagattagaatacccgtgatgac

SEQ ID NO: 8796 - DNA, 25 bp, SARS Virus
acagattagaaatcccgtgatgaca

SEQ ID NO: 8797 - DNA, 25 bp, SARS Virus
cagattagaaaatccgtgatgacaa

SEQ ID NO: 8798 - DNA, 25 bp, SARS Virus
agattagaaaactcgtgatgacaac

SEQ ID NO: 8799 - DNA, 25 bp, SARS Virus
gattagaaaacctgtgatgacaact

SEQ ID NO: 8800 - DNA, 25 bp, SARS Virus
attagaaaacccttgatgacaactt

SEQ ID NO: 8801 - DNA, 25 bp, SARS Virus
ttagaaaacccgtgatgacaacttt

SEQ ID NO: 8802 - DNA, 25 bp, SARS Virus
tagaaaacccgttatgacaactttt

SEQ ID NO: 8803 - DNA, 25 bp, SARS Virus
agaaaacccgtgttgacaacttttt

SEQ ID NO: 8804 - DNA, 25 bp, SARS Virus
gaaaacccgtgatgacaactttttg

SEQ ID NO: 8805 - DNA, 25 bp, SARS Virus
aaaacccgtgattacaactttttga

SEQ ID NO: 8806 - DNA, 25 bp, SARS Virus
aaacccgtgatgtcaactttttgag

SEQ ID NO: 8807 - DNA, 25 bp, SARS Virus
aacccgtgatgataactttttgagt

SEQ ID NO: 8808 - DNA, 25 bp, SARS Virus
acccgtgatgactactttttgagtc

SEQ ID NO: 8809 - DNA, 25 bp, SARS Virus
cccgtgatgacatctttttgagtcc

SEQ ID NO: 8810 - DNA, 25 bp, SARS Virus
ccgtgatgacaattttttgagtccg

SEQ ID NO: 8811 - DNA, 25 bp, SARS Virus
cgtgatgacaactttttgagtccgg

SEQ ID NO: 8812 - DNA, 25 bp, SARS Virus
gtgatgacaactttttgagtccgga

SEQ ID NO: 8813 - DNA, 25 bp, SARS Virus
tgatgacaactttttgagtccggat

SEQ ID NO: 8814 - DNA, 25 bp, SARS Virus
gatgacaactttttgagtccggata

SEQ ID NO: 8815 - DNA, 25 bp, SARS Virus
atgacaactttttgagtccggatag

SEQ ID NO: 8816 - DNA, 25 bp, SARS Virus
tgacaacttttttagtccggataga

SEQ ID NO: 8817 - DNA, 25 bp, SARS Virus
gacaactttttgtgtccggatagaa

SEQ ID NO: 8818 - DNA, 25 bp, SARS Virus
acaactttttgattccggatagaaa

SEQ ID NO: 8819 - DNA, 25 bp, SARS Virus
caactttttgagtccggatagaaac

SEQ ID NO: 8820 - DNA, 25 bp, SARS Virus
aactttttgagttcggatagaaact

SEQ ID NO: 8821 - DNA, 25 bp, SARS Virus
actttttgagtctggatagaaactt

SEQ ID NO: 8822 - DNA, 25 bp, SARS Virus
ctttttgagtcctgatagaaactta

SEQ ID NO: 8823 - DNA, 25 bp, SARS Virus
tttttgagtccgtatagaaacttac

SEQ ID NO: 8824 - DNA, 25 bp, SARS Virus
ttttgagtccggttagaaacttacc

SEQ ID NO: 8825 - DNA, 25 bp, SARS Virus
tttgagtccggatagaaacttacct

SEQ ID NO: 8826 - DNA, 25 bp, SARS Virus
ttgagtccggattgaaacttaccta

SEQ ID NO: 8827 - DNA, 25 bp, SARS Virus
tgagtccggatataaacttacctaa

SEQ ID NO: 8828 - DNA, 25 bp, SARS Virus
gagtccggatagtaacttacctaac

SEQ ID NO: 8829 - DNA, 25 bp, SARS Virus
agtccggatagatacttacctaact

SEQ ID NO: 8830 - DNA, 25 bp, SARS Virus
gtccggatagaatcttacctaactc

SEQ ID NO: 8831 - DNA, 25 bp, SARS Virus
tccggatagaaatttacctaactcc

SEQ ID NO: 8832 - DNA, 25 bp, SARS Virus
ccggatagaaacttacctaactccg

SEQ ID NO: 8833 - DNA, 25 bp, SARS Virus
cggatagaaacttacctaactccgc

SEQ ID NO: 8834 - DNA, 25 bp, SARS Virus
ggatagaaactttcctaactccgct

SEQ ID NO: 8835 - DNA, 25 bp, SARS Virus
gatagaaacttatctaactccgctt

SEQ ID NO: 8836 - DNA, 25 bp, SARS Virus
atagaaacttacttaactccgcttt

SEQ ID NO: 8837 - DNA, 25 bp, SARS Virus
tagaaacttacctaactccgctttg

SEQ ID NO: 8838 - DNA, 25 bp, SARS Virus
agaaacttaccttactccgctttga

SEQ ID NO: 8839 - DNA, 25 bp, SARS Virus
gaaacttacctatctccgctttgaa

SEQ ID NO: 8840 - DNA, 25 bp, SARS Virus
aaacttacctaattccgctttgaat

SEQ ID NO: 8841 - DNA, 25 bp, SARS Virus
aacttacctaactccgctttgaatc

SEQ ID NO: 8842 - DNA, 25 bp, SARS Virus
acttacctaacttcgctttgaatca

SEQ ID NO: 8843 - DNA, 25 bp, SARS Virus
cttacctaactctgctttgaatcac

SEQ ID NO: 8844 - DNA, 25 bp, SARS Virus
ttacctaactcctctttgaatcacg

SEQ ID NO: 8845 - DNA, 25 bp, SARS Virus
tacctaactccgttttgaatcacgt

SEQ ID NO: 8846 - DNA, 25 bp, SARS Virus
acctaactccgctttgaatcacgtc

SEQ ID NO: 8847 - DNA, 25 bp, SARS Virus
cctaactccgctttgaatcacgtcc

SEQ ID NO: 8848 - DNA, 25 bp, SARS Virus
ctaactccgctttgaatcacgtcct

SEQ ID NO: 8849 - DNA, 25 bp, SARS Virus
taactccgcttttaatcacgtcctc

SEQ ID NO: 8850 - DNA, 25 bp, SARS Virus
aactccgctttgtatcacgtcctca

SEQ ID NO: 8851 - DNA, 25 bp, SARS Virus
actccgctttgattcacgtcctcaa

SEQ ID NO: 8852 - DNA, 25 bp, SARS Virus
ctccgctttgaatcacgtcctcaac

SEQ ID NO: 8853 - DNA, 25 bp, SARS Virus
tccgctttgaattacgtcctcaact

SEQ ID NO: 8854 - DNA, 25 bp, SARS Virus
ccgctttgaatctcgtcctcaactt

SEQ ID NO: 8855 - DNA, 25 bp, SARS Virus
cgctttgaatcatgtcctcaactta

SEQ ID NO: 8856 - DNA, 25 bp, SARS Virus
gctttgaatcacttcctcaacttaa

SEQ ID NO: 8857 - DNA, 25 bp, SARS Virus
ctttgaatcacgtcctcaacttaaa

SEQ ID NO: 8858 - DNA, 25 bp, SARS Virus
tttgaatcacgttctcaacttaaag

SEQ ID NO: 8859 - DNA, 25 bp, SARS Virus
ttgaatcacgtcttcaacttaaaga

SEQ ID NO: 8860 - DNA, 25 bp, SARS Virus
tgaatcacgtcctcaacttaaagag

SEQ ID NO: 8861 - DNA, 25 bp, SARS Virus
gaatcacgtccttaacttaaagagt

SEQ ID NO: 8862 - DNA, 25 bp, SARS Virus
aatcacgtcctctacttaaagagtt

SEQ ID NO: 8863 - DNA, 25 bp, SARS Virus
atcacgtcctcatcttaaagagttc

SEQ ID NO: 8864 - DNA, 25 bp, SARS Virus
tcacgtcctcaatttaaagagttcc

SEQ ID NO: 8865 - DNA, 25 bp, SARS Virus
cacgtcctcaacttaaagagttcct

SEQ ID NO: 8866 - DNA, 25 bp, SARS Virus
acgtcctcaacttaaagagttccta

SEQ ID NO: 8867 - DNA, 25 bp, SARS Virus
cgtcctcaactttaagagttcctac

SEQ ID NO: 8868 - DNA, 25 bp, SARS Virus
gtcctcaacttatagagttcctacg

SEQ ID NO: 8869 - DNA, 25 bp, SARS Virus
tcctcaacttaatgagttcctacga

SEQ ID NO: 8870 - DNA, 25 bp, SARS Virus
cctcaacttaaatagttcctacgaa

SEQ ID NO: 8871 - DNA, 25 bp, SARS Virus
ctcaacttaaagtgttcctacgaac

SEQ ID NO: 8872 - DNA, 25 bp, SARS Virus
tcaacttaaagatttcctacgaacc

SEQ ID NO: 8873 - DNA, 25 bp, SARS Virus
caacttaaagagttcctacgaaccc

SEQ ID NO: 8874 - DNA, 25 bp, SARS Virus
aacttaaagagttcctacgaaccct

SEQ ID NO: 8875 - DNA, 25 bp, SARS Virus
acttaaagagtttctacgaaccctc

SEQ ID NO: 8876 - DNA, 25 bp, SARS Virus
cttaaagagttcttacgaaccctct

SEQ ID NO: 8877 - DNA, 25 bp, SARS Virus
ttaaagagttcctacgaaccctcta

SEQ ID NO: 8878 - DNA, 25 bp, SARS Virus
taaagagttccttcgaaccctctaa

SEQ ID NO: 8879 - DNA, 25 bp, SARS Virus
aaagagttcctatgaaccctctaag

SEQ ID NO: 8880 - DNA, 25 bp, SARS Virus
aagagttcctactaaccctctaaga

SEQ ID NO: 8881 - DNA, 25 bp, SARS Virus
agagttcctacgtaccctctaagag

SEQ ID NO: 8882 - DNA, 25 bp, SARS Virus
gagttcctacgatccctctaagagt

SEQ ID NO: 8883 - DNA, 25 bp, SARS Virus
agttcctacgaatcctctaagagtt

SEQ ID NO: 8884 - DNA, 25 bp, SARS Virus
gttcctacgaactctctaagagttt

SEQ ID NO: 8885 - DNA, 25 bp, SARS Virus
ttcctacgaaccttctaagagttta

SEQ ID NO: 8886 - DNA, 25 bp, SARS Virus
tcctacgaaccctctaagagtttaa

SEQ ID NO: 8887 - DNA, 25 bp, SARS Virus
cctacgaaccctttaagagtttaaa

SEQ ID NO: 8888 - DNA, 25 bp, SARS Virus
ctacgaaccctctaagagtttaaag

SEQ ID NO: 8889 - DNA, 25 bp, SARS Virus
tacgaaccctcttagagtttaaaga

SEQ ID NO: 8890 - DNA, 25 bp, SARS Virus
acgaaccctctatgagtttaaagag

SEQ ID NO: 8891 - DNA, 25 bp, SARS Virus
cgaaccctctaatagtttaaagagt

SEQ ID NO: 8892 - DNA, 25 bp, SARS Virus
gaaccctctaagtgtttaaagagta

SEQ ID NO: 8893 - DNA, 25 bp, SARS Virus
aaccctctaagattttaaagagtaa

SEQ ID NO: 8894 - DNA, 25 bp, SARS Virus
accctctaagagtttaaagagtaat

SEQ ID NO: 8895 - DNA, 25 bp, SARS Virus
ccctctaagagtttaaagagtaatg

SEQ ID NO: 8896 - DNA, 25 bp, SARS Virus
cctctaagagtttaaagagtaatgt

SEQ ID NO: 8897 - DNA, 25 bp, SARS Virus
ctctaagagttttaagagtaatgtc

SEQ ID NO: 8898 - DNA, 25 bp, SARS Virus
tctaagagtttatagagtaatgtcc

SEQ ID NO: 8899 - DNA, 25 bp, SARS Virus
ctaagagtttaatgagtaatgtcca

SEQ ID NO: 8900 - DNA, 25 bp, SARS Virus
taagagtttaaatagtaatgtccac

SEQ ID NO: 8901 - DNA, 25 bp, SARS Virus
aagagtttaaagtgtaatgtccaca

SEQ ID NO: 8902 - DNA, 25 bp, SARS Virus
agagtttaaagattaatgtccacaa

SEQ ID NO: 8903 - DNA, 25 bp, SARS Virus
gagtttaaagagtaatgtccacaaa

SEQ ID NO: 8904 - DNA, 25 bp, SARS Virus
agtttaaagagttatgtccacaaaa

SEQ ID NO: 8905 - DNA, 25 bp, SARS Virus
gtttaaagagtattgtccacaaaaa

SEQ ID NO: 8906 - DNA, 25 bp, SARS Virus
tttaaagagtaatgtccacaaaaac

SEQ ID NO: 8907 - DNA, 25 bp, SARS Virus
ttaaagagtaatttccacaaaaact

SEQ ID NO: 8908 - DNA, 25 bp, SARS Virus
taaagagtaatgtccacaaaaactg

SEQ ID NO: 8909 - DNA, 25 bp, SARS Virus
aaagagtaatgttcacaaaaactgt

SEQ ID NO: 8910 - DNA, 25 bp, SARS Virus
aagagtaatgtctacaaaaactgta

SEQ ID NO: 8911 - DNA, 25 bp, SARS Virus
agagtaatgtcctcaaaaactgtag

SEQ ID NO: 8912 - DNA, 25 bp, SARS Virus
gagtaatgtccataaaaactgtagc

SEQ ID NO: 8913 - DNA, 25 bp, SARS Virus
agtaatgtccacaaaaactgtagca

SEQ ID NO: 8914 - DNA, 25 bp, SARS Virus
gtaatgtccacaaaaactgtagcag

SEQ ID NO: 8915 - DNA, 25 bp, SARS Virus
taatgtccacaaaaactgtagcagt

SEQ ID NO: 8916 - DNA, 25 bp, SARS Virus
aatgtccacaaaaactgtagcagtt

SEQ ID NO: 8917 - DNA, 25 bp, SARS Virus
atgtccacaaaaactgtagcagttc

SEQ ID NO: 8918 - DNA, 25 bp, SARS Virus
tgtccacaaaaaatgtagcagttcc

SEQ ID NO: 8919 - DNA, 25 bp, SARS Virus
gtccacaaaaacagtagcagttccc

SEQ ID NO: 8920 - DNA, 25 bp, SARS Virus
tccacaaaaactatagcagttccca

SEQ ID NO: 8921 - DNA, 25 bp, SARS Virus
ccacaaaaactgaagcagttcccag

SEQ ID NO: 8922 - DNA, 25 bp, SARS Virus
cacaaaaactgtagcagttcccagt

SEQ ID NO: 8923 - DNA, 25 bp, SARS Virus
acaaaaactgtaacagttcccagtt

SEQ ID NO: 8924 - DNA, 25 bp, SARS Virus
caaaaactgtagaagttcccagttt

SEQ ID NO: 8925 - DNA, 25 bp, SARS Virus
aaaaactgtagcagttcccagttta

SEQ ID NO: 8926 - DNA, 25 bp, SARS Virus
aaaactgtagcaattcccagtttat

SEQ ID NO: 8927 - DNA, 25 bp, SARS Virus
aaactgtagcagatcccagtttatg

SEQ ID NO: 8928 - DNA, 25 bp, SARS Virus
aactgtagcagtacccagtttatgt

SEQ ID NO: 8929 - DNA, 25 bp, SARS Virus
actgtagcagttaccagtttatgtc

SEQ ID NO: 8930 - DNA, 25 bp, SARS Virus
ctgtagcagttcacagtttatgtcc

SEQ ID NO: 8931 - DNA, 25 bp, SARS Virus
tgtagcagttccaagtttatgtcca

SEQ ID NO: 8932 - DNA, 25 bp, SARS Virus
gtagcagttcccagtttatgtccaa

SEQ ID NO: 8933 - DNA, 25 bp, SARS Virus
tagcagttcccaatttatgtccaac

SEQ ID NO: 8934 - DNA, 25 bp, SARS Virus
agcagttcccagattatgtccaacg

SEQ ID NO: 8935 - DNA, 25 bp, SARS Virus
gcagttcccagtatatgtccaacga

SEQ ID NO: 8936 - DNA, 25 bp, SARS Virus
cagttcccagttaatgtccaacgaa

SEQ ID NO: 8937 - DNA, 25 bp, SARS Virus
agttcccagtttatgtccaacgaag

SEQ ID NO: 8938 - DNA, 25 bp, SARS Virus
gttcccagtttaagtccaacgaagt

SEQ ID NO: 8939 - DNA, 25 bp, SARS Virus
ttcccagtttatatccaacgaagtc

SEQ ID NO: 8940 - DNA, 25 bp, SARS Virus
tcccagtttatgaccaacgaagtct

SEQ ID NO: 8941 - DNA, 25 bp, SARS Virus
cccagtttatgtacaacgaagtcta

SEQ ID NO: 8942 - DNA, 25 bp, SARS Virus
ccagtttatgtcaaacgaagtctat

SEQ ID NO: 8943 - DNA, 25 bp, SARS Virus
cagtttatgtccaacgaagtctatt

SEQ ID NO: 8944 - DNA, 25 bp, SARS Virus
agtttatgtccaacgaagtctattg

SEQ ID NO: 8945 - DNA, 25 bp, SARS Virus
gtttatgtccaaagaagtctattgt

SEQ ID NO: 8946 - DNA, 25 bp, SARS Virus
tttatgtccaacaaagtctattgta

SEQ ID NO: 8947 - DNA, 25 bp, SARS Virus
ttatgtccaacgaagtctattgtag

SEQ ID NO: 8948 - DNA, 25 bp, SARS Virus
tatgtccaacgaagtctattgtagt

SEQ ID NO: 8949 - DNA, 25 bp, SARS Virus
atgtccaacgaaatctattgtagtt

SEQ ID NO: 8950 - DNA, 25 bp, SARS Virus
tgtccaacgaagactattgtagttc

SEQ ID NO: 8951 - DNA, 25 bp, SARS Virus
gtccaacgaagtatattgtagttcc

SEQ ID NO: 8952 - DNA, 25 bp, SARS Virus
tccaacgaagtcaattgtagttcct

SEQ ID NO: 8953 - DNA, 25 bp, SARS Virus
ccaacgaagtctattgtagttccta

SEQ ID NO: 8954 - DNA, 25 bp, SARS Virus
caacgaagtctaatgtagttcctaa

SEQ ID NO: 8955 - DNA, 25 bp, SARS Virus
aacgaagtctatagtagttcctaac

SEQ ID NO: 8956 - DNA, 25 bp, SARS Virus
acgaagtctattatagttcctaaca

SEQ ID NO: 8957 - DNA, 25 bp, SARS Virus
cgaagtctattgaagttcctaacac

SEQ ID NO: 8958 - DNA, 25 bp, SARS Virus
gaagtctattgtagttcctaacaca

SEQ ID NO: 8959 - DNA, 25 bp, SARS Virus
aagtctattgtaattcctaacacat

SEQ ID NO: 8960 - DNA, 25 bp, SARS Virus
agtctattgtagatcctaacacatt

SEQ ID NO: 8961 - DNA, 25 bp, SARS Virus
gtctattgtagtacctaacacattt

SEQ ID NO: 8962 - DNA, 25 bp, SARS Virus
tctattgtagttactaacacatttt

SEQ ID NO: 8963 - DNA, 25 bp, SARS Virus
ctattgtagttcataacacatttta

SEQ ID NO: 8964 - DNA, 25 bp, SARS Virus
tattgtagttccaaacacattttac

SEQ ID NO: 8965 - DNA, 25 bp, SARS Virus
attgtagttcctaacacattttacg

SEQ ID NO: 8966 - DNA, 25 bp, SARS Virus
ttgtagttcctaacacattttacga

SEQ ID NO: 8967 - DNA, 25 bp, SARS Virus
tgtagttcctaaaacattttacgaa

SEQ ID NO: 8968 - DNA, 25 bp, SARS Virus
gtagttcctaacacattttacgaag

SEQ ID NO: 8969 - DNA, 25 bp, SARS Virus
tagttcctaacaaattttacgaagt

SEQ ID NO: 8970 - DNA, 25 bp, SARS Virus
agttcctaacacattttacgaagta

SEQ ID NO: 8971 - DNA, 25 bp, SARS Virus
gttcctaacacaatttacgaagtaa

SEQ ID NO: 8972 - DNA, 25 bp, SARS Virus
ttcctaacacatattacgaagtaac

SEQ ID NO: 8973 - DNA, 25 bp, SARS Virus
tcctaacacattatacgaagtaact

SEQ ID NO: 8974 - DNA, 25 bp, SARS Virus
cctaacacatttaacgaagtaacta

SEQ ID NO: 8975 - DNA, 25 bp, SARS Virus
ctaacacattttacgaagtaactac

SEQ ID NO: 8976 - DNA, 25 bp, SARS Virus
taacacattttaagaagtaactaca

SEQ ID NO: 8977 - DNA, 25 bp, SARS Virus
aacacattttacaaagtaactacaa

SEQ ID NO: 8978 - DNA, 25 bp, SARS Virus
acacattttacgaagtaactacaac

SEQ ID NO: 8979 - DNA, 25 bp, SARS Virus
cacattttacgaagtaactacaaca

SEQ ID NO: 8980 - DNA, 25 bp, SARS Virus
acattttacgaaataactacaacaa

SEQ ID NO: 8981 - DNA, 25 bp, SARS Virus
cattttacgaagaaactacaacaat

SEQ ID NO: 8982 - DNA, 25 bp, SARS Virus
attttacgaagtaactacaacaatt

SEQ ID NO: 8983 - DNA, 25 bp, SARS Virus
ttttacgaagtaactacaacaattg

SEQ ID NO: 8984 - DNA, 25 bp, SARS Virus
tttacgaagtaaatacaacaattgt

SEQ ID NO: 8985 - DNA, 25 bp, SARS Virus
ttacgaagtaacaacaacaattgtt

SEQ ID NO: 8986 - DNA, 25 bp, SARS Virus
tacgaagtaactacaacaattgttc

SEQ ID NO: 8987 - DNA, 25 bp, SARS Virus
acgaagtaactaaaacaattgttcc

SEQ ID NO: 8988 - DNA, 25 bp, SARS Virus
cgaagtaactacaacaattgttccg

SEQ ID NO: 8989 - DNA, 25 bp, SARS Virus
gaagtaactacaacaattgttccgt

SEQ ID NO: 8990 - DNA, 25 bp, SARS Virus
aagtaactacaaaaattgttccgtg

SEQ ID NO: 8991 - DNA, 25 bp, SARS Virus
agtaactacaacaattgttccgtga

SEQ ID NO: 8992 - DNA, 25 bp, SARS Virus
gtaactacaacaattgttccgtgag

SEQ ID NO: 8993 - DNA, 25 bp, SARS Virus
taactacaacaaatgttccgtgagc

SEQ ID NO: 8994 - DNA, 25 bp, SARS Virus
aactacaacaatagttccgtgagct

SEQ ID NO: 8995 - DNA, 25 bp, SARS Virus
actacaacaattattccgtgagctt

SEQ ID NO: 8996 - DNA, 25 bp, SARS Virus
ctacaacaattgatccgtgagcttt

SEQ ID NO: 8997 - DNA, 25 bp, SARS Virus
tacaacaattgtaccgtgagcttta

SEQ ID NO: 8998 - DNA, 25 bp, SARS Virus
acaacaattgttacgtgagctttac

SEQ ID NO: 8999 - DNA, 25 bp, SARS Virus
caacaattgttcagtgagctttaca

SEQ ID NO: 9000 - DNA, 25 bp, SARS Virus
aacaattgttccatgagctttacac

SEQ ID NO: 9001 - DNA, 25 bp, SARS Virus
acaattgttccgagagctttacacg

SEQ ID NO: 9002 - DNA, 25 bp, SARS Virus
caattgttccgtaagctttacacgt

SEQ ID NO: 9003 - DNA, 25 bp, SARS Virus
aattgttccgtgagctttacacgta

SEQ ID NO: 9004 - DNA, 25 bp, SARS Virus
attgttccgtgaactttacacgtaa

SEQ ID NO: 9005 - DNA, 25 bp, SARS Virus
ttgttccgtgagatttacacgtaac

SEQ ID NO: 9006 - DNA, 25 bp, SARS Virus
tgttccgtgagcattacacgtaact

SEQ ID NO: 9007 - DNA, 25 bp, SARS Virus
gttccgtgagctatacacgtaacta

SEQ ID NO: 9008 - DNA, 25 bp, SARS Virus
ttccgtgagcttaacacgtaactag

SEQ ID NO: 9009 - DNA, 25 bp, SARS Virus
tccgtgagctttacacgtaactagt

SEQ ID NO: 9010 - DNA, 25 bp, SARS Virus
ccgtgagctttaaacgtaactagtt

SEQ ID NO: 9011 - DNA, 25 bp, SARS Virus
cgtgagctttacacgtaactagttc

SEQ ID NO: 9012 - DNA, 25 bp, SARS Virus
gtgagctttacaagtaactagttca

SEQ ID NO: 9013 - DNA, 25 bp, SARS Virus
tgagctttacacataactagttcag

SEQ ID NO: 9014 - DNA, 25 bp, SARS Virus
gagctttacacgaaactagttcagt

SEQ ID NO: 9015 - DNA, 25 bp, SARS Virus
agctttacacgtaactagttcagtg

SEQ ID NO: 9016 - DNA, 25 bp, SARS Virus
gctttacacgtaactagttcagtga

SEQ ID NO: 9017 - DNA, 25 bp, SARS Virus
ctttacacgtaaatagttcagtgat

SEQ ID NO: 9018 - DNA, 25 bp, SARS Virus
tttacacgtaacaagttcagtgata

SEQ ID NO: 9019 - DNA, 25 bp, SARS Virus
ttacacgtaactagttcagtgatag

SEQ ID NO: 9020 - DNA, 25 bp, SARS Virus
tacacgtaactaattcagtgatagc

SEQ ID NO: 9021 - DNA, 25 bp, SARS Virus
acacgtaactagatcagtgatagcg

SEQ ID NO: 9022 - DNA, 25 bp, SARS Virus
cacgtaactagtacagtgatagcga

SEQ ID NO: 9023 - DNA, 25 bp, SARS Virus
acgtaactagttaagtgatagcgac

SEQ ID NO: 9024 - DNA, 25 bp, SARS Virus
cgtaactagttcagtgatagcgacc

SEQ ID NO: 9025 - DNA, 25 bp, SARS Virus
gtaactagttcaatgatagcgaccg

SEQ ID NO: 9026 - DNA, 25 bp, SARS Virus
taactagttcagagatagcgaccgc

SEQ ID NO: 9027 - DNA, 25 bp, SARS Virus
aactagttcagtaatagcgaccgcg

SEQ ID NO: 9028 - DNA, 25 bp, SARS Virus
actagttcagtgatagcgaccgcgt

SEQ ID NO: 9029 - DNA, 25 bp, SARS Virus
ctagttcagtgaaagcgaccgcgtt

SEQ ID NO: 9030 - DNA, 25 bp, SARS Virus
tagttcagtgatagcgaccgcgttt

SEQ ID NO: 9031 - DNA, 25 bp, SARS Virus
agttcagtgataacgaccgcgtttc

SEQ ID NO: 9032 - DNA, 25 bp, SARS Virus
gttcagtgatagagaccgcgtttca

SEQ ID NO: 9033 - DNA, 25 bp, SARS Virus
ttcagtgatagcaaccgcgtttcaa

SEQ ID NO: 9034 - DNA, 25 bp, SARS Virus
tcagtgatagcgaccgcgtttcaac

SEQ ID NO: 9035 - DNA, 25 bp, SARS Virus
cagtgatagcgaacgcgtttcaacg

SEQ ID NO: 9036 - DNA, 25 bp, SARS Virus
agtgatagcgacagcgtttcaacgc

SEQ ID NO: 9037 - DNA, 25 bp, SARS Virus
gtgatagcgaccacgtttcaacgct

SEQ ID NO: 9038 - DNA, 25 bp, SARS Virus
tgatagcgaccgagtttcaacgcta

SEQ ID NO: 9039 - DNA, 25 bp, SARS Virus
gatagcgaccgcatttcaacgctag

SEQ ID NO: 9040 - DNA, 25 bp, SARS Virus
atagcgaccgcgattcaacgctagt

SEQ ID NO: 9041 - DNA, 25 bp, SARS Virus
tagcgaccgcgtatcaacgctagtg

SEQ ID NO: 9042 - DNA, 25 bp, SARS Virus
agcgaccgcgttacaacgctagtga

SEQ ID NO: 9043 - DNA, 25 bp, SARS Virus
gcgaccgcgtttaaacgctagtgag

SEQ ID NO: 9044 - DNA, 25 bp, SARS Virus
cgaccgcgtttcaacgctagtgagt

SEQ ID NO: 9045 - DNA, 25 bp, SARS Virus
gaccgcgtttcaacgctagtgagtt

SEQ ID NO: 9046 - DNA, 25 bp, SARS Virus
accgcgtttcaaagctagtgagttg

SEQ ID NO: 9047 - DNA, 25 bp, SARS Virus
ccgcgtttcaacactagtgagttga

SEQ ID NO: 9048 - DNA, 25 bp, SARS Virus
cgcgtttcaacgatagtgagttgaa

SEQ ID NO: 9049 - DNA, 25 bp, SARS Virus
gcgtttcaacgcaagtgagttgaat

SEQ ID NO: 9050 - DNA, 25 bp, SARS Virus
cgtttcaacgctagtgagttgaatc

SEQ ID NO: 9051 - DNA, 25 bp, SARS Virus
gtttcaacgctaatgagttgaatcc

SEQ ID NO: 9052 - DNA, 25 bp, SARS Virus
tttcaacgctagagagttgaatcca

SEQ ID NO: 9053 - DNA, 25 bp, SARS Virus
ttcaacgctagtaagttgaatccac

SEQ ID NO: 9054 - DNA, 25 bp, SARS Virus
tcaacgctagtgagttgaatccact

SEQ ID NO: 9055 - DNA, 25 bp, SARS Virus
caacgctagtgaattgaatccactt

SEQ ID NO: 9056 - DNA, 25 bp, SARS Virus
aacgctagtgagatgaatccacttc

SEQ ID NO: 9057 - DNA, 25 bp, SARS Virus
acgctagtgagtagaatccacttca

SEQ ID NO: 9058 - DNA, 25 bp, SARS Virus
cgctagtgagttaaatccacttcag

SEQ ID NO: 9059 - DNA, 25 bp, SARS Virus
gctagtgagttgaatccacttcaga

SEQ ID NO: 9060 - DNA, 25 bp, SARS Virus
ctagtgagttgaatccacttcagaa

SEQ ID NO: 9061 - DNA, 25 bp, SARS Virus
tagtgagttgaaaccacttcagaag

SEQ ID NO: 9062 - DNA, 25 bp, SARS Virus
agtgagttgaatacacttcagaagt

SEQ ID NO: 9063 - DNA, 25 bp, SARS Virus
gtgagttgaatcaacttcagaagta

SEQ ID NO: 9064 - DNA, 25 bp, SARS Virus
tgagttgaatccacttcagaagtag

SEQ ID NO: 9065 - DNA, 25 bp, SARS Virus
gagttgaatccaattcagaagtagc

SEQ ID NO: 9066 - DNA, 25 bp, SARS Virus
agttgaatccacatcagaagtagcg

SEQ ID NO: 9067 - DNA, 25 bp, SARS Virus
gttgaatccactacagaagtagcga

SEQ ID NO: 9068 - DNA, 25 bp, SARS Virus
ttgaatccacttaagaagtagcgag

SEQ ID NO: 9069 - DNA, 25 bp, SARS Virus
tgaatccacttcagaagtagcgagt

SEQ ID NO: 9070 - DNA, 25 bp, SARS Virus
gaatccacttcaaaagtagcgagtt

SEQ ID NO: 9071 - DNA, 25 bp, SARS Virus
aatccacttcagaagtagcgagttt

SEQ ID NO: 9072 - DNA, 25 bp, SARS Virus
atccacttcagaagtagcgagtttc

SEQ ID NO: 9073 - DNA, 25 bp, SARS Virus
tccacttcagaaatagcgagtttcg

SEQ ID NO: 9074 - DNA, 25 bp, SARS Virus
ccacttcagaagaagcgagtttcgt

SEQ ID NO: 9075 - DNA, 25 bp, SARS Virus
cacttcagaagtagcgagtttcgtt

SEQ ID NO: 9076 - DNA, 25 bp, SARS Virus
acttcagaagtaacgagtttcgttc

SEQ ID NO: 9077 - DNA, 25 bp, SARS Virus
cttcagaagtagagagtttcgttcc

SEQ ID NO: 9078 - DNA, 25 bp, SARS Virus
ttcagaagtagcaagtttcgttccc

SEQ ID NO: 9079 - DNA, 25 bp, SARS Virus
tcagaagtagcgagtttcgttccct

SEQ ID NO: 9080 - DNA, 25 bp, SARS Virus
cagaagtagcgaatttcgttccctg

SEQ ID NO: 9081 - DNA, 25 bp, SARS Virus
agaagtagcgagattcgttccctga

SEQ ID NO: 9082 - DNA, 25 bp, SARS Virus
gaagtagcgagtatcgttccctgaa

SEQ ID NO: 9083 - DNA, 25 bp, SARS Virus
aagtagcgagttacgttccctgaaa

SEQ ID NO: 9084 - DNA, 25 bp, SARS Virus
agtagcgagtttagttccctgaaat

SEQ ID NO: 9085 - DNA, 25 bp, SARS Virus
gtagcgagtttcattccctgaaatg

SEQ ID NO: 9086 - DNA, 25 bp, SARS Virus
tagcgagtttcgatccctgaaatgg

SEQ ID NO: 9087 - DNA, 25 bp, SARS Virus
agcgagtttcgtaccctgaaatggc

SEQ ID NO: 9088 - DNA, 25 bp, SARS Virus
gcgagtttcgttacctgaaatggca

SEQ ID NO: 9089 - DNA, 25 bp, SARS Virus
cgagtttcgttcactgaaatggcag

SEQ ID NO: 9090 - DNA, 25 bp, SARS Virus
gagtttcgttccatgaaatggcagt

SEQ ID NO: 9091 - DNA, 25 bp, SARS Virus
agtttcgttcccagaaatggcagtc

SEQ ID NO: 9092 - DNA, 25 bp, SARS Virus
gtttcgttccctaaaatggcagtca

SEQ ID NO: 9093 - DNA, 25 bp, SARS Virus
tttcgttccctgaaatggcagtcac

SEQ ID NO: 9094 - DNA, 25 bp, SARS Virus
ttcgttccctgaaatggcagtcaca

SEQ ID NO: 9095 - DNA, 25 bp, SARS Virus
tcgttccctgaaatggcagtcacat

SEQ ID NO: 9096 - DNA, 25 bp, SARS Virus
cgttccctgaaaaggcagtcacata

SEQ ID NO: 9097 - DNA, 25 bp, SARS Virus
gttccctgaaatagcagtcacatat

SEQ ID NO: 9098 - DNA, 25 bp, SARS Virus
ttccctgaaatgacagtcacatatg

SEQ ID NO: 9099 - DNA, 25 bp, SARS Virus
tccctgaaatggaagtcacatatgc

SEQ ID NO: 9100 - DNA, 25 bp, SARS Virus
ccctgaaatggcagtcacatatgca

SEQ ID NO: 9101 - DNA, 25 bp, SARS Virus
cctgaaatggcaatcacatatgcac

SEQ ID NO: 9102 - DNA, 25 bp, SARS Virus
ctgaaatggcagacacatatgcacc

SEQ ID NO: 9103 - DNA, 25 bp, SARS Virus
tgaaatggcagtaacatatgcaccg

SEQ ID NO: 9104 - DNA, 25 bp, SARS Virus
gaaatggcagtcacatatgcaccgt

SEQ ID NO: 9105 - DNA, 25 bp, SARS Virus
aaatggcagtcaaatatgcaccgtt

SEQ ID NO: 9106 - DNA, 25 bp, SARS Virus
aatggcagtcacatatgcaccgttc

SEQ ID NO: 9107 - DNA, 25 bp, SARS Virus
atggcagtcacaaatgcaccgttcc

SEQ ID NO: 9108 - DNA, 25 bp, SARS Virus
tggcagtcacatatgcaccgttcct

SEQ ID NO: 9109 - DNA, 25 bp, SARS Virus
ggcagtcacataagcaccgttcctc

SEQ ID NO: 9110 - DNA, 25 bp, SARS Virus
gcagtcacatatacaccgttcctcg

SEQ ID NO: 9111 - DNA, 25 bp, SARS Virus
cagtcacatatgaaccgttcctcgt

SEQ ID NO: 9112 - DNA, 25 bp, SARS Virus
agtcacatatgcaccgttcctcgtc

SEQ ID NO: 9113 - DNA, 25 bp, SARS Virus
gtcacatatgcaacgttcctcgtcg

SEQ ID NO: 9114 - DNA, 25 bp, SARS Virus
tcacatatgcacagttcctcgtcga

SEQ ID NO: 9115 - DNA, 25 bp, SARS Virus
cacatatgcaccattcctcgtcgac

SEQ ID NO: 9116 - DNA, 25 bp, SARS Virus
acatatgcaccgatcctcgtcgacg

SEQ ID NO: 9117 - DNA, 25 bp, SARS Virus
catatgcaccgtacctcgtcgacgt

SEQ ID NO: 9118 - DNA, 25 bp, SARS Virus
atatgcaccgttactcgtcgacgtt

SEQ ID NO: 9119 - DNA, 25 bp, SARS Virus
tatgcaccgttcatcgtcgacgttg

SEQ ID NO: 9120 - DNA, 25 bp, SARS Virus
atgcaccgttccacgtcgacgttga

SEQ ID NO: 9121 - DNA, 25 bp, SARS Virus
tgcaccgttcctagtcgacgttgat

SEQ ID NO: 9122 - DNA, 25 bp, SARS Virus
gcaccgttcctcatcgacgttgatg

SEQ ID NO: 9123 - DNA, 25 bp, SARS Virus
caccgttcctcgacgacgttgatga

SEQ ID NO: 9124 - DNA, 25 bp, SARS Virus
accgttcctcgtagacgttgatgag

SEQ ID NO: 9125 - DNA, 25 bp, SARS Virus
ccgttcctcgtcaacgttgatgagt

SEQ ID NO: 9126 - DNA, 25 bp, SARS Virus
cgttcctcgtcgacgttgatgagta

SEQ ID NO: 9127 - DNA, 25 bp, SARS Virus
gttcctcgtcgaagttgatgagtac

SEQ ID NO: 9128 - DNA, 25 bp, SARS Virus
ttcctcgtcgacattgatgagtacg

SEQ ID NO: 9129 - DNA, 25 bp, SARS Virus
tcctcgtcgacgatgatgagtacgg

SEQ ID NO: 9130 - DNA, 25 bp, SARS Virus
cctcgtcgacgtagatgagtacgga

SEQ ID NO: 9131 - DNA, 25 bp, SARS Virus
ctcgtcgacgttaatgagtacggag

SEQ ID NO: 9132 - DNA, 25 bp, SARS Virus
tcgtcgacgttgatgagtacggaga

SEQ ID NO: 9133 - DNA, 25 bp, SARS Virus
cgtcgacgttgaagagtacggagaa

SEQ ID NO: 9134 - DNA, 25 bp, SARS Virus
gtcgacgttgataagtacggagaat

SEQ ID NO: 9135 - DNA, 25 bp, SARS Virus
tcgacgttgatgagtacggagaatt

SEQ ID NO: 9136 - DNA, 25 bp, SARS Virus
cgacgttgatgaatacggagaattc

SEQ ID NO: 9137 - DNA, 25 bp, SARS Virus
gacgttgatgagaacggagaattcc

SEQ ID NO: 9138 - DNA, 25 bp, SARS Virus
acgttgatgagtacggagaattccg

SEQ ID NO: 9139 - DNA, 25 bp, SARS Virus
cgttgatgagtaaggagaattccgt

SEQ ID NO: 9140 - DNA, 25 bp, SARS Virus
gttgatgagtacagagaattccgtg

SEQ ID NO: 9141 - DNA, 25 bp, SARS Virus
ttgatgagtacgaagaattccgtgg

SEQ ID NO: 9142 - DNA, 25 bp, SARS Virus
tgatgagtacggagaattccgtggt

SEQ ID NO: 9143 - DNA, 25 bp, SARS Virus
gatgagtacggaaaattccgtggtt

SEQ ID NO: 9144 - DNA, 25 bp, SARS Virus
atgagtacggagaattccgtggttt

SEQ ID NO: 9145 - DNA, 25 bp, SARS Virus
tgagtacggagaattccgtggtttt

SEQ ID NO: 9146 - DNA, 25 bp, SARS Virus
gagtacggagaaatccgtggttttc

SEQ ID NO: 9147 - DNA, 25 bp, SARS Virus
agtacggagaataccgtggttttct

SEQ ID NO: 9148 - DNA, 25 bp, SARS Virus
gtacggagaattacgtggttttctt

SEQ ID NO: 9149 - DNA, 25 bp, SARS Virus
tacggagaattcagtggttttcttc

SEQ ID NO: 9150 - DNA, 25 bp, SARS Virus
acggagaattccatggttttcttca

SEQ ID NO: 9151 - DNA, 25 bp, SARS Virus
cggagaattccgaggttttcttcat

SEQ ID NO: 9152 - DNA, 25 bp, SARS Virus
ggagaattccgtagttttcttcatt

SEQ ID NO: 9153 - DNA, 25 bp, SARS Virus
gagaattccgtgattttcttcattg

SEQ ID NO: 9154 - DNA, 25 bp, SARS Virus
agaattccgtggatttcttcattgg

SEQ ID NO: 9155 - DNA, 25 bp, SARS Virus
gaattccgtggtattcttcattgga

SEQ ID NO: 9156 - DNA, 25 bp, SARS Virus
aattccgtggttatcttcattggaa

SEQ ID NO: 9157 - DNA, 25 bp, SARS Virus
attccgtggtttacttcattggaaa

SEQ ID NO: 9158 - DNA, 25 bp, SARS Virus
ttccgtggttttattcattggaaag

SEQ ID NO: 9159 - DNA, 25 bp, SARS Virus
tccgtggttttcatcattggaaaga

SEQ ID NO: 9160 - DNA, 25 bp, SARS Virus
ccgtggttttctacattggaaagaa

SEQ ID NO: 9161 - DNA, 25 bp, SARS Virus
cgtggttttcttaattggaaagaac

SEQ ID NO: 9162 - DNA, 25 bp, SARS Virus
gtggttttcttcattggaaagaact

SEQ ID NO: 9163 - DNA, 25 bp, SARS Virus
tggttttcttcaatggaaagaactt

SEQ ID NO: 9164 - DNA, 25 bp, SARS Virus
ggttttcttcataggaaagaacttc

SEQ ID NO: 9165 - DNA, 25 bp, SARS Virus
gttttcttcattagaaagaacttcc

SEQ ID NO: 9166 - DNA, 25 bp, SARS Virus
ttttcttcattgaaaagaacttcca

SEQ ID NO: 9167 - DNA, 25 bp, SARS Virus
tttcttcattggaaagaacttccac

SEQ ID NO: 9168 - DNA, 25 bp, SARS Virus
ttcttcattggaaagaacttccact

SEQ ID NO: 9169 - DNA, 25 bp, SARS Virus
tcttcattggaaagaacttccacta

SEQ ID NO: 9170 - DNA, 25 bp, SARS Virus
cttcattggaaaaaacttccactaa

SEQ ID NO: 9171 - DNA, 25 bp, SARS Virus
ttcattggaaagaacttccactaag

SEQ ID NO: 9172 - DNA, 25 bp, SARS Virus
tcattggaaagaacttccactaagt

SEQ ID NO: 9173 - DNA, 25 bp, SARS Virus
cattggaaagaaattccactaagtg

SEQ ID NO: 9174 - DNA, 25 bp, SARS Virus
attggaaagaacatccactaagtgt

SEQ ID NO: 9175 - DNA, 25 bp, SARS Virus
ttggaaagaactaccactaagtgta

SEQ ID NO: 9176 - DNA, 25 bp, SARS Virus
tggaaagaacttacactaagtgtac

SEQ ID NO: 9177 - DNA, 25 bp, SARS Virus
ggaaagaacttcaactaagtgtact

SEQ ID NO: 9178 - DNA, 25 bp, SARS Virus
gaaagaacttccactaagtgtactg

SEQ ID NO: 9179 - DNA, 25 bp, SARS Virus
aaagaacttccaataagtgtactgt

SEQ ID NO: 9180 - DNA, 25 bp, SARS Virus
aagaacttccacaaagtgtactgtg

SEQ ID NO: 9181 - DNA, 25 bp, SARS Virus
agaacttccactaagtgtactgtgt

SEQ ID NO: 9182 - DNA, 25 bp, SARS Virus
gaacttccactaagtgtactgtgtc

SEQ ID NO: 9183 - DNA, 25 bp, SARS Virus
aacttccactaaatgtactgtgtca

SEQ ID NO: 9184 - DNA, 25 bp, SARS Virus
acttccactaagagtactgtgtcat

SEQ ID NO: 9185 - DNA, 25 bp, SARS Virus
cttccactaagtatactgtgtcatg

SEQ ID NO: 9186 - DNA, 25 bp, SARS Virus
ttccactaagtgaactgtgtcatga

SEQ ID NO: 9187 - DNA, 25 bp, SARS Virus
tccactaagtgtactgtgtcatgaa

SEQ ID NO: 9188 - DNA, 25 bp, SARS Virus
ccactaagtgtaatgtgtcatgaat

SEQ ID NO: 9189 - DNA, 25 bp, SARS Virus
cactaagtgtacagtgtcatgaatg

SEQ ID NO: 9190 - DNA, 25 bp, SARS Virus
actaagtgtactatgtcatgaatgg

SEQ ID NO: 9191 - DNA, 25 bp, SARS Virus
ctaagtgtactgagtcatgaatgga

SEQ ID NO: 9192 - DNA, 25 bp, SARS Virus
taagtgtactgtatcatgaatggag

SEQ ID NO: 9193 - DNA, 25 bp, SARS Virus
aagtgtactgtgacatgaatggaga

SEQ ID NO: 9194 - DNA, 25 bp, SARS Virus
agtgtactgtgtaatgaatggagac

SEQ ID NO: 9195 - DNA, 25 bp, SARS Virus
gtgtactgtgtcatgaatggagact

SEQ ID NO: 9196 - DNA, 25 bp, SARS Virus
tgtactgtgtcaagaatggagactc

SEQ ID NO: 9197 - DNA, 25 bp, SARS Virus
gtactgtgtcataaatggagactcc

SEQ ID NO: 9198 - DNA, 25 bp, SARS Virus
tactgtgtcatgaatggagactcct

SEQ ID NO: 9199 - DNA, 25 bp, SARS Virus
actgtgtcatgaatggagactcctc

SEQ ID NO: 9200 - DNA, 25 bp, SARS Virus
ctgtgtcatgaaaggagactcctcc

SEQ ID NO: 9201 - DNA, 25 bp, SARS Virus
tgtgtcatgaatagagactcctcca

SEQ ID NO: 9202 - DNA, 25 bp, SARS Virus
gtgtcatgaatgaagactcctccaa

SEQ ID NO: 9203 - DNA, 25 bp, SARS Virus
tgtcatgaatggagactcctccaac

SEQ ID NO: 9204 - DNA, 25 bp, SARS Virus
gtcatgaatggaaactcctccaaca

SEQ ID NO: 9205 - DNA, 25 bp, SARS Virus
tcatgaatggagactcctccaacaa

SEQ ID NO: 9206 - DNA, 25 bp, SARS Virus
catgaatggagaatcctccaacaag

SEQ ID NO: 9207 - DNA, 25 bp, SARS Virus
atgaatggagacacctccaacaaga

SEQ ID NO: 9208 - DNA, 25 bp, SARS Virus
tgaatggagactactccaacaagag

SEQ ID NO: 9209 - DNA, 25 bp, SARS Virus
gaatggagactcatccaacaagagt

SEQ ID NO: 9210 - DNA, 25 bp, SARS Virus
aatggagactccaccaacaagagtt

SEQ ID NO: 9211 - DNA, 25 bp, SARS Virus
atggagactcctacaacaagagttc

SEQ ID NO: 9212 - DNA, 25 bp, SARS Virus
tggagactcctcaaacaagagttct

SEQ ID NO: 9213 - DNA, 25 bp, SARS Virus
ggagactcctccaacaagagttctt

SEQ ID NO: 9214 - DNA, 25 bp, SARS Virus
gagactcctccaacaagagttcttg

SEQ ID NO: 9215 - DNA, 25 bp, SARS Virus
agactcctccaaaaagagttcttgc

SEQ ID NO: 9216 - DNA, 25 bp, SARS Virus
gactcctccaacaagagttcttgcc

SEQ ID NO: 9217 - DNA, 25 bp, SARS Virus
actcctccaacaagagttcttgcca

SEQ ID NO: 9218 - DNA, 25 bp, SARS Virus
ctcctccaacaaaagttcttgccac

SEQ ID NO: 9219 - DNA, 25 bp, SARS Virus
tcctccaacaagagttcttgccact

SEQ ID NO: 9220 - DNA, 25 bp, SARS Virus
cctccaacaagaattcttgccactt

SEQ ID NO: 9221 - DNA, 25 bp, SARS Virus
ctccaacaagagatcttgccacttg

SEQ ID NO: 9222 - DNA, 25 bp, SARS Virus
tccaacaagagtacttgccacttga

SEQ ID NO: 9223 - DNA, 25 bp, SARS Virus
ccaacaagagttattgccacttgag

SEQ ID NO: 9224 - DNA, 25 bp, SARS Virus
caacaagagttcatgccacttgagc

SEQ ID NO: 9225 - DNA, 25 bp, SARS Virus
aacaagagttctagccacttgagct

SEQ ID NO: 9226 - DNA, 25 bp, SARS Virus
acaagagttcttaccacttgagctt

SEQ ID NO: 9227 - DNA, 25 bp, SARS Virus
caagagttcttgacacttgagcttc

SEQ ID NO: 9228 - DNA, 25 bp, SARS Virus
aagagttcttgcaacttgagcttcg

SEQ ID NO: 9229 - DNA, 25 bp, SARS Virus
agagttcttgccacttgagcttcgt

SEQ ID NO: 9230 - DNA, 25 bp, SARS Virus
gagttcttgccaattgagcttcgtg

SEQ ID NO: 9231 - DNA, 25 bp, SARS Virus
agttcttgccacatgagcttcgtga

SEQ ID NO: 9232 - DNA, 25 bp, SARS Virus
gttcttgccactagagcttcgtgag

SEQ ID NO: 9233 - DNA, 25 bp, SARS Virus
ttcttgccacttaagcttcgtgagc

SEQ ID NO: 9234 - DNA, 25 bp, SARS Virus
tcttgccacttgagcttcgtgagct

SEQ ID NO: 9235 - DNA, 25 bp, SARS Virus
cttgccacttgaacttcgtgagctc

SEQ ID NO: 9236 - DNA, 25 bp, SARS Virus
ttgccacttgagattcgtgagctct

SEQ ID NO: 9237 - DNA, 25 bp, SARS Virus
tgccacttgagcatcgtgagctctg

SEQ ID NO: 9238 - DNA, 25 bp, SARS Virus
gccacttgagctacgtgagctctgc

SEQ ID NO: 9239 - DNA, 25 bp, SARS Virus
ccacttgagcttagtgagctctgcg

SEQ ID NO: 9240 - DNA, 25 bp, SARS Virus
cacttgagcttcatgagctctgcgg

SEQ ID NO: 9241 - DNA, 25 bp, SARS Virus
acttgagcttcgagagctctgcggg

SEQ ID NO: 9242 - DNA, 25 bp, SARS Virus
cttgagcttcgtaagctctgcgggc

SEQ ID NO: 9243 - DNA, 25 bp, SARS Virus
ttgagcttcgtgagctctgcgggca

SEQ ID NO: 9244 - DNA, 25 bp, SARS Virus
tgagcttcgtgaactctgcgggcaa

SEQ ID NO: 9245 - DNA, 25 bp, SARS Virus
gagcttcgtgagatctgcgggcaac

SEQ ID NO: 9246 - DNA, 25 bp, SARS Virus
agcttcgtgagcactgcgggcaact

SEQ ID NO: 9247 - DNA, 25 bp, SARS Virus
gcttcgtgagctatgcgggcaacta

SEQ ID NO: 9248 - DNA, 25 bp, SARS Virus
cttcgtgagctcagcgggcaactat

SEQ ID NO: 9249 - DNA, 25 bp, SARS Virus
ttcgtgagctctacgggcaactatc

SEQ ID NO: 9250 - DNA, 25 bp, SARS Virus
tcgtgagctctgagggcaactatcg

SEQ ID NO: 9251 - DNA, 25 bp, SARS Virus
cgtgagctctgcaggcaactatcga

SEQ ID NO: 9252 - DNA, 25 bp, SARS Virus
gtgagctctgcgagcaactatcgaa

SEQ ID NO: 9253 - DNA, 25 bp, SARS Virus
tgagctctgcggacaactatcgaag

SEQ ID NO: 9254 - DNA, 25 bp, SARS Virus
gagctctgcgggaaactatcgaagt

SEQ ID NO: 9255 - DNA, 25 bp, SARS Virus
agctctgcgggcaactatcgaagtg

SEQ ID NO: 9256 - DNA, 25 bp, SARS Virus
gctctgcgggcaactatcgaagtgt

SEQ ID NO: 9257 - DNA, 25 bp, SARS Virus
ctctgcgggcaaatatcgaagtgtt

SEQ ID NO: 9258 - DNA, 25 bp, SARS Virus
tctgcgggcaacaatcgaagtgttt

SEQ ID NO: 9259 - DNA, 25 bp, SARS Virus
ctgcgggcaactatcgaagtgttta

SEQ ID NO: 9260 - DNA, 25 bp, SARS Virus
tgcgggcaactaacgaagtgtttac

SEQ ID NO: 9261 - DNA, 25 bp, SARS Virus
gcgggcaactatagaagtgtttacc

SEQ ID NO: 9262 - DNA, 25 bp, SARS Virus
cgggcaactatcaaagtgtttacct

SEQ ID NO: 9263 - DNA, 25 bp, SARS Virus
gggcaactatcgaagtgtttacctc

SEQ ID NO: 9264 - DNA, 25 bp, SARS Virus
ggcaactatcgaagtgtttacctcg

SEQ ID NO: 9265 - DNA, 25 bp, SARS Virus
gcaactatcgaaatgtttacctcga

SEQ ID NO: 9266 - DNA, 25 bp, SARS Virus
caactatcgaagagtttacctcgat

SEQ ID NO: 9267 - DNA, 25 bp, SARS Virus
aactatcgaagtatttacctcgata

SEQ ID NO: 9268 - DNA, 25 bp, SARS Virus
actatcgaagtgattacctcgatag

SEQ ID NO: 9269 - DNA, 25 bp, SARS Virus
ctatcgaagtgtatacctcgatagc

SEQ ID NO: 9270 - DNA, 25 bp, SARS Virus
tatcgaagtgttaacctcgatagca

SEQ ID NO: 9271 - DNA, 25 bp, SARS Virus
atcgaagtgtttacctcgatagcaa

SEQ ID NO: 9272 - DNA, 25 bp, SARS Virus
tcgaagtgtttaactcgatagcaac

SEQ ID NO: 9273 - DNA, 25 bp, SARS Virus
cgaagtgtttacatcgatagcaacc

SEQ ID NO: 9274 - DNA, 25 bp, SARS Virus
gaagtgtttaccacgatagcaaccg

SEQ ID NO: 9275 - DNA, 25 bp, SARS Virus
aagtgtttacctagatagcaaccgt

SEQ ID NO: 9276 - DNA, 25 bp, SARS Virus
agtgtttacctcaatagcaaccgtg

SEQ ID NO: 9277 - DNA, 25 bp, SARS Virus
gtgtttacctcgatagcaaccgtgt

SEQ ID NO: 9278 - DNA, 25 bp, SARS Virus
tgtttacctcgaaagcaaccgtgtg

SEQ ID NO: 9279 - DNA, 25 bp, SARS Virus
gtttacctcgatagcaaccgtgtgg

SEQ ID NO: 9280 - DNA, 25 bp, SARS Virus
tttacctcgataacaaccgtgtggt

SEQ ID NO: 9281 - DNA, 25 bp, SARS Virus
ttacctcgatagaaaccgtgtggtc

SEQ ID NO: 9282 - DNA, 25 bp, SARS Virus
tacctcgatagcaaccgtgtggtca

SEQ ID NO: 9283 - DNA, 25 bp, SARS Virus
acctcgatagcaaccgtgtggtcag

SEQ ID NO: 9284 - DNA, 25 bp, SARS Virus
cctcgatagcaaacgtgtggtcaga

SEQ ID NO: 9285 - DNA, 25 bp, SARS Virus
ctcgatagcaacagtgtggtcagac

SEQ ID NO: 9286 - DNA, 25 bp, SARS Virus
tcgatagcaaccatgtggtcagaca

SEQ ID NO: 9287 - DNA, 25 bp, SARS Virus
cgatagcaaccgagtggtcagacac

SEQ ID NO: 9288 - DNA, 25 bp, SARS Virus
gatagcaaccgtatggtcagacaca

SEQ ID NO: 9289 - DNA, 25 bp, SARS Virus
atagcaaccgtgaggtcagacacat

SEQ ID NO: 9290 - DNA, 25 bp, SARS Virus
tagcaaccgtgtagtcagacacatt

SEQ ID NO: 9291 - DNA, 25 bp, SARS Virus
agcaaccgtgtgatcagacacattt

SEQ ID NO: 9292 - DNA, 25 bp, SARS Virus
gcaaccgtgtggacagacacattta

SEQ ID NO: 9293 - DNA, 25 bp, SARS Virus
caaccgtgtggtaagacacatttac

SEQ ID NO: 9294 - DNA, 25 bp, SARS Virus
aaccgtgtggtcagacacatttacc

SEQ ID NO: 9295 - DNA, 25 bp, SARS Virus
accgtgtggtcaaacacatttaccg

SEQ ID NO: 9296 - DNA, 25 bp, SARS Virus
ccgtgtggtcagacacatttaccgg

SEQ ID NO: 9297 - DNA, 25 bp, SARS Virus
cgtgtggtcagaaacatttaccgga

SEQ ID NO: 9298 - DNA, 25 bp, SARS Virus
gtgtggtcagacacatttaccggag

SEQ ID NO: 9299 - DNA, 25 bp, SARS Virus
tgtggtcagacaaatttaccggagt

SEQ ID NO: 9300 - DNA, 25 bp, SARS Virus
gtggtcagacacatttaccggagta

SEQ ID NO: 9301 - DNA, 25 bp, SARS Virus
tggtcagacacaattaccggagtac

SEQ ID NO: 9302 - DNA, 25 bp, SARS Virus
ggtcagacacatataccggagtacg

SEQ ID NO: 9303 - DNA, 25 bp, SARS Virus
gtcagacacattaaccggagtacga

SEQ ID NO: 9304 - DNA, 25 bp, SARS Virus
tcagacacatttaccggagtacgag

SEQ ID NO: 9305 - DNA, 25 bp, SARS Virus
cagacacatttaacggagtacgaga

SEQ ID NO: 9306 - DNA, 25 bp, SARS Virus
agacacatttacaggagtacgagaa

SEQ ID NO: 9307 - DNA, 25 bp, SARS Virus
gacacatttaccagagtacgagaat

SEQ ID NO: 9308 - DNA, 25 bp, SARS Virus
acacatttaccgaagtacgagaatc

SEQ ID NO: 9309 - DNA, 25 bp, SARS Virus
cacatttaccggagtacgagaatct

SEQ ID NO: 9310 - DNA, 25 bp, SARS Virus
acatttaccggaatacgagaatctc

SEQ ID NO: 9311 - DNA, 25 bp, SARS Virus
catttaccggagaacgagaatctct

SEQ ID NO: 9312 - DNA, 25 bp, SARS Virus
atttaccggagtacgagaatctcta

SEQ ID NO: 9313 - DNA, 25 bp, SARS Virus
tttaccggagtaagagaatctctaa

SEQ ID NO: 9314 - DNA, 25 bp, SARS Virus
ttaccggagtacaagaatctctaat

SEQ ID NO: 9315 - DNA, 25 bp, SARS Virus
taccggagtacgagaatctctaatt

SEQ ID NO: 9316 - DNA, 25 bp, SARS Virus
accggagtacgaaaatctctaattc

SEQ ID NO: 9317 - DNA, 25 bp, SARS Virus
ccggagtacgagaatctctaattcc

SEQ ID NO: 9318 - DNA, 25 bp, SARS Virus
cggagtacgagaatctctaattcct

SEQ ID NO: 9319 - DNA, 25 bp, SARS Virus
ggagtacgagaaactctaattcctg

SEQ ID NO: 9320 - DNA, 25 bp, SARS Virus
gagtacgagaatatctaattcctgt

SEQ ID NO: 9321 - DNA, 25 bp, SARS Virus
agtacgagaatcactaattcctgtt

SEQ ID NO: 9322 - DNA, 25 bp, SARS Virus
gtacgagaatctataattcctgttt

SEQ ID NO: 9323 - DNA, 25 bp, SARS Virus
tacgagaatctcaaattcctgtttc

SEQ ID NO: 9324 - DNA, 25 bp, SARS Virus
acgagaatctctaattcctgtttct

SEQ ID NO: 9325 - DNA, 25 bp, SARS Virus
cgagaatctctaattcctgtttctt

SEQ ID NO: 9326 - DNA, 25 bp, SARS Virus
gagaatctctaaatcctgtttcttg

SEQ ID NO: 9327 - DNA, 25 bp, SARS Virus
agaatctctaatacctgtttcttgt

SEQ ID NO: 9328 - DNA, 25 bp, SARS Virus
gaatctctaattactgtttcttgtt

SEQ ID NO: 9329 - DNA, 25 bp, SARS Virus
aatctctaattcatgtttcttgtta

SEQ ID NO: 9330 - DNA, 25 bp, SARS Virus
atctctaattccagtttcttgttat

SEQ ID NO: 9331 - DNA, 25 bp, SARS Virus
tctctaattcctatttcttgttatg

SEQ ID NO: 9332 - DNA, 25 bp, SARS Virus
ctctaattcctgattcttgttatga

SEQ ID NO: 9333 - DNA, 25 bp, SARS Virus
tctaattcctgtatcttgttatgac

SEQ ID NO: 9334 - DNA, 25 bp, SARS Virus
ctaattcctgttacttgttatgacg

SEQ ID NO: 9335 - DNA, 25 bp, SARS Virus
taattcctgtttattgttatgacgc

SEQ ID NO: 9336 - DNA, 25 bp, SARS Virus
aattcctgtttcatgttatgacgcg

SEQ ID NO: 9337 - DNA, 25 bp, SARS Virus
attcctgtttctagttatgacgcgt

SEQ ID NO: 9338 - DNA, 25 bp, SARS Virus
ttcctgtttcttattatgacgcgta

SEQ ID NO: 9339 - DNA, 25 bp, SARS Virus
tcctgtttcttgatatgacgcgtaa

SEQ ID NO: 9340 - DNA, 25 bp, SARS Virus
cctgtttcttgtaatgacgcgtaac

SEQ ID NO: 9341 - DNA, 25 bp, SARS Virus
ctgtttcttgttatgacgcgtaaca

SEQ ID NO: 9342 - DNA, 25 bp, SARS Virus
tgtttcttgttaagacgcgtaacag

SEQ ID NO: 9343 - DNA, 25 bp, SARS Virus
gtttcttgttataacgcgtaacaga

SEQ ID NO: 9344 - DNA, 25 bp, SARS Virus
tttcttgttatgacgcgtaacagag

SEQ ID NO: 9345 - DNA, 25 bp, SARS Virus
ttcttgttatgaagcgtaacagagg

SEQ ID NO: 9346 - DNA, 25 bp, SARS Virus
tcttgttatgacacgtaacagagga

SEQ ID NO: 9347 - DNA, 25 bp, SARS Virus
cttgttatgacgagtaacagaggac

SEQ ID NO: 9348 - DNA, 25 bp, SARS Virus
ttgttatgacgcataacagaggacc

SEQ ID NO: 9349 - DNA, 25 bp, SARS Virus
tgttatgacgcgaaacagaggacca

SEQ ID NO: 9350 - DNA, 25 bp, SARS Virus
gttatgacgcgtaacagaggaccaa

SEQ ID NO: 9351 - DNA, 25 bp, SARS Virus
ttatgacgcgtaacagaggaccaaa

SEQ ID NO: 9352 - DNA, 25 bp, SARS Virus
tatgacgcgtaaaagaggaccaaat

SEQ ID NO: 9353 - DNA, 25 bp, SARS Virus
atgacgcgtaacagaggaccaaatg

SEQ ID NO: 9354 - DNA, 25 bp, SARS Virus
tgacgcgtaacaaaggaccaaatga

SEQ ID NO: 9355 - DNA, 25 bp, SARS Virus
gacgcgtaacagaggaccaaatgac

SEQ ID NO: 9356 - DNA, 25 bp, SARS Virus
acgcgtaacagaagaccaaatgacc

SEQ ID NO: 9357 - DNA, 25 bp, SARS Virus
cgcgtaacagagaaccaaatgaccg

SEQ ID NO: 9358 - DNA, 25 bp, SARS Virus
gcgtaacagaggaccaaatgaccga

SEQ ID NO: 9359 - DNA, 25 bp, SARS Virus
cgtaacagaggaacaaatgaccgat

SEQ ID NO: 9360 - DNA, 25 bp, SARS Virus
gtaacagaggacaaaatgaccgatg

SEQ ID NO: 9361 - DNA, 25 bp, SARS Virus
taacagaggaccaaatgaccgatgt

SEQ ID NO: 9362 - DNA, 25 bp, SARS Virus
aacagaggaccaaatgaccgatgtt

SEQ ID NO: 9363 - DNA, 25 bp, SARS Virus
acagaggaccaaatgaccgatgttt

SEQ ID NO: 9364 - DNA, 25 bp, SARS Virus
cagaggaccaaaagaccgatgtttg

SEQ ID NO: 9365 - DNA, 25 bp, SARS Virus
agaggaccaaataaccgatgtttgt

SEQ ID NO: 9366 - DNA, 25 bp, SARS Virus
gaggaccaaatgaccgatgtttgtt

SEQ ID NO: 9367 - DNA, 25 bp, SARS Virus
aggaccaaatgaacgatgtttgtta

SEQ ID NO: 9368 - DNA, 25 bp, SARS Virus
ggaccaaatgacagatgtttgttac

SEQ ID NO: 9369 - DNA, 25 bp, SARS Virus
gaccaaatgaccaatgtttgttaca

SEQ ID NO: 9370 - DNA, 25 bp, SARS Virus
accaaatgaccgatgtttgttacag

SEQ ID NO: 9371 - DNA, 25 bp, SARS Virus
ccaaatgaccgaagtttgttacaga

SEQ ID NO: 9372 - DNA, 25 bp, SARS Virus
caaatgaccgatatttgttacagaa

SEQ ID NO: 9373 - DNA, 25 bp, SARS Virus
aaatgaccgatgattgttacagaaa

SEQ ID NO: 9374 - DNA, 25 bp, SARS Virus
aatgaccgatgtatgttacagaaag

SEQ ID NO: 9375 - DNA, 25 bp, SARS Virus
atgaccgatgttagttacagaaagc

SEQ ID NO: 9376 - DNA, 25 bp, SARS Virus
tgaccgatgtttattacagaaagcg

SEQ ID NO: 9377 - DNA, 25 bp, SARS Virus
gaccgatgtttgatacagaaagcga

SEQ ID NO: 9378 - DNA, 25 bp, SARS Virus
accgatgtttgtaacagaaagcgaa

SEQ ID NO: 9379 - DNA, 25 bp, SARS Virus
ccgatgtttgttacagaaagcgaat

SEQ ID NO: 9380 - DNA, 25 bp, SARS Virus
cgatgtttgttaaagaaagcgaatt

SEQ ID NO: 9381 - DNA, 25 bp, SARS Virus
gatgtttgttacagaaagcgaattt

SEQ ID NO: 9382 - DNA, 25 bp, SARS Virus
atgtttgttacaaaaagcgaatttt

SEQ ID NO: 9383 - DNA, 25 bp, SARS Virus
tgtttgttacagaaagcgaattttc

SEQ ID NO: 9384 - DNA, 25 bp, SARS Virus
gtttgttacagaaagcgaattttcc

SEQ ID NO: 9385 - DNA, 25 bp, SARS Virus
tttgttacagaaagcgaattttccc

SEQ ID NO: 9386 - DNA, 25 bp, SARS Virus
ttgttacagaaaacgaattttcccc

SEQ ID NO: 9387 - DNA, 25 bp, SARS Virus
tgttacagaaagagaattttccccc

SEQ ID NO: 9388 - DNA, 25 bp, SARS Virus
gttacagaaagcaaattttccccca

SEQ ID NO: 9389 - DNA, 25 bp, SARS Virus
ttacagaaagcgaattttcccccac

SEQ ID NO: 9390 - DNA, 25 bp, SARS Virus
tacagaaagcgaattttcccccacg

SEQ ID NO: 9391 - DNA, 25 bp, SARS Virus
acagaaagcgaaatttcccccacgt

SEQ ID NO: 9392 - DNA, 25 bp, SARS Virus
cagaaagcgaatattcccccacgtg

SEQ ID NO: 9393 - DNA, 25 bp, SARS Virus
agaaagcgaattatcccccacgtgg

SEQ ID NO: 9394 - DNA, 25 bp, SARS Virus
gaaagcgaatttacccccacgtggt

SEQ ID NO: 9395 - DNA, 25 bp, SARS Virus
aaagcgaattttaccccacgtggtt

SEQ ID NO: 9396 - DNA, 25 bp, SARS Virus
aagcgaattttcacccacgtggtta

SEQ ID NO: 9397 - DNA, 25 bp, SARS Virus
agcgaattttccaccacgtggttaa

SEQ ID NO: 9398 - DNA, 25 bp, SARS Virus
gcgaattttcccacacgtggttaat

SEQ ID NO: 9399 - DNA, 25 bp, SARS Virus
cgaattttccccaacgtggttaatt

SEQ ID NO: 9400 - DNA, 25 bp, SARS Virus
gaattttcccccacgtggttaattt

SEQ ID NO: 9401 - DNA, 25 bp, SARS Virus
agtaatgtccaccaaaactgtagca

SEQ ID NO: 9402 - DNA, 25 bp, SARS Virus
gtaatgtccacacaaactgtagcag

SEQ ID NO: 9403 - DNA, 25 bp, SARS Virus
taatgtccacaacaactgtagcagt

SEQ ID NO: 9404 - DNA, 25 bp, SARS Virus
aatgtccacaaacactgtagcagtt

SEQ ID NO: 9405 - DNA, 25 bp, SARS Virus
atgtccacaaaacctgtagcagttc

SEQ ID NO: 9406 - DNA, 25 bp, SARS Virus
tgtccacaaaaactgtagcagttcc

SEQ ID NO: 9407 - DNA, 25 bp, SARS Virus
gtccacaaaaaccgtagcagttccc

SEQ ID NO: 9408 - DNA, 25 bp, SARS Virus
tccacaaaaactctagcagttccca

SEQ ID NO: 9409 - DNA, 25 bp, SARS Virus
ccacaaaaactgcagcagttcccag

SEQ ID NO: 9410 - DNA, 25 bp, SARS Virus
cacaaaaactgtcgcagttcccagt

SEQ ID NO: 9411 - DNA, 25 bp, SARS Virus
acaaaaactgtaccagttcccagtt

SEQ ID NO: 9412 - DNA, 25 bp, SARS Virus
caaaaactgtagcagttcccagttt

SEQ ID NO: 9413 - DNA, 25 bp, SARS Virus
aaaaactgtagccgttcccagttta

SEQ ID NO: 9414 - DNA, 25 bp, SARS Virus
aaaactgtagcacttcccagtttat

SEQ ID NO: 9415 - DNA, 25 bp, SARS Virus
aaactgtagcagctcccagtttatg

SEQ ID NO: 9416 - DNA, 25 bp, SARS Virus
aactgtagcagtccccagtttatgt

SEQ ID NO: 9417 - DNA, 25 bp, SARS Virus
actgtagcagttcccagtttatgtc

SEQ ID NO: 9418 - DNA, 25 bp, SARS Virus
ctgtagcagttcccagtttatgtcc

SEQ ID NO: 9419 - DNA, 25 bp, SARS Virus
tgtagcagttcccagtttatgtcca

SEQ ID NO: 9420 - DNA, 25 bp, SARS Virus
gtagcagttccccgtttatgtccaa

SEQ ID NO: 9421 - DNA, 25 bp, SARS Virus
tagcagttcccactttatgtccaac

SEQ ID NO: 9422 - DNA, 25 bp, SARS Virus
agcagttcccagcttatgtccaacg

SEQ ID NO: 9423 - DNA, 25 bp, SARS Virus
gcagttcccagtctatgtccaacga

SEQ ID NO: 9424 - DNA, 25 bp, SARS Virus
cagttcccagttcatgtccaacgaa

SEQ ID NO: 9425 - DNA, 25 bp, SARS Virus
agttcccagtttctgtccaacgaag

SEQ ID NO: 9426 - DNA, 25 bp, SARS Virus
gttcccagtttacgtccaacgaagt

SEQ ID NO: 9427 - DNA, 25 bp, SARS Virus
ttcccagtttatctccaacgaagtc

SEQ ID NO: 9428 - DNA, 25 bp, SARS Virus
tcccagtttatgcccaacgaagtct

SEQ ID NO: 9429 - DNA, 25 bp, SARS Virus
cccagtttatgtccaacgaagtcta

SEQ ID NO: 9430 - DNA, 25 bp, SARS Virus
ccagtttatgtccaacgaagtctat

SEQ ID NO: 9431 - DNA, 25 bp, SARS Virus
cagtttatgtcccacgaagtctatt

SEQ ID NO: 9432 - DNA, 25 bp, SARS Virus
agtttatgtccaccgaagtctattg

SEQ ID NO: 9433 - DNA, 25 bp, SARS Virus
gtttatgtccaacgaagtctattgt

SEQ ID NO: 9434 - DNA, 25 bp, SARS Virus
tttatgtccaaccaagtctattgta

SEQ ID NO: 9435 - DNA, 25 bp, SARS Virus
ttatgtccaacgcagtctattgtag

SEQ ID NO: 9436 - DNA, 25 bp, SARS Virus
tatgtccaacgacgtctattgtagt

SEQ ID NO: 9437 - DNA, 25 bp, SARS Virus
atgtccaacgaactctattgtagtt

SEQ ID NO: 9438 - DNA, 25 bp, SARS Virus
tgtccaacgaagcctattgtagttc

SEQ ID NO: 9439 - DNA, 25 bp, SARS Virus
gtccaacgaagtctattgtagttcc

SEQ ID NO: 9440 - DNA, 25 bp, SARS Virus
tccaacgaagtccattgtagttcct

SEQ ID NO: 9441 - DNA, 25 bp, SARS Virus
ccaacgaagtctcttgtagttccta

SEQ ID NO: 9442 - DNA, 25 bp, SARS Virus
caacgaagtctactgtagttcctaa

SEQ ID NO: 9443 - DNA, 25 bp, SARS Virus
aacgaagtctatcgtagttcctaac

SEQ ID NO: 9444 - DNA, 25 bp, SARS Virus
acgaagtctattctagttcctaaca

SEQ ID NO: 9445 - DNA, 25 bp, SARS Virus
cgaagtctattgcagttcctaacac

SEQ ID NO: 9446 - DNA, 25 bp, SARS Virus
gaagtctattgtcgttcctaacaca

SEQ ID NO: 9447 - DNA, 25 bp, SARS Virus
aagtctattgtacttcctaacacat

SEQ ID NO: 9448 - DNA, 25 bp, SARS Virus
agtctattgtagctcctaacacatt

SEQ ID NO: 9449 - DNA, 25 bp, SARS Virus
gtctattgtagtccctaacacattt

SEQ ID NO: 9450 - DNA, 25 bp, SARS Virus
tctattgtagttcctaacacatttt

SEQ ID NO: 9451 - DNA, 25 bp, SARS Virus
ctattgtagttcctaacacatttta

SEQ ID NO: 9452 - DNA, 25 bp, SARS Virus
tattgtagttcccaacacattttac

SEQ ID NO: 9453 - DNA, 25 bp, SARS Virus
attgtagttcctcacacattttacg

SEQ ID NO: 9454 - DNA, 25 bp, SARS Virus
ttgtagttcctaccacattttacga

SEQ ID NO: 9455 - DNA, 25 bp, SARS Virus
tgtagttcctaacacattttacgaa

SEQ ID NO: 9456 - DNA, 25 bp, SARS Virus
gtagttcctaacccattttacgaag

SEQ ID NO: 9457 - DNA, 25 bp, SARS Virus
tagttcctaacacattttacgaagt

SEQ ID NO: 9458 - DNA, 25 bp, SARS Virus
agttcctaacaccttttacgaagta

SEQ ID NO: 9459 - DNA, 25 bp, SARS Virus
gttcctaacacactttacgaagtaa

SEQ ID NO: 9460 - DNA, 25 bp, SARS Virus
ttcctaacacatcttacgaagtaac

SEQ ID NO: 9461 - DNA, 25 bp, SARS Virus
tcctaacacattctacgaagtaact

SEQ ID NO: 9462 - DNA, 25 bp, SARS Virus
cctaacacatttcacgaagtaacta

SEQ ID NO: 9463 - DNA, 25 bp, SARS Virus
ctaacacattttccgaagtaactac

SEQ ID NO: 9464 - DNA, 25 bp, SARS Virus
taacacattttacgaagtaactaca

SEQ ID NO: 9465 - DNA, 25 bp, SARS Virus
aacacattttaccaagtaactacaa

SEQ ID NO: 9466 - DNA, 25 bp, SARS Virus
acacattttacgcagtaactacaac

SEQ ID NO: 9467 - DNA, 25 bp, SARS Virus
cacattttacgacgtaactacaaca

SEQ ID NO: 9468 - DNA, 25 bp, SARS Virus
acattttacgaactaactacaacaa

SEQ ID NO: 9469 - DNA, 25 bp, SARS Virus
cattttacgaagcaactacaacaat

SEQ ID NO: 9470 - DNA, 25 bp, SARS Virus
attttacgaagtcactacaacaatt

SEQ ID NO: 9471 - DNA, 25 bp, SARS Virus
ttttacgaagtacctacaacaattg

SEQ ID NO: 9472 - DNA, 25 bp, SARS Virus
tttacgaagtaactacaacaattgt

SEQ ID NO: 9473 - DNA, 25 bp, SARS Virus
ttacgaagtaaccacaacaattgtt

SEQ ID NO: 9474 - DNA, 25 bp, SARS Virus
tacgaagtaactccaacaattgttc

SEQ ID NO: 9475 - DNA, 25 bp, SARS Virus
acgaagtaactacaacaattgttcc

SEQ ID NO: 9476 - DNA, 25 bp, SARS Virus
cgaagtaactaccacaattgttccg

SEQ ID NO: 9477 - DNA, 25 bp, SARS Virus
gaagtaactacaccaattgttccgt

SEQ ID NO: 9478 - DNA, 25 bp, SARS Virus
aagtaactacaacaattgttccgtg

SEQ ID NO: 9479 - DNA, 25 bp, SARS Virus
agtaactacaaccattgttccgtga

SEQ ID NO: 9480 - DNA, 25 bp, SARS Virus
gtaactacaacacttgttccgtgag

SEQ ID NO: 9481 - DNA, 25 bp, SARS Virus
taactacaacaactgttccgtgagc

SEQ ID NO: 9482 - DNA, 25 bp, SARS Virus
aactacaacaatcgttccgtgagct

SEQ ID NO: 9483 - DNA, 25 bp, SARS Virus
actacaacaattcttccgtgagctt

SEQ ID NO: 9484 - DNA, 25 bp, SARS Virus
ctacaacaattgctccgtgagcttt

SEQ ID NO: 9485 - DNA, 25 bp, SARS Virus
tacaacaattgtcccgtgagcttta

SEQ ID NO: 9486 - DNA, 25 bp, SARS Virus
acaacaattgttccgtgagctttac

SEQ ID NO: 9487 - DNA, 25 bp, SARS Virus
caacaattgttccgtgagctttaca

SEQ ID NO: 9488 - DNA, 25 bp, SARS Virus
aacaattgttccctgagctttacac

SEQ ID NO: 9489 - DNA, 25 bp, SARS Virus
acaattgttccgcgagctttacacg

SEQ ID NO: 9490 - DNA, 25 bp, SARS Virus
caattgttccgtcagctttacacgt

SEQ ID NO: 9491 - DNA, 25 bp, SARS Virus
aattgttccgtgcgctttacacgta

SEQ ID NO: 9492 - DNA, 25 bp, SARS Virus
attgttccgtgacctttacacgtaa

SEQ ID NO: 9493 - DNA, 25 bp, SARS Virus
ttgttccgtgagctttacacgtaac

SEQ ID NO: 9494 - DNA, 25 bp, SARS Virus
tgttccgtgagccttacacgtaact

SEQ ID NO: 9495 - DNA, 25 bp, SARS Virus
gttccgtgagctctacacgtaacta

SEQ ID NO: 9496 - DNA, 25 bp, SARS Virus
ttccgtgagcttcacacgtaactag

SEQ ID NO: 9497 - DNA, 25 bp, SARS Virus
tccgtgagctttccacgtaactagt

SEQ ID NO: 9498 - DNA, 25 bp, SARS Virus
ccgtgagctttacacgtaactagtt

SEQ ID NO: 9499 - DNA, 25 bp, SARS Virus
cgtgagctttacccgtaactagttc

SEQ ID NO: 9500 - DNA, 25 bp, SARS Virus
gtgagctttacacgtaactagttca

SEQ ID NO: 9501 - DNA, 25 bp, SARS Virus
tgagctttacacctaactagttcag

SEQ ID NO: 9502 - DNA, 25 bp, SARS Virus
gagctttacacgcaactagttcagt

SEQ ID NO: 9503 - DNA, 25 bp, SARS Virus
agctttacacgtcactagttcagtg

SEQ ID NO: 9504 - DNA, 25 bp, SARS Virus
gctttacacgtacctagttcagtga

SEQ ID NO: 9505 - DNA, 25 bp, SARS Virus
ctttacacgtaactagttcagtgat

SEQ ID NO: 9506 - DNA, 25 bp, SARS Virus
tttacacgtaaccagttcagtgata

SEQ ID NO: 9507 - DNA, 25 bp, SARS Virus
ttacacgtaactcgttcagtgatag

SEQ ID NO: 9508 - DNA, 25 bp, SARS Virus
tacacgtaactacttcagtgatagc

SEQ ID NO: 9509 - DNA, 25 bp, SARS Virus
acacgtaactagctcagtgatagcg

SEQ ID NO: 9510 - DNA, 25 bp, SARS Virus
cacgtaactagtccagtgatagcga

SEQ ID NO: 9511 - DNA, 25 bp, SARS Virus
acgtaactagttcagtgatagcgac

SEQ ID NO: 9512 - DNA, 25 bp, SARS Virus
cgtaactagttccgtgatagcgacc

SEQ ID NO: 9513 - DNA, 25 bp, SARS Virus
gtaactagttcactgatagcgaccg

SEQ ID NO: 9514 - DNA, 25 bp, SARS Virus
taactagttcagcgatagcgaccgc

SEQ ID NO: 9515 - DNA, 25 bp, SARS Virus
aactagttcagtcatagcgaccgcg

SEQ ID NO: 9516 - DNA, 25 bp, SARS Virus
actagttcagtgctagcgaccgcgt

SEQ ID NO: 9517 - DNA, 25 bp, SARS Virus
ctagttcagtgacagcgaccgcgtt

SEQ ID NO: 9518 - DNA, 25 bp, SARS Virus
tagttcagtgatcgcgaccgcgttt

SEQ ID NO: 9519 - DNA, 25 bp, SARS Virus
agttcagtgataccgaccgcgtttc

SEQ ID NO: 9520 - DNA, 25 bp, SARS Virus
gttcagtgatagcgaccgcgtttca

SEQ ID NO: 9521 - DNA, 25 bp, SARS Virus
ttcagtgatagccaccgcgtttcaa

SEQ ID NO: 9522 - DNA, 25 bp, SARS Virus
tcagtgatagcgcccgcgtttcaac

SEQ ID NO: 9523 - DNA, 25 bp, SARS Virus
cagtgatagcgaccgcgtttcaacg

SEQ ID NO: 9524 - DNA, 25 bp, SARS Virus
agtgatagcgaccgcgtttcaacgc

SEQ ID NO: 9525 - DNA, 25 bp, SARS Virus
gtgatagcgaccccgtttcaacgct

SEQ ID NO: 9526 - DNA, 25 bp, SARS Virus
tgatagcgaccgcgtttcaacgcta

SEQ ID NO: 9527 - DNA, 25 bp, SARS Virus
gatagcgaccgcctttcaacgctag

SEQ ID NO: 9528 - DNA, 25 bp, SARS Virus
atagcgaccgcgcttcaacgctagt

SEQ ID NO: 9529 - DNA, 25 bp, SARS Virus
tagcgaccgcgtctcaacgctagtg

SEQ ID NO: 9530 - DNA, 25 bp, SARS Virus
agcgaccgcgttccaacgctagtga

SEQ ID NO: 9531 - DNA, 25 bp, SARS Virus
gcgaccgcgtttcaacgctagtgag

SEQ ID NO: 9532 - DNA, 25 bp, SARS Virus
cgaccgcgtttccacgctagtgagt

SEQ ID NO: 9533 - DNA, 25 bp, SARS Virus
gaccgcgtttcaccgctagtgagtt

SEQ ID NO: 9534 - DNA, 25 bp, SARS Virus
accgcgtttcaacgctagtgagttg

SEQ ID NO: 9535 - DNA, 25 bp, SARS Virus
ccgcgtttcaaccctagtgagttga

SEQ ID NO: 9536 - DNA, 25 bp, SARS Virus
cgcgtttcaacgctagtgagttgaa

SEQ ID NO: 9537 - DNA, 25 bp, SARS Virus
gcgtttcaacgccagtgagttgaat

SEQ ID NO: 9538 - DNA, 25 bp, SARS Virus
cgtttcaacgctcgtgagttgaatc

SEQ ID NO: 9539 - DNA, 25 bp, SARS Virus
gtttcaacgctactgagttgaatcc

SEQ ID NO: 9540 - DNA, 25 bp, SARS Virus
tttcaacgctagcgagttgaatcca

SEQ ID NO: 9541 - DNA, 25 bp, SARS Virus
ttcaacgctagtcagttgaatccac

SEQ ID NO: 9542 - DNA, 25 bp, SARS Virus
tcaacgctagtgcgttgaatccact

SEQ ID NO: 9543 - DNA, 25 bp, SARS Virus
caacgctagtgacttgaatccactt

SEQ ID NO: 9544 - DNA, 25 bp, SARS Virus
aacgctagtgagctgaatccacttc

SEQ ID NO: 9545 - DNA, 25 bp, SARS Virus
acgctagtgagtcgaatccacttca

SEQ ID NO: 9546 - DNA, 25 bp, SARS Virus
cgctagtgagttcaatccacttcag

SEQ ID NO: 9547 - DNA, 25 bp, SARS Virus
gctagtgagttgcatccacttcaga

SEQ ID NO: 9548 - DNA, 25 bp, SARS Virus
ctagtgagttgactccacttcagaa

SEQ ID NO: 9549 - DNA, 25 bp, SARS Virus
tagtgagttgaacccacttcagaag

SEQ ID NO: 9550 - DNA, 25 bp, SARS Virus
agtgagttgaatccacttcagaagt

SEQ ID NO: 9551 - DNA, 25 bp, SARS Virus
gtgagttgaatccacttcagaagta

SEQ ID NO: 9552 - DNA, 25 bp, SARS Virus
tgagttgaatccccttcagaagtag

SEQ ID NO: 9553 - DNA, 25 bp, SARS Virus
gagttgaatccacttcagaagtagc

SEQ ID NO: 9554 - DNA, 25 bp, SARS Virus
agttgaatccacctcagaagtagcg

SEQ ID NO: 9555 - DNA, 25 bp, SARS Virus
gttgaatccactccagaagtagcga

SEQ ID NO: 9556 - DNA, 25 bp, SARS Virus
ttgaatccacttcagaagtagcgag

SEQ ID NO: 9557 - DNA, 25 bp, SARS Virus
tgaatccacttccgaagtagcgagt

SEQ ID NO: 9558 - DNA, 25 bp, SARS Virus
gaatccacttcacaagtagcgagtt

SEQ ID NO: 9559 - DNA, 25 bp, SARS Virus
aatccacttcagcagtagcgagttt

SEQ ID NO: 9560 - DNA, 25 bp, SARS Virus
atccacttcagacgtagcgagtttc

SEQ ID NO: 9561 - DNA, 25 bp, SARS Virus
tccacttcagaactagcgagtttcg

SEQ ID NO: 9562 - DNA, 25 bp, SARS Virus
ccacttcagaagcagcgagtttcgt

SEQ ID NO: 9563 - DNA, 25 bp, SARS Virus
cacttcagaagtcgcgagtttcgtt

SEQ ID NO: 9564 - DNA, 25 bp, SARS Virus
acttcagaagtaccgagtttcgttc

SEQ ID NO: 9565 - DNA, 25 bp, SARS Virus
cttcagaagtagcgagtttcgttcc

SEQ ID NO: 9566 - DNA, 25 bp, SARS Virus
ttcagaagtagccagtttcgttccc

SEQ ID NO: 9567 - DNA, 25 bp, SARS Virus
tcagaagtagcgcgtttcgttccct

SEQ ID NO: 9568 - DNA, 25 bp, SARS Virus
cagaagtagcgactttcgttccctg

SEQ ID NO: 9569 - DNA, 25 bp, SARS Virus
agaagtagcgagcttcgttccctga

SEQ ID NO: 9570 - DNA, 25 bp, SARS Virus
gaagtagcgagtctcgttccctgaa

SEQ ID NO: 9571 - DNA, 25 bp, SARS Virus
aagtagcgagttccgttccctgaaa

SEQ ID NO: 9572 - DNA, 25 bp, SARS Virus
agtagcgagtttcgttccctgaaat

SEQ ID NO: 9573 - DNA, 25 bp, SARS Virus
gtagcgagtttccttccctgaaatg

SEQ ID NO: 9574 - DNA, 25 bp, SARS Virus
tagcgagtttcgctccctgaaatgg

SEQ ID NO: 9575 - DNA, 25 bp, SARS Virus
agcgagtttcgtcccctgaaatggc

SEQ ID NO: 9576 - DNA, 25 bp, SARS Virus
gcgagtttcgttccctgaaatggca

SEQ ID NO: 9577 - DNA, 25 bp, SARS Virus
cgagtttcgttccctgaaatggcag

SEQ ID NO: 9578 - DNA, 25 bp, SARS Virus
gagtttcgttccctgaaatggcagt

SEQ ID NO: 9579 - DNA, 25 bp, SARS Virus
agtttcgttccccgaaatggcagtc

SEQ ID NO: 9580 - DNA, 25 bp, SARS Virus
gtttcgttccctcaaatggcagtca

SEQ ID NO: 9581 - DNA, 25 bp, SARS Virus
tttcgttccctgcaatggcagtcac

SEQ ID NO: 9582 - DNA, 25 bp, SARS Virus
ttcgttccctgacatggcagtcaca

SEQ ID NO: 9583 - DNA, 25 bp, SARS Virus
tcgttccctgaactggcagtcacat

SEQ ID NO: 9584 - DNA, 25 bp, SARS Virus
cgttccctgaaacggcagtcacata

SEQ ID NO: 9585 - DNA, 25 bp, SARS Virus
gttccctgaaatcgcagtcacatat

SEQ ID NO: 9586 - DNA, 25 bp, SARS Virus
ttccctgaaatgccagtcacatatg

SEQ ID NO: 9587 - DNA, 25 bp, SARS Virus
tccctgaaatggcagtcacatatgc

SEQ ID NO: 9588 - DNA, 25 bp, SARS Virus
ccctgaaatggccgtcacatatgca

SEQ ID NO: 9589 - DNA, 25 bp, SARS Virus
cctgaaatggcactcacatatgcac

SEQ ID NO: 9590 - DNA, 25 bp, SARS Virus
ctgaaatggcagccacatatgcacc

SEQ ID NO: 9591 - DNA, 25 bp, SARS Virus
tgaaatggcagtcacatatgcaccg

SEQ ID NO: 9592 - DNA, 25 bp, SARS Virus
gaaatggcagtcccatatgcaccgt

SEQ ID NO: 9593 - DNA, 25 bp, SARS Virus
aaatggcagtcacatatgcaccgtt

SEQ ID NO: 9594 - DNA, 25 bp, SARS Virus
aatggcagtcacctatgcaccgttc

SEQ ID NO: 9595 - DNA, 25 bp, SARS Virus
atggcagtcacacatgcaccgttcc

SEQ ID NO: 9596 - DNA, 25 bp, SARS Virus
tggcagtcacatctgcaccgttcct

SEQ ID NO: 9597 - DNA, 25 bp, SARS Virus
ggcagtcacatacgcaccgttcctc

SEQ ID NO: 9598 - DNA, 25 bp, SARS Virus
gcagtcacatatccaccgttcctcg

SEQ ID NO: 9599 - DNA, 25 bp, SARS Virus
cagtcacatatgcaccgttcctcgt

SEQ ID NO: 9600 - DNA, 25 bp, SARS Virus
agtcacatatgccccgttcctcgtc

SEQ ID NO: 9601 - DNA, 25 bp, SARS Virus
gtcacatatgcaccgttcctcgtcg

SEQ ID NO: 9602 - DNA, 25 bp, SARS Virus
tcacatatgcaccgttcctcgtcga

SEQ ID NO: 9603 - DNA, 25 bp, SARS Virus
cacatatgcacccttcctcgtcgac

SEQ ID NO: 9604 - DNA, 25 bp, SARS Virus
acatatgcaccgctcctcgtcgacg

SEQ ID NO: 9605 - DNA, 25 bp, SARS Virus
catatgcaccgtccctcgtcgacgt

SEQ ID NO: 9606 - DNA, 25 bp, SARS Virus
atatgcaccgttcctcgtcgacgtt

SEQ ID NO: 9607 - DNA, 25 bp, SARS Virus
tatgcaccgttcctcgtcgacgttg

SEQ ID NO: 9608 - DNA, 25 bp, SARS Virus
atgcaccgttccccgtcgacgttga

SEQ ID NO: 9609 - DNA, 25 bp, SARS Virus
tgcaccgttcctcgtcgacgttgat

SEQ ID NO: 9610 - DNA, 25 bp, SARS Virus
gcaccgttcctcctcgacgttgatg

SEQ ID NO: 9611 - DNA, 25 bp, SARS Virus
caccgttcctcgccgacgttgatga

SEQ ID NO: 9612 - DNA, 25 bp, SARS Virus
accgttcctcgtcgacgttgatgag

SEQ ID NO: 9613 - DNA, 25 bp, SARS Virus
ccgttcctcgtccacgttgatgagt

SEQ ID NO: 9614 - DNA, 25 bp, SARS Virus
cgttcctcgtcgccgttgatgagta

SEQ ID NO: 9615 - DNA, 25 bp, SARS Virus
gttcctcgtcgacgttgatgagtac

SEQ ID NO: 9616 - DNA, 25 bp, SARS Virus
ttcctcgtcgaccttgatgagtacg

SEQ ID NO: 9617 - DNA, 25 bp, SARS Virus
tcctcgtcgacgctgatgagtacgg

SEQ ID NO: 9618 - DNA, 25 bp, SARS Virus
cctcgtcgacgtcgatgagtacgga

SEQ ID NO: 9619 - DNA, 25 bp, SARS Virus
ctcgtcgacgttcatgagtacggag

SEQ ID NO: 9620 - DNA, 25 bp, SARS Virus
tcgtcgacgttgctgagtacggaga

SEQ ID NO: 9621 - DNA, 25 bp, SARS Virus
cgtcgacgttgacgagtacggagaa

SEQ ID NO: 9622 - DNA, 25 bp, SARS Virus
gtcgacgttgatcagtacggagaat

SEQ ID NO: 9623 - DNA, 25 bp, SARS Virus
tcgacgttgatgcgtacggagaatt

SEQ ID NO: 9624 - DNA, 25 bp, SARS Virus
cgacgttgatgactacggagaattc

SEQ ID NO: 9625 - DNA, 25 bp, SARS Virus
gacgttgatgagcacggagaattcc

SEQ ID NO: 9626 - DNA, 25 bp, SARS Virus
acgttgatgagtccggagaattccg

SEQ ID NO: 9627 - DNA, 25 bp, SARS Virus
cgttgatgagtacggagaattccgt

SEQ ID NO: 9628 - DNA, 25 bp, SARS Virus
gttgatgagtaccgagaattccgtg

SEQ ID NO: 9629 - DNA, 25 bp, SARS Virus
ttgatgagtacgcagaattccgtgg

SEQ ID NO: 9630 - DNA, 25 bp, SARS Virus
tgatgagtacggcgaattccgtggt

SEQ ID NO: 9631 - DNA, 25 bp, SARS Virus
gatgagtacggacaattccgtggtt

SEQ ID NO: 9632 - DNA, 25 bp, SARS Virus
atgagtacggagcattccgtggttt

SEQ ID NO: 9633 - DNA, 25 bp, SARS Virus
tgagtacggagacttccgtggtttt

SEQ ID NO: 9634 - DNA, 25 bp, SARS Virus
gagtacggagaactccgtggttttc

SEQ ID NO: 9635 - DNA, 25 bp, SARS Virus
agtacggagaatcccgtggttttct

SEQ ID NO: 9636 - DNA, 25 bp, SARS Virus
gtacggagaattccgtggttttctt

SEQ ID NO: 9637 - DNA, 25 bp, SARS Virus
tacggagaattccgtggttttcttc

SEQ ID NO: 9638 - DNA, 25 bp, SARS Virus
acggagaattccctggttttcttca

SEQ ID NO: 9639 - DNA, 25 bp, SARS Virus
cggagaattccgcggttttcttcat

SEQ ID NO: 9640 - DNA, 25 bp, SARS Virus
ggagaattccgtcgttttcttcatt

SEQ ID NO: 9641 - DNA, 25 bp, SARS Virus
gagaattccgtgcttttcttcattg

SEQ ID NO: 9642 - DNA, 25 bp, SARS Virus
agaattccgtggctttcttcattgg

SEQ ID NO: 9643 - DNA, 25 bp, SARS Virus
gaattccgtggtcttcttcattgga

SEQ ID NO: 9644 - DNA, 25 bp, SARS Virus
aattccgtggttctcttcattggaa

SEQ ID NO: 9645 - DNA, 25 bp, SARS Virus
attccgtggtttccttcattggaaa

SEQ ID NO: 9646 - DNA, 25 bp, SARS Virus
ttccgtggttttcttcattggaaag

SEQ ID NO: 9647 - DNA, 25 bp, SARS Virus
tccgtggttttcctcattggaaaga

SEQ ID NO: 9648 - DNA, 25 bp, SARS Virus
ccgtggttttctccattggaaagaa

SEQ ID NO: 9649 - DNA, 25 bp, SARS Virus
cgtggttttcttcattggaaagaac

SEQ ID NO: 9650 - DNA, 25 bp, SARS Virus
gtggttttcttccttggaaagaact

SEQ ID NO: 9651 - DNA, 25 bp, SARS Virus
tggttttcttcactggaaagaactt

SEQ ID NO: 9652 - DNA, 25 bp, SARS Virus
ggttttcttcatcggaaagaacttc

SEQ ID NO: 9653 - DNA, 25 bp, SARS Virus
gttttcttcattcgaaagaacttcc

SEQ ID NO: 9654 - DNA, 25 bp, SARS Virus
ttttcttcattgcaaagaacttcca

SEQ ID NO: 9655 - DNA, 25 bp, SARS Virus
tttcttcattggcaagaacttccac

SEQ ID NO: 9656 - DNA, 25 bp, SARS Virus
ttcttcattggacagaacttccact

SEQ ID NO: 9657 - DNA, 25 bp, SARS Virus
tcttcattggaacgaacttccacta

SEQ ID NO: 9658 - DNA, 25 bp, SARS Virus
cttcattggaaacaacttccactaa

SEQ ID NO: 9659 - DNA, 25 bp, SARS Virus
ttcattggaaagcacttccactaag

SEQ ID NO: 9660 - DNA, 25 bp, SARS Virus
tcattggaaagaccttccactaagt

SEQ ID NO: 9661 - DNA, 25 bp, SARS Virus
cattggaaagaacttccactaagtg

SEQ ID NO: 9662 - DNA, 25 bp, SARS Virus
attggaaagaacctccactaagtgt

SEQ ID NO: 9663 - DNA, 25 bp, SARS Virus
ttggaaagaactcccactaagtgta

SEQ ID NO: 9664 - DNA, 25 bp, SARS Virus
tggaaagaacttccactaagtgtac

SEQ ID NO: 9665 - DNA, 25 bp, SARS Virus
ggaaagaacttccactaagtgtact

SEQ ID NO: 9666 - DNA, 25 bp, SARS Virus
gaaagaacttcccctaagtgtactg

SEQ ID NO: 9667 - DNA, 25 bp, SARS Virus
aaagaacttccactaagtgtactgt

SEQ ID NO: 9668 - DNA, 25 bp, SARS Virus
aagaacttccaccaagtgtactgtg

SEQ ID NO: 9669 - DNA, 25 bp, SARS Virus
agaacttccactcagtgtactgtgt

SEQ ID NO: 9670 - DNA, 25 bp, SARS Virus
gaacttccactacgtgtactgtgtc

SEQ ID NO: 9671 - DNA, 25 bp, SARS Virus
aacttccactaactgtactgtgtca

SEQ ID NO: 9672 - DNA, 25 bp, SARS Virus
acttccactaagcgtactgtgtcat

SEQ ID NO: 9673 - DNA, 25 bp, SARS Virus
cttccactaagtctactgtgtcatg

SEQ ID NO: 9674 - DNA, 25 bp, SARS Virus
ttccactaagtgcactgtgtcatga

SEQ ID NO: 9675 - DNA, 25 bp, SARS Virus
tccactaagtgtcctgtgtcatgaa

SEQ ID NO: 9676 - DNA, 25 bp, SARS Virus
ccactaagtgtactgtgtcatgaat

SEQ ID NO: 9677 - DNA, 25 bp, SARS Virus
cactaagtgtaccgtgtcatgaatg

SEQ ID NO: 9678 - DNA, 25 bp, SARS Virus
actaagtgtactctgtcatgaatgg

SEQ ID NO: 9679 - DNA, 25 bp, SARS Virus
ctaagtgtactgcgtcatgaatgga

SEQ ID NO: 9680 - DNA, 25 bp, SARS Virus
taagtgtactgtctcatgaatggag

SEQ ID NO: 9681 - DNA, 25 bp, SARS Virus
aagtgtactgtgccatgaatggaga

SEQ ID NO: 9682 - DNA, 25 bp, SARS Virus
agtgtactgtgtcatgaatggagac

SEQ ID NO: 9683 - DNA, 25 bp, SARS Virus
gtgtactgtgtcctgaatggagact

SEQ ID NO: 9684 - DNA, 25 bp, SARS Virus
tgtactgtgtcacgaatggagactc

SEQ ID NO: 9685 - DNA, 25 bp, SARS Virus
gtactgtgtcatcaatggagactcc

SEQ ID NO: 9686 - DNA, 25 bp, SARS Virus
tactgtgtcatgcatggagactcct

SEQ ID NO: 9687 - DNA, 25 bp, SARS Virus
actgtgtcatgactggagactcctc

SEQ ID NO: 9688 - DNA, 25 bp, SARS Virus
ctgtgtcatgaacggagactcctcc

SEQ ID NO: 9689 - DNA, 25 bp, SARS Virus
tgtgtcatgaatcgagactcctcca

SEQ ID NO: 9690 - DNA, 25 bp, SARS Virus
gtgtcatgaatgcagactcctccaa

SEQ ID NO: 9691 - DNA, 25 bp, SARS Virus
tgtcatgaatggcgactcctccaac

SEQ ID NO: 9692 - DNA, 25 bp, SARS Virus
gtcatgaatggacactcctccaaca

SEQ ID NO: 9693 - DNA, 25 bp, SARS Virus
tcatgaatggagcctcctccaacaa

SEQ ID NO: 9694 - DNA, 25 bp, SARS Virus
catgaatggagactcctccaacaag

SEQ ID NO: 9695 - DNA, 25 bp, SARS Virus
atgaatggagacccctccaacaaga

SEQ ID NO: 9696 - DNA, 25 bp, SARS Virus
tgaatggagactcctccaacaagag

SEQ ID NO: 9697 - DNA, 25 bp, SARS Virus
gaatggagactcctccaacaagagt

SEQ ID NO: 9698 - DNA, 25 bp, SARS Virus
aatggagactcccccaacaagagtt

SEQ ID NO: 9699 - DNA, 25 bp, SARS Virus
atggagactcctccaacaagagttc

SEQ ID NO: 9700 - DNA, 25 bp, SARS Virus
tggagactcctccaacaagagttct

SEQ ID NO: 9701 - DNA, 25 bp, SARS Virus
ggagactcctcccacaagagttctt

SEQ ID NO: 9702 - DNA, 25 bp, SARS Virus
gagactcctccaccaagagttcttg

SEQ ID NO: 9703 - DNA, 25 bp, SARS Virus
agactcctccaacaagagttcttgc

SEQ ID NO: 9704 - DNA, 25 bp, SARS Virus
gactcctccaaccagagttcttgcc

SEQ ID NO: 9705 - DNA, 25 bp, SARS Virus
actcctccaacacgagttcttgcca

SEQ ID NO: 9706 - DNA, 25 bp, SARS Virus
ctcctccaacaacagttcttgccac

SEQ ID NO: 9707 - DNA, 25 bp, SARS Virus
tcctccaacaagcgttcttgccact

SEQ ID NO: 9708 - DNA, 25 bp, SARS Virus
cctccaacaagacttcttgccactt

SEQ ID NO: 9709 - DNA, 25 bp, SARS Virus
ctccaacaagagctcttgccacttg

SEQ ID NO: 9710 - DNA, 25 bp, SARS Virus
tccaacaagagtccttgccacttga

SEQ ID NO: 9711 - DNA, 25 bp, SARS Virus
ccaacaagagttcttgccacttgag

SEQ ID NO: 9712 - DNA, 25 bp, SARS Virus
caacaagagttcctgccacttgagc

SEQ ID NO: 9713 - DNA, 25 bp, SARS Virus
aacaagagttctcgccacttgagct

SEQ ID NO: 9714 - DNA, 25 bp, SARS Virus
acaagagttcttcccacttgagctt

SEQ ID NO: 9715 - DNA, 25 bp, SARS Virus
caagagttcttgccacttgagcttc

SEQ ID NO: 9716 - DNA, 25 bp, SARS Virus
aagagttcttgccacttgagcttcg

SEQ ID NO: 9717 - DNA, 25 bp, SARS Virus
agagttcttgccccttgagcttcgt

SEQ ID NO: 9718 - DNA, 25 bp, SARS Virus
gagttcttgccacttgagcttcgtg

SEQ ID NO: 9719 - DNA, 25 bp, SARS Virus
agttcttgccacctgagcttcgtga

SEQ ID NO: 9720 - DNA, 25 bp, SARS Virus
gttcttgccactcgagcttcgtgag

SEQ ID NO: 9721 - DNA, 25 bp, SARS Virus
ttcttgccacttcagcttcgtgagc

SEQ ID NO: 9722 - DNA, 25 bp, SARS Virus
tcttgccacttgcgcttcgtgagct

SEQ ID NO: 9723 - DNA, 25 bp, SARS Virus
cttgccacttgaccttcgtgagctc

SEQ ID NO: 9724 - DNA, 25 bp, SARS Virus
ttgccacttgagcttcgtgagctct

SEQ ID NO: 9725 - DNA, 25 bp, SARS Virus
tgccacttgagcctcgtgagctctg

SEQ ID NO: 9726 - DNA, 25 bp, SARS Virus
gccacttgagctccgtgagctctgc

SEQ ID NO: 9727 - DNA, 25 bp, SARS Virus
ccacttgagcttcgtgagctctgcg

SEQ ID NO: 9728 - DNA, 25 bp, SARS Virus
cacttgagcttcctgagctctgcgg

SEQ ID NO: 9729 - DNA, 25 bp, SARS Virus
acttgagcttcgcgagctctgcggg

SEQ ID NO: 9730 - DNA, 25 bp, SARS Virus
cttgagcttcgtcagctctgcgggc

SEQ ID NO: 9731 - DNA, 25 bp, SARS Virus
ttgagcttcgtgcgctctgcgggca

SEQ ID NO: 9732 - DNA, 25 bp, SARS Virus
tgagcttcgtgacctctgcgggcaa

SEQ ID NO: 9733 - DNA, 25 bp, SARS Virus
gagcttcgtgagctctgcgggcaac

SEQ ID NO: 9734 - DNA, 25 bp, SARS Virus
agcttcgtgagccctgcgggcaact

SEQ ID NO: 9735 - DNA, 25 bp, SARS Virus
gcttcgtgagctctgcgggcaacta

SEQ ID NO: 9736 - DNA, 25 bp, SARS Virus
cttcgtgagctccgcgggcaactat

SEQ ID NO: 9737 - DNA, 25 bp, SARS Virus
ttcgtgagctctccgggcaactatc

SEQ ID NO: 9738 - DNA, 25 bp, SARS Virus
tcgtgagctctgcgggcaactatcg

SEQ ID NO: 9739 - DNA, 25 bp, SARS Virus
cgtgagctctgccggcaactatcga

SEQ ID NO: 9740 - DNA, 25 bp, SARS Virus
gtgagctctgcgcgcaactatcgaa

SEQ ID NO: 9741 - DNA, 25 bp, SARS Virus
tgagctctgcggccaactatcgaag

SEQ ID NO: 9742 - DNA, 25 bp, SARS Virus
gagctctgcgggcaactatcgaagt

SEQ ID NO: 9743 - DNA, 25 bp, SARS Virus
agctctgcgggccactatcgaagtg

SEQ ID NO: 9744 - DNA, 25 bp, SARS Virus
gctctgcgggcacctatcgaagtgt

SEQ ID NO: 9745 - DNA, 25 bp, SARS Virus
ctctgcgggcaactatcgaagtgtt

SEQ ID NO: 9746 - DNA, 25 bp, SARS Virus
tctgcgggcaaccatcgaagtgttt

SEQ ID NO: 9747 - DNA, 25 bp, SARS Virus
ctgcgggcaactctcgaagtgttta

SEQ ID NO: 9748 - DNA, 25 bp, SARS Virus
tgcgggcaactaccgaagtgtttac

SEQ ID NO: 9749 - DNA, 25 bp, SARS Virus
gcgggcaactatcgaagtgtttacc

SEQ ID NO: 9750 - DNA, 25 bp, SARS Virus
cgggcaactatccaagtgtttacct

SEQ ID NO: 9751 - DNA, 25 bp, SARS Virus
gggcaactatcgcagtgtttacctc

SEQ ID NO: 9752 - DNA, 25 bp, SARS Virus
ggcaactatcgacgtgtttacctcg

SEQ ID NO: 9753 - DNA, 25 bp, SARS Virus
gcaactatcgaactgtttacctcga

SEQ ID NO: 9754 - DNA, 25 bp, SARS Virus
caactatcgaagcgtttacctcgat

SEQ ID NO: 9755 - DNA, 25 bp, SARS Virus
aactatcgaagtctttacctcgata

SEQ ID NO: 9756 - DNA, 25 bp, SARS Virus
actatcgaagtgcttacctcgatag

SEQ ID NO: 9757 - DNA, 25 bp, SARS Virus
ctatcgaagtgtctacctcgatagc

SEQ ID NO: 9758 - DNA, 25 bp, SARS Virus
tatcgaagtgttcacctcgatagca

SEQ ID NO: 9759 - DNA, 25 bp, SARS Virus
atcgaagtgtttccctcgatagcaa

SEQ ID NO: 9760 - DNA, 25 bp, SARS Virus
tcgaagtgtttacctcgatagcaac

SEQ ID NO: 9761 - DNA, 25 bp, SARS Virus
cgaagtgtttacctcgatagcaacc

SEQ ID NO: 9762 - DNA, 25 bp, SARS Virus
gaagtgtttaccccgatagcaaccg

SEQ ID NO: 9763 - DNA, 25 bp, SARS Virus
aagtgtttacctcgatagcaaccgt

SEQ ID NO: 9764 - DNA, 25 bp, SARS Virus
agtgtttacctccatagcaaccgtg

SEQ ID NO: 9765 - DNA, 25 bp, SARS Virus
gtgtttacctcgctagcaaccgtgt

SEQ ID NO: 9766 - DNA, 25 bp, SARS Virus
tgtttacctcgacagcaaccgtgtg

SEQ ID NO: 9767 - DNA, 25 bp, SARS Virus
gtttacctcgatcgcaaccgtgtgg

SEQ ID NO: 9768 - DNA, 25 bp, SARS Virus
tttacctcgataccaaccgtgtggt

SEQ ID NO: 9769 - DNA, 25 bp, SARS Virus
ttacctcgatagcaaccgtgtggtc

SEQ ID NO: 9770 - DNA, 25 bp, SARS Virus
tacctcgatagccaccgtgtggtca

SEQ ID NO: 9771 - DNA, 25 bp, SARS Virus
acctcgatagcacccgtgtggtcag

SEQ ID NO: 9772 - DNA, 25 bp, SARS Virus
cctcgatagcaaccgtgtggtcaga

SEQ ID NO: 9773 - DNA, 25 bp, SARS Virus
ctcgatagcaaccgtgtggtcagac

SEQ ID NO: 9774 - DNA, 25 bp, SARS Virus
tcgatagcaaccctgtggtcagaca

SEQ ID NO: 9775 - DNA, 25 bp, SARS Virus
cgatagcaaccgcgtggtcagacac

SEQ ID NO: 9776 - DNA, 25 bp, SARS Virus
gatagcaaccgtctggtcagacaca

SEQ ID NO: 9777 - DNA, 25 bp, SARS Virus
atagcaaccgtgcggtcagacacat

SEQ ID NO: 9778 - DNA, 25 bp, SARS Virus
tagcaaccgtgtcgtcagacacatt

SEQ ID NO: 9779 - DNA, 25 bp, SARS Virus
agcaaccgtgtgctcagacacattt

SEQ ID NO: 9780 - DNA, 25 bp, SARS Virus
gcaaccgtgtggccagacacattta

SEQ ID NO: 9781 - DNA, 25 bp, SARS Virus
caaccgtgtggtcagacacatttac

SEQ ID NO: 9782 - DNA, 25 bp, SARS Virus
aaccgtgtggtccgacacatttacc

SEQ ID NO: 9783 - DNA, 25 bp, SARS Virus
accgtgtggtcacacacatttaccg

SEQ ID NO: 9784 - DNA, 25 bp, SARS Virus
ccgtgtggtcagccacatttaccgg

SEQ ID NO: 9785 - DNA, 25 bp, SARS Virus
cgtgtggtcagacacatttaccgga

SEQ ID NO: 9786 - DNA, 25 bp, SARS Virus
gtgtggtcagacccatttaccggag

SEQ ID NO: 9787 - DNA, 25 bp, SARS Virus
tgtggtcagacacatttaccggagt

SEQ ID NO: 9788 - DNA, 25 bp, SARS Virus
gtggtcagacacctttaccggagta

SEQ ID NO: 9789 - DNA, 25 bp, SARS Virus
tggtcagacacacttaccggagtac

SEQ ID NO: 9790 - DNA, 25 bp, SARS Virus
ggtcagacacatctaccggagtacg

SEQ ID NO: 9791 - DNA, 25 bp, SARS Virus
gtcagacacattcaccggagtacga

SEQ ID NO: 9792 - DNA, 25 bp, SARS Virus
tcagacacatttcccggagtacgag

SEQ ID NO: 9793 - DNA, 25 bp, SARS Virus
cagacacatttaccggagtacgaga

SEQ ID NO: 9794 - DNA, 25 bp, SARS Virus
agacacatttaccggagtacgagaa

SEQ ID NO: 9795 - DNA, 25 bp, SARS Virus
gacacatttacccgagtacgagaat

SEQ ID NO: 9796 - DNA, 25 bp, SARS Virus
acacatttaccgcagtacgagaatc

SEQ ID NO: 9797 - DNA, 25 bp, SARS Virus
cacatttaccggcgtacgagaatct

SEQ ID NO: 9798 - DNA, 25 bp, SARS Virus
acatttaccggactacgagaatctc

SEQ ID NO: 9799 - DNA, 25 bp, SARS Virus
catttaccggagcacgagaatctct

SEQ ID NO: 9800 - DNA, 25 bp, SARS Virus
atttaccggagtccgagaatctcta

SEQ ID NO: 9801 - DNA, 25 bp, SARS Virus
tttaccggagtacgagaatctctaa

SEQ ID NO: 9802 - DNA, 25 bp, SARS Virus
ttaccggagtaccagaatctctaat

SEQ ID NO: 9803 - DNA, 25 bp, SARS Virus
taccggagtacgcgaatctctaatt

SEQ ID NO: 9804 - DNA, 25 bp, SARS Virus
accggagtacgacaatctctaattc

SEQ ID NO: 9805 - DNA, 25 bp, SARS Virus
ccggagtacgagcatctctaattcc

SEQ ID NO: 9806 - DNA, 25 bp, SARS Virus
cggagtacgagactctctaattcct

SEQ ID NO: 9807 - DNA, 25 bp, SARS Virus
ggagtacgagaacctctaattcctg

SEQ ID NO: 9808 - DNA, 25 bp, SARS Virus
gagtacgagaatctctaattcctgt

SEQ ID NO: 9809 - DNA, 25 bp, SARS Virus
agtacgagaatccctaattcctgtt

SEQ ID NO: 9810 - DNA, 25 bp, SARS Virus
gtacgagaatctctaattcctgttt

SEQ ID NO: 9811 - DNA, 25 bp, SARS Virus
tacgagaatctccaattcctgtttc

SEQ ID NO: 9812 - DNA, 25 bp, SARS Virus
acgagaatctctcattcctgtttct

SEQ ID NO: 9813 - DNA, 25 bp, SARS Virus
cgagaatctctacttcctgtttctt

SEQ ID NO: 9814 - DNA, 25 bp, SARS Virus
gagaatctctaactcctgtttcttg

SEQ ID NO: 9815 - DNA, 25 bp, SARS Virus
agaatctctaatccctgtttcttgt

SEQ ID NO: 9816 - DNA, 25 bp, SARS Virus
gaatctctaattcctgtttcttgtt

SEQ ID NO: 9817 - DNA, 25 bp, SARS Virus
aatctctaattcctgtttcttgtta

SEQ ID NO: 9818 - DNA, 25 bp, SARS Virus
atctctaattcccgtttcttgttat

SEQ ID NO: 9819 - DNA, 25 bp, SARS Virus
tctctaattcctctttcttgttatg

SEQ ID NO: 9820 - DNA, 25 bp, SARS Virus
ctctaattcctgcttcttgttatga

SEQ ID NO: 9821 - DNA, 25 bp, SARS Virus
tctaattcctgtctcttgttatgac

SEQ ID NO: 9822 - DNA, 25 bp, SARS Virus
ctaattcctgttccttgttatgacg

SEQ ID NO: 9823 - DNA, 25 bp, SARS Virus
taattcctgtttcttgttatgacgc

SEQ ID NO: 9824 - DNA, 25 bp, SARS Virus
aattcctgtttcctgttatgacgcg

SEQ ID NO: 9825 - DNA, 25 bp, SARS Virus
attcctgtttctcgttatgacgcgt

SEQ ID NO: 9826 - DNA, 25 bp, SARS Virus
ttcctgtttcttcttatgacgcgta

SEQ ID NO: 9827 - DNA, 25 bp, SARS Virus
tcctgtttcttgctatgacgcgtaa

SEQ ID NO: 9828 - DNA, 25 bp, SARS Virus
cctgtttcttgtcatgacgcgtaac

SEQ ID NO: 9829 - DNA, 25 bp, SARS Virus
ctgtttcttgttctgacgcgtaaca

SEQ ID NO: 9830 - DNA, 25 bp, SARS Virus
tgtttcttgttacgacgcgtaacag

SEQ ID NO: 9831 - DNA, 25 bp, SARS Virus
gtttcttgttatcacgcgtaacaga

SEQ ID NO: 9832 - DNA, 25 bp, SARS Virus
tttcttgttatgccgcgtaacagag

SEQ ID NO: 9833 - DNA, 25 bp, SARS Virus
ttcttgttatgacgcgtaacagagg

SEQ ID NO: 9834 - DNA, 25 bp, SARS Virus
tcttgttatgacccgtaacagagga

SEQ ID NO: 9835 - DNA, 25 bp, SARS Virus
cttgttatgacgcgtaacagaggac

SEQ ID NO: 9836 - DNA, 25 bp, SARS Virus
ttgttatgacgcctaacagaggacc

SEQ ID NO: 9837 - DNA, 25 bp, SARS Virus
tgttatgacgcgcaacagaggacca

SEQ ID NO: 9838 - DNA, 25 bp, SARS Virus
gttatgacgcgtcacagaggaccaa

SEQ ID NO: 9839 - DNA, 25 bp, SARS Virus
ttatgacgcgtaccagaggaccaaa

SEQ ID NO: 9840 - DNA, 25 bp, SARS Virus
tatgacgcgtaacagaggaccaaat

SEQ ID NO: 9841 - DNA, 25 bp, SARS Virus
atgacgcgtaaccgaggaccaaatg

SEQ ID NO: 9842 - DNA, 25 bp, SARS Virus
tgacgcgtaacacaggaccaaatga

SEQ ID NO: 9843 - DNA, 25 bp, SARS Virus
gacgcgtaacagcggaccaaatgac

SEQ ID NO: 9844 - DNA, 25 bp, SARS Virus
acgcgtaacagacgaccaaatgacc

SEQ ID NO: 9845 - DNA, 25 bp, SARS Virus
cgcgtaacagagcaccaaatgaccg

SEQ ID NO: 9846 - DNA, 25 bp, SARS Virus
gcgtaacagaggcccaaatgaccga

SEQ ID NO: 9847 - DNA, 25 bp, SARS Virus
cgtaacagaggaccaaatgaccgat

SEQ ID NO: 9848 - DNA, 25 bp, SARS Virus
gtaacagaggaccaaatgaccgatg

SEQ ID NO: 9849 - DNA, 25 bp, SARS Virus
taacagaggacccaatgaccgatgt

SEQ ID NO: 9850 - DNA, 25 bp, SARS Virus
aacagaggaccacatgaccgatgtt

SEQ ID NO: 9851 - DNA, 25 bp, SARS Virus
acagaggaccaactgaccgatgttt

SEQ ID NO: 9852 - DNA, 25 bp, SARS Virus
cagaggaccaaacgaccgatgtttg

SEQ ID NO: 9853 - DNA, 25 bp, SARS Virus
agaggaccaaatcaccgatgtttgt

SEQ ID NO: 9854 - DNA, 25 bp, SARS Virus
gaggaccaaatgcccgatgtttgtt

SEQ ID NO: 9855 - DNA, 25 bp, SARS Virus
aggaccaaatgaccgatgtttgtta

SEQ ID NO: 9856 - DNA, 25 bp, SARS Virus
ggaccaaatgaccgatgtttgttac

SEQ ID NO: 9857 - DNA, 25 bp, SARS Virus
gaccaaatgacccatgtttgttaca

SEQ ID NO: 9858 - DNA, 25 bp, SARS Virus
accaaatgaccgctgtttgttacag

SEQ ID NO: 9859 - DNA, 25 bp, SARS Virus
ccaaatgaccgacgtttgttacaga

SEQ ID NO: 9860 - DNA, 25 bp, SARS Virus
caaatgaccgatctttgttacagaa

SEQ ID NO: 9861 - DNA, 25 bp, SARS Virus
aaatgaccgatgcttgttacagaaa

SEQ ID NO: 9862 - DNA, 25 bp, SARS Virus
aatgaccgatgtctgttacagaaag

SEQ ID NO: 9863 - DNA, 25 bp, SARS Virus
atgaccgatgttcgttacagaaagc

SEQ ID NO: 9864 - DNA, 25 bp, SARS Virus
tgaccgatgtttcttacagaaagcg

SEQ ID NO: 9865 - DNA, 25 bp, SARS Virus
gaccgatgtttgctacagaaagcga

SEQ ID NO: 9866 - DNA, 25 bp, SARS Virus
accgatgtttgtcacagaaagcgaa

SEQ ID NO: 9867 - DNA, 25 bp, SARS Virus
ccgatgtttgttccagaaagcgaat

SEQ ID NO: 9868 - DNA, 25 bp, SARS Virus
cgatgtttgttacagaaagcgaatt

SEQ ID NO: 9869 - DNA, 25 bp, SARS Virus
gatgtttgttaccgaaagcgaattt

SEQ ID NO: 9870 - DNA, 25 bp, SARS Virus
atgtttgttacacaaagcgaatttt

SEQ ID NO: 9871 - DNA, 25 bp, SARS Virus
tgtttgttacagcaagcgaattttc

SEQ ID NO: 9872 - DNA, 25 bp, SARS Virus
gtttgttacagacagcgaattttcc

SEQ ID NO: 9873 - DNA, 25 bp, SARS Virus
tttgttacagaacgcgaattttccc

SEQ ID NO: 9874 - DNA, 25 bp, SARS Virus
ttgttacagaaaccgaattttcccc

SEQ ID NO: 9875 - DNA, 25 bp, SARS Virus
tgttacagaaagcgaattttccccc

SEQ ID NO: 9876 - DNA, 25 bp, SARS Virus
gttacagaaagccaattttccccca

SEQ ID NO: 9877 - DNA, 25 bp, SARS Virus
ttacagaaagcgcattttcccccac

SEQ ID NO: 9878 - DNA, 25 bp, SARS Virus
tacagaaagcgacttttcccccacg

SEQ ID NO: 9879 - DNA, 25 bp, SARS Virus
acagaaagcgaactttcccccacgt

SEQ ID NO: 9880 - DNA, 25 bp, SARS Virus
cagaaagcgaatcttcccccacgtg

SEQ ID NO: 9881 - DNA, 25 bp, SARS Virus
agaaagcgaattctcccccacgtgg

SEQ ID NO: 9882 - DNA, 25 bp, SARS Virus
gaaagcgaatttccccccacgtggt

SEQ ID NO: 9883 - DNA, 25 bp, SARS Virus
aaagcgaattttcccccacgtggtt

SEQ ID NO: 9884 - DNA, 25 bp, SARS Virus
aagcgaattttcccccacgtggtta

SEQ ID NO: 9885 - DNA, 25 bp, SARS Virus
agcgaattttcccccacgtggttaa

SEQ ID NO: 9886 - DNA, 25 bp, SARS Virus
gcgaattttcccccacgtggttaat

SEQ ID NO: 9887 - DNA, 25 bp, SARS Virus
cgaattttcccccacgtggttaatt

SEQ ID NO: 9888 - DNA, 25 bp, SARS Virus
gaattttcccccccgtggttaattt

SEQ ID NO: 9889 - DNA, 25 bp, SARS Virus
agtaatgtccacgaaaactgtagca

SEQ ID NO: 9890 - DNA, 25 bp, SARS Virus
gtaatgtccacagaaactgtagcag

SEQ ID NO: 9891 - DNA, 25 bp, SARS Virus
taatgtccacaagaactgtagcagt

SEQ ID NO: 9892 - DNA, 25 bp, SARS Virus
aatgtccacaaagactgtagcagtt

SEQ ID NO: 9893 - DNA, 25 bp, SARS Virus
atgtccacaaaagctgtagcagttc

SEQ ID NO: 9894 - DNA, 25 bp, SARS Virus
tgtccacaaaaagtgtagcagttcc

SEQ ID NO: 9895 - DNA, 25 bp, SARS Virus
gtccacaaaaacggtagcagttccc

SEQ ID NO: 9896 - DNA, 25 bp, SARS Virus
tccacaaaaactgtagcagttccca

SEQ ID NO: 9897 - DNA, 25 bp, SARS Virus
ccacaaaaactggagcagttcccag

SEQ ID NO: 9898 - DNA, 25 bp, SARS Virus
cacaaaaactgtggcagttcccagt

SEQ ID NO: 9899 - DNA, 25 bp, SARS Virus
acaaaaactgtagcagttcccagtt

SEQ ID NO: 9900 - DNA, 25 bp, SARS Virus
caaaaactgtaggagttcccagttt

SEQ ID NO: 9901 - DNA, 25 bp, SARS Virus
aaaaactgtagcggttcccagttta

SEQ ID NO: 9902 - DNA, 25 bp, SARS Virus
aaaactgtagcagttcccagtttat

SEQ ID NO: 9903 - DNA, 25 bp, SARS Virus
aaactgtagcaggtcccagtttatg

SEQ ID NO: 9904 - DNA, 25 bp, SARS Virus
aactgtagcagtgcccagtttatgt

SEQ ID NO: 9905 - DNA, 25 bp, SARS Virus
actgtagcagttgccagtttatgtc

SEQ ID NO: 9906 - DNA, 25 bp, SARS Virus
ctgtagcagttcgcagtttatgtcc

SEQ ID NO: 9907 - DNA, 25 bp, SARS Virus
tgtagcagttccgagtttatgtcca

SEQ ID NO: 9908 - DNA, 25 bp, SARS Virus
gtagcagttcccggtttatgtccaa

SEQ ID NO: 9909 - DNA, 25 bp, SARS Virus
tagcagttcccagtttatgtccaac

SEQ ID NO: 9910 - DNA, 25 bp, SARS Virus
agcagttcccaggttatgtccaacg

SEQ ID NO: 9911 - DNA, 25 bp, SARS Virus
gcagttcccagtgtatgtccaacga

SEQ ID NO: 9912 - DNA, 25 bp, SARS Virus
cagttcccagttgatgtccaacgaa

SEQ ID NO: 9913 - DNA, 25 bp, SARS Virus
agttcccagtttgtgtccaacgaag

SEQ ID NO: 9914 - DNA, 25 bp, SARS Virus
gttcccagtttaggtccaacgaagt

SEQ ID NO: 9915 - DNA, 25 bp, SARS Virus
ttcccagtttatgtccaacgaagtc

SEQ ID NO: 9916 - DNA, 25 bp, SARS Virus
tcccagtttatggccaacgaagtct

SEQ ID NO: 9917 - DNA, 25 bp, SARS Virus
cccagtttatgtgcaacgaagtcta

SEQ ID NO: 9918 - DNA, 25 bp, SARS Virus
ccagtttatgtcgaacgaagtctat

SEQ ID NO: 9919 - DNA, 25 bp, SARS Virus
cagtttatgtccgacgaagtctatt

SEQ ID NO: 9920 - DNA, 25 bp, SARS Virus
agtttatgtccagcgaagtctattg

SEQ ID NO: 9921 - DNA, 25 bp, SARS Virus
gtttatgtccaaggaagtctattgt

SEQ ID NO: 9922 - DNA, 25 bp, SARS Virus
tttatgtccaacgaagtctattgta

SEQ ID NO: 9923 - DNA, 25 bp, SARS Virus
ttatgtccaacggagtctattgtag

SEQ ID NO: 9924 - DNA, 25 bp, SARS Virus
tatgtccaacgaggtctattgtagt

SEQ ID NO: 9925 - DNA, 25 bp, SARS Virus
atgtccaacgaagtctattgtagtt

SEQ ID NO: 9926 - DNA, 25 bp, SARS Virus
tgtccaacgaaggctattgtagttc

SEQ ID NO: 9927 - DNA, 25 bp, SARS Virus
gtccaacgaagtgtattgtagttcc

SEQ ID NO: 9928 - DNA, 25 bp, SARS Virus
tccaacgaagtcgattgtagttcct

SEQ ID NO: 9929 - DNA, 25 bp, SARS Virus
ccaacgaagtctgttgtagttccta

SEQ ID NO: 9930 - DNA, 25 bp, SARS Virus
caacgaagtctagtgtagttcctaa

SEQ ID NO: 9931 - DNA, 25 bp, SARS Virus
aacgaagtctatggtagttcctaac

SEQ ID NO: 9932 - DNA, 25 bp, SARS Virus
acgaagtctattgtagttcctaaca

SEQ ID NO: 9933 - DNA, 25 bp, SARS Virus
cgaagtctattggagttcctaacac

SEQ ID NO: 9934 - DNA, 25 bp, SARS Virus
gaagtctattgtggttcctaacaca

SEQ ID NO: 9935 - DNA, 25 bp, SARS Virus
aagtctattgtagttcctaacacat

SEQ ID NO: 9936 - DNA, 25 bp, SARS Virus
agtctattgtaggtcctaacacatt

SEQ ID NO: 9937 - DNA, 25 bp, SARS Virus
gtctattgtagtgcctaacacattt

SEQ ID NO: 9938 - DNA, 25 bp, SARS Virus
tctattgtagttgctaacacatttt

SEQ ID NO: 9939 - DNA, 25 bp, SARS Virus
ctattgtagttcgtaacacatttta

SEQ ID NO: 9940 - DNA, 25 bp, SARS Virus
tattgtagttccgaacacattttac

SEQ ID NO: 9941 - DNA, 25 bp, SARS Virus
attgtagttcctgacacattttacg

SEQ ID NO: 9942 - DNA, 25 bp, SARS Virus
ttgtagttcctagcacattttacga

SEQ ID NO: 9943 - DNA, 25 bp, SARS Virus
tgtagttcctaagacattttacgaa

SEQ ID NO: 9944 - DNA, 25 bp, SARS Virus
gtagttcctaacgcattttacgaag

SEQ ID NO: 9945 - DNA, 25 bp, SARS Virus
tagttcctaacagattttacgaagt

SEQ ID NO: 9946 - DNA, 25 bp, SARS Virus
agttcctaacacgttttacgaagta

SEQ ID NO: 9947 - DNA, 25 bp, SARS Virus
gttcctaacacagtttacgaagtaa

SEQ ID NO: 9948 - DNA, 25 bp, SARS Virus
ttcctaacacatgttacgaagtaac

SEQ ID NO: 9949 - DNA, 25 bp, SARS Virus
tcctaacacattgtacgaagtaact

SEQ ID NO: 9950 - DNA, 25 bp, SARS Virus
cctaacacatttgacgaagtaacta

SEQ ID NO: 9951 - DNA, 25 bp, SARS Virus
ctaacacattttgcgaagtaactac

SEQ ID NO: 9952 - DNA, 25 bp, SARS Virus
taacacattttaggaagtaactaca

SEQ ID NO: 9953 - DNA, 25 bp, SARS Virus
aacacattttacgaagtaactacaa

SEQ ID NO: 9954 - DNA, 25 bp, SARS Virus
acacattttacggagtaactacaac

SEQ ID NO: 9955 - DNA, 25 bp, SARS Virus
cacattttacgaggtaactacaaca

SEQ ID NO: 9956 - DNA, 25 bp, SARS Virus
acattttacgaagtaactacaacaa

SEQ ID NO: 9957 - DNA, 25 bp, SARS Virus
cattttacgaaggaactacaacaat

SEQ ID NO: 9958 - DNA, 25 bp, SARS Virus
attttacgaagtgactacaacaatt

SEQ ID NO: 9959 - DNA, 25 bp, SARS Virus
ttttacgaagtagctacaacaattg

SEQ ID NO: 9960 - DNA, 25 bp, SARS Virus
tttacgaagtaagtacaacaattgt

SEQ ID NO: 9961 - DNA, 25 bp, SARS Virus
ttacgaagtaacgacaacaattgtt

SEQ ID NO: 9962 - DNA, 25 bp, SARS Virus
tacgaagtaactgcaacaattgttc

SEQ ID NO: 9963 - DNA, 25 bp, SARS Virus
acgaagtaactagaacaattgttcc

SEQ ID NO: 9964 - DNA, 25 bp, SARS Virus
cgaagtaactacgacaattgttccg

SEQ ID NO: 9965 - DNA, 25 bp, SARS Virus
gaagtaactacagcaattgttccgt

SEQ ID NO: 9966 - DNA, 25 bp, SARS Virus
aagtaactacaagaattgttccgtg

SEQ ID NO: 9967 - DNA, 25 bp, SARS Virus
agtaactacaacgattgttccgtga

SEQ ID NO: 9968 - DNA, 25 bp, SARS Virus
gtaactacaacagttgttccgtgag

SEQ ID NO: 9969 - DNA, 25 bp, SARS Virus
taactacaacaagtgttccgtgagc

SEQ ID NO: 9970 - DNA, 25 bp, SARS Virus
aactacaacaatggttccgtgagct

SEQ ID NO: 9971 - DNA, 25 bp, SARS Virus
actacaacaattgttccgtgagctt

SEQ ID NO: 9972 - DNA, 25 bp, SARS Virus
ctacaacaattggtccgtgagcttt

SEQ ID NO: 9973 - DNA, 25 bp, SARS Virus
tacaacaattgtgccgtgagcttta

SEQ ID NO: 9974 - DNA, 25 bp, SARS Virus
acaacaattgttgcgtgagctttac

SEQ ID NO: 9975 - DNA, 25 bp, SARS Virus
caacaattgttcggtgagctttaca

SEQ ID NO: 9976 - DNA, 25 bp, SARS Virus
aacaattgttccgtgagctttacac

SEQ ID NO: 9977 - DNA, 25 bp, SARS Virus
acaattgttccgggagctttacacg

SEQ ID NO: 9978 - DNA, 25 bp, SARS Virus
caattgttccgtgagctttacacgt

SEQ ID NO: 9979 - DNA, 25 bp, SARS Virus
aattgttccgtgggctttacacgta

SEQ ID NO: 9980 - DNA, 25 bp, SARS Virus
attgttccgtgagctttacacgtaa

SEQ ID NO: 9981 - DNA, 25 bp, SARS Virus
ttgttccgtgaggtttacacgtaac

SEQ ID NO: 9982 - DNA, 25 bp, SARS Virus
tgttccgtgagcgttacacgtaact

SEQ ID NO: 9983 - DNA, 25 bp, SARS Virus
gttccgtgagctgtacacgtaacta

SEQ ID NO: 9984 - DNA, 25 bp, SARS Virus
ttccgtgagcttgacacgtaactag

SEQ ID NO: 9985 - DNA, 25 bp, SARS Virus
tccgtgagctttgcacgtaactagt

SEQ ID NO: 9986 - DNA, 25 bp, SARS Virus
ccgtgagctttagacgtaactagtt

SEQ ID NO: 9987 - DNA, 25 bp, SARS Virus
cgtgagctttacgcgtaactagttc

SEQ ID NO: 9988 - DNA, 25 bp, SARS Virus
gtgagctttacaggtaactagttca

SEQ ID NO: 9989 - DNA, 25 bp, SARS Virus
tgagctttacacgtaactagttcag

SEQ ID NO: 9990 - DNA, 25 bp, SARS Virus
gagctttacacggaactagttcagt

SEQ ID NO: 9991 - DNA, 25 bp, SARS Virus
agctttacacgtgactagttcagtg

SEQ ID NO: 9992 - DNA, 25 bp, SARS Virus
gctttacacgtagctagttcagtga

SEQ ID NO: 9993 - DNA, 25 bp, SARS Virus
ctttacacgtaagtagttcagtgat

SEQ ID NO: 9994 - DNA, 25 bp, SARS Virus
tttacacgtaacgagttcagtgata

SEQ ID NO: 9995 - DNA, 25 bp, SARS Virus
ttacacgtaactggttcagtgatag

SEQ ID NO: 9996 - DNA, 25 bp, SARS Virus
tacacgtaactagttcagtgatagc

SEQ ID NO: 9997 - DNA, 25 bp, SARS Virus
acacgtaactaggtcagtgatagcg

SEQ ID NO: 9998 - DNA, 25 bp, SARS Virus
cacgtaactagtgcagtgatagcga

SEQ ID NO: 9999 - DNA, 25 bp, SARS Virus
acgtaactagttgagtgatagcgac

SEQ ID NO: 10000 - DNA, 25 bp, SARS Virus
cgtaactagttcggtgatagcgacc

SEQ ID NO: 10001 - DNA, 25 bp, SARS Virus
gtaactagttcagtgatagcgaccg

SEQ ID NO: 10002 - DNA, 25 bp, SARS Virus
taactagttcagggatagcgaccgc

SEQ ID NO: 10003 - DNA, 25 bp, SARS Virus
aactagttcagtgatagcgaccgcg

SEQ ID NO: 10004 - DNA, 25 bp, SARS Virus
actagttcagtggtagcgaccgcgt

SEQ ID NO: 10005 - DNA, 25 bp, SARS Virus
ctagttcagtgagagcgaccgcgtt

SEQ ID NO: 10006 - DNA, 25 bp, SARS Virus
tagttcagtgatggcgaccgcgttt

SEQ ID NO: 10007 - DNA, 25 bp, SARS Virus
agttcagtgatagcgaccgcgtttc

SEQ ID NO: 10008 - DNA, 25 bp, SARS Virus
gttcagtgatagggaccgcgtttca

SEQ ID NO: 10009 - DNA, 25 bp, SARS Virus
ttcagtgatagcgaccgcgtttcaa

SEQ ID NO: 10010 - DNA, 25 bp, SARS Virus
tcagtgatagcggccgcgtttcaac

SEQ ID NO: 10011 - DNA, 25 bp, SARS Virus
cagtgatagcgagcgcgtttcaacg

SEQ ID NO: 10012 - DNA, 25 bp, SARS Virus
agtgatagcgacggcgtttcaacgc

SEQ ID NO: 10013 - DNA, 25 bp, SARS Virus
gtgatagcgaccgcgtttcaacgct

SEQ ID NO: 10014 - DNA, 25 bp, SARS Virus
tgatagcgaccgggtttcaacgcta

SEQ ID NO: 10015 - DNA, 25 bp, SARS Virus
gatagcgaccgcgtttcaacgctag

SEQ ID NO: 10016 - DNA, 25 bp, SARS Virus
atagcgaccgcggttcaacgctagt

SEQ ID NO: 10017 - DNA, 25 bp, SARS Virus
tagcgaccgcgtgtcaacgctagtg

SEQ ID NO: 10018 - DNA, 25 bp, SARS Virus
agcgaccgcgttgcaacgctagtga

SEQ ID NO: 10019 - DNA, 25 bp, SARS Virus
gcgaccgcgtttgaacgctagtgag

SEQ ID NO: 10020 - DNA, 25 bp, SARS Virus
cgaccgcgtttcgacgctagtgagt

SEQ ID NO: 10021 - DNA, 25 bp, SARS Virus
gaccgcgtttcagcgctagtgagtt

SEQ ID NO: 10022 - DNA, 25 bp, SARS Virus
accgcgtttcaaggctagtgagttg

SEQ ID NO: 10023 - DNA, 25 bp, SARS Virus
ccgcgtttcaacgctagtgagttga

SEQ ID NO: 10024 - DNA, 25 bp, SARS Virus
cgcgtttcaacggtagtgagttgaa

SEQ ID NO: 10025 - DNA, 25 bp, SARS Virus
gcgtttcaacgcgagtgagttgaat

SEQ ID NO: 10026 - DNA, 25 bp, SARS Virus
cgtttcaacgctggtgagttgaatc

SEQ ID NO: 10027 - DNA, 25 bp, SARS Virus
gtttcaacgctagtgagttgaatcc

SEQ ID NO: 10028 - DNA, 25 bp, SARS Virus
tttcaacgctagggagttgaatcca

SEQ ID NO: 10029 - DNA, 25 bp, SARS Virus
ttcaacgctagtgagttgaatccac

SEQ ID NO: 10030 - DNA, 25 bp, SARS Virus
tcaacgctagtgggttgaatccact

SEQ ID NO: 10031 - DNA, 25 bp, SARS Virus
caacgctagtgagttgaatccactt

SEQ ID NO: 10032 - DNA, 25 bp, SARS Virus
aacgctagtgaggtgaatccacttc

SEQ ID NO: 10033 - DNA, 25 bp, SARS Virus
acgctagtgagtggaatccacttca

SEQ ID NO: 10034 - DNA, 25 bp, SARS Virus
cgctagtgagttgaatccacttcag

SEQ ID NO: 10035 - DNA, 25 bp, SARS Virus
gctagtgagttggatccacttcaga

SEQ ID NO: 10036 - DNA, 25 bp, SARS Virus
ctagtgagttgagtccacttcagaa

SEQ ID NO: 10037 - DNA, 25 bp, SARS Virus
tagtgagttgaagccacttcagaag

SEQ ID NO: 10038 - DNA, 25 bp, SARS Virus
agtgagttgaatgcacttcagaagt

SEQ ID NO: 10039 - DNA, 25 bp, SARS Virus
gtgagttgaatcgacttcagaagta

SEQ ID NO: 10040 - DNA, 25 bp, SARS Virus
tgagttgaatccgcttcagaagtag

SEQ ID NO: 10041 - DNA, 25 bp, SARS Virus
gagttgaatccagttcagaagtagc

SEQ ID NO: 10042 - DNA, 25 bp, SARS Virus
agttgaatccacgtcagaagtagcg

SEQ ID NO: 10043 - DNA, 25 bp, SARS Virus
gttgaatccactgcagaagtagcga

SEQ ID NO: 10044 - DNA, 25 bp, SARS Virus
ttgaatccacttgagaagtagcgag

SEQ ID NO: 10045 - DNA, 25 bp, SARS Virus
tgaatccacttcggaagtagcgagt

SEQ ID NO: 10046 - DNA, 25 bp, SARS Virus
gaatccacttcagaagtagcgagtt

SEQ ID NO: 10047 - DNA, 25 bp, SARS Virus
aatccacttcaggagtagcgagttt

SEQ ID NO: 10048 - DNA, 25 bp, SARS Virus
atccacttcagaggtagcgagtttc

SEQ ID NO: 10049 - DNA, 25 bp, SARS Virus
tccacttcagaagtagcgagtttcg

SEQ ID NO: 10050 - DNA, 25 bp, SARS Virus
ccacttcagaaggagcgagtttcgt

SEQ ID NO: 10051 - DNA, 25 bp, SARS Virus
cacttcagaagtggcgagtttcgtt

SEQ ID NO: 10052 - DNA, 25 bp, SARS Virus
acttcagaagtagcgagtttcgttc

SEQ ID NO: 10053 - DNA, 25 bp, SARS Virus
cttcagaagtagggagtttcgttcc

SEQ ID NO: 10054 - DNA, 25 bp, SARS Virus
ttcagaagtagcgagtttcgttccc

SEQ ID NO: 10055 - DNA, 25 bp, SARS Virus
tcagaagtagcgggtttcgttccct

SEQ ID NO: 10056 - DNA, 25 bp, SARS Virus
cagaagtagcgagtttcgttccctg

SEQ ID NO: 10057 - DNA, 25 bp, SARS Virus
agaagtagcgaggttcgttccctga

SEQ ID NO: 10058 - DNA, 25 bp, SARS Virus
gaagtagcgagtgtcgttccctgaa

SEQ ID NO: 10059 - DNA, 25 bp, SARS Virus
aagtagcgagttgcgttccctgaaa

SEQ ID NO: 10060 - DNA, 25 bp, SARS Virus
agtagcgagtttggttccctgaaat

SEQ ID NO: 10061 - DNA, 25 bp, SARS Virus
gtagcgagtttcgttccctgaaatg

SEQ ID NO: 10062 - DNA, 25 bp, SARS Virus
tagcgagtttcggtccctgaaatgg

SEQ ID NO: 10063 - DNA, 25 bp, SARS Virus
agcgagtttcgtgccctgaaatggc

SEQ ID NO: 10064 - DNA, 25 bp, SARS Virus
gcgagtttcgttgcctgaaatggca

SEQ ID NO: 10065 - DNA, 25 bp, SARS Virus
cgagtttcgttcgctgaaatggcag

SEQ ID NO: 10066 - DNA, 25 bp, SARS Virus
gagtttcgttccgtgaaatggcagt

SEQ ID NO: 10067 - DNA, 25 bp, SARS Virus
agtttcgttcccggaaatggcagtc

SEQ ID NO: 10068 - DNA, 25 bp, SARS Virus
gtttcgttccctgaaatggcagtca

SEQ ID NO: 10069 - DNA, 25 bp, SARS Virus
tttcgttccctggaatggcagtcac

SEQ ID NO: 10070 - DNA, 25 bp, SARS Virus
ttcgttccctgagatggcagtcaca

SEQ ID NO: 10071 - DNA, 25 bp, SARS Virus
tcgttccctgaagtggcagtcacat

SEQ ID NO: 10072 - DNA, 25 bp, SARS Virus
cgttccctgaaagggcagtcacata

SEQ ID NO: 10073 - DNA, 25 bp, SARS Virus
gttccctgaaatggcagtcacatat

SEQ ID NO: 10074 - DNA, 25 bp, SARS Virus
ttccctgaaatggcagtcacatatg

SEQ ID NO: 10075 - DNA, 25 bp, SARS Virus
tccctgaaatgggagtcacatatgc

SEQ ID NO: 10076 - DNA, 25 bp, SARS Virus
ccctgaaatggcggtcacatatgca

SEQ ID NO: 10077 - DNA, 25 bp, SARS Virus
cctgaaatggcagtcacatatgcac

SEQ ID NO: 10078 - DNA, 25 bp, SARS Virus
ctgaaatggcaggcacatatgcacc

SEQ ID NO: 10079 - DNA, 25 bp, SARS Virus
tgaaatggcagtgacatatgcaccg

SEQ ID NO: 10080 - DNA, 25 bp, SARS Virus
gaaatggcagtcgcatatgcaccgt

SEQ ID NO: 10081 - DNA, 25 bp, SARS Virus
aaatggcagtcagatatgcaccgtt

SEQ ID NO: 10082 - DNA, 25 bp, SARS Virus
aatggcagtcacgtatgcaccgttc

SEQ ID NO: 10083 - DNA, 25 bp, SARS Virus
atggcagtcacagatgcaccgttcc

SEQ ID NO: 10084 - DNA, 25 bp, SARS Virus
tggcagtcacatgtgcaccgttcct

SEQ ID NO: 10085 - DNA, 25 bp, SARS Virus
ggcagtcacataggcaccgttcctc

SEQ ID NO: 10086 - DNA, 25 bp, SARS Virus
gcagtcacatatgcaccgttcctcg

SEQ ID NO: 10087 - DNA, 25 bp, SARS Virus
cagtcacatatggaccgttcctcgt

SEQ ID NO: 10088 - DNA, 25 bp, SARS Virus
agtcacatatgcgccgttcctcgtc

SEQ ID NO: 10089 - DNA, 25 bp, SARS Virus
gtcacatatgcagcgttcctcgtcg

SEQ ID NO: 10090 - DNA, 25 bp, SARS Virus
tcacatatgcacggttcctcgtcga

SEQ ID NO: 10091 - DNA, 25 bp, SARS Virus
cacatatgcaccgttcctcgtcgac

SEQ ID NO: 10092 - DNA, 25 bp, SARS Virus
acatatgcaccggtcctcgtcgacg

SEQ ID NO: 10093 - DNA, 25 bp, SARS Virus
catatgcaccgtgcctcgtcgacgt

SEQ ID NO: 10094 - DNA, 25 bp, SARS Virus
atatgcaccgttgctcgtcgacgtt

SEQ ID NO: 10095 - DNA, 25 bp, SARS Virus
tatgcaccgttcgtcgtcgacgttg

SEQ ID NO: 10096 - DNA, 25 bp, SARS Virus
atgcaccgttccgcgtcgacgttga

SEQ ID NO: 10097 - DNA, 25 bp, SARS Virus
tgcaccgttcctggtcgacgttgat

SEQ ID NO: 10098 - DNA, 25 bp, SARS Virus
gcaccgttcctcgtcgacgttgatg

SEQ ID NO: 10099 - DNA, 25 bp, SARS Virus
caccgttcctcggcgacgttgatga

SEQ ID NO: 10100 - DNA, 25 bp, SARS Virus
accgttcctcgtggacgttgatgag

SEQ ID NO: 10101 - DNA, 25 bp, SARS Virus
ccgttcctcgtcgacgttgatgagt

SEQ ID NO: 10102 - DNA, 25 bp, SARS Virus
cgttcctcgtcggcgttgatgagta

SEQ ID NO: 10103 - DNA, 25 bp, SARS Virus
gttcctcgtcgaggttgatgagtac

SEQ ID NO: 10104 - DNA, 25 bp, SARS Virus
ttcctcgtcgacgttgatgagtacg

SEQ ID NO: 10105 - DNA, 25 bp, SARS Virus
tcctcgtcgacggtgatgagtacgg

SEQ ID NO: 10106 - DNA, 25 bp, SARS Virus
cctcgtcgacgtggatgagtacgga

SEQ ID NO: 10107 - DNA, 25 bp, SARS Virus
ctcgtcgacgttgatgagtacggag

SEQ ID NO: 10108 - DNA, 25 bp, SARS Virus
tcgtcgacgttggtgagtacggaga

SEQ ID NO: 10109 - DNA, 25 bp, SARS Virus
cgtcgacgttgaggagtacggagaa

SEQ ID NO: 10110 - DNA, 25 bp, SARS Virus
gtcgacgttgatgagtacggagaat

SEQ ID NO: 10111 - DNA, 25 bp, SARS Virus
tcgacgttgatgggtacggagaatt

SEQ ID NO: 10112 - DNA, 25 bp, SARS Virus
cgacgttgatgagtacggagaattc

SEQ ID NO: 10113 - DNA, 25 bp, SARS Virus
gacgttgatgaggacggagaattcc

SEQ ID NO: 10114 - DNA, 25 bp, SARS Virus
acgttgatgagtgcggagaattccg

SEQ ID NO: 10115 - DNA, 25 bp, SARS Virus
cgttgatgagtagggagaattccgt

SEQ ID NO: 10116 - DNA, 25 bp, SARS Virus
gttgatgagtacggagaattccgtg

SEQ ID NO: 10117 - DNA, 25 bp, SARS Virus
ttgatgagtacggagaattccgtgg

SEQ ID NO: 10118 - DNA, 25 bp, SARS Virus
tgatgagtacggggaattccgtggt

SEQ ID NO: 10119 - DNA, 25 bp, SARS Virus
gatgagtacggagaattccgtggtt

SEQ ID NO: 10120 - DNA, 25 bp, SARS Virus
atgagtacggaggattccgtggttt

SEQ ID NO: 10121 - DNA, 25 bp, SARS Virus
tgagtacggagagttccgtggtttt

SEQ ID NO: 10122 - DNA, 25 bp, SARS Virus
gagtacggagaagtccgtggttttc

SEQ ID NO: 10123 - DNA, 25 bp, SARS Virus
agtacggagaatgccgtggttttct

SEQ ID NO: 10124 - DNA, 25 bp, SARS Virus
gtacggagaattgcgtggttttctt

SEQ ID NO: 10125 - DNA, 25 bp, SARS Virus
tacggagaattcggtggttttcttc

SEQ ID NO: 10126 - DNA, 25 bp, SARS Virus
acggagaattccgtggttttcttca

SEQ ID NO: 10127 - DNA, 25 bp, SARS Virus
cggagaattccggggttttcttcat

SEQ ID NO: 10128 - DNA, 25 bp, SARS Virus
ggagaattccgtggttttcttcatt

SEQ ID NO: 10129 - DNA, 25 bp, SARS Virus
gagaattccgtggttttcttcattg

SEQ ID NO: 10130 - DNA, 25 bp, SARS Virus
agaattccgtgggtttcttcattgg

SEQ ID NO: 10131 - DNA, 25 bp, SARS Virus
gaattccgtggtgttcttcattgga

SEQ ID NO: 10132 - DNA, 25 bp, SARS Virus
aattccgtggttgtcttcattggaa

SEQ ID NO: 10133 - DNA, 25 bp, SARS Virus
attccgtggtttgcttcattggaaa

SEQ ID NO: 10134 - DNA, 25 bp, SARS Virus
ttccgtggttttgttcattggaaag

SEQ ID NO: 10135 - DNA, 25 bp, SARS Virus
tccgtggttttcgtcattggaaaga

SEQ ID NO: 10136 - DNA, 25 bp, SARS Virus
ccgtggttttctgcattggaaagaa

SEQ ID NO: 10137 - DNA, 25 bp, SARS Virus
cgtggttttcttgattggaaagaac

SEQ ID NO: 10138 - DNA, 25 bp, SARS Virus
gtggttttcttcgttggaaagaact

SEQ ID NO: 10139 - DNA, 25 bp, SARS Virus
tggttttcttcagtggaaagaactt

SEQ ID NO: 10140 - DNA, 25 bp, SARS Virus
ggttttcttcatgggaaagaacttc

SEQ ID NO: 10141 - DNA, 25 bp, SARS Virus
gttttcttcattggaaagaacttcc

SEQ ID NO: 10142 - DNA, 25 bp, SARS Virus
ttttcttcattggaaagaacttcca

SEQ ID NO: 10143 - DNA, 25 bp, SARS Virus
tttcttcattgggaagaacttccac

SEQ ID NO: 10144 - DNA, 25 bp, SARS Virus
ttcttcattggagagaacttccact

SEQ ID NO: 10145 - DNA, 25 bp, SARS Virus
tcttcattggaaggaacttccacta

SEQ ID NO: 10146 - DNA, 25 bp, SARS Virus
cttcattggaaagaacttccactaa

SEQ ID NO: 10147 - DNA, 25 bp, SARS Virus
ttcattggaaaggacttccactaag

SEQ ID NO: 10148 - DNA, 25 bp, SARS Virus
tcattggaaagagcttccactaagt

SEQ ID NO: 10149 - DNA, 25 bp, SARS Virus
cattggaaagaagttccactaagtg

SEQ ID NO: 10150 - DNA, 25 bp, SARS Virus
attggaaagaacgtccactaagtgt

SEQ ID NO: 10151 - DNA, 25 bp, SARS Virus
ttggaaagaactgccactaagtgta

SEQ ID NO: 10152 - DNA, 25 bp, SARS Virus
tggaaagaacttgcactaagtgtac

SEQ ID NO: 10153 - DNA, 25 bp, SARS Virus
ggaaagaacttcgactaagtgtact

SEQ ID NO: 10154 - DNA, 25 bp, SARS Virus
gaaagaacttccgctaagtgtactg

SEQ ID NO: 10155 - DNA, 25 bp, SARS Virus
aaagaacttccagtaagtgtactgt

SEQ ID NO: 10156 - DNA, 25 bp, SARS Virus
aagaacttccacgaagtgtactgtg

SEQ ID NO: 10157 - DNA, 25 bp, SARS Virus
agaacttccactgagtgtactgtgt

SEQ ID NO: 10158 - DNA, 25 bp, SARS Virus
gaacttccactaggtgtactgtgtc

SEQ ID NO: 10159 - DNA, 25 bp, SARS Virus
aacttccactaagtgtactgtgtca

SEQ ID NO: 10160 - DNA, 25 bp, SARS Virus
acttccactaagggtactgtgtcat

SEQ ID NO: 10161 - DNA, 25 bp, SARS Virus
cttccactaagtgtactgtgtcatg

SEQ ID NO: 10162 - DNA, 25 bp, SARS Virus
ttccactaagtggactgtgtcatga

SEQ ID NO: 10163 - DNA, 25 bp, SARS Virus
tccactaagtgtgctgtgtcatgaa

SEQ ID NO: 10164 - DNA, 25 bp, SARS Virus
ccactaagtgtagtgtgtcatgaat

SEQ ID NO: 10165 - DNA, 25 bp, SARS Virus
cactaagtgtacggtgtcatgaatg

SEQ ID NO: 10166 - DNA, 25 bp, SARS Virus
actaagtgtactgtgtcatgaatgg

SEQ ID NO: 10167 - DNA, 25 bp, SARS Virus
ctaagtgtactgggtcatgaatgga

SEQ ID NO: 10168 - DNA, 25 bp, SARS Virus
taagtgtactgtgtcatgaatggag

SEQ ID NO: 10169 - DNA, 25 bp, SARS Virus
aagtgtactgtggcatgaatggaga

SEQ ID NO: 10170 - DNA, 25 bp, SARS Virus
agtgtactgtgtgatgaatggagac

SEQ ID NO: 10171 - DNA, 25 bp, SARS Virus
gtgtactgtgtcgtgaatggagact

SEQ ID NO: 10172 - DNA, 25 bp, SARS Virus
tgtactgtgtcaggaatggagactc

SEQ ID NO: 10173 - DNA, 25 bp, SARS Virus
gtactgtgtcatgaatggagactcc

SEQ ID NO: 10174 - DNA, 25 bp, SARS Virus
tactgtgtcatggatggagactcct

SEQ ID NO: 10175 - DNA, 25 bp, SARS Virus
actgtgtcatgagtggagactcctc

SEQ ID NO: 10176 - DNA, 25 bp, SARS Virus
ctgtgtcatgaagggagactcctcc

SEQ ID NO: 10177 - DNA, 25 bp, SARS Virus
tgtgtcatgaatggagactcctcca

SEQ ID NO: 10178 - DNA, 25 bp, SARS Virus
gtgtcatgaatggagactcctccaa

SEQ ID NO: 10179 - DNA, 25 bp, SARS Virus
tgtcatgaatggggactcctccaac

SEQ ID NO: 10180 - DNA, 25 bp, SARS Virus
gtcatgaatggagactcctccaaca

SEQ ID NO: 10181 - DNA, 25 bp, SARS Virus
tcatgaatggaggctcctccaacaa

SEQ ID NO: 10182 - DNA, 25 bp, SARS Virus
catgaatggagagtcctccaacaag

SEQ ID NO: 10183 - DNA, 25 bp, SARS Virus
atgaatggagacgcctccaacaaga

SEQ ID NO: 10184 - DNA, 25 bp, SARS Virus
tgaatggagactgctccaacaagag

SEQ ID NO: 10185 - DNA, 25 bp, SARS Virus
gaatggagactcgtccaacaagagt

SEQ ID NO: 10186 - DNA, 25 bp, SARS Virus
aatggagactccgccaacaagagtt

SEQ ID NO: 10187 - DNA, 25 bp, SARS Virus
atggagactcctgcaacaagagttc

SEQ ID NO: 10188 - DNA, 25 bp, SARS Virus
tggagactcctcgaacaagagttct

SEQ ID NO: 10189 - DNA, 25 bp, SARS Virus
ggagactcctccgacaagagttctt

SEQ ID NO: 10190 - DNA, 25 bp, SARS Virus
gagactcctccagcaagagttcttg

SEQ ID NO: 10191 - DNA, 25 bp, SARS Virus
agactcctccaagaagagttcttgc

SEQ ID NO: 10192 - DNA, 25 bp, SARS Virus
gactcctccaacgagagttcttgcc

SEQ ID NO: 10193 - DNA, 25 bp, SARS Virus
actcctccaacaggagttcttgcca

SEQ ID NO: 10194 - DNA, 25 bp, SARS Virus
ctcctccaacaagagttcttgccac

SEQ ID NO: 10195 - DNA, 25 bp, SARS Virus
tcctccaacaagggttcttgccact

SEQ ID NO: 10196 - DNA, 25 bp, SARS Virus
cctccaacaagagttcttgccactt

SEQ ID NO: 10197 - DNA, 25 bp, SARS Virus
ctccaacaagaggtcttgccacttg

SEQ ID NO: 10198 - DNA, 25 bp, SARS Virus
tccaacaagagtgcttgccacttga

SEQ ID NO: 10199 - DNA, 25 bp, SARS Virus
ccaacaagagttgttgccacttgag

SEQ ID NO: 10200 - DNA, 25 bp, SARS Virus
caacaagagttcgtgccacttgagc

SEQ ID NO: 10201 - DNA, 25 bp, SARS Virus
aacaagagttctggccacttgagct

SEQ ID NO: 10202 - DNA, 25 bp, SARS Virus
acaagagttcttgccacttgagctt

SEQ ID NO: 10203 - DNA, 25 bp, SARS Virus
caagagttcttggcacttgagcttc

SEQ ID NO: 10204 - DNA, 25 bp, SARS Virus
aagagttcttgcgacttgagcttcg

SEQ ID NO: 10205 - DNA, 25 bp, SARS Virus
agagttcttgccgcttgagcttcgt

SEQ ID NO: 10206 - DNA, 25 bp, SARS Virus
gagttcttgccagttgagcttcgtg

SEQ ID NO: 10207 - DNA, 25 bp, SARS Virus
agttcttgccacgtgagcttcgtga

SEQ ID NO: 10208 - DNA, 25 bp, SARS Virus
gttcttgccactggagcttcgtgag

SEQ ID NO: 10209 - DNA, 25 bp, SARS Virus
ttcttgccacttgagcttcgtgagc

SEQ ID NO: 10210 - DNA, 25 bp, SARS Virus
tcttgccacttgggcttcgtgagct

SEQ ID NO: 10211 - DNA, 25 bp, SARS Virus
cttgccacttgagcttcgtgagctc

SEQ ID NO: 10212 - DNA, 25 bp, SARS Virus
ttgccacttgaggttcgtgagctct

SEQ ID NO: 10213 - DNA, 25 bp, SARS Virus
tgccacttgagcgtcgtgagctctg

SEQ ID NO: 10214 - DNA, 25 bp, SARS Virus
gccacttgagctgcgtgagctctgc

SEQ ID NO: 10215 - DNA, 25 bp, SARS Virus
ccacttgagcttggtgagctctgcg

SEQ ID NO: 10216 - DNA, 25 bp, SARS Virus
cacttgagcttcgtgagctctgcgg

SEQ ID NO: 10217 - DNA, 25 bp, SARS Virus
acttgagcttcgggagctctgcggg

SEQ ID NO: 10218 - DNA, 25 bp, SARS Virus
cttgagcttcgtgagctctgcgggc

SEQ ID NO: 10219 - DNA, 25 bp, SARS Virus
ttgagcttcgtgggctctgcgggca

SEQ ID NO: 10220 - DNA, 25 bp, SARS Virus
tgagcttcgtgagctctgcgggcaa

SEQ ID NO: 10221 - DNA, 25 bp, SARS Virus
gagcttcgtgaggtctgcgggcaac

SEQ ID NO: 10222 - DNA, 25 bp, SARS Virus
agcttcgtgagcgctgcgggcaact

SEQ ID NO: 10223 - DNA, 25 bp, SARS Virus
gcttcgtgagctgtgcgggcaacta

SEQ ID NO: 10224 - DNA, 25 bp, SARS Virus
cttcgtgagctcggcgggcaactat

SEQ ID NO: 10225 - DNA, 25 bp, SARS Virus
ttcgtgagctctgcgggcaactatc

SEQ ID NO: 10226 - DNA, 25 bp, SARS Virus
tcgtgagctctgggggcaactatcg

SEQ ID NO: 10227 - DNA, 25 bp, SARS Virus
cgtgagctctgcgggcaactatcga

SEQ ID NO: 10228 - DNA, 25 bp, SARS Virus
gtgagctctgcgggcaactatcgaa

SEQ ID NO: 10229 - DNA, 25 bp, SARS Virus
tgagctctgcgggcaactatcgaag

SEQ ID NO: 10230 - DNA, 25 bp, SARS Virus
gagctctgcggggaactatcgaagt

SEQ ID NO: 10231 - DNA, 25 bp, SARS Virus
agctctgcgggcgactatcgaagtg

SEQ ID NO: 10232 - DNA, 25 bp, SARS Virus
gctctgcgggcagctatcgaagtgt

SEQ ID NO: 10233 - DNA, 25 bp, SARS Virus
ctctgcgggcaagtatcgaagtgtt

SEQ ID NO: 10234 - DNA, 25 bp, SARS Virus
tctgcgggcaacgatcgaagtgttt

SEQ ID NO: 10235 - DNA, 25 bp, SARS Virus
ctgcgggcaactgtcgaagtgttta

SEQ ID NO: 10236 - DNA, 25 bp, SARS Virus
tgcgggcaactagcgaagtgtttac

SEQ ID NO: 10237 - DNA, 25 bp, SARS Virus
gcgggcaactatggaagtgtttacc

SEQ ID NO: 10238 - DNA, 25 bp, SARS Virus
cgggcaactatcgaagtgtttacct

SEQ ID NO: 10239 - DNA, 25 bp, SARS Virus
gggcaactatcggagtgtttacctc

SEQ ID NO: 10240 - DNA, 25 bp, SARS Virus
ggcaactatcgaggtgtttacctcg

SEQ ID NO: 10241 - DNA, 25 bp, SARS Virus
gcaactatcgaagtgtttacctcga

SEQ ID NO: 10242 - DNA, 25 bp, SARS Virus
caactatcgaagggtttacctcgat

SEQ ID NO: 10243 - DNA, 25 bp, SARS Virus
aactatcgaagtgtttacctcgata

SEQ ID NO: 10244 - DNA, 25 bp, SARS Virus
actatcgaagtggttacctcgatag

SEQ ID NO: 10245 - DNA, 25 bp, SARS Virus
ctatcgaagtgtgtacctcgatagc

SEQ ID NO: 10246 - DNA, 25 bp, SARS Virus
tatcgaagtgttgacctcgatagca

SEQ ID NO: 10247 - DNA, 25 bp, SARS Virus
atcgaagtgtttgcctcgatagcaa

SEQ ID NO: 10248 - DNA, 25 bp, SARS Virus
tcgaagtgtttagctcgatagcaac

SEQ ID NO: 10249 - DNA, 25 bp, SARS Virus
cgaagtgtttacgtcgatagcaacc

SEQ ID NO: 10250 - DNA, 25 bp, SARS Virus
gaagtgtttaccgcgatagcaaccg

SEQ ID NO: 10251 - DNA, 25 bp, SARS Virus
aagtgtttacctggatagcaaccgt

SEQ ID NO: 10252 - DNA, 25 bp, SARS Virus
agtgtttacctcgatagcaaccgtg

SEQ ID NO: 10253 - DNA, 25 bp, SARS Virus
gtgtttacctcggtagcaaccgtgt

SEQ ID NO: 10254 - DNA, 25 bp, SARS Virus
tgtttacctcgagagcaaccgtgtg

SEQ ID NO: 10255 - DNA, 25 bp, SARS Virus
gtttacctcgatggcaaccgtgtgg

SEQ ID NO: 10256 - DNA, 25 bp, SARS Virus
tttacctcgatagcaaccgtgtggt

SEQ ID NO: 10257 - DNA, 25 bp, SARS Virus
ttacctcgataggaaccgtgtggtc

SEQ ID NO: 10258 - DNA, 25 bp, SARS Virus
tacctcgatagcgaccgtgtggtca

SEQ ID NO: 10259 - DNA, 25 bp, SARS Virus
acctcgatagcagccgtgtggtcag

SEQ ID NO: 10260 - DNA, 25 bp, SARS Virus
cctcgatagcaagcgtgtggtcaga

SEQ ID NO: 10261 - DNA, 25 bp, SARS Virus
ctcgatagcaacggtgtggtcagac

SEQ ID NO: 10262 - DNA, 25 bp, SARS Virus
tcgatagcaaccgtgtggtcagaca

SEQ ID NO: 10263 - DNA, 25 bp, SARS Virus
cgatagcaaccgggtggtcagacac

SEQ ID NO: 10264 - DNA, 25 bp, SARS Virus
gatagcaaccgtgtggtcagacaca

SEQ ID NO: 10265 - DNA, 25 bp, SARS Virus
atagcaaccgtggggtcagacacat

SEQ ID NO: 10266 - DNA, 25 bp, SARS Virus
tagcaaccgtgtggtcagacacatt

SEQ ID NO: 10267 - DNA, 25 bp, SARS Virus
agcaaccgtgtggtcagacacattt

SEQ ID NO: 10268 - DNA, 25 bp, SARS Virus
gcaaccgtgtgggcagacacattta

SEQ ID NO: 10269 - DNA, 25 bp, SARS Virus
caaccgtgtggtgagacacatttac

SEQ ID NO: 10270 - DNA, 25 bp, SARS Virus
aaccgtgtggtcggacacatttacc

SEQ ID NO: 10271 - DNA, 25 bp, SARS Virus
accgtgtggtcagacacatttaccg

SEQ ID NO: 10272 - DNA, 25 bp, SARS Virus
ccgtgtggtcaggcacatttaccgg

SEQ ID NO: 10273 - DNA, 25 bp, SARS Virus
cgtgtggtcagagacatttaccgga

SEQ ID NO: 10274 - DNA, 25 bp, SARS Virus
gtgtggtcagacgcatttaccggag

SEQ ID NO: 10275 - DNA, 25 bp, SARS Virus
tgtggtcagacagatttaccggagt

SEQ ID NO: 10276 - DNA, 25 bp, SARS Virus
gtggtcagacacgtttaccggagta

SEQ ID NO: 10277 - DNA, 25 bp, SARS Virus
tggtcagacacagttaccggagtac

SEQ ID NO: 10278 - DNA, 25 bp, SARS Virus
ggtcagacacatgtaccggagtacg

SEQ ID NO: 10279 - DNA, 25 bp, SARS Virus
gtcagacacattgaccggagtacga

SEQ ID NO: 10280 - DNA, 25 bp, SARS Virus
tcagacacatttgccggagtacgag

SEQ ID NO: 10281 - DNA, 25 bp, SARS Virus
cagacacatttagcggagtacgaga

SEQ ID NO: 10282 - DNA, 25 bp, SARS Virus
agacacatttacgggagtacgagaa

SEQ ID NO: 10283 - DNA, 25 bp, SARS Virus
gacacatttaccggagtacgagaat

SEQ ID NO: 10284 - DNA, 25 bp, SARS Virus
acacatttaccggagtacgagaatc

SEQ ID NO: 10285 - DNA, 25 bp, SARS Virus
cacatttaccggggtacgagaatct

SEQ ID NO: 10286 - DNA, 25 bp, SARS Virus
acatttaccggagtacgagaatctc

SEQ ID NO: 10287 - DNA, 25 bp, SARS Virus
catttaccggaggacgagaatctct

SEQ ID NO: 10288 - DNA, 25 bp, SARS Virus
atttaccggagtgcgagaatctcta

SEQ ID NO: 10289 - DNA, 25 bp, SARS Virus
tttaccggagtaggagaatctctaa

SEQ ID NO: 10290 - DNA, 25 bp, SARS Virus
ttaccggagtacgagaatctctaat

SEQ ID NO: 10291 - DNA, 25 bp, SARS Virus
taccggagtacgggaatctctaatt

SEQ ID NO: 10292 - DNA, 25 bp, SARS Virus
accggagtacgagaatctctaattc

SEQ ID NO: 10293 - DNA, 25 bp, SARS Virus
ccggagtacgaggatctctaattcc

SEQ ID NO: 10294 - DNA, 25 bp, SARS Virus
cggagtacgagagtctctaattcct

SEQ ID NO: 10295 - DNA, 25 bp, SARS Virus
ggagtacgagaagctctaattcctg

SEQ ID NO: 10296 - DNA, 25 bp, SARS Virus
gagtacgagaatgtctaattcctgt

SEQ ID NO: 10297 - DNA, 25 bp, SARS Virus
agtacgagaatcgctaattcctgtt

SEQ ID NO: 10298 - DNA, 25 bp, SARS Virus
gtacgagaatctgtaattcctgttt

SEQ ID NO: 10299 - DNA, 25 bp, SARS Virus
tacgagaatctcgaattcctgtttc

SEQ ID NO: 10300 - DNA, 25 bp, SARS Virus
acgagaatctctgattcctgtttct

SEQ ID NO: 10301 - DNA, 25 bp, SARS Virus
cgagaatctctagttcctgtttctt

SEQ ID NO: 10302 - DNA, 25 bp, SARS Virus
gagaatctctaagtcctgtttcttg

SEQ ID NO: 10303 - DNA, 25 bp, SARS Virus
agaatctctaatgcctgtttcttgt

SEQ ID NO: 10304 - DNA, 25 bp, SARS Virus
gaatctctaattgctgtttcttgtt

SEQ ID NO: 10305 - DNA, 25 bp, SARS Virus
aatctctaattcgtgtttcttgtta

SEQ ID NO: 10306 - DNA, 25 bp, SARS Virus
atctctaattccggtttcttgttat

SEQ ID NO: 10307 - DNA, 25 bp, SARS Virus
tctctaattcctgtttcttgttatg

SEQ ID NO: 10308 - DNA, 25 bp, SARS Virus
ctctaattcctggttcttgttatga

SEQ ID NO: 10309 - DNA, 25 bp, SARS Virus
tctaattcctgtgtcttgttatgac

SEQ ID NO: 10310 - DNA, 25 bp, SARS Virus
ctaattcctgttgcttgttatgacg

SEQ ID NO: 10311 - DNA, 25 bp, SARS Virus
taattcctgtttgttgttatgacgc

SEQ ID NO: 10312 - DNA, 25 bp, SARS Virus
aattcctgtttcgtgttatgacgcg

SEQ ID NO: 10313 - DNA, 25 bp, SARS Virus
attcctgtttctggttatgacgcgt

SEQ ID NO: 10314 - DNA, 25 bp, SARS Virus
ttcctgtttcttgttatgacgcgta

SEQ ID NO: 10315 - DNA, 25 bp, SARS Virus
tcctgtttcttggtatgacgcgtaa

SEQ ID NO: 10316 - DNA, 25 bp, SARS Virus
cctgtttcttgtgatgacgcgtaac

SEQ ID NO: 10317 - DNA, 25 bp, SARS Virus
ctgtttcttgttgtgacgcgtaaca

SEQ ID NO: 10318 - DNA, 25 bp, SARS Virus
tgtttcttgttaggacgcgtaacag

SEQ ID NO: 10319 - DNA, 25 bp, SARS Virus
gtttcttgttatgacgcgtaacaga

SEQ ID NO: 10320 - DNA, 25 bp, SARS Virus
tttcttgttatggcgcgtaacagag

SEQ ID NO: 10321 - DNA, 25 bp, SARS Virus
ttcttgttatgaggcgtaacagagg

SEQ ID NO: 10322 - DNA, 25 bp, SARS Virus
tcttgttatgacgcgtaacagagga

SEQ ID NO: 10323 - DNA, 25 bp, SARS Virus
cttgttatgacgggtaacagaggac

SEQ ID NO: 10324 - DNA, 25 bp, SARS Virus
ttgttatgacgcgtaacagaggacc

SEQ ID NO: 10325 - DNA, 25 bp, SARS Virus
tgttatgacgcggaacagaggacca

SEQ ID NO: 10326 - DNA, 25 bp, SARS Virus
gttatgacgcgtgacagaggaccaa

SEQ ID NO: 10327 - DNA, 25 bp, SARS Virus
ttatgacgcgtagcagaggaccaaa

SEQ ID NO: 10328 - DNA, 25 bp, SARS Virus
tatgacgcgtaagagaggaccaaat

SEQ ID NO: 10329 - DNA, 25 bp, SARS Virus
atgacgcgtaacggaggaccaaatg

SEQ ID NO: 10330 - DNA, 25 bp, SARS Virus
tgacgcgtaacagaggaccaaatga

SEQ ID NO: 10331 - DNA, 25 bp, SARS Virus
gacgcgtaacaggggaccaaatgac

SEQ ID NO: 10332 - DNA, 25 bp, SARS Virus
acgcgtaacagaggaccaaatgacc

SEQ ID NO: 10333 - DNA, 25 bp, SARS Virus
cgcgtaacagaggaccaaatgaccg

SEQ ID NO: 10334 - DNA, 25 bp, SARS Virus
gcgtaacagagggccaaatgaccga

SEQ ID NO: 10335 - DNA, 25 bp, SARS Virus
cgtaacagaggagcaaatgaccgat

SEQ ID NO: 10336 - DNA, 25 bp, SARS Virus
gtaacagaggacgaaatgaccgatg

SEQ ID NO: 10337 - DNA, 25 bp, SARS Virus
taacagaggaccgaatgaccgatgt

SEQ ID NO: 10338 - DNA, 25 bp, SARS Virus
aacagaggaccagatgaccgatgtt

SEQ ID NO: 10339 - DNA, 25 bp, SARS Virus
acagaggaccaagtgaccgatgttt

SEQ ID NO: 10340 - DNA, 25 bp, SARS Virus
cagaggaccaaaggaccgatgtttg

SEQ ID NO: 10341 - DNA, 25 bp, SARS Virus
agaggaccaaatgaccgatgtttgt

SEQ ID NO: 10342 - DNA, 25 bp, SARS Virus
gaggaccaaatggccgatgtttgtt

SEQ ID NO: 10343 - DNA, 25 bp, SARS Virus
aggaccaaatgagcgatgtttgtta

SEQ ID NO: 10344 - DNA, 25 bp, SARS Virus
ggaccaaatgacggatgtttgttac

SEQ ID NO: 10345 - DNA, 25 bp, SARS Virus
gaccaaatgaccgatgtttgttaca

SEQ ID NO: 10346 - DNA, 25 bp, SARS Virus
accaaatgaccggtgtttgttacag

SEQ ID NO: 10347 - DNA, 25 bp, SARS Virus
ccaaatgaccgaggtttgttacaga

SEQ ID NO: 10348 - DNA, 25 bp, SARS Virus
caaatgaccgatgtttgttacagaa

SEQ ID NO: 10349 - DNA, 25 bp, SARS Virus
aaatgaccgatggttgttacagaaa

SEQ ID NO: 10350 - DNA, 25 bp, SARS Virus
aatgaccgatgtgtgttacagaaag

SEQ ID NO: 10351 - DNA, 25 bp, SARS Virus
atgaccgatgttggttacagaaagc

SEQ ID NO: 10352 - DNA, 25 bp, SARS Virus
tgaccgatgtttgttacagaaagcg

SEQ ID NO: 10353 - DNA, 25 bp, SARS Virus
gaccgatgtttggtacagaaagcga

SEQ ID NO: 10354 - DNA, 25 bp, SARS Virus
accgatgtttgtgacagaaagcgaa

SEQ ID NO: 10355 - DNA, 25 bp, SARS Virus
ccgatgtttgttgcagaaagcgaat

SEQ ID NO: 10356 - DNA, 25 bp, SARS Virus
cgatgtttgttagagaaagcgaatt

SEQ ID NO: 10357 - DNA, 25 bp, SARS Virus
gatgtttgttacggaaagcgaattt

SEQ ID NO: 10358 - DNA, 25 bp, SARS Virus
atgtttgttacagaaagcgaatttt

SEQ ID NO: 10359 - DNA, 25 bp, SARS Virus
tgtttgttacaggaagcgaattttc

SEQ ID NO: 10360 - DNA, 25 bp, SARS Virus
gtttgttacagagagcgaattttcc

SEQ ID NO: 10361 - DNA, 25 bp, SARS Virus
tttgttacagaaggcgaattttccc

SEQ ID NO: 10362 - DNA, 25 bp, SARS Virus
ttgttacagaaagcgaattttcccc

SEQ ID NO: 10363 - DNA, 25 bp, SARS Virus
tgttacagaaagggaattttccccc

SEQ ID NO: 10364 - DNA, 25 bp, SARS Virus
gttacagaaagcgaattttccccca

SEQ ID NO: 10365 - DNA, 25 bp, SARS Virus
ttacagaaagcggattttcccccac

SEQ ID NO: 10366 - DNA, 25 bp, SARS Virus
tacagaaagcgagttttcccccacg

SEQ ID NO: 10367 - DNA, 25 bp, SARS Virus
acagaaagcgaagtttcccccacgt

SEQ ID NO: 10368 - DNA, 25 bp, SARS Virus
cagaaagcgaatgttcccccacgtg

SEQ ID NO: 10369 - DNA, 25 bp, SARS Virus
agaaagcgaattgtcccccacgtgg

SEQ ID NO: 10370 - DNA, 25 bp, SARS Virus
gaaagcgaatttgcccccacgtggt

SEQ ID NO: 10371 - DNA, 25 bp, SARS Virus
aaagcgaattttgccccacgtggtt

SEQ ID NO: 10372 - DNA, 25 bp, SARS Virus
aagcgaattttcgcccacgtggtta

SEQ ID NO: 10373 - DNA, 25 bp, SARS Virus
agcgaattttccgccacgtggttaa

SEQ ID NO: 10374 - DNA, 25 bp, SARS Virus
gcgaattttcccgcacgtggttaat

SEQ ID NO: 10375 - DNA, 25 bp, SARS Virus
cgaattttccccgacgtggttaatt

SEQ ID NO: 10376 - DNA, 25 bp, SARS Virus
gaattttcccccgcgtggttaattt

SEQ ID NO: 10377 - DNA, 25 bp, SARS Virus
agtaatgtccactaaaactgtagca

SEQ ID NO: 10378 - DNA, 25 bp, SARS Virus
gtaatgtccacataaactgtagcag

SEQ ID NO: 10379 - DNA, 25 bp, SARS Virus
taatgtccacaataactgtagcagt

SEQ ID NO: 10380 - DNA, 25 bp, SARS Virus
aatgtccacaaatactgtagcagtt

SEQ ID NO: 10381 - DNA, 25 bp, SARS Virus
atgtccacaaaatctgtagcagttc

SEQ ID NO: 10382 - DNA, 25 bp, SARS Virus
tgtccacaaaaattgtagcagttcc

SEQ ID NO: 10383 - DNA, 25 bp, SARS Virus
gtccacaaaaactgtagcagttccc

SEQ ID NO: 10384 - DNA, 25 bp, SARS Virus
tccacaaaaactttagcagttccca

SEQ ID NO: 10385 - DNA, 25 bp, SARS Virus
ccacaaaaactgtagcagttcccag

SEQ ID NO: 10386 - DNA, 25 bp, SARS Virus
cacaaaaactgttgcagttcccagt

SEQ ID NO: 10387 - DNA, 25 bp, SARS Virus
acaaaaactgtatcagttcccagtt

SEQ ID NO: 10388 - DNA, 25 bp, SARS Virus
caaaaactgtagtagttcccagttt

SEQ ID NO: 10389 - DNA, 25 bp, SARS Virus
aaaaactgtagctgttcccagttta

SEQ ID NO: 10390 - DNA, 25 bp, SARS Virus
aaaactgtagcatttcccagtttat

SEQ ID NO: 10391 - DNA, 25 bp, SARS Virus
aaactgtagcagttcccagtttatg

SEQ ID NO: 10392 - DNA, 25 bp, SARS Virus
aactgtagcagttcccagtttatgt

SEQ ID NO: 10393 - DNA, 25 bp, SARS Virus
actgtagcagtttccagtttatgtc

SEQ ID NO: 10394 - DNA, 25 bp, SARS Virus
ctgtagcagttctcagtttatgtcc

SEQ ID NO: 10395 - DNA, 25 bp, SARS Virus
tgtagcagttcctagtttatgtcca

SEQ ID NO: 10396 - DNA, 25 bp, SARS Virus
gtagcagttccctgtttatgtccaa

SEQ ID NO: 10397 - DNA, 25 bp, SARS Virus
tagcagttcccattttatgtccaac

SEQ ID NO: 10398 - DNA, 25 bp, SARS Virus
agcagttcccagtttatgtccaacg

SEQ ID NO: 10399 - DNA, 25 bp, SARS Virus
gcagttcccagtttatgtccaacga

SEQ ID NO: 10400 - DNA, 25 bp, SARS Virus
cagttcccagtttatgtccaacgaa

SEQ ID NO: 10401 - DNA, 25 bp, SARS Virus
agttcccagtttttgtccaacgaag

SEQ ID NO: 10402 - DNA, 25 bp, SARS Virus
gttcccagtttatgtccaacgaagt

SEQ ID NO: 10403 - DNA, 25 bp, SARS Virus
ttcccagtttatttccaacgaagtc

SEQ ID NO: 10404 - DNA, 25 bp, SARS Virus
tcccagtttatgtccaacgaagtct

SEQ ID NO: 10405 - DNA, 25 bp, SARS Virus
cccagtttatgttcaacgaagtcta

SEQ ID NO: 10406 - DNA, 25 bp, SARS Virus
ccagtttatgtctaacgaagtctat

SEQ ID NO: 10407 - DNA, 25 bp, SARS Virus
cagtttatgtcctacgaagtctatt

SEQ ID NO: 10408 - DNA, 25 bp, SARS Virus
agtttatgtccatcgaagtctattg

SEQ ID NO: 10409 - DNA, 25 bp, SARS Virus
gtttatgtccaatgaagtctattgt

SEQ ID NO: 10410 - DNA, 25 bp, SARS Virus
tttatgtccaactaagtctattgta

SEQ ID NO: 10411 - DNA, 25 bp, SARS Virus
ttatgtccaacgtagtctattgtag

SEQ ID NO: 10412 - DNA, 25 bp, SARS Virus
tatgtccaacgatgtctattgtagt

SEQ ID NO: 10413 - DNA, 25 bp, SARS Virus
atgtccaacgaattctattgtagtt

SEQ ID NO: 10414 - DNA, 25 bp, SARS Virus
tgtccaacgaagtctattgtagttc

SEQ ID NO: 10415 - DNA, 25 bp, SARS Virus
gtccaacgaagtttattgtagttcc

SEQ ID NO: 10416 - DNA, 25 bp, SARS Virus
tccaacgaagtctattgtagttcct

SEQ ID NO: 10417 - DNA, 25 bp, SARS Virus
ccaacgaagtcttttgtagttccta

SEQ ID NO: 10418 - DNA, 25 bp, SARS Virus
caacgaagtctattgtagttcctaa

SEQ ID NO: 10419 - DNA, 25 bp, SARS Virus
aacgaagtctattgtagttcctaac

SEQ ID NO: 10420 - DNA, 25 bp, SARS Virus
acgaagtctattttagttcctaaca

SEQ ID NO: 10421 - DNA, 25 bp, SARS Virus
cgaagtctattgtagttcctaacac

SEQ ID NO: 10422 - DNA, 25 bp, SARS Virus
gaagtctattgttgttcctaacaca

SEQ ID NO: 10423 - DNA, 25 bp, SARS Virus
aagtctattgtatttcctaacacat

SEQ ID NO: 10424 - DNA, 25 bp, SARS Virus
agtctattgtagttcctaacacatt

SEQ ID NO: 10425 - DNA, 25 bp, SARS Virus
gtctattgtagttcctaacacattt

SEQ ID NO: 10426 - DNA, 25 bp, SARS Virus
tctattgtagtttctaacacatttt

SEQ ID NO: 10427 - DNA, 25 bp, SARS Virus
ctattgtagttcttaacacatttta

SEQ ID NO: 10428 - DNA, 25 bp, SARS Virus
tattgtagttcctaacacattttac

SEQ ID NO: 10429 - DNA, 25 bp, SARS Virus
attgtagttccttacacattttacg

SEQ ID NO: 10430 - DNA, 25 bp, SARS Virus
ttgtagttcctatcacattttacga

SEQ ID NO: 10431 - DNA, 25 bp, SARS Virus
tgtagttcctaatacattttacgaa

SEQ ID NO: 10432 - DNA, 25 bp, SARS Virus
gtagttcctaactcattttacgaag

SEQ ID NO: 10433 - DNA, 25 bp, SARS Virus
tagttcctaacatattttacgaagt

SEQ ID NO: 10434 - DNA, 25 bp, SARS Virus
agttcctaacactttttacgaagta

SEQ ID NO: 10435 - DNA, 25 bp, SARS Virus
gttcctaacacattttacgaagtaa

SEQ ID NO: 10436 - DNA, 25 bp, SARS Virus
ttcctaacacattttacgaagtaac

SEQ ID NO: 10437 - DNA, 25 bp, SARS Virus
tcctaacacattttacgaagtaact

SEQ ID NO: 10438 - DNA, 25 bp, SARS Virus
cctaacacattttacgaagtaacta

SEQ ID NO: 10439 - DNA, 25 bp, SARS Virus
ctaacacatttttcgaagtaactac

SEQ ID NO: 10440 - DNA, 25 bp, SARS Virus
taacacattttatgaagtaactaca

SEQ ID NO: 10441 - DNA, 25 bp, SARS Virus
aacacattttactaagtaactacaa

SEQ ID NO: 10442 - DNA, 25 bp, SARS Virus
acacattttacgtagtaactacaac

SEQ ID NO: 10443 - DNA, 25 bp, SARS Virus
cacattttacgatgtaactacaaca

SEQ ID NO: 10444 - DNA, 25 bp, SARS Virus
acattttacgaattaactacaacaa

SEQ ID NO: 10445 - DNA, 25 bp, SARS Virus
cattttacgaagtaactacaacaat

SEQ ID NO: 10446 - DNA, 25 bp, SARS Virus
attttacgaagttactacaacaatt

SEQ ID NO: 10447 - DNA, 25 bp, SARS Virus
ttttacgaagtatctacaacaattg

SEQ ID NO: 10448 - DNA, 25 bp, SARS Virus
tttacgaagtaattacaacaattgt

SEQ ID NO: 10449 - DNA, 25 bp, SARS Virus
ttacgaagtaactacaacaattgtt

SEQ ID NO: 10450 - DNA, 25 bp, SARS Virus
tacgaagtaacttcaacaattgttc

SEQ ID NO: 10451 - DNA, 25 bp, SARS Virus
acgaagtaactataacaattgttcc

SEQ ID NO: 10452 - DNA, 25 bp, SARS Virus
cgaagtaactactacaattgttccg

SEQ ID NO: 10453 - DNA, 25 bp, SARS Virus
gaagtaactacatcaattgttccgt

SEQ ID NO: 10454 - DNA, 25 bp, SARS Virus
aagtaactacaataattgttccgtg

SEQ ID NO: 10455 - DNA, 25 bp, SARS Virus
agtaactacaactattgttccgtga

SEQ ID NO: 10456 - DNA, 25 bp, SARS Virus
gtaactacaacatttgttccgtgag

SEQ ID NO: 10457 - DNA, 25 bp, SARS Virus
taactacaacaattgttccgtgagc

SEQ ID NO: 10458 - DNA, 25 bp, SARS Virus
aactacaacaattgttccgtgagct

SEQ ID NO: 10459 - DNA, 25 bp, SARS Virus
actacaacaatttttccgtgagctt

SEQ ID NO: 10460 - DNA, 25 bp, SARS Virus
ctacaacaattgttccgtgagcttt

SEQ ID NO: 10461 - DNA, 25 bp, SARS Virus
tacaacaattgttccgtgagcttta

SEQ ID NO: 10462 - DNA, 25 bp, SARS Virus
acaacaattgtttcgtgagctttac

SEQ ID NO: 10463 - DNA, 25 bp, SARS Virus
caacaattgttctgtgagctttaca

SEQ ID NO: 10464 - DNA, 25 bp, SARS Virus
aacaattgttccttgagctttacac

SEQ ID NO: 10465 - DNA, 25 bp, SARS Virus
acaattgttccgtgagctttacacg

SEQ ID NO: 10466 - DNA, 25 bp, SARS Virus
caattgttccgttagctttacacgt

SEQ ID NO: 10467 - DNA, 25 bp, SARS Virus
aattgttccgtgtgctttacacgta

SEQ ID NO: 10468 - DNA, 25 bp, SARS Virus
attgttccgtgatctttacacgtaa

SEQ ID NO: 10469 - DNA, 25 bp, SARS Virus
ttgttccgtgagttttacacgtaac

SEQ ID NO: 10470 - DNA, 25 bp, SARS Virus
tgttccgtgagctttacacgtaact

SEQ ID NO: 10471 - DNA, 25 bp, SARS Virus
gttccgtgagctttacacgtaacta

SEQ ID NO: 10472 - DNA, 25 bp, SARS Virus
ttccgtgagctttacacgtaactag

SEQ ID NO: 10473 - DNA, 25 bp, SARS Virus
tccgtgagcttttcacgtaactagt

SEQ ID NO: 10474 - DNA, 25 bp, SARS Virus
ccgtgagctttatacgtaactagtt

SEQ ID NO: 10475 - DNA, 25 bp, SARS Virus
cgtgagctttactcgtaactagttc

SEQ ID NO: 10476 - DNA, 25 bp, SARS Virus
gtgagctttacatgtaactagttca

SEQ ID NO: 10477 - DNA, 25 bp, SARS Virus
tgagctttacacttaactagttcag

SEQ ID NO: 10478 - DNA, 25 bp, SARS Virus
gagctttacacgtaactagttcagt

SEQ ID NO: 10479 - DNA, 25 bp, SARS Virus
agctttacacgttactagttcagtg

SEQ ID NO: 10480 - DNA, 25 bp, SARS Virus
gctttacacgtatctagttcagtga

SEQ ID NO: 10481 - DNA, 25 bp, SARS Virus
ctttacacgtaattagttcagtgat

SEQ ID NO: 10482 - DNA, 25 bp, SARS Virus
tttacacgtaactagttcagtgata

SEQ ID NO: 10483 - DNA, 25 bp, SARS Virus
ttacacgtaacttgttcagtgatag

SEQ ID NO: 10484 - DNA, 25 bp, SARS Virus
tacacgtaactatttcagtgatagc

SEQ ID NO: 10485 - DNA, 25 bp, SARS Virus
acacgtaactagttcagtgatagcg

SEQ ID NO: 10486 - DNA, 25 bp, SARS Virus
cacgtaactagttcagtgatagcga

SEQ ID NO: 10487 - DNA, 25 bp, SARS Virus
acgtaactagtttagtgatagcgac

SEQ ID NO: 10488 - DNA, 25 bp, SARS Virus
cgtaactagttctgtgatagcgacc

SEQ ID NO: 10489 - DNA, 25 bp, SARS Virus
gtaactagttcattgatagcgaccg

SEQ ID NO: 10490 - DNA, 25 bp, SARS Virus
taactagttcagtgatagcgaccgc

SEQ ID NO: 10491 - DNA, 25 bp, SARS Virus
aactagttcagttatagcgaccgcg

SEQ ID NO: 10492 - DNA, 25 bp, SARS Virus
actagttcagtgttagcgaccgcgt

SEQ ID NO: 10493 - DNA, 25 bp, SARS Virus
ctagttcagtgatagcgaccgcgtt

SEQ ID NO: 10494 - DNA, 25 bp, SARS Virus
tagttcagtgattgcgaccgcgttt

SEQ ID NO: 10495 - DNA, 25 bp, SARS Virus
agttcagtgatatcgaccgcgtttc

SEQ ID NO: 10496 - DNA, 25 bp, SARS Virus
gttcagtgatagtgaccgcgtttca

SEQ ID NO: 10497 - DNA, 25 bp, SARS Virus
ttcagtgatagctaccgcgtttcaa

SEQ ID NO: 10498 - DNA, 25 bp, SARS Virus
tcagtgatagcgtccgcgtttcaac

SEQ ID NO: 10499 - DNA, 25 bp, SARS Virus
cagtgatagcgatcgcgtttcaacg

SEQ ID NO: 10500 - DNA, 25 bp, SARS Virus
agtgatagcgactgcgtttcaacgc

SEQ ID NO: 10501 - DNA, 25 bp, SARS Virus
gtgatagcgacctcgtttcaacgct

SEQ ID NO: 10502 - DNA, 25 bp, SARS Virus
tgatagcgaccgtgtttcaacgcta

SEQ ID NO: 10503 - DNA, 25 bp, SARS Virus
gatagcgaccgcttttcaacgctag

SEQ ID NO: 10504 - DNA, 25 bp, SARS Virus
atagcgaccgcgtttcaacgctagt

SEQ ID NO: 10505 - DNA, 25 bp, SARS Virus
tagcgaccgcgtttcaacgctagtg

SEQ ID NO: 10506 - DNA, 25 bp, SARS Virus
agcgaccgcgtttcaacgctagtga

SEQ ID NO: 10507 - DNA, 25 bp, SARS Virus
gcgaccgcgttttaacgctagtgag

SEQ ID NO: 10508 - DNA, 25 bp, SARS Virus
cgaccgcgtttctacgctagtgagt

SEQ ID NO: 10509 - DNA, 25 bp, SARS Virus
gaccgcgtttcatcgctagtgagtt

SEQ ID NO: 10510 - DNA, 25 bp, SARS Virus
accgcgtttcaatgctagtgagttg

SEQ ID NO: 10511 - DNA, 25 bp, SARS Virus
ccgcgtttcaactctagtgagttga

SEQ ID NO: 10512 - DNA, 25 bp, SARS Virus
cgcgtttcaacgttagtgagttgaa

SEQ ID NO: 10513 - DNA, 25 bp, SARS Virus
gcgtttcaacgctagtgagttgaat

SEQ ID NO: 10514 - DNA, 25 bp, SARS Virus
cgtttcaacgcttgtgagttgaatc

SEQ ID NO: 10515 - DNA, 25 bp, SARS Virus
gtttcaacgctattgagttgaatcc

SEQ ID NO: 10516 - DNA, 25 bp, SARS Virus
tttcaacgctagtgagttgaatcca

SEQ ID NO: 10517 - DNA, 25 bp, SARS Virus
ttcaacgctagttagttgaatccac

SEQ ID NO: 10518 - DNA, 25 bp, SARS Virus
tcaacgctagtgtgttgaatccact

SEQ ID NO: 10519 - DNA, 25 bp, SARS Virus
caacgctagtgatttgaatccactt

SEQ ID NO: 10520 - DNA, 25 bp, SARS Virus
aacgctagtgagttgaatccacttc

SEQ ID NO: 10521 - DNA, 25 bp, SARS Virus
acgctagtgagttgaatccacttca

SEQ ID NO: 10522 - DNA, 25 bp, SARS Virus
cgctagtgagtttaatccacttcag

SEQ ID NO: 10523 - DNA, 25 bp, SARS Virus
gctagtgagttgtatccacttcaga

SEQ ID NO: 10524 - DNA, 25 bp, SARS Virus
ctagtgagttgattccacttcagaa

SEQ ID NO: 10525 - DNA, 25 bp, SARS Virus
tagtgagttgaatccacttcagaag

SEQ ID NO: 10526 - DNA, 25 bp, SARS Virus
agtgagttgaattcacttcagaagt

SEQ ID NO: 10527 - DNA, 25 bp, SARS Virus
gtgagttgaatctacttcagaagta

SEQ ID NO: 10528 - DNA, 25 bp, SARS Virus
tgagttgaatcctcttcagaagtag

SEQ ID NO: 10529 - DNA, 25 bp, SARS Virus
gagttgaatccatttcagaagtagc

SEQ ID NO: 10530 - DNA, 25 bp, SARS Virus
agttgaatccacttcagaagtagcg

SEQ ID NO: 10531 - DNA, 25 bp, SARS Virus
gttgaatccacttcagaagtagcga

SEQ ID NO: 10532 - DNA, 25 bp, SARS Virus
ttgaatccactttagaagtagcgag

SEQ ID NO: 10533 - DNA, 25 bp, SARS Virus
tgaatccacttctgaagtagcgagt

SEQ ID NO: 10534 - DNA, 25 bp, SARS Virus
gaatccacttcataagtagcgagtt

SEQ ID NO: 10535 - DNA, 25 bp, SARS Virus
aatccacttcagtagtagcgagttt

SEQ ID NO: 10536 - DNA, 25 bp, SARS Virus
atccacttcagatgtagcgagtttc

SEQ ID NO: 10537 - DNA, 25 bp, SARS Virus
tccacttcagaattagcgagtttcg

SEQ ID NO: 10538 - DNA, 25 bp, SARS Virus
ccacttcagaagtagcgagtttcgt

SEQ ID NO: 10539 - DNA, 25 bp, SARS Virus
cacttcagaagttgcgagtttcgtt

SEQ ID NO: 10540 - DNA, 25 bp, SARS Virus
acttcagaagtatcgagtttcgttc

SEQ ID NO: 10541 - DNA, 25 bp, SARS Virus
cttcagaagtagtgagtttcgttcc

SEQ ID NO: 10542 - DNA, 25 bp, SARS Virus
ttcagaagtagctagtttcgttccc

SEQ ID NO: 10543 - DNA, 25 bp, SARS Virus
tcagaagtagcgtgtttcgttccct

SEQ ID NO: 10544 - DNA, 25 bp, SARS Virus
cagaagtagcgattttcgttccctg

SEQ ID NO: 10545 - DNA, 25 bp, SARS Virus
agaagtagcgagtttcgttccctga

SEQ ID NO: 10546 - DNA, 25 bp, SARS Virus
gaagtagcgagtttcgttccctgaa

SEQ ID NO: 10547 - DNA, 25 bp, SARS Virus
aagtagcgagtttcgttccctgaaa

SEQ ID NO: 10548 - DNA, 25 bp, SARS Virus
agtagcgagttttgttccctgaaat

SEQ ID NO: 10549 - DNA, 25 bp, SARS Virus
gtagcgagtttctttccctgaaatg

SEQ ID NO: 10550 - DNA, 25 bp, SARS Virus
tagcgagtttcgttccctgaaatgg

SEQ ID NO: 10551 - DNA, 25 bp, SARS Virus
agcgagtttcgttccctgaaatggc

SEQ ID NO: 10552 - DNA, 25 bp, SARS Virus
gcgagtttcgtttcctgaaatggca

SEQ ID NO: 10553 - DNA, 25 bp, SARS Virus
cgagtttcgttctctgaaatggcag

SEQ ID NO: 10554 - DNA, 25 bp, SARS Virus
gagtttcgttccttgaaatggcagt

SEQ ID NO: 10555 - DNA, 25 bp, SARS Virus
agtttcgttccctgaaatggcagtc

SEQ ID NO: 10556 - DNA, 25 bp, SARS Virus
gtttcgttcccttaaatggcagtca

SEQ ID NO: 10557 - DNA, 25 bp, SARS Virus
tttcgttccctgtaatggcagtcac

SEQ ID NO: 10558 - DNA, 25 bp, SARS Virus
ttcgttccctgatatggcagtcaca

SEQ ID NO: 10559 - DNA, 25 bp, SARS Virus
tcgttccctgaattggcagtcacat

SEQ ID NO: 10560 - DNA, 25 bp, SARS Virus
cgttccctgaaatggcagtcacata

SEQ ID NO: 10561 - DNA, 25 bp, SARS Virus
gttccctgaaattgcagtcacatat

SEQ ID NO: 10562 - DNA, 25 bp, SARS Virus
ttccctgaaatgtcagtcacatatg

SEQ ID NO: 10563 - DNA, 25 bp, SARS Virus
tccctgaaatggtagtcacatatgc

SEQ ID NO: 10564 - DNA, 25 bp, SARS Virus
ccctgaaatggctgtcacatatgca

SEQ ID NO: 10565 - DNA, 25 bp, SARS Virus
cctgaaatggcattcacatatgcac

SEQ ID NO: 10566 - DNA, 25 bp, SARS Virus
ctgaaatggcagtcacatatgcacc

SEQ ID NO: 10567 - DNA, 25 bp, SARS Virus
tgaaatggcagttacatatgcaccg

SEQ ID NO: 10568 - DNA, 25 bp, SARS Virus
gaaatggcagtctcatatgcaccgt

SEQ ID NO: 10569 - DNA, 25 bp, SARS Virus
aaatggcagtcatatatgcaccgtt

SEQ ID NO: 10570 - DNA, 25 bp, SARS Virus
aatggcagtcacttatgcaccgttc

SEQ ID NO: 10571 - DNA, 25 bp, SARS Virus
atggcagtcacatatgcaccgttcc

SEQ ID NO: 10572 - DNA, 25 bp, SARS Virus
tggcagtcacatttgcaccgttcct

SEQ ID NO: 10573 - DNA, 25 bp, SARS Virus
ggcagtcacatatgcaccgttcctc

SEQ ID NO: 10574 - DNA, 25 bp, SARS Virus
gcagtcacatattcaccgttcctcg

SEQ ID NO: 10575 - DNA, 25 bp, SARS Virus
cagtcacatatgtaccgttcctcgt

SEQ ID NO: 10576 - DNA, 25 bp, SARS Virus
agtcacatatgctccgttcctcgtc

SEQ ID NO: 10577 - DNA, 25 bp, SARS Virus
gtcacatatgcatcgttcctcgtcg

SEQ ID NO: 10578 - DNA, 25 bp, SARS Virus
tcacatatgcactgttcctcgtcga

SEQ ID NO: 10579 - DNA, 25 bp, SARS Virus
cacatatgcacctttcctcgtcgac

SEQ ID NO: 10580 - DNA, 25 bp, SARS Virus
acatatgcaccgttcctcgtcgacg

SEQ ID NO: 10581 - DNA, 25 bp, SARS Virus
catatgcaccgttcctcgtcgacgt

SEQ ID NO: 10582 - DNA, 25 bp, SARS Virus
atatgcaccgtttctcgtcgacgtt

SEQ ID NO: 10583 - DNA, 25 bp, SARS Virus
tatgcaccgttcttcgtcgacgttg

SEQ ID NO: 10584 - DNA, 25 bp, SARS Virus
atgcaccgttcctcgtcgacgttga

SEQ ID NO: 10585 - DNA, 25 bp, SARS Virus
tgcaccgttccttgtcgacgttgat

SEQ ID NO: 10586 - DNA, 25 bp, SARS Virus
gcaccgttcctcttcgacgttgatg

SEQ ID NO: 10587 - DNA, 25 bp, SARS Virus
caccgttcctcgtcgacgttgatga

SEQ ID NO: 10588 - DNA, 25 bp, SARS Virus
accgttcctcgttgacgttgatgag

SEQ ID NO: 10589 - DNA, 25 bp, SARS Virus
ccgttcctcgtctacgttgatgagt

SEQ ID NO: 10590 - DNA, 25 bp, SARS Virus
cgttcctcgtcgtcgttgatgagta

SEQ ID NO: 10591 - DNA, 25 bp, SARS Virus
gttcctcgtcgatgttgatgagtac

SEQ ID NO: 10592 - DNA, 25 bp, SARS Virus
ttcctcgtcgactttgatgagtacg

SEQ ID NO: 10593 - DNA, 25 bp, SARS Virus
tcctcgtcgacgttgatgagtacgg

SEQ ID NO: 10594 - DNA, 25 bp, SARS Virus
cctcgtcgacgttgatgagtacgga

SEQ ID NO: 10595 - DNA, 25 bp, SARS Virus
ctcgtcgacgtttatgagtacggag

SEQ ID NO: 10596 - DNA, 25 bp, SARS Virus
tcgtcgacgttgttgagtacggaga

SEQ ID NO: 10597 - DNA, 25 bp, SARS Virus
cgtcgacgttgatgagtacggagaa

SEQ ID NO: 10598 - DNA, 25 bp, SARS Virus
gtcgacgttgattagtacggagaat

SEQ ID NO: 10599 - DNA, 25 bp, SARS Virus
tcgacgttgatgtgtacggagaatt

SEQ ID NO: 10600 - DNA, 25 bp, SARS Virus
cgacgttgatgattacggagaattc

SEQ ID NO: 10601 - DNA, 25 bp, SARS Virus
gacgttgatgagtacggagaattcc

SEQ ID NO: 10602 - DNA, 25 bp, SARS Virus
acgttgatgagttcggagaattccg

SEQ ID NO: 10603 - DNA, 25 bp, SARS Virus
cgttgatgagtatggagaattccgt

SEQ ID NO: 10604 - DNA, 25 bp, SARS Virus
gttgatgagtactgagaattccgtg

SEQ ID NO: 10605 - DNA, 25 bp, SARS Virus
ttgatgagtacgtagaattccgtgg

SEQ ID NO: 10606 - DNA, 25 bp, SARS Virus
tgatgagtacggtgaattccgtggt

SEQ ID NO: 10607 - DNA, 25 bp, SARS Virus
gatgagtacggataattccgtggtt

SEQ ID NO: 10608 - DNA, 25 bp, SARS Virus
atgagtacggagtattccgtggttt

SEQ ID NO: 10609 - DNA, 25 bp, SARS Virus
tgagtacggagatttccgtggtttt

SEQ ID NO: 10610 - DNA, 25 bp, SARS Virus
gagtacggagaattccgtggttttc

SEQ ID NO: 10611 - DNA, 25 bp, SARS Virus
agtacggagaattccgtggttttct

SEQ ID NO: 10612 - DNA, 25 bp, SARS Virus
gtacggagaatttcgtggttttctt

SEQ ID NO: 10613 - DNA, 25 bp, SARS Virus
tacggagaattctgtggttttcttc

SEQ ID NO: 10614 - DNA, 25 bp, SARS Virus
acggagaattccttggttttcttca

SEQ ID NO: 10615 - DNA, 25 bp, SARS Virus
cggagaattccgtggttttcttcat

SEQ ID NO: 10616 - DNA, 25 bp, SARS Virus
ggagaattccgttgttttcttcatt

SEQ ID NO: 10617 - DNA, 25 bp, SARS Virus
gagaattccgtgtttttcttcattg

SEQ ID NO: 10618 - DNA, 25 bp, SARS Virus
agaattccgtggttttcttcattgg

SEQ ID NO: 10619 - DNA, 25 bp, SARS Virus
gaattccgtggttttcttcattgga

SEQ ID NO: 10620 - DNA, 25 bp, SARS Virus
aattccgtggttttcttcattggaa

SEQ ID NO: 10621 - DNA, 25 bp, SARS Virus
attccgtggttttcttcattggaaa

SEQ ID NO: 10622 - DNA, 25 bp, SARS Virus
ttccgtggtttttttcattggaaag

SEQ ID NO: 10623 - DNA, 25 bp, SARS Virus
tccgtggttttcttcattggaaaga

SEQ ID NO: 10624 - DNA, 25 bp, SARS Virus
ccgtggttttcttcattggaaagaa

SEQ ID NO: 10625 - DNA, 25 bp, SARS Virus
cgtggttttctttattggaaagaac

SEQ ID NO: 10626 - DNA, 25 bp, SARS Virus
gtggttttcttctttggaaagaact

SEQ ID NO: 10627 - DNA, 25 bp, SARS Virus
tggttttcttcattggaaagaactt

SEQ ID NO: 10628 - DNA, 25 bp, SARS Virus
ggttttcttcattggaaagaacttc

SEQ ID NO: 10629 - DNA, 25 bp, SARS Virus
gttttcttcatttgaaagaacttcc

SEQ ID NO: 10630 - DNA, 25 bp, SARS Virus
ttttcttcattgtaaagaacttcca

SEQ ID NO: 10631 - DNA, 25 bp, SARS Virus
tttcttcattggtaagaacttccac

SEQ ID NO: 10632 - DNA, 25 bp, SARS Virus
ttcttcattggatagaacttccact

SEQ ID NO: 10633 - DNA, 25 bp, SARS Virus
tcttcattggaatgaacttccacta

SEQ ID NO: 10634 - DNA, 25 bp, SARS Virus
cttcattggaaataacttccactaa

SEQ ID NO: 10635 - DNA, 25 bp, SARS Virus
ttcattggaaagtacttccactaag

SEQ ID NO: 10636 - DNA, 25 bp, SARS Virus
tcattggaaagatcttccactaagt

SEQ ID NO: 10637 - DNA, 25 bp, SARS Virus
cattggaaagaatttccactaagtg

SEQ ID NO: 10638 - DNA, 25 bp, SARS Virus
attggaaagaacttccactaagtgt

SEQ ID NO: 10639 - DNA, 25 bp, SARS Virus
ttggaaagaacttccactaagtgta

SEQ ID NO: 10640 - DNA, 25 bp, SARS Virus
tggaaagaactttcactaagtgtac

SEQ ID NO: 10641 - DNA, 25 bp, SARS Virus
ggaaagaacttctactaagtgtact

SEQ ID NO: 10642 - DNA, 25 bp, SARS Virus
gaaagaacttcctctaagtgtactg

SEQ ID NO: 10643 - DNA, 25 bp, SARS Virus
aaagaacttccattaagtgtactgt

SEQ ID NO: 10644 - DNA, 25 bp, SARS Virus
aagaacttccactaagtgtactgtg

SEQ ID NO: 10645 - DNA, 25 bp, SARS Virus
agaacttccacttagtgtactgtgt

SEQ ID NO: 10646 - DNA, 25 bp, SARS Virus
gaacttccactatgtgtactgtgtc

SEQ ID NO: 10647 - DNA, 25 bp, SARS Virus
aacttccactaattgtactgtgtca

SEQ ID NO: 10648 - DNA, 25 bp, SARS Virus
acttccactaagtgtactgtgtcat

SEQ ID NO: 10649 - DNA, 25 bp, SARS Virus
cttccactaagtttactgtgtcatg

SEQ ID NO: 10650 - DNA, 25 bp, SARS Virus
ttccactaagtgtactgtgtcatga

SEQ ID NO: 10651 - DNA, 25 bp, SARS Virus
tccactaagtgttctgtgtcatgaa

SEQ ID NO: 10652 - DNA, 25 bp, SARS Virus
ccactaagtgtattgtgtcatgaat

SEQ ID NO: 10653 - DNA, 25 bp, SARS Virus
cactaagtgtactgtgtcatgaatg

SEQ ID NO: 10654 - DNA, 25 bp, SARS Virus
actaagtgtactttgtcatgaatgg

SEQ ID NO: 10655 - DNA, 25 bp, SARS Virus
ctaagtgtactgtgtcatgaatgga

SEQ ID NO: 10656 - DNA, 25 bp, SARS Virus
taagtgtactgtttcatgaatggag

SEQ ID NO: 10657 - DNA, 25 bp, SARS Virus
aagtgtactgtgtcatgaatggaga

SEQ ID NO: 10658 - DNA, 25 bp, SARS Virus
agtgtactgtgttatgaatggagac

SEQ ID NO: 10659 - DNA, 25 bp, SARS Virus
gtgtactgtgtcttgaatggagact

SEQ ID NO: 10660 - DNA, 25 bp, SARS Virus
tgtactgtgtcatgaatggagactc

SEQ ID NO: 10661 - DNA, 25 bp, SARS Virus
gtactgtgtcattaatggagactcc

SEQ ID NO: 10662 - DNA, 25 bp, SARS Virus
tactgtgtcatgtatggagactcct

SEQ ID NO: 10663 - DNA, 25 bp, SARS Virus
actgtgtcatgattggagactcctc

SEQ ID NO: 10664 - DNA, 25 bp, SARS Virus
ctgtgtcatgaatggagactcctcc

SEQ ID NO: 10665 - DNA, 25 bp, SARS Virus
tgtgtcatgaattgagactcctcca

SEQ ID NO: 10666 - DNA, 25 bp, SARS Virus
gtgtcatgaatgtagactcctccaa

SEQ ID NO: 10667 - DNA, 25 bp, SARS Virus
tgtcatgaatggtgactcctccaac

SEQ ID NO: 10668 - DNA, 25 bp, SARS Virus
gtcatgaatggatactcctccaaca

SEQ ID NO: 10669 - DNA, 25 bp, SARS Virus
tcatgaatggagtctcctccaacaa

SEQ ID NO: 10670 - DNA, 25 bp, SARS Virus
catgaatggagattcctccaacaag

SEQ ID NO: 10671 - DNA, 25 bp, SARS Virus
atgaatggagactcctccaacaaga

SEQ ID NO: 10672 - DNA, 25 bp, SARS Virus
tgaatggagacttctccaacaagag

SEQ ID NO: 10673 - DNA, 25 bp, SARS Virus
gaatggagactcttccaacaagagt

SEQ ID NO: 10674 - DNA, 25 bp, SARS Virus
aatggagactcctccaacaagagtt

SEQ ID NO: 10675 - DNA, 25 bp, SARS Virus
atggagactccttcaacaagagttc

SEQ ID NO: 10676 - DNA, 25 bp, SARS Virus
tggagactcctctaacaagagttct

SEQ ID NO: 10677 - DNA, 25 bp, SARS Virus
ggagactcctcctacaagagttctt

SEQ ID NO: 10678 - DNA, 25 bp, SARS Virus
gagactcctccatcaagagttcttg

SEQ ID NO: 10679 - DNA, 25 bp, SARS Virus
agactcctccaataagagttcttgc

SEQ ID NO: 10680 - DNA, 25 bp, SARS Virus
gactcctccaactagagttcttgcc

SEQ ID NO: 10681 - DNA, 25 bp, SARS Virus
actcctccaacatgagttcttgcca

SEQ ID NO: 10682 - DNA, 25 bp, SARS Virus
ctcctccaacaatagttcttgccac

SEQ ID NO: 10683 - DNA, 25 bp, SARS Virus
tcctccaacaagtgttcttgccact

SEQ ID NO: 10684 - DNA, 25 bp, SARS Virus
cctccaacaagatttcttgccactt

SEQ ID NO: 10685 - DNA, 25 bp, SARS Virus
ctccaacaagagttcttgccacttg

SEQ ID NO: 10686 - DNA, 25 bp, SARS Virus
tccaacaagagttcttgccacttga

SEQ ID NO: 10687 - DNA, 25 bp, SARS Virus
ccaacaagagtttttgccacttgag

SEQ ID NO: 10688 - DNA, 25 bp, SARS Virus
caacaagagttcttgccacttgagc

SEQ ID NO: 10689 - DNA, 25 bp, SARS Virus
aacaagagttcttgccacttgagct

SEQ ID NO: 10690 - DNA, 25 bp, SARS Virus
acaagagttctttccacttgagctt

SEQ ID NO: 10691 - DNA, 25 bp, SARS Virus
caagagttcttgtcacttgagcttc

SEQ ID NO: 10692 - DNA, 25 bp, SARS Virus
aagagttcttgctacttgagcttcg

SEQ ID NO: 10693 - DNA, 25 bp, SARS Virus
agagttcttgcctcttgagcttcgt

SEQ ID NO: 10694 - DNA, 25 bp, SARS Virus
gagttcttgccatttgagcttcgtg

SEQ ID NO: 10695 - DNA, 25 bp, SARS Virus
agttcttgccacttgagcttcgtga

SEQ ID NO: 10696 - DNA, 25 bp, SARS Virus
gttcttgccacttgagcttcgtgag

SEQ ID NO: 10697 - DNA, 25 bp, SARS Virus
ttcttgccactttagcttcgtgagc

SEQ ID NO: 10698 - DNA, 25 bp, SARS Virus
tcttgccacttgtgcttcgtgagct

SEQ ID NO: 10699 - DNA, 25 bp, SARS Virus
cttgccacttgatcttcgtgagctc

SEQ ID NO: 10700 - DNA, 25 bp, SARS Virus
ttgccacttgagtttcgtgagctct

SEQ ID NO: 10701 - DNA, 25 bp, SARS Virus
tgccacttgagcttcgtgagctctg

SEQ ID NO: 10702 - DNA, 25 bp, SARS Virus
gccacttgagcttcgtgagctctgc

SEQ ID NO: 10703 - DNA, 25 bp, SARS Virus
ccacttgagctttgtgagctctgcg

SEQ ID NO: 10704 - DNA, 25 bp, SARS Virus
cacttgagcttcttgagctctgcgg

SEQ ID NO: 10705 - DNA, 25 bp, SARS Virus
acttgagcttcgtgagctctgcggg

SEQ ID NO: 10706 - DNA, 25 bp, SARS Virus
cttgagcttcgttagctctgcgggc

SEQ ID NO: 10707 - DNA, 25 bp, SARS Virus
ttgagcttcgtgtgctctgcgggca

SEQ ID NO: 10708 - DNA, 25 bp, SARS Virus
tgagcttcgtgatctctgcgggcaa

SEQ ID NO: 10709 - DNA, 25 bp, SARS Virus
gagcttcgtgagttctgcgggcaac

SEQ ID NO: 10710 - DNA, 25 bp, SARS Virus
agcttcgtgagctctgcgggcaact

SEQ ID NO: 10711 - DNA, 25 bp, SARS Virus
gcttcgtgagctttgcgggcaacta

SEQ ID NO: 10712 - DNA, 25 bp, SARS Virus
cttcgtgagctctgcgggcaactat

SEQ ID NO: 10713 - DNA, 25 bp, SARS Virus
ttcgtgagctcttcgggcaactatc

SEQ ID NO: 10714 - DNA, 25 bp, SARS Virus
tcgtgagctctgtgggcaactatcg

SEQ ID NO: 10715 - DNA, 25 bp, SARS Virus
cgtgagctctgctggcaactatcga

SEQ ID NO: 10716 - DNA, 25 bp, SARS Virus
gtgagctctgcgtgcaactatcgaa

SEQ ID NO: 10717 - DNA, 25 bp, SARS Virus
tgagctctgcggtcaactatcgaag

SEQ ID NO: 10718 - DNA, 25 bp, SARS Virus
gagctctgcgggtaactatcgaagt

SEQ ID NO: 10719 - DNA, 25 bp, SARS Virus
agctctgcgggctactatcgaagtg

SEQ ID NO: 10720 - DNA, 25 bp, SARS Virus
gctctgcgggcatctatcgaagtgt

SEQ ID NO: 10721 - DNA, 25 bp, SARS Virus
ctctgcgggcaattatcgaagtgtt

SEQ ID NO: 10722 - DNA, 25 bp, SARS Virus
tctgcgggcaactatcgaagtgttt

SEQ ID NO: 10723 - DNA, 25 bp, SARS Virus
ctgcgggcaactttcgaagtgttta

SEQ ID NO: 10724 - DNA, 25 bp, SARS Virus
tgcgggcaactatcgaagtgtttac

SEQ ID NO: 10725 - DNA, 25 bp, SARS Virus
gcgggcaactattgaagtgtttacc

SEQ ID NO: 10726 - DNA, 25 bp, SARS Virus
cgggcaactatctaagtgtttacct

SEQ ID NO: 10727 - DNA, 25 bp, SARS Virus
gggcaactatcgtagtgtttacctc

SEQ ID NO: 10728 - DNA, 25 bp, SARS Virus
ggcaactatcgatgtgtttacctcg

SEQ ID NO: 10729 - DNA, 25 bp, SARS Virus
gcaactatcgaattgtttacctcga

SEQ ID NO: 10730 - DNA, 25 bp, SARS Virus
caactatcgaagtgtttacctcgat

SEQ ID NO: 10731 - DNA, 25 bp, SARS Virus
aactatcgaagtttttacctcgata

SEQ ID NO: 10732 - DNA, 25 bp, SARS Virus
actatcgaagtgtttacctcgatag

SEQ ID NO: 10733 - DNA, 25 bp, SARS Virus
ctatcgaagtgtttacctcgatagc

SEQ ID NO: 10734 - DNA, 25 bp, SARS Virus
tatcgaagtgtttacctcgatagca

SEQ ID NO: 10735 - DNA, 25 bp, SARS Virus
atcgaagtgttttcctcgatagcaa

SEQ ID NO: 10736 - DNA, 25 bp, SARS Virus
tcgaagtgtttatctcgatagcaac

SEQ ID NO: 10737 - DNA, 25 bp, SARS Virus
cgaagtgtttacttcgatagcaacc

SEQ ID NO: 10738 - DNA, 25 bp, SARS Virus
gaagtgtttacctcgatagcaaccg

SEQ ID NO: 10739 - DNA, 25 bp, SARS Virus
aagtgtttaccttgatagcaaccgt

SEQ ID NO: 10740 - DNA, 25 bp, SARS Virus
agtgtttacctctatagcaaccgtg

SEQ ID NO: 10741 - DNA, 25 bp, SARS Virus
gtgtttacctcgttagcaaccgtgt

SEQ ID NO: 10742 - DNA, 25 bp, SARS Virus
tgtttacctcgatagcaaccgtgtg

SEQ ID NO: 10743 - DNA, 25 bp, SARS Virus
gtttacctcgattgcaaccgtgtgg

SEQ ID NO: 10744 - DNA, 25 bp, SARS Virus
tttacctcgatatcaaccgtgtggt

SEQ ID NO: 10745 - DNA, 25 bp, SARS Virus
ttacctcgatagtaaccgtgtggtc

SEQ ID NO: 10746 - DNA, 25 bp, SARS Virus
tacctcgatagctaccgtgtggtca

SEQ ID NO: 10747 - DNA, 25 bp, SARS Virus
acctcgatagcatccgtgtggtcag

SEQ ID NO: 10748 - DNA, 25 bp, SARS Virus
cctcgatagcaatcgtgtggtcaga

SEQ ID NO: 10749 - DNA, 25 bp, SARS Virus
ctcgatagcaactgtgtggtcagac

SEQ ID NO: 10750 - DNA, 25 bp, SARS Virus
tcgatagcaaccttgtggtcagaca

SEQ ID NO: 10751 - DNA, 25 bp, SARS Virus
cgatagcaaccgtgtggtcagacac

SEQ ID NO: 10752 - DNA, 25 bp, SARS Virus
gatagcaaccgtttggtcagacaca

SEQ ID NO: 10753 - DNA, 25 bp, SARS Virus
atagcaaccgtgtggtcagacacat

SEQ ID NO: 10754 - DNA, 25 bp, SARS Virus
tagcaaccgtgttgtcagacacatt

SEQ ID NO: 10755 - DNA, 25 bp, SARS Virus
agcaaccgtgtgttcagacacattt

SEQ ID NO: 10756 - DNA, 25 bp, SARS Virus
gcaaccgtgtggtcagacacattta

SEQ ID NO: 10757 - DNA, 25 bp, SARS Virus
caaccgtgtggttagacacatttac

SEQ ID NO: 10758 - DNA, 25 bp, SARS Virus
aaccgtgtggtctgacacatttacc

SEQ ID NO: 10759 - DNA, 25 bp, SARS Virus
accgtgtggtcatacacatttaccg

SEQ ID NO: 10760 - DNA, 25 bp, SARS Virus
ccgtgtggtcagtcacatttaccgg

SEQ ID NO: 10761 - DNA, 25 bp, SARS Virus
cgtgtggtcagatacatttaccgga

SEQ ID NO: 10762 - DNA, 25 bp, SARS Virus
gtgtggtcagactcatttaccggag

SEQ ID NO: 10763 - DNA, 25 bp, SARS Virus
tgtggtcagacatatttaccggagt

SEQ ID NO: 10764 - DNA, 25 bp, SARS Virus
gtggtcagacacttttaccggagta

SEQ ID NO: 10765 - DNA, 25 bp, SARS Virus
tggtcagacacatttaccggagtac

SEQ ID NO: 10766 - DNA, 25 bp, SARS Virus
ggtcagacacatttaccggagtacg

SEQ ID NO: 10767 - DNA, 25 bp, SARS Virus
gtcagacacatttaccggagtacga

SEQ ID NO: 10768 - DNA, 25 bp, SARS Virus
tcagacacattttccggagtacgag

SEQ ID NO: 10769 - DNA, 25 bp, SARS Virus
cagacacatttatcggagtacgaga

SEQ ID NO: 10770 - DNA, 25 bp, SARS Virus
agacacatttactggagtacgagaa

SEQ ID NO: 10771 - DNA, 25 bp, SARS Virus
gacacatttacctgagtacgagaat

SEQ ID NO: 10772 - DNA, 25 bp, SARS Virus
acacatttaccgtagtacgagaatc

SEQ ID NO: 10773 - DNA, 25 bp, SARS Virus
cacatttaccggtgtacgagaatct

SEQ ID NO: 10774 - DNA, 25 bp, SARS Virus
acatttaccggattacgagaatctc

SEQ ID NO: 10775 - DNA, 25 bp, SARS Virus
catttaccggagtacgagaatctct

SEQ ID NO: 10776 - DNA, 25 bp, SARS Virus
atttaccggagttcgagaatctcta

SEQ ID NO: 10777 - DNA, 25 bp, SARS Virus
tttaccggagtatgagaatctctaa

SEQ ID NO: 10778 - DNA, 25 bp, SARS Virus
ttaccggagtactagaatctctaat

SEQ ID NO: 10779 - DNA, 25 bp, SARS Virus
taccggagtacgtgaatctctaatt

SEQ ID NO: 10780 - DNA, 25 bp, SARS Virus
accggagtacgataatctctaattc

SEQ ID NO: 10781 - DNA, 25 bp, SARS Virus
ccggagtacgagtatctctaattcc

SEQ ID NO: 10782 - DNA, 25 bp, SARS Virus
cggagtacgagattctctaattcct

SEQ ID NO: 10783 - DNA, 25 bp, SARS Virus
ggagtacgagaatctctaattcctg

SEQ ID NO: 10784 - DNA, 25 bp, SARS Virus
gagtacgagaatttctaattcctgt

SEQ ID NO: 10785 - DNA, 25 bp, SARS Virus
agtacgagaatctctaattcctgtt

SEQ ID NO: 10786 - DNA, 25 bp, SARS Virus
gtacgagaatctttaattcctgttt

SEQ ID NO: 10787 - DNA, 25 bp, SARS Virus
tacgagaatctctaattcctgtttc

SEQ ID NO: 10788 - DNA, 25 bp, SARS Virus
acgagaatctcttattcctgtttct

SEQ ID NO: 10789 - DNA, 25 bp, SARS Virus
cgagaatctctatttcctgtttctt

SEQ ID NO: 10790 - DNA, 25 bp, SARS Virus
gagaatctctaattcctgtttcttg

SEQ ID NO: 10791 - DNA, 25 bp, SARS Virus
agaatctctaattcctgtttcttgt

SEQ ID NO: 10792 - DNA, 25 bp, SARS Virus
gaatctctaatttctgtttcttgtt

SEQ ID NO: 10793 - DNA, 25 bp, SARS Virus
aatctctaattcttgtttcttgtta

SEQ ID NO: 10794 - DNA, 25 bp, SARS Virus
atctctaattcctgtttcttgttat

SEQ ID NO: 10795 - DNA, 25 bp, SARS Virus
tctctaattcctttttcttgttatg

SEQ ID NO: 10796 - DNA, 25 bp, SARS Virus
ctctaattcctgtttcttgttatga

SEQ ID NO: 10797 - DNA, 25 bp, SARS Virus
tctaattcctgtttcttgttatgac

SEQ ID NO: 10798 - DNA, 25 bp, SARS Virus
ctaattcctgtttcttgttatgacg

SEQ ID NO: 10799 - DNA, 25 bp, SARS Virus
taattcctgttttttgttatgacgc

SEQ ID NO: 10800 - DNA, 25 bp, SARS Virus
aattcctgtttcttgttatgacgcg

SEQ ID NO: 10801 - DNA, 25 bp, SARS Virus
attcctgtttcttgttatgacgcgt

SEQ ID NO: 10802 - DNA, 25 bp, SARS Virus
ttcctgtttctttttatgacgcgta

SEQ ID NO: 10803 - DNA, 25 bp, SARS Virus
tcctgtttcttgttatgacgcgtaa

SEQ ID NO: 10804 - DNA, 25 bp, SARS Virus
cctgtttcttgttatgacgcgtaac

SEQ ID NO: 10805 - DNA, 25 bp, SARS Virus
ctgtttcttgttttgacgcgtaaca

SEQ ID NO: 10806 - DNA, 25 bp, SARS Virus
tgtttcttgttatgacgcgtaacag

SEQ ID NO: 10807 - DNA, 25 bp, SARS Virus
gtttcttgttattacgcgtaacaga

SEQ ID NO: 10808 - DNA, 25 bp, SARS Virus
tttcttgttatgtcgcgtaacagag

SEQ ID NO: 10809 - DNA, 25 bp, SARS Virus
ttcttgttatgatgcgtaacagagg

SEQ ID NO: 10810 - DNA, 25 bp, SARS Virus
tcttgttatgactcgtaacagagga

SEQ ID NO: 10811 - DNA, 25 bp, SARS Virus
cttgttatgacgtgtaacagaggac

SEQ ID NO: 10812 - DNA, 25 bp, SARS Virus
ttgttatgacgcttaacagaggacc

SEQ ID NO: 10813 - DNA, 25 bp, SARS Virus
tgttatgacgcgtaacagaggacca

SEQ ID NO: 10814 - DNA, 25 bp, SARS Virus
gttatgacgcgttacagaggaccaa

SEQ ID NO: 10815 - DNA, 25 bp, SARS Virus
ttatgacgcgtatcagaggaccaaa

SEQ ID NO: 10816 - DNA, 25 bp, SARS Virus
tatgacgcgtaatagaggaccaaat

SEQ ID NO: 10817 - DNA, 25 bp, SARS Virus
atgacgcgtaactgaggaccaaatg

SEQ ID NO: 10818 - DNA, 25 bp, SARS Virus
tgacgcgtaacataggaccaaatga

SEQ ID NO: 10819 - DNA, 25 bp, SARS Virus
gacgcgtaacagtggaccaaatgac

SEQ ID NO: 10820 - DNA, 25 bp, SARS Virus
acgcgtaacagatgaccaaatgacc

SEQ ID NO: 10821 - DNA, 25 bp, SARS Virus
cgcgtaacagagtaccaaatgaccg

SEQ ID NO: 10822 - DNA, 25 bp, SARS Virus
gcgtaacagaggtccaaatgaccga

SEQ ID NO: 10823 - DNA, 25 bp, SARS Virus
cgtaacagaggatcaaatgaccgat

SEQ ID NO: 10824 - DNA, 25 bp, SARS Virus
gtaacagaggactaaatgaccgatg

SEQ ID NO: 10825 - DNA, 25 bp, SARS Virus
taacagaggacctaatgaccgatgt

SEQ ID NO: 10826 - DNA, 25 bp, SARS Virus
aacagaggaccatatgaccgatgtt

SEQ ID NO: 10827 - DNA, 25 bp, SARS Virus
acagaggaccaattgaccgatgttt

SEQ ID NO: 10828 - DNA, 25 bp, SARS Virus
cagaggaccaaatgaccgatgtttg

SEQ ID NO: 10829 - DNA, 25 bp, SARS Virus
agaggaccaaattaccgatgtttgt

SEQ ID NO: 10830 - DNA, 25 bp, SARS Virus
gaggaccaaatgtccgatgtttgtt

SEQ ID NO: 10831 - DNA, 25 bp, SARS Virus
aggaccaaatgatcgatgtttgtta

SEQ ID NO: 10832 - DNA, 25 bp, SARS Virus
ggaccaaatgactgatgtttgttac

SEQ ID NO: 10833 - DNA, 25 bp, SARS Virus
gaccaaatgacctatgtttgttaca

SEQ ID NO: 10834 - DNA, 25 bp, SARS Virus
accaaatgaccgttgtttgttacag

SEQ ID NO: 10835 - DNA, 25 bp, SARS Virus
ccaaatgaccgatgtttgttacaga

SEQ ID NO: 10836 - DNA, 25 bp, SARS Virus
caaatgaccgatttttgttacagaa

SEQ ID NO: 10837 - DNA, 25 bp, SARS Virus
aaatgaccgatgtttgttacagaaa

SEQ ID NO: 10838 - DNA, 25 bp, SARS Virus
aatgaccgatgtttgttacagaaag

SEQ ID NO: 10839 - DNA, 25 bp, SARS Virus
atgaccgatgtttgttacagaaagc

SEQ ID NO: 10840 - DNA, 25 bp, SARS Virus
tgaccgatgttttttacagaaagcg

SEQ ID NO: 10841 - DNA, 25 bp, SARS Virus
gaccgatgtttgttacagaaagcga

SEQ ID NO: 10842 - DNA, 25 bp, SARS Virus
accgatgtttgttacagaaagcgaa

SEQ ID NO: 10843 - DNA, 25 bp, SARS Virus
ccgatgtttgtttcagaaagcgaat

SEQ ID NO: 10844 - DNA, 25 bp, SARS Virus
cgatgtttgttatagaaagcgaatt

SEQ ID NO: 10845 - DNA, 25 bp, SARS Virus
gatgtttgttactgaaagcgaattt

SEQ ID NO: 10846 - DNA, 25 bp, SARS Virus
atgtttgttacataaagcgaatttt

SEQ ID NO: 10847 - DNA, 25 bp, SARS Virus
tgtttgttacagtaagcgaattttc

SEQ ID NO: 10848 - DNA, 25 bp, SARS Virus
gtttgttacagatagcgaattttcc

SEQ ID NO: 10849 - DNA, 25 bp, SARS Virus
tttgttacagaatgcgaattttccc

SEQ ID NO: 10850 - DNA, 25 bp, SARS Virus
ttgttacagaaatcgaattttcccc

SEQ ID NO: 10851 - DNA, 25 bp, SARS Virus
tgttacagaaagtgaattttccccc

SEQ ID NO: 10852 - DNA, 25 bp, SARS Virus
gttacagaaagctaattttccccca

SEQ ID NO: 10853 - DNA, 25 bp, SARS Virus
ttacagaaagcgtattttcccccac

SEQ ID NO: 10854 - DNA, 25 bp, SARS Virus
tacagaaagcgatttttcccccacg

SEQ ID NO: 10855 - DNA, 25 bp, SARS Virus
acagaaagcgaattttcccccacgt

SEQ ID NO: 10856 - DNA, 25 bp, SARS Virus
cagaaagcgaattttcccccacgtg

SEQ ID NO: 10857 - DNA, 25 bp, SARS Virus
agaaagcgaattttcccccacgtgg

SEQ ID NO: 10858 - DNA, 25 bp, SARS Virus
gaaagcgaattttcccccacgtggt

SEQ ID NO: 10859 - DNA, 25 bp, SARS Virus
aaagcgaatttttccccacgtggtt

SEQ ID NO: 10860 - DNA, 25 bp, SARS Virus
aagcgaattttctcccacgtggtta

SEQ ID NO: 10861 - DNA, 25 bp, SARS Virus
agcgaattttcctccacgtggttaa

SEQ ID NO: 10862 - DNA, 25 bp, SARS Virus
gcgaattttccctcacgtggttaat

SEQ ID NO: 10863 - DNA, 25 bp, SARS Virus
cgaattttcccctacgtggttaatt

SEQ ID NO: 10864 - DNA, 25 bp, SARS Virus
gaattttccccctcgtggttaattt

SEQ ID NO: 10865 - DNA, 25 bp, SARS Virus
aattttcccccaagtggttaatttc

SEQ ID NO: 10866 - DNA, 25 bp, SARS Virus
attttcccccacatggttaatttcc

SEQ ID NO: 10867 - DNA, 25 bp, SARS Virus
ttttcccccacgaggttaatttcca

SEQ ID NO: 10868 - DNA, 25 bp, SARS Virus
tttcccccacgtagttaatttccac

SEQ ID NO: 10869 - DNA, 25 bp, SARS Virus
ttcccccacgtgattaatttccaca

SEQ ID NO: 10870 - DNA, 25 bp, SARS Virus
tcccccacgtggataatttccacat

SEQ ID NO: 10871 - DNA, 25 bp, SARS Virus
cccccacgtggtaaatttccacatt

SEQ ID NO: 10872 - DNA, 25 bp, SARS Virus
ccccacgtggttaatttccacattg

SEQ ID NO: 10873 - DNA, 25 bp, SARS Virus
cccacgtggttaatttccacattgg

SEQ ID NO: 10874 - DNA, 25 bp, SARS Virus
ccacgtggttaaattccacattgga

SEQ ID NO: 10875 - DNA, 25 bp, SARS Virus
cacgtggttaatatccacattggaa

SEQ ID NO: 10876 - DNA, 25 bp, SARS Virus
acgtggttaattaccacattggaaa

SEQ ID NO: 10877 - DNA, 25 bp, SARS Virus
cgtggttaatttacacattggaaac

SEQ ID NO: 10878 - DNA, 25 bp, SARS Virus
gtggttaatttcaacattggaaacc

SEQ ID NO: 10879 - DNA, 25 bp, SARS Virus
tggttaatttccacattggaaacct

SEQ ID NO: 10880 - DNA, 25 bp, SARS Virus
ggttaatttccaaattggaaacctc

SEQ ID NO: 10881 - DNA, 25 bp, SARS Virus
gttaatttccacattggaaacctct

SEQ ID NO: 10882 - DNA, 25 bp, SARS Virus
ttaatttccacaatggaaacctctt

SEQ ID NO: 10883 - DNA, 25 bp, SARS Virus
taatttccacataggaaacctcttc

SEQ ID NO: 10884 - DNA, 25 bp, SARS Virus
aatttccacattagaaacctcttct

SEQ ID NO: 10885 - DNA, 25 bp, SARS Virus
atttccacattgaaaacctcttcta

SEQ ID NO: 10886 - DNA, 25 bp, SARS Virus
tttccacattggaaacctcttctat

SEQ ID NO: 10887 - DNA, 25 bp, SARS Virus
ttccacattggaaacctcttctatg

SEQ ID NO: 10888 - DNA, 25 bp, SARS Virus
tccacattggaaacctcttctatga

SEQ ID NO: 10889 - DNA, 25 bp, SARS Virus
ccacattggaaaactcttctatgac

SEQ ID NO: 10890 - DNA, 25 bp, SARS Virus
cacattggaaacatcttctatgaca

SEQ ID NO: 10891 - DNA, 25 bp, SARS Virus
acattggaaaccacttctatgacaa

SEQ ID NO: 10892 - DNA, 25 bp, SARS Virus
cattggaaacctattctatgacaaa

SEQ ID NO: 10893 - DNA, 25 bp, SARS Virus
attggaaacctcatctatgacaaac

SEQ ID NO: 10894 - DNA, 25 bp, SARS Virus
ttggaaacctctactatgacaaacc

SEQ ID NO: 10895 - DNA, 25 bp, SARS Virus
tggaaacctcttatatgacaaaccc

SEQ ID NO: 10896 - DNA, 25 bp, SARS Virus
ggaaacctcttcaatgacaaaccct

SEQ ID NO: 10897 - DNA, 25 bp, SARS Virus
gaaacctcttctatgacaaaccctt

SEQ ID NO: 10898 - DNA, 25 bp, SARS Virus
aaacctcttctaagacaaacccttc

SEQ ID NO: 10899 - DNA, 25 bp, SARS Virus
aacctcttctataacaaacccttca

SEQ ID NO: 10900 - DNA, 25 bp, SARS Virus
acctcttctatgacaaacccttcaa

SEQ ID NO: 10901 - DNA, 25 bp, SARS Virus
cctcttctatgaaaaacccttcaag

SEQ ID NO: 10902 - DNA, 25 bp, SARS Virus
ctcttctatgacaaacccttcaagt

SEQ ID NO: 10903 - DNA, 25 bp, SARS Virus
tcttctatgacaaacccttcaagtt

SEQ ID NO: 10904 - DNA, 25 bp, SARS Virus
cttctatgacaaacccttcaagttc

SEQ ID NO: 10905 - DNA, 25 bp, SARS Virus
ttctatgacaaaaccttcaagttcc

SEQ ID NO: 10906 - DNA, 25 bp, SARS Virus
tctatgacaaacacttcaagttcca

SEQ ID NO: 10907 - DNA, 25 bp, SARS Virus
ctatgacaaaccattcaagttccaa

SEQ ID NO: 10908 - DNA, 25 bp, SARS Virus
tatgacaaacccatcaagttccaat

SEQ ID NO: 10909 - DNA, 25 bp, SARS Virus
atgacaaaccctacaagttccaatg

SEQ ID NO: 10910 - DNA, 25 bp, SARS Virus
tgacaaacccttaaagttccaatgt

SEQ ID NO: 10911 - DNA, 25 bp, SARS Virus
gacaaacccttcaagttccaatgtt

SEQ ID NO: 10912 - DNA, 25 bp, SARS Virus
acaaacccttcaagttccaatgttc

SEQ ID NO: 10913 - DNA, 25 bp, SARS Virus
caaacccttcaaattccaatgttct

SEQ ID NO: 10914 - DNA, 25 bp, SARS Virus
aaacccttcaagatccaatgttctt

SEQ ID NO: 10915 - DNA, 25 bp, SARS Virus
aacccttcaagtaccaatgttctta

SEQ ID NO: 10916 - DNA, 25 bp, SARS Virus
acccttcaagttacaatgttcttac

SEQ ID NO: 10917 - DNA, 25 bp, SARS Virus
cccttcaagttcaaatgttcttaca

SEQ ID NO: 10918 - DNA, 25 bp, SARS Virus
ccttcaagttccaatgttcttacac

SEQ ID NO: 10919 - DNA, 25 bp, SARS Virus
cttcaagttccaatgttcttacact

SEQ ID NO: 10920 - DNA, 25 bp, SARS Virus
ttcaagttccaaagttcttacactc

SEQ ID NO: 10921 - DNA, 25 bp, SARS Virus
tcaagttccaatattcttacactct

SEQ ID NO: 10922 - DNA, 25 bp, SARS Virus
caagttccaatgatcttacactctt

SEQ ID NO: 10923 - DNA, 25 bp, SARS Virus
aagttccaatgtacttacactctta

SEQ ID NO: 10924 - DNA, 25 bp, SARS Virus
agttccaatgttattacactcttag

SEQ ID NO: 10925 - DNA, 25 bp, SARS Virus
gttccaatgttcatacactcttagt

SEQ ID NO: 10926 - DNA, 25 bp, SARS Virus
ttccaatgttctaacactcttagtg

SEQ ID NO: 10927 - DNA, 25 bp, SARS Virus
tccaatgttcttacactcttagtgt

SEQ ID NO: 10928 - DNA, 25 bp, SARS Virus
ccaatgttcttaaactcttagtgta

SEQ ID NO: 10929 - DNA, 25 bp, SARS Virus
caatgttcttacactcttagtgtaa

SEQ ID NO: 10930 - DNA, 25 bp, SARS Virus
aatgttcttacaatcttagtgtaaa

SEQ ID NO: 10931 - DNA, 25 bp, SARS Virus
atgttcttacacacttagtgtaaac

SEQ ID NO: 10932 - DNA, 25 bp, SARS Virus
tgttcttacactattagtgtaaact

SEQ ID NO: 10933 - DNA, 25 bp, SARS Virus
gttcttacactcatagtgtaaactc

SEQ ID NO: 10934 - DNA, 25 bp, SARS Virus
ttcttacactctaagtgtaaactcg

SEQ ID NO: 10935 - DNA, 25 bp, SARS Virus
tcttacactcttagtgtaaactcga

SEQ ID NO: 10936 - DNA, 25 bp, SARS Virus
cttacactcttaatgtaaactcgaa

SEQ ID NO: 10937 - DNA, 25 bp, SARS Virus
ttacactcttagagtaaactcgaac

SEQ ID NO: 10938 - DNA, 25 bp, SARS Virus
tacactcttagtataaactcgaact

SEQ ID NO: 10939 - DNA, 25 bp, SARS Virus
acactcttagtgaaaactcgaacta

SEQ ID NO: 10940 - DNA, 25 bp, SARS Virus
cactcttagtgtaaactcgaactac

SEQ ID NO: 10941 - DNA, 25 bp, SARS Virus
actcttagtgtaaactcgaactact

SEQ ID NO: 10942 - DNA, 25 bp, SARS Virus
ctcttagtgtaaactcgaactactt

SEQ ID NO: 10943 - DNA, 25 bp, SARS Virus
tcttagtgtaaaatcgaactacttg

SEQ ID NO: 10944 - DNA, 25 bp, SARS Virus
cttagtgtaaacacgaactacttgc

SEQ ID NO: 10945 - DNA, 25 bp, SARS Virus
ttagtgtaaactagaactacttgca

SEQ ID NO: 10946 - DNA, 25 bp, SARS Virus
tagtgtaaactcaaactacttgcac

SEQ ID NO: 10947 - DNA, 25 bp, SARS Virus
agtgtaaactcgaactacttgcaca

SEQ ID NO: 10948 - DNA, 25 bp, SARS Virus
gtgtaaactcgaactacttgcacaa

SEQ ID NO: 10949 - DNA, 25 bp, SARS Virus
tgtaaactcgaaatacttgcacaac

SEQ ID NO: 10950 - DNA, 25 bp, SARS Virus
gtaaactcgaacaacttgcacaact

SEQ ID NO: 10951 - DNA, 25 bp, SARS Virus
taaactcgaactacttgcacaactg

SEQ ID NO: 10952 - DNA, 25 bp, SARS Virus
aaactcgaactaattgcacaactgt

SEQ ID NO: 10953 - DNA, 25 bp, SARS Virus
aactcgaactacatgcacaactgtt

SEQ ID NO: 10954 - DNA, 25 bp, SARS Virus
actcgaactactagcacaactgttt

SEQ ID NO: 10955 - DNA, 25 bp, SARS Virus
ctcgaactacttacacaactgtttc

SEQ ID NO: 10956 - DNA, 25 bp, SARS Virus
tcgaactacttgaacaactgtttca

SEQ ID NO: 10957 - DNA, 25 bp, SARS Virus
cgaactacttgcacaactgtttcac

SEQ ID NO: 10958 - DNA, 25 bp, SARS Virus
gaactacttgcaaaactgtttcacg

SEQ ID NO: 10959 - DNA, 25 bp, SARS Virus
aactacttgcacaactgtttcacga

SEQ ID NO: 10960 - DNA, 25 bp, SARS Virus
actacttgcacaactgtttcacgaa

SEQ ID NO: 10961 - DNA, 25 bp, SARS Virus
ctacttgcacaaatgtttcacgaat

SEQ ID NO: 10962 - DNA, 25 bp, SARS Virus
tacttgcacaacagtttcacgaatt

SEQ ID NO: 10963 - DNA, 25 bp, SARS Virus
acttgcacaactatttcacgaatta

SEQ ID NO: 10964 - DNA, 25 bp, SARS Virus
cttgcacaactgattcacgaattac

SEQ ID NO: 10965 - DNA, 25 bp, SARS Virus
ttgcacaactgtatcacgaattact

SEQ ID NO: 10966 - DNA, 25 bp, SARS Virus
tgcacaactgttacacgaattactt

SEQ ID NO: 10967 - DNA, 25 bp, SARS Virus
gcacaactgtttaacgaattacttt

SEQ ID NO: 10968 - DNA, 25 bp, SARS Virus
cacaactgtttcacgaattactttt

SEQ ID NO: 10969 - DNA, 25 bp, SARS Virus
acaactgtttcaagaattacttttc

SEQ ID NO: 10970 - DNA, 25 bp, SARS Virus
caactgtttcacaaattacttttca

SEQ ID NO: 10971 - DNA, 25 bp, SARS Virus
aactgtttcacgaattacttttcac

SEQ ID NO: 10972 - DNA, 25 bp, SARS Virus
actgtttcacgaattacttttcacg

SEQ ID NO: 10973 - DNA, 25 bp, SARS Virus
ctgtttcacgaaatacttttcacga

SEQ ID NO: 10974 - DNA, 25 bp, SARS Virus
tgtttcacgaataacttttcacgag

SEQ ID NO: 10975 - DNA, 25 bp, SARS Virus
gtttcacgaattacttttcacgaga

SEQ ID NO: 10976 - DNA, 25 bp, SARS Virus
tttcacgaattaattttcacgagac

SEQ ID NO: 10977 - DNA, 25 bp, SARS Virus
ttcacgaattacatttcacgagaca

SEQ ID NO: 10978 - DNA, 25 bp, SARS Virus
tcacgaattactattcacgagacag

SEQ ID NO: 10979 - DNA, 25 bp, SARS Virus
cacgaattacttatcacgagacaga

SEQ ID NO: 10980 - DNA, 25 bp, SARS Virus
acgaattactttacacgagacagat

SEQ ID NO: 10981 - DNA, 25 bp, SARS Virus
cgaattacttttaacgagacagatg

SEQ ID NO: 10982 - DNA, 25 bp, SARS Virus
gaattacttttcacgagacagatgt

SEQ ID NO: 10983 - DNA, 25 bp, SARS Virus
aattacttttcaagagacagatgtg

SEQ ID NO: 10984 - DNA, 25 bp, SARS Virus
attacttttcacaagacagatgtga

SEQ ID NO: 10985 - DNA, 25 bp, SARS Virus
ttacttttcacgagacagatgtgac

SEQ ID NO: 10986 - DNA, 25 bp, SARS Virus
tacttttcacgaaacagatgtgaca

SEQ ID NO: 10987 - DNA, 25 bp, SARS Virus
acttttcacgagacagatgtgacaa

SEQ ID NO: 10988 - DNA, 25 bp, SARS Virus
cttttcacgagaaagatgtgacaac

SEQ ID NO: 10989 - DNA, 25 bp, SARS Virus
ttttcacgagacagatgtgacaact

SEQ ID NO: 10990 - DNA, 25 bp, SARS Virus
tttcacgagacaaatgtgacaactt

SEQ ID NO: 10991 - DNA, 25 bp, SARS Virus
ttcacgagacagatgtgacaactta

SEQ ID NO: 10992 - DNA, 25 bp, SARS Virus
tcacgagacagaagtgacaacttag

SEQ ID NO: 10993 - DNA, 25 bp, SARS Virus
cacgagacagatatgacaacttagg

SEQ ID NO: 10994 - DNA, 25 bp, SARS Virus
acgagacagatgagacaacttaggc

SEQ ID NO: 10995 - DNA, 25 bp, SARS Virus
cgagacagatgtaacaacttaggcc

SEQ ID NO: 10996 - DNA, 25 bp, SARS Virus
gagacagatgtgacaacttaggcca

SEQ ID NO: 10997 - DNA, 25 bp, SARS Virus
agacagatgtgaaaacttaggccat

SEQ ID NO: 10998 - DNA, 25 bp, SARS Virus
gacagatgtgacaacttaggccatg

SEQ ID NO: 10999 - DNA, 25 bp, SARS Virus
acagatgtgacaacttaggccatgg

SEQ ID NO: 11000 - DNA, 25 bp, SARS Virus
cagatgtgacaaattaggccatggc

SEQ ID NO: 11001 - DNA, 25 bp, SARS Virus
agatgtgacaacataggccatggct

SEQ ID NO: 11002 - DNA, 25 bp, SARS Virus
gatgtgacaactaaggccatggctt

SEQ ID NO: 11003 - DNA, 25 bp, SARS Virus
atgtgacaacttaggccatggcttc

SEQ ID NO: 11004 - DNA, 25 bp, SARS Virus
tgtgacaacttaagccatggcttca

SEQ ID NO: 11005 - DNA, 25 bp, SARS Virus
gtgacaacttagaccatggcttcaa

SEQ ID NO: 11006 - DNA, 25 bp, SARS Virus
tgacaacttaggacatggcttcaat

SEQ ID NO: 11007 - DNA, 25 bp, SARS Virus
gacaacttaggcaatggcttcaatg

SEQ ID NO: 11008 - DNA, 25 bp, SARS Virus
acaacttaggccatggcttcaatga

SEQ ID NO: 11009 - DNA, 25 bp, SARS Virus
caacttaggccaaggcttcaatgac

SEQ ID NO: 11010 - DNA, 25 bp, SARS Virus
aacttaggccatagcttcaatgact

SEQ ID NO: 11011 - DNA, 25 bp, SARS Virus
acttaggccatgacttcaatgactc

SEQ ID NO: 11012 - DNA, 25 bp, SARS Virus
cttaggccatggattcaatgactca

SEQ ID NO: 11013 - DNA, 25 bp, SARS Virus
ttaggccatggcatcaatgactcaa

SEQ ID NO: 11014 - DNA, 25 bp, SARS Virus
taggccatggctacaatgactcaaa

SEQ ID NO: 11015 - DNA, 25 bp, SARS Virus
aggccatggcttaaatgactcaaac

SEQ ID NO: 11016 - DNA, 25 bp, SARS Virus
ggccatggcttcaatgactcaaacg

SEQ ID NO: 11017 - DNA, 25 bp, SARS Virus
gccatggcttcaatgactcaaacgt

SEQ ID NO: 11018 - DNA, 25 bp, SARS Virus
ccatggcttcaaagactcaaacgta

SEQ ID NO: 11019 - DNA, 25 bp, SARS Virus
catggcttcaataactcaaacgtac

SEQ ID NO: 11020 - DNA, 25 bp, SARS Virus
atggcttcaatgactcaaacgtaca

SEQ ID NO: 11021 - DNA, 25 bp, SARS Virus
tggcttcaatgaatcaaacgtacac

SEQ ID NO: 11022 - DNA, 25 bp, SARS Virus
ggcttcaatgacacaaacgtacaca

SEQ ID NO: 11023 - DNA, 25 bp, SARS Virus
gcttcaatgactaaaacgtacacaa

SEQ ID NO: 11024 - DNA, 25 bp, SARS Virus
cttcaatgactcaaacgtacacaac

SEQ ID NO: 11025 - DNA, 25 bp, SARS Virus
ttcaatgactcaaacgtacacaaca

SEQ ID NO: 11026 - DNA, 25 bp, SARS Virus
tcaatgactcaaacgtacacaacat

SEQ ID NO: 11027 - DNA, 25 bp, SARS Virus
caatgactcaaaagtacacaacatc

SEQ ID NO: 11028 - DNA, 25 bp, SARS Virus
aatgactcaaacatacacaacatcg

SEQ ID NO: 11029 - DNA, 25 bp, SARS Virus
atgactcaaacgaacacaacatcgt

SEQ ID NO: 11030 - DNA, 25 bp, SARS Virus
tgactcaaacgtacacaacatcgtc

SEQ ID NO: 11031 - DNA, 25 bp, SARS Virus
gactcaaacgtaaacaacatcgtct

SEQ ID NO: 11032 - DNA, 25 bp, SARS Virus
actcaaacgtacacaacatcgtctc

SEQ ID NO: 11033 - DNA, 25 bp, SARS Virus
ctcaaacgtacaaaacatcgtctcc

SEQ ID NO: 11034 - DNA, 25 bp, SARS Virus
tcaaacgtacacaacatcgtctccg

SEQ ID NO: 11035 - DNA, 25 bp, SARS Virus
caaacgtacacaacatcgtctccga

SEQ ID NO: 11036 - DNA, 25 bp, SARS Virus
aaacgtacacaaaatcgtctccgac

SEQ ID NO: 11037 - DNA, 25 bp, SARS Virus
aacgtacacaacatcgtctccgaca

SEQ ID NO: 11038 - DNA, 25 bp, SARS Virus
acgtacacaacaacgtctccgacaa

SEQ ID NO: 11039 - DNA, 25 bp, SARS Virus
cgtacacaacatagtctccgacaac

SEQ ID NO: 11040 - DNA, 25 bp, SARS Virus
gtacacaacatcatctccgacaaca

SEQ ID NO: 11041 - DNA, 25 bp, SARS Virus
tacacaacatcgactccgacaacac

SEQ ID NO: 11042 - DNA, 25 bp, SARS Virus
acacaacatcgtatccgacaacact

SEQ ID NO: 11043 - DNA, 25 bp, SARS Virus
cacaacatcgtcaccgacaacactt

SEQ ID NO: 11044 - DNA, 25 bp, SARS Virus
acaacatcgtctacgacaacacttc

SEQ ID NO: 11045 - DNA, 25 bp, SARS Virus
caacatcgtctcagacaacacttct

SEQ ID NO: 11046 - DNA, 25 bp, SARS Virus
aacatcgtctccaacaacacttctg

SEQ ID NO: 11047 - DNA, 25 bp, SARS Virus
acatcgtctccgacaacacttctga

SEQ ID NO: 11048 - DNA, 25 bp, SARS Virus
catcgtctccgaaaacacttctgaa

SEQ ID NO: 11049 - DNA, 25 bp, SARS Virus
atcgtctccgacaacacttctgaaa

SEQ ID NO: 11050 - DNA, 25 bp, SARS Virus
tcgtctccgacaacacttctgaaat

SEQ ID NO: 11051 - DNA, 25 bp, SARS Virus
cgtctccgacaaaacttctgaaatg

SEQ ID NO: 11052 - DNA, 25 bp, SARS Virus
gtctccgacaacacttctgaaatgt

SEQ ID NO: 11053 - DNA, 25 bp, SARS Virus
tctccgacaacaattctgaaatgtt

SEQ ID NO: 11054 - DNA, 25 bp, SARS Virus
ctccgacaacacatctgaaatgttg

SEQ ID NO: 11055 - DNA, 25 bp, SARS Virus
tccgacaacactactgaaatgttgg

SEQ ID NO: 11056 - DNA, 25 bp, SARS Virus
ccgacaacacttatgaaatgttggt

SEQ ID NO: 11057 - DNA, 25 bp, SARS Virus
cgacaacacttcagaaatgttggtc

SEQ ID NO: 11058 - DNA, 25 bp, SARS Virus
gacaacacttctaaaatgttggtca

SEQ ID NO: 11059 - DNA, 25 bp, SARS Virus
acaacacttctgaaatgttggtcaa

SEQ ID NO: 11060 - DNA, 25 bp, SARS Virus
caacacttctgaaatgttggtcaaa

SEQ ID NO: 11061 - DNA, 25 bp, SARS Virus
aacacttctgaaatgttggtcaaag

SEQ ID NO: 11062 - DNA, 25 bp, SARS Virus
acacttctgaaaagttggtcaaaga

SEQ ID NO: 11063 - DNA, 25 bp, SARS Virus
cacttctgaaatattggtcaaagac

SEQ ID NO: 11064 - DNA, 25 bp, SARS Virus
acttctgaaatgatggtcaaagact

SEQ ID NO: 11065 - DNA, 25 bp, SARS Virus
cttctgaaatgtaggtcaaagacta

SEQ ID NO: 11066 - DNA, 25 bp, SARS Virus
ttctgaaatgttagtcaaagactag

SEQ ID NO: 11067 - DNA, 25 bp, SARS Virus
tctgaaatgttgatcaaagactaga

SEQ ID NO: 11068 - DNA, 25 bp, SARS Virus
ctgaaatgttggacaaagactagag

SEQ ID NO: 11069 - DNA, 25 bp, SARS Virus
tgaaatgttggtaaaagactagagg

SEQ ID NO: 11070 - DNA, 25 bp, SARS Virus
gaaatgttggtcaaagactagagga

SEQ ID NO: 11071 - DNA, 25 bp, SARS Virus
aaatgttggtcaaagactagaggaa

SEQ ID NO: 11072 - DNA, 25 bp, SARS Virus
aatgttggtcaaagactagaggaat

SEQ ID NO: 11073 - DNA, 25 bp, SARS Virus
atgttggtcaaaaactagaggaatg

SEQ ID NO: 11074 - DNA, 25 bp, SARS Virus
tgttggtcaaagactagaggaatgg

SEQ ID NO: 11075 - DNA, 25 bp, SARS Virus
gttggtcaaagaatagaggaatggt

SEQ ID NO: 11076 - DNA, 25 bp, SARS Virus
ttggtcaaagacaagaggaatggtt

SEQ ID NO: 11077 - DNA, 25 bp, SARS Virus
tggtcaaagactagaggaatggttg

SEQ ID NO: 11078 - DNA, 25 bp, SARS Virus
ggtcaaagactaaaggaatggttgt

SEQ ID NO: 11079 - DNA, 25 bp, SARS Virus
gtcaaagactagaggaatggttgta

SEQ ID NO: 11080 - DNA, 25 bp, SARS Virus
tcaaagactagaagaatggttgtac

SEQ ID NO: 11081 - DNA, 25 bp, SARS Virus
caaagactagagaaatggttgtacc

SEQ ID NO: 11082 - DNA, 25 bp, SARS Virus
aaagactagaggaatggttgtaccc

SEQ ID NO: 11083 - DNA, 25 bp, SARS Virus
aagactagaggaatggttgtaccca

SEQ ID NO: 11084 - DNA, 25 bp, SARS Virus
agactagaggaaaggttgtacccat

SEQ ID NO: 11085 - DNA, 25 bp, SARS Virus
gactagaggaatagttgtacccata

SEQ ID NO: 11086 - DNA, 25 bp, SARS Virus
actagaggaatgattgtacccataa

SEQ ID NO: 11087 - DNA, 25 bp, SARS Virus
ctagaggaatggatgtacccataac

SEQ ID NO: 11088 - DNA, 25 bp, SARS Virus
tagaggaatggtagtacccataact

SEQ ID NO: 11089 - DNA, 25 bp, SARS Virus
agaggaatggttatacccataacta

SEQ ID NO: 11090 - DNA, 25 bp, SARS Virus
gaggaatggttgaacccataactag

SEQ ID NO: 11091 - DNA, 25 bp, SARS Virus
aggaatggttgtacccataactaga

SEQ ID NO: 11092 - DNA, 25 bp, SARS Virus
ggaatggttgtaaccataactagaa

SEQ ID NO: 11093 - DNA, 25 bp, SARS Virus
gaatggttgtacacataactagaac

SEQ ID NO: 11094 - DNA, 25 bp, SARS Virus
aatggttgtaccaataactagaact

SEQ ID NO: 11095 - DNA, 25 bp, SARS Virus
atggttgtacccataactagaacta

SEQ ID NO: 11096 - DNA, 25 bp, SARS Virus
tggttgtacccaaaactagaactac

SEQ ID NO: 11097 - DNA, 25 bp, SARS Virus
ggttgtacccataactagaactact

SEQ ID NO: 11098 - DNA, 25 bp, SARS Virus
gttgtacccataactagaactactc

SEQ ID NO: 11099 - DNA, 25 bp, SARS Virus
ttgtacccataaatagaactactca

SEQ ID NO: 11100 - DNA, 25 bp, SARS Virus
tgtacccataacaagaactactcac

SEQ ID NO: 11101 - DNA, 25 bp, SARS Virus
gtacccataactagaactactcacc

SEQ ID NO: 11102 - DNA, 25 bp, SARS Virus
tacccataactaaaactactcacct

SEQ ID NO: 11103 - DNA, 25 bp, SARS Virus
acccataactagaactactcacctc

SEQ ID NO: 11104 - DNA, 25 bp, SARS Virus
cccataactagaactactcacctca

SEQ ID NO: 11105 - DNA, 25 bp, SARS Virus
ccataactagaaatactcacctcac

SEQ ID NO: 11106 - DNA, 25 bp, SARS Virus
cataactagaacaactcacctcaca

SEQ ID NO: 11107 - DNA, 25 bp, SARS Virus
ataactagaactactcacctcacat

SEQ ID NO: 11108 - DNA, 25 bp, SARS Virus
taactagaactaatcacctcacatc

SEQ ID NO: 11109 - DNA, 25 bp, SARS Virus
aactagaactacacacctcacatcg

SEQ ID NO: 11110 - DNA, 25 bp, SARS Virus
actagaactactaacctcacatcga

SEQ ID NO: 11111 - DNA, 25 bp, SARS Virus
ctagaactactcacctcacatcgat

SEQ ID NO: 11112 - DNA, 25 bp, SARS Virus
tagaactactcaactcacatcgatg

SEQ ID NO: 11113 - DNA, 25 bp, SARS Virus
agaactactcacatcacatcgatgt

SEQ ID NO: 11114 - DNA, 25 bp, SARS Virus
gaactactcaccacacatcgatgta

SEQ ID NO: 11115 - DNA, 25 bp, SARS Virus
aactactcacctaacatcgatgtaa

SEQ ID NO: 11116 - DNA, 25 bp, SARS Virus
actactcacctcacatcgatgtaag

SEQ ID NO: 11117 - DNA, 25 bp, SARS Virus
ctactcacctcaaatcgatgtaaga

SEQ ID NO: 11118 - DNA, 25 bp, SARS Virus
tactcacctcacatcgatgtaagat

SEQ ID NO: 11119 - DNA, 25 bp, SARS Virus
actcacctcacaacgatgtaagatg

SEQ ID NO: 11120 - DNA, 25 bp, SARS Virus
ctcacctcacatagatgtaagatga

SEQ ID NO: 11121 - DNA, 25 bp, SARS Virus
tcacctcacatcaatgtaagatgaa

SEQ ID NO: 11122 - DNA, 25 bp, SARS Virus
cacctcacatcgatgtaagatgaat

SEQ ID NO: 11123 - DNA, 25 bp, SARS Virus
acctcacatcgaagtaagatgaata

SEQ ID NO: 11124 - DNA, 25 bp, SARS Virus
cctcacatcgatataagatgaataa

SEQ ID NO: 11125 - DNA, 25 bp, SARS Virus
ctcacatcgatgaaagatgaataaa

SEQ ID NO: 11126 - DNA, 25 bp, SARS Virus
tcacatcgatgtaagatgaataaac

SEQ ID NO: 11127 - DNA, 25 bp, SARS Virus
cacatcgatgtaagatgaataaact

SEQ ID NO: 11128 - DNA, 25 bp, SARS Virus
acatcgatgtaaaatgaataaacta

SEQ ID NO: 11129 - DNA, 25 bp, SARS Virus
catcgatgtaagatgaataaactac

SEQ ID NO: 11130 - DNA, 25 bp, SARS Virus
atcgatgtaagaagaataaactact

SEQ ID NO: 11131 - DNA, 25 bp, SARS Virus
tcgatgtaagataaataaactacta

SEQ ID NO: 11132 - DNA, 25 bp, SARS Virus
cgatgtaagatgaataaactactac

SEQ ID NO: 11133 - DNA, 25 bp, SARS Virus
gatgtaagatgaataaactactacg

SEQ ID NO: 11134 - DNA, 25 bp, SARS Virus
atgtaagatgaaaaaactactacga

SEQ ID NO: 11135 - DNA, 25 bp, SARS Virus
tgtaagatgaataaactactacgac

SEQ ID NO: 11136 - DNA, 25 bp, SARS Virus
gtaagatgaataaactactacgacc

SEQ ID NO: 11137 - DNA, 25 bp, SARS Virus
taagatgaataaactactacgacca

SEQ ID NO: 11138 - DNA, 25 bp, SARS Virus
aagatgaataaaatactacgaccac

SEQ ID NO: 11139 - DNA, 25 bp, SARS Virus
agatgaataaacaactacgaccact

SEQ ID NO: 11140 - DNA, 25 bp, SARS Virus
gatgaataaactactacgaccactt

SEQ ID NO: 11141 - DNA, 25 bp, SARS Virus
atgaataaactaatacgaccacttc

SEQ ID NO: 11142 - DNA, 25 bp, SARS Virus
tgaataaactacaacgaccacttct

SEQ ID NO: 11143 - DNA, 25 bp, SARS Virus
gaataaactactacgaccacttctt

SEQ ID NO: 11144 - DNA, 25 bp, SARS Virus
aataaactactaagaccacttcttt

SEQ ID NO: 11145 - DNA, 25 bp, SARS Virus
ataaactactacaaccacttctttt

SEQ ID NO: 11146 - DNA, 25 bp, SARS Virus
taaactactacgaccacttcttttg

SEQ ID NO: 11147 - DNA, 25 bp, SARS Virus
aaactactacgaacacttcttttga

SEQ ID NO: 11148 - DNA, 25 bp, SARS Virus
aactactacgacaacttcttttgaa

SEQ ID NO: 11149 - DNA, 25 bp, SARS Virus
actactacgaccacttcttttgaaa

SEQ ID NO: 11150 - DNA, 25 bp, SARS Virus
ctactacgaccaattcttttgaaaa

SEQ ID NO: 11151 - DNA, 25 bp, SARS Virus
tactacgaccacatcttttgaaaag

SEQ ID NO: 11152 - DNA, 25 bp, SARS Virus
actacgaccactacttttgaaaagt

SEQ ID NO: 11153 - DNA, 25 bp, SARS Virus
ctacgaccacttattttgaaaagta

SEQ ID NO: 11154 - DNA, 25 bp, SARS Virus
tacgaccacttcatttgaaaagtag

SEQ ID NO: 11155 - DNA, 25 bp, SARS Virus
acgaccacttctattgaaaagtagt

SEQ ID NO: 11156 - DNA, 25 bp, SARS Virus
cgaccacttcttatgaaaagtagtg

SEQ ID NO: 11157 - DNA, 25 bp, SARS Virus
gaccacttctttagaaaagtagtgc

SEQ ID NO: 11158 - DNA, 25 bp, SARS Virus
accacttcttttaaaaagtagtgca

SEQ ID NO: 11159 - DNA, 25 bp, SARS Virus
ccacttcttttgaaaagtagtgcat

SEQ ID NO: 11160 - DNA, 25 bp, SARS Virus
cacttcttttgaaaagtagtgcata

SEQ ID NO: 11161 - DNA, 25 bp, SARS Virus
acttcttttgaaaagtagtgcatac

SEQ ID NO: 11162 - DNA, 25 bp, SARS Virus
cttcttttgaaaagtagtgcataca

SEQ ID NO: 11163 - DNA, 25 bp, SARS Virus
ttcttttgaaaaatagtgcatacat

SEQ ID NO: 11164 - DNA, 25 bp, SARS Virus
tcttttgaaaagaagtgcatacata

SEQ ID NO: 11165 - DNA, 25 bp, SARS Virus
cttttgaaaagtagtgcatacataa

SEQ ID NO: 11166 - DNA, 25 bp, SARS Virus
ttttgaaaagtaatgcatacataac

SEQ ID NO: 11167 - DNA, 25 bp, SARS Virus
tttgaaaagtagagcatacataaca

SEQ ID NO: 11168 - DNA, 25 bp, SARS Virus
ttgaaaagtagtacatacataacaa

SEQ ID NO: 11169 - DNA, 25 bp, SARS Virus
tgaaaagtagtgaatacataacaag

SEQ ID NO: 11170 - DNA, 25 bp, SARS Virus
gaaaagtagtgcatacataacaagg

SEQ ID NO: 11171 - DNA, 25 bp, SARS Virus
aaaagtagtgcaaacataacaagga

SEQ ID NO: 11172 - DNA, 25 bp, SARS Virus
aaagtagtgcatacataacaaggaa

SEQ ID NO: 11173 - DNA, 25 bp, SARS Virus
aagtagtgcataaataacaaggaaa

SEQ ID NO: 11174 - DNA, 25 bp, SARS Virus
agtagtgcatacataacaaggaaaa

SEQ ID NO: 11175 - DNA, 25 bp, SARS Virus
gtagtgcatacaaaacaaggaaaat

SEQ ID NO: 11176 - DNA, 25 bp, SARS Virus
tagtgcatacataacaaggaaaatg

SEQ ID NO: 11177 - DNA, 25 bp, SARS Virus
agtgcatacataacaaggaaaatgg

SEQ ID NO: 11178 - DNA, 25 bp, SARS Virus
gtgcatacataaaaaggaaaatggg

SEQ ID NO: 11179 - DNA, 25 bp, SARS Virus
tgcatacataacaaggaaaatggga

SEQ ID NO: 11180 - DNA, 25 bp, SARS Virus
gcatacataacaaggaaaatgggag

SEQ ID NO: 11181 - DNA, 25 bp, SARS Virus
catacataacaaagaaaatgggagg

SEQ ID NO: 11182 - DNA, 25 bp, SARS Virus
atacataacaagaaaaatgggaggt

SEQ ID NO: 11183 - DNA, 25 bp, SARS Virus
tacataacaaggaaaatgggaggtc

SEQ ID NO: 11184 - DNA, 25 bp, SARS Virus
acataacaaggaaaatgggaggtct

SEQ ID NO: 11185 - DNA, 25 bp, SARS Virus
cataacaaggaaaatgggaggtcta

SEQ ID NO: 11186 - DNA, 25 bp, SARS Virus
ataacaaggaaaatgggaggtctac

SEQ ID NO: 11187 - DNA, 25 bp, SARS Virus
taacaaggaaaaagggaggtctact

SEQ ID NO: 11188 - DNA, 25 bp, SARS Virus
aacaaggaaaataggaggtctactc

SEQ ID NO: 11189 - DNA, 25 bp, SARS Virus
acaaggaaaatgagaggtctactcc

SEQ ID NO: 11190 - DNA, 25 bp, SARS Virus
caaggaaaatggaaggtctactcct

SEQ ID NO: 11191 - DNA, 25 bp, SARS Virus
aaggaaaatgggaggtctactcctt

SEQ ID NO: 11192 - DNA, 25 bp, SARS Virus
aggaaaatgggaagtctactccttc

SEQ ID NO: 11193 - DNA, 25 bp, SARS Virus
ggaaaatgggagatctactccttct

SEQ ID NO: 11194 - DNA, 25 bp, SARS Virus
gaaaatgggaggactactccttctt

SEQ ID NO: 11195 - DNA, 25 bp, SARS Virus
aaaatgggaggtatactccttcttc

SEQ ID NO: 11196 - DNA, 25 bp, SARS Virus
aaatgggaggtcaactccttcttct

SEQ ID NO: 11197 - DNA, 25 bp, SARS Virus
aatgggaggtctactccttcttctc

SEQ ID NO: 11198 - DNA, 25 bp, SARS Virus
atgggaggtctaatccttcttctcc

SEQ ID NO: 11199 - DNA, 25 bp, SARS Virus
tgggaggtctacaccttcttctcct

SEQ ID NO: 11200 - DNA, 25 bp, SARS Virus
gggaggtctactacttcttctcctg

SEQ ID NO: 11201 - DNA, 25 bp, SARS Virus
ggaggtctactcattcttctcctgc

SEQ ID NO: 11202 - DNA, 25 bp, SARS Virus
gaggtctactccatcttctcctgct

SEQ ID NO: 11203 - DNA, 25 bp, SARS Virus
aggtctactcctacttctcctgcta

SEQ ID NO: 11204 - DNA, 25 bp, SARS Virus
ggtctactccttattctcctgctac

SEQ ID NO: 11205 - DNA, 25 bp, SARS Virus
gtctactccttcatctcctgctacg

SEQ ID NO: 11206 - DNA, 25 bp, SARS Virus
tctactccttctactcctgctacgt

SEQ ID NO: 11207 - DNA, 25 bp, SARS Virus
ctactccttcttatcctgctacgtc

SEQ ID NO: 11208 - DNA, 25 bp, SARS Virus
tactccttcttcacctgctacgtct

SEQ ID NO: 11209 - DNA, 25 bp, SARS Virus
actccttcttctactgctacgtctc

SEQ ID NO: 11210 - DNA, 25 bp, SARS Virus
ctccttcttctcatgctacgtctca

SEQ ID NO: 11211 - DNA, 25 bp, SARS Virus
tccttcttctccagctacgtctcac

SEQ ID NO: 11212 - DNA, 25 bp, SARS Virus
ccttcttctcctactacgtctcaca

SEQ ID NO: 11213 - DNA, 25 bp, SARS Virus
cttcttctcctgatacgtctcacac

SEQ ID NO: 11214 - DNA, 25 bp, SARS Virus
ttcttctcctgcaacgtctcacact

SEQ ID NO: 11215 - DNA, 25 bp, SARS Virus
tcttctcctgctacgtctcacactc

SEQ ID NO: 11216 - DNA, 25 bp, SARS Virus
cttctcctgctaagtctcacactcc

SEQ ID NO: 11217 - DNA, 25 bp, SARS Virus
ttctcctgctacatctcacactcct

SEQ ID NO: 11218 - DNA, 25 bp, SARS Virus
tctcctgctacgactcacactcctt

SEQ ID NO: 11219 - DNA, 25 bp, SARS Virus
ctcctgctacgtatcacactccttc

SEQ ID NO: 11220 - DNA, 25 bp, SARS Virus
tcctgctacgtcacacactccttct

SEQ ID NO: 11221 - DNA, 25 bp, SARS Virus
cctgctacgtctaacactccttctt

SEQ ID NO: 11222 - DNA, 25 bp, SARS Virus
ctgctacgtctcacactccttcttc

SEQ ID NO: 11223 - DNA, 25 bp, SARS Virus
tgctacgtctcaaactccttcttct

SEQ ID NO: 11224 - DNA, 25 bp, SARS Virus
gctacgtctcacactccttcttctt

SEQ ID NO: 11225 - DNA, 25 bp, SARS Virus
ctacgtctcacaatccttcttcttt

SEQ ID NO: 11226 - DNA, 25 bp, SARS Virus
tacgtctcacacaccttcttcttta

SEQ ID NO: 11227 - DNA, 25 bp, SARS Virus
acgtctcacactacttcttctttaa

SEQ ID NO: 11228 - DNA, 25 bp, SARS Virus
cgtctcacactcattcttctttaac

SEQ ID NO: 11229 - DNA, 25 bp, SARS Virus
gtctcacactccatcttctttaact

SEQ ID NO: 11230 - DNA, 25 bp, SARS Virus
tctcacactcctacttctttaacta

SEQ ID NO: 11231 - DNA, 25 bp, SARS Virus
ctcacactccttattctttaactac

SEQ ID NO: 11232 - DNA, 25 bp, SARS Virus
tcacactccttcatctttaactact

SEQ ID NO: 11233 - DNA, 25 bp, SARS Virus
cacactccttctactttaactactt

SEQ ID NO: 11234 - DNA, 25 bp, SARS Virus
acactccttcttatttaactacttt

SEQ ID NO: 11235 - DNA, 25 bp, SARS Virus
cactccttcttcattaactactttg

SEQ ID NO: 11236 - DNA, 25 bp, SARS Virus
actccttcttctataactactttgg

SEQ ID NO: 11237 - DNA, 25 bp, SARS Virus
ctccttcttcttaaactactttgga

SEQ ID NO: 11238 - DNA, 25 bp, SARS Virus
tccttcttctttaactactttggac

SEQ ID NO: 11239 - DNA, 25 bp, SARS Virus
ccttcttctttaactactttggaca

SEQ ID NO: 11240 - DNA, 25 bp, SARS Virus
cttcttctttaaatactttggacac

SEQ ID NO: 11241 - DNA, 25 bp, SARS Virus
ttcttctttaacaactttggacact

SEQ ID NO: 11242 - DNA, 25 bp, SARS Virus
tcttctttaactactttggacactt

SEQ ID NO: 11243 - DNA, 25 bp, SARS Virus
cttctttaactaatttggacacttg

SEQ ID NO: 11244 - DNA, 25 bp, SARS Virus
ttctttaactacattggacacttgt

SEQ ID NO: 11245 - DNA, 25 bp, SARS Virus
tctttaactactatggacacttgta

SEQ ID NO: 11246 - DNA, 25 bp, SARS Virus
ctttaactacttaggacacttgtac

SEQ ID NO: 11247 - DNA, 25 bp, SARS Virus
tttaactactttagacacttgtact

SEQ ID NO: 11248 - DNA, 25 bp, SARS Virus
ttaactactttgaacacttgtactc

SEQ ID NO: 11249 - DNA, 25 bp, SARS Virus
taactactttggacacttgtactca

SEQ ID NO: 11250 - DNA, 25 bp, SARS Virus
aactactttggaaacttgtactcat

SEQ ID NO: 11251 - DNA, 25 bp, SARS Virus
actactttggacacttgtactcatg

SEQ ID NO: 11252 - DNA, 25 bp, SARS Virus
ctactttggacaattgtactcatgc

SEQ ID NO: 11253 - DNA, 25 bp, SARS Virus
tactttggacacatgtactcatgcc

SEQ ID NO: 11254 - DNA, 25 bp, SARS Virus
actttggacactagtactcatgcca

SEQ ID NO: 11255 - DNA, 25 bp, SARS Virus
ctttggacacttatactcatgccat

SEQ ID NO: 11256 - DNA, 25 bp, SARS Virus
tttggacacttgaactcatgccatg

SEQ ID NO: 11257 - DNA, 25 bp, SARS Virus
ttggacacttgtactcatgccatgt

SEQ ID NO: 11258 - DNA, 25 bp, SARS Virus
tggacacttgtaatcatgccatgtc

SEQ ID NO: 11259 - DNA, 25 bp, SARS Virus
ggacacttgtacacatgccatgtct

SEQ ID NO: 11260 - DNA, 25 bp, SARS Virus
gacacttgtactaatgccatgtctc

SEQ ID NO: 11261 - DNA, 25 bp, SARS Virus
acacttgtactcatgccatgtctcc

SEQ ID NO: 11262 - DNA, 25 bp, SARS Virus
cacttgtactcaagccatgtctcct

SEQ ID NO: 11263 - DNA, 25 bp, SARS Virus
acttgtactcataccatgtctccta

SEQ ID NO: 11264 - DNA, 25 bp, SARS Virus
cttgtactcatgacatgtctcctac

SEQ ID NO: 11265 - DNA, 25 bp, SARS Virus
ttgtactcatgcaatgtctcctact

SEQ ID NO: 11266 - DNA, 25 bp, SARS Virus
tgtactcatgccatgtctcctacta

SEQ ID NO: 11267 - DNA, 25 bp, SARS Virus
gtactcatgccaagtctcctactaa

SEQ ID NO: 11268 - DNA, 25 bp, SARS Virus
tactcatgccatatctcctactaat

SEQ ID NO: 11269 - DNA, 25 bp, SARS Virus
actcatgccatgactcctactaata

SEQ ID NO: 11270 - DNA, 25 bp, SARS Virus
ctcatgccatgtatcctactaatag

SEQ ID NO: 11271 - DNA, 25 bp, SARS Virus
tcatgccatgtcacctactaatagt

SEQ ID NO: 11272 - DNA, 25 bp, SARS Virus
catgccatgtctactactaatagtt

SEQ ID NO: 11273 - DNA, 25 bp, SARS Virus
atgccatgtctcatactaatagttc

SEQ ID NO: 11274 - DNA, 25 bp, SARS Virus
tgccatgtctccaactaatagttcc

SEQ ID NO: 11275 - DNA, 25 bp, SARS Virus
gccatgtctcctactaatagttcca

SEQ ID NO: 11276 - DNA, 25 bp, SARS Virus
ccatgtctcctaataatagttccag

SEQ ID NO: 11277 - DNA, 25 bp, SARS Virus
catgtctcctacaaatagttccaga

SEQ ID NO: 11278 - DNA, 25 bp, SARS Virus
atgtctcctactaatagttccagag

SEQ ID NO: 11279 - DNA, 25 bp, SARS Virus
tgtctcctactaatagttccagagg

SEQ ID NO: 11280 - DNA, 25 bp, SARS Virus
gtctcctactaaaagttccagaggg

SEQ ID NO: 11281 - DNA, 25 bp, SARS Virus
tctcctactaatagttccagaggga

SEQ ID NO: 11282 - DNA, 25 bp, SARS Virus
ctcctactaataattccagagggag

SEQ ID NO: 11283 - DNA, 25 bp, SARS Virus
tcctactaatagatccagagggaga

SEQ ID NO: 11284 - DNA, 25 bp, SARS Virus
cctactaatagtaccagagggagac

SEQ ID NO: 11285 - DNA, 25 bp, SARS Virus
ctactaatagttacagagggagacc

SEQ ID NO: 11286 - DNA, 25 bp, SARS Virus
tactaatagttcaagagggagacct

SEQ ID NO: 11287 - DNA, 25 bp, SARS Virus
actaatagttccagagggagacctt

SEQ ID NO: 11288 - DNA, 25 bp, SARS Virus
ctaatagttccaaagggagacctta

SEQ ID NO: 11289 - DNA, 25 bp, SARS Virus
taatagttccagagggagaccttaa

SEQ ID NO: 11290 - DNA, 25 bp, SARS Virus
aatagttccagaaggagaccttaaa

SEQ ID NO: 11291 - DNA, 25 bp, SARS Virus
atagttccagagagagaccttaaac

SEQ ID NO: 11292 - DNA, 25 bp, SARS Virus
tagttccagaggaagaccttaaacc

SEQ ID NO: 11293 - DNA, 25 bp, SARS Virus
agttccagagggagaccttaaacca

SEQ ID NO: 11294 - DNA, 25 bp, SARS Virus
gttccagagggaaaccttaaaccac

SEQ ID NO: 11295 - DNA, 25 bp, SARS Virus
ttccagagggagaccttaaaccacg

SEQ ID NO: 11296 - DNA, 25 bp, SARS Virus
tccagagggagaacttaaaccacgg

SEQ ID NO: 11297 - DNA, 25 bp, SARS Virus
ccagagggagacattaaaccacgga

SEQ ID NO: 11298 - DNA, 25 bp, SARS Virus
cagagggagaccataaaccacggag

SEQ ID NO: 11299 - DNA, 25 bp, SARS Virus
agagggagacctaaaaccacggagt

SEQ ID NO: 11300 - DNA, 25 bp, SARS Virus
gagggagaccttaaaccacggagtc

SEQ ID NO: 11301 - DNA, 25 bp, SARS Virus
agggagaccttaaaccacggagtcg

SEQ ID NO: 11302 - DNA, 25 bp, SARS Virus
gggagaccttaaaccacggagtcga

SEQ ID NO: 11303 - DNA, 25 bp, SARS Virus
ggagaccttaaaacacggagtcgac

SEQ ID NO: 11304 - DNA, 25 bp, SARS Virus
gagaccttaaacaacggagtcgact

SEQ ID NO: 11305 - DNA, 25 bp, SARS Virus
agaccttaaaccacggagtcgactt

SEQ ID NO: 11306 - DNA, 25 bp, SARS Virus
gaccttaaaccaaggagtcgacttt

SEQ ID NO: 11307 - DNA, 25 bp, SARS Virus
accttaaaccacagagtcgactttg

SEQ ID NO: 11308 - DNA, 25 bp, SARS Virus
ccttaaaccacgaagtcgactttgt

SEQ ID NO: 11309 - DNA, 25 bp, SARS Virus
cttaaaccacggagtcgactttgtc

SEQ ID NO: 11310 - DNA, 25 bp, SARS Virus
ttaaaccacggaatcgactttgtca

SEQ ID NO: 11311 - DNA, 25 bp, SARS Virus
taaaccacggagacgactttgtcaa

SEQ ID NO: 11312 - DNA, 25 bp, SARS Virus
aaaccacggagtagactttgtcaag

SEQ ID NO: 11313 - DNA, 25 bp, SARS Virus
aaccacggagtcaactttgtcaagc

SEQ ID NO: 11314 - DNA, 25 bp, SARS Virus
accacggagtcgactttgtcaagct

SEQ ID NO: 11315 - DNA, 25 bp, SARS Virus
ccacggagtcgaatttgtcaagctc

SEQ ID NO: 11316 - DNA, 25 bp, SARS Virus
cacggagtcgacattgtcaagctca

SEQ ID NO: 11317 - DNA, 25 bp, SARS Virus
acggagtcgactatgtcaagctcaa

SEQ ID NO: 11318 - DNA, 25 bp, SARS Virus
cggagtcgacttagtcaagctcaac

SEQ ID NO: 11319 - DNA, 25 bp, SARS Virus
ggagtcgactttatcaagctcaact

SEQ ID NO: 11320 - DNA, 25 bp, SARS Virus
gagtcgactttgacaagctcaactc

SEQ ID NO: 11321 - DNA, 25 bp, SARS Virus
agtcgactttgtaaagctcaactcc

SEQ ID NO: 11322 - DNA, 25 bp, SARS Virus
gtcgactttgtcaagctcaactcct

SEQ ID NO: 11323 - DNA, 25 bp, SARS Virus
tcgactttgtcaagctcaactcctt

SEQ ID NO: 11324 - DNA, 25 bp, SARS Virus
cgactttgtcaaactcaactccttc

SEQ ID NO: 11325 - DNA, 25 bp, SARS Virus
gactttgtcaagatcaactccttct

SEQ ID NO: 11326 - DNA, 25 bp, SARS Virus
actttgtcaagcacaactccttctt

SEQ ID NO: 11327 - DNA, 25 bp, SARS Virus
ctttgtcaagctaaactccttcttc

SEQ ID NO: 11328 - DNA, 25 bp, SARS Virus
tttgtcaagctcaactccttcttct

SEQ ID NO: 11329 - DNA, 25 bp, SARS Virus
ttgtcaagctcaactccttcttctt

SEQ ID NO: 11330 - DNA, 25 bp, SARS Virus
tgtcaagctcaaatccttcttcttc

SEQ ID NO: 11331 - DNA, 25 bp, SARS Virus
gtcaagctcaacaccttcttcttct

SEQ ID NO: 11332 - DNA, 25 bp, SARS Virus
tcaagctcaactacttcttcttctc

SEQ ID NO: 11333 - DNA, 25 bp, SARS Virus
caagctcaactcattcttcttctcc

SEQ ID NO: 11334 - DNA, 25 bp, SARS Virus
aagctcaactccatcttcttctcct

SEQ ID NO: 11335 - DNA, 25 bp, SARS Virus
agctcaactcctacttcttctcctt

SEQ ID NO: 11336 - DNA, 25 bp, SARS Virus
gctcaactccttattcttctccttc

SEQ ID NO: 11337 - DNA, 25 bp, SARS Virus
ctcaactccttcatcttctccttct

SEQ ID NO: 11338 - DNA, 25 bp, SARS Virus
tcaactccttctacttctccttctg

SEQ ID NO: 11339 - DNA, 25 bp, SARS Virus
caactccttcttattctccttctga

SEQ ID NO: 11340 - DNA, 25 bp, SARS Virus
aactccttcttcatctccttctgac

SEQ ID NO: 11341 - DNA, 25 bp, SARS Virus
actccttcttctactccttctgacc

SEQ ID NO: 11342 - DNA, 25 bp, SARS Virus
ctccttcttcttatccttctgaccg

SEQ ID NO: 11343 - DNA, 25 bp, SARS Virus
tccttcttcttcaccttctgaccga

SEQ ID NO: 11344 - DNA, 25 bp, SARS Virus
ccttcttcttctacttctgaccgac

SEQ ID NO: 11345 - DNA, 25 bp, SARS Virus
cttcttcttctcattctgaccgacc

SEQ ID NO: 11346 - DNA, 25 bp, SARS Virus
ttcttcttctccatctgaccgacct

SEQ ID NO: 11347 - DNA, 25 bp, SARS Virus
tcttcttctcctactgaccgaccta

SEQ ID NO: 11348 - DNA, 25 bp, SARS Virus
cttcttctccttatgaccgacctac

SEQ ID NO: 11349 - DNA, 25 bp, SARS Virus
ttcttctccttcagaccgacctact

SEQ ID NO: 11350 - DNA, 25 bp, SARS Virus
tcttctccttctaaccgacctacta

SEQ ID NO: 11351 - DNA, 25 bp, SARS Virus
cttctccttctgaccgacctactat

SEQ ID NO: 11352 - DNA, 25 bp, SARS Virus
ttctccttctgaacgacctactatg

SEQ ID NO: 11353 - DNA, 25 bp, SARS Virus
aattttcccccacgtggttaatttc

SEQ ID NO: 11354 - DNA, 25 bp, SARS Virus
attttcccccacctggttaatttcc

SEQ ID NO: 11355 - DNA, 25 bp, SARS Virus
ttttcccccacgcggttaatttcca

SEQ ID NO: 11356 - DNA, 25 bp, SARS Virus
tttcccccacgtcgttaatttccac

SEQ ID NO: 11357 - DNA, 25 bp, SARS Virus
ttcccccacgtgcttaatttccaca

SEQ ID NO: 11358 - DNA, 25 bp, SARS Virus
tcccccacgtggctaatttccacat

SEQ ID NO: 11359 - DNA, 25 bp, SARS Virus
cccccacgtggtcaatttccacatt

SEQ ID NO: 11360 - DNA, 25 bp, SARS Virus
ccccacgtggttcatttccacattg

SEQ ID NO: 11361 - DNA, 25 bp, SARS Virus
cccacgtggttactttccacattgg

SEQ ID NO: 11362 - DNA, 25 bp, SARS Virus
ccacgtggttaacttccacattgga

SEQ ID NO: 11363 - DNA, 25 bp, SARS Virus
cacgtggttaatctccacattggaa

SEQ ID NO: 11364 - DNA, 25 bp, SARS Virus
acgtggttaattcccacattggaaa

SEQ ID NO: 11365 - DNA, 25 bp, SARS Virus
cgtggttaatttccacattggaaac

SEQ ID NO: 11366 - DNA, 25 bp, SARS Virus
gtggttaatttccacattggaaacc

SEQ ID NO: 11367 - DNA, 25 bp, SARS Virus
tggttaatttccccattggaaacct

SEQ ID NO: 11368 - DNA, 25 bp, SARS Virus
ggttaatttccacattggaaacctc

SEQ ID NO: 11369 - DNA, 25 bp, SARS Virus
gttaatttccaccttggaaacctct

SEQ ID NO: 11370 - DNA, 25 bp, SARS Virus
ttaatttccacactggaaacctctt

SEQ ID NO: 11371 - DNA, 25 bp, SARS Virus
taatttccacatcggaaacctcttc

SEQ ID NO: 11372 - DNA, 25 bp, SARS Virus
aatttccacattcgaaacctcttct

SEQ ID NO: 11373 - DNA, 25 bp, SARS Virus
atttccacattgcaaacctcttcta

SEQ ID NO: 11374 - DNA, 25 bp, SARS Virus
tttccacattggcaacctcttctat

SEQ ID NO: 11375 - DNA, 25 bp, SARS Virus
ttccacattggacacctcttctatg

SEQ ID NO: 11376 - DNA, 25 bp, SARS Virus
tccacattggaaccctcttctatga

SEQ ID NO: 11377 - DNA, 25 bp, SARS Virus
ccacattggaaacctcttctatgac

SEQ ID NO: 11378 - DNA, 25 bp, SARS Virus
cacattggaaacctcttctatgaca

SEQ ID NO: 11379 - DNA, 25 bp, SARS Virus
acattggaaaccccttctatgacaa

SEQ ID NO: 11380 - DNA, 25 bp, SARS Virus
cattggaaacctcttctatgacaaa

SEQ ID NO: 11381 - DNA, 25 bp, SARS Virus
attggaaacctcctctatgacaaac

SEQ ID NO: 11382 - DNA, 25 bp, SARS Virus
ttggaaacctctcctatgacaaacc

SEQ ID NO: 11383 - DNA, 25 bp, SARS Virus
tggaaacctcttctatgacaaaccc

SEQ ID NO: 11384 - DNA, 25 bp, SARS Virus
ggaaacctcttccatgacaaaccct

SEQ ID NO: 11385 - DNA, 25 bp, SARS Virus
gaaacctcttctctgacaaaccctt

SEQ ID NO: 11386 - DNA, 25 bp, SARS Virus
aaacctcttctacgacaaacccttc

SEQ ID NO: 11387 - DNA, 25 bp, SARS Virus
aacctcttctatcacaaacccttca

SEQ ID NO: 11388 - DNA, 25 bp, SARS Virus
acctcttctatgccaaacccttcaa

SEQ ID NO: 11389 - DNA, 25 bp, SARS Virus
cctcttctatgacaaacccttcaag

SEQ ID NO: 11390 - DNA, 25 bp, SARS Virus
ctcttctatgaccaacccttcaagt

SEQ ID NO: 11391 - DNA, 25 bp, SARS Virus
tcttctatgacacacccttcaagtt

SEQ ID NO: 11392 - DNA, 25 bp, SARS Virus
cttctatgacaaccccttcaagttc

SEQ ID NO: 11393 - DNA, 25 bp, SARS Virus
ttctatgacaaacccttcaagttcc

SEQ ID NO: 11394 - DNA, 25 bp, SARS Virus
tctatgacaaacccttcaagttcca

SEQ ID NO: 11395 - DNA, 25 bp, SARS Virus
ctatgacaaacccttcaagttccaa

SEQ ID NO: 11396 - DNA, 25 bp, SARS Virus
tatgacaaacccctcaagttccaat

SEQ ID NO: 11397 - DNA, 25 bp, SARS Virus
atgacaaaccctccaagttccaatg

SEQ ID NO: 11398 - DNA, 25 bp, SARS Virus
tgacaaacccttcaagttccaatgt

SEQ ID NO: 11399 - DNA, 25 bp, SARS Virus
gacaaacccttccagttccaatgtt

SEQ ID NO: 11400 - DNA, 25 bp, SARS Virus
acaaacccttcacgttccaatgttc

SEQ ID NO: 11401 - DNA, 25 bp, SARS Virus
caaacccttcaacttccaatgttct

SEQ ID NO: 11402 - DNA, 25 bp, SARS Virus
aaacccttcaagctccaatgttctt

SEQ ID NO: 11403 - DNA, 25 bp, SARS Virus
aacccttcaagtcccaatgttctta

SEQ ID NO: 11404 - DNA, 25 bp, SARS Virus
acccttcaagttccaatgttcttac

SEQ ID NO: 11405 - DNA, 25 bp, SARS Virus
cccttcaagttccaatgttcttaca

SEQ ID NO: 11406 - DNA, 25 bp, SARS Virus
ccttcaagttcccatgttcttacac

SEQ ID NO: 11407 - DNA, 25 bp, SARS Virus
cttcaagttccactgttcttacact

SEQ ID NO: 11408 - DNA, 25 bp, SARS Virus
ttcaagttccaacgttcttacactc

SEQ ID NO: 11409 - DNA, 25 bp, SARS Virus
tcaagttccaatcttcttacactct

SEQ ID NO: 11410 - DNA, 25 bp, SARS Virus
caagttccaatgctcttacactctt

SEQ ID NO: 11411 - DNA, 25 bp, SARS Virus
aagttccaatgtccttacactctta

SEQ ID NO: 11412 - DNA, 25 bp, SARS Virus
agttccaatgttcttacactcttag

SEQ ID NO: 11413 - DNA, 25 bp, SARS Virus
gttccaatgttcctacactcttagt

SEQ ID NO: 11414 - DNA, 25 bp, SARS Virus
ttccaatgttctcacactcttagtg

SEQ ID NO: 11415 - DNA, 25 bp, SARS Virus
tccaatgttcttccactcttagtgt

SEQ ID NO: 11416 - DNA, 25 bp, SARS Virus
ccaatgttcttacactcttagtgta

SEQ ID NO: 11417 - DNA, 25 bp, SARS Virus
caatgttcttaccctcttagtgtaa

SEQ ID NO: 11418 - DNA, 25 bp, SARS Virus
aatgttcttacactcttagtgtaaa

SEQ ID NO: 11419 - DNA, 25 bp, SARS Virus
atgttcttacacccttagtgtaaac

SEQ ID NO: 11420 - DNA, 25 bp, SARS Virus
tgttcttacactcttagtgtaaact

SEQ ID NO: 11421 - DNA, 25 bp, SARS Virus
gttcttacactcctagtgtaaactc

SEQ ID NO: 11422 - DNA, 25 bp, SARS Virus
ttcttacactctcagtgtaaactcg

SEQ ID NO: 11423 - DNA, 25 bp, SARS Virus
tcttacactcttcgtgtaaactcga

SEQ ID NO: 11424 - DNA, 25 bp, SARS Virus
cttacactcttactgtaaactcgaa

SEQ ID NO: 11425 - DNA, 25 bp, SARS Virus
ttacactcttagcgtaaactcgaac

SEQ ID NO: 11426 - DNA, 25 bp, SARS Virus
tacactcttagtctaaactcgaact

SEQ ID NO: 11427 - DNA, 25 bp, SARS Virus
acactcttagtgcaaactcgaacta

SEQ ID NO: 11428 - DNA, 25 bp, SARS Virus
cactcttagtgtcaactcgaactac

SEQ ID NO: 11429 - DNA, 25 bp, SARS Virus
actcttagtgtacactcgaactact

SEQ ID NO: 11430 - DNA, 25 bp, SARS Virus
ctcttagtgtaacctcgaactactt

SEQ ID NO: 11431 - DNA, 25 bp, SARS Virus
tcttagtgtaaactcgaactacttg

SEQ ID NO: 11432 - DNA, 25 bp, SARS Virus
cttagtgtaaacccgaactacttgc

SEQ ID NO: 11433 - DNA, 25 bp, SARS Virus
ttagtgtaaactcgaactacttgca

SEQ ID NO: 11434 - DNA, 25 bp, SARS Virus
tagtgtaaactccaactacttgcac

SEQ ID NO: 11435 - DNA, 25 bp, SARS Virus
agtgtaaactcgcactacttgcaca

SEQ ID NO: 11436 - DNA, 25 bp, SARS Virus
gtgtaaactcgacctacttgcacaa

SEQ ID NO: 11437 - DNA, 25 bp, SARS Virus
tgtaaactcgaactacttgcacaac

SEQ ID NO: 11438 - DNA, 25 bp, SARS Virus
gtaaactcgaaccacttgcacaact

SEQ ID NO: 11439 - DNA, 25 bp, SARS Virus
taaactcgaactccttgcacaactg

SEQ ID NO: 11440 - DNA, 25 bp, SARS Virus
aaactcgaactacttgcacaactgt

SEQ ID NO: 11441 - DNA, 25 bp, SARS Virus
aactcgaactacctgcacaactgtt

SEQ ID NO: 11442 - DNA, 25 bp, SARS Virus
actcgaactactcgcacaactgttt

SEQ ID NO: 11443 - DNA, 25 bp, SARS Virus
ctcgaactacttccacaactgtttc

SEQ ID NO: 11444 - DNA, 25 bp, SARS Virus
tcgaactacttgcacaactgtttca

SEQ ID NO: 11445 - DNA, 25 bp, SARS Virus
cgaactacttgcccaactgtttcac

SEQ ID NO: 11446 - DNA, 25 bp, SARS Virus
gaactacttgcacaactgtttcacg

SEQ ID NO: 11447 - DNA, 25 bp, SARS Virus
aactacttgcaccactgtttcacga

SEQ ID NO: 11448 - DNA, 25 bp, SARS Virus
actacttgcacacctgtttcacgaa

SEQ ID NO: 11449 - DNA, 25 bp, SARS Virus
ctacttgcacaactgtttcacgaat

SEQ ID NO: 11450 - DNA, 25 bp, SARS Virus
tacttgcacaaccgtttcacgaatt

SEQ ID NO: 11451 - DNA, 25 bp, SARS Virus
acttgcacaactctttcacgaatta

SEQ ID NO: 11452 - DNA, 25 bp, SARS Virus
cttgcacaactgcttcacgaattac

SEQ ID NO: 11453 - DNA, 25 bp, SARS Virus
ttgcacaactgtctcacgaattact

SEQ ID NO: 11454 - DNA, 25 bp, SARS Virus
tgcacaactgttccacgaattactt

SEQ ID NO: 11455 - DNA, 25 bp, SARS Virus
gcacaactgtttcacgaattacttt

SEQ ID NO: 11456 - DNA, 25 bp, SARS Virus
cacaactgtttcccgaattactttt

SEQ ID NO: 11457 - DNA, 25 bp, SARS Virus
acaactgtttcacgaattacttttc

SEQ ID NO: 11458 - DNA, 25 bp, SARS Virus
caactgtttcaccaattacttttca

SEQ ID NO: 11459 - DNA, 25 bp, SARS Virus
aactgtttcacgcattacttttcac

SEQ ID NO: 11460 - DNA, 25 bp, SARS Virus
actgtttcacgacttacttttcacg

SEQ ID NO: 11461 - DNA, 25 bp, SARS Virus
ctgtttcacgaactacttttcacga

SEQ ID NO: 11462 - DNA, 25 bp, SARS Virus
tgtttcacgaatcacttttcacgag

SEQ ID NO: 11463 - DNA, 25 bp, SARS Virus
gtttcacgaattccttttcacgaga

SEQ ID NO: 11464 - DNA, 25 bp, SARS Virus
tttcacgaattacttttcacgagac

SEQ ID NO: 11465 - DNA, 25 bp, SARS Virus
ttcacgaattacctttcacgagaca

SEQ ID NO: 11466 - DNA, 25 bp, SARS Virus
tcacgaattactcttcacgagacag

SEQ ID NO: 11467 - DNA, 25 bp, SARS Virus
cacgaattacttctcacgagacaga

SEQ ID NO: 11468 - DNA, 25 bp, SARS Virus
acgaattactttccacgagacagat

SEQ ID NO: 11469 - DNA, 25 bp, SARS Virus
cgaattacttttcacgagacagatg

SEQ ID NO: 11470 - DNA, 25 bp, SARS Virus
gaattacttttcccgagacagatgt

SEQ ID NO: 11471 - DNA, 25 bp, SARS Virus
aattacttttcacgagacagatgtg

SEQ ID NO: 11472 - DNA, 25 bp, SARS Virus
attacttttcaccagacagatgtga

SEQ ID NO: 11473 - DNA, 25 bp, SARS Virus
ttacttttcacgcgacagatgtgac

SEQ ID NO: 11474 - DNA, 25 bp, SARS Virus
tacttttcacgacacagatgtgaca

SEQ ID NO: 11475 - DNA, 25 bp, SARS Virus
acttttcacgagccagatgtgacaa

SEQ ID NO: 11476 - DNA, 25 bp, SARS Virus
cttttcacgagacagatgtgacaac

SEQ ID NO: 11477 - DNA, 25 bp, SARS Virus
ttttcacgagaccgatgtgacaact

SEQ ID NO: 11478 - DNA, 25 bp, SARS Virus
tttcacgagacacatgtgacaactt

SEQ ID NO: 11479 - DNA, 25 bp, SARS Virus
ttcacgagacagctgtgacaactta

SEQ ID NO: 11480 - DNA, 25 bp, SARS Virus
tcacgagacagacgtgacaacttag

SEQ ID NO: 11481 - DNA, 25 bp, SARS Virus
cacgagacagatctgacaacttagg

SEQ ID NO: 11482 - DNA, 25 bp, SARS Virus
acgagacagatgcgacaacttaggc

SEQ ID NO: 11483 - DNA, 25 bp, SARS Virus
cgagacagatgtcacaacttaggcc

SEQ ID NO: 11484 - DNA, 25 bp, SARS Virus
gagacagatgtgccaacttaggcca

SEQ ID NO: 11485 - DNA, 25 bp, SARS Virus
agacagatgtgacaacttaggccat

SEQ ID NO: 11486 - DNA, 25 bp, SARS Virus
gacagatgtgaccacttaggccatg

SEQ ID NO: 11487 - DNA, 25 bp, SARS Virus
acagatgtgacaccttaggccatgg

SEQ ID NO: 11488 - DNA, 25 bp, SARS Virus
cagatgtgacaacttaggccatggc

SEQ ID NO: 11489 - DNA, 25 bp, SARS Virus
agatgtgacaacctaggccatggct

SEQ ID NO: 11490 - DNA, 25 bp, SARS Virus
gatgtgacaactcaggccatggctt

SEQ ID NO: 11491 - DNA, 25 bp, SARS Virus
atgtgacaacttcggccatggcttc

SEQ ID NO: 11492 - DNA, 25 bp, SARS Virus
tgtgacaacttacgccatggcttca

SEQ ID NO: 11493 - DNA, 25 bp, SARS Virus
gtgacaacttagcccatggcttcaa

SEQ ID NO: 11494 - DNA, 25 bp, SARS Virus
tgacaacttaggccatggcttcaat

SEQ ID NO: 11495 - DNA, 25 bp, SARS Virus
gacaacttaggccatggcttcaatg

SEQ ID NO: 11496 - DNA, 25 bp, SARS Virus
acaacttaggccctggcttcaatga

SEQ ID NO: 11497 - DNA, 25 bp, SARS Virus
caacttaggccacggcttcaatgac

SEQ ID NO: 11498 - DNA, 25 bp, SARS Virus
aacttaggccatcgcttcaatgact

SEQ ID NO: 11499 - DNA, 25 bp, SARS Virus
acttaggccatgccttcaatgactc

SEQ ID NO: 11500 - DNA, 25 bp, SARS Virus
cttaggccatggcttcaatgactca

SEQ ID NO: 11501 - DNA, 25 bp, SARS Virus
ttaggccatggcctcaatgactcaa

SEQ ID NO: 11502 - DNA, 25 bp, SARS Virus
taggccatggctccaatgactcaaa

SEQ ID NO: 11503 - DNA, 25 bp, SARS Virus
aggccatggcttcaatgactcaaac

SEQ ID NO: 11504 - DNA, 25 bp, SARS Virus
ggccatggcttccatgactcaaacg

SEQ ID NO: 11505 - DNA, 25 bp, SARS Virus
gccatggcttcactgactcaaacgt

SEQ ID NO: 11506 - DNA, 25 bp, SARS Virus
ccatggcttcaacgactcaaacgta

SEQ ID NO: 11507 - DNA, 25 bp, SARS Virus
catggcttcaatcactcaaacgtac

SEQ ID NO: 11508 - DNA, 25 bp, SARS Virus
atggcttcaatgcctcaaacgtaca

SEQ ID NO: 11509 - DNA, 25 bp, SARS Virus
tggcttcaatgactcaaacgtacac

SEQ ID NO: 11510 - DNA, 25 bp, SARS Virus
ggcttcaatgacccaaacgtacaca

SEQ ID NO: 11511 - DNA, 25 bp, SARS Virus
gcttcaatgactcaaacgtacacaa

SEQ ID NO: 11512 - DNA, 25 bp, SARS Virus
cttcaatgactccaacgtacacaac

SEQ ID NO: 11513 - DNA, 25 bp, SARS Virus
ttcaatgactcacacgtacacaaca

SEQ ID NO: 11514 - DNA, 25 bp, SARS Virus
tcaatgactcaaccgtacacaacat

SEQ ID NO: 11515 - DNA, 25 bp, SARS Virus
caatgactcaaacgtacacaacatc

SEQ ID NO: 11516 - DNA, 25 bp, SARS Virus
aatgactcaaacctacacaacatcg

SEQ ID NO: 11517 - DNA, 25 bp, SARS Virus
atgactcaaacgcacacaacatcgt

SEQ ID NO: 11518 - DNA, 25 bp, SARS Virus
tgactcaaacgtccacaacatcgtc

SEQ ID NO: 11519 - DNA, 25 bp, SARS Virus
gactcaaacgtacacaacatcgtct

SEQ ID NO: 11520 - DNA, 25 bp, SARS Virus
actcaaacgtacccaacatcgtctc

SEQ ID NO: 11521 - DNA, 25 bp, SARS Virus
ctcaaacgtacacaacatcgtctcc

SEQ ID NO: 11522 - DNA, 25 bp, SARS Virus
tcaaacgtacaccacatcgtctccg

SEQ ID NO: 11523 - DNA, 25 bp, SARS Virus
caaacgtacacaccatcgtctccga

SEQ ID NO: 11524 - DNA, 25 bp, SARS Virus
aaacgtacacaacatcgtctccgac

SEQ ID NO: 11525 - DNA, 25 bp, SARS Virus
aacgtacacaacctcgtctccgaca

SEQ ID NO: 11526 - DNA, 25 bp, SARS Virus
acgtacacaacaccgtctccgacaa

SEQ ID NO: 11527 - DNA, 25 bp, SARS Virus
cgtacacaacatcgtctccgacaac

SEQ ID NO: 11528 - DNA, 25 bp, SARS Virus
gtacacaacatcctctccgacaaca

SEQ ID NO: 11529 - DNA, 25 bp, SARS Virus
tacacaacatcgcctccgacaacac

SEQ ID NO: 11530 - DNA, 25 bp, SARS Virus
acacaacatcgtctccgacaacact

SEQ ID NO: 11531 - DNA, 25 bp, SARS Virus
cacaacatcgtccccgacaacactt

SEQ ID NO: 11532 - DNA, 25 bp, SARS Virus
acaacatcgtctccgacaacacttc

SEQ ID NO: 11533 - DNA, 25 bp, SARS Virus
caacatcgtctccgacaacacttct

SEQ ID NO: 11534 - DNA, 25 bp, SARS Virus
aacatcgtctcccacaacacttctg

SEQ ID NO: 11535 - DNA, 25 bp, SARS Virus
acatcgtctccgccaacacttctga

SEQ ID NO: 11536 - DNA, 25 bp, SARS Virus
catcgtctccgacaacacttctgaa

SEQ ID NO: 11537 - DNA, 25 bp, SARS Virus
atcgtctccgaccacacttctgaaa

SEQ ID NO: 11538 - DNA, 25 bp, SARS Virus
tcgtctccgacaccacttctgaaat

SEQ ID NO: 11539 - DNA, 25 bp, SARS Virus
cgtctccgacaacacttctgaaatg

SEQ ID NO: 11540 - DNA, 25 bp, SARS Virus
gtctccgacaacccttctgaaatgt

SEQ ID NO: 11541 - DNA, 25 bp, SARS Virus
tctccgacaacacttctgaaatgtt

SEQ ID NO: 11542 - DNA, 25 bp, SARS Virus
ctccgacaacacctctgaaatgttg

SEQ ID NO: 11543 - DNA, 25 bp, SARS Virus
tccgacaacactcctgaaatgttgg

SEQ ID NO: 11544 - DNA, 25 bp, SARS Virus
ccgacaacacttctgaaatgttggt

SEQ ID NO: 11545 - DNA, 25 bp, SARS Virus
cgacaacacttccgaaatgttggtc

SEQ ID NO: 11546 - DNA, 25 bp, SARS Virus
gacaacacttctcaaatgttggtca

SEQ ID NO: 11547 - DNA, 25 bp, SARS Virus
acaacacttctgcaatgttggtcaa

SEQ ID NO: 11548 - DNA, 25 bp, SARS Virus
caacacttctgacatgttggtcaaa

SEQ ID NO: 11549 - DNA, 25 bp, SARS Virus
aacacttctgaactgttggtcaaag

SEQ ID NO: 11550 - DNA, 25 bp, SARS Virus
acacttctgaaacgttggtcaaaga

SEQ ID NO: 11551 - DNA, 25 bp, SARS Virus
cacttctgaaatcttggtcaaagac

SEQ ID NO: 11552 - DNA, 25 bp, SARS Virus
acttctgaaatgctggtcaaagact

SEQ ID NO: 11553 - DNA, 25 bp, SARS Virus
cttctgaaatgtcggtcaaagacta

SEQ ID NO: 11554 - DNA, 25 bp, SARS Virus
ttctgaaatgttcgtcaaagactag

SEQ ID NO: 11555 - DNA, 25 bp, SARS Virus
tctgaaatgttgctcaaagactaga

SEQ ID NO: 11556 - DNA, 25 bp, SARS Virus
ctgaaatgttggccaaagactagag

SEQ ID NO: 11557 - DNA, 25 bp, SARS Virus
tgaaatgttggtcaaagactagagg

SEQ ID NO: 11558 - DNA, 25 bp, SARS Virus
gaaatgttggtccaagactagagga

SEQ ID NO: 11559 - DNA, 25 bp, SARS Virus
aaatgttggtcacagactagaggaa

SEQ ID NO: 11560 - DNA, 25 bp, SARS Virus
aatgttggtcaacgactagaggaat

SEQ ID NO: 11561 - DNA, 25 bp, SARS Virus
atgttggtcaaacactagaggaatg

SEQ ID NO: 11562 - DNA, 25 bp, SARS Virus
tgttggtcaaagcctagaggaatgg

SEQ ID NO: 11563 - DNA, 25 bp, SARS Virus
gttggtcaaagactagaggaatggt

SEQ ID NO: 11564 - DNA, 25 bp, SARS Virus
ttggtcaaagaccagaggaatggtt

SEQ ID NO: 11565 - DNA, 25 bp, SARS Virus
tggtcaaagactcgaggaatggttg

SEQ ID NO: 11566 - DNA, 25 bp, SARS Virus
ggtcaaagactacaggaatggttgt

SEQ ID NO: 11567 - DNA, 25 bp, SARS Virus
gtcaaagactagcggaatggttgta

SEQ ID NO: 11568 - DNA, 25 bp, SARS Virus
tcaaagactagacgaatggttgtac

SEQ ID NO: 11569 - DNA, 25 bp, SARS Virus
caaagactagagcaatggttgtacc

SEQ ID NO: 11570 - DNA, 25 bp, SARS Virus
aaagactagaggcatggttgtaccc

SEQ ID NO: 11571 - DNA, 25 bp, SARS Virus
aagactagaggactggttgtaccca

SEQ ID NO: 11572 - DNA, 25 bp, SARS Virus
agactagaggaacggttgtacccat

SEQ ID NO: 11573 - DNA, 25 bp, SARS Virus
gactagaggaatcgttgtacccata

SEQ ID NO: 11574 - DNA, 25 bp, SARS Virus
actagaggaatgcttgtacccataa

SEQ ID NO: 11575 - DNA, 25 bp, SARS Virus
ctagaggaatggctgtacccataac

SEQ ID NO: 11576 - DNA, 25 bp, SARS Virus
tagaggaatggtcgtacccataact

SEQ ID NO: 11577 - DNA, 25 bp, SARS Virus
agaggaatggttctacccataacta

SEQ ID NO: 11578 - DNA, 25 bp, SARS Virus
gaggaatggttgcacccataactag

SEQ ID NO: 11579 - DNA, 25 bp, SARS Virus
aggaatggttgtccccataactaga

SEQ ID NO: 11580 - DNA, 25 bp, SARS Virus
ggaatggttgtacccataactagaa

SEQ ID NO: 11581 - DNA, 25 bp, SARS Virus
gaatggttgtacccataactagaac

SEQ ID NO: 11582 - DNA, 25 bp, SARS Virus
aatggttgtacccataactagaact

SEQ ID NO: 11583 - DNA, 25 bp, SARS Virus
atggttgtacccctaactagaacta

SEQ ID NO: 11584 - DNA, 25 bp, SARS Virus
tggttgtacccacaactagaactac

SEQ ID NO: 11585 - DNA, 25 bp, SARS Virus
ggttgtacccatcactagaactact

SEQ ID NO: 11586 - DNA, 25 bp, SARS Virus
gttgtacccatacctagaactactc

SEQ ID NO: 11587 - DNA, 25 bp, SARS Virus
ttgtacccataactagaactactca

SEQ ID NO: 11588 - DNA, 25 bp, SARS Virus
tgtacccataaccagaactactcac

SEQ ID NO: 11589 - DNA, 25 bp, SARS Virus
gtacccataactcgaactactcacc

SEQ ID NO: 11590 - DNA, 25 bp, SARS Virus
tacccataactacaactactcacct

SEQ ID NO: 11591 - DNA, 25 bp, SARS Virus
acccataactagcactactcacctc

SEQ ID NO: 11592 - DNA, 25 bp, SARS Virus
cccataactagacctactcacctca

SEQ ID NO: 11593 - DNA, 25 bp, SARS Virus
ccataactagaactactcacctcac

SEQ ID NO: 11594 - DNA, 25 bp, SARS Virus
cataactagaaccactcacctcaca

SEQ ID NO: 11595 - DNA, 25 bp, SARS Virus
ataactagaactcctcacctcacat

SEQ ID NO: 11596 - DNA, 25 bp, SARS Virus
taactagaactactcacctcacatc

SEQ ID NO: 11597 - DNA, 25 bp, SARS Virus
aactagaactacccacctcacatcg

SEQ ID NO: 11598 - DNA, 25 bp, SARS Virus
actagaactactcacctcacatcga

SEQ ID NO: 11599 - DNA, 25 bp, SARS Virus
ctagaactactcccctcacatcgat

SEQ ID NO: 11600 - DNA, 25 bp, SARS Virus
tagaactactcacctcacatcgatg

SEQ ID NO: 11601 - DNA, 25 bp, SARS Virus
agaactactcacctcacatcgatgt

SEQ ID NO: 11602 - DNA, 25 bp, SARS Virus
gaactactcaccccacatcgatgta

SEQ ID NO: 11603 - DNA, 25 bp, SARS Virus
aactactcacctcacatcgatgtaa

SEQ ID NO: 11604 - DNA, 25 bp, SARS Virus
actactcacctcccatcgatgtaag

SEQ ID NO: 11605 - DNA, 25 bp, SARS Virus
ctactcacctcacatcgatgtaaga

SEQ ID NO: 11606 - DNA, 25 bp, SARS Virus
tactcacctcacctcgatgtaagat

SEQ ID NO: 11607 - DNA, 25 bp, SARS Virus
actcacctcacaccgatgtaagatg

SEQ ID NO: 11608 - DNA, 25 bp, SARS Virus
ctcacctcacatcgatgtaagatga

SEQ ID NO: 11609 - DNA, 25 bp, SARS Virus
tcacctcacatccatgtaagatgaa

SEQ ID NO: 11610 - DNA, 25 bp, SARS Virus
cacctcacatcgctgtaagatgaat

SEQ ID NO: 11611 - DNA, 25 bp, SARS Virus
acctcacatcgacgtaagatgaata

SEQ ID NO: 11612 - DNA, 25 bp, SARS Virus
cctcacatcgatctaagatgaataa

SEQ ID NO: 11613 - DNA, 25 bp, SARS Virus
ctcacatcgatgcaagatgaataaa

SEQ ID NO: 11614 - DNA, 25 bp, SARS Virus
tcacatcgatgtcagatgaataaac

SEQ ID NO: 11615 - DNA, 25 bp, SARS Virus
cacatcgatgtacgatgaataaact

SEQ ID NO: 11616 - DNA, 25 bp, SARS Virus
acatcgatgtaacatgaataaacta

SEQ ID NO: 11617 - DNA, 25 bp, SARS Virus
catcgatgtaagctgaataaactac

SEQ ID NO: 11618 - DNA, 25 bp, SARS Virus
atcgatgtaagacgaataaactact

SEQ ID NO: 11619 - DNA, 25 bp, SARS Virus
tcgatgtaagatcaataaactacta

SEQ ID NO: 11620 - DNA, 25 bp, SARS Virus
cgatgtaagatgcataaactactac

SEQ ID NO: 11621 - DNA, 25 bp, SARS Virus
gatgtaagatgactaaactactacg

SEQ ID NO: 11622 - DNA, 25 bp, SARS Virus
atgtaagatgaacaaactactacga

SEQ ID NO: 11623 - DNA, 25 bp, SARS Virus
tgtaagatgaatcaactactacgac

SEQ ID NO: 11624 - DNA, 25 bp, SARS Virus
gtaagatgaatacactactacgacc

SEQ ID NO: 11625 - DNA, 25 bp, SARS Virus
taagatgaataacctactacgacca

SEQ ID NO: 11626 - DNA, 25 bp, SARS Virus
aagatgaataaactactacgaccac

SEQ ID NO: 11627 - DNA, 25 bp, SARS Virus
agatgaataaaccactacgaccact

SEQ ID NO: 11628 - DNA, 25 bp, SARS Virus
gatgaataaactcctacgaccactt

SEQ ID NO: 11629 - DNA, 25 bp, SARS Virus
atgaataaactactacgaccacttc

SEQ ID NO: 11630 - DNA, 25 bp, SARS Virus
tgaataaactaccacgaccacttct

SEQ ID NO: 11631 - DNA, 25 bp, SARS Virus
gaataaactactccgaccacttctt

SEQ ID NO: 11632 - DNA, 25 bp, SARS Virus
aataaactactacgaccacttcttt

SEQ ID NO: 11633 - DNA, 25 bp, SARS Virus
ataaactactaccaccacttctttt

SEQ ID NO: 11634 - DNA, 25 bp, SARS Virus
taaactactacgcccacttcttttg

SEQ ID NO: 11635 - DNA, 25 bp, SARS Virus
aaactactacgaccacttcttttga

SEQ ID NO: 11636 - DNA, 25 bp, SARS Virus
aactactacgaccacttcttttgaa

SEQ ID NO: 11637 - DNA, 25 bp, SARS Virus
actactacgaccccttcttttgaaa

SEQ ID NO: 11638 - DNA, 25 bp, SARS Virus
ctactacgaccacttcttttgaaaa

SEQ ID NO: 11639 - DNA, 25 bp, SARS Virus
tactacgaccacctcttttgaaaag

SEQ ID NO: 11640 - DNA, 25 bp, SARS Virus
actacgaccactccttttgaaaagt

SEQ ID NO: 11641 - DNA, 25 bp, SARS Virus
ctacgaccacttcttttgaaaagta

SEQ ID NO: 11642 - DNA, 25 bp, SARS Virus
tacgaccacttcctttgaaaagtag

SEQ ID NO: 11643 - DNA, 25 bp, SARS Virus
acgaccacttctcttgaaaagtagt

SEQ ID NO: 11644 - DNA, 25 bp, SARS Virus
cgaccacttcttctgaaaagtagtg

SEQ ID NO: 11645 - DNA, 25 bp, SARS Virus
gaccacttctttcgaaaagtagtgc

SEQ ID NO: 11646 - DNA, 25 bp, SARS Virus
accacttcttttcaaaagtagtgca

SEQ ID NO: 11647 - DNA, 25 bp, SARS Virus
ccacttcttttgcaaagtagtgcat

SEQ ID NO: 11648 - DNA, 25 bp, SARS Virus
cacttcttttgacaagtagtgcata

SEQ ID NO: 11649 - DNA, 25 bp, SARS Virus
acttcttttgaacagtagtgcatac

SEQ ID NO: 11650 - DNA, 25 bp, SARS Virus
cttcttttgaaacgtagtgcataca

SEQ ID NO: 11651 - DNA, 25 bp, SARS Virus
ttcttttgaaaactagtgcatacat

SEQ ID NO: 11652 - DNA, 25 bp, SARS Virus
tcttttgaaaagcagtgcatacata

SEQ ID NO: 11653 - DNA, 25 bp, SARS Virus
cttttgaaaagtcgtgcatacataa

SEQ ID NO: 11654 - DNA, 25 bp, SARS Virus
ttttgaaaagtactgcatacataac

SEQ ID NO: 11655 - DNA, 25 bp, SARS Virus
tttgaaaagtagcgcatacataaca

SEQ ID NO: 11656 - DNA, 25 bp, SARS Virus
ttgaaaagtagtccatacataacaa

SEQ ID NO: 11657 - DNA, 25 bp, SARS Virus
tgaaaagtagtgcatacataacaag

SEQ ID NO: 11658 - DNA, 25 bp, SARS Virus
gaaaagtagtgcctacataacaagg

SEQ ID NO: 11659 - DNA, 25 bp, SARS Virus
aaaagtagtgcacacataacaagga

SEQ ID NO: 11660 - DNA, 25 bp, SARS Virus
aaagtagtgcatccataacaaggaa

SEQ ID NO: 11661 - DNA, 25 bp, SARS Virus
aagtagtgcatacataacaaggaaa

SEQ ID NO: 11662 - DNA, 25 bp, SARS Virus
agtagtgcatacctaacaaggaaaa

SEQ ID NO: 11663 - DNA, 25 bp, SARS Virus
gtagtgcatacacaacaaggaaaat

SEQ ID NO: 11664 - DNA, 25 bp, SARS Virus
tagtgcatacatcacaaggaaaatg

SEQ ID NO: 11665 - DNA, 25 bp, SARS Virus
agtgcatacataccaaggaaaatgg

SEQ ID NO: 11666 - DNA, 25 bp, SARS Virus
gtgcatacataacaaggaaaatggg

SEQ ID NO: 11667 - DNA, 25 bp, SARS Virus
tgcatacataaccaggaaaatggga

SEQ ID NO: 11668 - DNA, 25 bp, SARS Virus
gcatacataacacggaaaatgggag

SEQ ID NO: 11669 - DNA, 25 bp, SARS Virus
catacataacaacgaaaatgggagg

SEQ ID NO: 11670 - DNA, 25 bp, SARS Virus
atacataacaagcaaaatgggaggt

SEQ ID NO: 11671 - DNA, 25 bp, SARS Virus
tacataacaaggcaaatgggaggtc

SEQ ID NO: 11672 - DNA, 25 bp, SARS Virus
acataacaaggacaatgggaggtct

SEQ ID NO: 11673 - DNA, 25 bp, SARS Virus
cataacaaggaacatgggaggtcta

SEQ ID NO: 11674 - DNA, 25 bp, SARS Virus
ataacaaggaaactgggaggtctac

SEQ ID NO: 11675 - DNA, 25 bp, SARS Virus
taacaaggaaaacgggaggtctact

SEQ ID NO: 11676 - DNA, 25 bp, SARS Virus
aacaaggaaaatcggaggtctactc

SEQ ID NO: 11677 - DNA, 25 bp, SARS Virus
acaaggaaaatgcgaggtctactcc

SEQ ID NO: 11678 - DNA, 25 bp, SARS Virus
caaggaaaatggcaggtctactcct

SEQ ID NO: 11679 - DNA, 25 bp, SARS Virus
aaggaaaatgggcggtctactcctt

SEQ ID NO: 11680 - DNA, 25 bp, SARS Virus
aggaaaatgggacgtctactccttc

SEQ ID NO: 11681 - DNA, 25 bp, SARS Virus
ggaaaatgggagctctactccttct

SEQ ID NO: 11682 - DNA, 25 bp, SARS Virus
gaaaatgggaggcctactccttctt

SEQ ID NO: 11683 - DNA, 25 bp, SARS Virus
aaaatgggaggtctactccttcttc

SEQ ID NO: 11684 - DNA, 25 bp, SARS Virus
aaatgggaggtccactccttcttct

SEQ ID NO: 11685 - DNA, 25 bp, SARS Virus
aatgggaggtctcctccttcttctc

SEQ ID NO: 11686 - DNA, 25 bp, SARS Virus
atgggaggtctactccttcttctcc

SEQ ID NO: 11687 - DNA, 25 bp, SARS Virus
tgggaggtctaccccttcttctcct

SEQ ID NO: 11688 - DNA, 25 bp, SARS Virus
gggaggtctactccttcttctcctg

SEQ ID NO: 11689 - DNA, 25 bp, SARS Virus
ggaggtctactccttcttctcctgc

SEQ ID NO: 11690 - DNA, 25 bp, SARS Virus
gaggtctactccctcttctcctgct

SEQ ID NO: 11691 - DNA, 25 bp, SARS Virus
aggtctactcctccttctcctgcta

SEQ ID NO: 11692 - DNA, 25 bp, SARS Virus
ggtctactccttcttctcctgctac

SEQ ID NO: 11693 - DNA, 25 bp, SARS Virus
gtctactccttcctctcctgctacg

SEQ ID NO: 11694 - DNA, 25 bp, SARS Virus
tctactccttctcctcctgctacgt

SEQ ID NO: 11695 - DNA, 25 bp, SARS Virus
ctactccttcttctcctgctacgtc

SEQ ID NO: 11696 - DNA, 25 bp, SARS Virus
tactccttcttcccctgctacgtct

SEQ ID NO: 11697 - DNA, 25 bp, SARS Virus
actccttcttctcctgctacgtctc

SEQ ID NO: 11698 - DNA, 25 bp, SARS Virus
ctccttcttctcctgctacgtctca

SEQ ID NO: 11699 - DNA, 25 bp, SARS Virus
tccttcttctcccgctacgtctcac

SEQ ID NO: 11700 - DNA, 25 bp, SARS Virus
ccttcttctcctcctacgtctcaca

SEQ ID NO: 11701 - DNA, 25 bp, SARS Virus
cttcttctcctgctacgtctcacac

SEQ ID NO: 11702 - DNA, 25 bp, SARS Virus
ttcttctcctgccacgtctcacact

SEQ ID NO: 11703 - DNA, 25 bp, SARS Virus
tcttctcctgctccgtctcacactc

SEQ ID NO: 11704 - DNA, 25 bp, SARS Virus
cttctcctgctacgtctcacactcc

SEQ ID NO: 11705 - DNA, 25 bp, SARS Virus
ttctcctgctacctctcacactcct

SEQ ID NO: 11706 - DNA, 25 bp, SARS Virus
tctcctgctacgcctcacactcctt

SEQ ID NO: 11707 - DNA, 25 bp, SARS Virus
ctcctgctacgtctcacactccttc

SEQ ID NO: 11708 - DNA, 25 bp, SARS Virus
tcctgctacgtcccacactccttct

SEQ ID NO: 11709 - DNA, 25 bp, SARS Virus
cctgctacgtctcacactccttctt

SEQ ID NO: 11710 - DNA, 25 bp, SARS Virus
ctgctacgtctcccactccttcttc

SEQ ID NO: 11711 - DNA, 25 bp, SARS Virus
tgctacgtctcacactccttcttct

SEQ ID NO: 11712 - DNA, 25 bp, SARS Virus
gctacgtctcaccctccttcttctt

SEQ ID NO: 11713 - DNA, 25 bp, SARS Virus
ctacgtctcacactccttcttcttt

SEQ ID NO: 11714 - DNA, 25 bp, SARS Virus
tacgtctcacaccccttcttcttta

SEQ ID NO: 11715 - DNA, 25 bp, SARS Virus
acgtctcacactccttcttctttaa

SEQ ID NO: 11716 - DNA, 25 bp, SARS Virus
cgtctcacactccttcttctttaac

SEQ ID NO: 11717 - DNA, 25 bp, SARS Virus
gtctcacactccctcttctttaact

SEQ ID NO: 11718 - DNA, 25 bp, SARS Virus
tctcacactcctccttctttaacta

SEQ ID NO: 11719 - DNA, 25 bp, SARS Virus
ctcacactccttcttctttaactac

SEQ ID NO: 11720 - DNA, 25 bp, SARS Virus
tcacactccttcctctttaactact

SEQ ID NO: 11721 - DNA, 25 bp, SARS Virus
cacactccttctcctttaactactt

SEQ ID NO: 11722 - DNA, 25 bp, SARS Virus
acactccttcttctttaactacttt

SEQ ID NO: 11723 - DNA, 25 bp, SARS Virus
cactccttcttccttaactactttg

SEQ ID NO: 11724 - DNA, 25 bp, SARS Virus
actccttcttctctaactactttgg

SEQ ID NO: 11725 - DNA, 25 bp, SARS Virus
ctccttcttcttcaactactttgga

SEQ ID NO: 11726 - DNA, 25 bp, SARS Virus
tccttcttctttcactactttggac

SEQ ID NO: 11727 - DNA, 25 bp, SARS Virus
ccttcttctttacctactttggaca

SEQ ID NO: 11728 - DNA, 25 bp, SARS Virus
cttcttctttaactactttggacac

SEQ ID NO: 11729 - DNA, 25 bp, SARS Virus
ttcttctttaaccactttggacact

SEQ ID NO: 11730 - DNA, 25 bp, SARS Virus
tcttctttaactcctttggacactt

SEQ ID NO: 11731 - DNA, 25 bp, SARS Virus
cttctttaactactttggacacttg

SEQ ID NO: 11732 - DNA, 25 bp, SARS Virus
ttctttaactaccttggacacttgt

SEQ ID NO: 11733 - DNA, 25 bp, SARS Virus
tctttaactactctggacacttgta

SEQ ID NO: 11734 - DNA, 25 bp, SARS Virus
ctttaactacttcggacacttgtac

SEQ ID NO: 11735 - DNA, 25 bp, SARS Virus
tttaactactttcgacacttgtact

SEQ ID NO: 11736 - DNA, 25 bp, SARS Virus
ttaactactttgcacacttgtactc

SEQ ID NO: 11737 - DNA, 25 bp, SARS Virus
taactactttggccacttgtactca

SEQ ID NO: 11738 - DNA, 25 bp, SARS Virus
aactactttggacacttgtactcat

SEQ ID NO: 11739 - DNA, 25 bp, SARS Virus
actactttggacccttgtactcatg

SEQ ID NO: 11740 - DNA, 25 bp, SARS Virus
ctactttggacacttgtactcatgc

SEQ ID NO: 11741 - DNA, 25 bp, SARS Virus
tactttggacacctgtactcatgcc

SEQ ID NO: 11742 - DNA, 25 bp, SARS Virus
actttggacactcgtactcatgcca

SEQ ID NO: 11743 - DNA, 25 bp, SARS Virus
ctttggacacttctactcatgccat

SEQ ID NO: 11744 - DNA, 25 bp, SARS Virus
tttggacacttgcactcatgccatg

SEQ ID NO: 11745 - DNA, 25 bp, SARS Virus
ttggacacttgtcctcatgccatgt

SEQ ID NO: 11746 - DNA, 25 bp, SARS Virus
tggacacttgtactcatgccatgtc

SEQ ID NO: 11747 - DNA, 25 bp, SARS Virus
ggacacttgtacccatgccatgtct

SEQ ID NO: 11748 - DNA, 25 bp, SARS Virus
gacacttgtactcatgccatgtctc

SEQ ID NO: 11749 - DNA, 25 bp, SARS Virus
acacttgtactcctgccatgtctcc

SEQ ID NO: 11750 - DNA, 25 bp, SARS Virus
cacttgtactcacgccatgtctcct

SEQ ID NO: 11751 - DNA, 25 bp, SARS Virus
acttgtactcatcccatgtctccta

SEQ ID NO: 11752 - DNA, 25 bp, SARS Virus
cttgtactcatgccatgtctcctac

SEQ ID NO: 11753 - DNA, 25 bp, SARS Virus
ttgtactcatgccatgtctcctact

SEQ ID NO: 11754 - DNA, 25 bp, SARS Virus
tgtactcatgccctgtctcctacta

SEQ ID NO: 11755 - DNA, 25 bp, SARS Virus
gtactcatgccacgtctcctactaa

SEQ ID NO: 11756 - DNA, 25 bp, SARS Virus
tactcatgccatctctcctactaat

SEQ ID NO: 11757 - DNA, 25 bp, SARS Virus
actcatgccatgcctcctactaata

SEQ ID NO: 11758 - DNA, 25 bp, SARS Virus
ctcatgccatgtctcctactaatag

SEQ ID NO: 11759 - DNA, 25 bp, SARS Virus
tcatgccatgtcccctactaatagt

SEQ ID NO: 11760 - DNA, 25 bp, SARS Virus
catgccatgtctcctactaatagtt

SEQ ID NO: 11761 - DNA, 25 bp, SARS Virus
atgccatgtctcctactaatagttc

SEQ ID NO: 11762 - DNA, 25 bp, SARS Virus
tgccatgtctcccactaatagttcc

SEQ ID NO: 11763 - DNA, 25 bp, SARS Virus
gccatgtctcctcctaatagttcca

SEQ ID NO: 11764 - DNA, 25 bp, SARS Virus
ccatgtctcctactaatagttccag

SEQ ID NO: 11765 - DNA, 25 bp, SARS Virus
catgtctcctaccaatagttccaga

SEQ ID NO: 11766 - DNA, 25 bp, SARS Virus
atgtctcctactcatagttccagag

SEQ ID NO: 11767 - DNA, 25 bp, SARS Virus
tgtctcctactactagttccagagg

SEQ ID NO: 11768 - DNA, 25 bp, SARS Virus
gtctcctactaacagttccagaggg

SEQ ID NO: 11769 - DNA, 25 bp, SARS Virus
tctcctactaatcgttccagaggga

SEQ ID NO: 11770 - DNA, 25 bp, SARS Virus
ctcctactaatacttccagagggag

SEQ ID NO: 11771 - DNA, 25 bp, SARS Virus
tcctactaatagctccagagggaga

SEQ ID NO: 11772 - DNA, 25 bp, SARS Virus
cctactaatagtcccagagggagac

SEQ ID NO: 11773 - DNA, 25 bp, SARS Virus
ctactaatagttccagagggagacc

SEQ ID NO: 11774 - DNA, 25 bp, SARS Virus
tactaatagttccagagggagacct

SEQ ID NO: 11775 - DNA, 25 bp, SARS Virus
actaatagttcccgagggagacctt

SEQ ID NO: 11776 - DNA, 25 bp, SARS Virus
ctaatagttccacagggagacctta

SEQ ID NO: 11777 - DNA, 25 bp, SARS Virus
taatagttccagcgggagaccttaa

SEQ ID NO: 11778 - DNA, 25 bp, SARS Virus
aatagttccagacggagaccttaaa

SEQ ID NO: 11779 - DNA, 25 bp, SARS Virus
atagttccagagcgagaccttaaac

SEQ ID NO: 11780 - DNA, 25 bp, SARS Virus
tagttccagaggcagaccttaaacc

SEQ ID NO: 11781 - DNA, 25 bp, SARS Virus
agttccagagggcgaccttaaacca

SEQ ID NO: 11782 - DNA, 25 bp, SARS Virus
gttccagagggacaccttaaaccac

SEQ ID NO: 11783 - DNA, 25 bp, SARS Virus
ttccagagggagcccttaaaccacg

SEQ ID NO: 11784 - DNA, 25 bp, SARS Virus
tccagagggagaccttaaaccacgg

SEQ ID NO: 11785 - DNA, 25 bp, SARS Virus
ccagagggagaccttaaaccacgga

SEQ ID NO: 11786 - DNA, 25 bp, SARS Virus
cagagggagaccctaaaccacggag

SEQ ID NO: 11787 - DNA, 25 bp, SARS Virus
agagggagacctcaaaccacggagt

SEQ ID NO: 11788 - DNA, 25 bp, SARS Virus
gagggagaccttcaaccacggagtc

SEQ ID NO: 11789 - DNA, 25 bp, SARS Virus
agggagaccttacaccacggagtcg

SEQ ID NO: 11790 - DNA, 25 bp, SARS Virus
gggagaccttaacccacggagtcga

SEQ ID NO: 11791 - DNA, 25 bp, SARS Virus
ggagaccttaaaccacggagtcgac

SEQ ID NO: 11792 - DNA, 25 bp, SARS Virus
gagaccttaaaccacggagtcgact

SEQ ID NO: 11793 - DNA, 25 bp, SARS Virus
agaccttaaaccccggagtcgactt

SEQ ID NO: 11794 - DNA, 25 bp, SARS Virus
gaccttaaaccacggagtcgacttt

SEQ ID NO: 11795 - DNA, 25 bp, SARS Virus
accttaaaccaccgagtcgactttg

SEQ ID NO: 11796 - DNA, 25 bp, SARS Virus
ccttaaaccacgcagtcgactttgt

SEQ ID NO: 11797 - DNA, 25 bp, SARS Virus
cttaaaccacggcgtcgactttgtc

SEQ ID NO: 11798 - DNA, 25 bp, SARS Virus
ttaaaccacggactcgactttgtca

SEQ ID NO: 11799 - DNA, 25 bp, SARS Virus
taaaccacggagccgactttgtcaa

SEQ ID NO: 11800 - DNA, 25 bp, SARS Virus
aaaccacggagtcgactttgtcaag

SEQ ID NO: 11801 - DNA, 25 bp, SARS Virus
aaccacggagtccactttgtcaagc

SEQ ID NO: 11802 - DNA, 25 bp, SARS Virus
accacggagtcgcctttgtcaagct

SEQ ID NO: 11803 - DNA, 25 bp, SARS Virus
ccacggagtcgactttgtcaagctc

SEQ ID NO: 11804 - DNA, 25 bp, SARS Virus
cacggagtcgaccttgtcaagctca

SEQ ID NO: 11805 - DNA, 25 bp, SARS Virus
acggagtcgactctgtcaagctcaa

SEQ ID NO: 11806 - DNA, 25 bp, SARS Virus
cggagtcgacttcgtcaagctcaac

SEQ ID NO: 11807 - DNA, 25 bp, SARS Virus
ggagtcgactttctcaagctcaact

SEQ ID NO: 11808 - DNA, 25 bp, SARS Virus
gagtcgactttgccaagctcaactc

SEQ ID NO: 11809 - DNA, 25 bp, SARS Virus
agtcgactttgtcaagctcaactcc

SEQ ID NO: 11810 - DNA, 25 bp, SARS Virus
gtcgactttgtccagctcaactcct

SEQ ID NO: 11811 - DNA, 25 bp, SARS Virus
tcgactttgtcacgctcaactcctt

SEQ ID NO: 11812 - DNA, 25 bp, SARS Virus
cgactttgtcaacctcaactccttc

SEQ ID NO: 11813 - DNA, 25 bp, SARS Virus
gactttgtcaagctcaactccttct

SEQ ID NO: 11814 - DNA, 25 bp, SARS Virus
actttgtcaagcccaactccttctt

SEQ ID NO: 11815 - DNA, 25 bp, SARS Virus
ctttgtcaagctcaactccttcttc

SEQ ID NO: 11816 - DNA, 25 bp, SARS Virus
tttgtcaagctccactccttcttct

SEQ ID NO: 11817 - DNA, 25 bp, SARS Virus
ttgtcaagctcacctccttcttctt

SEQ ID NO: 11818 - DNA, 25 bp, SARS Virus
tgtcaagctcaactccttcttcttc

SEQ ID NO: 11819 - DNA, 25 bp, SARS Virus
gtcaagctcaaccccttcttcttct

SEQ ID NO: 11820 - DNA, 25 bp, SARS Virus
tcaagctcaactccttcttcttctc

SEQ ID NO: 11821 - DNA, 25 bp, SARS Virus
caagctcaactccttcttcttctcc

SEQ ID NO: 11822 - DNA, 25 bp, SARS Virus
aagctcaactccctcttcttctcct

SEQ ID NO: 11823 - DNA, 25 bp, SARS Virus
agctcaactcctccttcttctcctt

SEQ ID NO: 11824 - DNA, 25 bp, SARS Virus
gctcaactccttcttcttctccttc

SEQ ID NO: 11825 - DNA, 25 bp, SARS Virus
ctcaactccttcctcttctccttct

SEQ ID NO: 11826 - DNA, 25 bp, SARS Virus
tcaactccttctccttctccttctg

SEQ ID NO: 11827 - DNA, 25 bp, SARS Virus
caactccttcttcttctccttctga

SEQ ID NO: 11828 - DNA, 25 bp, SARS Virus
aactccttcttcctctccttctgac

SEQ ID NO: 11829 - DNA, 25 bp, SARS Virus
actccttcttctcctccttctgacc

SEQ ID NO: 11830 - DNA, 25 bp, SARS Virus
ctccttcttcttctccttctgaccg

SEQ ID NO: 11831 - DNA, 25 bp, SARS Virus
tccttcttcttccccttctgaccga

SEQ ID NO: 11832 - DNA, 25 bp, SARS Virus
ccttcttcttctccttctgaccgac

SEQ ID NO: 11833 - DNA, 25 bp, SARS Virus
cttcttcttctccttctgaccgacc

SEQ ID NO: 11834 - DNA, 25 bp, SARS Virus
ttcttcttctccctctgaccgacct

SEQ ID NO: 11835 - DNA, 25 bp, SARS Virus
tcttcttctcctcctgaccgaccta

SEQ ID NO: 11836 - DNA, 25 bp, SARS Virus
cttcttctccttctgaccgacctac

SEQ ID NO: 11837 - DNA, 25 bp, SARS Virus
ttcttctccttccgaccgacctact

SEQ ID NO: 11838 - DNA, 25 bp, SARS Virus
tcttctccttctcaccgacctacta

SEQ ID NO: 11839 - DNA, 25 bp, SARS Virus
cttctccttctgcccgacctactat

SEQ ID NO: 11840 - DNA, 25 bp, SARS Virus
ttctccttctgaccgacctactatg

SEQ ID NO: 11841 - DNA, 25 bp, SARS Virus
aattttcccccaggtggttaatttc

SEQ ID NO: 11842 - DNA, 25 bp, SARS Virus
attttcccccacgtggttaatttcc

SEQ ID NO: 11843 - DNA, 25 bp, SARS Virus
ttttcccccacggggttaatttcca

SEQ ID NO: 11844 - DNA, 25 bp, SARS Virus
tttcccccacgtggttaatttccac

SEQ ID NO: 11845 - DNA, 25 bp, SARS Virus
ttcccccacgtggttaatttccaca

SEQ ID NO: 11846 - DNA, 25 bp, SARS Virus
tcccccacgtgggtaatttccacat

SEQ ID NO: 11847 - DNA, 25 bp, SARS Virus
cccccacgtggtgaatttccacatt

SEQ ID NO: 11848 - DNA, 25 bp, SARS Virus
ccccacgtggttgatttccacattg

SEQ ID NO: 11849 - DNA, 25 bp, SARS Virus
cccacgtggttagtttccacattgg

SEQ ID NO: 11850 - DNA, 25 bp, SARS Virus
ccacgtggttaagttccacattgga

SEQ ID NO: 11851 - DNA, 25 bp, SARS Virus
cacgtggttaatgtccacattggaa

SEQ ID NO: 11852 - DNA, 25 bp, SARS Virus
acgtggttaattgccacattggaaa

SEQ ID NO: 11853 - DNA, 25 bp, SARS Virus
cgtggttaatttgcacattggaaac

SEQ ID NO: 11854 - DNA, 25 bp, SARS Virus
gtggttaatttcgacattggaaacc

SEQ ID NO: 11855 - DNA, 25 bp, SARS Virus
tggttaatttccgcattggaaacct

SEQ ID NO: 11856 - DNA, 25 bp, SARS Virus
ggttaatttccagattggaaacctc

SEQ ID NO: 11857 - DNA, 25 bp, SARS Virus
gttaatttccacgttggaaacctct

SEQ ID NO: 11858 - DNA, 25 bp, SARS Virus
ttaatttccacagtggaaacctctt

SEQ ID NO: 11859 - DNA, 25 bp, SARS Virus
taatttccacatgggaaacctcttc

SEQ ID NO: 11860 - DNA, 25 bp, SARS Virus
aatttccacattggaaacctcttct

SEQ ID NO: 11861 - DNA, 25 bp, SARS Virus
atttccacattggaaacctcttcta

SEQ ID NO: 11862 - DNA, 25 bp, SARS Virus
tttccacattgggaacctcttctat

SEQ ID NO: 11863 - DNA, 25 bp, SARS Virus
ttccacattggagacctcttctatg

SEQ ID NO: 11864 - DNA, 25 bp, SARS Virus
tccacattggaagcctcttctatga

SEQ ID NO: 11865 - DNA, 25 bp, SARS Virus
ccacattggaaagctcttctatgac

SEQ ID NO: 11866 - DNA, 25 bp, SARS Virus
cacattggaaacgtcttctatgaca

SEQ ID NO: 11867 - DNA, 25 bp, SARS Virus
acattggaaaccgcttctatgacaa

SEQ ID NO: 11868 - DNA, 25 bp, SARS Virus
cattggaaacctgttctatgacaaa

SEQ ID NO: 11869 - DNA, 25 bp, SARS Virus
attggaaacctcgtctatgacaaac

SEQ ID NO: 11870 - DNA, 25 bp, SARS Virus
ttggaaacctctgctatgacaaacc

SEQ ID NO: 11871 - DNA, 25 bp, SARS Virus
tggaaacctcttgtatgacaaaccc

SEQ ID NO: 11872 - DNA, 25 bp, SARS Virus
ggaaacctcttcgatgacaaaccct

SEQ ID NO: 11873 - DNA, 25 bp, SARS Virus
gaaacctcttctgtgacaaaccctt

SEQ ID NO: 11874 - DNA, 25 bp, SARS Virus
aaacctcttctaggacaaacccttc

SEQ ID NO: 11875 - DNA, 25 bp, SARS Virus
aacctcttctatgacaaacccttca

SEQ ID NO: 11876 - DNA, 25 bp, SARS Virus
acctcttctatggcaaacccttcaa

SEQ ID NO: 11877 - DNA, 25 bp, SARS Virus
cctcttctatgagaaacccttcaag

SEQ ID NO: 11878 - DNA, 25 bp, SARS Virus
ctcttctatgacgaacccttcaagt

SEQ ID NO: 11879 - DNA, 25 bp, SARS Virus
tcttctatgacagacccttcaagtt

SEQ ID NO: 11880 - DNA, 25 bp, SARS Virus
cttctatgacaagcccttcaagttc

SEQ ID NO: 11881 - DNA, 25 bp, SARS Virus
ttctatgacaaagccttcaagttcc

SEQ ID NO: 11882 - DNA, 25 bp, SARS Virus
tctatgacaaacgcttcaagttcca

SEQ ID NO: 11883 - DNA, 25 bp, SARS Virus
ctatgacaaaccgttcaagttccaa

SEQ ID NO: 11884 - DNA, 25 bp, SARS Virus
tatgacaaacccgtcaagttccaat

SEQ ID NO: 11885 - DNA, 25 bp, SARS Virus
atgacaaaccctgcaagttccaatg

SEQ ID NO: 11886 - DNA, 25 bp, SARS Virus
tgacaaacccttgaagttccaatgt

SEQ ID NO: 11887 - DNA, 25 bp, SARS Virus
gacaaacccttcgagttccaatgtt

SEQ ID NO: 11888 - DNA, 25 bp, SARS Virus
acaaacccttcaggttccaatgttc

SEQ ID NO: 11889 - DNA, 25 bp, SARS Virus
caaacccttcaagttccaatgttct

SEQ ID NO: 11890 - DNA, 25 bp, SARS Virus
aaacccttcaaggtccaatgttctt

SEQ ID NO: 11891 - DNA, 25 bp, SARS Virus
aacccttcaagtgccaatgttctta

SEQ ID NO: 11892 - DNA, 25 bp, SARS Virus
acccttcaagttgcaatgttcttac

SEQ ID NO: 11893 - DNA, 25 bp, SARS Virus
cccttcaagttcgaatgttcttaca

SEQ ID NO: 11894 - DNA, 25 bp, SARS Virus
ccttcaagttccgatgttcttacac

SEQ ID NO: 11895 - DNA, 25 bp, SARS Virus
cttcaagttccagtgttcttacact

SEQ ID NO: 11896 - DNA, 25 bp, SARS Virus
ttcaagttccaaggttcttacactc

SEQ ID NO: 11897 - DNA, 25 bp, SARS Virus
tcaagttccaatgttcttacactct

SEQ ID NO: 11898 - DNA, 25 bp, SARS Virus
caagttccaatggtcttacactctt

SEQ ID NO: 11899 - DNA, 25 bp, SARS Virus
aagttccaatgtgcttacactctta

SEQ ID NO: 11900 - DNA, 25 bp, SARS Virus
agttccaatgttgttacactcttag

SEQ ID NO: 11901 - DNA, 25 bp, SARS Virus
gttccaatgttcgtacactcttagt

SEQ ID NO: 11902 - DNA, 25 bp, SARS Virus
ttccaatgttctgacactcttagtg

SEQ ID NO: 11903 - DNA, 25 bp, SARS Virus
tccaatgttcttgcactcttagtgt

SEQ ID NO: 11904 - DNA, 25 bp, SARS Virus
ccaatgttcttagactcttagtgta

SEQ ID NO: 11905 - DNA, 25 bp, SARS Virus
caatgttcttacgctcttagtgtaa

SEQ ID NO: 11906 - DNA, 25 bp, SARS Virus
aatgttcttacagtcttagtgtaaa

SEQ ID NO: 11907 - DNA, 25 bp, SARS Virus
atgttcttacacgcttagtgtaaac

SEQ ID NO: 11908 - DNA, 25 bp, SARS Virus
tgttcttacactgttagtgtaaact

SEQ ID NO: 11909 - DNA, 25 bp, SARS Virus
gttcttacactcgtagtgtaaactc

SEQ ID NO: 11910 - DNA, 25 bp, SARS Virus
ttcttacactctgagtgtaaactcg

SEQ ID NO: 11911 - DNA, 25 bp, SARS Virus
tcttacactcttggtgtaaactcga

SEQ ID NO: 11912 - DNA, 25 bp, SARS Virus
cttacactcttagtgtaaactcgaa

SEQ ID NO: 11913 - DNA, 25 bp, SARS Virus
ttacactcttagggtaaactcgaac

SEQ ID NO: 11914 - DNA, 25 bp, SARS Virus
tacactcttagtgtaaactcgaact

SEQ ID NO: 11915 - DNA, 25 bp, SARS Virus
acactcttagtggaaactcgaacta

SEQ ID NO: 11916 - DNA, 25 bp, SARS Virus
cactcttagtgtgaactcgaactac

SEQ ID NO: 11917 - DNA, 25 bp, SARS Virus
actcttagtgtagactcgaactact

SEQ ID NO: 11918 - DNA, 25 bp, SARS Virus
ctcttagtgtaagctcgaactactt

SEQ ID NO: 11919 - DNA, 25 bp, SARS Virus
tcttagtgtaaagtcgaactacttg

SEQ ID NO: 11920 - DNA, 25 bp, SARS Virus
cttagtgtaaacgcgaactacttgc

SEQ ID NO: 11921 - DNA, 25 bp, SARS Virus
ttagtgtaaactggaactacttgca

SEQ ID NO: 11922 - DNA, 25 bp, SARS Virus
tagtgtaaactcgaactacttgcac

SEQ ID NO: 11923 - DNA, 25 bp, SARS Virus
agtgtaaactcggactacttgcaca

SEQ ID NO: 11924 - DNA, 25 bp, SARS Virus
gtgtaaactcgagctacttgcacaa

SEQ ID NO: 11925 - DNA, 25 bp, SARS Virus
tgtaaactcgaagtacttgcacaac

SEQ ID NO: 11926 - DNA, 25 bp, SARS Virus
gtaaactcgaacgacttgcacaact

SEQ ID NO: 11927 - DNA, 25 bp, SARS Virus
taaactcgaactgcttgcacaactg

SEQ ID NO: 11928 - DNA, 25 bp, SARS Virus
aaactcgaactagttgcacaactgt

SEQ ID NO: 11929 - DNA, 25 bp, SARS Virus
aactcgaactacgtgcacaactgtt

SEQ ID NO: 11930 - DNA, 25 bp, SARS Virus
actcgaactactggcacaactgttt

SEQ ID NO: 11931 - DNA, 25 bp, SARS Virus
ctcgaactacttgcacaactgtttc

SEQ ID NO: 11932 - DNA, 25 bp, SARS Virus
tcgaactacttggacaactgtttca

SEQ ID NO: 11933 - DNA, 25 bp, SARS Virus
cgaactacttgcgcaactgtttcac

SEQ ID NO: 11934 - DNA, 25 bp, SARS Virus
gaactacttgcagaactgtttcacg

SEQ ID NO: 11935 - DNA, 25 bp, SARS Virus
aactacttgcacgactgtttcacga

SEQ ID NO: 11936 - DNA, 25 bp, SARS Virus
actacttgcacagctgtttcacgaa

SEQ ID NO: 11937 - DNA, 25 bp, SARS Virus
ctacttgcacaagtgtttcacgaat

SEQ ID NO: 11938 - DNA, 25 bp, SARS Virus
tacttgcacaacggtttcacgaatt

SEQ ID NO: 11939 - DNA, 25 bp, SARS Virus
acttgcacaactgtttcacgaatta

SEQ ID NO: 11940 - DNA, 25 bp, SARS Virus
cttgcacaactggttcacgaattac

SEQ ID NO: 11941 - DNA, 25 bp, SARS Virus
ttgcacaactgtgtcacgaattact

SEQ ID NO: 11942 - DNA, 25 bp, SARS Virus
tgcacaactgttgcacgaattactt

SEQ ID NO: 11943 - DNA, 25 bp, SARS Virus
gcacaactgtttgacgaattacttt

SEQ ID NO: 11944 - DNA, 25 bp, SARS Virus
cacaactgtttcgcgaattactttt

SEQ ID NO: 11945 - DNA, 25 bp, SARS Virus
acaactgtttcaggaattacttttc

SEQ ID NO: 11946 - DNA, 25 bp, SARS Virus
caactgtttcacgaattacttttca

SEQ ID NO: 11947 - DNA, 25 bp, SARS Virus
aactgtttcacggattacttttcac

SEQ ID NO: 11948 - DNA, 25 bp, SARS Virus
actgtttcacgagttacttttcacg

SEQ ID NO: 11949 - DNA, 25 bp, SARS Virus
ctgtttcacgaagtacttttcacga

SEQ ID NO: 11950 - DNA, 25 bp, SARS Virus
tgtttcacgaatgacttttcacgag

SEQ ID NO: 11951 - DNA, 25 bp, SARS Virus
gtttcacgaattgcttttcacgaga

SEQ ID NO: 11952 - DNA, 25 bp, SARS Virus
tttcacgaattagttttcacgagac

SEQ ID NO: 11953 - DNA, 25 bp, SARS Virus
ttcacgaattacgtttcacgagaca

SEQ ID NO: 11954 - DNA, 25 bp, SARS Virus
tcacgaattactgttcacgagacag

SEQ ID NO: 11955 - DNA, 25 bp, SARS Virus
cacgaattacttgtcacgagacaga

SEQ ID NO: 11956 - DNA, 25 bp, SARS Virus
acgaattactttgcacgagacagat

SEQ ID NO: 11957 - DNA, 25 bp, SARS Virus
cgaattacttttgacgagacagatg

SEQ ID NO: 11958 - DNA, 25 bp, SARS Virus
gaattacttttcgcgagacagatgt

SEQ ID NO: 11959 - DNA, 25 bp, SARS Virus
aattacttttcaggagacagatgtg

SEQ ID NO: 11960 - DNA, 25 bp, SARS Virus
attacttttcacgagacagatgtga

SEQ ID NO: 11961 - DNA, 25 bp, SARS Virus
ttacttttcacgggacagatgtgac

SEQ ID NO: 11962 - DNA, 25 bp, SARS Virus
tacttttcacgagacagatgtgaca

SEQ ID NO: 11963 - DNA, 25 bp, SARS Virus
acttttcacgaggcagatgtgacaa

SEQ ID NO: 11964 - DNA, 25 bp, SARS Virus
cttttcacgagagagatgtgacaac

SEQ ID NO: 11965 - DNA, 25 bp, SARS Virus
ttttcacgagacggatgtgacaact

SEQ ID NO: 11966 - DNA, 25 bp, SARS Virus
tttcacgagacagatgtgacaactt

SEQ ID NO: 11967 - DNA, 25 bp, SARS Virus
ttcacgagacaggtgtgacaactta

SEQ ID NO: 11968 - DNA, 25 bp, SARS Virus
tcacgagacagaggtgacaacttag

SEQ ID NO: 11969 - DNA, 25 bp, SARS Virus
cacgagacagatgtgacaacttagg

SEQ ID NO: 11970 - DNA, 25 bp, SARS Virus
acgagacagatgggacaacttaggc

SEQ ID NO: 11971 - DNA, 25 bp, SARS Virus
cgagacagatgtgacaacttaggcc

SEQ ID NO: 11972 - DNA, 25 bp, SARS Virus
gagacagatgtggcaacttaggcca

SEQ ID NO: 11973 - DNA, 25 bp, SARS Virus
agacagatgtgagaacttaggccat

SEQ ID NO: 11974 - DNA, 25 bp, SARS Virus
gacagatgtgacgacttaggccatg

SEQ ID NO: 11975 - DNA, 25 bp, SARS Virus
acagatgtgacagcttaggccatgg

SEQ ID NO: 11976 - DNA, 25 bp, SARS Virus
cagatgtgacaagttaggccatggc

SEQ ID NO: 11977 - DNA, 25 bp, SARS Virus
agatgtgacaacgtaggccatggct

SEQ ID NO: 11978 - DNA, 25 bp, SARS Virus
gatgtgacaactgaggccatggctt

SEQ ID NO: 11979 - DNA, 25 bp, SARS Virus
atgtgacaacttgggccatggcttc

SEQ ID NO: 11980 - DNA, 25 bp, SARS Virus
tgtgacaacttaggccatggcttca

SEQ ID NO: 11981 - DNA, 25 bp, SARS Virus
gtgacaacttaggccatggcttcaa

SEQ ID NO: 11982 - DNA, 25 bp, SARS Virus
tgacaacttagggcatggcttcaat

SEQ ID NO: 11983 - DNA, 25 bp, SARS Virus
gacaacttaggcgatggcttcaatg

SEQ ID NO: 11984 - DNA, 25 bp, SARS Virus
acaacttaggccgtggcttcaatga

SEQ ID NO: 11985 - DNA, 25 bp, SARS Virus
caacttaggccagggcttcaatgac

SEQ ID NO: 11986 - DNA, 25 bp, SARS Virus
aacttaggccatggcttcaatgact

SEQ ID NO: 11987 - DNA, 25 bp, SARS Virus
acttaggccatggcttcaatgactc

SEQ ID NO: 11988 - DNA, 25 bp, SARS Virus
cttaggccatgggttcaatgactca

SEQ ID NO: 11989 - DNA, 25 bp, SARS Virus
ttaggccatggcgtcaatgactcaa

SEQ ID NO: 11990 - DNA, 25 bp, SARS Virus
taggccatggctgcaatgactcaaa

SEQ ID NO: 11991 - DNA, 25 bp, SARS Virus
aggccatggcttgaatgactcaaac

SEQ ID NO: 11992 - DNA, 25 bp, SARS Virus
ggccatggcttcgatgactcaaacg

SEQ ID NO: 11993 - DNA, 25 bp, SARS Virus
gccatggcttcagtgactcaaacgt

SEQ ID NO: 11994 - DNA, 25 bp, SARS Virus
ccatggcttcaaggactcaaacgta

SEQ ID NO: 11995 - DNA, 25 bp, SARS Virus
catggcttcaatgactcaaacgtac

SEQ ID NO: 11996 - DNA, 25 bp, SARS Virus
atggcttcaatggctcaaacgtaca

SEQ ID NO: 11997 - DNA, 25 bp, SARS Virus
tggcttcaatgagtcaaacgtacac

SEQ ID NO: 11998 - DNA, 25 bp, SARS Virus
ggcttcaatgacgcaaacgtacaca

SEQ ID NO: 11999 - DNA, 25 bp, SARS Virus
gcttcaatgactgaaacgtacacaa

SEQ ID NO: 12000 - DNA, 25 bp, SARS Virus
cttcaatgactcgaacgtacacaac

SEQ ID NO: 12001 - DNA, 25 bp, SARS Virus
ttcaatgactcagacgtacacaaca

SEQ ID NO: 12002 - DNA, 25 bp, SARS Virus
tcaatgactcaagcgtacacaacat

SEQ ID NO: 12003 - DNA, 25 bp, SARS Virus
caatgactcaaaggtacacaacatc

SEQ ID NO: 12004 - DNA, 25 bp, SARS Virus
aatgactcaaacgtacacaacatcg

SEQ ID NO: 12005 - DNA, 25 bp, SARS Virus
atgactcaaacggacacaacatcgt

SEQ ID NO: 12006 - DNA, 25 bp, SARS Virus
tgactcaaacgtgcacaacatcgtc

SEQ ID NO: 12007 - DNA, 25 bp, SARS Virus
gactcaaacgtagacaacatcgtct

SEQ ID NO: 12008 - DNA, 25 bp, SARS Virus
actcaaacgtacgcaacatcgtctc

SEQ ID NO: 12009 - DNA, 25 bp, SARS Virus
ctcaaacgtacagaacatcgtctcc

SEQ ID NO: 12010 - DNA, 25 bp, SARS Virus
tcaaacgtacacgacatcgtctccg

SEQ ID NO: 12011 - DNA, 25 bp, SARS Virus
caaacgtacacagcatcgtctccga

SEQ ID NO: 12012 - DNA, 25 bp, SARS Virus
aaacgtacacaagatcgtctccgac

SEQ ID NO: 12013 - DNA, 25 bp, SARS Virus
aacgtacacaacgtcgtctccgaca

SEQ ID NO: 12014 - DNA, 25 bp, SARS Virus
acgtacacaacagcgtctccgacaa

SEQ ID NO: 12015 - DNA, 25 bp, SARS Virus
cgtacacaacatggtctccgacaac

SEQ ID NO: 12016 - DNA, 25 bp, SARS Virus
gtacacaacatcgtctccgacaaca

SEQ ID NO: 12017 - DNA, 25 bp, SARS Virus
tacacaacatcggctccgacaacac

SEQ ID NO: 12018 - DNA, 25 bp, SARS Virus
acacaacatcgtgtccgacaacact

SEQ ID NO: 12019 - DNA, 25 bp, SARS Virus
cacaacatcgtcgccgacaacactt

SEQ ID NO: 12020 - DNA, 25 bp, SARS Virus
acaacatcgtctgcgacaacacttc

SEQ ID NO: 12021 - DNA, 25 bp, SARS Virus
caacatcgtctcggacaacacttct

SEQ ID NO: 12022 - DNA, 25 bp, SARS Virus
aacatcgtctccgacaacacttctg

SEQ ID NO: 12023 - DNA, 25 bp, SARS Virus
acatcgtctccggcaacacttctga

SEQ ID NO: 12024 - DNA, 25 bp, SARS Virus
catcgtctccgagaacacttctgaa

SEQ ID NO: 12025 - DNA, 25 bp, SARS Virus
atcgtctccgacgacacttctgaaa

SEQ ID NO: 12026 - DNA, 25 bp, SARS Virus
tcgtctccgacagcacttctgaaat

SEQ ID NO: 12027 - DNA, 25 bp, SARS Virus
cgtctccgacaagacttctgaaatg

SEQ ID NO: 12028 - DNA, 25 bp, SARS Virus
gtctccgacaacgcttctgaaatgt

SEQ ID NO: 12029 - DNA, 25 bp, SARS Virus
tctccgacaacagttctgaaatgtt

SEQ ID NO: 12030 - DNA, 25 bp, SARS Virus
ctccgacaacacgtctgaaatgttg

SEQ ID NO: 12031 - DNA, 25 bp, SARS Virus
tccgacaacactgctgaaatgttgg

SEQ ID NO: 12032 - DNA, 25 bp, SARS Virus
ccgacaacacttgtgaaatgttggt

SEQ ID NO: 12033 - DNA, 25 bp, SARS Virus
cgacaacacttcggaaatgttggtc

SEQ ID NO: 12034 - DNA, 25 bp, SARS Virus
gacaacacttctgaaatgttggtca

SEQ ID NO: 12035 - DNA, 25 bp, SARS Virus
acaacacttctggaatgttggtcaa

SEQ ID NO: 12036 - DNA, 25 bp, SARS Virus
caacacttctgagatgttggtcaaa

SEQ ID NO: 12037 - DNA, 25 bp, SARS Virus
aacacttctgaagtgttggtcaaag

SEQ ID NO: 12038 - DNA, 25 bp, SARS Virus
acacttctgaaaggttggtcaaaga

SEQ ID NO: 12039 - DNA, 25 bp, SARS Virus
cacttctgaaatgttggtcaaagac

SEQ ID NO: 12040 - DNA, 25 bp, SARS Virus
acttctgaaatggtggtcaaagact

SEQ ID NO: 12041 - DNA, 25 bp, SARS Virus
cttctgaaatgtgggtcaaagacta

SEQ ID NO: 12042 - DNA, 25 bp, SARS Virus
ttctgaaatgttggtcaaagactag

SEQ ID NO: 12043 - DNA, 25 bp, SARS Virus
tctgaaatgttggtcaaagactaga

SEQ ID NO: 12044 - DNA, 25 bp, SARS Virus
ctgaaatgttgggcaaagactagag

SEQ ID NO: 12045 - DNA, 25 bp, SARS Virus
tgaaatgttggtgaaagactagagg

SEQ ID NO: 12046 - DNA, 25 bp, SARS Virus
gaaatgttggtcgaagactagagga

SEQ ID NO: 12047 - DNA, 25 bp, SARS Virus
aaatgttggtcagagactagaggaa

SEQ ID NO: 12048 - DNA, 25 bp, SARS Virus
aatgttggtcaaggactagaggaat

SEQ ID NO: 12049 - DNA, 25 bp, SARS Virus
atgttggtcaaagactagaggaatg

SEQ ID NO: 12050 - DNA, 25 bp, SARS Virus
tgttggtcaaaggctagaggaatgg

SEQ ID NO: 12051 - DNA, 25 bp, SARS Virus
gttggtcaaagagtagaggaatggt

SEQ ID NO: 12052 - DNA, 25 bp, SARS Virus
ttggtcaaagacgagaggaatggtt

SEQ ID NO: 12053 - DNA, 25 bp, SARS Virus
tggtcaaagactggaggaatggttg

SEQ ID NO: 12054 - DNA, 25 bp, SARS Virus
ggtcaaagactagaggaatggttgt

SEQ ID NO: 12055 - DNA, 25 bp, SARS Virus
gtcaaagactaggggaatggttgta

SEQ ID NO: 12056 - DNA, 25 bp, SARS Virus
tcaaagactagaggaatggttgtac

SEQ ID NO: 12057 - DNA, 25 bp, SARS Virus
caaagactagaggaatggttgtacc

SEQ ID NO: 12058 - DNA, 25 bp, SARS Virus
aaagactagagggatggttgtaccc

SEQ ID NO: 12059 - DNA, 25 bp, SARS Virus
aagactagaggagtggttgtaccca

SEQ ID NO: 12060 - DNA, 25 bp, SARS Virus
agactagaggaagggttgtacccat

SEQ ID NO: 12061 - DNA, 25 bp, SARS Virus
gactagaggaatggttgtacccata

SEQ ID NO: 12062 - DNA, 25 bp, SARS Virus
actagaggaatggttgtacccataa

SEQ ID NO: 12063 - DNA, 25 bp, SARS Virus
ctagaggaatgggtgtacccataac

SEQ ID NO: 12064 - DNA, 25 bp, SARS Virus
tagaggaatggtggtacccataact

SEQ ID NO: 12065 - DNA, 25 bp, SARS Virus
agaggaatggttgtacccataacta

SEQ ID NO: 12066 - DNA, 25 bp, SARS Virus
gaggaatggttggacccataactag

SEQ ID NO: 12067 - DNA, 25 bp, SARS Virus
aggaatggttgtgcccataactaga

SEQ ID NO: 12068 - DNA, 25 bp, SARS Virus
ggaatggttgtagccataactagaa

SEQ ID NO: 12069 - DNA, 25 bp, SARS Virus
gaatggttgtacgcataactagaac

SEQ ID NO: 12070 - DNA, 25 bp, SARS Virus
aatggttgtaccgataactagaact

SEQ ID NO: 12071 - DNA, 25 bp, SARS Virus
atggttgtacccgtaactagaacta

SEQ ID NO: 12072 - DNA, 25 bp, SARS Virus
tggttgtacccagaactagaactac

SEQ ID NO: 12073 - DNA, 25 bp, SARS Virus
ggttgtacccatgactagaactact

SEQ ID NO: 12074 - DNA, 25 bp, SARS Virus
gttgtacccatagctagaactactc

SEQ ID NO: 12075 - DNA, 25 bp, SARS Virus
ttgtacccataagtagaactactca

SEQ ID NO: 12076 - DNA, 25 bp, SARS Virus
tgtacccataacgagaactactcac

SEQ ID NO: 12077 - DNA, 25 bp, SARS Virus
gtacccataactggaactactcacc

SEQ ID NO: 12078 - DNA, 25 bp, SARS Virus
tacccataactagaactactcacct

SEQ ID NO: 12079 - DNA, 25 bp, SARS Virus
acccataactaggactactcacctc

SEQ ID NO: 12080 - DNA, 25 bp, SARS Virus
cccataactagagctactcacctca

SEQ ID NO: 12081 - DNA, 25 bp, SARS Virus
ccataactagaagtactcacctcac

SEQ ID NO: 12082 - DNA, 25 bp, SARS Virus
cataactagaacgactcacctcaca

SEQ ID NO: 12083 - DNA, 25 bp, SARS Virus
ataactagaactgctcacctcacat

SEQ ID NO: 12084 - DNA, 25 bp, SARS Virus
taactagaactagtcacctcacatc

SEQ ID NO: 12085 - DNA, 25 bp, SARS Virus
aactagaactacgcacctcacatcg

SEQ ID NO: 12086 - DNA, 25 bp, SARS Virus
actagaactactgacctcacatcga

SEQ ID NO: 12087 - DNA, 25 bp, SARS Virus
ctagaactactcgcctcacatcgat

SEQ ID NO: 12088 - DNA, 25 bp, SARS Virus
tagaactactcagctcacatcgatg

SEQ ID NO: 12089 - DNA, 25 bp, SARS Virus
agaactactcacgtcacatcgatgt

SEQ ID NO: 12090 - DNA, 25 bp, SARS Virus
gaactactcaccgcacatcgatgta

SEQ ID NO: 12091 - DNA, 25 bp, SARS Virus
aactactcacctgacatcgatgtaa

SEQ ID NO: 12092 - DNA, 25 bp, SARS Virus
actactcacctcgcatcgatgtaag

SEQ ID NO: 12093 - DNA, 25 bp, SARS Virus
ctactcacctcagatcgatgtaaga

SEQ ID NO: 12094 - DNA, 25 bp, SARS Virus
tactcacctcacgtcgatgtaagat

SEQ ID NO: 12095 - DNA, 25 bp, SARS Virus
actcacctcacagcgatgtaagatg

SEQ ID NO: 12096 - DNA, 25 bp, SARS Virus
ctcacctcacatggatgtaagatga

SEQ ID NO: 12097 - DNA, 25 bp, SARS Virus
tcacctcacatcgatgtaagatgaa

SEQ ID NO: 12098 - DNA, 25 bp, SARS Virus
cacctcacatcggtgtaagatgaat

SEQ ID NO: 12099 - DNA, 25 bp, SARS Virus
acctcacatcgaggtaagatgaata

SEQ ID NO: 12100 - DNA, 25 bp, SARS Virus
cctcacatcgatgtaagatgaataa

SEQ ID NO: 12101 - DNA, 25 bp, SARS Virus
ctcacatcgatggaagatgaataaa

SEQ ID NO: 12102 - DNA, 25 bp, SARS Virus
tcacatcgatgtgagatgaataaac

SEQ ID NO: 12103 - DNA, 25 bp, SARS Virus
cacatcgatgtaggatgaataaact

SEQ ID NO: 12104 - DNA, 25 bp, SARS Virus
acatcgatgtaagatgaataaacta

SEQ ID NO: 12105 - DNA, 25 bp, SARS Virus
catcgatgtaaggtgaataaactac

SEQ ID NO: 12106 - DNA, 25 bp, SARS Virus
atcgatgtaagaggaataaactact

SEQ ID NO: 12107 - DNA, 25 bp, SARS Virus
tcgatgtaagatgaataaactacta

SEQ ID NO: 12108 - DNA, 25 bp, SARS Virus
cgatgtaagatggataaactactac

SEQ ID NO: 12109 - DNA, 25 bp, SARS Virus
gatgtaagatgagtaaactactacg

SEQ ID NO: 12110 - DNA, 25 bp, SARS Virus
atgtaagatgaagaaactactacga

SEQ ID NO: 12111 - DNA, 25 bp, SARS Virus
tgtaagatgaatgaactactacgac

SEQ ID NO: 12112 - DNA, 25 bp, SARS Virus
gtaagatgaatagactactacgacc

SEQ ID NO: 12113 - DNA, 25 bp, SARS Virus
taagatgaataagctactacgacca

SEQ ID NO: 12114 - DNA, 25 bp, SARS Virus
aagatgaataaagtactacgaccac

SEQ ID NO: 12115 - DNA, 25 bp, SARS Virus
agatgaataaacgactacgaccact

SEQ ID NO: 12116 - DNA, 25 bp, SARS Virus
gatgaataaactgctacgaccactt

SEQ ID NO: 12117 - DNA, 25 bp, SARS Virus
atgaataaactagtacgaccacttc

SEQ ID NO: 12118 - DNA, 25 bp, SARS Virus
tgaataaactacgacgaccacttct

SEQ ID NO: 12119 - DNA, 25 bp, SARS Virus
gaataaactactgcgaccacttctt

SEQ ID NO: 12120 - DNA, 25 bp, SARS Virus
aataaactactaggaccacttcttt

SEQ ID NO: 12121 - DNA, 25 bp, SARS Virus
ataaactactacgaccacttctttt

SEQ ID NO: 12122 - DNA, 25 bp, SARS Virus
taaactactacggccacttcttttg

SEQ ID NO: 12123 - DNA, 25 bp, SARS Virus
aaactactacgagcacttcttttga

SEQ ID NO: 12124 - DNA, 25 bp, SARS Virus
aactactacgacgacttcttttgaa

SEQ ID NO: 12125 - DNA, 25 bp, SARS Virus
actactacgaccgcttcttttgaaa

SEQ ID NO: 12126 - DNA, 25 bp, SARS Virus
ctactacgaccagttcttttgaaaa

SEQ ID NO: 12127 - DNA, 25 bp, SARS Virus
tactacgaccacgtcttttgaaaag

SEQ ID NO: 12128 - DNA, 25 bp, SARS Virus
actacgaccactgcttttgaaaagt

SEQ ID NO: 12129 - DNA, 25 bp, SARS Virus
ctacgaccacttgttttgaaaagta

SEQ ID NO: 12130 - DNA, 25 bp, SARS Virus
tacgaccacttcgtttgaaaagtag

SEQ ID NO: 12131 - DNA, 25 bp, SARS Virus
acgaccacttctgttgaaaagtagt

SEQ ID NO: 12132 - DNA, 25 bp, SARS Virus
cgaccacttcttgtgaaaagtagtg

SEQ ID NO: 12133 - DNA, 25 bp, SARS Virus
gaccacttctttggaaaagtagtgc

SEQ ID NO: 12134 - DNA, 25 bp, SARS Virus
accacttcttttgaaaagtagtgca

SEQ ID NO: 12135 - DNA, 25 bp, SARS Virus
ccacttcttttggaaagtagtgcat

SEQ ID NO: 12136 - DNA, 25 bp, SARS Virus
cacttcttttgagaagtagtgcata

SEQ ID NO: 12137 - DNA, 25 bp, SARS Virus
acttcttttgaagagtagtgcatac

SEQ ID NO: 12138 - DNA, 25 bp, SARS Virus
cttcttttgaaaggtagtgcataca

SEQ ID NO: 12139 - DNA, 25 bp, SARS Virus
ttcttttgaaaagtagtgcatacat

SEQ ID NO: 12140 - DNA, 25 bp, SARS Virus
tcttttgaaaaggagtgcatacata

SEQ ID NO: 12141 - DNA, 25 bp, SARS Virus
cttttgaaaagtggtgcatacataa

SEQ ID NO: 12142 - DNA, 25 bp, SARS Virus
ttttgaaaagtagtgcatacataac

SEQ ID NO: 12143 - DNA, 25 bp, SARS Virus
tttgaaaagtagggcatacataaca

SEQ ID NO: 12144 - DNA, 25 bp, SARS Virus
ttgaaaagtagtgcatacataacaa

SEQ ID NO: 12145 - DNA, 25 bp, SARS Virus
tgaaaagtagtggatacataacaag

SEQ ID NO: 12146 - DNA, 25 bp, SARS Virus
gaaaagtagtgcgtacataacaagg

SEQ ID NO: 12147 - DNA, 25 bp, SARS Virus
aaaagtagtgcagacataacaagga

SEQ ID NO: 12148 - DNA, 25 bp, SARS Virus
aaagtagtgcatgcataacaaggaa

SEQ ID NO: 12149 - DNA, 25 bp, SARS Virus
aagtagtgcatagataacaaggaaa

SEQ ID NO: 12150 - DNA, 25 bp, SARS Virus
agtagtgcatacgtaacaaggaaaa

SEQ ID NO: 12151 - DNA, 25 bp, SARS Virus
gtagtgcatacagaacaaggaaaat

SEQ ID NO: 12152 - DNA, 25 bp, SARS Virus
tagtgcatacatgacaaggaaaatg

SEQ ID NO: 12153 - DNA, 25 bp, SARS Virus
agtgcatacatagcaaggaaaatgg

SEQ ID NO: 12154 - DNA, 25 bp, SARS Virus
gtgcatacataagaaggaaaatggg

SEQ ID NO: 12155 - DNA, 25 bp, SARS Virus
tgcatacataacgaggaaaatggga

SEQ ID NO: 12156 - DNA, 25 bp, SARS Virus
gcatacataacagggaaaatgggag

SEQ ID NO: 12157 - DNA, 25 bp, SARS Virus
catacataacaaggaaaatgggagg

SEQ ID NO: 12158 - DNA, 25 bp, SARS Virus
atacataacaaggaaaatgggaggt

SEQ ID NO: 12159 - DNA, 25 bp, SARS Virus
tacataacaagggaaatgggaggtc

SEQ ID NO: 12160 - DNA, 25 bp, SARS Virus
acataacaaggagaatgggaggtct

SEQ ID NO: 12161 - DNA, 25 bp, SARS Virus
cataacaaggaagatgggaggtcta

SEQ ID NO: 12162 - DNA, 25 bp, SARS Virus
ataacaaggaaagtgggaggtctac

SEQ ID NO: 12163 - DNA, 25 bp, SARS Virus
taacaaggaaaaggggaggtctact

SEQ ID NO: 12164 - DNA, 25 bp, SARS Virus
aacaaggaaaatgggaggtctactc

SEQ ID NO: 12165 - DNA, 25 bp, SARS Virus
acaaggaaaatgggaggtctactcc

SEQ ID NO: 12166 - DNA, 25 bp, SARS Virus
caaggaaaatgggaggtctactcct

SEQ ID NO: 12167 - DNA, 25 bp, SARS Virus
aaggaaaatggggggtctactcctt

SEQ ID NO: 12168 - DNA, 25 bp, SARS Virus
aggaaaatgggaggtctactccttc

SEQ ID NO: 12169 - DNA, 25 bp, SARS Virus
ggaaaatgggaggtctactccttct

SEQ ID NO: 12170 - DNA, 25 bp, SARS Virus
gaaaatgggagggctactccttctt

SEQ ID NO: 12171 - DNA, 25 bp, SARS Virus
aaaatgggaggtgtactccttcttc

SEQ ID NO: 12172 - DNA, 25 bp, SARS Virus
aaatgggaggtcgactccttcttct

SEQ ID NO: 12173 - DNA, 25 bp, SARS Virus
aatgggaggtctgctccttcttctc

SEQ ID NO: 12174 - DNA, 25 bp, SARS Virus
atgggaggtctagtccttcttctcc

SEQ ID NO: 12175 - DNA, 25 bp, SARS Virus
tgggaggtctacgccttcttctcct

SEQ ID NO: 12176 - DNA, 25 bp, SARS Virus
gggaggtctactgcttcttctcctg

SEQ ID NO: 12177 - DNA, 25 bp, SARS Virus
ggaggtctactcgttcttctcctgc

SEQ ID NO: 12178 - DNA, 25 bp, SARS Virus
gaggtctactccgtcttctcctgct

SEQ ID NO: 12179 - DNA, 25 bp, SARS Virus
aggtctactcctgcttctcctgcta

SEQ ID NO: 12180 - DNA, 25 bp, SARS Virus
ggtctactccttgttctcctgctac

SEQ ID NO: 12181 - DNA, 25 bp, SARS Virus
gtctactccttcgtctcctgctacg

SEQ ID NO: 12182 - DNA, 25 bp, SARS Virus
tctactccttctgctcctgctacgt

SEQ ID NO: 12183 - DNA, 25 bp, SARS Virus
ctactccttcttgtcctgctacgtc

SEQ ID NO: 12184 - DNA, 25 bp, SARS Virus
tactccttcttcgcctgctacgtct

SEQ ID NO: 12185 - DNA, 25 bp, SARS Virus
actccttcttctgctgctacgtctc

SEQ ID NO: 12186 - DNA, 25 bp, SARS Virus
ctccttcttctcgtgctacgtctca

SEQ ID NO: 12187 - DNA, 25 bp, SARS Virus
tccttcttctccggctacgtctcac

SEQ ID NO: 12188 - DNA, 25 bp, SARS Virus
ccttcttctcctgctacgtctcaca

SEQ ID NO: 12189 - DNA, 25 bp, SARS Virus
cttcttctcctggtacgtctcacac

SEQ ID NO: 12190 - DNA, 25 bp, SARS Virus
ttcttctcctgcgacgtctcacact

SEQ ID NO: 12191 - DNA, 25 bp, SARS Virus
tcttctcctgctgcgtctcacactc

SEQ ID NO: 12192 - DNA, 25 bp, SARS Virus
cttctcctgctaggtctcacactcc

SEQ ID NO: 12193 - DNA, 25 bp, SARS Virus
ttctcctgctacgtctcacactcct

SEQ ID NO: 12194 - DNA, 25 bp, SARS Virus
tctcctgctacggctcacactcctt

SEQ ID NO: 12195 - DNA, 25 bp, SARS Virus
ctcctgctacgtgtcacactccttc

SEQ ID NO: 12196 - DNA, 25 bp, SARS Virus
tcctgctacgtcgcacactccttct

SEQ ID NO: 12197 - DNA, 25 bp, SARS Virus
cctgctacgtctgacactccttctt

SEQ ID NO: 12198 - DNA, 25 bp, SARS Virus
ctgctacgtctcgcactccttcttc

SEQ ID NO: 12199 - DNA, 25 bp, SARS Virus
tgctacgtctcagactccttcttct

SEQ ID NO: 12200 - DNA, 25 bp, SARS Virus
gctacgtctcacgctccttcttctt

SEQ ID NO: 12201 - DNA, 25 bp, SARS Virus
ctacgtctcacagtccttcttcttt

SEQ ID NO: 12202 - DNA, 25 bp, SARS Virus
tacgtctcacacgccttcttcttta

SEQ ID NO: 12203 - DNA, 25 bp, SARS Virus
acgtctcacactgcttcttctttaa

SEQ ID NO: 12204 - DNA, 25 bp, SARS Virus
cgtctcacactcgttcttctttaac

SEQ ID NO: 12205 - DNA, 25 bp, SARS Virus
gtctcacactccgtcttctttaact

SEQ ID NO: 12206 - DNA, 25 bp, SARS Virus
tctcacactcctgcttctttaacta

SEQ ID NO: 12207 - DNA, 25 bp, SARS Virus
ctcacactccttgttctttaactac

SEQ ID NO: 12208 - DNA, 25 bp, SARS Virus
tcacactccttcgtctttaactact

SEQ ID NO: 12209 - DNA, 25 bp, SARS Virus
cacactccttctgctttaactactt

SEQ ID NO: 12210 - DNA, 25 bp, SARS Virus
acactccttcttgtttaactacttt

SEQ ID NO: 12211 - DNA, 25 bp, SARS Virus
cactccttcttcgttaactactttg

SEQ ID NO: 12212 - DNA, 25 bp, SARS Virus
actccttcttctgtaactactttgg

SEQ ID NO: 12213 - DNA, 25 bp, SARS Virus
ctccttcttcttgaactactttgga

SEQ ID NO: 12214 - DNA, 25 bp, SARS Virus
tccttcttctttgactactttggac

SEQ ID NO: 12215 - DNA, 25 bp, SARS Virus
ccttcttctttagctactttggaca

SEQ ID NO: 12216 - DNA, 25 bp, SARS Virus
cttcttctttaagtactttggacac

SEQ ID NO: 12217 - DNA, 25 bp, SARS Virus
ttcttctttaacgactttggacact

SEQ ID NO: 12218 - DNA, 25 bp, SARS Virus
tcttctttaactgctttggacactt

SEQ ID NO: 12219 - DNA, 25 bp, SARS Virus
cttctttaactagtttggacacttg

SEQ ID NO: 12220 - DNA, 25 bp, SARS Virus
ttctttaactacgttggacacttgt

SEQ ID NO: 12221 - DNA, 25 bp, SARS Virus
tctttaactactgtggacacttgta

SEQ ID NO: 12222 - DNA, 25 bp, SARS Virus
ctttaactacttgggacacttgtac

SEQ ID NO: 12223 - DNA, 25 bp, SARS Virus
tttaactactttggacacttgtact

SEQ ID NO: 12224 - DNA, 25 bp, SARS Virus
ttaactactttggacacttgtactc

SEQ ID NO: 12225 - DNA, 25 bp, SARS Virus
taactactttgggcacttgtactca

SEQ ID NO: 12226 - DNA, 25 bp, SARS Virus
aactactttggagacttgtactcat

SEQ ID NO: 12227 - DNA, 25 bp, SARS Virus
actactttggacgcttgtactcatg

SEQ ID NO: 12228 - DNA, 25 bp, SARS Virus
ctactttggacagttgtactcatgc

SEQ ID NO: 12229 - DNA, 25 bp, SARS Virus
tactttggacacgtgtactcatgcc

SEQ ID NO: 12230 - DNA, 25 bp, SARS Virus
actttggacactggtactcatgcca

SEQ ID NO: 12231 - DNA, 25 bp, SARS Virus
ctttggacacttgtactcatgccat

SEQ ID NO: 12232 - DNA, 25 bp, SARS Virus
tttggacacttggactcatgccatg

SEQ ID NO: 12233 - DNA, 25 bp, SARS Virus
ttggacacttgtgctcatgccatgt

SEQ ID NO: 12234 - DNA, 25 bp, SARS Virus
tggacacttgtagtcatgccatgtc

SEQ ID NO: 12235 - DNA, 25 bp, SARS Virus
ggacacttgtacgcatgccatgtct

SEQ ID NO: 12236 - DNA, 25 bp, SARS Virus
gacacttgtactgatgccatgtctc

SEQ ID NO: 12237 - DNA, 25 bp, SARS Virus
acacttgtactcgtgccatgtctcc

SEQ ID NO: 12238 - DNA, 25 bp, SARS Virus
cacttgtactcaggccatgtctcct

SEQ ID NO: 12239 - DNA, 25 bp, SARS Virus
acttgtactcatgccatgtctccta

SEQ ID NO: 12240 - DNA, 25 bp, SARS Virus
cttgtactcatggcatgtctcctac

SEQ ID NO: 12241 - DNA, 25 bp, SARS Virus
ttgtactcatgcgatgtctcctact

SEQ ID NO: 12242 - DNA, 25 bp, SARS Virus
tgtactcatgccgtgtctcctacta

SEQ ID NO: 12243 - DNA, 25 bp, SARS Virus
gtactcatgccaggtctcctactaa

SEQ ID NO: 12244 - DNA, 25 bp, SARS Virus
tactcatgccatgtctcctactaat

SEQ ID NO: 12245 - DNA, 25 bp, SARS Virus
actcatgccatggctcctactaata

SEQ ID NO: 12246 - DNA, 25 bp, SARS Virus
ctcatgccatgtgtcctactaatag

SEQ ID NO: 12247 - DNA, 25 bp, SARS Virus
tcatgccatgtcgcctactaatagt

SEQ ID NO: 12248 - DNA, 25 bp, SARS Virus
catgccatgtctgctactaatagtt

SEQ ID NO: 12249 - DNA, 25 bp, SARS Virus
atgccatgtctcgtactaatagttc

SEQ ID NO: 12250 - DNA, 25 bp, SARS Virus
tgccatgtctccgactaatagttcc

SEQ ID NO: 12251 - DNA, 25 bp, SARS Virus
gccatgtctcctgctaatagttcca

SEQ ID NO: 12252 - DNA, 25 bp, SARS Virus
ccatgtctcctagtaatagttccag

SEQ ID NO: 12253 - DNA, 25 bp, SARS Virus
catgtctcctacgaatagttccaga

SEQ ID NO: 12254 - DNA, 25 bp, SARS Virus
atgtctcctactgatagttccagag

SEQ ID NO: 12255 - DNA, 25 bp, SARS Virus
tgtctcctactagtagttccagagg

SEQ ID NO: 12256 - DNA, 25 bp, SARS Virus
gtctcctactaagagttccagaggg

SEQ ID NO: 12257 - DNA, 25 bp, SARS Virus
tctcctactaatggttccagaggga

SEQ ID NO: 12258 - DNA, 25 bp, SARS Virus
ctcctactaatagttccagagggag

SEQ ID NO: 12259 - DNA, 25 bp, SARS Virus
tcctactaataggtccagagggaga

SEQ ID NO: 12260 - DNA, 25 bp, SARS Virus
cctactaatagtgccagagggagac

SEQ ID NO: 12261 - DNA, 25 bp, SARS Virus
ctactaatagttgcagagggagacc

SEQ ID NO: 12262 - DNA, 25 bp, SARS Virus
tactaatagttcgagagggagacct

SEQ ID NO: 12263 - DNA, 25 bp, SARS Virus
actaatagttccggagggagacctt

SEQ ID NO: 12264 - DNA, 25 bp, SARS Virus
ctaatagttccagagggagacctta

SEQ ID NO: 12265 - DNA, 25 bp, SARS Virus
taatagttccagggggagaccttaa

SEQ ID NO: 12266 - DNA, 25 bp, SARS Virus
aatagttccagagggagaccttaaa

SEQ ID NO: 12267 - DNA, 25 bp, SARS Virus
atagttccagagggagaccttaaac

SEQ ID NO: 12268 - DNA, 25 bp, SARS Virus
tagttccagagggagaccttaaacc

SEQ ID NO: 12269 - DNA, 25 bp, SARS Virus
agttccagagggggaccttaaacca

SEQ ID NO: 12270 - DNA, 25 bp, SARS Virus
gttccagagggagaccttaaaccac

SEQ ID NO: 12271 - DNA, 25 bp, SARS Virus
ttccagagggaggccttaaaccacg

SEQ ID NO: 12272 - DNA, 25 bp, SARS Virus
tccagagggagagcttaaaccacgg

SEQ ID NO: 12273 - DNA, 25 bp, SARS Virus
ccagagggagacgttaaaccacgga

SEQ ID NO: 12274 - DNA, 25 bp, SARS Virus
cagagggagaccgtaaaccacggag

SEQ ID NO: 12275 - DNA, 25 bp, SARS Virus
agagggagacctgaaaccacggagt

SEQ ID NO: 12276 - DNA, 25 bp, SARS Virus
gagggagaccttgaaccacggagtc

SEQ ID NO: 12277 - DNA, 25 bp, SARS Virus
agggagaccttagaccacggagtcg

SEQ ID NO: 12278 - DNA, 25 bp, SARS Virus
gggagaccttaagccacggagtcga

SEQ ID NO: 12279 - DNA, 25 bp, SARS Virus
ggagaccttaaagcacggagtcgac

SEQ ID NO: 12280 - DNA, 25 bp, SARS Virus
gagaccttaaacgacggagtcgact

SEQ ID NO: 12281 - DNA, 25 bp, SARS Virus
agaccttaaaccgcggagtcgactt

SEQ ID NO: 12282 - DNA, 25 bp, SARS Virus
gaccttaaaccagggagtcgacttt

SEQ ID NO: 12283 - DNA, 25 bp, SARS Virus
accttaaaccacggagtcgactttg

SEQ ID NO: 12284 - DNA, 25 bp, SARS Virus
ccttaaaccacggagtcgactttgt

SEQ ID NO: 12285 - DNA, 25 bp, SARS Virus
cttaaaccacggggtcgactttgtc

SEQ ID NO: 12286 - DNA, 25 bp, SARS Virus
ttaaaccacggagtcgactttgtca

SEQ ID NO: 12287 - DNA, 25 bp, SARS Virus
taaaccacggaggcgactttgtcaa

SEQ ID NO: 12288 - DNA, 25 bp, SARS Virus
aaaccacggagtggactttgtcaag

SEQ ID NO: 12289 - DNA, 25 bp, SARS Virus
aaccacggagtcgactttgtcaagc

SEQ ID NO: 12290 - DNA, 25 bp, SARS Virus
accacggagtcggctttgtcaagct

SEQ ID NO: 12291 - DNA, 25 bp, SARS Virus
ccacggagtcgagtttgtcaagctc

SEQ ID NO: 12292 - DNA, 25 bp, SARS Virus
cacggagtcgacgttgtcaagctca

SEQ ID NO: 12293 - DNA, 25 bp, SARS Virus
acggagtcgactgtgtcaagctcaa

SEQ ID NO: 12294 - DNA, 25 bp, SARS Virus
cggagtcgacttggtcaagctcaac

SEQ ID NO: 12295 - DNA, 25 bp, SARS Virus
ggagtcgactttgtcaagctcaact

SEQ ID NO: 12296 - DNA, 25 bp, SARS Virus
gagtcgactttggcaagctcaactc

SEQ ID NO: 12297 - DNA, 25 bp, SARS Virus
agtcgactttgtgaagctcaactcc

SEQ ID NO: 12298 - DNA, 25 bp, SARS Virus
gtcgactttgtcgagctcaactcct

SEQ ID NO: 12299 - DNA, 25 bp, SARS Virus
tcgactttgtcaggctcaactcctt

SEQ ID NO: 12300 - DNA, 25 bp, SARS Virus
cgactttgtcaagctcaactccttc

SEQ ID NO: 12301 - DNA, 25 bp, SARS Virus
gactttgtcaaggtcaactccttct

SEQ ID NO: 12302 - DNA, 25 bp, SARS Virus
actttgtcaagcgcaactccttctt

SEQ ID NO: 12303 - DNA, 25 bp, SARS Virus
ctttgtcaagctgaactccttcttc

SEQ ID NO: 12304 - DNA, 25 bp, SARS Virus
tttgtcaagctcgactccttcttct

SEQ ID NO: 12305 - DNA, 25 bp, SARS Virus
ttgtcaagctcagctccttcttctt

SEQ ID NO: 12306 - DNA, 25 bp, SARS Virus
tgtcaagctcaagtccttcttcttc

SEQ ID NO: 12307 - DNA, 25 bp, SARS Virus
gtcaagctcaacgccttcttcttct

SEQ ID NO: 12308 - DNA, 25 bp, SARS Virus
tcaagctcaactgcttcttcttctc

SEQ ID NO: 12309 - DNA, 25 bp, SARS Virus
caagctcaactcgttcttcttctcc

SEQ ID NO: 12310 - DNA, 25 bp, SARS Virus
aagctcaactccgtcttcttctcct

SEQ ID NO: 12311 - DNA, 25 bp, SARS Virus
agctcaactcctgcttcttctcctt

SEQ ID NO: 12312 - DNA, 25 bp, SARS Virus
gctcaactccttgttcttctccttc

SEQ ID NO: 12313 - DNA, 25 bp, SARS Virus
ctcaactccttcgtcttctccttct

SEQ ID NO: 12314 - DNA, 25 bp, SARS Virus
tcaactccttctgcttctccttctg

SEQ ID NO: 12315 - DNA, 25 bp, SARS Virus
caactccttcttgttctccttctga

SEQ ID NO: 12316 - DNA, 25 bp, SARS Virus
aactccttcttcgtctccttctgac

SEQ ID NO: 12317 - DNA, 25 bp, SARS Virus
actccttcttctgctccttctgacc

SEQ ID NO: 12318 - DNA, 25 bp, SARS Virus
ctccttcttcttgtccttctgaccg

SEQ ID NO: 12319 - DNA, 25 bp, SARS Virus
tccttcttcttcgccttctgaccga

SEQ ID NO: 12320 - DNA, 25 bp, SARS Virus
ccttcttcttctgcttctgaccgac

SEQ ID NO: 12321 - DNA, 25 bp, SARS Virus
cttcttcttctcgttctgaccgacc

SEQ ID NO: 12322 - DNA, 25 bp, SARS Virus
ttcttcttctccgtctgaccgacct

SEQ ID NO: 12323 - DNA, 25 bp, SARS Virus
tcttcttctcctgctgaccgaccta

SEQ ID NO: 12324 - DNA, 25 bp, SARS Virus
cttcttctccttgtgaccgacctac

SEQ ID NO: 12325 - DNA, 25 bp, SARS Virus
ttcttctccttcggaccgacctact

SEQ ID NO: 12326 - DNA, 25 bp, SARS Virus
tcttctccttctgaccgacctacta

SEQ ID NO: 12327 - DNA, 25 bp, SARS Virus
cttctccttctggccgacctactat

SEQ ID NO: 12328 - DNA, 25 bp, SARS Virus
ttctccttctgagcgacctactatg

SEQ ID NO: 12329 - DNA, 25 bp, SARS Virus
aattttcccccatgtggttaatttc

SEQ ID NO: 12330 - DNA, 25 bp, SARS Virus
attttcccccacttggttaatttcc

SEQ ID NO: 12331 - DNA, 25 bp, SARS Virus
ttttcccccacgtggttaatttcca

SEQ ID NO: 12332 - DNA, 25 bp, SARS Virus
tttcccccacgttgttaatttccac

SEQ ID NO: 12333 - DNA, 25 bp, SARS Virus
ttcccccacgtgtttaatttccaca

SEQ ID NO: 12334 - DNA, 25 bp, SARS Virus
tcccccacgtggttaatttccacat

SEQ ID NO: 12335 - DNA, 25 bp, SARS Virus
cccccacgtggttaatttccacatt

SEQ ID NO: 12336 - DNA, 25 bp, SARS Virus
ccccacgtggtttatttccacattg

SEQ ID NO: 12337 - DNA, 25 bp, SARS Virus
cccacgtggttattttccacattgg

SEQ ID NO: 12338 - DNA, 25 bp, SARS Virus
ccacgtggttaatttccacattgga

SEQ ID NO: 12339 - DNA, 25 bp, SARS Virus
cacgtggttaatttccacattggaa

SEQ ID NO: 12340 - DNA, 25 bp, SARS Virus
acgtggttaatttccacattggaaa

SEQ ID NO: 12341 - DNA, 25 bp, SARS Virus
cgtggttaattttcacattggaaac

SEQ ID NO: 12342 - DNA, 25 bp, SARS Virus
gtggttaatttctacattggaaacc

SEQ ID NO: 12343 - DNA, 25 bp, SARS Virus
tggttaatttcctcattggaaacct

SEQ ID NO: 12344 - DNA, 25 bp, SARS Virus
ggttaatttccatattggaaacctc

SEQ ID NO: 12345 - DNA, 25 bp, SARS Virus
gttaatttccactttggaaacctct

SEQ ID NO: 12346 - DNA, 25 bp, SARS Virus
ttaatttccacattggaaacctctt

SEQ ID NO: 12347 - DNA, 25 bp, SARS Virus
taatttccacattggaaacctcttc

SEQ ID NO: 12348 - DNA, 25 bp, SARS Virus
aatttccacatttgaaacctcttct

SEQ ID NO: 12349 - DNA, 25 bp, SARS Virus
atttccacattgtaaacctcttcta

SEQ ID NO: 12350 - DNA, 25 bp, SARS Virus
tttccacattggtaacctcttctat

SEQ ID NO: 12351 - DNA, 25 bp, SARS Virus
ttccacattggatacctcttctatg

SEQ ID NO: 12352 - DNA, 25 bp, SARS Virus
tccacattggaatcctcttctatga

SEQ ID NO: 12353 - DNA, 25 bp, SARS Virus
ccacattggaaatctcttctatgac

SEQ ID NO: 12354 - DNA, 25 bp, SARS Virus
cacattggaaacttcttctatgaca

SEQ ID NO: 12355 - DNA, 25 bp, SARS Virus
acattggaaacctcttctatgacaa

SEQ ID NO: 12356 - DNA, 25 bp, SARS Virus
cattggaaaccttttctatgacaaa

SEQ ID NO: 12357 - DNA, 25 bp, SARS Virus
attggaaacctcttctatgacaaac

SEQ ID NO: 12358 - DNA, 25 bp, SARS Virus
ttggaaacctcttctatgacaaacc

SEQ ID NO: 12359 - DNA, 25 bp, SARS Virus
tggaaacctcttttatgacaaaccc

SEQ ID NO: 12360 - DNA, 25 bp, SARS Virus
ggaaacctcttctatgacaaaccct

SEQ ID NO: 12361 - DNA, 25 bp, SARS Virus
gaaacctcttctttgacaaaccctt

SEQ ID NO: 12362 - DNA, 25 bp, SARS Virus
aaacctcttctatgacaaacccttc

SEQ ID NO: 12363 - DNA, 25 bp, SARS Virus
aacctcttctattacaaacccttca

SEQ ID NO: 12364 - DNA, 25 bp, SARS Virus
acctcttctatgtcaaacccttcaa

SEQ ID NO: 12365 - DNA, 25 bp, SARS Virus
cctcttctatgataaacccttcaag

SEQ ID NO: 12366 - DNA, 25 bp, SARS Virus
ctcttctatgactaacccttcaagt

SEQ ID NO: 12367 - DNA, 25 bp, SARS Virus
tcttctatgacatacccttcaagtt

SEQ ID NO: 12368 - DNA, 25 bp, SARS Virus
cttctatgacaatcccttcaagttc

SEQ ID NO: 12369 - DNA, 25 bp, SARS Virus
ttctatgacaaatccttcaagttcc

SEQ ID NO: 12370 - DNA, 25 bp, SARS Virus
tctatgacaaactcttcaagttcca

SEQ ID NO: 12371 - DNA, 25 bp, SARS Virus
ctatgacaaacctttcaagttccaa

SEQ ID NO: 12372 - DNA, 25 bp, SARS Virus
tatgacaaacccttcaagttccaat

SEQ ID NO: 12373 - DNA, 25 bp, SARS Virus
atgacaaacccttcaagttccaatg

SEQ ID NO: 12374 - DNA, 25 bp, SARS Virus
tgacaaaccctttaagttccaatgt

SEQ ID NO: 12375 - DNA, 25 bp, SARS Virus
gacaaacccttctagttccaatgtt

SEQ ID NO: 12376 - DNA, 25 bp, SARS Virus
acaaacccttcatgttccaatgttc

SEQ ID NO: 12377 - DNA, 25 bp, SARS Virus
caaacccttcaatttccaatgttct

SEQ ID NO: 12378 - DNA, 25 bp, SARS Virus
aaacccttcaagttccaatgttctt

SEQ ID NO: 12379 - DNA, 25 bp, SARS Virus
aacccttcaagttccaatgttctta

SEQ ID NO: 12380 - DNA, 25 bp, SARS Virus
acccttcaagtttcaatgttcttac

SEQ ID NO: 12381 - DNA, 25 bp, SARS Virus
cccttcaagttctaatgttcttaca

SEQ ID NO: 12382 - DNA, 25 bp, SARS Virus
ccttcaagttcctatgttcttacac

SEQ ID NO: 12383 - DNA, 25 bp, SARS Virus
cttcaagttccattgttcttacact

SEQ ID NO: 12384 - DNA, 25 bp, SARS Virus
ttcaagttccaatgttcttacactc

SEQ ID NO: 12385 - DNA, 25 bp, SARS Virus
tcaagttccaattttcttacactct

SEQ ID NO: 12386 - DNA, 25 bp, SARS Virus
caagttccaatgttcttacactctt

SEQ ID NO: 12387 - DNA, 25 bp, SARS Virus
aagttccaatgttcttacactctta

SEQ ID NO: 12388 - DNA, 25 bp, SARS Virus
agttccaatgtttttacactcttag

SEQ ID NO: 12389 - DNA, 25 bp, SARS Virus
gttccaatgttcttacactcttagt

SEQ ID NO: 12390 - DNA, 25 bp, SARS Virus
ttccaatgttcttacactcttagtg

SEQ ID NO: 12391 - DNA, 25 bp, SARS Virus
tccaatgttctttcactcttagtgt

SEQ ID NO: 12392 - DNA, 25 bp, SARS Virus
ccaatgttcttatactcttagtgta

SEQ ID NO: 12393 - DNA, 25 bp, SARS Virus
caatgttcttactctcttagtgtaa

SEQ ID NO: 12394 - DNA, 25 bp, SARS Virus
aatgttcttacattcttagtgtaaa

SEQ ID NO: 12395 - DNA, 25 bp, SARS Virus
atgttcttacactcttagtgtaaac

SEQ ID NO: 12396 - DNA, 25 bp, SARS Virus
tgttcttacacttttagtgtaaact

SEQ ID NO: 12397 - DNA, 25 bp, SARS Virus
gttcttacactcttagtgtaaactc

SEQ ID NO: 12398 - DNA, 25 bp, SARS Virus
ttcttacactcttagtgtaaactcg

SEQ ID NO: 12399 - DNA, 25 bp, SARS Virus
tcttacactctttgtgtaaactcga

SEQ ID NO: 12400 - DNA, 25 bp, SARS Virus
cttacactcttattgtaaactcgaa

SEQ ID NO: 12401 - DNA, 25 bp, SARS Virus
ttacactcttagtgtaaactcgaac

SEQ ID NO: 12402 - DNA, 25 bp, SARS Virus
tacactcttagtttaaactcgaact

SEQ ID NO: 12403 - DNA, 25 bp, SARS Virus
acactcttagtgtaaactcgaacta

SEQ ID NO: 12404 - DNA, 25 bp, SARS Virus
cactcttagtgttaactcgaactac

SEQ ID NO: 12405 - DNA, 25 bp, SARS Virus
actcttagtgtatactcgaactact

SEQ ID NO: 12406 - DNA, 25 bp, SARS Virus
ctcttagtgtaatctcgaactactt

SEQ ID NO: 12407 - DNA, 25 bp, SARS Virus
tcttagtgtaaattcgaactacttg

SEQ ID NO: 12408 - DNA, 25 bp, SARS Virus
cttagtgtaaactcgaactacttgc

SEQ ID NO: 12409 - DNA, 25 bp, SARS Virus
ttagtgtaaacttgaactacttgca

SEQ ID NO: 12410 - DNA, 25 bp, SARS Virus
tagtgtaaactctaactacttgcac

SEQ ID NO: 12411 - DNA, 25 bp, SARS Virus
agtgtaaactcgtactacttgcaca

SEQ ID NO: 12412 - DNA, 25 bp, SARS Virus
gtgtaaactcgatctacttgcacaa

SEQ ID NO: 12413 - DNA, 25 bp, SARS Virus
tgtaaactcgaattacttgcacaac

SEQ ID NO: 12414 - DNA, 25 bp, SARS Virus
gtaaactcgaactacttgcacaact

SEQ ID NO: 12415 - DNA, 25 bp, SARS Virus
taaactcgaacttcttgcacaactg

SEQ ID NO: 12416 - DNA, 25 bp, SARS Virus
aaactcgaactatttgcacaactgt

SEQ ID NO: 12417 - DNA, 25 bp, SARS Virus
aactcgaactacttgcacaactgtt

SEQ ID NO: 12418 - DNA, 25 bp, SARS Virus
actcgaactacttgcacaactgttt

SEQ ID NO: 12419 - DNA, 25 bp, SARS Virus
ctcgaactactttcacaactgtttc

SEQ ID NO: 12420 - DNA, 25 bp, SARS Virus
tcgaactacttgtacaactgtttca

SEQ ID NO: 12421 - DNA, 25 bp, SARS Virus
cgaactacttgctcaactgtttcac

SEQ ID NO: 12422 - DNA, 25 bp, SARS Virus
gaactacttgcataactgtttcacg

SEQ ID NO: 12423 - DNA, 25 bp, SARS Virus
aactacttgcactactgtttcacga

SEQ ID NO: 12424 - DNA, 25 bp, SARS Virus
actacttgcacatctgtttcacgaa

SEQ ID NO: 12425 - DNA, 25 bp, SARS Virus
ctacttgcacaattgtttcacgaat

SEQ ID NO: 12426 - DNA, 25 bp, SARS Virus
tacttgcacaactgtttcacgaatt

SEQ ID NO: 12427 - DNA, 25 bp, SARS Virus
acttgcacaactttttcacgaatta

SEQ ID NO: 12428 - DNA, 25 bp, SARS Virus
cttgcacaactgtttcacgaattac

SEQ ID NO: 12429 - DNA, 25 bp, SARS Virus
ttgcacaactgtttcacgaattact

SEQ ID NO: 12430 - DNA, 25 bp, SARS Virus
tgcacaactgtttcacgaattactt

SEQ ID NO: 12431 - DNA, 25 bp, SARS Virus
gcacaactgttttacgaattacttt

SEQ ID NO: 12432 - DNA, 25 bp, SARS Virus
cacaactgtttctcgaattactttt

SEQ ID NO: 12433 - DNA, 25 bp, SARS Virus
acaactgtttcatgaattacttttc

SEQ ID NO: 12434 - DNA, 25 bp, SARS Virus
caactgtttcactaattacttttca

SEQ ID NO: 12435 - DNA, 25 bp, SARS Virus
aactgtttcacgtattacttttcac

SEQ ID NO: 12436 - DNA, 25 bp, SARS Virus
actgtttcacgatttacttttcacg

SEQ ID NO: 12437 - DNA, 25 bp, SARS Virus
ctgtttcacgaattacttttcacga

SEQ ID NO: 12438 - DNA, 25 bp, SARS Virus
tgtttcacgaattacttttcacgag

SEQ ID NO: 12439 - DNA, 25 bp, SARS Virus
gtttcacgaatttcttttcacgaga

SEQ ID NO: 12440 - DNA, 25 bp, SARS Virus
tttcacgaattatttttcacgagac

SEQ ID NO: 12441 - DNA, 25 bp, SARS Virus
ttcacgaattacttttcacgagaca

SEQ ID NO: 12442 - DNA, 25 bp, SARS Virus
tcacgaattacttttcacgagacag

SEQ ID NO: 12443 - DNA, 25 bp, SARS Virus
cacgaattacttttcacgagacaga

SEQ ID NO: 12444 - DNA, 25 bp, SARS Virus
acgaattacttttcacgagacagat

SEQ ID NO: 12445 - DNA, 25 bp, SARS Virus
cgaattactttttacgagacagatg

SEQ ID NO: 12446 - DNA, 25 bp, SARS Virus
gaattacttttctcgagacagatgt

SEQ ID NO: 12447 - DNA, 25 bp, SARS Virus
aattacttttcatgagacagatgtg

SEQ ID NO: 12448 - DNA, 25 bp, SARS Virus
attacttttcactagacagatgtga

SEQ ID NO: 12449 - DNA, 25 bp, SARS Virus
ttacttttcacgtgacagatgtgac

SEQ ID NO: 12450 - DNA, 25 bp, SARS Virus
tacttttcacgatacagatgtgaca

SEQ ID NO: 12451 - DNA, 25 bp, SARS Virus
acttttcacgagtcagatgtgacaa

SEQ ID NO: 12452 - DNA, 25 bp, SARS Virus
cttttcacgagatagatgtgacaac

SEQ ID NO: 12453 - DNA, 25 bp, SARS Virus
ttttcacgagactgatgtgacaact

SEQ ID NO: 12454 - DNA, 25 bp, SARS Virus
tttcacgagacatatgtgacaactt

SEQ ID NO: 12455 - DNA, 25 bp, SARS Virus
ttcacgagacagttgtgacaactta

SEQ ID NO: 12456 - DNA, 25 bp, SARS Virus
tcacgagacagatgtgacaacttag

SEQ ID NO: 12457 - DNA, 25 bp, SARS Virus
cacgagacagatttgacaacttagg

SEQ ID NO: 12458 - DNA, 25 bp, SARS Virus
acgagacagatgtgacaacttaggc

SEQ ID NO: 12459 - DNA, 25 bp, SARS Virus
cgagacagatgttacaacttaggcc

SEQ ID NO: 12460 - DNA, 25 bp, SARS Virus
gagacagatgtgtcaacttaggcca

SEQ ID NO: 12461 - DNA, 25 bp, SARS Virus
agacagatgtgataacttaggccat

SEQ ID NO: 12462 - DNA, 25 bp, SARS Virus
gacagatgtgactacttaggccatg

SEQ ID NO: 12463 - DNA, 25 bp, SARS Virus
acagatgtgacatcttaggccatgg

SEQ ID NO: 12464 - DNA, 25 bp, SARS Virus
cagatgtgacaatttaggccatggc

SEQ ID NO: 12465 - DNA, 25 bp, SARS Virus
agatgtgacaacttaggccatggct

SEQ ID NO: 12466 - DNA, 25 bp, SARS Virus
gatgtgacaacttaggccatggctt

SEQ ID NO: 12467 - DNA, 25 bp, SARS Virus
atgtgacaactttggccatggcttc

SEQ ID NO: 12468 - DNA, 25 bp, SARS Virus
tgtgacaacttatgccatggcttca

SEQ ID NO: 12469 - DNA, 25 bp, SARS Virus
gtgacaacttagtccatggcttcaa

SEQ ID NO: 12470 - DNA, 25 bp, SARS Virus
tgacaacttaggtcatggcttcaat

SEQ ID NO: 12471 - DNA, 25 bp, SARS Virus
gacaacttaggctatggcttcaatg

SEQ ID NO: 12472 - DNA, 25 bp, SARS Virus
acaacttaggccttggcttcaatga

SEQ ID NO: 12473 - DNA, 25 bp, SARS Virus
caacttaggccatggcttcaatgac

SEQ ID NO: 12474 - DNA, 25 bp, SARS Virus
aacttaggccattgcttcaatgact

SEQ ID NO: 12475 - DNA, 25 bp, SARS Virus
acttaggccatgtcttcaatgactc

SEQ ID NO: 12476 - DNA, 25 bp, SARS Virus
cttaggccatggtttcaatgactca

SEQ ID NO: 12477 - DNA, 25 bp, SARS Virus
ttaggccatggcttcaatgactcaa

SEQ ID NO: 12478 - DNA, 25 bp, SARS Virus
taggccatggcttcaatgactcaaa

SEQ ID NO: 12479 - DNA, 25 bp, SARS Virus
aggccatggctttaatgactcaaac

SEQ ID NO: 12480 - DNA, 25 bp, SARS Virus
ggccatggcttctatgactcaaacg

SEQ ID NO: 12481 - DNA, 25 bp, SARS Virus
gccatggcttcattgactcaaacgt

SEQ ID NO: 12482 - DNA, 25 bp, SARS Virus
ccatggcttcaatgactcaaacgta

SEQ ID NO: 12483 - DNA, 25 bp, SARS Virus
catggcttcaattactcaaacgtac

SEQ ID NO: 12484 - DNA, 25 bp, SARS Virus
atggcttcaatgtctcaaacgtaca

SEQ ID NO: 12485 - DNA, 25 bp, SARS Virus
tggcttcaatgattcaaacgtacac

SEQ ID NO: 12486 - DNA, 25 bp, SARS Virus
ggcttcaatgactcaaacgtacaca

SEQ ID NO: 12487 - DNA, 25 bp, SARS Virus
gcttcaatgacttaaacgtacacaa

SEQ ID NO: 12488 - DNA, 25 bp, SARS Virus
cttcaatgactctaacgtacacaac

SEQ ID NO: 12489 - DNA, 25 bp, SARS Virus
ttcaatgactcatacgtacacaaca

SEQ ID NO: 12490 - DNA, 25 bp, SARS Virus
tcaatgactcaatcgtacacaacat

SEQ ID NO: 12491 - DNA, 25 bp, SARS Virus
caatgactcaaatgtacacaacatc

SEQ ID NO: 12492 - DNA, 25 bp, SARS Virus
aatgactcaaacttacacaacatcg

SEQ ID NO: 12493 - DNA, 25 bp, SARS Virus
atgactcaaacgtacacaacatcgt

SEQ ID NO: 12494 - DNA, 25 bp, SARS Virus
tgactcaaacgttcacaacatcgtc

SEQ ID NO: 12495 - DNA, 25 bp, SARS Virus
gactcaaacgtatacaacatcgtct

SEQ ID NO: 12496 - DNA, 25 bp, SARS Virus
actcaaacgtactcaacatcgtctc

SEQ ID NO: 12497 - DNA, 25 bp, SARS Virus
ctcaaacgtacataacatcgtctcc

SEQ ID NO: 12498 - DNA, 25 bp, SARS Virus
tcaaacgtacactacatcgtctccg

SEQ ID NO: 12499 - DNA, 25 bp, SARS Virus
caaacgtacacatcatcgtctccga

SEQ ID NO: 12500 - DNA, 25 bp, SARS Virus
aaacgtacacaatatcgtctccgac

SEQ ID NO: 12501 - DNA, 25 bp, SARS Virus
aacgtacacaacttcgtctccgaca

SEQ ID NO: 12502 - DNA, 25 bp, SARS Virus
acgtacacaacatcgtctccgacaa

SEQ ID NO: 12503 - DNA, 25 bp, SARS Virus
cgtacacaacattgtctccgacaac

SEQ ID NO: 12504 - DNA, 25 bp, SARS Virus
gtacacaacatcttctccgacaaca

SEQ ID NO: 12505 - DNA, 25 bp, SARS Virus
tacacaacatcgtctccgacaacac

SEQ ID NO: 12506 - DNA, 25 bp, SARS Virus
acacaacatcgtttccgacaacact

SEQ ID NO: 12507 - DNA, 25 bp, SARS Virus
cacaacatcgtctccgacaacactt

SEQ ID NO: 12508 - DNA, 25 bp, SARS Virus
acaacatcgtcttcgacaacacttc

SEQ ID NO: 12509 - DNA, 25 bp, SARS Virus
caacatcgtctctgacaacacttct

SEQ ID NO: 12510 - DNA, 25 bp, SARS Virus
aacatcgtctcctacaacacttctg

SEQ ID NO: 12511 - DNA, 25 bp, SARS Virus
acatcgtctccgtcaacacttctga

SEQ ID NO: 12512 - DNA, 25 bp, SARS Virus
catcgtctccgataacacttctgaa

SEQ ID NO: 12513 - DNA, 25 bp, SARS Virus
atcgtctccgactacacttctgaaa

SEQ ID NO: 12514 - DNA, 25 bp, SARS Virus
tcgtctccgacatcacttctgaaat

SEQ ID NO: 12515 - DNA, 25 bp, SARS Virus
cgtctccgacaatacttctgaaatg

SEQ ID NO: 12516 - DNA, 25 bp, SARS Virus
gtctccgacaactcttctgaaatgt

SEQ ID NO: 12517 - DNA, 25 bp, SARS Virus
tctccgacaacatttctgaaatgtt

SEQ ID NO: 12518 - DNA, 25 bp, SARS Virus
ctccgacaacacttctgaaatgttg

SEQ ID NO: 12519 - DNA, 25 bp, SARS Virus
tccgacaacacttctgaaatgttgg

SEQ ID NO: 12520 - DNA, 25 bp, SARS Virus
ccgacaacacttttgaaatgttggt

SEQ ID NO: 12521 - DNA, 25 bp, SARS Virus
cgacaacacttctgaaatgttggtc

SEQ ID NO: 12522 - DNA, 25 bp, SARS Virus
gacaacacttcttaaatgttggtca

SEQ ID NO: 12523 - DNA, 25 bp, SARS Virus
acaacacttctgtaatgttggtcaa

SEQ ID NO: 12524 - DNA, 25 bp, SARS Virus
caacacttctgatatgttggtcaaa

SEQ ID NO: 12525 - DNA, 25 bp, SARS Virus
aacacttctgaattgttggtcaaag

SEQ ID NO: 12526 - DNA, 25 bp, SARS Virus
acacttctgaaatgttggtcaaaga

SEQ ID NO: 12527 - DNA, 25 bp, SARS Virus
cacttctgaaattttggtcaaagac

SEQ ID NO: 12528 - DNA, 25 bp, SARS Virus
acttctgaaatgttggtcaaagact

SEQ ID NO: 12529 - DNA, 25 bp, SARS Virus
cttctgaaatgttggtcaaagacta

SEQ ID NO: 12530 - DNA, 25 bp, SARS Virus
ttctgaaatgtttgtcaaagactag

SEQ ID NO: 12531 - DNA, 25 bp, SARS Virus
tctgaaatgttgttcaaagactaga

SEQ ID NO: 12532 - DNA, 25 bp, SARS Virus
ctgaaatgttggtcaaagactagag

SEQ ID NO: 12533 - DNA, 25 bp, SARS Virus
tgaaatgttggttaaagactagagg

SEQ ID NO: 12534 - DNA, 25 bp, SARS Virus
gaaatgttggtctaagactagagga

SEQ ID NO: 12535 - DNA, 25 bp, SARS Virus
aaatgttggtcatagactagaggaa

SEQ ID NO: 12536 - DNA, 25 bp, SARS Virus
aatgttggtcaatgactagaggaat

SEQ ID NO: 12537 - DNA, 25 bp, SARS Virus
atgttggtcaaatactagaggaatg

SEQ ID NO: 12538 - DNA, 25 bp, SARS Virus
tgttggtcaaagtctagaggaatgg

SEQ ID NO: 12539 - DNA, 25 bp, SARS Virus
gttggtcaaagattagaggaatggt

SEQ ID NO: 12540 - DNA, 25 bp, SARS Virus
ttggtcaaagactagaggaatggtt

SEQ ID NO: 12541 - DNA, 25 bp, SARS Virus
tggtcaaagacttgaggaatggttg

SEQ ID NO: 12542 - DNA, 25 bp, SARS Virus
ggtcaaagactataggaatggttgt

SEQ ID NO: 12543 - DNA, 25 bp, SARS Virus
gtcaaagactagtggaatggttgta

SEQ ID NO: 12544 - DNA, 25 bp, SARS Virus
tcaaagactagatgaatggttgtac

SEQ ID NO: 12545 - DNA, 25 bp, SARS Virus
caaagactagagtaatggttgtacc

SEQ ID NO: 12546 - DNA, 25 bp, SARS Virus
aaagactagaggtatggttgtaccc

SEQ ID NO: 12547 - DNA, 25 bp, SARS Virus
aagactagaggattggttgtaccca

SEQ ID NO: 12548 - DNA, 25 bp, SARS Virus
agactagaggaatggttgtacccat

SEQ ID NO: 12549 - DNA, 25 bp, SARS Virus
gactagaggaattgttgtacccata

SEQ ID NO: 12550 - DNA, 25 bp, SARS Virus
actagaggaatgtttgtacccataa

SEQ ID NO: 12551 - DNA, 25 bp, SARS Virus
ctagaggaatggttgtacccataac

SEQ ID NO: 12552 - DNA, 25 bp, SARS Virus
tagaggaatggttgtacccataact

SEQ ID NO: 12553 - DNA, 25 bp, SARS Virus
agaggaatggttttacccataacta

SEQ ID NO: 12554 - DNA, 25 bp, SARS Virus
gaggaatggttgtacccataactag

SEQ ID NO: 12555 - DNA, 25 bp, SARS Virus
aggaatggttgttcccataactaga

SEQ ID NO: 12556 - DNA, 25 bp, SARS Virus
ggaatggttgtatccataactagaa

SEQ ID NO: 12557 - DNA, 25 bp, SARS Virus
gaatggttgtactcataactagaac

SEQ ID NO: 12558 - DNA, 25 bp, SARS Virus
aatggttgtacctataactagaact

SEQ ID NO: 12559 - DNA, 25 bp, SARS Virus
atggttgtacccttaactagaacta

SEQ ID NO: 12560 - DNA, 25 bp, SARS Virus
tggttgtacccataactagaactac

SEQ ID NO: 12561 - DNA, 25 bp, SARS Virus
ggttgtacccattactagaactact

SEQ ID NO: 12562 - DNA, 25 bp, SARS Virus
gttgtacccatatctagaactactc

SEQ ID NO: 12563 - DNA, 25 bp, SARS Virus
ttgtacccataattagaactactca

SEQ ID NO: 12564 - DNA, 25 bp, SARS Virus
tgtacccataactagaactactcac

SEQ ID NO: 12565 - DNA, 25 bp, SARS Virus
gtacccataacttgaactactcacc

SEQ ID NO: 12566 - DNA, 25 bp, SARS Virus
tacccataactataactactcacct

SEQ ID NO: 12567 - DNA, 25 bp, SARS Virus
acccataactagtactactcacctc

SEQ ID NO: 12568 - DNA, 25 bp, SARS Virus
cccataactagatctactcacctca

SEQ ID NO: 12569 - DNA, 25 bp, SARS Virus
ccataactagaattactcacctcac

SEQ ID NO: 12570 - DNA, 25 bp, SARS Virus
cataactagaactactcacctcaca

SEQ ID NO: 12571 - DNA, 25 bp, SARS Virus
ataactagaacttctcacctcacat

SEQ ID NO: 12572 - DNA, 25 bp, SARS Virus
taactagaactattcacctcacatc

SEQ ID NO: 12573 - DNA, 25 bp, SARS Virus
aactagaactactcacctcacatcg

SEQ ID NO: 12574 - DNA, 25 bp, SARS Virus
actagaactacttacctcacatcga

SEQ ID NO: 12575 - DNA, 25 bp, SARS Virus
ctagaactactctcctcacatcgat

SEQ ID NO: 12576 - DNA, 25 bp, SARS Virus
tagaactactcatctcacatcgatg

SEQ ID NO: 12577 - DNA, 25 bp, SARS Virus
agaactactcacttcacatcgatgt

SEQ ID NO: 12578 - DNA, 25 bp, SARS Virus
gaactactcacctcacatcgatgta

SEQ ID NO: 12579 - DNA, 25 bp, SARS Virus
aactactcaccttacatcgatgtaa

SEQ ID NO: 12580 - DNA, 25 bp, SARS Virus
actactcacctctcatcgatgtaag

SEQ ID NO: 12581 - DNA, 25 bp, SARS Virus
ctactcacctcatatcgatgtaaga

SEQ ID NO: 12582 - DNA, 25 bp, SARS Virus
tactcacctcacttcgatgtaagat

SEQ ID NO: 12583 - DNA, 25 bp, SARS Virus
actcacctcacatcgatgtaagatg

SEQ ID NO: 12584 - DNA, 25 bp, SARS Virus
ctcacctcacattgatgtaagatga

SEQ ID NO: 12585 - DNA, 25 bp, SARS Virus
tcacctcacatctatgtaagatgaa

SEQ ID NO: 12586 - DNA, 25 bp, SARS Virus
cacctcacatcgttgtaagatgaat

SEQ ID NO: 12587 - DNA, 25 bp, SARS Virus
acctcacatcgatgtaagatgaata

SEQ ID NO: 12588 - DNA, 25 bp, SARS Virus
cctcacatcgatttaagatgaataa

SEQ ID NO: 12589 - DNA, 25 bp, SARS Virus
ctcacatcgatgtaagatgaataaa

SEQ ID NO: 12590 - DNA, 25 bp, SARS Virus
tcacatcgatgttagatgaataaac

SEQ ID NO: 12591 - DNA, 25 bp, SARS Virus
cacatcgatgtatgatgaataaact

SEQ ID NO: 12592 - DNA, 25 bp, SARS Virus
acatcgatgtaatatgaataaacta

SEQ ID NO: 12593 - DNA, 25 bp, SARS Virus
catcgatgtaagttgaataaactac

SEQ ID NO: 12594 - DNA, 25 bp, SARS Virus
atcgatgtaagatgaataaactact

SEQ ID NO: 12595 - DNA, 25 bp, SARS Virus
tcgatgtaagattaataaactacta

SEQ ID NO: 12596 - DNA, 25 bp, SARS Virus
cgatgtaagatgtataaactactac

SEQ ID NO: 12597 - DNA, 25 bp, SARS Virus
gatgtaagatgattaaactactacg

SEQ ID NO: 12598 - DNA, 25 bp, SARS Virus
atgtaagatgaataaactactacga

SEQ ID NO: 12599 - DNA, 25 bp, SARS Virus
tgtaagatgaattaactactacgac

SEQ ID NO: 12600 - DNA, 25 bp, SARS Virus
gtaagatgaatatactactacgacc

SEQ ID NO: 12601 - DNA, 25 bp, SARS Virus
taagatgaataatctactacgacca

SEQ ID NO: 12602 - DNA, 25 bp, SARS Virus
aagatgaataaattactacgaccac

SEQ ID NO: 12603 - DNA, 25 bp, SARS Virus
agatgaataaactactacgaccact

SEQ ID NO: 12604 - DNA, 25 bp, SARS Virus
gatgaataaacttctacgaccactt

SEQ ID NO: 12605 - DNA, 25 bp, SARS Virus
atgaataaactattacgaccacttc

SEQ ID NO: 12606 - DNA, 25 bp, SARS Virus
tgaataaactactacgaccacttct

SEQ ID NO: 12607 - DNA, 25 bp, SARS Virus
gaataaactacttcgaccacttctt

SEQ ID NO: 12608 - DNA, 25 bp, SARS Virus
aataaactactatgaccacttcttt

SEQ ID NO: 12609 - DNA, 25 bp, SARS Virus
ataaactactactaccacttctttt

SEQ ID NO: 12610 - DNA, 25 bp, SARS Virus
taaactactacgtccacttcttttg

SEQ ID NO: 12611 - DNA, 25 bp, SARS Virus
aaactactacgatcacttcttttga

SEQ ID NO: 12612 - DNA, 25 bp, SARS Virus
aactactacgactacttcttttgaa

SEQ ID NO: 12613 - DNA, 25 bp, SARS Virus
actactacgacctcttcttttgaaa

SEQ ID NO: 12614 - DNA, 25 bp, SARS Virus
ctactacgaccatttcttttgaaaa

SEQ ID NO: 12615 - DNA, 25 bp, SARS Virus
tactacgaccacttcttttgaaaag

SEQ ID NO: 12616 - DNA, 25 bp, SARS Virus
actacgaccacttcttttgaaaagt

SEQ ID NO: 12617 - DNA, 25 bp, SARS Virus
ctacgaccactttttttgaaaagta

SEQ ID NO: 12618 - DNA, 25 bp, SARS Virus
tacgaccacttcttttgaaaagtag

SEQ ID NO: 12619 - DNA, 25 bp, SARS Virus
acgaccacttcttttgaaaagtagt

SEQ ID NO: 12620 - DNA, 25 bp, SARS Virus
cgaccacttcttttgaaaagtagtg

SEQ ID NO: 12621 - DNA, 25 bp, SARS Virus
gaccacttcttttgaaaagtagtgc

SEQ ID NO: 12622 - DNA, 25 bp, SARS Virus
accacttctttttaaaagtagtgca

SEQ ID NO: 12623 - DNA, 25 bp, SARS Virus
ccacttcttttgtaaagtagtgcat

SEQ ID NO: 12624 - DNA, 25 bp, SARS Virus
cacttcttttgataagtagtgcata

SEQ ID NO: 12625 - DNA, 25 bp, SARS Virus
acttcttttgaatagtagtgcatac

SEQ ID NO: 12626 - DNA, 25 bp, SARS Virus
cttcttttgaaatgtagtgcataca

SEQ ID NO: 12627 - DNA, 25 bp, SARS Virus
ttcttttgaaaattagtgcatacat

SEQ ID NO: 12628 - DNA, 25 bp, SARS Virus
tcttttgaaaagtagtgcatacata

SEQ ID NO: 12629 - DNA, 25 bp, SARS Virus
cttttgaaaagttgtgcatacataa

SEQ ID NO: 12630 - DNA, 25 bp, SARS Virus
ttttgaaaagtattgcatacataac

SEQ ID NO: 12631 - DNA, 25 bp, SARS Virus
tttgaaaagtagtgcatacataaca

SEQ ID NO: 12632 - DNA, 25 bp, SARS Virus
ttgaaaagtagttcatacataacaa

SEQ ID NO: 12633 - DNA, 25 bp, SARS Virus
tgaaaagtagtgtatacataacaag

SEQ ID NO: 12634 - DNA, 25 bp, SARS Virus
gaaaagtagtgcttacataacaagg

SEQ ID NO: 12635 - DNA, 25 bp, SARS Virus
aaaagtagtgcatacataacaagga

SEQ ID NO: 12636 - DNA, 25 bp, SARS Virus
aaagtagtgcattcataacaaggaa

SEQ ID NO: 12637 - DNA, 25 bp, SARS Virus
aagtagtgcatatataacaaggaaa

SEQ ID NO: 12638 - DNA, 25 bp, SARS Virus
agtagtgcatacttaacaaggaaaa

SEQ ID NO: 12639 - DNA, 25 bp, SARS Virus
gtagtgcatacataacaaggaaaat

SEQ ID NO: 12640 - DNA, 25 bp, SARS Virus
tagtgcatacattacaaggaaaatg

SEQ ID NO: 12641 - DNA, 25 bp, SARS Virus
agtgcatacatatcaaggaaaatgg

SEQ ID NO: 12642 - DNA, 25 bp, SARS Virus
gtgcatacataataaggaaaatggg

SEQ ID NO: 12643 - DNA, 25 bp, SARS Virus
tgcatacataactaggaaaatggga

SEQ ID NO: 12644 - DNA, 25 bp, SARS Virus
gcatacataacatggaaaatgggag

SEQ ID NO: 12645 - DNA, 25 bp, SARS Virus
catacataacaatgaaaatgggagg

SEQ ID NO: 12646 - DNA, 25 bp, SARS Virus
atacataacaagtaaaatgggaggt

SEQ ID NO: 12647 - DNA, 25 bp, SARS Virus
tacataacaaggtaaatgggaggtc

SEQ ID NO: 12648 - DNA, 25 bp, SARS Virus
acataacaaggataatgggaggtct

SEQ ID NO: 12649 - DNA, 25 bp, SARS Virus
cataacaaggaatatgggaggtcta

SEQ ID NO: 12650 - DNA, 25 bp, SARS Virus
ataacaaggaaattgggaggtctac

SEQ ID NO: 12651 - DNA, 25 bp, SARS Virus
taacaaggaaaatgggaggtctact

SEQ ID NO: 12652 - DNA, 25 bp, SARS Virus
aacaaggaaaattggaggtctactc

SEQ ID NO: 12653 - DNA, 25 bp, SARS Virus
acaaggaaaatgtgaggtctactcc

SEQ ID NO: 12654 - DNA, 25 bp, SARS Virus
caaggaaaatggtaggtctactcct

SEQ ID NO: 12655 - DNA, 25 bp, SARS Virus
aaggaaaatgggtggtctactcctt

SEQ ID NO: 12656 - DNA, 25 bp, SARS Virus
aggaaaatgggatgtctactccttc

SEQ ID NO: 12657 - DNA, 25 bp, SARS Virus
ggaaaatgggagttctactccttct

SEQ ID NO: 12658 - DNA, 25 bp, SARS Virus
gaaaatgggaggtctactccttctt

SEQ ID NO: 12659 - DNA, 25 bp, SARS Virus
aaaatgggaggtttactccttcttc

SEQ ID NO: 12660 - DNA, 25 bp, SARS Virus
aaatgggaggtctactccttcttct

SEQ ID NO: 12661 - DNA, 25 bp, SARS Virus
aatgggaggtcttctccttcttctc

SEQ ID NO: 12662 - DNA, 25 bp, SARS Virus
atgggaggtctattccttcttctcc

SEQ ID NO: 12663 - DNA, 25 bp, SARS Virus
tgggaggtctactccttcttctcct

SEQ ID NO: 12664 - DNA, 25 bp, SARS Virus
gggaggtctacttcttcttctcctg

SEQ ID NO: 12665 - DNA, 25 bp, SARS Virus
ggaggtctactctttcttctcctgc

SEQ ID NO: 12666 - DNA, 25 bp, SARS Virus
gaggtctactccttcttctcctgct

SEQ ID NO: 12667 - DNA, 25 bp, SARS Virus
aggtctactccttcttctcctgcta

SEQ ID NO: 12668 - DNA, 25 bp, SARS Virus
ggtctactcctttttctcctgctac

SEQ ID NO: 12669 - DNA, 25 bp, SARS Virus
gtctactccttcttctcctgctacg

SEQ ID NO: 12670 - DNA, 25 bp, SARS Virus
tctactccttcttctcctgctacgt

SEQ ID NO: 12671 - DNA, 25 bp, SARS Virus
ctactccttcttttcctgctacgtc

SEQ ID NO: 12672 - DNA, 25 bp, SARS Virus
tactccttcttctcctgctacgtct

SEQ ID NO: 12673 - DNA, 25 bp, SARS Virus
actccttcttcttctgctacgtctc

SEQ ID NO: 12674 - DNA, 25 bp, SARS Virus
ctccttcttctcttgctacgtctca

SEQ ID NO: 12675 - DNA, 25 bp, SARS Virus
tccttcttctcctgctacgtctcac

SEQ ID NO: 12676 - DNA, 25 bp, SARS Virus
ccttcttctccttctacgtctcaca

SEQ ID NO: 12677 - DNA, 25 bp, SARS Virus
cttcttctcctgttacgtctcacac

SEQ ID NO: 12678 - DNA, 25 bp, SARS Virus
ttcttctcctgctacgtctcacact

SEQ ID NO: 12679 - DNA, 25 bp, SARS Virus
tcttctcctgcttcgtctcacactc

SEQ ID NO: 12680 - DNA, 25 bp, SARS Virus
cttctcctgctatgtctcacactcc

SEQ ID NO: 12681 - DNA, 25 bp, SARS Virus
ttctcctgctacttctcacactcct

SEQ ID NO: 12682 - DNA, 25 bp, SARS Virus
tctcctgctacgtctcacactcctt

SEQ ID NO: 12683 - DNA, 25 bp, SARS Virus
ctcctgctacgtttcacactccttc

SEQ ID NO: 12684 - DNA, 25 bp, SARS Virus
tcctgctacgtctcacactccttct

SEQ ID NO: 12685 - DNA, 25 bp, SARS Virus
cctgctacgtcttacactccttctt

SEQ ID NO: 12686 - DNA, 25 bp, SARS Virus
ctgctacgtctctcactccttcttc

SEQ ID NO: 12687 - DNA, 25 bp, SARS Virus
tgctacgtctcatactccttcttct

SEQ ID NO: 12688 - DNA, 25 bp, SARS Virus
gctacgtctcactctccttcttctt

SEQ ID NO: 12689 - DNA, 25 bp, SARS Virus
ctacgtctcacattccttcttcttt

SEQ ID NO: 12690 - DNA, 25 bp, SARS Virus
tacgtctcacactccttcttcttta

SEQ ID NO: 12691 - DNA, 25 bp, SARS Virus
acgtctcacacttcttcttctttaa

SEQ ID NO: 12692 - DNA, 25 bp, SARS Virus
cgtctcacactctttcttctttaac

SEQ ID NO: 12693 - DNA, 25 bp, SARS Virus
gtctcacactccttcttctttaact

SEQ ID NO: 12694 - DNA, 25 bp, SARS Virus
tctcacactccttcttctttaacta

SEQ ID NO: 12695 - DNA, 25 bp, SARS Virus
ctcacactcctttttctttaactac

SEQ ID NO: 12696 - DNA, 25 bp, SARS Virus
tcacactccttcttctttaactact

SEQ ID NO: 12697 - DNA, 25 bp, SARS Virus
cacactccttcttctttaactactt

SEQ ID NO: 12698 - DNA, 25 bp, SARS Virus
acactccttcttttttaactacttt

SEQ ID NO: 12699 - DNA, 25 bp, SARS Virus
cactccttcttctttaactactttg

SEQ ID NO: 12700 - DNA, 25 bp, SARS Virus
actccttcttctttaactactttgg

SEQ ID NO: 12701 - DNA, 25 bp, SARS Virus
ctccttcttctttaactactttgga

SEQ ID NO: 12702 - DNA, 25 bp, SARS Virus
tccttcttcttttactactttggac

SEQ ID NO: 12703 - DNA, 25 bp, SARS Virus
ccttcttctttatctactttggaca

SEQ ID NO: 12704 - DNA, 25 bp, SARS Virus
cttcttctttaattactttggacac

SEQ ID NO: 12705 - DNA, 25 bp, SARS Virus
ttcttctttaactactttggacact

SEQ ID NO: 12706 - DNA, 25 bp, SARS Virus
tcttctttaacttctttggacactt

SEQ ID NO: 12707 - DNA, 25 bp, SARS Virus
cttctttaactattttggacacttg

SEQ ID NO: 12708 - DNA, 25 bp, SARS Virus
ttctttaactactttggacacttgt

SEQ ID NO: 12709 - DNA, 25 bp, SARS Virus
tctttaactactttggacacttgta

SEQ ID NO: 12710 - DNA, 25 bp, SARS Virus
ctttaactactttggacacttgtac

SEQ ID NO: 12711 - DNA, 25 bp, SARS Virus
tttaactacttttgacacttgtact

SEQ ID NO: 12712 - DNA, 25 bp, SARS Virus
ttaactactttgtacacttgtactc

SEQ ID NO: 12713 - DNA, 25 bp, SARS Virus
taactactttggtcacttgtactca

SEQ ID NO: 12714 - DNA, 25 bp, SARS Virus
aactactttggatacttgtactcat

SEQ ID NO: 12715 - DNA, 25 bp, SARS Virus
actactttggactcttgtactcatg

SEQ ID NO: 12716 - DNA, 25 bp, SARS Virus
ctactttggacatttgtactcatgc

SEQ ID NO: 12717 - DNA, 25 bp, SARS Virus
tactttggacacttgtactcatgcc

SEQ ID NO: 12718 - DNA, 25 bp, SARS Virus
actttggacacttgtactcatgcca

SEQ ID NO: 12719 - DNA, 25 bp, SARS Virus
ctttggacacttttactcatgccat

SEQ ID NO: 12720 - DNA, 25 bp, SARS Virus
tttggacacttgtactcatgccatg

SEQ ID NO: 12721 - DNA, 25 bp, SARS Virus
ttggacacttgttctcatgccatgt

SEQ ID NO: 12722 - DNA, 25 bp, SARS Virus
tggacacttgtattcatgccatgtc

SEQ ID NO: 12723 - DNA, 25 bp, SARS Virus
ggacacttgtactcatgccatgtct

SEQ ID NO: 12724 - DNA, 25 bp, SARS Virus
gacacttgtacttatgccatgtctc

SEQ ID NO: 12725 - DNA, 25 bp, SARS Virus
acacttgtactcttgccatgtctcc

SEQ ID NO: 12726 - DNA, 25 bp, SARS Virus
cacttgtactcatgccatgtctcct

SEQ ID NO: 12727 - DNA, 25 bp, SARS Virus
acttgtactcattccatgtctccta

SEQ ID NO: 12728 - DNA, 25 bp, SARS Virus
cttgtactcatgtcatgtctcctac

SEQ ID NO: 12729 - DNA, 25 bp, SARS Virus
ttgtactcatgctatgtctcctact

SEQ ID NO: 12730 - DNA, 25 bp, SARS Virus
tgtactcatgccttgtctcctacta

SEQ ID NO: 12731 - DNA, 25 bp, SARS Virus
gtactcatgccatgtctcctactaa

SEQ ID NO: 12732 - DNA, 25 bp, SARS Virus
tactcatgccatttctcctactaat

SEQ ID NO: 12733 - DNA, 25 bp, SARS Virus
actcatgccatgtctcctactaata

SEQ ID NO: 12734 - DNA, 25 bp, SARS Virus
ctcatgccatgtttcctactaatag

SEQ ID NO: 12735 - DNA, 25 bp, SARS Virus
tcatgccatgtctcctactaatagt

SEQ ID NO: 12736 - DNA, 25 bp, SARS Virus
catgccatgtcttctactaatagtt

SEQ ID NO: 12737 - DNA, 25 bp, SARS Virus
atgccatgtctcttactaatagttc

SEQ ID NO: 12738 - DNA, 25 bp, SARS Virus
tgccatgtctcctactaatagttcc

SEQ ID NO: 12739 - DNA, 25 bp, SARS Virus
gccatgtctccttctaatagttcca

SEQ ID NO: 12740 - DNA, 25 bp, SARS Virus
ccatgtctcctattaatagttccag

SEQ ID NO: 12741 - DNA, 25 bp, SARS Virus
catgtctcctactaatagttccaga

SEQ ID NO: 12742 - DNA, 25 bp, SARS Virus
atgtctcctacttatagttccagag

SEQ ID NO: 12743 - DNA, 25 bp, SARS Virus
tgtctcctactattagttccagagg

SEQ ID NO: 12744 - DNA, 25 bp, SARS Virus
gtctcctactaatagttccagaggg

SEQ ID NO: 12745 - DNA, 25 bp, SARS Virus
tctcctactaattgttccagaggga

SEQ ID NO: 12746 - DNA, 25 bp, SARS Virus
ctcctactaatatttccagagggag

SEQ ID NO: 12747 - DNA, 25 bp, SARS Virus
tcctactaatagttccagagggaga

SEQ ID NO: 12748 - DNA, 25 bp, SARS Virus
cctactaatagttccagagggagac

SEQ ID NO: 12749 - DNA, 25 bp, SARS Virus
ctactaatagtttcagagggagacc

SEQ ID NO: 12750 - DNA, 25 bp, SARS Virus
tactaatagttctagagggagacct

SEQ ID NO: 12751 - DNA, 25 bp, SARS Virus
actaatagttcctgagggagacctt

SEQ ID NO: 12752 - DNA, 25 bp, SARS Virus
ctaatagttccatagggagacctta

SEQ ID NO: 12753 - DNA, 25 bp, SARS Virus
taatagttccagtgggagaccttaa

SEQ ID NO: 12754 - DNA, 25 bp, SARS Virus
aatagttccagatggagaccttaaa

SEQ ID NO: 12755 - DNA, 25 bp, SARS Virus
atagttccagagtgagaccttaaac

SEQ ID NO: 12756 - DNA, 25 bp, SARS Virus
tagttccagaggtagaccttaaacc

SEQ ID NO: 12757 - DNA, 25 bp, SARS Virus
agttccagagggtgaccttaaacca

SEQ ID NO: 12758 - DNA, 25 bp, SARS Virus
gttccagagggataccttaaaccac

SEQ ID NO: 12759 - DNA, 25 bp, SARS Virus
ttccagagggagtccttaaaccacg

SEQ ID NO: 12760 - DNA, 25 bp, SARS Virus
tccagagggagatcttaaaccacgg

SEQ ID NO: 12761 - DNA, 25 bp, SARS Virus
ccagagggagactttaaaccacgga

SEQ ID NO: 12762 - DNA, 25 bp, SARS Virus
cagagggagaccttaaaccacggag

SEQ ID NO: 12763 - DNA, 25 bp, SARS Virus
agagggagaccttaaaccacggagt

SEQ ID NO: 12764 - DNA, 25 bp, SARS Virus
gagggagacctttaaccacggagtc

SEQ ID NO: 12765 - DNA, 25 bp, SARS Virus
agggagaccttataccacggagtcg

SEQ ID NO: 12766 - DNA, 25 bp, SARS Virus
gggagaccttaatccacggagtcga

SEQ ID NO: 12767 - DNA, 25 bp, SARS Virus
ggagaccttaaatcacggagtcgac

SEQ ID NO: 12768 - DNA, 25 bp, SARS Virus
gagaccttaaactacggagtcgact

SEQ ID NO: 12769 - DNA, 25 bp, SARS Virus
agaccttaaacctcggagtcgactt

SEQ ID NO: 12770 - DNA, 25 bp, SARS Virus
gaccttaaaccatggagtcgacttt

SEQ ID NO: 12771 - DNA, 25 bp, SARS Virus
accttaaaccactgagtcgactttg

SEQ ID NO: 12772 - DNA, 25 bp, SARS Virus
ccttaaaccacgtagtcgactttgt

SEQ ID NO: 12773 - DNA, 25 bp, SARS Virus
cttaaaccacggtgtcgactttgtc

SEQ ID NO: 12774 - DNA, 25 bp, SARS Virus
ttaaaccacggattcgactttgtca

SEQ ID NO: 12775 - DNA, 25 bp, SARS Virus
taaaccacggagtcgactttgtcaa

SEQ ID NO: 12776 - DNA, 25 bp, SARS Virus
aaaccacggagttgactttgtcaag

SEQ ID NO: 12777 - DNA, 25 bp, SARS Virus
aaccacggagtctactttgtcaagc

SEQ ID NO: 12778 - DNA, 25 bp, SARS Virus
accacggagtcgtctttgtcaagct

SEQ ID NO: 12779 - DNA, 25 bp, SARS Virus
ccacggagtcgattttgtcaagctc

SEQ ID NO: 12780 - DNA, 25 bp, SARS Virus
cacggagtcgactttgtcaagctca

SEQ ID NO: 12781 - DNA, 25 bp, SARS Virus
acggagtcgactttgtcaagctcaa

SEQ ID NO: 12782 - DNA, 25 bp, SARS Virus
cggagtcgactttgtcaagctcaac

SEQ ID NO: 12783 - DNA, 25 bp, SARS Virus
ggagtcgactttttcaagctcaact

SEQ ID NO: 12784 - DNA, 25 bp, SARS Virus
gagtcgactttgtcaagctcaactc

SEQ ID NO: 12785 - DNA, 25 bp, SARS Virus
agtcgactttgttaagctcaactcc

SEQ ID NO: 12786 - DNA, 25 bp, SARS Virus
gtcgactttgtctagctcaactcct

SEQ ID NO: 12787 - DNA, 25 bp, SARS Virus
tcgactttgtcatgctcaactcctt

SEQ ID NO: 12788 - DNA, 25 bp, SARS Virus
cgactttgtcaatctcaactccttc

SEQ ID NO: 12789 - DNA, 25 bp, SARS Virus
gactttgtcaagttcaactccttct

SEQ ID NO: 12790 - DNA, 25 bp, SARS Virus
actttgtcaagctcaactccttctt

SEQ ID NO: 12791 - DNA, 25 bp, SARS Virus
ctttgtcaagcttaactccttcttc

SEQ ID NO: 12792 - DNA, 25 bp, SARS Virus
tttgtcaagctctactccttcttct

SEQ ID NO: 12793 - DNA, 25 bp, SARS Virus
ttgtcaagctcatctccttcttctt

SEQ ID NO: 12794 - DNA, 25 bp, SARS Virus
tgtcaagctcaattccttcttcttc

SEQ ID NO: 12795 - DNA, 25 bp, SARS Virus
gtcaagctcaactccttcttcttct

SEQ ID NO: 12796 - DNA, 25 bp, SARS Virus
tcaagctcaacttcttcttcttctc

SEQ ID NO: 12797 - DNA, 25 bp, SARS Virus
caagctcaactctttcttcttctcc

SEQ ID NO: 12798 - DNA, 25 bp, SARS Virus
aagctcaactccttcttcttctcct

SEQ ID NO: 12799 - DNA, 25 bp, SARS Virus
agctcaactccttcttcttctcctt

SEQ ID NO: 12800 - DNA, 25 bp, SARS Virus
gctcaactcctttttcttctccttc

SEQ ID NO: 12801 - DNA, 25 bp, SARS Virus
ctcaactccttcttcttctccttct

SEQ ID NO: 12802 - DNA, 25 bp, SARS Virus
tcaactccttcttcttctccttctg

SEQ ID NO: 12803 - DNA, 25 bp, SARS Virus
caactccttctttttctccttctga

SEQ ID NO: 12804 - DNA, 25 bp, SARS Virus
aactccttcttcttctccttctgac

SEQ ID NO: 12805 - DNA, 25 bp, SARS Virus
actccttcttcttctccttctgacc

SEQ ID NO: 12806 - DNA, 25 bp, SARS Virus
ctccttcttcttttccttctgaccg

SEQ ID NO: 12807 - DNA, 25 bp, SARS Virus
tccttcttcttctccttctgaccga

SEQ ID NO: 12808 - DNA, 25 bp, SARS Virus
ccttcttcttcttcttctgaccgac

SEQ ID NO: 12809 - DNA, 25 bp, SARS Virus
cttcttcttctctttctgaccgacc

SEQ ID NO: 12810 - DNA, 25 bp, SARS Virus
ttcttcttctccttctgaccgacct

SEQ ID NO: 12811 - DNA, 25 bp, SARS Virus
tcttcttctccttctgaccgaccta

SEQ ID NO: 12812 - DNA, 25 bp, SARS Virus
cttcttctccttttgaccgacctac

SEQ ID NO: 12813 - DNA, 25 bp, SARS Virus
ttcttctccttctgaccgacctact

SEQ ID NO: 12814 - DNA, 25 bp, SARS Virus
tcttctccttcttaccgacctacta

SEQ ID NO: 12815 - DNA, 25 bp, SARS Virus
cttctccttctgtccgacctactat

SEQ ID NO: 12816 - DNA, 25 bp, SARS Virus
ttctccttctgatcgacctactatg

SEQ ID NO: 12817 - DNA, 25 bp, SARS Virus
tctccttctgacagacctactatga

SEQ ID NO: 12818 - DNA, 25 bp, SARS Virus
ctccttctgaccaacctactatgat

SEQ ID NO: 12819 - DNA, 25 bp, SARS Virus
tccttctgaccgacctactatgatg

SEQ ID NO: 12820 - DNA, 25 bp, SARS Virus
ccttctgaccgaactactatgatga

SEQ ID NO: 12821 - DNA, 25 bp, SARS Virus
cttctgaccgacatactatgatgac

SEQ ID NO: 12822 - DNA, 25 bp, SARS Virus
ttctgaccgaccaactatgatgact

SEQ ID NO: 12823 - DNA, 25 bp, SARS Virus
tctgaccgacctactatgatgactc

SEQ ID NO: 12824 - DNA, 25 bp, SARS Virus
ctgaccgacctaatatgatgactcg

SEQ ID NO: 12825 - DNA, 25 bp, SARS Virus
tgaccgacctacaatgatgactcgt

SEQ ID NO: 12826 - DNA, 25 bp, SARS Virus
gaccgacctactatgatgactcgtt

SEQ ID NO: 12827 - DNA, 25 bp, SARS Virus
accgacctactaagatgactcgtta

SEQ ID NO: 12828 - DNA, 25 bp, SARS Virus
ccgacctactataatgactcgttag

SEQ ID NO: 12829 - DNA, 25 bp, SARS Virus
cgacctactatgatgactcgttagt

SEQ ID NO: 12830 - DNA, 25 bp, SARS Virus
gacctactatgaagactcgttagtc

SEQ ID NO: 12831 - DNA, 25 bp, SARS Virus
acctactatgataactcgttagtct

SEQ ID NO: 12832 - DNA, 25 bp, SARS Virus
cctactatgatgactcgttagtctc

SEQ ID NO: 12833 - DNA, 25 bp, SARS Virus
ctactatgatgaatcgttagtctct

SEQ ID NO: 12834 - DNA, 25 bp, SARS Virus
tactatgatgacacgttagtctcta

SEQ ID NO: 12835 - DNA, 25 bp, SARS Virus
actatgatgactagttagtctctaa

SEQ ID NO: 12836 - DNA, 25 bp, SARS Virus
ctatgatgactcattagtctctaac

SEQ ID NO: 12837 - DNA, 25 bp, SARS Virus
tatgatgactcgatagtctctaact

SEQ ID NO: 12838 - DNA, 25 bp, SARS Virus
atgatgactcgtaagtctctaactc

SEQ ID NO: 12839 - DNA, 25 bp, SARS Virus
tgatgactcgttagtctctaactcg

SEQ ID NO: 12840 - DNA, 25 bp, SARS Virus
gatgactcgttaatctctaactcgg

SEQ ID NO: 12841 - DNA, 25 bp, SARS Virus
atgactcgttagactctaactcggt

SEQ ID NO: 12842 - DNA, 25 bp, SARS Virus
tgactcgttagtatctaactcggtc

SEQ ID NO: 12843 - DNA, 25 bp, SARS Virus
gactcgttagtcactaactcggtct

SEQ ID NO: 12844 - DNA, 25 bp, SARS Virus
actcgttagtctataactcggtctt

SEQ ID NO: 12845 - DNA, 25 bp, SARS Virus
ctcgttagtctcaaactcggtcttg

SEQ ID NO: 12846 - DNA, 25 bp, SARS Virus
tcgttagtctctaactcggtcttgg

SEQ ID NO: 12847 - DNA, 25 bp, SARS Virus
cgttagtctctaactcggtcttggt

SEQ ID NO: 12848 - DNA, 25 bp, SARS Virus
gttagtctctaaatcggtcttggtc

SEQ ID NO: 12849 - DNA, 25 bp, SARS Virus
ttagtctctaacacggtcttggtct

SEQ ID NO: 12850 - DNA, 25 bp, SARS Virus
tagtctctaactaggtcttggtctt

SEQ ID NO: 12851 - DNA, 25 bp, SARS Virus
agtctctaactcagtcttggtcttg

SEQ ID NO: 12852 - DNA, 25 bp, SARS Virus
gtctctaactcgatcttggtcttgg

SEQ ID NO: 12853 - DNA, 25 bp, SARS Virus
tctctaactcggacttggtcttgga

SEQ ID NO: 12854 - DNA, 25 bp, SARS Virus
ctctaactcggtattggtcttggat

SEQ ID NO: 12855 - DNA, 25 bp, SARS Virus
tctaactcggtcatggtcttggatg

SEQ ID NO: 12856 - DNA, 25 bp, SARS Virus
ctaactcggtctaggtcttggatgt

SEQ ID NO: 12857 - DNA, 25 bp, SARS Virus
taactcggtcttagtcttggatgtg

SEQ ID NO: 12858 - DNA, 25 bp, SARS Virus
aactcggtcttgatcttggatgtgg

SEQ ID NO: 12859 - DNA, 25 bp, SARS Virus
actcggtcttggacttggatgtgga

SEQ ID NO: 12860 - DNA, 25 bp, SARS Virus
ctcggtcttggtattggatgtggac

SEQ ID NO: 12861 - DNA, 25 bp, SARS Virus
tcggtcttggtcatggatgtggact

SEQ ID NO: 12862 - DNA, 25 bp, SARS Virus
cggtcttggtctaggatgtggactt

SEQ ID NO: 12863 - DNA, 25 bp, SARS Virus
ggtcttggtcttagatgtggacttc

SEQ ID NO: 12864 - DNA, 25 bp, SARS Virus
gtcttggtcttgaatgtggacttct

SEQ ID NO: 12865 - DNA, 25 bp, SARS Virus
tcttggtcttggatgtggacttctt

SEQ ID NO: 12866 - DNA, 25 bp, SARS Virus
cttggtcttggaagtggacttcttg

SEQ ID NO: 12867 - DNA, 25 bp, SARS Virus
ttggtcttggatatggacttcttgg

SEQ ID NO: 12868 - DNA, 25 bp, SARS Virus
tggtcttggatgaggacttcttggt

SEQ ID NO: 12869 - DNA, 25 bp, SARS Virus
ggtcttggatgtagacttcttggtc

SEQ ID NO: 12870 - DNA, 25 bp, SARS Virus
gtcttggatgtgaacttcttggtca

SEQ ID NO: 12871 - DNA, 25 bp, SARS Virus
tcttggatgtggacttcttggtcaa

SEQ ID NO: 12872 - DNA, 25 bp, SARS Virus
cttggatgtggaattcttggtcaat

SEQ ID NO: 12873 - DNA, 25 bp, SARS Virus
ttggatgtggacatcttggtcaatt

SEQ ID NO: 12874 - DNA, 25 bp, SARS Virus
tggatgtggactacttggtcaatta

SEQ ID NO: 12875 - DNA, 25 bp, SARS Virus
ggatgtggacttattggtcaattag

SEQ ID NO: 12876 - DNA, 25 bp, SARS Virus
gatgtggacttcatggtcaattagt

SEQ ID NO: 12877 - DNA, 25 bp, SARS Virus
atgtggacttctaggtcaattagtc

SEQ ID NO: 12878 - DNA, 25 bp, SARS Virus
tgtggacttcttagtcaattagtca

SEQ ID NO: 12879 - DNA, 25 bp, SARS Virus
gtggacttcttgatcaattagtcaa

SEQ ID NO: 12880 - DNA, 25 bp, SARS Virus
tggacttcttggacaattagtcaaa

SEQ ID NO: 12881 - DNA, 25 bp, SARS Virus
ggacttcttggtaaattagtcaaat

SEQ ID NO: 12882 - DNA, 25 bp, SARS Virus
gacttcttggtcaattagtcaaatg

SEQ ID NO: 12883 - DNA, 25 bp, SARS Virus
acttcttggtcaattagtcaaatga

SEQ ID NO: 12884 - DNA, 25 bp, SARS Virus
cttcttggtcaaatagtcaaatgac

SEQ ID NO: 12885 - DNA, 25 bp, SARS Virus
ttcttggtcaataagtcaaatgacc

SEQ ID NO: 12886 - DNA, 25 bp, SARS Virus
tcttggtcaattagtcaaatgacca

SEQ ID NO: 12887 - DNA, 25 bp, SARS Virus
cttggtcaattaatcaaatgaccaa

SEQ ID NO: 12888 - DNA, 25 bp, SARS Virus
ttggtcaattagacaaatgaccaat

SEQ ID NO: 12889 - DNA, 25 bp, SARS Virus
tggtcaattagtaaaatgaccaata

SEQ ID NO: 12890 - DNA, 25 bp, SARS Virus
ggtcaattagtcaaatgaccaataa

SEQ ID NO: 12891 - DNA, 25 bp, SARS Virus
gtcaattagtcaaatgaccaataaa

SEQ ID NO: 12892 - DNA, 25 bp, SARS Virus
tcaattagtcaaatgaccaataaat

SEQ ID NO: 12893 - DNA, 25 bp, SARS Virus
caattagtcaaaagaccaataaatt

SEQ ID NO: 12894 - DNA, 25 bp, SARS Virus
aattagtcaaataaccaataaattt

SEQ ID NO: 12895 - DNA, 25 bp, SARS Virus
attagtcaaatgaccaataaatttt

SEQ ID NO: 12896 - DNA, 25 bp, SARS Virus
ttagtcaaatgaacaataaattttg

SEQ ID NO: 12897 - DNA, 25 bp, SARS Virus
tagtcaaatgacaaataaattttga

SEQ ID NO: 12898 - DNA, 25 bp, SARS Virus
agtcaaatgaccaataaattttgaa

SEQ ID NO: 12899 - DNA, 25 bp, SARS Virus
gtcaaatgaccaataaattttgaat

SEQ ID NO: 12900 - DNA, 25 bp, SARS Virus
tcaaatgaccaaaaaattttgaatg

SEQ ID NO: 12901 - DNA, 25 bp, SARS Virus
caaatgaccaataaattttgaatga

SEQ ID NO: 12902 - DNA, 25 bp, SARS Virus
aaatgaccaataaattttgaatgac

SEQ ID NO: 12903 - DNA, 25 bp, SARS Virus
aatgaccaataaattttgaatgact

SEQ ID NO: 12904 - DNA, 25 bp, SARS Virus
atgaccaataaaatttgaatgactg

SEQ ID NO: 12905 - DNA, 25 bp, SARS Virus
tgaccaataaatattgaatgactgt

SEQ ID NO: 12906 - DNA, 25 bp, SARS Virus
gaccaataaattatgaatgactgtt

SEQ ID NO: 12907 - DNA, 25 bp, SARS Virus
accaataaatttagaatgactgtta

SEQ ID NO: 12908 - DNA, 25 bp, SARS Virus
ccaataaattttaaatgactgttac

SEQ ID NO: 12909 - DNA, 25 bp, SARS Virus
caataaattttgaatgactgttaca

SEQ ID NO: 12910 - DNA, 25 bp, SARS Virus
aataaattttgaatgactgttacaa

SEQ ID NO: 12911 - DNA, 25 bp, SARS Virus
ataaattttgaaagactgttacaac

SEQ ID NO: 12912 - DNA, 25 bp, SARS Virus
taaattttgaataactgttacaacg

SEQ ID NO: 12913 - DNA, 25 bp, SARS Virus
aaattttgaatgactgttacaacgg

SEQ ID NO: 12914 - DNA, 25 bp, SARS Virus
aattttgaatgaatgttacaacggt

SEQ ID NO: 12915 - DNA, 25 bp, SARS Virus
attttgaatgacagttacaacggta

SEQ ID NO: 12916 - DNA, 25 bp, SARS Virus
ttttgaatgactattacaacggtaa

SEQ ID NO: 12917 - DNA, 25 bp, SARS Virus
tttgaatgactgatacaacggtaat

SEQ ID NO: 12918 - DNA, 25 bp, SARS Virus
ttgaatgactgtaacaacggtaatt

SEQ ID NO: 12919 - DNA, 25 bp, SARS Virus
tgaatgactgttacaacggtaattt

SEQ ID NO: 12920 - DNA, 25 bp, SARS Virus
gaatgactgttaaaacggtaattta

SEQ ID NO: 12921 - DNA, 25 bp, SARS Virus
aatgactgttacaacggtaatttac

SEQ ID NO: 12922 - DNA, 25 bp, SARS Virus
atgactgttacaacggtaatttaca

SEQ ID NO: 12923 - DNA, 25 bp, SARS Virus
tgactgttacaaaggtaatttacac

SEQ ID NO: 12924 - DNA, 25 bp, SARS Virus
gactgttacaacagtaatttacaca

SEQ ID NO: 12925 - DNA, 25 bp, SARS Virus
actgttacaacgataatttacacaa

SEQ ID NO: 12926 - DNA, 25 bp, SARS Virus
ctgttacaacggaaatttacacaac

SEQ ID NO: 12927 - DNA, 25 bp, SARS Virus
tgttacaacggtaatttacacaact

SEQ ID NO: 12928 - DNA, 25 bp, SARS Virus
gttacaacggtaatttacacaactg

SEQ ID NO: 12929 - DNA, 25 bp, SARS Virus
ttacaacggtaaattacacaactgt

SEQ ID NO: 12930 - DNA, 25 bp, SARS Virus
tacaacggtaatatacacaactgta

SEQ ID NO: 12931 - DNA, 25 bp, SARS Virus
acaacggtaattaacacaactgtag

SEQ ID NO: 12932 - DNA, 25 bp, SARS Virus
caacggtaatttacacaactgtagc

SEQ ID NO: 12933 - DNA, 25 bp, SARS Virus
aacggtaatttaaacaactgtagca

SEQ ID NO: 12934 - DNA, 25 bp, SARS Virus
acggtaatttacacaactgtagcaa

SEQ ID NO: 12935 - DNA, 25 bp, SARS Virus
cggtaatttacaaaactgtagcaat

SEQ ID NO: 12936 - DNA, 25 bp, SARS Virus
ggtaatttacacaactgtagcaatt

SEQ ID NO: 12937 - DNA, 25 bp, SARS Virus
gtaatttacacaactgtagcaattc

SEQ ID NO: 12938 - DNA, 25 bp, SARS Virus
taatttacacaaatgtagcaattcc

SEQ ID NO: 12939 - DNA, 25 bp, SARS Virus
aatttacacaacagtagcaattcct

SEQ ID NO: 12940 - DNA, 25 bp, SARS Virus
atttacacaactatagcaattcctc

SEQ ID NO: 12941 - DNA, 25 bp, SARS Virus
tttacacaactgaagcaattcctcc

SEQ ID NO: 12942 - DNA, 25 bp, SARS Virus
ttacacaactgtagcaattcctccg

SEQ ID NO: 12943 - DNA, 25 bp, SARS Virus
tacacaactgtaacaattcctccgt

SEQ ID NO: 12944 - DNA, 25 bp, SARS Virus
acacaactgtagaaattcctccgtg

SEQ ID NO: 12945 - DNA, 25 bp, SARS Virus
cacaactgtagcaattcctccgtgt

SEQ ID NO: 12946 - DNA, 25 bp, SARS Virus
acaactgtagcaattcctccgtgtt

SEQ ID NO: 12947 - DNA, 25 bp, SARS Virus
caactgtagcaaatcctccgtgttt

SEQ ID NO: 12948 - DNA, 25 bp, SARS Virus
aactgtagcaatacctccgtgtttc

SEQ ID NO: 12949 - DNA, 25 bp, SARS Virus
actgtagcaattactccgtgtttca

SEQ ID NO: 12950 - DNA, 25 bp, SARS Virus
ctgtagcaattcatccgtgtttcac

SEQ ID NO: 12951 - DNA, 25 bp, SARS Virus
tgtagcaattccaccgtgtttcacg

SEQ ID NO: 12952 - DNA, 25 bp, SARS Virus
gtagcaattcctacgtgtttcacga

SEQ ID NO: 12953 - DNA, 25 bp, SARS Virus
tagcaattcctcagtgtttcacgat

SEQ ID NO: 12954 - DNA, 25 bp, SARS Virus
agcaattcctccatgtttcacgatt

SEQ ID NO: 12955 - DNA, 25 bp, SARS Virus
gcaattcctccgagtttcacgatta

SEQ ID NO: 12956 - DNA, 25 bp, SARS Virus
caattcctccgtatttcacgattag

SEQ ID NO: 12957 - DNA, 25 bp, SARS Virus
aattcctccgtgattcacgattagg

SEQ ID NO: 12958 - DNA, 25 bp, SARS Virus
attcctccgtgtatcacgattagga

SEQ ID NO: 12959 - DNA, 25 bp, SARS Virus
ttcctccgtgttacacgattaggat

SEQ ID NO: 12960 - DNA, 25 bp, SARS Virus
tcctccgtgtttaacgattaggata

SEQ ID NO: 12961 - DNA, 25 bp, SARS Virus
cctccgtgtttcacgattaggatac

SEQ ID NO: 12962 - DNA, 25 bp, SARS Virus
ctccgtgtttcaagattaggatacc

SEQ ID NO: 12963 - DNA, 25 bp, SARS Virus
tccgtgtttcacaattaggatacca

SEQ ID NO: 12964 - DNA, 25 bp, SARS Virus
ccgtgtttcacgattaggataccac

SEQ ID NO: 12965 - DNA, 25 bp, SARS Virus
cgtgtttcacgaataggataccact

SEQ ID NO: 12966 - DNA, 25 bp, SARS Virus
gtgtttcacgataaggataccacta

SEQ ID NO: 12967 - DNA, 25 bp, SARS Virus
tgtttcacgattaggataccactaa

SEQ ID NO: 12968 - DNA, 25 bp, SARS Virus
gtttcacgattaagataccactaac

SEQ ID NO: 12969 - DNA, 25 bp, SARS Virus
tttcacgattagaataccactaaca

SEQ ID NO: 12970 - DNA, 25 bp, SARS Virus
ttcacgattaggataccactaacat

SEQ ID NO: 12971 - DNA, 25 bp, SARS Virus
tcacgattaggaaaccactaacatt

SEQ ID NO: 12972 - DNA, 25 bp, SARS Virus
cacgattaggataccactaacattt

SEQ ID NO: 12973 - DNA, 25 bp, SARS Virus
acgattaggataacactaacattta

SEQ ID NO: 12974 - DNA, 25 bp, SARS Virus
cgattaggatacaactaacatttac

SEQ ID NO: 12975 - DNA, 25 bp, SARS Virus
gattaggataccactaacatttacg

SEQ ID NO: 12976 - DNA, 25 bp, SARS Virus
attaggataccaataacatttacga

SEQ ID NO: 12977 - DNA, 25 bp, SARS Virus
ttaggataccacaaacatttacgac

SEQ ID NO: 12978 - DNA, 25 bp, SARS Virus
taggataccactaacatttacgacg

SEQ ID NO: 12979 - DNA, 25 bp, SARS Virus
aggataccactaacatttacgacga

SEQ ID NO: 12980 - DNA, 25 bp, SARS Virus
ggataccactaaaatttacgacgat

SEQ ID NO: 12981 - DNA, 25 bp, SARS Virus
gataccactaacatttacgacgatt

SEQ ID NO: 12982 - DNA, 25 bp, SARS Virus
ataccactaacaattacgacgattg

SEQ ID NO: 12983 - DNA, 25 bp, SARS Virus
taccactaacatatacgacgattgt

SEQ ID NO: 12984 - DNA, 25 bp, SARS Virus
accactaacattaacgacgattgta

SEQ ID NO: 12985 - DNA, 25 bp, SARS Virus
ccactaacatttacgacgattgtat

SEQ ID NO: 12986 - DNA, 25 bp, SARS Virus
cactaacatttaagacgattgtatg

SEQ ID NO: 12987 - DNA, 25 bp, SARS Virus
actaacatttacaacgattgtatgt

SEQ ID NO: 12988 - DNA, 25 bp, SARS Virus
ctaacatttacgacgattgtatgtg

SEQ ID NO: 12989 - DNA, 25 bp, SARS Virus
taacatttacgaagattgtatgtgg

SEQ ID NO: 12990 - DNA, 25 bp, SARS Virus
aacatttacgacaattgtatgtgga

SEQ ID NO: 12991 - DNA, 25 bp, SARS Virus
acatttacgacgattgtatgtggac

SEQ ID NO: 12992 - DNA, 25 bp, SARS Virus
catttacgacgaatgtatgtggact

SEQ ID NO: 12993 - DNA, 25 bp, SARS Virus
atttacgacgatagtatgtggactt

SEQ ID NO: 12994 - DNA, 25 bp, SARS Virus
tttacgacgattatatgtggacttt

SEQ ID NO: 12995 - DNA, 25 bp, SARS Virus
ttacgacgattgaatgtggactttg

SEQ ID NO: 12996 - DNA, 25 bp, SARS Virus
tacgacgattgtatgtggactttgt

SEQ ID NO: 12997 - DNA, 25 bp, SARS Virus
acgacgattgtaagtggactttgta

SEQ ID NO: 12998 - DNA, 25 bp, SARS Virus
cgacgattgtatatggactttgtac

SEQ ID NO: 12999 - DNA, 25 bp, SARS Virus
gacgattgtatgaggactttgtacc

SEQ ID NO: 13000 - DNA, 25 bp, SARS Virus
acgattgtatgtagactttgtacca

SEQ ID NO: 13001 - DNA, 25 bp, SARS Virus
cgattgtatgtgaactttgtaccac

SEQ ID NO: 13002 - DNA, 25 bp, SARS Virus
gattgtatgtggactttgtaccacc

SEQ ID NO: 13003 - DNA, 25 bp, SARS Virus
attgtatgtggaatttgtaccacca

SEQ ID NO: 13004 - DNA, 25 bp, SARS Virus
ttgtatgtggacattgtaccaccac

SEQ ID NO: 13005 - DNA, 25 bp, SARS Virus
tgtatgtggactatgtaccaccacc

SEQ ID NO: 13006 - DNA, 25 bp, SARS Virus
gtatgtggacttagtaccaccacca

SEQ ID NO: 13007 - DNA, 25 bp, SARS Virus
tatgtggactttataccaccaccac

SEQ ID NO: 13008 - DNA, 25 bp, SARS Virus
atgtggactttgaaccaccaccaca

SEQ ID NO: 13009 - DNA, 25 bp, SARS Virus
tgtggactttgtaccaccaccacat

SEQ ID NO: 13010 - DNA, 25 bp, SARS Virus
gtggactttgtaacaccaccacatc

SEQ ID NO: 13011 - DNA, 25 bp, SARS Virus
tggactttgtacaaccaccacatcg

SEQ ID NO: 13012 - DNA, 25 bp, SARS Virus
ggactttgtaccaccaccacatcgt

SEQ ID NO: 13013 - DNA, 25 bp, SARS Virus
gactttgtaccaacaccacatcgtc

SEQ ID NO: 13014 - DNA, 25 bp, SARS Virus
actttgtaccacaaccacatcgtcc

SEQ ID NO: 13015 - DNA, 25 bp, SARS Virus
ctttgtaccaccaccacatcgtcca

SEQ ID NO: 13016 - DNA, 25 bp, SARS Virus
tttgtaccaccaacacatcgtccac

SEQ ID NO: 13017 - DNA, 25 bp, SARS Virus
ttgtaccaccacaacatcgtccacg

SEQ ID NO: 13018 - DNA, 25 bp, SARS Virus
tgtaccaccaccacatcgtccacgt

SEQ ID NO: 13019 - DNA, 25 bp, SARS Virus
gtaccaccaccaaatcgtccacgtg

SEQ ID NO: 13020 - DNA, 25 bp, SARS Virus
taccaccaccacatcgtccacgtga

SEQ ID NO: 13021 - DNA, 25 bp, SARS Virus
accaccaccacaacgtccacgtgag

SEQ ID NO: 13022 - DNA, 25 bp, SARS Virus
ccaccaccacatagtccacgtgagt

SEQ ID NO: 13023 - DNA, 25 bp, SARS Virus
caccaccacatcatccacgtgagtt

SEQ ID NO: 13024 - DNA, 25 bp, SARS Virus
accaccacatcgaccacgtgagttg

SEQ ID NO: 13025 - DNA, 25 bp, SARS Virus
ccaccacatcgtacacgtgagttgt

SEQ ID NO: 13026 - DNA, 25 bp, SARS Virus
caccacatcgtcaacgtgagttgtt

SEQ ID NO: 13027 - DNA, 25 bp, SARS Virus
accacatcgtccacgtgagttgttc

SEQ ID NO: 13028 - DNA, 25 bp, SARS Virus
ccacatcgtccaagtgagttgttcc

SEQ ID NO: 13029 - DNA, 25 bp, SARS Virus
cacatcgtccacatgagttgttccg

SEQ ID NO: 13030 - DNA, 25 bp, SARS Virus
acatcgtccacgagagttgttccgt

SEQ ID NO: 13031 - DNA, 25 bp, SARS Virus
catcgtccacgtaagttgttccgtt

SEQ ID NO: 13032 - DNA, 25 bp, SARS Virus
atcgtccacgtgagttgttccgttg

SEQ ID NO: 13033 - DNA, 25 bp, SARS Virus
tcgtccacgtgaattgttccgttgg

SEQ ID NO: 13034 - DNA, 25 bp, SARS Virus
cgtccacgtgagatgttccgttggt

SEQ ID NO: 13035 - DNA, 25 bp, SARS Virus
gtccacgtgagtagttccgttggtt

SEQ ID NO: 13036 - DNA, 25 bp, SARS Virus
tccacgtgagttattccgttggtta

SEQ ID NO: 13037 - DNA, 25 bp, SARS Virus
ccacgtgagttgatccgttggttac

SEQ ID NO: 13038 - DNA, 25 bp, SARS Virus
cacgtgagttgtaccgttggttacc

SEQ ID NO: 13039 - DNA, 25 bp, SARS Virus
acgtgagttgttacgttggttacca

SEQ ID NO: 13040 - DNA, 25 bp, SARS Virus
cgtgagttgttcagttggttaccac

SEQ ID NO: 13041 - DNA, 25 bp, SARS Virus
gtgagttgttccattggttaccacg

SEQ ID NO: 13042 - DNA, 25 bp, SARS Virus
tgagttgttccgatggttaccacgg

SEQ ID NO: 13043 - DNA, 25 bp, SARS Virus
gagttgttccgtaggttaccacggt

SEQ ID NO: 13044 - DNA, 25 bp, SARS Virus
agttgttccgttagttaccacggta

SEQ ID NO: 13045 - DNA, 25 bp, SARS Virus
gttgttccgttgattaccacggtac

SEQ ID NO: 13046 - DNA, 25 bp, SARS Virus
ttgttccgttggataccacggtacg

SEQ ID NO: 13047 - DNA, 25 bp, SARS Virus
tgttccgttggtaaccacggtacgt

SEQ ID NO: 13048 - DNA, 25 bp, SARS Virus
gttccgttggttaccacggtacgtt

SEQ ID NO: 13049 - DNA, 25 bp, SARS Virus
ttccgttggttaacacggtacgttt

SEQ ID NO: 13050 - DNA, 25 bp, SARS Virus
tccgttggttacaacggtacgtttt

SEQ ID NO: 13051 - DNA, 25 bp, SARS Virus
ccgttggttaccacggtacgttttc

SEQ ID NO: 13052 - DNA, 25 bp, SARS Virus
cgttggttaccaaggtacgttttcc

SEQ ID NO: 13053 - DNA, 25 bp, SARS Virus
gttggttaccacagtacgttttcct

SEQ ID NO: 13054 - DNA, 25 bp, SARS Virus
ttggttaccacgatacgttttcctc

SEQ ID NO: 13055 - DNA, 25 bp, SARS Virus
tggttaccacggaacgttttcctct

SEQ ID NO: 13056 - DNA, 25 bp, SARS Virus
ggttaccacggtacgttttcctctc

SEQ ID NO: 13057 - DNA, 25 bp, SARS Virus
gttaccacggtaagttttcctctca

SEQ ID NO: 13058 - DNA, 25 bp, SARS Virus
ttaccacggtacattttcctctcac

SEQ ID NO: 13059 - DNA, 25 bp, SARS Virus
taccacggtacgatttcctctcact

SEQ ID NO: 13060 - DNA, 25 bp, SARS Virus
accacggtacgtattcctctcacta

SEQ ID NO: 13061 - DNA, 25 bp, SARS Virus
ccacggtacgttatcctctcactac

SEQ ID NO: 13062 - DNA, 25 bp, SARS Virus
cacggtacgtttacctctcactact

SEQ ID NO: 13063 - DNA, 25 bp, SARS Virus
acggtacgttttactctcactacta

SEQ ID NO: 13064 - DNA, 25 bp, SARS Virus
cggtacgttttcatctcactactaa

SEQ ID NO: 13065 - DNA, 25 bp, SARS Virus
ggtacgttttccactcactactaat

SEQ ID NO: 13066 - DNA, 25 bp, SARS Virus
gtacgttttcctatcactactaatg

SEQ ID NO: 13067 - DNA, 25 bp, SARS Virus
tacgttttcctcacactactaatgt

SEQ ID NO: 13068 - DNA, 25 bp, SARS Virus
acgttttcctctaactactaatgta

SEQ ID NO: 13069 - DNA, 25 bp, SARS Virus
cgttttcctctcactactaatgtaa

SEQ ID NO: 13070 - DNA, 25 bp, SARS Virus
gttttcctctcaatactaatgtaat

SEQ ID NO: 13071 - DNA, 25 bp, SARS Virus
ttttcctctcacaactaatgtaatt

SEQ ID NO: 13072 - DNA, 25 bp, SARS Virus
tttcctctcactactaatgtaattc

SEQ ID NO: 13073 - DNA, 25 bp, SARS Virus
ttcctctcactaataatgtaattcg

SEQ ID NO: 13074 - DNA, 25 bp, SARS Virus
tcctctcactacaaatgtaattcga

SEQ ID NO: 13075 - DNA, 25 bp, SARS Virus
cctctcactactaatgtaattcgat

SEQ ID NO: 13076 - DNA, 25 bp, SARS Virus
ctctcactactaatgtaattcgatt

SEQ ID NO: 13077 - DNA, 25 bp, SARS Virus
tctcactactaaagtaattcgattt

SEQ ID NO: 13078 - DNA, 25 bp, SARS Virus
ctcactactaatataattcgattta

SEQ ID NO: 13079 - DNA, 25 bp, SARS Virus
tcactactaatgaaattcgatttac

SEQ ID NO: 13080 - DNA, 25 bp, SARS Virus
cactactaatgtaattcgatttacc

SEQ ID NO: 13081 - DNA, 25 bp, SARS Virus
actactaatgtaattcgatttaccg

SEQ ID NO: 13082 - DNA, 25 bp, SARS Virus
ctactaatgtaaatcgatttaccgg

SEQ ID NO: 13083 - DNA, 25 bp, SARS Virus
tactaatgtaatacgatttaccggg

SEQ ID NO: 13084 - DNA, 25 bp, SARS Virus
actaatgtaattagatttaccggga

SEQ ID NO: 13085 - DNA, 25 bp, SARS Virus
ctaatgtaattcaatttaccgggag

SEQ ID NO: 13086 - DNA, 25 bp, SARS Virus
taatgtaattcgatttaccgggaga

SEQ ID NO: 13087 - DNA, 25 bp, SARS Virus
aatgtaattcgaattaccgggagaa

SEQ ID NO: 13088 - DNA, 25 bp, SARS Virus
atgtaattcgatataccgggagaat

SEQ ID NO: 13089 - DNA, 25 bp, SARS Virus
tgtaattcgattaaccgggagaatg

SEQ ID NO: 13090 - DNA, 25 bp, SARS Virus
gtaattcgatttaccgggagaatgt

SEQ ID NO: 13091 - DNA, 25 bp, SARS Virus
taattcgatttaacgggagaatgtc

SEQ ID NO: 13092 - DNA, 25 bp, SARS Virus
aattcgatttacagggagaatgtca

SEQ ID NO: 13093 - DNA, 25 bp, SARS Virus
attcgatttaccaggagaatgtcat

SEQ ID NO: 13094 - DNA, 25 bp, SARS Virus
ttcgatttaccgagagaatgtcatc

SEQ ID NO: 13095 - DNA, 25 bp, SARS Virus
tcgatttaccggaagaatgtcatcc

SEQ ID NO: 13096 - DNA, 25 bp, SARS Virus
cgatttaccgggagaatgtcatcct

SEQ ID NO: 13097 - DNA, 25 bp, SARS Virus
gatttaccgggaaaatgtcatcctc

SEQ ID NO: 13098 - DNA, 25 bp, SARS Virus
atttaccgggagaatgtcatcctcc

SEQ ID NO: 13099 - DNA, 25 bp, SARS Virus
tttaccgggagaatgtcatcctccc

SEQ ID NO: 13100 - DNA, 25 bp, SARS Virus
ttaccgggagaaagtcatcctccca

SEQ ID NO: 13101 - DNA, 25 bp, SARS Virus
taccgggagaatatcatcctcccag

SEQ ID NO: 13102 - DNA, 25 bp, SARS Virus
accgggagaatgacatcctcccaga

SEQ ID NO: 13103 - DNA, 25 bp, SARS Virus
ccgggagaatgtaatcctcccagaa

SEQ ID NO: 13104 - DNA, 25 bp, SARS Virus
cgggagaatgtcatcctcccagaac

SEQ ID NO: 13105 - DNA, 25 bp, SARS Virus
gggagaatgtcaacctcccagaaca

SEQ ID NO: 13106 - DNA, 25 bp, SARS Virus
ggagaatgtcatactcccagaacaa

SEQ ID NO: 13107 - DNA, 25 bp, SARS Virus
gagaatgtcatcatcccagaacaaa

SEQ ID NO: 13108 - DNA, 25 bp, SARS Virus
agaatgtcatccacccagaacaaac

SEQ ID NO: 13109 - DNA, 25 bp, SARS Virus
gaatgtcatcctaccagaacaaacg

SEQ ID NO: 13110 - DNA, 25 bp, SARS Virus
aatgtcatcctcacagaacaaacga

SEQ ID NO: 13111 - DNA, 25 bp, SARS Virus
atgtcatcctccaagaacaaacgaa

SEQ ID NO: 13112 - DNA, 25 bp, SARS Virus
tgtcatcctcccagaacaaacgaaa

SEQ ID NO: 13113 - DNA, 25 bp, SARS Virus
gtcatcctcccaaaacaaacgaaag

SEQ ID NO: 13114 - DNA, 25 bp, SARS Virus
tcatcctcccagaacaaacgaaaga

SEQ ID NO: 13115 - DNA, 25 bp, SARS Virus
catcctcccagaacaaacgaaagac

SEQ ID NO: 13116 - DNA, 25 bp, SARS Virus
atcctcccagaaaaaacgaaagacc

SEQ ID NO: 13117 - DNA, 25 bp, SARS Virus
tcctcccagaacaaacgaaagacct

SEQ ID NO: 13118 - DNA, 25 bp, SARS Virus
cctcccagaacaaacgaaagacctg

SEQ ID NO: 13119 - DNA, 25 bp, SARS Virus
ctcccagaacaaacgaaagacctgt

SEQ ID NO: 13120 - DNA, 25 bp, SARS Virus
tcccagaacaaaagaaagacctgta

SEQ ID NO: 13121 - DNA, 25 bp, SARS Virus
cccagaacaaacaaaagacctgtat

SEQ ID NO: 13122 - DNA, 25 bp, SARS Virus
ccagaacaaacgaaagacctgtatt

SEQ ID NO: 13123 - DNA, 25 bp, SARS Virus
cagaacaaacgaaagacctgtatta

SEQ ID NO: 13124 - DNA, 25 bp, SARS Virus
agaacaaacgaaagacctgtattag

SEQ ID NO: 13125 - DNA, 25 bp, SARS Virus
gaacaaacgaaaaacctgtattaga

SEQ ID NO: 13126 - DNA, 25 bp, SARS Virus
aacaaacgaaagacctgtattagaa

SEQ ID NO: 13127 - DNA, 25 bp, SARS Virus
acaaacgaaagaactgtattagaac

SEQ ID NO: 13128 - DNA, 25 bp, SARS Virus
caaacgaaagacatgtattagaacg

SEQ ID NO: 13129 - DNA, 25 bp, SARS Virus
aaacgaaagaccagtattagaacga

SEQ ID NO: 13130 - DNA, 25 bp, SARS Virus
aacgaaagacctatattagaacgat

SEQ ID NO: 13131 - DNA, 25 bp, SARS Virus
acgaaagacctgaattagaacgatt

SEQ ID NO: 13132 - DNA, 25 bp, SARS Virus
cgaaagacctgtattagaacgattc

SEQ ID NO: 13133 - DNA, 25 bp, SARS Virus
gaaagacctgtaatagaacgattct

SEQ ID NO: 13134 - DNA, 25 bp, SARS Virus
aaagacctgtataagaacgattctt

SEQ ID NO: 13135 - DNA, 25 bp, SARS Virus
aagacctgtattagaacgattcttc

SEQ ID NO: 13136 - DNA, 25 bp, SARS Virus
agacctgtattaaaacgattcttca

SEQ ID NO: 13137 - DNA, 25 bp, SARS Virus
gacctgtattagaacgattcttcac

SEQ ID NO: 13138 - DNA, 25 bp, SARS Virus
acctgtattagaacgattcttcaca

SEQ ID NO: 13139 - DNA, 25 bp, SARS Virus
cctgtattagaaagattcttcacag

SEQ ID NO: 13140 - DNA, 25 bp, SARS Virus
ctgtattagaacaattcttcacaga

SEQ ID NO: 13141 - DNA, 25 bp, SARS Virus
tgtattagaacgattcttcacagac

SEQ ID NO: 13142 - DNA, 25 bp, SARS Virus
gtattagaacgaatcttcacagacg

SEQ ID NO: 13143 - DNA, 25 bp, SARS Virus
tattagaacgatacttcacagacgt

SEQ ID NO: 13144 - DNA, 25 bp, SARS Virus
attagaacgattattcacagacgta

SEQ ID NO: 13145 - DNA, 25 bp, SARS Virus
ttagaacgattcatcacagacgtac

SEQ ID NO: 13146 - DNA, 25 bp, SARS Virus
tagaacgattctacacagacgtaca

SEQ ID NO: 13147 - DNA, 25 bp, SARS Virus
agaacgattcttaacagacgtacaa

SEQ ID NO: 13148 - DNA, 25 bp, SARS Virus
gaacgattcttcacagacgtacaac

SEQ ID NO: 13149 - DNA, 25 bp, SARS Virus
aacgattcttcaaagacgtacaaca

SEQ ID NO: 13150 - DNA, 25 bp, SARS Virus
acgattcttcacagacgtacaacaa

SEQ ID NO: 13151 - DNA, 25 bp, SARS Virus
cgattcttcacaaacgtacaacaac

SEQ ID NO: 13152 - DNA, 25 bp, SARS Virus
gattcttcacagacgtacaacaacc

SEQ ID NO: 13153 - DNA, 25 bp, SARS Virus
attcttcacagaagtacaacaacct

SEQ ID NO: 13154 - DNA, 25 bp, SARS Virus
ttcttcacagacatacaacaacctg

SEQ ID NO: 13155 - DNA, 25 bp, SARS Virus
tcttcacagacgaacaacaacctgg

SEQ ID NO: 13156 - DNA, 25 bp, SARS Virus
cttcacagacgtacaacaacctgga

SEQ ID NO: 13157 - DNA, 25 bp, SARS Virus
ttcacagacgtaaaacaacctggat

SEQ ID NO: 13158 - DNA, 25 bp, SARS Virus
tcacagacgtacaacaacctggatt

SEQ ID NO: 13159 - DNA, 25 bp, SARS Virus
cacagacgtacaacaacctggattg

SEQ ID NO: 13160 - DNA, 25 bp, SARS Virus
acagacgtacaaaaacctggattgg

SEQ ID NO: 13161 - DNA, 25 bp, SARS Virus
cagacgtacaacaacctggattgga

SEQ ID NO: 13162 - DNA, 25 bp, SARS Virus
agacgtacaacaacctggattggat

SEQ ID NO: 13163 - DNA, 25 bp, SARS Virus
gacgtacaacaaactggattggatt

SEQ ID NO: 13164 - DNA, 25 bp, SARS Virus
acgtacaacaacatggattggattt

SEQ ID NO: 13165 - DNA, 25 bp, SARS Virus
cgtacaacaaccaggattggattta

SEQ ID NO: 13166 - DNA, 25 bp, SARS Virus
gtacaacaacctagattggatttac

SEQ ID NO: 13167 - DNA, 25 bp, SARS Virus
tacaacaacctgaattggatttacg

SEQ ID NO: 13168 - DNA, 25 bp, SARS Virus
acaacaacctggattggatttacgt

SEQ ID NO: 13169 - DNA, 25 bp, SARS Virus
caacaacctggaatggatttacgtc

SEQ ID NO: 13170 - DNA, 25 bp, SARS Virus
aacaacctggataggatttacgtcc

SEQ ID NO: 13171 - DNA, 25 bp, SARS Virus
acaacctggattagatttacgtcca

SEQ ID NO: 13172 - DNA, 25 bp, SARS Virus
caacctggattgaatttacgtccac

SEQ ID NO: 13173 - DNA, 25 bp, SARS Virus
aacctggattggatttacgtccact

SEQ ID NO: 13174 - DNA, 25 bp, SARS Virus
acctggattggaattacgtccactc

SEQ ID NO: 13175 - DNA, 25 bp, SARS Virus
cctggattggatatacgtccactcc

SEQ ID NO: 13176 - DNA, 25 bp, SARS Virus
ctggattggattaacgtccactcct

SEQ ID NO: 13177 - DNA, 25 bp, SARS Virus
tggattggatttacgtccactcctg

SEQ ID NO: 13178 - DNA, 25 bp, SARS Virus
ggattggatttaagtccactcctgt

SEQ ID NO: 13179 - DNA, 25 bp, SARS Virus
gattggatttacatccactcctgta

SEQ ID NO: 13180 - DNA, 25 bp, SARS Virus
attggatttacgaccactcctgtag

SEQ ID NO: 13181 - DNA, 25 bp, SARS Virus
ttggatttacgtacactcctgtagg

SEQ ID NO: 13182 - DNA, 25 bp, SARS Virus
tggatttacgtcaactcctgtaggt

SEQ ID NO: 13183 - DNA, 25 bp, SARS Virus
ggatttacgtccactcctgtaggtc

SEQ ID NO: 13184 - DNA, 25 bp, SARS Virus
gatttacgtccaatcctgtaggtcg

SEQ ID NO: 13185 - DNA, 25 bp, SARS Virus
atttacgtccacacctgtaggtcga

SEQ ID NO: 13186 - DNA, 25 bp, SARS Virus
tttacgtccactactgtaggtcgaa

SEQ ID NO: 13187 - DNA, 25 bp, SARS Virus
ttacgtccactcatgtaggtcgaag

SEQ ID NO: 13188 - DNA, 25 bp, SARS Virus
tacgtccactccagtaggtcgaaga

SEQ ID NO: 13189 - DNA, 25 bp, SARS Virus
acgtccactcctataggtcgaagaa

SEQ ID NO: 13190 - DNA, 25 bp, SARS Virus
cgtccactcctgaaggtcgaagaat

SEQ ID NO: 13191 - DNA, 25 bp, SARS Virus
gtccactcctgtaggtcgaagaatt

SEQ ID NO: 13192 - DNA, 25 bp, SARS Virus
tccactcctgtaagtcgaagaattc

SEQ ID NO: 13193 - DNA, 25 bp, SARS Virus
ccactcctgtagatcgaagaattcc

SEQ ID NO: 13194 - DNA, 25 bp, SARS Virus
cactcctgtaggacgaagaattccg

SEQ ID NO: 13195 - DNA, 25 bp, SARS Virus
actcctgtaggtagaagaattccgt

SEQ ID NO: 13196 - DNA, 25 bp, SARS Virus
ctcctgtaggtcaaagaattccgtc

SEQ ID NO: 13197 - DNA, 25 bp, SARS Virus
tcctgtaggtcgaagaattccgtcg

SEQ ID NO: 13198 - DNA, 25 bp, SARS Virus
cctgtaggtcgaagaattccgtcgt

SEQ ID NO: 13199 - DNA, 25 bp, SARS Virus
ctgtaggtcgaaaaattccgtcgta

SEQ ID NO: 13200 - DNA, 25 bp, SARS Virus
tgtaggtcgaagaattccgtcgtat

SEQ ID NO: 13201 - DNA, 25 bp, SARS Virus
gtaggtcgaagaattccgtcgtata

SEQ ID NO: 13202 - DNA, 25 bp, SARS Virus
taggtcgaagaaatccgtcgtatac

SEQ ID NO: 13203 - DNA, 25 bp, SARS Virus
aggtcgaagaataccgtcgtatact

SEQ ID NO: 13204 - DNA, 25 bp, SARS Virus
ggtcgaagaattacgtcgtatactt

SEQ ID NO: 13205 - DNA, 25 bp, SARS Virus
gtcgaagaattcagtcgtatacttt

SEQ ID NO: 13206 - DNA, 25 bp, SARS Virus
tcgaagaattccatcgtatactttt

SEQ ID NO: 13207 - DNA, 25 bp, SARS Virus
cgaagaattccgacgtatactttta

SEQ ID NO: 13208 - DNA, 25 bp, SARS Virus
gaagaattccgtagtatacttttaa

SEQ ID NO: 13209 - DNA, 25 bp, SARS Virus
aagaattccgtcatatacttttaaa

SEQ ID NO: 13210 - DNA, 25 bp, SARS Virus
agaattccgtcgaatacttttaaag

SEQ ID NO: 13211 - DNA, 25 bp, SARS Virus
gaattccgtcgtatacttttaaagt

SEQ ID NO: 13212 - DNA, 25 bp, SARS Virus
aattccgtcgtaaacttttaaagtt

SEQ ID NO: 13213 - DNA, 25 bp, SARS Virus
attccgtcgtatacttttaaagtta

SEQ ID NO: 13214 - DNA, 25 bp, SARS Virus
ttccgtcgtataattttaaagttaa

SEQ ID NO: 13215 - DNA, 25 bp, SARS Virus
tccgtcgtatacatttaaagttaag

SEQ ID NO: 13216 - DNA, 25 bp, SARS Virus
ccgtcgtatactattaaagttaagt

SEQ ID NO: 13217 - DNA, 25 bp, SARS Virus
cgtcgtatacttataaagttaagtg

SEQ ID NO: 13218 - DNA, 25 bp, SARS Virus
gtcgtatactttaaaagttaagtgt

SEQ ID NO: 13219 - DNA, 25 bp, SARS Virus
tcgtatacttttaaagttaagtgtc

SEQ ID NO: 13220 - DNA, 25 bp, SARS Virus
cgtatacttttaaagttaagtgtcc

SEQ ID NO: 13221 - DNA, 25 bp, SARS Virus
gtatacttttaaagttaagtgtcct

SEQ ID NO: 13222 - DNA, 25 bp, SARS Virus
tatacttttaaaattaagtgtcctg

SEQ ID NO: 13223 - DNA, 25 bp, SARS Virus
atacttttaaagataagtgtcctgt

SEQ ID NO: 13224 - DNA, 25 bp, SARS Virus
tacttttaaagtaaagtgtcctgta

SEQ ID NO: 13225 - DNA, 25 bp, SARS Virus
acttttaaagttaagtgtcctgtag

SEQ ID NO: 13226 - DNA, 25 bp, SARS Virus
cttttaaagttaagtgtcctgtaga

SEQ ID NO: 13227 - DNA, 25 bp, SARS Virus
ttttaaagttaaatgtcctgtagaa

SEQ ID NO: 13228 - DNA, 25 bp, SARS Virus
tttaaagttaagagtcctgtagaat

SEQ ID NO: 13229 - DNA, 25 bp, SARS Virus
ttaaagttaagtatcctgtagaatg

SEQ ID NO: 13230 - DNA, 25 bp, SARS Virus
taaagttaagtgacctgtagaatga

SEQ ID NO: 13231 - DNA, 25 bp, SARS Virus
aaagttaagtgtactgtagaatgaa

SEQ ID NO: 13232 - DNA, 25 bp, SARS Virus
aagttaagtgtcatgtagaatgaac

SEQ ID NO: 13233 - DNA, 25 bp, SARS Virus
agttaagtgtccagtagaatgaacg

SEQ ID NO: 13234 - DNA, 25 bp, SARS Virus
gttaagtgtcctatagaatgaacgt

SEQ ID NO: 13235 - DNA, 25 bp, SARS Virus
ttaagtgtcctgaagaatgaacgtg

SEQ ID NO: 13236 - DNA, 25 bp, SARS Virus
taagtgtcctgtagaatgaacgtgg

SEQ ID NO: 13237 - DNA, 25 bp, SARS Virus
aagtgtcctgtaaaatgaacgtggt

SEQ ID NO: 13238 - DNA, 25 bp, SARS Virus
agtgtcctgtagaatgaacgtggta

SEQ ID NO: 13239 - DNA, 25 bp, SARS Virus
gtgtcctgtagaatgaacgtggtaa

SEQ ID NO: 13240 - DNA, 25 bp, SARS Virus
tgtcctgtagaaagaacgtggtaac

SEQ ID NO: 13241 - DNA, 25 bp, SARS Virus
gtcctgtagaataaacgtggtaaca

SEQ ID NO: 13242 - DNA, 25 bp, SARS Virus
tcctgtagaatgaacgtggtaacaa

SEQ ID NO: 13243 - DNA, 25 bp, SARS Virus
cctgtagaatgaacgtggtaacaac

SEQ ID NO: 13244 - DNA, 25 bp, SARS Virus
ctgtagaatgaaagtggtaacaaca

SEQ ID NO: 13245 - DNA, 25 bp, SARS Virus
tgtagaatgaacatggtaacaacag

SEQ ID NO: 13246 - DNA, 25 bp, SARS Virus
gtagaatgaacgaggtaacaacagt

SEQ ID NO: 13247 - DNA, 25 bp, SARS Virus
tagaatgaacgtagtaacaacagtc

SEQ ID NO: 13248 - DNA, 25 bp, SARS Virus
agaatgaacgtgataacaacagtcg

SEQ ID NO: 13249 - DNA, 25 bp, SARS Virus
gaatgaacgtggaaacaacagtcgt

SEQ ID NO: 13250 - DNA, 25 bp, SARS Virus
aatgaacgtggtaacaacagtcgtc

SEQ ID NO: 13251 - DNA, 25 bp, SARS Virus
atgaacgtggtaacaacagtcgtcc

SEQ ID NO: 13252 - DNA, 25 bp, SARS Virus
tgaacgtggtaaaaacagtcgtccg

SEQ ID NO: 13253 - DNA, 25 bp, SARS Virus
gaacgtggtaacaacagtcgtccgt

SEQ ID NO: 13254 - DNA, 25 bp, SARS Virus
aacgtggtaacaacagtcgtccgta

SEQ ID NO: 13255 - DNA, 25 bp, SARS Virus
acgtggtaacaaaagtcgtccgtat

SEQ ID NO: 13256 - DNA, 25 bp, SARS Virus
cgtggtaacaacagtcgtccgtata

SEQ ID NO: 13257 - DNA, 25 bp, SARS Virus
gtggtaacaacaatcgtccgtataa

SEQ ID NO: 13258 - DNA, 25 bp, SARS Virus
tggtaacaacagacgtccgtataaa

SEQ ID NO: 13259 - DNA, 25 bp, SARS Virus
ggtaacaacagtagtccgtataaac

SEQ ID NO: 13260 - DNA, 25 bp, SARS Virus
gtaacaacagtcatccgtataaacc

SEQ ID NO: 13261 - DNA, 25 bp, SARS Virus
taacaacagtcgaccgtataaacca

SEQ ID NO: 13262 - DNA, 25 bp, SARS Virus
aacaacagtcgtacgtataaaccac

SEQ ID NO: 13263 - DNA, 25 bp, SARS Virus
acaacagtcgtcagtataaaccacg

SEQ ID NO: 13264 - DNA, 25 bp, SARS Virus
caacagtcgtccatataaaccacga

SEQ ID NO: 13265 - DNA, 25 bp, SARS Virus
aacagtcgtccgaataaaccacgat

SEQ ID NO: 13266 - DNA, 25 bp, SARS Virus
acagtcgtccgtataaaccacgatt

SEQ ID NO: 13267 - DNA, 25 bp, SARS Virus
cagtcgtccgtaaaaaccacgattt

SEQ ID NO: 13268 - DNA, 25 bp, SARS Virus
agtcgtccgtataaaccacgatttg

SEQ ID NO: 13269 - DNA, 25 bp, SARS Virus
gtcgtccgtataaaccacgatttgg

SEQ ID NO: 13270 - DNA, 25 bp, SARS Virus
tcgtccgtataaaccacgatttggt

SEQ ID NO: 13271 - DNA, 25 bp, SARS Virus
cgtccgtataaaacacgatttggtg

SEQ ID NO: 13272 - DNA, 25 bp, SARS Virus
gtccgtataaacaacgatttggtga

SEQ ID NO: 13273 - DNA, 25 bp, SARS Virus
tccgtataaaccacgatttggtgaa

SEQ ID NO: 13274 - DNA, 25 bp, SARS Virus
ccgtataaaccaagatttggtgaag

SEQ ID NO: 13275 - DNA, 25 bp, SARS Virus
cgtataaaccacaatttggtgaagt

SEQ ID NO: 13276 - DNA, 25 bp, SARS Virus
gtataaaccacgatttggtgaagtc

SEQ ID NO: 13277 - DNA, 25 bp, SARS Virus
tataaaccacgaattggtgaagtca

SEQ ID NO: 13278 - DNA, 25 bp, SARS Virus
ataaaccacgatatggtgaagtcag

SEQ ID NO: 13279 - DNA, 25 bp, SARS Virus
taaaccacgattaggtgaagtcaga

SEQ ID NO: 13280 - DNA, 25 bp, SARS Virus
aaaccacgatttagtgaagtcagaa

SEQ ID NO: 13281 - DNA, 25 bp, SARS Virus
aaccacgatttgatgaagtcagaaa

SEQ ID NO: 13282 - DNA, 25 bp, SARS Virus
accacgatttggagaagtcagaaat

SEQ ID NO: 13283 - DNA, 25 bp, SARS Virus
ccacgatttggtaaagtcagaaatg

SEQ ID NO: 13284 - DNA, 25 bp, SARS Virus
cacgatttggtgaagtcagaaatgt

SEQ ID NO: 13285 - DNA, 25 bp, SARS Virus
acgatttggtgaagtcagaaatgtt

SEQ ID NO: 13286 - DNA, 25 bp, SARS Virus
cgatttggtgaaatcagaaatgttc

SEQ ID NO: 13287 - DNA, 25 bp, SARS Virus
gatttggtgaagacagaaatgttca

SEQ ID NO: 13288 - DNA, 25 bp, SARS Virus
atttggtgaagtaagaaatgttcac

SEQ ID NO: 13289 - DNA, 25 bp, SARS Virus
tttggtgaagtcagaaatgttcaca

SEQ ID NO: 13290 - DNA, 25 bp, SARS Virus
ttggtgaagtcaaaaatgttcacac

SEQ ID NO: 13291 - DNA, 25 bp, SARS Virus
tggtgaagtcagaaatgttcacacg

SEQ ID NO: 13292 - DNA, 25 bp, SARS Virus
ggtgaagtcagaaatgttcacacgc

SEQ ID NO: 13293 - DNA, 25 bp, SARS Virus
gtgaagtcagaaatgttcacacgca

SEQ ID NO: 13294 - DNA, 25 bp, SARS Virus
tgaagtcagaaaagttcacacgcac

SEQ ID NO: 13295 - DNA, 25 bp, SARS Virus
gaagtcagaaatattcacacgcacg

SEQ ID NO: 13296 - DNA, 25 bp, SARS Virus
aagtcagaaatgatcacacgcacgt

SEQ ID NO: 13297 - DNA, 25 bp, SARS Virus
agtcagaaatgtacacacgcacgtc

SEQ ID NO: 13298 - DNA, 25 bp, SARS Virus
gtcagaaatgttaacacgcacgtct

SEQ ID NO: 13299 - DNA, 25 bp, SARS Virus
tcagaaatgttcacacgcacgtctg

SEQ ID NO: 13300 - DNA, 25 bp, SARS Virus
cagaaatgttcaaacgcacgtctgc

SEQ ID NO: 13301 - DNA, 25 bp, SARS Virus
agaaatgttcacacgcacgtctgcc

SEQ ID NO: 13302 - DNA, 25 bp, SARS Virus
gaaatgttcacaagcacgtctgcca

SEQ ID NO: 13303 - DNA, 25 bp, SARS Virus
aaatgttcacacacacgtctgccaa

SEQ ID NO: 13304 - DNA, 25 bp, SARS Virus
aatgttcacacgaacgtctgccaag

SEQ ID NO: 13305 - DNA, 25 bp, SARS Virus
tctccttctgaccgacctactatga

SEQ ID NO: 13306 - DNA, 25 bp, SARS Virus
ctccttctgacccacctactatgat

SEQ ID NO: 13307 - DNA, 25 bp, SARS Virus
tccttctgaccgccctactatgatg

SEQ ID NO: 13308 - DNA, 25 bp, SARS Virus
ccttctgaccgacctactatgatga

SEQ ID NO: 13309 - DNA, 25 bp, SARS Virus
cttctgaccgacctactatgatgac

SEQ ID NO: 13310 - DNA, 25 bp, SARS Virus
ttctgaccgacccactatgatgact

SEQ ID NO: 13311 - DNA, 25 bp, SARS Virus
tctgaccgacctcctatgatgactc

SEQ ID NO: 13312 - DNA, 25 bp, SARS Virus
ctgaccgacctactatgatgactcg

SEQ ID NO: 13313 - DNA, 25 bp, SARS Virus
tgaccgacctaccatgatgactcgt

SEQ ID NO: 13314 - DNA, 25 bp, SARS Virus
gaccgacctactctgatgactcgtt

SEQ ID NO: 13315 - DNA, 25 bp, SARS Virus
accgacctactacgatgactcgtta

SEQ ID NO: 13316 - DNA, 25 bp, SARS Virus
ccgacctactatcatgactcgttag

SEQ ID NO: 13317 - DNA, 25 bp, SARS Virus
cgacctactatgctgactcgttagt

SEQ ID NO: 13318 - DNA, 25 bp, SARS Virus
gacctactatgacgactcgttagtc

SEQ ID NO: 13319 - DNA, 25 bp, SARS Virus
acctactatgatcactcgttagtct

SEQ ID NO: 13320 - DNA, 25 bp, SARS Virus
cctactatgatgcctcgttagtctc

SEQ ID NO: 13321 - DNA, 25 bp, SARS Virus
ctactatgatgactcgttagtctct

SEQ ID NO: 13322 - DNA, 25 bp, SARS Virus
tactatgatgacccgttagtctcta

SEQ ID NO: 13323 - DNA, 25 bp, SARS Virus
actatgatgactcgttagtctctaa

SEQ ID NO: 13324 - DNA, 25 bp, SARS Virus
ctatgatgactccttagtctctaac

SEQ ID NO: 13325 - DNA, 25 bp, SARS Virus
tatgatgactcgctagtctctaact

SEQ ID NO: 13326 - DNA, 25 bp, SARS Virus
atgatgactcgtcagtctctaactc

SEQ ID NO: 13327 - DNA, 25 bp, SARS Virus
tgatgactcgttcgtctctaactcg

SEQ ID NO: 13328 - DNA, 25 bp, SARS Virus
gatgactcgttactctctaactcgg

SEQ ID NO: 13329 - DNA, 25 bp, SARS Virus
atgactcgttagcctctaactcggt

SEQ ID NO: 13330 - DNA, 25 bp, SARS Virus
tgactcgttagtctctaactcggtc

SEQ ID NO: 13331 - DNA, 25 bp, SARS Virus
gactcgttagtccctaactcggtct

SEQ ID NO: 13332 - DNA, 25 bp, SARS Virus
actcgttagtctctaactcggtctt

SEQ ID NO: 13333 - DNA, 25 bp, SARS Virus
ctcgttagtctccaactcggtcttg

SEQ ID NO: 13334 - DNA, 25 bp, SARS Virus
tcgttagtctctcactcggtcttgg

SEQ ID NO: 13335 - DNA, 25 bp, SARS Virus
cgttagtctctacctcggtcttggt

SEQ ID NO: 13336 - DNA, 25 bp, SARS Virus
gttagtctctaactcggtcttggtc

SEQ ID NO: 13337 - DNA, 25 bp, SARS Virus
ttagtctctaacccggtcttggtct

SEQ ID NO: 13338 - DNA, 25 bp, SARS Virus
tagtctctaactcggtcttggtctt

SEQ ID NO: 13339 - DNA, 25 bp, SARS Virus
agtctctaactccgtcttggtcttg

SEQ ID NO: 13340 - DNA, 25 bp, SARS Virus
gtctctaactcgctcttggtcttgg

SEQ ID NO: 13341 - DNA, 25 bp, SARS Virus
tctctaactcggccttggtcttgga

SEQ ID NO: 13342 - DNA, 25 bp, SARS Virus
ctctaactcggtcttggtcttggat

SEQ ID NO: 13343 - DNA, 25 bp, SARS Virus
tctaactcggtcctggtcttggatg

SEQ ID NO: 13344 - DNA, 25 bp, SARS Virus
ctaactcggtctcggtcttggatgt

SEQ ID NO: 13345 - DNA, 25 bp, SARS Virus
taactcggtcttcgtcttggatgtg

SEQ ID NO: 13346 - DNA, 25 bp, SARS Virus
aactcggtcttgctcttggatgtgg

SEQ ID NO: 13347 - DNA, 25 bp, SARS Virus
actcggtcttggccttggatgtgga

SEQ ID NO: 13348 - DNA, 25 bp, SARS Virus
ctcggtcttggtcttggatgtggac

SEQ ID NO: 13349 - DNA, 25 bp, SARS Virus
tcggtcttggtcctggatgtggact

SEQ ID NO: 13350 - DNA, 25 bp, SARS Virus
cggtcttggtctcggatgtggactt

SEQ ID NO: 13351 - DNA, 25 bp, SARS Virus
ggtcttggtcttcgatgtggacttc

SEQ ID NO: 13352 - DNA, 25 bp, SARS Virus
gtcttggtcttgcatgtggacttct

SEQ ID NO: 13353 - DNA, 25 bp, SARS Virus
tcttggtcttggctgtggacttctt

SEQ ID NO: 13354 - DNA, 25 bp, SARS Virus
cttggtcttggacgtggacttcttg

SEQ ID NO: 13355 - DNA, 25 bp, SARS Virus
ttggtcttggatctggacttcttgg

SEQ ID NO: 13356 - DNA, 25 bp, SARS Virus
tggtcttggatgcggacttcttggt

SEQ ID NO: 13357 - DNA, 25 bp, SARS Virus
ggtcttggatgtcgacttcttggtc

SEQ ID NO: 13358 - DNA, 25 bp, SARS Virus
gtcttggatgtgcacttcttggtca

SEQ ID NO: 13359 - DNA, 25 bp, SARS Virus
tcttggatgtggccttcttggtcaa

SEQ ID NO: 13360 - DNA, 25 bp, SARS Virus
cttggatgtggacttcttggtcaat

SEQ ID NO: 13361 - DNA, 25 bp, SARS Virus
ttggatgtggacctcttggtcaatt

SEQ ID NO: 13362 - DNA, 25 bp, SARS Virus
tggatgtggactccttggtcaatta

SEQ ID NO: 13363 - DNA, 25 bp, SARS Virus
ggatgtggacttcttggtcaattag

SEQ ID NO: 13364 - DNA, 25 bp, SARS Virus
gatgtggacttcctggtcaattagt

SEQ ID NO: 13365 - DNA, 25 bp, SARS Virus
atgtggacttctcggtcaattagtc

SEQ ID NO: 13366 - DNA, 25 bp, SARS Virus
tgtggacttcttcgtcaattagtca

SEQ ID NO: 13367 - DNA, 25 bp, SARS Virus
gtggacttcttgctcaattagtcaa

SEQ ID NO: 13368 - DNA, 25 bp, SARS Virus
tggacttcttggccaattagtcaaa

SEQ ID NO: 13369 - DNA, 25 bp, SARS Virus
ggacttcttggtcaattagtcaaat

SEQ ID NO: 13370 - DNA, 25 bp, SARS Virus
gacttcttggtccattagtcaaatg

SEQ ID NO: 13371 - DNA, 25 bp, SARS Virus
acttcttggtcacttagtcaaatga

SEQ ID NO: 13372 - DNA, 25 bp, SARS Virus
cttcttggtcaactagtcaaatgac

SEQ ID NO: 13373 - DNA, 25 bp, SARS Virus
ttcttggtcaatcagtcaaatgacc

SEQ ID NO: 13374 - DNA, 25 bp, SARS Virus
tcttggtcaattcgtcaaatgacca

SEQ ID NO: 13375 - DNA, 25 bp, SARS Virus
cttggtcaattactcaaatgaccaa

SEQ ID NO: 13376 - DNA, 25 bp, SARS Virus
ttggtcaattagccaaatgaccaat

SEQ ID NO: 13377 - DNA, 25 bp, SARS Virus
tggtcaattagtcaaatgaccaata

SEQ ID NO: 13378 - DNA, 25 bp, SARS Virus
ggtcaattagtccaatgaccaataa

SEQ ID NO: 13379 - DNA, 25 bp, SARS Virus
gtcaattagtcacatgaccaataaa

SEQ ID NO: 13380 - DNA, 25 bp, SARS Virus
tcaattagtcaactgaccaataaat

SEQ ID NO: 13381 - DNA, 25 bp, SARS Virus
caattagtcaaacgaccaataaatt

SEQ ID NO: 13382 - DNA, 25 bp, SARS Virus
aattagtcaaatcaccaataaattt

SEQ ID NO: 13383 - DNA, 25 bp, SARS Virus
attagtcaaatgcccaataaatttt

SEQ ID NO: 13384 - DNA, 25 bp, SARS Virus
ttagtcaaatgaccaataaattttg

SEQ ID NO: 13385 - DNA, 25 bp, SARS Virus
tagtcaaatgaccaataaattttga

SEQ ID NO: 13386 - DNA, 25 bp, SARS Virus
agtcaaatgacccataaattttgaa

SEQ ID NO: 13387 - DNA, 25 bp, SARS Virus
gtcaaatgaccactaaattttgaat

SEQ ID NO: 13388 - DNA, 25 bp, SARS Virus
tcaaatgaccaacaaattttgaatg

SEQ ID NO: 13389 - DNA, 25 bp, SARS Virus
caaatgaccaatcaattttgaatga

SEQ ID NO: 13390 - DNA, 25 bp, SARS Virus
aaatgaccaatacattttgaatgac

SEQ ID NO: 13391 - DNA, 25 bp, SARS Virus
aatgaccaataacttttgaatgact

SEQ ID NO: 13392 - DNA, 25 bp, SARS Virus
atgaccaataaactttgaatgactg

SEQ ID NO: 13393 - DNA, 25 bp, SARS Virus
tgaccaataaatcttgaatgactgt

SEQ ID NO: 13394 - DNA, 25 bp, SARS Virus
gaccaataaattctgaatgactgtt

SEQ ID NO: 13395 - DNA, 25 bp, SARS Virus
accaataaatttcgaatgactgtta

SEQ ID NO: 13396 - DNA, 25 bp, SARS Virus
ccaataaattttcaatgactgttac

SEQ ID NO: 13397 - DNA, 25 bp, SARS Virus
caataaattttgcatgactgttaca

SEQ ID NO: 13398 - DNA, 25 bp, SARS Virus
aataaattttgactgactgttacaa

SEQ ID NO: 13399 - DNA, 25 bp, SARS Virus
ataaattttgaacgactgttacaac

SEQ ID NO: 13400 - DNA, 25 bp, SARS Virus
taaattttgaatcactgttacaacg

SEQ ID NO: 13401 - DNA, 25 bp, SARS Virus
aaattttgaatgcctgttacaacgg

SEQ ID NO: 13402 - DNA, 25 bp, SARS Virus
aattttgaatgactgttacaacggt

SEQ ID NO: 13403 - DNA, 25 bp, SARS Virus
attttgaatgaccgttacaacggta

SEQ ID NO: 13404 - DNA, 25 bp, SARS Virus
ttttgaatgactcttacaacggtaa

SEQ ID NO: 13405 - DNA, 25 bp, SARS Virus
tttgaatgactgctacaacggtaat

SEQ ID NO: 13406 - DNA, 25 bp, SARS Virus
ttgaatgactgtcacaacggtaatt

SEQ ID NO: 13407 - DNA, 25 bp, SARS Virus
tgaatgactgttccaacggtaattt

SEQ ID NO: 13408 - DNA, 25 bp, SARS Virus
gaatgactgttacaacggtaattta

SEQ ID NO: 13409 - DNA, 25 bp, SARS Virus
aatgactgttaccacggtaatttac

SEQ ID NO: 13410 - DNA, 25 bp, SARS Virus
atgactgttacaccggtaatttaca

SEQ ID NO: 13411 - DNA, 25 bp, SARS Virus
tgactgttacaacggtaatttacac

SEQ ID NO: 13412 - DNA, 25 bp, SARS Virus
gactgttacaaccgtaatttacaca

SEQ ID NO: 13413 - DNA, 25 bp, SARS Virus
actgttacaacgctaatttacacaa

SEQ ID NO: 13414 - DNA, 25 bp, SARS Virus
ctgttacaacggcaatttacacaac

SEQ ID NO: 13415 - DNA, 25 bp, SARS Virus
tgttacaacggtcatttacacaact

SEQ ID NO: 13416 - DNA, 25 bp, SARS Virus
gttacaacggtactttacacaactg

SEQ ID NO: 13417 - DNA, 25 bp, SARS Virus
ttacaacggtaacttacacaactgt

SEQ ID NO: 13418 - DNA, 25 bp, SARS Virus
tacaacggtaatctacacaactgta

SEQ ID NO: 13419 - DNA, 25 bp, SARS Virus
acaacggtaattcacacaactgtag

SEQ ID NO: 13420 - DNA, 25 bp, SARS Virus
caacggtaatttccacaactgtagc

SEQ ID NO: 13421 - DNA, 25 bp, SARS Virus
aacggtaatttacacaactgtagca

SEQ ID NO: 13422 - DNA, 25 bp, SARS Virus
acggtaatttacccaactgtagcaa

SEQ ID NO: 13423 - DNA, 25 bp, SARS Virus
cggtaatttacacaactgtagcaat

SEQ ID NO: 13424 - DNA, 25 bp, SARS Virus
ggtaatttacaccactgtagcaatt

SEQ ID NO: 13425 - DNA, 25 bp, SARS Virus
gtaatttacacacctgtagcaattc

SEQ ID NO: 13426 - DNA, 25 bp, SARS Virus
taatttacacaactgtagcaattcc

SEQ ID NO: 13427 - DNA, 25 bp, SARS Virus
aatttacacaaccgtagcaattcct

SEQ ID NO: 13428 - DNA, 25 bp, SARS Virus
atttacacaactctagcaattcctc

SEQ ID NO: 13429 - DNA, 25 bp, SARS Virus
tttacacaactgcagcaattcctcc

SEQ ID NO: 13430 - DNA, 25 bp, SARS Virus
ttacacaactgtcgcaattcctccg

SEQ ID NO: 13431 - DNA, 25 bp, SARS Virus
tacacaactgtaccaattcctccgt

SEQ ID NO: 13432 - DNA, 25 bp, SARS Virus
acacaactgtagcaattcctccgtg

SEQ ID NO: 13433 - DNA, 25 bp, SARS Virus
cacaactgtagccattcctccgtgt

SEQ ID NO: 13434 - DNA, 25 bp, SARS Virus
acaactgtagcacttcctccgtgtt

SEQ ID NO: 13435 - DNA, 25 bp, SARS Virus
caactgtagcaactcctccgtgttt

SEQ ID NO: 13436 - DNA, 25 bp, SARS Virus
aactgtagcaatccctccgtgtttc

SEQ ID NO: 13437 - DNA, 25 bp, SARS Virus
actgtagcaattcctccgtgtttca

SEQ ID NO: 13438 - DNA, 25 bp, SARS Virus
ctgtagcaattcctccgtgtttcac

SEQ ID NO: 13439 - DNA, 25 bp, SARS Virus
tgtagcaattcccccgtgtttcacg

SEQ ID NO: 13440 - DNA, 25 bp, SARS Virus
gtagcaattcctccgtgtttcacga

SEQ ID NO: 13441 - DNA, 25 bp, SARS Virus
tagcaattcctccgtgtttcacgat

SEQ ID NO: 13442 - DNA, 25 bp, SARS Virus
agcaattcctccctgtttcacgatt

SEQ ID NO: 13443 - DNA, 25 bp, SARS Virus
gcaattcctccgcgtttcacgatta

SEQ ID NO: 13444 - DNA, 25 bp, SARS Virus
caattcctccgtctttcacgattag

SEQ ID NO: 13445 - DNA, 25 bp, SARS Virus
aattcctccgtgcttcacgattagg

SEQ ID NO: 13446 - DNA, 25 bp, SARS Virus
attcctccgtgtctcacgattagga

SEQ ID NO: 13447 - DNA, 25 bp, SARS Virus
ttcctccgtgttccacgattaggat

SEQ ID NO: 13448 - DNA, 25 bp, SARS Virus
tcctccgtgtttcacgattaggata

SEQ ID NO: 13449 - DNA, 25 bp, SARS Virus
cctccgtgtttcccgattaggatac

SEQ ID NO: 13450 - DNA, 25 bp, SARS Virus
ctccgtgtttcacgattaggatacc

SEQ ID NO: 13451 - DNA, 25 bp, SARS Virus
tccgtgtttcaccattaggatacca

SEQ ID NO: 13452 - DNA, 25 bp, SARS Virus
ccgtgtttcacgcttaggataccac

SEQ ID NO: 13453 - DNA, 25 bp, SARS Virus
cgtgtttcacgactaggataccact

SEQ ID NO: 13454 - DNA, 25 bp, SARS Virus
gtgtttcacgatcaggataccacta

SEQ ID NO: 13455 - DNA, 25 bp, SARS Virus
tgtttcacgattcggataccactaa

SEQ ID NO: 13456 - DNA, 25 bp, SARS Virus
gtttcacgattacgataccactaac

SEQ ID NO: 13457 - DNA, 25 bp, SARS Virus
tttcacgattagcataccactaaca

SEQ ID NO: 13458 - DNA, 25 bp, SARS Virus
ttcacgattaggctaccactaacat

SEQ ID NO: 13459 - DNA, 25 bp, SARS Virus
tcacgattaggacaccactaacatt

SEQ ID NO: 13460 - DNA, 25 bp, SARS Virus
cacgattaggatcccactaacattt

SEQ ID NO: 13461 - DNA, 25 bp, SARS Virus
acgattaggataccactaacattta

SEQ ID NO: 13462 - DNA, 25 bp, SARS Virus
cgattaggataccactaacatttac

SEQ ID NO: 13463 - DNA, 25 bp, SARS Virus
gattaggatacccctaacatttacg

SEQ ID NO: 13464 - DNA, 25 bp, SARS Virus
attaggataccactaacatttacga

SEQ ID NO: 13465 - DNA, 25 bp, SARS Virus
ttaggataccaccaacatttacgac

SEQ ID NO: 13466 - DNA, 25 bp, SARS Virus
taggataccactcacatttacgacg

SEQ ID NO: 13467 - DNA, 25 bp, SARS Virus
aggataccactaccatttacgacga

SEQ ID NO: 13468 - DNA, 25 bp, SARS Virus
ggataccactaacatttacgacgat

SEQ ID NO: 13469 - DNA, 25 bp, SARS Virus
gataccactaacctttacgacgatt

SEQ ID NO: 13470 - DNA, 25 bp, SARS Virus
ataccactaacacttacgacgattg

SEQ ID NO: 13471 - DNA, 25 bp, SARS Virus
taccactaacatctacgacgattgt

SEQ ID NO: 13472 - DNA, 25 bp, SARS Virus
accactaacattcacgacgattgta

SEQ ID NO: 13473 - DNA, 25 bp, SARS Virus
ccactaacatttccgacgattgtat

SEQ ID NO: 13474 - DNA, 25 bp, SARS Virus
cactaacatttacgacgattgtatg

SEQ ID NO: 13475 - DNA, 25 bp, SARS Virus
actaacatttaccacgattgtatgt

SEQ ID NO: 13476 - DNA, 25 bp, SARS Virus
ctaacatttacgccgattgtatgtg

SEQ ID NO: 13477 - DNA, 25 bp, SARS Virus
taacatttacgacgattgtatgtgg

SEQ ID NO: 13478 - DNA, 25 bp, SARS Virus
aacatttacgaccattgtatgtgga

SEQ ID NO: 13479 - DNA, 25 bp, SARS Virus
acatttacgacgcttgtatgtggac

SEQ ID NO: 13480 - DNA, 25 bp, SARS Virus
catttacgacgactgtatgtggact

SEQ ID NO: 13481 - DNA, 25 bp, SARS Virus
atttacgacgatcgtatgtggactt

SEQ ID NO: 13482 - DNA, 25 bp, SARS Virus
tttacgacgattctatgtggacttt

SEQ ID NO: 13483 - DNA, 25 bp, SARS Virus
ttacgacgattgcatgtggactttg

SEQ ID NO: 13484 - DNA, 25 bp, SARS Virus
tacgacgattgtctgtggactttgt

SEQ ID NO: 13485 - DNA, 25 bp, SARS Virus
acgacgattgtacgtggactttgta

SEQ ID NO: 13486 - DNA, 25 bp, SARS Virus
cgacgattgtatctggactttgtac

SEQ ID NO: 13487 - DNA, 25 bp, SARS Virus
gacgattgtatgcggactttgtacc

SEQ ID NO: 13488 - DNA, 25 bp, SARS Virus
acgattgtatgtcgactttgtacca

SEQ ID NO: 13489 - DNA, 25 bp, SARS Virus
cgattgtatgtgcactttgtaccac

SEQ ID NO: 13490 - DNA, 25 bp, SARS Virus
gattgtatgtggcctttgtaccacc

SEQ ID NO: 13491 - DNA, 25 bp, SARS Virus
attgtatgtggactttgtaccacca

SEQ ID NO: 13492 - DNA, 25 bp, SARS Virus
ttgtatgtggaccttgtaccaccac

SEQ ID NO: 13493 - DNA, 25 bp, SARS Virus
tgtatgtggactctgtaccaccacc

SEQ ID NO: 13494 - DNA, 25 bp, SARS Virus
gtatgtggacttcgtaccaccacca

SEQ ID NO: 13495 - DNA, 25 bp, SARS Virus
tatgtggactttctaccaccaccac

SEQ ID NO: 13496 - DNA, 25 bp, SARS Virus
atgtggactttgcaccaccaccaca

SEQ ID NO: 13497 - DNA, 25 bp, SARS Virus
tgtggactttgtcccaccaccacat

SEQ ID NO: 13498 - DNA, 25 bp, SARS Virus
gtggactttgtaccaccaccacatc

SEQ ID NO: 13499 - DNA, 25 bp, SARS Virus
tggactttgtaccaccaccacatcg

SEQ ID NO: 13500 - DNA, 25 bp, SARS Virus
ggactttgtacccccaccacatcgt

SEQ ID NO: 13501 - DNA, 25 bp, SARS Virus
gactttgtaccaccaccacatcgtc

SEQ ID NO: 13502 - DNA, 25 bp, SARS Virus
actttgtaccaccaccacatcgtcc

SEQ ID NO: 13503 - DNA, 25 bp, SARS Virus
ctttgtaccacccccacatcgtcca

SEQ ID NO: 13504 - DNA, 25 bp, SARS Virus
tttgtaccaccaccacatcgtccac

SEQ ID NO: 13505 - DNA, 25 bp, SARS Virus
ttgtaccaccaccacatcgtccacg

SEQ ID NO: 13506 - DNA, 25 bp, SARS Virus
tgtaccaccaccccatcgtccacgt

SEQ ID NO: 13507 - DNA, 25 bp, SARS Virus
gtaccaccaccacatcgtccacgtg

SEQ ID NO: 13508 - DNA, 25 bp, SARS Virus
taccaccaccacctcgtccacgtga

SEQ ID NO: 13509 - DNA, 25 bp, SARS Virus
accaccaccacaccgtccacgtgag

SEQ ID NO: 13510 - DNA, 25 bp, SARS Virus
ccaccaccacatcgtccacgtgagt

SEQ ID NO: 13511 - DNA, 25 bp, SARS Virus
caccaccacatcctccacgtgagtt

SEQ ID NO: 13512 - DNA, 25 bp, SARS Virus
accaccacatcgcccacgtgagttg

SEQ ID NO: 13513 - DNA, 25 bp, SARS Virus
ccaccacatcgtccacgtgagttgt

SEQ ID NO: 13514 - DNA, 25 bp, SARS Virus
caccacatcgtccacgtgagttgtt

SEQ ID NO: 13515 - DNA, 25 bp, SARS Virus
accacatcgtccccgtgagttgttc

SEQ ID NO: 13516 - DNA, 25 bp, SARS Virus
ccacatcgtccacgtgagttgttcc

SEQ ID NO: 13517 - DNA, 25 bp, SARS Virus
cacatcgtccacctgagttgttccg

SEQ ID NO: 13518 - DNA, 25 bp, SARS Virus
acatcgtccacgcgagttgttccgt

SEQ ID NO: 13519 - DNA, 25 bp, SARS Virus
catcgtccacgtcagttgttccgtt

SEQ ID NO: 13520 - DNA, 25 bp, SARS Virus
atcgtccacgtgcgttgttccgttg

SEQ ID NO: 13521 - DNA, 25 bp, SARS Virus
tcgtccacgtgacttgttccgttgg

SEQ ID NO: 13522 - DNA, 25 bp, SARS Virus
cgtccacgtgagctgttccgttggt

SEQ ID NO: 13523 - DNA, 25 bp, SARS Virus
gtccacgtgagtcgttccgttggtt

SEQ ID NO: 13524 - DNA, 25 bp, SARS Virus
tccacgtgagttcttccgttggtta

SEQ ID NO: 13525 - DNA, 25 bp, SARS Virus
ccacgtgagttgctccgttggttac

SEQ ID NO: 13526 - DNA, 25 bp, SARS Virus
cacgtgagttgtcccgttggttacc

SEQ ID NO: 13527 - DNA, 25 bp, SARS Virus
acgtgagttgttccgttggttacca

SEQ ID NO: 13528 - DNA, 25 bp, SARS Virus
cgtgagttgttccgttggttaccac

SEQ ID NO: 13529 - DNA, 25 bp, SARS Virus
gtgagttgttcccttggttaccacg

SEQ ID NO: 13530 - DNA, 25 bp, SARS Virus
tgagttgttccgctggttaccacgg

SEQ ID NO: 13531 - DNA, 25 bp, SARS Virus
gagttgttccgtcggttaccacggt

SEQ ID NO: 13532 - DNA, 25 bp, SARS Virus
agttgttccgttcgttaccacggta

SEQ ID NO: 13533 - DNA, 25 bp, SARS Virus
gttgttccgttgcttaccacggtac

SEQ ID NO: 13534 - DNA, 25 bp, SARS Virus
ttgttccgttggctaccacggtacg

SEQ ID NO: 13535 - DNA, 25 bp, SARS Virus
tgttccgttggtcaccacggtacgt

SEQ ID NO: 13536 - DNA, 25 bp, SARS Virus
gttccgttggttcccacggtacgtt

SEQ ID NO: 13537 - DNA, 25 bp, SARS Virus
ttccgttggttaccacggtacgttt

SEQ ID NO: 13538 - DNA, 25 bp, SARS Virus
tccgttggttaccacggtacgtttt

SEQ ID NO: 13539 - DNA, 25 bp, SARS Virus
ccgttggttaccccggtacgttttc

SEQ ID NO: 13540 - DNA, 25 bp, SARS Virus
cgttggttaccacggtacgttttcc

SEQ ID NO: 13541 - DNA, 25 bp, SARS Virus
gttggttaccaccgtacgttttcct

SEQ ID NO: 13542 - DNA, 25 bp, SARS Virus
ttggttaccacgctacgttttcctc

SEQ ID NO: 13543 - DNA, 25 bp, SARS Virus
tggttaccacggcacgttttcctct

SEQ ID NO: 13544 - DNA, 25 bp, SARS Virus
ggttaccacggtccgttttcctctc

SEQ ID NO: 13545 - DNA, 25 bp, SARS Virus
gttaccacggtacgttttcctctca

SEQ ID NO: 13546 - DNA, 25 bp, SARS Virus
ttaccacggtaccttttcctctcac

SEQ ID NO: 13547 - DNA, 25 bp, SARS Virus
taccacggtacgctttcctctcact

SEQ ID NO: 13548 - DNA, 25 bp, SARS Virus
accacggtacgtcttcctctcacta

SEQ ID NO: 13549 - DNA, 25 bp, SARS Virus
ccacggtacgttctcctctcactac

SEQ ID NO: 13550 - DNA, 25 bp, SARS Virus
cacggtacgtttccctctcactact

SEQ ID NO: 13551 - DNA, 25 bp, SARS Virus
acggtacgttttcctctcactacta

SEQ ID NO: 13552 - DNA, 25 bp, SARS Virus
cggtacgttttcctctcactactaa

SEQ ID NO: 13553 - DNA, 25 bp, SARS Virus
ggtacgttttcccctcactactaat

SEQ ID NO: 13554 - DNA, 25 bp, SARS Virus
gtacgttttcctctcactactaatg

SEQ ID NO: 13555 - DNA, 25 bp, SARS Virus
tacgttttcctcccactactaatgt

SEQ ID NO: 13556 - DNA, 25 bp, SARS Virus
acgttttcctctcactactaatgta

SEQ ID NO: 13557 - DNA, 25 bp, SARS Virus
cgttttcctctccctactaatgtaa

SEQ ID NO: 13558 - DNA, 25 bp, SARS Virus
gttttcctctcactactaatgtaat

SEQ ID NO: 13559 - DNA, 25 bp, SARS Virus
ttttcctctcaccactaatgtaatt

SEQ ID NO: 13560 - DNA, 25 bp, SARS Virus
tttcctctcactcctaatgtaattc

SEQ ID NO: 13561 - DNA, 25 bp, SARS Virus
ttcctctcactactaatgtaattcg

SEQ ID NO: 13562 - DNA, 25 bp, SARS Virus
tcctctcactaccaatgtaattcga

SEQ ID NO: 13563 - DNA, 25 bp, SARS Virus
cctctcactactcatgtaattcgat

SEQ ID NO: 13564 - DNA, 25 bp, SARS Virus
ctctcactactactgtaattcgatt

SEQ ID NO: 13565 - DNA, 25 bp, SARS Virus
tctcactactaacgtaattcgattt

SEQ ID NO: 13566 - DNA, 25 bp, SARS Virus
ctcactactaatctaattcgattta

SEQ ID NO: 13567 - DNA, 25 bp, SARS Virus
tcactactaatgcaattcgatttac

SEQ ID NO: 13568 - DNA, 25 bp, SARS Virus
cactactaatgtcattcgatttacc

SEQ ID NO: 13569 - DNA, 25 bp, SARS Virus
actactaatgtacttcgatttaccg

SEQ ID NO: 13570 - DNA, 25 bp, SARS Virus
ctactaatgtaactcgatttaccgg

SEQ ID NO: 13571 - DNA, 25 bp, SARS Virus
tactaatgtaatccgatttaccggg

SEQ ID NO: 13572 - DNA, 25 bp, SARS Virus
actaatgtaattcgatttaccggga

SEQ ID NO: 13573 - DNA, 25 bp, SARS Virus
ctaatgtaattccatttaccgggag

SEQ ID NO: 13574 - DNA, 25 bp, SARS Virus
taatgtaattcgctttaccgggaga

SEQ ID NO: 13575 - DNA, 25 bp, SARS Virus
aatgtaattcgacttaccgggagaa

SEQ ID NO: 13576 - DNA, 25 bp, SARS Virus
atgtaattcgatctaccgggagaat

SEQ ID NO: 13577 - DNA, 25 bp, SARS Virus
tgtaattcgattcaccgggagaatg

SEQ ID NO: 13578 - DNA, 25 bp, SARS Virus
gtaattcgatttcccgggagaatgt

SEQ ID NO: 13579 - DNA, 25 bp, SARS Virus
taattcgatttaccgggagaatgtc

SEQ ID NO: 13580 - DNA, 25 bp, SARS Virus
aattcgatttaccgggagaatgtca

SEQ ID NO: 13581 - DNA, 25 bp, SARS Virus
attcgatttacccggagaatgtcat

SEQ ID NO: 13582 - DNA, 25 bp, SARS Virus
ttcgatttaccgcgagaatgtcatc

SEQ ID NO: 13583 - DNA, 25 bp, SARS Virus
tcgatttaccggcagaatgtcatcc

SEQ ID NO: 13584 - DNA, 25 bp, SARS Virus
cgatttaccgggcgaatgtcatcct

SEQ ID NO: 13585 - DNA, 25 bp, SARS Virus
gatttaccgggacaatgtcatcctc

SEQ ID NO: 13586 - DNA, 25 bp, SARS Virus
atttaccgggagcatgtcatcctcc

SEQ ID NO: 13587 - DNA, 25 bp, SARS Virus
tttaccgggagactgtcatcctccc

SEQ ID NO: 13588 - DNA, 25 bp, SARS Virus
ttaccgggagaacgtcatcctccca

SEQ ID NO: 13589 - DNA, 25 bp, SARS Virus
taccgggagaatctcatcctcccag

SEQ ID NO: 13590 - DNA, 25 bp, SARS Virus
accgggagaatgccatcctcccaga

SEQ ID NO: 13591 - DNA, 25 bp, SARS Virus
ccgggagaatgtcatcctcccagaa

SEQ ID NO: 13592 - DNA, 25 bp, SARS Virus
cgggagaatgtcctcctcccagaac

SEQ ID NO: 13593 - DNA, 25 bp, SARS Virus
gggagaatgtcaccctcccagaaca

SEQ ID NO: 13594 - DNA, 25 bp, SARS Virus
ggagaatgtcatcctcccagaacaa

SEQ ID NO: 13595 - DNA, 25 bp, SARS Virus
gagaatgtcatcctcccagaacaaa

SEQ ID NO: 13596 - DNA, 25 bp, SARS Virus
agaatgtcatccccccagaacaaac

SEQ ID NO: 13597 - DNA, 25 bp, SARS Virus
gaatgtcatcctcccagaacaaacg

SEQ ID NO: 13598 - DNA, 25 bp, SARS Virus
aatgtcatcctcccagaacaaacga

SEQ ID NO: 13599 - DNA, 25 bp, SARS Virus
atgtcatcctcccagaacaaacgaa

SEQ ID NO: 13600 - DNA, 25 bp, SARS Virus
tgtcatcctccccgaacaaacgaaa

SEQ ID NO: 13601 - DNA, 25 bp, SARS Virus
gtcatcctcccacaacaaacgaaag

SEQ ID NO: 13602 - DNA, 25 bp, SARS Virus
tcatcctcccagcacaaacgaaaga

SEQ ID NO: 13603 - DNA, 25 bp, SARS Virus
catcctcccagaccaaacgaaagac

SEQ ID NO: 13604 - DNA, 25 bp, SARS Virus
atcctcccagaacaaacgaaagacc

SEQ ID NO: 13605 - DNA, 25 bp, SARS Virus
tcctcccagaaccaacgaaagacct

SEQ ID NO: 13606 - DNA, 25 bp, SARS Virus
cctcccagaacacacgaaagacctg

SEQ ID NO: 13607 - DNA, 25 bp, SARS Virus
ctcccagaacaaccgaaagacctgt

SEQ ID NO: 13608 - DNA, 25 bp, SARS Virus
tcccagaacaaacgaaagacctgta

SEQ ID NO: 13609 - DNA, 25 bp, SARS Virus
cccagaacaaaccaaagacctgtat

SEQ ID NO: 13610 - DNA, 25 bp, SARS Virus
ccagaacaaacgcaagacctgtatt

SEQ ID NO: 13611 - DNA, 25 bp, SARS Virus
cagaacaaacgacagacctgtatta

SEQ ID NO: 13612 - DNA, 25 bp, SARS Virus
agaacaaacgaacgacctgtattag

SEQ ID NO: 13613 - DNA, 25 bp, SARS Virus
gaacaaacgaaacacctgtattaga

SEQ ID NO: 13614 - DNA, 25 bp, SARS Virus
aacaaacgaaagccctgtattagaa

SEQ ID NO: 13615 - DNA, 25 bp, SARS Virus
acaaacgaaagacctgtattagaac

SEQ ID NO: 13616 - DNA, 25 bp, SARS Virus
caaacgaaagacctgtattagaacg

SEQ ID NO: 13617 - DNA, 25 bp, SARS Virus
aaacgaaagacccgtattagaacga

SEQ ID NO: 13618 - DNA, 25 bp, SARS Virus
aacgaaagacctctattagaacgat

SEQ ID NO: 13619 - DNA, 25 bp, SARS Virus
acgaaagacctgcattagaacgatt

SEQ ID NO: 13620 - DNA, 25 bp, SARS Virus
cgaaagacctgtcttagaacgattc

SEQ ID NO: 13621 - DNA, 25 bp, SARS Virus
gaaagacctgtactagaacgattct

SEQ ID NO: 13622 - DNA, 25 bp, SARS Virus
aaagacctgtatcagaacgattctt

SEQ ID NO: 13623 - DNA, 25 bp, SARS Virus
aagacctgtattcgaacgattcttc

SEQ ID NO: 13624 - DNA, 25 bp, SARS Virus
agacctgtattacaacgattcttca

SEQ ID NO: 13625 - DNA, 25 bp, SARS Virus
gacctgtattagcacgattcttcac

SEQ ID NO: 13626 - DNA, 25 bp, SARS Virus
acctgtattagaccgattcttcaca

SEQ ID NO: 13627 - DNA, 25 bp, SARS Virus
cctgtattagaacgattcttcacag

SEQ ID NO: 13628 - DNA, 25 bp, SARS Virus
ctgtattagaaccattcttcacaga

SEQ ID NO: 13629 - DNA, 25 bp, SARS Virus
tgtattagaacgcttcttcacagac

SEQ ID NO: 13630 - DNA, 25 bp, SARS Virus
gtattagaacgactcttcacagacg

SEQ ID NO: 13631 - DNA, 25 bp, SARS Virus
tattagaacgatccttcacagacgt

SEQ ID NO: 13632 - DNA, 25 bp, SARS Virus
attagaacgattcttcacagacgta

SEQ ID NO: 13633 - DNA, 25 bp, SARS Virus
ttagaacgattcctcacagacgtac

SEQ ID NO: 13634 - DNA, 25 bp, SARS Virus
tagaacgattctccacagacgtaca

SEQ ID NO: 13635 - DNA, 25 bp, SARS Virus
agaacgattcttcacagacgtacaa

SEQ ID NO: 13636 - DNA, 25 bp, SARS Virus
gaacgattcttcccagacgtacaac

SEQ ID NO: 13637 - DNA, 25 bp, SARS Virus
aacgattcttcacagacgtacaaca

SEQ ID NO: 13638 - DNA, 25 bp, SARS Virus
acgattcttcaccgacgtacaacaa

SEQ ID NO: 13639 - DNA, 25 bp, SARS Virus
cgattcttcacacacgtacaacaac

SEQ ID NO: 13640 - DNA, 25 bp, SARS Virus
gattcttcacagccgtacaacaacc

SEQ ID NO: 13641 - DNA, 25 bp, SARS Virus
attcttcacagacgtacaacaacct

SEQ ID NO: 13642 - DNA, 25 bp, SARS Virus
ttcttcacagacctacaacaacctg

SEQ ID NO: 13643 - DNA, 25 bp, SARS Virus
tcttcacagacgcacaacaacctgg

SEQ ID NO: 13644 - DNA, 25 bp, SARS Virus
cttcacagacgtccaacaacctgga

SEQ ID NO: 13645 - DNA, 25 bp, SARS Virus
ttcacagacgtacaacaacctggat

SEQ ID NO: 13646 - DNA, 25 bp, SARS Virus
tcacagacgtaccacaacctggatt

SEQ ID NO: 13647 - DNA, 25 bp, SARS Virus
cacagacgtacaccaacctggattg

SEQ ID NO: 13648 - DNA, 25 bp, SARS Virus
acagacgtacaacaacctggattgg

SEQ ID NO: 13649 - DNA, 25 bp, SARS Virus
cagacgtacaaccacctggattgga

SEQ ID NO: 13650 - DNA, 25 bp, SARS Virus
agacgtacaacaccctggattggat

SEQ ID NO: 13651 - DNA, 25 bp, SARS Virus
gacgtacaacaacctggattggatt

SEQ ID NO: 13652 - DNA, 25 bp, SARS Virus
acgtacaacaacctggattggattt

SEQ ID NO: 13653 - DNA, 25 bp, SARS Virus
cgtacaacaacccggattggattta

SEQ ID NO: 13654 - DNA, 25 bp, SARS Virus
gtacaacaacctcgattggatttac

SEQ ID NO: 13655 - DNA, 25 bp, SARS Virus
tacaacaacctgcattggatttacg

SEQ ID NO: 13656 - DNA, 25 bp, SARS Virus
acaacaacctggcttggatttacgt

SEQ ID NO: 13657 - DNA, 25 bp, SARS Virus
caacaacctggactggatttacgtc

SEQ ID NO: 13658 - DNA, 25 bp, SARS Virus
aacaacctggatcggatttacgtcc

SEQ ID NO: 13659 - DNA, 25 bp, SARS Virus
acaacctggattcgatttacgtcca

SEQ ID NO: 13660 - DNA, 25 bp, SARS Virus
caacctggattgcatttacgtccac

SEQ ID NO: 13661 - DNA, 25 bp, SARS Virus
aacctggattggctttacgtccact

SEQ ID NO: 13662 - DNA, 25 bp, SARS Virus
acctggattggacttacgtccactc

SEQ ID NO: 13663 - DNA, 25 bp, SARS Virus
cctggattggatctacgtccactcc

SEQ ID NO: 13664 - DNA, 25 bp, SARS Virus
ctggattggattcacgtccactcct

SEQ ID NO: 13665 - DNA, 25 bp, SARS Virus
tggattggatttccgtccactcctg

SEQ ID NO: 13666 - DNA, 25 bp, SARS Virus
ggattggatttacgtccactcctgt

SEQ ID NO: 13667 - DNA, 25 bp, SARS Virus
gattggatttacctccactcctgta

SEQ ID NO: 13668 - DNA, 25 bp, SARS Virus
attggatttacgcccactcctgtag

SEQ ID NO: 13669 - DNA, 25 bp, SARS Virus
ttggatttacgtccactcctgtagg

SEQ ID NO: 13670 - DNA, 25 bp, SARS Virus
tggatttacgtccactcctgtaggt

SEQ ID NO: 13671 - DNA, 25 bp, SARS Virus
ggatttacgtcccctcctgtaggtc

SEQ ID NO: 13672 - DNA, 25 bp, SARS Virus
gatttacgtccactcctgtaggtcg

SEQ ID NO: 13673 - DNA, 25 bp, SARS Virus
atttacgtccacccctgtaggtcga

SEQ ID NO: 13674 - DNA, 25 bp, SARS Virus
tttacgtccactcctgtaggtcgaa

SEQ ID NO: 13675 - DNA, 25 bp, SARS Virus
ttacgtccactcctgtaggtcgaag

SEQ ID NO: 13676 - DNA, 25 bp, SARS Virus
tacgtccactcccgtaggtcgaaga

SEQ ID NO: 13677 - DNA, 25 bp, SARS Virus
acgtccactcctctaggtcgaagaa

SEQ ID NO: 13678 - DNA, 25 bp, SARS Virus
cgtccactcctgcaggtcgaagaat

SEQ ID NO: 13679 - DNA, 25 bp, SARS Virus
gtccactcctgtcggtcgaagaatt

SEQ ID NO: 13680 - DNA, 25 bp, SARS Virus
tccactcctgtacgtcgaagaattc

SEQ ID NO: 13681 - DNA, 25 bp, SARS Virus
ccactcctgtagctcgaagaattcc

SEQ ID NO: 13682 - DNA, 25 bp, SARS Virus
cactcctgtaggccgaagaattccg

SEQ ID NO: 13683 - DNA, 25 bp, SARS Virus
actcctgtaggtcgaagaattccgt

SEQ ID NO: 13684 - DNA, 25 bp, SARS Virus
ctcctgtaggtccaagaattccgtc

SEQ ID NO: 13685 - DNA, 25 bp, SARS Virus
tcctgtaggtcgcagaattccgtcg

SEQ ID NO: 13686 - DNA, 25 bp, SARS Virus
cctgtaggtcgacgaattccgtcgt

SEQ ID NO: 13687 - DNA, 25 bp, SARS Virus
ctgtaggtcgaacaattccgtcgta

SEQ ID NO: 13688 - DNA, 25 bp, SARS Virus
tgtaggtcgaagcattccgtcgtat

SEQ ID NO: 13689 - DNA, 25 bp, SARS Virus
gtaggtcgaagacttccgtcgtata

SEQ ID NO: 13690 - DNA, 25 bp, SARS Virus
taggtcgaagaactccgtcgtatac

SEQ ID NO: 13691 - DNA, 25 bp, SARS Virus
aggtcgaagaatcccgtcgtatact

SEQ ID NO: 13692 - DNA, 25 bp, SARS Virus
ggtcgaagaattccgtcgtatactt

SEQ ID NO: 13693 - DNA, 25 bp, SARS Virus
gtcgaagaattccgtcgtatacttt

SEQ ID NO: 13694 - DNA, 25 bp, SARS Virus
tcgaagaattccctcgtatactttt

SEQ ID NO: 13695 - DNA, 25 bp, SARS Virus
cgaagaattccgccgtatactttta

SEQ ID NO: 13696 - DNA, 25 bp, SARS Virus
gaagaattccgtcgtatacttttaa

SEQ ID NO: 13697 - DNA, 25 bp, SARS Virus
aagaattccgtcctatacttttaaa

SEQ ID NO: 13698 - DNA, 25 bp, SARS Virus
agaattccgtcgcatacttttaaag

SEQ ID NO: 13699 - DNA, 25 bp, SARS Virus
gaattccgtcgtctacttttaaagt

SEQ ID NO: 13700 - DNA, 25 bp, SARS Virus
aattccgtcgtacacttttaaagtt

SEQ ID NO: 13701 - DNA, 25 bp, SARS Virus
attccgtcgtatccttttaaagtta

SEQ ID NO: 13702 - DNA, 25 bp, SARS Virus
ttccgtcgtatacttttaaagttaa

SEQ ID NO: 13703 - DNA, 25 bp, SARS Virus
tccgtcgtatacctttaaagttaag

SEQ ID NO: 13704 - DNA, 25 bp, SARS Virus
ccgtcgtatactcttaaagttaagt

SEQ ID NO: 13705 - DNA, 25 bp, SARS Virus
cgtcgtatacttctaaagttaagtg

SEQ ID NO: 13706 - DNA, 25 bp, SARS Virus
gtcgtatactttcaaagttaagtgt

SEQ ID NO: 13707 - DNA, 25 bp, SARS Virus
tcgtatacttttcaagttaagtgtc

SEQ ID NO: 13708 - DNA, 25 bp, SARS Virus
cgtatacttttacagttaagtgtcc

SEQ ID NO: 13709 - DNA, 25 bp, SARS Virus
gtatacttttaacgttaagtgtcct

SEQ ID NO: 13710 - DNA, 25 bp, SARS Virus
tatacttttaaacttaagtgtcctg

SEQ ID NO: 13711 - DNA, 25 bp, SARS Virus
atacttttaaagctaagtgtcctgt

SEQ ID NO: 13712 - DNA, 25 bp, SARS Virus
tacttttaaagtcaagtgtcctgta

SEQ ID NO: 13713 - DNA, 25 bp, SARS Virus
acttttaaagttcagtgtcctgtag

SEQ ID NO: 13714 - DNA, 25 bp, SARS Virus
cttttaaagttacgtgtcctgtaga

SEQ ID NO: 13715 - DNA, 25 bp, SARS Virus
ttttaaagttaactgtcctgtagaa

SEQ ID NO: 13716 - DNA, 25 bp, SARS Virus
tttaaagttaagcgtcctgtagaat

SEQ ID NO: 13717 - DNA, 25 bp, SARS Virus
ttaaagttaagtctcctgtagaatg

SEQ ID NO: 13718 - DNA, 25 bp, SARS Virus
taaagttaagtgccctgtagaatga

SEQ ID NO: 13719 - DNA, 25 bp, SARS Virus
aaagttaagtgtcctgtagaatgaa

SEQ ID NO: 13720 - DNA, 25 bp, SARS Virus
aagttaagtgtcctgtagaatgaac

SEQ ID NO: 13721 - DNA, 25 bp, SARS Virus
agttaagtgtcccgtagaatgaacg

SEQ ID NO: 13722 - DNA, 25 bp, SARS Virus
gttaagtgtcctctagaatgaacgt

SEQ ID NO: 13723 - DNA, 25 bp, SARS Virus
ttaagtgtcctgcagaatgaacgtg

SEQ ID NO: 13724 - DNA, 25 bp, SARS Virus
taagtgtcctgtcgaatgaacgtgg

SEQ ID NO: 13725 - DNA, 25 bp, SARS Virus
aagtgtcctgtacaatgaacgtggt

SEQ ID NO: 13726 - DNA, 25 bp, SARS Virus
agtgtcctgtagcatgaacgtggta

SEQ ID NO: 13727 - DNA, 25 bp, SARS Virus
gtgtcctgtagactgaacgtggtaa

SEQ ID NO: 13728 - DNA, 25 bp, SARS Virus
tgtcctgtagaacgaacgtggtaac

SEQ ID NO: 13729 - DNA, 25 bp, SARS Virus
gtcctgtagaatcaacgtggtaaca

SEQ ID NO: 13730 - DNA, 25 bp, SARS Virus
tcctgtagaatgcacgtggtaacaa

SEQ ID NO: 13731 - DNA, 25 bp, SARS Virus
cctgtagaatgaccgtggtaacaac

SEQ ID NO: 13732 - DNA, 25 bp, SARS Virus
ctgtagaatgaacgtggtaacaaca

SEQ ID NO: 13733 - DNA, 25 bp, SARS Virus
tgtagaatgaacctggtaacaacag

SEQ ID NO: 13734 - DNA, 25 bp, SARS Virus
gtagaatgaacgcggtaacaacagt

SEQ ID NO: 13735 - DNA, 25 bp, SARS Virus
tagaatgaacgtcgtaacaacagtc

SEQ ID NO: 13736 - DNA, 25 bp, SARS Virus
agaatgaacgtgctaacaacagtcg

SEQ ID NO: 13737 - DNA, 25 bp, SARS Virus
gaatgaacgtggcaacaacagtcgt

SEQ ID NO: 13738 - DNA, 25 bp, SARS Virus
aatgaacgtggtcacaacagtcgtc

SEQ ID NO: 13739 - DNA, 25 bp, SARS Virus
atgaacgtggtaccaacagtcgtcc

SEQ ID NO: 13740 - DNA, 25 bp, SARS Virus
tgaacgtggtaacaacagtcgtccg

SEQ ID NO: 13741 - DNA, 25 bp, SARS Virus
gaacgtggtaaccacagtcgtccgt

SEQ ID NO: 13742 - DNA, 25 bp, SARS Virus
aacgtggtaacaccagtcgtccgta

SEQ ID NO: 13743 - DNA, 25 bp, SARS Virus
acgtggtaacaacagtcgtccgtat

SEQ ID NO: 13744 - DNA, 25 bp, SARS Virus
cgtggtaacaaccgtcgtccgtata

SEQ ID NO: 13745 - DNA, 25 bp, SARS Virus
gtggtaacaacactcgtccgtataa

SEQ ID NO: 13746 - DNA, 25 bp, SARS Virus
tggtaacaacagccgtccgtataaa

SEQ ID NO: 13747 - DNA, 25 bp, SARS Virus
ggtaacaacagtcgtccgtataaac

SEQ ID NO: 13748 - DNA, 25 bp, SARS Virus
gtaacaacagtcctccgtataaacc

SEQ ID NO: 13749 - DNA, 25 bp, SARS Virus
taacaacagtcgcccgtataaacca

SEQ ID NO: 13750 - DNA, 25 bp, SARS Virus
aacaacagtcgtccgtataaaccac

SEQ ID NO: 13751 - DNA, 25 bp, SARS Virus
acaacagtcgtccgtataaaccacg

SEQ ID NO: 13752 - DNA, 25 bp, SARS Virus
caacagtcgtccctataaaccacga

SEQ ID NO: 13753 - DNA, 25 bp, SARS Virus
aacagtcgtccgcataaaccacgat

SEQ ID NO: 13754 - DNA, 25 bp, SARS Virus
acagtcgtccgtctaaaccacgatt

SEQ ID NO: 13755 - DNA, 25 bp, SARS Virus
cagtcgtccgtacaaaccacgattt

SEQ ID NO: 13756 - DNA, 25 bp, SARS Virus
agtcgtccgtatcaaccacgatttg

SEQ ID NO: 13757 - DNA, 25 bp, SARS Virus
gtcgtccgtatacaccacgatttgg

SEQ ID NO: 13758 - DNA, 25 bp, SARS Virus
tcgtccgtataacccacgatttggt

SEQ ID NO: 13759 - DNA, 25 bp, SARS Virus
cgtccgtataaaccacgatttggtg

SEQ ID NO: 13760 - DNA, 25 bp, SARS Virus
gtccgtataaaccacgatttggtga

SEQ ID NO: 13761 - DNA, 25 bp, SARS Virus
tccgtataaaccccgatttggtgaa

SEQ ID NO: 13762 - DNA, 25 bp, SARS Virus
ccgtataaaccacgatttggtgaag

SEQ ID NO: 13763 - DNA, 25 bp, SARS Virus
cgtataaaccaccatttggtgaagt

SEQ ID NO: 13764 - DNA, 25 bp, SARS Virus
gtataaaccacgctttggtgaagtc

SEQ ID NO: 13765 - DNA, 25 bp, SARS Virus
tataaaccacgacttggtgaagtca

SEQ ID NO: 13766 - DNA, 25 bp, SARS Virus
ataaaccacgatctggtgaagtcag

SEQ ID NO: 13767 - DNA, 25 bp, SARS Virus
taaaccacgattcggtgaagtcaga

SEQ ID NO: 13768 - DNA, 25 bp, SARS Virus
aaaccacgatttcgtgaagtcagaa

SEQ ID NO: 13769 - DNA, 25 bp, SARS Virus
aaccacgatttgctgaagtcagaaa

SEQ ID NO: 13770 - DNA, 25 bp, SARS Virus
accacgatttggcgaagtcagaaat

SEQ ID NO: 13771 - DNA, 25 bp, SARS Virus
ccacgatttggtcaagtcagaaatg

SEQ ID NO: 13772 - DNA, 25 bp, SARS Virus
cacgatttggtgcagtcagaaatgt

SEQ ID NO: 13773 - DNA, 25 bp, SARS Virus
acgatttggtgacgtcagaaatgtt

SEQ ID NO: 13774 - DNA, 25 bp, SARS Virus
cgatttggtgaactcagaaatgttc

SEQ ID NO: 13775 - DNA, 25 bp, SARS Virus
gatttggtgaagccagaaatgttca

SEQ ID NO: 13776 - DNA, 25 bp, SARS Virus
atttggtgaagtcagaaatgttcac

SEQ ID NO: 13777 - DNA, 25 bp, SARS Virus
tttggtgaagtccgaaatgttcaca

SEQ ID NO: 13778 - DNA, 25 bp, SARS Virus
ttggtgaagtcacaaatgttcacac

SEQ ID NO: 13779 - DNA, 25 bp, SARS Virus
tggtgaagtcagcaatgttcacacg

SEQ ID NO: 13780 - DNA, 25 bp, SARS Virus
ggtgaagtcagacatgttcacacgc

SEQ ID NO: 13781 - DNA, 25 bp, SARS Virus
gtgaagtcagaactgttcacacgca

SEQ ID NO: 13782 - DNA, 25 bp, SARS Virus
tgaagtcagaaacgttcacacgcac

SEQ ID NO: 13783 - DNA, 25 bp, SARS Virus
gaagtcagaaatcttcacacgcacg

SEQ ID NO: 13784 - DNA, 25 bp, SARS Virus
aagtcagaaatgctcacacgcacgt

SEQ ID NO: 13785 - DNA, 25 bp, SARS Virus
agtcagaaatgtccacacgcacgtc

SEQ ID NO: 13786 - DNA, 25 bp, SARS Virus
gtcagaaatgttcacacgcacgtct

SEQ ID NO: 13787 - DNA, 25 bp, SARS Virus
tcagaaatgttcccacgcacgtctg

SEQ ID NO: 13788 - DNA, 25 bp, SARS Virus
cagaaatgttcacacgcacgtctgc

SEQ ID NO: 13789 - DNA, 25 bp, SARS Virus
agaaatgttcacccgcacgtctgcc

SEQ ID NO: 13790 - DNA, 25 bp, SARS Virus
gaaatgttcacacgcacgtctgcca

SEQ ID NO: 13791 - DNA, 25 bp, SARS Virus
aaatgttcacacccacgtctgccaa

SEQ ID NO: 13792 - DNA, 25 bp, SARS Virus
aatgttcacacgcacgtctgccaag

SEQ ID NO: 13793 - DNA, 25 bp, SARS Virus
tctccttctgacggacctactatga

SEQ ID NO: 13794 - DNA, 25 bp, SARS Virus
ctccttctgaccgacctactatgat

SEQ ID NO: 13795 - DNA, 25 bp, SARS Virus
tccttctgaccggcctactatgatg

SEQ ID NO: 13796 - DNA, 25 bp, SARS Virus
ccttctgaccgagctactatgatga

SEQ ID NO: 13797 - DNA, 25 bp, SARS Virus
cttctgaccgacgtactatgatgac

SEQ ID NO: 13798 - DNA, 25 bp, SARS Virus
ttctgaccgaccgactatgatgact

SEQ ID NO: 13799 - DNA, 25 bp, SARS Virus
tctgaccgacctgctatgatgactc

SEQ ID NO: 13800 - DNA, 25 bp, SARS Virus
ctgaccgacctagtatgatgactcg

SEQ ID NO: 13801 - DNA, 25 bp, SARS Virus
tgaccgacctacgatgatgactcgt

SEQ ID NO: 13802 - DNA, 25 bp, SARS Virus
gaccgacctactgtgatgactcgtt

SEQ ID NO: 13803 - DNA, 25 bp, SARS Virus
accgacctactaggatgactcgtta

SEQ ID NO: 13804 - DNA, 25 bp, SARS Virus
ccgacctactatgatgactcgttag

SEQ ID NO: 13805 - DNA, 25 bp, SARS Virus
cgacctactatggtgactcgttagt

SEQ ID NO: 13806 - DNA, 25 bp, SARS Virus
gacctactatgaggactcgttagtc

SEQ ID NO: 13807 - DNA, 25 bp, SARS Virus
acctactatgatgactcgttagtct

SEQ ID NO: 13808 - DNA, 25 bp, SARS Virus
cctactatgatggctcgttagtctc

SEQ ID NO: 13809 - DNA, 25 bp, SARS Virus
ctactatgatgagtcgttagtctct

SEQ ID NO: 13810 - DNA, 25 bp, SARS Virus
tactatgatgacgcgttagtctcta

SEQ ID NO: 13811 - DNA, 25 bp, SARS Virus
actatgatgactggttagtctctaa

SEQ ID NO: 13812 - DNA, 25 bp, SARS Virus
ctatgatgactcgttagtctctaac

SEQ ID NO: 13813 - DNA, 25 bp, SARS Virus
tatgatgactcggtagtctctaact

SEQ ID NO: 13814 - DNA, 25 bp, SARS Virus
atgatgactcgtgagtctctaactc

SEQ ID NO: 13815 - DNA, 25 bp, SARS Virus
tgatgactcgttggtctctaactcg

SEQ ID NO: 13816 - DNA, 25 bp, SARS Virus
gatgactcgttagtctctaactcgg

SEQ ID NO: 13817 - DNA, 25 bp, SARS Virus
atgactcgttaggctctaactcggt

SEQ ID NO: 13818 - DNA, 25 bp, SARS Virus
tgactcgttagtgtctaactcggtc

SEQ ID NO: 13819 - DNA, 25 bp, SARS Virus
gactcgttagtcgctaactcggtct

SEQ ID NO: 13820 - DNA, 25 bp, SARS Virus
actcgttagtctgtaactcggtctt

SEQ ID NO: 13821 - DNA, 25 bp, SARS Virus
ctcgttagtctcgaactcggtcttg

SEQ ID NO: 13822 - DNA, 25 bp, SARS Virus
tcgttagtctctgactcggtcttgg

SEQ ID NO: 13823 - DNA, 25 bp, SARS Virus
cgttagtctctagctcggtcttggt

SEQ ID NO: 13824 - DNA, 25 bp, SARS Virus
gttagtctctaagtcggtcttggtc

SEQ ID NO: 13825 - DNA, 25 bp, SARS Virus
ttagtctctaacgcggtcttggtct

SEQ ID NO: 13826 - DNA, 25 bp, SARS Virus
tagtctctaactgggtcttggtctt

SEQ ID NO: 13827 - DNA, 25 bp, SARS Virus
agtctctaactcggtcttggtcttg

SEQ ID NO: 13828 - DNA, 25 bp, SARS Virus
gtctctaactcggtcttggtcttgg

SEQ ID NO: 13829 - DNA, 25 bp, SARS Virus
tctctaactcgggcttggtcttgga

SEQ ID NO: 13830 - DNA, 25 bp, SARS Virus
ctctaactcggtgttggtcttggat

SEQ ID NO: 13831 - DNA, 25 bp, SARS Virus
tctaactcggtcgtggtcttggatg

SEQ ID NO: 13832 - DNA, 25 bp, SARS Virus
ctaactcggtctgggtcttggatgt

SEQ ID NO: 13833 - DNA, 25 bp, SARS Virus
taactcggtcttggtcttggatgtg

SEQ ID NO: 13834 - DNA, 25 bp, SARS Virus
aactcggtcttggtcttggatgtgg

SEQ ID NO: 13835 - DNA, 25 bp, SARS Virus
actcggtcttgggcttggatgtgga

SEQ ID NO: 13836 - DNA, 25 bp, SARS Virus
ctcggtcttggtgttggatgtggac

SEQ ID NO: 13837 - DNA, 25 bp, SARS Virus
tcggtcttggtcgtggatgtggact

SEQ ID NO: 13838 - DNA, 25 bp, SARS Virus
cggtcttggtctgggatgtggactt

SEQ ID NO: 13839 - DNA, 25 bp, SARS Virus
ggtcttggtcttggatgtggacttc

SEQ ID NO: 13840 - DNA, 25 bp, SARS Virus
gtcttggtcttggatgtggacttct

SEQ ID NO: 13841 - DNA, 25 bp, SARS Virus
tcttggtcttgggtgtggacttctt

SEQ ID NO: 13842 - DNA, 25 bp, SARS Virus
cttggtcttggaggtggacttcttg

SEQ ID NO: 13843 - DNA, 25 bp, SARS Virus
ttggtcttggatgtggacttcttgg

SEQ ID NO: 13844 - DNA, 25 bp, SARS Virus
tggtcttggatggggacttcttggt

SEQ ID NO: 13845 - DNA, 25 bp, SARS Virus
ggtcttggatgtggacttcttggtc

SEQ ID NO: 13846 - DNA, 25 bp, SARS Virus
gtcttggatgtggacttcttggtca

SEQ ID NO: 13847 - DNA, 25 bp, SARS Virus
tcttggatgtgggcttcttggtcaa

SEQ ID NO: 13848 - DNA, 25 bp, SARS Virus
cttggatgtggagttcttggtcaat

SEQ ID NO: 13849 - DNA, 25 bp, SARS Virus
ttggatgtggacgtcttggtcaatt

SEQ ID NO: 13850 - DNA, 25 bp, SARS Virus
tggatgtggactgcttggtcaatta

SEQ ID NO: 13851 - DNA, 25 bp, SARS Virus
ggatgtggacttgttggtcaattag

SEQ ID NO: 13852 - DNA, 25 bp, SARS Virus
gatgtggacttcgtggtcaattagt

SEQ ID NO: 13853 - DNA, 25 bp, SARS Virus
atgtggacttctgggtcaattagtc

SEQ ID NO: 13854 - DNA, 25 bp, SARS Virus
tgtggacttcttggtcaattagtca

SEQ ID NO: 13855 - DNA, 25 bp, SARS Virus
gtggacttcttggtcaattagtcaa

SEQ ID NO: 13856 - DNA, 25 bp, SARS Virus
tggacttcttgggcaattagtcaaa

SEQ ID NO: 13857 - DNA, 25 bp, SARS Virus
ggacttcttggtgaattagtcaaat

SEQ ID NO: 13858 - DNA, 25 bp, SARS Virus
gacttcttggtcgattagtcaaatg

SEQ ID NO: 13859 - DNA, 25 bp, SARS Virus
acttcttggtcagttagtcaaatga

SEQ ID NO: 13860 - DNA, 25 bp, SARS Virus
cttcttggtcaagtagtcaaatgac

SEQ ID NO: 13861 - DNA, 25 bp, SARS Virus
ttcttggtcaatgagtcaaatgacc

SEQ ID NO: 13862 - DNA, 25 bp, SARS Virus
tcttggtcaattggtcaaatgacca

SEQ ID NO: 13863 - DNA, 25 bp, SARS Virus
cttggtcaattagtcaaatgaccaa

SEQ ID NO: 13864 - DNA, 25 bp, SARS Virus
ttggtcaattaggcaaatgaccaat

SEQ ID NO: 13865 - DNA, 25 bp, SARS Virus
tggtcaattagtgaaatgaccaata

SEQ ID NO: 13866 - DNA, 25 bp, SARS Virus
ggtcaattagtcgaatgaccaataa

SEQ ID NO: 13867 - DNA, 25 bp, SARS Virus
gtcaattagtcagatgaccaataaa

SEQ ID NO: 13868 - DNA, 25 bp, SARS Virus
tcaattagtcaagtgaccaataaat

SEQ ID NO: 13869 - DNA, 25 bp, SARS Virus
caattagtcaaaggaccaataaatt

SEQ ID NO: 13870 - DNA, 25 bp, SARS Virus
aattagtcaaatgaccaataaattt

SEQ ID NO: 13871 - DNA, 25 bp, SARS Virus
attagtcaaatggccaataaatttt

SEQ ID NO: 13872 - DNA, 25 bp, SARS Virus
ttagtcaaatgagcaataaattttg

SEQ ID NO: 13873 - DNA, 25 bp, SARS Virus
tagtcaaatgacgaataaattttga

SEQ ID NO: 13874 - DNA, 25 bp, SARS Virus
agtcaaatgaccgataaattttgaa

SEQ ID NO: 13875 - DNA, 25 bp, SARS Virus
gtcaaatgaccagtaaattttgaat

SEQ ID NO: 13876 - DNA, 25 bp, SARS Virus
tcaaatgaccaagaaattttgaatg

SEQ ID NO: 13877 - DNA, 25 bp, SARS Virus
caaatgaccaatgaattttgaatga

SEQ ID NO: 13878 - DNA, 25 bp, SARS Virus
aaatgaccaatagattttgaatgac

SEQ ID NO: 13879 - DNA, 25 bp, SARS Virus
aatgaccaataagttttgaatgact

SEQ ID NO: 13880 - DNA, 25 bp, SARS Virus
atgaccaataaagtttgaatgactg

SEQ ID NO: 13881 - DNA, 25 bp, SARS Virus
tgaccaataaatgttgaatgactgt

SEQ ID NO: 13882 - DNA, 25 bp, SARS Virus
gaccaataaattgtgaatgactgtt

SEQ ID NO: 13883 - DNA, 25 bp, SARS Virus
accaataaatttggaatgactgtta

SEQ ID NO: 13884 - DNA, 25 bp, SARS Virus
ccaataaattttgaatgactgttac

SEQ ID NO: 13885 - DNA, 25 bp, SARS Virus
caataaattttggatgactgttaca

SEQ ID NO: 13886 - DNA, 25 bp, SARS Virus
aataaattttgagtgactgttacaa

SEQ ID NO: 13887 - DNA, 25 bp, SARS Virus
ataaattttgaaggactgttacaac

SEQ ID NO: 13888 - DNA, 25 bp, SARS Virus
taaattttgaatgactgttacaacg

SEQ ID NO: 13889 - DNA, 25 bp, SARS Virus
aaattttgaatggctgttacaacgg

SEQ ID NO: 13890 - DNA, 25 bp, SARS Virus
aattttgaatgagtgttacaacggt

SEQ ID NO: 13891 - DNA, 25 bp, SARS Virus
attttgaatgacggttacaacggta

SEQ ID NO: 13892 - DNA, 25 bp, SARS Virus
ttttgaatgactgttacaacggtaa

SEQ ID NO: 13893 - DNA, 25 bp, SARS Virus
tttgaatgactggtacaacggtaat

SEQ ID NO: 13894 - DNA, 25 bp, SARS Virus
ttgaatgactgtgacaacggtaatt

SEQ ID NO: 13895 - DNA, 25 bp, SARS Virus
tgaatgactgttgcaacggtaattt

SEQ ID NO: 13896 - DNA, 25 bp, SARS Virus
gaatgactgttagaacggtaattta

SEQ ID NO: 13897 - DNA, 25 bp, SARS Virus
aatgactgttacgacggtaatttac

SEQ ID NO: 13898 - DNA, 25 bp, SARS Virus
atgactgttacagcggtaatttaca

SEQ ID NO: 13899 - DNA, 25 bp, SARS Virus
tgactgttacaagggtaatttacac

SEQ ID NO: 13900 - DNA, 25 bp, SARS Virus
gactgttacaacggtaatttacaca

SEQ ID NO: 13901 - DNA, 25 bp, SARS Virus
actgttacaacggtaatttacacaa

SEQ ID NO: 13902 - DNA, 25 bp, SARS Virus
ctgttacaacgggaatttacacaac

SEQ ID NO: 13903 - DNA, 25 bp, SARS Virus
tgttacaacggtgatttacacaact

SEQ ID NO: 13904 - DNA, 25 bp, SARS Virus
gttacaacggtagtttacacaactg

SEQ ID NO: 13905 - DNA, 25 bp, SARS Virus
ttacaacggtaagttacacaactgt

SEQ ID NO: 13906 - DNA, 25 bp, SARS Virus
tacaacggtaatgtacacaactgta

SEQ ID NO: 13907 - DNA, 25 bp, SARS Virus
acaacggtaattgacacaactgtag

SEQ ID NO: 13908 - DNA, 25 bp, SARS Virus
caacggtaatttgcacaactgtagc

SEQ ID NO: 13909 - DNA, 25 bp, SARS Virus
aacggtaatttagacaactgtagca

SEQ ID NO: 13910 - DNA, 25 bp, SARS Virus
acggtaatttacgcaactgtagcaa

SEQ ID NO: 13911 - DNA, 25 bp, SARS Virus
cggtaatttacagaactgtagcaat

SEQ ID NO: 13912 - DNA, 25 bp, SARS Virus
ggtaatttacacgactgtagcaatt

SEQ ID NO: 13913 - DNA, 25 bp, SARS Virus
gtaatttacacagctgtagcaattc

SEQ ID NO: 13914 - DNA, 25 bp, SARS Virus
taatttacacaagtgtagcaattcc

SEQ ID NO: 13915 - DNA, 25 bp, SARS Virus
aatttacacaacggtagcaattcct

SEQ ID NO: 13916 - DNA, 25 bp, SARS Virus
atttacacaactgtagcaattcctc

SEQ ID NO: 13917 - DNA, 25 bp, SARS Virus
tttacacaactggagcaattcctcc

SEQ ID NO: 13918 - DNA, 25 bp, SARS Virus
ttacacaactgtggcaattcctccg

SEQ ID NO: 13919 - DNA, 25 bp, SARS Virus
tacacaactgtagcaattcctccgt

SEQ ID NO: 13920 - DNA, 25 bp, SARS Virus
acacaactgtaggaattcctccgtg

SEQ ID NO: 13921 - DNA, 25 bp, SARS Virus
cacaactgtagcgattcctccgtgt

SEQ ID NO: 13922 - DNA, 25 bp, SARS Virus
acaactgtagcagttcctccgtgtt

SEQ ID NO: 13923 - DNA, 25 bp, SARS Virus
caactgtagcaagtcctccgtgttt

SEQ ID NO: 13924 - DNA, 25 bp, SARS Virus
aactgtagcaatgcctccgtgtttc

SEQ ID NO: 13925 - DNA, 25 bp, SARS Virus
actgtagcaattgctccgtgtttca

SEQ ID NO: 13926 - DNA, 25 bp, SARS Virus
ctgtagcaattcgtccgtgtttcac

SEQ ID NO: 13927 - DNA, 25 bp, SARS Virus
tgtagcaattccgccgtgtttcacg

SEQ ID NO: 13928 - DNA, 25 bp, SARS Virus
gtagcaattcctgcgtgtttcacga

SEQ ID NO: 13929 - DNA, 25 bp, SARS Virus
tagcaattcctcggtgtttcacgat

SEQ ID NO: 13930 - DNA, 25 bp, SARS Virus
agcaattcctccgtgtttcacgatt

SEQ ID NO: 13931 - DNA, 25 bp, SARS Virus
gcaattcctccgggtttcacgatta

SEQ ID NO: 13932 - DNA, 25 bp, SARS Virus
caattcctccgtgtttcacgattag

SEQ ID NO: 13933 - DNA, 25 bp, SARS Virus
aattcctccgtggttcacgattagg

SEQ ID NO: 13934 - DNA, 25 bp, SARS Virus
attcctccgtgtgtcacgattagga

SEQ ID NO: 13935 - DNA, 25 bp, SARS Virus
ttcctccgtgttgcacgattaggat

SEQ ID NO: 13936 - DNA, 25 bp, SARS Virus
tcctccgtgtttgacgattaggata

SEQ ID NO: 13937 - DNA, 25 bp, SARS Virus
cctccgtgtttcgcgattaggatac

SEQ ID NO: 13938 - DNA, 25 bp, SARS Virus
ctccgtgtttcaggattaggatacc

SEQ ID NO: 13939 - DNA, 25 bp, SARS Virus
tccgtgtttcacgattaggatacca

SEQ ID NO: 13940 - DNA, 25 bp, SARS Virus
ccgtgtttcacggttaggataccac

SEQ ID NO: 13941 - DNA, 25 bp, SARS Virus
cgtgtttcacgagtaggataccact

SEQ ID NO: 13942 - DNA, 25 bp, SARS Virus
gtgtttcacgatgaggataccacta

SEQ ID NO: 13943 - DNA, 25 bp, SARS Virus
tgtttcacgattgggataccactaa

SEQ ID NO: 13944 - DNA, 25 bp, SARS Virus
gtttcacgattaggataccactaac

SEQ ID NO: 13945 - DNA, 25 bp, SARS Virus
tttcacgattaggataccactaaca

SEQ ID NO: 13946 - DNA, 25 bp, SARS Virus
ttcacgattagggtaccactaacat

SEQ ID NO: 13947 - DNA, 25 bp, SARS Virus
tcacgattaggagaccactaacatt

SEQ ID NO: 13948 - DNA, 25 bp, SARS Virus
cacgattaggatgccactaacattt

SEQ ID NO: 13949 - DNA, 25 bp, SARS Virus
acgattaggatagcactaacattta

SEQ ID NO: 13950 - DNA, 25 bp, SARS Virus
cgattaggatacgactaacatttac

SEQ ID NO: 13951 - DNA, 25 bp, SARS Virus
gattaggataccgctaacatttacg

SEQ ID NO: 13952 - DNA, 25 bp, SARS Virus
attaggataccagtaacatttacga

SEQ ID NO: 13953 - DNA, 25 bp, SARS Virus
ttaggataccacgaacatttacgac

SEQ ID NO: 13954 - DNA, 25 bp, SARS Virus
taggataccactgacatttacgacg

SEQ ID NO: 13955 - DNA, 25 bp, SARS Virus
aggataccactagcatttacgacga

SEQ ID NO: 13956 - DNA, 25 bp, SARS Virus
ggataccactaagatttacgacgat

SEQ ID NO: 13957 - DNA, 25 bp, SARS Virus
gataccactaacgtttacgacgatt

SEQ ID NO: 13958 - DNA, 25 bp, SARS Virus
ataccactaacagttacgacgattg

SEQ ID NO: 13959 - DNA, 25 bp, SARS Virus
taccactaacatgtacgacgattgt

SEQ ID NO: 13960 - DNA, 25 bp, SARS Virus
accactaacattgacgacgattgta

SEQ ID NO: 13961 - DNA, 25 bp, SARS Virus
ccactaacatttgcgacgattgtat

SEQ ID NO: 13962 - DNA, 25 bp, SARS Virus
cactaacatttaggacgattgtatg

SEQ ID NO: 13963 - DNA, 25 bp, SARS Virus
actaacatttacgacgattgtatgt

SEQ ID NO: 13964 - DNA, 25 bp, SARS Virus
ctaacatttacggcgattgtatgtg

SEQ ID NO: 13965 - DNA, 25 bp, SARS Virus
taacatttacgaggattgtatgtgg

SEQ ID NO: 13966 - DNA, 25 bp, SARS Virus
aacatttacgacgattgtatgtgga

SEQ ID NO: 13967 - DNA, 25 bp, SARS Virus
acatttacgacggttgtatgtggac

SEQ ID NO: 13968 - DNA, 25 bp, SARS Virus
catttacgacgagtgtatgtggact

SEQ ID NO: 13969 - DNA, 25 bp, SARS Virus
atttacgacgatggtatgtggactt

SEQ ID NO: 13970 - DNA, 25 bp, SARS Virus
tttacgacgattgtatgtggacttt

SEQ ID NO: 13971 - DNA, 25 bp, SARS Virus
ttacgacgattggatgtggactttg

SEQ ID NO: 13972 - DNA, 25 bp, SARS Virus
tacgacgattgtgtgtggactttgt

SEQ ID NO: 13973 - DNA, 25 bp, SARS Virus
acgacgattgtaggtggactttgta

SEQ ID NO: 13974 - DNA, 25 bp, SARS Virus
cgacgattgtatgtggactttgtac

SEQ ID NO: 13975 - DNA, 25 bp, SARS Virus
gacgattgtatggggactttgtacc

SEQ ID NO: 13976 - DNA, 25 bp, SARS Virus
acgattgtatgtggactttgtacca

SEQ ID NO: 13977 - DNA, 25 bp, SARS Virus
cgattgtatgtggactttgtaccac

SEQ ID NO: 13978 - DNA, 25 bp, SARS Virus
gattgtatgtgggctttgtaccacc

SEQ ID NO: 13979 - DNA, 25 bp, SARS Virus
attgtatgtggagtttgtaccacca

SEQ ID NO: 13980 - DNA, 25 bp, SARS Virus
ttgtatgtggacgttgtaccaccac

SEQ ID NO: 13981 - DNA, 25 bp, SARS Virus
tgtatgtggactgtgtaccaccacc

SEQ ID NO: 13982 - DNA, 25 bp, SARS Virus
gtatgtggacttggtaccaccacca

SEQ ID NO: 13983 - DNA, 25 bp, SARS Virus
tatgtggactttgtaccaccaccac

SEQ ID NO: 13984 - DNA, 25 bp, SARS Virus
atgtggactttggaccaccaccaca

SEQ ID NO: 13985 - DNA, 25 bp, SARS Virus
tgtggactttgtgccaccaccacat

SEQ ID NO: 13986 - DNA, 25 bp, SARS Virus
gtggactttgtagcaccaccacatc

SEQ ID NO: 13987 - DNA, 25 bp, SARS Virus
tggactttgtacgaccaccacatcg

SEQ ID NO: 13988 - DNA, 25 bp, SARS Virus
ggactttgtaccgccaccacatcgt

SEQ ID NO: 13989 - DNA, 25 bp, SARS Virus
gactttgtaccagcaccacatcgtc

SEQ ID NO: 13990 - DNA, 25 bp, SARS Virus
actttgtaccacgaccacatcgtcc

SEQ ID NO: 13991 - DNA, 25 bp, SARS Virus
ctttgtaccaccgccacatcgtcca

SEQ ID NO: 13992 - DNA, 25 bp, SARS Virus
tttgtaccaccagcacatcgtccac

SEQ ID NO: 13993 - DNA, 25 bp, SARS Virus
ttgtaccaccacgacatcgtccacg

SEQ ID NO: 13994 - DNA, 25 bp, SARS Virus
tgtaccaccaccgcatcgtccacgt

SEQ ID NO: 13995 - DNA, 25 bp, SARS Virus
gtaccaccaccagatcgtccacgtg

SEQ ID NO: 13996 - DNA, 25 bp, SARS Virus
taccaccaccacgtcgtccacgtga

SEQ ID NO: 13997 - DNA, 25 bp, SARS Virus
accaccaccacagcgtccacgtgag

SEQ ID NO: 13998 - DNA, 25 bp, SARS Virus
ccaccaccacatggtccacgtgagt

SEQ ID NO: 13999 - DNA, 25 bp, SARS Virus
caccaccacatcgtccacgtgagtt

SEQ ID NO: 14000 - DNA, 25 bp, SARS Virus
accaccacatcggccacgtgagttg

SEQ ID NO: 14001 - DNA, 25 bp, SARS Virus
ccaccacatcgtgcacgtgagttgt

SEQ ID NO: 14002 - DNA, 25 bp, SARS Virus
caccacatcgtcgacgtgagttgtt

SEQ ID NO: 14003 - DNA, 25 bp, SARS Virus
accacatcgtccgcgtgagttgttc

SEQ ID NO: 14004 - DNA, 25 bp, SARS Virus
ccacatcgtccaggtgagttgttcc

SEQ ID NO: 14005 - DNA, 25 bp, SARS Virus
cacatcgtccacgtgagttgttccg

SEQ ID NO: 14006 - DNA, 25 bp, SARS Virus
acatcgtccacgggagttgttccgt

SEQ ID NO: 14007 - DNA, 25 bp, SARS Virus
catcgtccacgtgagttgttccgtt

SEQ ID NO: 14008 - DNA, 25 bp, SARS Virus
atcgtccacgtgggttgttccgttg

SEQ ID NO: 14009 - DNA, 25 bp, SARS Virus
tcgtccacgtgagttgttccgttgg

SEQ ID NO: 14010 - DNA, 25 bp, SARS Virus
cgtccacgtgaggtgttccgttggt

SEQ ID NO: 14011 - DNA, 25 bp, SARS Virus
gtccacgtgagtggttccgttggtt

SEQ ID NO: 14012 - DNA, 25 bp, SARS Virus
tccacgtgagttgttccgttggtta

SEQ ID NO: 14013 - DNA, 25 bp, SARS Virus
ccacgtgagttggtccgttggttac

SEQ ID NO: 14014 - DNA, 25 bp, SARS Virus
cacgtgagttgtgccgttggttacc

SEQ ID NO: 14015 - DNA, 25 bp, SARS Virus
acgtgagttgttgcgttggttacca

SEQ ID NO: 14016 - DNA, 25 bp, SARS Virus
cgtgagttgttcggttggttaccac

SEQ ID NO: 14017 - DNA, 25 bp, SARS Virus
gtgagttgttccgttggttaccacg

SEQ ID NO: 14018 - DNA, 25 bp, SARS Virus
tgagttgttccggtggttaccacgg

SEQ ID NO: 14019 - DNA, 25 bp, SARS Virus
gagttgttccgtgggttaccacggt

SEQ ID NO: 14020 - DNA, 25 bp, SARS Virus
agttgttccgttggttaccacggta

SEQ ID NO: 14021 - DNA, 25 bp, SARS Virus
gttgttccgttggttaccacggtac

SEQ ID NO: 14022 - DNA, 25 bp, SARS Virus
ttgttccgttgggtaccacggtacg

SEQ ID NO: 14023 - DNA, 25 bp, SARS Virus
tgttccgttggtgaccacggtacgt

SEQ ID NO: 14024 - DNA, 25 bp, SARS Virus
gttccgttggttgccacggtacgtt

SEQ ID NO: 14025 - DNA, 25 bp, SARS Virus
ttccgttggttagcacggtacgttt

SEQ ID NO: 14026 - DNA, 25 bp, SARS Virus
tccgttggttacgacggtacgtttt

SEQ ID NO: 14027 - DNA, 25 bp, SARS Virus
ccgttggttaccgcggtacgttttc

SEQ ID NO: 14028 - DNA, 25 bp, SARS Virus
cgttggttaccagggtacgttttcc

SEQ ID NO: 14029 - DNA, 25 bp, SARS Virus
gttggttaccacggtacgttttcct

SEQ ID NO: 14030 - DNA, 25 bp, SARS Virus
ttggttaccacggtacgttttcctc

SEQ ID NO: 14031 - DNA, 25 bp, SARS Virus
tggttaccacgggacgttttcctct

SEQ ID NO: 14032 - DNA, 25 bp, SARS Virus
ggttaccacggtgcgttttcctctc

SEQ ID NO: 14033 - DNA, 25 bp, SARS Virus
gttaccacggtaggttttcctctca

SEQ ID NO: 14034 - DNA, 25 bp, SARS Virus
ttaccacggtacgttttcctctcac

SEQ ID NO: 14035 - DNA, 25 bp, SARS Virus
taccacggtacggtttcctctcact

SEQ ID NO: 14036 - DNA, 25 bp, SARS Virus
accacggtacgtgttcctctcacta

SEQ ID NO: 14037 - DNA, 25 bp, SARS Virus
ccacggtacgttgtcctctcactac

SEQ ID NO: 14038 - DNA, 25 bp, SARS Virus
cacggtacgtttgcctctcactact

SEQ ID NO: 14039 - DNA, 25 bp, SARS Virus
acggtacgttttgctctcactacta

SEQ ID NO: 14040 - DNA, 25 bp, SARS Virus
cggtacgttttcgtctcactactaa

SEQ ID NO: 14041 - DNA, 25 bp, SARS Virus
ggtacgttttccgctcactactaat

SEQ ID NO: 14042 - DNA, 25 bp, SARS Virus
gtacgttttcctgtcactactaatg

SEQ ID NO: 14043 - DNA, 25 bp, SARS Virus
tacgttttcctcgcactactaatgt

SEQ ID NO: 14044 - DNA, 25 bp, SARS Virus
acgttttcctctgactactaatgta

SEQ ID NO: 14045 - DNA, 25 bp, SARS Virus
cgttttcctctcgctactaatgtaa

SEQ ID NO: 14046 - DNA, 25 bp, SARS Virus
gttttcctctcagtactaatgtaat

SEQ ID NO: 14047 - DNA, 25 bp, SARS Virus
ttttcctctcacgactaatgtaatt

SEQ ID NO: 14048 - DNA, 25 bp, SARS Virus
tttcctctcactgctaatgtaattc

SEQ ID NO: 14049 - DNA, 25 bp, SARS Virus
ttcctctcactagtaatgtaattcg

SEQ ID NO: 14050 - DNA, 25 bp, SARS Virus
tcctctcactacgaatgtaattcga

SEQ ID NO: 14051 - DNA, 25 bp, SARS Virus
cctctcactactgatgtaattcgat

SEQ ID NO: 14052 - DNA, 25 bp, SARS Virus
ctctcactactagtgtaattcgatt

SEQ ID NO: 14053 - DNA, 25 bp, SARS Virus
tctcactactaaggtaattcgattt

SEQ ID NO: 14054 - DNA, 25 bp, SARS Virus
ctcactactaatgtaattcgattta

SEQ ID NO: 14055 - DNA, 25 bp, SARS Virus
tcactactaatggaattcgatttac

SEQ ID NO: 14056 - DNA, 25 bp, SARS Virus
cactactaatgtgattcgatttacc

SEQ ID NO: 14057 - DNA, 25 bp, SARS Virus
actactaatgtagttcgatttaccg

SEQ ID NO: 14058 - DNA, 25 bp, SARS Virus
ctactaatgtaagtcgatttaccgg

SEQ ID NO: 14059 - DNA, 25 bp, SARS Virus
tactaatgtaatgcgatttaccggg

SEQ ID NO: 14060 - DNA, 25 bp, SARS Virus
actaatgtaattggatttaccggga

SEQ ID NO: 14061 - DNA, 25 bp, SARS Virus
ctaatgtaattcgatttaccgggag

SEQ ID NO: 14062 - DNA, 25 bp, SARS Virus
taatgtaattcggtttaccgggaga

SEQ ID NO: 14063 - DNA, 25 bp, SARS Virus
aatgtaattcgagttaccgggagaa

SEQ ID NO: 14064 - DNA, 25 bp, SARS Virus
atgtaattcgatgtaccgggagaat

SEQ ID NO: 14065 - DNA, 25 bp, SARS Virus
tgtaattcgattgaccgggagaatg

SEQ ID NO: 14066 - DNA, 25 bp, SARS Virus
gtaattcgatttgccgggagaatgt

SEQ ID NO: 14067 - DNA, 25 bp, SARS Virus
taattcgatttagcgggagaatgtc

SEQ ID NO: 14068 - DNA, 25 bp, SARS Virus
aattcgatttacggggagaatgtca

SEQ ID NO: 14069 - DNA, 25 bp, SARS Virus
attcgatttaccgggagaatgtcat

SEQ ID NO: 14070 - DNA, 25 bp, SARS Virus
ttcgatttaccgggagaatgtcatc

SEQ ID NO: 14071 - DNA, 25 bp, SARS Virus
tcgatttaccgggagaatgtcatcc

SEQ ID NO: 14072 - DNA, 25 bp, SARS Virus
cgatttaccgggggaatgtcatcct

SEQ ID NO: 14073 - DNA, 25 bp, SARS Virus
gatttaccgggagaatgtcatcctc

SEQ ID NO: 14074 - DNA, 25 bp, SARS Virus
atttaccgggaggatgtcatcctcc

SEQ ID NO: 14075 - DNA, 25 bp, SARS Virus
tttaccgggagagtgtcatcctccc

SEQ ID NO: 14076 - DNA, 25 bp, SARS Virus
ttaccgggagaaggtcatcctccca

SEQ ID NO: 14077 - DNA, 25 bp, SARS Virus
taccgggagaatgtcatcctcccag

SEQ ID NO: 14078 - DNA, 25 bp, SARS Virus
accgggagaatggcatcctcccaga

SEQ ID NO: 14079 - DNA, 25 bp, SARS Virus
ccgggagaatgtgatcctcccagaa

SEQ ID NO: 14080 - DNA, 25 bp, SARS Virus
cgggagaatgtcgtcctcccagaac

SEQ ID NO: 14081 - DNA, 25 bp, SARS Virus
gggagaatgtcagcctcccagaaca

SEQ ID NO: 14082 - DNA, 25 bp, SARS Virus
ggagaatgtcatgctcccagaacaa

SEQ ID NO: 14083 - DNA, 25 bp, SARS Virus
gagaatgtcatcgtcccagaacaaa

SEQ ID NO: 14084 - DNA, 25 bp, SARS Virus
agaatgtcatccgcccagaacaaac

SEQ ID NO: 14085 - DNA, 25 bp, SARS Virus
gaatgtcatcctgccagaacaaacg

SEQ ID NO: 14086 - DNA, 25 bp, SARS Virus
aatgtcatcctcgcagaacaaacga

SEQ ID NO: 14087 - DNA, 25 bp, SARS Virus
atgtcatcctccgagaacaaacgaa

SEQ ID NO: 14088 - DNA, 25 bp, SARS Virus
tgtcatcctcccggaacaaacgaaa

SEQ ID NO: 14089 - DNA, 25 bp, SARS Virus
gtcatcctcccagaacaaacgaaag

SEQ ID NO: 14090 - DNA, 25 bp, SARS Virus
tcatcctcccaggacaaacgaaaga

SEQ ID NO: 14091 - DNA, 25 bp, SARS Virus
catcctcccagagcaaacgaaagac

SEQ ID NO: 14092 - DNA, 25 bp, SARS Virus
atcctcccagaagaaacgaaagacc

SEQ ID NO: 14093 - DNA, 25 bp, SARS Virus
tcctcccagaacgaacgaaagacct

SEQ ID NO: 14094 - DNA, 25 bp, SARS Virus
cctcccagaacagacgaaagacctg

SEQ ID NO: 14095 - DNA, 25 bp, SARS Virus
ctcccagaacaagcgaaagacctgt

SEQ ID NO: 14096 - DNA, 25 bp, SARS Virus
tcccagaacaaaggaaagacctgta

SEQ ID NO: 14097 - DNA, 25 bp, SARS Virus
cccagaacaaacgaaagacctgtat

SEQ ID NO: 14098 - DNA, 25 bp, SARS Virus
ccagaacaaacggaagacctgtatt

SEQ ID NO: 14099 - DNA, 25 bp, SARS Virus
cagaacaaacgagagacctgtatta

SEQ ID NO: 14100 - DNA, 25 bp, SARS Virus
agaacaaacgaaggacctgtattag

SEQ ID NO: 14101 - DNA, 25 bp, SARS Virus
gaacaaacgaaagacctgtattaga

SEQ ID NO: 14102 - DNA, 25 bp, SARS Virus
aacaaacgaaaggcctgtattagaa

SEQ ID NO: 14103 - DNA, 25 bp, SARS Virus
acaaacgaaagagctgtattagaac

SEQ ID NO: 14104 - DNA, 25 bp, SARS Virus
caaacgaaagacgtgtattagaacg

SEQ ID NO: 14105 - DNA, 25 bp, SARS Virus
aaacgaaagaccggtattagaacga

SEQ ID NO: 14106 - DNA, 25 bp, SARS Virus
aacgaaagacctgtattagaacgat

SEQ ID NO: 14107 - DNA, 25 bp, SARS Virus
acgaaagacctggattagaacgatt

SEQ ID NO: 14108 - DNA, 25 bp, SARS Virus
cgaaagacctgtgttagaacgattc

SEQ ID NO: 14109 - DNA, 25 bp, SARS Virus
gaaagacctgtagtagaacgattct

SEQ ID NO: 14110 - DNA, 25 bp, SARS Virus
aaagacctgtatgagaacgattctt

SEQ ID NO: 14111 - DNA, 25 bp, SARS Virus
aagacctgtattggaacgattcttc

SEQ ID NO: 14112 - DNA, 25 bp, SARS Virus
agacctgtattagaacgattcttca

SEQ ID NO: 14113 - DNA, 25 bp, SARS Virus
gacctgtattaggacgattcttcac

SEQ ID NO: 14114 - DNA, 25 bp, SARS Virus
acctgtattagagcgattcttcaca

SEQ ID NO: 14115 - DNA, 25 bp, SARS Virus
cctgtattagaaggattcttcacag

SEQ ID NO: 14116 - DNA, 25 bp, SARS Virus
ctgtattagaacgattcttcacaga

SEQ ID NO: 14117 - DNA, 25 bp, SARS Virus
tgtattagaacggttcttcacagac

SEQ ID NO: 14118 - DNA, 25 bp, SARS Virus
gtattagaacgagtcttcacagacg

SEQ ID NO: 14119 - DNA, 25 bp, SARS Virus
tattagaacgatgcttcacagacgt

SEQ ID NO: 14120 - DNA, 25 bp, SARS Virus
attagaacgattgttcacagacgta

SEQ ID NO: 14121 - DNA, 25 bp, SARS Virus
ttagaacgattcgtcacagacgtac

SEQ ID NO: 14122 - DNA, 25 bp, SARS Virus
tagaacgattctgcacagacgtaca

SEQ ID NO: 14123 - DNA, 25 bp, SARS Virus
agaacgattcttgacagacgtacaa

SEQ ID NO: 14124 - DNA, 25 bp, SARS Virus
gaacgattcttcgcagacgtacaac

SEQ ID NO: 14125 - DNA, 25 bp, SARS Virus
aacgattcttcagagacgtacaaca

SEQ ID NO: 14126 - DNA, 25 bp, SARS Virus
acgattcttcacggacgtacaacaa

SEQ ID NO: 14127 - DNA, 25 bp, SARS Virus
cgattcttcacagacgtacaacaac

SEQ ID NO: 14128 - DNA, 25 bp, SARS Virus
gattcttcacaggcgtacaacaacc

SEQ ID NO: 14129 - DNA, 25 bp, SARS Virus
attcttcacagaggtacaacaacct

SEQ ID NO: 14130 - DNA, 25 bp, SARS Virus
ttcttcacagacgtacaacaacctg

SEQ ID NO: 14131 - DNA, 25 bp, SARS Virus
tcttcacagacggacaacaacctgg

SEQ ID NO: 14132 - DNA, 25 bp, SARS Virus
cttcacagacgtgcaacaacctgga

SEQ ID NO: 14133 - DNA, 25 bp, SARS Virus
ttcacagacgtagaacaacctggat

SEQ ID NO: 14134 - DNA, 25 bp, SARS Virus
tcacagacgtacgacaacctggatt

SEQ ID NO: 14135 - DNA, 25 bp, SARS Virus
cacagacgtacagcaacctggattg

SEQ ID NO: 14136 - DNA, 25 bp, SARS Virus
acagacgtacaagaacctggattgg

SEQ ID NO: 14137 - DNA, 25 bp, SARS Virus
cagacgtacaacgacctggattgga

SEQ ID NO: 14138 - DNA, 25 bp, SARS Virus
agacgtacaacagcctggattggat

SEQ ID NO: 14139 - DNA, 25 bp, SARS Virus
gacgtacaacaagctggattggatt

SEQ ID NO: 14140 - DNA, 25 bp, SARS Virus
acgtacaacaacgtggattggattt

SEQ ID NO: 14141 - DNA, 25 bp, SARS Virus
cgtacaacaaccgggattggattta

SEQ ID NO: 14142 - DNA, 25 bp, SARS Virus
gtacaacaacctggattggatttac

SEQ ID NO: 14143 - DNA, 25 bp, SARS Virus
tacaacaacctggattggatttacg

SEQ ID NO: 14144 - DNA, 25 bp, SARS Virus
acaacaacctgggttggatttacgt

SEQ ID NO: 14145 - DNA, 25 bp, SARS Virus
caacaacctggagtggatttacgtc

SEQ ID NO: 14146 - DNA, 25 bp, SARS Virus
aacaacctggatgggatttacgtcc

SEQ ID NO: 14147 - DNA, 25 bp, SARS Virus
acaacctggattggatttacgtcca

SEQ ID NO: 14148 - DNA, 25 bp, SARS Virus
caacctggattggatttacgtccac

SEQ ID NO: 14149 - DNA, 25 bp, SARS Virus
aacctggattgggtttacgtccact

SEQ ID NO: 14150 - DNA, 25 bp, SARS Virus
acctggattggagttacgtccactc

SEQ ID NO: 14151 - DNA, 25 bp, SARS Virus
cctggattggatgtacgtccactcc

SEQ ID NO: 14152 - DNA, 25 bp, SARS Virus
ctggattggattgacgtccactcct

SEQ ID NO: 14153 - DNA, 25 bp, SARS Virus
tggattggatttgcgtccactcctg

SEQ ID NO: 14154 - DNA, 25 bp, SARS Virus
ggattggatttaggtccactcctgt

SEQ ID NO: 14155 - DNA, 25 bp, SARS Virus
gattggatttacgtccactcctgta

SEQ ID NO: 14156 - DNA, 25 bp, SARS Virus
attggatttacggccactcctgtag

SEQ ID NO: 14157 - DNA, 25 bp, SARS Virus
ttggatttacgtgcactcctgtagg

SEQ ID NO: 14158 - DNA, 25 bp, SARS Virus
tggatttacgtcgactcctgtaggt

SEQ ID NO: 14159 - DNA, 25 bp, SARS Virus
ggatttacgtccgctcctgtaggtc

SEQ ID NO: 14160 - DNA, 25 bp, SARS Virus
gatttacgtccagtcctgtaggtcg

SEQ ID NO: 14161 - DNA, 25 bp, SARS Virus
atttacgtccacgcctgtaggtcga

SEQ ID NO: 14162 - DNA, 25 bp, SARS Virus
tttacgtccactgctgtaggtcgaa

SEQ ID NO: 14163 - DNA, 25 bp, SARS Virus
ttacgtccactcgtgtaggtcgaag

SEQ ID NO: 14164 - DNA, 25 bp, SARS Virus
tacgtccactccggtaggtcgaaga

SEQ ID NO: 14165 - DNA, 25 bp, SARS Virus
acgtccactcctgtaggtcgaagaa

SEQ ID NO: 14166 - DNA, 25 bp, SARS Virus
cgtccactcctggaggtcgaagaat

SEQ ID NO: 14167 - DNA, 25 bp, SARS Virus
gtccactcctgtgggtcgaagaatt

SEQ ID NO: 14168 - DNA, 25 bp, SARS Virus
tccactcctgtaggtcgaagaattc

SEQ ID NO: 14169 - DNA, 25 bp, SARS Virus
ccactcctgtaggtcgaagaattcc

SEQ ID NO: 14170 - DNA, 25 bp, SARS Virus
cactcctgtagggcgaagaattccg

SEQ ID NO: 14171 - DNA, 25 bp, SARS Virus
actcctgtaggtggaagaattccgt

SEQ ID NO: 14172 - DNA, 25 bp, SARS Virus
ctcctgtaggtcgaagaattccgtc

SEQ ID NO: 14173 - DNA, 25 bp, SARS Virus
tcctgtaggtcggagaattccgtcg

SEQ ID NO: 14174 - DNA, 25 bp, SARS Virus
cctgtaggtcgaggaattccgtcgt

SEQ ID NO: 14175 - DNA, 25 bp, SARS Virus
ctgtaggtcgaagaattccgtcgta

SEQ ID NO: 14176 - DNA, 25 bp, SARS Virus
tgtaggtcgaaggattccgtcgtat

SEQ ID NO: 14177 - DNA, 25 bp, SARS Virus
gtaggtcgaagagttccgtcgtata

SEQ ID NO: 14178 - DNA, 25 bp, SARS Virus
taggtcgaagaagtccgtcgtatac

SEQ ID NO: 14179 - DNA, 25 bp, SARS Virus
aggtcgaagaatgccgtcgtatact

SEQ ID NO: 14180 - DNA, 25 bp, SARS Virus
ggtcgaagaattgcgtcgtatactt

SEQ ID NO: 14181 - DNA, 25 bp, SARS Virus
gtcgaagaattcggtcgtatacttt

SEQ ID NO: 14182 - DNA, 25 bp, SARS Virus
tcgaagaattccgtcgtatactttt

SEQ ID NO: 14183 - DNA, 25 bp, SARS Virus
cgaagaattccggcgtatactttta

SEQ ID NO: 14184 - DNA, 25 bp, SARS Virus
gaagaattccgtggtatacttttaa

SEQ ID NO: 14185 - DNA, 25 bp, SARS Virus
aagaattccgtcgtatacttttaaa

SEQ ID NO: 14186 - DNA, 25 bp, SARS Virus
agaattccgtcggatacttttaaag

SEQ ID NO: 14187 - DNA, 25 bp, SARS Virus
gaattccgtcgtgtacttttaaagt

SEQ ID NO: 14188 - DNA, 25 bp, SARS Virus
aattccgtcgtagacttttaaagtt

SEQ ID NO: 14189 - DNA, 25 bp, SARS Virus
attccgtcgtatgcttttaaagtta

SEQ ID NO: 14190 - DNA, 25 bp, SARS Virus
ttccgtcgtatagttttaaagttaa

SEQ ID NO: 14191 - DNA, 25 bp, SARS Virus
tccgtcgtatacgtttaaagttaag

SEQ ID NO: 14192 - DNA, 25 bp, SARS Virus
ccgtcgtatactgttaaagttaagt

SEQ ID NO: 14193 - DNA, 25 bp, SARS Virus
cgtcgtatacttgtaaagttaagtg

SEQ ID NO: 14194 - DNA, 25 bp, SARS Virus
gtcgtatactttgaaagttaagtgt

SEQ ID NO: 14195 - DNA, 25 bp, SARS Virus
tcgtatacttttgaagttaagtgtc

SEQ ID NO: 14196 - DNA, 25 bp, SARS Virus
cgtatacttttagagttaagtgtcc

SEQ ID NO: 14197 - DNA, 25 bp, SARS Virus
gtatacttttaaggttaagtgtcct

SEQ ID NO: 14198 - DNA, 25 bp, SARS Virus
tatacttttaaagttaagtgtcctg

SEQ ID NO: 14199 - DNA, 25 bp, SARS Virus
atacttttaaaggtaagtgtcctgt

SEQ ID NO: 14200 - DNA, 25 bp, SARS Virus
tacttttaaagtgaagtgtcctgta

SEQ ID NO: 14201 - DNA, 25 bp, SARS Virus
acttttaaagttgagtgtcctgtag

SEQ ID NO: 14202 - DNA, 25 bp, SARS Virus
cttttaaagttaggtgtcctgtaga

SEQ ID NO: 14203 - DNA, 25 bp, SARS Virus
ttttaaagttaagtgtcctgtagaa

SEQ ID NO: 14204 - DNA, 25 bp, SARS Virus
tttaaagttaagggtcctgtagaat

SEQ ID NO: 14205 - DNA, 25 bp, SARS Virus
ttaaagttaagtgtcctgtagaatg

SEQ ID NO: 14206 - DNA, 25 bp, SARS Virus
taaagttaagtggcctgtagaatga

SEQ ID NO: 14207 - DNA, 25 bp, SARS Virus
aaagttaagtgtgctgtagaatgaa

SEQ ID NO: 14208 - DNA, 25 bp, SARS Virus
aagttaagtgtcgtgtagaatgaac

SEQ ID NO: 14209 - DNA, 25 bp, SARS Virus
agttaagtgtccggtagaatgaacg

SEQ ID NO: 14210 - DNA, 25 bp, SARS Virus
gttaagtgtcctgtagaatgaacgt

SEQ ID NO: 14211 - DNA, 25 bp, SARS Virus
ttaagtgtcctggagaatgaacgtg

SEQ ID NO: 14212 - DNA, 25 bp, SARS Virus
taagtgtcctgtggaatgaacgtgg

SEQ ID NO: 14213 - DNA, 25 bp, SARS Virus
aagtgtcctgtagaatgaacgtggt

SEQ ID NO: 14214 - DNA, 25 bp, SARS Virus
agtgtcctgtaggatgaacgtggta

SEQ ID NO: 14215 - DNA, 25 bp, SARS Virus
gtgtcctgtagagtgaacgtggtaa

SEQ ID NO: 14216 - DNA, 25 bp, SARS Virus
tgtcctgtagaaggaacgtggtaac

SEQ ID NO: 14217 - DNA, 25 bp, SARS Virus
gtcctgtagaatgaacgtggtaaca

SEQ ID NO: 14218 - DNA, 25 bp, SARS Virus
tcctgtagaatggacgtggtaacaa

SEQ ID NO: 14219 - DNA, 25 bp, SARS Virus
cctgtagaatgagcgtggtaacaac

SEQ ID NO: 14220 - DNA, 25 bp, SARS Virus
ctgtagaatgaaggtggtaacaaca

SEQ ID NO: 14221 - DNA, 25 bp, SARS Virus
tgtagaatgaacgtggtaacaacag

SEQ ID NO: 14222 - DNA, 25 bp, SARS Virus
gtagaatgaacggggtaacaacagt

SEQ ID NO: 14223 - DNA, 25 bp, SARS Virus
tagaatgaacgtggtaacaacagtc

SEQ ID NO: 14224 - DNA, 25 bp, SARS Virus
agaatgaacgtggtaacaacagtcg

SEQ ID NO: 14225 - DNA, 25 bp, SARS Virus
gaatgaacgtgggaacaacagtcgt

SEQ ID NO: 14226 - DNA, 25 bp, SARS Virus
aatgaacgtggtgacaacagtcgtc

SEQ ID NO: 14227 - DNA, 25 bp, SARS Virus
atgaacgtggtagcaacagtcgtcc

SEQ ID NO: 14228 - DNA, 25 bp, SARS Virus
tgaacgtggtaagaacagtcgtccg

SEQ ID NO: 14229 - DNA, 25 bp, SARS Virus
gaacgtggtaacgacagtcgtccgt

SEQ ID NO: 14230 - DNA, 25 bp, SARS Virus
aacgtggtaacagcagtcgtccgta

SEQ ID NO: 14231 - DNA, 25 bp, SARS Virus
acgtggtaacaagagtcgtccgtat

SEQ ID NO: 14232 - DNA, 25 bp, SARS Virus
cgtggtaacaacggtcgtccgtata

SEQ ID NO: 14233 - DNA, 25 bp, SARS Virus
gtggtaacaacagtcgtccgtataa

SEQ ID NO: 14234 - DNA, 25 bp, SARS Virus
tggtaacaacaggcgtccgtataaa

SEQ ID NO: 14235 - DNA, 25 bp, SARS Virus
ggtaacaacagtggtccgtataaac

SEQ ID NO: 14236 - DNA, 25 bp, SARS Virus
gtaacaacagtcgtccgtataaacc

SEQ ID NO: 14237 - DNA, 25 bp, SARS Virus
taacaacagtcggccgtataaacca

SEQ ID NO: 14238 - DNA, 25 bp, SARS Virus
aacaacagtcgtgcgtataaaccac

SEQ ID NO: 14239 - DNA, 25 bp, SARS Virus
acaacagtcgtcggtataaaccacg

SEQ ID NO: 14240 - DNA, 25 bp, SARS Virus
caacagtcgtccgtataaaccacga

SEQ ID NO: 14241 - DNA, 25 bp, SARS Virus
aacagtcgtccggataaaccacgat

SEQ ID NO: 14242 - DNA, 25 bp, SARS Virus
acagtcgtccgtgtaaaccacgatt

SEQ ID NO: 14243 - DNA, 25 bp, SARS Virus
cagtcgtccgtagaaaccacgattt

SEQ ID NO: 14244 - DNA, 25 bp, SARS Virus
agtcgtccgtatgaaccacgatttg

SEQ ID NO: 14245 - DNA, 25 bp, SARS Virus
gtcgtccgtatagaccacgatttgg

SEQ ID NO: 14246 - DNA, 25 bp, SARS Virus
tcgtccgtataagccacgatttggt

SEQ ID NO: 14247 - DNA, 25 bp, SARS Virus
cgtccgtataaagcacgatttggtg

SEQ ID NO: 14248 - DNA, 25 bp, SARS Virus
gtccgtataaacgacgatttggtga

SEQ ID NO: 14249 - DNA, 25 bp, SARS Virus
tccgtataaaccgcgatttggtgaa

SEQ ID NO: 14250 - DNA, 25 bp, SARS Virus
ccgtataaaccaggatttggtgaag

SEQ ID NO: 14251 - DNA, 25 bp, SARS Virus
cgtataaaccacgatttggtgaagt

SEQ ID NO: 14252 - DNA, 25 bp, SARS Virus
gtataaaccacggtttggtgaagtc

SEQ ID NO: 14253 - DNA, 25 bp, SARS Virus
tataaaccacgagttggtgaagtca

SEQ ID NO: 14254 - DNA, 25 bp, SARS Virus
ataaaccacgatgtggtgaagtcag

SEQ ID NO: 14255 - DNA, 25 bp, SARS Virus
taaaccacgattgggtgaagtcaga

SEQ ID NO: 14256 - DNA, 25 bp, SARS Virus
aaaccacgatttggtgaagtcagaa

SEQ ID NO: 14257 - DNA, 25 bp, SARS Virus
aaccacgatttggtgaagtcagaaa

SEQ ID NO: 14258 - DNA, 25 bp, SARS Virus
accacgatttggggaagtcagaaat

SEQ ID NO: 14259 - DNA, 25 bp, SARS Virus
ccacgatttggtgaagtcagaaatg

SEQ ID NO: 14260 - DNA, 25 bp, SARS Virus
cacgatttggtggagtcagaaatgt

SEQ ID NO: 14261 - DNA, 25 bp, SARS Virus
acgatttggtgaggtcagaaatgtt

SEQ ID NO: 14262 - DNA, 25 bp, SARS Virus
cgatttggtgaagtcagaaatgttc

SEQ ID NO: 14263 - DNA, 25 bp, SARS Virus
gatttggtgaaggcagaaatgttca

SEQ ID NO: 14264 - DNA, 25 bp, SARS Virus
atttggtgaagtgagaaatgttcac

SEQ ID NO: 14265 - DNA, 25 bp, SARS Virus
tttggtgaagtcggaaatgttcaca

SEQ ID NO: 14266 - DNA, 25 bp, SARS Virus
ttggtgaagtcagaaatgttcacac

SEQ ID NO: 14267 - DNA, 25 bp, SARS Virus
tggtgaagtcaggaatgttcacacg

SEQ ID NO: 14268 - DNA, 25 bp, SARS Virus
ggtgaagtcagagatgttcacacgc

SEQ ID NO: 14269 - DNA, 25 bp, SARS Virus
gtgaagtcagaagtgttcacacgca

SEQ ID NO: 14270 - DNA, 25 bp, SARS Virus
tgaagtcagaaaggttcacacgcac

SEQ ID NO: 14271 - DNA, 25 bp, SARS Virus
gaagtcagaaatgttcacacgcacg

SEQ ID NO: 14272 - DNA, 25 bp, SARS Virus
aagtcagaaatggtcacacgcacgt

SEQ ID NO: 14273 - DNA, 25 bp, SARS Virus
agtcagaaatgtgcacacgcacgtc

SEQ ID NO: 14274 - DNA, 25 bp, SARS Virus
gtcagaaatgttgacacgcacgtct

SEQ ID NO: 14275 - DNA, 25 bp, SARS Virus
tcagaaatgttcgcacgcacgtctg

SEQ ID NO: 14276 - DNA, 25 bp, SARS Virus
cagaaatgttcagacgcacgtctgc

SEQ ID NO: 14277 - DNA, 25 bp, SARS Virus
agaaatgttcacgcgcacgtctgcc

SEQ ID NO: 14278 - DNA, 25 bp, SARS Virus
gaaatgttcacaggcacgtctgcca

SEQ ID NO: 14279 - DNA, 25 bp, SARS Virus
aaatgttcacacgcacgtctgccaa

SEQ ID NO: 14280 - DNA, 25 bp, SARS Virus
aatgttcacacggacgtctgccaag

SEQ ID NO: 14281 - DNA, 25 bp, SARS Virus
tctccttctgactgacctactatga

SEQ ID NO: 14282 - DNA, 25 bp, SARS Virus
ctccttctgacctacctactatgat

SEQ ID NO: 14283 - DNA, 25 bp, SARS Virus
tccttctgaccgtcctactatgatg

SEQ ID NO: 14284 - DNA, 25 bp, SARS Virus
ccttctgaccgatctactatgatga

SEQ ID NO: 14285 - DNA, 25 bp, SARS Virus
cttctgaccgacttactatgatgac

SEQ ID NO: 14286 - DNA, 25 bp, SARS Virus
ttctgaccgacctactatgatgact

SEQ ID NO: 14287 - DNA, 25 bp, SARS Virus
tctgaccgaccttctatgatgactc

SEQ ID NO: 14288 - DNA, 25 bp, SARS Virus
ctgaccgacctattatgatgactcg

SEQ ID NO: 14289 - DNA, 25 bp, SARS Virus
tgaccgacctactatgatgactcgt

SEQ ID NO: 14290 - DNA, 25 bp, SARS Virus
gaccgacctactttgatgactcgtt

SEQ ID NO: 14291 - DNA, 25 bp, SARS Virus
accgacctactatgatgactcgtta

SEQ ID NO: 14292 - DNA, 25 bp, SARS Virus
ccgacctactattatgactcgttag

SEQ ID NO: 14293 - DNA, 25 bp, SARS Virus
cgacctactatgttgactcgttagt

SEQ ID NO: 14294 - DNA, 25 bp, SARS Virus
gacctactatgatgactcgttagtc

SEQ ID NO: 14295 - DNA, 25 bp, SARS Virus
acctactatgattactcgttagtct

SEQ ID NO: 14296 - DNA, 25 bp, SARS Virus
cctactatgatgtctcgttagtctc

SEQ ID NO: 14297 - DNA, 25 bp, SARS Virus
ctactatgatgattcgttagtctct

SEQ ID NO: 14298 - DNA, 25 bp, SARS Virus
tactatgatgactcgttagtctcta

SEQ ID NO: 14299 - DNA, 25 bp, SARS Virus
actatgatgacttgttagtctctaa

SEQ ID NO: 14300 - DNA, 25 bp, SARS Virus
ctatgatgactctttagtctctaac

SEQ ID NO: 14301 - DNA, 25 bp, SARS Virus
tatgatgactcgttagtctctaact

SEQ ID NO: 14302 - DNA, 25 bp, SARS Virus
atgatgactcgttagtctctaactc

SEQ ID NO: 14303 - DNA, 25 bp, SARS Virus
tgatgactcgtttgtctctaactcg

SEQ ID NO: 14304 - DNA, 25 bp, SARS Virus
gatgactcgttattctctaactcgg

SEQ ID NO: 14305 - DNA, 25 bp, SARS Virus
atgactcgttagtctctaactcggt

SEQ ID NO: 14306 - DNA, 25 bp, SARS Virus
tgactcgttagtttctaactcggtc

SEQ ID NO: 14307 - DNA, 25 bp, SARS Virus
gactcgttagtctctaactcggtct

SEQ ID NO: 14308 - DNA, 25 bp, SARS Virus
actcgttagtctttaactcggtctt

SEQ ID NO: 14309 - DNA, 25 bp, SARS Virus
ctcgttagtctctaactcggtcttg

SEQ ID NO: 14310 - DNA, 25 bp, SARS Virus
tcgttagtctcttactcggtcttgg

SEQ ID NO: 14311 - DNA, 25 bp, SARS Virus
cgttagtctctatctcggtcttggt

SEQ ID NO: 14312 - DNA, 25 bp, SARS Virus
gttagtctctaattcggtcttggtc

SEQ ID NO: 14313 - DNA, 25 bp, SARS Virus
ttagtctctaactcggtcttggtct

SEQ ID NO: 14314 - DNA, 25 bp, SARS Virus
tagtctctaacttggtcttggtctt

SEQ ID NO: 14315 - DNA, 25 bp, SARS Virus
agtctctaactctgtcttggtcttg

SEQ ID NO: 14316 - DNA, 25 bp, SARS Virus
gtctctaactcgttcttggtcttgg

SEQ ID NO: 14317 - DNA, 25 bp, SARS Virus
tctctaactcggtcttggtcttgga

SEQ ID NO: 14318 - DNA, 25 bp, SARS Virus
ctctaactcggttttggtcttggat

SEQ ID NO: 14319 - DNA, 25 bp, SARS Virus
tctaactcggtcttggtcttggatg

SEQ ID NO: 14320 - DNA, 25 bp, SARS Virus
ctaactcggtcttggtcttggatgt

SEQ ID NO: 14321 - DNA, 25 bp, SARS Virus
taactcggtctttgtcttggatgtg

SEQ ID NO: 14322 - DNA, 25 bp, SARS Virus
aactcggtcttgttcttggatgtgg

SEQ ID NO: 14323 - DNA, 25 bp, SARS Virus
actcggtcttggtcttggatgtgga

SEQ ID NO: 14324 - DNA, 25 bp, SARS Virus
ctcggtcttggttttggatgtggac

SEQ ID NO: 14325 - DNA, 25 bp, SARS Virus
tcggtcttggtcttggatgtggact

SEQ ID NO: 14326 - DNA, 25 bp, SARS Virus
cggtcttggtcttggatgtggactt

SEQ ID NO: 14327 - DNA, 25 bp, SARS Virus
ggtcttggtctttgatgtggacttc

SEQ ID NO: 14328 - DNA, 25 bp, SARS Virus
gtcttggtcttgtatgtggacttct

SEQ ID NO: 14329 - DNA, 25 bp, SARS Virus
tcttggtcttggttgtggacttctt

SEQ ID NO: 14330 - DNA, 25 bp, SARS Virus
cttggtcttggatgtggacttcttg

SEQ ID NO: 14331 - DNA, 25 bp, SARS Virus
ttggtcttggatttggacttcttgg

SEQ ID NO: 14332 - DNA, 25 bp, SARS Virus
tggtcttggatgtggacttcttggt

SEQ ID NO: 14333 - DNA, 25 bp, SARS Virus
ggtcttggatgttgacttcttggtc

SEQ ID NO: 14334 - DNA, 25 bp, SARS Virus
gtcttggatgtgtacttcttggtca

SEQ ID NO: 14335 - DNA, 25 bp, SARS Virus
tcttggatgtggtcttcttggtcaa

SEQ ID NO: 14336 - DNA, 25 bp, SARS Virus
cttggatgtggatttcttggtcaat

SEQ ID NO: 14337 - DNA, 25 bp, SARS Virus
ttggatgtggacttcttggtcaatt

SEQ ID NO: 14338 - DNA, 25 bp, SARS Virus
tggatgtggacttcttggtcaatta

SEQ ID NO: 14339 - DNA, 25 bp, SARS Virus
ggatgtggactttttggtcaattag

SEQ ID NO: 14340 - DNA, 25 bp, SARS Virus
gatgtggacttcttggtcaattagt

SEQ ID NO: 14341 - DNA, 25 bp, SARS Virus
atgtggacttcttggtcaattagtc

SEQ ID NO: 14342 - DNA, 25 bp, SARS Virus
tgtggacttctttgtcaattagtca

SEQ ID NO: 14343 - DNA, 25 bp, SARS Virus
gtggacttcttgttcaattagtcaa

SEQ ID NO: 14344 - DNA, 25 bp, SARS Virus
tggacttcttggtcaattagtcaaa

SEQ ID NO: 14345 - DNA, 25 bp, SARS Virus
ggacttcttggttaattagtcaaat

SEQ ID NO: 14346 - DNA, 25 bp, SARS Virus
gacttcttggtctattagtcaaatg

SEQ ID NO: 14347 - DNA, 25 bp, SARS Virus
acttcttggtcatttagtcaaatga

SEQ ID NO: 14348 - DNA, 25 bp, SARS Virus
cttcttggtcaattagtcaaatgac

SEQ ID NO: 14349 - DNA, 25 bp, SARS Virus
ttcttggtcaattagtcaaatgacc

SEQ ID NO: 14350 - DNA, 25 bp, SARS Virus
tcttggtcaatttgtcaaatgacca

SEQ ID NO: 14351 - DNA, 25 bp, SARS Virus
cttggtcaattattcaaatgaccaa

SEQ ID NO: 14352 - DNA, 25 bp, SARS Virus
ttggtcaattagtcaaatgaccaat

SEQ ID NO: 14353 - DNA, 25 bp, SARS Virus
tggtcaattagttaaatgaccaata

SEQ ID NO: 14354 - DNA, 25 bp, SARS Virus
ggtcaattagtctaatgaccaataa

SEQ ID NO: 14355 - DNA, 25 bp, SARS Virus
gtcaattagtcatatgaccaataaa

SEQ ID NO: 14356 - DNA, 25 bp, SARS Virus
tcaattagtcaattgaccaataaat

SEQ ID NO: 14357 - DNA, 25 bp, SARS Virus
caattagtcaaatgaccaataaatt

SEQ ID NO: 14358 - DNA, 25 bp, SARS Virus
aattagtcaaattaccaataaattt

SEQ ID NO: 14359 - DNA, 25 bp, SARS Virus
attagtcaaatgtccaataaatttt

SEQ ID NO: 14360 - DNA, 25 bp, SARS Virus
ttagtcaaatgatcaataaattttg

SEQ ID NO: 14361 - DNA, 25 bp, SARS Virus
tagtcaaatgactaataaattttga

SEQ ID NO: 14362 - DNA, 25 bp, SARS Virus
agtcaaatgacctataaattttgaa

SEQ ID NO: 14363 - DNA, 25 bp, SARS Virus
gtcaaatgaccattaaattttgaat

SEQ ID NO: 14364 - DNA, 25 bp, SARS Virus
tcaaatgaccaataaattttgaatg

SEQ ID NO: 14365 - DNA, 25 bp, SARS Virus
caaatgaccaattaattttgaatga

SEQ ID NO: 14366 - DNA, 25 bp, SARS Virus
aaatgaccaatatattttgaatgac

SEQ ID NO: 14367 - DNA, 25 bp, SARS Virus
aatgaccaataatttttgaatgact

SEQ ID NO: 14368 - DNA, 25 bp, SARS Virus
atgaccaataaattttgaatgactg

SEQ ID NO: 14369 - DNA, 25 bp, SARS Virus
tgaccaataaattttgaatgactgt

SEQ ID NO: 14370 - DNA, 25 bp, SARS Virus
gaccaataaattttgaatgactgtt

SEQ ID NO: 14371 - DNA, 25 bp, SARS Virus
accaataaattttgaatgactgtta

SEQ ID NO: 14372 - DNA, 25 bp, SARS Virus
ccaataaatttttaatgactgttac

SEQ ID NO: 14373 - DNA, 25 bp, SARS Virus
caataaattttgtatgactgttaca

SEQ ID NO: 14374 - DNA, 25 bp, SARS Virus
aataaattttgattgactgttacaa

SEQ ID NO: 14375 - DNA, 25 bp, SARS Virus
ataaattttgaatgactgttacaac

SEQ ID NO: 14376 - DNA, 25 bp, SARS Virus
taaattttgaattactgttacaacg

SEQ ID NO: 14377 - DNA, 25 bp, SARS Virus
aaattttgaatgtctgttacaacgg

SEQ ID NO: 14378 - DNA, 25 bp, SARS Virus
aattttgaatgattgttacaacggt

SEQ ID NO: 14379 - DNA, 25 bp, SARS Virus
attttgaatgactgttacaacggta

SEQ ID NO: 14380 - DNA, 25 bp, SARS Virus
ttttgaatgacttttacaacggtaa

SEQ ID NO: 14381 - DNA, 25 bp, SARS Virus
tttgaatgactgttacaacggtaat

SEQ ID NO: 14382 - DNA, 25 bp, SARS Virus
ttgaatgactgttacaacggtaatt

SEQ ID NO: 14383 - DNA, 25 bp, SARS Virus
tgaatgactgtttcaacggtaattt

SEQ ID NO: 14384 - DNA, 25 bp, SARS Virus
gaatgactgttataacggtaattta

SEQ ID NO: 14385 - DNA, 25 bp, SARS Virus
aatgactgttactacggtaatttac

SEQ ID NO: 14386 - DNA, 25 bp, SARS Virus
atgactgttacatcggtaatttaca

SEQ ID NO: 14387 - DNA, 25 bp, SARS Virus
tgactgttacaatggtaatttacac

SEQ ID NO: 14388 - DNA, 25 bp, SARS Virus
gactgttacaactgtaatttacaca

SEQ ID NO: 14389 - DNA, 25 bp, SARS Virus
actgttacaacgttaatttacacaa

SEQ ID NO: 14390 - DNA, 25 bp, SARS Virus
ctgttacaacggtaatttacacaac

SEQ ID NO: 14391 - DNA, 25 bp, SARS Virus
tgttacaacggttatttacacaact

SEQ ID NO: 14392 - DNA, 25 bp, SARS Virus
gttacaacggtattttacacaactg

SEQ ID NO: 14393 - DNA, 25 bp, SARS Virus
ttacaacggtaatttacacaactgt

SEQ ID NO: 14394 - DNA, 25 bp, SARS Virus
tacaacggtaatttacacaactgta

SEQ ID NO: 14395 - DNA, 25 bp, SARS Virus
acaacggtaatttacacaactgtag

SEQ ID NO: 14396 - DNA, 25 bp, SARS Virus
caacggtaattttcacaactgtagc

SEQ ID NO: 14397 - DNA, 25 bp, SARS Virus
aacggtaatttatacaactgtagca

SEQ ID NO: 14398 - DNA, 25 bp, SARS Virus
acggtaatttactcaactgtagcaa

SEQ ID NO: 14399 - DNA, 25 bp, SARS Virus
cggtaatttacataactgtagcaat

SEQ ID NO: 14400 - DNA, 25 bp, SARS Virus
ggtaatttacactactgtagcaatt

SEQ ID NO: 14401 - DNA, 25 bp, SARS Virus
gtaatttacacatctgtagcaattc

SEQ ID NO: 14402 - DNA, 25 bp, SARS Virus
taatttacacaattgtagcaattcc

SEQ ID NO: 14403 - DNA, 25 bp, SARS Virus
aatttacacaactgtagcaattcct

SEQ ID NO: 14404 - DNA, 25 bp, SARS Virus
atttacacaactttagcaattcctc

SEQ ID NO: 14405 - DNA, 25 bp, SARS Virus
tttacacaactgtagcaattcctcc

SEQ ID NO: 14406 - DNA, 25 bp, SARS Virus
ttacacaactgttgcaattcctccg

SEQ ID NO: 14407 - DNA, 25 bp, SARS Virus
tacacaactgtatcaattcctccgt

SEQ ID NO: 14408 - DNA, 25 bp, SARS Virus
acacaactgtagtaattcctccgtg

SEQ ID NO: 14409 - DNA, 25 bp, SARS Virus
cacaactgtagctattcctccgtgt

SEQ ID NO: 14410 - DNA, 25 bp, SARS Virus
acaactgtagcatttcctccgtgtt

SEQ ID NO: 14411 - DNA, 25 bp, SARS Virus
caactgtagcaattcctccgtgttt

SEQ ID NO: 14412 - DNA, 25 bp, SARS Virus
aactgtagcaattcctccgtgtttc

SEQ ID NO: 14413 - DNA, 25 bp, SARS Virus
actgtagcaatttctccgtgtttca

SEQ ID NO: 14414 - DNA, 25 bp, SARS Virus
ctgtagcaattcttccgtgtttcac

SEQ ID NO: 14415 - DNA, 25 bp, SARS Virus
tgtagcaattcctccgtgtttcacg

SEQ ID NO: 14416 - DNA, 25 bp, SARS Virus
gtagcaattccttcgtgtttcacga

SEQ ID NO: 14417 - DNA, 25 bp, SARS Virus
tagcaattcctctgtgtttcacgat

SEQ ID NO: 14418 - DNA, 25 bp, SARS Virus
agcaattcctccttgtttcacgatt

SEQ ID NO: 14419 - DNA, 25 bp, SARS Virus
gcaattcctccgtgtttcacgatta

SEQ ID NO: 14420 - DNA, 25 bp, SARS Virus
caattcctccgtttttcacgattag

SEQ ID NO: 14421 - DNA, 25 bp, SARS Virus
aattcctccgtgtttcacgattagg

SEQ ID NO: 14422 - DNA, 25 bp, SARS Virus
attcctccgtgtttcacgattagga

SEQ ID NO: 14423 - DNA, 25 bp, SARS Virus
ttcctccgtgtttcacgattaggat

SEQ ID NO: 14424 - DNA, 25 bp, SARS Virus
tcctccgtgttttacgattaggata

SEQ ID NO: 14425 - DNA, 25 bp, SARS Virus
cctccgtgtttctcgattaggatac

SEQ ID NO: 14426 - DNA, 25 bp, SARS Virus
ctccgtgtttcatgattaggatacc

SEQ ID NO: 14427 - DNA, 25 bp, SARS Virus
tccgtgtttcactattaggatacca

SEQ ID NO: 14428 - DNA, 25 bp, SARS Virus
ccgtgtttcacgtttaggataccac

SEQ ID NO: 14429 - DNA, 25 bp, SARS Virus
cgtgtttcacgattaggataccact

SEQ ID NO: 14430 - DNA, 25 bp, SARS Virus
gtgtttcacgattaggataccacta

SEQ ID NO: 14431 - DNA, 25 bp, SARS Virus
tgtttcacgatttggataccactaa

SEQ ID NO: 14432 - DNA, 25 bp, SARS Virus
gtttcacgattatgataccactaac

SEQ ID NO: 14433 - DNA, 25 bp, SARS Virus
tttcacgattagtataccactaaca

SEQ ID NO: 14434 - DNA, 25 bp, SARS Virus
ttcacgattaggttaccactaacat

SEQ ID NO: 14435 - DNA, 25 bp, SARS Virus
tcacgattaggataccactaacatt

SEQ ID NO: 14436 - DNA, 25 bp, SARS Virus
cacgattaggattccactaacattt

SEQ ID NO: 14437 - DNA, 25 bp, SARS Virus
acgattaggatatcactaacattta

SEQ ID NO: 14438 - DNA, 25 bp, SARS Virus
cgattaggatactactaacatttac

SEQ ID NO: 14439 - DNA, 25 bp, SARS Virus
gattaggatacctctaacatttacg

SEQ ID NO: 14440 - DNA, 25 bp, SARS Virus
attaggataccattaacatttacga

SEQ ID NO: 14441 - DNA, 25 bp, SARS Virus
ttaggataccactaacatttacgac

SEQ ID NO: 14442 - DNA, 25 bp, SARS Virus
taggataccacttacatttacgacg

SEQ ID NO: 14443 - DNA, 25 bp, SARS Virus
aggataccactatcatttacgacga

SEQ ID NO: 14444 - DNA, 25 bp, SARS Virus
ggataccactaatatttacgacgat

SEQ ID NO: 14445 - DNA, 25 bp, SARS Virus
gataccactaacttttacgacgatt

SEQ ID NO: 14446 - DNA, 25 bp, SARS Virus
ataccactaacatttacgacgattg

SEQ ID NO: 14447 - DNA, 25 bp, SARS Virus
taccactaacatttacgacgattgt

SEQ ID NO: 14448 - DNA, 25 bp, SARS Virus
accactaacatttacgacgattgta

SEQ ID NO: 14449 - DNA, 25 bp, SARS Virus
ccactaacattttcgacgattgtat

SEQ ID NO: 14450 - DNA, 25 bp, SARS Virus
cactaacatttatgacgattgtatg

SEQ ID NO: 14451 - DNA, 25 bp, SARS Virus
actaacatttactacgattgtatgt

SEQ ID NO: 14452 - DNA, 25 bp, SARS Virus
ctaacatttacgtcgattgtatgtg

SEQ ID NO: 14453 - DNA, 25 bp, SARS Virus
taacatttacgatgattgtatgtgg

SEQ ID NO: 14454 - DNA, 25 bp, SARS Virus
aacatttacgactattgtatgtgga

SEQ ID NO: 14455 - DNA, 25 bp, SARS Virus
acatttacgacgtttgtatgtggac

SEQ ID NO: 14456 - DNA, 25 bp, SARS Virus
catttacgacgattgtatgtggact

SEQ ID NO: 14457 - DNA, 25 bp, SARS Virus
atttacgacgattgtatgtggactt

SEQ ID NO: 14458 - DNA, 25 bp, SARS Virus
tttacgacgattttatgtggacttt

SEQ ID NO: 14459 - DNA, 25 bp, SARS Virus
ttacgacgattgtatgtggactttg

SEQ ID NO: 14460 - DNA, 25 bp, SARS Virus
tacgacgattgtttgtggactttgt

SEQ ID NO: 14461 - DNA, 25 bp, SARS Virus
acgacgattgtatgtggactttgta

SEQ ID NO: 14462 - DNA, 25 bp, SARS Virus
cgacgattgtatttggactttgtac

SEQ ID NO: 14463 - DNA, 25 bp, SARS Virus
gacgattgtatgtggactttgtacc

SEQ ID NO: 14464 - DNA, 25 bp, SARS Virus
acgattgtatgttgactttgtacca

SEQ ID NO: 14465 - DNA, 25 bp, SARS Virus
cgattgtatgtgtactttgtaccac

SEQ ID NO: 14466 - DNA, 25 bp, SARS Virus
gattgtatgtggtctttgtaccacc

SEQ ID NO: 14467 - DNA, 25 bp, SARS Virus
attgtatgtggattttgtaccacca

SEQ ID NO: 14468 - DNA, 25 bp, SARS Virus
ttgtatgtggactttgtaccaccac

SEQ ID NO: 14469 - DNA, 25 bp, SARS Virus
tgtatgtggactttgtaccaccacc

SEQ ID NO: 14470 - DNA, 25 bp, SARS Virus
gtatgtggactttgtaccaccacca

SEQ ID NO: 14471 - DNA, 25 bp, SARS Virus
tatgtggactttttaccaccaccac

SEQ ID NO: 14472 - DNA, 25 bp, SARS Virus
atgtggactttgtaccaccaccaca

SEQ ID NO: 14473 - DNA, 25 bp, SARS Virus
tgtggactttgttccaccaccacat

SEQ ID NO: 14474 - DNA, 25 bp, SARS Virus
gtggactttgtatcaccaccacatc

SEQ ID NO: 14475 - DNA, 25 bp, SARS Virus
tggactttgtactaccaccacatcg

SEQ ID NO: 14476 - DNA, 25 bp, SARS Virus
ggactttgtacctccaccacatcgt

SEQ ID NO: 14477 - DNA, 25 bp, SARS Virus
gactttgtaccatcaccacatcgtc

SEQ ID NO: 14478 - DNA, 25 bp, SARS Virus
actttgtaccactaccacatcgtcc

SEQ ID NO: 14479 - DNA, 25 bp, SARS Virus
ctttgtaccacctccacatcgtcca

SEQ ID NO: 14480 - DNA, 25 bp, SARS Virus
tttgtaccaccatcacatcgtccac

SEQ ID NO: 14481 - DNA, 25 bp, SARS Virus
ttgtaccaccactacatcgtccacg

SEQ ID NO: 14482 - DNA, 25 bp, SARS Virus
tgtaccaccacctcatcgtccacgt

SEQ ID NO: 14483 - DNA, 25 bp, SARS Virus
gtaccaccaccatatcgtccacgtg

SEQ ID NO: 14484 - DNA, 25 bp, SARS Virus
taccaccaccacttcgtccacgtga

SEQ ID NO: 14485 - DNA, 25 bp, SARS Virus
accaccaccacatcgtccacgtgag

SEQ ID NO: 14486 - DNA, 25 bp, SARS Virus
ccaccaccacattgtccacgtgagt

SEQ ID NO: 14487 - DNA, 25 bp, SARS Virus
caccaccacatcttccacgtgagtt

SEQ ID NO: 14488 - DNA, 25 bp, SARS Virus
accaccacatcgtccacgtgagttg

SEQ ID NO: 14489 - DNA, 25 bp, SARS Virus
ccaccacatcgttcacgtgagttgt

SEQ ID NO: 14490 - DNA, 25 bp, SARS Virus
caccacatcgtctacgtgagttgtt

SEQ ID NO: 14491 - DNA, 25 bp, SARS Virus
accacatcgtcctcgtgagttgttc

SEQ ID NO: 14492 - DNA, 25 bp, SARS Virus
ccacatcgtccatgtgagttgttcc

SEQ ID NO: 14493 - DNA, 25 bp, SARS Virus
cacatcgtccacttgagttgttccg

SEQ ID NO: 14494 - DNA, 25 bp, SARS Virus
acatcgtccacgtgagttgttccgt

SEQ ID NO: 14495 - DNA, 25 bp, SARS Virus
catcgtccacgttagttgttccgtt

SEQ ID NO: 14496 - DNA, 25 bp, SARS Virus
atcgtccacgtgtgttgttccgttg

SEQ ID NO: 14497 - DNA, 25 bp, SARS Virus
tcgtccacgtgatttgttccgttgg

SEQ ID NO: 14498 - DNA, 25 bp, SARS Virus
cgtccacgtgagttgttccgttggt

SEQ ID NO: 14499 - DNA, 25 bp, SARS Virus
gtccacgtgagttgttccgttggtt

SEQ ID NO: 14500 - DNA, 25 bp, SARS Virus
tccacgtgagtttttccgttggtta

SEQ ID NO: 14501 - DNA, 25 bp, SARS Virus
ccacgtgagttgttccgttggttac

SEQ ID NO: 14502 - DNA, 25 bp, SARS Virus
cacgtgagttgttccgttggttacc

SEQ ID NO: 14503 - DNA, 25 bp, SARS Virus
acgtgagttgtttcgttggttacca

SEQ ID NO: 14504 - DNA, 25 bp, SARS Virus
cgtgagttgttctgttggttaccac

SEQ ID NO: 14505 - DNA, 25 bp, SARS Virus
gtgagttgttcctttggttaccacg

SEQ ID NO: 14506 - DNA, 25 bp, SARS Virus
tgagttgttccgttggttaccacgg

SEQ ID NO: 14507 - DNA, 25 bp, SARS Virus
gagttgttccgttggttaccacggt

SEQ ID NO: 14508 - DNA, 25 bp, SARS Virus
agttgttccgtttgttaccacggta

SEQ ID NO: 14509 - DNA, 25 bp, SARS Virus
gttgttccgttgtttaccacggtac

SEQ ID NO: 14510 - DNA, 25 bp, SARS Virus
ttgttccgttggttaccacggtacg

SEQ ID NO: 14511 - DNA, 25 bp, SARS Virus
tgttccgttggttaccacggtacgt

SEQ ID NO: 14512 - DNA, 25 bp, SARS Virus
gttccgttggtttccacggtacgtt

SEQ ID NO: 14513 - DNA, 25 bp, SARS Virus
ttccgttggttatcacggtacgttt

SEQ ID NO: 14514 - DNA, 25 bp, SARS Virus
tccgttggttactacggtacgtttt

SEQ ID NO: 14515 - DNA, 25 bp, SARS Virus
ccgttggttacctcggtacgttttc

SEQ ID NO: 14516 - DNA, 25 bp, SARS Virus
cgttggttaccatggtacgttttcc

SEQ ID NO: 14517 - DNA, 25 bp, SARS Virus
gttggttaccactgtacgttttcct

SEQ ID NO: 14518 - DNA, 25 bp, SARS Virus
ttggttaccacgttacgttttcctc

SEQ ID NO: 14519 - DNA, 25 bp, SARS Virus
tggttaccacggtacgttttcctct

SEQ ID NO: 14520 - DNA, 25 bp, SARS Virus
ggttaccacggttcgttttcctctc

SEQ ID NO: 14521 - DNA, 25 bp, SARS Virus
gttaccacggtatgttttcctctca

SEQ ID NO: 14522 - DNA, 25 bp, SARS Virus
ttaccacggtactttttcctctcac

SEQ ID NO: 14523 - DNA, 25 bp, SARS Virus
taccacggtacgttttcctctcact

SEQ ID NO: 14524 - DNA, 25 bp, SARS Virus
accacggtacgttttcctctcacta

SEQ ID NO: 14525 - DNA, 25 bp, SARS Virus
ccacggtacgttttcctctcactac

SEQ ID NO: 14526 - DNA, 25 bp, SARS Virus
cacggtacgttttcctctcactact

SEQ ID NO: 14527 - DNA, 25 bp, SARS Virus
acggtacgtttttctctcactacta

SEQ ID NO: 14528 - DNA, 25 bp, SARS Virus
cggtacgttttcttctcactactaa

SEQ ID NO: 14529 - DNA, 25 bp, SARS Virus
ggtacgttttcctctcactactaat

SEQ ID NO: 14530 - DNA, 25 bp, SARS Virus
gtacgttttcctttcactactaatg

SEQ ID NO: 14531 - DNA, 25 bp, SARS Virus
tacgttttcctctcactactaatgt

SEQ ID NO: 14532 - DNA, 25 bp, SARS Virus
acgttttcctcttactactaatgta

SEQ ID NO: 14533 - DNA, 25 bp, SARS Virus
cgttttcctctctctactaatgtaa

SEQ ID NO: 14534 - DNA, 25 bp, SARS Virus
gttttcctctcattactaatgtaat

SEQ ID NO: 14535 - DNA, 25 bp, SARS Virus
ttttcctctcactactaatgtaatt

SEQ ID NO: 14536 - DNA, 25 bp, SARS Virus
tttcctctcacttctaatgtaattc

SEQ ID NO: 14537 - DNA, 25 bp, SARS Virus
ttcctctcactattaatgtaattcg

SEQ ID NO: 14538 - DNA, 25 bp, SARS Virus
tcctctcactactaatgtaattcga

SEQ ID NO: 14539 - DNA, 25 bp, SARS Virus
cctctcactacttatgtaattcgat

SEQ ID NO: 14540 - DNA, 25 bp, SARS Virus
ctctcactactattgtaattcgatt

SEQ ID NO: 14541 - DNA, 25 bp, SARS Virus
tctcactactaatgtaattcgattt

SEQ ID NO: 14542 - DNA, 25 bp, SARS Virus
ctcactactaatttaattcgattta

SEQ ID NO: 14543 - DNA, 25 bp, SARS Virus
tcactactaatgtaattcgatttac

SEQ ID NO: 14544 - DNA, 25 bp, SARS Virus
cactactaatgttattcgatttacc

SEQ ID NO: 14545 - DNA, 25 bp, SARS Virus
actactaatgtatttcgatttaccg

SEQ ID NO: 14546 - DNA, 25 bp, SARS Virus
ctactaatgtaattcgatttaccgg

SEQ ID NO: 14547 - DNA, 25 bp, SARS Virus
tactaatgtaattcgatttaccggg

SEQ ID NO: 14548 - DNA, 25 bp, SARS Virus
actaatgtaatttgatttaccggga

SEQ ID NO: 14549 - DNA, 25 bp, SARS Virus
ctaatgtaattctatttaccgggag

SEQ ID NO: 14550 - DNA, 25 bp, SARS Virus
taatgtaattcgttttaccgggaga

SEQ ID NO: 14551 - DNA, 25 bp, SARS Virus
aatgtaattcgatttaccgggagaa

SEQ ID NO: 14552 - DNA, 25 bp, SARS Virus
atgtaattcgatttaccgggagaat

SEQ ID NO: 14553 - DNA, 25 bp, SARS Virus
tgtaattcgatttaccgggagaatg

SEQ ID NO: 14554 - DNA, 25 bp, SARS Virus
gtaattcgattttccgggagaatgt

SEQ ID NO: 14555 - DNA, 25 bp, SARS Virus
taattcgatttatcgggagaatgtc

SEQ ID NO: 14556 - DNA, 25 bp, SARS Virus
aattcgatttactgggagaatgtca

SEQ ID NO: 14557 - DNA, 25 bp, SARS Virus
attcgatttacctggagaatgtcat

SEQ ID NO: 14558 - DNA, 25 bp, SARS Virus
ttcgatttaccgtgagaatgtcatc

SEQ ID NO: 14559 - DNA, 25 bp, SARS Virus
tcgatttaccggtagaatgtcatcc

SEQ ID NO: 14560 - DNA, 25 bp, SARS Virus
cgatttaccgggtgaatgtcatcct

SEQ ID NO: 14561 - DNA, 25 bp, SARS Virus
gatttaccgggataatgtcatcctc

SEQ ID NO: 14562 - DNA, 25 bp, SARS Virus
atttaccgggagtatgtcatcctcc

SEQ ID NO: 14563 - DNA, 25 bp, SARS Virus
tttaccgggagattgtcatcctccc

SEQ ID NO: 14564 - DNA, 25 bp, SARS Virus
ttaccgggagaatgtcatcctccca

SEQ ID NO: 14565 - DNA, 25 bp, SARS Virus
taccgggagaatttcatcctcccag

SEQ ID NO: 14566 - DNA, 25 bp, SARS Virus
accgggagaatgtcatcctcccaga

SEQ ID NO: 14567 - DNA, 25 bp, SARS Virus
ccgggagaatgttatcctcccagaa

SEQ ID NO: 14568 - DNA, 25 bp, SARS Virus
cgggagaatgtcttcctcccagaac

SEQ ID NO: 14569 - DNA, 25 bp, SARS Virus
gggagaatgtcatcctcccagaaca

SEQ ID NO: 14570 - DNA, 25 bp, SARS Virus
ggagaatgtcattctcccagaacaa

SEQ ID NO: 14571 - DNA, 25 bp, SARS Virus
gagaatgtcatcttcccagaacaaa

SEQ ID NO: 14572 - DNA, 25 bp, SARS Virus
agaatgtcatcctcccagaacaaac

SEQ ID NO: 14573 - DNA, 25 bp, SARS Virus
gaatgtcatccttccagaacaaacg

SEQ ID NO: 14574 - DNA, 25 bp, SARS Virus
aatgtcatcctctcagaacaaacga

SEQ ID NO: 14575 - DNA, 25 bp, SARS Virus
atgtcatcctcctagaacaaacgaa

SEQ ID NO: 14576 - DNA, 25 bp, SARS Virus
tgtcatcctccctgaacaaacgaaa

SEQ ID NO: 14577 - DNA, 25 bp, SARS Virus
gtcatcctcccataacaaacgaaag

SEQ ID NO: 14578 - DNA, 25 bp, SARS Virus
tcatcctcccagtacaaacgaaaga

SEQ ID NO: 14579 - DNA, 25 bp, SARS Virus
catcctcccagatcaaacgaaagac

SEQ ID NO: 14580 - DNA, 25 bp, SARS Virus
atcctcccagaataaacgaaagacc

SEQ ID NO: 14581 - DNA, 25 bp, SARS Virus
tcctcccagaactaacgaaagacct

SEQ ID NO: 14582 - DNA, 25 bp, SARS Virus
cctcccagaacatacgaaagacctg

SEQ ID NO: 14583 - DNA, 25 bp, SARS Virus
ctcccagaacaatcgaaagacctgt

SEQ ID NO: 14584 - DNA, 25 bp, SARS Virus
tcccagaacaaatgaaagacctgta

SEQ ID NO: 14585 - DNA, 25 bp, SARS Virus
cccagaacaaactaaagacctgtat

SEQ ID NO: 14586 - DNA, 25 bp, SARS Virus
ccagaacaaacgtaagacctgtatt

SEQ ID NO: 14587 - DNA, 25 bp, SARS Virus
cagaacaaacgatagacctgtatta

SEQ ID NO: 14588 - DNA, 25 bp, SARS Virus
agaacaaacgaatgacctgtattag

SEQ ID NO: 14589 - DNA, 25 bp, SARS Virus
gaacaaacgaaatacctgtattaga

SEQ ID NO: 14590 - DNA, 25 bp, SARS Virus
aacaaacgaaagtcctgtattagaa

SEQ ID NO: 14591 - DNA, 25 bp, SARS Virus
acaaacgaaagatctgtattagaac

SEQ ID NO: 14592 - DNA, 25 bp, SARS Virus
caaacgaaagacttgtattagaacg

SEQ ID NO: 14593 - DNA, 25 bp, SARS Virus
aaacgaaagacctgtattagaacga

SEQ ID NO: 14594 - DNA, 25 bp, SARS Virus
aacgaaagacctttattagaacgat

SEQ ID NO: 14595 - DNA, 25 bp, SARS Virus
acgaaagacctgtattagaacgatt

SEQ ID NO: 14596 - DNA, 25 bp, SARS Virus
cgaaagacctgttttagaacgattc

SEQ ID NO: 14597 - DNA, 25 bp, SARS Virus
gaaagacctgtattagaacgattct

SEQ ID NO: 14598 - DNA, 25 bp, SARS Virus
aaagacctgtattagaacgattctt

SEQ ID NO: 14599 - DNA, 25 bp, SARS Virus
aagacctgtatttgaacgattcttc

SEQ ID NO: 14600 - DNA, 25 bp, SARS Virus
agacctgtattataacgattcttca

SEQ ID NO: 14601 - DNA, 25 bp, SARS Virus
gacctgtattagtacgattcttcac

SEQ ID NO: 14602 - DNA, 25 bp, SARS Virus
acctgtattagatcgattcttcaca

SEQ ID NO: 14603 - DNA, 25 bp, SARS Virus
cctgtattagaatgattcttcacag

SEQ ID NO: 14604 - DNA, 25 bp, SARS Virus
ctgtattagaactattcttcacaga

SEQ ID NO: 14605 - DNA, 25 bp, SARS Virus
tgtattagaacgtttcttcacagac

SEQ ID NO: 14606 - DNA, 25 bp, SARS Virus
gtattagaacgattcttcacagacg

SEQ ID NO: 14607 - DNA, 25 bp, SARS Virus
tattagaacgattcttcacagacgt

SEQ ID NO: 14608 - DNA, 25 bp, SARS Virus
attagaacgatttttcacagacgta

SEQ ID NO: 14609 - DNA, 25 bp, SARS Virus
ttagaacgattcttcacagacgtac

SEQ ID NO: 14610 - DNA, 25 bp, SARS Virus
tagaacgattcttcacagacgtaca

SEQ ID NO: 14611 - DNA, 25 bp, SARS Virus
agaacgattctttacagacgtacaa

SEQ ID NO: 14612 - DNA, 25 bp, SARS Virus
gaacgattcttctcagacgtacaac

SEQ ID NO: 14613 - DNA, 25 bp, SARS Virus
aacgattcttcatagacgtacaaca

SEQ ID NO: 14614 - DNA, 25 bp, SARS Virus
acgattcttcactgacgtacaacaa

SEQ ID NO: 14615 - DNA, 25 bp, SARS Virus
cgattcttcacatacgtacaacaac

SEQ ID NO: 14616 - DNA, 25 bp, SARS Virus
gattcttcacagtcgtacaacaacc

SEQ ID NO: 14617 - DNA, 25 bp, SARS Virus
attcttcacagatgtacaacaacct

SEQ ID NO: 14618 - DNA, 25 bp, SARS Virus
ttcttcacagacttacaacaacctg

SEQ ID NO: 14619 - DNA, 25 bp, SARS Virus
tcttcacagacgtacaacaacctgg

SEQ ID NO: 14620 - DNA, 25 bp, SARS Virus
cttcacagacgttcaacaacctgga

SEQ ID NO: 14621 - DNA, 25 bp, SARS Virus
ttcacagacgtataacaacctggat

SEQ ID NO: 14622 - DNA, 25 bp, SARS Virus
tcacagacgtactacaacctggatt

SEQ ID NO: 14623 - DNA, 25 bp, SARS Virus
cacagacgtacatcaacctggattg

SEQ ID NO: 14624 - DNA, 25 bp, SARS Virus
acagacgtacaataacctggattgg

SEQ ID NO: 14625 - DNA, 25 bp, SARS Virus
cagacgtacaactacctggattgga

SEQ ID NO: 14626 - DNA, 25 bp, SARS Virus
agacgtacaacatcctggattggat

SEQ ID NO: 14627 - DNA, 25 bp, SARS Virus
gacgtacaacaatctggattggatt

SEQ ID NO: 14628 - DNA, 25 bp, SARS Virus
acgtacaacaacttggattggattt

SEQ ID NO: 14629 - DNA, 25 bp, SARS Virus
cgtacaacaacctggattggattta

SEQ ID NO: 14630 - DNA, 25 bp, SARS Virus
gtacaacaaccttgattggatttac

SEQ ID NO: 14631 - DNA, 25 bp, SARS Virus
tacaacaacctgtattggatttacg

SEQ ID NO: 14632 - DNA, 25 bp, SARS Virus
acaacaacctggtttggatttacgt

SEQ ID NO: 14633 - DNA, 25 bp, SARS Virus
caacaacctggattggatttacgtc

SEQ ID NO: 14634 - DNA, 25 bp, SARS Virus
aacaacctggattggatttacgtcc

SEQ ID NO: 14635 - DNA, 25 bp, SARS Virus
acaacctggatttgatttacgtcca

SEQ ID NO: 14636 - DNA, 25 bp, SARS Virus
caacctggattgtatttacgtccac

SEQ ID NO: 14637 - DNA, 25 bp, SARS Virus
aacctggattggttttacgtccact

SEQ ID NO: 14638 - DNA, 25 bp, SARS Virus
acctggattggatttacgtccactc

SEQ ID NO: 14639 - DNA, 25 bp, SARS Virus
cctggattggatttacgtccactcc

SEQ ID NO: 14640 - DNA, 25 bp, SARS Virus
ctggattggatttacgtccactcct

SEQ ID NO: 14641 - DNA, 25 bp, SARS Virus
tggattggattttcgtccactcctg

SEQ ID NO: 14642 - DNA, 25 bp, SARS Virus
ggattggatttatgtccactcctgt

SEQ ID NO: 14643 - DNA, 25 bp, SARS Virus
gattggatttacttccactcctgta

SEQ ID NO: 14644 - DNA, 25 bp, SARS Virus
attggatttacgtccactcctgtag

SEQ ID NO: 14645 - DNA, 25 bp, SARS Virus
ttggatttacgttcactcctgtagg

SEQ ID NO: 14646 - DNA, 25 bp, SARS Virus
tggatttacgtctactcctgtaggt

SEQ ID NO: 14647 - DNA, 25 bp, SARS Virus
ggatttacgtcctctcctgtaggtc

SEQ ID NO: 14648 - DNA, 25 bp, SARS Virus
gatttacgtccattcctgtaggtcg

SEQ ID NO: 14649 - DNA, 25 bp, SARS Virus
atttacgtccactcctgtaggtcga

SEQ ID NO: 14650 - DNA, 25 bp, SARS Virus
tttacgtccacttctgtaggtcgaa

SEQ ID NO: 14651 - DNA, 25 bp, SARS Virus
ttacgtccactcttgtaggtcgaag

SEQ ID NO: 14652 - DNA, 25 bp, SARS Virus
tacgtccactcctgtaggtcgaaga

SEQ ID NO: 14653 - DNA, 25 bp, SARS Virus
acgtccactcctttaggtcgaagaa

SEQ ID NO: 14654 - DNA, 25 bp, SARS Virus
cgtccactcctgtaggtcgaagaat

SEQ ID NO: 14655 - DNA, 25 bp, SARS Virus
gtccactcctgttggtcgaagaatt

SEQ ID NO: 14656 - DNA, 25 bp, SARS Virus
tccactcctgtatgtcgaagaattc

SEQ ID NO: 14657 - DNA, 25 bp, SARS Virus
ccactcctgtagttcgaagaattcc

SEQ ID NO: 14658 - DNA, 25 bp, SARS Virus
cactcctgtaggtcgaagaattccg

SEQ ID NO: 14659 - DNA, 25 bp, SARS Virus
actcctgtaggttgaagaattccgt

SEQ ID NO: 14660 - DNA, 25 bp, SARS Virus
ctcctgtaggtctaagaattccgtc

SEQ ID NO: 14661 - DNA, 25 bp, SARS Virus
tcctgtaggtcgtagaattccgtcg

SEQ ID NO: 14662 - DNA, 25 bp, SARS Virus
cctgtaggtcgatgaattccgtcgt

SEQ ID NO: 14663 - DNA, 25 bp, SARS Virus
ctgtaggtcgaataattccgtcgta

SEQ ID NO: 14664 - DNA, 25 bp, SARS Virus
tgtaggtcgaagtattccgtcgtat

SEQ ID NO: 14665 - DNA, 25 bp, SARS Virus
gtaggtcgaagatttccgtcgtata

SEQ ID NO: 14666 - DNA, 25 bp, SARS Virus
taggtcgaagaattccgtcgtatac

SEQ ID NO: 14667 - DNA, 25 bp, SARS Virus
aggtcgaagaattccgtcgtatact

SEQ ID NO: 14668 - DNA, 25 bp, SARS Virus
ggtcgaagaatttcgtcgtatactt

SEQ ID NO: 14669 - DNA, 25 bp, SARS Virus
gtcgaagaattctgtcgtatacttt

SEQ ID NO: 14670 - DNA, 25 bp, SARS Virus
tcgaagaattccttcgtatactttt

SEQ ID NO: 14671 - DNA, 25 bp, SARS Virus
cgaagaattccgtcgtatactttta

SEQ ID NO: 14672 - DNA, 25 bp, SARS Virus
gaagaattccgttgtatacttttaa

SEQ ID NO: 14673 - DNA, 25 bp, SARS Virus
aagaattccgtcttatacttttaaa

SEQ ID NO: 14674 - DNA, 25 bp, SARS Virus
agaattccgtcgtatacttttaaag

SEQ ID NO: 14675 - DNA, 25 bp, SARS Virus
gaattccgtcgtttacttttaaagt

SEQ ID NO: 14676 - DNA, 25 bp, SARS Virus
aattccgtcgtatacttttaaagtt

SEQ ID NO: 14677 - DNA, 25 bp, SARS Virus
attccgtcgtattcttttaaagtta

SEQ ID NO: 14678 - DNA, 25 bp, SARS Virus
ttccgtcgtatatttttaaagttaa

SEQ ID NO: 14679 - DNA, 25 bp, SARS Virus
tccgtcgtatacttttaaagttaag

SEQ ID NO: 14680 - DNA, 25 bp, SARS Virus
ccgtcgtatacttttaaagttaagt

SEQ ID NO: 14681 - DNA, 25 bp, SARS Virus
cgtcgtatacttttaaagttaagtg

SEQ ID NO: 14682 - DNA, 25 bp, SARS Virus
gtcgtatacttttaaagttaagtgt

SEQ ID NO: 14683 - DNA, 25 bp, SARS Virus
tcgtatactttttaagttaagtgtc

SEQ ID NO: 14684 - DNA, 25 bp, SARS Virus
cgtatacttttatagttaagtgtcc

SEQ ID NO: 14685 - DNA, 25 bp, SARS Virus
gtatacttttaatgttaagtgtcct

SEQ ID NO: 14686 - DNA, 25 bp, SARS Virus
tatacttttaaatttaagtgtcctg

SEQ ID NO: 14687 - DNA, 25 bp, SARS Virus
atacttttaaagttaagtgtcctgt

SEQ ID NO: 14688 - DNA, 25 bp, SARS Virus
tacttttaaagttaagtgtcctgta

SEQ ID NO: 14689 - DNA, 25 bp, SARS Virus
acttttaaagtttagtgtcctgtag

SEQ ID NO: 14690 - DNA, 25 bp, SARS Virus
cttttaaagttatgtgtcctgtaga

SEQ ID NO: 14691 - DNA, 25 bp, SARS Virus
ttttaaagttaattgtcctgtagaa

SEQ ID NO: 14692 - DNA, 25 bp, SARS Virus
tttaaagttaagtgtcctgtagaat

SEQ ID NO: 14693 - DNA, 25 bp, SARS Virus
ttaaagttaagtttcctgtagaatg

SEQ ID NO: 14694 - DNA, 25 bp, SARS Virus
taaagttaagtgtcctgtagaatga

SEQ ID NO: 14695 - DNA, 25 bp, SARS Virus
aaagttaagtgttctgtagaatgaa

SEQ ID NO: 14696 - DNA, 25 bp, SARS Virus
aagttaagtgtcttgtagaatgaac

SEQ ID NO: 14697 - DNA, 25 bp, SARS Virus
agttaagtgtcctgtagaatgaacg

SEQ ID NO: 14698 - DNA, 25 bp, SARS Virus
gttaagtgtcctttagaatgaacgt

SEQ ID NO: 14699 - DNA, 25 bp, SARS Virus
ttaagtgtcctgtagaatgaacgtg

SEQ ID NO: 14700 - DNA, 25 bp, SARS Virus
taagtgtcctgttgaatgaacgtgg

SEQ ID NO: 14701 - DNA, 25 bp, SARS Virus
aagtgtcctgtataatgaacgtggt

SEQ ID NO: 14702 - DNA, 25 bp, SARS Virus
agtgtcctgtagtatgaacgtggta

SEQ ID NO: 14703 - DNA, 25 bp, SARS Virus
gtgtcctgtagattgaacgtggtaa

SEQ ID NO: 14704 - DNA, 25 bp, SARS Virus
tgtcctgtagaatgaacgtggtaac

SEQ ID NO: 14705 - DNA, 25 bp, SARS Virus
gtcctgtagaattaacgtggtaaca

SEQ ID NO: 14706 - DNA, 25 bp, SARS Virus
tcctgtagaatgtacgtggtaacaa

SEQ ID NO: 14707 - DNA, 25 bp, SARS Virus
cctgtagaatgatcgtggtaacaac

SEQ ID NO: 14708 - DNA, 25 bp, SARS Virus
ctgtagaatgaatgtggtaacaaca

SEQ ID NO: 14709 - DNA, 25 bp, SARS Virus
tgtagaatgaacttggtaacaacag

SEQ ID NO: 14710 - DNA, 25 bp, SARS Virus
gtagaatgaacgtggtaacaacagt

SEQ ID NO: 14711 - DNA, 25 bp, SARS Virus
tagaatgaacgttgtaacaacagtc

SEQ ID NO: 14712 - DNA, 25 bp, SARS Virus
agaatgaacgtgttaacaacagtcg

SEQ ID NO: 14713 - DNA, 25 bp, SARS Virus
gaatgaacgtggtaacaacagtcgt

SEQ ID NO: 14714 - DNA, 25 bp, SARS Virus
aatgaacgtggttacaacagtcgtc

SEQ ID NO: 14715 - DNA, 25 bp, SARS Virus
atgaacgtggtatcaacagtcgtcc

SEQ ID NO: 14716 - DNA, 25 bp, SARS Virus
tgaacgtggtaataacagtcgtccg

SEQ ID NO: 14717 - DNA, 25 bp, SARS Virus
gaacgtggtaactacagtcgtccgt

SEQ ID NO: 14718 - DNA, 25 bp, SARS Virus
aacgtggtaacatcagtcgtccgta

SEQ ID NO: 14719 - DNA, 25 bp, SARS Virus
acgtggtaacaatagtcgtccgtat

SEQ ID NO: 14720 - DNA, 25 bp, SARS Virus
cgtggtaacaactgtcgtccgtata

SEQ ID NO: 14721 - DNA, 25 bp, SARS Virus
gtggtaacaacattcgtccgtataa

SEQ ID NO: 14722 - DNA, 25 bp, SARS Virus
tggtaacaacagtcgtccgtataaa

SEQ ID NO: 14723 - DNA, 25 bp, SARS Virus
ggtaacaacagttgtccgtataaac

SEQ ID NO: 14724 - DNA, 25 bp, SARS Virus
gtaacaacagtcttccgtataaacc

SEQ ID NO: 14725 - DNA, 25 bp, SARS Virus
taacaacagtcgtccgtataaacca

SEQ ID NO: 14726 - DNA, 25 bp, SARS Virus
aacaacagtcgttcgtataaaccac

SEQ ID NO: 14727 - DNA, 25 bp, SARS Virus
acaacagtcgtctgtataaaccacg

SEQ ID NO: 14728 - DNA, 25 bp, SARS Virus
caacagtcgtccttataaaccacga

SEQ ID NO: 14729 - DNA, 25 bp, SARS Virus
aacagtcgtccgtataaaccacgat

SEQ ID NO: 14730 - DNA, 25 bp, SARS Virus
acagtcgtccgtttaaaccacgatt

SEQ ID NO: 14731 - DNA, 25 bp, SARS Virus
cagtcgtccgtataaaccacgattt

SEQ ID NO: 14732 - DNA, 25 bp, SARS Virus
agtcgtccgtattaaccacgatttg

SEQ ID NO: 14733 - DNA, 25 bp, SARS Virus
gtcgtccgtatataccacgatttgg

SEQ ID NO: 14734 - DNA, 25 bp, SARS Virus
tcgtccgtataatccacgatttggt

SEQ ID NO: 14735 - DNA, 25 bp, SARS Virus
cgtccgtataaatcacgatttggtg

SEQ ID NO: 14736 - DNA, 25 bp, SARS Virus
gtccgtataaactacgatttggtga

SEQ ID NO: 14737 - DNA, 25 bp, SARS Virus
tccgtataaacctcgatttggtgaa

SEQ ID NO: 14738 - DNA, 25 bp, SARS Virus
ccgtataaaccatgatttggtgaag

SEQ ID NO: 14739 - DNA, 25 bp, SARS Virus
cgtataaaccactatttggtgaagt

SEQ ID NO: 14740 - DNA, 25 bp, SARS Virus
gtataaaccacgttttggtgaagtc

SEQ ID NO: 14741 - DNA, 25 bp, SARS Virus
tataaaccacgatttggtgaagtca

SEQ ID NO: 14742 - DNA, 25 bp, SARS Virus
ataaaccacgatttggtgaagtcag

SEQ ID NO: 14743 - DNA, 25 bp, SARS Virus
taaaccacgatttggtgaagtcaga

SEQ ID NO: 14744 - DNA, 25 bp, SARS Virus
aaaccacgattttgtgaagtcagaa

SEQ ID NO: 14745 - DNA, 25 bp, SARS Virus
aaccacgatttgttgaagtcagaaa

SEQ ID NO: 14746 - DNA, 25 bp, SARS Virus
accacgatttggtgaagtcagaaat

SEQ ID NO: 14747 - DNA, 25 bp, SARS Virus
ccacgatttggttaagtcagaaatg

SEQ ID NO: 14748 - DNA, 25 bp, SARS Virus
cacgatttggtgtagtcagaaatgt

SEQ ID NO: 14749 - DNA, 25 bp, SARS Virus
acgatttggtgatgtcagaaatgtt

SEQ ID NO: 14750 - DNA, 25 bp, SARS Virus
cgatttggtgaattcagaaatgttc

SEQ ID NO: 14751 - DNA, 25 bp, SARS Virus
gatttggtgaagtcagaaatgttca

SEQ ID NO: 14752 - DNA, 25 bp, SARS Virus
atttggtgaagttagaaatgttcac

SEQ ID NO: 14753 - DNA, 25 bp, SARS Virus
tttggtgaagtctgaaatgttcaca

SEQ ID NO: 14754 - DNA, 25 bp, SARS Virus
ttggtgaagtcataaatgttcacac

SEQ ID NO: 14755 - DNA, 25 bp, SARS Virus
tggtgaagtcagtaatgttcacacg

SEQ ID NO: 14756 - DNA, 25 bp, SARS Virus
ggtgaagtcagatatgttcacacgc

SEQ ID NO: 14757 - DNA, 25 bp, SARS Virus
gtgaagtcagaattgttcacacgca

SEQ ID NO: 14758 - DNA, 25 bp, SARS Virus
tgaagtcagaaatgttcacacgcac

SEQ ID NO: 14759 - DNA, 25 bp, SARS Virus
gaagtcagaaattttcacacgcacg

SEQ ID NO: 14760 - DNA, 25 bp, SARS Virus
aagtcagaaatgttcacacgcacgt

SEQ ID NO: 14761 - DNA, 25 bp, SARS Virus
agtcagaaatgttcacacgcacgtc

SEQ ID NO: 14762 - DNA, 25 bp, SARS Virus
gtcagaaatgtttacacgcacgtct

SEQ ID NO: 14763 - DNA, 25 bp, SARS Virus
tcagaaatgttctcacgcacgtctg

SEQ ID NO: 14764 - DNA, 25 bp, SARS Virus
cagaaatgttcatacgcacgtctgc

SEQ ID NO: 14765 - DNA, 25 bp, SARS Virus
agaaatgttcactcgcacgtctgcc

SEQ ID NO: 14766 - DNA, 25 bp, SARS Virus
gaaatgttcacatgcacgtctgcca

SEQ ID NO: 14767 - DNA, 25 bp, SARS Virus
aaatgttcacactcacgtctgccaa

SEQ ID NO: 14768 - DNA, 25 bp, SARS Virus
aatgttcacacgtacgtctgccaag

SEQ ID NO: 14769 - DNA, 25 bp, SARS Virus
atgttcacacgcacgtctgccaagc

SEQ ID NO: 14770 - DNA, 25 bp, SARS Virus
tgttcacacgcaagtctgccaagca

SEQ ID NO: 14771 - DNA, 25 bp, SARS Virus
gttcacacgcacatctgccaagcat

SEQ ID NO: 14772 - DNA, 25 bp, SARS Virus
ttcacacgcacgactgccaagcatg

SEQ ID NO: 14773 - DNA, 25 bp, SARS Virus
tcacacgcacgtatgccaagcatgt

SEQ ID NO: 14774 - DNA, 25 bp, SARS Virus
cacacgcacgtcagccaagcatgtg

SEQ ID NO: 14775 - DNA, 25 bp, SARS Virus
acacgcacgtctaccaagcatgtgt

SEQ ID NO: 14776 - DNA, 25 bp, SARS Virus
cacgcacgtctgacaagcatgtgtc

SEQ ID NO: 14777 - DNA, 25 bp, SARS Virus
acgcacgtctgcaaagcatgtgtcc

SEQ ID NO: 14778 - DNA, 25 bp, SARS Virus
cgcacgtctgccaagcatgtgtcca

SEQ ID NO: 14779 - DNA, 25 bp, SARS Virus
gcacgtctgccaagcatgtgtccaa

SEQ ID NO: 14780 - DNA, 25 bp, SARS Virus
cacgtctgccaaacatgtgtccaaa

SEQ ID NO: 14781 - DNA, 25 bp, SARS Virus
acgtctgccaagaatgtgtccaaat

SEQ ID NO: 14782 - DNA, 25 bp, SARS Virus
cgtctgccaagcatgtgtccaaata

SEQ ID NO: 14783 - DNA, 25 bp, SARS Virus
gtctgccaagcaagtgtccaaatat

SEQ ID NO: 14784 - DNA, 25 bp, SARS Virus
tctgccaagcatatgtccaaatata

SEQ ID NO: 14785 - DNA, 25 bp, SARS Virus
ctgccaagcatgagtccaaatataa

SEQ ID NO: 14786 - DNA, 25 bp, SARS Virus
tgccaagcatgtatccaaatataac

SEQ ID NO: 14787 - DNA, 25 bp, SARS Virus
gccaagcatgtgaccaaatataacg

SEQ ID NO: 14788 - DNA, 25 bp, SARS Virus
ccaagcatgtgtacaaatataacgt

SEQ ID NO: 14789 - DNA, 25 bp, SARS Virus
caagcatgtgtcaaaatataacgtc

SEQ ID NO: 14790 - DNA, 25 bp, SARS Virus
aagcatgtgtccaaatataacgtca

SEQ ID NO: 14791 - DNA, 25 bp, SARS Virus
agcatgtgtccaaatataacgtcag

SEQ ID NO: 14792 - DNA, 25 bp, SARS Virus
gcatgtgtccaaatataacgtcagt

SEQ ID NO: 14793 - DNA, 25 bp, SARS Virus
catgtgtccaaaaataacgtcagtt

SEQ ID NO: 14794 - DNA, 25 bp, SARS Virus
atgtgtccaaatataacgtcagtta

SEQ ID NO: 14795 - DNA, 25 bp, SARS Virus
tgtgtccaaataaaacgtcagttac

SEQ ID NO: 14796 - DNA, 25 bp, SARS Virus
gtgtccaaatataacgtcagttact

SEQ ID NO: 14797 - DNA, 25 bp, SARS Virus
tgtccaaatataacgtcagttactg

SEQ ID NO: 14798 - DNA, 25 bp, SARS Virus
gtccaaatataaagtcagttactgt

SEQ ID NO: 14799 - DNA, 25 bp, SARS Virus
tccaaatataacatcagttactgtt

SEQ ID NO: 14800 - DNA, 25 bp, SARS Virus
ccaaatataacgacagttactgttt

SEQ ID NO: 14801 - DNA, 25 bp, SARS Virus
caaatataacgtaagttactgtttc

SEQ ID NO: 14802 - DNA, 25 bp, SARS Virus
aaatataacgtcagttactgtttcg

SEQ ID NO: 14803 - DNA, 25 bp, SARS Virus
aatataacgtcaattactgtttcga

SEQ ID NO: 14804 - DNA, 25 bp, SARS Virus
atataacgtcagatactgtttcgag

SEQ ID NO: 14805 - DNA, 25 bp, SARS Virus
tataacgtcagtaactgtttcgaga

SEQ ID NO: 14806 - DNA, 25 bp, SARS Virus
ataacgtcagttactgtttcgagaa

SEQ ID NO: 14807 - DNA, 25 bp, SARS Virus
taacgtcagttaatgtttcgagaaa

SEQ ID NO: 14808 - DNA, 25 bp, SARS Virus
aacgtcagttacagtttcgagaaat

SEQ ID NO: 14809 - DNA, 25 bp, SARS Virus
acgtcagttactatttcgagaaata

SEQ ID NO: 14810 - DNA, 25 bp, SARS Virus
cgtcagttactgattcgagaaatac

SEQ ID NO: 14811 - DNA, 25 bp, SARS Virus
gtcagttactgtatcgagaaatact

SEQ ID NO: 14812 - DNA, 25 bp, SARS Virus
tcagttactgttacgagaaatactc

SEQ ID NO: 14813 - DNA, 25 bp, SARS Virus
cagttactgtttagagaaatactcg

SEQ ID NO: 14814 - DNA, 25 bp, SARS Virus
agttactgtttcaagaaatactcgt

SEQ ID NO: 14815 - DNA, 25 bp, SARS Virus
gttactgtttcgagaaatactcgtc

SEQ ID NO: 14816 - DNA, 25 bp, SARS Virus
ttactgtttcgaaaaatactcgtcc

SEQ ID NO: 14817 - DNA, 25 bp, SARS Virus
tactgtttcgagaaatactcgtcca

SEQ ID NO: 14818 - DNA, 25 bp, SARS Virus
actgtttcgagaaatactcgtccaa

SEQ ID NO: 14819 - DNA, 25 bp, SARS Virus
ctgtttcgagaaatactcgtccaac

SEQ ID NO: 14820 - DNA, 25 bp, SARS Virus
tgtttcgagaaaaactcgtccaaca

SEQ ID NO: 14821 - DNA, 25 bp, SARS Virus
gtttcgagaaatactcgtccaacag

SEQ ID NO: 14822 - DNA, 25 bp, SARS Virus
tttcgagaaataatcgtccaacagt

SEQ ID NO: 14823 - DNA, 25 bp, SARS Virus
ttcgagaaatacacgtccaacagta

SEQ ID NO: 14824 - DNA, 25 bp, SARS Virus
tcgagaaatactagtccaacagtac

SEQ ID NO: 14825 - DNA, 25 bp, SARS Virus
cgagaaatactcatccaacagtacc

SEQ ID NO: 14826 - DNA, 25 bp, SARS Virus
gagaaatactcgaccaacagtacct

SEQ ID NO: 14827 - DNA, 25 bp, SARS Virus
agaaatactcgtacaacagtaccta

SEQ ID NO: 14828 - DNA, 25 bp, SARS Virus
gaaatactcgtcaaacagtacctaa

SEQ ID NO: 14829 - DNA, 25 bp, SARS Virus
aaatactcgtccaacagtacctaat

SEQ ID NO: 14830 - DNA, 25 bp, SARS Virus
aatactcgtccaacagtacctaata

SEQ ID NO: 14831 - DNA, 25 bp, SARS Virus
atactcgtccaaaagtacctaatag

SEQ ID NO: 14832 - DNA, 25 bp, SARS Virus
tactcgtccaacagtacctaataga

SEQ ID NO: 14833 - DNA, 25 bp, SARS Virus
actcgtccaacaatacctaatagaa

SEQ ID NO: 14834 - DNA, 25 bp, SARS Virus
ctcgtccaacagaacctaatagaac

SEQ ID NO: 14835 - DNA, 25 bp, SARS Virus
tcgtccaacagtacctaatagaact

SEQ ID NO: 14836 - DNA, 25 bp, SARS Virus
cgtccaacagtaactaatagaacta

SEQ ID NO: 14837 - DNA, 25 bp, SARS Virus
gtccaacagtacataatagaactat

SEQ ID NO: 14838 - DNA, 25 bp, SARS Virus
tccaacagtaccaaatagaactatt

SEQ ID NO: 14839 - DNA, 25 bp, SARS Virus
ccaacagtacctaatagaactattg

SEQ ID NO: 14840 - DNA, 25 bp, SARS Virus
caacagtacctaatagaactattgg

SEQ ID NO: 14841 - DNA, 25 bp, SARS Virus
aacagtacctaaaagaactattgga

SEQ ID NO: 14842 - DNA, 25 bp, SARS Virus
acagtacctaatagaactattggac

SEQ ID NO: 14843 - DNA, 25 bp, SARS Virus
cagtacctaataaaactattggact

SEQ ID NO: 14844 - DNA, 25 bp, SARS Virus
agtacctaatagaactattggactt

SEQ ID NO: 14845 - DNA, 25 bp, SARS Virus
gtacctaatagaactattggacttc

SEQ ID NO: 14846 - DNA, 25 bp, SARS Virus
tacctaatagaaatattggacttcg

SEQ ID NO: 14847 - DNA, 25 bp, SARS Virus
acctaatagaacaattggacttcgg

SEQ ID NO: 14848 - DNA, 25 bp, SARS Virus
cctaatagaactattggacttcgga

SEQ ID NO: 14849 - DNA, 25 bp, SARS Virus
ctaatagaactaatggacttcggat

SEQ ID NO: 14850 - DNA, 25 bp, SARS Virus
taatagaactataggacttcggatc

SEQ ID NO: 14851 - DNA, 25 bp, SARS Virus
aatagaactattagacttcggatct

SEQ ID NO: 14852 - DNA, 25 bp, SARS Virus
atagaactattgaacttcggatctc

SEQ ID NO: 14853 - DNA, 25 bp, SARS Virus
tagaactattggacttcggatctca

SEQ ID NO: 14854 - DNA, 25 bp, SARS Virus
agaactattggaattcggatctcac

SEQ ID NO: 14855 - DNA, 25 bp, SARS Virus
gaactattggacatcggatctcacc

SEQ ID NO: 14856 - DNA, 25 bp, SARS Virus
aactattggactacggatctcacct

SEQ ID NO: 14857 - DNA, 25 bp, SARS Virus
actattggacttaggatctcacctt

SEQ ID NO: 14858 - DNA, 25 bp, SARS Virus
ctattggacttcagatctcaccttc

SEQ ID NO: 14859 - DNA, 25 bp, SARS Virus
tattggacttcgaatctcaccttcg

SEQ ID NO: 14860 - DNA, 25 bp, SARS Virus
attggacttcggatctcaccttcgt

SEQ ID NO: 14861 - DNA, 25 bp, SARS Virus
ttggacttcggaactcaccttcgtg

SEQ ID NO: 14862 - DNA, 25 bp, SARS Virus
tggacttcggatatcaccttcgtgg

SEQ ID NO: 14863 - DNA, 25 bp, SARS Virus
ggacttcggatcacaccttcgtgga

SEQ ID NO: 14864 - DNA, 25 bp, SARS Virus
gacttcggatctaaccttcgtggat

SEQ ID NO: 14865 - DNA, 25 bp, SARS Virus
acttcggatctcaccttcgtggatt

SEQ ID NO: 14866 - DNA, 25 bp, SARS Virus
cttcggatctcaacttcgtggattt

SEQ ID NO: 14867 - DNA, 25 bp, SARS Virus
ttcggatctcacattcgtggatttg

SEQ ID NO: 14868 - DNA, 25 bp, SARS Virus
tcggatctcaccatcgtggatttgt

SEQ ID NO: 14869 - DNA, 25 bp, SARS Virus
cggatctcacctacgtggatttgtt

SEQ ID NO: 14870 - DNA, 25 bp, SARS Virus
ggatctcaccttagtggatttgttc

SEQ ID NO: 14871 - DNA, 25 bp, SARS Virus
gatctcaccttcatggatttgttct

SEQ ID NO: 14872 - DNA, 25 bp, SARS Virus
atctcaccttcgaggatttgttctc

SEQ ID NO: 14873 - DNA, 25 bp, SARS Virus
tctcaccttcgtagatttgttctcc

SEQ ID NO: 14874 - DNA, 25 bp, SARS Virus
ctcaccttcgtgaatttgttctcct

SEQ ID NO: 14875 - DNA, 25 bp, SARS Virus
tcaccttcgtggatttgttctcctc

SEQ ID NO: 14876 - DNA, 25 bp, SARS Virus
caccttcgtggaattgttctcctcg

SEQ ID NO: 14877 - DNA, 25 bp, SARS Virus
accttcgtggatatgttctcctcgg

SEQ ID NO: 14878 - DNA, 25 bp, SARS Virus
ccttcgtggattagttctcctcggt

SEQ ID NO: 14879 - DNA, 25 bp, SARS Virus
cttcgtggatttattctcctcggtg

SEQ ID NO: 14880 - DNA, 25 bp, SARS Virus
ttcgtggatttgatctcctcggtgg

SEQ ID NO: 14881 - DNA, 25 bp, SARS Virus
tcgtggatttgtactcctcggtggt

SEQ ID NO: 14882 - DNA, 25 bp, SARS Virus
cgtggatttgttatcctcggtggtt

SEQ ID NO: 14883 - DNA, 25 bp, SARS Virus
gtggatttgttcacctcggtggttt

SEQ ID NO: 14884 - DNA, 25 bp, SARS Virus
tggatttgttctactcggtggtttg

SEQ ID NO: 14885 - DNA, 25 bp, SARS Virus
ggatttgttctcatcggtggtttgt

SEQ ID NO: 14886 - DNA, 25 bp, SARS Virus
gatttgttctccacggtggtttgtg

SEQ ID NO: 14887 - DNA, 25 bp, SARS Virus
atttgttctcctaggtggtttgtgt

SEQ ID NO: 14888 - DNA, 25 bp, SARS Virus
tttgttctcctcagtggtttgtgtc

SEQ ID NO: 14889 - DNA, 25 bp, SARS Virus
ttgttctcctcgatggtttgtgtct

SEQ ID NO: 14890 - DNA, 25 bp, SARS Virus
tgttctcctcggaggtttgtgtctt

SEQ ID NO: 14891 - DNA, 25 bp, SARS Virus
gttctcctcggtagtttgtgtcttc

SEQ ID NO: 14892 - DNA, 25 bp, SARS Virus
ttctcctcggtgatttgtgtcttct

SEQ ID NO: 14893 - DNA, 25 bp, SARS Virus
tctcctcggtggattgtgtcttcta

SEQ ID NO: 14894 - DNA, 25 bp, SARS Virus
ctcctcggtggtatgtgtcttctaa

SEQ ID NO: 14895 - DNA, 25 bp, SARS Virus
tcctcggtggttagtgtcttctaag

SEQ ID NO: 14896 - DNA, 25 bp, SARS Virus
cctcggtggtttatgtcttctaagg

SEQ ID NO: 14897 - DNA, 25 bp, SARS Virus
ctcggtggtttgagtcttctaaggt

SEQ ID NO: 14898 - DNA, 25 bp, SARS Virus
tcggtggtttgtatcttctaaggtt

SEQ ID NO: 14899 - DNA, 25 bp, SARS Virus
cggtggtttgtgacttctaaggttt

SEQ ID NO: 14900 - DNA, 25 bp, SARS Virus
ggtggtttgtgtattctaaggtttt

SEQ ID NO: 14901 - DNA, 25 bp, SARS Virus
gtggtttgtgtcatctaaggttttg

SEQ ID NO: 14902 - DNA, 25 bp, SARS Virus
tggtttgtgtctactaaggttttga

SEQ ID NO: 14903 - DNA, 25 bp, SARS Virus
ggtttgtgtcttataaggttttgac

SEQ ID NO: 14904 - DNA, 25 bp, SARS Virus
gtttgtgtcttcaaaggttttgact

SEQ ID NO: 14905 - DNA, 25 bp, SARS Virus
tttgtgtcttctaaggttttgactc

SEQ ID NO: 14906 - DNA, 25 bp, SARS Virus
ttgtgtcttctaaggttttgactcc

SEQ ID NO: 14907 - DNA, 25 bp, SARS Virus
tgtgtcttctaaagttttgactcct

SEQ ID NO: 14908 - DNA, 25 bp, SARS Virus
gtgtcttctaagattttgactcctc

SEQ ID NO: 14909 - DNA, 25 bp, SARS Virus
tgtcttctaaggatttgactcctct

SEQ ID NO: 14910 - DNA, 25 bp, SARS Virus
gtcttctaaggtattgactcctctt

SEQ ID NO: 14911 - DNA, 25 bp, SARS Virus
tcttctaaggttatgactcctcttt

SEQ ID NO: 14912 - DNA, 25 bp, SARS Virus
cttctaaggtttagactcctcttta

SEQ ID NO: 14913 - DNA, 25 bp, SARS Virus
ttctaaggttttaactcctctttag

SEQ ID NO: 14914 - DNA, 25 bp, SARS Virus
tctaaggttttgactcctctttaga

SEQ ID NO: 14915 - DNA, 25 bp, SARS Virus
ctaaggttttgaatcctctttagac

SEQ ID NO: 14916 - DNA, 25 bp, SARS Virus
taaggttttgacacctctttagaca

SEQ ID NO: 14917 - DNA, 25 bp, SARS Virus
aaggttttgactactctttagacag

SEQ ID NO: 14918 - DNA, 25 bp, SARS Virus
aggttttgactcatctttagacagc

SEQ ID NO: 14919 - DNA, 25 bp, SARS Virus
ggttttgactccactttagacagca

SEQ ID NO: 14920 - DNA, 25 bp, SARS Virus
gttttgactcctatttagacagcat

SEQ ID NO: 14921 - DNA, 25 bp, SARS Virus
ttttgactcctcattagacagcatg

SEQ ID NO: 14922 - DNA, 25 bp, SARS Virus
tttgactcctctatagacagcatgt

SEQ ID NO: 14923 - DNA, 25 bp, SARS Virus
ttgactcctcttaagacagcatgtc

SEQ ID NO: 14924 - DNA, 25 bp, SARS Virus
tgactcctctttagacagcatgtct

SEQ ID NO: 14925 - DNA, 25 bp, SARS Virus
gactcctctttaaacagcatgtctt

SEQ ID NO: 14926 - DNA, 25 bp, SARS Virus
actcctctttagacagcatgtcttc

SEQ ID NO: 14927 - DNA, 25 bp, SARS Virus
ctcctctttagaaagcatgtcttcg

SEQ ID NO: 14928 - DNA, 25 bp, SARS Virus
tcctctttagacagcatgtcttcgg

SEQ ID NO: 14929 - DNA, 25 bp, SARS Virus
cctctttagacaacatgtcttcgga

SEQ ID NO: 14930 - DNA, 25 bp, SARS Virus
ctctttagacagaatgtcttcggac

SEQ ID NO: 14931 - DNA, 25 bp, SARS Virus
tctttagacagcatgtcttcggaca

SEQ ID NO: 14932 - DNA, 25 bp, SARS Virus
ctttagacagcaagtcttcggacag

SEQ ID NO: 14933 - DNA, 25 bp, SARS Virus
tttagacagcatatcttcggacagc

SEQ ID NO: 14934 - DNA, 25 bp, SARS Virus
ttagacagcatgacttcggacagct

SEQ ID NO: 14935 - DNA, 25 bp, SARS Virus
tagacagcatgtattcggacagcta

SEQ ID NO: 14936 - DNA, 25 bp, SARS Virus
agacagcatgtcatcggacagctac

SEQ ID NO: 14937 - DNA, 25 bp, SARS Virus
gacagcatgtctacggacagctaca

SEQ ID NO: 14938 - DNA, 25 bp, SARS Virus
acagcatgtcttaggacagctacac

SEQ ID NO: 14939 - DNA, 25 bp, SARS Virus
cagcatgtcttcagacagctacact

SEQ ID NO: 14940 - DNA, 25 bp, SARS Virus
agcatgtcttcgaacagctacactt

SEQ ID NO: 14941 - DNA, 25 bp, SARS Virus
gcatgtcttcggacagctacacttc

SEQ ID NO: 14942 - DNA, 25 bp, SARS Virus
catgtcttcggaaagctacacttcg

SEQ ID NO: 14943 - DNA, 25 bp, SARS Virus
atgtcttcggacagctacacttcgg

SEQ ID NO: 14944 - DNA, 25 bp, SARS Virus
tgtcttcggacaactacacttcggt

SEQ ID NO: 14945 - DNA, 25 bp, SARS Virus
gtcttcggacagatacacttcggtt

SEQ ID NO: 14946 - DNA, 25 bp, SARS Virus
tcttcggacagcaacacttcggttt

SEQ ID NO: 14947 - DNA, 25 bp, SARS Virus
cttcggacagctacacttcggtttt

SEQ ID NO: 14948 - DNA, 25 bp, SARS Virus
ttcggacagctaaacttcggttttt

SEQ ID NO: 14949 - DNA, 25 bp, SARS Virus
tcggacagctacacttcggttttta

SEQ ID NO: 14950 - DNA, 25 bp, SARS Virus
cggacagctacaattcggtttttaa

SEQ ID NO: 14951 - DNA, 25 bp, SARS Virus
ggacagctacacatcggtttttaat

SEQ ID NO: 14952 - DNA, 25 bp, SARS Virus
gacagctacactacggtttttaatt

SEQ ID NO: 14953 - DNA, 25 bp, SARS Virus
acagctacacttaggtttttaattc

SEQ ID NO: 14954 - DNA, 25 bp, SARS Virus
cagctacacttcagtttttaattcc

SEQ ID NO: 14955 - DNA, 25 bp, SARS Virus
agctacacttcgatttttaattccg

SEQ ID NO: 14956 - DNA, 25 bp, SARS Virus
gctacacttcggattttaattccgg

SEQ ID NO: 14957 - DNA, 25 bp, SARS Virus
ctacacttcggtatttaattccgga

SEQ ID NO: 14958 - DNA, 25 bp, SARS Virus
tacacttcggttattaattccggac

SEQ ID NO: 14959 - DNA, 25 bp, SARS Virus
acacttcggtttataattccggacg

SEQ ID NO: 14960 - DNA, 25 bp, SARS Virus
cacttcggttttaaattccggacgt

SEQ ID NO: 14961 - DNA, 25 bp, SARS Virus
acttcggtttttaattccggacgta

SEQ ID NO: 14962 - DNA, 25 bp, SARS Virus
cttcggtttttaattccggacgtaa

SEQ ID NO: 14963 - DNA, 25 bp, SARS Virus
ttcggtttttaaatccggacgtaac

SEQ ID NO: 14964 - DNA, 25 bp, SARS Virus
tcggtttttaataccggacgtaact

SEQ ID NO: 14965 - DNA, 25 bp, SARS Virus
cggtttttaattacggacgtaacta

SEQ ID NO: 14966 - DNA, 25 bp, SARS Virus
ggtttttaattcaggacgtaactac

SEQ ID NO: 14967 - DNA, 25 bp, SARS Virus
gtttttaattccagacgtaactact

SEQ ID NO: 14968 - DNA, 25 bp, SARS Virus
tttttaattccgaacgtaactactc

SEQ ID NO: 14969 - DNA, 25 bp, SARS Virus
ttttaattccggacgtaactactcc

SEQ ID NO: 14970 - DNA, 25 bp, SARS Virus
tttaattccggaagtaactactcca

SEQ ID NO: 14971 - DNA, 25 bp, SARS Virus
ttaattccggacataactactccaa

SEQ ID NO: 14972 - DNA, 25 bp, SARS Virus
taattccggacgaaactactccaat

SEQ ID NO: 14973 - DNA, 25 bp, SARS Virus
aattccggacgtaactactccaatg

SEQ ID NO: 14974 - DNA, 25 bp, SARS Virus
attccggacgtaactactccaatgg

SEQ ID NO: 14975 - DNA, 25 bp, SARS Virus
ttccggacgtaaatactccaatggt

SEQ ID NO: 14976 - DNA, 25 bp, SARS Virus
tccggacgtaacaactccaatggtg

SEQ ID NO: 14977 - DNA, 25 bp, SARS Virus
ccggacgtaactactccaatggtgt

SEQ ID NO: 14978 - DNA, 25 bp, SARS Virus
cggacgtaactaatccaatggtgtt

SEQ ID NO: 14979 - DNA, 25 bp, SARS Virus
ggacgtaactacaccaatggtgttg

SEQ ID NO: 14980 - DNA, 25 bp, SARS Virus
gacgtaactactacaatggtgttgt

SEQ ID NO: 14981 - DNA, 25 bp, SARS Virus
acgtaactactcaaatggtgttgtg

SEQ ID NO: 14982 - DNA, 25 bp, SARS Virus
cgtaactactccaatggtgttgtga

SEQ ID NO: 14983 - DNA, 25 bp, SARS Virus
gtaactactccaatggtgttgtgac

SEQ ID NO: 14984 - DNA, 25 bp, SARS Virus
taactactccaaaggtgttgtgacc

SEQ ID NO: 14985 - DNA, 25 bp, SARS Virus
aactactccaatagtgttgtgacct

SEQ ID NO: 14986 - DNA, 25 bp, SARS Virus
actactccaatgatgttgtgacctt

SEQ ID NO: 14987 - DNA, 25 bp, SARS Virus
ctactccaatggagttgtgaccttc

SEQ ID NO: 14988 - DNA, 25 bp, SARS Virus
tactccaatggtattgtgaccttct

SEQ ID NO: 14989 - DNA, 25 bp, SARS Virus
actccaatggtgatgtgaccttctt

SEQ ID NO: 14990 - DNA, 25 bp, SARS Virus
ctccaatggtgtagtgaccttcttt

SEQ ID NO: 14991 - DNA, 25 bp, SARS Virus
tccaatggtgttatgaccttctttg

SEQ ID NO: 14992 - DNA, 25 bp, SARS Virus
ccaatggtgttgagaccttctttga

SEQ ID NO: 14993 - DNA, 25 bp, SARS Virus
caatggtgttgtaaccttctttgat

SEQ ID NO: 14994 - DNA, 25 bp, SARS Virus
aatggtgttgtgaccttctttgatt

SEQ ID NO: 14995 - DNA, 25 bp, SARS Virus
atggtgttgtgaacttctttgattc

SEQ ID NO: 14996 - DNA, 25 bp, SARS Virus
tggtgttgtgacattctttgattca

SEQ ID NO: 14997 - DNA, 25 bp, SARS Virus
ggtgttgtgaccatctttgattcaa

SEQ ID NO: 14998 - DNA, 25 bp, SARS Virus
gtgttgtgacctactttgattcaaa

SEQ ID NO: 14999 - DNA, 25 bp, SARS Virus
tgttgtgaccttatttgattcaaag

SEQ ID NO: 15000 - DNA, 25 bp, SARS Virus
gttgtgaccttcattgattcaaaga

SEQ ID NO: 15001 - DNA, 25 bp, SARS Virus
ttgtgaccttctatgattcaaagaa

SEQ ID NO: 15002 - DNA, 25 bp, SARS Virus
tgtgaccttcttagattcaaagaat

SEQ ID NO: 15003 - DNA, 25 bp, SARS Virus
gtgaccttctttaattcaaagaatg

SEQ ID NO: 15004 - DNA, 25 bp, SARS Virus
tgaccttctttgattcaaagaatgg

SEQ ID NO: 15005 - DNA, 25 bp, SARS Virus
gaccttctttgaatcaaagaatggt

SEQ ID NO: 15006 - DNA, 25 bp, SARS Virus
accttctttgatacaaagaatggtt

SEQ ID NO: 15007 - DNA, 25 bp, SARS Virus
ccttctttgattaaaagaatggtta

SEQ ID NO: 15008 - DNA, 25 bp, SARS Virus
cttctttgattcaaagaatggttat

SEQ ID NO: 15009 - DNA, 25 bp, SARS Virus
ttctttgattcaaagaatggttatt

SEQ ID NO: 15010 - DNA, 25 bp, SARS Virus
tctttgattcaaagaatggttattc

SEQ ID NO: 15011 - DNA, 25 bp, SARS Virus
ctttgattcaaaaaatggttattca

SEQ ID NO: 15012 - DNA, 25 bp, SARS Virus
tttgattcaaagaatggttattcaa

SEQ ID NO: 15013 - DNA, 25 bp, SARS Virus
ttgattcaaagaatggttattcaat

SEQ ID NO: 15014 - DNA, 25 bp, SARS Virus
tgattcaaagaaaggttattcaatg

SEQ ID NO: 15015 - DNA, 25 bp, SARS Virus
gattcaaagaatagttattcaatga

SEQ ID NO: 15016 - DNA, 25 bp, SARS Virus
attcaaagaatgattattcaatgag

SEQ ID NO: 15017 - DNA, 25 bp, SARS Virus
ttcaaagaatggatattcaatgaga

SEQ ID NO: 15018 - DNA, 25 bp, SARS Virus
tcaaagaatggtaattcaatgagaa

SEQ ID NO: 15019 - DNA, 25 bp, SARS Virus
caaagaatggttattcaatgagaac

SEQ ID NO: 15020 - DNA, 25 bp, SARS Virus
aaagaatggttaatcaatgagaaca

SEQ ID NO: 15021 - DNA, 25 bp, SARS Virus
aagaatggttatacaatgagaacaa

SEQ ID NO: 15022 - DNA, 25 bp, SARS Virus
agaatggttattaaatgagaacaaa

SEQ ID NO: 15023 - DNA, 25 bp, SARS Virus
gaatggttattcaatgagaacaaac

SEQ ID NO: 15024 - DNA, 25 bp, SARS Virus
aatggttattcaatgagaacaaacg

SEQ ID NO: 15025 - DNA, 25 bp, SARS Virus
atggttattcaaagagaacaaacga

SEQ ID NO: 15026 - DNA, 25 bp, SARS Virus
tggttattcaataagaacaaacgac

SEQ ID NO: 15027 - DNA, 25 bp, SARS Virus
ggttattcaatgagaacaaacgact

SEQ ID NO: 15028 - DNA, 25 bp, SARS Virus
gttattcaatgaaaacaaacgacta

SEQ ID NO: 15029 - DNA, 25 bp, SARS Virus
ttattcaatgagaacaaacgactat

SEQ ID NO: 15030 - DNA, 25 bp, SARS Virus
tattcaatgagaacaaacgactata

SEQ ID NO: 15031 - DNA, 25 bp, SARS Virus
attcaatgagaaaaaacgactatag

SEQ ID NO: 15032 - DNA, 25 bp, SARS Virus
ttcaatgagaacaaacgactatagt

SEQ ID NO: 15033 - DNA, 25 bp, SARS Virus
tcaatgagaacaaacgactatagtt

SEQ ID NO: 15034 - DNA, 25 bp, SARS Virus
caatgagaacaaacgactatagtta

SEQ ID NO: 15035 - DNA, 25 bp, SARS Virus
aatgagaacaaaagactatagttac

SEQ ID NO: 15036 - DNA, 25 bp, SARS Virus
atgagaacaaacaactatagttacc

SEQ ID NO: 15037 - DNA, 25 bp, SARS Virus
tgagaacaaacgactatagttacca

SEQ ID NO: 15038 - DNA, 25 bp, SARS Virus
gagaacaaacgaatatagttaccat

SEQ ID NO: 15039 - DNA, 25 bp, SARS Virus
agaacaaacgacaatagttaccatt

SEQ ID NO: 15040 - DNA, 25 bp, SARS Virus
gaacaaacgactatagttaccattc

SEQ ID NO: 15041 - DNA, 25 bp, SARS Virus
aacaaacgactaaagttaccattcg

SEQ ID NO: 15042 - DNA, 25 bp, SARS Virus
acaaacgactatagttaccattcga

SEQ ID NO: 15043 - DNA, 25 bp, SARS Virus
caaacgactataattaccattcgaa

SEQ ID NO: 15044 - DNA, 25 bp, SARS Virus
aaacgactatagataccattcgaaa

SEQ ID NO: 15045 - DNA, 25 bp, SARS Virus
aacgactatagtaaccattcgaaat

SEQ ID NO: 15046 - DNA, 25 bp, SARS Virus
acgactatagttaccattcgaaatg

SEQ ID NO: 15047 - DNA, 25 bp, SARS Virus
cgactatagttaacattcgaaatgg

SEQ ID NO: 15048 - DNA, 25 bp, SARS Virus
gactatagttacaattcgaaatggt

SEQ ID NO: 15049 - DNA, 25 bp, SARS Virus
actatagttaccattcgaaatggta

SEQ ID NO: 15050 - DNA, 25 bp, SARS Virus
ctatagttaccaatcgaaatggtac

SEQ ID NO: 15051 - DNA, 25 bp, SARS Virus
tatagttaccatacgaaatggtact

SEQ ID NO: 15052 - DNA, 25 bp, SARS Virus
atagttaccattagaaatggtacta

SEQ ID NO: 15053 - DNA, 25 bp, SARS Virus
tagttaccattcaaaatggtactaa

SEQ ID NO: 15054 - DNA, 25 bp, SARS Virus
agttaccattcgaaatggtactaag

SEQ ID NO: 15055 - DNA, 25 bp, SARS Virus
gttaccattcgaaatggtactaaga

SEQ ID NO: 15056 - DNA, 25 bp, SARS Virus
ttaccattcgaaatggtactaagag

SEQ ID NO: 15057 - DNA, 25 bp, SARS Virus
taccattcgaaaaggtactaagagt

SEQ ID NO: 15058 - DNA, 25 bp, SARS Virus
accattcgaaatagtactaagagtc

SEQ ID NO: 15059 - DNA, 25 bp, SARS Virus
ccattcgaaatgatactaagagtct

SEQ ID NO: 15060 - DNA, 25 bp, SARS Virus
cattcgaaatggaactaagagtctt

SEQ ID NO: 15061 - DNA, 25 bp, SARS Virus
attcgaaatggtactaagagtcttg

SEQ ID NO: 15062 - DNA, 25 bp, SARS Virus
ttcgaaatggtaataagagtcttgt

SEQ ID NO: 15063 - DNA, 25 bp, SARS Virus
tcgaaatggtacaaagagtcttgta

SEQ ID NO: 15064 - DNA, 25 bp, SARS Virus
cgaaatggtactaagagtcttgtac

SEQ ID NO: 15065 - DNA, 25 bp, SARS Virus
gaaatggtactaagagtcttgtacg

SEQ ID NO: 15066 - DNA, 25 bp, SARS Virus
aaatggtactaaaagtcttgtacga

SEQ ID NO: 15067 - DNA, 25 bp, SARS Virus
aatggtactaagagtcttgtacgaa

SEQ ID NO: 15068 - DNA, 25 bp, SARS Virus
atggtactaagaatcttgtacgaat

SEQ ID NO: 15069 - DNA, 25 bp, SARS Virus
tggtactaagagacttgtacgaatc

SEQ ID NO: 15070 - DNA, 25 bp, SARS Virus
ggtactaagagtattgtacgaatct

SEQ ID NO: 15071 - DNA, 25 bp, SARS Virus
gtactaagagtcatgtacgaatctc

SEQ ID NO: 15072 - DNA, 25 bp, SARS Virus
tactaagagtctagtacgaatctcc

SEQ ID NO: 15073 - DNA, 25 bp, SARS Virus
actaagagtcttatacgaatctcca

SEQ ID NO: 15074 - DNA, 25 bp, SARS Virus
ctaagagtcttgaacgaatctccac

SEQ ID NO: 15075 - DNA, 25 bp, SARS Virus
taagagtcttgtacgaatctccact

SEQ ID NO: 15076 - DNA, 25 bp, SARS Virus
aagagtcttgtaagaatctccactt

SEQ ID NO: 15077 - DNA, 25 bp, SARS Virus
agagtcttgtacaaatctccacttc

SEQ ID NO: 15078 - DNA, 25 bp, SARS Virus
gagtcttgtacgaatctccacttct

SEQ ID NO: 15079 - DNA, 25 bp, SARS Virus
agtcttgtacgaatctccacttcta

SEQ ID NO: 15080 - DNA, 25 bp, SARS Virus
gtcttgtacgaaactccacttctat

SEQ ID NO: 15081 - DNA, 25 bp, SARS Virus
tcttgtacgaatatccacttctata

SEQ ID NO: 15082 - DNA, 25 bp, SARS Virus
cttgtacgaatcaccacttctatac

SEQ ID NO: 15083 - DNA, 25 bp, SARS Virus
ttgtacgaatctacacttctataca

SEQ ID NO: 15084 - DNA, 25 bp, SARS Virus
tgtacgaatctcaacttctatacag

SEQ ID NO: 15085 - DNA, 25 bp, SARS Virus
gtacgaatctccacttctatacaga

SEQ ID NO: 15086 - DNA, 25 bp, SARS Virus
tacgaatctccaattctatacagaa

SEQ ID NO: 15087 - DNA, 25 bp, SARS Virus
acgaatctccacatctatacagaaa

SEQ ID NO: 15088 - DNA, 25 bp, SARS Virus
cgaatctccactactatacagaaag

SEQ ID NO: 15089 - DNA, 25 bp, SARS Virus
gaatctccacttatatacagaaagg

SEQ ID NO: 15090 - DNA, 25 bp, SARS Virus
aatctccacttcaatacagaaagga

SEQ ID NO: 15091 - DNA, 25 bp, SARS Virus
atctccacttctatacagaaaggaa

SEQ ID NO: 15092 - DNA, 25 bp, SARS Virus
tctccacttctaaacagaaaggaac

SEQ ID NO: 15093 - DNA, 25 bp, SARS Virus
ctccacttctatacagaaaggaact

SEQ ID NO: 15094 - DNA, 25 bp, SARS Virus
tccacttctataaagaaaggaactc

SEQ ID NO: 15095 - DNA, 25 bp, SARS Virus
ccacttctatacagaaaggaactct

SEQ ID NO: 15096 - DNA, 25 bp, SARS Virus
cacttctatacaaaaaggaactctt

SEQ ID NO: 15097 - DNA, 25 bp, SARS Virus
acttctatacagaaaggaactcttc

SEQ ID NO: 15098 - DNA, 25 bp, SARS Virus
cttctatacagaaaggaactcttcc

SEQ ID NO: 15099 - DNA, 25 bp, SARS Virus
ttctatacagaaaggaactcttcct

SEQ ID NO: 15100 - DNA, 25 bp, SARS Virus
tctatacagaaaagaactcttccta

SEQ ID NO: 15101 - DNA, 25 bp, SARS Virus
ctatacagaaagaaactcttcctac

SEQ ID NO: 15102 - DNA, 25 bp, SARS Virus
tatacagaaaggaactcttcctacg

SEQ ID NO: 15103 - DNA, 25 bp, SARS Virus
atacagaaaggaactcttcctacgt

SEQ ID NO: 15104 - DNA, 25 bp, SARS Virus
tacagaaaggaaatcttcctacgtg

SEQ ID NO: 15105 - DNA, 25 bp, SARS Virus
acagaaaggaacacttcctacgtgg

SEQ ID NO: 15106 - DNA, 25 bp, SARS Virus
cagaaaggaactattcctacgtgga

SEQ ID NO: 15107 - DNA, 25 bp, SARS Virus
agaaaggaactcatcctacgtggaa

SEQ ID NO: 15108 - DNA, 25 bp, SARS Virus
gaaaggaactctacctacgtggaat

SEQ ID NO: 15109 - DNA, 25 bp, SARS Virus
aaaggaactcttactacgtggaatg

SEQ ID NO: 15110 - DNA, 25 bp, SARS Virus
aaggaactcttcatacgtggaatgt

SEQ ID NO: 15111 - DNA, 25 bp, SARS Virus
aggaactcttccaacgtggaatgta

SEQ ID NO: 15112 - DNA, 25 bp, SARS Virus
ggaactcttcctacgtggaatgtac

SEQ ID NO: 15113 - DNA, 25 bp, SARS Virus
gaactcttcctaagtggaatgtacc

SEQ ID NO: 15114 - DNA, 25 bp, SARS Virus
aactcttcctacatggaatgtacca

SEQ ID NO: 15115 - DNA, 25 bp, SARS Virus
actcttcctacgaggaatgtaccat

SEQ ID NO: 15116 - DNA, 25 bp, SARS Virus
ctcttcctacgtagaatgtaccatc

SEQ ID NO: 15117 - DNA, 25 bp, SARS Virus
tcttcctacgtgaaatgtaccatcc

SEQ ID NO: 15118 - DNA, 25 bp, SARS Virus
cttcctacgtggaatgtaccatcca

SEQ ID NO: 15119 - DNA, 25 bp, SARS Virus
ttcctacgtggaatgtaccatccac

SEQ ID NO: 15120 - DNA, 25 bp, SARS Virus
tcctacgtggaaagtaccatccact

SEQ ID NO: 15121 - DNA, 25 bp, SARS Virus
cctacgtggaatataccatccacta

SEQ ID NO: 15122 - DNA, 25 bp, SARS Virus
ctacgtggaatgaaccatccactac

SEQ ID NO: 15123 - DNA, 25 bp, SARS Virus
tacgtggaatgtaccatccactaca

SEQ ID NO: 15124 - DNA, 25 bp, SARS Virus
acgtggaatgtaacatccactacaa

SEQ ID NO: 15125 - DNA, 25 bp, SARS Virus
cgtggaatgtacaatccactacaat

SEQ ID NO: 15126 - DNA, 25 bp, SARS Virus
gtggaatgtaccatccactacaata

SEQ ID NO: 15127 - DNA, 25 bp, SARS Virus
tggaatgtaccaaccactacaatag

SEQ ID NO: 15128 - DNA, 25 bp, SARS Virus
ggaatgtaccatacactacaatagt

SEQ ID NO: 15129 - DNA, 25 bp, SARS Virus
gaatgtaccatcaactacaatagtg

SEQ ID NO: 15130 - DNA, 25 bp, SARS Virus
aatgtaccatccactacaatagtga

SEQ ID NO: 15131 - DNA, 25 bp, SARS Virus
atgtaccatccaatacaatagtgat

SEQ ID NO: 15132 - DNA, 25 bp, SARS Virus
tgtaccatccacaacaatagtgatc

SEQ ID NO: 15133 - DNA, 25 bp, SARS Virus
gtaccatccactacaatagtgatca

SEQ ID NO: 15134 - DNA, 25 bp, SARS Virus
taccatccactaaaatagtgatcac

SEQ ID NO: 15135 - DNA, 25 bp, SARS Virus
accatccactacaatagtgatcacc

SEQ ID NO: 15136 - DNA, 25 bp, SARS Virus
ccatccactacaatagtgatcacca

SEQ ID NO: 15137 - DNA, 25 bp, SARS Virus
catccactacaaaagtgatcaccac

SEQ ID NO: 15138 - DNA, 25 bp, SARS Virus
atccactacaatagtgatcaccact

SEQ ID NO: 15139 - DNA, 25 bp, SARS Virus
tccactacaataatgatcaccacta

SEQ ID NO: 15140 - DNA, 25 bp, SARS Virus
ccactacaatagagatcaccactat

SEQ ID NO: 15141 - DNA, 25 bp, SARS Virus
cactacaatagtaatcaccactata

SEQ ID NO: 15142 - DNA, 25 bp, SARS Virus
actacaatagtgatcaccactatag

SEQ ID NO: 15143 - DNA, 25 bp, SARS Virus
ctacaatagtgaacaccactatagt

SEQ ID NO: 15144 - DNA, 25 bp, SARS Virus
tacaatagtgataaccactatagtg

SEQ ID NO: 15145 - DNA, 25 bp, SARS Virus
acaatagtgatcaccactatagtga

SEQ ID NO: 15146 - DNA, 25 bp, SARS Virus
caatagtgatcaacactatagtgaa

SEQ ID NO: 15147 - DNA, 25 bp, SARS Virus
aatagtgatcacaactatagtgaac

SEQ ID NO: 15148 - DNA, 25 bp, SARS Virus
atagtgatcaccactatagtgaaca

SEQ ID NO: 15149 - DNA, 25 bp, SARS Virus
tagtgatcaccaatatagtgaacac

SEQ ID NO: 15150 - DNA, 25 bp, SARS Virus
agtgatcaccacaatagtgaacaca

SEQ ID NO: 15151 - DNA, 25 bp, SARS Virus
gtgatcaccactatagtgaacacaa

SEQ ID NO: 15152 - DNA, 25 bp, SARS Virus
tgatcaccactaaagtgaacacaac

SEQ ID NO: 15153 - DNA, 25 bp, SARS Virus
gatcaccactatagtgaacacaaca

SEQ ID NO: 15154 - DNA, 25 bp, SARS Virus
atcaccactataatgaacacaacat

SEQ ID NO: 15155 - DNA, 25 bp, SARS Virus
tcaccactatagagaacacaacatt

SEQ ID NO: 15156 - DNA, 25 bp, SARS Virus
caccactatagtaaacacaacatta

SEQ ID NO: 15157 - DNA, 25 bp, SARS Virus
accactatagtgaacacaacattat

SEQ ID NO: 15158 - DNA, 25 bp, SARS Virus
ccactatagtgaacacaacattatg

SEQ ID NO: 15159 - DNA, 25 bp, SARS Virus
cactatagtgaaaacaacattatgg

SEQ ID NO: 15160 - DNA, 25 bp, SARS Virus
actatagtgaacacaacattatggg

SEQ ID NO: 15161 - DNA, 25 bp, SARS Virus
ctatagtgaacaaaacattatggga

SEQ ID NO: 15162 - DNA, 25 bp, SARS Virus
tatagtgaacacaacattatgggag

SEQ ID NO: 15163 - DNA, 25 bp, SARS Virus
atagtgaacacaacattatgggagg

SEQ ID NO: 15164 - DNA, 25 bp, SARS Virus
tagtgaacacaaaattatgggaggt

SEQ ID NO: 15165 - DNA, 25 bp, SARS Virus
agtgaacacaacattatgggaggtt

SEQ ID NO: 15166 - DNA, 25 bp, SARS Virus
gtgaacacaacaatatgggaggttt

SEQ ID NO: 15167 - DNA, 25 bp, SARS Virus
tgaacacaacataatgggaggtttt

SEQ ID NO: 15168 - DNA, 25 bp, SARS Virus
gaacacaacattatgggaggttttt

SEQ ID NO: 15169 - DNA, 25 bp, SARS Virus
aacacaacattaagggaggtttttc

SEQ ID NO: 15170 - DNA, 25 bp, SARS Virus
acacaacattataggaggtttttcc

SEQ ID NO: 15171 - DNA, 25 bp, SARS Virus
cacaacattatgagaggtttttccg

SEQ ID NO: 15172 - DNA, 25 bp, SARS Virus
acaacattatggaaggtttttccga

SEQ ID NO: 15173 - DNA, 25 bp, SARS Virus
caacattatgggaggtttttccgac

SEQ ID NO: 15174 - DNA, 25 bp, SARS Virus
aacattatgggaagtttttccgacc

SEQ ID NO: 15175 - DNA, 25 bp, SARS Virus
acattatgggagatttttccgacca

SEQ ID NO: 15176 - DNA, 25 bp, SARS Virus
cattatgggaggattttccgaccac

SEQ ID NO: 15177 - DNA, 25 bp, SARS Virus
attatgggaggtatttccgaccacc

SEQ ID NO: 15178 - DNA, 25 bp, SARS Virus
ttatgggaggttattccgaccaccg

SEQ ID NO: 15179 - DNA, 25 bp, SARS Virus
tatgggaggtttatccgaccaccgt

SEQ ID NO: 15180 - DNA, 25 bp, SARS Virus
atgggaggttttaccgaccaccgtg

SEQ ID NO: 15181 - DNA, 25 bp, SARS Virus
tgggaggtttttacgaccaccgtga

SEQ ID NO: 15182 - DNA, 25 bp, SARS Virus
gggaggtttttcagaccaccgtgat

SEQ ID NO: 15183 - DNA, 25 bp, SARS Virus
ggaggtttttccaaccaccgtgatg

SEQ ID NO: 15184 - DNA, 25 bp, SARS Virus
gaggtttttccgaccaccgtgatga

SEQ ID NO: 15185 - DNA, 25 bp, SARS Virus
aggtttttccgaacaccgtgatgac

SEQ ID NO: 15186 - DNA, 25 bp, SARS Virus
ggtttttccgacaaccgtgatgact

SEQ ID NO: 15187 - DNA, 25 bp, SARS Virus
gtttttccgaccaccgtgatgactc

SEQ ID NO: 15188 - DNA, 25 bp, SARS Virus
tttttccgaccaacgtgatgactct

SEQ ID NO: 15189 - DNA, 25 bp, SARS Virus
ttttccgaccacagtgatgactcta

SEQ ID NO: 15190 - DNA, 25 bp, SARS Virus
tttccgaccaccatgatgactctac

SEQ ID NO: 15191 - DNA, 25 bp, SARS Virus
ttccgaccaccgagatgactctacg

SEQ ID NO: 15192 - DNA, 25 bp, SARS Virus
tccgaccaccgtaatgactctacga

SEQ ID NO: 15193 - DNA, 25 bp, SARS Virus
ccgaccaccgtgatgactctacgag

SEQ ID NO: 15194 - DNA, 25 bp, SARS Virus
cgaccaccgtgaagactctacgaga

SEQ ID NO: 15195 - DNA, 25 bp, SARS Virus
gaccaccgtgataactctacgagag

SEQ ID NO: 15196 - DNA, 25 bp, SARS Virus
accaccgtgatgactctacgagagt

SEQ ID NO: 15197 - DNA, 25 bp, SARS Virus
ccaccgtgatgaatctacgagagtt

SEQ ID NO: 15198 - DNA, 25 bp, SARS Virus
caccgtgatgacactacgagagttc

SEQ ID NO: 15199 - DNA, 25 bp, SARS Virus
accgtgatgactatacgagagttct

SEQ ID NO: 15200 - DNA, 25 bp, SARS Virus
ccgtgatgactcaacgagagttctc

SEQ ID NO: 15201 - DNA, 25 bp, SARS Virus
cgtgatgactctacgagagttctcg

SEQ ID NO: 15202 - DNA, 25 bp, SARS Virus
gtgatgactctaagagagttctcga

SEQ ID NO: 15203 - DNA, 25 bp, SARS Virus
tgatgactctacaagagttctcgaa

SEQ ID NO: 15204 - DNA, 25 bp, SARS Virus
gatgactctacgagagttctcgaaa

SEQ ID NO: 15205 - DNA, 25 bp, SARS Virus
atgactctacgaaagttctcgaaac

SEQ ID NO: 15206 - DNA, 25 bp, SARS Virus
tgactctacgagagttctcgaaact

SEQ ID NO: 15207 - DNA, 25 bp, SARS Virus
gactctacgagaattctcgaaactt

SEQ ID NO: 15208 - DNA, 25 bp, SARS Virus
actctacgagagatctcgaaacttc

SEQ ID NO: 15209 - DNA, 25 bp, SARS Virus
ctctacgagagtactcgaaacttct

SEQ ID NO: 15210 - DNA, 25 bp, SARS Virus
tctacgagagttatcgaaacttctt

SEQ ID NO: 15211 - DNA, 25 bp, SARS Virus
ctacgagagttcacgaaacttcttt

SEQ ID NO: 15212 - DNA, 25 bp, SARS Virus
tacgagagttctagaaacttctttc

SEQ ID NO: 15213 - DNA, 25 bp, SARS Virus
acgagagttctcaaaacttctttca

SEQ ID NO: 15214 - DNA, 25 bp, SARS Virus
cgagagttctcgaaacttctttcac

SEQ ID NO: 15215 - DNA, 25 bp, SARS Virus
gagagttctcgaaacttctttcacg

SEQ ID NO: 15216 - DNA, 25 bp, SARS Virus
agagttctcgaaacttctttcacgg

SEQ ID NO: 15217 - DNA, 25 bp, SARS Virus
gagttctcgaaaattctttcacggt

SEQ ID NO: 15218 - DNA, 25 bp, SARS Virus
agttctcgaaacatctttcacggtc

SEQ ID NO: 15219 - DNA, 25 bp, SARS Virus
gttctcgaaactactttcacggtca

SEQ ID NO: 15220 - DNA, 25 bp, SARS Virus
ttctcgaaacttatttcacggtcaa

SEQ ID NO: 15221 - DNA, 25 bp, SARS Virus
tctcgaaacttcattcacggtcaac

SEQ ID NO: 15222 - DNA, 25 bp, SARS Virus
ctcgaaacttctatcacggtcaact

SEQ ID NO: 15223 - DNA, 25 bp, SARS Virus
tcgaaacttcttacacggtcaacta

SEQ ID NO: 15224 - DNA, 25 bp, SARS Virus
cgaaacttctttaacggtcaactac

SEQ ID NO: 15225 - DNA, 25 bp, SARS Virus
gaaacttctttcacggtcaactact

SEQ ID NO: 15226 - DNA, 25 bp, SARS Virus
aaacttctttcaaggtcaactactc

SEQ ID NO: 15227 - DNA, 25 bp, SARS Virus
aacttctttcacagtcaactactca

SEQ ID NO: 15228 - DNA, 25 bp, SARS Virus
acttctttcacgatcaactactcat

SEQ ID NO: 15229 - DNA, 25 bp, SARS Virus
cttctttcacggacaactactcata

SEQ ID NO: 15230 - DNA, 25 bp, SARS Virus
ttctttcacggtaaactactcatat

SEQ ID NO: 15231 - DNA, 25 bp, SARS Virus
tctttcacggtcaactactcatata

SEQ ID NO: 15232 - DNA, 25 bp, SARS Virus
ctttcacggtcaactactcatatat

SEQ ID NO: 15233 - DNA, 25 bp, SARS Virus
tttcacggtcaaatactcatatatt

SEQ ID NO: 15234 - DNA, 25 bp, SARS Virus
ttcacggtcaacaactcatatattg

SEQ ID NO: 15235 - DNA, 25 bp, SARS Virus
tcacggtcaactactcatatattgg

SEQ ID NO: 15236 - DNA, 25 bp, SARS Virus
cacggtcaactaatcatatattggt

SEQ ID NO: 15237 - DNA, 25 bp, SARS Virus
acggtcaactacacatatattggtg

SEQ ID NO: 15238 - DNA, 25 bp, SARS Virus
cggtcaactactaatatattggtgc

SEQ ID NO: 15239 - DNA, 25 bp, SARS Virus
ggtcaactactcatatattggtgca

SEQ ID NO: 15240 - DNA, 25 bp, SARS Virus
gtcaactactcaaatattggtgcat

SEQ ID NO: 15241 - DNA, 25 bp, SARS Virus
tcaactactcatatattggtgcatg

SEQ ID NO: 15242 - DNA, 25 bp, SARS Virus
caactactcataaattggtgcatgg

SEQ ID NO: 15243 - DNA, 25 bp, SARS Virus
aactactcatatattggtgcatggg

SEQ ID NO: 15244 - DNA, 25 bp, SARS Virus
actactcatataatggtgcatggga

SEQ ID NO: 15245 - DNA, 25 bp, SARS Virus
ctactcatatataggtgcatgggac

SEQ ID NO: 15246 - DNA, 25 bp, SARS Virus
tactcatatattagtgcatgggacc

SEQ ID NO: 15247 - DNA, 25 bp, SARS Virus
actcatatattgatgcatgggacct

SEQ ID NO: 15248 - DNA, 25 bp, SARS Virus
ctcatatattggagcatgggacctg

SEQ ID NO: 15249 - DNA, 25 bp, SARS Virus
tcatatattggtacatgggacctgt

SEQ ID NO: 15250 - DNA, 25 bp, SARS Virus
catatattggtgaatgggacctgtt

SEQ ID NO: 15251 - DNA, 25 bp, SARS Virus
atatattggtgcatgggacctgttc

SEQ ID NO: 15252 - DNA, 25 bp, SARS Virus
tatattggtgcaagggacctgttcc

SEQ ID NO: 15253 - DNA, 25 bp, SARS Virus
atattggtgcataggacctgttcct

SEQ ID NO: 15254 - DNA, 25 bp, SARS Virus
tattggtgcatgagacctgttccta

SEQ ID NO: 15255 - DNA, 25 bp, SARS Virus
attggtgcatggaacctgttcctac

SEQ ID NO: 15256 - DNA, 25 bp, SARS Virus
ttggtgcatgggacctgttcctaca

SEQ ID NO: 15257 - DNA, 25 bp, SARS Virus
atgttcacacgcccgtctgccaagc

SEQ ID NO: 15258 - DNA, 25 bp, SARS Virus
tgttcacacgcacgtctgccaagca

SEQ ID NO: 15259 - DNA, 25 bp, SARS Virus
gttcacacgcacctctgccaagcat

SEQ ID NO: 15260 - DNA, 25 bp, SARS Virus
ttcacacgcacgcctgccaagcatg

SEQ ID NO: 15261 - DNA, 25 bp, SARS Virus
tcacacgcacgtctgccaagcatgt

SEQ ID NO: 15262 - DNA, 25 bp, SARS Virus
cacacgcacgtccgccaagcatgtg

SEQ ID NO: 15263 - DNA, 25 bp, SARS Virus
acacgcacgtctcccaagcatgtgt

SEQ ID NO: 15264 - DNA, 25 bp, SARS Virus
cacgcacgtctgccaagcatgtgtc

SEQ ID NO: 15265 - DNA, 25 bp, SARS Virus
acgcacgtctgccaagcatgtgtcc

SEQ ID NO: 15266 - DNA, 25 bp, SARS Virus
cgcacgtctgcccagcatgtgtcca

SEQ ID NO: 15267 - DNA, 25 bp, SARS Virus
gcacgtctgccacgcatgtgtccaa

SEQ ID NO: 15268 - DNA, 25 bp, SARS Virus
cacgtctgccaaccatgtgtccaaa

SEQ ID NO: 15269 - DNA, 25 bp, SARS Virus
acgtctgccaagcatgtgtccaaat

SEQ ID NO: 15270 - DNA, 25 bp, SARS Virus
cgtctgccaagcctgtgtccaaata

SEQ ID NO: 15271 - DNA, 25 bp, SARS Virus
gtctgccaagcacgtgtccaaatat

SEQ ID NO: 15272 - DNA, 25 bp, SARS Virus
tctgccaagcatctgtccaaatata

SEQ ID NO: 15273 - DNA, 25 bp, SARS Virus
ctgccaagcatgcgtccaaatataa

SEQ ID NO: 15274 - DNA, 25 bp, SARS Virus
tgccaagcatgtctccaaatataac

SEQ ID NO: 15275 - DNA, 25 bp, SARS Virus
gccaagcatgtgcccaaatataacg

SEQ ID NO: 15276 - DNA, 25 bp, SARS Virus
ccaagcatgtgtccaaatataacgt

SEQ ID NO: 15277 - DNA, 25 bp, SARS Virus
caagcatgtgtccaaatataacgtc

SEQ ID NO: 15278 - DNA, 25 bp, SARS Virus
aagcatgtgtcccaatataacgtca

SEQ ID NO: 15279 - DNA, 25 bp, SARS Virus
agcatgtgtccacatataacgtcag

SEQ ID NO: 15280 - DNA, 25 bp, SARS Virus
gcatgtgtccaactataacgtcagt

SEQ ID NO: 15281 - DNA, 25 bp, SARS Virus
catgtgtccaaacataacgtcagtt

SEQ ID NO: 15282 - DNA, 25 bp, SARS Virus
atgtgtccaaatctaacgtcagtta

SEQ ID NO: 15283 - DNA, 25 bp, SARS Virus
tgtgtccaaatacaacgtcagttac

SEQ ID NO: 15284 - DNA, 25 bp, SARS Virus
gtgtccaaatatcacgtcagttact

SEQ ID NO: 15285 - DNA, 25 bp, SARS Virus
tgtccaaatataccgtcagttactg

SEQ ID NO: 15286 - DNA, 25 bp, SARS Virus
gtccaaatataacgtcagttactgt

SEQ ID NO: 15287 - DNA, 25 bp, SARS Virus
tccaaatataacctcagttactgtt

SEQ ID NO: 15288 - DNA, 25 bp, SARS Virus
ccaaatataacgccagttactgttt

SEQ ID NO: 15289 - DNA, 25 bp, SARS Virus
caaatataacgtcagttactgtttc

SEQ ID NO: 15290 - DNA, 25 bp, SARS Virus
aaatataacgtccgttactgtttcg

SEQ ID NO: 15291 - DNA, 25 bp, SARS Virus
aatataacgtcacttactgtttcga

SEQ ID NO: 15292 - DNA, 25 bp, SARS Virus
atataacgtcagctactgtttcgag

SEQ ID NO: 15293 - DNA, 25 bp, SARS Virus
tataacgtcagtcactgtttcgaga

SEQ ID NO: 15294 - DNA, 25 bp, SARS Virus
ataacgtcagttcctgtttcgagaa

SEQ ID NO: 15295 - DNA, 25 bp, SARS Virus
taacgtcagttactgtttcgagaaa

SEQ ID NO: 15296 - DNA, 25 bp, SARS Virus
aacgtcagttaccgtttcgagaaat

SEQ ID NO: 15297 - DNA, 25 bp, SARS Virus
acgtcagttactctttcgagaaata

SEQ ID NO: 15298 - DNA, 25 bp, SARS Virus
cgtcagttactgcttcgagaaatac

SEQ ID NO: 15299 - DNA, 25 bp, SARS Virus
gtcagttactgtctcgagaaatact

SEQ ID NO: 15300 - DNA, 25 bp, SARS Virus
tcagttactgttccgagaaatactc

SEQ ID NO: 15301 - DNA, 25 bp, SARS Virus
cagttactgtttcgagaaatactcg

SEQ ID NO: 15302 - DNA, 25 bp, SARS Virus
agttactgtttccagaaatactcgt

SEQ ID NO: 15303 - DNA, 25 bp, SARS Virus
gttactgtttcgcgaaatactcgtc

SEQ ID NO: 15304 - DNA, 25 bp, SARS Virus
ttactgtttcgacaaatactcgtcc

SEQ ID NO: 15305 - DNA, 25 bp, SARS Virus
tactgtttcgagcaatactcgtcca

SEQ ID NO: 15306 - DNA, 25 bp, SARS Virus
actgtttcgagacatactcgtccaa

SEQ ID NO: 15307 - DNA, 25 bp, SARS Virus
ctgtttcgagaactactcgtccaac

SEQ ID NO: 15308 - DNA, 25 bp, SARS Virus
tgtttcgagaaacactcgtccaaca

SEQ ID NO: 15309 - DNA, 25 bp, SARS Virus
gtttcgagaaatcctcgtccaacag

SEQ ID NO: 15310 - DNA, 25 bp, SARS Virus
tttcgagaaatactcgtccaacagt

SEQ ID NO: 15311 - DNA, 25 bp, SARS Virus
ttcgagaaatacccgtccaacagta

SEQ ID NO: 15312 - DNA, 25 bp, SARS Virus
tcgagaaatactcgtccaacagtac

SEQ ID NO: 15313 - DNA, 25 bp, SARS Virus
cgagaaatactcctccaacagtacc

SEQ ID NO: 15314 - DNA, 25 bp, SARS Virus
gagaaatactcgcccaacagtacct

SEQ ID NO: 15315 - DNA, 25 bp, SARS Virus
agaaatactcgtccaacagtaccta

SEQ ID NO: 15316 - DNA, 25 bp, SARS Virus
gaaatactcgtccaacagtacctaa

SEQ ID NO: 15317 - DNA, 25 bp, SARS Virus
aaatactcgtcccacagtacctaat

SEQ ID NO: 15318 - DNA, 25 bp, SARS Virus
aatactcgtccaccagtacctaata

SEQ ID NO: 15319 - DNA, 25 bp, SARS Virus
atactcgtccaacagtacctaatag

SEQ ID NO: 15320 - DNA, 25 bp, SARS Virus
tactcgtccaaccgtacctaataga

SEQ ID NO: 15321 - DNA, 25 bp, SARS Virus
actcgtccaacactacctaatagaa

SEQ ID NO: 15322 - DNA, 25 bp, SARS Virus
ctcgtccaacagcacctaatagaac

SEQ ID NO: 15323 - DNA, 25 bp, SARS Virus
tcgtccaacagtccctaatagaact

SEQ ID NO: 15324 - DNA, 25 bp, SARS Virus
cgtccaacagtacctaatagaacta

SEQ ID NO: 15325 - DNA, 25 bp, SARS Virus
gtccaacagtacctaatagaactat

SEQ ID NO: 15326 - DNA, 25 bp, SARS Virus
tccaacagtacccaatagaactatt

SEQ ID NO: 15327 - DNA, 25 bp, SARS Virus
ccaacagtacctcatagaactattg

SEQ ID NO: 15328 - DNA, 25 bp, SARS Virus
caacagtacctactagaactattgg

SEQ ID NO: 15329 - DNA, 25 bp, SARS Virus
aacagtacctaacagaactattgga

SEQ ID NO: 15330 - DNA, 25 bp, SARS Virus
acagtacctaatcgaactattggac

SEQ ID NO: 15331 - DNA, 25 bp, SARS Virus
cagtacctaatacaactattggact

SEQ ID NO: 15332 - DNA, 25 bp, SARS Virus
agtacctaatagcactattggactt

SEQ ID NO: 15333 - DNA, 25 bp, SARS Virus
gtacctaatagacctattggacttc

SEQ ID NO: 15334 - DNA, 25 bp, SARS Virus
tacctaatagaactattggacttcg

SEQ ID NO: 15335 - DNA, 25 bp, SARS Virus
acctaatagaaccattggacttcgg

SEQ ID NO: 15336 - DNA, 25 bp, SARS Virus
cctaatagaactcttggacttcgga

SEQ ID NO: 15337 - DNA, 25 bp, SARS Virus
ctaatagaactactggacttcggat

SEQ ID NO: 15338 - DNA, 25 bp, SARS Virus
taatagaactatcggacttcggatc

SEQ ID NO: 15339 - DNA, 25 bp, SARS Virus
aatagaactattcgacttcggatct

SEQ ID NO: 15340 - DNA, 25 bp, SARS Virus
atagaactattgcacttcggatctc

SEQ ID NO: 15341 - DNA, 25 bp, SARS Virus
tagaactattggccttcggatctca

SEQ ID NO: 15342 - DNA, 25 bp, SARS Virus
agaactattggacttcggatctcac

SEQ ID NO: 15343 - DNA, 25 bp, SARS Virus
gaactattggacctcggatctcacc

SEQ ID NO: 15344 - DNA, 25 bp, SARS Virus
aactattggactccggatctcacct

SEQ ID NO: 15345 - DNA, 25 bp, SARS Virus
actattggacttcggatctcacctt

SEQ ID NO: 15346 - DNA, 25 bp, SARS Virus
ctattggacttccgatctcaccttc

SEQ ID NO: 15347 - DNA, 25 bp, SARS Virus
tattggacttcgcatctcaccttcg

SEQ ID NO: 15348 - DNA, 25 bp, SARS Virus
attggacttcggctctcaccttcgt

SEQ ID NO: 15349 - DNA, 25 bp, SARS Virus
ttggacttcggacctcaccttcgtg

SEQ ID NO: 15350 - DNA, 25 bp, SARS Virus
tggacttcggatctcaccttcgtgg

SEQ ID NO: 15351 - DNA, 25 bp, SARS Virus
ggacttcggatcccaccttcgtgga

SEQ ID NO: 15352 - DNA, 25 bp, SARS Virus
gacttcggatctcaccttcgtggat

SEQ ID NO: 15353 - DNA, 25 bp, SARS Virus
acttcggatctccccttcgtggatt

SEQ ID NO: 15354 - DNA, 25 bp, SARS Virus
cttcggatctcaccttcgtggattt

SEQ ID NO: 15355 - DNA, 25 bp, SARS Virus
ttcggatctcaccttcgtggatttg

SEQ ID NO: 15356 - DNA, 25 bp, SARS Virus
tcggatctcaccctcgtggatttgt

SEQ ID NO: 15357 - DNA, 25 bp, SARS Virus
cggatctcacctccgtggatttgtt

SEQ ID NO: 15358 - DNA, 25 bp, SARS Virus
ggatctcaccttcgtggatttgttc

SEQ ID NO: 15359 - DNA, 25 bp, SARS Virus
gatctcaccttcctggatttgttct

SEQ ID NO: 15360 - DNA, 25 bp, SARS Virus
atctcaccttcgcggatttgttctc

SEQ ID NO: 15361 - DNA, 25 bp, SARS Virus
tctcaccttcgtcgatttgttctcc

SEQ ID NO: 15362 - DNA, 25 bp, SARS Virus
ctcaccttcgtgcatttgttctcct

SEQ ID NO: 15363 - DNA, 25 bp, SARS Virus
tcaccttcgtggctttgttctcctc

SEQ ID NO: 15364 - DNA, 25 bp, SARS Virus
caccttcgtggacttgttctcctcg

SEQ ID NO: 15365 - DNA, 25 bp, SARS Virus
accttcgtggatctgttctcctcgg

SEQ ID NO: 15366 - DNA, 25 bp, SARS Virus
ccttcgtggattcgttctcctcggt

SEQ ID NO: 15367 - DNA, 25 bp, SARS Virus
cttcgtggatttcttctcctcggtg

SEQ ID NO: 15368 - DNA, 25 bp, SARS Virus
ttcgtggatttgctctcctcggtgg

SEQ ID NO: 15369 - DNA, 25 bp, SARS Virus
tcgtggatttgtcctcctcggtggt

SEQ ID NO: 15370 - DNA, 25 bp, SARS Virus
cgtggatttgttctcctcggtggtt

SEQ ID NO: 15371 - DNA, 25 bp, SARS Virus
gtggatttgttcccctcggtggttt

SEQ ID NO: 15372 - DNA, 25 bp, SARS Virus
tggatttgttctcctcggtggtttg

SEQ ID NO: 15373 - DNA, 25 bp, SARS Virus
ggatttgttctcctcggtggtttgt

SEQ ID NO: 15374 - DNA, 25 bp, SARS Virus
gatttgttctccccggtggtttgtg

SEQ ID NO: 15375 - DNA, 25 bp, SARS Virus
atttgttctcctcggtggtttgtgt

SEQ ID NO: 15376 - DNA, 25 bp, SARS Virus
tttgttctcctccgtggtttgtgtc

SEQ ID NO: 15377 - DNA, 25 bp, SARS Virus
ttgttctcctcgctggtttgtgtct

SEQ ID NO: 15378 - DNA, 25 bp, SARS Virus
tgttctcctcggcggtttgtgtctt

SEQ ID NO: 15379 - DNA, 25 bp, SARS Virus
gttctcctcggtcgtttgtgtcttc

SEQ ID NO: 15380 - DNA, 25 bp, SARS Virus
ttctcctcggtgctttgtgtcttct

SEQ ID NO: 15381 - DNA, 25 bp, SARS Virus
tctcctcggtggcttgtgtcttcta

SEQ ID NO: 15382 - DNA, 25 bp, SARS Virus
ctcctcggtggtctgtgtcttctaa

SEQ ID NO: 15383 - DNA, 25 bp, SARS Virus
tcctcggtggttcgtgtcttctaag

SEQ ID NO: 15384 - DNA, 25 bp, SARS Virus
cctcggtggtttctgtcttctaagg

SEQ ID NO: 15385 - DNA, 25 bp, SARS Virus
ctcggtggtttgcgtcttctaaggt

SEQ ID NO: 15386 - DNA, 25 bp, SARS Virus
tcggtggtttgtctcttctaaggtt

SEQ ID NO: 15387 - DNA, 25 bp, SARS Virus
cggtggtttgtgccttctaaggttt

SEQ ID NO: 15388 - DNA, 25 bp, SARS Virus
ggtggtttgtgtcttctaaggtttt

SEQ ID NO: 15389 - DNA, 25 bp, SARS Virus
gtggtttgtgtcctctaaggttttg

SEQ ID NO: 15390 - DNA, 25 bp, SARS Virus
tggtttgtgtctcctaaggttttga

SEQ ID NO: 15391 - DNA, 25 bp, SARS Virus
ggtttgtgtcttctaaggttttgac

SEQ ID NO: 15392 - DNA, 25 bp, SARS Virus
gtttgtgtcttccaaggttttgact

SEQ ID NO: 15393 - DNA, 25 bp, SARS Virus
tttgtgtcttctcaggttttgactc

SEQ ID NO: 15394 - DNA, 25 bp, SARS Virus
ttgtgtcttctacggttttgactcc

SEQ ID NO: 15395 - DNA, 25 bp, SARS Virus
tgtgtcttctaacgttttgactcct

SEQ ID NO: 15396 - DNA, 25 bp, SARS Virus
gtgtcttctaagcttttgactcctc

SEQ ID NO: 15397 - DNA, 25 bp, SARS Virus
tgtcttctaaggctttgactcctct

SEQ ID NO: 15398 - DNA, 25 bp, SARS Virus
gtcttctaaggtcttgactcctctt

SEQ ID NO: 15399 - DNA, 25 bp, SARS Virus
tcttctaaggttctgactcctcttt

SEQ ID NO: 15400 - DNA, 25 bp, SARS Virus
cttctaaggtttcgactcctcttta

SEQ ID NO: 15401 - DNA, 25 bp, SARS Virus
ttctaaggttttcactcctctttag

SEQ ID NO: 15402 - DNA, 25 bp, SARS Virus
tctaaggttttgcctcctctttaga

SEQ ID NO: 15403 - DNA, 25 bp, SARS Virus
ctaaggttttgactcctctttagac

SEQ ID NO: 15404 - DNA, 25 bp, SARS Virus
taaggttttgacccctctttagaca

SEQ ID NO: 15405 - DNA, 25 bp, SARS Virus
aaggttttgactcctctttagacag

SEQ ID NO: 15406 - DNA, 25 bp, SARS Virus
aggttttgactcctctttagacagc

SEQ ID NO: 15407 - DNA, 25 bp, SARS Virus
ggttttgactcccctttagacagca

SEQ ID NO: 15408 - DNA, 25 bp, SARS Virus
gttttgactcctctttagacagcat

SEQ ID NO: 15409 - DNA, 25 bp, SARS Virus
ttttgactcctccttagacagcatg

SEQ ID NO: 15410 - DNA, 25 bp, SARS Virus
tttgactcctctctagacagcatgt

SEQ ID NO: 15411 - DNA, 25 bp, SARS Virus
ttgactcctcttcagacagcatgtc

SEQ ID NO: 15412 - DNA, 25 bp, SARS Virus
tgactcctctttcgacagcatgtct

SEQ ID NO: 15413 - DNA, 25 bp, SARS Virus
gactcctctttacacagcatgtctt

SEQ ID NO: 15414 - DNA, 25 bp, SARS Virus
actcctctttagccagcatgtcttc

SEQ ID NO: 15415 - DNA, 25 bp, SARS Virus
ctcctctttagacagcatgtcttcg

SEQ ID NO: 15416 - DNA, 25 bp, SARS Virus
tcctctttagaccgcatgtcttcgg

SEQ ID NO: 15417 - DNA, 25 bp, SARS Virus
cctctttagacaccatgtcttcgga

SEQ ID NO: 15418 - DNA, 25 bp, SARS Virus
ctctttagacagcatgtcttcggac

SEQ ID NO: 15419 - DNA, 25 bp, SARS Virus
tctttagacagcctgtcttcggaca

SEQ ID NO: 15420 - DNA, 25 bp, SARS Virus
ctttagacagcacgtcttcggacag

SEQ ID NO: 15421 - DNA, 25 bp, SARS Virus
tttagacagcatctcttcggacagc

SEQ ID NO: 15422 - DNA, 25 bp, SARS Virus
ttagacagcatgccttcggacagct

SEQ ID NO: 15423 - DNA, 25 bp, SARS Virus
tagacagcatgtcttcggacagcta

SEQ ID NO: 15424 - DNA, 25 bp, SARS Virus
agacagcatgtcctcggacagctac

SEQ ID NO: 15425 - DNA, 25 bp, SARS Virus
gacagcatgtctccggacagctaca

SEQ ID NO: 15426 - DNA, 25 bp, SARS Virus
acagcatgtcttcggacagctacac

SEQ ID NO: 15427 - DNA, 25 bp, SARS Virus
cagcatgtcttccgacagctacact

SEQ ID NO: 15428 - DNA, 25 bp, SARS Virus
agcatgtcttcgcacagctacactt

SEQ ID NO: 15429 - DNA, 25 bp, SARS Virus
gcatgtcttcggccagctacacttc

SEQ ID NO: 15430 - DNA, 25 bp, SARS Virus
catgtcttcggacagctacacttcg

SEQ ID NO: 15431 - DNA, 25 bp, SARS Virus
atgtcttcggaccgctacacttcgg

SEQ ID NO: 15432 - DNA, 25 bp, SARS Virus
tgtcttcggacacctacacttcggt

SEQ ID NO: 15433 - DNA, 25 bp, SARS Virus
gtcttcggacagctacacttcggtt

SEQ ID NO: 15434 - DNA, 25 bp, SARS Virus
tcttcggacagccacacttcggttt

SEQ ID NO: 15435 - DNA, 25 bp, SARS Virus
cttcggacagctccacttcggtttt

SEQ ID NO: 15436 - DNA, 25 bp, SARS Virus
ttcggacagctacacttcggttttt

SEQ ID NO: 15437 - DNA, 25 bp, SARS Virus
tcggacagctacccttcggttttta

SEQ ID NO: 15438 - DNA, 25 bp, SARS Virus
cggacagctacacttcggtttttaa

SEQ ID NO: 15439 - DNA, 25 bp, SARS Virus
ggacagctacacctcggtttttaat

SEQ ID NO: 15440 - DNA, 25 bp, SARS Virus
gacagctacactccggtttttaatt

SEQ ID NO: 15441 - DNA, 25 bp, SARS Virus
acagctacacttcggtttttaattc

SEQ ID NO: 15442 - DNA, 25 bp, SARS Virus
cagctacacttccgtttttaattcc

SEQ ID NO: 15443 - DNA, 25 bp, SARS Virus
agctacacttcgctttttaattccg

SEQ ID NO: 15444 - DNA, 25 bp, SARS Virus
gctacacttcggcttttaattccgg

SEQ ID NO: 15445 - DNA, 25 bp, SARS Virus
ctacacttcggtctttaattccgga

SEQ ID NO: 15446 - DNA, 25 bp, SARS Virus
tacacttcggttcttaattccggac

SEQ ID NO: 15447 - DNA, 25 bp, SARS Virus
acacttcggtttctaattccggacg

SEQ ID NO: 15448 - DNA, 25 bp, SARS Virus
cacttcggttttcaattccggacgt

SEQ ID NO: 15449 - DNA, 25 bp, SARS Virus
acttcggtttttcattccggacgta

SEQ ID NO: 15450 - DNA, 25 bp, SARS Virus
cttcggtttttacttccggacgtaa

SEQ ID NO: 15451 - DNA, 25 bp, SARS Virus
ttcggtttttaactccggacgtaac

SEQ ID NO: 15452 - DNA, 25 bp, SARS Virus
tcggtttttaatcccggacgtaact

SEQ ID NO: 15453 - DNA, 25 bp, SARS Virus
cggtttttaattccggacgtaacta

SEQ ID NO: 15454 - DNA, 25 bp, SARS Virus
ggtttttaattccggacgtaactac

SEQ ID NO: 15455 - DNA, 25 bp, SARS Virus
gtttttaattcccgacgtaactact

SEQ ID NO: 15456 - DNA, 25 bp, SARS Virus
tttttaattccgcacgtaactactc

SEQ ID NO: 15457 - DNA, 25 bp, SARS Virus
ttttaattccggccgtaactactcc

SEQ ID NO: 15458 - DNA, 25 bp, SARS Virus
tttaattccggacgtaactactcca

SEQ ID NO: 15459 - DNA, 25 bp, SARS Virus
ttaattccggacctaactactccaa

SEQ ID NO: 15460 - DNA, 25 bp, SARS Virus
taattccggacgcaactactccaat

SEQ ID NO: 15461 - DNA, 25 bp, SARS Virus
aattccggacgtcactactccaatg

SEQ ID NO: 15462 - DNA, 25 bp, SARS Virus
attccggacgtacctactccaatgg

SEQ ID NO: 15463 - DNA, 25 bp, SARS Virus
ttccggacgtaactactccaatggt

SEQ ID NO: 15464 - DNA, 25 bp, SARS Virus
tccggacgtaaccactccaatggtg

SEQ ID NO: 15465 - DNA, 25 bp, SARS Virus
ccggacgtaactcctccaatggtgt

SEQ ID NO: 15466 - DNA, 25 bp, SARS Virus
cggacgtaactactccaatggtgtt

SEQ ID NO: 15467 - DNA, 25 bp, SARS Virus
ggacgtaactaccccaatggtgttg

SEQ ID NO: 15468 - DNA, 25 bp, SARS Virus
gacgtaactactccaatggtgttgt

SEQ ID NO: 15469 - DNA, 25 bp, SARS Virus
acgtaactactccaatggtgttgtg

SEQ ID NO: 15470 - DNA, 25 bp, SARS Virus
cgtaactactcccatggtgttgtga

SEQ ID NO: 15471 - DNA, 25 bp, SARS Virus
gtaactactccactggtgttgtgac

SEQ ID NO: 15472 - DNA, 25 bp, SARS Virus
taactactccaacggtgttgtgacc

SEQ ID NO: 15473 - DNA, 25 bp, SARS Virus
aactactccaatcgtgttgtgacct

SEQ ID NO: 15474 - DNA, 25 bp, SARS Virus
actactccaatgctgttgtgacctt

SEQ ID NO: 15475 - DNA, 25 bp, SARS Virus
ctactccaatggcgttgtgaccttc

SEQ ID NO: 15476 - DNA, 25 bp, SARS Virus
tactccaatggtcttgtgaccttct

SEQ ID NO: 15477 - DNA, 25 bp, SARS Virus
actccaatggtgctgtgaccttctt

SEQ ID NO: 15478 - DNA, 25 bp, SARS Virus
ctccaatggtgtcgtgaccttcttt

SEQ ID NO: 15479 - DNA, 25 bp, SARS Virus
tccaatggtgttctgaccttctttg

SEQ ID NO: 15480 - DNA, 25 bp, SARS Virus
ccaatggtgttgcgaccttctttga

SEQ ID NO: 15481 - DNA, 25 bp, SARS Virus
caatggtgttgtcaccttctttgat

SEQ ID NO: 15482 - DNA, 25 bp, SARS Virus
aatggtgttgtgcccttctttgatt

SEQ ID NO: 15483 - DNA, 25 bp, SARS Virus
atggtgttgtgaccttctttgattc

SEQ ID NO: 15484 - DNA, 25 bp, SARS Virus
tggtgttgtgaccttctttgattca

SEQ ID NO: 15485 - DNA, 25 bp, SARS Virus
ggtgttgtgaccctctttgattcaa

SEQ ID NO: 15486 - DNA, 25 bp, SARS Virus
gtgttgtgacctcctttgattcaaa

SEQ ID NO: 15487 - DNA, 25 bp, SARS Virus
tgttgtgaccttctttgattcaaag

SEQ ID NO: 15488 - DNA, 25 bp, SARS Virus
gttgtgaccttccttgattcaaaga

SEQ ID NO: 15489 - DNA, 25 bp, SARS Virus
ttgtgaccttctctgattcaaagaa

SEQ ID NO: 15490 - DNA, 25 bp, SARS Virus
tgtgaccttcttcgattcaaagaat

SEQ ID NO: 15491 - DNA, 25 bp, SARS Virus
gtgaccttctttcattcaaagaatg

SEQ ID NO: 15492 - DNA, 25 bp, SARS Virus
tgaccttctttgcttcaaagaatgg

SEQ ID NO: 15493 - DNA, 25 bp, SARS Virus
gaccttctttgactcaaagaatggt

SEQ ID NO: 15494 - DNA, 25 bp, SARS Virus
accttctttgatccaaagaatggtt

SEQ ID NO: 15495 - DNA, 25 bp, SARS Virus
ccttctttgattcaaagaatggtta

SEQ ID NO: 15496 - DNA, 25 bp, SARS Virus
cttctttgattccaagaatggttat

SEQ ID NO: 15497 - DNA, 25 bp, SARS Virus
ttctttgattcacagaatggttatt

SEQ ID NO: 15498 - DNA, 25 bp, SARS Virus
tctttgattcaacgaatggttattc

SEQ ID NO: 15499 - DNA, 25 bp, SARS Virus
ctttgattcaaacaatggttattca

SEQ ID NO: 15500 - DNA, 25 bp, SARS Virus
tttgattcaaagcatggttattcaa

SEQ ID NO: 15501 - DNA, 25 bp, SARS Virus
ttgattcaaagactggttattcaat

SEQ ID NO: 15502 - DNA, 25 bp, SARS Virus
tgattcaaagaacggttattcaatg

SEQ ID NO: 15503 - DNA, 25 bp, SARS Virus
gattcaaagaatcgttattcaatga

SEQ ID NO: 15504 - DNA, 25 bp, SARS Virus
attcaaagaatgcttattcaatgag

SEQ ID NO: 15505 - DNA, 25 bp, SARS Virus
ttcaaagaatggctattcaatgaga

SEQ ID NO: 15506 - DNA, 25 bp, SARS Virus
tcaaagaatggtcattcaatgagaa

SEQ ID NO: 15507 - DNA, 25 bp, SARS Virus
caaagaatggttcttcaatgagaac

SEQ ID NO: 15508 - DNA, 25 bp, SARS Virus
aaagaatggttactcaatgagaaca

SEQ ID NO: 15509 - DNA, 25 bp, SARS Virus
aagaatggttatccaatgagaacaa

SEQ ID NO: 15510 - DNA, 25 bp, SARS Virus
agaatggttattcaatgagaacaaa

SEQ ID NO: 15511 - DNA, 25 bp, SARS Virus
gaatggttattccatgagaacaaac

SEQ ID NO: 15512 - DNA, 25 bp, SARS Virus
aatggttattcactgagaacaaacg

SEQ ID NO: 15513 - DNA, 25 bp, SARS Virus
atggttattcaacgagaacaaacga

SEQ ID NO: 15514 - DNA, 25 bp, SARS Virus
tggttattcaatcagaacaaacgac

SEQ ID NO: 15515 - DNA, 25 bp, SARS Virus
ggttattcaatgcgaacaaacgact

SEQ ID NO: 15516 - DNA, 25 bp, SARS Virus
gttattcaatgacaacaaacgacta

SEQ ID NO: 15517 - DNA, 25 bp, SARS Virus
ttattcaatgagcacaaacgactat

SEQ ID NO: 15518 - DNA, 25 bp, SARS Virus
tattcaatgagaccaaacgactata

SEQ ID NO: 15519 - DNA, 25 bp, SARS Virus
attcaatgagaacaaacgactatag

SEQ ID NO: 15520 - DNA, 25 bp, SARS Virus
ttcaatgagaaccaacgactatagt

SEQ ID NO: 15521 - DNA, 25 bp, SARS Virus
tcaatgagaacacacgactatagtt

SEQ ID NO: 15522 - DNA, 25 bp, SARS Virus
caatgagaacaaccgactatagtta

SEQ ID NO: 15523 - DNA, 25 bp, SARS Virus
aatgagaacaaacgactatagttac

SEQ ID NO: 15524 - DNA, 25 bp, SARS Virus
atgagaacaaaccactatagttacc

SEQ ID NO: 15525 - DNA, 25 bp, SARS Virus
tgagaacaaacgcctatagttacca

SEQ ID NO: 15526 - DNA, 25 bp, SARS Virus
gagaacaaacgactatagttaccat

SEQ ID NO: 15527 - DNA, 25 bp, SARS Virus
agaacaaacgaccatagttaccatt

SEQ ID NO: 15528 - DNA, 25 bp, SARS Virus
gaacaaacgactctagttaccattc

SEQ ID NO: 15529 - DNA, 25 bp, SARS Virus
aacaaacgactacagttaccattcg

SEQ ID NO: 15530 - DNA, 25 bp, SARS Virus
acaaacgactatcgttaccattcga

SEQ ID NO: 15531 - DNA, 25 bp, SARS Virus
caaacgactatacttaccattcgaa

SEQ ID NO: 15532 - DNA, 25 bp, SARS Virus
aaacgactatagctaccattcgaaa

SEQ ID NO: 15533 - DNA, 25 bp, SARS Virus
aacgactatagtcaccattcgaaat

SEQ ID NO: 15534 - DNA, 25 bp, SARS Virus
acgactatagttcccattcgaaatg

SEQ ID NO: 15535 - DNA, 25 bp, SARS Virus
cgactatagttaccattcgaaatgg

SEQ ID NO: 15536 - DNA, 25 bp, SARS Virus
gactatagttaccattcgaaatggt

SEQ ID NO: 15537 - DNA, 25 bp, SARS Virus
actatagttacccttcgaaatggta

SEQ ID NO: 15538 - DNA, 25 bp, SARS Virus
ctatagttaccactcgaaatggtac

SEQ ID NO: 15539 - DNA, 25 bp, SARS Virus
tatagttaccatccgaaatggtact

SEQ ID NO: 15540 - DNA, 25 bp, SARS Virus
atagttaccattcgaaatggtacta

SEQ ID NO: 15541 - DNA, 25 bp, SARS Virus
tagttaccattccaaatggtactaa

SEQ ID NO: 15542 - DNA, 25 bp, SARS Virus
agttaccattcgcaatggtactaag

SEQ ID NO: 15543 - DNA, 25 bp, SARS Virus
gttaccattcgacatggtactaaga

SEQ ID NO: 15544 - DNA, 25 bp, SARS Virus
ttaccattcgaactggtactaagag

SEQ ID NO: 15545 - DNA, 25 bp, SARS Virus
taccattcgaaacggtactaagagt

SEQ ID NO: 15546 - DNA, 25 bp, SARS Virus
accattcgaaatcgtactaagagtc

SEQ ID NO: 15547 - DNA, 25 bp, SARS Virus
ccattcgaaatgctactaagagtct

SEQ ID NO: 15548 - DNA, 25 bp, SARS Virus
cattcgaaatggcactaagagtctt

SEQ ID NO: 15549 - DNA, 25 bp, SARS Virus
attcgaaatggtcctaagagtcttg

SEQ ID NO: 15550 - DNA, 25 bp, SARS Virus
ttcgaaatggtactaagagtcttgt

SEQ ID NO: 15551 - DNA, 25 bp, SARS Virus
tcgaaatggtaccaagagtcttgta

SEQ ID NO: 15552 - DNA, 25 bp, SARS Virus
cgaaatggtactcagagtcttgtac

SEQ ID NO: 15553 - DNA, 25 bp, SARS Virus
gaaatggtactacgagtcttgtacg

SEQ ID NO: 15554 - DNA, 25 bp, SARS Virus
aaatggtactaacagtcttgtacga

SEQ ID NO: 15555 - DNA, 25 bp, SARS Virus
aatggtactaagcgtcttgtacgaa

SEQ ID NO: 15556 - DNA, 25 bp, SARS Virus
atggtactaagactcttgtacgaat

SEQ ID NO: 15557 - DNA, 25 bp, SARS Virus
tggtactaagagccttgtacgaatc

SEQ ID NO: 15558 - DNA, 25 bp, SARS Virus
ggtactaagagtcttgtacgaatct

SEQ ID NO: 15559 - DNA, 25 bp, SARS Virus
gtactaagagtcctgtacgaatctc

SEQ ID NO: 15560 - DNA, 25 bp, SARS Virus
tactaagagtctcgtacgaatctcc

SEQ ID NO: 15561 - DNA, 25 bp, SARS Virus
actaagagtcttctacgaatctcca

SEQ ID NO: 15562 - DNA, 25 bp, SARS Virus
ctaagagtcttgcacgaatctccac

SEQ ID NO: 15563 - DNA, 25 bp, SARS Virus
taagagtcttgtccgaatctccact

SEQ ID NO: 15564 - DNA, 25 bp, SARS Virus
aagagtcttgtacgaatctccactt

SEQ ID NO: 15565 - DNA, 25 bp, SARS Virus
agagtcttgtaccaatctccacttc

SEQ ID NO: 15566 - DNA, 25 bp, SARS Virus
gagtcttgtacgcatctccacttct

SEQ ID NO: 15567 - DNA, 25 bp, SARS Virus
agtcttgtacgactctccacttcta

SEQ ID NO: 15568 - DNA, 25 bp, SARS Virus
gtcttgtacgaacctccacttctat

SEQ ID NO: 15569 - DNA, 25 bp, SARS Virus
tcttgtacgaatctccacttctata

SEQ ID NO: 15570 - DNA, 25 bp, SARS Virus
cttgtacgaatccccacttctatac

SEQ ID NO: 15571 - DNA, 25 bp, SARS Virus
ttgtacgaatctccacttctataca

SEQ ID NO: 15572 - DNA, 25 bp, SARS Virus
tgtacgaatctccacttctatacag

SEQ ID NO: 15573 - DNA, 25 bp, SARS Virus
gtacgaatctccccttctatacaga

SEQ ID NO: 15574 - DNA, 25 bp, SARS Virus
tacgaatctccacttctatacagaa

SEQ ID NO: 15575 - DNA, 25 bp, SARS Virus
acgaatctccacctctatacagaaa

SEQ ID NO: 15576 - DNA, 25 bp, SARS Virus
cgaatctccactcctatacagaaag

SEQ ID NO: 15577 - DNA, 25 bp, SARS Virus
gaatctccacttctatacagaaagg

SEQ ID NO: 15578 - DNA, 25 bp, SARS Virus
aatctccacttccatacagaaagga

SEQ ID NO: 15579 - DNA, 25 bp, SARS Virus
atctccacttctctacagaaaggaa

SEQ ID NO: 15580 - DNA, 25 bp, SARS Virus
tctccacttctacacagaaaggaac

SEQ ID NO: 15581 - DNA, 25 bp, SARS Virus
ctccacttctatccagaaaggaact

SEQ ID NO: 15582 - DNA, 25 bp, SARS Virus
tccacttctatacagaaaggaactc

SEQ ID NO: 15583 - DNA, 25 bp, SARS Virus
ccacttctataccgaaaggaactct

SEQ ID NO: 15584 - DNA, 25 bp, SARS Virus
cacttctatacacaaaggaactctt

SEQ ID NO: 15585 - DNA, 25 bp, SARS Virus
acttctatacagcaaggaactcttc

SEQ ID NO: 15586 - DNA, 25 bp, SARS Virus
cttctatacagacaggaactcttcc

SEQ ID NO: 15587 - DNA, 25 bp, SARS Virus
ttctatacagaacggaactcttcct

SEQ ID NO: 15588 - DNA, 25 bp, SARS Virus
tctatacagaaacgaactcttccta

SEQ ID NO: 15589 - DNA, 25 bp, SARS Virus
ctatacagaaagcaactcttcctac

SEQ ID NO: 15590 - DNA, 25 bp, SARS Virus
tatacagaaaggcactcttcctacg

SEQ ID NO: 15591 - DNA, 25 bp, SARS Virus
atacagaaaggacctcttcctacgt

SEQ ID NO: 15592 - DNA, 25 bp, SARS Virus
tacagaaaggaactcttcctacgtg

SEQ ID NO: 15593 - DNA, 25 bp, SARS Virus
acagaaaggaacccttcctacgtgg

SEQ ID NO: 15594 - DNA, 25 bp, SARS Virus
cagaaaggaactcttcctacgtgga

SEQ ID NO: 15595 - DNA, 25 bp, SARS Virus
agaaaggaactcctcctacgtggaa

SEQ ID NO: 15596 - DNA, 25 bp, SARS Virus
gaaaggaactctccctacgtggaat

SEQ ID NO: 15597 - DNA, 25 bp, SARS Virus
aaaggaactcttcctacgtggaatg

SEQ ID NO: 15598 - DNA, 25 bp, SARS Virus
aaggaactcttcctacgtggaatgt

SEQ ID NO: 15599 - DNA, 25 bp, SARS Virus
aggaactcttcccacgtggaatgta

SEQ ID NO: 15600 - DNA, 25 bp, SARS Virus
ggaactcttcctccgtggaatgtac

SEQ ID NO: 15601 - DNA, 25 bp, SARS Virus
gaactcttcctacgtggaatgtacc

SEQ ID NO: 15602 - DNA, 25 bp, SARS Virus
aactcttcctacctggaatgtacca

SEQ ID NO: 15603 - DNA, 25 bp, SARS Virus
actcttcctacgcggaatgtaccat

SEQ ID NO: 15604 - DNA, 25 bp, SARS Virus
ctcttcctacgtcgaatgtaccatc

SEQ ID NO: 15605 - DNA, 25 bp, SARS Virus
tcttcctacgtgcaatgtaccatcc

SEQ ID NO: 15606 - DNA, 25 bp, SARS Virus
cttcctacgtggcatgtaccatcca

SEQ ID NO: 15607 - DNA, 25 bp, SARS Virus
ttcctacgtggactgtaccatccac

SEQ ID NO: 15608 - DNA, 25 bp, SARS Virus
tcctacgtggaacgtaccatccact

SEQ ID NO: 15609 - DNA, 25 bp, SARS Virus
cctacgtggaatctaccatccacta

SEQ ID NO: 15610 - DNA, 25 bp, SARS Virus
ctacgtggaatgcaccatccactac

SEQ ID NO: 15611 - DNA, 25 bp, SARS Virus
tacgtggaatgtcccatccactaca

SEQ ID NO: 15612 - DNA, 25 bp, SARS Virus
acgtggaatgtaccatccactacaa

SEQ ID NO: 15613 - DNA, 25 bp, SARS Virus
cgtggaatgtaccatccactacaat

SEQ ID NO: 15614 - DNA, 25 bp, SARS Virus
gtggaatgtaccctccactacaata

SEQ ID NO: 15615 - DNA, 25 bp, SARS Virus
tggaatgtaccacccactacaatag

SEQ ID NO: 15616 - DNA, 25 bp, SARS Virus
ggaatgtaccatccactacaatagt

SEQ ID NO: 15617 - DNA, 25 bp, SARS Virus
gaatgtaccatccactacaatagtg

SEQ ID NO: 15618 - DNA, 25 bp, SARS Virus
aatgtaccatcccctacaatagtga

SEQ ID NO: 15619 - DNA, 25 bp, SARS Virus
atgtaccatccactacaatagtgat

SEQ ID NO: 15620 - DNA, 25 bp, SARS Virus
tgtaccatccaccacaatagtgatc

SEQ ID NO: 15621 - DNA, 25 bp, SARS Virus
gtaccatccactccaatagtgatca

SEQ ID NO: 15622 - DNA, 25 bp, SARS Virus
taccatccactacaatagtgatcac

SEQ ID NO: 15623 - DNA, 25 bp, SARS Virus
accatccactaccatagtgatcacc

SEQ ID NO: 15624 - DNA, 25 bp, SARS Virus
ccatccactacactagtgatcacca

SEQ ID NO: 15625 - DNA, 25 bp, SARS Virus
catccactacaacagtgatcaccac

SEQ ID NO: 15626 - DNA, 25 bp, SARS Virus
atccactacaatcgtgatcaccact

SEQ ID NO: 15627 - DNA, 25 bp, SARS Virus
tccactacaatactgatcaccacta

SEQ ID NO: 15628 - DNA, 25 bp, SARS Virus
ccactacaatagcgatcaccactat

SEQ ID NO: 15629 - DNA, 25 bp, SARS Virus
cactacaatagtcatcaccactata

SEQ ID NO: 15630 - DNA, 25 bp, SARS Virus
actacaatagtgctcaccactatag

SEQ ID NO: 15631 - DNA, 25 bp, SARS Virus
ctacaatagtgaccaccactatagt

SEQ ID NO: 15632 - DNA, 25 bp, SARS Virus
tacaatagtgatcaccactatagtg

SEQ ID NO: 15633 - DNA, 25 bp, SARS Virus
acaatagtgatccccactatagtga

SEQ ID NO: 15634 - DNA, 25 bp, SARS Virus
caatagtgatcaccactatagtgaa

SEQ ID NO: 15635 - DNA, 25 bp, SARS Virus
aatagtgatcaccactatagtgaac

SEQ ID NO: 15636 - DNA, 25 bp, SARS Virus
atagtgatcacccctatagtgaaca

SEQ ID NO: 15637 - DNA, 25 bp, SARS Virus
tagtgatcaccactatagtgaacac

SEQ ID NO: 15638 - DNA, 25 bp, SARS Virus
agtgatcaccaccatagtgaacaca

SEQ ID NO: 15639 - DNA, 25 bp, SARS Virus
gtgatcaccactctagtgaacacaa

SEQ ID NO: 15640 - DNA, 25 bp, SARS Virus
tgatcaccactacagtgaacacaac

SEQ ID NO: 15641 - DNA, 25 bp, SARS Virus
gatcaccactatcgtgaacacaaca

SEQ ID NO: 15642 - DNA, 25 bp, SARS Virus
atcaccactatactgaacacaacat

SEQ ID NO: 15643 - DNA, 25 bp, SARS Virus
tcaccactatagcgaacacaacatt

SEQ ID NO: 15644 - DNA, 25 bp, SARS Virus
caccactatagtcaacacaacatta

SEQ ID NO: 15645 - DNA, 25 bp, SARS Virus
accactatagtgcacacaacattat

SEQ ID NO: 15646 - DNA, 25 bp, SARS Virus
ccactatagtgaccacaacattatg

SEQ ID NO: 15647 - DNA, 25 bp, SARS Virus
cactatagtgaacacaacattatgg

SEQ ID NO: 15648 - DNA, 25 bp, SARS Virus
actatagtgaacccaacattatggg

SEQ ID NO: 15649 - DNA, 25 bp, SARS Virus
ctatagtgaacacaacattatggga

SEQ ID NO: 15650 - DNA, 25 bp, SARS Virus
tatagtgaacaccacattatgggag

SEQ ID NO: 15651 - DNA, 25 bp, SARS Virus
atagtgaacacaccattatgggagg

SEQ ID NO: 15652 - DNA, 25 bp, SARS Virus
tagtgaacacaacattatgggaggt

SEQ ID NO: 15653 - DNA, 25 bp, SARS Virus
agtgaacacaaccttatgggaggtt

SEQ ID NO: 15654 - DNA, 25 bp, SARS Virus
gtgaacacaacactatgggaggttt

SEQ ID NO: 15655 - DNA, 25 bp, SARS Virus
tgaacacaacatcatgggaggtttt

SEQ ID NO: 15656 - DNA, 25 bp, SARS Virus
gaacacaacattctgggaggttttt

SEQ ID NO: 15657 - DNA, 25 bp, SARS Virus
aacacaacattacgggaggtttttc

SEQ ID NO: 15658 - DNA, 25 bp, SARS Virus
acacaacattatcggaggtttttcc

SEQ ID NO: 15659 - DNA, 25 bp, SARS Virus
cacaacattatgcgaggtttttccg

SEQ ID NO: 15660 - DNA, 25 bp, SARS Virus
acaacattatggcaggtttttccga

SEQ ID NO: 15661 - DNA, 25 bp, SARS Virus
caacattatgggcggtttttccgac

SEQ ID NO: 15662 - DNA, 25 bp, SARS Virus
aacattatgggacgtttttccgacc

SEQ ID NO: 15663 - DNA, 25 bp, SARS Virus
acattatgggagctttttccgacca

SEQ ID NO: 15664 - DNA, 25 bp, SARS Virus
cattatgggaggcttttccgaccac

SEQ ID NO: 15665 - DNA, 25 bp, SARS Virus
attatgggaggtctttccgaccacc

SEQ ID NO: 15666 - DNA, 25 bp, SARS Virus
ttatgggaggttcttccgaccaccg

SEQ ID NO: 15667 - DNA, 25 bp, SARS Virus
tatgggaggtttctccgaccaccgt

SEQ ID NO: 15668 - DNA, 25 bp, SARS Virus
atgggaggttttcccgaccaccgtg

SEQ ID NO: 15669 - DNA, 25 bp, SARS Virus
tgggaggtttttccgaccaccgtga

SEQ ID NO: 15670 - DNA, 25 bp, SARS Virus
gggaggtttttccgaccaccgtgat

SEQ ID NO: 15671 - DNA, 25 bp, SARS Virus
ggaggtttttcccaccaccgtgatg

SEQ ID NO: 15672 - DNA, 25 bp, SARS Virus
gaggtttttccgcccaccgtgatga

SEQ ID NO: 15673 - DNA, 25 bp, SARS Virus
aggtttttccgaccaccgtgatgac

SEQ ID NO: 15674 - DNA, 25 bp, SARS Virus
ggtttttccgaccaccgtgatgact

SEQ ID NO: 15675 - DNA, 25 bp, SARS Virus
gtttttccgacccccgtgatgactc

SEQ ID NO: 15676 - DNA, 25 bp, SARS Virus
tttttccgaccaccgtgatgactct

SEQ ID NO: 15677 - DNA, 25 bp, SARS Virus
ttttccgaccaccgtgatgactcta

SEQ ID NO: 15678 - DNA, 25 bp, SARS Virus
tttccgaccaccctgatgactctac

SEQ ID NO: 15679 - DNA, 25 bp, SARS Virus
ttccgaccaccgcgatgactctacg

SEQ ID NO: 15680 - DNA, 25 bp, SARS Virus
tccgaccaccgtcatgactctacga

SEQ ID NO: 15681 - DNA, 25 bp, SARS Virus
ccgaccaccgtgctgactctacgag

SEQ ID NO: 15682 - DNA, 25 bp, SARS Virus
cgaccaccgtgacgactctacgaga

SEQ ID NO: 15683 - DNA, 25 bp, SARS Virus
gaccaccgtgatcactctacgagag

SEQ ID NO: 15684 - DNA, 25 bp, SARS Virus
accaccgtgatgcctctacgagagt

SEQ ID NO: 15685 - DNA, 25 bp, SARS Virus
ccaccgtgatgactctacgagagtt

SEQ ID NO: 15686 - DNA, 25 bp, SARS Virus
caccgtgatgaccctacgagagttc

SEQ ID NO: 15687 - DNA, 25 bp, SARS Virus
accgtgatgactctacgagagttct

SEQ ID NO: 15688 - DNA, 25 bp, SARS Virus
ccgtgatgactccacgagagttctc

SEQ ID NO: 15689 - DNA, 25 bp, SARS Virus
cgtgatgactctccgagagttctcg

SEQ ID NO: 15690 - DNA, 25 bp, SARS Virus
gtgatgactctacgagagttctcga

SEQ ID NO: 15691 - DNA, 25 bp, SARS Virus
tgatgactctaccagagttctcgaa

SEQ ID NO: 15692 - DNA, 25 bp, SARS Virus
gatgactctacgcgagttctcgaaa

SEQ ID NO: 15693 - DNA, 25 bp, SARS Virus
atgactctacgacagttctcgaaac

SEQ ID NO: 15694 - DNA, 25 bp, SARS Virus
tgactctacgagcgttctcgaaact

SEQ ID NO: 15695 - DNA, 25 bp, SARS Virus
gactctacgagacttctcgaaactt

SEQ ID NO: 15696 - DNA, 25 bp, SARS Virus
actctacgagagctctcgaaacttc

SEQ ID NO: 15697 - DNA, 25 bp, SARS Virus
ctctacgagagtcctcgaaacttct

SEQ ID NO: 15698 - DNA, 25 bp, SARS Virus
tctacgagagttctcgaaacttctt

SEQ ID NO: 15699 - DNA, 25 bp, SARS Virus
ctacgagagttcccgaaacttcttt

SEQ ID NO: 15700 - DNA, 25 bp, SARS Virus
tacgagagttctcgaaacttctttc

SEQ ID NO: 15701 - DNA, 25 bp, SARS Virus
acgagagttctccaaacttctttca

SEQ ID NO: 15702 - DNA, 25 bp, SARS Virus
cgagagttctcgcaacttctttcac

SEQ ID NO: 15703 - DNA, 25 bp, SARS Virus
gagagttctcgacacttctttcacg

SEQ ID NO: 15704 - DNA, 25 bp, SARS Virus
agagttctcgaaccttctttcacgg

SEQ ID NO: 15705 - DNA, 25 bp, SARS Virus
gagttctcgaaacttctttcacggt

SEQ ID NO: 15706 - DNA, 25 bp, SARS Virus
agttctcgaaacctctttcacggtc

SEQ ID NO: 15707 - DNA, 25 bp, SARS Virus
gttctcgaaactcctttcacggtca

SEQ ID NO: 15708 - DNA, 25 bp, SARS Virus
ttctcgaaacttctttcacggtcaa

SEQ ID NO: 15709 - DNA, 25 bp, SARS Virus
tctcgaaacttccttcacggtcaac

SEQ ID NO: 15710 - DNA, 25 bp, SARS Virus
ctcgaaacttctctcacggtcaact

SEQ ID NO: 15711 - DNA, 25 bp, SARS Virus
tcgaaacttcttccacggtcaacta

SEQ ID NO: 15712 - DNA, 25 bp, SARS Virus
cgaaacttctttcacggtcaactac

SEQ ID NO: 15713 - DNA, 25 bp, SARS Virus
gaaacttctttcccggtcaactact

SEQ ID NO: 15714 - DNA, 25 bp, SARS Virus
aaacttctttcacggtcaactactc

SEQ ID NO: 15715 - DNA, 25 bp, SARS Virus
aacttctttcaccgtcaactactca

SEQ ID NO: 15716 - DNA, 25 bp, SARS Virus
acttctttcacgctcaactactcat

SEQ ID NO: 15717 - DNA, 25 bp, SARS Virus
cttctttcacggccaactactcata

SEQ ID NO: 15718 - DNA, 25 bp, SARS Virus
ttctttcacggtcaactactcatat

SEQ ID NO: 15719 - DNA, 25 bp, SARS Virus
tctttcacggtccactactcatata

SEQ ID NO: 15720 - DNA, 25 bp, SARS Virus
ctttcacggtcacctactcatatat

SEQ ID NO: 15721 - DNA, 25 bp, SARS Virus
tttcacggtcaactactcatatatt

SEQ ID NO: 15722 - DNA, 25 bp, SARS Virus
ttcacggtcaaccactcatatattg

SEQ ID NO: 15723 - DNA, 25 bp, SARS Virus
tcacggtcaactcctcatatattgg

SEQ ID NO: 15724 - DNA, 25 bp, SARS Virus
cacggtcaactactcatatattggt

SEQ ID NO: 15725 - DNA, 25 bp, SARS Virus
acggtcaactacccatatattggtg

SEQ ID NO: 15726 - DNA, 25 bp, SARS Virus
cggtcaactactcatatattggtgc

SEQ ID NO: 15727 - DNA, 25 bp, SARS Virus
ggtcaactactcctatattggtgca

SEQ ID NO: 15728 - DNA, 25 bp, SARS Virus
gtcaactactcacatattggtgcat

SEQ ID NO: 15729 - DNA, 25 bp, SARS Virus
tcaactactcatctattggtgcatg

SEQ ID NO: 15730 - DNA, 25 bp, SARS Virus
caactactcatacattggtgcatgg

SEQ ID NO: 15731 - DNA, 25 bp, SARS Virus
aactactcatatcttggtgcatggg

SEQ ID NO: 15732 - DNA, 25 bp, SARS Virus
actactcatatactggtgcatggga

SEQ ID NO: 15733 - DNA, 25 bp, SARS Virus
ctactcatatatcggtgcatgggac

SEQ ID NO: 15734 - DNA, 25 bp, SARS Virus
tactcatatattcgtgcatgggacc

SEQ ID NO: 15735 - DNA, 25 bp, SARS Virus
actcatatattgctgcatgggacct

SEQ ID NO: 15736 - DNA, 25 bp, SARS Virus
ctcatatattggcgcatgggacctg

SEQ ID NO: 15737 - DNA, 25 bp, SARS Virus
tcatatattggtccatgggacctgt

SEQ ID NO: 15738 - DNA, 25 bp, SARS Virus
catatattggtgcatgggacctgtt

SEQ ID NO: 15739 - DNA, 25 bp, SARS Virus
atatattggtgcctgggacctgttc

SEQ ID NO: 15740 - DNA, 25 bp, SARS Virus
tatattggtgcacgggacctgttcc

SEQ ID NO: 15741 - DNA, 25 bp, SARS Virus
atattggtgcatcggacctgttcct

SEQ ID NO: 15742 - DNA, 25 bp, SARS Virus
tattggtgcatgcgacctgttccta

SEQ ID NO: 15743 - DNA, 25 bp, SARS Virus
attggtgcatggcacctgttcctac

SEQ ID NO: 15744 - DNA, 25 bp, SARS Virus
ttggtgcatgggccctgttcctaca

SEQ ID NO: 15745 - DNA, 25 bp, SARS Virus
atgttcacacgcgcgtctgccaagc

SEQ ID NO: 15746 - DNA, 25 bp, SARS Virus
tgttcacacgcaggtctgccaagca

SEQ ID NO: 15747 - DNA, 25 bp, SARS Virus
gttcacacgcacgtctgccaagcat

SEQ ID NO: 15748 - DNA, 25 bp, SARS Virus
ttcacacgcacggctgccaagcatg

SEQ ID NO: 15749 - DNA, 25 bp, SARS Virus
tcacacgcacgtgtgccaagcatgt

SEQ ID NO: 15750 - DNA, 25 bp, SARS Virus
cacacgcacgtcggccaagcatgtg

SEQ ID NO: 15751 - DNA, 25 bp, SARS Virus
acacgcacgtctgccaagcatgtgt

SEQ ID NO: 15752 - DNA, 25 bp, SARS Virus
cacgcacgtctggcaagcatgtgtc

SEQ ID NO: 15753 - DNA, 25 bp, SARS Virus
acgcacgtctgcgaagcatgtgtcc

SEQ ID NO: 15754 - DNA, 25 bp, SARS Virus
cgcacgtctgccgagcatgtgtcca

SEQ ID NO: 15755 - DNA, 25 bp, SARS Virus
gcacgtctgccaggcatgtgtccaa

SEQ ID NO: 15756 - DNA, 25 bp, SARS Virus
cacgtctgccaagcatgtgtccaaa

SEQ ID NO: 15757 - DNA, 25 bp, SARS Virus
acgtctgccaaggatgtgtccaaat

SEQ ID NO: 15758 - DNA, 25 bp, SARS Virus
cgtctgccaagcgtgtgtccaaata

SEQ ID NO: 15759 - DNA, 25 bp, SARS Virus
gtctgccaagcaggtgtccaaatat

SEQ ID NO: 15760 - DNA, 25 bp, SARS Virus
tctgccaagcatgtgtccaaatata

SEQ ID NO: 15761 - DNA, 25 bp, SARS Virus
ctgccaagcatgggtccaaatataa

SEQ ID NO: 15762 - DNA, 25 bp, SARS Virus
tgccaagcatgtgtccaaatataac

SEQ ID NO: 15763 - DNA, 25 bp, SARS Virus
gccaagcatgtggccaaatataacg

SEQ ID NO: 15764 - DNA, 25 bp, SARS Virus
ccaagcatgtgtgcaaatataacgt

SEQ ID NO: 15765 - DNA, 25 bp, SARS Virus
caagcatgtgtcgaaatataacgtc

SEQ ID NO: 15766 - DNA, 25 bp, SARS Virus
aagcatgtgtccgaatataacgtca

SEQ ID NO: 15767 - DNA, 25 bp, SARS Virus
agcatgtgtccagatataacgtcag

SEQ ID NO: 15768 - DNA, 25 bp, SARS Virus
gcatgtgtccaagtataacgtcagt

SEQ ID NO: 15769 - DNA, 25 bp, SARS Virus
catgtgtccaaagataacgtcagtt

SEQ ID NO: 15770 - DNA, 25 bp, SARS Virus
atgtgtccaaatgtaacgtcagtta

SEQ ID NO: 15771 - DNA, 25 bp, SARS Virus
tgtgtccaaatagaacgtcagttac

SEQ ID NO: 15772 - DNA, 25 bp, SARS Virus
gtgtccaaatatgacgtcagttact

SEQ ID NO: 15773 - DNA, 25 bp, SARS Virus
tgtccaaatatagcgtcagttactg

SEQ ID NO: 15774 - DNA, 25 bp, SARS Virus
gtccaaatataaggtcagttactgt

SEQ ID NO: 15775 - DNA, 25 bp, SARS Virus
tccaaatataacgtcagttactgtt

SEQ ID NO: 15776 - DNA, 25 bp, SARS Virus
ccaaatataacggcagttactgttt

SEQ ID NO: 15777 - DNA, 25 bp, SARS Virus
caaatataacgtgagttactgtttc

SEQ ID NO: 15778 - DNA, 25 bp, SARS Virus
aaatataacgtcggttactgtttcg

SEQ ID NO: 15779 - DNA, 25 bp, SARS Virus
aatataacgtcagttactgtttcga

SEQ ID NO: 15780 - DNA, 25 bp, SARS Virus
atataacgtcaggtactgtttcgag

SEQ ID NO: 15781 - DNA, 25 bp, SARS Virus
tataacgtcagtgactgtttcgaga

SEQ ID NO: 15782 - DNA, 25 bp, SARS Virus
ataacgtcagttgctgtttcgagaa

SEQ ID NO: 15783 - DNA, 25 bp, SARS Virus
taacgtcagttagtgtttcgagaaa

SEQ ID NO: 15784 - DNA, 25 bp, SARS Virus
aacgtcagttacggtttcgagaaat

SEQ ID NO: 15785 - DNA, 25 bp, SARS Virus
acgtcagttactgtttcgagaaata

SEQ ID NO: 15786 - DNA, 25 bp, SARS Virus
cgtcagttactggttcgagaaatac

SEQ ID NO: 15787 - DNA, 25 bp, SARS Virus
gtcagttactgtgtcgagaaatact

SEQ ID NO: 15788 - DNA, 25 bp, SARS Virus
tcagttactgttgcgagaaatactc

SEQ ID NO: 15789 - DNA, 25 bp, SARS Virus
cagttactgtttggagaaatactcg

SEQ ID NO: 15790 - DNA, 25 bp, SARS Virus
agttactgtttcgagaaatactcgt

SEQ ID NO: 15791 - DNA, 25 bp, SARS Virus
gttactgtttcgggaaatactcgtc

SEQ ID NO: 15792 - DNA, 25 bp, SARS Virus
ttactgtttcgagaaatactcgtcc

SEQ ID NO: 15793 - DNA, 25 bp, SARS Virus
tactgtttcgaggaatactcgtcca

SEQ ID NO: 15794 - DNA, 25 bp, SARS Virus
actgtttcgagagatactcgtccaa

SEQ ID NO: 15795 - DNA, 25 bp, SARS Virus
ctgtttcgagaagtactcgtccaac

SEQ ID NO: 15796 - DNA, 25 bp, SARS Virus
tgtttcgagaaagactcgtccaaca

SEQ ID NO: 15797 - DNA, 25 bp, SARS Virus
gtttcgagaaatgctcgtccaacag

SEQ ID NO: 15798 - DNA, 25 bp, SARS Virus
tttcgagaaatagtcgtccaacagt

SEQ ID NO: 15799 - DNA, 25 bp, SARS Virus
ttcgagaaatacgcgtccaacagta

SEQ ID NO: 15800 - DNA, 25 bp, SARS Virus
tcgagaaatactggtccaacagtac

SEQ ID NO: 15801 - DNA, 25 bp, SARS Virus
cgagaaatactcgtccaacagtacc

SEQ ID NO: 15802 - DNA, 25 bp, SARS Virus
gagaaatactcggccaacagtacct

SEQ ID NO: 15803 - DNA, 25 bp, SARS Virus
agaaatactcgtgcaacagtaccta

SEQ ID NO: 15804 - DNA, 25 bp, SARS Virus
gaaatactcgtcgaacagtacctaa

SEQ ID NO: 15805 - DNA, 25 bp, SARS Virus
aaatactcgtccgacagtacctaat

SEQ ID NO: 15806 - DNA, 25 bp, SARS Virus
aatactcgtccagcagtacctaata

SEQ ID NO: 15807 - DNA, 25 bp, SARS Virus
atactcgtccaagagtacctaatag

SEQ ID NO: 15808 - DNA, 25 bp, SARS Virus
tactcgtccaacggtacctaataga

SEQ ID NO: 15809 - DNA, 25 bp, SARS Virus
actcgtccaacagtacctaatagaa

SEQ ID NO: 15810 - DNA, 25 bp, SARS Virus
ctcgtccaacaggacctaatagaac

SEQ ID NO: 15811 - DNA, 25 bp, SARS Virus
tcgtccaacagtgcctaatagaact

SEQ ID NO: 15812 - DNA, 25 bp, SARS Virus
cgtccaacagtagctaatagaacta

SEQ ID NO: 15813 - DNA, 25 bp, SARS Virus
gtccaacagtacgtaatagaactat

SEQ ID NO: 15814 - DNA, 25 bp, SARS Virus
tccaacagtaccgaatagaactatt

SEQ ID NO: 15815 - DNA, 25 bp, SARS Virus
ccaacagtacctgatagaactattg

SEQ ID NO: 15816 - DNA, 25 bp, SARS Virus
caacagtacctagtagaactattgg

SEQ ID NO: 15817 - DNA, 25 bp, SARS Virus
aacagtacctaagagaactattgga

SEQ ID NO: 15818 - DNA, 25 bp, SARS Virus
acagtacctaatggaactattggac

SEQ ID NO: 15819 - DNA, 25 bp, SARS Virus
cagtacctaatagaactattggact

SEQ ID NO: 15820 - DNA, 25 bp, SARS Virus
agtacctaataggactattggactt

SEQ ID NO: 15821 - DNA, 25 bp, SARS Virus
gtacctaatagagctattggacttc

SEQ ID NO: 15822 - DNA, 25 bp, SARS Virus
tacctaatagaagtattggacttcg

SEQ ID NO: 15823 - DNA, 25 bp, SARS Virus
acctaatagaacgattggacttcgg

SEQ ID NO: 15824 - DNA, 25 bp, SARS Virus
cctaatagaactgttggacttcgga

SEQ ID NO: 15825 - DNA, 25 bp, SARS Virus
ctaatagaactagtggacttcggat

SEQ ID NO: 15826 - DNA, 25 bp, SARS Virus
taatagaactatgggacttcggatc

SEQ ID NO: 15827 - DNA, 25 bp, SARS Virus
aatagaactattggacttcggatct

SEQ ID NO: 15828 - DNA, 25 bp, SARS Virus
atagaactattggacttcggatctc

SEQ ID NO: 15829 - DNA, 25 bp, SARS Virus
tagaactattgggcttcggatctca

SEQ ID NO: 15830 - DNA, 25 bp, SARS Virus
agaactattggagttcggatctcac

SEQ ID NO: 15831 - DNA, 25 bp, SARS Virus
gaactattggacgtcggatctcacc

SEQ ID NO: 15832 - DNA, 25 bp, SARS Virus
aactattggactgcggatctcacct

SEQ ID NO: 15833 - DNA, 25 bp, SARS Virus
actattggacttgggatctcacctt

SEQ ID NO: 15834 - DNA, 25 bp, SARS Virus
ctattggacttcggatctcaccttc

SEQ ID NO: 15835 - DNA, 25 bp, SARS Virus
tattggacttcggatctcaccttcg

SEQ ID NO: 15836 - DNA, 25 bp, SARS Virus
attggacttcgggtctcaccttcgt

SEQ ID NO: 15837 - DNA, 25 bp, SARS Virus
ttggacttcggagctcaccttcgtg

SEQ ID NO: 15838 - DNA, 25 bp, SARS Virus
tggacttcggatgtcaccttcgtgg

SEQ ID NO: 15839 - DNA, 25 bp, SARS Virus
ggacttcggatcgcaccttcgtgga

SEQ ID NO: 15840 - DNA, 25 bp, SARS Virus
gacttcggatctgaccttcgtggat

SEQ ID NO: 15841 - DNA, 25 bp, SARS Virus
acttcggatctcgccttcgtggatt

SEQ ID NO: 15842 - DNA, 25 bp, SARS Virus
cttcggatctcagcttcgtggattt

SEQ ID NO: 15843 - DNA, 25 bp, SARS Virus
ttcggatctcacgttcgtggatttg

SEQ ID NO: 15844 - DNA, 25 bp, SARS Virus
tcggatctcaccgtcgtggatttgt

SEQ ID NO: 15845 - DNA, 25 bp, SARS Virus
cggatctcacctgcgtggatttgtt

SEQ ID NO: 15846 - DNA, 25 bp, SARS Virus
ggatctcaccttggtggatttgttc

SEQ ID NO: 15847 - DNA, 25 bp, SARS Virus
gatctcaccttcgtggatttgttct

SEQ ID NO: 15848 - DNA, 25 bp, SARS Virus
atctcaccttcggggatttgttctc

SEQ ID NO: 15849 - DNA, 25 bp, SARS Virus
tctcaccttcgtggatttgttctcc

SEQ ID NO: 15850 - DNA, 25 bp, SARS Virus
ctcaccttcgtggatttgttctcct

SEQ ID NO: 15851 - DNA, 25 bp, SARS Virus
tcaccttcgtgggtttgttctcctc

SEQ ID NO: 15852 - DNA, 25 bp, SARS Virus
caccttcgtggagttgttctcctcg

SEQ ID NO: 15853 - DNA, 25 bp, SARS Virus
accttcgtggatgtgttctcctcgg

SEQ ID NO: 15854 - DNA, 25 bp, SARS Virus
ccttcgtggattggttctcctcggt

SEQ ID NO: 15855 - DNA, 25 bp, SARS Virus
cttcgtggatttgttctcctcggtg

SEQ ID NO: 15856 - DNA, 25 bp, SARS Virus
ttcgtggatttggtctcctcggtgg

SEQ ID NO: 15857 - DNA, 25 bp, SARS Virus
tcgtggatttgtgctcctcggtggt

SEQ ID NO: 15858 - DNA, 25 bp, SARS Virus
cgtggatttgttgtcctcggtggtt

SEQ ID NO: 15859 - DNA, 25 bp, SARS Virus
gtggatttgttcgcctcggtggttt

SEQ ID NO: 15860 - DNA, 25 bp, SARS Virus
tggatttgttctgctcggtggtttg

SEQ ID NO: 15861 - DNA, 25 bp, SARS Virus
ggatttgttctcgtcggtggtttgt

SEQ ID NO: 15862 - DNA, 25 bp, SARS Virus
gatttgttctccgcggtggtttgtg

SEQ ID NO: 15863 - DNA, 25 bp, SARS Virus
atttgttctcctgggtggtttgtgt

SEQ ID NO: 15864 - DNA, 25 bp, SARS Virus
tttgttctcctcggtggtttgtgtc

SEQ ID NO: 15865 - DNA, 25 bp, SARS Virus
ttgttctcctcggtggtttgtgtct

SEQ ID NO: 15866 - DNA, 25 bp, SARS Virus
tgttctcctcgggggtttgtgtctt

SEQ ID NO: 15867 - DNA, 25 bp, SARS Virus
gttctcctcggtggtttgtgtcttc

SEQ ID NO: 15868 - DNA, 25 bp, SARS Virus
ttctcctcggtggtttgtgtcttct

SEQ ID NO: 15869 - DNA, 25 bp, SARS Virus
tctcctcggtgggttgtgtcttcta

SEQ ID NO: 15870 - DNA, 25 bp, SARS Virus
ctcctcggtggtgtgtgtcttctaa

SEQ ID NO: 15871 - DNA, 25 bp, SARS Virus
tcctcggtggttggtgtcttctaag

SEQ ID NO: 15872 - DNA, 25 bp, SARS Virus
cctcggtggtttgtgtcttctaagg

SEQ ID NO: 15873 - DNA, 25 bp, SARS Virus
ctcggtggtttgggtcttctaaggt

SEQ ID NO: 15874 - DNA, 25 bp, SARS Virus
tcggtggtttgtgtcttctaaggtt

SEQ ID NO: 15875 - DNA, 25 bp, SARS Virus
cggtggtttgtggcttctaaggttt

SEQ ID NO: 15876 - DNA, 25 bp, SARS Virus
ggtggtttgtgtgttctaaggtttt

SEQ ID NO: 15877 - DNA, 25 bp, SARS Virus
gtggtttgtgtcgtctaaggttttg

SEQ ID NO: 15878 - DNA, 25 bp, SARS Virus
tggtttgtgtctgctaaggttttga

SEQ ID NO: 15879 - DNA, 25 bp, SARS Virus
ggtttgtgtcttgtaaggttttgac

SEQ ID NO: 15880 - DNA, 25 bp, SARS Virus
gtttgtgtcttcgaaggttttgact

SEQ ID NO: 15881 - DNA, 25 bp, SARS Virus
tttgtgtcttctgaggttttgactc

SEQ ID NO: 15882 - DNA, 25 bp, SARS Virus
ttgtgtcttctagggttttgactcc

SEQ ID NO: 15883 - DNA, 25 bp, SARS Virus
tgtgtcttctaaggttttgactcct

SEQ ID NO: 15884 - DNA, 25 bp, SARS Virus
gtgtcttctaaggttttgactcctc

SEQ ID NO: 15885 - DNA, 25 bp, SARS Virus
tgtcttctaagggtttgactcctct

SEQ ID NO: 15886 - DNA, 25 bp, SARS Virus
gtcttctaaggtgttgactcctctt

SEQ ID NO: 15887 - DNA, 25 bp, SARS Virus
tcttctaaggttgtgactcctcttt

SEQ ID NO: 15888 - DNA, 25 bp, SARS Virus
cttctaaggtttggactcctcttta

SEQ ID NO: 15889 - DNA, 25 bp, SARS Virus
ttctaaggttttgactcctctttag

SEQ ID NO: 15890 - DNA, 25 bp, SARS Virus
tctaaggttttggctcctctttaga

SEQ ID NO: 15891 - DNA, 25 bp, SARS Virus
ctaaggttttgagtcctctttagac

SEQ ID NO: 15892 - DNA, 25 bp, SARS Virus
taaggttttgacgcctctttagaca

SEQ ID NO: 15893 - DNA, 25 bp, SARS Virus
aaggttttgactgctctttagacag

SEQ ID NO: 15894 - DNA, 25 bp, SARS Virus
aggttttgactcgtctttagacagc

SEQ ID NO: 15895 - DNA, 25 bp, SARS Virus
ggttttgactccgctttagacagca

SEQ ID NO: 15896 - DNA, 25 bp, SARS Virus
gttttgactcctgtttagacagcat

SEQ ID NO: 15897 - DNA, 25 bp, SARS Virus
ttttgactcctcgttagacagcatg

SEQ ID NO: 15898 - DNA, 25 bp, SARS Virus
tttgactcctctgtagacagcatgt

SEQ ID NO: 15899 - DNA, 25 bp, SARS Virus
ttgactcctcttgagacagcatgtc

SEQ ID NO: 15900 - DNA, 25 bp, SARS Virus
tgactcctctttggacagcatgtct

SEQ ID NO: 15901 - DNA, 25 bp, SARS Virus
gactcctctttagacagcatgtctt

SEQ ID NO: 15902 - DNA, 25 bp, SARS Virus
actcctctttaggcagcatgtcttc

SEQ ID NO: 15903 - DNA, 25 bp, SARS Virus
ctcctctttagagagcatgtcttcg

SEQ ID NO: 15904 - DNA, 25 bp, SARS Virus
tcctctttagacggcatgtcttcgg

SEQ ID NO: 15905 - DNA, 25 bp, SARS Virus
cctctttagacagcatgtcttcgga

SEQ ID NO: 15906 - DNA, 25 bp, SARS Virus
ctctttagacaggatgtcttcggac

SEQ ID NO: 15907 - DNA, 25 bp, SARS Virus
tctttagacagcgtgtcttcggaca

SEQ ID NO: 15908 - DNA, 25 bp, SARS Virus
ctttagacagcaggtcttcggacag

SEQ ID NO: 15909 - DNA, 25 bp, SARS Virus
tttagacagcatgtcttcggacagc

SEQ ID NO: 15910 - DNA, 25 bp, SARS Virus
ttagacagcatggcttcggacagct

SEQ ID NO: 15911 - DNA, 25 bp, SARS Virus
tagacagcatgtgttcggacagcta

SEQ ID NO: 15912 - DNA, 25 bp, SARS Virus
agacagcatgtcgtcggacagctac

SEQ ID NO: 15913 - DNA, 25 bp, SARS Virus
gacagcatgtctgcggacagctaca

SEQ ID NO: 15914 - DNA, 25 bp, SARS Virus
acagcatgtcttgggacagctacac

SEQ ID NO: 15915 - DNA, 25 bp, SARS Virus
cagcatgtcttcggacagctacact

SEQ ID NO: 15916 - DNA, 25 bp, SARS Virus
agcatgtcttcggacagctacactt

SEQ ID NO: 15917 - DNA, 25 bp, SARS Virus
gcatgtcttcgggcagctacacttc

SEQ ID NO: 15918 - DNA, 25 bp, SARS Virus
catgtcttcggagagctacacttcg

SEQ ID NO: 15919 - DNA, 25 bp, SARS Virus
atgtcttcggacggctacacttcgg

SEQ ID NO: 15920 - DNA, 25 bp, SARS Virus
tgtcttcggacagctacacttcggt

SEQ ID NO: 15921 - DNA, 25 bp, SARS Virus
gtcttcggacaggtacacttcggtt

SEQ ID NO: 15922 - DNA, 25 bp, SARS Virus
tcttcggacagcgacacttcggttt

SEQ ID NO: 15923 - DNA, 25 bp, SARS Virus
cttcggacagctgcacttcggtttt

SEQ ID NO: 15924 - DNA, 25 bp, SARS Virus
ttcggacagctagacttcggttttt

SEQ ID NO: 15925 - DNA, 25 bp, SARS Virus
tcggacagctacgcttcggttttta

SEQ ID NO: 15926 - DNA, 25 bp, SARS Virus
cggacagctacagttcggtttttaa

SEQ ID NO: 15927 - DNA, 25 bp, SARS Virus
ggacagctacacgtcggtttttaat

SEQ ID NO: 15928 - DNA, 25 bp, SARS Virus
gacagctacactgcggtttttaatt

SEQ ID NO: 15929 - DNA, 25 bp, SARS Virus
acagctacacttgggtttttaattc

SEQ ID NO: 15930 - DNA, 25 bp, SARS Virus
cagctacacttcggtttttaattcc

SEQ ID NO: 15931 - DNA, 25 bp, SARS Virus
agctacacttcggtttttaattccg

SEQ ID NO: 15932 - DNA, 25 bp, SARS Virus
gctacacttcgggttttaattccgg

SEQ ID NO: 15933 - DNA, 25 bp, SARS Virus
ctacacttcggtgtttaattccgga

SEQ ID NO: 15934 - DNA, 25 bp, SARS Virus
tacacttcggttgttaattccggac

SEQ ID NO: 15935 - DNA, 25 bp, SARS Virus
acacttcggtttgtaattccggacg

SEQ ID NO: 15936 - DNA, 25 bp, SARS Virus
cacttcggttttgaattccggacgt

SEQ ID NO: 15937 - DNA, 25 bp, SARS Virus
acttcggtttttgattccggacgta

SEQ ID NO: 15938 - DNA, 25 bp, SARS Virus
cttcggtttttagttccggacgtaa

SEQ ID NO: 15939 - DNA, 25 bp, SARS Virus
ttcggtttttaagtccggacgtaac

SEQ ID NO: 15940 - DNA, 25 bp, SARS Virus
tcggtttttaatgccggacgtaact

SEQ ID NO: 15941 - DNA, 25 bp, SARS Virus
cggtttttaattgcggacgtaacta

SEQ ID NO: 15942 - DNA, 25 bp, SARS Virus
ggtttttaattcgggacgtaactac

SEQ ID NO: 15943 - DNA, 25 bp, SARS Virus
gtttttaattccggacgtaactact

SEQ ID NO: 15944 - DNA, 25 bp, SARS Virus
tttttaattccggacgtaactactc

SEQ ID NO: 15945 - DNA, 25 bp, SARS Virus
ttttaattccgggcgtaactactcc

SEQ ID NO: 15946 - DNA, 25 bp, SARS Virus
tttaattccggaggtaactactcca

SEQ ID NO: 15947 - DNA, 25 bp, SARS Virus
ttaattccggacgtaactactccaa

SEQ ID NO: 15948 - DNA, 25 bp, SARS Virus
taattccggacggaactactccaat

SEQ ID NO: 15949 - DNA, 25 bp, SARS Virus
aattccggacgtgactactccaatg

SEQ ID NO: 15950 - DNA, 25 bp, SARS Virus
attccggacgtagctactccaatgg

SEQ ID NO: 15951 - DNA, 25 bp, SARS Virus
ttccggacgtaagtactccaatggt

SEQ ID NO: 15952 - DNA, 25 bp, SARS Virus
tccggacgtaacgactccaatggtg

SEQ ID NO: 15953 - DNA, 25 bp, SARS Virus
ccggacgtaactgctccaatggtgt

SEQ ID NO: 15954 - DNA, 25 bp, SARS Virus
cggacgtaactagtccaatggtgtt

SEQ ID NO: 15955 - DNA, 25 bp, SARS Virus
ggacgtaactacgccaatggtgttg

SEQ ID NO: 15956 - DNA, 25 bp, SARS Virus
gacgtaactactgcaatggtgttgt

SEQ ID NO: 15957 - DNA, 25 bp, SARS Virus
acgtaactactcgaatggtgttgtg

SEQ ID NO: 15958 - DNA, 25 bp, SARS Virus
cgtaactactccgatggtgttgtga

SEQ ID NO: 15959 - DNA, 25 bp, SARS Virus
gtaactactccagtggtgttgtgac

SEQ ID NO: 15960 - DNA, 25 bp, SARS Virus
taactactccaagggtgttgtgacc

SEQ ID NO: 15961 - DNA, 25 bp, SARS Virus
aactactccaatggtgttgtgacct

SEQ ID NO: 15962 - DNA, 25 bp, SARS Virus
actactccaatggtgttgtgacctt

SEQ ID NO: 15963 - DNA, 25 bp, SARS Virus
ctactccaatggggttgtgaccttc

SEQ ID NO: 15964 - DNA, 25 bp, SARS Virus
tactccaatggtgttgtgaccttct

SEQ ID NO: 15965 - DNA, 25 bp, SARS Virus
actccaatggtggtgtgaccttctt

SEQ ID NO: 15966 - DNA, 25 bp, SARS Virus
ctccaatggtgtggtgaccttcttt

SEQ ID NO: 15967 - DNA, 25 bp, SARS Virus
tccaatggtgttgtgaccttctttg

SEQ ID NO: 15968 - DNA, 25 bp, SARS Virus
ccaatggtgttgggaccttctttga

SEQ ID NO: 15969 - DNA, 25 bp, SARS Virus
caatggtgttgtgaccttctttgat

SEQ ID NO: 15970 - DNA, 25 bp, SARS Virus
aatggtgttgtggccttctttgatt

SEQ ID NO: 15971 - DNA, 25 bp, SARS Virus
atggtgttgtgagcttctttgattc

SEQ ID NO: 15972 - DNA, 25 bp, SARS Virus
tggtgttgtgacgttctttgattca

SEQ ID NO: 15973 - DNA, 25 bp, SARS Virus
ggtgttgtgaccgtctttgattcaa

SEQ ID NO: 15974 - DNA, 25 bp, SARS Virus
gtgttgtgacctgctttgattcaaa

SEQ ID NO: 15975 - DNA, 25 bp, SARS Virus
tgttgtgaccttgtttgattcaaag

SEQ ID NO: 15976 - DNA, 25 bp, SARS Virus
gttgtgaccttcgttgattcaaaga

SEQ ID NO: 15977 - DNA, 25 bp, SARS Virus
ttgtgaccttctgtgattcaaagaa

SEQ ID NO: 15978 - DNA, 25 bp, SARS Virus
tgtgaccttcttggattcaaagaat

SEQ ID NO: 15979 - DNA, 25 bp, SARS Virus
gtgaccttctttgattcaaagaatg

SEQ ID NO: 15980 - DNA, 25 bp, SARS Virus
tgaccttctttggttcaaagaatgg

SEQ ID NO: 15981 - DNA, 25 bp, SARS Virus
gaccttctttgagtcaaagaatggt

SEQ ID NO: 15982 - DNA, 25 bp, SARS Virus
accttctttgatgcaaagaatggtt

SEQ ID NO: 15983 - DNA, 25 bp, SARS Virus
ccttctttgattgaaagaatggtta

SEQ ID NO: 15984 - DNA, 25 bp, SARS Virus
cttctttgattcgaagaatggttat

SEQ ID NO: 15985 - DNA, 25 bp, SARS Virus
ttctttgattcagagaatggttatt

SEQ ID NO: 15986 - DNA, 25 bp, SARS Virus
tctttgattcaaggaatggttattc

SEQ ID NO: 15987 - DNA, 25 bp, SARS Virus
ctttgattcaaagaatggttattca

SEQ ID NO: 15988 - DNA, 25 bp, SARS Virus
tttgattcaaaggatggttattcaa

SEQ ID NO: 15989 - DNA, 25 bp, SARS Virus
ttgattcaaagagtggttattcaat

SEQ ID NO: 15990 - DNA, 25 bp, SARS Virus
tgattcaaagaagggttattcaatg

SEQ ID NO: 15991 - DNA, 25 bp, SARS Virus
gattcaaagaatggttattcaatga

SEQ ID NO: 15992 - DNA, 25 bp, SARS Virus
attcaaagaatggttattcaatgag

SEQ ID NO: 15993 - DNA, 25 bp, SARS Virus
ttcaaagaatgggtattcaatgaga

SEQ ID NO: 15994 - DNA, 25 bp, SARS Virus
tcaaagaatggtgattcaatgagaa

SEQ ID NO: 15995 - DNA, 25 bp, SARS Virus
caaagaatggttgttcaatgagaac

SEQ ID NO: 15996 - DNA, 25 bp, SARS Virus
aaagaatggttagtcaatgagaaca

SEQ ID NO: 15997 - DNA, 25 bp, SARS Virus
aagaatggttatgcaatgagaacaa

SEQ ID NO: 15998 - DNA, 25 bp, SARS Virus
agaatggttattgaatgagaacaaa

SEQ ID NO: 15999 - DNA, 25 bp, SARS Virus
gaatggttattcgatgagaacaaac

SEQ ID NO: 16000 - DNA, 25 bp, SARS Virus
aatggttattcagtgagaacaaacg

SEQ ID NO: 16001 - DNA, 25 bp, SARS Virus
atggttattcaaggagaacaaacga

SEQ ID NO: 16002 - DNA, 25 bp, SARS Virus
tggttattcaatgagaacaaacgac

SEQ ID NO: 16003 - DNA, 25 bp, SARS Virus
ggttattcaatgggaacaaacgact

SEQ ID NO: 16004 - DNA, 25 bp, SARS Virus
gttattcaatgagaacaaacgacta

SEQ ID NO: 16005 - DNA, 25 bp, SARS Virus
ttattcaatgaggacaaacgactat

SEQ ID NO: 16006 - DNA, 25 bp, SARS Virus
tattcaatgagagcaaacgactata

SEQ ID NO: 16007 - DNA, 25 bp, SARS Virus
attcaatgagaagaaacgactatag

SEQ ID NO: 16008 - DNA, 25 bp, SARS Virus
ttcaatgagaacgaacgactatagt

SEQ ID NO: 16009 - DNA, 25 bp, SARS Virus
tcaatgagaacagacgactatagtt

SEQ ID NO: 16010 - DNA, 25 bp, SARS Virus
caatgagaacaagcgactatagtta

SEQ ID NO: 16011 - DNA, 25 bp, SARS Virus
aatgagaacaaaggactatagttac

SEQ ID NO: 16012 - DNA, 25 bp, SARS Virus
atgagaacaaacgactatagttacc

SEQ ID NO: 16013 - DNA, 25 bp, SARS Virus
tgagaacaaacggctatagttacca

SEQ ID NO: 16014 - DNA, 25 bp, SARS Virus
gagaacaaacgagtatagttaccat

SEQ ID NO: 16015 - DNA, 25 bp, SARS Virus
agaacaaacgacgatagttaccatt

SEQ ID NO: 16016 - DNA, 25 bp, SARS Virus
gaacaaacgactgtagttaccattc

SEQ ID NO: 16017 - DNA, 25 bp, SARS Virus
aacaaacgactagagttaccattcg

SEQ ID NO: 16018 - DNA, 25 bp, SARS Virus
acaaacgactatggttaccattcga

SEQ ID NO: 16019 - DNA, 25 bp, SARS Virus
caaacgactatagttaccattcgaa

SEQ ID NO: 16020 - DNA, 25 bp, SARS Virus
aaacgactataggtaccattcgaaa

SEQ ID NO: 16021 - DNA, 25 bp, SARS Virus
aacgactatagtgaccattcgaaat

SEQ ID NO: 16022 - DNA, 25 bp, SARS Virus
acgactatagttgccattcgaaatg

SEQ ID NO: 16023 - DNA, 25 bp, SARS Virus
cgactatagttagcattcgaaatgg

SEQ ID NO: 16024 - DNA, 25 bp, SARS Virus
gactatagttacgattcgaaatggt

SEQ ID NO: 16025 - DNA, 25 bp, SARS Virus
actatagttaccgttcgaaatggta

SEQ ID NO: 16026 - DNA, 25 bp, SARS Virus
ctatagttaccagtcgaaatggtac

SEQ ID NO: 16027 - DNA, 25 bp, SARS Virus
tatagttaccatgcgaaatggtact

SEQ ID NO: 16028 - DNA, 25 bp, SARS Virus
atagttaccattggaaatggtacta

SEQ ID NO: 16029 - DNA, 25 bp, SARS Virus
tagttaccattcgaaatggtactaa

SEQ ID NO: 16030 - DNA, 25 bp, SARS Virus
agttaccattcggaatggtactaag

SEQ ID NO: 16031 - DNA, 25 bp, SARS Virus
gttaccattcgagatggtactaaga

SEQ ID NO: 16032 - DNA, 25 bp, SARS Virus
ttaccattcgaagtggtactaagag

SEQ ID NO: 16033 - DNA, 25 bp, SARS Virus
taccattcgaaagggtactaagagt

SEQ ID NO: 16034 - DNA, 25 bp, SARS Virus
accattcgaaatggtactaagagtc

SEQ ID NO: 16035 - DNA, 25 bp, SARS Virus
ccattcgaaatggtactaagagtct

SEQ ID NO: 16036 - DNA, 25 bp, SARS Virus
cattcgaaatgggactaagagtctt

SEQ ID NO: 16037 - DNA, 25 bp, SARS Virus
attcgaaatggtgctaagagtcttg

SEQ ID NO: 16038 - DNA, 25 bp, SARS Virus
ttcgaaatggtagtaagagtcttgt

SEQ ID NO: 16039 - DNA, 25 bp, SARS Virus
tcgaaatggtacgaagagtcttgta

SEQ ID NO: 16040 - DNA, 25 bp, SARS Virus
cgaaatggtactgagagtcttgtac

SEQ ID NO: 16041 - DNA, 25 bp, SARS Virus
gaaatggtactaggagtcttgtacg

SEQ ID NO: 16042 - DNA, 25 bp, SARS Virus
aaatggtactaagagtcttgtacga

SEQ ID NO: 16043 - DNA, 25 bp, SARS Virus
aatggtactaagggtcttgtacgaa

SEQ ID NO: 16044 - DNA, 25 bp, SARS Virus
atggtactaagagtcttgtacgaat

SEQ ID NO: 16045 - DNA, 25 bp, SARS Virus
tggtactaagaggcttgtacgaatc

SEQ ID NO: 16046 - DNA, 25 bp, SARS Virus
ggtactaagagtgttgtacgaatct

SEQ ID NO: 16047 - DNA, 25 bp, SARS Virus
gtactaagagtcgtgtacgaatctc

SEQ ID NO: 16048 - DNA, 25 bp, SARS Virus
tactaagagtctggtacgaatctcc

SEQ ID NO: 16049 - DNA, 25 bp, SARS Virus
actaagagtcttgtacgaatctcca

SEQ ID NO: 16050 - DNA, 25 bp, SARS Virus
ctaagagtcttggacgaatctccac

SEQ ID NO: 16051 - DNA, 25 bp, SARS Virus
taagagtcttgtgcgaatctccact

SEQ ID NO: 16052 - DNA, 25 bp, SARS Virus
aagagtcttgtaggaatctccactt

SEQ ID NO: 16053 - DNA, 25 bp, SARS Virus
agagtcttgtacgaatctccacttc

SEQ ID NO: 16054 - DNA, 25 bp, SARS Virus
gagtcttgtacggatctccacttct

SEQ ID NO: 16055 - DNA, 25 bp, SARS Virus
agtcttgtacgagtctccacttcta

SEQ ID NO: 16056 - DNA, 25 bp, SARS Virus
gtcttgtacgaagctccacttctat

SEQ ID NO: 16057 - DNA, 25 bp, SARS Virus
tcttgtacgaatgtccacttctata

SEQ ID NO: 16058 - DNA, 25 bp, SARS Virus
cttgtacgaatcgccacttctatac

SEQ ID NO: 16059 - DNA, 25 bp, SARS Virus
ttgtacgaatctgcacttctataca

SEQ ID NO: 16060 - DNA, 25 bp, SARS Virus
tgtacgaatctcgacttctatacag

SEQ ID NO: 16061 - DNA, 25 bp, SARS Virus
gtacgaatctccgcttctatacaga

SEQ ID NO: 16062 - DNA, 25 bp, SARS Virus
tacgaatctccagttctatacagaa

SEQ ID NO: 16063 - DNA, 25 bp, SARS Virus
acgaatctccacgtctatacagaaa

SEQ ID NO: 16064 - DNA, 25 bp, SARS Virus
cgaatctccactgctatacagaaag

SEQ ID NO: 16065 - DNA, 25 bp, SARS Virus
gaatctccacttgtatacagaaagg

SEQ ID NO: 16066 - DNA, 25 bp, SARS Virus
aatctccacttcgatacagaaagga

SEQ ID NO: 16067 - DNA, 25 bp, SARS Virus
atctccacttctgtacagaaaggaa

SEQ ID NO: 16068 - DNA, 25 bp, SARS Virus
tctccacttctagacagaaaggaac

SEQ ID NO: 16069 - DNA, 25 bp, SARS Virus
ctccacttctatgcagaaaggaact

SEQ ID NO: 16070 - DNA, 25 bp, SARS Virus
tccacttctatagagaaaggaactc

SEQ ID NO: 16071 - DNA, 25 bp, SARS Virus
ccacttctatacggaaaggaactct

SEQ ID NO: 16072 - DNA, 25 bp, SARS Virus
cacttctatacagaaaggaactctt

SEQ ID NO: 16073 - DNA, 25 bp, SARS Virus
acttctatacaggaaggaactcttc

SEQ ID NO: 16074 - DNA, 25 bp, SARS Virus
cttctatacagagaggaactcttcc

SEQ ID NO: 16075 - DNA, 25 bp, SARS Virus
ttctatacagaagggaactcttcct

SEQ ID NO: 16076 - DNA, 25 bp, SARS Virus
tctatacagaaaggaactcttccta

SEQ ID NO: 16077 - DNA, 25 bp, SARS Virus
ctatacagaaaggaactcttcctac

SEQ ID NO: 16078 - DNA, 25 bp, SARS Virus
tatacagaaagggactcttcctacg

SEQ ID NO: 16079 - DNA, 25 bp, SARS Virus
atacagaaaggagctcttcctacgt

SEQ ID NO: 16080 - DNA, 25 bp, SARS Virus
tacagaaaggaagtcttcctacgtg

SEQ ID NO: 16081 - DNA, 25 bp, SARS Virus
acagaaaggaacgcttcctacgtgg

SEQ ID NO: 16082 - DNA, 25 bp, SARS Virus
cagaaaggaactgttcctacgtgga

SEQ ID NO: 16083 - DNA, 25 bp, SARS Virus
agaaaggaactcgtcctacgtggaa

SEQ ID NO: 16084 - DNA, 25 bp, SARS Virus
gaaaggaactctgcctacgtggaat

SEQ ID NO: 16085 - DNA, 25 bp, SARS Virus
aaaggaactcttgctacgtggaatg

SEQ ID NO: 16086 - DNA, 25 bp, SARS Virus
aaggaactcttcgtacgtggaatgt

SEQ ID NO: 16087 - DNA, 25 bp, SARS Virus
aggaactcttccgacgtggaatgta

SEQ ID NO: 16088 - DNA, 25 bp, SARS Virus
ggaactcttcctgcgtggaatgtac

SEQ ID NO: 16089 - DNA, 25 bp, SARS Virus
gaactcttcctaggtggaatgtacc

SEQ ID NO: 16090 - DNA, 25 bp, SARS Virus
aactcttcctacgtggaatgtacca

SEQ ID NO: 16091 - DNA, 25 bp, SARS Virus
actcttcctacggggaatgtaccat

SEQ ID NO: 16092 - DNA, 25 bp, SARS Virus
ctcttcctacgtggaatgtaccatc

SEQ ID NO: 16093 - DNA, 25 bp, SARS Virus
tcttcctacgtggaatgtaccatcc

SEQ ID NO: 16094 - DNA, 25 bp, SARS Virus
cttcctacgtgggatgtaccatcca

SEQ ID NO: 16095 - DNA, 25 bp, SARS Virus
ttcctacgtggagtgtaccatccac

SEQ ID NO: 16096 - DNA, 25 bp, SARS Virus
tcctacgtggaaggtaccatccact

SEQ ID NO: 16097 - DNA, 25 bp, SARS Virus
cctacgtggaatgtaccatccacta

SEQ ID NO: 16098 - DNA, 25 bp, SARS Virus
ctacgtggaatggaccatccactac

SEQ ID NO: 16099 - DNA, 25 bp, SARS Virus
tacgtggaatgtgccatccactaca

SEQ ID NO: 16100 - DNA, 25 bp, SARS Virus
acgtggaatgtagcatccactacaa

SEQ ID NO: 16101 - DNA, 25 bp, SARS Virus
cgtggaatgtacgatccactacaat

SEQ ID NO: 16102 - DNA, 25 bp, SARS Virus
gtggaatgtaccgtccactacaata

SEQ ID NO: 16103 - DNA, 25 bp, SARS Virus
tggaatgtaccagccactacaatag

SEQ ID NO: 16104 - DNA, 25 bp, SARS Virus
ggaatgtaccatgcactacaatagt

SEQ ID NO: 16105 - DNA, 25 bp, SARS Virus
gaatgtaccatcgactacaatagtg

SEQ ID NO: 16106 - DNA, 25 bp, SARS Virus
aatgtaccatccgctacaatagtga

SEQ ID NO: 16107 - DNA, 25 bp, SARS Virus
atgtaccatccagtacaatagtgat

SEQ ID NO: 16108 - DNA, 25 bp, SARS Virus
tgtaccatccacgacaatagtgatc

SEQ ID NO: 16109 - DNA, 25 bp, SARS Virus
gtaccatccactgcaatagtgatca

SEQ ID NO: 16110 - DNA, 25 bp, SARS Virus
taccatccactagaatagtgatcac

SEQ ID NO: 16111 - DNA, 25 bp, SARS Virus
accatccactacgatagtgatcacc

SEQ ID NO: 16112 - DNA, 25 bp, SARS Virus
ccatccactacagtagtgatcacca

SEQ ID NO: 16113 - DNA, 25 bp, SARS Virus
catccactacaagagtgatcaccac

SEQ ID NO: 16114 - DNA, 25 bp, SARS Virus
atccactacaatggtgatcaccact

SEQ ID NO: 16115 - DNA, 25 bp, SARS Virus
tccactacaatagtgatcaccacta

SEQ ID NO: 16116 - DNA, 25 bp, SARS Virus
ccactacaatagggatcaccactat

SEQ ID NO: 16117 - DNA, 25 bp, SARS Virus
cactacaatagtgatcaccactata

SEQ ID NO: 16118 - DNA, 25 bp, SARS Virus
actacaatagtggtcaccactatag

SEQ ID NO: 16119 - DNA, 25 bp, SARS Virus
ctacaatagtgagcaccactatagt

SEQ ID NO: 16120 - DNA, 25 bp, SARS Virus
tacaatagtgatgaccactatagtg

SEQ ID NO: 16121 - DNA, 25 bp, SARS Virus
acaatagtgatcgccactatagtga

SEQ ID NO: 16122 - DNA, 25 bp, SARS Virus
caatagtgatcagcactatagtgaa

SEQ ID NO: 16123 - DNA, 25 bp, SARS Virus
aatagtgatcacgactatagtgaac

SEQ ID NO: 16124 - DNA, 25 bp, SARS Virus
atagtgatcaccgctatagtgaaca

SEQ ID NO: 16125 - DNA, 25 bp, SARS Virus
tagtgatcaccagtatagtgaacac

SEQ ID NO: 16126 - DNA, 25 bp, SARS Virus
agtgatcaccacgatagtgaacaca

SEQ ID NO: 16127 - DNA, 25 bp, SARS Virus
gtgatcaccactgtagtgaacacaa

SEQ ID NO: 16128 - DNA, 25 bp, SARS Virus
tgatcaccactagagtgaacacaac

SEQ ID NO: 16129 - DNA, 25 bp, SARS Virus
gatcaccactatggtgaacacaaca

SEQ ID NO: 16130 - DNA, 25 bp, SARS Virus
atcaccactatagtgaacacaacat

SEQ ID NO: 16131 - DNA, 25 bp, SARS Virus
tcaccactatagggaacacaacatt

SEQ ID NO: 16132 - DNA, 25 bp, SARS Virus
caccactatagtgaacacaacatta

SEQ ID NO: 16133 - DNA, 25 bp, SARS Virus
accactatagtggacacaacattat

SEQ ID NO: 16134 - DNA, 25 bp, SARS Virus
ccactatagtgagcacaacattatg

SEQ ID NO: 16135 - DNA, 25 bp, SARS Virus
cactatagtgaagacaacattatgg

SEQ ID NO: 16136 - DNA, 25 bp, SARS Virus
actatagtgaacgcaacattatggg

SEQ ID NO: 16137 - DNA, 25 bp, SARS Virus
ctatagtgaacagaacattatggga

SEQ ID NO: 16138 - DNA, 25 bp, SARS Virus
tatagtgaacacgacattatgggag

SEQ ID NO: 16139 - DNA, 25 bp, SARS Virus
atagtgaacacagcattatgggagg

SEQ ID NO: 16140 - DNA, 25 bp, SARS Virus
tagtgaacacaagattatgggaggt

SEQ ID NO: 16141 - DNA, 25 bp, SARS Virus
agtgaacacaacgttatgggaggtt

SEQ ID NO: 16142 - DNA, 25 bp, SARS Virus
gtgaacacaacagtatgggaggttt

SEQ ID NO: 16143 - DNA, 25 bp, SARS Virus
tgaacacaacatgatgggaggtttt

SEQ ID NO: 16144 - DNA, 25 bp, SARS Virus
gaacacaacattgtgggaggttttt

SEQ ID NO: 16145 - DNA, 25 bp, SARS Virus
aacacaacattaggggaggtttttc

SEQ ID NO: 16146 - DNA, 25 bp, SARS Virus
acacaacattatgggaggtttttcc

SEQ ID NO: 16147 - DNA, 25 bp, SARS Virus
cacaacattatgggaggtttttccg

SEQ ID NO: 16148 - DNA, 25 bp, SARS Virus
acaacattatgggaggtttttccga

SEQ ID NO: 16149 - DNA, 25 bp, SARS Virus
caacattatggggggtttttccgac

SEQ ID NO: 16150 - DNA, 25 bp, SARS Virus
aacattatgggaggtttttccgacc

SEQ ID NO: 16151 - DNA, 25 bp, SARS Virus
acattatgggaggtttttccgacca

SEQ ID NO: 16152 - DNA, 25 bp, SARS Virus
cattatgggagggttttccgaccac

SEQ ID NO: 16153 - DNA, 25 bp, SARS Virus
attatgggaggtgtttccgaccacc

SEQ ID NO: 16154 - DNA, 25 bp, SARS Virus
ttatgggaggttgttccgaccaccg

SEQ ID NO: 16155 - DNA, 25 bp, SARS Virus
tatgggaggtttgtccgaccaccgt

SEQ ID NO: 16156 - DNA, 25 bp, SARS Virus
atgggaggttttgccgaccaccgtg

SEQ ID NO: 16157 - DNA, 25 bp, SARS Virus
tgggaggtttttgcgaccaccgtga

SEQ ID NO: 16158 - DNA, 25 bp, SARS Virus
gggaggtttttcggaccaccgtgat

SEQ ID NO: 16159 - DNA, 25 bp, SARS Virus
ggaggtttttccgaccaccgtgatg

SEQ ID NO: 16160 - DNA, 25 bp, SARS Virus
gaggtttttccggccaccgtgatga

SEQ ID NO: 16161 - DNA, 25 bp, SARS Virus
aggtttttccgagcaccgtgatgac

SEQ ID NO: 16162 - DNA, 25 bp, SARS Virus
ggtttttccgacgaccgtgatgact

SEQ ID NO: 16163 - DNA, 25 bp, SARS Virus
gtttttccgaccgccgtgatgactc

SEQ ID NO: 16164 - DNA, 25 bp, SARS Virus
tttttccgaccagcgtgatgactct

SEQ ID NO: 16165 - DNA, 25 bp, SARS Virus
ttttccgaccacggtgatgactcta

SEQ ID NO: 16166 - DNA, 25 bp, SARS Virus
tttccgaccaccgtgatgactctac

SEQ ID NO: 16167 - DNA, 25 bp, SARS Virus
ttccgaccaccgggatgactctacg

SEQ ID NO: 16168 - DNA, 25 bp, SARS Virus
tccgaccaccgtgatgactctacga

SEQ ID NO: 16169 - DNA, 25 bp, SARS Virus
ccgaccaccgtggtgactctacgag

SEQ ID NO: 16170 - DNA, 25 bp, SARS Virus
cgaccaccgtgaggactctacgaga

SEQ ID NO: 16171 - DNA, 25 bp, SARS Virus
gaccaccgtgatgactctacgagag

SEQ ID NO: 16172 - DNA, 25 bp, SARS Virus
accaccgtgatggctctacgagagt

SEQ ID NO: 16173 - DNA, 25 bp, SARS Virus
ccaccgtgatgagtctacgagagtt

SEQ ID NO: 16174 - DNA, 25 bp, SARS Virus
caccgtgatgacgctacgagagttc

SEQ ID NO: 16175 - DNA, 25 bp, SARS Virus
accgtgatgactgtacgagagttct

SEQ ID NO: 16176 - DNA, 25 bp, SARS Virus
ccgtgatgactcgacgagagttctc

SEQ ID NO: 16177 - DNA, 25 bp, SARS Virus
cgtgatgactctgcgagagttctcg

SEQ ID NO: 16178 - DNA, 25 bp, SARS Virus
gtgatgactctaggagagttctcga

SEQ ID NO: 16179 - DNA, 25 bp, SARS Virus
tgatgactctacgagagttctcgaa

SEQ ID NO: 16180 - DNA, 25 bp, SARS Virus
gatgactctacgggagttctcgaaa

SEQ ID NO: 16181 - DNA, 25 bp, SARS Virus
atgactctacgagagttctcgaaac

SEQ ID NO: 16182 - DNA, 25 bp, SARS Virus
tgactctacgagggttctcgaaact

SEQ ID NO: 16183 - DNA, 25 bp, SARS Virus
gactctacgagagttctcgaaactt

SEQ ID NO: 16184 - DNA, 25 bp, SARS Virus
actctacgagaggtctcgaaacttc

SEQ ID NO: 16185 - DNA, 25 bp, SARS Virus
ctctacgagagtgctcgaaacttct

SEQ ID NO: 16186 - DNA, 25 bp, SARS Virus
tctacgagagttgtcgaaacttctt

SEQ ID NO: 16187 - DNA, 25 bp, SARS Virus
ctacgagagttcgcgaaacttcttt

SEQ ID NO: 16188 - DNA, 25 bp, SARS Virus
tacgagagttctggaaacttctttc

SEQ ID NO: 16189 - DNA, 25 bp, SARS Virus
acgagagttctcgaaacttctttca

SEQ ID NO: 16190 - DNA, 25 bp, SARS Virus
cgagagttctcggaacttctttcac

SEQ ID NO: 16191 - DNA, 25 bp, SARS Virus
gagagttctcgagacttctttcacg

SEQ ID NO: 16192 - DNA, 25 bp, SARS Virus
agagttctcgaagcttctttcacgg

SEQ ID NO: 16193 - DNA, 25 bp, SARS Virus
gagttctcgaaagttctttcacggt

SEQ ID NO: 16194 - DNA, 25 bp, SARS Virus
agttctcgaaacgtctttcacggtc

SEQ ID NO: 16195 - DNA, 25 bp, SARS Virus
gttctcgaaactgctttcacggtca

SEQ ID NO: 16196 - DNA, 25 bp, SARS Virus
ttctcgaaacttgtttcacggtcaa

SEQ ID NO: 16197 - DNA, 25 bp, SARS Virus
tctcgaaacttcgttcacggtcaac

SEQ ID NO: 16198 - DNA, 25 bp, SARS Virus
ctcgaaacttctgtcacggtcaact

SEQ ID NO: 16199 - DNA, 25 bp, SARS Virus
tcgaaacttcttgcacggtcaacta

SEQ ID NO: 16200 - DNA, 25 bp, SARS Virus
cgaaacttctttgacggtcaactac

SEQ ID NO: 16201 - DNA, 25 bp, SARS Virus
gaaacttctttcgcggtcaactact

SEQ ID NO: 16202 - DNA, 25 bp, SARS Virus
aaacttctttcagggtcaactactc

SEQ ID NO: 16203 - DNA, 25 bp, SARS Virus
aacttctttcacggtcaactactca

SEQ ID NO: 16204 - DNA, 25 bp, SARS Virus
acttctttcacggtcaactactcat

SEQ ID NO: 16205 - DNA, 25 bp, SARS Virus
cttctttcacgggcaactactcata

SEQ ID NO: 16206 - DNA, 25 bp, SARS Virus
ttctttcacggtgaactactcatat

SEQ ID NO: 16207 - DNA, 25 bp, SARS Virus
tctttcacggtcgactactcatata

SEQ ID NO: 16208 - DNA, 25 bp, SARS Virus
ctttcacggtcagctactcatatat

SEQ ID NO: 16209 - DNA, 25 bp, SARS Virus
tttcacggtcaagtactcatatatt

SEQ ID NO: 16210 - DNA, 25 bp, SARS Virus
ttcacggtcaacgactcatatattg

SEQ ID NO: 16211 - DNA, 25 bp, SARS Virus
tcacggtcaactgctcatatattgg

SEQ ID NO: 16212 - DNA, 25 bp, SARS Virus
cacggtcaactagtcatatattggt

SEQ ID NO: 16213 - DNA, 25 bp, SARS Virus
acggtcaactacgcatatattggtg

SEQ ID NO: 16214 - DNA, 25 bp, SARS Virus
cggtcaactactgatatattggtgc

SEQ ID NO: 16215 - DNA, 25 bp, SARS Virus
ggtcaactactcgtatattggtgca

SEQ ID NO: 16216 - DNA, 25 bp, SARS Virus
gtcaactactcagatattggtgcat

SEQ ID NO: 16217 - DNA, 25 bp, SARS Virus
tcaactactcatgtattggtgcatg

SEQ ID NO: 16218 - DNA, 25 bp, SARS Virus
caactactcatagattggtgcatgg

SEQ ID NO: 16219 - DNA, 25 bp, SARS Virus
aactactcatatgttggtgcatggg

SEQ ID NO: 16220 - DNA, 25 bp, SARS Virus
actactcatatagtggtgcatggga

SEQ ID NO: 16221 - DNA, 25 bp, SARS Virus
ctactcatatatgggtgcatgggac

SEQ ID NO: 16222 - DNA, 25 bp, SARS Virus
tactcatatattggtgcatgggacc

SEQ ID NO: 16223 - DNA, 25 bp, SARS Virus
actcatatattggtgcatgggacct

SEQ ID NO: 16224 - DNA, 25 bp, SARS Virus
ctcatatattggggcatgggacctg

SEQ ID NO: 16225 - DNA, 25 bp, SARS Virus
tcatatattggtgcatgggacctgt

SEQ ID NO: 16226 - DNA, 25 bp, SARS Virus
catatattggtggatgggacctgtt

SEQ ID NO: 16227 - DNA, 25 bp, SARS Virus
atatattggtgcgtgggacctgttc

SEQ ID NO: 16228 - DNA, 25 bp, SARS Virus
tatattggtgcaggggacctgttcc

SEQ ID NO: 16229 - DNA, 25 bp, SARS Virus
atattggtgcatgggacctgttcct

SEQ ID NO: 16230 - DNA, 25 bp, SARS Virus
tattggtgcatgggacctgttccta

SEQ ID NO: 16231 - DNA, 25 bp, SARS Virus
attggtgcatgggacctgttcctac

SEQ ID NO: 16232 - DNA, 25 bp, SARS Virus
ttggtgcatggggcctgttcctaca

SEQ ID NO: 16233 - DNA, 25 bp, SARS Virus
atgttcacacgctcgtctgccaagc

SEQ ID NO: 16234 - DNA, 25 bp, SARS Virus
tgttcacacgcatgtctgccaagca

SEQ ID NO: 16235 - DNA, 25 bp, SARS Virus
gttcacacgcacttctgccaagcat

SEQ ID NO: 16236 - DNA, 25 bp, SARS Virus
ttcacacgcacgtctgccaagcatg

SEQ ID NO: 16237 - DNA, 25 bp, SARS Virus
tcacacgcacgtttgccaagcatgt

SEQ ID NO: 16238 - DNA, 25 bp, SARS Virus
cacacgcacgtctgccaagcatgtg

SEQ ID NO: 16239 - DNA, 25 bp, SARS Virus
acacgcacgtcttccaagcatgtgt

SEQ ID NO: 16240 - DNA, 25 bp, SARS Virus
cacgcacgtctgtcaagcatgtgtc

SEQ ID NO: 16241 - DNA, 25 bp, SARS Virus
acgcacgtctgctaagcatgtgtcc

SEQ ID NO: 16242 - DNA, 25 bp, SARS Virus
cgcacgtctgcctagcatgtgtcca

SEQ ID NO: 16243 - DNA, 25 bp, SARS Virus
gcacgtctgccatgcatgtgtccaa

SEQ ID NO: 16244 - DNA, 25 bp, SARS Virus
cacgtctgccaatcatgtgtccaaa

SEQ ID NO: 16245 - DNA, 25 bp, SARS Virus
acgtctgccaagtatgtgtccaaat

SEQ ID NO: 16246 - DNA, 25 bp, SARS Virus
cgtctgccaagcttgtgtccaaata

SEQ ID NO: 16247 - DNA, 25 bp, SARS Virus
gtctgccaagcatgtgtccaaatat

SEQ ID NO: 16248 - DNA, 25 bp, SARS Virus
tctgccaagcatttgtccaaatata

SEQ ID NO: 16249 - DNA, 25 bp, SARS Virus
ctgccaagcatgtgtccaaatataa

SEQ ID NO: 16250 - DNA, 25 bp, SARS Virus
tgccaagcatgtttccaaatataac

SEQ ID NO: 16251 - DNA, 25 bp, SARS Virus
gccaagcatgtgtccaaatataacg

SEQ ID NO: 16252 - DNA, 25 bp, SARS Virus
ccaagcatgtgttcaaatataacgt

SEQ ID NO: 16253 - DNA, 25 bp, SARS Virus
caagcatgtgtctaaatataacgtc

SEQ ID NO: 16254 - DNA, 25 bp, SARS Virus
aagcatgtgtcctaatataacgtca

SEQ ID NO: 16255 - DNA, 25 bp, SARS Virus
agcatgtgtccatatataacgtcag

SEQ ID NO: 16256 - DNA, 25 bp, SARS Virus
gcatgtgtccaattataacgtcagt

SEQ ID NO: 16257 - DNA, 25 bp, SARS Virus
catgtgtccaaatataacgtcagtt

SEQ ID NO: 16258 - DNA, 25 bp, SARS Virus
atgtgtccaaatttaacgtcagtta

SEQ ID NO: 16259 - DNA, 25 bp, SARS Virus
tgtgtccaaatataacgtcagttac

SEQ ID NO: 16260 - DNA, 25 bp, SARS Virus
gtgtccaaatattacgtcagttact

SEQ ID NO: 16261 - DNA, 25 bp, SARS Virus
tgtccaaatatatcgtcagttactg

SEQ ID NO: 16262 - DNA, 25 bp, SARS Virus
gtccaaatataatgtcagttactgt

SEQ ID NO: 16263 - DNA, 25 bp, SARS Virus
tccaaatataacttcagttactgtt

SEQ ID NO: 16264 - DNA, 25 bp, SARS Virus
ccaaatataacgtcagttactgttt

SEQ ID NO: 16265 - DNA, 25 bp, SARS Virus
caaatataacgttagttactgtttc

SEQ ID NO: 16266 - DNA, 25 bp, SARS Virus
aaatataacgtctgttactgtttcg

SEQ ID NO: 16267 - DNA, 25 bp, SARS Virus
aatataacgtcatttactgtttcga

SEQ ID NO: 16268 - DNA, 25 bp, SARS Virus
atataacgtcagttactgtttcgag

SEQ ID NO: 16269 - DNA, 25 bp, SARS Virus
tataacgtcagttactgtttcgaga

SEQ ID NO: 16270 - DNA, 25 bp, SARS Virus
ataacgtcagtttctgtttcgagaa

SEQ ID NO: 16271 - DNA, 25 bp, SARS Virus
taacgtcagttattgtttcgagaaa

SEQ ID NO: 16272 - DNA, 25 bp, SARS Virus
aacgtcagttactgtttcgagaaat

SEQ ID NO: 16273 - DNA, 25 bp, SARS Virus
acgtcagttactttttcgagaaata

SEQ ID NO: 16274 - DNA, 25 bp, SARS Virus
cgtcagttactgtttcgagaaatac

SEQ ID NO: 16275 - DNA, 25 bp, SARS Virus
gtcagttactgtttcgagaaatact

SEQ ID NO: 16276 - DNA, 25 bp, SARS Virus
tcagttactgtttcgagaaatactc

SEQ ID NO: 16277 - DNA, 25 bp, SARS Virus
cagttactgttttgagaaatactcg

SEQ ID NO: 16278 - DNA, 25 bp, SARS Virus
agttactgtttctagaaatactcgt

SEQ ID NO: 16279 - DNA, 25 bp, SARS Virus
gttactgtttcgtgaaatactcgtc

SEQ ID NO: 16280 - DNA, 25 bp, SARS Virus
ttactgtttcgataaatactcgtcc

SEQ ID NO: 16281 - DNA, 25 bp, SARS Virus
tactgtttcgagtaatactcgtcca

SEQ ID NO: 16282 - DNA, 25 bp, SARS Virus
actgtttcgagatatactcgtccaa

SEQ ID NO: 16283 - DNA, 25 bp, SARS Virus
ctgtttcgagaattactcgtccaac

SEQ ID NO: 16284 - DNA, 25 bp, SARS Virus
tgtttcgagaaatactcgtccaaca

SEQ ID NO: 16285 - DNA, 25 bp, SARS Virus
gtttcgagaaattctcgtccaacag

SEQ ID NO: 16286 - DNA, 25 bp, SARS Virus
tttcgagaaatattcgtccaacagt

SEQ ID NO: 16287 - DNA, 25 bp, SARS Virus
ttcgagaaatactcgtccaacagta

SEQ ID NO: 16288 - DNA, 25 bp, SARS Virus
tcgagaaatacttgtccaacagtac

SEQ ID NO: 16289 - DNA, 25 bp, SARS Virus
cgagaaatactcttccaacagtacc

SEQ ID NO: 16290 - DNA, 25 bp, SARS Virus
gagaaatactcgtccaacagtacct

SEQ ID NO: 16291 - DNA, 25 bp, SARS Virus
agaaatactcgttcaacagtaccta

SEQ ID NO: 16292 - DNA, 25 bp, SARS Virus
gaaatactcgtctaacagtacctaa

SEQ ID NO: 16293 - DNA, 25 bp, SARS Virus
aaatactcgtcctacagtacctaat

SEQ ID NO: 16294 - DNA, 25 bp, SARS Virus
aatactcgtccatcagtacctaata

SEQ ID NO: 16295 - DNA, 25 bp, SARS Virus
atactcgtccaatagtacctaatag

SEQ ID NO: 16296 - DNA, 25 bp, SARS Virus
tactcgtccaactgtacctaataga

SEQ ID NO: 16297 - DNA, 25 bp, SARS Virus
actcgtccaacattacctaatagaa

SEQ ID NO: 16298 - DNA, 25 bp, SARS Virus
ctcgtccaacagtacctaatagaac

SEQ ID NO: 16299 - DNA, 25 bp, SARS Virus
tcgtccaacagttcctaatagaact

SEQ ID NO: 16300 - DNA, 25 bp, SARS Virus
cgtccaacagtatctaatagaacta

SEQ ID NO: 16301 - DNA, 25 bp, SARS Virus
gtccaacagtacttaatagaactat

SEQ ID NO: 16302 - DNA, 25 bp, SARS Virus
tccaacagtacctaatagaactatt

SEQ ID NO: 16303 - DNA, 25 bp, SARS Virus
ccaacagtaccttatagaactattg

SEQ ID NO: 16304 - DNA, 25 bp, SARS Virus
caacagtacctattagaactattgg

SEQ ID NO: 16305 - DNA, 25 bp, SARS Virus
aacagtacctaatagaactattgga

SEQ ID NO: 16306 - DNA, 25 bp, SARS Virus
acagtacctaattgaactattggac

SEQ ID NO: 16307 - DNA, 25 bp, SARS Virus
cagtacctaatataactattggact

SEQ ID NO: 16308 - DNA, 25 bp, SARS Virus
agtacctaatagtactattggactt

SEQ ID NO: 16309 - DNA, 25 bp, SARS Virus
gtacctaatagatctattggacttc

SEQ ID NO: 16310 - DNA, 25 bp, SARS Virus
tacctaatagaattattggacttcg

SEQ ID NO: 16311 - DNA, 25 bp, SARS Virus
acctaatagaactattggacttcgg

SEQ ID NO: 16312 - DNA, 25 bp, SARS Virus
cctaatagaacttttggacttcgga

SEQ ID NO: 16313 - DNA, 25 bp, SARS Virus
ctaatagaactattggacttcggat

SEQ ID NO: 16314 - DNA, 25 bp, SARS Virus
taatagaactattggacttcggatc

SEQ ID NO: 16315 - DNA, 25 bp, SARS Virus
aatagaactatttgacttcggatct

SEQ ID NO: 16316 - DNA, 25 bp, SARS Virus
atagaactattgtacttcggatctc

SEQ ID NO: 16317 - DNA, 25 bp, SARS Virus
tagaactattggtcttcggatctca

SEQ ID NO: 16318 - DNA, 25 bp, SARS Virus
agaactattggatttcggatctcac

SEQ ID NO: 16319 - DNA, 25 bp, SARS Virus
gaactattggacttcggatctcacc

SEQ ID NO: 16320 - DNA, 25 bp, SARS Virus
aactattggacttcggatctcacct

SEQ ID NO: 16321 - DNA, 25 bp, SARS Virus
actattggactttggatctcacctt

SEQ ID NO: 16322 - DNA, 25 bp, SARS Virus
ctattggacttctgatctcaccttc

SEQ ID NO: 16323 - DNA, 25 bp, SARS Virus
tattggacttcgtatctcaccttcg

SEQ ID NO: 16324 - DNA, 25 bp, SARS Virus
attggacttcggttctcaccttcgt

SEQ ID NO: 16325 - DNA, 25 bp, SARS Virus
ttggacttcggatctcaccttcgtg

SEQ ID NO: 16326 - DNA, 25 bp, SARS Virus
tggacttcggatttcaccttcgtgg

SEQ ID NO: 16327 - DNA, 25 bp, SARS Virus
ggacttcggatctcaccttcgtgga

SEQ ID NO: 16328 - DNA, 25 bp, SARS Virus
gacttcggatcttaccttcgtggat

SEQ ID NO: 16329 - DNA, 25 bp, SARS Virus
acttcggatctctccttcgtggatt

SEQ ID NO: 16330 - DNA, 25 bp, SARS Virus
cttcggatctcatcttcgtggattt

SEQ ID NO: 16331 - DNA, 25 bp, SARS Virus
ttcggatctcactttcgtggatttg

SEQ ID NO: 16332 - DNA, 25 bp, SARS Virus
tcggatctcaccttcgtggatttgt

SEQ ID NO: 16333 - DNA, 25 bp, SARS Virus
cggatctcaccttcgtggatttgtt

SEQ ID NO: 16334 - DNA, 25 bp, SARS Virus
ggatctcacctttgtggatttgttc

SEQ ID NO: 16335 - DNA, 25 bp, SARS Virus
gatctcaccttcttggatttgttct

SEQ ID NO: 16336 - DNA, 25 bp, SARS Virus
atctcaccttcgtggatttgttctc

SEQ ID NO: 16337 - DNA, 25 bp, SARS Virus
tctcaccttcgttgatttgttctcc

SEQ ID NO: 16338 - DNA, 25 bp, SARS Virus
ctcaccttcgtgtatttgttctcct

SEQ ID NO: 16339 - DNA, 25 bp, SARS Virus
tcaccttcgtggttttgttctcctc

SEQ ID NO: 16340 - DNA, 25 bp, SARS Virus
caccttcgtggatttgttctcctcg

SEQ ID NO: 16341 - DNA, 25 bp, SARS Virus
accttcgtggatttgttctcctcgg

SEQ ID NO: 16342 - DNA, 25 bp, SARS Virus
ccttcgtggatttgttctcctcggt

SEQ ID NO: 16343 - DNA, 25 bp, SARS Virus
cttcgtggattttttctcctcggtg

SEQ ID NO: 16344 - DNA, 25 bp, SARS Virus
ttcgtggatttgttctcctcggtgg

SEQ ID NO: 16345 - DNA, 25 bp, SARS Virus
tcgtggatttgttctcctcggtggt

SEQ ID NO: 16346 - DNA, 25 bp, SARS Virus
cgtggatttgttttcctcggtggtt

SEQ ID NO: 16347 - DNA, 25 bp, SARS Virus
gtggatttgttctcctcggtggttt

SEQ ID NO: 16348 - DNA, 25 bp, SARS Virus
tggatttgttcttctcggtggtttg

SEQ ID NO: 16349 - DNA, 25 bp, SARS Virus
ggatttgttctcttcggtggtttgt

SEQ ID NO: 16350 - DNA, 25 bp, SARS Virus
gatttgttctcctcggtggtttgtg

SEQ ID NO: 16351 - DNA, 25 bp, SARS Virus
atttgttctccttggtggtttgtgt

SEQ ID NO: 16352 - DNA, 25 bp, SARS Virus
tttgttctcctctgtggtttgtgtc

SEQ ID NO: 16353 - DNA, 25 bp, SARS Virus
ttgttctcctcgttggtttgtgtct

SEQ ID NO: 16354 - DNA, 25 bp, SARS Virus
tgttctcctcggtggtttgtgtctt

SEQ ID NO: 16355 - DNA, 25 bp, SARS Virus
gttctcctcggttgtttgtgtcttc

SEQ ID NO: 16356 - DNA, 25 bp, SARS Virus
ttctcctcggtgttttgtgtcttct

SEQ ID NO: 16357 - DNA, 25 bp, SARS Virus
tctcctcggtggtttgtgtcttcta

SEQ ID NO: 16358 - DNA, 25 bp, SARS Virus
ctcctcggtggtttgtgtcttctaa

SEQ ID NO: 16359 - DNA, 25 bp, SARS Virus
tcctcggtggtttgtgtcttctaag

SEQ ID NO: 16360 - DNA, 25 bp, SARS Virus
cctcggtggtttttgtcttctaagg

SEQ ID NO: 16361 - DNA, 25 bp, SARS Virus
ctcggtggtttgtgtcttctaaggt

SEQ ID NO: 16362 - DNA, 25 bp, SARS Virus
tcggtggtttgtttcttctaaggtt

SEQ ID NO: 16363 - DNA, 25 bp, SARS Virus
cggtggtttgtgtcttctaaggttt

SEQ ID NO: 16364 - DNA, 25 bp, SARS Virus
ggtggtttgtgttttctaaggtttt

SEQ ID NO: 16365 - DNA, 25 bp, SARS Virus
gtggtttgtgtcttctaaggttttg

SEQ ID NO: 16366 - DNA, 25 bp, SARS Virus
tggtttgtgtcttctaaggttttga

SEQ ID NO: 16367 - DNA, 25 bp, SARS Virus
ggtttgtgtcttttaaggttttgac

SEQ ID NO: 16368 - DNA, 25 bp, SARS Virus
gtttgtgtcttctaaggttttgact

SEQ ID NO: 16369 - DNA, 25 bp, SARS Virus
tttgtgtcttcttaggttttgactc

SEQ ID NO: 16370 - DNA, 25 bp, SARS Virus
ttgtgtcttctatggttttgactcc

SEQ ID NO: 16371 - DNA, 25 bp, SARS Virus
tgtgtcttctaatgttttgactcct

SEQ ID NO: 16372 - DNA, 25 bp, SARS Virus
gtgtcttctaagtttttgactcctc

SEQ ID NO: 16373 - DNA, 25 bp, SARS Virus
tgtcttctaaggttttgactcctct

SEQ ID NO: 16374 - DNA, 25 bp, SARS Virus
gtcttctaaggttttgactcctctt

SEQ ID NO: 16375 - DNA, 25 bp, SARS Virus
tcttctaaggttttgactcctcttt

SEQ ID NO: 16376 - DNA, 25 bp, SARS Virus
cttctaaggttttgactcctcttta

SEQ ID NO: 16377 - DNA, 25 bp, SARS Virus
ttctaaggtttttactcctctttag

SEQ ID NO: 16378 - DNA, 25 bp, SARS Virus
tctaaggttttgtctcctctttaga

SEQ ID NO: 16379 - DNA, 25 bp, SARS Virus
ctaaggttttgattcctctttagac

SEQ ID NO: 16380 - DNA, 25 bp, SARS Virus
taaggttttgactcctctttagaca

SEQ ID NO: 16381 - DNA, 25 bp, SARS Virus
aaggttttgacttctctttagacag

SEQ ID NO: 16382 - DNA, 25 bp, SARS Virus
aggttttgactcttctttagacagc

SEQ ID NO: 16383 - DNA, 25 bp, SARS Virus
ggttttgactcctctttagacagca

SEQ ID NO: 16384 - DNA, 25 bp, SARS Virus
gttttgactcctttttagacagcat

SEQ ID NO: 16385 - DNA, 25 bp, SARS Virus
ttttgactcctctttagacagcatg

SEQ ID NO: 16386 - DNA, 25 bp, SARS Virus
tttgactcctctttagacagcatgt

SEQ ID NO: 16387 - DNA, 25 bp, SARS Virus
ttgactcctctttagacagcatgtc

SEQ ID NO: 16388 - DNA, 25 bp, SARS Virus
tgactcctcttttgacagcatgtct

SEQ ID NO: 16389 - DNA, 25 bp, SARS Virus
gactcctctttatacagcatgtctt

SEQ ID NO: 16390 - DNA, 25 bp, SARS Virus
actcctctttagtcagcatgtcttc

SEQ ID NO: 16391 - DNA, 25 bp, SARS Virus
ctcctctttagatagcatgtcttcg

SEQ ID NO: 16392 - DNA, 25 bp, SARS Virus
tcctctttagactgcatgtcttcgg

SEQ ID NO: 16393 - DNA, 25 bp, SARS Virus
cctctttagacatcatgtcttcgga

SEQ ID NO: 16394 - DNA, 25 bp, SARS Virus
ctctttagacagtatgtcttcggac

SEQ ID NO: 16395 - DNA, 25 bp, SARS Virus
tctttagacagcttgtcttcggaca

SEQ ID NO: 16396 - DNA, 25 bp, SARS Virus
ctttagacagcatgtcttcggacag

SEQ ID NO: 16397 - DNA, 25 bp, SARS Virus
tttagacagcatttcttcggacagc

SEQ ID NO: 16398 - DNA, 25 bp, SARS Virus
ttagacagcatgtcttcggacagct

SEQ ID NO: 16399 - DNA, 25 bp, SARS Virus
tagacagcatgttttcggacagcta

SEQ ID NO: 16400 - DNA, 25 bp, SARS Virus
agacagcatgtcttcggacagctac

SEQ ID NO: 16401 - DNA, 25 bp, SARS Virus
gacagcatgtcttcggacagctaca

SEQ ID NO: 16402 - DNA, 25 bp, SARS Virus
acagcatgtctttggacagctacac

SEQ ID NO: 16403 - DNA, 25 bp, SARS Virus
cagcatgtcttctgacagctacact

SEQ ID NO: 16404 - DNA, 25 bp, SARS Virus
agcatgtcttcgtacagctacactt

SEQ ID NO: 16405 - DNA, 25 bp, SARS Virus
gcatgtcttcggtcagctacacttc

SEQ ID NO: 16406 - DNA, 25 bp, SARS Virus
catgtcttcggatagctacacttcg

SEQ ID NO: 16407 - DNA, 25 bp, SARS Virus
atgtcttcggactgctacacttcgg

SEQ ID NO: 16408 - DNA, 25 bp, SARS Virus
tgtcttcggacatctacacttcggt

SEQ ID NO: 16409 - DNA, 25 bp, SARS Virus
gtcttcggacagttacacttcggtt

SEQ ID NO: 16410 - DNA, 25 bp, SARS Virus
tcttcggacagctacacttcggttt

SEQ ID NO: 16411 - DNA, 25 bp, SARS Virus
cttcggacagcttcacttcggtttt

SEQ ID NO: 16412 - DNA, 25 bp, SARS Virus
ttcggacagctatacttcggttttt

SEQ ID NO: 16413 - DNA, 25 bp, SARS Virus
tcggacagctactcttcggttttta

SEQ ID NO: 16414 - DNA, 25 bp, SARS Virus
cggacagctacatttcggtttttaa

SEQ ID NO: 16415 - DNA, 25 bp, SARS Virus
ggacagctacacttcggtttttaat

SEQ ID NO: 16416 - DNA, 25 bp, SARS Virus
gacagctacacttcggtttttaatt

SEQ ID NO: 16417 - DNA, 25 bp, SARS Virus
acagctacactttggtttttaattc

SEQ ID NO: 16418 - DNA, 25 bp, SARS Virus
cagctacacttctgtttttaattcc

SEQ ID NO: 16419 - DNA, 25 bp, SARS Virus
agctacacttcgttttttaattccg

SEQ ID NO: 16420 - DNA, 25 bp, SARS Virus
gctacacttcggtttttaattccgg

SEQ ID NO: 16421 - DNA, 25 bp, SARS Virus
ctacacttcggtttttaattccgga

SEQ ID NO: 16422 - DNA, 25 bp, SARS Virus
tacacttcggtttttaattccggac

SEQ ID NO: 16423 - DNA, 25 bp, SARS Virus
acacttcggtttttaattccggacg

SEQ ID NO: 16424 - DNA, 25 bp, SARS Virus
cacttcggtttttaattccggacgt

SEQ ID NO: 16425 - DNA, 25 bp, SARS Virus
acttcggttttttattccggacgta

SEQ ID NO: 16426 - DNA, 25 bp, SARS Virus
cttcggtttttatttccggacgtaa

SEQ ID NO: 16427 - DNA, 25 bp, SARS Virus
ttcggtttttaattccggacgtaac

SEQ ID NO: 16428 - DNA, 25 bp, SARS Virus
tcggtttttaattccggacgtaact

SEQ ID NO: 16429 - DNA, 25 bp, SARS Virus
cggtttttaatttcggacgtaacta

SEQ ID NO: 16430 - DNA, 25 bp, SARS Virus
ggtttttaattctggacgtaactac

SEQ ID NO: 16431 - DNA, 25 bp, SARS Virus
gtttttaattcctgacgtaactact

SEQ ID NO: 16432 - DNA, 25 bp, SARS Virus
tttttaattccgtacgtaactactc

SEQ ID NO: 16433 - DNA, 25 bp, SARS Virus
ttttaattccggtcgtaactactcc

SEQ ID NO: 16434 - DNA, 25 bp, SARS Virus
tttaattccggatgtaactactcca

SEQ ID NO: 16435 - DNA, 25 bp, SARS Virus
ttaattccggacttaactactccaa

SEQ ID NO: 16436 - DNA, 25 bp, SARS Virus
taattccggacgtaactactccaat

SEQ ID NO: 16437 - DNA, 25 bp, SARS Virus
aattccggacgttactactccaatg

SEQ ID NO: 16438 - DNA, 25 bp, SARS Virus
attccggacgtatctactccaatgg

SEQ ID NO: 16439 - DNA, 25 bp, SARS Virus
ttccggacgtaattactccaatggt

SEQ ID NO: 16440 - DNA, 25 bp, SARS Virus
tccggacgtaactactccaatggtg

SEQ ID NO: 16441 - DNA, 25 bp, SARS Virus
ccggacgtaacttctccaatggtgt

SEQ ID NO: 16442 - DNA, 25 bp, SARS Virus
cggacgtaactattccaatggtgtt

SEQ ID NO: 16443 - DNA, 25 bp, SARS Virus
ggacgtaactactccaatggtgttg

SEQ ID NO: 16444 - DNA, 25 bp, SARS Virus
gacgtaactacttcaatggtgttgt

SEQ ID NO: 16445 - DNA, 25 bp, SARS Virus
acgtaactactctaatggtgttgtg

SEQ ID NO: 16446 - DNA, 25 bp, SARS Virus
cgtaactactcctatggtgttgtga

SEQ ID NO: 16447 - DNA, 25 bp, SARS Virus
gtaactactccattggtgttgtgac

SEQ ID NO: 16448 - DNA, 25 bp, SARS Virus
taactactccaatggtgttgtgacc

SEQ ID NO: 16449 - DNA, 25 bp, SARS Virus
aactactccaattgtgttgtgacct

SEQ ID NO: 16450 - DNA, 25 bp, SARS Virus
actactccaatgttgttgtgacctt

SEQ ID NO: 16451 - DNA, 25 bp, SARS Virus
ctactccaatggtgttgtgaccttc

SEQ ID NO: 16452 - DNA, 25 bp, SARS Virus
tactccaatggttttgtgaccttct

SEQ ID NO: 16453 - DNA, 25 bp, SARS Virus
actccaatggtgttgtgaccttctt

SEQ ID NO: 16454 - DNA, 25 bp, SARS Virus
ctccaatggtgttgtgaccttcttt

SEQ ID NO: 16455 - DNA, 25 bp, SARS Virus
tccaatggtgttttgaccttctttg

SEQ ID NO: 16456 - DNA, 25 bp, SARS Virus
ccaatggtgttgtgaccttctttga

SEQ ID NO: 16457 - DNA, 25 bp, SARS Virus
caatggtgttgttaccttctttgat

SEQ ID NO: 16458 - DNA, 25 bp, SARS Virus
aatggtgttgtgtccttctttgatt

SEQ ID NO: 16459 - DNA, 25 bp, SARS Virus
atggtgttgtgatcttctttgattc

SEQ ID NO: 16460 - DNA, 25 bp, SARS Virus
tggtgttgtgactttctttgattca

SEQ ID NO: 16461 - DNA, 25 bp, SARS Virus
ggtgttgtgaccttctttgattcaa

SEQ ID NO: 16462 - DNA, 25 bp, SARS Virus
gtgttgtgaccttctttgattcaaa

SEQ ID NO: 16463 - DNA, 25 bp, SARS Virus
tgttgtgaccttttttgattcaaag

SEQ ID NO: 16464 - DNA, 25 bp, SARS Virus
gttgtgaccttctttgattcaaaga

SEQ ID NO: 16465 - DNA, 25 bp, SARS Virus
ttgtgaccttctttgattcaaagaa

SEQ ID NO: 16466 - DNA, 25 bp, SARS Virus
tgtgaccttctttgattcaaagaat

SEQ ID NO: 16467 - DNA, 25 bp, SARS Virus
gtgaccttcttttattcaaagaatg

SEQ ID NO: 16468 - DNA, 25 bp, SARS Virus
tgaccttctttgtttcaaagaatgg

SEQ ID NO: 16469 - DNA, 25 bp, SARS Virus
gaccttctttgattcaaagaatggt

SEQ ID NO: 16470 - DNA, 25 bp, SARS Virus
accttctttgattcaaagaatggtt

SEQ ID NO: 16471 - DNA, 25 bp, SARS Virus
ccttctttgatttaaagaatggtta

SEQ ID NO: 16472 - DNA, 25 bp, SARS Virus
cttctttgattctaagaatggttat

SEQ ID NO: 16473 - DNA, 25 bp, SARS Virus
ttctttgattcatagaatggttatt

SEQ ID NO: 16474 - DNA, 25 bp, SARS Virus
tctttgattcaatgaatggttattc

SEQ ID NO: 16475 - DNA, 25 bp, SARS Virus
ctttgattcaaataatggttattca

SEQ ID NO: 16476 - DNA, 25 bp, SARS Virus
tttgattcaaagtatggttattcaa

SEQ ID NO: 16477 - DNA, 25 bp, SARS Virus
ttgattcaaagattggttattcaat

SEQ ID NO: 16478 - DNA, 25 bp, SARS Virus
tgattcaaagaatggttattcaatg

SEQ ID NO: 16479 - DNA, 25 bp, SARS Virus
gattcaaagaattgttattcaatga

SEQ ID NO: 16480 - DNA, 25 bp, SARS Virus
attcaaagaatgtttattcaatgag

SEQ ID NO: 16481 - DNA, 25 bp, SARS Virus
ttcaaagaatggttattcaatgaga

SEQ ID NO: 16482 - DNA, 25 bp, SARS Virus
tcaaagaatggttattcaatgagaa

SEQ ID NO: 16483 - DNA, 25 bp, SARS Virus
caaagaatggtttttcaatgagaac

SEQ ID NO: 16484 - DNA, 25 bp, SARS Virus
aaagaatggttattcaatgagaaca

SEQ ID NO: 16485 - DNA, 25 bp, SARS Virus
aagaatggttattcaatgagaacaa

SEQ ID NO: 16486 - DNA, 25 bp, SARS Virus
agaatggttatttaatgagaacaaa

SEQ ID NO: 16487 - DNA, 25 bp, SARS Virus
gaatggttattctatgagaacaaac

SEQ ID NO: 16488 - DNA, 25 bp, SARS Virus
aatggttattcattgagaacaaacg

SEQ ID NO: 16489 - DNA, 25 bp, SARS Virus
atggttattcaatgagaacaaacga

SEQ ID NO: 16490 - DNA, 25 bp, SARS Virus
tggttattcaattagaacaaacgac

SEQ ID NO: 16491 - DNA, 25 bp, SARS Virus
ggttattcaatgtgaacaaacgact

SEQ ID NO: 16492 - DNA, 25 bp, SARS Virus
gttattcaatgataacaaacgacta

SEQ ID NO: 16493 - DNA, 25 bp, SARS Virus
ttattcaatgagtacaaacgactat

SEQ ID NO: 16494 - DNA, 25 bp, SARS Virus
tattcaatgagatcaaacgactata

SEQ ID NO: 16495 - DNA, 25 bp, SARS Virus
attcaatgagaataaacgactatag

SEQ ID NO: 16496 - DNA, 25 bp, SARS Virus
ttcaatgagaactaacgactatagt

SEQ ID NO: 16497 - DNA, 25 bp, SARS Virus
tcaatgagaacatacgactatagtt

SEQ ID NO: 16498 - DNA, 25 bp, SARS Virus
caatgagaacaatcgactatagtta

SEQ ID NO: 16499 - DNA, 25 bp, SARS Virus
aatgagaacaaatgactatagttac

SEQ ID NO: 16500 - DNA, 25 bp, SARS Virus
atgagaacaaactactatagttacc

SEQ ID NO: 16501 - DNA, 25 bp, SARS Virus
tgagaacaaacgtctatagttacca

SEQ ID NO: 16502 - DNA, 25 bp, SARS Virus
gagaacaaacgattatagttaccat

SEQ ID NO: 16503 - DNA, 25 bp, SARS Virus
agaacaaacgactatagttaccatt

SEQ ID NO: 16504 - DNA, 25 bp, SARS Virus
gaacaaacgactttagttaccattc

SEQ ID NO: 16505 - DNA, 25 bp, SARS Virus
aacaaacgactatagttaccattcg

SEQ ID NO: 16506 - DNA, 25 bp, SARS Virus
acaaacgactattgttaccattcga

SEQ ID NO: 16507 - DNA, 25 bp, SARS Virus
caaacgactatatttaccattcgaa

SEQ ID NO: 16508 - DNA, 25 bp, SARS Virus
aaacgactatagttaccattcgaaa

SEQ ID NO: 16509 - DNA, 25 bp, SARS Virus
aacgactatagttaccattcgaaat

SEQ ID NO: 16510 - DNA, 25 bp, SARS Virus
acgactatagtttccattcgaaatg

SEQ ID NO: 16511 - DNA, 25 bp, SARS Virus
cgactatagttatcattcgaaatgg

SEQ ID NO: 16512 - DNA, 25 bp, SARS Virus
gactatagttactattcgaaatggt

SEQ ID NO: 16513 - DNA, 25 bp, SARS Virus
actatagttacctttcgaaatggta

SEQ ID NO: 16514 - DNA, 25 bp, SARS Virus
ctatagttaccattcgaaatggtac

SEQ ID NO: 16515 - DNA, 25 bp, SARS Virus
tatagttaccattcgaaatggtact

SEQ ID NO: 16516 - DNA, 25 bp, SARS Virus
atagttaccatttgaaatggtacta

SEQ ID NO: 16517 - DNA, 25 bp, SARS Virus
tagttaccattctaaatggtactaa

SEQ ID NO: 16518 - DNA, 25 bp, SARS Virus
agttaccattcgtaatggtactaag

SEQ ID NO: 16519 - DNA, 25 bp, SARS Virus
gttaccattcgatatggtactaaga

SEQ ID NO: 16520 - DNA, 25 bp, SARS Virus
ttaccattcgaattggtactaagag

SEQ ID NO: 16521 - DNA, 25 bp, SARS Virus
taccattcgaaatggtactaagagt

SEQ ID NO: 16522 - DNA, 25 bp, SARS Virus
accattcgaaattgtactaagagtc

SEQ ID NO: 16523 - DNA, 25 bp, SARS Virus
ccattcgaaatgttactaagagtct

SEQ ID NO: 16524 - DNA, 25 bp, SARS Virus
cattcgaaatggtactaagagtctt

SEQ ID NO: 16525 - DNA, 25 bp, SARS Virus
attcgaaatggttctaagagtcttg

SEQ ID NO: 16526 - DNA, 25 bp, SARS Virus
ttcgaaatggtattaagagtcttgt

SEQ ID NO: 16527 - DNA, 25 bp, SARS Virus
tcgaaatggtactaagagtcttgta

SEQ ID NO: 16528 - DNA, 25 bp, SARS Virus
cgaaatggtacttagagtcttgtac

SEQ ID NO: 16529 - DNA, 25 bp, SARS Virus
gaaatggtactatgagtcttgtacg

SEQ ID NO: 16530 - DNA, 25 bp, SARS Virus
aaatggtactaatagtcttgtacga

SEQ ID NO: 16531 - DNA, 25 bp, SARS Virus
aatggtactaagtgtcttgtacgaa

SEQ ID NO: 16532 - DNA, 25 bp, SARS Virus
atggtactaagattcttgtacgaat

SEQ ID NO: 16533 - DNA, 25 bp, SARS Virus
tggtactaagagtcttgtacgaatc

SEQ ID NO: 16534 - DNA, 25 bp, SARS Virus
ggtactaagagttttgtacgaatct

SEQ ID NO: 16535 - DNA, 25 bp, SARS Virus
gtactaagagtcttgtacgaatctc

SEQ ID NO: 16536 - DNA, 25 bp, SARS Virus
tactaagagtcttgtacgaatctcc

SEQ ID NO: 16537 - DNA, 25 bp, SARS Virus
actaagagtcttttacgaatctcca

SEQ ID NO: 16538 - DNA, 25 bp, SARS Virus
ctaagagtcttgtacgaatctccac

SEQ ID NO: 16539 - DNA, 25 bp, SARS Virus
taagagtcttgttcgaatctccact

SEQ ID NO: 16540 - DNA, 25 bp, SARS Virus
aagagtcttgtatgaatctccactt

SEQ ID NO: 16541 - DNA, 25 bp, SARS Virus
agagtcttgtactaatctccacttc

SEQ ID NO: 16542 - DNA, 25 bp, SARS Virus
gagtcttgtacgtatctccacttct

SEQ ID NO: 16543 - DNA, 25 bp, SARS Virus
agtcttgtacgattctccacttcta

SEQ ID NO: 16544 - DNA, 25 bp, SARS Virus
gtcttgtacgaatctccacttctat

SEQ ID NO: 16545 - DNA, 25 bp, SARS Virus
tcttgtacgaatttccacttctata

SEQ ID NO: 16546 - DNA, 25 bp, SARS Virus
cttgtacgaatctccacttctatac

SEQ ID NO: 16547 - DNA, 25 bp, SARS Virus
ttgtacgaatcttcacttctataca

SEQ ID NO: 16548 - DNA, 25 bp, SARS Virus
tgtacgaatctctacttctatacag

SEQ ID NO: 16549 - DNA, 25 bp, SARS Virus
gtacgaatctcctcttctatacaga

SEQ ID NO: 16550 - DNA, 25 bp, SARS Virus
tacgaatctccatttctatacagaa

SEQ ID NO: 16551 - DNA, 25 bp, SARS Virus
acgaatctccacttctatacagaaa

SEQ ID NO: 16552 - DNA, 25 bp, SARS Virus
cgaatctccacttctatacagaaag

SEQ ID NO: 16553 - DNA, 25 bp, SARS Virus
gaatctccacttttatacagaaagg

SEQ ID NO: 16554 - DNA, 25 bp, SARS Virus
aatctccacttctatacagaaagga

SEQ ID NO: 16555 - DNA, 25 bp, SARS Virus
atctccacttctttacagaaaggaa

SEQ ID NO: 16556 - DNA, 25 bp, SARS Virus
tctccacttctatacagaaaggaac

SEQ ID NO: 16557 - DNA, 25 bp, SARS Virus
ctccacttctattcagaaaggaact

SEQ ID NO: 16558 - DNA, 25 bp, SARS Virus
tccacttctatatagaaaggaactc

SEQ ID NO: 16559 - DNA, 25 bp, SARS Virus
ccacttctatactgaaaggaactct

SEQ ID NO: 16560 - DNA, 25 bp, SARS Virus
cacttctatacataaaggaactctt

SEQ ID NO: 16561 - DNA, 25 bp, SARS Virus
acttctatacagtaaggaactcttc

SEQ ID NO: 16562 - DNA, 25 bp, SARS Virus
cttctatacagataggaactcttcc

SEQ ID NO: 16563 - DNA, 25 bp, SARS Virus
ttctatacagaatggaactcttcct

SEQ ID NO: 16564 - DNA, 25 bp, SARS Virus
tctatacagaaatgaactcttccta

SEQ ID NO: 16565 - DNA, 25 bp, SARS Virus
ctatacagaaagtaactcttcctac

SEQ ID NO: 16566 - DNA, 25 bp, SARS Virus
tatacagaaaggtactcttcctacg

SEQ ID NO: 16567 - DNA, 25 bp, SARS Virus
atacagaaaggatctcttcctacgt

SEQ ID NO: 16568 - DNA, 25 bp, SARS Virus
tacagaaaggaattcttcctacgtg

SEQ ID NO: 16569 - DNA, 25 bp, SARS Virus
acagaaaggaactcttcctacgtgg

SEQ ID NO: 16570 - DNA, 25 bp, SARS Virus
cagaaaggaacttttcctacgtgga

SEQ ID NO: 16571 - DNA, 25 bp, SARS Virus
agaaaggaactcttcctacgtggaa

SEQ ID NO: 16572 - DNA, 25 bp, SARS Virus
gaaaggaactcttcctacgtggaat

SEQ ID NO: 16573 - DNA, 25 bp, SARS Virus
aaaggaactctttctacgtggaatg

SEQ ID NO: 16574 - DNA, 25 bp, SARS Virus
aaggaactcttcttacgtggaatgt

SEQ ID NO: 16575 - DNA, 25 bp, SARS Virus
aggaactcttcctacgtggaatgta

SEQ ID NO: 16576 - DNA, 25 bp, SARS Virus
ggaactcttccttcgtggaatgtac

SEQ ID NO: 16577 - DNA, 25 bp, SARS Virus
gaactcttcctatgtggaatgtacc

SEQ ID NO: 16578 - DNA, 25 bp, SARS Virus
aactcttcctacttggaatgtacca

SEQ ID NO: 16579 - DNA, 25 bp, SARS Virus
actcttcctacgtggaatgtaccat

SEQ ID NO: 16580 - DNA, 25 bp, SARS Virus
ctcttcctacgttgaatgtaccatc

SEQ ID NO: 16581 - DNA, 25 bp, SARS Virus
tcttcctacgtgtaatgtaccatcc

SEQ ID NO: 16582 - DNA, 25 bp, SARS Virus
cttcctacgtggtatgtaccatcca

SEQ ID NO: 16583 - DNA, 25 bp, SARS Virus
ttcctacgtggattgtaccatccac

SEQ ID NO: 16584 - DNA, 25 bp, SARS Virus
tcctacgtggaatgtaccatccact

SEQ ID NO: 16585 - DNA, 25 bp, SARS Virus
cctacgtggaatttaccatccacta

SEQ ID NO: 16586 - DNA, 25 bp, SARS Virus
ctacgtggaatgtaccatccactac

SEQ ID NO: 16587 - DNA, 25 bp, SARS Virus
tacgtggaatgttccatccactaca

SEQ ID NO: 16588 - DNA, 25 bp, SARS Virus
acgtggaatgtatcatccactacaa

SEQ ID NO: 16589 - DNA, 25 bp, SARS Virus
cgtggaatgtactatccactacaat

SEQ ID NO: 16590 - DNA, 25 bp, SARS Virus
gtggaatgtaccttccactacaata

SEQ ID NO: 16591 - DNA, 25 bp, SARS Virus
tggaatgtaccatccactacaatag

SEQ ID NO: 16592 - DNA, 25 bp, SARS Virus
ggaatgtaccattcactacaatagt

SEQ ID NO: 16593 - DNA, 25 bp, SARS Virus
gaatgtaccatctactacaatagtg

SEQ ID NO: 16594 - DNA, 25 bp, SARS Virus
aatgtaccatcctctacaatagtga

SEQ ID NO: 16595 - DNA, 25 bp, SARS Virus
atgtaccatccattacaatagtgat

SEQ ID NO: 16596 - DNA, 25 bp, SARS Virus
tgtaccatccactacaatagtgatc

SEQ ID NO: 16597 - DNA, 25 bp, SARS Virus
gtaccatccacttcaatagtgatca

SEQ ID NO: 16598 - DNA, 25 bp, SARS Virus
taccatccactataatagtgatcac

SEQ ID NO: 16599 - DNA, 25 bp, SARS Virus
accatccactactatagtgatcacc

SEQ ID NO: 16600 - DNA, 25 bp, SARS Virus
ccatccactacattagtgatcacca

SEQ ID NO: 16601 - DNA, 25 bp, SARS Virus
catccactacaatagtgatcaccac

SEQ ID NO: 16602 - DNA, 25 bp, SARS Virus
atccactacaattgtgatcaccact

SEQ ID NO: 16603 - DNA, 25 bp, SARS Virus
tccactacaatattgatcaccacta

SEQ ID NO: 16604 - DNA, 25 bp, SARS Virus
ccactacaatagtgatcaccactat

SEQ ID NO: 16605 - DNA, 25 bp, SARS Virus
cactacaatagttatcaccactata

SEQ ID NO: 16606 - DNA, 25 bp, SARS Virus
actacaatagtgttcaccactatag

SEQ ID NO: 16607 - DNA, 25 bp, SARS Virus
ctacaatagtgatcaccactatagt

SEQ ID NO: 16608 - DNA, 25 bp, SARS Virus
tacaatagtgattaccactatagtg

SEQ ID NO: 16609 - DNA, 25 bp, SARS Virus
acaatagtgatctccactatagtga

SEQ ID NO: 16610 - DNA, 25 bp, SARS Virus
caatagtgatcatcactatagtgaa

SEQ ID NO: 16611 - DNA, 25 bp, SARS Virus
aatagtgatcactactatagtgaac

SEQ ID NO: 16612 - DNA, 25 bp, SARS Virus
atagtgatcacctctatagtgaaca

SEQ ID NO: 16613 - DNA, 25 bp, SARS Virus
tagtgatcaccattatagtgaacac

SEQ ID NO: 16614 - DNA, 25 bp, SARS Virus
agtgatcaccactatagtgaacaca

SEQ ID NO: 16615 - DNA, 25 bp, SARS Virus
gtgatcaccactttagtgaacacaa

SEQ ID NO: 16616 - DNA, 25 bp, SARS Virus
tgatcaccactatagtgaacacaac

SEQ ID NO: 16617 - DNA, 25 bp, SARS Virus
gatcaccactattgtgaacacaaca

SEQ ID NO: 16618 - DNA, 25 bp, SARS Virus
atcaccactatattgaacacaacat

SEQ ID NO: 16619 - DNA, 25 bp, SARS Virus
tcaccactatagtgaacacaacatt

SEQ ID NO: 16620 - DNA, 25 bp, SARS Virus
caccactatagttaacacaacatta

SEQ ID NO: 16621 - DNA, 25 bp, SARS Virus
accactatagtgtacacaacattat

SEQ ID NO: 16622 - DNA, 25 bp, SARS Virus
ccactatagtgatcacaacattatg

SEQ ID NO: 16623 - DNA, 25 bp, SARS Virus
cactatagtgaatacaacattatgg

SEQ ID NO: 16624 - DNA, 25 bp, SARS Virus
actatagtgaactcaacattatggg

SEQ ID NO: 16625 - DNA, 25 bp, SARS Virus
ctatagtgaacataacattatggga

SEQ ID NO: 16626 - DNA, 25 bp, SARS Virus
tatagtgaacactacattatgggag

SEQ ID NO: 16627 - DNA, 25 bp, SARS Virus
atagtgaacacatcattatgggagg

SEQ ID NO: 16628 - DNA, 25 bp, SARS Virus
tagtgaacacaatattatgggaggt

SEQ ID NO: 16629 - DNA, 25 bp, SARS Virus
agtgaacacaactttatgggaggtt

SEQ ID NO: 16630 - DNA, 25 bp, SARS Virus
gtgaacacaacattatgggaggttt

SEQ ID NO: 16631 - DNA, 25 bp, SARS Virus
tgaacacaacattatgggaggtttt

SEQ ID NO: 16632 - DNA, 25 bp, SARS Virus
gaacacaacattttgggaggttttt

SEQ ID NO: 16633 - DNA, 25 bp, SARS Virus
aacacaacattatgggaggtttttc

SEQ ID NO: 16634 - DNA, 25 bp, SARS Virus
acacaacattattggaggtttttcc

SEQ ID NO: 16635 - DNA, 25 bp, SARS Virus
cacaacattatgtgaggtttttccg

SEQ ID NO: 16636 - DNA, 25 bp, SARS Virus
acaacattatggtaggtttttccga

SEQ ID NO: 16637 - DNA, 25 bp, SARS Virus
caacattatgggtggtttttccgac

SEQ ID NO: 16638 - DNA, 25 bp, SARS Virus
aacattatgggatgtttttccgacc

SEQ ID NO: 16639 - DNA, 25 bp, SARS Virus
acattatgggagttttttccgacca

SEQ ID NO: 16640 - DNA, 25 bp, SARS Virus
cattatgggaggtttttccgaccac

SEQ ID NO: 16641 - DNA, 25 bp, SARS Virus
attatgggaggtttttccgaccacc

SEQ ID NO: 16642 - DNA, 25 bp, SARS Virus
ttatgggaggtttttccgaccaccg

SEQ ID NO: 16643 - DNA, 25 bp, SARS Virus
tatgggaggtttttccgaccaccgt

SEQ ID NO: 16644 - DNA, 25 bp, SARS Virus
atgggaggtttttccgaccaccgtg

SEQ ID NO: 16645 - DNA, 25 bp, SARS Virus
tgggaggttttttcgaccaccgtga

SEQ ID NO: 16646 - DNA, 25 bp, SARS Virus
gggaggtttttctgaccaccgtgat

SEQ ID NO: 16647 - DNA, 25 bp, SARS Virus
ggaggtttttcctaccaccgtgatg

SEQ ID NO: 16648 - DNA, 25 bp, SARS Virus
gaggtttttccgtccaccgtgatga

SEQ ID NO: 16649 - DNA, 25 bp, SARS Virus
aggtttttccgatcaccgtgatgac

SEQ ID NO: 16650 - DNA, 25 bp, SARS Virus
ggtttttccgactaccgtgatgact

SEQ ID NO: 16651 - DNA, 25 bp, SARS Virus
gtttttccgacctccgtgatgactc

SEQ ID NO: 16652 - DNA, 25 bp, SARS Virus
tttttccgaccatcgtgatgactct

SEQ ID NO: 16653 - DNA, 25 bp, SARS Virus
ttttccgaccactgtgatgactcta

SEQ ID NO: 16654 - DNA, 25 bp, SARS Virus
tttccgaccaccttgatgactctac

SEQ ID NO: 16655 - DNA, 25 bp, SARS Virus
ttccgaccaccgtgatgactctacg

SEQ ID NO: 16656 - DNA, 25 bp, SARS Virus
tccgaccaccgttatgactctacga

SEQ ID NO: 16657 - DNA, 25 bp, SARS Virus
ccgaccaccgtgttgactctacgag

SEQ ID NO: 16658 - DNA, 25 bp, SARS Virus
cgaccaccgtgatgactctacgaga

SEQ ID NO: 16659 - DNA, 25 bp, SARS Virus
gaccaccgtgattactctacgagag

SEQ ID NO: 16660 - DNA, 25 bp, SARS Virus
accaccgtgatgtctctacgagagt

SEQ ID NO: 16661 - DNA, 25 bp, SARS Virus
ccaccgtgatgattctacgagagtt

SEQ ID NO: 16662 - DNA, 25 bp, SARS Virus
caccgtgatgactctacgagagttc

SEQ ID NO: 16663 - DNA, 25 bp, SARS Virus
accgtgatgactttacgagagttct

SEQ ID NO: 16664 - DNA, 25 bp, SARS Virus
ccgtgatgactctacgagagttctc

SEQ ID NO: 16665 - DNA, 25 bp, SARS Virus
cgtgatgactcttcgagagttctcg

SEQ ID NO: 16666 - DNA, 25 bp, SARS Virus
gtgatgactctatgagagttctcga

SEQ ID NO: 16667 - DNA, 25 bp, SARS Virus
tgatgactctactagagttctcgaa

SEQ ID NO: 16668 - DNA, 25 bp, SARS Virus
gatgactctacgtgagttctcgaaa

SEQ ID NO: 16669 - DNA, 25 bp, SARS Virus
atgactctacgatagttctcgaaac

SEQ ID NO: 16670 - DNA, 25 bp, SARS Virus
tgactctacgagtgttctcgaaact

SEQ ID NO: 16671 - DNA, 25 bp, SARS Virus
gactctacgagatttctcgaaactt

SEQ ID NO: 16672 - DNA, 25 bp, SARS Virus
actctacgagagttctcgaaacttc

SEQ ID NO: 16673 - DNA, 25 bp, SARS Virus
ctctacgagagttctcgaaacttct

SEQ ID NO: 16674 - DNA, 25 bp, SARS Virus
tctacgagagttttcgaaacttctt

SEQ ID NO: 16675 - DNA, 25 bp, SARS Virus
ctacgagagttctcgaaacttcttt

SEQ ID NO: 16676 - DNA, 25 bp, SARS Virus
tacgagagttcttgaaacttctttc

SEQ ID NO: 16677 - DNA, 25 bp, SARS Virus
acgagagttctctaaacttctttca

SEQ ID NO: 16678 - DNA, 25 bp, SARS Virus
cgagagttctcgtaacttctttcac

SEQ ID NO: 16679 - DNA, 25 bp, SARS Virus
gagagttctcgatacttctttcacg

SEQ ID NO: 16680 - DNA, 25 bp, SARS Virus
agagttctcgaatcttctttcacgg

SEQ ID NO: 16681 - DNA, 25 bp, SARS Virus
gagttctcgaaatttctttcacggt

SEQ ID NO: 16682 - DNA, 25 bp, SARS Virus
agttctcgaaacttctttcacggtc

SEQ ID NO: 16683 - DNA, 25 bp, SARS Virus
gttctcgaaacttctttcacggtca

SEQ ID NO: 16684 - DNA, 25 bp, SARS Virus
ttctcgaaacttttttcacggtcaa

SEQ ID NO: 16685 - DNA, 25 bp, SARS Virus
tctcgaaacttctttcacggtcaac

SEQ ID NO: 16686 - DNA, 25 bp, SARS Virus
ctcgaaacttctttcacggtcaact

SEQ ID NO: 16687 - DNA, 25 bp, SARS Virus
tcgaaacttctttcacggtcaacta

SEQ ID NO: 16688 - DNA, 25 bp, SARS Virus
cgaaacttcttttacggtcaactac

SEQ ID NO: 16689 - DNA, 25 bp, SARS Virus
gaaacttctttctcggtcaactact

SEQ ID NO: 16690 - DNA, 25 bp, SARS Virus
aaacttctttcatggtcaactactc

SEQ ID NO: 16691 - DNA, 25 bp, SARS Virus
aacttctttcactgtcaactactca

SEQ ID NO: 16692 - DNA, 25 bp, SARS Virus
acttctttcacgttcaactactcat

SEQ ID NO: 16693 - DNA, 25 bp, SARS Virus
cttctttcacggtcaactactcata

SEQ ID NO: 16694 - DNA, 25 bp, SARS Virus
ttctttcacggttaactactcatat

SEQ ID NO: 16695 - DNA, 25 bp, SARS Virus
tctttcacggtctactactcatata

SEQ ID NO: 16696 - DNA, 25 bp, SARS Virus
ctttcacggtcatctactcatatat

SEQ ID NO: 16697 - DNA, 25 bp, SARS Virus
tttcacggtcaattactcatatatt

SEQ ID NO: 16698 - DNA, 25 bp, SARS Virus
ttcacggtcaactactcatatattg

SEQ ID NO: 16699 - DNA, 25 bp, SARS Virus
tcacggtcaacttctcatatattgg

SEQ ID NO: 16700 - DNA, 25 bp, SARS Virus
cacggtcaactattcatatattggt

SEQ ID NO: 16701 - DNA, 25 bp, SARS Virus
acggtcaactactcatatattggtg

SEQ ID NO: 16702 - DNA, 25 bp, SARS Virus
cggtcaactacttatatattggtgc

SEQ ID NO: 16703 - DNA, 25 bp, SARS Virus
ggtcaactactcttatattggtgca

SEQ ID NO: 16704 - DNA, 25 bp, SARS Virus
gtcaactactcatatattggtgcat

SEQ ID NO: 16705 - DNA, 25 bp, SARS Virus
tcaactactcatttattggtgcatg

SEQ ID NO: 16706 - DNA, 25 bp, SARS Virus
caactactcatatattggtgcatgg

SEQ ID NO: 16707 - DNA, 25 bp, SARS Virus
aactactcatattttggtgcatggg

SEQ ID NO: 16708 - DNA, 25 bp, SARS Virus
actactcatatattggtgcatggga

SEQ ID NO: 16709 - DNA, 25 bp, SARS Virus
ctactcatatattggtgcatgggac

SEQ ID NO: 16710 - DNA, 25 bp, SARS Virus
tactcatatatttgtgcatgggacc

SEQ ID NO: 16711 - DNA, 25 bp, SARS Virus
actcatatattgttgcatgggacct

SEQ ID NO: 16712 - DNA, 25 bp, SARS Virus
ctcatatattggtgcatgggacctg

SEQ ID NO: 16713 - DNA, 25 bp, SARS Virus
tcatatattggttcatgggacctgt

SEQ ID NO: 16714 - DNA, 25 bp, SARS Virus
catatattggtgtatgggacctgtt

SEQ ID NO: 16715 - DNA, 25 bp, SARS Virus
atatattggtgcttgggacctgttc

SEQ ID NO: 16716 - DNA, 25 bp, SARS Virus
tatattggtgcatgggacctgttcc

SEQ ID NO: 16717 - DNA, 25 bp, SARS Virus
atattggtgcattggacctgttcct

SEQ ID NO: 16718 - DNA, 25 bp, SARS Virus
tattggtgcatgtgacctgttccta

SEQ ID NO: 16719 - DNA, 25 bp, SARS Virus
attggtgcatggtacctgttcctac

SEQ ID NO: 16720 - DNA, 25 bp, SARS Virus
ttggtgcatgggtcctgttcctaca

SEQ ID NO: 16721 - DNA, 25 bp, SARS Virus
tggtgcatgggaactgttcctacac

SEQ ID NO: 16722 - DNA, 25 bp, SARS Virus
ggtgcatgggacatgttcctacacg

SEQ ID NO: 16723 - DNA, 25 bp, SARS Virus
gtgcatgggaccagttcctacacga

SEQ ID NO: 16724 - DNA, 25 bp, SARS Virus
tgcatgggacctattcctacacgac

SEQ ID NO: 16725 - DNA, 25 bp, SARS Virus
gcatgggacctgatcctacacgacc

SEQ ID NO: 16726 - DNA, 25 bp, SARS Virus
catgggacctgtacctacacgacca

SEQ ID NO: 16727 - DNA, 25 bp, SARS Virus
atgggacctgttactacacgaccaa

SEQ ID NO: 16728 - DNA, 25 bp, SARS Virus
tgggacctgttcatacacgaccaat

SEQ ID NO: 16729 - DNA, 25 bp, SARS Virus
gggacctgttccaacacgaccaata

SEQ ID NO: 16730 - DNA, 25 bp, SARS Virus
ggacctgttcctacacgaccaatat

SEQ ID NO: 16731 - DNA, 25 bp, SARS Virus
gacctgttcctaaacgaccaatatg

SEQ ID NO: 16732 - DNA, 25 bp, SARS Virus
acctgttcctacacgaccaatatgt

SEQ ID NO: 16733 - DNA, 25 bp, SARS Virus
cctgttcctacaagaccaatatgtg

SEQ ID NO: 16734 - DNA, 25 bp, SARS Virus
ctgttcctacacaaccaatatgtga

SEQ ID NO: 16735 - DNA, 25 bp, SARS Virus
tgttcctacacgaccaatatgtgaa

SEQ ID NO: 16736 - DNA, 25 bp, SARS Virus
gttcctacacgaacaatatgtgaac

SEQ ID NO: 16737 - DNA, 25 bp, SARS Virus
ttcctacacgacaaatatgtgaact

SEQ ID NO: 16738 - DNA, 25 bp, SARS Virus
tcctacacgaccaatatgtgaactc

SEQ ID NO: 16739 - DNA, 25 bp, SARS Virus
cctacacgaccaatatgtgaactcc

SEQ ID NO: 16740 - DNA, 25 bp, SARS Virus
ctacacgaccaaaatgtgaactcct

SEQ ID NO: 16741 - DNA, 25 bp, SARS Virus
tacacgaccaatatgtgaactcctt

SEQ ID NO: 16742 - DNA, 25 bp, SARS Virus
acacgaccaataagtgaactccttc

SEQ ID NO: 16743 - DNA, 25 bp, SARS Virus
cacgaccaatatatgaactccttcg

SEQ ID NO: 16744 - DNA, 25 bp, SARS Virus
acgaccaatatgagaactccttcga

SEQ ID NO: 16745 - DNA, 25 bp, SARS Virus
cgaccaatatgtaaactccttcgat

SEQ ID NO: 16746 - DNA, 25 bp, SARS Virus
gaccaatatgtgaactccttcgatt

SEQ ID NO: 16747 - DNA, 25 bp, SARS Virus
accaatatgtgaactccttcgattc

SEQ ID NO: 16748 - DNA, 25 bp, SARS Virus
ccaatatgtgaaatccttcgattct

SEQ ID NO: 16749 - DNA, 25 bp, SARS Virus
caatatgtgaacaccttcgattctg

SEQ ID NO: 16750 - DNA, 25 bp, SARS Virus
aatatgtgaactacttcgattctga

SEQ ID NO: 16751 - DNA, 25 bp, SARS Virus
atatgtgaactcattcgattctgac

SEQ ID NO: 16752 - DNA, 25 bp, SARS Virus
tatgtgaactccatcgattctgacg

SEQ ID NO: 16753 - DNA, 25 bp, SARS Virus
atgtgaactcctacgattctgacga

SEQ ID NO: 16754 - DNA, 25 bp, SARS Virus
tgtgaactccttagattctgacgag

SEQ ID NO: 16755 - DNA, 25 bp, SARS Virus
gtgaactccttcaattctgacgaga

SEQ ID NO: 16756 - DNA, 25 bp, SARS Virus
tgaactccttcgattctgacgagaa

SEQ ID NO: 16757 - DNA, 25 bp, SARS Virus
gaactccttcgaatctgacgagaat

SEQ ID NO: 16758 - DNA, 25 bp, SARS Virus
aactccttcgatactgacgagaatt

SEQ ID NO: 16759 - DNA, 25 bp, SARS Virus
actccttcgattatgacgagaattc

SEQ ID NO: 16760 - DNA, 25 bp, SARS Virus
ctccttcgattcagacgagaattct

SEQ ID NO: 16761 - DNA, 25 bp, SARS Virus
tccttcgattctaacgagaattctt

SEQ ID NO: 16762 - DNA, 25 bp, SARS Virus
ccttcgattctgacgagaattcttt

SEQ ID NO: 16763 - DNA, 25 bp, SARS Virus
cttcgattctgaagagaattcttta

SEQ ID NO: 16764 - DNA, 25 bp, SARS Virus
ttcgattctgacaagaattctttac

SEQ ID NO: 16765 - DNA, 25 bp, SARS Virus
tcgattctgacgagaattctttacg

SEQ ID NO: 16766 - DNA, 25 bp, SARS Virus
cgattctgacgaaaattctttacgt

SEQ ID NO: 16767 - DNA, 25 bp, SARS Virus
gattctgacgagaattctttacgtt

SEQ ID NO: 16768 - DNA, 25 bp, SARS Virus
attctgacgagaattctttacgttt

SEQ ID NO: 16769 - DNA, 25 bp, SARS Virus
ttctgacgagaaatctttacgttta

SEQ ID NO: 16770 - DNA, 25 bp, SARS Virus
tctgacgagaatactttacgtttag

SEQ ID NO: 16771 - DNA, 25 bp, SARS Virus
ctgacgagaattatttacgtttaga

SEQ ID NO: 16772 - DNA, 25 bp, SARS Virus
tgacgagaattcattacgtttagac

SEQ ID NO: 16773 - DNA, 25 bp, SARS Virus
gacgagaattctatacgtttagacg

SEQ ID NO: 16774 - DNA, 25 bp, SARS Virus
acgagaattcttaacgtttagacgt

SEQ ID NO: 16775 - DNA, 25 bp, SARS Virus
cgagaattctttacgtttagacgta

SEQ ID NO: 16776 - DNA, 25 bp, SARS Virus
gagaattctttaagtttagacgtaa

SEQ ID NO: 16777 - DNA, 25 bp, SARS Virus
agaattctttacatttagacgtaaa

SEQ ID NO: 16778 - DNA, 25 bp, SARS Virus
gaattctttacgattagacgtaaaa

SEQ ID NO: 16779 - DNA, 25 bp, SARS Virus
aattctttacgtatagacgtaaaat

SEQ ID NO: 16780 - DNA, 25 bp, SARS Virus
attctttacgttaagacgtaaaata

SEQ ID NO: 16781 - DNA, 25 bp, SARS Virus
ttctttacgtttagacgtaaaatac

SEQ ID NO: 16782 - DNA, 25 bp, SARS Virus
tctttacgtttaaacgtaaaataca

SEQ ID NO: 16783 - DNA, 25 bp, SARS Virus
ctttacgtttagacgtaaaatacat

SEQ ID NO: 16784 - DNA, 25 bp, SARS Virus
tttacgtttagaagtaaaatacatg

SEQ ID NO: 16785 - DNA, 25 bp, SARS Virus
ttacgtttagacataaaatacatga

SEQ ID NO: 16786 - DNA, 25 bp, SARS Virus
tacgtttagacgaaaaatacatgat

SEQ ID NO: 16787 - DNA, 25 bp, SARS Virus
acgtttagacgtaaaatacatgatg

SEQ ID NO: 16788 - DNA, 25 bp, SARS Virus
cgtttagacgtaaaatacatgatgg

SEQ ID NO: 16789 - DNA, 25 bp, SARS Virus
gtttagacgtaaaatacatgatgga

SEQ ID NO: 16790 - DNA, 25 bp, SARS Virus
tttagacgtaaaatacatgatggaa

SEQ ID NO: 16791 - DNA, 25 bp, SARS Virus
ttagacgtaaaaaacatgatggaag

SEQ ID NO: 16792 - DNA, 25 bp, SARS Virus
tagacgtaaaatacatgatggaagt

SEQ ID NO: 16793 - DNA, 25 bp, SARS Virus
agacgtaaaataaatgatggaagtc

SEQ ID NO: 16794 - DNA, 25 bp, SARS Virus
gacgtaaaatacatgatggaagtct

SEQ ID NO: 16795 - DNA, 25 bp, SARS Virus
acgtaaaatacaagatggaagtctt

SEQ ID NO: 16796 - DNA, 25 bp, SARS Virus
cgtaaaatacataatggaagtcttc

SEQ ID NO: 16797 - DNA, 25 bp, SARS Virus
gtaaaatacatgatggaagtcttcg

SEQ ID NO: 16798 - DNA, 25 bp, SARS Virus
taaaatacatgaaggaagtcttcgt

SEQ ID NO: 16799 - DNA, 25 bp, SARS Virus
aaaatacatgatagaagtcttcgtg

SEQ ID NO: 16800 - DNA, 25 bp, SARS Virus
aaatacatgatgaaagtcttcgtgg

SEQ ID NO: 16801 - DNA, 25 bp, SARS Virus
aatacatgatggaagtcttcgtgga

SEQ ID NO: 16802 - DNA, 25 bp, SARS Virus
atacatgatggaagtcttcgtggat

SEQ ID NO: 16803 - DNA, 25 bp, SARS Virus
tacatgatggaaatcttcgtggatt

SEQ ID NO: 16804 - DNA, 25 bp, SARS Virus
acatgatggaagacttcgtggatta

SEQ ID NO: 16805 - DNA, 25 bp, SARS Virus
catgatggaagtattcgtggattac

SEQ ID NO: 16806 - DNA, 25 bp, SARS Virus
atgatggaagtcatcgtggattacg

SEQ ID NO: 16807 - DNA, 25 bp, SARS Virus
tgatggaagtctacgtggattacga

SEQ ID NO: 16808 - DNA, 25 bp, SARS Virus
gatggaagtcttagtggattacgat

SEQ ID NO: 16809 - DNA, 25 bp, SARS Virus
atggaagtcttcatggattacgatt

SEQ ID NO: 16810 - DNA, 25 bp, SARS Virus
tggaagtcttcgaggattacgattc

SEQ ID NO: 16811 - DNA, 25 bp, SARS Virus
ggaagtcttcgtagattacgattcc

SEQ ID NO: 16812 - DNA, 25 bp, SARS Virus
gaagtcttcgtgaattacgattcct

SEQ ID NO: 16813 - DNA, 25 bp, SARS Virus
aagtcttcgtggattacgattcctt

SEQ ID NO: 16814 - DNA, 25 bp, SARS Virus
agtcttcgtggaatacgattccttc

SEQ ID NO: 16815 - DNA, 25 bp, SARS Virus
gtcttcgtggataacgattccttct

SEQ ID NO: 16816 - DNA, 25 bp, SARS Virus
tcttcgtggattacgattccttctc

SEQ ID NO: 16817 - DNA, 25 bp, SARS Virus
cttcgtggattaagattccttctct

SEQ ID NO: 16818 - DNA, 25 bp, SARS Virus
ttcgtggattacaattccttctcta

SEQ ID NO: 16819 - DNA, 25 bp, SARS Virus
tcgtggattacgattccttctctaa

SEQ ID NO: 16820 - DNA, 25 bp, SARS Virus
cgtggattacgaatccttctctaag

SEQ ID NO: 16821 - DNA, 25 bp, SARS Virus
gtggattacgataccttctctaaga

SEQ ID NO: 16822 - DNA, 25 bp, SARS Virus
tggattacgattacttctctaagat

SEQ ID NO: 16823 - DNA, 25 bp, SARS Virus
ggattacgattcattctctaagatc

SEQ ID NO: 16824 - DNA, 25 bp, SARS Virus
gattacgattccatctctaagatcc

SEQ ID NO: 16825 - DNA, 25 bp, SARS Virus
attacgattcctactctaagatcct

SEQ ID NO: 16826 - DNA, 25 bp, SARS Virus
ttacgattccttatctaagatcctt

SEQ ID NO: 16827 - DNA, 25 bp, SARS Virus
tacgattccttcactaagatccttg

SEQ ID NO: 16828 - DNA, 25 bp, SARS Virus
acgattccttctataagatccttga

SEQ ID NO: 16829 - DNA, 25 bp, SARS Virus
cgattccttctcaaagatccttgac

SEQ ID NO: 16830 - DNA, 25 bp, SARS Virus
gattccttctctaagatccttgaca

SEQ ID NO: 16831 - DNA, 25 bp, SARS Virus
attccttctctaagatccttgacat

SEQ ID NO: 16832 - DNA, 25 bp, SARS Virus
ttccttctctaaaatccttgacata

SEQ ID NO: 16833 - DNA, 25 bp, SARS Virus
tccttctctaagatccttgacatag

SEQ ID NO: 16834 - DNA, 25 bp, SARS Virus
ccttctctaagaaccttgacatagg

SEQ ID NO: 16835 - DNA, 25 bp, SARS Virus
cttctctaagatacttgacatagga

SEQ ID NO: 16836 - DNA, 25 bp, SARS Virus
ttctctaagatcattgacataggac

SEQ ID NO: 16837 - DNA, 25 bp, SARS Virus
tctctaagatccatgacataggacc

SEQ ID NO: 16838 - DNA, 25 bp, SARS Virus
ctctaagatcctagacataggacct

SEQ ID NO: 16839 - DNA, 25 bp, SARS Virus
tctaagatccttaacataggacctt

SEQ ID NO: 16840 - DNA, 25 bp, SARS Virus
ctaagatccttgacataggacctta

SEQ ID NO: 16841 - DNA, 25 bp, SARS Virus
taagatccttgaaataggaccttaa

SEQ ID NO: 16842 - DNA, 25 bp, SARS Virus
aagatccttgacataggaccttaaa

SEQ ID NO: 16843 - DNA, 25 bp, SARS Virus
agatccttgacaaaggaccttaaac

SEQ ID NO: 16844 - DNA, 25 bp, SARS Virus
gatccttgacataggaccttaaact

SEQ ID NO: 16845 - DNA, 25 bp, SARS Virus
atccttgacataagaccttaaactc

SEQ ID NO: 16846 - DNA, 25 bp, SARS Virus
tccttgacatagaaccttaaactct

SEQ ID NO: 16847 - DNA, 25 bp, SARS Virus
ccttgacataggaccttaaactctc

SEQ ID NO: 16848 - DNA, 25 bp, SARS Virus
cttgacataggaacttaaactctct

SEQ ID NO: 16849 - DNA, 25 bp, SARS Virus
ttgacataggacattaaactctctt

SEQ ID NO: 16850 - DNA, 25 bp, SARS Virus
tgacataggaccataaactctcttt

SEQ ID NO: 16851 - DNA, 25 bp, SARS Virus
gacataggacctaaaactctcttta

SEQ ID NO: 16852 - DNA, 25 bp, SARS Virus
acataggaccttaaactctctttac

SEQ ID NO: 16853 - DNA, 25 bp, SARS Virus
cataggaccttaaactctctttacg

SEQ ID NO: 16854 - DNA, 25 bp, SARS Virus
ataggaccttaaactctctttacga

SEQ ID NO: 16855 - DNA, 25 bp, SARS Virus
taggaccttaaaatctctttacgaa

SEQ ID NO: 16856 - DNA, 25 bp, SARS Virus
aggaccttaaacactctttacgaac

SEQ ID NO: 16857 - DNA, 25 bp, SARS Virus
ggaccttaaactatctttacgaacg

SEQ ID NO: 16858 - DNA, 25 bp, SARS Virus
gaccttaaactcactttacgaacga

SEQ ID NO: 16859 - DNA, 25 bp, SARS Virus
accttaaactctatttacgaacgag

SEQ ID NO: 16860 - DNA, 25 bp, SARS Virus
ccttaaactctcattacgaacgagt

SEQ ID NO: 16861 - DNA, 25 bp, SARS Virus
cttaaactctctatacgaacgagta

SEQ ID NO: 16862 - DNA, 25 bp, SARS Virus
ttaaactctcttaacgaacgagtac

SEQ ID NO: 16863 - DNA, 25 bp, SARS Virus
taaactctctttacgaacgagtacg

SEQ ID NO: 16864 - DNA, 25 bp, SARS Virus
aaactctctttaagaacgagtacga

SEQ ID NO: 16865 - DNA, 25 bp, SARS Virus
aactctctttacaaacgagtacgac

SEQ ID NO: 16866 - DNA, 25 bp, SARS Virus
actctctttacgaacgagtacgact

SEQ ID NO: 16867 - DNA, 25 bp, SARS Virus
ctctctttacgaacgagtacgactt

SEQ ID NO: 16868 - DNA, 25 bp, SARS Virus
tctctttacgaaagagtacgacttc

SEQ ID NO: 16869 - DNA, 25 bp, SARS Virus
ctctttacgaacaagtacgacttct

SEQ ID NO: 16870 - DNA, 25 bp, SARS Virus
tctttacgaacgagtacgacttctc

SEQ ID NO: 16871 - DNA, 25 bp, SARS Virus
ctttacgaacgaatacgacttctct

SEQ ID NO: 16872 - DNA, 25 bp, SARS Virus
tttacgaacgagaacgacttctctg

SEQ ID NO: 16873 - DNA, 25 bp, SARS Virus
ttacgaacgagtacgacttctctgt

SEQ ID NO: 16874 - DNA, 25 bp, SARS Virus
tacgaacgagtaagacttctctgtt

SEQ ID NO: 16875 - DNA, 25 bp, SARS Virus
acgaacgagtacaacttctctgttc

SEQ ID NO: 16876 - DNA, 25 bp, SARS Virus
cgaacgagtacgacttctctgttct

SEQ ID NO: 16877 - DNA, 25 bp, SARS Virus
gaacgagtacgaattctctgttctt

SEQ ID NO: 16878 - DNA, 25 bp, SARS Virus
aacgagtacgacatctctgttcttt

SEQ ID NO: 16879 - DNA, 25 bp, SARS Virus
acgagtacgactactctgttctttt

SEQ ID NO: 16880 - DNA, 25 bp, SARS Virus
cgagtacgacttatctgttctttta

SEQ ID NO: 16881 - DNA, 25 bp, SARS Virus
gagtacgacttcactgttcttttaa

SEQ ID NO: 16882 - DNA, 25 bp, SARS Virus
agtacgacttctatgttcttttaat

SEQ ID NO: 16883 - DNA, 25 bp, SARS Virus
gtacgacttctcagttcttttaatt

SEQ ID NO: 16884 - DNA, 25 bp, SARS Virus
tacgacttctctattcttttaatta

SEQ ID NO: 16885 - DNA, 25 bp, SARS Virus
acgacttctctgatcttttaattac

SEQ ID NO: 16886 - DNA, 25 bp, SARS Virus
cgacttctctgtacttttaattacg

SEQ ID NO: 16887 - DNA, 25 bp, SARS Virus
gacttctctgttattttaattacgg

SEQ ID NO: 16888 - DNA, 25 bp, SARS Virus
acttctctgttcatttaattacgga

SEQ ID NO: 16889 - DNA, 25 bp, SARS Virus
cttctctgttctattaattacggat

SEQ ID NO: 16890 - DNA, 25 bp, SARS Virus
ttctctgttcttataattacggata

SEQ ID NO: 16891 - DNA, 25 bp, SARS Virus
tctctgttctttaaattacggatat

SEQ ID NO: 16892 - DNA, 25 bp, SARS Virus
ctctgttcttttaattacggatata

SEQ ID NO: 16893 - DNA, 25 bp, SARS Virus
tctgttcttttaattacggatatac

SEQ ID NO: 16894 - DNA, 25 bp, SARS Virus
ctgttcttttaaatacggatatacg

SEQ ID NO: 16895 - DNA, 25 bp, SARS Virus
tgttcttttaataacggatatacgt

SEQ ID NO: 16896 - DNA, 25 bp, SARS Virus
gttcttttaattacggatatacgta

SEQ ID NO: 16897 - DNA, 25 bp, SARS Virus
ttcttttaattaaggatatacgtac

SEQ ID NO: 16898 - DNA, 25 bp, SARS Virus
tcttttaattacagatatacgtacc

SEQ ID NO: 16899 - DNA, 25 bp, SARS Virus
cttttaattacgaatatacgtacct

SEQ ID NO: 16900 - DNA, 25 bp, SARS Virus
ttttaattacggatatacgtaccta

SEQ ID NO: 16901 - DNA, 25 bp, SARS Virus
tttaattacggaaatacgtacctac

SEQ ID NO: 16902 - DNA, 25 bp, SARS Virus
ttaattacggatatacgtacctaca

SEQ ID NO: 16903 - DNA, 25 bp, SARS Virus
taattacggataaacgtacctacaa

SEQ ID NO: 16904 - DNA, 25 bp, SARS Virus
aattacggatatacgtacctacaat

SEQ ID NO: 16905 - DNA, 25 bp, SARS Virus
attacggatataagtacctacaatc

SEQ ID NO: 16906 - DNA, 25 bp, SARS Virus
ttacggatatacatacctacaatct

SEQ ID NO: 16907 - DNA, 25 bp, SARS Virus
tacggatatacgaacctacaatctc

SEQ ID NO: 16908 - DNA, 25 bp, SARS Virus
acggatatacgtacctacaatctcg

SEQ ID NO: 16909 - DNA, 25 bp, SARS Virus
cggatatacgtaactacaatctcgg

SEQ ID NO: 16910 - DNA, 25 bp, SARS Virus
ggatatacgtacatacaatctcggt

SEQ ID NO: 16911 - DNA, 25 bp, SARS Virus
gatatacgtaccaacaatctcggta

SEQ ID NO: 16912 - DNA, 25 bp, SARS Virus
atatacgtacctacaatctcggtat

SEQ ID NO: 16913 - DNA, 25 bp, SARS Virus
tatacgtacctaaaatctcggtatt

SEQ ID NO: 16914 - DNA, 25 bp, SARS Virus
atacgtacctacaatctcggtatta

SEQ ID NO: 16915 - DNA, 25 bp, SARS Virus
tacgtacctacaatctcggtattac

SEQ ID NO: 16916 - DNA, 25 bp, SARS Virus
acgtacctacaaactcggtattacc

SEQ ID NO: 16917 - DNA, 25 bp, SARS Virus
cgtacctacaatatcggtattaccg

SEQ ID NO: 16918 - DNA, 25 bp, SARS Virus
gtacctacaatcacggtattaccgt

SEQ ID NO: 16919 - DNA, 25 bp, SARS Virus
tacctacaatctaggtattaccgtt

SEQ ID NO: 16920 - DNA, 25 bp, SARS Virus
acctacaatctcagtattaccgttg

SEQ ID NO: 16921 - DNA, 25 bp, SARS Virus
cctacaatctcgatattaccgttgg

SEQ ID NO: 16922 - DNA, 25 bp, SARS Virus
ctacaatctcggaattaccgttggt

SEQ ID NO: 16923 - DNA, 25 bp, SARS Virus
tacaatctcggtattaccgttggta

SEQ ID NO: 16924 - DNA, 25 bp, SARS Virus
acaatctcggtaataccgttggtag

SEQ ID NO: 16925 - DNA, 25 bp, SARS Virus
caatctcggtataaccgttggtagg

SEQ ID NO: 16926 - DNA, 25 bp, SARS Virus
aatctcggtattaccgttggtaggt

SEQ ID NO: 16927 - DNA, 25 bp, SARS Virus
atctcggtattaacgttggtaggtt

SEQ ID NO: 16928 - DNA, 25 bp, SARS Virus
tctcggtattacagttggtaggttg

SEQ ID NO: 16929 - DNA, 25 bp, SARS Virus
ctcggtattaccattggtaggttgc

SEQ ID NO: 16930 - DNA, 25 bp, SARS Virus
tcggtattaccgatggtaggttgca

SEQ ID NO: 16931 - DNA, 25 bp, SARS Virus
cggtattaccgtaggtaggttgcat

SEQ ID NO: 16932 - DNA, 25 bp, SARS Virus
ggtattaccgttagtaggttgcatt

SEQ ID NO: 16933 - DNA, 25 bp, SARS Virus
gtattaccgttgataggttgcattc

SEQ ID NO: 16934 - DNA, 25 bp, SARS Virus
tattaccgttggaaggttgcattca

SEQ ID NO: 16935 - DNA, 25 bp, SARS Virus
attaccgttggtaggttgcattcat

SEQ ID NO: 16936 - DNA, 25 bp, SARS Virus
ttaccgttggtaagttgcattcata

SEQ ID NO: 16937 - DNA, 25 bp, SARS Virus
taccgttggtagattgcattcatat

SEQ ID NO: 16938 - DNA, 25 bp, SARS Virus
accgttggtaggatgcattcatatt

SEQ ID NO: 16939 - DNA, 25 bp, SARS Virus
ccgttggtaggtagcattcatattt

SEQ ID NO: 16940 - DNA, 25 bp, SARS Virus
cgttggtaggttacattcatatttc

SEQ ID NO: 16941 - DNA, 25 bp, SARS Virus
gttggtaggttgaattcatatttcc

SEQ ID NO: 16942 - DNA, 25 bp, SARS Virus
ttggtaggttgcattcatatttcct

SEQ ID NO: 16943 - DNA, 25 bp, SARS Virus
tggtaggttgcaatcatatttcctt

SEQ ID NO: 16944 - DNA, 25 bp, SARS Virus
ggtaggttgcatacatatttcctta

SEQ ID NO: 16945 - DNA, 25 bp, SARS Virus
gtaggttgcattaatatttccttaa

SEQ ID NO: 16946 - DNA, 25 bp, SARS Virus
taggttgcattcatatttccttaat

SEQ ID NO: 16947 - DNA, 25 bp, SARS Virus
aggttgcattcaaatttccttaatt

SEQ ID NO: 16948 - DNA, 25 bp, SARS Virus
ggttgcattcatatttccttaattt

SEQ ID NO: 16949 - DNA, 25 bp, SARS Virus
gttgcattcataattccttaatttt

SEQ ID NO: 16950 - DNA, 25 bp, SARS Virus
ttgcattcatatatccttaatttta

SEQ ID NO: 16951 - DNA, 25 bp, SARS Virus
tgcattcatattaccttaattttaa

SEQ ID NO: 16952 - DNA, 25 bp, SARS Virus
gcattcatatttacttaattttaag

SEQ ID NO: 16953 - DNA, 25 bp, SARS Virus
cattcatatttcattaattttaagt

SEQ ID NO: 16954 - DNA, 25 bp, SARS Virus
attcatatttccataattttaagtt

SEQ ID NO: 16955 - DNA, 25 bp, SARS Virus
ttcatatttcctaaattttaagttc

SEQ ID NO: 16956 - DNA, 25 bp, SARS Virus
tcatatttccttaattttaagttct

SEQ ID NO: 16957 - DNA, 25 bp, SARS Virus
catatttccttaattttaagttctc

SEQ ID NO: 16958 - DNA, 25 bp, SARS Virus
atatttccttaaatttaagttctcc

SEQ ID NO: 16959 - DNA, 25 bp, SARS Virus
tatttccttaatattaagttctccc

SEQ ID NO: 16960 - DNA, 25 bp, SARS Virus
atttccttaattataagttctcccg

SEQ ID NO: 16961 - DNA, 25 bp, SARS Virus
tttccttaatttaaagttctcccgt

SEQ ID NO: 16962 - DNA, 25 bp, SARS Virus
ttccttaattttaagttctcccgta

SEQ ID NO: 16963 - DNA, 25 bp, SARS Virus
tccttaattttaagttctcccgtag

SEQ ID NO: 16964 - DNA, 25 bp, SARS Virus
ccttaattttaaattctcccgtagc

SEQ ID NO: 16965 - DNA, 25 bp, SARS Virus
cttaattttaagatctcccgtagca

SEQ ID NO: 16966 - DNA, 25 bp, SARS Virus
ttaattttaagtactcccgtagcaa

SEQ ID NO: 16967 - DNA, 25 bp, SARS Virus
taattttaagttatcccgtagcaac

SEQ ID NO: 16968 - DNA, 25 bp, SARS Virus
aattttaagttcacccgtagcaact

SEQ ID NO: 16969 - DNA, 25 bp, SARS Virus
attttaagttctaccgtagcaactg

SEQ ID NO: 16970 - DNA, 25 bp, SARS Virus
ttttaagttctcacgtagcaactga

SEQ ID NO: 16971 - DNA, 25 bp, SARS Virus
tttaagttctccagtagcaactgat

SEQ ID NO: 16972 - DNA, 25 bp, SARS Virus
ttaagttctcccatagcaactgata

SEQ ID NO: 16973 - DNA, 25 bp, SARS Virus
taagttctcccgaagcaactgatac

SEQ ID NO: 16974 - DNA, 25 bp, SARS Virus
aagttctcccgtagcaactgatacc

SEQ ID NO: 16975 - DNA, 25 bp, SARS Virus
agttctcccgtaacaactgatacca

SEQ ID NO: 16976 - DNA, 25 bp, SARS Virus
gttctcccgtagaaactgataccac

SEQ ID NO: 16977 - DNA, 25 bp, SARS Virus
ttctcccgtagcaactgataccaca

SEQ ID NO: 16978 - DNA, 25 bp, SARS Virus
tctcccgtagcaactgataccacag

SEQ ID NO: 16979 - DNA, 25 bp, SARS Virus
ctcccgtagcaaatgataccacagg

SEQ ID NO: 16980 - DNA, 25 bp, SARS Virus
tcccgtagcaacagataccacaggc

SEQ ID NO: 16981 - DNA, 25 bp, SARS Virus
cccgtagcaactaataccacaggct

SEQ ID NO: 16982 - DNA, 25 bp, SARS Virus
ccgtagcaactgataccacaggcta

SEQ ID NO: 16983 - DNA, 25 bp, SARS Virus
cgtagcaactgaaaccacaggctaa

SEQ ID NO: 16984 - DNA, 25 bp, SARS Virus
gtagcaactgataccacaggctaag

SEQ ID NO: 16985 - DNA, 25 bp, SARS Virus
tagcaactgataacacaggctaaga

SEQ ID NO: 16986 - DNA, 25 bp, SARS Virus
agcaactgatacaacaggctaagaa

SEQ ID NO: 16987 - DNA, 25 bp, SARS Virus
gcaactgataccacaggctaagaag

SEQ ID NO: 16988 - DNA, 25 bp, SARS Virus
caactgataccaaaggctaagaaga

SEQ ID NO: 16989 - DNA, 25 bp, SARS Virus
aactgataccacaggctaagaagaa

SEQ ID NO: 16990 - DNA, 25 bp, SARS Virus
actgataccacaagctaagaagaaa

SEQ ID NO: 16991 - DNA, 25 bp, SARS Virus
ctgataccacagactaagaagaaaa

SEQ ID NO: 16992 - DNA, 25 bp, SARS Virus
tgataccacaggataagaagaaaat

SEQ ID NO: 16993 - DNA, 25 bp, SARS Virus
gataccacaggcaaagaagaaaata

SEQ ID NO: 16994 - DNA, 25 bp, SARS Virus
ataccacaggctaagaagaaaatat

SEQ ID NO: 16995 - DNA, 25 bp, SARS Virus
taccacaggctaagaagaaaatatg

SEQ ID NO: 16996 - DNA, 25 bp, SARS Virus
accacaggctaaaaagaaaatatga

SEQ ID NO: 16997 - DNA, 25 bp, SARS Virus
ccacaggctaagaagaaaatatgat

SEQ ID NO: 16998 - DNA, 25 bp, SARS Virus
cacaggctaagaagaaaatatgatc

SEQ ID NO: 16999 - DNA, 25 bp, SARS Virus
acaggctaagaaaaaaatatgatca

SEQ ID NO: 17000 - DNA, 25 bp, SARS Virus
caggctaagaagaaaatatgatcat

SEQ ID NO: 17001 - DNA, 25 bp, SARS Virus
aggctaagaagaaaatatgatcatt

SEQ ID NO: 17002 - DNA, 25 bp, SARS Virus
ggctaagaagaaaatatgatcattt

SEQ ID NO: 17003 - DNA, 25 bp, SARS Virus
gctaagaagaaaatatgatcatttc

SEQ ID NO: 17004 - DNA, 25 bp, SARS Virus
ctaagaagaaaaaatgatcatttct

SEQ ID NO: 17005 - DNA, 25 bp, SARS Virus
taagaagaaaatatgatcatttctc

SEQ ID NO: 17006 - DNA, 25 bp, SARS Virus
aagaagaaaataagatcatttctcg

SEQ ID NO: 17007 - DNA, 25 bp, SARS Virus
agaagaaaatataatcatttctcgg

SEQ ID NO: 17008 - DNA, 25 bp, SARS Virus
gaagaaaatatgatcatttctcgga

SEQ ID NO: 17009 - DNA, 25 bp, SARS Virus
aagaaaatatgaacatttctcggac

SEQ ID NO: 17010 - DNA, 25 bp, SARS Virus
agaaaatatgataatttctcggaca

SEQ ID NO: 17011 - DNA, 25 bp, SARS Virus
gaaaatatgatcatttctcggacat

SEQ ID NO: 17012 - DNA, 25 bp, SARS Virus
aaaatatgatcaattctcggacatc

SEQ ID NO: 17013 - DNA, 25 bp, SARS Virus
aaatatgatcatatctcggacatcg

SEQ ID NO: 17014 - DNA, 25 bp, SARS Virus
aatatgatcattactcggacatcga

SEQ ID NO: 17015 - DNA, 25 bp, SARS Virus
atatgatcatttatcggacatcgaa

SEQ ID NO: 17016 - DNA, 25 bp, SARS Virus
tatgatcatttcacggacatcgaag

SEQ ID NO: 17017 - DNA, 25 bp, SARS Virus
atgatcatttctaggacatcgaaga

SEQ ID NO: 17018 - DNA, 25 bp, SARS Virus
tgatcatttctcagacatcgaagat

SEQ ID NO: 17019 - DNA, 25 bp, SARS Virus
gatcatttctcgaacatcgaagata

SEQ ID NO: 17020 - DNA, 25 bp, SARS Virus
atcatttctcggacatcgaagataa

SEQ ID NO: 17021 - DNA, 25 bp, SARS Virus
tcatttctcggaaatcgaagataat

SEQ ID NO: 17022 - DNA, 25 bp, SARS Virus
catttctcggacatcgaagataata

SEQ ID NO: 17023 - DNA, 25 bp, SARS Virus
atttctcggacaacgaagataataa

SEQ ID NO: 17024 - DNA, 25 bp, SARS Virus
tttctcggacatagaagataataat

SEQ ID NO: 17025 - DNA, 25 bp, SARS Virus
ttctcggacatcaaagataataatg

SEQ ID NO: 17026 - DNA, 25 bp, SARS Virus
tctcggacatcgaagataataatgc

SEQ ID NO: 17027 - DNA, 25 bp, SARS Virus
ctcggacatcgaagataataatgct

SEQ ID NO: 17028 - DNA, 25 bp, SARS Virus
tcggacatcgaaaataataatgctt

SEQ ID NO: 17029 - DNA, 25 bp, SARS Virus
cggacatcgaagataataatgcttc

SEQ ID NO: 17030 - DNA, 25 bp, SARS Virus
ggacatcgaagaaaataatgcttcg

SEQ ID NO: 17031 - DNA, 25 bp, SARS Virus
gacatcgaagataataatgcttcga

SEQ ID NO: 17032 - DNA, 25 bp, SARS Virus
acatcgaagataataatgcttcgac

SEQ ID NO: 17033 - DNA, 25 bp, SARS Virus
catcgaagataaaaatgcttcgact

SEQ ID NO: 17034 - DNA, 25 bp, SARS Virus
atcgaagataataatgcttcgactt

SEQ ID NO: 17035 - DNA, 25 bp, SARS Virus
tcgaagataataatgcttcgacttg

SEQ ID NO: 17036 - DNA, 25 bp, SARS Virus
cgaagataataaagcttcgacttga

SEQ ID NO: 17037 - DNA, 25 bp, SARS Virus
gaagataataatacttcgacttgag

SEQ ID NO: 17038 - DNA, 25 bp, SARS Virus
aagataataatgattcgacttgaga

SEQ ID NO: 17039 - DNA, 25 bp, SARS Virus
agataataatgcatcgacttgagag

SEQ ID NO: 17040 - DNA, 25 bp, SARS Virus
gataataatgctacgacttgagaga

SEQ ID NO: 17041 - DNA, 25 bp, SARS Virus
ataataatgcttagacttgagagat

SEQ ID NO: 17042 - DNA, 25 bp, SARS Virus
taataatgcttcaacttgagagatt

SEQ ID NO: 17043 - DNA, 25 bp, SARS Virus
aataatgcttcgacttgagagattt

SEQ ID NO: 17044 - DNA, 25 bp, SARS Virus
ataatgcttcgaattgagagattta

SEQ ID NO: 17045 - DNA, 25 bp, SARS Virus
taatgcttcgacatgagagatttac

SEQ ID NO: 17046 - DNA, 25 bp, SARS Virus
aatgcttcgactagagagatttact

SEQ ID NO: 17047 - DNA, 25 bp, SARS Virus
atgcttcgacttaagagatttactc

SEQ ID NO: 17048 - DNA, 25 bp, SARS Virus
tgcttcgacttgagagatttactcg

SEQ ID NO: 17049 - DNA, 25 bp, SARS Virus
gcttcgacttgaaagatttactcgg

SEQ ID NO: 17050 - DNA, 25 bp, SARS Virus
cttcgacttgagagatttactcggc

SEQ ID NO: 17051 - DNA, 25 bp, SARS Virus
ttcgacttgagaaatttactcggcg

SEQ ID NO: 17052 - DNA, 25 bp, SARS Virus
tcgacttgagagatttactcggcga

SEQ ID NO: 17053 - DNA, 25 bp, SARS Virus
cgacttgagagaattactcggcgaa

SEQ ID NO: 17054 - DNA, 25 bp, SARS Virus
gacttgagagatatactcggcgaac

SEQ ID NO: 17055 - DNA, 25 bp, SARS Virus
acttgagagattaactcggcgaaca

SEQ ID NO: 17056 - DNA, 25 bp, SARS Virus
cttgagagatttactcggcgaacag

SEQ ID NO: 17057 - DNA, 25 bp, SARS Virus
ttgagagatttaatcggcgaacagt

SEQ ID NO: 17058 - DNA, 25 bp, SARS Virus
tgagagatttacacggcgaacagtg

SEQ ID NO: 17059 - DNA, 25 bp, SARS Virus
gagagatttactaggcgaacagtgt

SEQ ID NO: 17060 - DNA, 25 bp, SARS Virus
agagatttactcagcgaacagtgtt

SEQ ID NO: 17061 - DNA, 25 bp, SARS Virus
gagatttactcgacgaacagtgtta

SEQ ID NO: 17062 - DNA, 25 bp, SARS Virus
agatttactcggagaacagtgttac

SEQ ID NO: 17063 - DNA, 25 bp, SARS Virus
gatttactcggcaaacagtgttacg

SEQ ID NO: 17064 - DNA, 25 bp, SARS Virus
atttactcggcgaacagtgttacgg

SEQ ID NO: 17065 - DNA, 25 bp, SARS Virus
tttactcggcgaacagtgttacggt

SEQ ID NO: 17066 - DNA, 25 bp, SARS Virus
ttactcggcgaaaagtgttacggtt

SEQ ID NO: 17067 - DNA, 25 bp, SARS Virus
tactcggcgaacagtgttacggtta

SEQ ID NO: 17068 - DNA, 25 bp, SARS Virus
actcggcgaacaatgttacggttaa

SEQ ID NO: 17069 - DNA, 25 bp, SARS Virus
ctcggcgaacagagttacggttaac

SEQ ID NO: 17070 - DNA, 25 bp, SARS Virus
tcggcgaacagtattacggttaacc

SEQ ID NO: 17071 - DNA, 25 bp, SARS Virus
cggcgaacagtgatacggttaacca

SEQ ID NO: 17072 - DNA, 25 bp, SARS Virus
ggcgaacagtgtaacggttaaccaa

SEQ ID NO: 17073 - DNA, 25 bp, SARS Virus
gcgaacagtgttacggttaaccaat

SEQ ID NO: 17074 - DNA, 25 bp, SARS Virus
cgaacagtgttaaggttaaccaata

SEQ ID NO: 17075 - DNA, 25 bp, SARS Virus
gaacagtgttacagttaaccaatac

SEQ ID NO: 17076 - DNA, 25 bp, SARS Virus
aacagtgttacgattaaccaataca

SEQ ID NO: 17077 - DNA, 25 bp, SARS Virus
acagtgttacggataaccaatacac

SEQ ID NO: 17078 - DNA, 25 bp, SARS Virus
cagtgttacggtaaaccaatacact

SEQ ID NO: 17079 - DNA, 25 bp, SARS Virus
agtgttacggttaaccaatacactg

SEQ ID NO: 17080 - DNA, 25 bp, SARS Virus
gtgttacggttaaccaatacactgt

SEQ ID NO: 17081 - DNA, 25 bp, SARS Virus
tgttacggttaaacaatacactgtg

SEQ ID NO: 17082 - DNA, 25 bp, SARS Virus
gttacggttaacaaatacactgtgt

SEQ ID NO: 17083 - DNA, 25 bp, SARS Virus
ttacggttaaccaatacactgtgta

SEQ ID NO: 17084 - DNA, 25 bp, SARS Virus
tacggttaaccaatacactgtgtac

SEQ ID NO: 17085 - DNA, 25 bp, SARS Virus
acggttaaccaaaacactgtgtacc

SEQ ID NO: 17086 - DNA, 25 bp, SARS Virus
cggttaaccaatacactgtgtacca

SEQ ID NO: 17087 - DNA, 25 bp, SARS Virus
ggttaaccaataaactgtgtaccaa

SEQ ID NO: 17088 - DNA, 25 bp, SARS Virus
gttaaccaatacactgtgtaccaaa

SEQ ID NO: 17089 - DNA, 25 bp, SARS Virus
ttaaccaatacaatgtgtaccaaaa

SEQ ID NO: 17090 - DNA, 25 bp, SARS Virus
taaccaatacacagtgtaccaaaat

SEQ ID NO: 17091 - DNA, 25 bp, SARS Virus
aaccaatacactatgtaccaaaatt

SEQ ID NO: 17092 - DNA, 25 bp, SARS Virus
accaatacactgagtaccaaaatta

SEQ ID NO: 17093 - DNA, 25 bp, SARS Virus
ccaatacactgtataccaaaattag

SEQ ID NO: 17094 - DNA, 25 bp, SARS Virus
caatacactgtgaaccaaaattaga

SEQ ID NO: 17095 - DNA, 25 bp, SARS Virus
aatacactgtgtaccaaaattagaa

SEQ ID NO: 17096 - DNA, 25 bp, SARS Virus
atacactgtgtaacaaaattagaac

SEQ ID NO: 17097 - DNA, 25 bp, SARS Virus
tacactgtgtacaaaaattagaact

SEQ ID NO: 17098 - DNA, 25 bp, SARS Virus
acactgtgtaccaaaattagaactt

SEQ ID NO: 17099 - DNA, 25 bp, SARS Virus
cactgtgtaccaaaattagaacttc

SEQ ID NO: 17100 - DNA, 25 bp, SARS Virus
actgtgtaccaaaattagaacttct

SEQ ID NO: 17101 - DNA, 25 bp, SARS Virus
ctgtgtaccaaaattagaacttctc

SEQ ID NO: 17102 - DNA, 25 bp, SARS Virus
tgtgtaccaaaaatagaacttctcc

SEQ ID NO: 17103 - DNA, 25 bp, SARS Virus
gtgtaccaaaataagaacttctccg

SEQ ID NO: 17104 - DNA, 25 bp, SARS Virus
tgtaccaaaattagaacttctccga

SEQ ID NO: 17105 - DNA, 25 bp, SARS Virus
gtaccaaaattaaaacttctccgac

SEQ ID NO: 17106 - DNA, 25 bp, SARS Virus
taccaaaattagaacttctccgacg

SEQ ID NO: 17107 - DNA, 25 bp, SARS Virus
accaaaattagaacttctccgacgc

SEQ ID NO: 17108 - DNA, 25 bp, SARS Virus
ccaaaattagaaattctccgacgcg

SEQ ID NO: 17109 - DNA, 25 bp, SARS Virus
caaaattagaacatctccgacgcgc

SEQ ID NO: 17110 - DNA, 25 bp, SARS Virus
aaaattagaactactccgacgcgcg

SEQ ID NO: 17111 - DNA, 25 bp, SARS Virus
aaattagaacttatccgacgcgcga

SEQ ID NO: 17112 - DNA, 25 bp, SARS Virus
aattagaacttcaccgacgcgcgac

SEQ ID NO: 17113 - DNA, 25 bp, SARS Virus
attagaacttctacgacgcgcgaca

SEQ ID NO: 17114 - DNA, 25 bp, SARS Virus
ttagaacttctcagacgcgcgacat

SEQ ID NO: 17115 - DNA, 25 bp, SARS Virus
tagaacttctccaacgcgcgacata

SEQ ID NO: 17116 - DNA, 25 bp, SARS Virus
agaacttctccgacgcgcgacatac

SEQ ID NO: 17117 - DNA, 25 bp, SARS Virus
gaacttctccgaagcgcgacatacg

SEQ ID NO: 17118 - DNA, 25 bp, SARS Virus
aacttctccgacacgcgacatacgc

SEQ ID NO: 17119 - DNA, 25 bp, SARS Virus
acttctccgacgagcgacatacgca

SEQ ID NO: 17120 - DNA, 25 bp, SARS Virus
cttctccgacgcacgacatacgcaa

SEQ ID NO: 17121 - DNA, 25 bp, SARS Virus
ttctccgacgcgagacatacgcaag

SEQ ID NO: 17122 - DNA, 25 bp, SARS Virus
tctccgacgcgcaacatacgcaaga

SEQ ID NO: 17123 - DNA, 25 bp, SARS Virus
ctccgacgcgcgacatacgcaagag

SEQ ID NO: 17124 - DNA, 25 bp, SARS Virus
tccgacgcgcgaaatacgcaagaga

SEQ ID NO: 17125 - DNA, 25 bp, SARS Virus
ccgacgcgcgacatacgcaagagaa

SEQ ID NO: 17126 - DNA, 25 bp, SARS Virus
cgacgcgcgacaaacgcaagagaat

SEQ ID NO: 17127 - DNA, 25 bp, SARS Virus
gacgcgcgacatacgcaagagaatt

SEQ ID NO: 17128 - DNA, 25 bp, SARS Virus
acgcgcgacataagcaagagaattt

SEQ ID NO: 17129 - DNA, 25 bp, SARS Virus
cgcgcgacatacacaagagaatttc

SEQ ID NO: 17130 - DNA, 25 bp, SARS Virus
gcgcgacatacgaaagagaatttcg

SEQ ID NO: 17131 - DNA, 25 bp, SARS Virus
cgcgacatacgcaagagaatttcga

SEQ ID NO: 17132 - DNA, 25 bp, SARS Virus
gcgacatacgcaagagaatttcgag

SEQ ID NO: 17133 - DNA, 25 bp, SARS Virus
cgacatacgcaaaagaatttcgagg

SEQ ID NO: 17134 - DNA, 25 bp, SARS Virus
gacatacgcaagagaatttcgagga

SEQ ID NO: 17135 - DNA, 25 bp, SARS Virus
acatacgcaagaaaatttcgaggac

SEQ ID NO: 17136 - DNA, 25 bp, SARS Virus
catacgcaagagaatttcgaggacg

SEQ ID NO: 17137 - DNA, 25 bp, SARS Virus
atacgcaagagaatttcgaggacgg

SEQ ID NO: 17138 - DNA, 25 bp, SARS Virus
tacgcaagagaaattcgaggacggc

SEQ ID NO: 17139 - DNA, 25 bp, SARS Virus
acgcaagagaatatcgaggacggca

SEQ ID NO: 17140 - DNA, 25 bp, SARS Virus
cgcaagagaattacgaggacggcat

SEQ ID NO: 17141 - DNA, 25 bp, SARS Virus
gcaagagaatttagaggacggcatc

SEQ ID NO: 17142 - DNA, 25 bp, SARS Virus
caagagaatttcaaggacggcatca

SEQ ID NO: 17143 - DNA, 25 bp, SARS Virus
aagagaatttcgaggacggcatcac

SEQ ID NO: 17144 - DNA, 25 bp, SARS Virus
agagaatttcgaagacggcatcaca

SEQ ID NO: 17145 - DNA, 25 bp, SARS Virus
gagaatttcgagaacggcatcacag

SEQ ID NO: 17146 - DNA, 25 bp, SARS Virus
agaatttcgaggacggcatcacagt

SEQ ID NO: 17147 - DNA, 25 bp, SARS Virus
gaatttcgaggaaggcatcacagtc

SEQ ID NO: 17148 - DNA, 25 bp, SARS Virus
aatttcgaggacagcatcacagtca

SEQ ID NO: 17149 - DNA, 25 bp, SARS Virus
atttcgaggacgacatcacagtcat

SEQ ID NO: 17150 - DNA, 25 bp, SARS Virus
tttcgaggacggaatcacagtcata

SEQ ID NO: 17151 - DNA, 25 bp, SARS Virus
ttcgaggacggcatcacagtcatag

SEQ ID NO: 17152 - DNA, 25 bp, SARS Virus
tcgaggacggcaacacagtcatagt

SEQ ID NO: 17153 - DNA, 25 bp, SARS Virus
cgaggacggcataacagtcatagta

SEQ ID NO: 17154 - DNA, 25 bp, SARS Virus
gaggacggcatcacagtcatagtag

SEQ ID NO: 17155 - DNA, 25 bp, SARS Virus
aggacggcatcaaagtcatagtagt

SEQ ID NO: 17156 - DNA, 25 bp, SARS Virus
ggacggcatcacagtcatagtagtg

SEQ ID NO: 17157 - DNA, 25 bp, SARS Virus
gacggcatcacaatcatagtagtgg

SEQ ID NO: 17158 - DNA, 25 bp, SARS Virus
acggcatcacagacatagtagtggt

SEQ ID NO: 17159 - DNA, 25 bp, SARS Virus
cggcatcacagtaatagtagtggtc

SEQ ID NO: 17160 - DNA, 25 bp, SARS Virus
ggcatcacagtcatagtagtggtct

SEQ ID NO: 17161 - DNA, 25 bp, SARS Virus
gcatcacagtcaaagtagtggtcta

SEQ ID NO: 17162 - DNA, 25 bp, SARS Virus
catcacagtcatagtagtggtctac

SEQ ID NO: 17163 - DNA, 25 bp, SARS Virus
atcacagtcataatagtggtctacg

SEQ ID NO: 17164 - DNA, 25 bp, SARS Virus
tcacagtcatagaagtggtctacga

SEQ ID NO: 17165 - DNA, 25 bp, SARS Virus
cacagtcatagtagtggtctacgac

SEQ ID NO: 17166 - DNA, 25 bp, SARS Virus
acagtcatagtaatggtctacgaca

SEQ ID NO: 17167 - DNA, 25 bp, SARS Virus
cagtcatagtagaggtctacgacaa

SEQ ID NO: 17168 - DNA, 25 bp, SARS Virus
agtcatagtagtagtctacgacaat

SEQ ID NO: 17169 - DNA, 25 bp, SARS Virus
gtcatagtagtgatctacgacaatg

SEQ ID NO: 17170 - DNA, 25 bp, SARS Virus
tcatagtagtggactacgacaatga

SEQ ID NO: 17171 - DNA, 25 bp, SARS Virus
catagtagtggtatacgacaatgat

SEQ ID NO: 17172 - DNA, 25 bp, SARS Virus
atagtagtggtcaacgacaatgatg

SEQ ID NO: 17173 - DNA, 25 bp, SARS Virus
tagtagtggtctacgacaatgatgt

SEQ ID NO: 17174 - DNA, 25 bp, SARS Virus
agtagtggtctaagacaatgatgta

SEQ ID NO: 17175 - DNA, 25 bp, SARS Virus
gtagtggtctacaacaatgatgtat

SEQ ID NO: 17176 - DNA, 25 bp, SARS Virus
tagtggtctacgacaatgatgtata

SEQ ID NO: 17177 - DNA, 25 bp, SARS Virus
agtggtctacgaaaatgatgtatat

SEQ ID NO: 17178 - DNA, 25 bp, SARS Virus
gtggtctacgacaatgatgtatatt

SEQ ID NO: 17179 - DNA, 25 bp, SARS Virus
tggtctacgacaatgatgtatatta

SEQ ID NO: 17180 - DNA, 25 bp, SARS Virus
ggtctacgacaaagatgtatattac

SEQ ID NO: 17181 - DNA, 25 bp, SARS Virus
gtctacgacaataatgtatattacc

SEQ ID NO: 17182 - DNA, 25 bp, SARS Virus
tctacgacaatgatgtatattacct

SEQ ID NO: 17183 - DNA, 25 bp, SARS Virus
ctacgacaatgaagtatattaccta

SEQ ID NO: 17184 - DNA, 25 bp, SARS Virus
tacgacaatgatatatattacctat

SEQ ID NO: 17185 - DNA, 25 bp, SARS Virus
acgacaatgatgaatattacctatg

SEQ ID NO: 17186 - DNA, 25 bp, SARS Virus
cgacaatgatgtatattacctatgg

SEQ ID NO: 17187 - DNA, 25 bp, SARS Virus
gacaatgatgtaaattacctatgga

SEQ ID NO: 17188 - DNA, 25 bp, SARS Virus
acaatgatgtatattacctatggag

SEQ ID NO: 17189 - DNA, 25 bp, SARS Virus
caatgatgtataatacctatggagt

SEQ ID NO: 17190 - DNA, 25 bp, SARS Virus
aatgatgtatataacctatggagtg

SEQ ID NO: 17191 - DNA, 25 bp, SARS Virus
atgatgtatattacctatggagtga

SEQ ID NO: 17192 - DNA, 25 bp, SARS Virus
tgatgtatattaactatggagtgaa

SEQ ID NO: 17193 - DNA, 25 bp, SARS Virus
gatgtatattacatatggagtgaag

SEQ ID NO: 17194 - DNA, 25 bp, SARS Virus
atgtatattaccaatggagtgaagc

SEQ ID NO: 17195 - DNA, 25 bp, SARS Virus
tgtatattacctatggagtgaagca

SEQ ID NO: 17196 - DNA, 25 bp, SARS Virus
gtatattacctaaggagtgaagcag

SEQ ID NO: 17197 - DNA, 25 bp, SARS Virus
tatattacctatagagtgaagcagt

SEQ ID NO: 17198 - DNA, 25 bp, SARS Virus
atattacctatgaagtgaagcagta

SEQ ID NO: 17199 - DNA, 25 bp, SARS Virus
tattacctatggagtgaagcagtag

SEQ ID NO: 17200 - DNA, 25 bp, SARS Virus
attacctatggaatgaagcagtagt

SEQ ID NO: 17201 - DNA, 25 bp, SARS Virus
ttacctatggagagaagcagtagtt

SEQ ID NO: 17202 - DNA, 25 bp, SARS Virus
tacctatggagtaaagcagtagttt

SEQ ID NO: 17203 - DNA, 25 bp, SARS Virus
acctatggagtgaagcagtagtttc

SEQ ID NO: 17204 - DNA, 25 bp, SARS Virus
cctatggagtgaagcagtagtttct

SEQ ID NO: 17205 - DNA, 25 bp, SARS Virus
ctatggagtgaaacagtagtttctg

SEQ ID NO: 17206 - DNA, 25 bp, SARS Virus
tatggagtgaagaagtagtttctgt

SEQ ID NO: 17207 - DNA, 25 bp, SARS Virus
atggagtgaagcagtagtttctgta

SEQ ID NO: 17208 - DNA, 25 bp, SARS Virus
tggagtgaagcaatagtttctgtag

SEQ ID NO: 17209 - DNA, 25 bp, SARS Virus
tggtgcatgggacctgttcctacac

SEQ ID NO: 17210 - DNA, 25 bp, SARS Virus
ggtgcatgggacctgttcctacacg

SEQ ID NO: 17211 - DNA, 25 bp, SARS Virus
gtgcatgggacccgttcctacacga

SEQ ID NO: 17212 - DNA, 25 bp, SARS Virus
tgcatgggacctcttcctacacgac

SEQ ID NO: 17213 - DNA, 25 bp, SARS Virus
gcatgggacctgctcctacacgacc

SEQ ID NO: 17214 - DNA, 25 bp, SARS Virus
catgggacctgtccctacacgacca

SEQ ID NO: 17215 - DNA, 25 bp, SARS Virus
atgggacctgttcctacacgaccaa

SEQ ID NO: 17216 - DNA, 25 bp, SARS Virus
tgggacctgttcctacacgaccaat

SEQ ID NO: 17217 - DNA, 25 bp, SARS Virus
gggacctgttcccacacgaccaata

SEQ ID NO: 17218 - DNA, 25 bp, SARS Virus
ggacctgttcctccacgaccaatat

SEQ ID NO: 17219 - DNA, 25 bp, SARS Virus
gacctgttcctacacgaccaatatg

SEQ ID NO: 17220 - DNA, 25 bp, SARS Virus
acctgttcctacccgaccaatatgt

SEQ ID NO: 17221 - DNA, 25 bp, SARS Virus
cctgttcctacacgaccaatatgtg

SEQ ID NO: 17222 - DNA, 25 bp, SARS Virus
ctgttcctacaccaccaatatgtga

SEQ ID NO: 17223 - DNA, 25 bp, SARS Virus
tgttcctacacgcccaatatgtgaa

SEQ ID NO: 17224 - DNA, 25 bp, SARS Virus
gttcctacacgaccaatatgtgaac

SEQ ID NO: 17225 - DNA, 25 bp, SARS Virus
ttcctacacgaccaatatgtgaact

SEQ ID NO: 17226 - DNA, 25 bp, SARS Virus
tcctacacgacccatatgtgaactc

SEQ ID NO: 17227 - DNA, 25 bp, SARS Virus
cctacacgaccactatgtgaactcc

SEQ ID NO: 17228 - DNA, 25 bp, SARS Virus
ctacacgaccaacatgtgaactcct

SEQ ID NO: 17229 - DNA, 25 bp, SARS Virus
tacacgaccaatctgtgaactcctt

SEQ ID NO: 17230 - DNA, 25 bp, SARS Virus
acacgaccaatacgtgaactccttc

SEQ ID NO: 17231 - DNA, 25 bp, SARS Virus
cacgaccaatatctgaactccttcg

SEQ ID NO: 17232 - DNA, 25 bp, SARS Virus
acgaccaatatgcgaactccttcga

SEQ ID NO: 17233 - DNA, 25 bp, SARS Virus
cgaccaatatgtcaactccttcgat

SEQ ID NO: 17234 - DNA, 25 bp, SARS Virus
gaccaatatgtgcactccttcgatt

SEQ ID NO: 17235 - DNA, 25 bp, SARS Virus
accaatatgtgacctccttcgattc

SEQ ID NO: 17236 - DNA, 25 bp, SARS Virus
ccaatatgtgaactccttcgattct

SEQ ID NO: 17237 - DNA, 25 bp, SARS Virus
caatatgtgaaccccttcgattctg

SEQ ID NO: 17238 - DNA, 25 bp, SARS Virus
aatatgtgaactccttcgattctga

SEQ ID NO: 17239 - DNA, 25 bp, SARS Virus
atatgtgaactccttcgattctgac

SEQ ID NO: 17240 - DNA, 25 bp, SARS Virus
tatgtgaactccctcgattctgacg

SEQ ID NO: 17241 - DNA, 25 bp, SARS Virus
atgtgaactcctccgattctgacga

SEQ ID NO: 17242 - DNA, 25 bp, SARS Virus
tgtgaactccttcgattctgacgag

SEQ ID NO: 17243 - DNA, 25 bp, SARS Virus
gtgaactccttccattctgacgaga

SEQ ID NO: 17244 - DNA, 25 bp, SARS Virus
tgaactccttcgcttctgacgagaa

SEQ ID NO: 17245 - DNA, 25 bp, SARS Virus
gaactccttcgactctgacgagaat

SEQ ID NO: 17246 - DNA, 25 bp, SARS Virus
aactccttcgatcctgacgagaatt

SEQ ID NO: 17247 - DNA, 25 bp, SARS Virus
actccttcgattctgacgagaattc

SEQ ID NO: 17248 - DNA, 25 bp, SARS Virus
ctccttcgattccgacgagaattct

SEQ ID NO: 17249 - DNA, 25 bp, SARS Virus
tccttcgattctcacgagaattctt

SEQ ID NO: 17250 - DNA, 25 bp, SARS Virus
ccttcgattctgccgagaattcttt

SEQ ID NO: 17251 - DNA, 25 bp, SARS Virus
cttcgattctgacgagaattcttta

SEQ ID NO: 17252 - DNA, 25 bp, SARS Virus
ttcgattctgaccagaattctttac

SEQ ID NO: 17253 - DNA, 25 bp, SARS Virus
tcgattctgacgcgaattctttacg

SEQ ID NO: 17254 - DNA, 25 bp, SARS Virus
cgattctgacgacaattctttacgt

SEQ ID NO: 17255 - DNA, 25 bp, SARS Virus
gattctgacgagcattctttacgtt

SEQ ID NO: 17256 - DNA, 25 bp, SARS Virus
attctgacgagacttctttacgttt

SEQ ID NO: 17257 - DNA, 25 bp, SARS Virus
ttctgacgagaactctttacgttta

SEQ ID NO: 17258 - DNA, 25 bp, SARS Virus
tctgacgagaatcctttacgtttag

SEQ ID NO: 17259 - DNA, 25 bp, SARS Virus
ctgacgagaattctttacgtttaga

SEQ ID NO: 17260 - DNA, 25 bp, SARS Virus
tgacgagaattccttacgtttagac

SEQ ID NO: 17261 - DNA, 25 bp, SARS Virus
gacgagaattctctacgtttagacg

SEQ ID NO: 17262 - DNA, 25 bp, SARS Virus
acgagaattcttcacgtttagacgt

SEQ ID NO: 17263 - DNA, 25 bp, SARS Virus
cgagaattctttccgtttagacgta

SEQ ID NO: 17264 - DNA, 25 bp, SARS Virus
gagaattctttacgtttagacgtaa

SEQ ID NO: 17265 - DNA, 25 bp, SARS Virus
agaattctttacctttagacgtaaa

SEQ ID NO: 17266 - DNA, 25 bp, SARS Virus
gaattctttacgcttagacgtaaaa

SEQ ID NO: 17267 - DNA, 25 bp, SARS Virus
aattctttacgtctagacgtaaaat

SEQ ID NO: 17268 - DNA, 25 bp, SARS Virus
attctttacgttcagacgtaaaata

SEQ ID NO: 17269 - DNA, 25 bp, SARS Virus
ttctttacgtttcgacgtaaaatac

SEQ ID NO: 17270 - DNA, 25 bp, SARS Virus
tctttacgtttacacgtaaaataca

SEQ ID NO: 17271 - DNA, 25 bp, SARS Virus
ctttacgtttagccgtaaaatacat

SEQ ID NO: 17272 - DNA, 25 bp, SARS Virus
tttacgtttagacgtaaaatacatg

SEQ ID NO: 17273 - DNA, 25 bp, SARS Virus
ttacgtttagacctaaaatacatga

SEQ ID NO: 17274 - DNA, 25 bp, SARS Virus
tacgtttagacgcaaaatacatgat

SEQ ID NO: 17275 - DNA, 25 bp, SARS Virus
acgtttagacgtcaaatacatgatg

SEQ ID NO: 17276 - DNA, 25 bp, SARS Virus
cgtttagacgtacaatacatgatgg

SEQ ID NO: 17277 - DNA, 25 bp, SARS Virus
gtttagacgtaacatacatgatgga

SEQ ID NO: 17278 - DNA, 25 bp, SARS Virus
tttagacgtaaactacatgatggaa

SEQ ID NO: 17279 - DNA, 25 bp, SARS Virus
ttagacgtaaaacacatgatggaag

SEQ ID NO: 17280 - DNA, 25 bp, SARS Virus
tagacgtaaaatccatgatggaagt

SEQ ID NO: 17281 - DNA, 25 bp, SARS Virus
agacgtaaaatacatgatggaagtc

SEQ ID NO: 17282 - DNA, 25 bp, SARS Virus
gacgtaaaatacctgatggaagtct

SEQ ID NO: 17283 - DNA, 25 bp, SARS Virus
acgtaaaatacacgatggaagtctt

SEQ ID NO: 17284 - DNA, 25 bp, SARS Virus
cgtaaaatacatcatggaagtcttc

SEQ ID NO: 17285 - DNA, 25 bp, SARS Virus
gtaaaatacatgctggaagtcttcg

SEQ ID NO: 17286 - DNA, 25 bp, SARS Virus
taaaatacatgacggaagtcttcgt

SEQ ID NO: 17287 - DNA, 25 bp, SARS Virus
aaaatacatgatcgaagtcttcgtg

SEQ ID NO: 17288 - DNA, 25 bp, SARS Virus
aaatacatgatgcaagtcttcgtgg

SEQ ID NO: 17289 - DNA, 25 bp, SARS Virus
aatacatgatggcagtcttcgtgga

SEQ ID NO: 17290 - DNA, 25 bp, SARS Virus
atacatgatggacgtcttcgtggat

SEQ ID NO: 17291 - DNA, 25 bp, SARS Virus
tacatgatggaactcttcgtggatt

SEQ ID NO: 17292 - DNA, 25 bp, SARS Virus
acatgatggaagccttcgtggatta

SEQ ID NO: 17293 - DNA, 25 bp, SARS Virus
catgatggaagtcttcgtggattac

SEQ ID NO: 17294 - DNA, 25 bp, SARS Virus
atgatggaagtcctcgtggattacg

SEQ ID NO: 17295 - DNA, 25 bp, SARS Virus
tgatggaagtctccgtggattacga

SEQ ID NO: 17296 - DNA, 25 bp, SARS Virus
gatggaagtcttcgtggattacgat

SEQ ID NO: 17297 - DNA, 25 bp, SARS Virus
atggaagtcttcctggattacgatt

SEQ ID NO: 17298 - DNA, 25 bp, SARS Virus
tggaagtcttcgcggattacgattc

SEQ ID NO: 17299 - DNA, 25 bp, SARS Virus
ggaagtcttcgtcgattacgattcc

SEQ ID NO: 17300 - DNA, 25 bp, SARS Virus
gaagtcttcgtgcattacgattcct

SEQ ID NO: 17301 - DNA, 25 bp, SARS Virus
aagtcttcgtggcttacgattcctt

SEQ ID NO: 17302 - DNA, 25 bp, SARS Virus
agtcttcgtggactacgattccttc

SEQ ID NO: 17303 - DNA, 25 bp, SARS Virus
gtcttcgtggatcacgattccttct

SEQ ID NO: 17304 - DNA, 25 bp, SARS Virus
tcttcgtggattccgattccttctc

SEQ ID NO: 17305 - DNA, 25 bp, SARS Virus
cttcgtggattacgattccttctct

SEQ ID NO: 17306 - DNA, 25 bp, SARS Virus
ttcgtggattaccattccttctcta

SEQ ID NO: 17307 - DNA, 25 bp, SARS Virus
tcgtggattacgcttccttctctaa

SEQ ID NO: 17308 - DNA, 25 bp, SARS Virus
cgtggattacgactccttctctaag

SEQ ID NO: 17309 - DNA, 25 bp, SARS Virus
gtggattacgatcccttctctaaga

SEQ ID NO: 17310 - DNA, 25 bp, SARS Virus
tggattacgattccttctctaagat

SEQ ID NO: 17311 - DNA, 25 bp, SARS Virus
ggattacgattccttctctaagatc

SEQ ID NO: 17312 - DNA, 25 bp, SARS Virus
gattacgattccctctctaagatcc

SEQ ID NO: 17313 - DNA, 25 bp, SARS Virus
attacgattcctcctctaagatcct

SEQ ID NO: 17314 - DNA, 25 bp, SARS Virus
ttacgattccttctctaagatcctt

SEQ ID NO: 17315 - DNA, 25 bp, SARS Virus
tacgattccttccctaagatccttg

SEQ ID NO: 17316 - DNA, 25 bp, SARS Virus
acgattccttctctaagatccttga

SEQ ID NO: 17317 - DNA, 25 bp, SARS Virus
cgattccttctccaagatccttgac

SEQ ID NO: 17318 - DNA, 25 bp, SARS Virus
gattccttctctcagatccttgaca

SEQ ID NO: 17319 - DNA, 25 bp, SARS Virus
attccttctctacgatccttgacat

SEQ ID NO: 17320 - DNA, 25 bp, SARS Virus
ttccttctctaacatccttgacata

SEQ ID NO: 17321 - DNA, 25 bp, SARS Virus
tccttctctaagctccttgacatag

SEQ ID NO: 17322 - DNA, 25 bp, SARS Virus
ccttctctaagacccttgacatagg

SEQ ID NO: 17323 - DNA, 25 bp, SARS Virus
cttctctaagatccttgacatagga

SEQ ID NO: 17324 - DNA, 25 bp, SARS Virus
ttctctaagatccttgacataggac

SEQ ID NO: 17325 - DNA, 25 bp, SARS Virus
tctctaagatccctgacataggacc

SEQ ID NO: 17326 - DNA, 25 bp, SARS Virus
ctctaagatcctcgacataggacct

SEQ ID NO: 17327 - DNA, 25 bp, SARS Virus
tctaagatccttcacataggacctt

SEQ ID NO: 17328 - DNA, 25 bp, SARS Virus
ctaagatccttgccataggacctta

SEQ ID NO: 17329 - DNA, 25 bp, SARS Virus
taagatccttgacataggaccttaa

SEQ ID NO: 17330 - DNA, 25 bp, SARS Virus
aagatccttgacctaggaccttaaa

SEQ ID NO: 17331 - DNA, 25 bp, SARS Virus
agatccttgacacaggaccttaaac

SEQ ID NO: 17332 - DNA, 25 bp, SARS Virus
gatccttgacatcggaccttaaact

SEQ ID NO: 17333 - DNA, 25 bp, SARS Virus
atccttgacatacgaccttaaactc

SEQ ID NO: 17334 - DNA, 25 bp, SARS Virus
tccttgacatagcaccttaaactct

SEQ ID NO: 17335 - DNA, 25 bp, SARS Virus
ccttgacataggcccttaaactctc

SEQ ID NO: 17336 - DNA, 25 bp, SARS Virus
cttgacataggaccttaaactctct

SEQ ID NO: 17337 - DNA, 25 bp, SARS Virus
ttgacataggaccttaaactctctt

SEQ ID NO: 17338 - DNA, 25 bp, SARS Virus
tgacataggaccctaaactctcttt

SEQ ID NO: 17339 - DNA, 25 bp, SARS Virus
gacataggacctcaaactctcttta

SEQ ID NO: 17340 - DNA, 25 bp, SARS Virus
acataggaccttcaactctctttac

SEQ ID NO: 17341 - DNA, 25 bp, SARS Virus
cataggaccttacactctctttacg

SEQ ID NO: 17342 - DNA, 25 bp, SARS Virus
ataggaccttaacctctctttacga

SEQ ID NO: 17343 - DNA, 25 bp, SARS Virus
taggaccttaaactctctttacgaa

SEQ ID NO: 17344 - DNA, 25 bp, SARS Virus
aggaccttaaaccctctttacgaac

SEQ ID NO: 17345 - DNA, 25 bp, SARS Virus
ggaccttaaactctctttacgaacg

SEQ ID NO: 17346 - DNA, 25 bp, SARS Virus
gaccttaaactccctttacgaacga

SEQ ID NO: 17347 - DNA, 25 bp, SARS Virus
accttaaactctctttacgaacgag

SEQ ID NO: 17348 - DNA, 25 bp, SARS Virus
ccttaaactctccttacgaacgagt

SEQ ID NO: 17349 - DNA, 25 bp, SARS Virus
cttaaactctctctacgaacgagta

SEQ ID NO: 17350 - DNA, 25 bp, SARS Virus
ttaaactctcttcacgaacgagtac

SEQ ID NO: 17351 - DNA, 25 bp, SARS Virus
taaactctctttccgaacgagtacg

SEQ ID NO: 17352 - DNA, 25 bp, SARS Virus
aaactctctttacgaacgagtacga

SEQ ID NO: 17353 - DNA, 25 bp, SARS Virus
aactctctttaccaacgagtacgac

SEQ ID NO: 17354 - DNA, 25 bp, SARS Virus
actctctttacgcacgagtacgact

SEQ ID NO: 17355 - DNA, 25 bp, SARS Virus
ctctctttacgaccgagtacgactt

SEQ ID NO: 17356 - DNA, 25 bp, SARS Virus
tctctttacgaacgagtacgacttc

SEQ ID NO: 17357 - DNA, 25 bp, SARS Virus
ctctttacgaaccagtacgacttct

SEQ ID NO: 17358 - DNA, 25 bp, SARS Virus
tctttacgaacgcgtacgacttctc

SEQ ID NO: 17359 - DNA, 25 bp, SARS Virus
ctttacgaacgactacgacttctct

SEQ ID NO: 17360 - DNA, 25 bp, SARS Virus
tttacgaacgagcacgacttctctg

SEQ ID NO: 17361 - DNA, 25 bp, SARS Virus
ttacgaacgagtccgacttctctgt

SEQ ID NO: 17362 - DNA, 25 bp, SARS Virus
tacgaacgagtacgacttctctgtt

SEQ ID NO: 17363 - DNA, 25 bp, SARS Virus
acgaacgagtaccacttctctgttc

SEQ ID NO: 17364 - DNA, 25 bp, SARS Virus
cgaacgagtacgccttctctgttct

SEQ ID NO: 17365 - DNA, 25 bp, SARS Virus
gaacgagtacgacttctctgttctt

SEQ ID NO: 17366 - DNA, 25 bp, SARS Virus
aacgagtacgacctctctgttcttt

SEQ ID NO: 17367 - DNA, 25 bp, SARS Virus
acgagtacgactcctctgttctttt

SEQ ID NO: 17368 - DNA, 25 bp, SARS Virus
cgagtacgacttctctgttctttta

SEQ ID NO: 17369 - DNA, 25 bp, SARS Virus
gagtacgacttccctgttcttttaa

SEQ ID NO: 17370 - DNA, 25 bp, SARS Virus
agtacgacttctctgttcttttaat

SEQ ID NO: 17371 - DNA, 25 bp, SARS Virus
gtacgacttctccgttcttttaatt

SEQ ID NO: 17372 - DNA, 25 bp, SARS Virus
tacgacttctctcttcttttaatta

SEQ ID NO: 17373 - DNA, 25 bp, SARS Virus
acgacttctctgctcttttaattac

SEQ ID NO: 17374 - DNA, 25 bp, SARS Virus
cgacttctctgtccttttaattacg

SEQ ID NO: 17375 - DNA, 25 bp, SARS Virus
gacttctctgttcttttaattacgg

SEQ ID NO: 17376 - DNA, 25 bp, SARS Virus
acttctctgttcctttaattacgga

SEQ ID NO: 17377 - DNA, 25 bp, SARS Virus
cttctctgttctcttaattacggat

SEQ ID NO: 17378 - DNA, 25 bp, SARS Virus
ttctctgttcttctaattacggata

SEQ ID NO: 17379 - DNA, 25 bp, SARS Virus
tctctgttctttcaattacggatat

SEQ ID NO: 17380 - DNA, 25 bp, SARS Virus
ctctgttcttttcattacggatata

SEQ ID NO: 17381 - DNA, 25 bp, SARS Virus
tctgttcttttacttacggatatac

SEQ ID NO: 17382 - DNA, 25 bp, SARS Virus
ctgttcttttaactacggatatacg

SEQ ID NO: 17383 - DNA, 25 bp, SARS Virus
tgttcttttaatcacggatatacgt

SEQ ID NO: 17384 - DNA, 25 bp, SARS Virus
gttcttttaattccggatatacgta

SEQ ID NO: 17385 - DNA, 25 bp, SARS Virus
ttcttttaattacggatatacgtac

SEQ ID NO: 17386 - DNA, 25 bp, SARS Virus
tcttttaattaccgatatacgtacc

SEQ ID NO: 17387 - DNA, 25 bp, SARS Virus
cttttaattacgcatatacgtacct

SEQ ID NO: 17388 - DNA, 25 bp, SARS Virus
ttttaattacggctatacgtaccta

SEQ ID NO: 17389 - DNA, 25 bp, SARS Virus
tttaattacggacatacgtacctac

SEQ ID NO: 17390 - DNA, 25 bp, SARS Virus
ttaattacggatctacgtacctaca

SEQ ID NO: 17391 - DNA, 25 bp, SARS Virus
taattacggatacacgtacctacaa

SEQ ID NO: 17392 - DNA, 25 bp, SARS Virus
aattacggatatccgtacctacaat

SEQ ID NO: 17393 - DNA, 25 bp, SARS Virus
attacggatatacgtacctacaatc

SEQ ID NO: 17394 - DNA, 25 bp, SARS Virus
ttacggatatacctacctacaatct

SEQ ID NO: 17395 - DNA, 25 bp, SARS Virus
tacggatatacgcacctacaatctc

SEQ ID NO: 17396 - DNA, 25 bp, SARS Virus
acggatatacgtccctacaatctcg

SEQ ID NO: 17397 - DNA, 25 bp, SARS Virus
cggatatacgtacctacaatctcgg

SEQ ID NO: 17398 - DNA, 25 bp, SARS Virus
ggatatacgtacctacaatctcggt

SEQ ID NO: 17399 - DNA, 25 bp, SARS Virus
gatatacgtacccacaatctcggta

SEQ ID NO: 17400 - DNA, 25 bp, SARS Virus
atatacgtacctccaatctcggtat

SEQ ID NO: 17401 - DNA, 25 bp, SARS Virus
tatacgtacctacaatctcggtatt

SEQ ID NO: 17402 - DNA, 25 bp, SARS Virus
atacgtacctaccatctcggtatta

SEQ ID NO: 17403 - DNA, 25 bp, SARS Virus
tacgtacctacactctcggtattac

SEQ ID NO: 17404 - DNA, 25 bp, SARS Virus
acgtacctacaacctcggtattacc

SEQ ID NO: 17405 - DNA, 25 bp, SARS Virus
cgtacctacaatctcggtattaccg

SEQ ID NO: 17406 - DNA, 25 bp, SARS Virus
gtacctacaatcccggtattaccgt

SEQ ID NO: 17407 - DNA, 25 bp, SARS Virus
tacctacaatctcggtattaccgtt

SEQ ID NO: 17408 - DNA, 25 bp, SARS Virus
acctacaatctccgtattaccgttg

SEQ ID NO: 17409 - DNA, 25 bp, SARS Virus
cctacaatctcgctattaccgttgg

SEQ ID NO: 17410 - DNA, 25 bp, SARS Virus
ctacaatctcggcattaccgttggt

SEQ ID NO: 17411 - DNA, 25 bp, SARS Virus
tacaatctcggtcttaccgttggta

SEQ ID NO: 17412 - DNA, 25 bp, SARS Virus
acaatctcggtactaccgttggtag

SEQ ID NO: 17413 - DNA, 25 bp, SARS Virus
caatctcggtatcaccgttggtagg

SEQ ID NO: 17414 - DNA, 25 bp, SARS Virus
aatctcggtattcccgttggtaggt

SEQ ID NO: 17415 - DNA, 25 bp, SARS Virus
atctcggtattaccgttggtaggtt

SEQ ID NO: 17416 - DNA, 25 bp, SARS Virus
tctcggtattaccgttggtaggttg

SEQ ID NO: 17417 - DNA, 25 bp, SARS Virus
ctcggtattacccttggtaggttgc

SEQ ID NO: 17418 - DNA, 25 bp, SARS Virus
tcggtattaccgctggtaggttgca

SEQ ID NO: 17419 - DNA, 25 bp, SARS Virus
cggtattaccgtcggtaggttgcat

SEQ ID NO: 17420 - DNA, 25 bp, SARS Virus
ggtattaccgttcgtaggttgcatt

SEQ ID NO: 17421 - DNA, 25 bp, SARS Virus
gtattaccgttgctaggttgcattc

SEQ ID NO: 17422 - DNA, 25 bp, SARS Virus
tattaccgttggcaggttgcattca

SEQ ID NO: 17423 - DNA, 25 bp, SARS Virus
attaccgttggtcggttgcattcat

SEQ ID NO: 17424 - DNA, 25 bp, SARS Virus
ttaccgttggtacgttgcattcata

SEQ ID NO: 17425 - DNA, 25 bp, SARS Virus
taccgttggtagcttgcattcatat

SEQ ID NO: 17426 - DNA, 25 bp, SARS Virus
accgttggtaggctgcattcatatt

SEQ ID NO: 17427 - DNA, 25 bp, SARS Virus
ccgttggtaggtcgcattcatattt

SEQ ID NO: 17428 - DNA, 25 bp, SARS Virus
cgttggtaggttccattcatatttc

SEQ ID NO: 17429 - DNA, 25 bp, SARS Virus
gttggtaggttgcattcatatttcc

SEQ ID NO: 17430 - DNA, 25 bp, SARS Virus
ttggtaggttgccttcatatttcct

SEQ ID NO: 17431 - DNA, 25 bp, SARS Virus
tggtaggttgcactcatatttcctt

SEQ ID NO: 17432 - DNA, 25 bp, SARS Virus
ggtaggttgcatccatatttcctta

SEQ ID NO: 17433 - DNA, 25 bp, SARS Virus
gtaggttgcattcatatttccttaa

SEQ ID NO: 17434 - DNA, 25 bp, SARS Virus
taggttgcattcctatttccttaat

SEQ ID NO: 17435 - DNA, 25 bp, SARS Virus
aggttgcattcacatttccttaatt

SEQ ID NO: 17436 - DNA, 25 bp, SARS Virus
ggttgcattcatctttccttaattt

SEQ ID NO: 17437 - DNA, 25 bp, SARS Virus
gttgcattcatacttccttaatttt

SEQ ID NO: 17438 - DNA, 25 bp, SARS Virus
ttgcattcatatctccttaatttta

SEQ ID NO: 17439 - DNA, 25 bp, SARS Virus
tgcattcatattcccttaattttaa

SEQ ID NO: 17440 - DNA, 25 bp, SARS Virus
gcattcatatttccttaattttaag

SEQ ID NO: 17441 - DNA, 25 bp, SARS Virus
cattcatatttccttaattttaagt

SEQ ID NO: 17442 - DNA, 25 bp, SARS Virus
attcatatttccctaattttaagtt

SEQ ID NO: 17443 - DNA, 25 bp, SARS Virus
ttcatatttcctcaattttaagttc

SEQ ID NO: 17444 - DNA, 25 bp, SARS Virus
tcatatttccttcattttaagttct

SEQ ID NO: 17445 - DNA, 25 bp, SARS Virus
catatttccttacttttaagttctc

SEQ ID NO: 17446 - DNA, 25 bp, SARS Virus
atatttccttaactttaagttctcc

SEQ ID NO: 17447 - DNA, 25 bp, SARS Virus
tatttccttaatcttaagttctccc

SEQ ID NO: 17448 - DNA, 25 bp, SARS Virus
atttccttaattctaagttctcccg

SEQ ID NO: 17449 - DNA, 25 bp, SARS Virus
tttccttaatttcaagttctcccgt

SEQ ID NO: 17450 - DNA, 25 bp, SARS Virus
ttccttaattttcagttctcccgta

SEQ ID NO: 17451 - DNA, 25 bp, SARS Virus
tccttaattttacgttctcccgtag

SEQ ID NO: 17452 - DNA, 25 bp, SARS Virus
ccttaattttaacttctcccgtagc

SEQ ID NO: 17453 - DNA, 25 bp, SARS Virus
cttaattttaagctctcccgtagca

SEQ ID NO: 17454 - DNA, 25 bp, SARS Virus
ttaattttaagtcctcccgtagcaa

SEQ ID NO: 17455 - DNA, 25 bp, SARS Virus
taattttaagttctcccgtagcaac

SEQ ID NO: 17456 - DNA, 25 bp, SARS Virus
aattttaagttcccccgtagcaact

SEQ ID NO: 17457 - DNA, 25 bp, SARS Virus
attttaagttctcccgtagcaactg

SEQ ID NO: 17458 - DNA, 25 bp, SARS Virus
ttttaagttctcccgtagcaactga

SEQ ID NO: 17459 - DNA, 25 bp, SARS Virus
tttaagttctcccgtagcaactgat

SEQ ID NO: 17460 - DNA, 25 bp, SARS Virus
ttaagttctcccctagcaactgata

SEQ ID NO: 17461 - DNA, 25 bp, SARS Virus
taagttctcccgcagcaactgatac

SEQ ID NO: 17462 - DNA, 25 bp, SARS Virus
aagttctcccgtcgcaactgatacc

SEQ ID NO: 17463 - DNA, 25 bp, SARS Virus
agttctcccgtaccaactgatacca

SEQ ID NO: 17464 - DNA, 25 bp, SARS Virus
gttctcccgtagcaactgataccac

SEQ ID NO: 17465 - DNA, 25 bp, SARS Virus
ttctcccgtagccactgataccaca

SEQ ID NO: 17466 - DNA, 25 bp, SARS Virus
tctcccgtagcacctgataccacag

SEQ ID NO: 17467 - DNA, 25 bp, SARS Virus
ctcccgtagcaactgataccacagg

SEQ ID NO: 17468 - DNA, 25 bp, SARS Virus
tcccgtagcaaccgataccacaggc

SEQ ID NO: 17469 - DNA, 25 bp, SARS Virus
cccgtagcaactcataccacaggct

SEQ ID NO: 17470 - DNA, 25 bp, SARS Virus
ccgtagcaactgctaccacaggcta

SEQ ID NO: 17471 - DNA, 25 bp, SARS Virus
cgtagcaactgacaccacaggctaa

SEQ ID NO: 17472 - DNA, 25 bp, SARS Virus
gtagcaactgatcccacaggctaag

SEQ ID NO: 17473 - DNA, 25 bp, SARS Virus
tagcaactgataccacaggctaaga

SEQ ID NO: 17474 - DNA, 25 bp, SARS Virus
agcaactgataccacaggctaagaa

SEQ ID NO: 17475 - DNA, 25 bp, SARS Virus
gcaactgataccccaggctaagaag

SEQ ID NO: 17476 - DNA, 25 bp, SARS Virus
caactgataccacaggctaagaaga

SEQ ID NO: 17477 - DNA, 25 bp, SARS Virus
aactgataccaccggctaagaagaa

SEQ ID NO: 17478 - DNA, 25 bp, SARS Virus
actgataccacacgctaagaagaaa

SEQ ID NO: 17479 - DNA, 25 bp, SARS Virus
ctgataccacagcctaagaagaaaa

SEQ ID NO: 17480 - DNA, 25 bp, SARS Virus
tgataccacaggctaagaagaaaat

SEQ ID NO: 17481 - DNA, 25 bp, SARS Virus
gataccacaggccaagaagaaaata

SEQ ID NO: 17482 - DNA, 25 bp, SARS Virus
ataccacaggctcagaagaaaatat

SEQ ID NO: 17483 - DNA, 25 bp, SARS Virus
taccacaggctacgaagaaaatatg

SEQ ID NO: 17484 - DNA, 25 bp, SARS Virus
accacaggctaacaagaaaatatga

SEQ ID NO: 17485 - DNA, 25 bp, SARS Virus
ccacaggctaagcagaaaatatgat

SEQ ID NO: 17486 - DNA, 25 bp, SARS Virus
cacaggctaagacgaaaatatgatc

SEQ ID NO: 17487 - DNA, 25 bp, SARS Virus
acaggctaagaacaaaatatgatca

SEQ ID NO: 17488 - DNA, 25 bp, SARS Virus
caggctaagaagcaaatatgatcat

SEQ ID NO: 17489 - DNA, 25 bp, SARS Virus
aggctaagaagacaatatgatcatt

SEQ ID NO: 17490 - DNA, 25 bp, SARS Virus
ggctaagaagaacatatgatcattt

SEQ ID NO: 17491 - DNA, 25 bp, SARS Virus
gctaagaagaaactatgatcatttc

SEQ ID NO: 17492 - DNA, 25 bp, SARS Virus
ctaagaagaaaacatgatcatttct

SEQ ID NO: 17493 - DNA, 25 bp, SARS Virus
taagaagaaaatctgatcatttctc

SEQ ID NO: 17494 - DNA, 25 bp, SARS Virus
aagaagaaaatacgatcatttctcg

SEQ ID NO: 17495 - DNA, 25 bp, SARS Virus
agaagaaaatatcatcatttctcgg

SEQ ID NO: 17496 - DNA, 25 bp, SARS Virus
gaagaaaatatgctcatttctcgga

SEQ ID NO: 17497 - DNA, 25 bp, SARS Virus
aagaaaatatgaccatttctcggac

SEQ ID NO: 17498 - DNA, 25 bp, SARS Virus
agaaaatatgatcatttctcggaca

SEQ ID NO: 17499 - DNA, 25 bp, SARS Virus
gaaaatatgatcctttctcggacat

SEQ ID NO: 17500 - DNA, 25 bp, SARS Virus
aaaatatgatcacttctcggacatc

SEQ ID NO: 17501 - DNA, 25 bp, SARS Virus
aaatatgatcatctctcggacatcg

SEQ ID NO: 17502 - DNA, 25 bp, SARS Virus
aatatgatcattcctcggacatcga

SEQ ID NO: 17503 - DNA, 25 bp, SARS Virus
atatgatcatttctcggacatcgaa

SEQ ID NO: 17504 - DNA, 25 bp, SARS Virus
tatgatcatttcccggacatcgaag

SEQ ID NO: 17505 - DNA, 25 bp, SARS Virus
atgatcatttctcggacatcgaaga

SEQ ID NO: 17506 - DNA, 25 bp, SARS Virus
tgatcatttctccgacatcgaagat

SEQ ID NO: 17507 - DNA, 25 bp, SARS Virus
gatcatttctcgcacatcgaagata

SEQ ID NO: 17508 - DNA, 25 bp, SARS Virus
atcatttctcggccatcgaagataa

SEQ ID NO: 17509 - DNA, 25 bp, SARS Virus
tcatttctcggacatcgaagataat

SEQ ID NO: 17510 - DNA, 25 bp, SARS Virus
catttctcggacctcgaagataata

SEQ ID NO: 17511 - DNA, 25 bp, SARS Virus
atttctcggacaccgaagataataa

SEQ ID NO: 17512 - DNA, 25 bp, SARS Virus
tttctcggacatcgaagataataat

SEQ ID NO: 17513 - DNA, 25 bp, SARS Virus
ttctcggacatccaagataataatg

SEQ ID NO: 17514 - DNA, 25 bp, SARS Virus
tctcggacatcgcagataataatgc

SEQ ID NO: 17515 - DNA, 25 bp, SARS Virus
ctcggacatcgacgataataatgct

SEQ ID NO: 17516 - DNA, 25 bp, SARS Virus
tcggacatcgaacataataatgctt

SEQ ID NO: 17517 - DNA, 25 bp, SARS Virus
cggacatcgaagctaataatgcttc

SEQ ID NO: 17518 - DNA, 25 bp, SARS Virus
ggacatcgaagacaataatgcttcg

SEQ ID NO: 17519 - DNA, 25 bp, SARS Virus
gacatcgaagatcataatgcttcga

SEQ ID NO: 17520 - DNA, 25 bp, SARS Virus
acatcgaagatactaatgcttcgac

SEQ ID NO: 17521 - DNA, 25 bp, SARS Virus
catcgaagataacaatgcttcgact

SEQ ID NO: 17522 - DNA, 25 bp, SARS Virus
atcgaagataatcatgcttcgactt

SEQ ID NO: 17523 - DNA, 25 bp, SARS Virus
tcgaagataatactgcttcgacttg

SEQ ID NO: 17524 - DNA, 25 bp, SARS Virus
cgaagataataacgcttcgacttga

SEQ ID NO: 17525 - DNA, 25 bp, SARS Virus
gaagataataatccttcgacttgag

SEQ ID NO: 17526 - DNA, 25 bp, SARS Virus
aagataataatgcttcgacttgaga

SEQ ID NO: 17527 - DNA, 25 bp, SARS Virus
agataataatgcctcgacttgagag

SEQ ID NO: 17528 - DNA, 25 bp, SARS Virus
gataataatgctccgacttgagaga

SEQ ID NO: 17529 - DNA, 25 bp, SARS Virus
ataataatgcttcgacttgagagat

SEQ ID NO: 17530 - DNA, 25 bp, SARS Virus
taataatgcttccacttgagagatt

SEQ ID NO: 17531 - DNA, 25 bp, SARS Virus
aataatgcttcgccttgagagattt

SEQ ID NO: 17532 - DNA, 25 bp, SARS Virus
ataatgcttcgacttgagagattta

SEQ ID NO: 17533 - DNA, 25 bp, SARS Virus
taatgcttcgacctgagagatttac

SEQ ID NO: 17534 - DNA, 25 bp, SARS Virus
aatgcttcgactcgagagatttact

SEQ ID NO: 17535 - DNA, 25 bp, SARS Virus
atgcttcgacttcagagatttactc

SEQ ID NO: 17536 - DNA, 25 bp, SARS Virus
tgcttcgacttgcgagatttactcg

SEQ ID NO: 17537 - DNA, 25 bp, SARS Virus
gcttcgacttgacagatttactcgg

SEQ ID NO: 17538 - DNA, 25 bp, SARS Virus
cttcgacttgagcgatttactcggc

SEQ ID NO: 17539 - DNA, 25 bp, SARS Virus
ttcgacttgagacatttactcggcg

SEQ ID NO: 17540 - DNA, 25 bp, SARS Virus
tcgacttgagagctttactcggcga

SEQ ID NO: 17541 - DNA, 25 bp, SARS Virus
cgacttgagagacttactcggcgaa

SEQ ID NO: 17542 - DNA, 25 bp, SARS Virus
gacttgagagatctactcggcgaac

SEQ ID NO: 17543 - DNA, 25 bp, SARS Virus
acttgagagattcactcggcgaaca

SEQ ID NO: 17544 - DNA, 25 bp, SARS Virus
cttgagagatttcctcggcgaacag

SEQ ID NO: 17545 - DNA, 25 bp, SARS Virus
ttgagagatttactcggcgaacagt

SEQ ID NO: 17546 - DNA, 25 bp, SARS Virus
tgagagatttacccggcgaacagtg

SEQ ID NO: 17547 - DNA, 25 bp, SARS Virus
gagagatttactcggcgaacagtgt

SEQ ID NO: 17548 - DNA, 25 bp, SARS Virus
agagatttactccgcgaacagtgtt

SEQ ID NO: 17549 - DNA, 25 bp, SARS Virus
gagatttactcgccgaacagtgtta

SEQ ID NO: 17550 - DNA, 25 bp, SARS Virus
agatttactcggcgaacagtgttac

SEQ ID NO: 17551 - DNA, 25 bp, SARS Virus
gatttactcggccaacagtgttacg

SEQ ID NO: 17552 - DNA, 25 bp, SARS Virus
atttactcggcgcacagtgttacgg

SEQ ID NO: 17553 - DNA, 25 bp, SARS Virus
tttactcggcgaccagtgttacggt

SEQ ID NO: 17554 - DNA, 25 bp, SARS Virus
ttactcggcgaacagtgttacggtt

SEQ ID NO: 17555 - DNA, 25 bp, SARS Virus
tactcggcgaaccgtgttacggtta

SEQ ID NO: 17556 - DNA, 25 bp, SARS Virus
actcggcgaacactgttacggttaa

SEQ ID NO: 17557 - DNA, 25 bp, SARS Virus
ctcggcgaacagcgttacggttaac

SEQ ID NO: 17558 - DNA, 25 bp, SARS Virus
tcggcgaacagtcttacggttaacc

SEQ ID NO: 17559 - DNA, 25 bp, SARS Virus
cggcgaacagtgctacggttaacca

SEQ ID NO: 17560 - DNA, 25 bp, SARS Virus
ggcgaacagtgtcacggttaaccaa

SEQ ID NO: 17561 - DNA, 25 bp, SARS Virus
gcgaacagtgttccggttaaccaat

SEQ ID NO: 17562 - DNA, 25 bp, SARS Virus
cgaacagtgttacggttaaccaata

SEQ ID NO: 17563 - DNA, 25 bp, SARS Virus
gaacagtgttaccgttaaccaatac

SEQ ID NO: 17564 - DNA, 25 bp, SARS Virus
aacagtgttacgcttaaccaataca

SEQ ID NO: 17565 - DNA, 25 bp, SARS Virus
acagtgttacggctaaccaatacac

SEQ ID NO: 17566 - DNA, 25 bp, SARS Virus
cagtgttacggtcaaccaatacact

SEQ ID NO: 17567 - DNA, 25 bp, SARS Virus
agtgttacggttcaccaatacactg

SEQ ID NO: 17568 - DNA, 25 bp, SARS Virus
gtgttacggttacccaatacactgt

SEQ ID NO: 17569 - DNA, 25 bp, SARS Virus
tgttacggttaaccaatacactgtg

SEQ ID NO: 17570 - DNA, 25 bp, SARS Virus
gttacggttaaccaatacactgtgt

SEQ ID NO: 17571 - DNA, 25 bp, SARS Virus
ttacggttaacccatacactgtgta

SEQ ID NO: 17572 - DNA, 25 bp, SARS Virus
tacggttaaccactacactgtgtac

SEQ ID NO: 17573 - DNA, 25 bp, SARS Virus
acggttaaccaacacactgtgtacc

SEQ ID NO: 17574 - DNA, 25 bp, SARS Virus
cggttaaccaatccactgtgtacca

SEQ ID NO: 17575 - DNA, 25 bp, SARS Virus
ggttaaccaatacactgtgtaccaa

SEQ ID NO: 17576 - DNA, 25 bp, SARS Virus
gttaaccaataccctgtgtaccaaa

SEQ ID NO: 17577 - DNA, 25 bp, SARS Virus
ttaaccaatacactgtgtaccaaaa

SEQ ID NO: 17578 - DNA, 25 bp, SARS Virus
taaccaatacaccgtgtaccaaaat

SEQ ID NO: 17579 - DNA, 25 bp, SARS Virus
aaccaatacactctgtaccaaaatt

SEQ ID NO: 17580 - DNA, 25 bp, SARS Virus
accaatacactgcgtaccaaaatta

SEQ ID NO: 17581 - DNA, 25 bp, SARS Virus
ccaatacactgtctaccaaaattag

SEQ ID NO: 17582 - DNA, 25 bp, SARS Virus
caatacactgtgcaccaaaattaga

SEQ ID NO: 17583 - DNA, 25 bp, SARS Virus
aatacactgtgtcccaaaattagaa

SEQ ID NO: 17584 - DNA, 25 bp, SARS Virus
atacactgtgtaccaaaattagaac

SEQ ID NO: 17585 - DNA, 25 bp, SARS Virus
tacactgtgtaccaaaattagaact

SEQ ID NO: 17586 - DNA, 25 bp, SARS Virus
acactgtgtacccaaattagaactt

SEQ ID NO: 17587 - DNA, 25 bp, SARS Virus
cactgtgtaccacaattagaacttc

SEQ ID NO: 17588 - DNA, 25 bp, SARS Virus
actgtgtaccaacattagaacttct

SEQ ID NO: 17589 - DNA, 25 bp, SARS Virus
ctgtgtaccaaacttagaacttctc

SEQ ID NO: 17590 - DNA, 25 bp, SARS Virus
tgtgtaccaaaactagaacttctcc

SEQ ID NO: 17591 - DNA, 25 bp, SARS Virus
gtgtaccaaaatcagaacttctccg

SEQ ID NO: 17592 - DNA, 25 bp, SARS Virus
tgtaccaaaattcgaacttctccga

SEQ ID NO: 17593 - DNA, 25 bp, SARS Virus
gtaccaaaattacaacttctccgac

SEQ ID NO: 17594 - DNA, 25 bp, SARS Virus
taccaaaattagcacttctccgacg

SEQ ID NO: 17595 - DNA, 25 bp, SARS Virus
accaaaattagaccttctccgacgc

SEQ ID NO: 17596 - DNA, 25 bp, SARS Virus
ccaaaattagaacttctccgacgcg

SEQ ID NO: 17597 - DNA, 25 bp, SARS Virus
caaaattagaacctctccgacgcgc

SEQ ID NO: 17598 - DNA, 25 bp, SARS Virus
aaaattagaactcctccgacgcgcg

SEQ ID NO: 17599 - DNA, 25 bp, SARS Virus
aaattagaacttctccgacgcgcga

SEQ ID NO: 17600 - DNA, 25 bp, SARS Virus
aattagaacttccccgacgcgcgac

SEQ ID NO: 17601 - DNA, 25 bp, SARS Virus
attagaacttctccgacgcgcgaca

SEQ ID NO: 17602 - DNA, 25 bp, SARS Virus
ttagaacttctccgacgcgcgacat

SEQ ID NO: 17603 - DNA, 25 bp, SARS Virus
tagaacttctcccacgcgcgacata

SEQ ID NO: 17604 - DNA, 25 bp, SARS Virus
agaacttctccgccgcgcgacatac

SEQ ID NO: 17605 - DNA, 25 bp, SARS Virus
gaacttctccgacgcgcgacatacg

SEQ ID NO: 17606 - DNA, 25 bp, SARS Virus
aacttctccgacccgcgacatacgc

SEQ ID NO: 17607 - DNA, 25 bp, SARS Virus
acttctccgacgcgcgacatacgca

SEQ ID NO: 17608 - DNA, 25 bp, SARS Virus
cttctccgacgcccgacatacgcaa

SEQ ID NO: 17609 - DNA, 25 bp, SARS Virus
ttctccgacgcgcgacatacgcaag

SEQ ID NO: 17610 - DNA, 25 bp, SARS Virus
tctccgacgcgccacatacgcaaga

SEQ ID NO: 17611 - DNA, 25 bp, SARS Virus
ctccgacgcgcgccatacgcaagag

SEQ ID NO: 17612 - DNA, 25 bp, SARS Virus
tccgacgcgcgacatacgcaagaga

SEQ ID NO: 17613 - DNA, 25 bp, SARS Virus
ccgacgcgcgacctacgcaagagaa

SEQ ID NO: 17614 - DNA, 25 bp, SARS Virus
cgacgcgcgacacacgcaagagaat

SEQ ID NO: 17615 - DNA, 25 bp, SARS Virus
gacgcgcgacatccgcaagagaatt

SEQ ID NO: 17616 - DNA, 25 bp, SARS Virus
acgcgcgacatacgcaagagaattt

SEQ ID NO: 17617 - DNA, 25 bp, SARS Virus
cgcgcgacatacccaagagaatttc

SEQ ID NO: 17618 - DNA, 25 bp, SARS Virus
gcgcgacatacgcaagagaatttcg

SEQ ID NO: 17619 - DNA, 25 bp, SARS Virus
cgcgacatacgccagagaatttcga

SEQ ID NO: 17620 - DNA, 25 bp, SARS Virus
gcgacatacgcacgagaatttcgag

SEQ ID NO: 17621 - DNA, 25 bp, SARS Virus
cgacatacgcaacagaatttcgagg

SEQ ID NO: 17622 - DNA, 25 bp, SARS Virus
gacatacgcaagcgaatttcgagga

SEQ ID NO: 17623 - DNA, 25 bp, SARS Virus
acatacgcaagacaatttcgaggac

SEQ ID NO: 17624 - DNA, 25 bp, SARS Virus
catacgcaagagcatttcgaggacg

SEQ ID NO: 17625 - DNA, 25 bp, SARS Virus
atacgcaagagactttcgaggacgg

SEQ ID NO: 17626 - DNA, 25 bp, SARS Virus
tacgcaagagaacttcgaggacggc

SEQ ID NO: 17627 - DNA, 25 bp, SARS Virus
acgcaagagaatctcgaggacggca

SEQ ID NO: 17628 - DNA, 25 bp, SARS Virus
cgcaagagaattccgaggacggcat

SEQ ID NO: 17629 - DNA, 25 bp, SARS Virus
gcaagagaatttcgaggacggcatc

SEQ ID NO: 17630 - DNA, 25 bp, SARS Virus
caagagaatttccaggacggcatca

SEQ ID NO: 17631 - DNA, 25 bp, SARS Virus
aagagaatttcgcggacggcatcac

SEQ ID NO: 17632 - DNA, 25 bp, SARS Virus
agagaatttcgacgacggcatcaca

SEQ ID NO: 17633 - DNA, 25 bp, SARS Virus
gagaatttcgagcacggcatcacag

SEQ ID NO: 17634 - DNA, 25 bp, SARS Virus
agaatttcgaggccggcatcacagt

SEQ ID NO: 17635 - DNA, 25 bp, SARS Virus
gaatttcgaggacggcatcacagtc

SEQ ID NO: 17636 - DNA, 25 bp, SARS Virus
aatttcgaggaccgcatcacagtca

SEQ ID NO: 17637 - DNA, 25 bp, SARS Virus
atttcgaggacgccatcacagtcat

SEQ ID NO: 17638 - DNA, 25 bp, SARS Virus
tttcgaggacggcatcacagtcata

SEQ ID NO: 17639 - DNA, 25 bp, SARS Virus
ttcgaggacggcctcacagtcatag

SEQ ID NO: 17640 - DNA, 25 bp, SARS Virus
tcgaggacggcaccacagtcatagt

SEQ ID NO: 17641 - DNA, 25 bp, SARS Virus
cgaggacggcatcacagtcatagta

SEQ ID NO: 17642 - DNA, 25 bp, SARS Virus
gaggacggcatcccagtcatagtag

SEQ ID NO: 17643 - DNA, 25 bp, SARS Virus
aggacggcatcacagtcatagtagt

SEQ ID NO: 17644 - DNA, 25 bp, SARS Virus
ggacggcatcaccgtcatagtagtg

SEQ ID NO: 17645 - DNA, 25 bp, SARS Virus
gacggcatcacactcatagtagtgg

SEQ ID NO: 17646 - DNA, 25 bp, SARS Virus
acggcatcacagccatagtagtggt

SEQ ID NO: 17647 - DNA, 25 bp, SARS Virus
cggcatcacagtcatagtagtggtc

SEQ ID NO: 17648 - DNA, 25 bp, SARS Virus
ggcatcacagtcctagtagtggtct

SEQ ID NO: 17649 - DNA, 25 bp, SARS Virus
gcatcacagtcacagtagtggtcta

SEQ ID NO: 17650 - DNA, 25 bp, SARS Virus
catcacagtcatcgtagtggtctac

SEQ ID NO: 17651 - DNA, 25 bp, SARS Virus
atcacagtcatactagtggtctacg

SEQ ID NO: 17652 - DNA, 25 bp, SARS Virus
tcacagtcatagcagtggtctacga

SEQ ID NO: 17653 - DNA, 25 bp, SARS Virus
cacagtcatagtcgtggtctacgac

SEQ ID NO: 17654 - DNA, 25 bp, SARS Virus
acagtcatagtactggtctacgaca

SEQ ID NO: 17655 - DNA, 25 bp, SARS Virus
cagtcatagtagcggtctacgacaa

SEQ ID NO: 17656 - DNA, 25 bp, SARS Virus
agtcatagtagtcgtctacgacaat

SEQ ID NO: 17657 - DNA, 25 bp, SARS Virus
gtcatagtagtgctctacgacaatg

SEQ ID NO: 17658 - DNA, 25 bp, SARS Virus
tcatagtagtggcctacgacaatga

SEQ ID NO: 17659 - DNA, 25 bp, SARS Virus
catagtagtggtctacgacaatgat

SEQ ID NO: 17660 - DNA, 25 bp, SARS Virus
atagtagtggtccacgacaatgatg

SEQ ID NO: 17661 - DNA, 25 bp, SARS Virus
tagtagtggtctccgacaatgatgt

SEQ ID NO: 17662 - DNA, 25 bp, SARS Virus
agtagtggtctacgacaatgatgta

SEQ ID NO: 17663 - DNA, 25 bp, SARS Virus
gtagtggtctaccacaatgatgtat

SEQ ID NO: 17664 - DNA, 25 bp, SARS Virus
tagtggtctacgccaatgatgtata

SEQ ID NO: 17665 - DNA, 25 bp, SARS Virus
agtggtctacgacaatgatgtatat

SEQ ID NO: 17666 - DNA, 25 bp, SARS Virus
gtggtctacgaccatgatgtatatt

SEQ ID NO: 17667 - DNA, 25 bp, SARS Virus
tggtctacgacactgatgtatatta

SEQ ID NO: 17668 - DNA, 25 bp, SARS Virus
ggtctacgacaacgatgtatattac

SEQ ID NO: 17669 - DNA, 25 bp, SARS Virus
gtctacgacaatcatgtatattacc

SEQ ID NO: 17670 - DNA, 25 bp, SARS Virus
tctacgacaatgctgtatattacct

SEQ ID NO: 17671 - DNA, 25 bp, SARS Virus
ctacgacaatgacgtatattaccta

SEQ ID NO: 17672 - DNA, 25 bp, SARS Virus
tacgacaatgatctatattacctat

SEQ ID NO: 17673 - DNA, 25 bp, SARS Virus
acgacaatgatgcatattacctatg

SEQ ID NO: 17674 - DNA, 25 bp, SARS Virus
cgacaatgatgtctattacctatgg

SEQ ID NO: 17675 - DNA, 25 bp, SARS Virus
gacaatgatgtacattacctatgga

SEQ ID NO: 17676 - DNA, 25 bp, SARS Virus
acaatgatgtatcttacctatggag

SEQ ID NO: 17677 - DNA, 25 bp, SARS Virus
caatgatgtatactacctatggagt

SEQ ID NO: 17678 - DNA, 25 bp, SARS Virus
aatgatgtatatcacctatggagtg

SEQ ID NO: 17679 - DNA, 25 bp, SARS Virus
atgatgtatattccctatggagtga

SEQ ID NO: 17680 - DNA, 25 bp, SARS Virus
tgatgtatattacctatggagtgaa

SEQ ID NO: 17681 - DNA, 25 bp, SARS Virus
gatgtatattacctatggagtgaag

SEQ ID NO: 17682 - DNA, 25 bp, SARS Virus
atgtatattacccatggagtgaagc

SEQ ID NO: 17683 - DNA, 25 bp, SARS Virus
tgtatattacctctggagtgaagca

SEQ ID NO: 17684 - DNA, 25 bp, SARS Virus
gtatattacctacggagtgaagcag

SEQ ID NO: 17685 - DNA, 25 bp, SARS Virus
tatattacctatcgagtgaagcagt

SEQ ID NO: 17686 - DNA, 25 bp, SARS Virus
atattacctatgcagtgaagcagta

SEQ ID NO: 17687 - DNA, 25 bp, SARS Virus
tattacctatggcgtgaagcagtag

SEQ ID NO: 17688 - DNA, 25 bp, SARS Virus
attacctatggactgaagcagtagt

SEQ ID NO: 17689 - DNA, 25 bp, SARS Virus
ttacctatggagcgaagcagtagtt

SEQ ID NO: 17690 - DNA, 25 bp, SARS Virus
tacctatggagtcaagcagtagttt

SEQ ID NO: 17691 - DNA, 25 bp, SARS Virus
acctatggagtgcagcagtagtttc

SEQ ID NO: 17692 - DNA, 25 bp, SARS Virus
cctatggagtgacgcagtagtttct

SEQ ID NO: 17693 - DNA, 25 bp, SARS Virus
ctatggagtgaaccagtagtttctg

SEQ ID NO: 17694 - DNA, 25 bp, SARS Virus
tatggagtgaagcagtagtttctgt

SEQ ID NO: 17695 - DNA, 25 bp, SARS Virus
atggagtgaagccgtagtttctgta

SEQ ID NO: 17696 - DNA, 25 bp, SARS Virus
tggagtgaagcactagtttctgtag

SEQ ID NO: 17697 - DNA, 25 bp, SARS Virus
tggtgcatgggagctgttcctacac

SEQ ID NO: 17698 - DNA, 25 bp, SARS Virus
ggtgcatgggacgtgttcctacacg

SEQ ID NO: 17699 - DNA, 25 bp, SARS Virus
gtgcatgggaccggttcctacacga

SEQ ID NO: 17700 - DNA, 25 bp, SARS Virus
tgcatgggacctgttcctacacgac

SEQ ID NO: 17701 - DNA, 25 bp, SARS Virus
gcatgggacctggtcctacacgacc

SEQ ID NO: 17702 - DNA, 25 bp, SARS Virus
catgggacctgtgcctacacgacca

SEQ ID NO: 17703 - DNA, 25 bp, SARS Virus
atgggacctgttgctacacgaccaa

SEQ ID NO: 17704 - DNA, 25 bp, SARS Virus
tgggacctgttcgtacacgaccaat

SEQ ID NO: 17705 - DNA, 25 bp, SARS Virus
gggacctgttccgacacgaccaata

SEQ ID NO: 17706 - DNA, 25 bp, SARS Virus
ggacctgttcctgcacgaccaatat

SEQ ID NO: 17707 - DNA, 25 bp, SARS Virus
gacctgttcctagacgaccaatatg

SEQ ID NO: 17708 - DNA, 25 bp, SARS Virus
acctgttcctacgcgaccaatatgt

SEQ ID NO: 17709 - DNA, 25 bp, SARS Virus
cctgttcctacaggaccaatatgtg

SEQ ID NO: 17710 - DNA, 25 bp, SARS Virus
ctgttcctacacgaccaatatgtga

SEQ ID NO: 17711 - DNA, 25 bp, SARS Virus
tgttcctacacggccaatatgtgaa

SEQ ID NO: 17712 - DNA, 25 bp, SARS Virus
gttcctacacgagcaatatgtgaac

SEQ ID NO: 17713 - DNA, 25 bp, SARS Virus
ttcctacacgacgaatatgtgaact

SEQ ID NO: 17714 - DNA, 25 bp, SARS Virus
tcctacacgaccgatatgtgaactc

SEQ ID NO: 17715 - DNA, 25 bp, SARS Virus
cctacacgaccagtatgtgaactcc

SEQ ID NO: 17716 - DNA, 25 bp, SARS Virus
ctacacgaccaagatgtgaactcct

SEQ ID NO: 17717 - DNA, 25 bp, SARS Virus
tacacgaccaatgtgtgaactcctt

SEQ ID NO: 17718 - DNA, 25 bp, SARS Virus
acacgaccaataggtgaactccttc

SEQ ID NO: 17719 - DNA, 25 bp, SARS Virus
cacgaccaatatgtgaactccttcg

SEQ ID NO: 17720 - DNA, 25 bp, SARS Virus
acgaccaatatgggaactccttcga

SEQ ID NO: 17721 - DNA, 25 bp, SARS Virus
cgaccaatatgtgaactccttcgat

SEQ ID NO: 17722 - DNA, 25 bp, SARS Virus
gaccaatatgtggactccttcgatt

SEQ ID NO: 17723 - DNA, 25 bp, SARS Virus
accaatatgtgagctccttcgattc

SEQ ID NO: 17724 - DNA, 25 bp, SARS Virus
ccaatatgtgaagtccttcgattct

SEQ ID NO: 17725 - DNA, 25 bp, SARS Virus
caatatgtgaacgccttcgattctg

SEQ ID NO: 17726 - DNA, 25 bp, SARS Virus
aatatgtgaactgcttcgattctga

SEQ ID NO: 17727 - DNA, 25 bp, SARS Virus
atatgtgaactcgttcgattctgac

SEQ ID NO: 17728 - DNA, 25 bp, SARS Virus
tatgtgaactccgtcgattctgacg

SEQ ID NO: 17729 - DNA, 25 bp, SARS Virus
atgtgaactcctgcgattctgacga

SEQ ID NO: 17730 - DNA, 25 bp, SARS Virus
tgtgaactccttggattctgacgag

SEQ ID NO: 17731 - DNA, 25 bp, SARS Virus
gtgaactccttcgattctgacgaga

SEQ ID NO: 17732 - DNA, 25 bp, SARS Virus
tgaactccttcggttctgacgagaa

SEQ ID NO: 17733 - DNA, 25 bp, SARS Virus
gaactccttcgagtctgacgagaat

SEQ ID NO: 17734 - DNA, 25 bp, SARS Virus
aactccttcgatgctgacgagaatt

SEQ ID NO: 17735 - DNA, 25 bp, SARS Virus
actccttcgattgtgacgagaattc

SEQ ID NO: 17736 - DNA, 25 bp, SARS Virus
ctccttcgattcggacgagaattct

SEQ ID NO: 17737 - DNA, 25 bp, SARS Virus
tccttcgattctgacgagaattctt

SEQ ID NO: 17738 - DNA, 25 bp, SARS Virus
ccttcgattctggcgagaattcttt

SEQ ID NO: 17739 - DNA, 25 bp, SARS Virus
cttcgattctgaggagaattcttta

SEQ ID NO: 17740 - DNA, 25 bp, SARS Virus
ttcgattctgacgagaattctttac

SEQ ID NO: 17741 - DNA, 25 bp, SARS Virus
tcgattctgacgggaattctttacg

SEQ ID NO: 17742 - DNA, 25 bp, SARS Virus
cgattctgacgagaattctttacgt

SEQ ID NO: 17743 - DNA, 25 bp, SARS Virus
gattctgacgaggattctttacgtt

SEQ ID NO: 17744 - DNA, 25 bp, SARS Virus
attctgacgagagttctttacgttt

SEQ ID NO: 17745 - DNA, 25 bp, SARS Virus
ttctgacgagaagtctttacgttta

SEQ ID NO: 17746 - DNA, 25 bp, SARS Virus
tctgacgagaatgctttacgtttag

SEQ ID NO: 17747 - DNA, 25 bp, SARS Virus
ctgacgagaattgtttacgtttaga

SEQ ID NO: 17748 - DNA, 25 bp, SARS Virus
tgacgagaattcgttacgtttagac

SEQ ID NO: 17749 - DNA, 25 bp, SARS Virus
gacgagaattctgtacgtttagacg

SEQ ID NO: 17750 - DNA, 25 bp, SARS Virus
acgagaattcttgacgtttagacgt

SEQ ID NO: 17751 - DNA, 25 bp, SARS Virus
cgagaattctttgcgtttagacgta

SEQ ID NO: 17752 - DNA, 25 bp, SARS Virus
gagaattctttaggtttagacgtaa

SEQ ID NO: 17753 - DNA, 25 bp, SARS Virus
agaattctttacgtttagacgtaaa

SEQ ID NO: 17754 - DNA, 25 bp, SARS Virus
gaattctttacggttagacgtaaaa

SEQ ID NO: 17755 - DNA, 25 bp, SARS Virus
aattctttacgtgtagacgtaaaat

SEQ ID NO: 17756 - DNA, 25 bp, SARS Virus
attctttacgttgagacgtaaaata

SEQ ID NO: 17757 - DNA, 25 bp, SARS Virus
ttctttacgtttggacgtaaaatac

SEQ ID NO: 17758 - DNA, 25 bp, SARS Virus
tctttacgtttagacgtaaaataca

SEQ ID NO: 17759 - DNA, 25 bp, SARS Virus
ctttacgtttaggcgtaaaatacat

SEQ ID NO: 17760 - DNA, 25 bp, SARS Virus
tttacgtttagaggtaaaatacatg

SEQ ID NO: 17761 - DNA, 25 bp, SARS Virus
ttacgtttagacgtaaaatacatga

SEQ ID NO: 17762 - DNA, 25 bp, SARS Virus
tacgtttagacggaaaatacatgat

SEQ ID NO: 17763 - DNA, 25 bp, SARS Virus
acgtttagacgtgaaatacatgatg

SEQ ID NO: 17764 - DNA, 25 bp, SARS Virus
cgtttagacgtagaatacatgatgg

SEQ ID NO: 17765 - DNA, 25 bp, SARS Virus
gtttagacgtaagatacatgatgga

SEQ ID NO: 17766 - DNA, 25 bp, SARS Virus
tttagacgtaaagtacatgatggaa

SEQ ID NO: 17767 - DNA, 25 bp, SARS Virus
ttagacgtaaaagacatgatggaag

SEQ ID NO: 17768 - DNA, 25 bp, SARS Virus
tagacgtaaaatgcatgatggaagt

SEQ ID NO: 17769 - DNA, 25 bp, SARS Virus
agacgtaaaatagatgatggaagtc

SEQ ID NO: 17770 - DNA, 25 bp, SARS Virus
gacgtaaaatacgtgatggaagtct

SEQ ID NO: 17771 - DNA, 25 bp, SARS Virus
acgtaaaatacaggatggaagtctt

SEQ ID NO: 17772 - DNA, 25 bp, SARS Virus
cgtaaaatacatgatggaagtcttc

SEQ ID NO: 17773 - DNA, 25 bp, SARS Virus
gtaaaatacatggtggaagtcttcg

SEQ ID NO: 17774 - DNA, 25 bp, SARS Virus
taaaatacatgagggaagtcttcgt

SEQ ID NO: 17775 - DNA, 25 bp, SARS Virus
aaaatacatgatggaagtcttcgtg

SEQ ID NO: 17776 - DNA, 25 bp, SARS Virus
aaatacatgatggaagtcttcgtgg

SEQ ID NO: 17777 - DNA, 25 bp, SARS Virus
aatacatgatgggagtcttcgtgga

SEQ ID NO: 17778 - DNA, 25 bp, SARS Virus
atacatgatggaggtcttcgtggat

SEQ ID NO: 17779 - DNA, 25 bp, SARS Virus
tacatgatggaagtcttcgtggatt

SEQ ID NO: 17780 - DNA, 25 bp, SARS Virus
acatgatggaaggcttcgtggatta

SEQ ID NO: 17781 - DNA, 25 bp, SARS Virus
catgatggaagtgttcgtggattac

SEQ ID NO: 17782 - DNA, 25 bp, SARS Virus
atgatggaagtcgtcgtggattacg

SEQ ID NO: 17783 - DNA, 25 bp, SARS Virus
tgatggaagtctgcgtggattacga

SEQ ID NO: 17784 - DNA, 25 bp, SARS Virus
gatggaagtcttggtggattacgat

SEQ ID NO: 17785 - DNA, 25 bp, SARS Virus
atggaagtcttcgtggattacgatt

SEQ ID NO: 17786 - DNA, 25 bp, SARS Virus
tggaagtcttcggggattacgattc

SEQ ID NO: 17787 - DNA, 25 bp, SARS Virus
ggaagtcttcgtggattacgattcc

SEQ ID NO: 17788 - DNA, 25 bp, SARS Virus
gaagtcttcgtggattacgattcct

SEQ ID NO: 17789 - DNA, 25 bp, SARS Virus
aagtcttcgtgggttacgattcctt

SEQ ID NO: 17790 - DNA, 25 bp, SARS Virus
agtcttcgtggagtacgattccttc

SEQ ID NO: 17791 - DNA, 25 bp, SARS Virus
gtcttcgtggatgacgattccttct

SEQ ID NO: 17792 - DNA, 25 bp, SARS Virus
tcttcgtggattgcgattccttctc

SEQ ID NO: 17793 - DNA, 25 bp, SARS Virus
cttcgtggattaggattccttctct

SEQ ID NO: 17794 - DNA, 25 bp, SARS Virus
ttcgtggattacgattccttctcta

SEQ ID NO: 17795 - DNA, 25 bp, SARS Virus
tcgtggattacggttccttctctaa

SEQ ID NO: 17796 - DNA, 25 bp, SARS Virus
cgtggattacgagtccttctctaag

SEQ ID NO: 17797 - DNA, 25 bp, SARS Virus
gtggattacgatgccttctctaaga

SEQ ID NO: 17798 - DNA, 25 bp, SARS Virus
tggattacgattgcttctctaagat

SEQ ID NO: 17799 - DNA, 25 bp, SARS Virus
ggattacgattcgttctctaagatc

SEQ ID NO: 17800 - DNA, 25 bp, SARS Virus
gattacgattccgtctctaagatcc

SEQ ID NO: 17801 - DNA, 25 bp, SARS Virus
attacgattcctgctctaagatcct

SEQ ID NO: 17802 - DNA, 25 bp, SARS Virus
ttacgattccttgtctaagatcctt

SEQ ID NO: 17803 - DNA, 25 bp, SARS Virus
tacgattccttcgctaagatccttg

SEQ ID NO: 17804 - DNA, 25 bp, SARS Virus
acgattccttctgtaagatccttga

SEQ ID NO: 17805 - DNA, 25 bp, SARS Virus
cgattccttctcgaagatccttgac

SEQ ID NO: 17806 - DNA, 25 bp, SARS Virus
gattccttctctgagatccttgaca

SEQ ID NO: 17807 - DNA, 25 bp, SARS Virus
attccttctctaggatccttgacat

SEQ ID NO: 17808 - DNA, 25 bp, SARS Virus
ttccttctctaagatccttgacata

SEQ ID NO: 17809 - DNA, 25 bp, SARS Virus
tccttctctaaggtccttgacatag

SEQ ID NO: 17810 - DNA, 25 bp, SARS Virus
ccttctctaagagccttgacatagg

SEQ ID NO: 17811 - DNA, 25 bp, SARS Virus
cttctctaagatgcttgacatagga

SEQ ID NO: 17812 - DNA, 25 bp, SARS Virus
ttctctaagatcgttgacataggac

SEQ ID NO: 17813 - DNA, 25 bp, SARS Virus
tctctaagatccgtgacataggacc

SEQ ID NO: 17814 - DNA, 25 bp, SARS Virus
ctctaagatcctggacataggacct

SEQ ID NO: 17815 - DNA, 25 bp, SARS Virus
tctaagatccttgacataggacctt

SEQ ID NO: 17816 - DNA, 25 bp, SARS Virus
ctaagatccttggcataggacctta

SEQ ID NO: 17817 - DNA, 25 bp, SARS Virus
taagatccttgagataggaccttaa

SEQ ID NO: 17818 - DNA, 25 bp, SARS Virus
aagatccttgacgtaggaccttaaa

SEQ ID NO: 17819 - DNA, 25 bp, SARS Virus
agatccttgacagaggaccttaaac

SEQ ID NO: 17820 - DNA, 25 bp, SARS Virus
gatccttgacatgggaccttaaact

SEQ ID NO: 17821 - DNA, 25 bp, SARS Virus
atccttgacataggaccttaaactc

SEQ ID NO: 17822 - DNA, 25 bp, SARS Virus
tccttgacataggaccttaaactct

SEQ ID NO: 17823 - DNA, 25 bp, SARS Virus
ccttgacatagggccttaaactctc

SEQ ID NO: 17824 - DNA, 25 bp, SARS Virus
cttgacataggagcttaaactctct

SEQ ID NO: 17825 - DNA, 25 bp, SARS Virus
ttgacataggacgttaaactctctt

SEQ ID NO: 17826 - DNA, 25 bp, SARS Virus
tgacataggaccgtaaactctcttt

SEQ ID NO: 17827 - DNA, 25 bp, SARS Virus
gacataggacctgaaactctcttta

SEQ ID NO: 17828 - DNA, 25 bp, SARS Virus
acataggaccttgaactctctttac

SEQ ID NO: 17829 - DNA, 25 bp, SARS Virus
cataggaccttagactctctttacg

SEQ ID NO: 17830 - DNA, 25 bp, SARS Virus
ataggaccttaagctctctttacga

SEQ ID NO: 17831 - DNA, 25 bp, SARS Virus
taggaccttaaagtctctttacgaa

SEQ ID NO: 17832 - DNA, 25 bp, SARS Virus
aggaccttaaacgctctttacgaac

SEQ ID NO: 17833 - DNA, 25 bp, SARS Virus
ggaccttaaactgtctttacgaacg

SEQ ID NO: 17834 - DNA, 25 bp, SARS Virus
gaccttaaactcgctttacgaacga

SEQ ID NO: 17835 - DNA, 25 bp, SARS Virus
accttaaactctgtttacgaacgag

SEQ ID NO: 17836 - DNA, 25 bp, SARS Virus
ccttaaactctcgttacgaacgagt

SEQ ID NO: 17837 - DNA, 25 bp, SARS Virus
cttaaactctctgtacgaacgagta

SEQ ID NO: 17838 - DNA, 25 bp, SARS Virus
ttaaactctcttgacgaacgagtac

SEQ ID NO: 17839 - DNA, 25 bp, SARS Virus
taaactctctttgcgaacgagtacg

SEQ ID NO: 17840 - DNA, 25 bp, SARS Virus
aaactctctttaggaacgagtacga

SEQ ID NO: 17841 - DNA, 25 bp, SARS Virus
aactctctttacgaacgagtacgac

SEQ ID NO: 17842 - DNA, 25 bp, SARS Virus
actctctttacggacgagtacgact

SEQ ID NO: 17843 - DNA, 25 bp, SARS Virus
ctctctttacgagcgagtacgactt

SEQ ID NO: 17844 - DNA, 25 bp, SARS Virus
tctctttacgaaggagtacgacttc

SEQ ID NO: 17845 - DNA, 25 bp, SARS Virus
ctctttacgaacgagtacgacttct

SEQ ID NO: 17846 - DNA, 25 bp, SARS Virus
tctttacgaacgggtacgacttctc

SEQ ID NO: 17847 - DNA, 25 bp, SARS Virus
ctttacgaacgagtacgacttctct

SEQ ID NO: 17848 - DNA, 25 bp, SARS Virus
tttacgaacgaggacgacttctctg

SEQ ID NO: 17849 - DNA, 25 bp, SARS Virus
ttacgaacgagtgcgacttctctgt

SEQ ID NO: 17850 - DNA, 25 bp, SARS Virus
tacgaacgagtaggacttctctgtt

SEQ ID NO: 17851 - DNA, 25 bp, SARS Virus
acgaacgagtacgacttctctgttc

SEQ ID NO: 17852 - DNA, 25 bp, SARS Virus
cgaacgagtacggcttctctgttct

SEQ ID NO: 17853 - DNA, 25 bp, SARS Virus
gaacgagtacgagttctctgttctt

SEQ ID NO: 17854 - DNA, 25 bp, SARS Virus
aacgagtacgacgtctctgttcttt

SEQ ID NO: 17855 - DNA, 25 bp, SARS Virus
acgagtacgactgctctgttctttt

SEQ ID NO: 17856 - DNA, 25 bp, SARS Virus
cgagtacgacttgtctgttctttta

SEQ ID NO: 17857 - DNA, 25 bp, SARS Virus
gagtacgacttcgctgttcttttaa

SEQ ID NO: 17858 - DNA, 25 bp, SARS Virus
agtacgacttctgtgttcttttaat

SEQ ID NO: 17859 - DNA, 25 bp, SARS Virus
gtacgacttctcggttcttttaatt

SEQ ID NO: 17860 - DNA, 25 bp, SARS Virus
tacgacttctctgttcttttaatta

SEQ ID NO: 17861 - DNA, 25 bp, SARS Virus
acgacttctctggtcttttaattac

SEQ ID NO: 17862 - DNA, 25 bp, SARS Virus
cgacttctctgtgcttttaattacg

SEQ ID NO: 17863 - DNA, 25 bp, SARS Virus
gacttctctgttgttttaattacgg

SEQ ID NO: 17864 - DNA, 25 bp, SARS Virus
acttctctgttcgtttaattacgga

SEQ ID NO: 17865 - DNA, 25 bp, SARS Virus
cttctctgttctgttaattacggat

SEQ ID NO: 17866 - DNA, 25 bp, SARS Virus
ttctctgttcttgtaattacggata

SEQ ID NO: 17867 - DNA, 25 bp, SARS Virus
tctctgttctttgaattacggatat

SEQ ID NO: 17868 - DNA, 25 bp, SARS Virus
ctctgttcttttgattacggatata

SEQ ID NO: 17869 - DNA, 25 bp, SARS Virus
tctgttcttttagttacggatatac

SEQ ID NO: 17870 - DNA, 25 bp, SARS Virus
ctgttcttttaagtacggatatacg

SEQ ID NO: 17871 - DNA, 25 bp, SARS Virus
tgttcttttaatgacggatatacgt

SEQ ID NO: 17872 - DNA, 25 bp, SARS Virus
gttcttttaattgcggatatacgta

SEQ ID NO: 17873 - DNA, 25 bp, SARS Virus
ttcttttaattagggatatacgtac

SEQ ID NO: 17874 - DNA, 25 bp, SARS Virus
tcttttaattacggatatacgtacc

SEQ ID NO: 17875 - DNA, 25 bp, SARS Virus
cttttaattacggatatacgtacct

SEQ ID NO: 17876 - DNA, 25 bp, SARS Virus
ttttaattacgggtatacgtaccta

SEQ ID NO: 17877 - DNA, 25 bp, SARS Virus
tttaattacggagatacgtacctac

SEQ ID NO: 17878 - DNA, 25 bp, SARS Virus
ttaattacggatgtacgtacctaca

SEQ ID NO: 17879 - DNA, 25 bp, SARS Virus
taattacggatagacgtacctacaa

SEQ ID NO: 17880 - DNA, 25 bp, SARS Virus
aattacggatatgcgtacctacaat

SEQ ID NO: 17881 - DNA, 25 bp, SARS Virus
attacggatataggtacctacaatc

SEQ ID NO: 17882 - DNA, 25 bp, SARS Virus
ttacggatatacgtacctacaatct

SEQ ID NO: 17883 - DNA, 25 bp, SARS Virus
tacggatatacggacctacaatctc

SEQ ID NO: 17884 - DNA, 25 bp, SARS Virus
acggatatacgtgcctacaatctcg

SEQ ID NO: 17885 - DNA, 25 bp, SARS Virus
cggatatacgtagctacaatctcgg

SEQ ID NO: 17886 - DNA, 25 bp, SARS Virus
ggatatacgtacgtacaatctcggt

SEQ ID NO: 17887 - DNA, 25 bp, SARS Virus
gatatacgtaccgacaatctcggta

SEQ ID NO: 17888 - DNA, 25 bp, SARS Virus
atatacgtacctgcaatctcggtat

SEQ ID NO: 17889 - DNA, 25 bp, SARS Virus
tatacgtacctagaatctcggtatt

SEQ ID NO: 17890 - DNA, 25 bp, SARS Virus
atacgtacctacgatctcggtatta

SEQ ID NO: 17891 - DNA, 25 bp, SARS Virus
tacgtacctacagtctcggtattac

SEQ ID NO: 17892 - DNA, 25 bp, SARS Virus
acgtacctacaagctcggtattacc

SEQ ID NO: 17893 - DNA, 25 bp, SARS Virus
cgtacctacaatgtcggtattaccg

SEQ ID NO: 17894 - DNA, 25 bp, SARS Virus
gtacctacaatcgcggtattaccgt

SEQ ID NO: 17895 - DNA, 25 bp, SARS Virus
tacctacaatctgggtattaccgtt

SEQ ID NO: 17896 - DNA, 25 bp, SARS Virus
acctacaatctcggtattaccgttg

SEQ ID NO: 17897 - DNA, 25 bp, SARS Virus
cctacaatctcggtattaccgttgg

SEQ ID NO: 17898 - DNA, 25 bp, SARS Virus
ctacaatctcgggattaccgttggt

SEQ ID NO: 17899 - DNA, 25 bp, SARS Virus
tacaatctcggtgttaccgttggta

SEQ ID NO: 17900 - DNA, 25 bp, SARS Virus
acaatctcggtagtaccgttggtag

SEQ ID NO: 17901 - DNA, 25 bp, SARS Virus
caatctcggtatgaccgttggtagg

SEQ ID NO: 17902 - DNA, 25 bp, SARS Virus
aatctcggtattgccgttggtaggt

SEQ ID NO: 17903 - DNA, 25 bp, SARS Virus
atctcggtattagcgttggtaggtt

SEQ ID NO: 17904 - DNA, 25 bp, SARS Virus
tctcggtattacggttggtaggttg

SEQ ID NO: 17905 - DNA, 25 bp, SARS Virus
ctcggtattaccgttggtaggttgc

SEQ ID NO: 17906 - DNA, 25 bp, SARS Virus
tcggtattaccggtggtaggttgca

SEQ ID NO: 17907 - DNA, 25 bp, SARS Virus
cggtattaccgtgggtaggttgcat

SEQ ID NO: 17908 - DNA, 25 bp, SARS Virus
ggtattaccgttggtaggttgcatt

SEQ ID NO: 17909 - DNA, 25 bp, SARS Virus
gtattaccgttggtaggttgcattc

SEQ ID NO: 17910 - DNA, 25 bp, SARS Virus
tattaccgttgggaggttgcattca

SEQ ID NO: 17911 - DNA, 25 bp, SARS Virus
attaccgttggtgggttgcattcat

SEQ ID NO: 17912 - DNA, 25 bp, SARS Virus
ttaccgttggtaggttgcattcata

SEQ ID NO: 17913 - DNA, 25 bp, SARS Virus
taccgttggtaggttgcattcatat

SEQ ID NO: 17914 - DNA, 25 bp, SARS Virus
accgttggtagggtgcattcatatt

SEQ ID NO: 17915 - DNA, 25 bp, SARS Virus
ccgttggtaggtggcattcatattt

SEQ ID NO: 17916 - DNA, 25 bp, SARS Virus
cgttggtaggttgcattcatatttc

SEQ ID NO: 17917 - DNA, 25 bp, SARS Virus
gttggtaggttggattcatatttcc

SEQ ID NO: 17918 - DNA, 25 bp, SARS Virus
ttggtaggttgcgttcatatttcct

SEQ ID NO: 17919 - DNA, 25 bp, SARS Virus
tggtaggttgcagtcatatttcctt

SEQ ID NO: 17920 - DNA, 25 bp, SARS Virus
ggtaggttgcatgcatatttcctta

SEQ ID NO: 17921 - DNA, 25 bp, SARS Virus
gtaggttgcattgatatttccttaa

SEQ ID NO: 17922 - DNA, 25 bp, SARS Virus
taggttgcattcgtatttccttaat

SEQ ID NO: 17923 - DNA, 25 bp, SARS Virus
aggttgcattcagatttccttaatt

SEQ ID NO: 17924 - DNA, 25 bp, SARS Virus
ggttgcattcatgtttccttaattt

SEQ ID NO: 17925 - DNA, 25 bp, SARS Virus
gttgcattcatagttccttaatttt

SEQ ID NO: 17926 - DNA, 25 bp, SARS Virus
ttgcattcatatgtccttaatttta

SEQ ID NO: 17927 - DNA, 25 bp, SARS Virus
tgcattcatattgccttaattttaa

SEQ ID NO: 17928 - DNA, 25 bp, SARS Virus
gcattcatatttgcttaattttaag

SEQ ID NO: 17929 - DNA, 25 bp, SARS Virus
cattcatatttcgttaattttaagt

SEQ ID NO: 17930 - DNA, 25 bp, SARS Virus
attcatatttccgtaattttaagtt

SEQ ID NO: 17931 - DNA, 25 bp, SARS Virus
ttcatatttcctgaattttaagttc

SEQ ID NO: 17932 - DNA, 25 bp, SARS Virus
tcatatttccttgattttaagttct

SEQ ID NO: 17933 - DNA, 25 bp, SARS Virus
catatttccttagttttaagttctc

SEQ ID NO: 17934 - DNA, 25 bp, SARS Virus
atatttccttaagtttaagttctcc

SEQ ID NO: 17935 - DNA, 25 bp, SARS Virus
tatttccttaatgttaagttctccc

SEQ ID NO: 17936 - DNA, 25 bp, SARS Virus
atttccttaattgtaagttctcccg

SEQ ID NO: 17937 - DNA, 25 bp, SARS Virus
tttccttaatttgaagttctcccgt

SEQ ID NO: 17938 - DNA, 25 bp, SARS Virus
ttccttaattttgagttctcccgta

SEQ ID NO: 17939 - DNA, 25 bp, SARS Virus
tccttaattttaggttctcccgtag

SEQ ID NO: 17940 - DNA, 25 bp, SARS Virus
ccttaattttaagttctcccgtagc

SEQ ID NO: 17941 - DNA, 25 bp, SARS Virus
cttaattttaaggtctcccgtagca

SEQ ID NO: 17942 - DNA, 25 bp, SARS Virus
ttaattttaagtgctcccgtagcaa

SEQ ID NO: 17943 - DNA, 25 bp, SARS Virus
taattttaagttgtcccgtagcaac

SEQ ID NO: 17944 - DNA, 25 bp, SARS Virus
aattttaagttcgcccgtagcaact

SEQ ID NO: 17945 - DNA, 25 bp, SARS Virus
attttaagttctgccgtagcaactg

SEQ ID NO: 17946 - DNA, 25 bp, SARS Virus
ttttaagttctcgcgtagcaactga

SEQ ID NO: 17947 - DNA, 25 bp, SARS Virus
tttaagttctccggtagcaactgat

SEQ ID NO: 17948 - DNA, 25 bp, SARS Virus
ttaagttctcccgtagcaactgata

SEQ ID NO: 17949 - DNA, 25 bp, SARS Virus
taagttctcccggagcaactgatac

SEQ ID NO: 17950 - DNA, 25 bp, SARS Virus
aagttctcccgtggcaactgatacc

SEQ ID NO: 17951 - DNA, 25 bp, SARS Virus
agttctcccgtagcaactgatacca

SEQ ID NO: 17952 - DNA, 25 bp, SARS Virus
gttctcccgtaggaactgataccac

SEQ ID NO: 17953 - DNA, 25 bp, SARS Virus
ttctcccgtagcgactgataccaca

SEQ ID NO: 17954 - DNA, 25 bp, SARS Virus
tctcccgtagcagctgataccacag

SEQ ID NO: 17955 - DNA, 25 bp, SARS Virus
ctcccgtagcaagtgataccacagg

SEQ ID NO: 17956 - DNA, 25 bp, SARS Virus
tcccgtagcaacggataccacaggc

SEQ ID NO: 17957 - DNA, 25 bp, SARS Virus
cccgtagcaactgataccacaggct

SEQ ID NO: 17958 - DNA, 25 bp, SARS Virus
ccgtagcaactggtaccacaggcta

SEQ ID NO: 17959 - DNA, 25 bp, SARS Virus
cgtagcaactgagaccacaggctaa

SEQ ID NO: 17960 - DNA, 25 bp, SARS Virus
gtagcaactgatgccacaggctaag

SEQ ID NO: 17961 - DNA, 25 bp, SARS Virus
tagcaactgatagcacaggctaaga

SEQ ID NO: 17962 - DNA, 25 bp, SARS Virus
agcaactgatacgacaggctaagaa

SEQ ID NO: 17963 - DNA, 25 bp, SARS Virus
gcaactgataccgcaggctaagaag

SEQ ID NO: 17964 - DNA, 25 bp, SARS Virus
caactgataccagaggctaagaaga

SEQ ID NO: 17965 - DNA, 25 bp, SARS Virus
aactgataccacgggctaagaagaa

SEQ ID NO: 17966 - DNA, 25 bp, SARS Virus
actgataccacaggctaagaagaaa

SEQ ID NO: 17967 - DNA, 25 bp, SARS Virus
ctgataccacaggctaagaagaaaa

SEQ ID NO: 17968 - DNA, 25 bp, SARS Virus
tgataccacagggtaagaagaaaat

SEQ ID NO: 17969 - DNA, 25 bp, SARS Virus
gataccacaggcgaagaagaaaata

SEQ ID NO: 17970 - DNA, 25 bp, SARS Virus
ataccacaggctgagaagaaaatat

SEQ ID NO: 17971 - DNA, 25 bp, SARS Virus
taccacaggctaggaagaaaatatg

SEQ ID NO: 17972 - DNA, 25 bp, SARS Virus
accacaggctaagaagaaaatatga

SEQ ID NO: 17973 - DNA, 25 bp, SARS Virus
ccacaggctaaggagaaaatatgat

SEQ ID NO: 17974 - DNA, 25 bp, SARS Virus
cacaggctaagaggaaaatatgatc

SEQ ID NO: 17975 - DNA, 25 bp, SARS Virus
acaggctaagaagaaaatatgatca

SEQ ID NO: 17976 - DNA, 25 bp, SARS Virus
caggctaagaaggaaatatgatcat

SEQ ID NO: 17977 - DNA, 25 bp, SARS Virus
aggctaagaagagaatatgatcatt

SEQ ID NO: 17978 - DNA, 25 bp, SARS Virus
ggctaagaagaagatatgatcattt

SEQ ID NO: 17979 - DNA, 25 bp, SARS Virus
gctaagaagaaagtatgatcatttc

SEQ ID NO: 17980 - DNA, 25 bp, SARS Virus
ctaagaagaaaagatgatcatttct

SEQ ID NO: 17981 - DNA, 25 bp, SARS Virus
taagaagaaaatgtgatcatttctc

SEQ ID NO: 17982 - DNA, 25 bp, SARS Virus
aagaagaaaataggatcatttctcg

SEQ ID NO: 17983 - DNA, 25 bp, SARS Virus
agaagaaaatatgatcatttctcgg

SEQ ID NO: 17984 - DNA, 25 bp, SARS Virus
gaagaaaatatggtcatttctcgga

SEQ ID NO: 17985 - DNA, 25 bp, SARS Virus
aagaaaatatgagcatttctcggac

SEQ ID NO: 17986 - DNA, 25 bp, SARS Virus
agaaaatatgatgatttctcggaca

SEQ ID NO: 17987 - DNA, 25 bp, SARS Virus
gaaaatatgatcgtttctcggacat

SEQ ID NO: 17988 - DNA, 25 bp, SARS Virus
aaaatatgatcagttctcggacatc

SEQ ID NO: 17989 - DNA, 25 bp, SARS Virus
aaatatgatcatgtctcggacatcg

SEQ ID NO: 17990 - DNA, 25 bp, SARS Virus
aatatgatcattgctcggacatcga

SEQ ID NO: 17991 - DNA, 25 bp, SARS Virus
atatgatcatttgtcggacatcgaa

SEQ ID NO: 17992 - DNA, 25 bp, SARS Virus
tatgatcatttcgcggacatcgaag

SEQ ID NO: 17993 - DNA, 25 bp, SARS Virus
atgatcatttctgggacatcgaaga

SEQ ID NO: 17994 - DNA, 25 bp, SARS Virus
tgatcatttctcggacatcgaagat

SEQ ID NO: 17995 - DNA, 25 bp, SARS Virus
gatcatttctcggacatcgaagata

SEQ ID NO: 17996 - DNA, 25 bp, SARS Virus
atcatttctcgggcatcgaagataa

SEQ ID NO: 17997 - DNA, 25 bp, SARS Virus
tcatttctcggagatcgaagataat

SEQ ID NO: 17998 - DNA, 25 bp, SARS Virus
catttctcggacgtcgaagataata

SEQ ID NO: 17999 - DNA, 25 bp, SARS Virus
atttctcggacagcgaagataataa

SEQ ID NO: 18000 - DNA, 25 bp, SARS Virus
tttctcggacatggaagataataat

SEQ ID NO: 18001 - DNA, 25 bp, SARS Virus
ttctcggacatcgaagataataatg

SEQ ID NO: 18002 - DNA, 25 bp, SARS Virus
tctcggacatcggagataataatgc

SEQ ID NO: 18003 - DNA, 25 bp, SARS Virus
ctcggacatcgaggataataatgct

SEQ ID NO: 18004 - DNA, 25 bp, SARS Virus
tcggacatcgaagataataatgctt

SEQ ID NO: 18005 - DNA, 25 bp, SARS Virus
cggacatcgaaggtaataatgcttc

SEQ ID NO: 18006 - DNA, 25 bp, SARS Virus
ggacatcgaagagaataatgcttcg

SEQ ID NO: 18007 - DNA, 25 bp, SARS Virus
gacatcgaagatgataatgcttcga

SEQ ID NO: 18008 - DNA, 25 bp, SARS Virus
acatcgaagatagtaatgcttcgac

SEQ ID NO: 18009 - DNA, 25 bp, SARS Virus
catcgaagataagaatgcttcgact

SEQ ID NO: 18010 - DNA, 25 bp, SARS Virus
atcgaagataatgatgcttcgactt

SEQ ID NO: 18011 - DNA, 25 bp, SARS Virus
tcgaagataatagtgcttcgacttg

SEQ ID NO: 18012 - DNA, 25 bp, SARS Virus
cgaagataataaggcttcgacttga

SEQ ID NO: 18013 - DNA, 25 bp, SARS Virus
gaagataataatgcttcgacttgag

SEQ ID NO: 18014 - DNA, 25 bp, SARS Virus
aagataataatggttcgacttgaga

SEQ ID NO: 18015 - DNA, 25 bp, SARS Virus
agataataatgcgtcgacttgagag

SEQ ID NO: 18016 - DNA, 25 bp, SARS Virus
gataataatgctgcgacttgagaga

SEQ ID NO: 18017 - DNA, 25 bp, SARS Virus
ataataatgcttggacttgagagat

SEQ ID NO: 18018 - DNA, 25 bp, SARS Virus
taataatgcttcgacttgagagatt

SEQ ID NO: 18019 - DNA, 25 bp, SARS Virus
aataatgcttcggcttgagagattt

SEQ ID NO: 18020 - DNA, 25 bp, SARS Virus
ataatgcttcgagttgagagattta

SEQ ID NO: 18021 - DNA, 25 bp, SARS Virus
taatgcttcgacgtgagagatttac

SEQ ID NO: 18022 - DNA, 25 bp, SARS Virus
aatgcttcgactggagagatttact

SEQ ID NO: 18023 - DNA, 25 bp, SARS Virus
atgcttcgacttgagagatttactc

SEQ ID NO: 18024 - DNA, 25 bp, SARS Virus
tgcttcgacttgggagatttactcg

SEQ ID NO: 18025 - DNA, 25 bp, SARS Virus
gcttcgacttgagagatttactcgg

SEQ ID NO: 18026 - DNA, 25 bp, SARS Virus
cttcgacttgagggatttactcggc

SEQ ID NO: 18027 - DNA, 25 bp, SARS Virus
ttcgacttgagagatttactcggcg

SEQ ID NO: 18028 - DNA, 25 bp, SARS Virus
tcgacttgagaggtttactcggcga

SEQ ID NO: 18029 - DNA, 25 bp, SARS Virus
cgacttgagagagttactcggcgaa

SEQ ID NO: 18030 - DNA, 25 bp, SARS Virus
gacttgagagatgtactcggcgaac

SEQ ID NO: 18031 - DNA, 25 bp, SARS Virus
acttgagagattgactcggcgaaca

SEQ ID NO: 18032 - DNA, 25 bp, SARS Virus
cttgagagatttgctcggcgaacag

SEQ ID NO: 18033 - DNA, 25 bp, SARS Virus
ttgagagatttagtcggcgaacagt

SEQ ID NO: 18034 - DNA, 25 bp, SARS Virus
tgagagatttacgcggcgaacagtg

SEQ ID NO: 18035 - DNA, 25 bp, SARS Virus
gagagatttactgggcgaacagtgt

SEQ ID NO: 18036 - DNA, 25 bp, SARS Virus
agagatttactcggcgaacagtgtt

SEQ ID NO: 18037 - DNA, 25 bp, SARS Virus
gagatttactcggcgaacagtgtta

SEQ ID NO: 18038 - DNA, 25 bp, SARS Virus
agatttactcggggaacagtgttac

SEQ ID NO: 18039 - DNA, 25 bp, SARS Virus
gatttactcggcgaacagtgttacg

SEQ ID NO: 18040 - DNA, 25 bp, SARS Virus
atttactcggcggacagtgttacgg

SEQ ID NO: 18041 - DNA, 25 bp, SARS Virus
tttactcggcgagcagtgttacggt

SEQ ID NO: 18042 - DNA, 25 bp, SARS Virus
ttactcggcgaagagtgttacggtt

SEQ ID NO: 18043 - DNA, 25 bp, SARS Virus
tactcggcgaacggtgttacggtta

SEQ ID NO: 18044 - DNA, 25 bp, SARS Virus
actcggcgaacagtgttacggttaa

SEQ ID NO: 18045 - DNA, 25 bp, SARS Virus
ctcggcgaacagggttacggttaac

SEQ ID NO: 18046 - DNA, 25 bp, SARS Virus
tcggcgaacagtgttacggttaacc

SEQ ID NO: 18047 - DNA, 25 bp, SARS Virus
cggcgaacagtggtacggttaacca

SEQ ID NO: 18048 - DNA, 25 bp, SARS Virus
ggcgaacagtgtgacggttaaccaa

SEQ ID NO: 18049 - DNA, 25 bp, SARS Virus
gcgaacagtgttgcggttaaccaat

SEQ ID NO: 18050 - DNA, 25 bp, SARS Virus
cgaacagtgttagggttaaccaata

SEQ ID NO: 18051 - DNA, 25 bp, SARS Virus
gaacagtgttacggttaaccaatac

SEQ ID NO: 18052 - DNA, 25 bp, SARS Virus
aacagtgttacggttaaccaataca

SEQ ID NO: 18053 - DNA, 25 bp, SARS Virus
acagtgttacgggtaaccaatacac

SEQ ID NO: 18054 - DNA, 25 bp, SARS Virus
cagtgttacggtgaaccaatacact

SEQ ID NO: 18055 - DNA, 25 bp, SARS Virus
agtgttacggttgaccaatacactg

SEQ ID NO: 18056 - DNA, 25 bp, SARS Virus
gtgttacggttagccaatacactgt

SEQ ID NO: 18057 - DNA, 25 bp, SARS Virus
tgttacggttaagcaatacactgtg

SEQ ID NO: 18058 - DNA, 25 bp, SARS Virus
gttacggttaacgaatacactgtgt

SEQ ID NO: 18059 - DNA, 25 bp, SARS Virus
ttacggttaaccgatacactgtgta

SEQ ID NO: 18060 - DNA, 25 bp, SARS Virus
tacggttaaccagtacactgtgtac

SEQ ID NO: 18061 - DNA, 25 bp, SARS Virus
acggttaaccaagacactgtgtacc

SEQ ID NO: 18062 - DNA, 25 bp, SARS Virus
cggttaaccaatgcactgtgtacca

SEQ ID NO: 18063 - DNA, 25 bp, SARS Virus
ggttaaccaatagactgtgtaccaa

SEQ ID NO: 18064 - DNA, 25 bp, SARS Virus
gttaaccaatacgctgtgtaccaaa

SEQ ID NO: 18065 - DNA, 25 bp, SARS Virus
ttaaccaatacagtgtgtaccaaaa

SEQ ID NO: 18066 - DNA, 25 bp, SARS Virus
taaccaatacacggtgtaccaaaat

SEQ ID NO: 18067 - DNA, 25 bp, SARS Virus
aaccaatacactgtgtaccaaaatt

SEQ ID NO: 18068 - DNA, 25 bp, SARS Virus
accaatacactgggtaccaaaatta

SEQ ID NO: 18069 - DNA, 25 bp, SARS Virus
ccaatacactgtgtaccaaaattag

SEQ ID NO: 18070 - DNA, 25 bp, SARS Virus
caatacactgtggaccaaaattaga

SEQ ID NO: 18071 - DNA, 25 bp, SARS Virus
aatacactgtgtgccaaaattagaa

SEQ ID NO: 18072 - DNA, 25 bp, SARS Virus
atacactgtgtagcaaaattagaac

SEQ ID NO: 18073 - DNA, 25 bp, SARS Virus
tacactgtgtacgaaaattagaact

SEQ ID NO: 18074 - DNA, 25 bp, SARS Virus
acactgtgtaccgaaattagaactt

SEQ ID NO: 18075 - DNA, 25 bp, SARS Virus
cactgtgtaccagaattagaacttc

SEQ ID NO: 18076 - DNA, 25 bp, SARS Virus
actgtgtaccaagattagaacttct

SEQ ID NO: 18077 - DNA, 25 bp, SARS Virus
ctgtgtaccaaagttagaacttctc

SEQ ID NO: 18078 - DNA, 25 bp, SARS Virus
tgtgtaccaaaagtagaacttctcc

SEQ ID NO: 18079 - DNA, 25 bp, SARS Virus
gtgtaccaaaatgagaacttctccg

SEQ ID NO: 18080 - DNA, 25 bp, SARS Virus
tgtaccaaaattggaacttctccga

SEQ ID NO: 18081 - DNA, 25 bp, SARS Virus
gtaccaaaattagaacttctccgac

SEQ ID NO: 18082 - DNA, 25 bp, SARS Virus
taccaaaattaggacttctccgacg

SEQ ID NO: 18083 - DNA, 25 bp, SARS Virus
accaaaattagagcttctccgacgc

SEQ ID NO: 18084 - DNA, 25 bp, SARS Virus
ccaaaattagaagttctccgacgcg

SEQ ID NO: 18085 - DNA, 25 bp, SARS Virus
caaaattagaacgtctccgacgcgc

SEQ ID NO: 18086 - DNA, 25 bp, SARS Virus
aaaattagaactgctccgacgcgcg

SEQ ID NO: 18087 - DNA, 25 bp, SARS Virus
aaattagaacttgtccgacgcgcga

SEQ ID NO: 18088 - DNA, 25 bp, SARS Virus
aattagaacttcgccgacgcgcgac

SEQ ID NO: 18089 - DNA, 25 bp, SARS Virus
attagaacttctgcgacgcgcgaca

SEQ ID NO: 18090 - DNA, 25 bp, SARS Virus
ttagaacttctcggacgcgcgacat

SEQ ID NO: 18091 - DNA, 25 bp, SARS Virus
tagaacttctccgacgcgcgacata

SEQ ID NO: 18092 - DNA, 25 bp, SARS Virus
agaacttctccggcgcgcgacatac

SEQ ID NO: 18093 - DNA, 25 bp, SARS Virus
gaacttctccgaggcgcgacatacg

SEQ ID NO: 18094 - DNA, 25 bp, SARS Virus
aacttctccgacgcgcgacatacgc

SEQ ID NO: 18095 - DNA, 25 bp, SARS Virus
acttctccgacgggcgacatacgca

SEQ ID NO: 18096 - DNA, 25 bp, SARS Virus
cttctccgacgcgcgacatacgcaa

SEQ ID NO: 18097 - DNA, 25 bp, SARS Virus
ttctccgacgcgggacatacgcaag

SEQ ID NO: 18098 - DNA, 25 bp, SARS Virus
tctccgacgcgcgacatacgcaaga

SEQ ID NO: 18099 - DNA, 25 bp, SARS Virus
ctccgacgcgcggcatacgcaagag

SEQ ID NO: 18100 - DNA, 25 bp, SARS Virus
tccgacgcgcgagatacgcaagaga

SEQ ID NO: 18101 - DNA, 25 bp, SARS Virus
ccgacgcgcgacgtacgcaagagaa

SEQ ID NO: 18102 - DNA, 25 bp, SARS Virus
cgacgcgcgacagacgcaagagaat

SEQ ID NO: 18103 - DNA, 25 bp, SARS Virus
gacgcgcgacatgcgcaagagaatt

SEQ ID NO: 18104 - DNA, 25 bp, SARS Virus
acgcgcgacataggcaagagaattt

SEQ ID NO: 18105 - DNA, 25 bp, SARS Virus
cgcgcgacatacgcaagagaatttc

SEQ ID NO: 18106 - DNA, 25 bp, SARS Virus
gcgcgacatacggaagagaatttcg

SEQ ID NO: 18107 - DNA, 25 bp, SARS Virus
cgcgacatacgcgagagaatttcga

SEQ ID NO: 18108 - DNA, 25 bp, SARS Virus
gcgacatacgcaggagaatttcgag

SEQ ID NO: 18109 - DNA, 25 bp, SARS Virus
cgacatacgcaagagaatttcgagg

SEQ ID NO: 18110 - DNA, 25 bp, SARS Virus
gacatacgcaagggaatttcgagga

SEQ ID NO: 18111 - DNA, 25 bp, SARS Virus
acatacgcaagagaatttcgaggac

SEQ ID NO: 18112 - DNA, 25 bp, SARS Virus
catacgcaagaggatttcgaggacg

SEQ ID NO: 18113 - DNA, 25 bp, SARS Virus
atacgcaagagagtttcgaggacgg

SEQ ID NO: 18114 - DNA, 25 bp, SARS Virus
tacgcaagagaagttcgaggacggc

SEQ ID NO: 18115 - DNA, 25 bp, SARS Virus
acgcaagagaatgtcgaggacggca

SEQ ID NO: 18116 - DNA, 25 bp, SARS Virus
cgcaagagaattgcgaggacggcat

SEQ ID NO: 18117 - DNA, 25 bp, SARS Virus
gcaagagaatttggaggacggcatc

SEQ ID NO: 18118 - DNA, 25 bp, SARS Virus
caagagaatttcgaggacggcatca

SEQ ID NO: 18119 - DNA, 25 bp, SARS Virus
aagagaatttcggggacggcatcac

SEQ ID NO: 18120 - DNA, 25 bp, SARS Virus
agagaatttcgaggacggcatcaca

SEQ ID NO: 18121 - DNA, 25 bp, SARS Virus
gagaatttcgaggacggcatcacag

SEQ ID NO: 18122 - DNA, 25 bp, SARS Virus
agaatttcgagggcggcatcacagt

SEQ ID NO: 18123 - DNA, 25 bp, SARS Virus
gaatttcgaggagggcatcacagtc

SEQ ID NO: 18124 - DNA, 25 bp, SARS Virus
aatttcgaggacggcatcacagtca

SEQ ID NO: 18125 - DNA, 25 bp, SARS Virus
atttcgaggacggcatcacagtcat

SEQ ID NO: 18126 - DNA, 25 bp, SARS Virus
tttcgaggacgggatcacagtcata

SEQ ID NO: 18127 - DNA, 25 bp, SARS Virus
ttcgaggacggcgtcacagtcatag

SEQ ID NO: 18128 - DNA, 25 bp, SARS Virus
tcgaggacggcagcacagtcatagt

SEQ ID NO: 18129 - DNA, 25 bp, SARS Virus
cgaggacggcatgacagtcatagta

SEQ ID NO: 18130 - DNA, 25 bp, SARS Virus
gaggacggcatcgcagtcatagtag

SEQ ID NO: 18131 - DNA, 25 bp, SARS Virus
aggacggcatcagagtcatagtagt

SEQ ID NO: 18132 - DNA, 25 bp, SARS Virus
ggacggcatcacggtcatagtagtg

SEQ ID NO: 18133 - DNA, 25 bp, SARS Virus
gacggcatcacagtcatagtagtgg

SEQ ID NO: 18134 - DNA, 25 bp, SARS Virus
acggcatcacaggcatagtagtggt

SEQ ID NO: 18135 - DNA, 25 bp, SARS Virus
cggcatcacagtgatagtagtggtc

SEQ ID NO: 18136 - DNA, 25 bp, SARS Virus
ggcatcacagtcgtagtagtggtct

SEQ ID NO: 18137 - DNA, 25 bp, SARS Virus
gcatcacagtcagagtagtggtcta

SEQ ID NO: 18138 - DNA, 25 bp, SARS Virus
catcacagtcatggtagtggtctac

SEQ ID NO: 18139 - DNA, 25 bp, SARS Virus
atcacagtcatagtagtggtctacg

SEQ ID NO: 18140 - DNA, 25 bp, SARS Virus
tcacagtcataggagtggtctacga

SEQ ID NO: 18141 - DNA, 25 bp, SARS Virus
cacagtcatagtggtggtctacgac

SEQ ID NO: 18142 - DNA, 25 bp, SARS Virus
acagtcatagtagtggtctacgaca

SEQ ID NO: 18143 - DNA, 25 bp, SARS Virus
cagtcatagtaggggtctacgacaa

SEQ ID NO: 18144 - DNA, 25 bp, SARS Virus
agtcatagtagtggtctacgacaat

SEQ ID NO: 18145 - DNA, 25 bp, SARS Virus
gtcatagtagtggtctacgacaatg

SEQ ID NO: 18146 - DNA, 25 bp, SARS Virus
tcatagtagtgggctacgacaatga

SEQ ID NO: 18147 - DNA, 25 bp, SARS Virus
catagtagtggtgtacgacaatgat

SEQ ID NO: 18148 - DNA, 25 bp, SARS Virus
atagtagtggtcgacgacaatgatg

SEQ ID NO: 18149 - DNA, 25 bp, SARS Virus
tagtagtggtctgcgacaatgatgt

SEQ ID NO: 18150 - DNA, 25 bp, SARS Virus
agtagtggtctaggacaatgatgta

SEQ ID NO: 18151 - DNA, 25 bp, SARS Virus
gtagtggtctacgacaatgatgtat

SEQ ID NO: 18152 - DNA, 25 bp, SARS Virus
tagtggtctacggcaatgatgtata

SEQ ID NO: 18153 - DNA, 25 bp, SARS Virus
agtggtctacgagaatgatgtatat

SEQ ID NO: 18154 - DNA, 25 bp, SARS Virus
gtggtctacgacgatgatgtatatt

SEQ ID NO: 18155 - DNA, 25 bp, SARS Virus
tggtctacgacagtgatgtatatta

SEQ ID NO: 18156 - DNA, 25 bp, SARS Virus
ggtctacgacaaggatgtatattac

SEQ ID NO: 18157 - DNA, 25 bp, SARS Virus
gtctacgacaatgatgtatattacc

SEQ ID NO: 18158 - DNA, 25 bp, SARS Virus
tctacgacaatggtgtatattacct

SEQ ID NO: 18159 - DNA, 25 bp, SARS Virus
ctacgacaatgaggtatattaccta

SEQ ID NO: 18160 - DNA, 25 bp, SARS Virus
tacgacaatgatgtatattacctat

SEQ ID NO: 18161 - DNA, 25 bp, SARS Virus
acgacaatgatggatattacctatg

SEQ ID NO: 18162 - DNA, 25 bp, SARS Virus
cgacaatgatgtgtattacctatgg

SEQ ID NO: 18163 - DNA, 25 bp, SARS Virus
gacaatgatgtagattacctatgga

SEQ ID NO: 18164 - DNA, 25 bp, SARS Virus
acaatgatgtatgttacctatggag

SEQ ID NO: 18165 - DNA, 25 bp, SARS Virus
caatgatgtatagtacctatggagt

SEQ ID NO: 18166 - DNA, 25 bp, SARS Virus
aatgatgtatatgacctatggagtg

SEQ ID NO: 18167 - DNA, 25 bp, SARS Virus
atgatgtatattgcctatggagtga

SEQ ID NO: 18168 - DNA, 25 bp, SARS Virus
tgatgtatattagctatggagtgaa

SEQ ID NO: 18169 - DNA, 25 bp, SARS Virus
gatgtatattacgtatggagtgaag

SEQ ID NO: 18170 - DNA, 25 bp, SARS Virus
atgtatattaccgatggagtgaagc

SEQ ID NO: 18171 - DNA, 25 bp, SARS Virus
tgtatattacctgtggagtgaagca

SEQ ID NO: 18172 - DNA, 25 bp, SARS Virus
gtatattacctagggagtgaagcag

SEQ ID NO: 18173 - DNA, 25 bp, SARS Virus
tatattacctatggagtgaagcagt

SEQ ID NO: 18174 - DNA, 25 bp, SARS Virus
atattacctatggagtgaagcagta

SEQ ID NO: 18175 - DNA, 25 bp, SARS Virus
tattacctatggggtgaagcagtag

SEQ ID NO: 18176 - DNA, 25 bp, SARS Virus
attacctatggagtgaagcagtagt

SEQ ID NO: 18177 - DNA, 25 bp, SARS Virus
ttacctatggagggaagcagtagtt

SEQ ID NO: 18178 - DNA, 25 bp, SARS Virus
tacctatggagtgaagcagtagttt

SEQ ID NO: 18179 - DNA, 25 bp, SARS Virus
acctatggagtggagcagtagtttc

SEQ ID NO: 18180 - DNA, 25 bp, SARS Virus
cctatggagtgaggcagtagtttct

SEQ ID NO: 18181 - DNA, 25 bp, SARS Virus
ctatggagtgaagcagtagtttctg

SEQ ID NO: 18182 - DNA, 25 bp, SARS Virus
tatggagtgaaggagtagtttctgt

SEQ ID NO: 18183 - DNA, 25 bp, SARS Virus
atggagtgaagcggtagtttctgta

SEQ ID NO: 18184 - DNA, 25 bp, SARS Virus
tggagtgaagcagtagtttctgtag

SEQ ID NO: 18185 - DNA, 25 bp, SARS Virus
tggtgcatgggatctgttcctacac

SEQ ID NO: 18186 - DNA, 25 bp, SARS Virus
ggtgcatgggacttgttcctacacg

SEQ ID NO: 18187 - DNA, 25 bp, SARS Virus
gtgcatgggacctgttcctacacga

SEQ ID NO: 18188 - DNA, 25 bp, SARS Virus
tgcatgggaccttttcctacacgac

SEQ ID NO: 18189 - DNA, 25 bp, SARS Virus
gcatgggacctgttcctacacgacc

SEQ ID NO: 18190 - DNA, 25 bp, SARS Virus
catgggacctgttcctacacgacca

SEQ ID NO: 18191 - DNA, 25 bp, SARS Virus
atgggacctgtttctacacgaccaa

SEQ ID NO: 18192 - DNA, 25 bp, SARS Virus
tgggacctgttcttacacgaccaat

SEQ ID NO: 18193 - DNA, 25 bp, SARS Virus
gggacctgttcctacacgaccaata

SEQ ID NO: 18194 - DNA, 25 bp, SARS Virus
ggacctgttccttcacgaccaatat

SEQ ID NO: 18195 - DNA, 25 bp, SARS Virus
gacctgttcctatacgaccaatatg

SEQ ID NO: 18196 - DNA, 25 bp, SARS Virus
acctgttcctactcgaccaatatgt

SEQ ID NO: 18197 - DNA, 25 bp, SARS Virus
cctgttcctacatgaccaatatgtg

SEQ ID NO: 18198 - DNA, 25 bp, SARS Virus
ctgttcctacactaccaatatgtga

SEQ ID NO: 18199 - DNA, 25 bp, SARS Virus
tgttcctacacgtccaatatgtgaa

SEQ ID NO: 18200 - DNA, 25 bp, SARS Virus
gttcctacacgatcaatatgtgaac

SEQ ID NO: 18201 - DNA, 25 bp, SARS Virus
ttcctacacgactaatatgtgaact

SEQ ID NO: 18202 - DNA, 25 bp, SARS Virus
tcctacacgacctatatgtgaactc

SEQ ID NO: 18203 - DNA, 25 bp, SARS Virus
cctacacgaccattatgtgaactcc

SEQ ID NO: 18204 - DNA, 25 bp, SARS Virus
ctacacgaccaatatgtgaactcct

SEQ ID NO: 18205 - DNA, 25 bp, SARS Virus
tacacgaccaatttgtgaactcctt

SEQ ID NO: 18206 - DNA, 25 bp, SARS Virus
acacgaccaatatgtgaactccttc

SEQ ID NO: 18207 - DNA, 25 bp, SARS Virus
cacgaccaatatttgaactccttcg

SEQ ID NO: 18208 - DNA, 25 bp, SARS Virus
acgaccaatatgtgaactccttcga

SEQ ID NO: 18209 - DNA, 25 bp, SARS Virus
cgaccaatatgttaactccttcgat

SEQ ID NO: 18210 - DNA, 25 bp, SARS Virus
gaccaatatgtgtactccttcgatt

SEQ ID NO: 18211 - DNA, 25 bp, SARS Virus
accaatatgtgatctccttcgattc

SEQ ID NO: 18212 - DNA, 25 bp, SARS Virus
ccaatatgtgaattccttcgattct

SEQ ID NO: 18213 - DNA, 25 bp, SARS Virus
caatatgtgaactccttcgattctg

SEQ ID NO: 18214 - DNA, 25 bp, SARS Virus
aatatgtgaacttcttcgattctga

SEQ ID NO: 18215 - DNA, 25 bp, SARS Virus
atatgtgaactctttcgattctgac

SEQ ID NO: 18216 - DNA, 25 bp, SARS Virus
tatgtgaactccttcgattctgacg

SEQ ID NO: 18217 - DNA, 25 bp, SARS Virus
atgtgaactccttcgattctgacga

SEQ ID NO: 18218 - DNA, 25 bp, SARS Virus
tgtgaactcctttgattctgacgag

SEQ ID NO: 18219 - DNA, 25 bp, SARS Virus
gtgaactccttctattctgacgaga

SEQ ID NO: 18220 - DNA, 25 bp, SARS Virus
tgaactccttcgtttctgacgagaa

SEQ ID NO: 18221 - DNA, 25 bp, SARS Virus
gaactccttcgattctgacgagaat

SEQ ID NO: 18222 - DNA, 25 bp, SARS Virus
aactccttcgattctgacgagaatt

SEQ ID NO: 18223 - DNA, 25 bp, SARS Virus
actccttcgattttgacgagaattc

SEQ ID NO: 18224 - DNA, 25 bp, SARS Virus
ctccttcgattctgacgagaattct

SEQ ID NO: 18225 - DNA, 25 bp, SARS Virus
tccttcgattcttacgagaattctt

SEQ ID NO: 18226 - DNA, 25 bp, SARS Virus
ccttcgattctgtcgagaattcttt

SEQ ID NO: 18227 - DNA, 25 bp, SARS Virus
cttcgattctgatgagaattcttta

SEQ ID NO: 18228 - DNA, 25 bp, SARS Virus
ttcgattctgactagaattctttac

SEQ ID NO: 18229 - DNA, 25 bp, SARS Virus
tcgattctgacgtgaattctttacg

SEQ ID NO: 18230 - DNA, 25 bp, SARS Virus
cgattctgacgataattctttacgt

SEQ ID NO: 18231 - DNA, 25 bp, SARS Virus
gattctgacgagtattctttacgtt

SEQ ID NO: 18232 - DNA, 25 bp, SARS Virus
attctgacgagatttctttacgttt

SEQ ID NO: 18233 - DNA, 25 bp, SARS Virus
ttctgacgagaattctttacgttta

SEQ ID NO: 18234 - DNA, 25 bp, SARS Virus
tctgacgagaattctttacgtttag

SEQ ID NO: 18235 - DNA, 25 bp, SARS Virus
ctgacgagaattttttacgtttaga

SEQ ID NO: 18236 - DNA, 25 bp, SARS Virus
tgacgagaattctttacgtttagac

SEQ ID NO: 18237 - DNA, 25 bp, SARS Virus
gacgagaattctttacgtttagacg

SEQ ID NO: 18238 - DNA, 25 bp, SARS Virus
acgagaattctttacgtttagacgt

SEQ ID NO: 18239 - DNA, 25 bp, SARS Virus
cgagaattcttttcgtttagacgta

SEQ ID NO: 18240 - DNA, 25 bp, SARS Virus
gagaattctttatgtttagacgtaa

SEQ ID NO: 18241 - DNA, 25 bp, SARS Virus
agaattctttacttttagacgtaaa

SEQ ID NO: 18242 - DNA, 25 bp, SARS Virus
gaattctttacgtttagacgtaaaa

SEQ ID NO: 18243 - DNA, 25 bp, SARS Virus
aattctttacgtttagacgtaaaat

SEQ ID NO: 18244 - DNA, 25 bp, SARS Virus
attctttacgtttagacgtaaaata

SEQ ID NO: 18245 - DNA, 25 bp, SARS Virus
ttctttacgttttgacgtaaaatac

SEQ ID NO: 18246 - DNA, 25 bp, SARS Virus
tctttacgtttatacgtaaaataca

SEQ ID NO: 18247 - DNA, 25 bp, SARS Virus
ctttacgtttagtcgtaaaatacat

SEQ ID NO: 18248 - DNA, 25 bp, SARS Virus
tttacgtttagatgtaaaatacatg

SEQ ID NO: 18249 - DNA, 25 bp, SARS Virus
ttacgtttagacttaaaatacatga

SEQ ID NO: 18250 - DNA, 25 bp, SARS Virus
tacgtttagacgtaaaatacatgat

SEQ ID NO: 18251 - DNA, 25 bp, SARS Virus
acgtttagacgttaaatacatgatg

SEQ ID NO: 18252 - DNA, 25 bp, SARS Virus
cgtttagacgtataatacatgatgg

SEQ ID NO: 18253 - DNA, 25 bp, SARS Virus
gtttagacgtaatatacatgatgga

SEQ ID NO: 18254 - DNA, 25 bp, SARS Virus
tttagacgtaaattacatgatggaa

SEQ ID NO: 18255 - DNA, 25 bp, SARS Virus
ttagacgtaaaatacatgatggaag

SEQ ID NO: 18256 - DNA, 25 bp, SARS Virus
tagacgtaaaattcatgatggaagt

SEQ ID NO: 18257 - DNA, 25 bp, SARS Virus
agacgtaaaatatatgatggaagtc

SEQ ID NO: 18258 - DNA, 25 bp, SARS Virus
gacgtaaaatacttgatggaagtct

SEQ ID NO: 18259 - DNA, 25 bp, SARS Virus
acgtaaaatacatgatggaagtctt

SEQ ID NO: 18260 - DNA, 25 bp, SARS Virus
cgtaaaatacattatggaagtcttc

SEQ ID NO: 18261 - DNA, 25 bp, SARS Virus
gtaaaatacatgttggaagtcttcg

SEQ ID NO: 18262 - DNA, 25 bp, SARS Virus
taaaatacatgatggaagtcttcgt

SEQ ID NO: 18263 - DNA, 25 bp, SARS Virus
aaaatacatgattgaagtcttcgtg

SEQ ID NO: 18264 - DNA, 25 bp, SARS Virus
aaatacatgatgtaagtcttcgtgg

SEQ ID NO: 18265 - DNA, 25 bp, SARS Virus
aatacatgatggtagtcttcgtgga

SEQ ID NO: 18266 - DNA, 25 bp, SARS Virus
atacatgatggatgtcttcgtggat

SEQ ID NO: 18267 - DNA, 25 bp, SARS Virus
tacatgatggaattcttcgtggatt

SEQ ID NO: 18268 - DNA, 25 bp, SARS Virus
acatgatggaagtcttcgtggatta

SEQ ID NO: 18269 - DNA, 25 bp, SARS Virus
catgatggaagttttcgtggattac

SEQ ID NO: 18270 - DNA, 25 bp, SARS Virus
atgatggaagtcttcgtggattacg

SEQ ID NO: 18271 - DNA, 25 bp, SARS Virus
tgatggaagtcttcgtggattacga

SEQ ID NO: 18272 - DNA, 25 bp, SARS Virus
gatggaagtctttgtggattacgat

SEQ ID NO: 18273 - DNA, 25 bp, SARS Virus
atggaagtcttcttggattacgatt

SEQ ID NO: 18274 - DNA, 25 bp, SARS Virus
tggaagtcttcgtggattacgattc

SEQ ID NO: 18275 - DNA, 25 bp, SARS Virus
ggaagtcttcgttgattacgattcc

SEQ ID NO: 18276 - DNA, 25 bp, SARS Virus
gaagtcttcgtgtattacgattcct

SEQ ID NO: 18277 - DNA, 25 bp, SARS Virus
aagtcttcgtggtttacgattcctt

SEQ ID NO: 18278 - DNA, 25 bp, SARS Virus
agtcttcgtggattacgattccttc

SEQ ID NO: 18279 - DNA, 25 bp, SARS Virus
gtcttcgtggattacgattccttct

SEQ ID NO: 18280 - DNA, 25 bp, SARS Virus
tcttcgtggatttcgattccttctc

SEQ ID NO: 18281 - DNA, 25 bp, SARS Virus
cttcgtggattatgattccttctct

SEQ ID NO: 18282 - DNA, 25 bp, SARS Virus
ttcgtggattactattccttctcta

SEQ ID NO: 18283 - DNA, 25 bp, SARS Virus
tcgtggattacgtttccttctctaa

SEQ ID NO: 18284 - DNA, 25 bp, SARS Virus
cgtggattacgattccttctctaag

SEQ ID NO: 18285 - DNA, 25 bp, SARS Virus
gtggattacgattccttctctaaga

SEQ ID NO: 18286 - DNA, 25 bp, SARS Virus
tggattacgatttcttctctaagat

SEQ ID NO: 18287 - DNA, 25 bp, SARS Virus
ggattacgattctttctctaagatc

SEQ ID NO: 18288 - DNA, 25 bp, SARS Virus
gattacgattccttctctaagatcc

SEQ ID NO: 18289 - DNA, 25 bp, SARS Virus
attacgattccttctctaagatcct

SEQ ID NO: 18290 - DNA, 25 bp, SARS Virus
ttacgattccttttctaagatcctt

SEQ ID NO: 18291 - DNA, 25 bp, SARS Virus
tacgattccttctctaagatccttg

SEQ ID NO: 18292 - DNA, 25 bp, SARS Virus
acgattccttctttaagatccttga

SEQ ID NO: 18293 - DNA, 25 bp, SARS Virus
cgattccttctctaagatccttgac

SEQ ID NO: 18294 - DNA, 25 bp, SARS Virus
gattccttctcttagatccttgaca

SEQ ID NO: 18295 - DNA, 25 bp, SARS Virus
attccttctctatgatccttgacat

SEQ ID NO: 18296 - DNA, 25 bp, SARS Virus
ttccttctctaatatccttgacata

SEQ ID NO: 18297 - DNA, 25 bp, SARS Virus
tccttctctaagttccttgacatag

SEQ ID NO: 18298 - DNA, 25 bp, SARS Virus
ccttctctaagatccttgacatagg

SEQ ID NO: 18299 - DNA, 25 bp, SARS Virus
cttctctaagattcttgacatagga

SEQ ID NO: 18300 - DNA, 25 bp, SARS Virus
ttctctaagatctttgacataggac

SEQ ID NO: 18301 - DNA, 25 bp, SARS Virus
tctctaagatccttgacataggacc

SEQ ID NO: 18302 - DNA, 25 bp, SARS Virus
ctctaagatccttgacataggacct

SEQ ID NO: 18303 - DNA, 25 bp, SARS Virus
tctaagatcctttacataggacctt

SEQ ID NO: 18304 - DNA, 25 bp, SARS Virus
ctaagatccttgtcataggacctta

SEQ ID NO: 18305 - DNA, 25 bp, SARS Virus
taagatccttgatataggaccttaa

SEQ ID NO: 18306 - DNA, 25 bp, SARS Virus
aagatccttgacttaggaccttaaa

SEQ ID NO: 18307 - DNA, 25 bp, SARS Virus
agatccttgacataggaccttaaac

SEQ ID NO: 18308 - DNA, 25 bp, SARS Virus
gatccttgacattggaccttaaact

SEQ ID NO: 18309 - DNA, 25 bp, SARS Virus
atccttgacatatgaccttaaactc

SEQ ID NO: 18310 - DNA, 25 bp, SARS Virus
tccttgacatagtaccttaaactct

SEQ ID NO: 18311 - DNA, 25 bp, SARS Virus
ccttgacataggtccttaaactctc

SEQ ID NO: 18312 - DNA, 25 bp, SARS Virus
cttgacataggatcttaaactctct

SEQ ID NO: 18313 - DNA, 25 bp, SARS Virus
ttgacataggactttaaactctctt

SEQ ID NO: 18314 - DNA, 25 bp, SARS Virus
tgacataggaccttaaactctcttt

SEQ ID NO: 18315 - DNA, 25 bp, SARS Virus
gacataggaccttaaactctcttta

SEQ ID NO: 18316 - DNA, 25 bp, SARS Virus
acataggacctttaactctctttac

SEQ ID NO: 18317 - DNA, 25 bp, SARS Virus
cataggaccttatactctctttacg

SEQ ID NO: 18318 - DNA, 25 bp, SARS Virus
ataggaccttaatctctctttacga

SEQ ID NO: 18319 - DNA, 25 bp, SARS Virus
taggaccttaaattctctttacgaa

SEQ ID NO: 18320 - DNA, 25 bp, SARS Virus
aggaccttaaactctctttacgaac

SEQ ID NO: 18321 - DNA, 25 bp, SARS Virus
ggaccttaaactttctttacgaacg

SEQ ID NO: 18322 - DNA, 25 bp, SARS Virus
gaccttaaactctctttacgaacga

SEQ ID NO: 18323 - DNA, 25 bp, SARS Virus
accttaaactctttttacgaacgag

SEQ ID NO: 18324 - DNA, 25 bp, SARS Virus
ccttaaactctctttacgaacgagt

SEQ ID NO: 18325 - DNA, 25 bp, SARS Virus
cttaaactctctttacgaacgagta

SEQ ID NO: 18326 - DNA, 25 bp, SARS Virus
ttaaactctctttacgaacgagtac

SEQ ID NO: 18327 - DNA, 25 bp, SARS Virus
taaactctcttttcgaacgagtacg

SEQ ID NO: 18328 - DNA, 25 bp, SARS Virus
aaactctctttatgaacgagtacga

SEQ ID NO: 18329 - DNA, 25 bp, SARS Virus
aactctctttactaacgagtacgac

SEQ ID NO: 18330 - DNA, 25 bp, SARS Virus
actctctttacgtacgagtacgact

SEQ ID NO: 18331 - DNA, 25 bp, SARS Virus
ctctctttacgatcgagtacgactt

SEQ ID NO: 18332 - DNA, 25 bp, SARS Virus
tctctttacgaatgagtacgacttc

SEQ ID NO: 18333 - DNA, 25 bp, SARS Virus
ctctttacgaactagtacgacttct

SEQ ID NO: 18334 - DNA, 25 bp, SARS Virus
tctttacgaacgtgtacgacttctc

SEQ ID NO: 18335 - DNA, 25 bp, SARS Virus
ctttacgaacgattacgacttctct

SEQ ID NO: 18336 - DNA, 25 bp, SARS Virus
tttacgaacgagtacgacttctctg

SEQ ID NO: 18337 - DNA, 25 bp, SARS Virus
ttacgaacgagttcgacttctctgt

SEQ ID NO: 18338 - DNA, 25 bp, SARS Virus
tacgaacgagtatgacttctctgtt

SEQ ID NO: 18339 - DNA, 25 bp, SARS Virus
acgaacgagtactacttctctgttc

SEQ ID NO: 18340 - DNA, 25 bp, SARS Virus
cgaacgagtacgtcttctctgttct

SEQ ID NO: 18341 - DNA, 25 bp, SARS Virus
gaacgagtacgatttctctgttctt

SEQ ID NO: 18342 - DNA, 25 bp, SARS Virus
aacgagtacgacttctctgttcttt

SEQ ID NO: 18343 - DNA, 25 bp, SARS Virus
acgagtacgacttctctgttctttt

SEQ ID NO: 18344 - DNA, 25 bp, SARS Virus
cgagtacgacttttctgttctttta

SEQ ID NO: 18345 - DNA, 25 bp, SARS Virus
gagtacgacttctctgttcttttaa

SEQ ID NO: 18346 - DNA, 25 bp, SARS Virus
agtacgacttctttgttcttttaat

SEQ ID NO: 18347 - DNA, 25 bp, SARS Virus
gtacgacttctctgttcttttaatt

SEQ ID NO: 18348 - DNA, 25 bp, SARS Virus
tacgacttctcttttcttttaatta

SEQ ID NO: 18349 - DNA, 25 bp, SARS Virus
acgacttctctgttcttttaattac

SEQ ID NO: 18350 - DNA, 25 bp, SARS Virus
cgacttctctgttcttttaattacg

SEQ ID NO: 18351 - DNA, 25 bp, SARS Virus
gacttctctgtttttttaattacgg

SEQ ID NO: 18352 - DNA, 25 bp, SARS Virus
acttctctgttcttttaattacgga

SEQ ID NO: 18353 - DNA, 25 bp, SARS Virus
cttctctgttcttttaattacggat

SEQ ID NO: 18354 - DNA, 25 bp, SARS Virus
ttctctgttcttttaattacggata

SEQ ID NO: 18355 - DNA, 25 bp, SARS Virus
tctctgttcttttaattacggatat

SEQ ID NO: 18356 - DNA, 25 bp, SARS Virus
ctctgttctttttattacggatata

SEQ ID NO: 18357 - DNA, 25 bp, SARS Virus
tctgttcttttatttacggatatac

SEQ ID NO: 18358 - DNA, 25 bp, SARS Virus
ctgttcttttaattacggatatacg

SEQ ID NO: 18359 - DNA, 25 bp, SARS Virus
tgttcttttaattacggatatacgt

SEQ ID NO: 18360 - DNA, 25 bp, SARS Virus
gttcttttaatttcggatatacgta

SEQ ID NO: 18361 - DNA, 25 bp, SARS Virus
ttcttttaattatggatatacgtac

SEQ ID NO: 18362 - DNA, 25 bp, SARS Virus
tcttttaattactgatatacgtacc

SEQ ID NO: 18363 - DNA, 25 bp, SARS Virus
cttttaattacgtatatacgtacct

SEQ ID NO: 18364 - DNA, 25 bp, SARS Virus
ttttaattacggttatacgtaccta

SEQ ID NO: 18365 - DNA, 25 bp, SARS Virus
tttaattacggatatacgtacctac

SEQ ID NO: 18366 - DNA, 25 bp, SARS Virus
ttaattacggatttacgtacctaca

SEQ ID NO: 18367 - DNA, 25 bp, SARS Virus
taattacggatatacgtacctacaa

SEQ ID NO: 18368 - DNA, 25 bp, SARS Virus
aattacggatattcgtacctacaat

SEQ ID NO: 18369 - DNA, 25 bp, SARS Virus
attacggatatatgtacctacaatc

SEQ ID NO: 18370 - DNA, 25 bp, SARS Virus
ttacggatatacttacctacaatct

SEQ ID NO: 18371 - DNA, 25 bp, SARS Virus
tacggatatacgtacctacaatctc

SEQ ID NO: 18372 - DNA, 25 bp, SARS Virus
acggatatacgttcctacaatctcg

SEQ ID NO: 18373 - DNA, 25 bp, SARS Virus
cggatatacgtatctacaatctcgg

SEQ ID NO: 18374 - DNA, 25 bp, SARS Virus
ggatatacgtacttacaatctcggt

SEQ ID NO: 18375 - DNA, 25 bp, SARS Virus
gatatacgtacctacaatctcggta

SEQ ID NO: 18376 - DNA, 25 bp, SARS Virus
atatacgtaccttcaatctcggtat

SEQ ID NO: 18377 - DNA, 25 bp, SARS Virus
tatacgtacctataatctcggtatt

SEQ ID NO: 18378 - DNA, 25 bp, SARS Virus
atacgtacctactatctcggtatta

SEQ ID NO: 18379 - DNA, 25 bp, SARS Virus
tacgtacctacattctcggtattac

SEQ ID NO: 18380 - DNA, 25 bp, SARS Virus
acgtacctacaatctcggtattacc

SEQ ID NO: 18381 - DNA, 25 bp, SARS Virus
cgtacctacaatttcggtattaccg

SEQ ID NO: 18382 - DNA, 25 bp, SARS Virus
gtacctacaatctcggtattaccgt

SEQ ID NO: 18383 - DNA, 25 bp, SARS Virus
tacctacaatcttggtattaccgtt

SEQ ID NO: 18384 - DNA, 25 bp, SARS Virus
acctacaatctctgtattaccgttg

SEQ ID NO: 18385 - DNA, 25 bp, SARS Virus
cctacaatctcgttattaccgttgg

SEQ ID NO: 18386 - DNA, 25 bp, SARS Virus
ctacaatctcggtattaccgttggt

SEQ ID NO: 18387 - DNA, 25 bp, SARS Virus
tacaatctcggttttaccgttggta

SEQ ID NO: 18388 - DNA, 25 bp, SARS Virus
acaatctcggtattaccgttggtag

SEQ ID NO: 18389 - DNA, 25 bp, SARS Virus
caatctcggtattaccgttggtagg

SEQ ID NO: 18390 - DNA, 25 bp, SARS Virus
aatctcggtatttccgttggtaggt

SEQ ID NO: 18391 - DNA, 25 bp, SARS Virus
atctcggtattatcgttggtaggtt

SEQ ID NO: 18392 - DNA, 25 bp, SARS Virus
tctcggtattactgttggtaggttg

SEQ ID NO: 18393 - DNA, 25 bp, SARS Virus
ctcggtattacctttggtaggttgc

SEQ ID NO: 18394 - DNA, 25 bp, SARS Virus
tcggtattaccgttggtaggttgca

SEQ ID NO: 18395 - DNA, 25 bp, SARS Virus
cggtattaccgttggtaggttgcat

SEQ ID NO: 18396 - DNA, 25 bp, SARS Virus
ggtattaccgtttgtaggttgcatt

SEQ ID NO: 18397 - DNA, 25 bp, SARS Virus
gtattaccgttgttaggttgcattc

SEQ ID NO: 18398 - DNA, 25 bp, SARS Virus
tattaccgttggtaggttgcattca

SEQ ID NO: 18399 - DNA, 25 bp, SARS Virus
attaccgttggttggttgcattcat

SEQ ID NO: 18400 - DNA, 25 bp, SARS Virus
ttaccgttggtatgttgcattcata

SEQ ID NO: 18401 - DNA, 25 bp, SARS Virus
taccgttggtagtttgcattcatat

SEQ ID NO: 18402 - DNA, 25 bp, SARS Virus
accgttggtaggttgcattcatatt

SEQ ID NO: 18403 - DNA, 25 bp, SARS Virus
ccgttggtaggttgcattcatattt

SEQ ID NO: 18404 - DNA, 25 bp, SARS Virus
cgttggtaggtttcattcatatttc

SEQ ID NO: 18405 - DNA, 25 bp, SARS Virus
gttggtaggttgtattcatatttcc

SEQ ID NO: 18406 - DNA, 25 bp, SARS Virus
ttggtaggttgctttcatatttcct

SEQ ID NO: 18407 - DNA, 25 bp, SARS Virus
tggtaggttgcattcatatttcctt

SEQ ID NO: 18408 - DNA, 25 bp, SARS Virus
ggtaggttgcattcatatttcctta

SEQ ID NO: 18409 - DNA, 25 bp, SARS Virus
gtaggttgcatttatatttccttaa

SEQ ID NO: 18410 - DNA, 25 bp, SARS Virus
taggttgcattcttatttccttaat

SEQ ID NO: 18411 - DNA, 25 bp, SARS Virus
aggttgcattcatatttccttaatt

SEQ ID NO: 18412 - DNA, 25 bp, SARS Virus
ggttgcattcatttttccttaattt

SEQ ID NO: 18413 - DNA, 25 bp, SARS Virus
gttgcattcatatttccttaatttt

SEQ ID NO: 18414 - DNA, 25 bp, SARS Virus
ttgcattcatatttccttaatttta

SEQ ID NO: 18415 - DNA, 25 bp, SARS Virus
tgcattcatatttccttaattttaa

SEQ ID NO: 18416 - DNA, 25 bp, SARS Virus
gcattcatattttcttaattttaag

SEQ ID NO: 18417 - DNA, 25 bp, SARS Virus
cattcatatttctttaattttaagt

SEQ ID NO: 18418 - DNA, 25 bp, SARS Virus
attcatatttccttaattttaagtt

SEQ ID NO: 18419 - DNA, 25 bp, SARS Virus
ttcatatttccttaattttaagttc

SEQ ID NO: 18420 - DNA, 25 bp, SARS Virus
tcatatttcctttattttaagttct

SEQ ID NO: 18421 - DNA, 25 bp, SARS Virus
catatttccttatttttaagttctc

SEQ ID NO: 18422 - DNA, 25 bp, SARS Virus
atatttccttaattttaagttctcc

SEQ ID NO: 18423 - DNA, 25 bp, SARS Virus
tatttccttaattttaagttctccc

SEQ ID NO: 18424 - DNA, 25 bp, SARS Virus
atttccttaattttaagttctcccg

SEQ ID NO: 18425 - DNA, 25 bp, SARS Virus
tttccttaattttaagttctcccgt

SEQ ID NO: 18426 - DNA, 25 bp, SARS Virus
ttccttaatttttagttctcccgta

SEQ ID NO: 18427 - DNA, 25 bp, SARS Virus
tccttaattttatgttctcccgtag

SEQ ID NO: 18428 - DNA, 25 bp, SARS Virus
ccttaattttaatttctcccgtagc

SEQ ID NO: 18429 - DNA, 25 bp, SARS Virus
cttaattttaagttctcccgtagca

SEQ ID NO: 18430 - DNA, 25 bp, SARS Virus
ttaattttaagttctcccgtagcaa

SEQ ID NO: 18431 - DNA, 25 bp, SARS Virus
taattttaagttttcccgtagcaac

SEQ ID NO: 18432 - DNA, 25 bp, SARS Virus
aattttaagttctcccgtagcaact

SEQ ID NO: 18433 - DNA, 25 bp, SARS Virus
attttaagttcttccgtagcaactg

SEQ ID NO: 18434 - DNA, 25 bp, SARS Virus
ttttaagttctctcgtagcaactga

SEQ ID NO: 18435 - DNA, 25 bp, SARS Virus
tttaagttctcctgtagcaactgat

SEQ ID NO: 18436 - DNA, 25 bp, SARS Virus
ttaagttctcccttagcaactgata

SEQ ID NO: 18437 - DNA, 25 bp, SARS Virus
taagttctcccgtagcaactgatac

SEQ ID NO: 18438 - DNA, 25 bp, SARS Virus
aagttctcccgttgcaactgatacc

SEQ ID NO: 18439 - DNA, 25 bp, SARS Virus
agttctcccgtatcaactgatacca

SEQ ID NO: 18440 - DNA, 25 bp, SARS Virus
gttctcccgtagtaactgataccac

SEQ ID NO: 18441 - DNA, 25 bp, SARS Virus
ttctcccgtagctactgataccaca

SEQ ID NO: 18442 - DNA, 25 bp, SARS Virus
tctcccgtagcatctgataccacag

SEQ ID NO: 18443 - DNA, 25 bp, SARS Virus
ctcccgtagcaattgataccacagg

SEQ ID NO: 18444 - DNA, 25 bp, SARS Virus
tcccgtagcaactgataccacaggc

SEQ ID NO: 18445 - DNA, 25 bp, SARS Virus
cccgtagcaacttataccacaggct

SEQ ID NO: 18446 - DNA, 25 bp, SARS Virus
ccgtagcaactgttaccacaggcta

SEQ ID NO: 18447 - DNA, 25 bp, SARS Virus
cgtagcaactgataccacaggctaa

SEQ ID NO: 18448 - DNA, 25 bp, SARS Virus
gtagcaactgattccacaggctaag

SEQ ID NO: 18449 - DNA, 25 bp, SARS Virus
tagcaactgatatcacaggctaaga

SEQ ID NO: 18450 - DNA, 25 bp, SARS Virus
agcaactgatactacaggctaagaa

SEQ ID NO: 18451 - DNA, 25 bp, SARS Virus
gcaactgatacctcaggctaagaag

SEQ ID NO: 18452 - DNA, 25 bp, SARS Virus
caactgataccataggctaagaaga

SEQ ID NO: 18453 - DNA, 25 bp, SARS Virus
aactgataccactggctaagaagaa

SEQ ID NO: 18454 - DNA, 25 bp, SARS Virus
actgataccacatgctaagaagaaa

SEQ ID NO: 18455 - DNA, 25 bp, SARS Virus
ctgataccacagtctaagaagaaaa

SEQ ID NO: 18456 - DNA, 25 bp, SARS Virus
tgataccacaggttaagaagaaaat

SEQ ID NO: 18457 - DNA, 25 bp, SARS Virus
gataccacaggctaagaagaaaata

SEQ ID NO: 18458 - DNA, 25 bp, SARS Virus
ataccacaggcttagaagaaaatat

SEQ ID NO: 18459 - DNA, 25 bp, SARS Virus
taccacaggctatgaagaaaatatg

SEQ ID NO: 18460 - DNA, 25 bp, SARS Virus
accacaggctaataagaaaatatga

SEQ ID NO: 18461 - DNA, 25 bp, SARS Virus
ccacaggctaagtagaaaatatgat

SEQ ID NO: 18462 - DNA, 25 bp, SARS Virus
cacaggctaagatgaaaatatgatc

SEQ ID NO: 18463 - DNA, 25 bp, SARS Virus
acaggctaagaataaaatatgatca

SEQ ID NO: 18464 - DNA, 25 bp, SARS Virus
caggctaagaagtaaatatgatcat

SEQ ID NO: 18465 - DNA, 25 bp, SARS Virus
aggctaagaagataatatgatcatt

SEQ ID NO: 18466 - DNA, 25 bp, SARS Virus
ggctaagaagaatatatgatcattt

SEQ ID NO: 18467 - DNA, 25 bp, SARS Virus
gctaagaagaaattatgatcatttc

SEQ ID NO: 18468 - DNA, 25 bp, SARS Virus
ctaagaagaaaatatgatcatttct

SEQ ID NO: 18469 - DNA, 25 bp, SARS Virus
taagaagaaaatttgatcatttctc

SEQ ID NO: 18470 - DNA, 25 bp, SARS Virus
aagaagaaaatatgatcatttctcg

SEQ ID NO: 18471 - DNA, 25 bp, SARS Virus
agaagaaaatattatcatttctcgg

SEQ ID NO: 18472 - DNA, 25 bp, SARS Virus
gaagaaaatatgttcatttctcgga

SEQ ID NO: 18473 - DNA, 25 bp, SARS Virus
aagaaaatatgatcatttctcggac

SEQ ID NO: 18474 - DNA, 25 bp, SARS Virus
agaaaatatgattatttctcggaca

SEQ ID NO: 18475 - DNA, 25 bp, SARS Virus
gaaaatatgatcttttctcggacat

SEQ ID NO: 18476 - DNA, 25 bp, SARS Virus
aaaatatgatcatttctcggacatc

SEQ ID NO: 18477 - DNA, 25 bp, SARS Virus
aaatatgatcatttctcggacatcg

SEQ ID NO: 18478 - DNA, 25 bp, SARS Virus
aatatgatcatttctcggacatcga

SEQ ID NO: 18479 - DNA, 25 bp, SARS Virus
atatgatcatttttcggacatcgaa

SEQ ID NO: 18480 - DNA, 25 bp, SARS Virus
tatgatcatttctcggacatcgaag

SEQ ID NO: 18481 - DNA, 25 bp, SARS Virus
atgatcatttcttggacatcgaaga

SEQ ID NO: 18482 - DNA, 25 bp, SARS Virus
tgatcatttctctgacatcgaagat

SEQ ID NO: 18483 - DNA, 25 bp, SARS Virus
gatcatttctcgtacatcgaagata

SEQ ID NO: 18484 - DNA, 25 bp, SARS Virus
atcatttctcggtcatcgaagataa

SEQ ID NO: 18485 - DNA, 25 bp, SARS Virus
tcatttctcggatatcgaagataat

SEQ ID NO: 18486 - DNA, 25 bp, SARS Virus
catttctcggacttcgaagataata

SEQ ID NO: 18487 - DNA, 25 bp, SARS Virus
atttctcggacatcgaagataataa

SEQ ID NO: 18488 - DNA, 25 bp, SARS Virus
tttctcggacattgaagataataat

SEQ ID NO: 18489 - DNA, 25 bp, SARS Virus
ttctcggacatctaagataataatg

SEQ ID NO: 18490 - DNA, 25 bp, SARS Virus
tctcggacatcgtagataataatgc

SEQ ID NO: 18491 - DNA, 25 bp, SARS Virus
ctcggacatcgatgataataatgct

SEQ ID NO: 18492 - DNA, 25 bp, SARS Virus
tcggacatcgaatataataatgctt

SEQ ID NO: 18493 - DNA, 25 bp, SARS Virus
cggacatcgaagttaataatgcttc

SEQ ID NO: 18494 - DNA, 25 bp, SARS Virus
ggacatcgaagataataatgcttcg

SEQ ID NO: 18495 - DNA, 25 bp, SARS Virus
gacatcgaagattataatgcttcga

SEQ ID NO: 18496 - DNA, 25 bp, SARS Virus
acatcgaagatattaatgcttcgac

SEQ ID NO: 18497 - DNA, 25 bp, SARS Virus
catcgaagataataatgcttcgact

SEQ ID NO: 18498 - DNA, 25 bp, SARS Virus
atcgaagataattatgcttcgactt

SEQ ID NO: 18499 - DNA, 25 bp, SARS Virus
tcgaagataatattgcttcgacttg

SEQ ID NO: 18500 - DNA, 25 bp, SARS Virus
cgaagataataatgcttcgacttga

SEQ ID NO: 18501 - DNA, 25 bp, SARS Virus
gaagataataattcttcgacttgag

SEQ ID NO: 18502 - DNA, 25 bp, SARS Virus
aagataataatgtttcgacttgaga

SEQ ID NO: 18503 - DNA, 25 bp, SARS Virus
agataataatgcttcgacttgagag

SEQ ID NO: 18504 - DNA, 25 bp, SARS Virus
gataataatgcttcgacttgagaga

SEQ ID NO: 18505 - DNA, 25 bp, SARS Virus
ataataatgctttgacttgagagat

SEQ ID NO: 18506 - DNA, 25 bp, SARS Virus
taataatgcttctacttgagagatt

SEQ ID NO: 18507 - DNA, 25 bp, SARS Virus
aataatgcttcgtcttgagagattt

SEQ ID NO: 18508 - DNA, 25 bp, SARS Virus
ataatgcttcgatttgagagattta

SEQ ID NO: 18509 - DNA, 25 bp, SARS Virus
taatgcttcgacttgagagatttac

SEQ ID NO: 18510 - DNA, 25 bp, SARS Virus
aatgcttcgacttgagagatttact

SEQ ID NO: 18511 - DNA, 25 bp, SARS Virus
atgcttcgactttagagatttactc

SEQ ID NO: 18512 - DNA, 25 bp, SARS Virus
tgcttcgacttgtgagatttactcg

SEQ ID NO: 18513 - DNA, 25 bp, SARS Virus
gcttcgacttgatagatttactcgg

SEQ ID NO: 18514 - DNA, 25 bp, SARS Virus
cttcgacttgagtgatttactcggc

SEQ ID NO: 18515 - DNA, 25 bp, SARS Virus
ttcgacttgagatatttactcggcg

SEQ ID NO: 18516 - DNA, 25 bp, SARS Virus
tcgacttgagagttttactcggcga

SEQ ID NO: 18517 - DNA, 25 bp, SARS Virus
cgacttgagagatttactcggcgaa

SEQ ID NO: 18518 - DNA, 25 bp, SARS Virus
gacttgagagatttactcggcgaac

SEQ ID NO: 18519 - DNA, 25 bp, SARS Virus
acttgagagatttactcggcgaaca

SEQ ID NO: 18520 - DNA, 25 bp, SARS Virus
cttgagagattttctcggcgaacag

SEQ ID NO: 18521 - DNA, 25 bp, SARS Virus
ttgagagatttattcggcgaacagt

SEQ ID NO: 18522 - DNA, 25 bp, SARS Virus
tgagagatttactcggcgaacagtg

SEQ ID NO: 18523 - DNA, 25 bp, SARS Virus
gagagatttacttggcgaacagtgt

SEQ ID NO: 18524 - DNA, 25 bp, SARS Virus
agagatttactctgcgaacagtgtt

SEQ ID NO: 18525 - DNA, 25 bp, SARS Virus
gagatttactcgtcgaacagtgtta

SEQ ID NO: 18526 - DNA, 25 bp, SARS Virus
agatttactcggtgaacagtgttac

SEQ ID NO: 18527 - DNA, 25 bp, SARS Virus
gatttactcggctaacagtgttacg

SEQ ID NO: 18528 - DNA, 25 bp, SARS Virus
atttactcggcgtacagtgttacgg

SEQ ID NO: 18529 - DNA, 25 bp, SARS Virus
tttactcggcgatcagtgttacggt

SEQ ID NO: 18530 - DNA, 25 bp, SARS Virus
ttactcggcgaatagtgttacggtt

SEQ ID NO: 18531 - DNA, 25 bp, SARS Virus
tactcggcgaactgtgttacggtta

SEQ ID NO: 18532 - DNA, 25 bp, SARS Virus
actcggcgaacattgttacggttaa

SEQ ID NO: 18533 - DNA, 25 bp, SARS Virus
ctcggcgaacagtgttacggttaac

SEQ ID NO: 18534 - DNA, 25 bp, SARS Virus
tcggcgaacagttttacggttaacc

SEQ ID NO: 18535 - DNA, 25 bp, SARS Virus
cggcgaacagtgttacggttaacca

SEQ ID NO: 18536 - DNA, 25 bp, SARS Virus
ggcgaacagtgttacggttaaccaa

SEQ ID NO: 18537 - DNA, 25 bp, SARS Virus
gcgaacagtgtttcggttaaccaat

SEQ ID NO: 18538 - DNA, 25 bp, SARS Virus
cgaacagtgttatggttaaccaata

SEQ ID NO: 18539 - DNA, 25 bp, SARS Virus
gaacagtgttactgttaaccaatac

SEQ ID NO: 18540 - DNA, 25 bp, SARS Virus
aacagtgttacgtttaaccaataca

SEQ ID NO: 18541 - DNA, 25 bp, SARS Virus
acagtgttacggttaaccaatacac

SEQ ID NO: 18542 - DNA, 25 bp, SARS Virus
cagtgttacggttaaccaatacact

SEQ ID NO: 18543 - DNA, 25 bp, SARS Virus
agtgttacggtttaccaatacactg

SEQ ID NO: 18544 - DNA, 25 bp, SARS Virus
gtgttacggttatccaatacactgt

SEQ ID NO: 18545 - DNA, 25 bp, SARS Virus
tgttacggttaatcaatacactgtg

SEQ ID NO: 18546 - DNA, 25 bp, SARS Virus
gttacggttaactaatacactgtgt

SEQ ID NO: 18547 - DNA, 25 bp, SARS Virus
ttacggttaacctatacactgtgta

SEQ ID NO: 18548 - DNA, 25 bp, SARS Virus
tacggttaaccattacactgtgtac

SEQ ID NO: 18549 - DNA, 25 bp, SARS Virus
acggttaaccaatacactgtgtacc

SEQ ID NO: 18550 - DNA, 25 bp, SARS Virus
cggttaaccaattcactgtgtacca

SEQ ID NO: 18551 - DNA, 25 bp, SARS Virus
ggttaaccaatatactgtgtaccaa

SEQ ID NO: 18552 - DNA, 25 bp, SARS Virus
gttaaccaatactctgtgtaccaaa

SEQ ID NO: 18553 - DNA, 25 bp, SARS Virus
ttaaccaatacattgtgtaccaaaa

SEQ ID NO: 18554 - DNA, 25 bp, SARS Virus
taaccaatacactgtgtaccaaaat

SEQ ID NO: 18555 - DNA, 25 bp, SARS Virus
aaccaatacactttgtaccaaaatt

SEQ ID NO: 18556 - DNA, 25 bp, SARS Virus
accaatacactgtgtaccaaaatta

SEQ ID NO: 18557 - DNA, 25 bp, SARS Virus
ccaatacactgtttaccaaaattag

SEQ ID NO: 18558 - DNA, 25 bp, SARS Virus
caatacactgtgtaccaaaattaga

SEQ ID NO: 18559 - DNA, 25 bp, SARS Virus
aatacactgtgttccaaaattagaa

SEQ ID NO: 18560 - DNA, 25 bp, SARS Virus
atacactgtgtatcaaaattagaac

SEQ ID NO: 18561 - DNA, 25 bp, SARS Virus
tacactgtgtactaaaattagaact

SEQ ID NO: 18562 - DNA, 25 bp, SARS Virus
acactgtgtacctaaattagaactt

SEQ ID NO: 18563 - DNA, 25 bp, SARS Virus
cactgtgtaccataattagaacttc

SEQ ID NO: 18564 - DNA, 25 bp, SARS Virus
actgtgtaccaatattagaacttct

SEQ ID NO: 18565 - DNA, 25 bp, SARS Virus
ctgtgtaccaaatttagaacttctc

SEQ ID NO: 18566 - DNA, 25 bp, SARS Virus
tgtgtaccaaaattagaacttctcc

SEQ ID NO: 18567 - DNA, 25 bp, SARS Virus
gtgtaccaaaattagaacttctccg

SEQ ID NO: 18568 - DNA, 25 bp, SARS Virus
tgtaccaaaatttgaacttctccga

SEQ ID NO: 18569 - DNA, 25 bp, SARS Virus
gtaccaaaattataacttctccgac

SEQ ID NO: 18570 - DNA, 25 bp, SARS Virus
taccaaaattagtacttctccgacg

SEQ ID NO: 18571 - DNA, 25 bp, SARS Virus
accaaaattagatcttctccgacgc

SEQ ID NO: 18572 - DNA, 25 bp, SARS Virus
ccaaaattagaatttctccgacgcg

SEQ ID NO: 18573 - DNA, 25 bp, SARS Virus
caaaattagaacttctccgacgcgc

SEQ ID NO: 18574 - DNA, 25 bp, SARS Virus
aaaattagaacttctccgacgcgcg

SEQ ID NO: 18575 - DNA, 25 bp, SARS Virus
aaattagaacttttccgacgcgcga

SEQ ID NO: 18576 - DNA, 25 bp, SARS Virus
aattagaacttctccgacgcgcgac

SEQ ID NO: 18577 - DNA, 25 bp, SARS Virus
attagaacttcttcgacgcgcgaca

SEQ ID NO: 18578 - DNA, 25 bp, SARS Virus
ttagaacttctctgacgcgcgacat

SEQ ID NO: 18579 - DNA, 25 bp, SARS Virus
tagaacttctcctacgcgcgacata

SEQ ID NO: 18580 - DNA, 25 bp, SARS Virus
agaacttctccgtcgcgcgacatac

SEQ ID NO: 18581 - DNA, 25 bp, SARS Virus
gaacttctccgatgcgcgacatacg

SEQ ID NO: 18582 - DNA, 25 bp, SARS Virus
aacttctccgactcgcgacatacgc

SEQ ID NO: 18583 - DNA, 25 bp, SARS Virus
acttctccgacgtgcgacatacgca

SEQ ID NO: 18584 - DNA, 25 bp, SARS Virus
cttctccgacgctcgacatacgcaa

SEQ ID NO: 18585 - DNA, 25 bp, SARS Virus
ttctccgacgcgtgacatacgcaag

SEQ ID NO: 18586 - DNA, 25 bp, SARS Virus
tctccgacgcgctacatacgcaaga

SEQ ID NO: 18587 - DNA, 25 bp, SARS Virus
ctccgacgcgcgtcatacgcaagag

SEQ ID NO: 18588 - DNA, 25 bp, SARS Virus
tccgacgcgcgatatacgcaagaga

SEQ ID NO: 18589 - DNA, 25 bp, SARS Virus
ccgacgcgcgacttacgcaagagaa

SEQ ID NO: 18590 - DNA, 25 bp, SARS Virus
cgacgcgcgacatacgcaagagaat

SEQ ID NO: 18591 - DNA, 25 bp, SARS Virus
gacgcgcgacattcgcaagagaatt

SEQ ID NO: 18592 - DNA, 25 bp, SARS Virus
acgcgcgacatatgcaagagaattt

SEQ ID NO: 18593 - DNA, 25 bp, SARS Virus
cgcgcgacatactcaagagaatttc

SEQ ID NO: 18594 - DNA, 25 bp, SARS Virus
gcgcgacatacgtaagagaatttcg

SEQ ID NO: 18595 - DNA, 25 bp, SARS Virus
cgcgacatacgctagagaatttcga

SEQ ID NO: 18596 - DNA, 25 bp, SARS Virus
gcgacatacgcatgagaatttcgag

SEQ ID NO: 18597 - DNA, 25 bp, SARS Virus
cgacatacgcaatagaatttcgagg

SEQ ID NO: 18598 - DNA, 25 bp, SARS Virus
gacatacgcaagtgaatttcgagga

SEQ ID NO: 18599 - DNA, 25 bp, SARS Virus
acatacgcaagataatttcgaggac

SEQ ID NO: 18600 - DNA, 25 bp, SARS Virus
catacgcaagagtatttcgaggacg

SEQ ID NO: 18601 - DNA, 25 bp, SARS Virus
atacgcaagagattttcgaggacgg

SEQ ID NO: 18602 - DNA, 25 bp, SARS Virus
tacgcaagagaatttcgaggacggc

SEQ ID NO: 18603 - DNA, 25 bp, SARS Virus
acgcaagagaatttcgaggacggca

SEQ ID NO: 18604 - DNA, 25 bp, SARS Virus
cgcaagagaatttcgaggacggcat

SEQ ID NO: 18605 - DNA, 25 bp, SARS Virus
gcaagagaattttgaggacggcatc

SEQ ID NO: 18606 - DNA, 25 bp, SARS Virus
caagagaatttctaggacggcatca

SEQ ID NO: 18607 - DNA, 25 bp, SARS Virus
aagagaatttcgtggacggcatcac

SEQ ID NO: 18608 - DNA, 25 bp, SARS Virus
agagaatttcgatgacggcatcaca

SEQ ID NO: 18609 - DNA, 25 bp, SARS Virus
gagaatttcgagtacggcatcacag

SEQ ID NO: 18610 - DNA, 25 bp, SARS Virus
agaatttcgaggtcggcatcacagt

SEQ ID NO: 18611 - DNA, 25 bp, SARS Virus
gaatttcgaggatggcatcacagtc

SEQ ID NO: 18612 - DNA, 25 bp, SARS Virus
aatttcgaggactgcatcacagtca

SEQ ID NO: 18613 - DNA, 25 bp, SARS Virus
atttcgaggacgtcatcacagtcat

SEQ ID NO: 18614 - DNA, 25 bp, SARS Virus
tttcgaggacggtatcacagtcata

SEQ ID NO: 18615 - DNA, 25 bp, SARS Virus
ttcgaggacggcttcacagtcatag

SEQ ID NO: 18616 - DNA, 25 bp, SARS Virus
tcgaggacggcatcacagtcatagt

SEQ ID NO: 18617 - DNA, 25 bp, SARS Virus
cgaggacggcattacagtcatagta

SEQ ID NO: 18618 - DNA, 25 bp, SARS Virus
gaggacggcatctcagtcatagtag

SEQ ID NO: 18619 - DNA, 25 bp, SARS Virus
aggacggcatcatagtcatagtagt

SEQ ID NO: 18620 - DNA, 25 bp, SARS Virus
ggacggcatcactgtcatagtagtg

SEQ ID NO: 18621 - DNA, 25 bp, SARS Virus
gacggcatcacattcatagtagtgg

SEQ ID NO: 18622 - DNA, 25 bp, SARS Virus
acggcatcacagtcatagtagtggt

SEQ ID NO: 18623 - DNA, 25 bp, SARS Virus
cggcatcacagttatagtagtggtc

SEQ ID NO: 18624 - DNA, 25 bp, SARS Virus
ggcatcacagtcttagtagtggtct

SEQ ID NO: 18625 - DNA, 25 bp, SARS Virus
gcatcacagtcatagtagtggtcta

SEQ ID NO: 18626 - DNA, 25 bp, SARS Virus
catcacagtcattgtagtggtctac

SEQ ID NO: 18627 - DNA, 25 bp, SARS Virus
atcacagtcatattagtggtctacg

SEQ ID NO: 18628 - DNA, 25 bp, SARS Virus
tcacagtcatagtagtggtctacga

SEQ ID NO: 18629 - DNA, 25 bp, SARS Virus
cacagtcatagttgtggtctacgac

SEQ ID NO: 18630 - DNA, 25 bp, SARS Virus
acagtcatagtattggtctacgaca

SEQ ID NO: 18631 - DNA, 25 bp, SARS Virus
cagtcatagtagtggtctacgacaa

SEQ ID NO: 18632 - DNA, 25 bp, SARS Virus
agtcatagtagttgtctacgacaat

SEQ ID NO: 18633 - DNA, 25 bp, SARS Virus
gtcatagtagtgttctacgacaatg

SEQ ID NO: 18634 - DNA, 25 bp, SARS Virus
tcatagtagtggtctacgacaatga

SEQ ID NO: 18635 - DNA, 25 bp, SARS Virus
catagtagtggtttacgacaatgat

SEQ ID NO: 18636 - DNA, 25 bp, SARS Virus
atagtagtggtctacgacaatgatg

SEQ ID NO: 18637 - DNA, 25 bp, SARS Virus
tagtagtggtcttcgacaatgatgt

SEQ ID NO: 18638 - DNA, 25 bp, SARS Virus
agtagtggtctatgacaatgatgta

SEQ ID NO: 18639 - DNA, 25 bp, SARS Virus
gtagtggtctactacaatgatgtat

SEQ ID NO: 18640 - DNA, 25 bp, SARS Virus
tagtggtctacgtcaatgatgtata

SEQ ID NO: 18641 - DNA, 25 bp, SARS Virus
agtggtctacgataatgatgtatat

SEQ ID NO: 18642 - DNA, 25 bp, SARS Virus
gtggtctacgactatgatgtatatt

SEQ ID NO: 18643 - DNA, 25 bp, SARS Virus
tggtctacgacattgatgtatatta

SEQ ID NO: 18644 - DNA, 25 bp, SARS Virus
ggtctacgacaatgatgtatattac

SEQ ID NO: 18645 - DNA, 25 bp, SARS Virus
gtctacgacaattatgtatattacc

SEQ ID NO: 18646 - DNA, 25 bp, SARS Virus
tctacgacaatgttgtatattacct

SEQ ID NO: 18647 - DNA, 25 bp, SARS Virus
ctacgacaatgatgtatattaccta

SEQ ID NO: 18648 - DNA, 25 bp, SARS Virus
tacgacaatgatttatattacctat

SEQ ID NO: 18649 - DNA, 25 bp, SARS Virus
acgacaatgatgtatattacctatg

SEQ ID NO: 18650 - DNA, 25 bp, SARS Virus
cgacaatgatgtttattacctatgg

SEQ ID NO: 18651 - DNA, 25 bp, SARS Virus
gacaatgatgtatattacctatgga

SEQ ID NO: 18652 - DNA, 25 bp, SARS Virus
acaatgatgtattttacctatggag

SEQ ID NO: 18653 - DNA, 25 bp, SARS Virus
caatgatgtatattacctatggagt

SEQ ID NO: 18654 - DNA, 25 bp, SARS Virus
aatgatgtatattacctatggagtg

SEQ ID NO: 18655 - DNA, 25 bp, SARS Virus
atgatgtatatttcctatggagtga

SEQ ID NO: 18656 - DNA, 25 bp, SARS Virus
tgatgtatattatctatggagtgaa

SEQ ID NO: 18657 - DNA, 25 bp, SARS Virus
gatgtatattacttatggagtgaag

SEQ ID NO: 18658 - DNA, 25 bp, SARS Virus
atgtatattacctatggagtgaagc

SEQ ID NO: 18659 - DNA, 25 bp, SARS Virus
tgtatattacctttggagtgaagca

SEQ ID NO: 18660 - DNA, 25 bp, SARS Virus
gtatattacctatggagtgaagcag

SEQ ID NO: 18661 - DNA, 25 bp, SARS Virus
tatattacctattgagtgaagcagt

SEQ ID NO: 18662 - DNA, 25 bp, SARS Virus
atattacctatgtagtgaagcagta

SEQ ID NO: 18663 - DNA, 25 bp, SARS Virus
tattacctatggtgtgaagcagtag

SEQ ID NO: 18664 - DNA, 25 bp, SARS Virus
attacctatggattgaagcagtagt

SEQ ID NO: 18665 - DNA, 25 bp, SARS Virus
ttacctatggagtgaagcagtagtt

SEQ ID NO: 18666 - DNA, 25 bp, SARS Virus
tacctatggagttaagcagtagttt

SEQ ID NO: 18667 - DNA, 25 bp, SARS Virus
acctatggagtgtagcagtagtttc

SEQ ID NO: 18668 - DNA, 25 bp, SARS Virus
cctatggagtgatgcagtagtttct

SEQ ID NO: 18669 - DNA, 25 bp, SARS Virus
ctatggagtgaatcagtagtttctg

SEQ ID NO: 18670 - DNA, 25 bp, SARS Virus
tatggagtgaagtagtagtttctgt

SEQ ID NO: 18671 - DNA, 25 bp, SARS Virus
atggagtgaagctgtagtttctgta

SEQ ID NO: 18672 - DNA, 25 bp, SARS Virus
tggagtgaagcattagtttctgtag

SEQ ID NO: 18673 - DNA, 25 bp, SARS Virus
ggagtgaagcagaagtttctgtaga

SEQ ID NO: 18674 - DNA, 25 bp, SARS Virus
gagtgaagcagtagtttctgtagac

SEQ ID NO: 18675 - DNA, 25 bp, SARS Virus
agtgaagcagtaatttctgtagact

SEQ ID NO: 18676 - DNA, 25 bp, SARS Virus
gtgaagcagtagattctgtagactc

SEQ ID NO: 18677 - DNA, 25 bp, SARS Virus
tgaagcagtagtatctgtagactcc

SEQ ID NO: 18678 - DNA, 25 bp, SARS Virus
gaagcagtagttactgtagactcct

SEQ ID NO: 18679 - DNA, 25 bp, SARS Virus
aagcagtagtttatgtagactcctc

SEQ ID NO: 18680 - DNA, 25 bp, SARS Virus
agcagtagtttcagtagactcctcg

SEQ ID NO: 18681 - DNA, 25 bp, SARS Virus
gcagtagtttctatagactcctcgt

SEQ ID NO: 18682 - DNA, 25 bp, SARS Virus
cagtagtttctgaagactcctcgtg

SEQ ID NO: 18683 - DNA, 25 bp, SARS Virus
agtagtttctgtagactcctcgtga

SEQ ID NO: 18684 - DNA, 25 bp, SARS Virus
gtagtttctgtaaactcctcgtgaa

SEQ ID NO: 18685 - DNA, 25 bp, SARS Virus
tagtttctgtagactcctcgtgaaa

SEQ ID NO: 18686 - DNA, 25 bp, SARS Virus
agtttctgtagaatcctcgtgaaac

SEQ ID NO: 18687 - DNA, 25 bp, SARS Virus
gtttctgtagacacctcgtgaaaca

SEQ ID NO: 18688 - DNA, 25 bp, SARS Virus
tttctgtagactactcgtgaaacat

SEQ ID NO: 18689 - DNA, 25 bp, SARS Virus
ttctgtagactcatcgtgaaacatc

SEQ ID NO: 18690 - DNA, 25 bp, SARS Virus
tctgtagactccacgtgaaacatct

SEQ ID NO: 18691 - DNA, 25 bp, SARS Virus
ctgtagactcctagtgaaacatctt

SEQ ID NO: 18692 - DNA, 25 bp, SARS Virus
tgtagactcctcatgaaacatcttt

SEQ ID NO: 18693 - DNA, 25 bp, SARS Virus
gtagactcctcgagaaacatctttg

SEQ ID NO: 18694 - DNA, 25 bp, SARS Virus
tagactcctcgtaaaacatctttgt

SEQ ID NO: 18695 - DNA, 25 bp, SARS Virus
agactcctcgtgaaacatctttgtc

SEQ ID NO: 18696 - DNA, 25 bp, SARS Virus
gactcctcgtgaaacatctttgtca

SEQ ID NO: 18697 - DNA, 25 bp, SARS Virus
actcctcgtgaaacatctttgtcaa

SEQ ID NO: 18698 - DNA, 25 bp, SARS Virus
ctcctcgtgaaaaatctttgtcaaa

SEQ ID NO: 18699 - DNA, 25 bp, SARS Virus
tcctcgtgaaacatctttgtcaaag

SEQ ID NO: 18700 - DNA, 25 bp, SARS Virus
cctcgtgaaacaactttgtcaaaga

SEQ ID NO: 18701 - DNA, 25 bp, SARS Virus
ctcgtgaaacatatttgtcaaagaa

SEQ ID NO: 18702 - DNA, 25 bp, SARS Virus
tcgtgaaacatcattgtcaaagaaa

SEQ ID NO: 18703 - DNA, 25 bp, SARS Virus
cgtgaaacatctatgtcaaagaaac

SEQ ID NO: 18704 - DNA, 25 bp, SARS Virus
gtgaaacatcttagtcaaagaaacc

SEQ ID NO: 18705 - DNA, 25 bp, SARS Virus
tgaaacatctttatcaaagaaaccg

SEQ ID NO: 18706 - DNA, 25 bp, SARS Virus
gaaacatctttgacaaagaaaccga

SEQ ID NO: 18707 - DNA, 25 bp, SARS Virus
aaacatctttgtaaaagaaaccgac

SEQ ID NO: 18708 - DNA, 25 bp, SARS Virus
aacatctttgtcaaagaaaccgacc

SEQ ID NO: 18709 - DNA, 25 bp, SARS Virus
acatctttgtcaaagaaaccgaccg

SEQ ID NO: 18710 - DNA, 25 bp, SARS Virus
catctttgtcaaagaaaccgaccga

SEQ ID NO: 18711 - DNA, 25 bp, SARS Virus
atctttgtcaaaaaaaccgaccgag

SEQ ID NO: 18712 - DNA, 25 bp, SARS Virus
tctttgtcaaagaaaccgaccgaga

SEQ ID NO: 18713 - DNA, 25 bp, SARS Virus
ctttgtcaaagaaaccgaccgagaa

SEQ ID NO: 18714 - DNA, 25 bp, SARS Virus
tttgtcaaagaaaccgaccgagaat

SEQ ID NO: 18715 - DNA, 25 bp, SARS Virus
ttgtcaaagaaaacgaccgagaatg

SEQ ID NO: 18716 - DNA, 25 bp, SARS Virus
tgtcaaagaaacagaccgagaatgt

SEQ ID NO: 18717 - DNA, 25 bp, SARS Virus
gtcaaagaaaccaaccgagaatgtc

SEQ ID NO: 18718 - DNA, 25 bp, SARS Virus
tcaaagaaaccgaccgagaatgtct

SEQ ID NO: 18719 - DNA, 25 bp, SARS Virus
caaagaaaccgaacgagaatgtctc

SEQ ID NO: 18720 - DNA, 25 bp, SARS Virus
aaagaaaccgacagagaatgtctct

SEQ ID NO: 18721 - DNA, 25 bp, SARS Virus
aagaaaccgaccaagaatgtctcta

SEQ ID NO: 18722 - DNA, 25 bp, SARS Virus
agaaaccgaccgagaatgtctctaa

SEQ ID NO: 18723 - DNA, 25 bp, SARS Virus
gaaaccgaccgaaaatgtctctaac

SEQ ID NO: 18724 - DNA, 25 bp, SARS Virus
aaaccgaccgagaatgtctctaacc

SEQ ID NO: 18725 - DNA, 25 bp, SARS Virus
aaccgaccgagaatgtctctaacca

SEQ ID NO: 18726 - DNA, 25 bp, SARS Virus
accgaccgagaaagtctctaaccag

SEQ ID NO: 18727 - DNA, 25 bp, SARS Virus
ccgaccgagaatatctctaaccagg

SEQ ID NO: 18728 - DNA, 25 bp, SARS Virus
cgaccgagaatgactctaaccagga

SEQ ID NO: 18729 - DNA, 25 bp, SARS Virus
gaccgagaatgtatctaaccaggat

SEQ ID NO: 18730 - DNA, 25 bp, SARS Virus
accgagaatgtcactaaccaggata

SEQ ID NO: 18731 - DNA, 25 bp, SARS Virus
ccgagaatgtctataaccaggataa

SEQ ID NO: 18732 - DNA, 25 bp, SARS Virus
cgagaatgtctcaaaccaggataag

SEQ ID NO: 18733 - DNA, 25 bp, SARS Virus
gagaatgtctctaaccaggataagt

SEQ ID NO: 18734 - DNA, 25 bp, SARS Virus
agaatgtctctaaccaggataagtc

SEQ ID NO: 18735 - DNA, 25 bp, SARS Virus
gaatgtctctaaacaggataagtcc

SEQ ID NO: 18736 - DNA, 25 bp, SARS Virus
aatgtctctaacaaggataagtcct

SEQ ID NO: 18737 - DNA, 25 bp, SARS Virus
atgtctctaaccaggataagtcctg

SEQ ID NO: 18738 - DNA, 25 bp, SARS Virus
tgtctctaaccaagataagtcctgt

SEQ ID NO: 18739 - DNA, 25 bp, SARS Virus
gtctctaaccagaataagtcctgtc

SEQ ID NO: 18740 - DNA, 25 bp, SARS Virus
tctctaaccaggataagtcctgtcg

SEQ ID NO: 18741 - DNA, 25 bp, SARS Virus
ctctaaccaggaaaagtcctgtcgc

SEQ ID NO: 18742 - DNA, 25 bp, SARS Virus
tctaaccaggataagtcctgtcgca

SEQ ID NO: 18743 - DNA, 25 bp, SARS Virus
ctaaccaggataagtcctgtcgcat

SEQ ID NO: 18744 - DNA, 25 bp, SARS Virus
taaccaggataaatcctgtcgcatg

SEQ ID NO: 18745 - DNA, 25 bp, SARS Virus
aaccaggataagacctgtcgcatgt

SEQ ID NO: 18746 - DNA, 25 bp, SARS Virus
accaggataagtactgtcgcatgtc

SEQ ID NO: 18747 - DNA, 25 bp, SARS Virus
ccaggataagtcatgtcgcatgtct

SEQ ID NO: 18748 - DNA, 25 bp, SARS Virus
caggataagtccagtcgcatgtctc

SEQ ID NO: 18749 - DNA, 25 bp, SARS Virus
aggataagtcctatcgcatgtctca

SEQ ID NO: 18750 - DNA, 25 bp, SARS Virus
ggataagtcctgacgcatgtctcaa

SEQ ID NO: 18751 - DNA, 25 bp, SARS Virus
gataagtcctgtagcatgtctcaat

SEQ ID NO: 18752 - DNA, 25 bp, SARS Virus
ataagtcctgtcacatgtctcaatc

SEQ ID NO: 18753 - DNA, 25 bp, SARS Virus
taagtcctgtcgaatgtctcaatcc

SEQ ID NO: 18754 - DNA, 25 bp, SARS Virus
aagtcctgtcgcatgtctcaatcca

SEQ ID NO: 18755 - DNA, 25 bp, SARS Virus
agtcctgtcgcaagtctcaatccac

SEQ ID NO: 18756 - DNA, 25 bp, SARS Virus
gtcctgtcgcatatctcaatccaca

SEQ ID NO: 18757 - DNA, 25 bp, SARS Virus
tcctgtcgcatgactcaatccacaa

SEQ ID NO: 18758 - DNA, 25 bp, SARS Virus
cctgtcgcatgtatcaatccacaac

SEQ ID NO: 18759 - DNA, 25 bp, SARS Virus
ctgtcgcatgtcacaatccacaact

SEQ ID NO: 18760 - DNA, 25 bp, SARS Virus
tgtcgcatgtctaaatccacaactt

SEQ ID NO: 18761 - DNA, 25 bp, SARS Virus
gtcgcatgtctcaatccacaactta

SEQ ID NO: 18762 - DNA, 25 bp, SARS Virus
tcgcatgtctcaatccacaacttaa

SEQ ID NO: 18763 - DNA, 25 bp, SARS Virus
cgcatgtctcaaaccacaacttaaa

SEQ ID NO: 18764 - DNA, 25 bp, SARS Virus
gcatgtctcaatacacaacttaaag

SEQ ID NO: 18765 - DNA, 25 bp, SARS Virus
catgtctcaatcaacaacttaaaga

SEQ ID NO: 18766 - DNA, 25 bp, SARS Virus
atgtctcaatccacaacttaaagaa

SEQ ID NO: 18767 - DNA, 25 bp, SARS Virus
tgtctcaatccaaaacttaaagaat

SEQ ID NO: 18768 - DNA, 25 bp, SARS Virus
gtctcaatccacaacttaaagaatt

SEQ ID NO: 18769 - DNA, 25 bp, SARS Virus
tctcaatccacaacttaaagaattc

SEQ ID NO: 18770 - DNA, 25 bp, SARS Virus
ctcaatccacaaattaaagaattcg

SEQ ID NO: 18771 - DNA, 25 bp, SARS Virus
tcaatccacaacataaagaattcgc

SEQ ID NO: 18772 - DNA, 25 bp, SARS Virus
caatccacaactaaaagaattcgca

SEQ ID NO: 18773 - DNA, 25 bp, SARS Virus
aatccacaacttaaagaattcgcac

SEQ ID NO: 18774 - DNA, 25 bp, SARS Virus
atccacaacttaaagaattcgcacc

SEQ ID NO: 18775 - DNA, 25 bp, SARS Virus
tccacaacttaaagaattcgcacca

SEQ ID NO: 18776 - DNA, 25 bp, SARS Virus
ccacaacttaaaaaattcgcaccac

SEQ ID NO: 18777 - DNA, 25 bp, SARS Virus
cacaacttaaagaattcgcaccact

SEQ ID NO: 18778 - DNA, 25 bp, SARS Virus
acaacttaaagaattcgcaccactg

SEQ ID NO: 18779 - DNA, 25 bp, SARS Virus
caacttaaagaaatcgcaccactgt

SEQ ID NO: 18780 - DNA, 25 bp, SARS Virus
aacttaaagaatacgcaccactgtt

SEQ ID NO: 18781 - DNA, 25 bp, SARS Virus
acttaaagaattagcaccactgttt

SEQ ID NO: 18782 - DNA, 25 bp, SARS Virus
cttaaagaattcacaccactgtttt

SEQ ID NO: 18783 - DNA, 25 bp, SARS Virus
ttaaagaattcgaaccactgtttta

SEQ ID NO: 18784 - DNA, 25 bp, SARS Virus
taaagaattcgcaccactgttttaa

SEQ ID NO: 18785 - DNA, 25 bp, SARS Virus
aaagaattcgcaacactgttttaac

SEQ ID NO: 18786 - DNA, 25 bp, SARS Virus
aagaattcgcacaactgttttaaca

SEQ ID NO: 18787 - DNA, 25 bp, SARS Virus
agaattcgcaccactgttttaacac

SEQ ID NO: 18788 - DNA, 25 bp, SARS Virus
gaattcgcaccaatgttttaacaca

SEQ ID NO: 18789 - DNA, 25 bp, SARS Virus
aattcgcaccacagttttaacacat

SEQ ID NO: 18790 - DNA, 25 bp, SARS Virus
attcgcaccactattttaacacatg

SEQ ID NO: 18791 - DNA, 25 bp, SARS Virus
ttcgcaccactgatttaacacatgg

SEQ ID NO: 18792 - DNA, 25 bp, SARS Virus
tcgcaccactgtattaacacatggt

SEQ ID NO: 18793 - DNA, 25 bp, SARS Virus
cgcaccactgttataacacatggtg

SEQ ID NO: 18794 - DNA, 25 bp, SARS Virus
gcaccactgtttaaacacatggtgt

SEQ ID NO: 18795 - DNA, 25 bp, SARS Virus
caccactgttttaacacatggtgtg

SEQ ID NO: 18796 - DNA, 25 bp, SARS Virus
accactgttttaacacatggtgtga

SEQ ID NO: 18797 - DNA, 25 bp, SARS Virus
ccactgttttaaaacatggtgtgag

SEQ ID NO: 18798 - DNA, 25 bp, SARS Virus
cactgttttaacacatggtgtgaga

SEQ ID NO: 18799 - DNA, 25 bp, SARS Virus
actgttttaacaaatggtgtgagac

SEQ ID NO: 18800 - DNA, 25 bp, SARS Virus
ctgttttaacacatggtgtgagacc

SEQ ID NO: 18801 - DNA, 25 bp, SARS Virus
tgttttaacacaaggtgtgagacct

SEQ ID NO: 18802 - DNA, 25 bp, SARS Virus
gttttaacacatagtgtgagacctc

SEQ ID NO: 18803 - DNA, 25 bp, SARS Virus
ttttaacacatgatgtgagacctct

SEQ ID NO: 18804 - DNA, 25 bp, SARS Virus
tttaacacatggagtgagacctctc

SEQ ID NO: 18805 - DNA, 25 bp, SARS Virus
ttaacacatggtatgagacctctcg

SEQ ID NO: 18806 - DNA, 25 bp, SARS Virus
taacacatggtgagagacctctcgg

SEQ ID NO: 18807 - DNA, 25 bp, SARS Virus
aacacatggtgtaagacctctcggg

SEQ ID NO: 18808 - DNA, 25 bp, SARS Virus
acacatggtgtgagacctctcgggg

SEQ ID NO: 18809 - DNA, 25 bp, SARS Virus
cacatggtgtgaaacctctcggggc

SEQ ID NO: 18810 - DNA, 25 bp, SARS Virus
acatggtgtgagacctctcggggca

SEQ ID NO: 18811 - DNA, 25 bp, SARS Virus
catggtgtgagaactctcggggcag

SEQ ID NO: 18812 - DNA, 25 bp, SARS Virus
atggtgtgagacatctcggggcagc

SEQ ID NO: 18813 - DNA, 25 bp, SARS Virus
tggtgtgagaccactcggggcagct

SEQ ID NO: 18814 - DNA, 25 bp, SARS Virus
ggtgtgagacctatcggggcagctc

SEQ ID NO: 18815 - DNA, 25 bp, SARS Virus
gtgtgagacctcacggggcagctca

SEQ ID NO: 18816 - DNA, 25 bp, SARS Virus
tgtgagacctctaggggcagctcaa

SEQ ID NO: 18817 - DNA, 25 bp, SARS Virus
gtgagacctctcagggcagctcaaa

SEQ ID NO: 18818 - DNA, 25 bp, SARS Virus
tgagacctctcgaggcagctcaaag

SEQ ID NO: 18819 - DNA, 25 bp, SARS Virus
gagacctctcggagcagctcaaagt

SEQ ID NO: 18820 - DNA, 25 bp, SARS Virus
agacctctcgggacagctcaaagta

SEQ ID NO: 18821 - DNA, 25 bp, SARS Virus
gacctctcggggaagctcaaagtag

SEQ ID NO: 18822 - DNA, 25 bp, SARS Virus
acctctcggggcagctcaaagtaga

SEQ ID NO: 18823 - DNA, 25 bp, SARS Virus
cctctcggggcaactcaaagtagaa

SEQ ID NO: 18824 - DNA, 25 bp, SARS Virus
ctctcggggcagatcaaagtagaac

SEQ ID NO: 18825 - DNA, 25 bp, SARS Virus
tctcggggcagcacaaagtagaact

SEQ ID NO: 18826 - DNA, 25 bp, SARS Virus
ctcggggcagctaaaagtagaactg

SEQ ID NO: 18827 - DNA, 25 bp, SARS Virus
tcggggcagctcaaagtagaactgc

SEQ ID NO: 18828 - DNA, 25 bp, SARS Virus
cggggcagctcaaagtagaactgcc

SEQ ID NO: 18829 - DNA, 25 bp, SARS Virus
ggggcagctcaaagtagaactgcca

SEQ ID NO: 18830 - DNA, 25 bp, SARS Virus
gggcagctcaaaatagaactgccac

SEQ ID NO: 18831 - DNA, 25 bp, SARS Virus
ggcagctcaaagaagaactgccact

SEQ ID NO: 18832 - DNA, 25 bp, SARS Virus
gcagctcaaagtagaactgccactc

SEQ ID NO: 18833 - DNA, 25 bp, SARS Virus
cagctcaaagtaaaactgccactcc

SEQ ID NO: 18834 - DNA, 25 bp, SARS Virus
agctcaaagtagaactgccactcca

SEQ ID NO: 18835 - DNA, 25 bp, SARS Virus
gctcaaagtagaactgccactccaa

SEQ ID NO: 18836 - DNA, 25 bp, SARS Virus
ctcaaagtagaaatgccactccaag

SEQ ID NO: 18837 - DNA, 25 bp, SARS Virus
tcaaagtagaacagccactccaaga

SEQ ID NO: 18838 - DNA, 25 bp, SARS Virus
caaagtagaactaccactccaagaa

SEQ ID NO: 18839 - DNA, 25 bp, SARS Virus
aaagtagaactgacactccaagaaa

SEQ ID NO: 18840 - DNA, 25 bp, SARS Virus
aagtagaactgcaactccaagaaag

SEQ ID NO: 18841 - DNA, 25 bp, SARS Virus
agtagaactgccactccaagaaagt

SEQ ID NO: 18842 - DNA, 25 bp, SARS Virus
gtagaactgccaatccaagaaagtg

SEQ ID NO: 18843 - DNA, 25 bp, SARS Virus
tagaactgccacaccaagaaagtga

SEQ ID NO: 18844 - DNA, 25 bp, SARS Virus
agaactgccactacaagaaagtgaa

SEQ ID NO: 18845 - DNA, 25 bp, SARS Virus
gaactgccactcaaagaaagtgaac

SEQ ID NO: 18846 - DNA, 25 bp, SARS Virus
aactgccactccaagaaagtgaact

SEQ ID NO: 18847 - DNA, 25 bp, SARS Virus
actgccactccaagaaagtgaactg

SEQ ID NO: 18848 - DNA, 25 bp, SARS Virus
ctgccactccaaaaaagtgaactgt

SEQ ID NO: 18849 - DNA, 25 bp, SARS Virus
tgccactccaagaaagtgaactgtt

SEQ ID NO: 18850 - DNA, 25 bp, SARS Virus
gccactccaagaaagtgaactgttt

SEQ ID NO: 18851 - DNA, 25 bp, SARS Virus
ccactccaagaaagtgaactgtttg

SEQ ID NO: 18852 - DNA, 25 bp, SARS Virus
cactccaagaaaatgaactgtttga

SEQ ID NO: 18853 - DNA, 25 bp, SARS Virus
actccaagaaagagaactgtttgat

SEQ ID NO: 18854 - DNA, 25 bp, SARS Virus
ctccaagaaagtaaactgtttgatt

SEQ ID NO: 18855 - DNA, 25 bp, SARS Virus
tccaagaaagtgaactgtttgattt

SEQ ID NO: 18856 - DNA, 25 bp, SARS Virus
ccaagaaagtgaactgtttgatttc

SEQ ID NO: 18857 - DNA, 25 bp, SARS Virus
caagaaagtgaaatgtttgatttct

SEQ ID NO: 18858 - DNA, 25 bp, SARS Virus
aagaaagtgaacagtttgatttctc

SEQ ID NO: 18859 - DNA, 25 bp, SARS Virus
agaaagtgaactatttgatttctca

SEQ ID NO: 18860 - DNA, 25 bp, SARS Virus
gaaagtgaactgattgatttctcag

SEQ ID NO: 18861 - DNA, 25 bp, SARS Virus
aaagtgaactgtatgatttctcaga

SEQ ID NO: 18862 - DNA, 25 bp, SARS Virus
aagtgaactgttagatttctcagag

SEQ ID NO: 18863 - DNA, 25 bp, SARS Virus
agtgaactgtttaatttctcagaga

SEQ ID NO: 18864 - DNA, 25 bp, SARS Virus
gtgaactgtttgatttctcagagaa

SEQ ID NO: 18865 - DNA, 25 bp, SARS Virus
tgaactgtttgaattctcagagaat

SEQ ID NO: 18866 - DNA, 25 bp, SARS Virus
gaactgtttgatatctcagagaata

SEQ ID NO: 18867 - DNA, 25 bp, SARS Virus
aactgtttgattactcagagaatag

SEQ ID NO: 18868 - DNA, 25 bp, SARS Virus
actgtttgatttatcagagaatagg

SEQ ID NO: 18869 - DNA, 25 bp, SARS Virus
ctgtttgatttcacagagaataggg

SEQ ID NO: 18870 - DNA, 25 bp, SARS Virus
tgtttgatttctaagagaataggga

SEQ ID NO: 18871 - DNA, 25 bp, SARS Virus
gtttgatttctcagagaatagggac

SEQ ID NO: 18872 - DNA, 25 bp, SARS Virus
tttgatttctcaaagaatagggacg

SEQ ID NO: 18873 - DNA, 25 bp, SARS Virus
ttgatttctcagagaatagggacgc

SEQ ID NO: 18874 - DNA, 25 bp, SARS Virus
tgatttctcagaaaatagggacgcc

SEQ ID NO: 18875 - DNA, 25 bp, SARS Virus
gatttctcagagaatagggacgccc

SEQ ID NO: 18876 - DNA, 25 bp, SARS Virus
atttctcagagaatagggacgccct

SEQ ID NO: 18877 - DNA, 25 bp, SARS Virus
tttctcagagaaaagggacgccctc

SEQ ID NO: 18878 - DNA, 25 bp, SARS Virus
ttctcagagaatagggacgccctcc

SEQ ID NO: 18879 - DNA, 25 bp, SARS Virus
tctcagagaataaggacgccctcca

SEQ ID NO: 18880 - DNA, 25 bp, SARS Virus
ctcagagaatagagacgccctccaa

SEQ ID NO: 18881 - DNA, 25 bp, SARS Virus
tcagagaataggaacgccctccaat

SEQ ID NO: 18882 - DNA, 25 bp, SARS Virus
cagagaatagggacgccctccaatt

SEQ ID NO: 18883 - DNA, 25 bp, SARS Virus
agagaatagggaagccctccaattc

SEQ ID NO: 18884 - DNA, 25 bp, SARS Virus
gagaatagggacaccctccaattct

SEQ ID NO: 18885 - DNA, 25 bp, SARS Virus
agaatagggacgacctccaattctg

SEQ ID NO: 18886 - DNA, 25 bp, SARS Virus
gaatagggacgcactccaattctga

SEQ ID NO: 18887 - DNA, 25 bp, SARS Virus
aatagggacgccatccaattctgat

SEQ ID NO: 18888 - DNA, 25 bp, SARS Virus
atagggacgcccaccaattctgata

SEQ ID NO: 18889 - DNA, 25 bp, SARS Virus
tagggacgccctacaattctgatat

SEQ ID NO: 18890 - DNA, 25 bp, SARS Virus
agggacgccctcaaattctgatatt

SEQ ID NO: 18891 - DNA, 25 bp, SARS Virus
gggacgccctccaattctgatattt

SEQ ID NO: 18892 - DNA, 25 bp, SARS Virus
ggacgccctccaattctgatatttt

SEQ ID NO: 18893 - DNA, 25 bp, SARS Virus
gacgccctccaaatctgatattttc

SEQ ID NO: 18894 - DNA, 25 bp, SARS Virus
acgccctccaatactgatattttca

SEQ ID NO: 18895 - DNA, 25 bp, SARS Virus
cgccctccaattatgatattttcac

SEQ ID NO: 18896 - DNA, 25 bp, SARS Virus
gccctccaattcagatattttcaca

SEQ ID NO: 18897 - DNA, 25 bp, SARS Virus
ccctccaattctaatattttcacaa

SEQ ID NO: 18898 - DNA, 25 bp, SARS Virus
cctccaattctgatattttcacaag

SEQ ID NO: 18899 - DNA, 25 bp, SARS Virus
ctccaattctgaaattttcacaagt

SEQ ID NO: 18900 - DNA, 25 bp, SARS Virus
tccaattctgatattttcacaagtg

SEQ ID NO: 18901 - DNA, 25 bp, SARS Virus
ccaattctgataatttcacaagtgt

SEQ ID NO: 18902 - DNA, 25 bp, SARS Virus
caattctgatatattcacaagtgtt

SEQ ID NO: 18903 - DNA, 25 bp, SARS Virus
aattctgatattatcacaagtgttg

SEQ ID NO: 18904 - DNA, 25 bp, SARS Virus
attctgatatttacacaagtgttga

SEQ ID NO: 18905 - DNA, 25 bp, SARS Virus
ttctgatattttaacaagtgttgac

SEQ ID NO: 18906 - DNA, 25 bp, SARS Virus
tctgatattttcacaagtgttgaca

SEQ ID NO: 18907 - DNA, 25 bp, SARS Virus
ctgatattttcaaaagtgttgacac

SEQ ID NO: 18908 - DNA, 25 bp, SARS Virus
tgatattttcacaagtgttgacacc

SEQ ID NO: 18909 - DNA, 25 bp, SARS Virus
gatattttcacaagtgttgacacct

SEQ ID NO: 18910 - DNA, 25 bp, SARS Virus
atattttcacaaatgttgacacctg

SEQ ID NO: 18911 - DNA, 25 bp, SARS Virus
tattttcacaagagttgacacctgt

SEQ ID NO: 18912 - DNA, 25 bp, SARS Virus
attttcacaagtattgacacctgtt

SEQ ID NO: 18913 - DNA, 25 bp, SARS Virus
ttttcacaagtgatgacacctgttg

SEQ ID NO: 18914 - DNA, 25 bp, SARS Virus
tttcacaagtgtagacacctgttgt

SEQ ID NO: 18915 - DNA, 25 bp, SARS Virus
ttcacaagtgttaacacctgttgtg

SEQ ID NO: 18916 - DNA, 25 bp, SARS Virus
tcacaagtgttgacacctgttgtga

SEQ ID NO: 18917 - DNA, 25 bp, SARS Virus
cacaagtgttgaaacctgttgtgat

SEQ ID NO: 18918 - DNA, 25 bp, SARS Virus
acaagtgttgacacctgttgtgatt

SEQ ID NO: 18919 - DNA, 25 bp, SARS Virus
caagtgttgacaactgttgtgatta

SEQ ID NO: 18920 - DNA, 25 bp, SARS Virus
aagtgttgacacatgttgtgattag

SEQ ID NO: 18921 - DNA, 25 bp, SARS Virus
agtgttgacaccagttgtgattaga

SEQ ID NO: 18922 - DNA, 25 bp, SARS Virus
gtgttgacacctattgtgattagag

SEQ ID NO: 18923 - DNA, 25 bp, SARS Virus
tgttgacacctgatgtgattagagg

SEQ ID NO: 18924 - DNA, 25 bp, SARS Virus
gttgacacctgtagtgattagaggt

SEQ ID NO: 18925 - DNA, 25 bp, SARS Virus
ttgacacctgttatgattagaggtg

SEQ ID NO: 18926 - DNA, 25 bp, SARS Virus
tgacacctgttgagattagaggtgt

SEQ ID NO: 18927 - DNA, 25 bp, SARS Virus
gacacctgttgtaattagaggtgtg

SEQ ID NO: 18928 - DNA, 25 bp, SARS Virus
acacctgttgtgattagaggtgtgt

SEQ ID NO: 18929 - DNA, 25 bp, SARS Virus
cacctgttgtgaatagaggtgtgtg

SEQ ID NO: 18930 - DNA, 25 bp, SARS Virus
acctgttgtgataagaggtgtgtgt

SEQ ID NO: 18931 - DNA, 25 bp, SARS Virus
cctgttgtgattagaggtgtgtgtc

SEQ ID NO: 18932 - DNA, 25 bp, SARS Virus
ctgttgtgattaaaggtgtgtgtcg

SEQ ID NO: 18933 - DNA, 25 bp, SARS Virus
tgttgtgattagaggtgtgtgtcga

SEQ ID NO: 18934 - DNA, 25 bp, SARS Virus
gttgtgattagaagtgtgtgtcgaa

SEQ ID NO: 18935 - DNA, 25 bp, SARS Virus
ttgtgattagagatgtgtgtcgaac

SEQ ID NO: 18936 - DNA, 25 bp, SARS Virus
tgtgattagaggagtgtgtcgaaca

SEQ ID NO: 18937 - DNA, 25 bp, SARS Virus
gtgattagaggtatgtgtcgaacac

SEQ ID NO: 18938 - DNA, 25 bp, SARS Virus
tgattagaggtgagtgtcgaacacc

SEQ ID NO: 18939 - DNA, 25 bp, SARS Virus
gattagaggtgtatgtcgaacacct

SEQ ID NO: 18940 - DNA, 25 bp, SARS Virus
attagaggtgtgagtcgaacaccta

SEQ ID NO: 18941 - DNA, 25 bp, SARS Virus
ttagaggtgtgtatcgaacacctat

SEQ ID NO: 18942 - DNA, 25 bp, SARS Virus
tagaggtgtgtgacgaacacctata

SEQ ID NO: 18943 - DNA, 25 bp, SARS Virus
agaggtgtgtgtagaacacctatac

SEQ ID NO: 18944 - DNA, 25 bp, SARS Virus
gaggtgtgtgtcaaacacctataca

SEQ ID NO: 18945 - DNA, 25 bp, SARS Virus
aggtgtgtgtcgaacacctatacag

SEQ ID NO: 18946 - DNA, 25 bp, SARS Virus
ggtgtgtgtcgaacacctatacaga

SEQ ID NO: 18947 - DNA, 25 bp, SARS Virus
gtgtgtgtcgaaaacctatacagat

SEQ ID NO: 18948 - DNA, 25 bp, SARS Virus
tgtgtgtcgaacacctatacagata

SEQ ID NO: 18949 - DNA, 25 bp, SARS Virus
gtgtgtcgaacaactatacagatac

SEQ ID NO: 18950 - DNA, 25 bp, SARS Virus
tgtgtcgaacacatatacagatact

SEQ ID NO: 18951 - DNA, 25 bp, SARS Virus
gtgtcgaacaccaatacagatactg

SEQ ID NO: 18952 - DNA, 25 bp, SARS Virus
tgtcgaacacctatacagatactgt

SEQ ID NO: 18953 - DNA, 25 bp, SARS Virus
gtcgaacacctaaacagatactgta

SEQ ID NO: 18954 - DNA, 25 bp, SARS Virus
tcgaacacctatacagatactgtat

SEQ ID NO: 18955 - DNA, 25 bp, SARS Virus
cgaacacctataaagatactgtata

SEQ ID NO: 18956 - DNA, 25 bp, SARS Virus
gaacacctatacagatactgtatac

SEQ ID NO: 18957 - DNA, 25 bp, SARS Virus
aacacctatacaaatactgtatacc

SEQ ID NO: 18958 - DNA, 25 bp, SARS Virus
acacctatacagatactgtatacct

SEQ ID NO: 18959 - DNA, 25 bp, SARS Virus
cacctatacagaaactgtatacctg

SEQ ID NO: 18960 - DNA, 25 bp, SARS Virus
acctatacagatactgtatacctgt

SEQ ID NO: 18961 - DNA, 25 bp, SARS Virus
cctatacagataatgtatacctgtc

SEQ ID NO: 18962 - DNA, 25 bp, SARS Virus
ctatacagatacagtatacctgtcg

SEQ ID NO: 18963 - DNA, 25 bp, SARS Virus
tatacagatactatatacctgtcgt

SEQ ID NO: 18964 - DNA, 25 bp, SARS Virus
atacagatactgaatacctgtcgtc

SEQ ID NO: 18965 - DNA, 25 bp, SARS Virus
tacagatactgtatacctgtcgtca

SEQ ID NO: 18966 - DNA, 25 bp, SARS Virus
acagatactgtaaacctgtcgtcaa

SEQ ID NO: 18967 - DNA, 25 bp, SARS Virus
cagatactgtatacctgtcgtcaaa

SEQ ID NO: 18968 - DNA, 25 bp, SARS Virus
agatactgtataactgtcgtcaaac

SEQ ID NO: 18969 - DNA, 25 bp, SARS Virus
gatactgtatacatgtcgtcaaacc

SEQ ID NO: 18970 - DNA, 25 bp, SARS Virus
atactgtataccagtcgtcaaacca

SEQ ID NO: 18971 - DNA, 25 bp, SARS Virus
tactgtatacctatcgtcaaaccag

SEQ ID NO: 18972 - DNA, 25 bp, SARS Virus
actgtatacctgacgtcaaaccagg

SEQ ID NO: 18973 - DNA, 25 bp, SARS Virus
ctgtatacctgtagtcaaaccaggt

SEQ ID NO: 18974 - DNA, 25 bp, SARS Virus
tgtatacctgtcatcaaaccaggtt

SEQ ID NO: 18975 - DNA, 25 bp, SARS Virus
gtatacctgtcgacaaaccaggttg

SEQ ID NO: 18976 - DNA, 25 bp, SARS Virus
tatacctgtcgtaaaaccaggttgt

SEQ ID NO: 18977 - DNA, 25 bp, SARS Virus
atacctgtcgtcaaaccaggttgta

SEQ ID NO: 18978 - DNA, 25 bp, SARS Virus
tacctgtcgtcaaaccaggttgtat

SEQ ID NO: 18979 - DNA, 25 bp, SARS Virus
acctgtcgtcaaaccaggttgtatg

SEQ ID NO: 18980 - DNA, 25 bp, SARS Virus
cctgtcgtcaaaacaggttgtatga

SEQ ID NO: 18981 - DNA, 25 bp, SARS Virus
ctgtcgtcaaacaaggttgtatgaa

SEQ ID NO: 18982 - DNA, 25 bp, SARS Virus
tgtcgtcaaaccaggttgtatgaac

SEQ ID NO: 18983 - DNA, 25 bp, SARS Virus
gtcgtcaaaccaagttgtatgaacc

SEQ ID NO: 18984 - DNA, 25 bp, SARS Virus
tcgtcaaaccagattgtatgaacct

SEQ ID NO: 18985 - DNA, 25 bp, SARS Virus
cgtcaaaccaggatgtatgaaccta

SEQ ID NO: 18986 - DNA, 25 bp, SARS Virus
gtcaaaccaggtagtatgaacctac

SEQ ID NO: 18987 - DNA, 25 bp, SARS Virus
tcaaaccaggttatatgaacctacc

SEQ ID NO: 18988 - DNA, 25 bp, SARS Virus
caaaccaggttgaatgaacctacca

SEQ ID NO: 18989 - DNA, 25 bp, SARS Virus
aaaccaggttgtatgaacctaccac

SEQ ID NO: 18990 - DNA, 25 bp, SARS Virus
aaccaggttgtaagaacctaccacg

SEQ ID NO: 18991 - DNA, 25 bp, SARS Virus
accaggttgtataaacctaccacga

SEQ ID NO: 18992 - DNA, 25 bp, SARS Virus
ccaggttgtatgaacctaccacgac

SEQ ID NO: 18993 - DNA, 25 bp, SARS Virus
caggttgtatgaacctaccacgact

SEQ ID NO: 18994 - DNA, 25 bp, SARS Virus
aggttgtatgaaactaccacgacta

SEQ ID NO: 18995 - DNA, 25 bp, SARS Virus
ggttgtatgaacataccacgactac

SEQ ID NO: 18996 - DNA, 25 bp, SARS Virus
gttgtatgaaccaaccacgactaca

SEQ ID NO: 18997 - DNA, 25 bp, SARS Virus
ttgtatgaacctaccacgactacaa

SEQ ID NO: 18998 - DNA, 25 bp, SARS Virus
tgtatgaacctaacacgactacaat

SEQ ID NO: 18999 - DNA, 25 bp, SARS Virus
gtatgaacctacaacgactacaatg

SEQ ID NO: 19000 - DNA, 25 bp, SARS Virus
tatgaacctaccacgactacaatgt

SEQ ID NO: 19001 - DNA, 25 bp, SARS Virus
atgaacctaccaagactacaatgtt

SEQ ID NO: 19002 - DNA, 25 bp, SARS Virus
tgaacctaccacaactacaatgttt

SEQ ID NO: 19003 - DNA, 25 bp, SARS Virus
gaacctaccacgactacaatgtttt

SEQ ID NO: 19004 - DNA, 25 bp, SARS Virus
aacctaccacgaatacaatgttttt

SEQ ID NO: 19005 - DNA, 25 bp, SARS Virus
acctaccacgacaacaatgttttta

SEQ ID NO: 19006 - DNA, 25 bp, SARS Virus
cctaccacgactacaatgtttttaa

SEQ ID NO: 19007 - DNA, 25 bp, SARS Virus
ctaccacgactaaaatgtttttaat

SEQ ID NO: 19008 - DNA, 25 bp, SARS Virus
taccacgactacaatgtttttaatt

SEQ ID NO: 19009 - DNA, 25 bp, SARS Virus
accacgactacaatgtttttaattt

SEQ ID NO: 19010 - DNA, 25 bp, SARS Virus
ccacgactacaaagtttttaatttg

SEQ ID NO: 19011 - DNA, 25 bp, SARS Virus
cacgactacaatatttttaatttgg

SEQ ID NO: 19012 - DNA, 25 bp, SARS Virus
acgactacaatgattttaatttgga

SEQ ID NO: 19013 - DNA, 25 bp, SARS Virus
cgactacaatgtatttaatttggag

SEQ ID NO: 19014 - DNA, 25 bp, SARS Virus
gactacaatgttattaatttggagt

SEQ ID NO: 19015 - DNA, 25 bp, SARS Virus
actacaatgtttataatttggagta

SEQ ID NO: 19016 - DNA, 25 bp, SARS Virus
ctacaatgttttaaatttggagtac

SEQ ID NO: 19017 - DNA, 25 bp, SARS Virus
tacaatgtttttaatttggagtaca

SEQ ID NO: 19018 - DNA, 25 bp, SARS Virus
acaatgtttttaatttggagtacat

SEQ ID NO: 19019 - DNA, 25 bp, SARS Virus
caatgtttttaaattggagtacatt

SEQ ID NO: 19020 - DNA, 25 bp, SARS Virus
aatgtttttaatatggagtacattt

SEQ ID NO: 19021 - DNA, 25 bp, SARS Virus
atgtttttaattaggagtacattta

SEQ ID NO: 19022 - DNA, 25 bp, SARS Virus
tgtttttaatttagagtacatttag

SEQ ID NO: 19023 - DNA, 25 bp, SARS Virus
gtttttaatttgaagtacatttagt

SEQ ID NO: 19024 - DNA, 25 bp, SARS Virus
tttttaatttggagtacatttagta

SEQ ID NO: 19025 - DNA, 25 bp, SARS Virus
ttttaatttggaatacatttagtac

SEQ ID NO: 19026 - DNA, 25 bp, SARS Virus
tttaatttggagaacatttagtact

SEQ ID NO: 19027 - DNA, 25 bp, SARS Virus
ttaatttggagtacatttagtactc

SEQ ID NO: 19028 - DNA, 25 bp, SARS Virus
taatttggagtaaatttagtactcc

SEQ ID NO: 19029 - DNA, 25 bp, SARS Virus
aatttggagtacatttagtactccc

SEQ ID NO: 19030 - DNA, 25 bp, SARS Virus
atttggagtacaattagtactccca

SEQ ID NO: 19031 - DNA, 25 bp, SARS Virus
tttggagtacatatagtactcccat

SEQ ID NO: 19032 - DNA, 25 bp, SARS Virus
ttggagtacattaagtactcccatt

SEQ ID NO: 19033 - DNA, 25 bp, SARS Virus
tggagtacatttagtactcccattc

SEQ ID NO: 19034 - DNA, 25 bp, SARS Virus
ggagtacatttaatactcccattct

SEQ ID NO: 19035 - DNA, 25 bp, SARS Virus
gagtacatttagaactcccattctg

SEQ ID NO: 19036 - DNA, 25 bp, SARS Virus
agtacatttagtactcccattctga

SEQ ID NO: 19037 - DNA, 25 bp, SARS Virus
gtacatttagtaatcccattctgaa

SEQ ID NO: 19038 - DNA, 25 bp, SARS Virus
tacatttagtacacccattctgaaa

SEQ ID NO: 19039 - DNA, 25 bp, SARS Virus
acatttagtactaccattctgaaag

SEQ ID NO: 19040 - DNA, 25 bp, SARS Virus
catttagtactcacattctgaaaga

SEQ ID NO: 19041 - DNA, 25 bp, SARS Virus
atttagtactccaattctgaaagaa

SEQ ID NO: 19042 - DNA, 25 bp, SARS Virus
tttagtactcccattctgaaagaaa

SEQ ID NO: 19043 - DNA, 25 bp, SARS Virus
ttagtactcccaatctgaaagaaac

SEQ ID NO: 19044 - DNA, 25 bp, SARS Virus
tagtactcccatactgaaagaaaca

SEQ ID NO: 19045 - DNA, 25 bp, SARS Virus
agtactcccattatgaaagaaacat

SEQ ID NO: 19046 - DNA, 25 bp, SARS Virus
gtactcccattcagaaagaaacatg

SEQ ID NO: 19047 - DNA, 25 bp, SARS Virus
tactcccattctaaaagaaacatga

SEQ ID NO: 19048 - DNA, 25 bp, SARS Virus
actcccattctgaaagaaacatgat

SEQ ID NO: 19049 - DNA, 25 bp, SARS Virus
ctcccattctgaaagaaacatgatg

SEQ ID NO: 19050 - DNA, 25 bp, SARS Virus
tcccattctgaaagaaacatgatgg

SEQ ID NO: 19051 - DNA, 25 bp, SARS Virus
cccattctgaaaaaaacatgatgga

SEQ ID NO: 19052 - DNA, 25 bp, SARS Virus
ccattctgaaagaaacatgatggat

SEQ ID NO: 19053 - DNA, 25 bp, SARS Virus
cattctgaaagaaacatgatggatc

SEQ ID NO: 19054 - DNA, 25 bp, SARS Virus
attctgaaagaaacatgatggatca

SEQ ID NO: 19055 - DNA, 25 bp, SARS Virus
ttctgaaagaaaaatgatggatcac

SEQ ID NO: 19056 - DNA, 25 bp, SARS Virus
tctgaaagaaacatgatggatcact

SEQ ID NO: 19057 - DNA, 25 bp, SARS Virus
ctgaaagaaacaagatggatcacta

SEQ ID NO: 19058 - DNA, 25 bp, SARS Virus
tgaaagaaacataatggatcactac

SEQ ID NO: 19059 - DNA, 25 bp, SARS Virus
gaaagaaacatgatggatcactact

SEQ ID NO: 19060 - DNA, 25 bp, SARS Virus
aaagaaacatgaaggatcactactg

SEQ ID NO: 19061 - DNA, 25 bp, SARS Virus
aagaaacatgatagatcactactgt

SEQ ID NO: 19062 - DNA, 25 bp, SARS Virus
agaaacatgatgaatcactactgtg

SEQ ID NO: 19063 - DNA, 25 bp, SARS Virus
gaaacatgatggatcactactgtgt

SEQ ID NO: 19064 - DNA, 25 bp, SARS Virus
aaacatgatggaacactactgtgtg

SEQ ID NO: 19065 - DNA, 25 bp, SARS Virus
aacatgatggataactactgtgtga

SEQ ID NO: 19066 - DNA, 25 bp, SARS Virus
acatgatggatcactactgtgtgat

SEQ ID NO: 19067 - DNA, 25 bp, SARS Virus
catgatggatcaatactgtgtgatg

SEQ ID NO: 19068 - DNA, 25 bp, SARS Virus
atgatggatcacaactgtgtgatgc

SEQ ID NO: 19069 - DNA, 25 bp, SARS Virus
tgatggatcactactgtgtgatgca

SEQ ID NO: 19070 - DNA, 25 bp, SARS Virus
gatggatcactaatgtgtgatgcat

SEQ ID NO: 19071 - DNA, 25 bp, SARS Virus
atggatcactacagtgtgatgcatc

SEQ ID NO: 19072 - DNA, 25 bp, SARS Virus
tggatcactactatgtgatgcatca

SEQ ID NO: 19073 - DNA, 25 bp, SARS Virus
ggatcactactgagtgatgcatcac

SEQ ID NO: 19074 - DNA, 25 bp, SARS Virus
gatcactactgtatgatgcatcact

SEQ ID NO: 19075 - DNA, 25 bp, SARS Virus
atcactactgtgagatgcatcactt

SEQ ID NO: 19076 - DNA, 25 bp, SARS Virus
tcactactgtgtaatgcatcacttc

SEQ ID NO: 19077 - DNA, 25 bp, SARS Virus
cactactgtgtgatgcatcacttcg

SEQ ID NO: 19078 - DNA, 25 bp, SARS Virus
actactgtgtgaagcatcacttcga

SEQ ID NO: 19079 - DNA, 25 bp, SARS Virus
ctactgtgtgatacatcacttcgaa

SEQ ID NO: 19080 - DNA, 25 bp, SARS Virus
tactgtgtgatgaatcacttcgaaa

SEQ ID NO: 19081 - DNA, 25 bp, SARS Virus
actgtgtgatgcatcacttcgaaag

SEQ ID NO: 19082 - DNA, 25 bp, SARS Virus
ctgtgtgatgcaacacttcgaaagc

SEQ ID NO: 19083 - DNA, 25 bp, SARS Virus
tgtgtgatgcataacttcgaaagct

SEQ ID NO: 19084 - DNA, 25 bp, SARS Virus
gtgtgatgcatcacttcgaaagctc

SEQ ID NO: 19085 - DNA, 25 bp, SARS Virus
tgtgatgcatcaattcgaaagctca

SEQ ID NO: 19086 - DNA, 25 bp, SARS Virus
gtgatgcatcacatcgaaagctcat

SEQ ID NO: 19087 - DNA, 25 bp, SARS Virus
tgatgcatcactacgaaagctcatg

SEQ ID NO: 19088 - DNA, 25 bp, SARS Virus
gatgcatcacttagaaagctcatga

SEQ ID NO: 19089 - DNA, 25 bp, SARS Virus
atgcatcacttcaaaagctcatgat

SEQ ID NO: 19090 - DNA, 25 bp, SARS Virus
tgcatcacttcgaaagctcatgatg

SEQ ID NO: 19091 - DNA, 25 bp, SARS Virus
gcatcacttcgaaagctcatgatgg

SEQ ID NO: 19092 - DNA, 25 bp, SARS Virus
catcacttcgaaagctcatgatggt

SEQ ID NO: 19093 - DNA, 25 bp, SARS Virus
atcacttcgaaaactcatgatggta

SEQ ID NO: 19094 - DNA, 25 bp, SARS Virus
tcacttcgaaagatcatgatggtat

SEQ ID NO: 19095 - DNA, 25 bp, SARS Virus
cacttcgaaagcacatgatggtatg

SEQ ID NO: 19096 - DNA, 25 bp, SARS Virus
acttcgaaagctaatgatggtatga

SEQ ID NO: 19097 - DNA, 25 bp, SARS Virus
cttcgaaagctcatgatggtatgag

SEQ ID NO: 19098 - DNA, 25 bp, SARS Virus
ttcgaaagctcaagatggtatgaga

SEQ ID NO: 19099 - DNA, 25 bp, SARS Virus
tcgaaagctcataatggtatgagaa

SEQ ID NO: 19100 - DNA, 25 bp, SARS Virus
cgaaagctcatgatggtatgagaac

SEQ ID NO: 19101 - DNA, 25 bp, SARS Virus
gaaagctcatgaaggtatgagaact

SEQ ID NO: 19102 - DNA, 25 bp, SARS Virus
aaagctcatgatagtatgagaacta

SEQ ID NO: 19103 - DNA, 25 bp, SARS Virus
aagctcatgatgatatgagaactac

SEQ ID NO: 19104 - DNA, 25 bp, SARS Virus
agctcatgatggaatgagaactact

SEQ ID NO: 19105 - DNA, 25 bp, SARS Virus
gctcatgatggtatgagaactactc

SEQ ID NO: 19106 - DNA, 25 bp, SARS Virus
ctcatgatggtaagagaactactct

SEQ ID NO: 19107 - DNA, 25 bp, SARS Virus
tcatgatggtataagaactactctc

SEQ ID NO: 19108 - DNA, 25 bp, SARS Virus
catgatggtatgagaactactctca

SEQ ID NO: 19109 - DNA, 25 bp, SARS Virus
atgatggtatgaaaactactctcaa

SEQ ID NO: 19110 - DNA, 25 bp, SARS Virus
tgatggtatgagaactactctcaaa

SEQ ID NO: 19111 - DNA, 25 bp, SARS Virus
gatggtatgagaactactctcaaaa

SEQ ID NO: 19112 - DNA, 25 bp, SARS Virus
atggtatgagaaatactctcaaaag

SEQ ID NO: 19113 - DNA, 25 bp, SARS Virus
tggtatgagaacaactctcaaaaga

SEQ ID NO: 19114 - DNA, 25 bp, SARS Virus
ggtatgagaactactctcaaaagaa

SEQ ID NO: 19115 - DNA, 25 bp, SARS Virus
gtatgagaactaatctcaaaagaac

SEQ ID NO: 19116 - DNA, 25 bp, SARS Virus
tatgagaactacactcaaaagaacc

SEQ ID NO: 19117 - DNA, 25 bp, SARS Virus
atgagaactactatcaaaagaacca

SEQ ID NO: 19118 - DNA, 25 bp, SARS Virus
tgagaactactcacaaaagaaccat

SEQ ID NO: 19119 - DNA, 25 bp, SARS Virus
gagaactactctaaaaagaaccatc

SEQ ID NO: 19120 - DNA, 25 bp, SARS Virus
agaactactctcaaaagaaccatcc

SEQ ID NO: 19121 - DNA, 25 bp, SARS Virus
gaactactctcaaaagaaccatcca

SEQ ID NO: 19122 - DNA, 25 bp, SARS Virus
aactactctcaaaagaaccatccat

SEQ ID NO: 19123 - DNA, 25 bp, SARS Virus
actactctcaaaagaaccatccatg

SEQ ID NO: 19124 - DNA, 25 bp, SARS Virus
ctactctcaaaaaaaccatccatgt

SEQ ID NO: 19125 - DNA, 25 bp, SARS Virus
tactctcaaaagaaccatccatgta

SEQ ID NO: 19126 - DNA, 25 bp, SARS Virus
actctcaaaagaaccatccatgtac

SEQ ID NO: 19127 - DNA, 25 bp, SARS Virus
ctctcaaaagaaacatccatgtaca

SEQ ID NO: 19128 - DNA, 25 bp, SARS Virus
tctcaaaagaacaatccatgtacag

SEQ ID NO: 19129 - DNA, 25 bp, SARS Virus
ctcaaaagaaccatccatgtacaga

SEQ ID NO: 19130 - DNA, 25 bp, SARS Virus
tcaaaagaaccaaccatgtacagac

SEQ ID NO: 19131 - DNA, 25 bp, SARS Virus
caaaagaaccatacatgtacagacg

SEQ ID NO: 19132 - DNA, 25 bp, SARS Virus
aaaagaaccatcaatgtacagacga

SEQ ID NO: 19133 - DNA, 25 bp, SARS Virus
aaagaaccatccatgtacagacgaa

SEQ ID NO: 19134 - DNA, 25 bp, SARS Virus
aagaaccatccaagtacagacgaaa

SEQ ID NO: 19135 - DNA, 25 bp, SARS Virus
agaaccatccatatacagacgaaat

SEQ ID NO: 19136 - DNA, 25 bp, SARS Virus
gaaccatccatgaacagacgaaatt

SEQ ID NO: 19137 - DNA, 25 bp, SARS Virus
aaccatccatgtacagacgaaattt

SEQ ID NO: 19138 - DNA, 25 bp, SARS Virus
accatccatgtaaagacgaaatttg

SEQ ID NO: 19139 - DNA, 25 bp, SARS Virus
ccatccatgtacagacgaaatttgg

SEQ ID NO: 19140 - DNA, 25 bp, SARS Virus
catccatgtacaaacgaaatttggt

SEQ ID NO: 19141 - DNA, 25 bp, SARS Virus
atccatgtacagacgaaatttggtg

SEQ ID NO: 19142 - DNA, 25 bp, SARS Virus
tccatgtacagaagaaatttggtgt

SEQ ID NO: 19143 - DNA, 25 bp, SARS Virus
ccatgtacagacaaaatttggtgtg

SEQ ID NO: 19144 - DNA, 25 bp, SARS Virus
catgtacagacgaaatttggtgtgt

SEQ ID NO: 19145 - DNA, 25 bp, SARS Virus
atgtacagacgaaatttggtgtgtt

SEQ ID NO: 19146 - DNA, 25 bp, SARS Virus
tgtacagacgaaatttggtgtgttt

SEQ ID NO: 19147 - DNA, 25 bp, SARS Virus
gtacagacgaaaattggtgtgtttc

SEQ ID NO: 19148 - DNA, 25 bp, SARS Virus
tacagacgaaatatggtgtgtttct

SEQ ID NO: 19149 - DNA, 25 bp, SARS Virus
acagacgaaattaggtgtgtttctt

SEQ ID NO: 19150 - DNA, 25 bp, SARS Virus
cagacgaaatttagtgtgtttcttt

SEQ ID NO: 19151 - DNA, 25 bp, SARS Virus
agacgaaatttgatgtgtttcttta

SEQ ID NO: 19152 - DNA, 25 bp, SARS Virus
gacgaaatttggagtgtttctttac

SEQ ID NO: 19153 - DNA, 25 bp, SARS Virus
acgaaatttggtatgtttctttacc

SEQ ID NO: 19154 - DNA, 25 bp, SARS Virus
cgaaatttggtgagtttctttacct

SEQ ID NO: 19155 - DNA, 25 bp, SARS Virus
gaaatttggtgtatttctttacctt

SEQ ID NO: 19156 - DNA, 25 bp, SARS Virus
aaatttggtgtgattctttaccttt

SEQ ID NO: 19157 - DNA, 25 bp, SARS Virus
aatttggtgtgtatctttaccttta

SEQ ID NO: 19158 - DNA, 25 bp, SARS Virus
atttggtgtgttactttacctttaa

SEQ ID NO: 19159 - DNA, 25 bp, SARS Virus
tttggtgtgtttatttacctttaaa

SEQ ID NO: 19160 - DNA, 25 bp, SARS Virus
ttggtgtgtttcattacctttaaag

SEQ ID NO: 19161 - DNA, 25 bp, SARS Virus
ggagtgaagcagcagtttctgtaga

SEQ ID NO: 19162 - DNA, 25 bp, SARS Virus
gagtgaagcagtcgtttctgtagac

SEQ ID NO: 19163 - DNA, 25 bp, SARS Virus
agtgaagcagtactttctgtagact

SEQ ID NO: 19164 - DNA, 25 bp, SARS Virus
gtgaagcagtagcttctgtagactc

SEQ ID NO: 19165 - DNA, 25 bp, SARS Virus
tgaagcagtagtctctgtagactcc

SEQ ID NO: 19166 - DNA, 25 bp, SARS Virus
gaagcagtagttcctgtagactcct

SEQ ID NO: 19167 - DNA, 25 bp, SARS Virus
aagcagtagtttctgtagactcctc

SEQ ID NO: 19168 - DNA, 25 bp, SARS Virus
agcagtagtttccgtagactcctcg

SEQ ID NO: 19169 - DNA, 25 bp, SARS Virus
gcagtagtttctctagactcctcgt

SEQ ID NO: 19170 - DNA, 25 bp, SARS Virus
cagtagtttctgcagactcctcgtg

SEQ ID NO: 19171 - DNA, 25 bp, SARS Virus
agtagtttctgtcgactcctcgtga

SEQ ID NO: 19172 - DNA, 25 bp, SARS Virus
gtagtttctgtacactcctcgtgaa

SEQ ID NO: 19173 - DNA, 25 bp, SARS Virus
tagtttctgtagcctcctcgtgaaa

SEQ ID NO: 19174 - DNA, 25 bp, SARS Virus
agtttctgtagactcctcgtgaaac

SEQ ID NO: 19175 - DNA, 25 bp, SARS Virus
gtttctgtagacccctcgtgaaaca

SEQ ID NO: 19176 - DNA, 25 bp, SARS Virus
tttctgtagactcctcgtgaaacat

SEQ ID NO: 19177 - DNA, 25 bp, SARS Virus
ttctgtagactcctcgtgaaacatc

SEQ ID NO: 19178 - DNA, 25 bp, SARS Virus
tctgtagactccccgtgaaacatct

SEQ ID NO: 19179 - DNA, 25 bp, SARS Virus
ctgtagactcctcgtgaaacatctt

SEQ ID NO: 19180 - DNA, 25 bp, SARS Virus
tgtagactcctcctgaaacatcttt

SEQ ID NO: 19181 - DNA, 25 bp, SARS Virus
gtagactcctcgcgaaacatctttg

SEQ ID NO: 19182 - DNA, 25 bp, SARS Virus
tagactcctcgtcaaacatctttgt

SEQ ID NO: 19183 - DNA, 25 bp, SARS Virus
agactcctcgtgcaacatctttgtc

SEQ ID NO: 19184 - DNA, 25 bp, SARS Virus
gactcctcgtgacacatctttgtca

SEQ ID NO: 19185 - DNA, 25 bp, SARS Virus
actcctcgtgaaccatctttgtcaa

SEQ ID NO: 19186 - DNA, 25 bp, SARS Virus
ctcctcgtgaaacatctttgtcaaa

SEQ ID NO: 19187 - DNA, 25 bp, SARS Virus
tcctcgtgaaacctctttgtcaaag

SEQ ID NO: 19188 - DNA, 25 bp, SARS Virus
cctcgtgaaacacctttgtcaaaga

SEQ ID NO: 19189 - DNA, 25 bp, SARS Virus
ctcgtgaaacatctttgtcaaagaa

SEQ ID NO: 19190 - DNA, 25 bp, SARS Virus
tcgtgaaacatccttgtcaaagaaa

SEQ ID NO: 19191 - DNA, 25 bp, SARS Virus
cgtgaaacatctctgtcaaagaaac

SEQ ID NO: 19192 - DNA, 25 bp, SARS Virus
gtgaaacatcttcgtcaaagaaacc

SEQ ID NO: 19193 - DNA, 25 bp, SARS Virus
tgaaacatctttctcaaagaaaccg

SEQ ID NO: 19194 - DNA, 25 bp, SARS Virus
gaaacatctttgccaaagaaaccga

SEQ ID NO: 19195 - DNA, 25 bp, SARS Virus
aaacatctttgtcaaagaaaccgac

SEQ ID NO: 19196 - DNA, 25 bp, SARS Virus
aacatctttgtccaagaaaccgacc

SEQ ID NO: 19197 - DNA, 25 bp, SARS Virus
acatctttgtcacagaaaccgaccg

SEQ ID NO: 19198 - DNA, 25 bp, SARS Virus
catctttgtcaacgaaaccgaccga

SEQ ID NO: 19199 - DNA, 25 bp, SARS Virus
atctttgtcaaacaaaccgaccgag

SEQ ID NO: 19200 - DNA, 25 bp, SARS Virus
tctttgtcaaagcaaccgaccgaga

SEQ ID NO: 19201 - DNA, 25 bp, SARS Virus
ctttgtcaaagacaccgaccgagaa

SEQ ID NO: 19202 - DNA, 25 bp, SARS Virus
tttgtcaaagaacccgaccgagaat

SEQ ID NO: 19203 - DNA, 25 bp, SARS Virus
ttgtcaaagaaaccgaccgagaatg

SEQ ID NO: 19204 - DNA, 25 bp, SARS Virus
tgtcaaagaaaccgaccgagaatgt

SEQ ID NO: 19205 - DNA, 25 bp, SARS Virus
gtcaaagaaacccaccgagaatgtc

SEQ ID NO: 19206 - DNA, 25 bp, SARS Virus
tcaaagaaaccgcccgagaatgtct

SEQ ID NO: 19207 - DNA, 25 bp, SARS Virus
caaagaaaccgaccgagaatgtctc

SEQ ID NO: 19208 - DNA, 25 bp, SARS Virus
aaagaaaccgaccgagaatgtctct

SEQ ID NO: 19209 - DNA, 25 bp, SARS Virus
aagaaaccgacccagaatgtctcta

SEQ ID NO: 19210 - DNA, 25 bp, SARS Virus
agaaaccgaccgcgaatgtctctaa

SEQ ID NO: 19211 - DNA, 25 bp, SARS Virus
gaaaccgaccgacaatgtctctaac

SEQ ID NO: 19212 - DNA, 25 bp, SARS Virus
aaaccgaccgagcatgtctctaacc

SEQ ID NO: 19213 - DNA, 25 bp, SARS Virus
aaccgaccgagactgtctctaacca

SEQ ID NO: 19214 - DNA, 25 bp, SARS Virus
accgaccgagaacgtctctaaccag

SEQ ID NO: 19215 - DNA, 25 bp, SARS Virus
ccgaccgagaatctctctaaccagg

SEQ ID NO: 19216 - DNA, 25 bp, SARS Virus
cgaccgagaatgcctctaaccagga

SEQ ID NO: 19217 - DNA, 25 bp, SARS Virus
gaccgagaatgtctctaaccaggat

SEQ ID NO: 19218 - DNA, 25 bp, SARS Virus
accgagaatgtccctaaccaggata

SEQ ID NO: 19219 - DNA, 25 bp, SARS Virus
ccgagaatgtctctaaccaggataa

SEQ ID NO: 19220 - DNA, 25 bp, SARS Virus
cgagaatgtctccaaccaggataag

SEQ ID NO: 19221 - DNA, 25 bp, SARS Virus
gagaatgtctctcaccaggataagt

SEQ ID NO: 19222 - DNA, 25 bp, SARS Virus
agaatgtctctacccaggataagtc

SEQ ID NO: 19223 - DNA, 25 bp, SARS Virus
gaatgtctctaaccaggataagtcc

SEQ ID NO: 19224 - DNA, 25 bp, SARS Virus
aatgtctctaaccaggataagtcct

SEQ ID NO: 19225 - DNA, 25 bp, SARS Virus
atgtctctaacccggataagtcctg

SEQ ID NO: 19226 - DNA, 25 bp, SARS Virus
tgtctctaaccacgataagtcctgt

SEQ ID NO: 19227 - DNA, 25 bp, SARS Virus
gtctctaaccagcataagtcctgtc

SEQ ID NO: 19228 - DNA, 25 bp, SARS Virus
tctctaaccaggctaagtcctgtcg

SEQ ID NO: 19229 - DNA, 25 bp, SARS Virus
ctctaaccaggacaagtcctgtcgc

SEQ ID NO: 19230 - DNA, 25 bp, SARS Virus
tctaaccaggatcagtcctgtcgca

SEQ ID NO: 19231 - DNA, 25 bp, SARS Virus
ctaaccaggatacgtcctgtcgcat

SEQ ID NO: 19232 - DNA, 25 bp, SARS Virus
taaccaggataactcctgtcgcatg

SEQ ID NO: 19233 - DNA, 25 bp, SARS Virus
aaccaggataagccctgtcgcatgt

SEQ ID NO: 19234 - DNA, 25 bp, SARS Virus
accaggataagtcctgtcgcatgtc

SEQ ID NO: 19235 - DNA, 25 bp, SARS Virus
ccaggataagtcctgtcgcatgtct

SEQ ID NO: 19236 - DNA, 25 bp, SARS Virus
caggataagtcccgtcgcatgtctc

SEQ ID NO: 19237 - DNA, 25 bp, SARS Virus
aggataagtcctctcgcatgtctca

SEQ ID NO: 19238 - DNA, 25 bp, SARS Virus
ggataagtcctgccgcatgtctcaa

SEQ ID NO: 19239 - DNA, 25 bp, SARS Virus
gataagtcctgtcgcatgtctcaat

SEQ ID NO: 19240 - DNA, 25 bp, SARS Virus
ataagtcctgtcccatgtctcaatc

SEQ ID NO: 19241 - DNA, 25 bp, SARS Virus
taagtcctgtcgcatgtctcaatcc

SEQ ID NO: 19242 - DNA, 25 bp, SARS Virus
aagtcctgtcgcctgtctcaatcca

SEQ ID NO: 19243 - DNA, 25 bp, SARS Virus
agtcctgtcgcacgtctcaatccac

SEQ ID NO: 19244 - DNA, 25 bp, SARS Virus
gtcctgtcgcatctctcaatccaca

SEQ ID NO: 19245 - DNA, 25 bp, SARS Virus
tcctgtcgcatgcctcaatccacaa

SEQ ID NO: 19246 - DNA, 25 bp, SARS Virus
cctgtcgcatgtctcaatccacaac

SEQ ID NO: 19247 - DNA, 25 bp, SARS Virus
ctgtcgcatgtcccaatccacaact

SEQ ID NO: 19248 - DNA, 25 bp, SARS Virus
tgtcgcatgtctcaatccacaactt

SEQ ID NO: 19249 - DNA, 25 bp, SARS Virus
gtcgcatgtctccatccacaactta

SEQ ID NO: 19250 - DNA, 25 bp, SARS Virus
tcgcatgtctcactccacaacttaa

SEQ ID NO: 19251 - DNA, 25 bp, SARS Virus
cgcatgtctcaacccacaacttaaa

SEQ ID NO: 19252 - DNA, 25 bp, SARS Virus
gcatgtctcaatccacaacttaaag

SEQ ID NO: 19253 - DNA, 25 bp, SARS Virus
catgtctcaatccacaacttaaaga

SEQ ID NO: 19254 - DNA, 25 bp, SARS Virus
atgtctcaatccccaacttaaagaa

SEQ ID NO: 19255 - DNA, 25 bp, SARS Virus
tgtctcaatccacaacttaaagaat

SEQ ID NO: 19256 - DNA, 25 bp, SARS Virus
gtctcaatccaccacttaaagaatt

SEQ ID NO: 19257 - DNA, 25 bp, SARS Virus
tctcaatccacaccttaaagaattc

SEQ ID NO: 19258 - DNA, 25 bp, SARS Virus
ctcaatccacaacttaaagaattcg

SEQ ID NO: 19259 - DNA, 25 bp, SARS Virus
tcaatccacaacctaaagaattcgc

SEQ ID NO: 19260 - DNA, 25 bp, SARS Virus
caatccacaactcaaagaattcgca

SEQ ID NO: 19261 - DNA, 25 bp, SARS Virus
aatccacaacttcaagaattcgcac

SEQ ID NO: 19262 - DNA, 25 bp, SARS Virus
atccacaacttacagaattcgcacc

SEQ ID NO: 19263 - DNA, 25 bp, SARS Virus
tccacaacttaacgaattcgcacca

SEQ ID NO: 19264 - DNA, 25 bp, SARS Virus
ccacaacttaaacaattcgcaccac

SEQ ID NO: 19265 - DNA, 25 bp, SARS Virus
cacaacttaaagcattcgcaccact

SEQ ID NO: 19266 - DNA, 25 bp, SARS Virus
acaacttaaagacttcgcaccactg

SEQ ID NO: 19267 - DNA, 25 bp, SARS Virus
caacttaaagaactcgcaccactgt

SEQ ID NO: 19268 - DNA, 25 bp, SARS Virus
aacttaaagaatccgcaccactgtt

SEQ ID NO: 19269 - DNA, 25 bp, SARS Virus
acttaaagaattcgcaccactgttt

SEQ ID NO: 19270 - DNA, 25 bp, SARS Virus
cttaaagaattcccaccactgtttt

SEQ ID NO: 19271 - DNA, 25 bp, SARS Virus
ttaaagaattcgcaccactgtttta

SEQ ID NO: 19272 - DNA, 25 bp, SARS Virus
taaagaattcgccccactgttttaa

SEQ ID NO: 19273 - DNA, 25 bp, SARS Virus
aaagaattcgcaccactgttttaac

SEQ ID NO: 19274 - DNA, 25 bp, SARS Virus
aagaattcgcaccactgttttaaca

SEQ ID NO: 19275 - DNA, 25 bp, SARS Virus
agaattcgcacccctgttttaacac

SEQ ID NO: 19276 - DNA, 25 bp, SARS Virus
gaattcgcaccactgttttaacaca

SEQ ID NO: 19277 - DNA, 25 bp, SARS Virus
aattcgcaccaccgttttaacacat

SEQ ID NO: 19278 - DNA, 25 bp, SARS Virus
attcgcaccactcttttaacacatg

SEQ ID NO: 19279 - DNA, 25 bp, SARS Virus
ttcgcaccactgctttaacacatgg

SEQ ID NO: 19280 - DNA, 25 bp, SARS Virus
tcgcaccactgtcttaacacatggt

SEQ ID NO: 19281 - DNA, 25 bp, SARS Virus
cgcaccactgttctaacacatggtg

SEQ ID NO: 19282 - DNA, 25 bp, SARS Virus
gcaccactgtttcaacacatggtgt

SEQ ID NO: 19283 - DNA, 25 bp, SARS Virus
caccactgttttcacacatggtgtg

SEQ ID NO: 19284 - DNA, 25 bp, SARS Virus
accactgttttaccacatggtgtga

SEQ ID NO: 19285 - DNA, 25 bp, SARS Virus
ccactgttttaacacatggtgtgag

SEQ ID NO: 19286 - DNA, 25 bp, SARS Virus
cactgttttaacccatggtgtgaga

SEQ ID NO: 19287 - DNA, 25 bp, SARS Virus
actgttttaacacatggtgtgagac

SEQ ID NO: 19288 - DNA, 25 bp, SARS Virus
ctgttttaacacctggtgtgagacc

SEQ ID NO: 19289 - DNA, 25 bp, SARS Virus
tgttttaacacacggtgtgagacct

SEQ ID NO: 19290 - DNA, 25 bp, SARS Virus
gttttaacacatcgtgtgagacctc

SEQ ID NO: 19291 - DNA, 25 bp, SARS Virus
ttttaacacatgctgtgagacctct

SEQ ID NO: 19292 - DNA, 25 bp, SARS Virus
tttaacacatggcgtgagacctctc

SEQ ID NO: 19293 - DNA, 25 bp, SARS Virus
ttaacacatggtctgagacctctcg

SEQ ID NO: 19294 - DNA, 25 bp, SARS Virus
taacacatggtgcgagacctctcgg

SEQ ID NO: 19295 - DNA, 25 bp, SARS Virus
aacacatggtgtcagacctctcggg

SEQ ID NO: 19296 - DNA, 25 bp, SARS Virus
acacatggtgtgcgacctctcgggg

SEQ ID NO: 19297 - DNA, 25 bp, SARS Virus
cacatggtgtgacacctctcggggc

SEQ ID NO: 19298 - DNA, 25 bp, SARS Virus
acatggtgtgagccctctcggggca

SEQ ID NO: 19299 - DNA, 25 bp, SARS Virus
catggtgtgagacctctcggggcag

SEQ ID NO: 19300 - DNA, 25 bp, SARS Virus
atggtgtgagacctctcggggcagc

SEQ ID NO: 19301 - DNA, 25 bp, SARS Virus
tggtgtgagacccctcggggcagct

SEQ ID NO: 19302 - DNA, 25 bp, SARS Virus
ggtgtgagacctctcggggcagctc

SEQ ID NO: 19303 - DNA, 25 bp, SARS Virus
gtgtgagacctcccggggcagctca

SEQ ID NO: 19304 - DNA, 25 bp, SARS Virus
tgtgagacctctcggggcagctcaa

SEQ ID NO: 19305 - DNA, 25 bp, SARS Virus
gtgagacctctccgggcagctcaaa

SEQ ID NO: 19306 - DNA, 25 bp, SARS Virus
tgagacctctcgcggcagctcaaag

SEQ ID NO: 19307 - DNA, 25 bp, SARS Virus
gagacctctcggcgcagctcaaagt

SEQ ID NO: 19308 - DNA, 25 bp, SARS Virus
agacctctcgggccagctcaaagta

SEQ ID NO: 19309 - DNA, 25 bp, SARS Virus
gacctctcggggcagctcaaagtag

SEQ ID NO: 19310 - DNA, 25 bp, SARS Virus
acctctcggggccgctcaaagtaga

SEQ ID NO: 19311 - DNA, 25 bp, SARS Virus
cctctcggggcacctcaaagtagaa

SEQ ID NO: 19312 - DNA, 25 bp, SARS Virus
ctctcggggcagctcaaagtagaac

SEQ ID NO: 19313 - DNA, 25 bp, SARS Virus
tctcggggcagcccaaagtagaact

SEQ ID NO: 19314 - DNA, 25 bp, SARS Virus
ctcggggcagctcaaagtagaactg

SEQ ID NO: 19315 - DNA, 25 bp, SARS Virus
tcggggcagctccaagtagaactgc

SEQ ID NO: 19316 - DNA, 25 bp, SARS Virus
cggggcagctcacagtagaactgcc

SEQ ID NO: 19317 - DNA, 25 bp, SARS Virus
ggggcagctcaacgtagaactgcca

SEQ ID NO: 19318 - DNA, 25 bp, SARS Virus
gggcagctcaaactagaactgccac

SEQ ID NO: 19319 - DNA, 25 bp, SARS Virus
ggcagctcaaagcagaactgccact

SEQ ID NO: 19320 - DNA, 25 bp, SARS Virus
gcagctcaaagtcgaactgccactc

SEQ ID NO: 19321 - DNA, 25 bp, SARS Virus
cagctcaaagtacaactgccactcc

SEQ ID NO: 19322 - DNA, 25 bp, SARS Virus
agctcaaagtagcactgccactcca

SEQ ID NO: 19323 - DNA, 25 bp, SARS Virus
gctcaaagtagacctgccactccaa

SEQ ID NO: 19324 - DNA, 25 bp, SARS Virus
ctcaaagtagaactgccactccaag

SEQ ID NO: 19325 - DNA, 25 bp, SARS Virus
tcaaagtagaaccgccactccaaga

SEQ ID NO: 19326 - DNA, 25 bp, SARS Virus
caaagtagaactcccactccaagaa

SEQ ID NO: 19327 - DNA, 25 bp, SARS Virus
aaagtagaactgccactccaagaaa

SEQ ID NO: 19328 - DNA, 25 bp, SARS Virus
aagtagaactgccactccaagaaag

SEQ ID NO: 19329 - DNA, 25 bp, SARS Virus
agtagaactgcccctccaagaaagt

SEQ ID NO: 19330 - DNA, 25 bp, SARS Virus
gtagaactgccactccaagaaagtg

SEQ ID NO: 19331 - DNA, 25 bp, SARS Virus
tagaactgccaccccaagaaagtga

SEQ ID NO: 19332 - DNA, 25 bp, SARS Virus
agaactgccactccaagaaagtgaa

SEQ ID NO: 19333 - DNA, 25 bp, SARS Virus
gaactgccactccaagaaagtgaac

SEQ ID NO: 19334 - DNA, 25 bp, SARS Virus
aactgccactcccagaaagtgaact

SEQ ID NO: 19335 - DNA, 25 bp, SARS Virus
actgccactccacgaaagtgaactg

SEQ ID NO: 19336 - DNA, 25 bp, SARS Virus
ctgccactccaacaaagtgaactgt

SEQ ID NO: 19337 - DNA, 25 bp, SARS Virus
tgccactccaagcaagtgaactgtt

SEQ ID NO: 19338 - DNA, 25 bp, SARS Virus
gccactccaagacagtgaactgttt

SEQ ID NO: 19339 - DNA, 25 bp, SARS Virus
ccactccaagaacgtgaactgtttg

SEQ ID NO: 19340 - DNA, 25 bp, SARS Virus
cactccaagaaactgaactgtttga

SEQ ID NO: 19341 - DNA, 25 bp, SARS Virus
actccaagaaagcgaactgtttgat

SEQ ID NO: 19342 - DNA, 25 bp, SARS Virus
ctccaagaaagtcaactgtttgatt

SEQ ID NO: 19343 - DNA, 25 bp, SARS Virus
tccaagaaagtgcactgtttgattt

SEQ ID NO: 19344 - DNA, 25 bp, SARS Virus
ccaagaaagtgacctgtttgatttc

SEQ ID NO: 19345 - DNA, 25 bp, SARS Virus
caagaaagtgaactgtttgatttct

SEQ ID NO: 19346 - DNA, 25 bp, SARS Virus
aagaaagtgaaccgtttgatttctc

SEQ ID NO: 19347 - DNA, 25 bp, SARS Virus
agaaagtgaactctttgatttctca

SEQ ID NO: 19348 - DNA, 25 bp, SARS Virus
gaaagtgaactgcttgatttctcag

SEQ ID NO: 19349 - DNA, 25 bp, SARS Virus
aaagtgaactgtctgatttctcaga

SEQ ID NO: 19350 - DNA, 25 bp, SARS Virus
aagtgaactgttcgatttctcagag

SEQ ID NO: 19351 - DNA, 25 bp, SARS Virus
agtgaactgtttcatttctcagaga

SEQ ID NO: 19352 - DNA, 25 bp, SARS Virus
gtgaactgtttgctttctcagagaa

SEQ ID NO: 19353 - DNA, 25 bp, SARS Virus
tgaactgtttgacttctcagagaat

SEQ ID NO: 19354 - DNA, 25 bp, SARS Virus
gaactgtttgatctctcagagaata

SEQ ID NO: 19355 - DNA, 25 bp, SARS Virus
aactgtttgattcctcagagaatag

SEQ ID NO: 19356 - DNA, 25 bp, SARS Virus
actgtttgatttctcagagaatagg

SEQ ID NO: 19357 - DNA, 25 bp, SARS Virus
ctgtttgatttcccagagaataggg

SEQ ID NO: 19358 - DNA, 25 bp, SARS Virus
tgtttgatttctcagagaataggga

SEQ ID NO: 19359 - DNA, 25 bp, SARS Virus
gtttgatttctccgagaatagggac

SEQ ID NO: 19360 - DNA, 25 bp, SARS Virus
tttgatttctcacagaatagggacg

SEQ ID NO: 19361 - DNA, 25 bp, SARS Virus
ttgatttctcagcgaatagggacgc

SEQ ID NO: 19362 - DNA, 25 bp, SARS Virus
tgatttctcagacaatagggacgcc

SEQ ID NO: 19363 - DNA, 25 bp, SARS Virus
gatttctcagagcatagggacgccc

SEQ ID NO: 19364 - DNA, 25 bp, SARS Virus
atttctcagagactagggacgccct

SEQ ID NO: 19365 - DNA, 25 bp, SARS Virus
tttctcagagaacagggacgccctc

SEQ ID NO: 19366 - DNA, 25 bp, SARS Virus
ttctcagagaatcgggacgccctcc

SEQ ID NO: 19367 - DNA, 25 bp, SARS Virus
tctcagagaatacggacgccctcca

SEQ ID NO: 19368 - DNA, 25 bp, SARS Virus
ctcagagaatagcgacgccctccaa

SEQ ID NO: 19369 - DNA, 25 bp, SARS Virus
tcagagaataggcacgccctccaat

SEQ ID NO: 19370 - DNA, 25 bp, SARS Virus
cagagaatagggccgccctccaatt

SEQ ID NO: 19371 - DNA, 25 bp, SARS Virus
agagaatagggacgccctccaattc

SEQ ID NO: 19372 - DNA, 25 bp, SARS Virus
gagaatagggaccccctccaattct

SEQ ID NO: 19373 - DNA, 25 bp, SARS Virus
agaatagggacgccctccaattctg

SEQ ID NO: 19374 - DNA, 25 bp, SARS Virus
gaatagggacgccctccaattctga

SEQ ID NO: 19375 - DNA, 25 bp, SARS Virus
aatagggacgccctccaattctgat

SEQ ID NO: 19376 - DNA, 25 bp, SARS Virus
atagggacgccccccaattctgata

SEQ ID NO: 19377 - DNA, 25 bp, SARS Virus
tagggacgccctccaattctgatat

SEQ ID NO: 19378 - DNA, 25 bp, SARS Virus
agggacgccctccaattctgatatt

SEQ ID NO: 19379 - DNA, 25 bp, SARS Virus
gggacgccctcccattctgatattt

SEQ ID NO: 19380 - DNA, 25 bp, SARS Virus
ggacgccctccacttctgatatttt

SEQ ID NO: 19381 - DNA, 25 bp, SARS Virus
gacgccctccaactctgatattttc

SEQ ID NO: 19382 - DNA, 25 bp, SARS Virus
acgccctccaatcctgatattttca

SEQ ID NO: 19383 - DNA, 25 bp, SARS Virus
cgccctccaattctgatattttcac

SEQ ID NO: 19384 - DNA, 25 bp, SARS Virus
gccctccaattccgatattttcaca

SEQ ID NO: 19385 - DNA, 25 bp, SARS Virus
ccctccaattctcatattttcacaa

SEQ ID NO: 19386 - DNA, 25 bp, SARS Virus
cctccaattctgctattttcacaag

SEQ ID NO: 19387 - DNA, 25 bp, SARS Virus
ctccaattctgacattttcacaagt

SEQ ID NO: 19388 - DNA, 25 bp, SARS Virus
tccaattctgatcttttcacaagtg

SEQ ID NO: 19389 - DNA, 25 bp, SARS Virus
ccaattctgatactttcacaagtgt

SEQ ID NO: 19390 - DNA, 25 bp, SARS Virus
caattctgatatcttcacaagtgtt

SEQ ID NO: 19391 - DNA, 25 bp, SARS Virus
aattctgatattctcacaagtgttg

SEQ ID NO: 19392 - DNA, 25 bp, SARS Virus
attctgatatttccacaagtgttga

SEQ ID NO: 19393 - DNA, 25 bp, SARS Virus
ttctgatattttcacaagtgttgac

SEQ ID NO: 19394 - DNA, 25 bp, SARS Virus
tctgatattttcccaagtgttgaca

SEQ ID NO: 19395 - DNA, 25 bp, SARS Virus
ctgatattttcacaagtgttgacac

SEQ ID NO: 19396 - DNA, 25 bp, SARS Virus
tgatattttcaccagtgttgacacc

SEQ ID NO: 19397 - DNA, 25 bp, SARS Virus
gatattttcacacgtgttgacacct

SEQ ID NO: 19398 - DNA, 25 bp, SARS Virus
atattttcacaactgttgacacctg

SEQ ID NO: 19399 - DNA, 25 bp, SARS Virus
tattttcacaagcgttgacacctgt

SEQ ID NO: 19400 - DNA, 25 bp, SARS Virus
attttcacaagtcttgacacctgtt

SEQ ID NO: 19401 - DNA, 25 bp, SARS Virus
ttttcacaagtgctgacacctgttg

SEQ ID NO: 19402 - DNA, 25 bp, SARS Virus
tttcacaagtgtcgacacctgttgt

SEQ ID NO: 19403 - DNA, 25 bp, SARS Virus
ttcacaagtgttcacacctgttgtg

SEQ ID NO: 19404 - DNA, 25 bp, SARS Virus
tcacaagtgttgccacctgttgtga

SEQ ID NO: 19405 - DNA, 25 bp, SARS Virus
cacaagtgttgacacctgttgtgat

SEQ ID NO: 19406 - DNA, 25 bp, SARS Virus
acaagtgttgacccctgttgtgatt

SEQ ID NO: 19407 - DNA, 25 bp, SARS Virus
caagtgttgacacctgttgtgatta

SEQ ID NO: 19408 - DNA, 25 bp, SARS Virus
aagtgttgacacctgttgtgattag

SEQ ID NO: 19409 - DNA, 25 bp, SARS Virus
agtgttgacacccgttgtgattaga

SEQ ID NO: 19410 - DNA, 25 bp, SARS Virus
gtgttgacacctcttgtgattagag

SEQ ID NO: 19411 - DNA, 25 bp, SARS Virus
tgttgacacctgctgtgattagagg

SEQ ID NO: 19412 - DNA, 25 bp, SARS Virus
gttgacacctgtcgtgattagaggt

SEQ ID NO: 19413 - DNA, 25 bp, SARS Virus
ttgacacctgttctgattagaggtg

SEQ ID NO: 19414 - DNA, 25 bp, SARS Virus
tgacacctgttgcgattagaggtgt

SEQ ID NO: 19415 - DNA, 25 bp, SARS Virus
gacacctgttgtcattagaggtgtg

SEQ ID NO: 19416 - DNA, 25 bp, SARS Virus
acacctgttgtgcttagaggtgtgt

SEQ ID NO: 19417 - DNA, 25 bp, SARS Virus
cacctgttgtgactagaggtgtgtg

SEQ ID NO: 19418 - DNA, 25 bp, SARS Virus
acctgttgtgatcagaggtgtgtgt

SEQ ID NO: 19419 - DNA, 25 bp, SARS Virus
cctgttgtgattcgaggtgtgtgtc

SEQ ID NO: 19420 - DNA, 25 bp, SARS Virus
ctgttgtgattacaggtgtgtgtcg

SEQ ID NO: 19421 - DNA, 25 bp, SARS Virus
tgttgtgattagcggtgtgtgtcga

SEQ ID NO: 19422 - DNA, 25 bp, SARS Virus
gttgtgattagacgtgtgtgtcgaa

SEQ ID NO: 19423 - DNA, 25 bp, SARS Virus
ttgtgattagagctgtgtgtcgaac

SEQ ID NO: 19424 - DNA, 25 bp, SARS Virus
tgtgattagaggcgtgtgtcgaaca

SEQ ID NO: 19425 - DNA, 25 bp, SARS Virus
gtgattagaggtctgtgtcgaacac

SEQ ID NO: 19426 - DNA, 25 bp, SARS Virus
tgattagaggtgcgtgtcgaacacc

SEQ ID NO: 19427 - DNA, 25 bp, SARS Virus
gattagaggtgtctgtcgaacacct

SEQ ID NO: 19428 - DNA, 25 bp, SARS Virus
attagaggtgtgcgtcgaacaccta

SEQ ID NO: 19429 - DNA, 25 bp, SARS Virus
ttagaggtgtgtctcgaacacctat

SEQ ID NO: 19430 - DNA, 25 bp, SARS Virus
tagaggtgtgtgccgaacacctata

SEQ ID NO: 19431 - DNA, 25 bp, SARS Virus
agaggtgtgtgtcgaacacctatac

SEQ ID NO: 19432 - DNA, 25 bp, SARS Virus
gaggtgtgtgtccaacacctataca

SEQ ID NO: 19433 - DNA, 25 bp, SARS Virus
aggtgtgtgtcgcacacctatacag

SEQ ID NO: 19434 - DNA, 25 bp, SARS Virus
ggtgtgtgtcgaccacctatacaga

SEQ ID NO: 19435 - DNA, 25 bp, SARS Virus
gtgtgtgtcgaacacctatacagat

SEQ ID NO: 19436 - DNA, 25 bp, SARS Virus
tgtgtgtcgaacccctatacagata

SEQ ID NO: 19437 - DNA, 25 bp, SARS Virus
gtgtgtcgaacacctatacagatac

SEQ ID NO: 19438 - DNA, 25 bp, SARS Virus
tgtgtcgaacacctatacagatact

SEQ ID NO: 19439 - DNA, 25 bp, SARS Virus
gtgtcgaacacccatacagatactg

SEQ ID NO: 19440 - DNA, 25 bp, SARS Virus
tgtcgaacacctctacagatactgt

SEQ ID NO: 19441 - DNA, 25 bp, SARS Virus
gtcgaacacctacacagatactgta

SEQ ID NO: 19442 - DNA, 25 bp, SARS Virus
tcgaacacctatccagatactgtat

SEQ ID NO: 19443 - DNA, 25 bp, SARS Virus
cgaacacctatacagatactgtata

SEQ ID NO: 19444 - DNA, 25 bp, SARS Virus
gaacacctataccgatactgtatac

SEQ ID NO: 19445 - DNA, 25 bp, SARS Virus
aacacctatacacatactgtatacc

SEQ ID NO: 19446 - DNA, 25 bp, SARS Virus
acacctatacagctactgtatacct

SEQ ID NO: 19447 - DNA, 25 bp, SARS Virus
cacctatacagacactgtatacctg

SEQ ID NO: 19448 - DNA, 25 bp, SARS Virus
acctatacagatcctgtatacctgt

SEQ ID NO: 19449 - DNA, 25 bp, SARS Virus
cctatacagatactgtatacctgtc

SEQ ID NO: 19450 - DNA, 25 bp, SARS Virus
ctatacagataccgtatacctgtcg

SEQ ID NO: 19451 - DNA, 25 bp, SARS Virus
tatacagatactctatacctgtcgt

SEQ ID NO: 19452 - DNA, 25 bp, SARS Virus
atacagatactgcatacctgtcgtc

SEQ ID NO: 19453 - DNA, 25 bp, SARS Virus
tacagatactgtctacctgtcgtca

SEQ ID NO: 19454 - DNA, 25 bp, SARS Virus
acagatactgtacacctgtcgtcaa

SEQ ID NO: 19455 - DNA, 25 bp, SARS Virus
cagatactgtatccctgtcgtcaaa

SEQ ID NO: 19456 - DNA, 25 bp, SARS Virus
agatactgtatacctgtcgtcaaac

SEQ ID NO: 19457 - DNA, 25 bp, SARS Virus
gatactgtatacctgtcgtcaaacc

SEQ ID NO: 19458 - DNA, 25 bp, SARS Virus
atactgtatacccgtcgtcaaacca

SEQ ID NO: 19459 - DNA, 25 bp, SARS Virus
tactgtatacctctcgtcaaaccag

SEQ ID NO: 19460 - DNA, 25 bp, SARS Virus
actgtatacctgccgtcaaaccagg

SEQ ID NO: 19461 - DNA, 25 bp, SARS Virus
ctgtatacctgtcgtcaaaccaggt

SEQ ID NO: 19462 - DNA, 25 bp, SARS Virus
tgtatacctgtcctcaaaccaggtt

SEQ ID NO: 19463 - DNA, 25 bp, SARS Virus
gtatacctgtcgccaaaccaggttg

SEQ ID NO: 19464 - DNA, 25 bp, SARS Virus
tatacctgtcgtcaaaccaggttgt

SEQ ID NO: 19465 - DNA, 25 bp, SARS Virus
atacctgtcgtccaaccaggttgta

SEQ ID NO: 19466 - DNA, 25 bp, SARS Virus
tacctgtcgtcacaccaggttgtat

SEQ ID NO: 19467 - DNA, 25 bp, SARS Virus
acctgtcgtcaacccaggttgtatg

SEQ ID NO: 19468 - DNA, 25 bp, SARS Virus
cctgtcgtcaaaccaggttgtatga

SEQ ID NO: 19469 - DNA, 25 bp, SARS Virus
ctgtcgtcaaaccaggttgtatgaa

SEQ ID NO: 19470 - DNA, 25 bp, SARS Virus
tgtcgtcaaacccggttgtatgaac

SEQ ID NO: 19471 - DNA, 25 bp, SARS Virus
gtcgtcaaaccacgttgtatgaacc

SEQ ID NO: 19472 - DNA, 25 bp, SARS Virus
tcgtcaaaccagcttgtatgaacct

SEQ ID NO: 19473 - DNA, 25 bp, SARS Virus
cgtcaaaccaggctgtatgaaccta

SEQ ID NO: 19474 - DNA, 25 bp, SARS Virus
gtcaaaccaggtcgtatgaacctac

SEQ ID NO: 19475 - DNA, 25 bp, SARS Virus
tcaaaccaggttctatgaacctacc

SEQ ID NO: 19476 - DNA, 25 bp, SARS Virus
caaaccaggttgcatgaacctacca

SEQ ID NO: 19477 - DNA, 25 bp, SARS Virus
aaaccaggttgtctgaacctaccac

SEQ ID NO: 19478 - DNA, 25 bp, SARS Virus
aaccaggttgtacgaacctaccacg

SEQ ID NO: 19479 - DNA, 25 bp, SARS Virus
accaggttgtatcaacctaccacga

SEQ ID NO: 19480 - DNA, 25 bp, SARS Virus
ccaggttgtatgcacctaccacgac

SEQ ID NO: 19481 - DNA, 25 bp, SARS Virus
caggttgtatgaccctaccacgact

SEQ ID NO: 19482 - DNA, 25 bp, SARS Virus
aggttgtatgaacctaccacgacta

SEQ ID NO: 19483 - DNA, 25 bp, SARS Virus
ggttgtatgaacctaccacgactac

SEQ ID NO: 19484 - DNA, 25 bp, SARS Virus
gttgtatgaacccaccacgactaca

SEQ ID NO: 19485 - DNA, 25 bp, SARS Virus
ttgtatgaacctcccacgactacaa

SEQ ID NO: 19486 - DNA, 25 bp, SARS Virus
tgtatgaacctaccacgactacaat

SEQ ID NO: 19487 - DNA, 25 bp, SARS Virus
gtatgaacctaccacgactacaatg

SEQ ID NO: 19488 - DNA, 25 bp, SARS Virus
tatgaacctaccccgactacaatgt

SEQ ID NO: 19489 - DNA, 25 bp, SARS Virus
atgaacctaccacgactacaatgtt

SEQ ID NO: 19490 - DNA, 25 bp, SARS Virus
tgaacctaccaccactacaatgttt

SEQ ID NO: 19491 - DNA, 25 bp, SARS Virus
gaacctaccacgcctacaatgtttt

SEQ ID NO: 19492 - DNA, 25 bp, SARS Virus
aacctaccacgactacaatgttttt

SEQ ID NO: 19493 - DNA, 25 bp, SARS Virus
acctaccacgaccacaatgttttta

SEQ ID NO: 19494 - DNA, 25 bp, SARS Virus
cctaccacgactccaatgtttttaa

SEQ ID NO: 19495 - DNA, 25 bp, SARS Virus
ctaccacgactacaatgtttttaat

SEQ ID NO: 19496 - DNA, 25 bp, SARS Virus
taccacgactaccatgtttttaatt

SEQ ID NO: 19497 - DNA, 25 bp, SARS Virus
accacgactacactgtttttaattt

SEQ ID NO: 19498 - DNA, 25 bp, SARS Virus
ccacgactacaacgtttttaatttg

SEQ ID NO: 19499 - DNA, 25 bp, SARS Virus
cacgactacaatctttttaatttgg

SEQ ID NO: 19500 - DNA, 25 bp, SARS Virus
acgactacaatgcttttaatttgga

SEQ ID NO: 19501 - DNA, 25 bp, SARS Virus
cgactacaatgtctttaatttggag

SEQ ID NO: 19502 - DNA, 25 bp, SARS Virus
gactacaatgttcttaatttggagt

SEQ ID NO: 19503 - DNA, 25 bp, SARS Virus
actacaatgtttctaatttggagta

SEQ ID NO: 19504 - DNA, 25 bp, SARS Virus
ctacaatgttttcaatttggagtac

SEQ ID NO: 19505 - DNA, 25 bp, SARS Virus
tacaatgtttttcatttggagtaca

SEQ ID NO: 19506 - DNA, 25 bp, SARS Virus
acaatgtttttactttggagtacat

SEQ ID NO: 19507 - DNA, 25 bp, SARS Virus
caatgtttttaacttggagtacatt

SEQ ID NO: 19508 - DNA, 25 bp, SARS Virus
aatgtttttaatctggagtacattt

SEQ ID NO: 19509 - DNA, 25 bp, SARS Virus
atgtttttaattcggagtacattta

SEQ ID NO: 19510 - DNA, 25 bp, SARS Virus
tgtttttaatttcgagtacatttag

SEQ ID NO: 19511 - DNA, 25 bp, SARS Virus
gtttttaatttgcagtacatttagt

SEQ ID NO: 19512 - DNA, 25 bp, SARS Virus
tttttaatttggcgtacatttagta

SEQ ID NO: 19513 - DNA, 25 bp, SARS Virus
ttttaatttggactacatttagtac

SEQ ID NO: 19514 - DNA, 25 bp, SARS Virus
tttaatttggagcacatttagtact

SEQ ID NO: 19515 - DNA, 25 bp, SARS Virus
ttaatttggagtccatttagtactc

SEQ ID NO: 19516 - DNA, 25 bp, SARS Virus
taatttggagtacatttagtactcc

SEQ ID NO: 19517 - DNA, 25 bp, SARS Virus
aatttggagtacctttagtactccc

SEQ ID NO: 19518 - DNA, 25 bp, SARS Virus
atttggagtacacttagtactccca

SEQ ID NO: 19519 - DNA, 25 bp, SARS Virus
tttggagtacatctagtactcccat

SEQ ID NO: 19520 - DNA, 25 bp, SARS Virus
ttggagtacattcagtactcccatt

SEQ ID NO: 19521 - DNA, 25 bp, SARS Virus
tggagtacatttcgtactcccattc

SEQ ID NO: 19522 - DNA, 25 bp, SARS Virus
ggagtacatttactactcccattct

SEQ ID NO: 19523 - DNA, 25 bp, SARS Virus
gagtacatttagcactcccattctg

SEQ ID NO: 19524 - DNA, 25 bp, SARS Virus
agtacatttagtcctcccattctga

SEQ ID NO: 19525 - DNA, 25 bp, SARS Virus
gtacatttagtactcccattctgaa

SEQ ID NO: 19526 - DNA, 25 bp, SARS Virus
tacatttagtacccccattctgaaa

SEQ ID NO: 19527 - DNA, 25 bp, SARS Virus
acatttagtactcccattctgaaag

SEQ ID NO: 19528 - DNA, 25 bp, SARS Virus
catttagtactcccattctgaaaga

SEQ ID NO: 19529 - DNA, 25 bp, SARS Virus
atttagtactcccattctgaaagaa

SEQ ID NO: 19530 - DNA, 25 bp, SARS Virus
tttagtactccccttctgaaagaaa

SEQ ID NO: 19531 - DNA, 25 bp, SARS Virus
ttagtactcccactctgaaagaaac

SEQ ID NO: 19532 - DNA, 25 bp, SARS Virus
tagtactcccatcctgaaagaaaca

SEQ ID NO: 19533 - DNA, 25 bp, SARS Virus
agtactcccattctgaaagaaacat

SEQ ID NO: 19534 - DNA, 25 bp, SARS Virus
gtactcccattccgaaagaaacatg

SEQ ID NO: 19535 - DNA, 25 bp, SARS Virus
tactcccattctcaaagaaacatga

SEQ ID NO: 19536 - DNA, 25 bp, SARS Virus
actcccattctgcaagaaacatgat

SEQ ID NO: 19537 - DNA, 25 bp, SARS Virus
ctcccattctgacagaaacatgatg

SEQ ID NO: 19538 - DNA, 25 bp, SARS Virus
tcccattctgaacgaaacatgatgg

SEQ ID NO: 19539 - DNA, 25 bp, SARS Virus
cccattctgaaacaaacatgatgga

SEQ ID NO: 19540 - DNA, 25 bp, SARS Virus
ccattctgaaagcaacatgatggat

SEQ ID NO: 19541 - DNA, 25 bp, SARS Virus
cattctgaaagacacatgatggatc

SEQ ID NO: 19542 - DNA, 25 bp, SARS Virus
attctgaaagaaccatgatggatca

SEQ ID NO: 19543 - DNA, 25 bp, SARS Virus
ttctgaaagaaacatgatggatcac

SEQ ID NO: 19544 - DNA, 25 bp, SARS Virus
tctgaaagaaacctgatggatcact

SEQ ID NO: 19545 - DNA, 25 bp, SARS Virus
ctgaaagaaacacgatggatcacta

SEQ ID NO: 19546 - DNA, 25 bp, SARS Virus
tgaaagaaacatcatggatcactac

SEQ ID NO: 19547 - DNA, 25 bp, SARS Virus
gaaagaaacatgctggatcactact

SEQ ID NO: 19548 - DNA, 25 bp, SARS Virus
aaagaaacatgacggatcactactg

SEQ ID NO: 19549 - DNA, 25 bp, SARS Virus
aagaaacatgatcgatcactactgt

SEQ ID NO: 19550 - DNA, 25 bp, SARS Virus
agaaacatgatgcatcactactgtg

SEQ ID NO: 19551 - DNA, 25 bp, SARS Virus
gaaacatgatggctcactactgtgt

SEQ ID NO: 19552 - DNA, 25 bp, SARS Virus
aaacatgatggaccactactgtgtg

SEQ ID NO: 19553 - DNA, 25 bp, SARS Virus
aacatgatggatcactactgtgtga

SEQ ID NO: 19554 - DNA, 25 bp, SARS Virus
acatgatggatccctactgtgtgat

SEQ ID NO: 19555 - DNA, 25 bp, SARS Virus
catgatggatcactactgtgtgatg

SEQ ID NO: 19556 - DNA, 25 bp, SARS Virus
atgatggatcaccactgtgtgatgc

SEQ ID NO: 19557 - DNA, 25 bp, SARS Virus
tgatggatcactcctgtgtgatgca

SEQ ID NO: 19558 - DNA, 25 bp, SARS Virus
gatggatcactactgtgtgatgcat

SEQ ID NO: 19559 - DNA, 25 bp, SARS Virus
atggatcactaccgtgtgatgcatc

SEQ ID NO: 19560 - DNA, 25 bp, SARS Virus
tggatcactactctgtgatgcatca

SEQ ID NO: 19561 - DNA, 25 bp, SARS Virus
ggatcactactgcgtgatgcatcac

SEQ ID NO: 19562 - DNA, 25 bp, SARS Virus
gatcactactgtctgatgcatcact

SEQ ID NO: 19563 - DNA, 25 bp, SARS Virus
atcactactgtgcgatgcatcactt

SEQ ID NO: 19564 - DNA, 25 bp, SARS Virus
tcactactgtgtcatgcatcacttc

SEQ ID NO: 19565 - DNA, 25 bp, SARS Virus
cactactgtgtgctgcatcacttcg

SEQ ID NO: 19566 - DNA, 25 bp, SARS Virus
actactgtgtgacgcatcacttcga

SEQ ID NO: 19567 - DNA, 25 bp, SARS Virus
ctactgtgtgatccatcacttcgaa

SEQ ID NO: 19568 - DNA, 25 bp, SARS Virus
tactgtgtgatgcatcacttcgaaa

SEQ ID NO: 19569 - DNA, 25 bp, SARS Virus
actgtgtgatgcctcacttcgaaag

SEQ ID NO: 19570 - DNA, 25 bp, SARS Virus
ctgtgtgatgcaccacttcgaaagc

SEQ ID NO: 19571 - DNA, 25 bp, SARS Virus
tgtgtgatgcatcacttcgaaagct

SEQ ID NO: 19572 - DNA, 25 bp, SARS Virus
gtgtgatgcatcccttcgaaagctc

SEQ ID NO: 19573 - DNA, 25 bp, SARS Virus
tgtgatgcatcacttcgaaagctca

SEQ ID NO: 19574 - DNA, 25 bp, SARS Virus
gtgatgcatcacctcgaaagctcat

SEQ ID NO: 19575 - DNA, 25 bp, SARS Virus
tgatgcatcactccgaaagctcatg

SEQ ID NO: 19576 - DNA, 25 bp, SARS Virus
gatgcatcacttcgaaagctcatga

SEQ ID NO: 19577 - DNA, 25 bp, SARS Virus
atgcatcacttccaaagctcatgat

SEQ ID NO: 19578 - DNA, 25 bp, SARS Virus
tgcatcacttcgcaagctcatgatg

SEQ ID NO: 19579 - DNA, 25 bp, SARS Virus
gcatcacttcgacagctcatgatgg

SEQ ID NO: 19580 - DNA, 25 bp, SARS Virus
catcacttcgaacgctcatgatggt

SEQ ID NO: 19581 - DNA, 25 bp, SARS Virus
atcacttcgaaacctcatgatggta

SEQ ID NO: 19582 - DNA, 25 bp, SARS Virus
tcacttcgaaagctcatgatggtat

SEQ ID NO: 19583 - DNA, 25 bp, SARS Virus
cacttcgaaagcccatgatggtatg

SEQ ID NO: 19584 - DNA, 25 bp, SARS Virus
acttcgaaagctcatgatggtatga

SEQ ID NO: 19585 - DNA, 25 bp, SARS Virus
cttcgaaagctcctgatggtatgag

SEQ ID NO: 19586 - DNA, 25 bp, SARS Virus
ttcgaaagctcacgatggtatgaga

SEQ ID NO: 19587 - DNA, 25 bp, SARS Virus
tcgaaagctcatcatggtatgagaa

SEQ ID NO: 19588 - DNA, 25 bp, SARS Virus
cgaaagctcatgctggtatgagaac

SEQ ID NO: 19589 - DNA, 25 bp, SARS Virus
gaaagctcatgacggtatgagaact

SEQ ID NO: 19590 - DNA, 25 bp, SARS Virus
aaagctcatgatcgtatgagaacta

SEQ ID NO: 19591 - DNA, 25 bp, SARS Virus
aagctcatgatgctatgagaactac

SEQ ID NO: 19592 - DNA, 25 bp, SARS Virus
agctcatgatggcatgagaactact

SEQ ID NO: 19593 - DNA, 25 bp, SARS Virus
gctcatgatggtctgagaactactc

SEQ ID NO: 19594 - DNA, 25 bp, SARS Virus
ctcatgatggtacgagaactactct

SEQ ID NO: 19595 - DNA, 25 bp, SARS Virus
tcatgatggtatcagaactactctc

SEQ ID NO: 19596 - DNA, 25 bp, SARS Virus
catgatggtatgcgaactactctca

SEQ ID NO: 19597 - DNA, 25 bp, SARS Virus
atgatggtatgacaactactctcaa

SEQ ID NO: 19598 - DNA, 25 bp, SARS Virus
tgatggtatgagcactactctcaaa

SEQ ID NO: 19599 - DNA, 25 bp, SARS Virus
gatggtatgagacctactctcaaaa

SEQ ID NO: 19600 - DNA, 25 bp, SARS Virus
atggtatgagaactactctcaaaag

SEQ ID NO: 19601 - DNA, 25 bp, SARS Virus
tggtatgagaaccactctcaaaaga

SEQ ID NO: 19602 - DNA, 25 bp, SARS Virus
ggtatgagaactcctctcaaaagaa

SEQ ID NO: 19603 - DNA, 25 bp, SARS Virus
gtatgagaactactctcaaaagaac

SEQ ID NO: 19604 - DNA, 25 bp, SARS Virus
tatgagaactaccctcaaaagaacc

SEQ ID NO: 19605 - DNA, 25 bp, SARS Virus
atgagaactactctcaaaagaacca

SEQ ID NO: 19606 - DNA, 25 bp, SARS Virus
tgagaactactcccaaaagaaccat

SEQ ID NO: 19607 - DNA, 25 bp, SARS Virus
gagaactactctcaaaagaaccatc

SEQ ID NO: 19608 - DNA, 25 bp, SARS Virus
agaactactctccaaagaaccatcc

SEQ ID NO: 19609 - DNA, 25 bp, SARS Virus
gaactactctcacaagaaccatcca

SEQ ID NO: 19610 - DNA, 25 bp, SARS Virus
aactactctcaacagaaccatccat

SEQ ID NO: 19611 - DNA, 25 bp, SARS Virus
actactctcaaacgaaccatccatg

SEQ ID NO: 19612 - DNA, 25 bp, SARS Virus
ctactctcaaaacaaccatccatgt

SEQ ID NO: 19613 - DNA, 25 bp, SARS Virus
tactctcaaaagcaccatccatgta

SEQ ID NO: 19614 - DNA, 25 bp, SARS Virus
actctcaaaagacccatccatgtac

SEQ ID NO: 19615 - DNA, 25 bp, SARS Virus
ctctcaaaagaaccatccatgtaca

SEQ ID NO: 19616 - DNA, 25 bp, SARS Virus
tctcaaaagaaccatccatgtacag

SEQ ID NO: 19617 - DNA, 25 bp, SARS Virus
ctcaaaagaaccctccatgtacaga

SEQ ID NO: 19618 - DNA, 25 bp, SARS Virus
tcaaaagaaccacccatgtacagac

SEQ ID NO: 19619 - DNA, 25 bp, SARS Virus
caaaagaaccatccatgtacagacg

SEQ ID NO: 19620 - DNA, 25 bp, SARS Virus
aaaagaaccatccatgtacagacga

SEQ ID NO: 19621 - DNA, 25 bp, SARS Virus
aaagaaccatccctgtacagacgaa

SEQ ID NO: 19622 - DNA, 25 bp, SARS Virus
aagaaccatccacgtacagacgaaa

SEQ ID NO: 19623 - DNA, 25 bp, SARS Virus
agaaccatccatctacagacgaaat

SEQ ID NO: 19624 - DNA, 25 bp, SARS Virus
gaaccatccatgcacagacgaaatt

SEQ ID NO: 19625 - DNA, 25 bp, SARS Virus
aaccatccatgtccagacgaaattt

SEQ ID NO: 19626 - DNA, 25 bp, SARS Virus
accatccatgtacagacgaaatttg

SEQ ID NO: 19627 - DNA, 25 bp, SARS Virus
ccatccatgtaccgacgaaatttgg

SEQ ID NO: 19628 - DNA, 25 bp, SARS Virus
catccatgtacacacgaaatttggt

SEQ ID NO: 19629 - DNA, 25 bp, SARS Virus
atccatgtacagccgaaatttggtg

SEQ ID NO: 19630 - DNA, 25 bp, SARS Virus
tccatgtacagacgaaatttggtgt

SEQ ID NO: 19631 - DNA, 25 bp, SARS Virus
ccatgtacagaccaaatttggtgtg

SEQ ID NO: 19632 - DNA, 25 bp, SARS Virus
catgtacagacgcaatttggtgtgt

SEQ ID NO: 19633 - DNA, 25 bp, SARS Virus
atgtacagacgacatttggtgtgtt

SEQ ID NO: 19634 - DNA, 25 bp, SARS Virus
tgtacagacgaactttggtgtgttt

SEQ ID NO: 19635 - DNA, 25 bp, SARS Virus
gtacagacgaaacttggtgtgtttc

SEQ ID NO: 19636 - DNA, 25 bp, SARS Virus
tacagacgaaatctggtgtgtttct

SEQ ID NO: 19637 - DNA, 25 bp, SARS Virus
acagacgaaattcggtgtgtttctt

SEQ ID NO: 19638 - DNA, 25 bp, SARS Virus
cagacgaaatttcgtgtgtttcttt

SEQ ID NO: 19639 - DNA, 25 bp, SARS Virus
agacgaaatttgctgtgtttcttta

SEQ ID NO: 19640 - DNA, 25 bp, SARS Virus
gacgaaatttggcgtgtttctttac

SEQ ID NO: 19641 - DNA, 25 bp, SARS Virus
acgaaatttggtctgtttctttacc

SEQ ID NO: 19642 - DNA, 25 bp, SARS Virus
cgaaatttggtgcgtttctttacct

SEQ ID NO: 19643 - DNA, 25 bp, SARS Virus
gaaatttggtgtctttctttacctt

SEQ ID NO: 19644 - DNA, 25 bp, SARS Virus
aaatttggtgtgcttctttaccttt

SEQ ID NO: 19645 - DNA, 25 bp, SARS Virus
aatttggtgtgtctctttaccttta

SEQ ID NO: 19646 - DNA, 25 bp, SARS Virus
atttggtgtgttcctttacctttaa

SEQ ID NO: 19647 - DNA, 25 bp, SARS Virus
tttggtgtgtttctttacctttaaa

SEQ ID NO: 19648 - DNA, 25 bp, SARS Virus
ttggtgtgtttccttacctttaaag

SEQ ID NO: 19649 - DNA, 25 bp, SARS Virus
ggagtgaagcaggagtttctgtaga

SEQ ID NO: 19650 - DNA, 25 bp, SARS Virus
gagtgaagcagtggtttctgtagac

SEQ ID NO: 19651 - DNA, 25 bp, SARS Virus
agtgaagcagtagtttctgtagact

SEQ ID NO: 19652 - DNA, 25 bp, SARS Virus
gtgaagcagtaggttctgtagactc

SEQ ID NO: 19653 - DNA, 25 bp, SARS Virus
tgaagcagtagtgtctgtagactcc

SEQ ID NO: 19654 - DNA, 25 bp, SARS Virus
gaagcagtagttgctgtagactcct

SEQ ID NO: 19655 - DNA, 25 bp, SARS Virus
aagcagtagtttgtgtagactcctc

SEQ ID NO: 19656 - DNA, 25 bp, SARS Virus
agcagtagtttcggtagactcctcg

SEQ ID NO: 19657 - DNA, 25 bp, SARS Virus
gcagtagtttctgtagactcctcgt

SEQ ID NO: 19658 - DNA, 25 bp, SARS Virus
cagtagtttctggagactcctcgtg

SEQ ID NO: 19659 - DNA, 25 bp, SARS Virus
agtagtttctgtggactcctcgtga

SEQ ID NO: 19660 - DNA, 25 bp, SARS Virus
gtagtttctgtagactcctcgtgaa

SEQ ID NO: 19661 - DNA, 25 bp, SARS Virus
tagtttctgtaggctcctcgtgaaa

SEQ ID NO: 19662 - DNA, 25 bp, SARS Virus
agtttctgtagagtcctcgtgaaac

SEQ ID NO: 19663 - DNA, 25 bp, SARS Virus
gtttctgtagacgcctcgtgaaaca

SEQ ID NO: 19664 - DNA, 25 bp, SARS Virus
tttctgtagactgctcgtgaaacat

SEQ ID NO: 19665 - DNA, 25 bp, SARS Virus
ttctgtagactcgtcgtgaaacatc

SEQ ID NO: 19666 - DNA, 25 bp, SARS Virus
tctgtagactccgcgtgaaacatct

SEQ ID NO: 19667 - DNA, 25 bp, SARS Virus
ctgtagactcctggtgaaacatctt

SEQ ID NO: 19668 - DNA, 25 bp, SARS Virus
tgtagactcctcgtgaaacatcttt

SEQ ID NO: 19669 - DNA, 25 bp, SARS Virus
gtagactcctcgggaaacatctttg

SEQ ID NO: 19670 - DNA, 25 bp, SARS Virus
tagactcctcgtgaaacatctttgt

SEQ ID NO: 19671 - DNA, 25 bp, SARS Virus
agactcctcgtggaacatctttgtc

SEQ ID NO: 19672 - DNA, 25 bp, SARS Virus
gactcctcgtgagacatctttgtca

SEQ ID NO: 19673 - DNA, 25 bp, SARS Virus
actcctcgtgaagcatctttgtcaa

SEQ ID NO: 19674 - DNA, 25 bp, SARS Virus
ctcctcgtgaaagatctttgtcaaa

SEQ ID NO: 19675 - DNA, 25 bp, SARS Virus
tcctcgtgaaacgtctttgtcaaag

SEQ ID NO: 19676 - DNA, 25 bp, SARS Virus
cctcgtgaaacagctttgtcaaaga

SEQ ID NO: 19677 - DNA, 25 bp, SARS Virus
ctcgtgaaacatgtttgtcaaagaa

SEQ ID NO: 19678 - DNA, 25 bp, SARS Virus
tcgtgaaacatcgttgtcaaagaaa

SEQ ID NO: 19679 - DNA, 25 bp, SARS Virus
cgtgaaacatctgtgtcaaagaaac

SEQ ID NO: 19680 - DNA, 25 bp, SARS Virus
gtgaaacatcttggtcaaagaaacc

SEQ ID NO: 19681 - DNA, 25 bp, SARS Virus
tgaaacatctttgtcaaagaaaccg

SEQ ID NO: 19682 - DNA, 25 bp, SARS Virus
gaaacatctttggcaaagaaaccga

SEQ ID NO: 19683 - DNA, 25 bp, SARS Virus
aaacatctttgtgaaagaaaccgac

SEQ ID NO: 19684 - DNA, 25 bp, SARS Virus
aacatctttgtcgaagaaaccgacc

SEQ ID NO: 19685 - DNA, 25 bp, SARS Virus
acatctttgtcagagaaaccgaccg

SEQ ID NO: 19686 - DNA, 25 bp, SARS Virus
catctttgtcaaggaaaccgaccga

SEQ ID NO: 19687 - DNA, 25 bp, SARS Virus
atctttgtcaaagaaaccgaccgag

SEQ ID NO: 19688 - DNA, 25 bp, SARS Virus
tctttgtcaaaggaaccgaccgaga

SEQ ID NO: 19689 - DNA, 25 bp, SARS Virus
ctttgtcaaagagaccgaccgagaa

SEQ ID NO: 19690 - DNA, 25 bp, SARS Virus
tttgtcaaagaagccgaccgagaat

SEQ ID NO: 19691 - DNA, 25 bp, SARS Virus
ttgtcaaagaaagcgaccgagaatg

SEQ ID NO: 19692 - DNA, 25 bp, SARS Virus
tgtcaaagaaacggaccgagaatgt

SEQ ID NO: 19693 - DNA, 25 bp, SARS Virus
gtcaaagaaaccgaccgagaatgtc

SEQ ID NO: 19694 - DNA, 25 bp, SARS Virus
tcaaagaaaccggccgagaatgtct

SEQ ID NO: 19695 - DNA, 25 bp, SARS Virus
caaagaaaccgagcgagaatgtctc

SEQ ID NO: 19696 - DNA, 25 bp, SARS Virus
aaagaaaccgacggagaatgtctct

SEQ ID NO: 19697 - DNA, 25 bp, SARS Virus
aagaaaccgaccgagaatgtctcta

SEQ ID NO: 19698 - DNA, 25 bp, SARS Virus
agaaaccgaccgggaatgtctctaa

SEQ ID NO: 19699 - DNA, 25 bp, SARS Virus
gaaaccgaccgagaatgtctctaac

SEQ ID NO: 19700 - DNA, 25 bp, SARS Virus
aaaccgaccgaggatgtctctaacc

SEQ ID NO: 19701 - DNA, 25 bp, SARS Virus
aaccgaccgagagtgtctctaacca

SEQ ID NO: 19702 - DNA, 25 bp, SARS Virus
accgaccgagaaggtctctaaccag

SEQ ID NO: 19703 - DNA, 25 bp, SARS Virus
ccgaccgagaatgtctctaaccagg

SEQ ID NO: 19704 - DNA, 25 bp, SARS Virus
cgaccgagaatggctctaaccagga

SEQ ID NO: 19705 - DNA, 25 bp, SARS Virus
gaccgagaatgtgtctaaccaggat

SEQ ID NO: 19706 - DNA, 25 bp, SARS Virus
accgagaatgtcgctaaccaggata

SEQ ID NO: 19707 - DNA, 25 bp, SARS Virus
ccgagaatgtctgtaaccaggataa

SEQ ID NO: 19708 - DNA, 25 bp, SARS Virus
cgagaatgtctcgaaccaggataag

SEQ ID NO: 19709 - DNA, 25 bp, SARS Virus
gagaatgtctctgaccaggataagt

SEQ ID NO: 19710 - DNA, 25 bp, SARS Virus
agaatgtctctagccaggataagtc

SEQ ID NO: 19711 - DNA, 25 bp, SARS Virus
gaatgtctctaagcaggataagtcc

SEQ ID NO: 19712 - DNA, 25 bp, SARS Virus
aatgtctctaacgaggataagtcct

SEQ ID NO: 19713 - DNA, 25 bp, SARS Virus
atgtctctaaccgggataagtcctg

SEQ ID NO: 19714 - DNA, 25 bp, SARS Virus
tgtctctaaccaggataagtcctgt

SEQ ID NO: 19715 - DNA, 25 bp, SARS Virus
gtctctaaccaggataagtcctgtc

SEQ ID NO: 19716 - DNA, 25 bp, SARS Virus
tctctaaccagggtaagtcctgtcg

SEQ ID NO: 19717 - DNA, 25 bp, SARS Virus
ctctaaccaggagaagtcctgtcgc

SEQ ID NO: 19718 - DNA, 25 bp, SARS Virus
tctaaccaggatgagtcctgtcgca

SEQ ID NO: 19719 - DNA, 25 bp, SARS Virus
ctaaccaggataggtcctgtcgcat

SEQ ID NO: 19720 - DNA, 25 bp, SARS Virus
taaccaggataagtcctgtcgcatg

SEQ ID NO: 19721 - DNA, 25 bp, SARS Virus
aaccaggataaggcctgtcgcatgt

SEQ ID NO: 19722 - DNA, 25 bp, SARS Virus
accaggataagtgctgtcgcatgtc

SEQ ID NO: 19723 - DNA, 25 bp, SARS Virus
ccaggataagtcgtgtcgcatgtct

SEQ ID NO: 19724 - DNA, 25 bp, SARS Virus
caggataagtccggtcgcatgtctc

SEQ ID NO: 19725 - DNA, 25 bp, SARS Virus
aggataagtcctgtcgcatgtctca

SEQ ID NO: 19726 - DNA, 25 bp, SARS Virus
ggataagtcctggcgcatgtctcaa

SEQ ID NO: 19727 - DNA, 25 bp, SARS Virus
gataagtcctgtggcatgtctcaat

SEQ ID NO: 19728 - DNA, 25 bp, SARS Virus
ataagtcctgtcgcatgtctcaatc

SEQ ID NO: 19729 - DNA, 25 bp, SARS Virus
taagtcctgtcggatgtctcaatcc

SEQ ID NO: 19730 - DNA, 25 bp, SARS Virus
aagtcctgtcgcgtgtctcaatcca

SEQ ID NO: 19731 - DNA, 25 bp, SARS Virus
agtcctgtcgcaggtctcaatccac

SEQ ID NO: 19732 - DNA, 25 bp, SARS Virus
gtcctgtcgcatgtctcaatccaca

SEQ ID NO: 19733 - DNA, 25 bp, SARS Virus
tcctgtcgcatggctcaatccacaa

SEQ ID NO: 19734 - DNA, 25 bp, SARS Virus
cctgtcgcatgtgtcaatccacaac

SEQ ID NO: 19735 - DNA, 25 bp, SARS Virus
ctgtcgcatgtcgcaatccacaact

SEQ ID NO: 19736 - DNA, 25 bp, SARS Virus
tgtcgcatgtctgaatccacaactt

SEQ ID NO: 19737 - DNA, 25 bp, SARS Virus
gtcgcatgtctcgatccacaactta

SEQ ID NO: 19738 - DNA, 25 bp, SARS Virus
tcgcatgtctcagtccacaacttaa

SEQ ID NO: 19739 - DNA, 25 bp, SARS Virus
cgcatgtctcaagccacaacttaaa

SEQ ID NO: 19740 - DNA, 25 bp, SARS Virus
gcatgtctcaatgcacaacttaaag

SEQ ID NO: 19741 - DNA, 25 bp, SARS Virus
catgtctcaatcgacaacttaaaga

SEQ ID NO: 19742 - DNA, 25 bp, SARS Virus
atgtctcaatccgcaacttaaagaa

SEQ ID NO: 19743 - DNA, 25 bp, SARS Virus
tgtctcaatccagaacttaaagaat

SEQ ID NO: 19744 - DNA, 25 bp, SARS Virus
gtctcaatccacgacttaaagaatt

SEQ ID NO: 19745 - DNA, 25 bp, SARS Virus
tctcaatccacagcttaaagaattc

SEQ ID NO: 19746 - DNA, 25 bp, SARS Virus
ctcaatccacaagttaaagaattcg

SEQ ID NO: 19747 - DNA, 25 bp, SARS Virus
tcaatccacaacgtaaagaattcgc

SEQ ID NO: 19748 - DNA, 25 bp, SARS Virus
caatccacaactgaaagaattcgca

SEQ ID NO: 19749 - DNA, 25 bp, SARS Virus
aatccacaacttgaagaattcgcac

SEQ ID NO: 19750 - DNA, 25 bp, SARS Virus
atccacaacttagagaattcgcacc

SEQ ID NO: 19751 - DNA, 25 bp, SARS Virus
tccacaacttaaggaattcgcacca

SEQ ID NO: 19752 - DNA, 25 bp, SARS Virus
ccacaacttaaagaattcgcaccac

SEQ ID NO: 19753 - DNA, 25 bp, SARS Virus
cacaacttaaaggattcgcaccact

SEQ ID NO: 19754 - DNA, 25 bp, SARS Virus
acaacttaaagagttcgcaccactg

SEQ ID NO: 19755 - DNA, 25 bp, SARS Virus
caacttaaagaagtcgcaccactgt

SEQ ID NO: 19756 - DNA, 25 bp, SARS Virus
aacttaaagaatgcgcaccactgtt

SEQ ID NO: 19757 - DNA, 25 bp, SARS Virus
acttaaagaattggcaccactgttt

SEQ ID NO: 19758 - DNA, 25 bp, SARS Virus
cttaaagaattcgcaccactgtttt

SEQ ID NO: 19759 - DNA, 25 bp, SARS Virus
ttaaagaattcggaccactgtttta

SEQ ID NO: 19760 - DNA, 25 bp, SARS Virus
taaagaattcgcgccactgttttaa

SEQ ID NO: 19761 - DNA, 25 bp, SARS Virus
aaagaattcgcagcactgttttaac

SEQ ID NO: 19762 - DNA, 25 bp, SARS Virus
aagaattcgcacgactgttttaaca

SEQ ID NO: 19763 - DNA, 25 bp, SARS Virus
agaattcgcaccgctgttttaacac

SEQ ID NO: 19764 - DNA, 25 bp, SARS Virus
gaattcgcaccagtgttttaacaca

SEQ ID NO: 19765 - DNA, 25 bp, SARS Virus
aattcgcaccacggttttaacacat

SEQ ID NO: 19766 - DNA, 25 bp, SARS Virus
attcgcaccactgttttaacacatg

SEQ ID NO: 19767 - DNA, 25 bp, SARS Virus
ttcgcaccactggtttaacacatgg

SEQ ID NO: 19768 - DNA, 25 bp, SARS Virus
tcgcaccactgtgttaacacatggt

SEQ ID NO: 19769 - DNA, 25 bp, SARS Virus
cgcaccactgttgtaacacatggtg

SEQ ID NO: 19770 - DNA, 25 bp, SARS Virus
gcaccactgtttgaacacatggtgt

SEQ ID NO: 19771 - DNA, 25 bp, SARS Virus
caccactgttttgacacatggtgtg

SEQ ID NO: 19772 - DNA, 25 bp, SARS Virus
accactgttttagcacatggtgtga

SEQ ID NO: 19773 - DNA, 25 bp, SARS Virus
ccactgttttaagacatggtgtgag

SEQ ID NO: 19774 - DNA, 25 bp, SARS Virus
cactgttttaacgcatggtgtgaga

SEQ ID NO: 19775 - DNA, 25 bp, SARS Virus
actgttttaacagatggtgtgagac

SEQ ID NO: 19776 - DNA, 25 bp, SARS Virus
ctgttttaacacgtggtgtgagacc

SEQ ID NO: 19777 - DNA, 25 bp, SARS Virus
tgttttaacacagggtgtgagacct

SEQ ID NO: 19778 - DNA, 25 bp, SARS Virus
gttttaacacatggtgtgagacctc

SEQ ID NO: 19779 - DNA, 25 bp, SARS Virus
ttttaacacatggtgtgagacctct

SEQ ID NO: 19780 - DNA, 25 bp, SARS Virus
tttaacacatggggtgagacctctc

SEQ ID NO: 19781 - DNA, 25 bp, SARS Virus
ttaacacatggtgtgagacctctcg

SEQ ID NO: 19782 - DNA, 25 bp, SARS Virus
taacacatggtgggagacctctcgg

SEQ ID NO: 19783 - DNA, 25 bp, SARS Virus
aacacatggtgtgagacctctcggg

SEQ ID NO: 19784 - DNA, 25 bp, SARS Virus
acacatggtgtgggacctctcgggg

SEQ ID NO: 19785 - DNA, 25 bp, SARS Virus
cacatggtgtgagacctctcggggc

SEQ ID NO: 19786 - DNA, 25 bp, SARS Virus
acatggtgtgaggcctctcggggca

SEQ ID NO: 19787 - DNA, 25 bp, SARS Virus
catggtgtgagagctctcggggcag

SEQ ID NO: 19788 - DNA, 25 bp, SARS Virus
atggtgtgagacgtctcggggcagc

SEQ ID NO: 19789 - DNA, 25 bp, SARS Virus
tggtgtgagaccgctcggggcagct

SEQ ID NO: 19790 - DNA, 25 bp, SARS Virus
ggtgtgagacctgtcggggcagctc

SEQ ID NO: 19791 - DNA, 25 bp, SARS Virus
gtgtgagacctcgcggggcagctca

SEQ ID NO: 19792 - DNA, 25 bp, SARS Virus
tgtgagacctctgggggcagctcaa

SEQ ID NO: 19793 - DNA, 25 bp, SARS Virus
gtgagacctctcggggcagctcaaa

SEQ ID NO: 19794 - DNA, 25 bp, SARS Virus
tgagacctctcggggcagctcaaag

SEQ ID NO: 19795 - DNA, 25 bp, SARS Virus
gagacctctcggggcagctcaaagt

SEQ ID NO: 19796 - DNA, 25 bp, SARS Virus
agacctctcggggcagctcaaagta

SEQ ID NO: 19797 - DNA, 25 bp, SARS Virus
gacctctcgggggagctcaaagtag

SEQ ID NO: 19798 - DNA, 25 bp, SARS Virus
acctctcggggcggctcaaagtaga

SEQ ID NO: 19799 - DNA, 25 bp, SARS Virus
cctctcggggcagctcaaagtagaa

SEQ ID NO: 19800 - DNA, 25 bp, SARS Virus
ctctcggggcaggtcaaagtagaac

SEQ ID NO: 19801 - DNA, 25 bp, SARS Virus
tctcggggcagcgcaaagtagaact

SEQ ID NO: 19802 - DNA, 25 bp, SARS Virus
ctcggggcagctgaaagtagaactg

SEQ ID NO: 19803 - DNA, 25 bp, SARS Virus
tcggggcagctcgaagtagaactgc

SEQ ID NO: 19804 - DNA, 25 bp, SARS Virus
cggggcagctcagagtagaactgcc

SEQ ID NO: 19805 - DNA, 25 bp, SARS Virus
ggggcagctcaaggtagaactgcca

SEQ ID NO: 19806 - DNA, 25 bp, SARS Virus
gggcagctcaaagtagaactgccac

SEQ ID NO: 19807 - DNA, 25 bp, SARS Virus
ggcagctcaaaggagaactgccact

SEQ ID NO: 19808 - DNA, 25 bp, SARS Virus
gcagctcaaagtggaactgccactc

SEQ ID NO: 19809 - DNA, 25 bp, SARS Virus
cagctcaaagtagaactgccactcc

SEQ ID NO: 19810 - DNA, 25 bp, SARS Virus
agctcaaagtaggactgccactcca

SEQ ID NO: 19811 - DNA, 25 bp, SARS Virus
gctcaaagtagagctgccactccaa

SEQ ID NO: 19812 - DNA, 25 bp, SARS Virus
ctcaaagtagaagtgccactccaag

SEQ ID NO: 19813 - DNA, 25 bp, SARS Virus
tcaaagtagaacggccactccaaga

SEQ ID NO: 19814 - DNA, 25 bp, SARS Virus
caaagtagaactgccactccaagaa

SEQ ID NO: 19815 - DNA, 25 bp, SARS Virus
aaagtagaactggcactccaagaaa

SEQ ID NO: 19816 - DNA, 25 bp, SARS Virus
aagtagaactgcgactccaagaaag

SEQ ID NO: 19817 - DNA, 25 bp, SARS Virus
agtagaactgccgctccaagaaagt

SEQ ID NO: 19818 - DNA, 25 bp, SARS Virus
gtagaactgccagtccaagaaagtg

SEQ ID NO: 19819 - DNA, 25 bp, SARS Virus
tagaactgccacgccaagaaagtga

SEQ ID NO: 19820 - DNA, 25 bp, SARS Virus
agaactgccactgcaagaaagtgaa

SEQ ID NO: 19821 - DNA, 25 bp, SARS Virus
gaactgccactcgaagaaagtgaac

SEQ ID NO: 19822 - DNA, 25 bp, SARS Virus
aactgccactccgagaaagtgaact

SEQ ID NO: 19823 - DNA, 25 bp, SARS Virus
actgccactccaggaaagtgaactg

SEQ ID NO: 19824 - DNA, 25 bp, SARS Virus
ctgccactccaagaaagtgaactgt

SEQ ID NO: 19825 - DNA, 25 bp, SARS Virus
tgccactccaaggaagtgaactgtt

SEQ ID NO: 19826 - DNA, 25 bp, SARS Virus
gccactccaagagagtgaactgttt

SEQ ID NO: 19827 - DNA, 25 bp, SARS Virus
ccactccaagaaggtgaactgtttg

SEQ ID NO: 19828 - DNA, 25 bp, SARS Virus
cactccaagaaagtgaactgtttga

SEQ ID NO: 19829 - DNA, 25 bp, SARS Virus
actccaagaaagggaactgtttgat

SEQ ID NO: 19830 - DNA, 25 bp, SARS Virus
ctccaagaaagtgaactgtttgatt

SEQ ID NO: 19831 - DNA, 25 bp, SARS Virus
tccaagaaagtggactgtttgattt

SEQ ID NO: 19832 - DNA, 25 bp, SARS Virus
ccaagaaagtgagctgtttgatttc

SEQ ID NO: 19833 - DNA, 25 bp, SARS Virus
caagaaagtgaagtgtttgatttct

SEQ ID NO: 19834 - DNA, 25 bp, SARS Virus
aagaaagtgaacggtttgatttctc

SEQ ID NO: 19835 - DNA, 25 bp, SARS Virus
agaaagtgaactgtttgatttctca

SEQ ID NO: 19836 - DNA, 25 bp, SARS Virus
gaaagtgaactggttgatttctcag

SEQ ID NO: 19837 - DNA, 25 bp, SARS Virus
aaagtgaactgtgtgatttctcaga

SEQ ID NO: 19838 - DNA, 25 bp, SARS Virus
aagtgaactgttggatttctcagag

SEQ ID NO: 19839 - DNA, 25 bp, SARS Virus
agtgaactgtttgatttctcagaga

SEQ ID NO: 19840 - DNA, 25 bp, SARS Virus
gtgaactgtttggtttctcagagaa

SEQ ID NO: 19841 - DNA, 25 bp, SARS Virus
tgaactgtttgagttctcagagaat

SEQ ID NO: 19842 - DNA, 25 bp, SARS Virus
gaactgtttgatgtctcagagaata

SEQ ID NO: 19843 - DNA, 25 bp, SARS Virus
aactgtttgattgctcagagaatag

SEQ ID NO: 19844 - DNA, 25 bp, SARS Virus
actgtttgatttgtcagagaatagg

SEQ ID NO: 19845 - DNA, 25 bp, SARS Virus
ctgtttgatttcgcagagaataggg

SEQ ID NO: 19846 - DNA, 25 bp, SARS Virus
tgtttgatttctgagagaataggga

SEQ ID NO: 19847 - DNA, 25 bp, SARS Virus
gtttgatttctcggagaatagggac

SEQ ID NO: 19848 - DNA, 25 bp, SARS Virus
tttgatttctcagagaatagggacg

SEQ ID NO: 19849 - DNA, 25 bp, SARS Virus
ttgatttctcagggaatagggacgc

SEQ ID NO: 19850 - DNA, 25 bp, SARS Virus
tgatttctcagagaatagggacgcc

SEQ ID NO: 19851 - DNA, 25 bp, SARS Virus
gatttctcagaggatagggacgccc

SEQ ID NO: 19852 - DNA, 25 bp, SARS Virus
atttctcagagagtagggacgccct

SEQ ID NO: 19853 - DNA, 25 bp, SARS Virus
tttctcagagaagagggacgccctc

SEQ ID NO: 19854 - DNA, 25 bp, SARS Virus
ttctcagagaatggggacgccctcc

SEQ ID NO: 19855 - DNA, 25 bp, SARS Virus
tctcagagaatagggacgccctcca

SEQ ID NO: 19856 - DNA, 25 bp, SARS Virus
ctcagagaatagggacgccctccaa

SEQ ID NO: 19857 - DNA, 25 bp, SARS Virus
tcagagaatagggacgccctccaat

SEQ ID NO: 19858 - DNA, 25 bp, SARS Virus
cagagaataggggcgccctccaatt

SEQ ID NO: 19859 - DNA, 25 bp, SARS Virus
agagaatagggaggccctccaattc

SEQ ID NO: 19860 - DNA, 25 bp, SARS Virus
gagaatagggacgccctccaattct

SEQ ID NO: 19861 - DNA, 25 bp, SARS Virus
agaatagggacggcctccaattctg

SEQ ID NO: 19862 - DNA, 25 bp, SARS Virus
gaatagggacgcgctccaattctga

SEQ ID NO: 19863 - DNA, 25 bp, SARS Virus
aatagggacgccgtccaattctgat

SEQ ID NO: 19864 - DNA, 25 bp, SARS Virus
atagggacgcccgccaattctgata

SEQ ID NO: 19865 - DNA, 25 bp, SARS Virus
tagggacgccctgcaattctgatat

SEQ ID NO: 19866 - DNA, 25 bp, SARS Virus
agggacgccctcgaattctgatatt

SEQ ID NO: 19867 - DNA, 25 bp, SARS Virus
gggacgccctccgattctgatattt

SEQ ID NO: 19868 - DNA, 25 bp, SARS Virus
ggacgccctccagttctgatatttt

SEQ ID NO: 19869 - DNA, 25 bp, SARS Virus
gacgccctccaagtctgatattttc

SEQ ID NO: 19870 - DNA, 25 bp, SARS Virus
acgccctccaatgctgatattttca

SEQ ID NO: 19871 - DNA, 25 bp, SARS Virus
cgccctccaattgtgatattttcac

SEQ ID NO: 19872 - DNA, 25 bp, SARS Virus
gccctccaattcggatattttcaca

SEQ ID NO: 19873 - DNA, 25 bp, SARS Virus
ccctccaattctgatattttcacaa

SEQ ID NO: 19874 - DNA, 25 bp, SARS Virus
cctccaattctggtattttcacaag

SEQ ID NO: 19875 - DNA, 25 bp, SARS Virus
ctccaattctgagattttcacaagt

SEQ ID NO: 19876 - DNA, 25 bp, SARS Virus
tccaattctgatgttttcacaagtg

SEQ ID NO: 19877 - DNA, 25 bp, SARS Virus
ccaattctgatagtttcacaagtgt

SEQ ID NO: 19878 - DNA, 25 bp, SARS Virus
caattctgatatgttcacaagtgtt

SEQ ID NO: 19879 - DNA, 25 bp, SARS Virus
aattctgatattgtcacaagtgttg

SEQ ID NO: 19880 - DNA, 25 bp, SARS Virus
attctgatatttgcacaagtgttga

SEQ ID NO: 19881 - DNA, 25 bp, SARS Virus
ttctgatattttgacaagtgttgac

SEQ ID NO: 19882 - DNA, 25 bp, SARS Virus
tctgatattttcgcaagtgttgaca

SEQ ID NO: 19883 - DNA, 25 bp, SARS Virus
ctgatattttcagaagtgttgacac

SEQ ID NO: 19884 - DNA, 25 bp, SARS Virus
tgatattttcacgagtgttgacacc

SEQ ID NO: 19885 - DNA, 25 bp, SARS Virus
gatattttcacaggtgttgacacct

SEQ ID NO: 19886 - DNA, 25 bp, SARS Virus
atattttcacaagtgttgacacctg

SEQ ID NO: 19887 - DNA, 25 bp, SARS Virus
tattttcacaagggttgacacctgt

SEQ ID NO: 19888 - DNA, 25 bp, SARS Virus
attttcacaagtgttgacacctgtt

SEQ ID NO: 19889 - DNA, 25 bp, SARS Virus
ttttcacaagtggtgacacctgttg

SEQ ID NO: 19890 - DNA, 25 bp, SARS Virus
tttcacaagtgtggacacctgttgt

SEQ ID NO: 19891 - DNA, 25 bp, SARS Virus
ttcacaagtgttgacacctgttgtg

SEQ ID NO: 19892 - DNA, 25 bp, SARS Virus
tcacaagtgttggcacctgttgtga

SEQ ID NO: 19893 - DNA, 25 bp, SARS Virus
cacaagtgttgagacctgttgtgat

SEQ ID NO: 19894 - DNA, 25 bp, SARS Virus
acaagtgttgacgcctgttgtgatt

SEQ ID NO: 19895 - DNA, 25 bp, SARS Virus
caagtgttgacagctgttgtgatta

SEQ ID NO: 19896 - DNA, 25 bp, SARS Virus
aagtgttgacacgtgttgtgattag

SEQ ID NO: 19897 - DNA, 25 bp, SARS Virus
agtgttgacaccggttgtgattaga

SEQ ID NO: 19898 - DNA, 25 bp, SARS Virus
gtgttgacacctgttgtgattagag

SEQ ID NO: 19899 - DNA, 25 bp, SARS Virus
tgttgacacctggtgtgattagagg

SEQ ID NO: 19900 - DNA, 25 bp, SARS Virus
gttgacacctgtggtgattagaggt

SEQ ID NO: 19901 - DNA, 25 bp, SARS Virus
ttgacacctgttgtgattagaggtg

SEQ ID NO: 19902 - DNA, 25 bp, SARS Virus
tgacacctgttgggattagaggtgt

SEQ ID NO: 19903 - DNA, 25 bp, SARS Virus
gacacctgttgtgattagaggtgtg

SEQ ID NO: 19904 - DNA, 25 bp, SARS Virus
acacctgttgtggttagaggtgtgt

SEQ ID NO: 19905 - DNA, 25 bp, SARS Virus
cacctgttgtgagtagaggtgtgtg

SEQ ID NO: 19906 - DNA, 25 bp, SARS Virus
acctgttgtgatgagaggtgtgtgt

SEQ ID NO: 19907 - DNA, 25 bp, SARS Virus
cctgttgtgattggaggtgtgtgtc

SEQ ID NO: 19908 - DNA, 25 bp, SARS Virus
ctgttgtgattagaggtgtgtgtcg

SEQ ID NO: 19909 - DNA, 25 bp, SARS Virus
tgttgtgattaggggtgtgtgtcga

SEQ ID NO: 19910 - DNA, 25 bp, SARS Virus
gttgtgattagaggtgtgtgtcgaa

SEQ ID NO: 19911 - DNA, 25 bp, SARS Virus
ttgtgattagaggtgtgtgtcgaac

SEQ ID NO: 19912 - DNA, 25 bp, SARS Virus
tgtgattagaggggtgtgtcgaaca

SEQ ID NO: 19913 - DNA, 25 bp, SARS Virus
gtgattagaggtgtgtgtcgaacac

SEQ ID NO: 19914 - DNA, 25 bp, SARS Virus
tgattagaggtgggtgtcgaacacc

SEQ ID NO: 19915 - DNA, 25 bp, SARS Virus
gattagaggtgtgtgtcgaacacct

SEQ ID NO: 19916 - DNA, 25 bp, SARS Virus
attagaggtgtgggtcgaacaccta

SEQ ID NO: 19917 - DNA, 25 bp, SARS Virus
ttagaggtgtgtgtcgaacacctat

SEQ ID NO: 19918 - DNA, 25 bp, SARS Virus
tagaggtgtgtggcgaacacctata

SEQ ID NO: 19919 - DNA, 25 bp, SARS Virus
agaggtgtgtgtggaacacctatac

SEQ ID NO: 19920 - DNA, 25 bp, SARS Virus
gaggtgtgtgtcgaacacctataca

SEQ ID NO: 19921 - DNA, 25 bp, SARS Virus
aggtgtgtgtcggacacctatacag

SEQ ID NO: 19922 - DNA, 25 bp, SARS Virus
ggtgtgtgtcgagcacctatacaga

SEQ ID NO: 19923 - DNA, 25 bp, SARS Virus
gtgtgtgtcgaagacctatacagat

SEQ ID NO: 19924 - DNA, 25 bp, SARS Virus
tgtgtgtcgaacgcctatacagata

SEQ ID NO: 19925 - DNA, 25 bp, SARS Virus
gtgtgtcgaacagctatacagatac

SEQ ID NO: 19926 - DNA, 25 bp, SARS Virus
tgtgtcgaacacgtatacagatact

SEQ ID NO: 19927 - DNA, 25 bp, SARS Virus
gtgtcgaacaccgatacagatactg

SEQ ID NO: 19928 - DNA, 25 bp, SARS Virus
tgtcgaacacctgtacagatactgt

SEQ ID NO: 19929 - DNA, 25 bp, SARS Virus
gtcgaacacctagacagatactgta

SEQ ID NO: 19930 - DNA, 25 bp, SARS Virus
tcgaacacctatgcagatactgtat

SEQ ID NO: 19931 - DNA, 25 bp, SARS Virus
cgaacacctatagagatactgtata

SEQ ID NO: 19932 - DNA, 25 bp, SARS Virus
gaacacctatacggatactgtatac

SEQ ID NO: 19933 - DNA, 25 bp, SARS Virus
aacacctatacagatactgtatacc

SEQ ID NO: 19934 - DNA, 25 bp, SARS Virus
acacctatacaggtactgtatacct

SEQ ID NO: 19935 - DNA, 25 bp, SARS Virus
cacctatacagagactgtatacctg

SEQ ID NO: 19936 - DNA, 25 bp, SARS Virus
acctatacagatgctgtatacctgt

SEQ ID NO: 19937 - DNA, 25 bp, SARS Virus
cctatacagatagtgtatacctgtc

SEQ ID NO: 19938 - DNA, 25 bp, SARS Virus
ctatacagatacggtatacctgtcg

SEQ ID NO: 19939 - DNA, 25 bp, SARS Virus
tatacagatactgtatacctgtcgt

SEQ ID NO: 19940 - DNA, 25 bp, SARS Virus
atacagatactggatacctgtcgtc

SEQ ID NO: 19941 - DNA, 25 bp, SARS Virus
tacagatactgtgtacctgtcgtca

SEQ ID NO: 19942 - DNA, 25 bp, SARS Virus
acagatactgtagacctgtcgtcaa

SEQ ID NO: 19943 - DNA, 25 bp, SARS Virus
cagatactgtatgcctgtcgtcaaa

SEQ ID NO: 19944 - DNA, 25 bp, SARS Virus
agatactgtatagctgtcgtcaaac

SEQ ID NO: 19945 - DNA, 25 bp, SARS Virus
gatactgtatacgtgtcgtcaaacc

SEQ ID NO: 19946 - DNA, 25 bp, SARS Virus
atactgtataccggtcgtcaaacca

SEQ ID NO: 19947 - DNA, 25 bp, SARS Virus
tactgtatacctgtcgtcaaaccag

SEQ ID NO: 19948 - DNA, 25 bp, SARS Virus
actgtatacctggcgtcaaaccagg

SEQ ID NO: 19949 - DNA, 25 bp, SARS Virus
ctgtatacctgtggtcaaaccaggt

SEQ ID NO: 19950 - DNA, 25 bp, SARS Virus
tgtatacctgtcgtcaaaccaggtt

SEQ ID NO: 19951 - DNA, 25 bp, SARS Virus
gtatacctgtcggcaaaccaggttg

SEQ ID NO: 19952 - DNA, 25 bp, SARS Virus
tatacctgtcgtgaaaccaggttgt

SEQ ID NO: 19953 - DNA, 25 bp, SARS Virus
atacctgtcgtcgaaccaggttgta

SEQ ID NO: 19954 - DNA, 25 bp, SARS Virus
tacctgtcgtcagaccaggttgtat

SEQ ID NO: 19955 - DNA, 25 bp, SARS Virus
acctgtcgtcaagccaggttgtatg

SEQ ID NO: 19956 - DNA, 25 bp, SARS Virus
cctgtcgtcaaagcaggttgtatga

SEQ ID NO: 19957 - DNA, 25 bp, SARS Virus
ctgtcgtcaaacgaggttgtatgaa

SEQ ID NO: 19958 - DNA, 25 bp, SARS Virus
tgtcgtcaaaccgggttgtatgaac

SEQ ID NO: 19959 - DNA, 25 bp, SARS Virus
gtcgtcaaaccaggttgtatgaacc

SEQ ID NO: 19960 - DNA, 25 bp, SARS Virus
tcgtcaaaccaggttgtatgaacct

SEQ ID NO: 19961 - DNA, 25 bp, SARS Virus
cgtcaaaccagggtgtatgaaccta

SEQ ID NO: 19962 - DNA, 25 bp, SARS Virus
gtcaaaccaggtggtatgaacctac

SEQ ID NO: 19963 - DNA, 25 bp, SARS Virus
tcaaaccaggttgtatgaacctacc

SEQ ID NO: 19964 - DNA, 25 bp, SARS Virus
caaaccaggttggatgaacctacca

SEQ ID NO: 19965 - DNA, 25 bp, SARS Virus
aaaccaggttgtgtgaacctaccac

SEQ ID NO: 19966 - DNA, 25 bp, SARS Virus
aaccaggttgtaggaacctaccacg

SEQ ID NO: 19967 - DNA, 25 bp, SARS Virus
accaggttgtatgaacctaccacga

SEQ ID NO: 19968 - DNA, 25 bp, SARS Virus
ccaggttgtatggacctaccacgac

SEQ ID NO: 19969 - DNA, 25 bp, SARS Virus
caggttgtatgagcctaccacgact

SEQ ID NO: 19970 - DNA, 25 bp, SARS Virus
aggttgtatgaagctaccacgacta

SEQ ID NO: 19971 - DNA, 25 bp, SARS Virus
ggttgtatgaacgtaccacgactac

SEQ ID NO: 19972 - DNA, 25 bp, SARS Virus
gttgtatgaaccgaccacgactaca

SEQ ID NO: 19973 - DNA, 25 bp, SARS Virus
ttgtatgaacctgccacgactacaa

SEQ ID NO: 19974 - DNA, 25 bp, SARS Virus
tgtatgaacctagcacgactacaat

SEQ ID NO: 19975 - DNA, 25 bp, SARS Virus
gtatgaacctacgacgactacaatg

SEQ ID NO: 19976 - DNA, 25 bp, SARS Virus
tatgaacctaccgcgactacaatgt

SEQ ID NO: 19977 - DNA, 25 bp, SARS Virus
atgaacctaccaggactacaatgtt

SEQ ID NO: 19978 - DNA, 25 bp, SARS Virus
tgaacctaccacgactacaatgttt

SEQ ID NO: 19979 - DNA, 25 bp, SARS Virus
gaacctaccacggctacaatgtttt

SEQ ID NO: 19980 - DNA, 25 bp, SARS Virus
aacctaccacgagtacaatgttttt

SEQ ID NO: 19981 - DNA, 25 bp, SARS Virus
acctaccacgacgacaatgttttta

SEQ ID NO: 19982 - DNA, 25 bp, SARS Virus
cctaccacgactgcaatgtttttaa

SEQ ID NO: 19983 - DNA, 25 bp, SARS Virus
ctaccacgactagaatgtttttaat

SEQ ID NO: 19984 - DNA, 25 bp, SARS Virus
taccacgactacgatgtttttaatt

SEQ ID NO: 19985 - DNA, 25 bp, SARS Virus
accacgactacagtgtttttaattt

SEQ ID NO: 19986 - DNA, 25 bp, SARS Virus
ccacgactacaaggtttttaatttg

SEQ ID NO: 19987 - DNA, 25 bp, SARS Virus
cacgactacaatgtttttaatttgg

SEQ ID NO: 19988 - DNA, 25 bp, SARS Virus
acgactacaatggttttaatttgga

SEQ ID NO: 19989 - DNA, 25 bp, SARS Virus
cgactacaatgtgtttaatttggag

SEQ ID NO: 19990 - DNA, 25 bp, SARS Virus
gactacaatgttgttaatttggagt

SEQ ID NO: 19991 - DNA, 25 bp, SARS Virus
actacaatgtttgtaatttggagta

SEQ ID NO: 19992 - DNA, 25 bp, SARS Virus
ctacaatgttttgaatttggagtac

SEQ ID NO: 19993 - DNA, 25 bp, SARS Virus
tacaatgtttttgatttggagtaca

SEQ ID NO: 19994 - DNA, 25 bp, SARS Virus
acaatgtttttagtttggagtacat

SEQ ID NO: 19995 - DNA, 25 bp, SARS Virus
caatgtttttaagttggagtacatt

SEQ ID NO: 19996 - DNA, 25 bp, SARS Virus
aatgtttttaatgtggagtacattt

SEQ ID NO: 19997 - DNA, 25 bp, SARS Virus
atgtttttaattgggagtacattta

SEQ ID NO: 19998 - DNA, 25 bp, SARS Virus
tgtttttaatttggagtacatttag

SEQ ID NO: 19999 - DNA, 25 bp, SARS Virus
gtttttaatttggagtacatttagt

SEQ ID NO: 20000 - DNA, 25 bp, SARS Virus
tttttaatttggggtacatttagta

SEQ ID NO: 20001 - DNA, 25 bp, SARS Virus
ttttaatttggagtacatttagtac

SEQ ID NO: 20002 - DNA, 25 bp, SARS Virus
tttaatttggaggacatttagtact

SEQ ID NO: 20003 - DNA, 25 bp, SARS Virus
ttaatttggagtgcatttagtactc

SEQ ID NO: 20004 - DNA, 25 bp, SARS Virus
taatttggagtagatttagtactcc

SEQ ID NO: 20005 - DNA, 25 bp, SARS Virus
aatttggagtacgtttagtactccc

SEQ ID NO: 20006 - DNA, 25 bp, SARS Virus
atttggagtacagttagtactccca

SEQ ID NO: 20007 - DNA, 25 bp, SARS Virus
tttggagtacatgtagtactcccat

SEQ ID NO: 20008 - DNA, 25 bp, SARS Virus
ttggagtacattgagtactcccatt

SEQ ID NO: 20009 - DNA, 25 bp, SARS Virus
tggagtacatttggtactcccattc

SEQ ID NO: 20010 - DNA, 25 bp, SARS Virus
ggagtacatttagtactcccattct

SEQ ID NO: 20011 - DNA, 25 bp, SARS Virus
gagtacatttaggactcccattctg

SEQ ID NO: 20012 - DNA, 25 bp, SARS Virus
agtacatttagtgctcccattctga

SEQ ID NO: 20013 - DNA, 25 bp, SARS Virus
gtacatttagtagtcccattctgaa

SEQ ID NO: 20014 - DNA, 25 bp, SARS Virus
tacatttagtacgcccattctgaaa

SEQ ID NO: 20015 - DNA, 25 bp, SARS Virus
acatttagtactgccattctgaaag

SEQ ID NO: 20016 - DNA, 25 bp, SARS Virus
catttagtactcgcattctgaaaga

SEQ ID NO: 20017 - DNA, 25 bp, SARS Virus
atttagtactccgattctgaaagaa

SEQ ID NO: 20018 - DNA, 25 bp, SARS Virus
tttagtactcccgttctgaaagaaa

SEQ ID NO: 20019 - DNA, 25 bp, SARS Virus
ttagtactcccagtctgaaagaaac

SEQ ID NO: 20020 - DNA, 25 bp, SARS Virus
tagtactcccatgctgaaagaaaca

SEQ ID NO: 20021 - DNA, 25 bp, SARS Virus
agtactcccattgtgaaagaaacat

SEQ ID NO: 20022 - DNA, 25 bp, SARS Virus
gtactcccattcggaaagaaacatg

SEQ ID NO: 20023 - DNA, 25 bp, SARS Virus
tactcccattctgaaagaaacatga

SEQ ID NO: 20024 - DNA, 25 bp, SARS Virus
actcccattctggaagaaacatgat

SEQ ID NO: 20025 - DNA, 25 bp, SARS Virus
ctcccattctgagagaaacatgatg

SEQ ID NO: 20026 - DNA, 25 bp, SARS Virus
tcccattctgaaggaaacatgatgg

SEQ ID NO: 20027 - DNA, 25 bp, SARS Virus
cccattctgaaagaaacatgatgga

SEQ ID NO: 20028 - DNA, 25 bp, SARS Virus
ccattctgaaaggaacatgatggat

SEQ ID NO: 20029 - DNA, 25 bp, SARS Virus
cattctgaaagagacatgatggatc

SEQ ID NO: 20030 - DNA, 25 bp, SARS Virus
attctgaaagaagcatgatggatca

SEQ ID NO: 20031 - DNA, 25 bp, SARS Virus
ttctgaaagaaagatgatggatcac

SEQ ID NO: 20032 - DNA, 25 bp, SARS Virus
tctgaaagaaacgtgatggatcact

SEQ ID NO: 20033 - DNA, 25 bp, SARS Virus
ctgaaagaaacaggatggatcacta

SEQ ID NO: 20034 - DNA, 25 bp, SARS Virus
tgaaagaaacatgatggatcactac

SEQ ID NO: 20035 - DNA, 25 bp, SARS Virus
gaaagaaacatggtggatcactact

SEQ ID NO: 20036 - DNA, 25 bp, SARS Virus
aaagaaacatgagggatcactactg

SEQ ID NO: 20037 - DNA, 25 bp, SARS Virus
aagaaacatgatggatcactactgt

SEQ ID NO: 20038 - DNA, 25 bp, SARS Virus
agaaacatgatggatcactactgtg

SEQ ID NO: 20039 - DNA, 25 bp, SARS Virus
gaaacatgatgggtcactactgtgt

SEQ ID NO: 20040 - DNA, 25 bp, SARS Virus
aaacatgatggagcactactgtgtg

SEQ ID NO: 20041 - DNA, 25 bp, SARS Virus
aacatgatggatgactactgtgtga

SEQ ID NO: 20042 - DNA, 25 bp, SARS Virus
acatgatggatcgctactgtgtgat

SEQ ID NO: 20043 - DNA, 25 bp, SARS Virus
catgatggatcagtactgtgtgatg

SEQ ID NO: 20044 - DNA, 25 bp, SARS Virus
atgatggatcacgactgtgtgatgc

SEQ ID NO: 20045 - DNA, 25 bp, SARS Virus
tgatggatcactgctgtgtgatgca

SEQ ID NO: 20046 - DNA, 25 bp, SARS Virus
gatggatcactagtgtgtgatgcat

SEQ ID NO: 20047 - DNA, 25 bp, SARS Virus
atggatcactacggtgtgatgcatc

SEQ ID NO: 20048 - DNA, 25 bp, SARS Virus
tggatcactactgtgtgatgcatca

SEQ ID NO: 20049 - DNA, 25 bp, SARS Virus
ggatcactactgggtgatgcatcac

SEQ ID NO: 20050 - DNA, 25 bp, SARS Virus
gatcactactgtgtgatgcatcact

SEQ ID NO: 20051 - DNA, 25 bp, SARS Virus
atcactactgtgggatgcatcactt

SEQ ID NO: 20052 - DNA, 25 bp, SARS Virus
tcactactgtgtgatgcatcacttc

SEQ ID NO: 20053 - DNA, 25 bp, SARS Virus
cactactgtgtggtgcatcacttcg

SEQ ID NO: 20054 - DNA, 25 bp, SARS Virus
actactgtgtgaggcatcacttcga

SEQ ID NO: 20055 - DNA, 25 bp, SARS Virus
ctactgtgtgatgcatcacttcgaa

SEQ ID NO: 20056 - DNA, 25 bp, SARS Virus
tactgtgtgatggatcacttcgaaa

SEQ ID NO: 20057 - DNA, 25 bp, SARS Virus
actgtgtgatgcgtcacttcgaaag

SEQ ID NO: 20058 - DNA, 25 bp, SARS Virus
ctgtgtgatgcagcacttcgaaagc

SEQ ID NO: 20059 - DNA, 25 bp, SARS Virus
tgtgtgatgcatgacttcgaaagct

SEQ ID NO: 20060 - DNA, 25 bp, SARS Virus
gtgtgatgcatcgcttcgaaagctc

SEQ ID NO: 20061 - DNA, 25 bp, SARS Virus
tgtgatgcatcagttcgaaagctca

SEQ ID NO: 20062 - DNA, 25 bp, SARS Virus
gtgatgcatcacgtcgaaagctcat

SEQ ID NO: 20063 - DNA, 25 bp, SARS Virus
tgatgcatcactgcgaaagctcatg

SEQ ID NO: 20064 - DNA, 25 bp, SARS Virus
gatgcatcacttggaaagctcatga

SEQ ID NO: 20065 - DNA, 25 bp, SARS Virus
atgcatcacttcgaaagctcatgat

SEQ ID NO: 20066 - DNA, 25 bp, SARS Virus
tgcatcacttcggaagctcatgatg

SEQ ID NO: 20067 - DNA, 25 bp, SARS Virus
gcatcacttcgagagctcatgatgg

SEQ ID NO: 20068 - DNA, 25 bp, SARS Virus
catcacttcgaaggctcatgatggt

SEQ ID NO: 20069 - DNA, 25 bp, SARS Virus
atcacttcgaaagctcatgatggta

SEQ ID NO: 20070 - DNA, 25 bp, SARS Virus
tcacttcgaaaggtcatgatggtat

SEQ ID NO: 20071 - DNA, 25 bp, SARS Virus
cacttcgaaagcgcatgatggtatg

SEQ ID NO: 20072 - DNA, 25 bp, SARS Virus
acttcgaaagctgatgatggtatga

SEQ ID NO: 20073 - DNA, 25 bp, SARS Virus
cttcgaaagctcgtgatggtatgag

SEQ ID NO: 20074 - DNA, 25 bp, SARS Virus
ttcgaaagctcaggatggtatgaga

SEQ ID NO: 20075 - DNA, 25 bp, SARS Virus
tcgaaagctcatgatggtatgagaa

SEQ ID NO: 20076 - DNA, 25 bp, SARS Virus
cgaaagctcatggtggtatgagaac

SEQ ID NO: 20077 - DNA, 25 bp, SARS Virus
gaaagctcatgagggtatgagaact

SEQ ID NO: 20078 - DNA, 25 bp, SARS Virus
aaagctcatgatggtatgagaacta

SEQ ID NO: 20079 - DNA, 25 bp, SARS Virus
aagctcatgatggtatgagaactac

SEQ ID NO: 20080 - DNA, 25 bp, SARS Virus
agctcatgatgggatgagaactact

SEQ ID NO: 20081 - DNA, 25 bp, SARS Virus
gctcatgatggtgtgagaactactc

SEQ ID NO: 20082 - DNA, 25 bp, SARS Virus
ctcatgatggtaggagaactactct

SEQ ID NO: 20083 - DNA, 25 bp, SARS Virus
tcatgatggtatgagaactactctc

SEQ ID NO: 20084 - DNA, 25 bp, SARS Virus
catgatggtatgggaactactctca

SEQ ID NO: 20085 - DNA, 25 bp, SARS Virus
atgatggtatgagaactactctcaa

SEQ ID NO: 20086 - DNA, 25 bp, SARS Virus
tgatggtatgaggactactctcaaa

SEQ ID NO: 20087 - DNA, 25 bp, SARS Virus
gatggtatgagagctactctcaaaa

SEQ ID NO: 20088 - DNA, 25 bp, SARS Virus
atggtatgagaagtactctcaaaag

SEQ ID NO: 20089 - DNA, 25 bp, SARS Virus
tggtatgagaacgactctcaaaaga

SEQ ID NO: 20090 - DNA, 25 bp, SARS Virus
ggtatgagaactgctctcaaaagaa

SEQ ID NO: 20091 - DNA, 25 bp, SARS Virus
gtatgagaactagtctcaaaagaac

SEQ ID NO: 20092 - DNA, 25 bp, SARS Virus
tatgagaactacgctcaaaagaacc

SEQ ID NO: 20093 - DNA, 25 bp, SARS Virus
atgagaactactgtcaaaagaacca

SEQ ID NO: 20094 - DNA, 25 bp, SARS Virus
tgagaactactcgcaaaagaaccat

SEQ ID NO: 20095 - DNA, 25 bp, SARS Virus
gagaactactctgaaaagaaccatc

SEQ ID NO: 20096 - DNA, 25 bp, SARS Virus
agaactactctcgaaagaaccatcc

SEQ ID NO: 20097 - DNA, 25 bp, SARS Virus
gaactactctcagaagaaccatcca

SEQ ID NO: 20098 - DNA, 25 bp, SARS Virus
aactactctcaagagaaccatccat

SEQ ID NO: 20099 - DNA, 25 bp, SARS Virus
actactctcaaaggaaccatccatg

SEQ ID NO: 20100 - DNA, 25 bp, SARS Virus
ctactctcaaaagaaccatccatgt

SEQ ID NO: 20101 - DNA, 25 bp, SARS Virus
tactctcaaaaggaccatccatgta

SEQ ID NO: 20102 - DNA, 25 bp, SARS Virus
actctcaaaagagccatccatgtac

SEQ ID NO: 20103 - DNA, 25 bp, SARS Virus
ctctcaaaagaagcatccatgtaca

SEQ ID NO: 20104 - DNA, 25 bp, SARS Virus
tctcaaaagaacgatccatgtacag

SEQ ID NO: 20105 - DNA, 25 bp, SARS Virus
ctcaaaagaaccgtccatgtacaga

SEQ ID NO: 20106 - DNA, 25 bp, SARS Virus
tcaaaagaaccagccatgtacagac

SEQ ID NO: 20107 - DNA, 25 bp, SARS Virus
caaaagaaccatgcatgtacagacg

SEQ ID NO: 20108 - DNA, 25 bp, SARS Virus
aaaagaaccatcgatgtacagacga

SEQ ID NO: 20109 - DNA, 25 bp, SARS Virus
aaagaaccatccgtgtacagacgaa

SEQ ID NO: 20110 - DNA, 25 bp, SARS Virus
aagaaccatccaggtacagacgaaa

SEQ ID NO: 20111 - DNA, 25 bp, SARS Virus
agaaccatccatgtacagacgaaat

SEQ ID NO: 20112 - DNA, 25 bp, SARS Virus
gaaccatccatggacagacgaaatt

SEQ ID NO: 20113 - DNA, 25 bp, SARS Virus
aaccatccatgtgcagacgaaattt

SEQ ID NO: 20114 - DNA, 25 bp, SARS Virus
accatccatgtagagacgaaatttg

SEQ ID NO: 20115 - DNA, 25 bp, SARS Virus
ccatccatgtacggacgaaatttgg

SEQ ID NO: 20116 - DNA, 25 bp, SARS Virus
catccatgtacagacgaaatttggt

SEQ ID NO: 20117 - DNA, 25 bp, SARS Virus
atccatgtacaggcgaaatttggtg

SEQ ID NO: 20118 - DNA, 25 bp, SARS Virus
tccatgtacagaggaaatttggtgt

SEQ ID NO: 20119 - DNA, 25 bp, SARS Virus
ccatgtacagacgaaatttggtgtg

SEQ ID NO: 20120 - DNA, 25 bp, SARS Virus
catgtacagacggaatttggtgtgt

SEQ ID NO: 20121 - DNA, 25 bp, SARS Virus
atgtacagacgagatttggtgtgtt

SEQ ID NO: 20122 - DNA, 25 bp, SARS Virus
tgtacagacgaagtttggtgtgttt

SEQ ID NO: 20123 - DNA, 25 bp, SARS Virus
gtacagacgaaagttggtgtgtttc

SEQ ID NO: 20124 - DNA, 25 bp, SARS Virus
tacagacgaaatgtggtgtgtttct

SEQ ID NO: 20125 - DNA, 25 bp, SARS Virus
acagacgaaattgggtgtgtttctt

SEQ ID NO: 20126 - DNA, 25 bp, SARS Virus
cagacgaaatttggtgtgtttcttt

SEQ ID NO: 20127 - DNA, 25 bp, SARS Virus
agacgaaatttggtgtgtttcttta

SEQ ID NO: 20128 - DNA, 25 bp, SARS Virus
gacgaaatttggggtgtttctttac

SEQ ID NO: 20129 - DNA, 25 bp, SARS Virus
acgaaatttggtgtgtttctttacc

SEQ ID NO: 20130 - DNA, 25 bp, SARS Virus
cgaaatttggtgggtttctttacct

SEQ ID NO: 20131 - DNA, 25 bp, SARS Virus
gaaatttggtgtgtttctttacctt

SEQ ID NO: 20132 - DNA, 25 bp, SARS Virus
aaatttggtgtggttctttaccttt

SEQ ID NO: 20133 - DNA, 25 bp, SARS Virus
aatttggtgtgtgtctttaccttta

SEQ ID NO: 20134 - DNA, 25 bp, SARS Virus
atttggtgtgttgctttacctttaa

SEQ ID NO: 20135 - DNA, 25 bp, SARS Virus
tttggtgtgtttgtttacctttaaa

SEQ ID NO: 20136 - DNA, 25 bp, SARS Virus
ttggtgtgtttcgttacctttaaag

SEQ ID NO: 20137 - DNA, 25 bp, SARS Virus
ggagtgaagcagtagtttctgtaga

SEQ ID NO: 20138 - DNA, 25 bp, SARS Virus
gagtgaagcagttgtttctgtagac

SEQ ID NO: 20139 - DNA, 25 bp, SARS Virus
agtgaagcagtattttctgtagact

SEQ ID NO: 20140 - DNA, 25 bp, SARS Virus
gtgaagcagtagtttctgtagactc

SEQ ID NO: 20141 - DNA, 25 bp, SARS Virus
tgaagcagtagtttctgtagactcc

SEQ ID NO: 20142 - DNA, 25 bp, SARS Virus
gaagcagtagtttctgtagactcct

SEQ ID NO: 20143 - DNA, 25 bp, SARS Virus
aagcagtagtttttgtagactcctc

SEQ ID NO: 20144 - DNA, 25 bp, SARS Virus
agcagtagtttctgtagactcctcg

SEQ ID NO: 20145 - DNA, 25 bp, SARS Virus
gcagtagtttctttagactcctcgt

SEQ ID NO: 20146 - DNA, 25 bp, SARS Virus
cagtagtttctgtagactcctcgtg

SEQ ID NO: 20147 - DNA, 25 bp, SARS Virus
agtagtttctgttgactcctcgtga

SEQ ID NO: 20148 - DNA, 25 bp, SARS Virus
gtagtttctgtatactcctcgtgaa

SEQ ID NO: 20149 - DNA, 25 bp, SARS Virus
tagtttctgtagtctcctcgtgaaa

SEQ ID NO: 20150 - DNA, 25 bp, SARS Virus
agtttctgtagattcctcgtgaaac

SEQ ID NO: 20151 - DNA, 25 bp, SARS Virus
gtttctgtagactcctcgtgaaaca

SEQ ID NO: 20152 - DNA, 25 bp, SARS Virus
tttctgtagacttctcgtgaaacat

SEQ ID NO: 20153 - DNA, 25 bp, SARS Virus
ttctgtagactcttcgtgaaacatc

SEQ ID NO: 20154 - DNA, 25 bp, SARS Virus
tctgtagactcctcgtgaaacatct

SEQ ID NO: 20155 - DNA, 25 bp, SARS Virus
ctgtagactccttgtgaaacatctt

SEQ ID NO: 20156 - DNA, 25 bp, SARS Virus
tgtagactcctcttgaaacatcttt

SEQ ID NO: 20157 - DNA, 25 bp, SARS Virus
gtagactcctcgtgaaacatctttg

SEQ ID NO: 20158 - DNA, 25 bp, SARS Virus
tagactcctcgttaaacatctttgt

SEQ ID NO: 20159 - DNA, 25 bp, SARS Virus
agactcctcgtgtaacatctttgtc

SEQ ID NO: 20160 - DNA, 25 bp, SARS Virus
gactcctcgtgatacatctttgtca

SEQ ID NO: 20161 - DNA, 25 bp, SARS Virus
actcctcgtgaatcatctttgtcaa

SEQ ID NO: 20162 - DNA, 25 bp, SARS Virus
ctcctcgtgaaatatctttgtcaaa

SEQ ID NO: 20163 - DNA, 25 bp, SARS Virus
tcctcgtgaaacttctttgtcaaag

SEQ ID NO: 20164 - DNA, 25 bp, SARS Virus
cctcgtgaaacatctttgtcaaaga

SEQ ID NO: 20165 - DNA, 25 bp, SARS Virus
ctcgtgaaacatttttgtcaaagaa

SEQ ID NO: 20166 - DNA, 25 bp, SARS Virus
tcgtgaaacatctttgtcaaagaaa

SEQ ID NO: 20167 - DNA, 25 bp, SARS Virus
cgtgaaacatctttgtcaaagaaac

SEQ ID NO: 20168 - DNA, 25 bp, SARS Virus
gtgaaacatctttgtcaaagaaacc

SEQ ID NO: 20169 - DNA, 25 bp, SARS Virus
tgaaacatctttttcaaagaaaccg

SEQ ID NO: 20170 - DNA, 25 bp, SARS Virus
gaaacatctttgtcaaagaaaccga

SEQ ID NO: 20171 - DNA, 25 bp, SARS Virus
aaacatctttgttaaagaaaccgac

SEQ ID NO: 20172 - DNA, 25 bp, SARS Virus
aacatctttgtctaagaaaccgacc

SEQ ID NO: 20173 - DNA, 25 bp, SARS Virus
acatctttgtcatagaaaccgaccg

SEQ ID NO: 20174 - DNA, 25 bp, SARS Virus
catctttgtcaatgaaaccgaccga

SEQ ID NO: 20175 - DNA, 25 bp, SARS Virus
atctttgtcaaataaaccgaccgag

SEQ ID NO: 20176 - DNA, 25 bp, SARS Virus
tctttgtcaaagtaaccgaccgaga

SEQ ID NO: 20177 - DNA, 25 bp, SARS Virus
ctttgtcaaagataccgaccgagaa

SEQ ID NO: 20178 - DNA, 25 bp, SARS Virus
tttgtcaaagaatccgaccgagaat

SEQ ID NO: 20179 - DNA, 25 bp, SARS Virus
ttgtcaaagaaatcgaccgagaatg

SEQ ID NO: 20180 - DNA, 25 bp, SARS Virus
tgtcaaagaaactgaccgagaatgt

SEQ ID NO: 20181 - DNA, 25 bp, SARS Virus
gtcaaagaaacctaccgagaatgtc

SEQ ID NO: 20182 - DNA, 25 bp, SARS Virus
tcaaagaaaccgtccgagaatgtct

SEQ ID NO: 20183 - DNA, 25 bp, SARS Virus
caaagaaaccgatcgagaatgtctc

SEQ ID NO: 20184 - DNA, 25 bp, SARS Virus
aaagaaaccgactgagaatgtctct

SEQ ID NO: 20185 - DNA, 25 bp, SARS Virus
aagaaaccgacctagaatgtctcta

SEQ ID NO: 20186 - DNA, 25 bp, SARS Virus
agaaaccgaccgtgaatgtctctaa

SEQ ID NO: 20187 - DNA, 25 bp, SARS Virus
gaaaccgaccgataatgtctctaac

SEQ ID NO: 20188 - DNA, 25 bp, SARS Virus
aaaccgaccgagtatgtctctaacc

SEQ ID NO: 20189 - DNA, 25 bp, SARS Virus
aaccgaccgagattgtctctaacca

SEQ ID NO: 20190 - DNA, 25 bp, SARS Virus
accgaccgagaatgtctctaaccag

SEQ ID NO: 20191 - DNA, 25 bp, SARS Virus
ccgaccgagaatttctctaaccagg

SEQ ID NO: 20192 - DNA, 25 bp, SARS Virus
cgaccgagaatgtctctaaccagga

SEQ ID NO: 20193 - DNA, 25 bp, SARS Virus
gaccgagaatgtttctaaccaggat

SEQ ID NO: 20194 - DNA, 25 bp, SARS Virus
accgagaatgtctctaaccaggata

SEQ ID NO: 20195 - DNA, 25 bp, SARS Virus
ccgagaatgtctttaaccaggataa

SEQ ID NO: 20196 - DNA, 25 bp, SARS Virus
cgagaatgtctctaaccaggataag

SEQ ID NO: 20197 - DNA, 25 bp, SARS Virus
gagaatgtctcttaccaggataagt

SEQ ID NO: 20198 - DNA, 25 bp, SARS Virus
agaatgtctctatccaggataagtc

SEQ ID NO: 20199 - DNA, 25 bp, SARS Virus
gaatgtctctaatcaggataagtcc

SEQ ID NO: 20200 - DNA, 25 bp, SARS Virus
aatgtctctaactaggataagtcct

SEQ ID NO: 20201 - DNA, 25 bp, SARS Virus
atgtctctaacctggataagtcctg

SEQ ID NO: 20202 - DNA, 25 bp, SARS Virus
tgtctctaaccatgataagtcctgt

SEQ ID NO: 20203 - DNA, 25 bp, SARS Virus
gtctctaaccagtataagtcctgtc

SEQ ID NO: 20204 - DNA, 25 bp, SARS Virus
tctctaaccaggttaagtcctgtcg

SEQ ID NO: 20205 - DNA, 25 bp, SARS Virus
ctctaaccaggataagtcctgtcgc

SEQ ID NO: 20206 - DNA, 25 bp, SARS Virus
tctaaccaggattagtcctgtcgca

SEQ ID NO: 20207 - DNA, 25 bp, SARS Virus
ctaaccaggatatgtcctgtcgcat

SEQ ID NO: 20208 - DNA, 25 bp, SARS Virus
taaccaggataattcctgtcgcatg

SEQ ID NO: 20209 - DNA, 25 bp, SARS Virus
aaccaggataagtcctgtcgcatgt

SEQ ID NO: 20210 - DNA, 25 bp, SARS Virus
accaggataagttctgtcgcatgtc

SEQ ID NO: 20211 - DNA, 25 bp, SARS Virus
ccaggataagtcttgtcgcatgtct

SEQ ID NO: 20212 - DNA, 25 bp, SARS Virus
caggataagtcctgtcgcatgtctc

SEQ ID NO: 20213 - DNA, 25 bp, SARS Virus
aggataagtcctttcgcatgtctca

SEQ ID NO: 20214 - DNA, 25 bp, SARS Virus
ggataagtcctgtcgcatgtctcaa

SEQ ID NO: 20215 - DNA, 25 bp, SARS Virus
gataagtcctgttgcatgtctcaat

SEQ ID NO: 20216 - DNA, 25 bp, SARS Virus
ataagtcctgtctcatgtctcaatc

SEQ ID NO: 20217 - DNA, 25 bp, SARS Virus
taagtcctgtcgtatgtctcaatcc

SEQ ID NO: 20218 - DNA, 25 bp, SARS Virus
aagtcctgtcgcttgtctcaatcca

SEQ ID NO: 20219 - DNA, 25 bp, SARS Virus
agtcctgtcgcatgtctcaatccac

SEQ ID NO: 20220 - DNA, 25 bp, SARS Virus
gtcctgtcgcatttctcaatccaca

SEQ ID NO: 20221 - DNA, 25 bp, SARS Virus
tcctgtcgcatgtctcaatccacaa

SEQ ID NO: 20222 - DNA, 25 bp, SARS Virus
cctgtcgcatgtttcaatccacaac

SEQ ID NO: 20223 - DNA, 25 bp, SARS Virus
ctgtcgcatgtctcaatccacaact

SEQ ID NO: 20224 - DNA, 25 bp, SARS Virus
tgtcgcatgtcttaatccacaactt

SEQ ID NO: 20225 - DNA, 25 bp, SARS Virus
gtcgcatgtctctatccacaactta

SEQ ID NO: 20226 - DNA, 25 bp, SARS Virus
tcgcatgtctcattccacaacttaa

SEQ ID NO: 20227 - DNA, 25 bp, SARS Virus
cgcatgtctcaatccacaacttaaa

SEQ ID NO: 20228 - DNA, 25 bp, SARS Virus
gcatgtctcaattcacaacttaaag

SEQ ID NO: 20229 - DNA, 25 bp, SARS Virus
catgtctcaatctacaacttaaaga

SEQ ID NO: 20230 - DNA, 25 bp, SARS Virus
atgtctcaatcctcaacttaaagaa

SEQ ID NO: 20231 - DNA, 25 bp, SARS Virus
tgtctcaatccataacttaaagaat

SEQ ID NO: 20232 - DNA, 25 bp, SARS Virus
gtctcaatccactacttaaagaatt

SEQ ID NO: 20233 - DNA, 25 bp, SARS Virus
tctcaatccacatcttaaagaattc

SEQ ID NO: 20234 - DNA, 25 bp, SARS Virus
ctcaatccacaatttaaagaattcg

SEQ ID NO: 20235 - DNA, 25 bp, SARS Virus
tcaatccacaacttaaagaattcgc

SEQ ID NO: 20236 - DNA, 25 bp, SARS Virus
caatccacaacttaaagaattcgca

SEQ ID NO: 20237 - DNA, 25 bp, SARS Virus
aatccacaactttaagaattcgcac

SEQ ID NO: 20238 - DNA, 25 bp, SARS Virus
atccacaacttatagaattcgcacc

SEQ ID NO: 20239 - DNA, 25 bp, SARS Virus
tccacaacttaatgaattcgcacca

SEQ ID NO: 20240 - DNA, 25 bp, SARS Virus
ccacaacttaaataattcgcaccac

SEQ ID NO: 20241 - DNA, 25 bp, SARS Virus
cacaacttaaagtattcgcaccact

SEQ ID NO: 20242 - DNA, 25 bp, SARS Virus
acaacttaaagatttcgcaccactg

SEQ ID NO: 20243 - DNA, 25 bp, SARS Virus
caacttaaagaattcgcaccactgt

SEQ ID NO: 20244 - DNA, 25 bp, SARS Virus
aacttaaagaattcgcaccactgtt

SEQ ID NO: 20245 - DNA, 25 bp, SARS Virus
acttaaagaatttgcaccactgttt

SEQ ID NO: 20246 - DNA, 25 bp, SARS Virus
cttaaagaattctcaccactgtttt

SEQ ID NO: 20247 - DNA, 25 bp, SARS Virus
ttaaagaattcgtaccactgtttta

SEQ ID NO: 20248 - DNA, 25 bp, SARS Virus
taaagaattcgctccactgttttaa

SEQ ID NO: 20249 - DNA, 25 bp, SARS Virus
aaagaattcgcatcactgttttaac

SEQ ID NO: 20250 - DNA, 25 bp, SARS Virus
aagaattcgcactactgttttaaca

SEQ ID NO: 20251 - DNA, 25 bp, SARS Virus
agaattcgcacctctgttttaacac

SEQ ID NO: 20252 - DNA, 25 bp, SARS Virus
gaattcgcaccattgttttaacaca

SEQ ID NO: 20253 - DNA, 25 bp, SARS Virus
aattcgcaccactgttttaacacat

SEQ ID NO: 20254 - DNA, 25 bp, SARS Virus
attcgcaccacttttttaacacatg

SEQ ID NO: 20255 - DNA, 25 bp, SARS Virus
ttcgcaccactgttttaacacatgg

SEQ ID NO: 20256 - DNA, 25 bp, SARS Virus
tcgcaccactgttttaacacatggt

SEQ ID NO: 20257 - DNA, 25 bp, SARS Virus
cgcaccactgttttaacacatggtg

SEQ ID NO: 20258 - DNA, 25 bp, SARS Virus
gcaccactgttttaacacatggtgt

SEQ ID NO: 20259 - DNA, 25 bp, SARS Virus
caccactgtttttacacatggtgtg

SEQ ID NO: 20260 - DNA, 25 bp, SARS Virus
accactgttttatcacatggtgtga

SEQ ID NO: 20261 - DNA, 25 bp, SARS Virus
ccactgttttaatacatggtgtgag

SEQ ID NO: 20262 - DNA, 25 bp, SARS Virus
cactgttttaactcatggtgtgaga

SEQ ID NO: 20263 - DNA, 25 bp, SARS Virus
actgttttaacatatggtgtgagac

SEQ ID NO: 20264 - DNA, 25 bp, SARS Virus
ctgttttaacacttggtgtgagacc

SEQ ID NO: 20265 - DNA, 25 bp, SARS Virus
tgttttaacacatggtgtgagacct

SEQ ID NO: 20266 - DNA, 25 bp, SARS Virus
gttttaacacattgtgtgagacctc

SEQ ID NO: 20267 - DNA, 25 bp, SARS Virus
ttttaacacatgttgtgagacctct

SEQ ID NO: 20268 - DNA, 25 bp, SARS Virus
tttaacacatggtgtgagacctctc

SEQ ID NO: 20269 - DNA, 25 bp, SARS Virus
ttaacacatggtttgagacctctcg

SEQ ID NO: 20270 - DNA, 25 bp, SARS Virus
taacacatggtgtgagacctctcgg

SEQ ID NO: 20271 - DNA, 25 bp, SARS Virus
aacacatggtgttagacctctcggg

SEQ ID NO: 20272 - DNA, 25 bp, SARS Virus
acacatggtgtgtgacctctcgggg

SEQ ID NO: 20273 - DNA, 25 bp, SARS Virus
cacatggtgtgatacctctcggggc

SEQ ID NO: 20274 - DNA, 25 bp, SARS Virus
acatggtgtgagtcctctcggggca

SEQ ID NO: 20275 - DNA, 25 bp, SARS Virus
catggtgtgagatctctcggggcag

SEQ ID NO: 20276 - DNA, 25 bp, SARS Virus
atggtgtgagacttctcggggcagc

SEQ ID NO: 20277 - DNA, 25 bp, SARS Virus
tggtgtgagacctctcggggcagct

SEQ ID NO: 20278 - DNA, 25 bp, SARS Virus
ggtgtgagacctttcggggcagctc

SEQ ID NO: 20279 - DNA, 25 bp, SARS Virus
gtgtgagacctctcggggcagctca

SEQ ID NO: 20280 - DNA, 25 bp, SARS Virus
tgtgagacctcttggggcagctcaa

SEQ ID NO: 20281 - DNA, 25 bp, SARS Virus
gtgagacctctctgggcagctcaaa

SEQ ID NO: 20282 - DNA, 25 bp, SARS Virus
tgagacctctcgtggcagctcaaag

SEQ ID NO: 20283 - DNA, 25 bp, SARS Virus
gagacctctcggtgcagctcaaagt

SEQ ID NO: 20284 - DNA, 25 bp, SARS Virus
agacctctcgggtcagctcaaagta

SEQ ID NO: 20285 - DNA, 25 bp, SARS Virus
gacctctcggggtagctcaaagtag

SEQ ID NO: 20286 - DNA, 25 bp, SARS Virus
acctctcggggctgctcaaagtaga

SEQ ID NO: 20287 - DNA, 25 bp, SARS Virus
cctctcggggcatctcaaagtagaa

SEQ ID NO: 20288 - DNA, 25 bp, SARS Virus
ctctcggggcagttcaaagtagaac

SEQ ID NO: 20289 - DNA, 25 bp, SARS Virus
tctcggggcagctcaaagtagaact

SEQ ID NO: 20290 - DNA, 25 bp, SARS Virus
ctcggggcagcttaaagtagaactg

SEQ ID NO: 20291 - DNA, 25 bp, SARS Virus
tcggggcagctctaagtagaactgc

SEQ ID NO: 20292 - DNA, 25 bp, SARS Virus
cggggcagctcatagtagaactgcc

SEQ ID NO: 20293 - DNA, 25 bp, SARS Virus
ggggcagctcaatgtagaactgcca

SEQ ID NO: 20294 - DNA, 25 bp, SARS Virus
gggcagctcaaattagaactgccac

SEQ ID NO: 20295 - DNA, 25 bp, SARS Virus
ggcagctcaaagtagaactgccact

SEQ ID NO: 20296 - DNA, 25 bp, SARS Virus
gcagctcaaagttgaactgccactc

SEQ ID NO: 20297 - DNA, 25 bp, SARS Virus
cagctcaaagtataactgccactcc

SEQ ID NO: 20298 - DNA, 25 bp, SARS Virus
agctcaaagtagtactgccactcca

SEQ ID NO: 20299 - DNA, 25 bp, SARS Virus
gctcaaagtagatctgccactccaa

SEQ ID NO: 20300 - DNA, 25 bp, SARS Virus
ctcaaagtagaattgccactccaag

SEQ ID NO: 20301 - DNA, 25 bp, SARS Virus
tcaaagtagaactgccactccaaga

SEQ ID NO: 20302 - DNA, 25 bp, SARS Virus
caaagtagaacttccactccaagaa

SEQ ID NO: 20303 - DNA, 25 bp, SARS Virus
aaagtagaactgtcactccaagaaa

SEQ ID NO: 20304 - DNA, 25 bp, SARS Virus
aagtagaactgctactccaagaaag

SEQ ID NO: 20305 - DNA, 25 bp, SARS Virus
agtagaactgcctctccaagaaagt

SEQ ID NO: 20306 - DNA, 25 bp, SARS Virus
gtagaactgccattccaagaaagtg

SEQ ID NO: 20307 - DNA, 25 bp, SARS Virus
tagaactgccactccaagaaagtga

SEQ ID NO: 20308 - DNA, 25 bp, SARS Virus
agaactgccacttcaagaaagtgaa

SEQ ID NO: 20309 - DNA, 25 bp, SARS Virus
gaactgccactctaagaaagtgaac

SEQ ID NO: 20310 - DNA, 25 bp, SARS Virus
aactgccactcctagaaagtgaact

SEQ ID NO: 20311 - DNA, 25 bp, SARS Virus
actgccactccatgaaagtgaactg

SEQ ID NO: 20312 - DNA, 25 bp, SARS Virus
ctgccactccaataaagtgaactgt

SEQ ID NO: 20313 - DNA, 25 bp, SARS Virus
tgccactccaagtaagtgaactgtt

SEQ ID NO: 20314 - DNA, 25 bp, SARS Virus
gccactccaagatagtgaactgttt

SEQ ID NO: 20315 - DNA, 25 bp, SARS Virus
ccactccaagaatgtgaactgtttg

SEQ ID NO: 20316 - DNA, 25 bp, SARS Virus
cactccaagaaattgaactgtttga

SEQ ID NO: 20317 - DNA, 25 bp, SARS Virus
actccaagaaagtgaactgtttgat

SEQ ID NO: 20318 - DNA, 25 bp, SARS Virus
ctccaagaaagttaactgtttgatt

SEQ ID NO: 20319 - DNA, 25 bp, SARS Virus
tccaagaaagtgtactgtttgattt

SEQ ID NO: 20320 - DNA, 25 bp, SARS Virus
ccaagaaagtgatctgtttgatttc

SEQ ID NO: 20321 - DNA, 25 bp, SARS Virus
caagaaagtgaattgtttgatttct

SEQ ID NO: 20322 - DNA, 25 bp, SARS Virus
aagaaagtgaactgtttgatttctc

SEQ ID NO: 20323 - DNA, 25 bp, SARS Virus
agaaagtgaactttttgatttctca

SEQ ID NO: 20324 - DNA, 25 bp, SARS Virus
gaaagtgaactgtttgatttctcag

SEQ ID NO: 20325 - DNA, 25 bp, SARS Virus
aaagtgaactgtttgatttctcaga

SEQ ID NO: 20326 - DNA, 25 bp, SARS Virus
aagtgaactgtttgatttctcagag

SEQ ID NO: 20327 - DNA, 25 bp, SARS Virus
agtgaactgttttatttctcagaga

SEQ ID NO: 20328 - DNA, 25 bp, SARS Virus
gtgaactgtttgttttctcagagaa

SEQ ID NO: 20329 - DNA, 25 bp, SARS Virus
tgaactgtttgatttctcagagaat

SEQ ID NO: 20330 - DNA, 25 bp, SARS Virus
gaactgtttgatttctcagagaata

SEQ ID NO: 20331 - DNA, 25 bp, SARS Virus
aactgtttgatttctcagagaatag

SEQ ID NO: 20332 - DNA, 25 bp, SARS Virus
actgtttgatttttcagagaatagg

SEQ ID NO: 20333 - DNA, 25 bp, SARS Virus
ctgtttgatttctcagagaataggg

SEQ ID NO: 20334 - DNA, 25 bp, SARS Virus
tgtttgatttcttagagaataggga

SEQ ID NO: 20335 - DNA, 25 bp, SARS Virus
gtttgatttctctgagaatagggac

SEQ ID NO: 20336 - DNA, 25 bp, SARS Virus
tttgatttctcatagaatagggacg

SEQ ID NO: 20337 - DNA, 25 bp, SARS Virus
ttgatttctcagtgaatagggacgc

SEQ ID NO: 20338 - DNA, 25 bp, SARS Virus
tgatttctcagataatagggacgcc

SEQ ID NO: 20339 - DNA, 25 bp, SARS Virus
gatttctcagagtatagggacgccc

SEQ ID NO: 20340 - DNA, 25 bp, SARS Virus
atttctcagagattagggacgccct

SEQ ID NO: 20341 - DNA, 25 bp, SARS Virus
tttctcagagaatagggacgccctc

SEQ ID NO: 20342 - DNA, 25 bp, SARS Virus
ttctcagagaattgggacgccctcc

SEQ ID NO: 20343 - DNA, 25 bp, SARS Virus
tctcagagaatatggacgccctcca

SEQ ID NO: 20344 - DNA, 25 bp, SARS Virus
ctcagagaatagtgacgccctccaa

SEQ ID NO: 20345 - DNA, 25 bp, SARS Virus
tcagagaataggtacgccctccaat

SEQ ID NO: 20346 - DNA, 25 bp, SARS Virus
cagagaatagggtcgccctccaatt

SEQ ID NO: 20347 - DNA, 25 bp, SARS Virus
agagaatagggatgccctccaattc

SEQ ID NO: 20348 - DNA, 25 bp, SARS Virus
gagaatagggactccctccaattct

SEQ ID NO: 20349 - DNA, 25 bp, SARS Virus
agaatagggacgtcctccaattctg

SEQ ID NO: 20350 - DNA, 25 bp, SARS Virus
gaatagggacgctctccaattctga

SEQ ID NO: 20351 - DNA, 25 bp, SARS Virus
aatagggacgccttccaattctgat

SEQ ID NO: 20352 - DNA, 25 bp, SARS Virus
atagggacgccctccaattctgata

SEQ ID NO: 20353 - DNA, 25 bp, SARS Virus
tagggacgcccttcaattctgatat

SEQ ID NO: 20354 - DNA, 25 bp, SARS Virus
agggacgccctctaattctgatatt

SEQ ID NO: 20355 - DNA, 25 bp, SARS Virus
gggacgccctcctattctgatattt

SEQ ID NO: 20356 - DNA, 25 bp, SARS Virus
ggacgccctccatttctgatatttt

SEQ ID NO: 20357 - DNA, 25 bp, SARS Virus
gacgccctccaattctgatattttc

SEQ ID NO: 20358 - DNA, 25 bp, SARS Virus
acgccctccaattctgatattttca

SEQ ID NO: 20359 - DNA, 25 bp, SARS Virus
cgccctccaattttgatattttcac

SEQ ID NO: 20360 - DNA, 25 bp, SARS Virus
gccctccaattctgatattttcaca

SEQ ID NO: 20361 - DNA, 25 bp, SARS Virus
ccctccaattcttatattttcacaa

SEQ ID NO: 20362 - DNA, 25 bp, SARS Virus
cctccaattctgttattttcacaag

SEQ ID NO: 20363 - DNA, 25 bp, SARS Virus
ctccaattctgatattttcacaagt

SEQ ID NO: 20364 - DNA, 25 bp, SARS Virus
tccaattctgattttttcacaagtg

SEQ ID NO: 20365 - DNA, 25 bp, SARS Virus
ccaattctgatattttcacaagtgt

SEQ ID NO: 20366 - DNA, 25 bp, SARS Virus
caattctgatattttcacaagtgtt

SEQ ID NO: 20367 - DNA, 25 bp, SARS Virus
aattctgatattttcacaagtgttg

SEQ ID NO: 20368 - DNA, 25 bp, SARS Virus
attctgatattttcacaagtgttga

SEQ ID NO: 20369 - DNA, 25 bp, SARS Virus
ttctgatatttttacaagtgttgac

SEQ ID NO: 20370 - DNA, 25 bp, SARS Virus
tctgatattttctcaagtgttgaca

SEQ ID NO: 20371 - DNA, 25 bp, SARS Virus
ctgatattttcataagtgttgacac

SEQ ID NO: 20372 - DNA, 25 bp, SARS Virus
tgatattttcactagtgttgacacc

SEQ ID NO: 20373 - DNA, 25 bp, SARS Virus
gatattttcacatgtgttgacacct

SEQ ID NO: 20374 - DNA, 25 bp, SARS Virus
atattttcacaattgttgacacctg

SEQ ID NO: 20375 - DNA, 25 bp, SARS Virus
tattttcacaagtgttgacacctgt

SEQ ID NO: 20376 - DNA, 25 bp, SARS Virus
attttcacaagttttgacacctgtt

SEQ ID NO: 20377 - DNA, 25 bp, SARS Virus
ttttcacaagtgttgacacctgttg

SEQ ID NO: 20378 - DNA, 25 bp, SARS Virus
tttcacaagtgttgacacctgttgt

SEQ ID NO: 20379 - DNA, 25 bp, SARS Virus
ttcacaagtgtttacacctgttgtg

SEQ ID NO: 20380 - DNA, 25 bp, SARS Virus
tcacaagtgttgtcacctgttgtga

SEQ ID NO: 20381 - DNA, 25 bp, SARS Virus
cacaagtgttgatacctgttgtgat

SEQ ID NO: 20382 - DNA, 25 bp, SARS Virus
acaagtgttgactcctgttgtgatt

SEQ ID NO: 20383 - DNA, 25 bp, SARS Virus
caagtgttgacatctgttgtgatta

SEQ ID NO: 20384 - DNA, 25 bp, SARS Virus
aagtgttgacacttgttgtgattag

SEQ ID NO: 20385 - DNA, 25 bp, SARS Virus
agtgttgacacctgttgtgattaga

SEQ ID NO: 20386 - DNA, 25 bp, SARS Virus
gtgttgacaccttttgtgattagag

SEQ ID NO: 20387 - DNA, 25 bp, SARS Virus
tgttgacacctgttgtgattagagg

SEQ ID NO: 20388 - DNA, 25 bp, SARS Virus
gttgacacctgttgtgattagaggt

SEQ ID NO: 20389 - DNA, 25 bp, SARS Virus
ttgacacctgttttgattagaggtg

SEQ ID NO: 20390 - DNA, 25 bp, SARS Virus
tgacacctgttgtgattagaggtgt

SEQ ID NO: 20391 - DNA, 25 bp, SARS Virus
gacacctgttgttattagaggtgtg

SEQ ID NO: 20392 - DNA, 25 bp, SARS Virus
acacctgttgtgtttagaggtgtgt

SEQ ID NO: 20393 - DNA, 25 bp, SARS Virus
cacctgttgtgattagaggtgtgtg

SEQ ID NO: 20394 - DNA, 25 bp, SARS Virus
acctgttgtgattagaggtgtgtgt

SEQ ID NO: 20395 - DNA, 25 bp, SARS Virus
cctgttgtgatttgaggtgtgtgtc

SEQ ID NO: 20396 - DNA, 25 bp, SARS Virus
ctgttgtgattataggtgtgtgtcg

SEQ ID NO: 20397 - DNA, 25 bp, SARS Virus
tgttgtgattagtggtgtgtgtcga

SEQ ID NO: 20398 - DNA, 25 bp, SARS Virus
gttgtgattagatgtgtgtgtcgaa

SEQ ID NO: 20399 - DNA, 25 bp, SARS Virus
ttgtgattagagttgtgtgtcgaac

SEQ ID NO: 20400 - DNA, 25 bp, SARS Virus
tgtgattagaggtgtgtgtcgaaca

SEQ ID NO: 20401 - DNA, 25 bp, SARS Virus
gtgattagaggtttgtgtcgaacac

SEQ ID NO: 20402 - DNA, 25 bp, SARS Virus
tgattagaggtgtgtgtcgaacacc

SEQ ID NO: 20403 - DNA, 25 bp, SARS Virus
gattagaggtgtttgtcgaacacct

SEQ ID NO: 20404 - DNA, 25 bp, SARS Virus
attagaggtgtgtgtcgaacaccta

SEQ ID NO: 20405 - DNA, 25 bp, SARS Virus
ttagaggtgtgtttcgaacacctat

SEQ ID NO: 20406 - DNA, 25 bp, SARS Virus
tagaggtgtgtgtcgaacacctata

SEQ ID NO: 20407 - DNA, 25 bp, SARS Virus
agaggtgtgtgttgaacacctatac

SEQ ID NO: 20408 - DNA, 25 bp, SARS Virus
gaggtgtgtgtctaacacctataca

SEQ ID NO: 20409 - DNA, 25 bp, SARS Virus
aggtgtgtgtcgtacacctatacag

SEQ ID NO: 20410 - DNA, 25 bp, SARS Virus
ggtgtgtgtcgatcacctatacaga

SEQ ID NO: 20411 - DNA, 25 bp, SARS Virus
gtgtgtgtcgaatacctatacagat

SEQ ID NO: 20412 - DNA, 25 bp, SARS Virus
tgtgtgtcgaactcctatacagata

SEQ ID NO: 20413 - DNA, 25 bp, SARS Virus
gtgtgtcgaacatctatacagatac

SEQ ID NO: 20414 - DNA, 25 bp, SARS Virus
tgtgtcgaacacttatacagatact

SEQ ID NO: 20415 - DNA, 25 bp, SARS Virus
gtgtcgaacacctatacagatactg

SEQ ID NO: 20416 - DNA, 25 bp, SARS Virus
tgtcgaacacctttacagatactgt

SEQ ID NO: 20417 - DNA, 25 bp, SARS Virus
gtcgaacacctatacagatactgta

SEQ ID NO: 20418 - DNA, 25 bp, SARS Virus
tcgaacacctattcagatactgtat

SEQ ID NO: 20419 - DNA, 25 bp, SARS Virus
cgaacacctatatagatactgtata

SEQ ID NO: 20420 - DNA, 25 bp, SARS Virus
gaacacctatactgatactgtatac

SEQ ID NO: 20421 - DNA, 25 bp, SARS Virus
aacacctatacatatactgtatacc

SEQ ID NO: 20422 - DNA, 25 bp, SARS Virus
acacctatacagttactgtatacct

SEQ ID NO: 20423 - DNA, 25 bp, SARS Virus
cacctatacagatactgtatacctg

SEQ ID NO: 20424 - DNA, 25 bp, SARS Virus
acctatacagattctgtatacctgt

SEQ ID NO: 20425 - DNA, 25 bp, SARS Virus
cctatacagatattgtatacctgtc

SEQ ID NO: 20426 - DNA, 25 bp, SARS Virus
ctatacagatactgtatacctgtcg

SEQ ID NO: 20427 - DNA, 25 bp, SARS Virus
tatacagatactttatacctgtcgt

SEQ ID NO: 20428 - DNA, 25 bp, SARS Virus
atacagatactgtatacctgtcgtc

SEQ ID NO: 20429 - DNA, 25 bp, SARS Virus
tacagatactgtttacctgtcgtca

SEQ ID NO: 20430 - DNA, 25 bp, SARS Virus
acagatactgtatacctgtcgtcaa

SEQ ID NO: 20431 - DNA, 25 bp, SARS Virus
cagatactgtattcctgtcgtcaaa

SEQ ID NO: 20432 - DNA, 25 bp, SARS Virus
agatactgtatatctgtcgtcaaac

SEQ ID NO: 20433 - DNA, 25 bp, SARS Virus
gatactgtatacttgtcgtcaaacc

SEQ ID NO: 20434 - DNA, 25 bp, SARS Virus
atactgtatacctgtcgtcaaacca

SEQ ID NO: 20435 - DNA, 25 bp, SARS Virus
tactgtatacctttcgtcaaaccag

SEQ ID NO: 20436 - DNA, 25 bp, SARS Virus
actgtatacctgtcgtcaaaccagg

SEQ ID NO: 20437 - DNA, 25 bp, SARS Virus
ctgtatacctgttgtcaaaccaggt

SEQ ID NO: 20438 - DNA, 25 bp, SARS Virus
tgtatacctgtcttcaaaccaggtt

SEQ ID NO: 20439 - DNA, 25 bp, SARS Virus
gtatacctgtcgtcaaaccaggttg

SEQ ID NO: 20440 - DNA, 25 bp, SARS Virus
tatacctgtcgttaaaccaggttgt

SEQ ID NO: 20441 - DNA, 25 bp, SARS Virus
atacctgtcgtctaaccaggttgta

SEQ ID NO: 20442 - DNA, 25 bp, SARS Virus
tacctgtcgtcataccaggttgtat

SEQ ID NO: 20443 - DNA, 25 bp, SARS Virus
acctgtcgtcaatccaggttgtatg

SEQ ID NO: 20444 - DNA, 25 bp, SARS Virus
cctgtcgtcaaatcaggttgtatga

SEQ ID NO: 20445 - DNA, 25 bp, SARS Virus
ctgtcgtcaaactaggttgtatgaa

SEQ ID NO: 20446 - DNA, 25 bp, SARS Virus
tgtcgtcaaacctggttgtatgaac

SEQ ID NO: 20447 - DNA, 25 bp, SARS Virus
gtcgtcaaaccatgttgtatgaacc

SEQ ID NO: 20448 - DNA, 25 bp, SARS Virus
tcgtcaaaccagtttgtatgaacct

SEQ ID NO: 20449 - DNA, 25 bp, SARS Virus
cgtcaaaccaggttgtatgaaccta

SEQ ID NO: 20450 - DNA, 25 bp, SARS Virus
gtcaaaccaggttgtatgaacctac

SEQ ID NO: 20451 - DNA, 25 bp, SARS Virus
tcaaaccaggttttatgaacctacc

SEQ ID NO: 20452 - DNA, 25 bp, SARS Virus
caaaccaggttgtatgaacctacca

SEQ ID NO: 20453 - DNA, 25 bp, SARS Virus
aaaccaggttgtttgaacctaccac

SEQ ID NO: 20454 - DNA, 25 bp, SARS Virus
aaccaggttgtatgaacctaccacg

SEQ ID NO: 20455 - DNA, 25 bp, SARS Virus
accaggttgtattaacctaccacga

SEQ ID NO: 20456 - DNA, 25 bp, SARS Virus
ccaggttgtatgtacctaccacgac

SEQ ID NO: 20457 - DNA, 25 bp, SARS Virus
caggttgtatgatcctaccacgact

SEQ ID NO: 20458 - DNA, 25 bp, SARS Virus
aggttgtatgaatctaccacgacta

SEQ ID NO: 20459 - DNA, 25 bp, SARS Virus
ggttgtatgaacttaccacgactac

SEQ ID NO: 20460 - DNA, 25 bp, SARS Virus
gttgtatgaacctaccacgactaca

SEQ ID NO: 20461 - DNA, 25 bp, SARS Virus
ttgtatgaaccttccacgactacaa

SEQ ID NO: 20462 - DNA, 25 bp, SARS Virus
tgtatgaacctatcacgactacaat

SEQ ID NO: 20463 - DNA, 25 bp, SARS Virus
gtatgaacctactacgactacaatg

SEQ ID NO: 20464 - DNA, 25 bp, SARS Virus
tatgaacctacctcgactacaatgt

SEQ ID NO: 20465 - DNA, 25 bp, SARS Virus
atgaacctaccatgactacaatgtt

SEQ ID NO: 20466 - DNA, 25 bp, SARS Virus
tgaacctaccactactacaatgttt

SEQ ID NO: 20467 - DNA, 25 bp, SARS Virus
gaacctaccacgtctacaatgtttt

SEQ ID NO: 20468 - DNA, 25 bp, SARS Virus
aacctaccacgattacaatgttttt

SEQ ID NO: 20469 - DNA, 25 bp, SARS Virus
acctaccacgactacaatgttttta

SEQ ID NO: 20470 - DNA, 25 bp, SARS Virus
cctaccacgacttcaatgtttttaa

SEQ ID NO: 20471 - DNA, 25 bp, SARS Virus
ctaccacgactataatgtttttaat

SEQ ID NO: 20472 - DNA, 25 bp, SARS Virus
taccacgactactatgtttttaatt

SEQ ID NO: 20473 - DNA, 25 bp, SARS Virus
accacgactacattgtttttaattt

SEQ ID NO: 20474 - DNA, 25 bp, SARS Virus
ccacgactacaatgtttttaatttg

SEQ ID NO: 20475 - DNA, 25 bp, SARS Virus
cacgactacaatttttttaatttgg

SEQ ID NO: 20476 - DNA, 25 bp, SARS Virus
acgactacaatgtttttaatttgga

SEQ ID NO: 20477 - DNA, 25 bp, SARS Virus
cgactacaatgtttttaatttggag

SEQ ID NO: 20478 - DNA, 25 bp, SARS Virus
gactacaatgtttttaatttggagt

SEQ ID NO: 20479 - DNA, 25 bp, SARS Virus
actacaatgtttttaatttggagta

SEQ ID NO: 20480 - DNA, 25 bp, SARS Virus
ctacaatgtttttaatttggagtac

SEQ ID NO: 20481 - DNA, 25 bp, SARS Virus
tacaatgttttttatttggagtaca

SEQ ID NO: 20482 - DNA, 25 bp, SARS Virus
acaatgtttttattttggagtacat

SEQ ID NO: 20483 - DNA, 25 bp, SARS Virus
caatgtttttaatttggagtacatt

SEQ ID NO: 20484 - DNA, 25 bp, SARS Virus
aatgtttttaatttggagtacattt

SEQ ID NO: 20485 - DNA, 25 bp, SARS Virus
atgtttttaatttggagtacattta

SEQ ID NO: 20486 - DNA, 25 bp, SARS Virus
tgtttttaattttgagtacatttag

SEQ ID NO: 20487 - DNA, 25 bp, SARS Virus
gtttttaatttgtagtacatttagt

SEQ ID NO: 20488 - DNA, 25 bp, SARS Virus
tttttaatttggtgtacatttagta

SEQ ID NO: 20489 - DNA, 25 bp, SARS Virus
ttttaatttggattacatttagtac

SEQ ID NO: 20490 - DNA, 25 bp, SARS Virus
tttaatttggagtacatttagtact

SEQ ID NO: 20491 - DNA, 25 bp, SARS Virus
ttaatttggagttcatttagtactc

SEQ ID NO: 20492 - DNA, 25 bp, SARS Virus
taatttggagtatatttagtactcc

SEQ ID NO: 20493 - DNA, 25 bp, SARS Virus
aatttggagtacttttagtactccc

SEQ ID NO: 20494 - DNA, 25 bp, SARS Virus
atttggagtacatttagtactccca

SEQ ID NO: 20495 - DNA, 25 bp, SARS Virus
tttggagtacatttagtactcccat

SEQ ID NO: 20496 - DNA, 25 bp, SARS Virus
ttggagtacatttagtactcccatt

SEQ ID NO: 20497 - DNA, 25 bp, SARS Virus
tggagtacattttgtactcccattc

SEQ ID NO: 20498 - DNA, 25 bp, SARS Virus
ggagtacatttattactcccattct

SEQ ID NO: 20499 - DNA, 25 bp, SARS Virus
gagtacatttagtactcccattctg

SEQ ID NO: 20500 - DNA, 25 bp, SARS Virus
agtacatttagttctcccattctga

SEQ ID NO: 20501 - DNA, 25 bp, SARS Virus
gtacatttagtattcccattctgaa

SEQ ID NO: 20502 - DNA, 25 bp, SARS Virus
tacatttagtactcccattctgaaa

SEQ ID NO: 20503 - DNA, 25 bp, SARS Virus
acatttagtacttccattctgaaag

SEQ ID NO: 20504 - DNA, 25 bp, SARS Virus
catttagtactctcattctgaaaga

SEQ ID NO: 20505 - DNA, 25 bp, SARS Virus
atttagtactcctattctgaaagaa

SEQ ID NO: 20506 - DNA, 25 bp, SARS Virus
tttagtactccctttctgaaagaaa

SEQ ID NO: 20507 - DNA, 25 bp, SARS Virus
ttagtactcccattctgaaagaaac

SEQ ID NO: 20508 - DNA, 25 bp, SARS Virus
tagtactcccattctgaaagaaaca

SEQ ID NO: 20509 - DNA, 25 bp, SARS Virus
agtactcccattttgaaagaaacat

SEQ ID NO: 20510 - DNA, 25 bp, SARS Virus
gtactcccattctgaaagaaacatg

SEQ ID NO: 20511 - DNA, 25 bp, SARS Virus
tactcccattcttaaagaaacatga

SEQ ID NO: 20512 - DNA, 25 bp, SARS Virus
actcccattctgtaagaaacatgat

SEQ ID NO: 20513 - DNA, 25 bp, SARS Virus
ctcccattctgatagaaacatgatg

SEQ ID NO: 20514 - DNA, 25 bp, SARS Virus
tcccattctgaatgaaacatgatgg

SEQ ID NO: 20515 - DNA, 25 bp, SARS Virus
cccattctgaaataaacatgatgga

SEQ ID NO: 20516 - DNA, 25 bp, SARS Virus
ccattctgaaagtaacatgatggat

SEQ ID NO: 20517 - DNA, 25 bp, SARS Virus
cattctgaaagatacatgatggatc

SEQ ID NO: 20518 - DNA, 25 bp, SARS Virus
attctgaaagaatcatgatggatca

SEQ ID NO: 20519 - DNA, 25 bp, SARS Virus
ttctgaaagaaatatgatggatcac

SEQ ID NO: 20520 - DNA, 25 bp, SARS Virus
tctgaaagaaacttgatggatcact

SEQ ID NO: 20521 - DNA, 25 bp, SARS Virus
ctgaaagaaacatgatggatcacta

SEQ ID NO: 20522 - DNA, 25 bp, SARS Virus
tgaaagaaacattatggatcactac

SEQ ID NO: 20523 - DNA, 25 bp, SARS Virus
gaaagaaacatgttggatcactact

SEQ ID NO: 20524 - DNA, 25 bp, SARS Virus
aaagaaacatgatggatcactactg

SEQ ID NO: 20525 - DNA, 25 bp, SARS Virus
aagaaacatgattgatcactactgt

SEQ ID NO: 20526 - DNA, 25 bp, SARS Virus
agaaacatgatgtatcactactgtg

SEQ ID NO: 20527 - DNA, 25 bp, SARS Virus
gaaacatgatggttcactactgtgt

SEQ ID NO: 20528 - DNA, 25 bp, SARS Virus
aaacatgatggatcactactgtgtg

SEQ ID NO: 20529 - DNA, 25 bp, SARS Virus
aacatgatggattactactgtgtga

SEQ ID NO: 20530 - DNA, 25 bp, SARS Virus
acatgatggatctctactgtgtgat

SEQ ID NO: 20531 - DNA, 25 bp, SARS Virus
catgatggatcattactgtgtgatg

SEQ ID NO: 20532 - DNA, 25 bp, SARS Virus
atgatggatcactactgtgtgatgc

SEQ ID NO: 20533 - DNA, 25 bp, SARS Virus
tgatggatcacttctgtgtgatgca

SEQ ID NO: 20534 - DNA, 25 bp, SARS Virus
gatggatcactattgtgtgatgcat

SEQ ID NO: 20535 - DNA, 25 bp, SARS Virus
atggatcactactgtgtgatgcatc

SEQ ID NO: 20536 - DNA, 25 bp, SARS Virus
tggatcactactttgtgatgcatca

SEQ ID NO: 20537 - DNA, 25 bp, SARS Virus
ggatcactactgtgtgatgcatcac

SEQ ID NO: 20538 - DNA, 25 bp, SARS Virus
gatcactactgtttgatgcatcact

SEQ ID NO: 20539 - DNA, 25 bp, SARS Virus
atcactactgtgtgatgcatcactt

SEQ ID NO: 20540 - DNA, 25 bp, SARS Virus
tcactactgtgttatgcatcacttc

SEQ ID NO: 20541 - DNA, 25 bp, SARS Virus
cactactgtgtgttgcatcacttcg

SEQ ID NO: 20542 - DNA, 25 bp, SARS Virus
actactgtgtgatgcatcacttcga

SEQ ID NO: 20543 - DNA, 25 bp, SARS Virus
ctactgtgtgattcatcacttcgaa

SEQ ID NO: 20544 - DNA, 25 bp, SARS Virus
tactgtgtgatgtatcacttcgaaa

SEQ ID NO: 20545 - DNA, 25 bp, SARS Virus
actgtgtgatgcttcacttcgaaag

SEQ ID NO: 20546 - DNA, 25 bp, SARS Virus
ctgtgtgatgcatcacttcgaaagc

SEQ ID NO: 20547 - DNA, 25 bp, SARS Virus
tgtgtgatgcattacttcgaaagct

SEQ ID NO: 20548 - DNA, 25 bp, SARS Virus
gtgtgatgcatctcttcgaaagctc

SEQ ID NO: 20549 - DNA, 25 bp, SARS Virus
tgtgatgcatcatttcgaaagctca

SEQ ID NO: 20550 - DNA, 25 bp, SARS Virus
gtgatgcatcacttcgaaagctcat

SEQ ID NO: 20551 - DNA, 25 bp, SARS Virus
tgatgcatcacttcgaaagctcatg

SEQ ID NO: 20552 - DNA, 25 bp, SARS Virus
gatgcatcactttgaaagctcatga

SEQ ID NO: 20553 - DNA, 25 bp, SARS Virus
atgcatcacttctaaagctcatgat

SEQ ID NO: 20554 - DNA, 25 bp, SARS Virus
tgcatcacttcgtaagctcatgatg

SEQ ID NO: 20555 - DNA, 25 bp, SARS Virus
gcatcacttcgatagctcatgatgg

SEQ ID NO: 20556 - DNA, 25 bp, SARS Virus
catcacttcgaatgctcatgatggt

SEQ ID NO: 20557 - DNA, 25 bp, SARS Virus
atcacttcgaaatctcatgatggta

SEQ ID NO: 20558 - DNA, 25 bp, SARS Virus
tcacttcgaaagttcatgatggtat

SEQ ID NO: 20559 - DNA, 25 bp, SARS Virus
cacttcgaaagctcatgatggtatg

SEQ ID NO: 20560 - DNA, 25 bp, SARS Virus
acttcgaaagcttatgatggtatga

SEQ ID NO: 20561 - DNA, 25 bp, SARS Virus
cttcgaaagctcttgatggtatgag

SEQ ID NO: 20562 - DNA, 25 bp, SARS Virus
ttcgaaagctcatgatggtatgaga

SEQ ID NO: 20563 - DNA, 25 bp, SARS Virus
tcgaaagctcattatggtatgagaa

SEQ ID NO: 20564 - DNA, 25 bp, SARS Virus
cgaaagctcatgttggtatgagaac

SEQ ID NO: 20565 - DNA, 25 bp, SARS Virus
gaaagctcatgatggtatgagaact

SEQ ID NO: 20566 - DNA, 25 bp, SARS Virus
aaagctcatgattgtatgagaacta

SEQ ID NO: 20567 - DNA, 25 bp, SARS Virus
aagctcatgatgttatgagaactac

SEQ ID NO: 20568 - DNA, 25 bp, SARS Virus
agctcatgatggtatgagaactact

SEQ ID NO: 20569 - DNA, 25 bp, SARS Virus
gctcatgatggtttgagaactactc

SEQ ID NO: 20570 - DNA, 25 bp, SARS Virus
ctcatgatggtatgagaactactct

SEQ ID NO: 20571 - DNA, 25 bp, SARS Virus
tcatgatggtattagaactactctc

SEQ ID NO: 20572 - DNA, 25 bp, SARS Virus
catgatggtatgtgaactactctca

SEQ ID NO: 20573 - DNA, 25 bp, SARS Virus
atgatggtatgataactactctcaa

SEQ ID NO: 20574 - DNA, 25 bp, SARS Virus
tgatggtatgagtactactctcaaa

SEQ ID NO: 20575 - DNA, 25 bp, SARS Virus
gatggtatgagatctactctcaaaa

SEQ ID NO: 20576 - DNA, 25 bp, SARS Virus
atggtatgagaattactctcaaaag

SEQ ID NO: 20577 - DNA, 25 bp, SARS Virus
tggtatgagaactactctcaaaaga

SEQ ID NO: 20578 - DNA, 25 bp, SARS Virus
ggtatgagaacttctctcaaaagaa

SEQ ID NO: 20579 - DNA, 25 bp, SARS Virus
gtatgagaactattctcaaaagaac

SEQ ID NO: 20580 - DNA, 25 bp, SARS Virus
tatgagaactactctcaaaagaacc

SEQ ID NO: 20581 - DNA, 25 bp, SARS Virus
atgagaactactttcaaaagaacca

SEQ ID NO: 20582 - DNA, 25 bp, SARS Virus
tgagaactactctcaaaagaaccat

SEQ ID NO: 20583 - DNA, 25 bp, SARS Virus
gagaactactcttaaaagaaccatc

SEQ ID NO: 20584 - DNA, 25 bp, SARS Virus
agaactactctctaaagaaccatcc

SEQ ID NO: 20585 - DNA, 25 bp, SARS Virus
gaactactctcataagaaccatcca

SEQ ID NO: 20586 - DNA, 25 bp, SARS Virus
aactactctcaatagaaccatccat

SEQ ID NO: 20587 - DNA, 25 bp, SARS Virus
actactctcaaatgaaccatccatg

SEQ ID NO: 20588 - DNA, 25 bp, SARS Virus
ctactctcaaaataaccatccatgt

SEQ ID NO: 20589 - DNA, 25 bp, SARS Virus
tactctcaaaagtaccatccatgta

SEQ ID NO: 20590 - DNA, 25 bp, SARS Virus
actctcaaaagatccatccatgtac

SEQ ID NO: 20591 - DNA, 25 bp, SARS Virus
ctctcaaaagaatcatccatgtaca

SEQ ID NO: 20592 - DNA, 25 bp, SARS Virus
tctcaaaagaactatccatgtacag

SEQ ID NO: 20593 - DNA, 25 bp, SARS Virus
ctcaaaagaaccttccatgtacaga

SEQ ID NO: 20594 - DNA, 25 bp, SARS Virus
tcaaaagaaccatccatgtacagac

SEQ ID NO: 20595 - DNA, 25 bp, SARS Virus
caaaagaaccattcatgtacagacg

SEQ ID NO: 20596 - DNA, 25 bp, SARS Virus
aaaagaaccatctatgtacagacga

SEQ ID NO: 20597 - DNA, 25 bp, SARS Virus
aaagaaccatccttgtacagacgaa

SEQ ID NO: 20598 - DNA, 25 bp, SARS Virus
aagaaccatccatgtacagacgaaa

SEQ ID NO: 20599 - DNA, 25 bp, SARS Virus
agaaccatccatttacagacgaaat

SEQ ID NO: 20600 - DNA, 25 bp, SARS Virus
gaaccatccatgtacagacgaaatt

SEQ ID NO: 20601 - DNA, 25 bp, SARS Virus
aaccatccatgttcagacgaaattt

SEQ ID NO: 20602 - DNA, 25 bp, SARS Virus
accatccatgtatagacgaaatttg

SEQ ID NO: 20603 - DNA, 25 bp, SARS Virus
ccatccatgtactgacgaaatttgg

SEQ ID NO: 20604 - DNA, 25 bp, SARS Virus
catccatgtacatacgaaatttggt

SEQ ID NO: 20605 - DNA, 25 bp, SARS Virus
atccatgtacagtcgaaatttggtg

SEQ ID NO: 20606 - DNA, 25 bp, SARS Virus
tccatgtacagatgaaatttggtgt

SEQ ID NO: 20607 - DNA, 25 bp, SARS Virus
ccatgtacagactaaatttggtgtg

SEQ ID NO: 20608 - DNA, 25 bp, SARS Virus
catgtacagacgtaatttggtgtgt

SEQ ID NO: 20609 - DNA, 25 bp, SARS Virus
atgtacagacgatatttggtgtgtt

SEQ ID NO: 20610 - DNA, 25 bp, SARS Virus
tgtacagacgaattttggtgtgttt

SEQ ID NO: 20611 - DNA, 25 bp, SARS Virus
gtacagacgaaatttggtgtgtttc

SEQ ID NO: 20612 - DNA, 25 bp, SARS Virus
tacagacgaaatttggtgtgtttct

SEQ ID NO: 20613 - DNA, 25 bp, SARS Virus
acagacgaaatttggtgtgtttctt

SEQ ID NO: 20614 - DNA, 25 bp, SARS Virus
cagacgaaattttgtgtgtttcttt

SEQ ID NO: 20615 - DNA, 25 bp, SARS Virus
agacgaaatttgttgtgtttcttta

SEQ ID NO: 20616 - DNA, 25 bp, SARS Virus
gacgaaatttggtgtgtttctttac

SEQ ID NO: 20617 - DNA, 25 bp, SARS Virus
acgaaatttggtttgtttctttacc

SEQ ID NO: 20618 - DNA, 25 bp, SARS Virus
cgaaatttggtgtgtttctttacct

SEQ ID NO: 20619 - DNA, 25 bp, SARS Virus
gaaatttggtgtttttctttacctt

SEQ ID NO: 20620 - DNA, 25 bp, SARS Virus
aaatttggtgtgtttctttaccttt

SEQ ID NO: 20621 - DNA, 25 bp, SARS Virus
aatttggtgtgtttctttaccttta

SEQ ID NO: 20622 - DNA, 25 bp, SARS Virus
atttggtgtgtttctttacctttaa

SEQ ID NO: 20623 - DNA, 25 bp, SARS Virus
tttggtgtgtttttttacctttaaa

SEQ ID NO: 20624 - DNA, 25 bp, SARS Virus
ttggtgtgtttctttacctttaaag

SEQ ID NO: 20625 - DNA, 25 bp, SARS Virus
tggtgtgtttctatacctttaaagg

SEQ ID NO: 20626 - DNA, 25 bp, SARS Virus
ggtgtgtttcttaacctttaaagga

SEQ ID NO: 20627 - DNA, 25 bp, SARS Virus
gtgtgtttctttacctttaaaggag

SEQ ID NO: 20628 - DNA, 25 bp, SARS Virus
tgtgtttctttaactttaaaggagt

SEQ ID NO: 20629 - DNA, 25 bp, SARS Virus
gtgtttctttacatttaaaggagtt

SEQ ID NO: 20630 - DNA, 25 bp, SARS Virus
tgtttctttaccattaaaggagttc

SEQ ID NO: 20631 - DNA, 25 bp, SARS Virus
gtttctttacctataaaggagttca

SEQ ID NO: 20632 - DNA, 25 bp, SARS Virus
tttctttaccttaaaaggagttcaa

SEQ ID NO: 20633 - DNA, 25 bp, SARS Virus
ttctttacctttaaaggagttcaac

SEQ ID NO: 20634 - DNA, 25 bp, SARS Virus
tctttacctttaaaggagttcaacc

SEQ ID NO: 20635 - DNA, 25 bp, SARS Virus
ctttacctttaaaggagttcaacca

SEQ ID NO: 20636 - DNA, 25 bp, SARS Virus
tttacctttaaaagagttcaaccac

SEQ ID NO: 20637 - DNA, 25 bp, SARS Virus
ttacctttaaagaagttcaaccacc

SEQ ID NO: 20638 - DNA, 25 bp, SARS Virus
tacctttaaaggagttcaaccacca

SEQ ID NO: 20639 - DNA, 25 bp, SARS Virus
acctttaaaggaattcaaccaccaa

SEQ ID NO: 20640 - DNA, 25 bp, SARS Virus
cctttaaaggagatcaaccaccaaa

SEQ ID NO: 20641 - DNA, 25 bp, SARS Virus
ctttaaaggagtacaaccaccaaat

SEQ ID NO: 20642 - DNA, 25 bp, SARS Virus
tttaaaggagttaaaccaccaaatt

SEQ ID NO: 20643 - DNA, 25 bp, SARS Virus
ttaaaggagttcaaccaccaaattg

SEQ ID NO: 20644 - DNA, 25 bp, SARS Virus
taaaggagttcaaccaccaaattga

SEQ ID NO: 20645 - DNA, 25 bp, SARS Virus
aaaggagttcaaacaccaaattgaa

SEQ ID NO: 20646 - DNA, 25 bp, SARS Virus
aaggagttcaacaaccaaattgaag

SEQ ID NO: 20647 - DNA, 25 bp, SARS Virus
aggagttcaaccaccaaattgaagt

SEQ ID NO: 20648 - DNA, 25 bp, SARS Virus
ggagttcaaccaacaaattgaagtt

SEQ ID NO: 20649 - DNA, 25 bp, SARS Virus
gagttcaaccacaaaattgaagtta

SEQ ID NO: 20650 - DNA, 25 bp, SARS Virus
agttcaaccaccaaattgaagttaa

SEQ ID NO: 20651 - DNA, 25 bp, SARS Virus
gttcaaccaccaaattgaagttaat

SEQ ID NO: 20652 - DNA, 25 bp, SARS Virus
ttcaaccaccaaattgaagttaatt

SEQ ID NO: 20653 - DNA, 25 bp, SARS Virus
tcaaccaccaaaatgaagttaattt

SEQ ID NO: 20654 - DNA, 25 bp, SARS Virus
caaccaccaaatagaagttaattta

SEQ ID NO: 20655 - DNA, 25 bp, SARS Virus
aaccaccaaattaaagttaatttac

SEQ ID NO: 20656 - DNA, 25 bp, SARS Virus
accaccaaattgaagttaatttacc

SEQ ID NO: 20657 - DNA, 25 bp, SARS Virus
ccaccaaattgaagttaatttaccc

SEQ ID NO: 20658 - DNA, 25 bp, SARS Virus
caccaaattgaaattaatttacccg

SEQ ID NO: 20659 - DNA, 25 bp, SARS Virus
accaaattgaagataatttacccga

SEQ ID NO: 20660 - DNA, 25 bp, SARS Virus
ccaaattgaagtaaatttacccgac

SEQ ID NO: 20661 - DNA, 25 bp, SARS Virus
caaattgaagttaatttacccgact

SEQ ID NO: 20662 - DNA, 25 bp, SARS Virus
aaattgaagttaatttacccgacta

SEQ ID NO: 20663 - DNA, 25 bp, SARS Virus
aattgaagttaaattacccgactat

SEQ ID NO: 20664 - DNA, 25 bp, SARS Virus
attgaagttaatatacccgactatt

SEQ ID NO: 20665 - DNA, 25 bp, SARS Virus
ttgaagttaattaacccgactattg

SEQ ID NO: 20666 - DNA, 25 bp, SARS Virus
tgaagttaatttacccgactattgt

SEQ ID NO: 20667 - DNA, 25 bp, SARS Virus
gaagttaatttaaccgactattgtt

SEQ ID NO: 20668 - DNA, 25 bp, SARS Virus
aagttaatttacacgactattgtta

SEQ ID NO: 20669 - DNA, 25 bp, SARS Virus
agttaatttaccagactattgttaa

SEQ ID NO: 20670 - DNA, 25 bp, SARS Virus
gttaatttacccaactattgttaac

SEQ ID NO: 20671 - DNA, 25 bp, SARS Virus
ttaatttacccgactattgttaaca

SEQ ID NO: 20672 - DNA, 25 bp, SARS Virus
taatttacccgaatattgttaacaa

SEQ ID NO: 20673 - DNA, 25 bp, SARS Virus
aatttacccgacaattgttaacaat

SEQ ID NO: 20674 - DNA, 25 bp, SARS Virus
atttacccgactattgttaacaata

SEQ ID NO: 20675 - DNA, 25 bp, SARS Virus
tttacccgactaatgttaacaataa

SEQ ID NO: 20676 - DNA, 25 bp, SARS Virus
ttacccgactatagttaacaataaa

SEQ ID NO: 20677 - DNA, 25 bp, SARS Virus
tacccgactattattaacaataaac

SEQ ID NO: 20678 - DNA, 25 bp, SARS Virus
acccgactattgataacaataaaca

SEQ ID NO: 20679 - DNA, 25 bp, SARS Virus
cccgactattgtaaacaataaacag

SEQ ID NO: 20680 - DNA, 25 bp, SARS Virus
ccgactattgttaacaataaacaga

SEQ ID NO: 20681 - DNA, 25 bp, SARS Virus
cgactattgttaacaataaacagat

SEQ ID NO: 20682 - DNA, 25 bp, SARS Virus
gactattgttaaaaataaacagatc

SEQ ID NO: 20683 - DNA, 25 bp, SARS Virus
actattgttaacaataaacagatca

SEQ ID NO: 20684 - DNA, 25 bp, SARS Virus
ctattgttaacaataaacagatcac

SEQ ID NO: 20685 - DNA, 25 bp, SARS Virus
tattgttaacaaaaaacagatcaca

SEQ ID NO: 20686 - DNA, 25 bp, SARS Virus
attgttaacaataaacagatcacaa

SEQ ID NO: 20687 - DNA, 25 bp, SARS Virus
ttgttaacaataaacagatcacaaa

SEQ ID NO: 20688 - DNA, 25 bp, SARS Virus
tgttaacaataaacagatcacaaaa

SEQ ID NO: 20689 - DNA, 25 bp, SARS Virus
gttaacaataaaaagatcacaaaat

SEQ ID NO: 20690 - DNA, 25 bp, SARS Virus
ttaacaataaacagatcacaaaata

SEQ ID NO: 20691 - DNA, 25 bp, SARS Virus
taacaataaacaaatcacaaaataa

SEQ ID NO: 20692 - DNA, 25 bp, SARS Virus
aacaataaacagatcacaaaataat

SEQ ID NO: 20693 - DNA, 25 bp, SARS Virus
acaataaacagaacacaaaataatc

SEQ ID NO: 20694 - DNA, 25 bp, SARS Virus
caataaacagataacaaaataatcg

SEQ ID NO: 20695 - DNA, 25 bp, SARS Virus
aataaacagatcacaaaataatcgt

SEQ ID NO: 20696 - DNA, 25 bp, SARS Virus
ataaacagatcaaaaaataatcgtg

SEQ ID NO: 20697 - DNA, 25 bp, SARS Virus
taaacagatcacaaaataatcgtga

SEQ ID NO: 20698 - DNA, 25 bp, SARS Virus
aaacagatcacaaaataatcgtgaa

SEQ ID NO: 20699 - DNA, 25 bp, SARS Virus
aacagatcacaaaataatcgtgaag

SEQ ID NO: 20700 - DNA, 25 bp, SARS Virus
acagatcacaaaataatcgtgaagt

SEQ ID NO: 20701 - DNA, 25 bp, SARS Virus
cagatcacaaaaaaatcgtgaagtt

SEQ ID NO: 20702 - DNA, 25 bp, SARS Virus
agatcacaaaataatcgtgaagttg

SEQ ID NO: 20703 - DNA, 25 bp, SARS Virus
gatcacaaaataatcgtgaagttgt

SEQ ID NO: 20704 - DNA, 25 bp, SARS Virus
atcacaaaataaacgtgaagttgtc

SEQ ID NO: 20705 - DNA, 25 bp, SARS Virus
tcacaaaataatagtgaagttgtcg

SEQ ID NO: 20706 - DNA, 25 bp, SARS Virus
cacaaaataatcatgaagttgtcga

SEQ ID NO: 20707 - DNA, 25 bp, SARS Virus
acaaaataatcgagaagttgtcgaa

SEQ ID NO: 20708 - DNA, 25 bp, SARS Virus
caaaataatcgtaaagttgtcgaac

SEQ ID NO: 20709 - DNA, 25 bp, SARS Virus
aaaataatcgtgaagttgtcgaact

SEQ ID NO: 20710 - DNA, 25 bp, SARS Virus
aaataatcgtgaagttgtcgaactt

SEQ ID NO: 20711 - DNA, 25 bp, SARS Virus
aataatcgtgaaattgtcgaacttc

SEQ ID NO: 20712 - DNA, 25 bp, SARS Virus
ataatcgtgaagatgtcgaacttca

SEQ ID NO: 20713 - DNA, 25 bp, SARS Virus
taatcgtgaagtagtcgaacttcag

SEQ ID NO: 20714 - DNA, 25 bp, SARS Virus
aatcgtgaagttatcgaacttcagt

SEQ ID NO: 20715 - DNA, 25 bp, SARS Virus
atcgtgaagttgacgaacttcagtt

SEQ ID NO: 20716 - DNA, 25 bp, SARS Virus
tcgtgaagttgtagaacttcagttt

SEQ ID NO: 20717 - DNA, 25 bp, SARS Virus
cgtgaagttgtcaaacttcagttta

SEQ ID NO: 20718 - DNA, 25 bp, SARS Virus
gtgaagttgtcgaacttcagtttaa

SEQ ID NO: 20719 - DNA, 25 bp, SARS Virus
tgaagttgtcgaacttcagtttaag

SEQ ID NO: 20720 - DNA, 25 bp, SARS Virus
gaagttgtcgaaattcagtttaagt

SEQ ID NO: 20721 - DNA, 25 bp, SARS Virus
aagttgtcgaacatcagtttaagtt

SEQ ID NO: 20722 - DNA, 25 bp, SARS Virus
agttgtcgaactacagtttaagtta

SEQ ID NO: 20723 - DNA, 25 bp, SARS Virus
gttgtcgaacttaagtttaagttac

SEQ ID NO: 20724 - DNA, 25 bp, SARS Virus
ttgtcgaacttcagtttaagttacg

SEQ ID NO: 20725 - DNA, 25 bp, SARS Virus
tgtcgaacttcaatttaagttacgt

SEQ ID NO: 20726 - DNA, 25 bp, SARS Virus
gtcgaacttcagattaagttacgtg

SEQ ID NO: 20727 - DNA, 25 bp, SARS Virus
tcgaacttcagtataagttacgtgg

SEQ ID NO: 20728 - DNA, 25 bp, SARS Virus
cgaacttcagttaaagttacgtggt

SEQ ID NO: 20729 - DNA, 25 bp, SARS Virus
gaacttcagtttaagttacgtggtc

SEQ ID NO: 20730 - DNA, 25 bp, SARS Virus
aacttcagtttaagttacgtggtcg

SEQ ID NO: 20731 - DNA, 25 bp, SARS Virus
acttcagtttaaattacgtggtcgt

SEQ ID NO: 20732 - DNA, 25 bp, SARS Virus
cttcagtttaagatacgtggtcgtg

SEQ ID NO: 20733 - DNA, 25 bp, SARS Virus
ttcagtttaagtaacgtggtcgtga

SEQ ID NO: 20734 - DNA, 25 bp, SARS Virus
tcagtttaagttacgtggtcgtgaa

SEQ ID NO: 20735 - DNA, 25 bp, SARS Virus
cagtttaagttaagtggtcgtgaag

SEQ ID NO: 20736 - DNA, 25 bp, SARS Virus
agtttaagttacatggtcgtgaagt

SEQ ID NO: 20737 - DNA, 25 bp, SARS Virus
gtttaagttacgaggtcgtgaagtt

SEQ ID NO: 20738 - DNA, 25 bp, SARS Virus
tttaagttacgtagtcgtgaagttc

SEQ ID NO: 20739 - DNA, 25 bp, SARS Virus
ttaagttacgtgatcgtgaagttct

SEQ ID NO: 20740 - DNA, 25 bp, SARS Virus
taagttacgtggacgtgaagttctc

SEQ ID NO: 20741 - DNA, 25 bp, SARS Virus
aagttacgtggtagtgaagttctcc

SEQ ID NO: 20742 - DNA, 25 bp, SARS Virus
agttacgtggtcatgaagttctccg

SEQ ID NO: 20743 - DNA, 25 bp, SARS Virus
gttacgtggtcgagaagttctccga

SEQ ID NO: 20744 - DNA, 25 bp, SARS Virus
ttacgtggtcgtaaagttctccgaa

SEQ ID NO: 20745 - DNA, 25 bp, SARS Virus
tacgtggtcgtgaagttctccgaat

SEQ ID NO: 20746 - DNA, 25 bp, SARS Virus
acgtggtcgtgaagttctccgaata

SEQ ID NO: 20747 - DNA, 25 bp, SARS Virus
cgtggtcgtgaaattctccgaataa

SEQ ID NO: 20748 - DNA, 25 bp, SARS Virus
gtggtcgtgaagatctccgaataat

SEQ ID NO: 20749 - DNA, 25 bp, SARS Virus
tggtcgtgaagtactccgaataata

SEQ ID NO: 20750 - DNA, 25 bp, SARS Virus
ggtcgtgaagttatccgaataatat

SEQ ID NO: 20751 - DNA, 25 bp, SARS Virus
gtcgtgaagttcaccgaataatatc

SEQ ID NO: 20752 - DNA, 25 bp, SARS Virus
tcgtgaagttctacgaataatatct

SEQ ID NO: 20753 - DNA, 25 bp, SARS Virus
cgtgaagttctcagaataatatctc

SEQ ID NO: 20754 - DNA, 25 bp, SARS Virus
gtgaagttctccaaataatatctcg

SEQ ID NO: 20755 - DNA, 25 bp, SARS Virus
tgaagttctccgaataatatctcgg

SEQ ID NO: 20756 - DNA, 25 bp, SARS Virus
gaagttctccgaataatatctcggg

SEQ ID NO: 20757 - DNA, 25 bp, SARS Virus
aagttctccgaaaaatatctcgggc

SEQ ID NO: 20758 - DNA, 25 bp, SARS Virus
agttctccgaataatatctcgggca

SEQ ID NO: 20759 - DNA, 25 bp, SARS Virus
gttctccgaataatatctcgggcac

SEQ ID NO: 20760 - DNA, 25 bp, SARS Virus
ttctccgaataaaatctcgggcacg

SEQ ID NO: 20761 - DNA, 25 bp, SARS Virus
tctccgaataatatctcgggcacga

SEQ ID NO: 20762 - DNA, 25 bp, SARS Virus
ctccgaataataactcgggcacgac

SEQ ID NO: 20763 - DNA, 25 bp, SARS Virus
tccgaataatatatcgggcacgacc

SEQ ID NO: 20764 - DNA, 25 bp, SARS Virus
ccgaataatatcacgggcacgacca

SEQ ID NO: 20765 - DNA, 25 bp, SARS Virus
cgaataatatctagggcacgaccac

SEQ ID NO: 20766 - DNA, 25 bp, SARS Virus
gaataatatctcaggcacgaccact

SEQ ID NO: 20767 - DNA, 25 bp, SARS Virus
aataatatctcgagcacgaccacta

SEQ ID NO: 20768 - DNA, 25 bp, SARS Virus
ataatatctcggacacgaccactac

SEQ ID NO: 20769 - DNA, 25 bp, SARS Virus
taatatctcgggaacgaccactacg

SEQ ID NO: 20770 - DNA, 25 bp, SARS Virus
aatatctcgggcacgaccactacga

SEQ ID NO: 20771 - DNA, 25 bp, SARS Virus
atatctcgggcaagaccactacgac

SEQ ID NO: 20772 - DNA, 25 bp, SARS Virus
tatctcgggcacaaccactacgacg

SEQ ID NO: 20773 - DNA, 25 bp, SARS Virus
atctcgggcacgaccactacgacga

SEQ ID NO: 20774 - DNA, 25 bp, SARS Virus
tctcgggcacgaacactacgacgat

SEQ ID NO: 20775 - DNA, 25 bp, SARS Virus
ctcgggcacgacaactacgacgatt

SEQ ID NO: 20776 - DNA, 25 bp, SARS Virus
tcgggcacgaccactacgacgattg

SEQ ID NO: 20777 - DNA, 25 bp, SARS Virus
cgggcacgaccaatacgacgattga

SEQ ID NO: 20778 - DNA, 25 bp, SARS Virus
gggcacgaccacaacgacgattgaa

SEQ ID NO: 20779 - DNA, 25 bp, SARS Virus
ggcacgaccactacgacgattgaaa

SEQ ID NO: 20780 - DNA, 25 bp, SARS Virus
gcacgaccactaagacgattgaaaa

SEQ ID NO: 20781 - DNA, 25 bp, SARS Virus
cacgaccactacaacgattgaaaac

SEQ ID NO: 20782 - DNA, 25 bp, SARS Virus
acgaccactacgacgattgaaaaca

SEQ ID NO: 20783 - DNA, 25 bp, SARS Virus
cgaccactacgaagattgaaaacac

SEQ ID NO: 20784 - DNA, 25 bp, SARS Virus
gaccactacgacaattgaaaacacg

SEQ ID NO: 20785 - DNA, 25 bp, SARS Virus
accactacgacgattgaaaacacgt

SEQ ID NO: 20786 - DNA, 25 bp, SARS Virus
ccactacgacgaatgaaaacacgtg

SEQ ID NO: 20787 - DNA, 25 bp, SARS Virus
cactacgacgatagaaaacacgtga

SEQ ID NO: 20788 - DNA, 25 bp, SARS Virus
actacgacgattaaaaacacgtgag

SEQ ID NO: 20789 - DNA, 25 bp, SARS Virus
ctacgacgattgaaaacacgtgagt

SEQ ID NO: 20790 - DNA, 25 bp, SARS Virus
tacgacgattgaaaacacgtgagta

SEQ ID NO: 20791 - DNA, 25 bp, SARS Virus
acgacgattgaaaacacgtgagtat

SEQ ID NO: 20792 - DNA, 25 bp, SARS Virus
cgacgattgaaaacacgtgagtatg

SEQ ID NO: 20793 - DNA, 25 bp, SARS Virus
gacgattgaaaaaacgtgagtatga

SEQ ID NO: 20794 - DNA, 25 bp, SARS Virus
acgattgaaaacacgtgagtatgag

SEQ ID NO: 20795 - DNA, 25 bp, SARS Virus
cgattgaaaacaagtgagtatgagc

SEQ ID NO: 20796 - DNA, 25 bp, SARS Virus
gattgaaaacacatgagtatgagcg

SEQ ID NO: 20797 - DNA, 25 bp, SARS Virus
attgaaaacacgagagtatgagcga

SEQ ID NO: 20798 - DNA, 25 bp, SARS Virus
ttgaaaacacgtaagtatgagcgaa

SEQ ID NO: 20799 - DNA, 25 bp, SARS Virus
tgaaaacacgtgagtatgagcgaat

SEQ ID NO: 20800 - DNA, 25 bp, SARS Virus
gaaaacacgtgaatatgagcgaatg

SEQ ID NO: 20801 - DNA, 25 bp, SARS Virus
aaaacacgtgagaatgagcgaatgt

SEQ ID NO: 20802 - DNA, 25 bp, SARS Virus
aaacacgtgagtatgagcgaatgtc

SEQ ID NO: 20803 - DNA, 25 bp, SARS Virus
aacacgtgagtaagagcgaatgtca

SEQ ID NO: 20804 - DNA, 25 bp, SARS Virus
acacgtgagtataagcgaatgtcat

SEQ ID NO: 20805 - DNA, 25 bp, SARS Virus
cacgtgagtatgagcgaatgtcatt

SEQ ID NO: 20806 - DNA, 25 bp, SARS Virus
acgtgagtatgaacgaatgtcatta

SEQ ID NO: 20807 - DNA, 25 bp, SARS Virus
cgtgagtatgagagaatgtcattat

SEQ ID NO: 20808 - DNA, 25 bp, SARS Virus
gtgagtatgagcaaatgtcattatt

SEQ ID NO: 20809 - DNA, 25 bp, SARS Virus
tgagtatgagcgaatgtcattattt

SEQ ID NO: 20810 - DNA, 25 bp, SARS Virus
gagtatgagcgaatgtcattatttt

SEQ ID NO: 20811 - DNA, 25 bp, SARS Virus
agtatgagcgaaagtcattattttg

SEQ ID NO: 20812 - DNA, 25 bp, SARS Virus
gtatgagcgaatatcattattttga

SEQ ID NO: 20813 - DNA, 25 bp, SARS Virus
tatgagcgaatgacattattttgac

SEQ ID NO: 20814 - DNA, 25 bp, SARS Virus
atgagcgaatgtaattattttgaca

SEQ ID NO: 20815 - DNA, 25 bp, SARS Virus
tgagcgaatgtcattattttgacaa

SEQ ID NO: 20816 - DNA, 25 bp, SARS Virus
gagcgaatgtcaatattttgacaac

SEQ ID NO: 20817 - DNA, 25 bp, SARS Virus
agcgaatgtcataattttgacaacc

SEQ ID NO: 20818 - DNA, 25 bp, SARS Virus
gcgaatgtcattattttgacaaccg

SEQ ID NO: 20819 - DNA, 25 bp, SARS Virus
cgaatgtcattaatttgacaaccgc

SEQ ID NO: 20820 - DNA, 25 bp, SARS Virus
gaatgtcattatattgacaaccgct

SEQ ID NO: 20821 - DNA, 25 bp, SARS Virus
aatgtcattattatgacaaccgctc

SEQ ID NO: 20822 - DNA, 25 bp, SARS Virus
atgtcattatttagacaaccgctcg

SEQ ID NO: 20823 - DNA, 25 bp, SARS Virus
tgtcattattttaacaaccgctcga

SEQ ID NO: 20824 - DNA, 25 bp, SARS Virus
gtcattattttgacaaccgctcgaa

SEQ ID NO: 20825 - DNA, 25 bp, SARS Virus
tcattattttgaaaaccgctcgaac

SEQ ID NO: 20826 - DNA, 25 bp, SARS Virus
cattattttgacaaccgctcgaacc

SEQ ID NO: 20827 - DNA, 25 bp, SARS Virus
attattttgacaaccgctcgaacca

SEQ ID NO: 20828 - DNA, 25 bp, SARS Virus
ttattttgacaaacgctcgaaccac

SEQ ID NO: 20829 - DNA, 25 bp, SARS Virus
tattttgacaacagctcgaaccact

SEQ ID NO: 20830 - DNA, 25 bp, SARS Virus
attttgacaaccactcgaaccacta

SEQ ID NO: 20831 - DNA, 25 bp, SARS Virus
ttttgacaaccgatcgaaccactac

SEQ ID NO: 20832 - DNA, 25 bp, SARS Virus
tttgacaaccgcacgaaccactaca

SEQ ID NO: 20833 - DNA, 25 bp, SARS Virus
ttgacaaccgctagaaccactacag

SEQ ID NO: 20834 - DNA, 25 bp, SARS Virus
tgacaaccgctcaaaccactacagt

SEQ ID NO: 20835 - DNA, 25 bp, SARS Virus
gacaaccgctcgaaccactacagtc

SEQ ID NO: 20836 - DNA, 25 bp, SARS Virus
acaaccgctcgaaccactacagtct

SEQ ID NO: 20837 - DNA, 25 bp, SARS Virus
caaccgctcgaaacactacagtctc

SEQ ID NO: 20838 - DNA, 25 bp, SARS Virus
aaccgctcgaacaactacagtctct

SEQ ID NO: 20839 - DNA, 25 bp, SARS Virus
accgctcgaaccactacagtctctt

SEQ ID NO: 20840 - DNA, 25 bp, SARS Virus
ccgctcgaaccaatacagtctcttt

SEQ ID NO: 20841 - DNA, 25 bp, SARS Virus
cgctcgaaccacaacagtctctttg

SEQ ID NO: 20842 - DNA, 25 bp, SARS Virus
gctcgaaccactacagtctctttga

SEQ ID NO: 20843 - DNA, 25 bp, SARS Virus
ctcgaaccactaaagtctctttgat

SEQ ID NO: 20844 - DNA, 25 bp, SARS Virus
tcgaaccactacagtctctttgata

SEQ ID NO: 20845 - DNA, 25 bp, SARS Virus
cgaaccactacaatctctttgatac

SEQ ID NO: 20846 - DNA, 25 bp, SARS Virus
gaaccactacagactctttgatact

SEQ ID NO: 20847 - DNA, 25 bp, SARS Virus
aaccactacagtatctttgatactg

SEQ ID NO: 20848 - DNA, 25 bp, SARS Virus
accactacagtcactttgatactgg

SEQ ID NO: 20849 - DNA, 25 bp, SARS Virus
ccactacagtctatttgatactggg

SEQ ID NO: 20850 - DNA, 25 bp, SARS Virus
cactacagtctcattgatactgggt

SEQ ID NO: 20851 - DNA, 25 bp, SARS Virus
actacagtctctatgatactgggta

SEQ ID NO: 20852 - DNA, 25 bp, SARS Virus
ctacagtctcttagatactgggtag

SEQ ID NO: 20853 - DNA, 25 bp, SARS Virus
tacagtctctttaatactgggtaga

SEQ ID NO: 20854 - DNA, 25 bp, SARS Virus
acagtctctttgatactgggtagaa

SEQ ID NO: 20855 - DNA, 25 bp, SARS Virus
cagtctctttgaaactgggtagaag

SEQ ID NO: 20856 - DNA, 25 bp, SARS Virus
agtctctttgatactgggtagaaga

SEQ ID NO: 20857 - DNA, 25 bp, SARS Virus
gtctctttgataatgggtagaagat

SEQ ID NO: 20858 - DNA, 25 bp, SARS Virus
tctctttgatacagggtagaagatg

SEQ ID NO: 20859 - DNA, 25 bp, SARS Virus
ctctttgatactaggtagaagatgt

SEQ ID NO: 20860 - DNA, 25 bp, SARS Virus
tctttgatactgagtagaagatgtc

SEQ ID NO: 20861 - DNA, 25 bp, SARS Virus
ctttgatactggatagaagatgtcg

SEQ ID NO: 20862 - DNA, 25 bp, SARS Virus
tttgatactgggaagaagatgtcgt

SEQ ID NO: 20863 - DNA, 25 bp, SARS Virus
ttgatactgggtagaagatgtcgta

SEQ ID NO: 20864 - DNA, 25 bp, SARS Virus
tgatactgggtaaaagatgtcgtac

SEQ ID NO: 20865 - DNA, 25 bp, SARS Virus
gatactgggtagaagatgtcgtacg

SEQ ID NO: 20866 - DNA, 25 bp, SARS Virus
atactgggtagaagatgtcgtacga

SEQ ID NO: 20867 - DNA, 25 bp, SARS Virus
tactgggtagaaaatgtcgtacgat

SEQ ID NO: 20868 - DNA, 25 bp, SARS Virus
actgggtagaagatgtcgtacgatt

SEQ ID NO: 20869 - DNA, 25 bp, SARS Virus
ctgggtagaagaagtcgtacgatta

SEQ ID NO: 20870 - DNA, 25 bp, SARS Virus
tgggtagaagatatcgtacgattaa

SEQ ID NO: 20871 - DNA, 25 bp, SARS Virus
gggtagaagatgacgtacgattaaa

SEQ ID NO: 20872 - DNA, 25 bp, SARS Virus
ggtagaagatgtagtacgattaaac

SEQ ID NO: 20873 - DNA, 25 bp, SARS Virus
gtagaagatgtcatacgattaaacc

SEQ ID NO: 20874 - DNA, 25 bp, SARS Virus
tagaagatgtcgaacgattaaacct

SEQ ID NO: 20875 - DNA, 25 bp, SARS Virus
agaagatgtcgtacgattaaacctt

SEQ ID NO: 20876 - DNA, 25 bp, SARS Virus
gaagatgtcgtaagattaaacctta

SEQ ID NO: 20877 - DNA, 25 bp, SARS Virus
aagatgtcgtacaattaaaccttag

SEQ ID NO: 20878 - DNA, 25 bp, SARS Virus
agatgtcgtacgattaaaccttaga

SEQ ID NO: 20879 - DNA, 25 bp, SARS Virus
gatgtcgtacgaataaaccttagac

SEQ ID NO: 20880 - DNA, 25 bp, SARS Virus
atgtcgtacgataaaaccttagacg

SEQ ID NO: 20881 - DNA, 25 bp, SARS Virus
tgtcgtacgattaaaccttagacgt

SEQ ID NO: 20882 - DNA, 25 bp, SARS Virus
gtcgtacgattaaaccttagacgtt

SEQ ID NO: 20883 - DNA, 25 bp, SARS Virus
tcgtacgattaaaccttagacgttt

SEQ ID NO: 20884 - DNA, 25 bp, SARS Virus
cgtacgattaaaacttagacgtttc

SEQ ID NO: 20885 - DNA, 25 bp, SARS Virus
gtacgattaaacattagacgtttcg

SEQ ID NO: 20886 - DNA, 25 bp, SARS Virus
tacgattaaaccatagacgtttcgc

SEQ ID NO: 20887 - DNA, 25 bp, SARS Virus
acgattaaacctaagacgtttcgct

SEQ ID NO: 20888 - DNA, 25 bp, SARS Virus
cgattaaaccttagacgtttcgctc

SEQ ID NO: 20889 - DNA, 25 bp, SARS Virus
gattaaaccttaaacgtttcgctca

SEQ ID NO: 20890 - DNA, 25 bp, SARS Virus
attaaaccttagacgtttcgctcaa

SEQ ID NO: 20891 - DNA, 25 bp, SARS Virus
ttaaaccttagaagtttcgctcaag

SEQ ID NO: 20892 - DNA, 25 bp, SARS Virus
taaaccttagacatttcgctcaaga

SEQ ID NO: 20893 - DNA, 25 bp, SARS Virus
aaaccttagacgattcgctcaagaa

SEQ ID NO: 20894 - DNA, 25 bp, SARS Virus
aaccttagacgtatcgctcaagaat

SEQ ID NO: 20895 - DNA, 25 bp, SARS Virus
accttagacgttacgctcaagaatt

SEQ ID NO: 20896 - DNA, 25 bp, SARS Virus
ccttagacgtttagctcaagaatta

SEQ ID NO: 20897 - DNA, 25 bp, SARS Virus
cttagacgtttcactcaagaattac

SEQ ID NO: 20898 - DNA, 25 bp, SARS Virus
ttagacgtttcgatcaagaattaca

SEQ ID NO: 20899 - DNA, 25 bp, SARS Virus
tagacgtttcgcacaagaattacac

SEQ ID NO: 20900 - DNA, 25 bp, SARS Virus
agacgtttcgctaaagaattacacc

SEQ ID NO: 20901 - DNA, 25 bp, SARS Virus
gacgtttcgctcaagaattacacca

SEQ ID NO: 20902 - DNA, 25 bp, SARS Virus
acgtttcgctcaagaattacaccac

SEQ ID NO: 20903 - DNA, 25 bp, SARS Virus
cgtttcgctcaaaaattacaccaca

SEQ ID NO: 20904 - DNA, 25 bp, SARS Virus
gtttcgctcaagaattacaccacac

SEQ ID NO: 20905 - DNA, 25 bp, SARS Virus
tttcgctcaagaattacaccacaca

SEQ ID NO: 20906 - DNA, 25 bp, SARS Virus
ttcgctcaagaaatacaccacacat

SEQ ID NO: 20907 - DNA, 25 bp, SARS Virus
tcgctcaagaataacaccacacatt

SEQ ID NO: 20908 - DNA, 25 bp, SARS Virus
cgctcaagaattacaccacacattt

SEQ ID NO: 20909 - DNA, 25 bp, SARS Virus
gctcaagaattaaaccacacatttg

SEQ ID NO: 20910 - DNA, 25 bp, SARS Virus
ctcaagaattacaccacacatttgt

SEQ ID NO: 20911 - DNA, 25 bp, SARS Virus
tcaagaattacaacacacatttgta

SEQ ID NO: 20912 - DNA, 25 bp, SARS Virus
caagaattacacaacacatttgtaa

SEQ ID NO: 20913 - DNA, 25 bp, SARS Virus
aagaattacaccacacatttgtaac

SEQ ID NO: 20914 - DNA, 25 bp, SARS Virus
agaattacaccaaacatttgtaaca

SEQ ID NO: 20915 - DNA, 25 bp, SARS Virus
gaattacaccacacatttgtaacac

SEQ ID NO: 20916 - DNA, 25 bp, SARS Virus
aattacaccacaaatttgtaacacc

SEQ ID NO: 20917 - DNA, 25 bp, SARS Virus
attacaccacacatttgtaacacca

SEQ ID NO: 20918 - DNA, 25 bp, SARS Virus
ttacaccacacaattgtaacaccag

SEQ ID NO: 20919 - DNA, 25 bp, SARS Virus
tacaccacacatatgtaacaccagt

SEQ ID NO: 20920 - DNA, 25 bp, SARS Virus
acaccacacattagtaacaccagtc

SEQ ID NO: 20921 - DNA, 25 bp, SARS Virus
caccacacatttataacaccagtct

SEQ ID NO: 20922 - DNA, 25 bp, SARS Virus
accacacatttgaaacaccagtctt

SEQ ID NO: 20923 - DNA, 25 bp, SARS Virus
ccacacatttgtaacaccagtcttt

SEQ ID NO: 20924 - DNA, 25 bp, SARS Virus
cacacatttgtaacaccagtctttt

SEQ ID NO: 20925 - DNA, 25 bp, SARS Virus
acacatttgtaaaaccagtcttttg

SEQ ID NO: 20926 - DNA, 25 bp, SARS Virus
cacatttgtaacaccagtcttttga

SEQ ID NO: 20927 - DNA, 25 bp, SARS Virus
acatttgtaacaacagtcttttgat

SEQ ID NO: 20928 - DNA, 25 bp, SARS Virus
catttgtaacacaagtcttttgatg

SEQ ID NO: 20929 - DNA, 25 bp, SARS Virus
atttgtaacaccagtcttttgatga

SEQ ID NO: 20930 - DNA, 25 bp, SARS Virus
tttgtaacaccaatcttttgatgat

SEQ ID NO: 20931 - DNA, 25 bp, SARS Virus
ttgtaacaccagacttttgatgatg

SEQ ID NO: 20932 - DNA, 25 bp, SARS Virus
tgtaacaccagtattttgatgatgg

SEQ ID NO: 20933 - DNA, 25 bp, SARS Virus
gtaacaccagtcatttgatgatgga

SEQ ID NO: 20934 - DNA, 25 bp, SARS Virus
taacaccagtctattgatgatggaa

SEQ ID NO: 20935 - DNA, 25 bp, SARS Virus
aacaccagtcttatgatgatggaat

SEQ ID NO: 20936 - DNA, 25 bp, SARS Virus
acaccagtctttagatgatggaatt

SEQ ID NO: 20937 - DNA, 25 bp, SARS Virus
caccagtcttttaatgatggaattg

SEQ ID NO: 20938 - DNA, 25 bp, SARS Virus
accagtcttttgatgatggaattgc

SEQ ID NO: 20939 - DNA, 25 bp, SARS Virus
ccagtcttttgaagatggaattgcc

SEQ ID NO: 20940 - DNA, 25 bp, SARS Virus
cagtcttttgataatggaattgccc

SEQ ID NO: 20941 - DNA, 25 bp, SARS Virus
agtcttttgatgatggaattgccca

SEQ ID NO: 20942 - DNA, 25 bp, SARS Virus
gtcttttgatgaaggaattgcccac

SEQ ID NO: 20943 - DNA, 25 bp, SARS Virus
tcttttgatgatagaattgcccaca

SEQ ID NO: 20944 - DNA, 25 bp, SARS Virus
cttttgatgatgaaattgcccacat

SEQ ID NO: 20945 - DNA, 25 bp, SARS Virus
ttttgatgatggaattgcccacatc

SEQ ID NO: 20946 - DNA, 25 bp, SARS Virus
tttgatgatggaattgcccacatct

SEQ ID NO: 20947 - DNA, 25 bp, SARS Virus
ttgatgatggaaatgcccacatctt

SEQ ID NO: 20948 - DNA, 25 bp, SARS Virus
tgatgatggaatagcccacatcttc

SEQ ID NO: 20949 - DNA, 25 bp, SARS Virus
gatgatggaattacccacatcttcg

SEQ ID NO: 20950 - DNA, 25 bp, SARS Virus
atgatggaattgaccacatcttcga

SEQ ID NO: 20951 - DNA, 25 bp, SARS Virus
tgatggaattgcacacatcttcgac

SEQ ID NO: 20952 - DNA, 25 bp, SARS Virus
gatggaattgccaacatcttcgaca

SEQ ID NO: 20953 - DNA, 25 bp, SARS Virus
atggaattgcccacatcttcgacac

SEQ ID NO: 20954 - DNA, 25 bp, SARS Virus
tggaattgcccaaatcttcgacact

SEQ ID NO: 20955 - DNA, 25 bp, SARS Virus
ggaattgcccacatcttcgacacta

SEQ ID NO: 20956 - DNA, 25 bp, SARS Virus
gaattgcccacaacttcgacactac

SEQ ID NO: 20957 - DNA, 25 bp, SARS Virus
aattgcccacatattcgacactaca

SEQ ID NO: 20958 - DNA, 25 bp, SARS Virus
attgcccacatcatcgacactacat

SEQ ID NO: 20959 - DNA, 25 bp, SARS Virus
ttgcccacatctacgacactacata

SEQ ID NO: 20960 - DNA, 25 bp, SARS Virus
tgcccacatcttagacactacatat

SEQ ID NO: 20961 - DNA, 25 bp, SARS Virus
gcccacatcttcaacactacatata

SEQ ID NO: 20962 - DNA, 25 bp, SARS Virus
cccacatcttcgacactacatatac

SEQ ID NO: 20963 - DNA, 25 bp, SARS Virus
ccacatcttcgaaactacatatacc

SEQ ID NO: 20964 - DNA, 25 bp, SARS Virus
cacatcttcgacactacatataccc

SEQ ID NO: 20965 - DNA, 25 bp, SARS Virus
acatcttcgacaatacatataccca

SEQ ID NO: 20966 - DNA, 25 bp, SARS Virus
catcttcgacacaacatatacccat

SEQ ID NO: 20967 - DNA, 25 bp, SARS Virus
atcttcgacactacatatacccatg

SEQ ID NO: 20968 - DNA, 25 bp, SARS Virus
tcttcgacactaaatatacccatga

SEQ ID NO: 20969 - DNA, 25 bp, SARS Virus
cttcgacactacatatacccatgag

SEQ ID NO: 20970 - DNA, 25 bp, SARS Virus
ttcgacactacaaatacccatgaga

SEQ ID NO: 20971 - DNA, 25 bp, SARS Virus
tcgacactacatatacccatgagat

SEQ ID NO: 20972 - DNA, 25 bp, SARS Virus
cgacactacataaacccatgagata

SEQ ID NO: 20973 - DNA, 25 bp, SARS Virus
gacactacatatacccatgagatag

SEQ ID NO: 20974 - DNA, 25 bp, SARS Virus
acactacatataaccatgagataga

SEQ ID NO: 20975 - DNA, 25 bp, SARS Virus
cactacatatacacatgagatagaa

SEQ ID NO: 20976 - DNA, 25 bp, SARS Virus
actacatataccaatgagatagaat

SEQ ID NO: 20977 - DNA, 25 bp, SARS Virus
ctacatatacccatgagatagaata

SEQ ID NO: 20978 - DNA, 25 bp, SARS Virus
tacatatacccaagagatagaatac

SEQ ID NO: 20979 - DNA, 25 bp, SARS Virus
acatatacccataagatagaatact

SEQ ID NO: 20980 - DNA, 25 bp, SARS Virus
catatacccatgagatagaatacta

SEQ ID NO: 20981 - DNA, 25 bp, SARS Virus
atatacccatgaaatagaatactat

SEQ ID NO: 20982 - DNA, 25 bp, SARS Virus
tatacccatgagatagaatactatt

SEQ ID NO: 20983 - DNA, 25 bp, SARS Virus
atacccatgagaaagaatactatta

SEQ ID NO: 20984 - DNA, 25 bp, SARS Virus
tacccatgagatagaatactattag

SEQ ID NO: 20985 - DNA, 25 bp, SARS Virus
acccatgagataaaatactattaga

SEQ ID NO: 20986 - DNA, 25 bp, SARS Virus
cccatgagatagaatactattagaa

SEQ ID NO: 20987 - DNA, 25 bp, SARS Virus
ccatgagatagaatactattagaat

SEQ ID NO: 20988 - DNA, 25 bp, SARS Virus
catgagatagaaaactattagaatt

SEQ ID NO: 20989 - DNA, 25 bp, SARS Virus
atgagatagaatactattagaattc

SEQ ID NO: 20990 - DNA, 25 bp, SARS Virus
tgagatagaataatattagaattct

SEQ ID NO: 20991 - DNA, 25 bp, SARS Virus
gagatagaatacaattagaattctg

SEQ ID NO: 20992 - DNA, 25 bp, SARS Virus
agatagaatactattagaattctgt

SEQ ID NO: 20993 - DNA, 25 bp, SARS Virus
gatagaatactaatagaattctgtc

SEQ ID NO: 20994 - DNA, 25 bp, SARS Virus
atagaatactataagaattctgtcc

SEQ ID NO: 20995 - DNA, 25 bp, SARS Virus
tagaatactattagaattctgtcca

SEQ ID NO: 20996 - DNA, 25 bp, SARS Virus
agaatactattaaaattctgtccac

SEQ ID NO: 20997 - DNA, 25 bp, SARS Virus
gaatactattagaattctgtccaca

SEQ ID NO: 20998 - DNA, 25 bp, SARS Virus
aatactattagaattctgtccacaa

SEQ ID NO: 20999 - DNA, 25 bp, SARS Virus
atactattagaaatctgtccacaaa

SEQ ID NO: 21000 - DNA, 25 bp, SARS Virus
tactattagaatactgtccacaaag

SEQ ID NO: 21001 - DNA, 25 bp, SARS Virus
actattagaattatgtccacaaagg

SEQ ID NO: 21002 - DNA, 25 bp, SARS Virus
ctattagaattcagtccacaaaggt

SEQ ID NO: 21003 - DNA, 25 bp, SARS Virus
tattagaattctatccacaaaggta

SEQ ID NO: 21004 - DNA, 25 bp, SARS Virus
attagaattctgaccacaaaggtaa

SEQ ID NO: 21005 - DNA, 25 bp, SARS Virus
ttagaattctgtacacaaaggtaag

SEQ ID NO: 21006 - DNA, 25 bp, SARS Virus
tagaattctgtcaacaaaggtaagg

SEQ ID NO: 21007 - DNA, 25 bp, SARS Virus
agaattctgtccacaaaggtaaggt

SEQ ID NO: 21008 - DNA, 25 bp, SARS Virus
gaattctgtccaaaaaggtaaggta

SEQ ID NO: 21009 - DNA, 25 bp, SARS Virus
aattctgtccacaaaggtaaggtac

SEQ ID NO: 21010 - DNA, 25 bp, SARS Virus
attctgtccacaaaggtaaggtaca

SEQ ID NO: 21011 - DNA, 25 bp, SARS Virus
ttctgtccacaaaggtaaggtacac

SEQ ID NO: 21012 - DNA, 25 bp, SARS Virus
tctgtccacaaaagtaaggtacaca

SEQ ID NO: 21013 - DNA, 25 bp, SARS Virus
ctgtccacaaagataaggtacacac

SEQ ID NO: 21014 - DNA, 25 bp, SARS Virus
tgtccacaaaggaaaggtacacaca

SEQ ID NO: 21015 - DNA, 25 bp, SARS Virus
gtccacaaaggtaaggtacacacac

SEQ ID NO: 21016 - DNA, 25 bp, SARS Virus
tccacaaaggtaaggtacacacaca

SEQ ID NO: 21017 - DNA, 25 bp, SARS Virus
ccacaaaggtaaagtacacacacac

SEQ ID NO: 21018 - DNA, 25 bp, SARS Virus
cacaaaggtaagatacacacacacc

SEQ ID NO: 21019 - DNA, 25 bp, SARS Virus
acaaaggtaaggaacacacacacca

SEQ ID NO: 21020 - DNA, 25 bp, SARS Virus
caaaggtaaggtacacacacaccag

SEQ ID NO: 21021 - DNA, 25 bp, SARS Virus
aaaggtaaggtaaacacacaccagc

SEQ ID NO: 21022 - DNA, 25 bp, SARS Virus
aaggtaaggtacacacacaccagca

SEQ ID NO: 21023 - DNA, 25 bp, SARS Virus
aggtaaggtacaaacacaccagcac

SEQ ID NO: 21024 - DNA, 25 bp, SARS Virus
ggtaaggtacacacacaccagcact

SEQ ID NO: 21025 - DNA, 25 bp, SARS Virus
gtaaggtacacaaacaccagcacta

SEQ ID NO: 21026 - DNA, 25 bp, SARS Virus
taaggtacacacacaccagcactac

SEQ ID NO: 21027 - DNA, 25 bp, SARS Virus
aaggtacacacaaaccagcactacg

SEQ ID NO: 21028 - DNA, 25 bp, SARS Virus
aggtacacacacaccagcactacga

SEQ ID NO: 21029 - DNA, 25 bp, SARS Virus
ggtacacacacaacagcactacgat

SEQ ID NO: 21030 - DNA, 25 bp, SARS Virus
gtacacacacacaagcactacgatg

SEQ ID NO: 21031 - DNA, 25 bp, SARS Virus
tacacacacaccagcactacgatgt

SEQ ID NO: 21032 - DNA, 25 bp, SARS Virus
acacacacaccaacactacgatgtg

SEQ ID NO: 21033 - DNA, 25 bp, SARS Virus
cacacacaccagaactacgatgtgt

SEQ ID NO: 21034 - DNA, 25 bp, SARS Virus
acacacaccagcactacgatgtgtt

SEQ ID NO: 21035 - DNA, 25 bp, SARS Virus
cacacaccagcaatacgatgtgtta

SEQ ID NO: 21036 - DNA, 25 bp, SARS Virus
acacaccagcacaacgatgtgttat

SEQ ID NO: 21037 - DNA, 25 bp, SARS Virus
cacaccagcactacgatgtgttata

SEQ ID NO: 21038 - DNA, 25 bp, SARS Virus
acaccagcactaagatgtgttatag

SEQ ID NO: 21039 - DNA, 25 bp, SARS Virus
caccagcactacaatgtgttataga

SEQ ID NO: 21040 - DNA, 25 bp, SARS Virus
accagcactacgatgtgttatagat

SEQ ID NO: 21041 - DNA, 25 bp, SARS Virus
ccagcactacgaagtgttatagatc

SEQ ID NO: 21042 - DNA, 25 bp, SARS Virus
cagcactacgatatgttatagatca

SEQ ID NO: 21043 - DNA, 25 bp, SARS Virus
agcactacgatgagttatagatcat

SEQ ID NO: 21044 - DNA, 25 bp, SARS Virus
gcactacgatgtattatagatcatg

SEQ ID NO: 21045 - DNA, 25 bp, SARS Virus
cactacgatgtgatatagatcatgt

SEQ ID NO: 21046 - DNA, 25 bp, SARS Virus
actacgatgtgtaatagatcatgtt

SEQ ID NO: 21047 - DNA, 25 bp, SARS Virus
ctacgatgtgttatagatcatgttg

SEQ ID NO: 21048 - DNA, 25 bp, SARS Virus
tacgatgtgttaaagatcatgttgt

SEQ ID NO: 21049 - DNA, 25 bp, SARS Virus
acgatgtgttatagatcatgttgtt

SEQ ID NO: 21050 - DNA, 25 bp, SARS Virus
cgatgtgttataaatcatgttgttc

SEQ ID NO: 21051 - DNA, 25 bp, SARS Virus
gatgtgttatagatcatgttgttct

SEQ ID NO: 21052 - DNA, 25 bp, SARS Virus
atgtgttatagaacatgttgttctc

SEQ ID NO: 21053 - DNA, 25 bp, SARS Virus
tgtgttatagataatgttgttctca

SEQ ID NO: 21054 - DNA, 25 bp, SARS Virus
gtgttatagatcatgttgttctcag

SEQ ID NO: 21055 - DNA, 25 bp, SARS Virus
tgttatagatcaagttgttctcaga

SEQ ID NO: 21056 - DNA, 25 bp, SARS Virus
gttatagatcatattgttctcagaa

SEQ ID NO: 21057 - DNA, 25 bp, SARS Virus
ttatagatcatgatgttctcagaag

SEQ ID NO: 21058 - DNA, 25 bp, SARS Virus
tatagatcatgtagttctcagaaga

SEQ ID NO: 21059 - DNA, 25 bp, SARS Virus
atagatcatgttattctcagaagaa

SEQ ID NO: 21060 - DNA, 25 bp, SARS Virus
tagatcatgttgatctcagaagaaa

SEQ ID NO: 21061 - DNA, 25 bp, SARS Virus
agatcatgttgtactcagaagaaaa

SEQ ID NO: 21062 - DNA, 25 bp, SARS Virus
gatcatgttgttatcagaagaaaac

SEQ ID NO: 21063 - DNA, 25 bp, SARS Virus
atcatgttgttcacagaagaaaaca

SEQ ID NO: 21064 - DNA, 25 bp, SARS Virus
tcatgttgttctaagaagaaaacaa

SEQ ID NO: 21065 - DNA, 25 bp, SARS Virus
catgttgttctcagaagaaaacaat

SEQ ID NO: 21066 - DNA, 25 bp, SARS Virus
atgttgttctcaaaagaaaacaata

SEQ ID NO: 21067 - DNA, 25 bp, SARS Virus
tgttgttctcagaagaaaacaatac

SEQ ID NO: 21068 - DNA, 25 bp, SARS Virus
gttgttctcagaagaaaacaatact

SEQ ID NO: 21069 - DNA, 25 bp, SARS Virus
ttgttctcagaaaaaaacaatacta

SEQ ID NO: 21070 - DNA, 25 bp, SARS Virus
tgttctcagaagaaaacaatactac

SEQ ID NO: 21071 - DNA, 25 bp, SARS Virus
gttctcagaagaaaacaatactaca

SEQ ID NO: 21072 - DNA, 25 bp, SARS Virus
ttctcagaagaaaacaatactacag

SEQ ID NO: 21073 - DNA, 25 bp, SARS Virus
tctcagaagaaaacaatactacaga

SEQ ID NO: 21074 - DNA, 25 bp, SARS Virus
ctcagaagaaaaaaatactacagac

SEQ ID NO: 21075 - DNA, 25 bp, SARS Virus
tcagaagaaaacaatactacagacg

SEQ ID NO: 21076 - DNA, 25 bp, SARS Virus
cagaagaaaacaatactacagacgt

SEQ ID NO: 21077 - DNA, 25 bp, SARS Virus
agaagaaaacaaaactacagacgtg

SEQ ID NO: 21078 - DNA, 25 bp, SARS Virus
gaagaaaacaatactacagacgtgg

SEQ ID NO: 21079 - DNA, 25 bp, SARS Virus
aagaaaacaataatacagacgtggt

SEQ ID NO: 21080 - DNA, 25 bp, SARS Virus
agaaaacaatacaacagacgtggtg

SEQ ID NO: 21081 - DNA, 25 bp, SARS Virus
gaaaacaatactacagacgtggtgg

SEQ ID NO: 21082 - DNA, 25 bp, SARS Virus
aaaacaatactaaagacgtggtgga

SEQ ID NO: 21083 - DNA, 25 bp, SARS Virus
aaacaatactacagacgtggtggac

SEQ ID NO: 21084 - DNA, 25 bp, SARS Virus
aacaatactacaaacgtggtggacg

SEQ ID NO: 21085 - DNA, 25 bp, SARS Virus
acaatactacagacgtggtggacga

SEQ ID NO: 21086 - DNA, 25 bp, SARS Virus
caatactacagaagtggtggacgac

SEQ ID NO: 21087 - DNA, 25 bp, SARS Virus
aatactacagacatggtggacgact

SEQ ID NO: 21088 - DNA, 25 bp, SARS Virus
atactacagacgaggtggacgactc

SEQ ID NO: 21089 - DNA, 25 bp, SARS Virus
tactacagacgtagtggacgactca

SEQ ID NO: 21090 - DNA, 25 bp, SARS Virus
actacagacgtgatggacgactcat

SEQ ID NO: 21091 - DNA, 25 bp, SARS Virus
ctacagacgtggaggacgactcata

SEQ ID NO: 21092 - DNA, 25 bp, SARS Virus
tacagacgtggtagacgactcatat

SEQ ID NO: 21093 - DNA, 25 bp, SARS Virus
acagacgtggtgaacgactcatatt

SEQ ID NO: 21094 - DNA, 25 bp, SARS Virus
cagacgtggtggacgactcatattt

SEQ ID NO: 21095 - DNA, 25 bp, SARS Virus
agacgtggtggaagactcatattta

SEQ ID NO: 21096 - DNA, 25 bp, SARS Virus
gacgtggtggacaactcatatttaa

SEQ ID NO: 21097 - DNA, 25 bp, SARS Virus
acgtggtggacgactcatatttaat

SEQ ID NO: 21098 - DNA, 25 bp, SARS Virus
cgtggtggacgaatcatatttaatg

SEQ ID NO: 21099 - DNA, 25 bp, SARS Virus
gtggtggacgacacatatttaatgt

SEQ ID NO: 21100 - DNA, 25 bp, SARS Virus
tggtggacgactaatatttaatgtc

SEQ ID NO: 21101 - DNA, 25 bp, SARS Virus
ggtggacgactcatatttaatgtcg

SEQ ID NO: 21102 - DNA, 25 bp, SARS Virus
gtggacgactcaaatttaatgtcgt

SEQ ID NO: 21103 - DNA, 25 bp, SARS Virus
tggacgactcatatttaatgtcgtt

SEQ ID NO: 21104 - DNA, 25 bp, SARS Virus
ggacgactcataattaatgtcgttc

SEQ ID NO: 21105 - DNA, 25 bp, SARS Virus
gacgactcatatataatgtcgttcc

SEQ ID NO: 21106 - DNA, 25 bp, SARS Virus
acgactcatattaaatgtcgttcca

SEQ ID NO: 21107 - DNA, 25 bp, SARS Virus
cgactcatatttaatgtcgttccat

SEQ ID NO: 21108 - DNA, 25 bp, SARS Virus
gactcatatttaatgtcgttccatg

SEQ ID NO: 21109 - DNA, 25 bp, SARS Virus
actcatatttaaagtcgttccatgt

SEQ ID NO: 21110 - DNA, 25 bp, SARS Virus
ctcatatttaatatcgttccatgta

SEQ ID NO: 21111 - DNA, 25 bp, SARS Virus
tcatatttaatgacgttccatgtaa

SEQ ID NO: 21112 - DNA, 25 bp, SARS Virus
catatttaatgtagttccatgtaag

SEQ ID NO: 21113 - DNA, 25 bp, SARS Virus
tggtgtgtttctctacctttaaagg

SEQ ID NO: 21114 - DNA, 25 bp, SARS Virus
ggtgtgtttcttcacctttaaagga

SEQ ID NO: 21115 - DNA, 25 bp, SARS Virus
gtgtgtttctttccctttaaaggag

SEQ ID NO: 21116 - DNA, 25 bp, SARS Virus
tgtgtttctttacctttaaaggagt

SEQ ID NO: 21117 - DNA, 25 bp, SARS Virus
gtgtttctttacctttaaaggagtt

SEQ ID NO: 21118 - DNA, 25 bp, SARS Virus
tgtttctttacccttaaaggagttc

SEQ ID NO: 21119 - DNA, 25 bp, SARS Virus
gtttctttacctctaaaggagttca

SEQ ID NO: 21120 - DNA, 25 bp, SARS Virus
tttctttaccttcaaaggagttcaa

SEQ ID NO: 21121 - DNA, 25 bp, SARS Virus
ttctttacctttcaaggagttcaac

SEQ ID NO: 21122 - DNA, 25 bp, SARS Virus
tctttacctttacaggagttcaacc

SEQ ID NO: 21123 - DNA, 25 bp, SARS Virus
ctttacctttaacggagttcaacca

SEQ ID NO: 21124 - DNA, 25 bp, SARS Virus
tttacctttaaacgagttcaaccac

SEQ ID NO: 21125 - DNA, 25 bp, SARS Virus
ttacctttaaagcagttcaaccacc

SEQ ID NO: 21126 - DNA, 25 bp, SARS Virus
tacctttaaaggcgttcaaccacca

SEQ ID NO: 21127 - DNA, 25 bp, SARS Virus
acctttaaaggacttcaaccaccaa

SEQ ID NO: 21128 - DNA, 25 bp, SARS Virus
cctttaaaggagctcaaccaccaaa

SEQ ID NO: 21129 - DNA, 25 bp, SARS Virus
ctttaaaggagtccaaccaccaaat

SEQ ID NO: 21130 - DNA, 25 bp, SARS Virus
tttaaaggagttcaaccaccaaatt

SEQ ID NO: 21131 - DNA, 25 bp, SARS Virus
ttaaaggagttccaccaccaaattg

SEQ ID NO: 21132 - DNA, 25 bp, SARS Virus
taaaggagttcacccaccaaattga

SEQ ID NO: 21133 - DNA, 25 bp, SARS Virus
aaaggagttcaaccaccaaattgaa

SEQ ID NO: 21134 - DNA, 25 bp, SARS Virus
aaggagttcaaccaccaaattgaag

SEQ ID NO: 21135 - DNA, 25 bp, SARS Virus
aggagttcaacccccaaattgaagt

SEQ ID NO: 21136 - DNA, 25 bp, SARS Virus
ggagttcaaccaccaaattgaagtt

SEQ ID NO: 21137 - DNA, 25 bp, SARS Virus
gagttcaaccaccaaattgaagtta

SEQ ID NO: 21138 - DNA, 25 bp, SARS Virus
agttcaaccacccaattgaagttaa

SEQ ID NO: 21139 - DNA, 25 bp, SARS Virus
gttcaaccaccacattgaagttaat

SEQ ID NO: 21140 - DNA, 25 bp, SARS Virus
ttcaaccaccaacttgaagttaatt

SEQ ID NO: 21141 - DNA, 25 bp, SARS Virus
tcaaccaccaaactgaagttaattt

SEQ ID NO: 21142 - DNA, 25 bp, SARS Virus
caaccaccaaatcgaagttaattta

SEQ ID NO: 21143 - DNA, 25 bp, SARS Virus
aaccaccaaattcaagttaatttac

SEQ ID NO: 21144 - DNA, 25 bp, SARS Virus
accaccaaattgcagttaatttacc

SEQ ID NO: 21145 - DNA, 25 bp, SARS Virus
ccaccaaattgacgttaatttaccc

SEQ ID NO: 21146 - DNA, 25 bp, SARS Virus
caccaaattgaacttaatttacccg

SEQ ID NO: 21147 - DNA, 25 bp, SARS Virus
accaaattgaagctaatttacccga

SEQ ID NO: 21148 - DNA, 25 bp, SARS Virus
ccaaattgaagtcaatttacccgac

SEQ ID NO: 21149 - DNA, 25 bp, SARS Virus
caaattgaagttcatttacccgact

SEQ ID NO: 21150 - DNA, 25 bp, SARS Virus
aaattgaagttactttacccgacta

SEQ ID NO: 21151 - DNA, 25 bp, SARS Virus
aattgaagttaacttacccgactat

SEQ ID NO: 21152 - DNA, 25 bp, SARS Virus
attgaagttaatctacccgactatt

SEQ ID NO: 21153 - DNA, 25 bp, SARS Virus
ttgaagttaattcacccgactattg

SEQ ID NO: 21154 - DNA, 25 bp, SARS Virus
tgaagttaatttccccgactattgt

SEQ ID NO: 21155 - DNA, 25 bp, SARS Virus
gaagttaatttacccgactattgtt

SEQ ID NO: 21156 - DNA, 25 bp, SARS Virus
aagttaatttacccgactattgtta

SEQ ID NO: 21157 - DNA, 25 bp, SARS Virus
agttaatttacccgactattgttaa

SEQ ID NO: 21158 - DNA, 25 bp, SARS Virus
gttaatttaccccactattgttaac

SEQ ID NO: 21159 - DNA, 25 bp, SARS Virus
ttaatttacccgcctattgttaaca

SEQ ID NO: 21160 - DNA, 25 bp, SARS Virus
taatttacccgactattgttaacaa

SEQ ID NO: 21161 - DNA, 25 bp, SARS Virus
aatttacccgaccattgttaacaat

SEQ ID NO: 21162 - DNA, 25 bp, SARS Virus
atttacccgactcttgttaacaata

SEQ ID NO: 21163 - DNA, 25 bp, SARS Virus
tttacccgactactgttaacaataa

SEQ ID NO: 21164 - DNA, 25 bp, SARS Virus
ttacccgactatcgttaacaataaa

SEQ ID NO: 21165 - DNA, 25 bp, SARS Virus
tacccgactattcttaacaataaac

SEQ ID NO: 21166 - DNA, 25 bp, SARS Virus
acccgactattgctaacaataaaca

SEQ ID NO: 21167 - DNA, 25 bp, SARS Virus
cccgactattgtcaacaataaacag

SEQ ID NO: 21168 - DNA, 25 bp, SARS Virus
ccgactattgttcacaataaacaga

SEQ ID NO: 21169 - DNA, 25 bp, SARS Virus
cgactattgttaccaataaacagat

SEQ ID NO: 21170 - DNA, 25 bp, SARS Virus
gactattgttaacaataaacagatc

SEQ ID NO: 21171 - DNA, 25 bp, SARS Virus
actattgttaaccataaacagatca

SEQ ID NO: 21172 - DNA, 25 bp, SARS Virus
ctattgttaacactaaacagatcac

SEQ ID NO: 21173 - DNA, 25 bp, SARS Virus
tattgttaacaacaaacagatcaca

SEQ ID NO: 21174 - DNA, 25 bp, SARS Virus
attgttaacaatcaacagatcacaa

SEQ ID NO: 21175 - DNA, 25 bp, SARS Virus
ttgttaacaatacacagatcacaaa

SEQ ID NO: 21176 - DNA, 25 bp, SARS Virus
tgttaacaataaccagatcacaaaa

SEQ ID NO: 21177 - DNA, 25 bp, SARS Virus
gttaacaataaacagatcacaaaat

SEQ ID NO: 21178 - DNA, 25 bp, SARS Virus
ttaacaataaaccgatcacaaaata

SEQ ID NO: 21179 - DNA, 25 bp, SARS Virus
taacaataaacacatcacaaaataa

SEQ ID NO: 21180 - DNA, 25 bp, SARS Virus
aacaataaacagctcacaaaataat

SEQ ID NO: 21181 - DNA, 25 bp, SARS Virus
acaataaacagaccacaaaataatc

SEQ ID NO: 21182 - DNA, 25 bp, SARS Virus
caataaacagatcacaaaataatcg

SEQ ID NO: 21183 - DNA, 25 bp, SARS Virus
aataaacagatcccaaaataatcgt

SEQ ID NO: 21184 - DNA, 25 bp, SARS Virus
ataaacagatcacaaaataatcgtg

SEQ ID NO: 21185 - DNA, 25 bp, SARS Virus
taaacagatcaccaaataatcgtga

SEQ ID NO: 21186 - DNA, 25 bp, SARS Virus
aaacagatcacacaataatcgtgaa

SEQ ID NO: 21187 - DNA, 25 bp, SARS Virus
aacagatcacaacataatcgtgaag

SEQ ID NO: 21188 - DNA, 25 bp, SARS Virus
acagatcacaaactaatcgtgaagt

SEQ ID NO: 21189 - DNA, 25 bp, SARS Virus
cagatcacaaaacaatcgtgaagtt

SEQ ID NO: 21190 - DNA, 25 bp, SARS Virus
agatcacaaaatcatcgtgaagttg

SEQ ID NO: 21191 - DNA, 25 bp, SARS Virus
gatcacaaaatactcgtgaagttgt

SEQ ID NO: 21192 - DNA, 25 bp, SARS Virus
atcacaaaataaccgtgaagttgtc

SEQ ID NO: 21193 - DNA, 25 bp, SARS Virus
tcacaaaataatcgtgaagttgtcg

SEQ ID NO: 21194 - DNA, 25 bp, SARS Virus
cacaaaataatcctgaagttgtcga

SEQ ID NO: 21195 - DNA, 25 bp, SARS Virus
acaaaataatcgcgaagttgtcgaa

SEQ ID NO: 21196 - DNA, 25 bp, SARS Virus
caaaataatcgtcaagttgtcgaac

SEQ ID NO: 21197 - DNA, 25 bp, SARS Virus
aaaataatcgtgcagttgtcgaact

SEQ ID NO: 21198 - DNA, 25 bp, SARS Virus
aaataatcgtgacgttgtcgaactt

SEQ ID NO: 21199 - DNA, 25 bp, SARS Virus
aataatcgtgaacttgtcgaacttc

SEQ ID NO: 21200 - DNA, 25 bp, SARS Virus
ataatcgtgaagctgtcgaacttca

SEQ ID NO: 21201 - DNA, 25 bp, SARS Virus
taatcgtgaagtcgtcgaacttcag

SEQ ID NO: 21202 - DNA, 25 bp, SARS Virus
aatcgtgaagttctcgaacttcagt

SEQ ID NO: 21203 - DNA, 25 bp, SARS Virus
atcgtgaagttgccgaacttcagtt

SEQ ID NO: 21204 - DNA, 25 bp, SARS Virus
tcgtgaagttgtcgaacttcagttt

SEQ ID NO: 21205 - DNA, 25 bp, SARS Virus
cgtgaagttgtccaacttcagttta

SEQ ID NO: 21206 - DNA, 25 bp, SARS Virus
gtgaagttgtcgcacttcagtttaa

SEQ ID NO: 21207 - DNA, 25 bp, SARS Virus
tgaagttgtcgaccttcagtttaag

SEQ ID NO: 21208 - DNA, 25 bp, SARS Virus
gaagttgtcgaacttcagtttaagt

SEQ ID NO: 21209 - DNA, 25 bp, SARS Virus
aagttgtcgaacctcagtttaagtt

SEQ ID NO: 21210 - DNA, 25 bp, SARS Virus
agttgtcgaactccagtttaagtta

SEQ ID NO: 21211 - DNA, 25 bp, SARS Virus
gttgtcgaacttcagtttaagttac

SEQ ID NO: 21212 - DNA, 25 bp, SARS Virus
ttgtcgaacttccgtttaagttacg

SEQ ID NO: 21213 - DNA, 25 bp, SARS Virus
tgtcgaacttcactttaagttacgt

SEQ ID NO: 21214 - DNA, 25 bp, SARS Virus
gtcgaacttcagcttaagttacgtg

SEQ ID NO: 21215 - DNA, 25 bp, SARS Virus
tcgaacttcagtctaagttacgtgg

SEQ ID NO: 21216 - DNA, 25 bp, SARS Virus
cgaacttcagttcaagttacgtggt

SEQ ID NO: 21217 - DNA, 25 bp, SARS Virus
gaacttcagtttcagttacgtggtc

SEQ ID NO: 21218 - DNA, 25 bp, SARS Virus
aacttcagtttacgttacgtggtcg

SEQ ID NO: 21219 - DNA, 25 bp, SARS Virus
acttcagtttaacttacgtggtcgt

SEQ ID NO: 21220 - DNA, 25 bp, SARS Virus
cttcagtttaagctacgtggtcgtg

SEQ ID NO: 21221 - DNA, 25 bp, SARS Virus
ttcagtttaagtcacgtggtcgtga

SEQ ID NO: 21222 - DNA, 25 bp, SARS Virus
tcagtttaagttccgtggtcgtgaa

SEQ ID NO: 21223 - DNA, 25 bp, SARS Virus
cagtttaagttacgtggtcgtgaag

SEQ ID NO: 21224 - DNA, 25 bp, SARS Virus
agtttaagttacctggtcgtgaagt

SEQ ID NO: 21225 - DNA, 25 bp, SARS Virus
gtttaagttacgcggtcgtgaagtt

SEQ ID NO: 21226 - DNA, 25 bp, SARS Virus
tttaagttacgtcgtcgtgaagttc

SEQ ID NO: 21227 - DNA, 25 bp, SARS Virus
ttaagttacgtgctcgtgaagttct

SEQ ID NO: 21228 - DNA, 25 bp, SARS Virus
taagttacgtggccgtgaagttctc

SEQ ID NO: 21229 - DNA, 25 bp, SARS Virus
aagttacgtggtcgtgaagttctcc

SEQ ID NO: 21230 - DNA, 25 bp, SARS Virus
agttacgtggtcctgaagttctccg

SEQ ID NO: 21231 - DNA, 25 bp, SARS Virus
gttacgtggtcgcgaagttctccga

SEQ ID NO: 21232 - DNA, 25 bp, SARS Virus
ttacgtggtcgtcaagttctccgaa

SEQ ID NO: 21233 - DNA, 25 bp, SARS Virus
tacgtggtcgtgcagttctccgaat

SEQ ID NO: 21234 - DNA, 25 bp, SARS Virus
acgtggtcgtgacgttctccgaata

SEQ ID NO: 21235 - DNA, 25 bp, SARS Virus
cgtggtcgtgaacttctccgaataa

SEQ ID NO: 21236 - DNA, 25 bp, SARS Virus
gtggtcgtgaagctctccgaataat

SEQ ID NO: 21237 - DNA, 25 bp, SARS Virus
tggtcgtgaagtcctccgaataata

SEQ ID NO: 21238 - DNA, 25 bp, SARS Virus
ggtcgtgaagttctccgaataatat

SEQ ID NO: 21239 - DNA, 25 bp, SARS Virus
gtcgtgaagttccccgaataatatc

SEQ ID NO: 21240 - DNA, 25 bp, SARS Virus
tcgtgaagttctccgaataatatct

SEQ ID NO: 21241 - DNA, 25 bp, SARS Virus
cgtgaagttctccgaataatatctc

SEQ ID NO: 21242 - DNA, 25 bp, SARS Virus
gtgaagttctcccaataatatctcg

SEQ ID NO: 21243 - DNA, 25 bp, SARS Virus
tgaagttctccgcataatatctcgg

SEQ ID NO: 21244 - DNA, 25 bp, SARS Virus
gaagttctccgactaatatctcggg

SEQ ID NO: 21245 - DNA, 25 bp, SARS Virus
aagttctccgaacaatatctcgggc

SEQ ID NO: 21246 - DNA, 25 bp, SARS Virus
agttctccgaatcatatctcgggca

SEQ ID NO: 21247 - DNA, 25 bp, SARS Virus
gttctccgaatactatctcgggcac

SEQ ID NO: 21248 - DNA, 25 bp, SARS Virus
ttctccgaataacatctcgggcacg

SEQ ID NO: 21249 - DNA, 25 bp, SARS Virus
tctccgaataatctctcgggcacga

SEQ ID NO: 21250 - DNA, 25 bp, SARS Virus
ctccgaataatacctcgggcacgac

SEQ ID NO: 21251 - DNA, 25 bp, SARS Virus
tccgaataatatctcgggcacgacc

SEQ ID NO: 21252 - DNA, 25 bp, SARS Virus
ccgaataatatcccgggcacgacca

SEQ ID NO: 21253 - DNA, 25 bp, SARS Virus
cgaataatatctcgggcacgaccac

SEQ ID NO: 21254 - DNA, 25 bp, SARS Virus
gaataatatctccggcacgaccact

SEQ ID NO: 21255 - DNA, 25 bp, SARS Virus
aataatatctcgcgcacgaccacta

SEQ ID NO: 21256 - DNA, 25 bp, SARS Virus
ataatatctcggccacgaccactac

SEQ ID NO: 21257 - DNA, 25 bp, SARS Virus
taatatctcgggcacgaccactacg

SEQ ID NO: 21258 - DNA, 25 bp, SARS Virus
aatatctcgggcccgaccactacga

SEQ ID NO: 21259 - DNA, 25 bp, SARS Virus
atatctcgggcacgaccactacgac

SEQ ID NO: 21260 - DNA, 25 bp, SARS Virus
tatctcgggcaccaccactacgacg

SEQ ID NO: 21261 - DNA, 25 bp, SARS Virus
atctcgggcacgcccactacgacga

SEQ ID NO: 21262 - DNA, 25 bp, SARS Virus
tctcgggcacgaccactacgacgat

SEQ ID NO: 21263 - DNA, 25 bp, SARS Virus
ctcgggcacgaccactacgacgatt

SEQ ID NO: 21264 - DNA, 25 bp, SARS Virus
tcgggcacgacccctacgacgattg

SEQ ID NO: 21265 - DNA, 25 bp, SARS Virus
cgggcacgaccactacgacgattga

SEQ ID NO: 21266 - DNA, 25 bp, SARS Virus
gggcacgaccaccacgacgattgaa

SEQ ID NO: 21267 - DNA, 25 bp, SARS Virus
ggcacgaccactccgacgattgaaa

SEQ ID NO: 21268 - DNA, 25 bp, SARS Virus
gcacgaccactacgacgattgaaaa

SEQ ID NO: 21269 - DNA, 25 bp, SARS Virus
cacgaccactaccacgattgaaaac

SEQ ID NO: 21270 - DNA, 25 bp, SARS Virus
acgaccactacgccgattgaaaaca

SEQ ID NO: 21271 - DNA, 25 bp, SARS Virus
cgaccactacgacgattgaaaacac

SEQ ID NO: 21272 - DNA, 25 bp, SARS Virus
gaccactacgaccattgaaaacacg

SEQ ID NO: 21273 - DNA, 25 bp, SARS Virus
accactacgacgcttgaaaacacgt

SEQ ID NO: 21274 - DNA, 25 bp, SARS Virus
ccactacgacgactgaaaacacgtg

SEQ ID NO: 21275 - DNA, 25 bp, SARS Virus
cactacgacgatcgaaaacacgtga

SEQ ID NO: 21276 - DNA, 25 bp, SARS Virus
actacgacgattcaaaacacgtgag

SEQ ID NO: 21277 - DNA, 25 bp, SARS Virus
ctacgacgattgcaaacacgtgagt

SEQ ID NO: 21278 - DNA, 25 bp, SARS Virus
tacgacgattgacaacacgtgagta

SEQ ID NO: 21279 - DNA, 25 bp, SARS Virus
acgacgattgaacacacgtgagtat

SEQ ID NO: 21280 - DNA, 25 bp, SARS Virus
cgacgattgaaaccacgtgagtatg

SEQ ID NO: 21281 - DNA, 25 bp, SARS Virus
gacgattgaaaacacgtgagtatga

SEQ ID NO: 21282 - DNA, 25 bp, SARS Virus
acgattgaaaacccgtgagtatgag

SEQ ID NO: 21283 - DNA, 25 bp, SARS Virus
cgattgaaaacacgtgagtatgagc

SEQ ID NO: 21284 - DNA, 25 bp, SARS Virus
gattgaaaacacctgagtatgagcg

SEQ ID NO: 21285 - DNA, 25 bp, SARS Virus
attgaaaacacgcgagtatgagcga

SEQ ID NO: 21286 - DNA, 25 bp, SARS Virus
ttgaaaacacgtcagtatgagcgaa

SEQ ID NO: 21287 - DNA, 25 bp, SARS Virus
tgaaaacacgtgcgtatgagcgaat

SEQ ID NO: 21288 - DNA, 25 bp, SARS Virus
gaaaacacgtgactatgagcgaatg

SEQ ID NO: 21289 - DNA, 25 bp, SARS Virus
aaaacacgtgagcatgagcgaatgt

SEQ ID NO: 21290 - DNA, 25 bp, SARS Virus
aaacacgtgagtctgagcgaatgtc

SEQ ID NO: 21291 - DNA, 25 bp, SARS Virus
aacacgtgagtacgagcgaatgtca

SEQ ID NO: 21292 - DNA, 25 bp, SARS Virus
acacgtgagtatcagcgaatgtcat

SEQ ID NO: 21293 - DNA, 25 bp, SARS Virus
cacgtgagtatgcgcgaatgtcatt

SEQ ID NO: 21294 - DNA, 25 bp, SARS Virus
acgtgagtatgaccgaatgtcatta

SEQ ID NO: 21295 - DNA, 25 bp, SARS Virus
cgtgagtatgagcgaatgtcattat

SEQ ID NO: 21296 - DNA, 25 bp, SARS Virus
gtgagtatgagccaatgtcattatt

SEQ ID NO: 21297 - DNA, 25 bp, SARS Virus
tgagtatgagcgcatgtcattattt

SEQ ID NO: 21298 - DNA, 25 bp, SARS Virus
gagtatgagcgactgtcattatttt

SEQ ID NO: 21299 - DNA, 25 bp, SARS Virus
agtatgagcgaacgtcattattttg

SEQ ID NO: 21300 - DNA, 25 bp, SARS Virus
gtatgagcgaatctcattattttga

SEQ ID NO: 21301 - DNA, 25 bp, SARS Virus
tatgagcgaatgccattattttgac

SEQ ID NO: 21302 - DNA, 25 bp, SARS Virus
atgagcgaatgtcattattttgaca

SEQ ID NO: 21303 - DNA, 25 bp, SARS Virus
tgagcgaatgtccttattttgacaa

SEQ ID NO: 21304 - DNA, 25 bp, SARS Virus
gagcgaatgtcactattttgacaac

SEQ ID NO: 21305 - DNA, 25 bp, SARS Virus
agcgaatgtcatcattttgacaacc

SEQ ID NO: 21306 - DNA, 25 bp, SARS Virus
gcgaatgtcattcttttgacaaccg

SEQ ID NO: 21307 - DNA, 25 bp, SARS Virus
cgaatgtcattactttgacaaccgc

SEQ ID NO: 21308 - DNA, 25 bp, SARS Virus
gaatgtcattatcttgacaaccgct

SEQ ID NO: 21309 - DNA, 25 bp, SARS Virus
aatgtcattattctgacaaccgctc

SEQ ID NO: 21310 - DNA, 25 bp, SARS Virus
atgtcattatttcgacaaccgctcg

SEQ ID NO: 21311 - DNA, 25 bp, SARS Virus
tgtcattattttcacaaccgctcga

SEQ ID NO: 21312 - DNA, 25 bp, SARS Virus
gtcattattttgccaaccgctcgaa

SEQ ID NO: 21313 - DNA, 25 bp, SARS Virus
tcattattttgacaaccgctcgaac

SEQ ID NO: 21314 - DNA, 25 bp, SARS Virus
cattattttgaccaccgctcgaacc

SEQ ID NO: 21315 - DNA, 25 bp, SARS Virus
attattttgacacccgctcgaacca

SEQ ID NO: 21316 - DNA, 25 bp, SARS Virus
ttattttgacaaccgctcgaaccac

SEQ ID NO: 21317 - DNA, 25 bp, SARS Virus
tattttgacaaccgctcgaaccact

SEQ ID NO: 21318 - DNA, 25 bp, SARS Virus
attttgacaacccctcgaaccacta

SEQ ID NO: 21319 - DNA, 25 bp, SARS Virus
ttttgacaaccgctcgaaccactac

SEQ ID NO: 21320 - DNA, 25 bp, SARS Virus
tttgacaaccgcccgaaccactaca

SEQ ID NO: 21321 - DNA, 25 bp, SARS Virus
ttgacaaccgctcgaaccactacag

SEQ ID NO: 21322 - DNA, 25 bp, SARS Virus
tgacaaccgctccaaccactacagt

SEQ ID NO: 21323 - DNA, 25 bp, SARS Virus
gacaaccgctcgcaccactacagtc

SEQ ID NO: 21324 - DNA, 25 bp, SARS Virus
acaaccgctcgacccactacagtct

SEQ ID NO: 21325 - DNA, 25 bp, SARS Virus
caaccgctcgaaccactacagtctc

SEQ ID NO: 21326 - DNA, 25 bp, SARS Virus
aaccgctcgaaccactacagtctct

SEQ ID NO: 21327 - DNA, 25 bp, SARS Virus
accgctcgaacccctacagtctctt

SEQ ID NO: 21328 - DNA, 25 bp, SARS Virus
ccgctcgaaccactacagtctcttt

SEQ ID NO: 21329 - DNA, 25 bp, SARS Virus
cgctcgaaccaccacagtctctttg

SEQ ID NO: 21330 - DNA, 25 bp, SARS Virus
gctcgaaccactccagtctctttga

SEQ ID NO: 21331 - DNA, 25 bp, SARS Virus
ctcgaaccactacagtctctttgat

SEQ ID NO: 21332 - DNA, 25 bp, SARS Virus
tcgaaccactaccgtctctttgata

SEQ ID NO: 21333 - DNA, 25 bp, SARS Virus
cgaaccactacactctctttgatac

SEQ ID NO: 21334 - DNA, 25 bp, SARS Virus
gaaccactacagcctctttgatact

SEQ ID NO: 21335 - DNA, 25 bp, SARS Virus
aaccactacagtctctttgatactg

SEQ ID NO: 21336 - DNA, 25 bp, SARS Virus
accactacagtccctttgatactgg

SEQ ID NO: 21337 - DNA, 25 bp, SARS Virus
ccactacagtctctttgatactggg

SEQ ID NO: 21338 - DNA, 25 bp, SARS Virus
cactacagtctccttgatactgggt

SEQ ID NO: 21339 - DNA, 25 bp, SARS Virus
actacagtctctctgatactgggta

SEQ ID NO: 21340 - DNA, 25 bp, SARS Virus
ctacagtctcttcgatactgggtag

SEQ ID NO: 21341 - DNA, 25 bp, SARS Virus
tacagtctctttcatactgggtaga

SEQ ID NO: 21342 - DNA, 25 bp, SARS Virus
acagtctctttgctactgggtagaa

SEQ ID NO: 21343 - DNA, 25 bp, SARS Virus
cagtctctttgacactgggtagaag

SEQ ID NO: 21344 - DNA, 25 bp, SARS Virus
agtctctttgatcctgggtagaaga

SEQ ID NO: 21345 - DNA, 25 bp, SARS Virus
gtctctttgatactgggtagaagat

SEQ ID NO: 21346 - DNA, 25 bp, SARS Virus
tctctttgataccgggtagaagatg

SEQ ID NO: 21347 - DNA, 25 bp, SARS Virus
ctctttgatactcggtagaagatgt

SEQ ID NO: 21348 - DNA, 25 bp, SARS Virus
tctttgatactgcgtagaagatgtc

SEQ ID NO: 21349 - DNA, 25 bp, SARS Virus
ctttgatactggctagaagatgtcg

SEQ ID NO: 21350 - DNA, 25 bp, SARS Virus
tttgatactgggcagaagatgtcgt

SEQ ID NO: 21351 - DNA, 25 bp, SARS Virus
ttgatactgggtcgaagatgtcgta

SEQ ID NO: 21352 - DNA, 25 bp, SARS Virus
tgatactgggtacaagatgtcgtac

SEQ ID NO: 21353 - DNA, 25 bp, SARS Virus
gatactgggtagcagatgtcgtacg

SEQ ID NO: 21354 - DNA, 25 bp, SARS Virus
atactgggtagacgatgtcgtacga

SEQ ID NO: 21355 - DNA, 25 bp, SARS Virus
tactgggtagaacatgtcgtacgat

SEQ ID NO: 21356 - DNA, 25 bp, SARS Virus
actgggtagaagctgtcgtacgatt

SEQ ID NO: 21357 - DNA, 25 bp, SARS Virus
ctgggtagaagacgtcgtacgatta

SEQ ID NO: 21358 - DNA, 25 bp, SARS Virus
tgggtagaagatctcgtacgattaa

SEQ ID NO: 21359 - DNA, 25 bp, SARS Virus
gggtagaagatgccgtacgattaaa

SEQ ID NO: 21360 - DNA, 25 bp, SARS Virus
ggtagaagatgtcgtacgattaaac

SEQ ID NO: 21361 - DNA, 25 bp, SARS Virus
gtagaagatgtcctacgattaaacc

SEQ ID NO: 21362 - DNA, 25 bp, SARS Virus
tagaagatgtcgcacgattaaacct

SEQ ID NO: 21363 - DNA, 25 bp, SARS Virus
agaagatgtcgtccgattaaacctt

SEQ ID NO: 21364 - DNA, 25 bp, SARS Virus
gaagatgtcgtacgattaaacctta

SEQ ID NO: 21365 - DNA, 25 bp, SARS Virus
aagatgtcgtaccattaaaccttag

SEQ ID NO: 21366 - DNA, 25 bp, SARS Virus
agatgtcgtacgcttaaaccttaga

SEQ ID NO: 21367 - DNA, 25 bp, SARS Virus
gatgtcgtacgactaaaccttagac

SEQ ID NO: 21368 - DNA, 25 bp, SARS Virus
atgtcgtacgatcaaaccttagacg

SEQ ID NO: 21369 - DNA, 25 bp, SARS Virus
tgtcgtacgattcaaccttagacgt

SEQ ID NO: 21370 - DNA, 25 bp, SARS Virus
gtcgtacgattacaccttagacgtt

SEQ ID NO: 21371 - DNA, 25 bp, SARS Virus
tcgtacgattaacccttagacgttt

SEQ ID NO: 21372 - DNA, 25 bp, SARS Virus
cgtacgattaaaccttagacgtttc

SEQ ID NO: 21373 - DNA, 25 bp, SARS Virus
gtacgattaaaccttagacgtttcg

SEQ ID NO: 21374 - DNA, 25 bp, SARS Virus
tacgattaaaccctagacgtttcgc

SEQ ID NO: 21375 - DNA, 25 bp, SARS Virus
acgattaaacctcagacgtttcgct

SEQ ID NO: 21376 - DNA, 25 bp, SARS Virus
cgattaaaccttcgacgtttcgctc

SEQ ID NO: 21377 - DNA, 25 bp, SARS Virus
gattaaaccttacacgtttcgctca

SEQ ID NO: 21378 - DNA, 25 bp, SARS Virus
attaaaccttagccgtttcgctcaa

SEQ ID NO: 21379 - DNA, 25 bp, SARS Virus
ttaaaccttagacgtttcgctcaag

SEQ ID NO: 21380 - DNA, 25 bp, SARS Virus
taaaccttagacctttcgctcaaga

SEQ ID NO: 21381 - DNA, 25 bp, SARS Virus
aaaccttagacgcttcgctcaagaa

SEQ ID NO: 21382 - DNA, 25 bp, SARS Virus
aaccttagacgtctcgctcaagaat

SEQ ID NO: 21383 - DNA, 25 bp, SARS Virus
accttagacgttccgctcaagaatt

SEQ ID NO: 21384 - DNA, 25 bp, SARS Virus
ccttagacgtttcgctcaagaatta

SEQ ID NO: 21385 - DNA, 25 bp, SARS Virus
cttagacgtttccctcaagaattac

SEQ ID NO: 21386 - DNA, 25 bp, SARS Virus
ttagacgtttcgctcaagaattaca

SEQ ID NO: 21387 - DNA, 25 bp, SARS Virus
tagacgtttcgcccaagaattacac

SEQ ID NO: 21388 - DNA, 25 bp, SARS Virus
agacgtttcgctcaagaattacacc

SEQ ID NO: 21389 - DNA, 25 bp, SARS Virus
gacgtttcgctccagaattacacca

SEQ ID NO: 21390 - DNA, 25 bp, SARS Virus
acgtttcgctcacgaattacaccac

SEQ ID NO: 21391 - DNA, 25 bp, SARS Virus
cgtttcgctcaacaattacaccaca

SEQ ID NO: 21392 - DNA, 25 bp, SARS Virus
gtttcgctcaagcattacaccacac

SEQ ID NO: 21393 - DNA, 25 bp, SARS Virus
tttcgctcaagacttacaccacaca

SEQ ID NO: 21394 - DNA, 25 bp, SARS Virus
ttcgctcaagaactacaccacacat

SEQ ID NO: 21395 - DNA, 25 bp, SARS Virus
tcgctcaagaatcacaccacacatt

SEQ ID NO: 21396 - DNA, 25 bp, SARS Virus
cgctcaagaattccaccacacattt

SEQ ID NO: 21397 - DNA, 25 bp, SARS Virus
gctcaagaattacaccacacatttg

SEQ ID NO: 21398 - DNA, 25 bp, SARS Virus
ctcaagaattaccccacacatttgt

SEQ ID NO: 21399 - DNA, 25 bp, SARS Virus
tcaagaattacaccacacatttgta

SEQ ID NO: 21400 - DNA, 25 bp, SARS Virus
caagaattacaccacacatttgtaa

SEQ ID NO: 21401 - DNA, 25 bp, SARS Virus
aagaattacaccccacatttgtaac

SEQ ID NO: 21402 - DNA, 25 bp, SARS Virus
agaattacaccacacatttgtaaca

SEQ ID NO: 21403 - DNA, 25 bp, SARS Virus
gaattacaccacccatttgtaacac

SEQ ID NO: 21404 - DNA, 25 bp, SARS Virus
aattacaccacacatttgtaacacc

SEQ ID NO: 21405 - DNA, 25 bp, SARS Virus
attacaccacacctttgtaacacca

SEQ ID NO: 21406 - DNA, 25 bp, SARS Virus
ttacaccacacacttgtaacaccag

SEQ ID NO: 21407 - DNA, 25 bp, SARS Virus
tacaccacacatctgtaacaccagt

SEQ ID NO: 21408 - DNA, 25 bp, SARS Virus
acaccacacattcgtaacaccagtc

SEQ ID NO: 21409 - DNA, 25 bp, SARS Virus
caccacacatttctaacaccagtct

SEQ ID NO: 21410 - DNA, 25 bp, SARS Virus
accacacatttgcaacaccagtctt

SEQ ID NO: 21411 - DNA, 25 bp, SARS Virus
ccacacatttgtcacaccagtcttt

SEQ ID NO: 21412 - DNA, 25 bp, SARS Virus
cacacatttgtaccaccagtctttt

SEQ ID NO: 21413 - DNA, 25 bp, SARS Virus
acacatttgtaacaccagtcttttg

SEQ ID NO: 21414 - DNA, 25 bp, SARS Virus
cacatttgtaaccccagtcttttga

SEQ ID NO: 21415 - DNA, 25 bp, SARS Virus
acatttgtaacaccagtcttttgat

SEQ ID NO: 21416 - DNA, 25 bp, SARS Virus
catttgtaacaccagtcttttgatg

SEQ ID NO: 21417 - DNA, 25 bp, SARS Virus
atttgtaacacccgtcttttgatga

SEQ ID NO: 21418 - DNA, 25 bp, SARS Virus
tttgtaacaccactcttttgatgat

SEQ ID NO: 21419 - DNA, 25 bp, SARS Virus
ttgtaacaccagccttttgatgatg

SEQ ID NO: 21420 - DNA, 25 bp, SARS Virus
tgtaacaccagtcttttgatgatgg

SEQ ID NO: 21421 - DNA, 25 bp, SARS Virus
gtaacaccagtcctttgatgatgga

SEQ ID NO: 21422 - DNA, 25 bp, SARS Virus
taacaccagtctcttgatgatggaa

SEQ ID NO: 21423 - DNA, 25 bp, SARS Virus
aacaccagtcttctgatgatggaat

SEQ ID NO: 21424 - DNA, 25 bp, SARS Virus
acaccagtctttcgatgatggaatt

SEQ ID NO: 21425 - DNA, 25 bp, SARS Virus
caccagtcttttcatgatggaattg

SEQ ID NO: 21426 - DNA, 25 bp, SARS Virus
accagtcttttgctgatggaattgc

SEQ ID NO: 21427 - DNA, 25 bp, SARS Virus
ccagtcttttgacgatggaattgcc

SEQ ID NO: 21428 - DNA, 25 bp, SARS Virus
cagtcttttgatcatggaattgccc

SEQ ID NO: 21429 - DNA, 25 bp, SARS Virus
agtcttttgatgctggaattgccca

SEQ ID NO: 21430 - DNA, 25 bp, SARS Virus
gtcttttgatgacggaattgcccac

SEQ ID NO: 21431 - DNA, 25 bp, SARS Virus
tcttttgatgatcgaattgcccaca

SEQ ID NO: 21432 - DNA, 25 bp, SARS Virus
cttttgatgatgcaattgcccacat

SEQ ID NO: 21433 - DNA, 25 bp, SARS Virus
ttttgatgatggcattgcccacatc

SEQ ID NO: 21434 - DNA, 25 bp, SARS Virus
tttgatgatggacttgcccacatct

SEQ ID NO: 21435 - DNA, 25 bp, SARS Virus
ttgatgatggaactgcccacatctt

SEQ ID NO: 21436 - DNA, 25 bp, SARS Virus
tgatgatggaatcgcccacatcttc

SEQ ID NO: 21437 - DNA, 25 bp, SARS Virus
gatgatggaattccccacatcttcg

SEQ ID NO: 21438 - DNA, 25 bp, SARS Virus
atgatggaattgcccacatcttcga

SEQ ID NO: 21439 - DNA, 25 bp, SARS Virus
tgatggaattgcccacatcttcgac

SEQ ID NO: 21440 - DNA, 25 bp, SARS Virus
gatggaattgcccacatcttcgaca

SEQ ID NO: 21441 - DNA, 25 bp, SARS Virus
atggaattgcccccatcttcgacac

SEQ ID NO: 21442 - DNA, 25 bp, SARS Virus
tggaattgcccacatcttcgacact

SEQ ID NO: 21443 - DNA, 25 bp, SARS Virus
ggaattgcccacctcttcgacacta

SEQ ID NO: 21444 - DNA, 25 bp, SARS Virus
gaattgcccacaccttcgacactac

SEQ ID NO: 21445 - DNA, 25 bp, SARS Virus
aattgcccacatcttcgacactaca

SEQ ID NO: 21446 - DNA, 25 bp, SARS Virus
attgcccacatcctcgacactacat

SEQ ID NO: 21447 - DNA, 25 bp, SARS Virus
ttgcccacatctccgacactacata

SEQ ID NO: 21448 - DNA, 25 bp, SARS Virus
tgcccacatcttcgacactacatat

SEQ ID NO: 21449 - DNA, 25 bp, SARS Virus
gcccacatcttccacactacatata

SEQ ID NO: 21450 - DNA, 25 bp, SARS Virus
cccacatcttcgccactacatatac

SEQ ID NO: 21451 - DNA, 25 bp, SARS Virus
ccacatcttcgacactacatatacc

SEQ ID NO: 21452 - DNA, 25 bp, SARS Virus
cacatcttcgaccctacatataccc

SEQ ID NO: 21453 - DNA, 25 bp, SARS Virus
acatcttcgacactacatataccca

SEQ ID NO: 21454 - DNA, 25 bp, SARS Virus
catcttcgacaccacatatacccat

SEQ ID NO: 21455 - DNA, 25 bp, SARS Virus
atcttcgacactccatatacccatg

SEQ ID NO: 21456 - DNA, 25 bp, SARS Virus
tcttcgacactacatatacccatga

SEQ ID NO: 21457 - DNA, 25 bp, SARS Virus
cttcgacactacctatacccatgag

SEQ ID NO: 21458 - DNA, 25 bp, SARS Virus
ttcgacactacacatacccatgaga

SEQ ID NO: 21459 - DNA, 25 bp, SARS Virus
tcgacactacatctacccatgagat

SEQ ID NO: 21460 - DNA, 25 bp, SARS Virus
cgacactacatacacccatgagata

SEQ ID NO: 21461 - DNA, 25 bp, SARS Virus
gacactacatatccccatgagatag

SEQ ID NO: 21462 - DNA, 25 bp, SARS Virus
acactacatatacccatgagataga

SEQ ID NO: 21463 - DNA, 25 bp, SARS Virus
cactacatatacccatgagatagaa

SEQ ID NO: 21464 - DNA, 25 bp, SARS Virus
actacatatacccatgagatagaat

SEQ ID NO: 21465 - DNA, 25 bp, SARS Virus
ctacatatacccctgagatagaata

SEQ ID NO: 21466 - DNA, 25 bp, SARS Virus
tacatatacccacgagatagaatac

SEQ ID NO: 21467 - DNA, 25 bp, SARS Virus
acatatacccatcagatagaatact

SEQ ID NO: 21468 - DNA, 25 bp, SARS Virus
catatacccatgcgatagaatacta

SEQ ID NO: 21469 - DNA, 25 bp, SARS Virus
atatacccatgacatagaatactat

SEQ ID NO: 21470 - DNA, 25 bp, SARS Virus
tatacccatgagctagaatactatt

SEQ ID NO: 21471 - DNA, 25 bp, SARS Virus
atacccatgagacagaatactatta

SEQ ID NO: 21472 - DNA, 25 bp, SARS Virus
tacccatgagatcgaatactattag

SEQ ID NO: 21473 - DNA, 25 bp, SARS Virus
acccatgagatacaatactattaga

SEQ ID NO: 21474 - DNA, 25 bp, SARS Virus
cccatgagatagcatactattagaa

SEQ ID NO: 21475 - DNA, 25 bp, SARS Virus
ccatgagatagactactattagaat

SEQ ID NO: 21476 - DNA, 25 bp, SARS Virus
catgagatagaacactattagaatt

SEQ ID NO: 21477 - DNA, 25 bp, SARS Virus
atgagatagaatcctattagaattc

SEQ ID NO: 21478 - DNA, 25 bp, SARS Virus
tgagatagaatactattagaattct

SEQ ID NO: 21479 - DNA, 25 bp, SARS Virus
gagatagaataccattagaattctg

SEQ ID NO: 21480 - DNA, 25 bp, SARS Virus
agatagaatactcttagaattctgt

SEQ ID NO: 21481 - DNA, 25 bp, SARS Virus
gatagaatactactagaattctgtc

SEQ ID NO: 21482 - DNA, 25 bp, SARS Virus
atagaatactatcagaattctgtcc

SEQ ID NO: 21483 - DNA, 25 bp, SARS Virus
tagaatactattcgaattctgtcca

SEQ ID NO: 21484 - DNA, 25 bp, SARS Virus
agaatactattacaattctgtccac

SEQ ID NO: 21485 - DNA, 25 bp, SARS Virus
gaatactattagcattctgtccaca

SEQ ID NO: 21486 - DNA, 25 bp, SARS Virus
aatactattagacttctgtccacaa

SEQ ID NO: 21487 - DNA, 25 bp, SARS Virus
atactattagaactctgtccacaaa

SEQ ID NO: 21488 - DNA, 25 bp, SARS Virus
tactattagaatcctgtccacaaag

SEQ ID NO: 21489 - DNA, 25 bp, SARS Virus
actattagaattctgtccacaaagg

SEQ ID NO: 21490 - DNA, 25 bp, SARS Virus
ctattagaattccgtccacaaaggt

SEQ ID NO: 21491 - DNA, 25 bp, SARS Virus
tattagaattctctccacaaaggta

SEQ ID NO: 21492 - DNA, 25 bp, SARS Virus
attagaattctgcccacaaaggtaa

SEQ ID NO: 21493 - DNA, 25 bp, SARS Virus
ttagaattctgtccacaaaggtaag

SEQ ID NO: 21494 - DNA, 25 bp, SARS Virus
tagaattctgtccacaaaggtaagg

SEQ ID NO: 21495 - DNA, 25 bp, SARS Virus
agaattctgtccccaaaggtaaggt

SEQ ID NO: 21496 - DNA, 25 bp, SARS Virus
gaattctgtccacaaaggtaaggta

SEQ ID NO: 21497 - DNA, 25 bp, SARS Virus
aattctgtccaccaaggtaaggtac

SEQ ID NO: 21498 - DNA, 25 bp, SARS Virus
attctgtccacacaggtaaggtaca

SEQ ID NO: 21499 - DNA, 25 bp, SARS Virus
ttctgtccacaacggtaaggtacac

SEQ ID NO: 21500 - DNA, 25 bp, SARS Virus
tctgtccacaaacgtaaggtacaca

SEQ ID NO: 21501 - DNA, 25 bp, SARS Virus
ctgtccacaaagctaaggtacacac

SEQ ID NO: 21502 - DNA, 25 bp, SARS Virus
tgtccacaaaggcaaggtacacaca

SEQ ID NO: 21503 - DNA, 25 bp, SARS Virus
gtccacaaaggtcaggtacacacac

SEQ ID NO: 21504 - DNA, 25 bp, SARS Virus
tccacaaaggtacggtacacacaca

SEQ ID NO: 21505 - DNA, 25 bp, SARS Virus
ccacaaaggtaacgtacacacacac

SEQ ID NO: 21506 - DNA, 25 bp, SARS Virus
cacaaaggtaagctacacacacacc

SEQ ID NO: 21507 - DNA, 25 bp, SARS Virus
acaaaggtaaggcacacacacacca

SEQ ID NO: 21508 - DNA, 25 bp, SARS Virus
caaaggtaaggtccacacacaccag

SEQ ID NO: 21509 - DNA, 25 bp, SARS Virus
aaaggtaaggtacacacacaccagc

SEQ ID NO: 21510 - DNA, 25 bp, SARS Virus
aaggtaaggtacccacacaccagca

SEQ ID NO: 21511 - DNA, 25 bp, SARS Virus
aggtaaggtacacacacaccagcac

SEQ ID NO: 21512 - DNA, 25 bp, SARS Virus
ggtaaggtacacccacaccagcact

SEQ ID NO: 21513 - DNA, 25 bp, SARS Virus
gtaaggtacacacacaccagcacta

SEQ ID NO: 21514 - DNA, 25 bp, SARS Virus
taaggtacacacccaccagcactac

SEQ ID NO: 21515 - DNA, 25 bp, SARS Virus
aaggtacacacacaccagcactacg

SEQ ID NO: 21516 - DNA, 25 bp, SARS Virus
aggtacacacaccccagcactacga

SEQ ID NO: 21517 - DNA, 25 bp, SARS Virus
ggtacacacacaccagcactacgat

SEQ ID NO: 21518 - DNA, 25 bp, SARS Virus
gtacacacacaccagcactacgatg

SEQ ID NO: 21519 - DNA, 25 bp, SARS Virus
tacacacacacccgcactacgatgt

SEQ ID NO: 21520 - DNA, 25 bp, SARS Virus
acacacacaccaccactacgatgtg

SEQ ID NO: 21521 - DNA, 25 bp, SARS Virus
cacacacaccagcactacgatgtgt

SEQ ID NO: 21522 - DNA, 25 bp, SARS Virus
acacacaccagccctacgatgtgtt

SEQ ID NO: 21523 - DNA, 25 bp, SARS Virus
cacacaccagcactacgatgtgtta

SEQ ID NO: 21524 - DNA, 25 bp, SARS Virus
acacaccagcaccacgatgtgttat

SEQ ID NO: 21525 - DNA, 25 bp, SARS Virus
cacaccagcactccgatgtgttata

SEQ ID NO: 21526 - DNA, 25 bp, SARS Virus
acaccagcactacgatgtgttatag

SEQ ID NO: 21527 - DNA, 25 bp, SARS Virus
caccagcactaccatgtgttataga

SEQ ID NO: 21528 - DNA, 25 bp, SARS Virus
accagcactacgctgtgttatagat

SEQ ID NO: 21529 - DNA, 25 bp, SARS Virus
ccagcactacgacgtgttatagatc

SEQ ID NO: 21530 - DNA, 25 bp, SARS Virus
cagcactacgatctgttatagatca

SEQ ID NO: 21531 - DNA, 25 bp, SARS Virus
agcactacgatgcgttatagatcat

SEQ ID NO: 21532 - DNA, 25 bp, SARS Virus
gcactacgatgtcttatagatcatg

SEQ ID NO: 21533 - DNA, 25 bp, SARS Virus
cactacgatgtgctatagatcatgt

SEQ ID NO: 21534 - DNA, 25 bp, SARS Virus
actacgatgtgtcatagatcatgtt

SEQ ID NO: 21535 - DNA, 25 bp, SARS Virus
ctacgatgtgttctagatcatgttg

SEQ ID NO: 21536 - DNA, 25 bp, SARS Virus
tacgatgtgttacagatcatgttgt

SEQ ID NO: 21537 - DNA, 25 bp, SARS Virus
acgatgtgttatcgatcatgttgtt

SEQ ID NO: 21538 - DNA, 25 bp, SARS Virus
cgatgtgttatacatcatgttgttc

SEQ ID NO: 21539 - DNA, 25 bp, SARS Virus
gatgtgttatagctcatgttgttct

SEQ ID NO: 21540 - DNA, 25 bp, SARS Virus
atgtgttatagaccatgttgttctc

SEQ ID NO: 21541 - DNA, 25 bp, SARS Virus
tgtgttatagatcatgttgttctca

SEQ ID NO: 21542 - DNA, 25 bp, SARS Virus
gtgttatagatcctgttgttctcag

SEQ ID NO: 21543 - DNA, 25 bp, SARS Virus
tgttatagatcacgttgttctcaga

SEQ ID NO: 21544 - DNA, 25 bp, SARS Virus
gttatagatcatcttgttctcagaa

SEQ ID NO: 21545 - DNA, 25 bp, SARS Virus
ttatagatcatgctgttctcagaag

SEQ ID NO: 21546 - DNA, 25 bp, SARS Virus
tatagatcatgtcgttctcagaaga

SEQ ID NO: 21547 - DNA, 25 bp, SARS Virus
atagatcatgttcttctcagaagaa

SEQ ID NO: 21548 - DNA, 25 bp, SARS Virus
tagatcatgttgctctcagaagaaa

SEQ ID NO: 21549 - DNA, 25 bp, SARS Virus
agatcatgttgtcctcagaagaaaa

SEQ ID NO: 21550 - DNA, 25 bp, SARS Virus
gatcatgttgttctcagaagaaaac

SEQ ID NO: 21551 - DNA, 25 bp, SARS Virus
atcatgttgttcccagaagaaaaca

SEQ ID NO: 21552 - DNA, 25 bp, SARS Virus
tcatgttgttctcagaagaaaacaa

SEQ ID NO: 21553 - DNA, 25 bp, SARS Virus
catgttgttctccgaagaaaacaat

SEQ ID NO: 21554 - DNA, 25 bp, SARS Virus
atgttgttctcacaagaaaacaata

SEQ ID NO: 21555 - DNA, 25 bp, SARS Virus
tgttgttctcagcagaaaacaatac

SEQ ID NO: 21556 - DNA, 25 bp, SARS Virus
gttgttctcagacgaaaacaatact

SEQ ID NO: 21557 - DNA, 25 bp, SARS Virus
ttgttctcagaacaaaacaatacta

SEQ ID NO: 21558 - DNA, 25 bp, SARS Virus
tgttctcagaagcaaacaatactac

SEQ ID NO: 21559 - DNA, 25 bp, SARS Virus
gttctcagaagacaacaatactaca

SEQ ID NO: 21560 - DNA, 25 bp, SARS Virus
ttctcagaagaacacaatactacag

SEQ ID NO: 21561 - DNA, 25 bp, SARS Virus
tctcagaagaaaccaatactacaga

SEQ ID NO: 21562 - DNA, 25 bp, SARS Virus
ctcagaagaaaacaatactacagac

SEQ ID NO: 21563 - DNA, 25 bp, SARS Virus
tcagaagaaaaccatactacagacg

SEQ ID NO: 21564 - DNA, 25 bp, SARS Virus
cagaagaaaacactactacagacgt

SEQ ID NO: 21565 - DNA, 25 bp, SARS Virus
agaagaaaacaacactacagacgtg

SEQ ID NO: 21566 - DNA, 25 bp, SARS Virus
gaagaaaacaatcctacagacgtgg

SEQ ID NO: 21567 - DNA, 25 bp, SARS Virus
aagaaaacaatactacagacgtggt

SEQ ID NO: 21568 - DNA, 25 bp, SARS Virus
agaaaacaataccacagacgtggtg

SEQ ID NO: 21569 - DNA, 25 bp, SARS Virus
gaaaacaatactccagacgtggtgg

SEQ ID NO: 21570 - DNA, 25 bp, SARS Virus
aaaacaatactacagacgtggtgga

SEQ ID NO: 21571 - DNA, 25 bp, SARS Virus
aaacaatactaccgacgtggtggac

SEQ ID NO: 21572 - DNA, 25 bp, SARS Virus
aacaatactacacacgtggtggacg

SEQ ID NO: 21573 - DNA, 25 bp, SARS Virus
acaatactacagccgtggtggacga

SEQ ID NO: 21574 - DNA, 25 bp, SARS Virus
caatactacagacgtggtggacgac

SEQ ID NO: 21575 - DNA, 25 bp, SARS Virus
aatactacagacctggtggacgact

SEQ ID NO: 21576 - DNA, 25 bp, SARS Virus
atactacagacgcggtggacgactc

SEQ ID NO: 21577 - DNA, 25 bp, SARS Virus
tactacagacgtcgtggacgactca

SEQ ID NO: 21578 - DNA, 25 bp, SARS Virus
actacagacgtgctggacgactcat

SEQ ID NO: 21579 - DNA, 25 bp, SARS Virus
ctacagacgtggcggacgactcata

SEQ ID NO: 21580 - DNA, 25 bp, SARS Virus
tacagacgtggtcgacgactcatat

SEQ ID NO: 21581 - DNA, 25 bp, SARS Virus
acagacgtggtgcacgactcatatt

SEQ ID NO: 21582 - DNA, 25 bp, SARS Virus
cagacgtggtggccgactcatattt

SEQ ID NO: 21583 - DNA, 25 bp, SARS Virus
agacgtggtggacgactcatattta

SEQ ID NO: 21584 - DNA, 25 bp, SARS Virus
gacgtggtggaccactcatatttaa

SEQ ID NO: 21585 - DNA, 25 bp, SARS Virus
acgtggtggacgcctcatatttaat

SEQ ID NO: 21586 - DNA, 25 bp, SARS Virus
cgtggtggacgactcatatttaatg

SEQ ID NO: 21587 - DNA, 25 bp, SARS Virus
gtggtggacgacccatatttaatgt

SEQ ID NO: 21588 - DNA, 25 bp, SARS Virus
tggtggacgactcatatttaatgtc

SEQ ID NO: 21589 - DNA, 25 bp, SARS Virus
ggtggacgactcctatttaatgtcg

SEQ ID NO: 21590 - DNA, 25 bp, SARS Virus
gtggacgactcacatttaatgtcgt

SEQ ID NO: 21591 - DNA, 25 bp, SARS Virus
tggacgactcatctttaatgtcgtt

SEQ ID NO: 21592 - DNA, 25 bp, SARS Virus
ggacgactcatacttaatgtcgttc

SEQ ID NO: 21593 - DNA, 25 bp, SARS Virus
gacgactcatatctaatgtcgttcc

SEQ ID NO: 21594 - DNA, 25 bp, SARS Virus
acgactcatattcaatgtcgttcca

SEQ ID NO: 21595 - DNA, 25 bp, SARS Virus
cgactcatatttcatgtcgttccat

SEQ ID NO: 21596 - DNA, 25 bp, SARS Virus
gactcatatttactgtcgttccatg

SEQ ID NO: 21597 - DNA, 25 bp, SARS Virus
actcatatttaacgtcgttccatgt

SEQ ID NO: 21598 - DNA, 25 bp, SARS Virus
ctcatatttaatctcgttccatgta

SEQ ID NO: 21599 - DNA, 25 bp, SARS Virus
tcatatttaatgccgttccatgtaa

SEQ ID NO: 21600 - DNA, 25 bp, SARS Virus
catatttaatgtcgttccatgtaag

SEQ ID NO: 21601 - DNA, 25 bp, SARS Virus
tggtgtgtttctgtacctttaaagg

SEQ ID NO: 21602 - DNA, 25 bp, SARS Virus
ggtgtgtttcttgacctttaaagga

SEQ ID NO: 21603 - DNA, 25 bp, SARS Virus
gtgtgtttctttgcctttaaaggag

SEQ ID NO: 21604 - DNA, 25 bp, SARS Virus
tgtgtttctttagctttaaaggagt

SEQ ID NO: 21605 - DNA, 25 bp, SARS Virus
gtgtttctttacgtttaaaggagtt

SEQ ID NO: 21606 - DNA, 25 bp, SARS Virus
tgtttctttaccgttaaaggagttc

SEQ ID NO: 21607 - DNA, 25 bp, SARS Virus
gtttctttacctgtaaaggagttca

SEQ ID NO: 21608 - DNA, 25 bp, SARS Virus
tttctttaccttgaaaggagttcaa

SEQ ID NO: 21609 - DNA, 25 bp, SARS Virus
ttctttacctttgaaggagttcaac

SEQ ID NO: 21610 - DNA, 25 bp, SARS Virus
tctttacctttagaggagttcaacc

SEQ ID NO: 21611 - DNA, 25 bp, SARS Virus
ctttacctttaagggagttcaacca

SEQ ID NO: 21612 - DNA, 25 bp, SARS Virus
tttacctttaaaggagttcaaccac

SEQ ID NO: 21613 - DNA, 25 bp, SARS Virus
ttacctttaaaggagttcaaccacc

SEQ ID NO: 21614 - DNA, 25 bp, SARS Virus
tacctttaaaggggttcaaccacca

SEQ ID NO: 21615 - DNA, 25 bp, SARS Virus
acctttaaaggagttcaaccaccaa

SEQ ID NO: 21616 - DNA, 25 bp, SARS Virus
cctttaaaggaggtcaaccaccaaa

SEQ ID NO: 21617 - DNA, 25 bp, SARS Virus
ctttaaaggagtgcaaccaccaaat

SEQ ID NO: 21618 - DNA, 25 bp, SARS Virus
tttaaaggagttgaaccaccaaatt

SEQ ID NO: 21619 - DNA, 25 bp, SARS Virus
ttaaaggagttcgaccaccaaattg

SEQ ID NO: 21620 - DNA, 25 bp, SARS Virus
taaaggagttcagccaccaaattga

SEQ ID NO: 21621 - DNA, 25 bp, SARS Virus
aaaggagttcaagcaccaaattgaa

SEQ ID NO: 21622 - DNA, 25 bp, SARS Virus
aaggagttcaacgaccaaattgaag

SEQ ID NO: 21623 - DNA, 25 bp, SARS Virus
aggagttcaaccgccaaattgaagt

SEQ ID NO: 21624 - DNA, 25 bp, SARS Virus
ggagttcaaccagcaaattgaagtt

SEQ ID NO: 21625 - DNA, 25 bp, SARS Virus
gagttcaaccacgaaattgaagtta

SEQ ID NO: 21626 - DNA, 25 bp, SARS Virus
agttcaaccaccgaattgaagttaa

SEQ ID NO: 21627 - DNA, 25 bp, SARS Virus
gttcaaccaccagattgaagttaat

SEQ ID NO: 21628 - DNA, 25 bp, SARS Virus
ttcaaccaccaagttgaagttaatt

SEQ ID NO: 21629 - DNA, 25 bp, SARS Virus
tcaaccaccaaagtgaagttaattt

SEQ ID NO: 21630 - DNA, 25 bp, SARS Virus
caaccaccaaatggaagttaattta

SEQ ID NO: 21631 - DNA, 25 bp, SARS Virus
aaccaccaaattgaagttaatttac

SEQ ID NO: 21632 - DNA, 25 bp, SARS Virus
accaccaaattggagttaatttacc

SEQ ID NO: 21633 - DNA, 25 bp, SARS Virus
ccaccaaattgaggttaatttaccc

SEQ ID NO: 21634 - DNA, 25 bp, SARS Virus
caccaaattgaagttaatttacccg

SEQ ID NO: 21635 - DNA, 25 bp, SARS Virus
accaaattgaaggtaatttacccga

SEQ ID NO: 21636 - DNA, 25 bp, SARS Virus
ccaaattgaagtgaatttacccgac

SEQ ID NO: 21637 - DNA, 25 bp, SARS Virus
caaattgaagttgatttacccgact

SEQ ID NO: 21638 - DNA, 25 bp, SARS Virus
aaattgaagttagtttacccgacta

SEQ ID NO: 21639 - DNA, 25 bp, SARS Virus
aattgaagttaagttacccgactat

SEQ ID NO: 21640 - DNA, 25 bp, SARS Virus
attgaagttaatgtacccgactatt

SEQ ID NO: 21641 - DNA, 25 bp, SARS Virus
ttgaagttaattgacccgactattg

SEQ ID NO: 21642 - DNA, 25 bp, SARS Virus
tgaagttaatttgcccgactattgt

SEQ ID NO: 21643 - DNA, 25 bp, SARS Virus
gaagttaatttagccgactattgtt

SEQ ID NO: 21644 - DNA, 25 bp, SARS Virus
aagttaatttacgcgactattgtta

SEQ ID NO: 21645 - DNA, 25 bp, SARS Virus
agttaatttaccggactattgttaa

SEQ ID NO: 21646 - DNA, 25 bp, SARS Virus
gttaatttacccgactattgttaac

SEQ ID NO: 21647 - DNA, 25 bp, SARS Virus
ttaatttacccggctattgttaaca

SEQ ID NO: 21648 - DNA, 25 bp, SARS Virus
taatttacccgagtattgttaacaa

SEQ ID NO: 21649 - DNA, 25 bp, SARS Virus
aatttacccgacgattgttaacaat

SEQ ID NO: 21650 - DNA, 25 bp, SARS Virus
atttacccgactgttgttaacaata

SEQ ID NO: 21651 - DNA, 25 bp, SARS Virus
tttacccgactagtgttaacaataa

SEQ ID NO: 21652 - DNA, 25 bp, SARS Virus
ttacccgactatggttaacaataaa

SEQ ID NO: 21653 - DNA, 25 bp, SARS Virus
tacccgactattgttaacaataaac

SEQ ID NO: 21654 - DNA, 25 bp, SARS Virus
acccgactattggtaacaataaaca

SEQ ID NO: 21655 - DNA, 25 bp, SARS Virus
cccgactattgtgaacaataaacag

SEQ ID NO: 21656 - DNA, 25 bp, SARS Virus
ccgactattgttgacaataaacaga

SEQ ID NO: 21657 - DNA, 25 bp, SARS Virus
cgactattgttagcaataaacagat

SEQ ID NO: 21658 - DNA, 25 bp, SARS Virus
gactattgttaagaataaacagatc

SEQ ID NO: 21659 - DNA, 25 bp, SARS Virus
actattgttaacgataaacagatca

SEQ ID NO: 21660 - DNA, 25 bp, SARS Virus
ctattgttaacagtaaacagatcac

SEQ ID NO: 21661 - DNA, 25 bp, SARS Virus
tattgttaacaagaaacagatcaca

SEQ ID NO: 21662 - DNA, 25 bp, SARS Virus
attgttaacaatgaacagatcacaa

SEQ ID NO: 21663 - DNA, 25 bp, SARS Virus
ttgttaacaatagacagatcacaaa

SEQ ID NO: 21664 - DNA, 25 bp, SARS Virus
tgttaacaataagcagatcacaaaa

SEQ ID NO: 21665 - DNA, 25 bp, SARS Virus
gttaacaataaagagatcacaaaat

SEQ ID NO: 21666 - DNA, 25 bp, SARS Virus
ttaacaataaacggatcacaaaata

SEQ ID NO: 21667 - DNA, 25 bp, SARS Virus
taacaataaacagatcacaaaataa

SEQ ID NO: 21668 - DNA, 25 bp, SARS Virus
aacaataaacaggtcacaaaataat

SEQ ID NO: 21669 - DNA, 25 bp, SARS Virus
acaataaacagagcacaaaataatc

SEQ ID NO: 21670 - DNA, 25 bp, SARS Virus
caataaacagatgacaaaataatcg

SEQ ID NO: 21671 - DNA, 25 bp, SARS Virus
aataaacagatcgcaaaataatcgt

SEQ ID NO: 21672 - DNA, 25 bp, SARS Virus
ataaacagatcagaaaataatcgtg

SEQ ID NO: 21673 - DNA, 25 bp, SARS Virus
taaacagatcacgaaataatcgtga

SEQ ID NO: 21674 - DNA, 25 bp, SARS Virus
aaacagatcacagaataatcgtgaa

SEQ ID NO: 21675 - DNA, 25 bp, SARS Virus
aacagatcacaagataatcgtgaag

SEQ ID NO: 21676 - DNA, 25 bp, SARS Virus
acagatcacaaagtaatcgtgaagt

SEQ ID NO: 21677 - DNA, 25 bp, SARS Virus
cagatcacaaaagaatcgtgaagtt

SEQ ID NO: 21678 - DNA, 25 bp, SARS Virus
agatcacaaaatgatcgtgaagttg

SEQ ID NO: 21679 - DNA, 25 bp, SARS Virus
gatcacaaaatagtcgtgaagttgt

SEQ ID NO: 21680 - DNA, 25 bp, SARS Virus
atcacaaaataagcgtgaagttgtc

SEQ ID NO: 21681 - DNA, 25 bp, SARS Virus
tcacaaaataatggtgaagttgtcg

SEQ ID NO: 21682 - DNA, 25 bp, SARS Virus
cacaaaataatcgtgaagttgtcga

SEQ ID NO: 21683 - DNA, 25 bp, SARS Virus
acaaaataatcgggaagttgtcgaa

SEQ ID NO: 21684 - DNA, 25 bp, SARS Virus
caaaataatcgtgaagttgtcgaac

SEQ ID NO: 21685 - DNA, 25 bp, SARS Virus
aaaataatcgtggagttgtcgaact

SEQ ID NO: 21686 - DNA, 25 bp, SARS Virus
aaataatcgtgaggttgtcgaactt

SEQ ID NO: 21687 - DNA, 25 bp, SARS Virus
aataatcgtgaagttgtcgaacttc

SEQ ID NO: 21688 - DNA, 25 bp, SARS Virus
ataatcgtgaaggtgtcgaacttca

SEQ ID NO: 21689 - DNA, 25 bp, SARS Virus
taatcgtgaagtggtcgaacttcag

SEQ ID NO: 21690 - DNA, 25 bp, SARS Virus
aatcgtgaagttgtcgaacttcagt

SEQ ID NO: 21691 - DNA, 25 bp, SARS Virus
atcgtgaagttggcgaacttcagtt

SEQ ID NO: 21692 - DNA, 25 bp, SARS Virus
tcgtgaagttgtggaacttcagttt

SEQ ID NO: 21693 - DNA, 25 bp, SARS Virus
cgtgaagttgtcgaacttcagttta

SEQ ID NO: 21694 - DNA, 25 bp, SARS Virus
gtgaagttgtcggacttcagtttaa

SEQ ID NO: 21695 - DNA, 25 bp, SARS Virus
tgaagttgtcgagcttcagtttaag

SEQ ID NO: 21696 - DNA, 25 bp, SARS Virus
gaagttgtcgaagttcagtttaagt

SEQ ID NO: 21697 - DNA, 25 bp, SARS Virus
aagttgtcgaacgtcagtttaagtt

SEQ ID NO: 21698 - DNA, 25 bp, SARS Virus
agttgtcgaactgcagtttaagtta

SEQ ID NO: 21699 - DNA, 25 bp, SARS Virus
gttgtcgaacttgagtttaagttac

SEQ ID NO: 21700 - DNA, 25 bp, SARS Virus
ttgtcgaacttcggtttaagttacg

SEQ ID NO: 21701 - DNA, 25 bp, SARS Virus
tgtcgaacttcagtttaagttacgt

SEQ ID NO: 21702 - DNA, 25 bp, SARS Virus
gtcgaacttcaggttaagttacgtg

SEQ ID NO: 21703 - DNA, 25 bp, SARS Virus
tcgaacttcagtgtaagttacgtgg

SEQ ID NO: 21704 - DNA, 25 bp, SARS Virus
cgaacttcagttgaagttacgtggt

SEQ ID NO: 21705 - DNA, 25 bp, SARS Virus
gaacttcagtttgagttacgtggtc

SEQ ID NO: 21706 - DNA, 25 bp, SARS Virus
aacttcagtttaggttacgtggtcg

SEQ ID NO: 21707 - DNA, 25 bp, SARS Virus
acttcagtttaagttacgtggtcgt

SEQ ID NO: 21708 - DNA, 25 bp, SARS Virus
cttcagtttaaggtacgtggtcgtg

SEQ ID NO: 21709 - DNA, 25 bp, SARS Virus
ttcagtttaagtgacgtggtcgtga

SEQ ID NO: 21710 - DNA, 25 bp, SARS Virus
tcagtttaagttgcgtggtcgtgaa

SEQ ID NO: 21711 - DNA, 25 bp, SARS Virus
cagtttaagttaggtggtcgtgaag

SEQ ID NO: 21712 - DNA, 25 bp, SARS Virus
agtttaagttacgtggtcgtgaagt

SEQ ID NO: 21713 - DNA, 25 bp, SARS Virus
gtttaagttacggggtcgtgaagtt

SEQ ID NO: 21714 - DNA, 25 bp, SARS Virus
tttaagttacgtggtcgtgaagttc

SEQ ID NO: 21715 - DNA, 25 bp, SARS Virus
ttaagttacgtggtcgtgaagttct

SEQ ID NO: 21716 - DNA, 25 bp, SARS Virus
taagttacgtgggcgtgaagttctc

SEQ ID NO: 21717 - DNA, 25 bp, SARS Virus
aagttacgtggtggtgaagttctcc

SEQ ID NO: 21718 - DNA, 25 bp, SARS Virus
agttacgtggtcgtgaagttctccg

SEQ ID NO: 21719 - DNA, 25 bp, SARS Virus
gttacgtggtcgggaagttctccga

SEQ ID NO: 21720 - DNA, 25 bp, SARS Virus
ttacgtggtcgtgaagttctccgaa

SEQ ID NO: 21721 - DNA, 25 bp, SARS Virus
tacgtggtcgtggagttctccgaat

SEQ ID NO: 21722 - DNA, 25 bp, SARS Virus
acgtggtcgtgaggttctccgaata

SEQ ID NO: 21723 - DNA, 25 bp, SARS Virus
cgtggtcgtgaagttctccgaataa

SEQ ID NO: 21724 - DNA, 25 bp, SARS Virus
gtggtcgtgaaggtctccgaataat

SEQ ID NO: 21725 - DNA, 25 bp, SARS Virus
tggtcgtgaagtgctccgaataata

SEQ ID NO: 21726 - DNA, 25 bp, SARS Virus
ggtcgtgaagttgtccgaataatat

SEQ ID NO: 21727 - DNA, 25 bp, SARS Virus
gtcgtgaagttcgccgaataatatc

SEQ ID NO: 21728 - DNA, 25 bp, SARS Virus
tcgtgaagttctgcgaataatatct

SEQ ID NO: 21729 - DNA, 25 bp, SARS Virus
cgtgaagttctcggaataatatctc

SEQ ID NO: 21730 - DNA, 25 bp, SARS Virus
gtgaagttctccgaataatatctcg

SEQ ID NO: 21731 - DNA, 25 bp, SARS Virus
tgaagttctccggataatatctcgg

SEQ ID NO: 21732 - DNA, 25 bp, SARS Virus
gaagttctccgagtaatatctcggg

SEQ ID NO: 21733 - DNA, 25 bp, SARS Virus
aagttctccgaagaatatctcgggc

SEQ ID NO: 21734 - DNA, 25 bp, SARS Virus
agttctccgaatgatatctcgggca

SEQ ID NO: 21735 - DNA, 25 bp, SARS Virus
gttctccgaatagtatctcgggcac

SEQ ID NO: 21736 - DNA, 25 bp, SARS Virus
ttctccgaataagatctcgggcacg

SEQ ID NO: 21737 - DNA, 25 bp, SARS Virus
tctccgaataatgtctcgggcacga

SEQ ID NO: 21738 - DNA, 25 bp, SARS Virus
ctccgaataatagctcgggcacgac

SEQ ID NO: 21739 - DNA, 25 bp, SARS Virus
tccgaataatatgtcgggcacgacc

SEQ ID NO: 21740 - DNA, 25 bp, SARS Virus
ccgaataatatcgcgggcacgacca

SEQ ID NO: 21741 - DNA, 25 bp, SARS Virus
cgaataatatctggggcacgaccac

SEQ ID NO: 21742 - DNA, 25 bp, SARS Virus
gaataatatctcgggcacgaccact

SEQ ID NO: 21743 - DNA, 25 bp, SARS Virus
aataatatctcgggcacgaccacta

SEQ ID NO: 21744 - DNA, 25 bp, SARS Virus
ataatatctcgggcacgaccactac

SEQ ID NO: 21745 - DNA, 25 bp, SARS Virus
taatatctcggggacgaccactacg

SEQ ID NO: 21746 - DNA, 25 bp, SARS Virus
aatatctcgggcgcgaccactacga

SEQ ID NO: 21747 - DNA, 25 bp, SARS Virus
atatctcgggcaggaccactacgac

SEQ ID NO: 21748 - DNA, 25 bp, SARS Virus
tatctcgggcacgaccactacgacg

SEQ ID NO: 21749 - DNA, 25 bp, SARS Virus
atctcgggcacggccactacgacga

SEQ ID NO: 21750 - DNA, 25 bp, SARS Virus
tctcgggcacgagcactacgacgat

SEQ ID NO: 21751 - DNA, 25 bp, SARS Virus
ctcgggcacgacgactacgacgatt

SEQ ID NO: 21752 - DNA, 25 bp, SARS Virus
tcgggcacgaccgctacgacgattg

SEQ ID NO: 21753 - DNA, 25 bp, SARS Virus
cgggcacgaccagtacgacgattga

SEQ ID NO: 21754 - DNA, 25 bp, SARS Virus
gggcacgaccacgacgacgattgaa

SEQ ID NO: 21755 - DNA, 25 bp, SARS Virus
ggcacgaccactgcgacgattgaaa

SEQ ID NO: 21756 - DNA, 25 bp, SARS Virus
gcacgaccactaggacgattgaaaa

SEQ ID NO: 21757 - DNA, 25 bp, SARS Virus
cacgaccactacgacgattgaaaac

SEQ ID NO: 21758 - DNA, 25 bp, SARS Virus
acgaccactacggcgattgaaaaca

SEQ ID NO: 21759 - DNA, 25 bp, SARS Virus
cgaccactacgaggattgaaaacac

SEQ ID NO: 21760 - DNA, 25 bp, SARS Virus
gaccactacgacgattgaaaacacg

SEQ ID NO: 21761 - DNA, 25 bp, SARS Virus
accactacgacggttgaaaacacgt

SEQ ID NO: 21762 - DNA, 25 bp, SARS Virus
ccactacgacgagtgaaaacacgtg

SEQ ID NO: 21763 - DNA, 25 bp, SARS Virus
cactacgacgatggaaaacacgtga

SEQ ID NO: 21764 - DNA, 25 bp, SARS Virus
actacgacgattgaaaacacgtgag

SEQ ID NO: 21765 - DNA, 25 bp, SARS Virus
ctacgacgattggaaacacgtgagt

SEQ ID NO: 21766 - DNA, 25 bp, SARS Virus
tacgacgattgagaacacgtgagta

SEQ ID NO: 21767 - DNA, 25 bp, SARS Virus
acgacgattgaagacacgtgagtat

SEQ ID NO: 21768 - DNA, 25 bp, SARS Virus
cgacgattgaaagcacgtgagtatg

SEQ ID NO: 21769 - DNA, 25 bp, SARS Virus
gacgattgaaaagacgtgagtatga

SEQ ID NO: 21770 - DNA, 25 bp, SARS Virus
acgattgaaaacgcgtgagtatgag

SEQ ID NO: 21771 - DNA, 25 bp, SARS Virus
cgattgaaaacaggtgagtatgagc

SEQ ID NO: 21772 - DNA, 25 bp, SARS Virus
gattgaaaacacgtgagtatgagcg

SEQ ID NO: 21773 - DNA, 25 bp, SARS Virus
attgaaaacacgggagtatgagcga

SEQ ID NO: 21774 - DNA, 25 bp, SARS Virus
ttgaaaacacgtgagtatgagcgaa

SEQ ID NO: 21775 - DNA, 25 bp, SARS Virus
tgaaaacacgtgggtatgagcgaat

SEQ ID NO: 21776 - DNA, 25 bp, SARS Virus
gaaaacacgtgagtatgagcgaatg

SEQ ID NO: 21777 - DNA, 25 bp, SARS Virus
aaaacacgtgaggatgagcgaatgt

SEQ ID NO: 21778 - DNA, 25 bp, SARS Virus
aaacacgtgagtgtgagcgaatgtc

SEQ ID NO: 21779 - DNA, 25 bp, SARS Virus
aacacgtgagtaggagcgaatgtca

SEQ ID NO: 21780 - DNA, 25 bp, SARS Virus
acacgtgagtatgagcgaatgtcat

SEQ ID NO: 21781 - DNA, 25 bp, SARS Virus
cacgtgagtatgggcgaatgtcatt

SEQ ID NO: 21782 - DNA, 25 bp, SARS Virus
acgtgagtatgagcgaatgtcatta

SEQ ID NO: 21783 - DNA, 25 bp, SARS Virus
cgtgagtatgagggaatgtcattat

SEQ ID NO: 21784 - DNA, 25 bp, SARS Virus
gtgagtatgagcgaatgtcattatt

SEQ ID NO: 21785 - DNA, 25 bp, SARS Virus
tgagtatgagcggatgtcattattt

SEQ ID NO: 21786 - DNA, 25 bp, SARS Virus
gagtatgagcgagtgtcattatttt

SEQ ID NO: 21787 - DNA, 25 bp, SARS Virus
agtatgagcgaaggtcattattttg

SEQ ID NO: 21788 - DNA, 25 bp, SARS Virus
gtatgagcgaatgtcattattttga

SEQ ID NO: 21789 - DNA, 25 bp, SARS Virus
tatgagcgaatggcattattttgac

SEQ ID NO: 21790 - DNA, 25 bp, SARS Virus
atgagcgaatgtgattattttgaca

SEQ ID NO: 21791 - DNA, 25 bp, SARS Virus
tgagcgaatgtcgttattttgacaa

SEQ ID NO: 21792 - DNA, 25 bp, SARS Virus
gagcgaatgtcagtattttgacaac

SEQ ID NO: 21793 - DNA, 25 bp, SARS Virus
agcgaatgtcatgattttgacaacc

SEQ ID NO: 21794 - DNA, 25 bp, SARS Virus
gcgaatgtcattgttttgacaaccg

SEQ ID NO: 21795 - DNA, 25 bp, SARS Virus
cgaatgtcattagtttgacaaccgc

SEQ ID NO: 21796 - DNA, 25 bp, SARS Virus
gaatgtcattatgttgacaaccgct

SEQ ID NO: 21797 - DNA, 25 bp, SARS Virus
aatgtcattattgtgacaaccgctc

SEQ ID NO: 21798 - DNA, 25 bp, SARS Virus
atgtcattatttggacaaccgctcg

SEQ ID NO: 21799 - DNA, 25 bp, SARS Virus
tgtcattattttgacaaccgctcga

SEQ ID NO: 21800 - DNA, 25 bp, SARS Virus
gtcattattttggcaaccgctcgaa

SEQ ID NO: 21801 - DNA, 25 bp, SARS Virus
tcattattttgagaaccgctcgaac

SEQ ID NO: 21802 - DNA, 25 bp, SARS Virus
cattattttgacgaccgctcgaacc

SEQ ID NO: 21803 - DNA, 25 bp, SARS Virus
attattttgacagccgctcgaacca

SEQ ID NO: 21804 - DNA, 25 bp, SARS Virus
ttattttgacaagcgctcgaaccac

SEQ ID NO: 21805 - DNA, 25 bp, SARS Virus
tattttgacaacggctcgaaccact

SEQ ID NO: 21806 - DNA, 25 bp, SARS Virus
attttgacaaccgctcgaaccacta

SEQ ID NO: 21807 - DNA, 25 bp, SARS Virus
ttttgacaaccggtcgaaccactac

SEQ ID NO: 21808 - DNA, 25 bp, SARS Virus
tttgacaaccgcgcgaaccactaca

SEQ ID NO: 21809 - DNA, 25 bp, SARS Virus
ttgacaaccgctggaaccactacag

SEQ ID NO: 21810 - DNA, 25 bp, SARS Virus
tgacaaccgctcgaaccactacagt

SEQ ID NO: 21811 - DNA, 25 bp, SARS Virus
gacaaccgctcggaccactacagtc

SEQ ID NO: 21812 - DNA, 25 bp, SARS Virus
acaaccgctcgagccactacagtct

SEQ ID NO: 21813 - DNA, 25 bp, SARS Virus
caaccgctcgaagcactacagtctc

SEQ ID NO: 21814 - DNA, 25 bp, SARS Virus
aaccgctcgaacgactacagtctct

SEQ ID NO: 21815 - DNA, 25 bp, SARS Virus
accgctcgaaccgctacagtctctt

SEQ ID NO: 21816 - DNA, 25 bp, SARS Virus
ccgctcgaaccagtacagtctcttt

SEQ ID NO: 21817 - DNA, 25 bp, SARS Virus
cgctcgaaccacgacagtctctttg

SEQ ID NO: 21818 - DNA, 25 bp, SARS Virus
gctcgaaccactgcagtctctttga

SEQ ID NO: 21819 - DNA, 25 bp, SARS Virus
ctcgaaccactagagtctctttgat

SEQ ID NO: 21820 - DNA, 25 bp, SARS Virus
tcgaaccactacggtctctttgata

SEQ ID NO: 21821 - DNA, 25 bp, SARS Virus
cgaaccactacagtctctttgatac

SEQ ID NO: 21822 - DNA, 25 bp, SARS Virus
gaaccactacaggctctttgatact

SEQ ID NO: 21823 - DNA, 25 bp, SARS Virus
aaccactacagtgtctttgatactg

SEQ ID NO: 21824 - DNA, 25 bp, SARS Virus
accactacagtcgctttgatactgg

SEQ ID NO: 21825 - DNA, 25 bp, SARS Virus
ccactacagtctgtttgatactggg

SEQ ID NO: 21826 - DNA, 25 bp, SARS Virus
cactacagtctcgttgatactgggt

SEQ ID NO: 21827 - DNA, 25 bp, SARS Virus
actacagtctctgtgatactgggta

SEQ ID NO: 21828 - DNA, 25 bp, SARS Virus
ctacagtctcttggatactgggtag

SEQ ID NO: 21829 - DNA, 25 bp, SARS Virus
tacagtctctttgatactgggtaga

SEQ ID NO: 21830 - DNA, 25 bp, SARS Virus
acagtctctttggtactgggtagaa

SEQ ID NO: 21831 - DNA, 25 bp, SARS Virus
cagtctctttgagactgggtagaag

SEQ ID NO: 21832 - DNA, 25 bp, SARS Virus
agtctctttgatgctgggtagaaga

SEQ ID NO: 21833 - DNA, 25 bp, SARS Virus
gtctctttgatagtgggtagaagat

SEQ ID NO: 21834 - DNA, 25 bp, SARS Virus
tctctttgatacggggtagaagatg

SEQ ID NO: 21835 - DNA, 25 bp, SARS Virus
ctctttgatactgggtagaagatgt

SEQ ID NO: 21836 - DNA, 25 bp, SARS Virus
tctttgatactgggtagaagatgtc

SEQ ID NO: 21837 - DNA, 25 bp, SARS Virus
ctttgatactgggtagaagatgtcg

SEQ ID NO: 21838 - DNA, 25 bp, SARS Virus
tttgatactggggagaagatgtcgt

SEQ ID NO: 21839 - DNA, 25 bp, SARS Virus
ttgatactgggtggaagatgtcgta

SEQ ID NO: 21840 - DNA, 25 bp, SARS Virus
tgatactgggtagaagatgtcgtac

SEQ ID NO: 21841 - DNA, 25 bp, SARS Virus
gatactgggtaggagatgtcgtacg

SEQ ID NO: 21842 - DNA, 25 bp, SARS Virus
atactgggtagaggatgtcgtacga

SEQ ID NO: 21843 - DNA, 25 bp, SARS Virus
tactgggtagaagatgtcgtacgat

SEQ ID NO: 21844 - DNA, 25 bp, SARS Virus
actgggtagaaggtgtcgtacgatt

SEQ ID NO: 21845 - DNA, 25 bp, SARS Virus
ctgggtagaagaggtcgtacgatta

SEQ ID NO: 21846 - DNA, 25 bp, SARS Virus
tgggtagaagatgtcgtacgattaa

SEQ ID NO: 21847 - DNA, 25 bp, SARS Virus
gggtagaagatggcgtacgattaaa

SEQ ID NO: 21848 - DNA, 25 bp, SARS Virus
ggtagaagatgtggtacgattaaac

SEQ ID NO: 21849 - DNA, 25 bp, SARS Virus
gtagaagatgtcgtacgattaaacc

SEQ ID NO: 21850 - DNA, 25 bp, SARS Virus
tagaagatgtcggacgattaaacct

SEQ ID NO: 21851 - DNA, 25 bp, SARS Virus
agaagatgtcgtgcgattaaacctt

SEQ ID NO: 21852 - DNA, 25 bp, SARS Virus
gaagatgtcgtaggattaaacctta

SEQ ID NO: 21853 - DNA, 25 bp, SARS Virus
aagatgtcgtacgattaaaccttag

SEQ ID NO: 21854 - DNA, 25 bp, SARS Virus
agatgtcgtacggttaaaccttaga

SEQ ID NO: 21855 - DNA, 25 bp, SARS Virus
gatgtcgtacgagtaaaccttagac

SEQ ID NO: 21856 - DNA, 25 bp, SARS Virus
atgtcgtacgatgaaaccttagacg

SEQ ID NO: 21857 - DNA, 25 bp, SARS Virus
tgtcgtacgattgaaccttagacgt

SEQ ID NO: 21858 - DNA, 25 bp, SARS Virus
gtcgtacgattagaccttagacgtt

SEQ ID NO: 21859 - DNA, 25 bp, SARS Virus
tcgtacgattaagccttagacgttt

SEQ ID NO: 21860 - DNA, 25 bp, SARS Virus
cgtacgattaaagcttagacgtttc

SEQ ID NO: 21861 - DNA, 25 bp, SARS Virus
gtacgattaaacgttagacgtttcg

SEQ ID NO: 21862 - DNA, 25 bp, SARS Virus
tacgattaaaccgtagacgtttcgc

SEQ ID NO: 21863 - DNA, 25 bp, SARS Virus
acgattaaacctgagacgtttcgct

SEQ ID NO: 21864 - DNA, 25 bp, SARS Virus
cgattaaaccttggacgtttcgctc

SEQ ID NO: 21865 - DNA, 25 bp, SARS Virus
gattaaaccttagacgtttcgctca

SEQ ID NO: 21866 - DNA, 25 bp, SARS Virus
attaaaccttaggcgtttcgctcaa

SEQ ID NO: 21867 - DNA, 25 bp, SARS Virus
ttaaaccttagaggtttcgctcaag

SEQ ID NO: 21868 - DNA, 25 bp, SARS Virus
taaaccttagacgtttcgctcaaga

SEQ ID NO: 21869 - DNA, 25 bp, SARS Virus
aaaccttagacggttcgctcaagaa

SEQ ID NO: 21870 - DNA, 25 bp, SARS Virus
aaccttagacgtgtcgctcaagaat

SEQ ID NO: 21871 - DNA, 25 bp, SARS Virus
accttagacgttgcgctcaagaatt

SEQ ID NO: 21872 - DNA, 25 bp, SARS Virus
ccttagacgtttggctcaagaatta

SEQ ID NO: 21873 - DNA, 25 bp, SARS Virus
cttagacgtttcgctcaagaattac

SEQ ID NO: 21874 - DNA, 25 bp, SARS Virus
ttagacgtttcggtcaagaattaca

SEQ ID NO: 21875 - DNA, 25 bp, SARS Virus
tagacgtttcgcgcaagaattacac

SEQ ID NO: 21876 - DNA, 25 bp, SARS Virus
agacgtttcgctgaagaattacacc

SEQ ID NO: 21877 - DNA, 25 bp, SARS Virus
gacgtttcgctcgagaattacacca

SEQ ID NO: 21878 - DNA, 25 bp, SARS Virus
acgtttcgctcaggaattacaccac

SEQ ID NO: 21879 - DNA, 25 bp, SARS Virus
cgtttcgctcaagaattacaccaca

SEQ ID NO: 21880 - DNA, 25 bp, SARS Virus
gtttcgctcaaggattacaccacac

SEQ ID NO: 21881 - DNA, 25 bp, SARS Virus
tttcgctcaagagttacaccacaca

SEQ ID NO: 21882 - DNA, 25 bp, SARS Virus
ttcgctcaagaagtacaccacacat

SEQ ID NO: 21883 - DNA, 25 bp, SARS Virus
tcgctcaagaatgacaccacacatt

SEQ ID NO: 21884 - DNA, 25 bp, SARS Virus
cgctcaagaattgcaccacacattt

SEQ ID NO: 21885 - DNA, 25 bp, SARS Virus
gctcaagaattagaccacacatttg

SEQ ID NO: 21886 - DNA, 25 bp, SARS Virus
ctcaagaattacgccacacatttgt

SEQ ID NO: 21887 - DNA, 25 bp, SARS Virus
tcaagaattacagcacacatttgta

SEQ ID NO: 21888 - DNA, 25 bp, SARS Virus
caagaattacacgacacatttgtaa

SEQ ID NO: 21889 - DNA, 25 bp, SARS Virus
aagaattacaccgcacatttgtaac

SEQ ID NO: 21890 - DNA, 25 bp, SARS Virus
agaattacaccagacatttgtaaca

SEQ ID NO: 21891 - DNA, 25 bp, SARS Virus
gaattacaccacgcatttgtaacac

SEQ ID NO: 21892 - DNA, 25 bp, SARS Virus
aattacaccacagatttgtaacacc

SEQ ID NO: 21893 - DNA, 25 bp, SARS Virus
attacaccacacgtttgtaacacca

SEQ ID NO: 21894 - DNA, 25 bp, SARS Virus
ttacaccacacagttgtaacaccag

SEQ ID NO: 21895 - DNA, 25 bp, SARS Virus
tacaccacacatgtgtaacaccagt

SEQ ID NO: 21896 - DNA, 25 bp, SARS Virus
acaccacacattggtaacaccagtc

SEQ ID NO: 21897 - DNA, 25 bp, SARS Virus
caccacacatttgtaacaccagtct

SEQ ID NO: 21898 - DNA, 25 bp, SARS Virus
accacacatttggaacaccagtctt

SEQ ID NO: 21899 - DNA, 25 bp, SARS Virus
ccacacatttgtgacaccagtcttt

SEQ ID NO: 21900 - DNA, 25 bp, SARS Virus
cacacatttgtagcaccagtctttt

SEQ ID NO: 21901 - DNA, 25 bp, SARS Virus
acacatttgtaagaccagtcttttg

SEQ ID NO: 21902 - DNA, 25 bp, SARS Virus
cacatttgtaacgccagtcttttga

SEQ ID NO: 21903 - DNA, 25 bp, SARS Virus
acatttgtaacagcagtcttttgat

SEQ ID NO: 21904 - DNA, 25 bp, SARS Virus
catttgtaacacgagtcttttgatg

SEQ ID NO: 21905 - DNA, 25 bp, SARS Virus
atttgtaacaccggtcttttgatga

SEQ ID NO: 21906 - DNA, 25 bp, SARS Virus
tttgtaacaccagtcttttgatgat

SEQ ID NO: 21907 - DNA, 25 bp, SARS Virus
ttgtaacaccaggcttttgatgatg

SEQ ID NO: 21908 - DNA, 25 bp, SARS Virus
tgtaacaccagtgttttgatgatgg

SEQ ID NO: 21909 - DNA, 25 bp, SARS Virus
gtaacaccagtcgtttgatgatgga

SEQ ID NO: 21910 - DNA, 25 bp, SARS Virus
taacaccagtctgttgatgatggaa

SEQ ID NO: 21911 - DNA, 25 bp, SARS Virus
aacaccagtcttgtgatgatggaat

SEQ ID NO: 21912 - DNA, 25 bp, SARS Virus
acaccagtctttggatgatggaatt

SEQ ID NO: 21913 - DNA, 25 bp, SARS Virus
caccagtcttttgatgatggaattg

SEQ ID NO: 21914 - DNA, 25 bp, SARS Virus
accagtcttttggtgatggaattgc

SEQ ID NO: 21915 - DNA, 25 bp, SARS Virus
ccagtcttttgaggatggaattgcc

SEQ ID NO: 21916 - DNA, 25 bp, SARS Virus
cagtcttttgatgatggaattgccc

SEQ ID NO: 21917 - DNA, 25 bp, SARS Virus
agtcttttgatggtggaattgccca

SEQ ID NO: 21918 - DNA, 25 bp, SARS Virus
gtcttttgatgagggaattgcccac

SEQ ID NO: 21919 - DNA, 25 bp, SARS Virus
tcttttgatgatggaattgcccaca

SEQ ID NO: 21920 - DNA, 25 bp, SARS Virus
cttttgatgatggaattgcccacat

SEQ ID NO: 21921 - DNA, 25 bp, SARS Virus
ttttgatgatgggattgcccacatc

SEQ ID NO: 21922 - DNA, 25 bp, SARS Virus
tttgatgatggagttgcccacatct

SEQ ID NO: 21923 - DNA, 25 bp, SARS Virus
ttgatgatggaagtgcccacatctt

SEQ ID NO: 21924 - DNA, 25 bp, SARS Virus
tgatgatggaatggcccacatcttc

SEQ ID NO: 21925 - DNA, 25 bp, SARS Virus
gatgatggaattgcccacatcttcg

SEQ ID NO: 21926 - DNA, 25 bp, SARS Virus
atgatggaattggccacatcttcga

SEQ ID NO: 21927 - DNA, 25 bp, SARS Virus
tgatggaattgcgcacatcttcgac

SEQ ID NO: 21928 - DNA, 25 bp, SARS Virus
gatggaattgccgacatcttcgaca

SEQ ID NO: 21929 - DNA, 25 bp, SARS Virus
atggaattgcccgcatcttcgacac

SEQ ID NO: 21930 - DNA, 25 bp, SARS Virus
tggaattgcccagatcttcgacact

SEQ ID NO: 21931 - DNA, 25 bp, SARS Virus
ggaattgcccacgtcttcgacacta

SEQ ID NO: 21932 - DNA, 25 bp, SARS Virus
gaattgcccacagcttcgacactac

SEQ ID NO: 21933 - DNA, 25 bp, SARS Virus
aattgcccacatgttcgacactaca

SEQ ID NO: 21934 - DNA, 25 bp, SARS Virus
attgcccacatcgtcgacactacat

SEQ ID NO: 21935 - DNA, 25 bp, SARS Virus
ttgcccacatctgcgacactacata

SEQ ID NO: 21936 - DNA, 25 bp, SARS Virus
tgcccacatcttggacactacatat

SEQ ID NO: 21937 - DNA, 25 bp, SARS Virus
gcccacatcttcgacactacatata

SEQ ID NO: 21938 - DNA, 25 bp, SARS Virus
cccacatcttcggcactacatatac

SEQ ID NO: 21939 - DNA, 25 bp, SARS Virus
ccacatcttcgagactacatatacc

SEQ ID NO: 21940 - DNA, 25 bp, SARS Virus
cacatcttcgacgctacatataccc

SEQ ID NO: 21941 - DNA, 25 bp, SARS Virus
acatcttcgacagtacatataccca

SEQ ID NO: 21942 - DNA, 25 bp, SARS Virus
catcttcgacacgacatatacccat

SEQ ID NO: 21943 - DNA, 25 bp, SARS Virus
atcttcgacactgcatatacccatg

SEQ ID NO: 21944 - DNA, 25 bp, SARS Virus
tcttcgacactagatatacccatga

SEQ ID NO: 21945 - DNA, 25 bp, SARS Virus
cttcgacactacgtatacccatgag

SEQ ID NO: 21946 - DNA, 25 bp, SARS Virus
ttcgacactacagatacccatgaga

SEQ ID NO: 21947 - DNA, 25 bp, SARS Virus
tcgacactacatgtacccatgagat

SEQ ID NO: 21948 - DNA, 25 bp, SARS Virus
cgacactacatagacccatgagata

SEQ ID NO: 21949 - DNA, 25 bp, SARS Virus
gacactacatatgcccatgagatag

SEQ ID NO: 21950 - DNA, 25 bp, SARS Virus
acactacatatagccatgagataga

SEQ ID NO: 21951 - DNA, 25 bp, SARS Virus
cactacatatacgcatgagatagaa

SEQ ID NO: 21952 - DNA, 25 bp, SARS Virus
actacatataccgatgagatagaat

SEQ ID NO: 21953 - DNA, 25 bp, SARS Virus
ctacatatacccgtgagatagaata

SEQ ID NO: 21954 - DNA, 25 bp, SARS Virus
tacatatacccaggagatagaatac

SEQ ID NO: 21955 - DNA, 25 bp, SARS Virus
acatatacccatgagatagaatact

SEQ ID NO: 21956 - DNA, 25 bp, SARS Virus
catatacccatgggatagaatacta

SEQ ID NO: 21957 - DNA, 25 bp, SARS Virus
atatacccatgagatagaatactat

SEQ ID NO: 21958 - DNA, 25 bp, SARS Virus
tatacccatgaggtagaatactatt

SEQ ID NO: 21959 - DNA, 25 bp, SARS Virus
atacccatgagagagaatactatta

SEQ ID NO: 21960 - DNA, 25 bp, SARS Virus
tacccatgagatggaatactattag

SEQ ID NO: 21961 - DNA, 25 bp, SARS Virus
acccatgagatagaatactattaga

SEQ ID NO: 21962 - DNA, 25 bp, SARS Virus
cccatgagataggatactattagaa

SEQ ID NO: 21963 - DNA, 25 bp, SARS Virus
ccatgagatagagtactattagaat

SEQ ID NO: 21964 - DNA, 25 bp, SARS Virus
catgagatagaagactattagaatt

SEQ ID NO: 21965 - DNA, 25 bp, SARS Virus
atgagatagaatgctattagaattc

SEQ ID NO: 21966 - DNA, 25 bp, SARS Virus
tgagatagaatagtattagaattct

SEQ ID NO: 21967 - DNA, 25 bp, SARS Virus
gagatagaatacgattagaattctg

SEQ ID NO: 21968 - DNA, 25 bp, SARS Virus
agatagaatactgttagaattctgt

SEQ ID NO: 21969 - DNA, 25 bp, SARS Virus
gatagaatactagtagaattctgtc

SEQ ID NO: 21970 - DNA, 25 bp, SARS Virus
atagaatactatgagaattctgtcc

SEQ ID NO: 21971 - DNA, 25 bp, SARS Virus
tagaatactattggaattctgtcca

SEQ ID NO: 21972 - DNA, 25 bp, SARS Virus
agaatactattagaattctgtccac

SEQ ID NO: 21973 - DNA, 25 bp, SARS Virus
gaatactattaggattctgtccaca

SEQ ID NO: 21974 - DNA, 25 bp, SARS Virus
aatactattagagttctgtccacaa

SEQ ID NO: 21975 - DNA, 25 bp, SARS Virus
atactattagaagtctgtccacaaa

SEQ ID NO: 21976 - DNA, 25 bp, SARS Virus
tactattagaatgctgtccacaaag

SEQ ID NO: 21977 - DNA, 25 bp, SARS Virus
actattagaattgtgtccacaaagg

SEQ ID NO: 21978 - DNA, 25 bp, SARS Virus
ctattagaattcggtccacaaaggt

SEQ ID NO: 21979 - DNA, 25 bp, SARS Virus
tattagaattctgtccacaaaggta

SEQ ID NO: 21980 - DNA, 25 bp, SARS Virus
attagaattctggccacaaaggtaa

SEQ ID NO: 21981 - DNA, 25 bp, SARS Virus
ttagaattctgtgcacaaaggtaag

SEQ ID NO: 21982 - DNA, 25 bp, SARS Virus
tagaattctgtcgacaaaggtaagg

SEQ ID NO: 21983 - DNA, 25 bp, SARS Virus
agaattctgtccgcaaaggtaaggt

SEQ ID NO: 21984 - DNA, 25 bp, SARS Virus
gaattctgtccagaaaggtaaggta

SEQ ID NO: 21985 - DNA, 25 bp, SARS Virus
aattctgtccacgaaggtaaggtac

SEQ ID NO: 21986 - DNA, 25 bp, SARS Virus
attctgtccacagaggtaaggtaca

SEQ ID NO: 21987 - DNA, 25 bp, SARS Virus
ttctgtccacaagggtaaggtacac

SEQ ID NO: 21988 - DNA, 25 bp, SARS Virus
tctgtccacaaaggtaaggtacaca

SEQ ID NO: 21989 - DNA, 25 bp, SARS Virus
ctgtccacaaaggtaaggtacacac

SEQ ID NO: 21990 - DNA, 25 bp, SARS Virus
tgtccacaaagggaaggtacacaca

SEQ ID NO: 21991 - DNA, 25 bp, SARS Virus
gtccacaaaggtgaggtacacacac

SEQ ID NO: 21992 - DNA, 25 bp, SARS Virus
tccacaaaggtagggtacacacaca

SEQ ID NO: 21993 - DNA, 25 bp, SARS Virus
ccacaaaggtaaggtacacacacac

SEQ ID NO: 21994 - DNA, 25 bp, SARS Virus
cacaaaggtaaggtacacacacacc

SEQ ID NO: 21995 - DNA, 25 bp, SARS Virus
acaaaggtaagggacacacacacca

SEQ ID NO: 21996 - DNA, 25 bp, SARS Virus
caaaggtaaggtgcacacacaccag

SEQ ID NO: 21997 - DNA, 25 bp, SARS Virus
aaaggtaaggtagacacacaccagc

SEQ ID NO: 21998 - DNA, 25 bp, SARS Virus
aaggtaaggtacgcacacaccagca

SEQ ID NO: 21999 - DNA, 25 bp, SARS Virus
aggtaaggtacagacacaccagcac

SEQ ID NO: 22000 - DNA, 25 bp, SARS Virus
ggtaaggtacacgcacaccagcact

SEQ ID NO: 22001 - DNA, 25 bp, SARS Virus
gtaaggtacacagacaccagcacta

SEQ ID NO: 22002 - DNA, 25 bp, SARS Virus
taaggtacacacgcaccagcactac

SEQ ID NO: 22003 - DNA, 25 bp, SARS Virus
aaggtacacacagaccagcactacg

SEQ ID NO: 22004 - DNA, 25 bp, SARS Virus
aggtacacacacgccagcactacga

SEQ ID NO: 22005 - DNA, 25 bp, SARS Virus
ggtacacacacagcagcactacgat

SEQ ID NO: 22006 - DNA, 25 bp, SARS Virus
gtacacacacacgagcactacgatg

SEQ ID NO: 22007 - DNA, 25 bp, SARS Virus
tacacacacaccggcactacgatgt

SEQ ID NO: 22008 - DNA, 25 bp, SARS Virus
acacacacaccagcactacgatgtg

SEQ ID NO: 22009 - DNA, 25 bp, SARS Virus
cacacacaccaggactacgatgtgt

SEQ ID NO: 22010 - DNA, 25 bp, SARS Virus
acacacaccagcgctacgatgtgtt

SEQ ID NO: 22011 - DNA, 25 bp, SARS Virus
cacacaccagcagtacgatgtgtta

SEQ ID NO: 22012 - DNA, 25 bp, SARS Virus
acacaccagcacgacgatgtgttat

SEQ ID NO: 22013 - DNA, 25 bp, SARS Virus
cacaccagcactgcgatgtgttata

SEQ ID NO: 22014 - DNA, 25 bp, SARS Virus
acaccagcactaggatgtgttatag

SEQ ID NO: 22015 - DNA, 25 bp, SARS Virus
caccagcactacgatgtgttataga

SEQ ID NO: 22016 - DNA, 25 bp, SARS Virus
accagcactacggtgtgttatagat

SEQ ID NO: 22017 - DNA, 25 bp, SARS Virus
ccagcactacgaggtgttatagatc

SEQ ID NO: 22018 - DNA, 25 bp, SARS Virus
cagcactacgatgtgttatagatca

SEQ ID NO: 22019 - DNA, 25 bp, SARS Virus
agcactacgatgggttatagatcat

SEQ ID NO: 22020 - DNA, 25 bp, SARS Virus
gcactacgatgtgttatagatcatg

SEQ ID NO: 22021 - DNA, 25 bp, SARS Virus
cactacgatgtggtatagatcatgt

SEQ ID NO: 22022 - DNA, 25 bp, SARS Virus
actacgatgtgtgatagatcatgtt

SEQ ID NO: 22023 - DNA, 25 bp, SARS Virus
ctacgatgtgttgtagatcatgttg

SEQ ID NO: 22024 - DNA, 25 bp, SARS Virus
tacgatgtgttagagatcatgttgt

SEQ ID NO: 22025 - DNA, 25 bp, SARS Virus
acgatgtgttatggatcatgttgtt

SEQ ID NO: 22026 - DNA, 25 bp, SARS Virus
cgatgtgttatagatcatgttgttc

SEQ ID NO: 22027 - DNA, 25 bp, SARS Virus
gatgtgttataggtcatgttgttct

SEQ ID NO: 22028 - DNA, 25 bp, SARS Virus
atgtgttatagagcatgttgttctc

SEQ ID NO: 22029 - DNA, 25 bp, SARS Virus
tgtgttatagatgatgttgttctca

SEQ ID NO: 22030 - DNA, 25 bp, SARS Virus
gtgttatagatcgtgttgttctcag

SEQ ID NO: 22031 - DNA, 25 bp, SARS Virus
tgttatagatcaggttgttctcaga

SEQ ID NO: 22032 - DNA, 25 bp, SARS Virus
gttatagatcatgttgttctcagaa

SEQ ID NO: 22033 - DNA, 25 bp, SARS Virus
ttatagatcatggtgttctcagaag

SEQ ID NO: 22034 - DNA, 25 bp, SARS Virus
tatagatcatgtggttctcagaaga

SEQ ID NO: 22035 - DNA, 25 bp, SARS Virus
atagatcatgttgttctcagaagaa

SEQ ID NO: 22036 - DNA, 25 bp, SARS Virus
tagatcatgttggtctcagaagaaa

SEQ ID NO: 22037 - DNA, 25 bp, SARS Virus
agatcatgttgtgctcagaagaaaa

SEQ ID NO: 22038 - DNA, 25 bp, SARS Virus
gatcatgttgttgtcagaagaaaac

SEQ ID NO: 22039 - DNA, 25 bp, SARS Virus
atcatgttgttcgcagaagaaaaca

SEQ ID NO: 22040 - DNA, 25 bp, SARS Virus
tcatgttgttctgagaagaaaacaa

SEQ ID NO: 22041 - DNA, 25 bp, SARS Virus
catgttgttctcggaagaaaacaat

SEQ ID NO: 22042 - DNA, 25 bp, SARS Virus
atgttgttctcagaagaaaacaata

SEQ ID NO: 22043 - DNA, 25 bp, SARS Virus
tgttgttctcaggagaaaacaatac

SEQ ID NO: 22044 - DNA, 25 bp, SARS Virus
gttgttctcagaggaaaacaatact

SEQ ID NO: 22045 - DNA, 25 bp, SARS Virus
ttgttctcagaagaaaacaatacta

SEQ ID NO: 22046 - DNA, 25 bp, SARS Virus
tgttctcagaaggaaacaatactac

SEQ ID NO: 22047 - DNA, 25 bp, SARS Virus
gttctcagaagagaacaatactaca

SEQ ID NO: 22048 - DNA, 25 bp, SARS Virus
ttctcagaagaagacaatactacag

SEQ ID NO: 22049 - DNA, 25 bp, SARS Virus
tctcagaagaaagcaatactacaga

SEQ ID NO: 22050 - DNA, 25 bp, SARS Virus
ctcagaagaaaagaatactacagac

SEQ ID NO: 22051 - DNA, 25 bp, SARS Virus
tcagaagaaaacgatactacagacg

SEQ ID NO: 22052 - DNA, 25 bp, SARS Virus
cagaagaaaacagtactacagacgt

SEQ ID NO: 22053 - DNA, 25 bp, SARS Virus
agaagaaaacaagactacagacgtg

SEQ ID NO: 22054 - DNA, 25 bp, SARS Virus
gaagaaaacaatgctacagacgtgg

SEQ ID NO: 22055 - DNA, 25 bp, SARS Virus
aagaaaacaatagtacagacgtggt

SEQ ID NO: 22056 - DNA, 25 bp, SARS Virus
agaaaacaatacgacagacgtggtg

SEQ ID NO: 22057 - DNA, 25 bp, SARS Virus
gaaaacaatactgcagacgtggtgg

SEQ ID NO: 22058 - DNA, 25 bp, SARS Virus
aaaacaatactagagacgtggtgga

SEQ ID NO: 22059 - DNA, 25 bp, SARS Virus
aaacaatactacggacgtggtggac

SEQ ID NO: 22060 - DNA, 25 bp, SARS Virus
aacaatactacagacgtggtggacg

SEQ ID NO: 22061 - DNA, 25 bp, SARS Virus
acaatactacaggcgtggtggacga

SEQ ID NO: 22062 - DNA, 25 bp, SARS Virus
caatactacagaggtggtggacgac

SEQ ID NO: 22063 - DNA, 25 bp, SARS Virus
aatactacagacgtggtggacgact

SEQ ID NO: 22064 - DNA, 25 bp, SARS Virus
atactacagacggggtggacgactc

SEQ ID NO: 22065 - DNA, 25 bp, SARS Virus
tactacagacgtggtggacgactca

SEQ ID NO: 22066 - DNA, 25 bp, SARS Virus
actacagacgtggtggacgactcat

SEQ ID NO: 22067 - DNA, 25 bp, SARS Virus
ctacagacgtgggggacgactcata

SEQ ID NO: 22068 - DNA, 25 bp, SARS Virus
tacagacgtggtggacgactcatat

SEQ ID NO: 22069 - DNA, 25 bp, SARS Virus
acagacgtggtggacgactcatatt

SEQ ID NO: 22070 - DNA, 25 bp, SARS Virus
cagacgtggtgggcgactcatattt

SEQ ID NO: 22071 - DNA, 25 bp, SARS Virus
agacgtggtggaggactcatattta

SEQ ID NO: 22072 - DNA, 25 bp, SARS Virus
gacgtggtggacgactcatatttaa

SEQ ID NO: 22073 - DNA, 25 bp, SARS Virus
acgtggtggacggctcatatttaat

SEQ ID NO: 22074 - DNA, 25 bp, SARS Virus
cgtggtggacgagtcatatttaatg

SEQ ID NO: 22075 - DNA, 25 bp, SARS Virus
gtggtggacgacgcatatttaatgt

SEQ ID NO: 22076 - DNA, 25 bp, SARS Virus
tggtggacgactgatatttaatgtc

SEQ ID NO: 22077 - DNA, 25 bp, SARS Virus
ggtggacgactcgtatttaatgtcg

SEQ ID NO: 22078 - DNA, 25 bp, SARS Virus
gtggacgactcagatttaatgtcgt

SEQ ID NO: 22079 - DNA, 25 bp, SARS Virus
tggacgactcatgtttaatgtcgtt

SEQ ID NO: 22080 - DNA, 25 bp, SARS Virus
ggacgactcatagttaatgtcgttc

SEQ ID NO: 22081 - DNA, 25 bp, SARS Virus
gacgactcatatgtaatgtcgttcc

SEQ ID NO: 22082 - DNA, 25 bp, SARS Virus
acgactcatattgaatgtcgttcca

SEQ ID NO: 22083 - DNA, 25 bp, SARS Virus
cgactcatatttgatgtcgttccat

SEQ ID NO: 22084 - DNA, 25 bp, SARS Virus
gactcatatttagtgtcgttccatg

SEQ ID NO: 22085 - DNA, 25 bp, SARS Virus
actcatatttaaggtcgttccatgt

SEQ ID NO: 22086 - DNA, 25 bp, SARS Virus
ctcatatttaatgtcgttccatgta

SEQ ID NO: 22087 - DNA, 25 bp, SARS Virus
tcatatttaatggcgttccatgtaa

SEQ ID NO: 22088 - DNA, 25 bp, SARS Virus
catatttaatgtggttccatgtaag

SEQ ID NO: 22089 - DNA, 25 bp, SARS Virus
tggtgtgtttctttacctttaaagg

SEQ ID NO: 22090 - DNA, 25 bp, SARS Virus
ggtgtgtttctttacctttaaagga

SEQ ID NO: 22091 - DNA, 25 bp, SARS Virus
gtgtgtttcttttcctttaaaggag

SEQ ID NO: 22092 - DNA, 25 bp, SARS Virus
tgtgtttctttatctttaaaggagt

SEQ ID NO: 22093 - DNA, 25 bp, SARS Virus
gtgtttctttacttttaaaggagtt

SEQ ID NO: 22094 - DNA, 25 bp, SARS Virus
tgtttctttacctttaaaggagttc

SEQ ID NO: 22095 - DNA, 25 bp, SARS Virus
gtttctttacctttaaaggagttca

SEQ ID NO: 22096 - DNA, 25 bp, SARS Virus
tttctttacctttaaaggagttcaa

SEQ ID NO: 22097 - DNA, 25 bp, SARS Virus
ttctttaccttttaaggagttcaac

SEQ ID NO: 22098 - DNA, 25 bp, SARS Virus
tctttacctttataggagttcaacc

SEQ ID NO: 22099 - DNA, 25 bp, SARS Virus
ctttacctttaatggagttcaacca

SEQ ID NO: 22100 - DNA, 25 bp, SARS Virus
tttacctttaaatgagttcaaccac

SEQ ID NO: 22101 - DNA, 25 bp, SARS Virus
ttacctttaaagtagttcaaccacc

SEQ ID NO: 22102 - DNA, 25 bp, SARS Virus
tacctttaaaggtgttcaaccacca

SEQ ID NO: 22103 - DNA, 25 bp, SARS Virus
acctttaaaggatttcaaccaccaa

SEQ ID NO: 22104 - DNA, 25 bp, SARS Virus
cctttaaaggagttcaaccaccaaa

SEQ ID NO: 22105 - DNA, 25 bp, SARS Virus
ctttaaaggagttcaaccaccaaat

SEQ ID NO: 22106 - DNA, 25 bp, SARS Virus
tttaaaggagtttaaccaccaaatt

SEQ ID NO: 22107 - DNA, 25 bp, SARS Virus
ttaaaggagttctaccaccaaattg

SEQ ID NO: 22108 - DNA, 25 bp, SARS Virus
taaaggagttcatccaccaaattga

SEQ ID NO: 22109 - DNA, 25 bp, SARS Virus
aaaggagttcaatcaccaaattgaa

SEQ ID NO: 22110 - DNA, 25 bp, SARS Virus
aaggagttcaactaccaaattgaag

SEQ ID NO: 22111 - DNA, 25 bp, SARS Virus
aggagttcaacctccaaattgaagt

SEQ ID NO: 22112 - DNA, 25 bp, SARS Virus
ggagttcaaccatcaaattgaagtt

SEQ ID NO: 22113 - DNA, 25 bp, SARS Virus
gagttcaaccactaaattgaagtta

SEQ ID NO: 22114 - DNA, 25 bp, SARS Virus
agttcaaccacctaattgaagttaa

SEQ ID NO: 22115 - DNA, 25 bp, SARS Virus
gttcaaccaccatattgaagttaat

SEQ ID NO: 22116 - DNA, 25 bp, SARS Virus
ttcaaccaccaatttgaagttaatt

SEQ ID NO: 22117 - DNA, 25 bp, SARS Virus
tcaaccaccaaattgaagttaattt

SEQ ID NO: 22118 - DNA, 25 bp, SARS Virus
caaccaccaaattgaagttaattta

SEQ ID NO: 22119 - DNA, 25 bp, SARS Virus
aaccaccaaatttaagttaatttac

SEQ ID NO: 22120 - DNA, 25 bp, SARS Virus
accaccaaattgtagttaatttacc

SEQ ID NO: 22121 - DNA, 25 bp, SARS Virus
ccaccaaattgatgttaatttaccc

SEQ ID NO: 22122 - DNA, 25 bp, SARS Virus
caccaaattgaatttaatttacccg

SEQ ID NO: 22123 - DNA, 25 bp, SARS Virus
accaaattgaagttaatttacccga

SEQ ID NO: 22124 - DNA, 25 bp, SARS Virus
ccaaattgaagttaatttacccgac

SEQ ID NO: 22125 - DNA, 25 bp, SARS Virus
caaattgaagtttatttacccgact

SEQ ID NO: 22126 - DNA, 25 bp, SARS Virus
aaattgaagttattttacccgacta

SEQ ID NO: 22127 - DNA, 25 bp, SARS Virus
aattgaagttaatttacccgactat

SEQ ID NO: 22128 - DNA, 25 bp, SARS Virus
attgaagttaatttacccgactatt

SEQ ID NO: 22129 - DNA, 25 bp, SARS Virus
ttgaagttaatttacccgactattg

SEQ ID NO: 22130 - DNA, 25 bp, SARS Virus
tgaagttaattttcccgactattgt

SEQ ID NO: 22131 - DNA, 25 bp, SARS Virus
gaagttaatttatccgactattgtt

SEQ ID NO: 22132 - DNA, 25 bp, SARS Virus
aagttaatttactcgactattgtta

SEQ ID NO: 22133 - DNA, 25 bp, SARS Virus
agttaatttacctgactattgttaa

SEQ ID NO: 22134 - DNA, 25 bp, SARS Virus
gttaatttaccctactattgttaac

SEQ ID NO: 22135 - DNA, 25 bp, SARS Virus
ttaatttacccgtctattgttaaca

SEQ ID NO: 22136 - DNA, 25 bp, SARS Virus
taatttacccgattattgttaacaa

SEQ ID NO: 22137 - DNA, 25 bp, SARS Virus
aatttacccgactattgttaacaat

SEQ ID NO: 22138 - DNA, 25 bp, SARS Virus
atttacccgacttttgttaacaata

SEQ ID NO: 22139 - DNA, 25 bp, SARS Virus
tttacccgactattgttaacaataa

SEQ ID NO: 22140 - DNA, 25 bp, SARS Virus
ttacccgactattgttaacaataaa

SEQ ID NO: 22141 - DNA, 25 bp, SARS Virus
tacccgactatttttaacaataaac

SEQ ID NO: 22142 - DNA, 25 bp, SARS Virus
acccgactattgttaacaataaaca

SEQ ID NO: 22143 - DNA, 25 bp, SARS Virus
cccgactattgttaacaataaacag

SEQ ID NO: 22144 - DNA, 25 bp, SARS Virus
ccgactattgtttacaataaacaga

SEQ ID NO: 22145 - DNA, 25 bp, SARS Virus
cgactattgttatcaataaacagat

SEQ ID NO: 22146 - DNA, 25 bp, SARS Virus
gactattgttaataataaacagatc

SEQ ID NO: 22147 - DNA, 25 bp, SARS Virus
actattgttaactataaacagatca

SEQ ID NO: 22148 - DNA, 25 bp, SARS Virus
ctattgttaacattaaacagatcac

SEQ ID NO: 22149 - DNA, 25 bp, SARS Virus
tattgttaacaataaacagatcaca

SEQ ID NO: 22150 - DNA, 25 bp, SARS Virus
attgttaacaattaacagatcacaa

SEQ ID NO: 22151 - DNA, 25 bp, SARS Virus
ttgttaacaatatacagatcacaaa

SEQ ID NO: 22152 - DNA, 25 bp, SARS Virus
tgttaacaataatcagatcacaaaa

SEQ ID NO: 22153 - DNA, 25 bp, SARS Virus
gttaacaataaatagatcacaaaat

SEQ ID NO: 22154 - DNA, 25 bp, SARS Virus
ttaacaataaactgatcacaaaata

SEQ ID NO: 22155 - DNA, 25 bp, SARS Virus
taacaataaacatatcacaaaataa

SEQ ID NO: 22156 - DNA, 25 bp, SARS Virus
aacaataaacagttcacaaaataat

SEQ ID NO: 22157 - DNA, 25 bp, SARS Virus
acaataaacagatcacaaaataatc

SEQ ID NO: 22158 - DNA, 25 bp, SARS Virus
caataaacagattacaaaataatcg

SEQ ID NO: 22159 - DNA, 25 bp, SARS Virus
aataaacagatctcaaaataatcgt

SEQ ID NO: 22160 - DNA, 25 bp, SARS Virus
ataaacagatcataaaataatcgtg

SEQ ID NO: 22161 - DNA, 25 bp, SARS Virus
taaacagatcactaaataatcgtga

SEQ ID NO: 22162 - DNA, 25 bp, SARS Virus
aaacagatcacataataatcgtgaa

SEQ ID NO: 22163 - DNA, 25 bp, SARS Virus
aacagatcacaatataatcgtgaag

SEQ ID NO: 22164 - DNA, 25 bp, SARS Virus
acagatcacaaattaatcgtgaagt

SEQ ID NO: 22165 - DNA, 25 bp, SARS Virus
cagatcacaaaataatcgtgaagtt

SEQ ID NO: 22166 - DNA, 25 bp, SARS Virus
agatcacaaaattatcgtgaagttg

SEQ ID NO: 22167 - DNA, 25 bp, SARS Virus
gatcacaaaatattcgtgaagttgt

SEQ ID NO: 22168 - DNA, 25 bp, SARS Virus
atcacaaaataatcgtgaagttgtc

SEQ ID NO: 22169 - DNA, 25 bp, SARS Virus
tcacaaaataattgtgaagttgtcg

SEQ ID NO: 22170 - DNA, 25 bp, SARS Virus
cacaaaataatcttgaagttgtcga

SEQ ID NO: 22171 - DNA, 25 bp, SARS Virus
acaaaataatcgtgaagttgtcgaa

SEQ ID NO: 22172 - DNA, 25 bp, SARS Virus
caaaataatcgttaagttgtcgaac

SEQ ID NO: 22173 - DNA, 25 bp, SARS Virus
aaaataatcgtgtagttgtcgaact

SEQ ID NO: 22174 - DNA, 25 bp, SARS Virus
aaataatcgtgatgttgtcgaactt

SEQ ID NO: 22175 - DNA, 25 bp, SARS Virus
aataatcgtgaatttgtcgaacttc

SEQ ID NO: 22176 - DNA, 25 bp, SARS Virus
ataatcgtgaagttgtcgaacttca

SEQ ID NO: 22177 - DNA, 25 bp, SARS Virus
taatcgtgaagttgtcgaacttcag

SEQ ID NO: 22178 - DNA, 25 bp, SARS Virus
aatcgtgaagttttcgaacttcagt

SEQ ID NO: 22179 - DNA, 25 bp, SARS Virus
atcgtgaagttgtcgaacttcagtt

SEQ ID NO: 22180 - DNA, 25 bp, SARS Virus
tcgtgaagttgttgaacttcagttt

SEQ ID NO: 22181 - DNA, 25 bp, SARS Virus
cgtgaagttgtctaacttcagttta

SEQ ID NO: 22182 - DNA, 25 bp, SARS Virus
gtgaagttgtcgtacttcagtttaa

SEQ ID NO: 22183 - DNA, 25 bp, SARS Virus
tgaagttgtcgatcttcagtttaag

SEQ ID NO: 22184 - DNA, 25 bp, SARS Virus
gaagttgtcgaatttcagtttaagt

SEQ ID NO: 22185 - DNA, 25 bp, SARS Virus
aagttgtcgaacttcagtttaagtt

SEQ ID NO: 22186 - DNA, 25 bp, SARS Virus
agttgtcgaacttcagtttaagtta

SEQ ID NO: 22187 - DNA, 25 bp, SARS Virus
gttgtcgaactttagtttaagttac

SEQ ID NO: 22188 - DNA, 25 bp, SARS Virus
ttgtcgaacttctgtttaagttacg

SEQ ID NO: 22189 - DNA, 25 bp, SARS Virus
tgtcgaacttcattttaagttacgt

SEQ ID NO: 22190 - DNA, 25 bp, SARS Virus
gtcgaacttcagtttaagttacgtg

SEQ ID NO: 22191 - DNA, 25 bp, SARS Virus
tcgaacttcagtttaagttacgtgg

SEQ ID NO: 22192 - DNA, 25 bp, SARS Virus
cgaacttcagtttaagttacgtggt

SEQ ID NO: 22193 - DNA, 25 bp, SARS Virus
gaacttcagttttagttacgtggtc

SEQ ID NO: 22194 - DNA, 25 bp, SARS Virus
aacttcagtttatgttacgtggtcg

SEQ ID NO: 22195 - DNA, 25 bp, SARS Virus
acttcagtttaatttacgtggtcgt

SEQ ID NO: 22196 - DNA, 25 bp, SARS Virus
cttcagtttaagttacgtggtcgtg

SEQ ID NO: 22197 - DNA, 25 bp, SARS Virus
ttcagtttaagttacgtggtcgtga

SEQ ID NO: 22198 - DNA, 25 bp, SARS Virus
tcagtttaagtttcgtggtcgtgaa

SEQ ID NO: 22199 - DNA, 25 bp, SARS Virus
cagtttaagttatgtggtcgtgaag

SEQ ID NO: 22200 - DNA, 25 bp, SARS Virus
agtttaagttacttggtcgtgaagt

SEQ ID NO: 22201 - DNA, 25 bp, SARS Virus
gtttaagttacgtggtcgtgaagtt

SEQ ID NO: 22202 - DNA, 25 bp, SARS Virus
tttaagttacgttgtcgtgaagttc

SEQ ID NO: 22203 - DNA, 25 bp, SARS Virus
ttaagttacgtgttcgtgaagttct

SEQ ID NO: 22204 - DNA, 25 bp, SARS Virus
taagttacgtggtcgtgaagttctc

SEQ ID NO: 22205 - DNA, 25 bp, SARS Virus
aagttacgtggttgtgaagttctcc

SEQ ID NO: 22206 - DNA, 25 bp, SARS Virus
agttacgtggtcttgaagttctccg

SEQ ID NO: 22207 - DNA, 25 bp, SARS Virus
gttacgtggtcgtgaagttctccga

SEQ ID NO: 22208 - DNA, 25 bp, SARS Virus
ttacgtggtcgttaagttctccgaa

SEQ ID NO: 22209 - DNA, 25 bp, SARS Virus
tacgtggtcgtgtagttctccgaat

SEQ ID NO: 22210 - DNA, 25 bp, SARS Virus
acgtggtcgtgatgttctccgaata

SEQ ID NO: 22211 - DNA, 25 bp, SARS Virus
cgtggtcgtgaatttctccgaataa

SEQ ID NO: 22212 - DNA, 25 bp, SARS Virus
gtggtcgtgaagttctccgaataat

SEQ ID NO: 22213 - DNA, 25 bp, SARS Virus
tggtcgtgaagttctccgaataata

SEQ ID NO: 22214 - DNA, 25 bp, SARS Virus
ggtcgtgaagttttccgaataatat

SEQ ID NO: 22215 - DNA, 25 bp, SARS Virus
gtcgtgaagttctccgaataatatc

SEQ ID NO: 22216 - DNA, 25 bp, SARS Virus
tcgtgaagttcttcgaataatatct

SEQ ID NO: 22217 - DNA, 25 bp, SARS Virus
cgtgaagttctctgaataatatctc

SEQ ID NO: 22218 - DNA, 25 bp, SARS Virus
gtgaagttctcctaataatatctcg

SEQ ID NO: 22219 - DNA, 25 bp, SARS Virus
tgaagttctccgtataatatctcgg

SEQ ID NO: 22220 - DNA, 25 bp, SARS Virus
gaagttctccgattaatatctcggg

SEQ ID NO: 22221 - DNA, 25 bp, SARS Virus
aagttctccgaataatatctcgggc

SEQ ID NO: 22222 - DNA, 25 bp, SARS Virus
agttctccgaattatatctcgggca

SEQ ID NO: 22223 - DNA, 25 bp, SARS Virus
gttctccgaatattatctcgggcac

SEQ ID NO: 22224 - DNA, 25 bp, SARS Virus
ttctccgaataatatctcgggcacg

SEQ ID NO: 22225 - DNA, 25 bp, SARS Virus
tctccgaataatttctcgggcacga

SEQ ID NO: 22226 - DNA, 25 bp, SARS Virus
ctccgaataatatctcgggcacgac

SEQ ID NO: 22227 - DNA, 25 bp, SARS Virus
tccgaataatatttcgggcacgacc

SEQ ID NO: 22228 - DNA, 25 bp, SARS Virus
ccgaataatatctcgggcacgacca

SEQ ID NO: 22229 - DNA, 25 bp, SARS Virus
cgaataatatcttgggcacgaccac

SEQ ID NO: 22230 - DNA, 25 bp, SARS Virus
gaataatatctctggcacgaccact

SEQ ID NO: 22231 - DNA, 25 bp, SARS Virus
aataatatctcgtgcacgaccacta

SEQ ID NO: 22232 - DNA, 25 bp, SARS Virus
ataatatctcggtcacgaccactac

SEQ ID NO: 22233 - DNA, 25 bp, SARS Virus
taatatctcgggtacgaccactacg

SEQ ID NO: 22234 - DNA, 25 bp, SARS Virus
aatatctcgggctcgaccactacga

SEQ ID NO: 22235 - DNA, 25 bp, SARS Virus
atatctcgggcatgaccactacgac

SEQ ID NO: 22236 - DNA, 25 bp, SARS Virus
tatctcgggcactaccactacgacg

SEQ ID NO: 22237 - DNA, 25 bp, SARS Virus
atctcgggcacgtccactacgacga

SEQ ID NO: 22238 - DNA, 25 bp, SARS Virus
tctcgggcacgatcactacgacgat

SEQ ID NO: 22239 - DNA, 25 bp, SARS Virus
ctcgggcacgactactacgacgatt

SEQ ID NO: 22240 - DNA, 25 bp, SARS Virus
tcgggcacgacctctacgacgattg

SEQ ID NO: 22241 - DNA, 25 bp, SARS Virus
cgggcacgaccattacgacgattga

SEQ ID NO: 22242 - DNA, 25 bp, SARS Virus
gggcacgaccactacgacgattgaa

SEQ ID NO: 22243 - DNA, 25 bp, SARS Virus
ggcacgaccacttcgacgattgaaa

SEQ ID NO: 22244 - DNA, 25 bp, SARS Virus
gcacgaccactatgacgattgaaaa

SEQ ID NO: 22245 - DNA, 25 bp, SARS Virus
cacgaccactactacgattgaaaac

SEQ ID NO: 22246 - DNA, 25 bp, SARS Virus
acgaccactacgtcgattgaaaaca

SEQ ID NO: 22247 - DNA, 25 bp, SARS Virus
cgaccactacgatgattgaaaacac

SEQ ID NO: 22248 - DNA, 25 bp, SARS Virus
gaccactacgactattgaaaacacg

SEQ ID NO: 22249 - DNA, 25 bp, SARS Virus
accactacgacgtttgaaaacacgt

SEQ ID NO: 22250 - DNA, 25 bp, SARS Virus
ccactacgacgattgaaaacacgtg

SEQ ID NO: 22251 - DNA, 25 bp, SARS Virus
cactacgacgattgaaaacacgtga

SEQ ID NO: 22252 - DNA, 25 bp, SARS Virus
actacgacgatttaaaacacgtgag

SEQ ID NO: 22253 - DNA, 25 bp, SARS Virus
ctacgacgattgtaaacacgtgagt

SEQ ID NO: 22254 - DNA, 25 bp, SARS Virus
tacgacgattgataacacgtgagta

SEQ ID NO: 22255 - DNA, 25 bp, SARS Virus
acgacgattgaatacacgtgagtat

SEQ ID NO: 22256 - DNA, 25 bp, SARS Virus
cgacgattgaaatcacgtgagtatg

SEQ ID NO: 22257 - DNA, 25 bp, SARS Virus
gacgattgaaaatacgtgagtatga

SEQ ID NO: 22258 - DNA, 25 bp, SARS Virus
acgattgaaaactcgtgagtatgag

SEQ ID NO: 22259 - DNA, 25 bp, SARS Virus
cgattgaaaacatgtgagtatgagc

SEQ ID NO: 22260 - DNA, 25 bp, SARS Virus
gattgaaaacacttgagtatgagcg

SEQ ID NO: 22261 - DNA, 25 bp, SARS Virus
attgaaaacacgtgagtatgagcga

SEQ ID NO: 22262 - DNA, 25 bp, SARS Virus
ttgaaaacacgttagtatgagcgaa

SEQ ID NO: 22263 - DNA, 25 bp, SARS Virus
tgaaaacacgtgtgtatgagcgaat

SEQ ID NO: 22264 - DNA, 25 bp, SARS Virus
gaaaacacgtgattatgagcgaatg

SEQ ID NO: 22265 - DNA, 25 bp, SARS Virus
aaaacacgtgagtatgagcgaatgt

SEQ ID NO: 22266 - DNA, 25 bp, SARS Virus
aaacacgtgagtttgagcgaatgtc

SEQ ID NO: 22267 - DNA, 25 bp, SARS Virus
aacacgtgagtatgagcgaatgtca

SEQ ID NO: 22268 - DNA, 25 bp, SARS Virus
acacgtgagtattagcgaatgtcat

SEQ ID NO: 22269 - DNA, 25 bp, SARS Virus
cacgtgagtatgtgcgaatgtcatt

SEQ ID NO: 22270 - DNA, 25 bp, SARS Virus
acgtgagtatgatcgaatgtcatta

SEQ ID NO: 22271 - DNA, 25 bp, SARS Virus
cgtgagtatgagtgaatgtcattat

SEQ ID NO: 22272 - DNA, 25 bp, SARS Virus
gtgagtatgagctaatgtcattatt

SEQ ID NO: 22273 - DNA, 25 bp, SARS Virus
tgagtatgagcgtatgtcattattt

SEQ ID NO: 22274 - DNA, 25 bp, SARS Virus
gagtatgagcgattgtcattatttt

SEQ ID NO: 22275 - DNA, 25 bp, SARS Virus
agtatgagcgaatgtcattattttg

SEQ ID NO: 22276 - DNA, 25 bp, SARS Virus
gtatgagcgaatttcattattttga

SEQ ID NO: 22277 - DNA, 25 bp, SARS Virus
tatgagcgaatgtcattattttgac

SEQ ID NO: 22278 - DNA, 25 bp, SARS Virus
atgagcgaatgttattattttgaca

SEQ ID NO: 22279 - DNA, 25 bp, SARS Virus
tgagcgaatgtctttattttgacaa

SEQ ID NO: 22280 - DNA, 25 bp, SARS Virus
gagcgaatgtcattattttgacaac

SEQ ID NO: 22281 - DNA, 25 bp, SARS Virus
agcgaatgtcattattttgacaacc

SEQ ID NO: 22282 - DNA, 25 bp, SARS Virus
gcgaatgtcatttttttgacaaccg

SEQ ID NO: 22283 - DNA, 25 bp, SARS Virus
cgaatgtcattattttgacaaccgc

SEQ ID NO: 22284 - DNA, 25 bp, SARS Virus
gaatgtcattattttgacaaccgct

SEQ ID NO: 22285 - DNA, 25 bp, SARS Virus
aatgtcattattttgacaaccgctc

SEQ ID NO: 22286 - DNA, 25 bp, SARS Virus
atgtcattattttgacaaccgctcg

SEQ ID NO: 22287 - DNA, 25 bp, SARS Virus
tgtcattatttttacaaccgctcga

SEQ ID NO: 22288 - DNA, 25 bp, SARS Virus
gtcattattttgtcaaccgctcgaa

SEQ ID NO: 22289 - DNA, 25 bp, SARS Virus
tcattattttgataaccgctcgaac

SEQ ID NO: 22290 - DNA, 25 bp, SARS Virus
cattattttgactaccgctcgaacc

SEQ ID NO: 22291 - DNA, 25 bp, SARS Virus
attattttgacatccgctcgaacca

SEQ ID NO: 22292 - DNA, 25 bp, SARS Virus
ttattttgacaatcgctcgaaccac

SEQ ID NO: 22293 - DNA, 25 bp, SARS Virus
tattttgacaactgctcgaaccact

SEQ ID NO: 22294 - DNA, 25 bp, SARS Virus
attttgacaacctctcgaaccacta

SEQ ID NO: 22295 - DNA, 25 bp, SARS Virus
ttttgacaaccgttcgaaccactac

SEQ ID NO: 22296 - DNA, 25 bp, SARS Virus
tttgacaaccgctcgaaccactaca

SEQ ID NO: 22297 - DNA, 25 bp, SARS Virus
ttgacaaccgcttgaaccactacag

SEQ ID NO: 22298 - DNA, 25 bp, SARS Virus
tgacaaccgctctaaccactacagt

SEQ ID NO: 22299 - DNA, 25 bp, SARS Virus
gacaaccgctcgtaccactacagtc

SEQ ID NO: 22300 - DNA, 25 bp, SARS Virus
acaaccgctcgatccactacagtct

SEQ ID NO: 22301 - DNA, 25 bp, SARS Virus
caaccgctcgaatcactacagtctc

SEQ ID NO: 22302 - DNA, 25 bp, SARS Virus
aaccgctcgaactactacagtctct

SEQ ID NO: 22303 - DNA, 25 bp, SARS Virus
accgctcgaacctctacagtctctt

SEQ ID NO: 22304 - DNA, 25 bp, SARS Virus
ccgctcgaaccattacagtctcttt

SEQ ID NO: 22305 - DNA, 25 bp, SARS Virus
cgctcgaaccactacagtctctttg

SEQ ID NO: 22306 - DNA, 25 bp, SARS Virus
gctcgaaccacttcagtctctttga

SEQ ID NO: 22307 - DNA, 25 bp, SARS Virus
ctcgaaccactatagtctctttgat

SEQ ID NO: 22308 - DNA, 25 bp, SARS Virus
tcgaaccactactgtctctttgata

SEQ ID NO: 22309 - DNA, 25 bp, SARS Virus
cgaaccactacattctctttgatac

SEQ ID NO: 22310 - DNA, 25 bp, SARS Virus
gaaccactacagtctctttgatact

SEQ ID NO: 22311 - DNA, 25 bp, SARS Virus
aaccactacagtttctttgatactg

SEQ ID NO: 22312 - DNA, 25 bp, SARS Virus
accactacagtctctttgatactgg

SEQ ID NO: 22313 - DNA, 25 bp, SARS Virus
ccactacagtctttttgatactggg

SEQ ID NO: 22314 - DNA, 25 bp, SARS Virus
cactacagtctctttgatactgggt

SEQ ID NO: 22315 - DNA, 25 bp, SARS Virus
actacagtctctttgatactgggta

SEQ ID NO: 22316 - DNA, 25 bp, SARS Virus
ctacagtctctttgatactgggtag

SEQ ID NO: 22317 - DNA, 25 bp, SARS Virus
tacagtctcttttatactgggtaga

SEQ ID NO: 22318 - DNA, 25 bp, SARS Virus
acagtctctttgttactgggtagaa

SEQ ID NO: 22319 - DNA, 25 bp, SARS Virus
cagtctctttgatactgggtagaag

SEQ ID NO: 22320 - DNA, 25 bp, SARS Virus
agtctctttgattctgggtagaaga

SEQ ID NO: 22321 - DNA, 25 bp, SARS Virus
gtctctttgatattgggtagaagat

SEQ ID NO: 22322 - DNA, 25 bp, SARS Virus
tctctttgatactgggtagaagatg

SEQ ID NO: 22323 - DNA, 25 bp, SARS Virus
ctctttgatacttggtagaagatgt

SEQ ID NO: 22324 - DNA, 25 bp, SARS Virus
tctttgatactgtgtagaagatgtc

SEQ ID NO: 22325 - DNA, 25 bp, SARS Virus
ctttgatactggttagaagatgtcg

SEQ ID NO: 22326 - DNA, 25 bp, SARS Virus
tttgatactgggtagaagatgtcgt

SEQ ID NO: 22327 - DNA, 25 bp, SARS Virus
ttgatactgggttgaagatgtcgta

SEQ ID NO: 22328 - DNA, 25 bp, SARS Virus
tgatactgggtataagatgtcgtac

SEQ ID NO: 22329 - DNA, 25 bp, SARS Virus
gatactgggtagtagatgtcgtacg

SEQ ID NO: 22330 - DNA, 25 bp, SARS Virus
atactgggtagatgatgtcgtacga

SEQ ID NO: 22331 - DNA, 25 bp, SARS Virus
tactgggtagaatatgtcgtacgat

SEQ ID NO: 22332 - DNA, 25 bp, SARS Virus
actgggtagaagttgtcgtacgatt

SEQ ID NO: 22333 - DNA, 25 bp, SARS Virus
ctgggtagaagatgtcgtacgatta

SEQ ID NO: 22334 - DNA, 25 bp, SARS Virus
tgggtagaagatttcgtacgattaa

SEQ ID NO: 22335 - DNA, 25 bp, SARS Virus
gggtagaagatgtcgtacgattaaa

SEQ ID NO: 22336 - DNA, 25 bp, SARS Virus
ggtagaagatgttgtacgattaaac

SEQ ID NO: 22337 - DNA, 25 bp, SARS Virus
gtagaagatgtcttacgattaaacc

SEQ ID NO: 22338 - DNA, 25 bp, SARS Virus
tagaagatgtcgtacgattaaacct

SEQ ID NO: 22339 - DNA, 25 bp, SARS Virus
agaagatgtcgttcgattaaacctt

SEQ ID NO: 22340 - DNA, 25 bp, SARS Virus
gaagatgtcgtatgattaaacctta

SEQ ID NO: 22341 - DNA, 25 bp, SARS Virus
aagatgtcgtactattaaaccttag

SEQ ID NO: 22342 - DNA, 25 bp, SARS Virus
agatgtcgtacgtttaaaccttaga

SEQ ID NO: 22343 - DNA, 25 bp, SARS Virus
gatgtcgtacgattaaaccttagac

SEQ ID NO: 22344 - DNA, 25 bp, SARS Virus
atgtcgtacgattaaaccttagacg

SEQ ID NO: 22345 - DNA, 25 bp, SARS Virus
tgtcgtacgatttaaccttagacgt

SEQ ID NO: 22346 - DNA, 25 bp, SARS Virus
gtcgtacgattataccttagacgtt

SEQ ID NO: 22347 - DNA, 25 bp, SARS Virus
tcgtacgattaatccttagacgttt

SEQ ID NO: 22348 - DNA, 25 bp, SARS Virus
cgtacgattaaatcttagacgtttc

SEQ ID NO: 22349 - DNA, 25 bp, SARS Virus
gtacgattaaactttagacgtttcg

SEQ ID NO: 22350 - DNA, 25 bp, SARS Virus
tacgattaaaccttagacgtttcgc

SEQ ID NO: 22351 - DNA, 25 bp, SARS Virus
acgattaaaccttagacgtttcgct

SEQ ID NO: 22352 - DNA, 25 bp, SARS Virus
cgattaaacctttgacgtttcgctc

SEQ ID NO: 22353 - DNA, 25 bp, SARS Virus
gattaaaccttatacgtttcgctca

SEQ ID NO: 22354 - DNA, 25 bp, SARS Virus
attaaaccttagtcgtttcgctcaa

SEQ ID NO: 22355 - DNA, 25 bp, SARS Virus
ttaaaccttagatgtttcgctcaag

SEQ ID NO: 22356 - DNA, 25 bp, SARS Virus
taaaccttagacttttcgctcaaga

SEQ ID NO: 22357 - DNA, 25 bp, SARS Virus
aaaccttagacgtttcgctcaagaa

SEQ ID NO: 22358 - DNA, 25 bp, SARS Virus
aaccttagacgtttcgctcaagaat

SEQ ID NO: 22359 - DNA, 25 bp, SARS Virus
accttagacgtttcgctcaagaatt

SEQ ID NO: 22360 - DNA, 25 bp, SARS Virus
ccttagacgttttgctcaagaatta

SEQ ID NO: 22361 - DNA, 25 bp, SARS Virus
cttagacgtttctctcaagaattac

SEQ ID NO: 22362 - DNA, 25 bp, SARS Virus
ttagacgtttcgttcaagaattaca

SEQ ID NO: 22363 - DNA, 25 bp, SARS Virus
tagacgtttcgctcaagaattacac

SEQ ID NO: 22364 - DNA, 25 bp, SARS Virus
agacgtttcgcttaagaattacacc

SEQ ID NO: 22365 - DNA, 25 bp, SARS Virus
gacgtttcgctctagaattacacca

SEQ ID NO: 22366 - DNA, 25 bp, SARS Virus
acgtttcgctcatgaattacaccac

SEQ ID NO: 22367 - DNA, 25 bp, SARS Virus
cgtttcgctcaataattacaccaca

SEQ ID NO: 22368 - DNA, 25 bp, SARS Virus
gtttcgctcaagtattacaccacac

SEQ ID NO: 22369 - DNA, 25 bp, SARS Virus
tttcgctcaagatttacaccacaca

SEQ ID NO: 22370 - DNA, 25 bp, SARS Virus
ttcgctcaagaattacaccacacat

SEQ ID NO: 22371 - DNA, 25 bp, SARS Virus
tcgctcaagaattacaccacacatt

SEQ ID NO: 22372 - DNA, 25 bp, SARS Virus
cgctcaagaatttcaccacacattt

SEQ ID NO: 22373 - DNA, 25 bp, SARS Virus
gctcaagaattataccacacatttg

SEQ ID NO: 22374 - DNA, 25 bp, SARS Virus
ctcaagaattactccacacatttgt

SEQ ID NO: 22375 - DNA, 25 bp, SARS Virus
tcaagaattacatcacacatttgta

SEQ ID NO: 22376 - DNA, 25 bp, SARS Virus
caagaattacactacacatttgtaa

SEQ ID NO: 22377 - DNA, 25 bp, SARS Virus
aagaattacacctcacatttgtaac

SEQ ID NO: 22378 - DNA, 25 bp, SARS Virus
agaattacaccatacatttgtaaca

SEQ ID NO: 22379 - DNA, 25 bp, SARS Virus
gaattacaccactcatttgtaacac

SEQ ID NO: 22380 - DNA, 25 bp, SARS Virus
aattacaccacatatttgtaacacc

SEQ ID NO: 22381 - DNA, 25 bp, SARS Virus
attacaccacacttttgtaacacca

SEQ ID NO: 22382 - DNA, 25 bp, SARS Virus
ttacaccacacatttgtaacaccag

SEQ ID NO: 22383 - DNA, 25 bp, SARS Virus
tacaccacacatttgtaacaccagt

SEQ ID NO: 22384 - DNA, 25 bp, SARS Virus
acaccacacatttgtaacaccagtc

SEQ ID NO: 22385 - DNA, 25 bp, SARS Virus
caccacacatttttaacaccagtct

SEQ ID NO: 22386 - DNA, 25 bp, SARS Virus
accacacatttgtaacaccagtctt

SEQ ID NO: 22387 - DNA, 25 bp, SARS Virus
ccacacatttgttacaccagtcttt

SEQ ID NO: 22388 - DNA, 25 bp, SARS Virus
cacacatttgtatcaccagtctttt

SEQ ID NO: 22389 - DNA, 25 bp, SARS Virus
acacatttgtaataccagtcttttg

SEQ ID NO: 22390 - DNA, 25 bp, SARS Virus
cacatttgtaactccagtcttttga

SEQ ID NO: 22391 - DNA, 25 bp, SARS Virus
acatttgtaacatcagtcttttgat

SEQ ID NO: 22392 - DNA, 25 bp, SARS Virus
catttgtaacactagtcttttgatg

SEQ ID NO: 22393 - DNA, 25 bp, SARS Virus
atttgtaacacctgtcttttgatga

SEQ ID NO: 22394 - DNA, 25 bp, SARS Virus
tttgtaacaccattcttttgatgat

SEQ ID NO: 22395 - DNA, 25 bp, SARS Virus
ttgtaacaccagtcttttgatgatg

SEQ ID NO: 22396 - DNA, 25 bp, SARS Virus
tgtaacaccagttttttgatgatgg

SEQ ID NO: 22397 - DNA, 25 bp, SARS Virus
gtaacaccagtcttttgatgatgga

SEQ ID NO: 22398 - DNA, 25 bp, SARS Virus
taacaccagtcttttgatgatggaa

SEQ ID NO: 22399 - DNA, 25 bp, SARS Virus
aacaccagtcttttgatgatggaat

SEQ ID NO: 22400 - DNA, 25 bp, SARS Virus
acaccagtcttttgatgatggaatt

SEQ ID NO: 22401 - DNA, 25 bp, SARS Virus
caccagtctttttatgatggaattg

SEQ ID NO: 22402 - DNA, 25 bp, SARS Virus
accagtcttttgttgatggaattgc

SEQ ID NO: 22403 - DNA, 25 bp, SARS Virus
ccagtcttttgatgatggaattgcc

SEQ ID NO: 22404 - DNA, 25 bp, SARS Virus
cagtcttttgattatggaattgccc

SEQ ID NO: 22405 - DNA, 25 bp, SARS Virus
agtcttttgatgttggaattgccca

SEQ ID NO: 22406 - DNA, 25 bp, SARS Virus
gtcttttgatgatggaattgcccac

SEQ ID NO: 22407 - DNA, 25 bp, SARS Virus
tcttttgatgattgaattgcccaca

SEQ ID NO: 22408 - DNA, 25 bp, SARS Virus
cttttgatgatgtaattgcccacat

SEQ ID NO: 22409 - DNA, 25 bp, SARS Virus
ttttgatgatggtattgcccacatc

SEQ ID NO: 22410 - DNA, 25 bp, SARS Virus
tttgatgatggatttgcccacatct

SEQ ID NO: 22411 - DNA, 25 bp, SARS Virus
ttgatgatggaattgcccacatctt

SEQ ID NO: 22412 - DNA, 25 bp, SARS Virus
tgatgatggaattgcccacatcttc

SEQ ID NO: 22413 - DNA, 25 bp, SARS Virus
gatgatggaatttcccacatcttcg

SEQ ID NO: 22414 - DNA, 25 bp, SARS Virus
atgatggaattgtccacatcttcga

SEQ ID NO: 22415 - DNA, 25 bp, SARS Virus
tgatggaattgctcacatcttcgac

SEQ ID NO: 22416 - DNA, 25 bp, SARS Virus
gatggaattgcctacatcttcgaca

SEQ ID NO: 22417 - DNA, 25 bp, SARS Virus
atggaattgccctcatcttcgacac

SEQ ID NO: 22418 - DNA, 25 bp, SARS Virus
tggaattgcccatatcttcgacact

SEQ ID NO: 22419 - DNA, 25 bp, SARS Virus
ggaattgcccacttcttcgacacta

SEQ ID NO: 22420 - DNA, 25 bp, SARS Virus
gaattgcccacatcttcgacactac

SEQ ID NO: 22421 - DNA, 25 bp, SARS Virus
aattgcccacattttcgacactaca

SEQ ID NO: 22422 - DNA, 25 bp, SARS Virus
attgcccacatcttcgacactacat

SEQ ID NO: 22423 - DNA, 25 bp, SARS Virus
ttgcccacatcttcgacactacata

SEQ ID NO: 22424 - DNA, 25 bp, SARS Virus
tgcccacatctttgacactacatat

SEQ ID NO: 22425 - DNA, 25 bp, SARS Virus
gcccacatcttctacactacatata

SEQ ID NO: 22426 - DNA, 25 bp, SARS Virus
cccacatcttcgtcactacatatac

SEQ ID NO: 22427 - DNA, 25 bp, SARS Virus
ccacatcttcgatactacatatacc

SEQ ID NO: 22428 - DNA, 25 bp, SARS Virus
cacatcttcgactctacatataccc

SEQ ID NO: 22429 - DNA, 25 bp, SARS Virus
acatcttcgacattacatataccca

SEQ ID NO: 22430 - DNA, 25 bp, SARS Virus
catcttcgacactacatatacccat

SEQ ID NO: 22431 - DNA, 25 bp, SARS Virus
atcttcgacacttcatatacccatg

SEQ ID NO: 22432 - DNA, 25 bp, SARS Virus
tcttcgacactatatatacccatga

SEQ ID NO: 22433 - DNA, 25 bp, SARS Virus
cttcgacactacttatacccatgag

SEQ ID NO: 22434 - DNA, 25 bp, SARS Virus
ttcgacactacatatacccatgaga

SEQ ID NO: 22435 - DNA, 25 bp, SARS Virus
tcgacactacatttacccatgagat

SEQ ID NO: 22436 - DNA, 25 bp, SARS Virus
cgacactacatatacccatgagata

SEQ ID NO: 22437 - DNA, 25 bp, SARS Virus
gacactacatattcccatgagatag

SEQ ID NO: 22438 - DNA, 25 bp, SARS Virus
acactacatatatccatgagataga

SEQ ID NO: 22439 - DNA, 25 bp, SARS Virus
cactacatatactcatgagatagaa

SEQ ID NO: 22440 - DNA, 25 bp, SARS Virus
actacatatacctatgagatagaat

SEQ ID NO: 22441 - DNA, 25 bp, SARS Virus
ctacatatacccttgagatagaata

SEQ ID NO: 22442 - DNA, 25 bp, SARS Virus
tacatatacccatgagatagaatac

SEQ ID NO: 22443 - DNA, 25 bp, SARS Virus
acatatacccattagatagaatact

SEQ ID NO: 22444 - DNA, 25 bp, SARS Virus
catatacccatgtgatagaatacta

SEQ ID NO: 22445 - DNA, 25 bp, SARS Virus
atatacccatgatatagaatactat

SEQ ID NO: 22446 - DNA, 25 bp, SARS Virus
tatacccatgagttagaatactatt

SEQ ID NO: 22447 - DNA, 25 bp, SARS Virus
atacccatgagatagaatactatta

SEQ ID NO: 22448 - DNA, 25 bp, SARS Virus
tacccatgagattgaatactattag

SEQ ID NO: 22449 - DNA, 25 bp, SARS Virus
acccatgagatataatactattaga

SEQ ID NO: 22450 - DNA, 25 bp, SARS Virus
cccatgagatagtatactattagaa

SEQ ID NO: 22451 - DNA, 25 bp, SARS Virus
ccatgagatagattactattagaat

SEQ ID NO: 22452 - DNA, 25 bp, SARS Virus
catgagatagaatactattagaatt

SEQ ID NO: 22453 - DNA, 25 bp, SARS Virus
atgagatagaattctattagaattc

SEQ ID NO: 22454 - DNA, 25 bp, SARS Virus
tgagatagaatattattagaattct

SEQ ID NO: 22455 - DNA, 25 bp, SARS Virus
gagatagaatactattagaattctg

SEQ ID NO: 22456 - DNA, 25 bp, SARS Virus
agatagaatacttttagaattctgt

SEQ ID NO: 22457 - DNA, 25 bp, SARS Virus
gatagaatactattagaattctgtc

SEQ ID NO: 22458 - DNA, 25 bp, SARS Virus
atagaatactattagaattctgtcc

SEQ ID NO: 22459 - DNA, 25 bp, SARS Virus
tagaatactatttgaattctgtcca

SEQ ID NO: 22460 - DNA, 25 bp, SARS Virus
agaatactattataattctgtccac

SEQ ID NO: 22461 - DNA, 25 bp, SARS Virus
gaatactattagtattctgtccaca

SEQ ID NO: 22462 - DNA, 25 bp, SARS Virus
aatactattagatttctgtccacaa

SEQ ID NO: 22463 - DNA, 25 bp, SARS Virus
atactattagaattctgtccacaaa

SEQ ID NO: 22464 - DNA, 25 bp, SARS Virus
tactattagaattctgtccacaaag

SEQ ID NO: 22465 - DNA, 25 bp, SARS Virus
actattagaattttgtccacaaagg

SEQ ID NO: 22466 - DNA, 25 bp, SARS Virus
ctattagaattctgtccacaaaggt

SEQ ID NO: 22467 - DNA, 25 bp, SARS Virus
tattagaattctttccacaaaggta

SEQ ID NO: 22468 - DNA, 25 bp, SARS Virus
attagaattctgtccacaaaggtaa

SEQ ID NO: 22469 - DNA, 25 bp, SARS Virus
ttagaattctgttcacaaaggtaag

SEQ ID NO: 22470 - DNA, 25 bp, SARS Virus
tagaattctgtctacaaaggtaagg

SEQ ID NO: 22471 - DNA, 25 bp, SARS Virus
agaattctgtcctcaaaggtaaggt

SEQ ID NO: 22472 - DNA, 25 bp, SARS Virus
gaattctgtccataaaggtaaggta

SEQ ID NO: 22473 - DNA, 25 bp, SARS Virus
aattctgtccactaaggtaaggtac

SEQ ID NO: 22474 - DNA, 25 bp, SARS Virus
attctgtccacataggtaaggtaca

SEQ ID NO: 22475 - DNA, 25 bp, SARS Virus
ttctgtccacaatggtaaggtacac

SEQ ID NO: 22476 - DNA, 25 bp, SARS Virus
tctgtccacaaatgtaaggtacaca

SEQ ID NO: 22477 - DNA, 25 bp, SARS Virus
ctgtccacaaagttaaggtacacac

SEQ ID NO: 22478 - DNA, 25 bp, SARS Virus
tgtccacaaaggtaaggtacacaca

SEQ ID NO: 22479 - DNA, 25 bp, SARS Virus
gtccacaaaggttaggtacacacac

SEQ ID NO: 22480 - DNA, 25 bp, SARS Virus
tccacaaaggtatggtacacacaca

SEQ ID NO: 22481 - DNA, 25 bp, SARS Virus
ccacaaaggtaatgtacacacacac

SEQ ID NO: 22482 - DNA, 25 bp, SARS Virus
cacaaaggtaagttacacacacacc

SEQ ID NO: 22483 - DNA, 25 bp, SARS Virus
acaaaggtaaggtacacacacacca

SEQ ID NO: 22484 - DNA, 25 bp, SARS Virus
caaaggtaaggttcacacacaccag

SEQ ID NO: 22485 - DNA, 25 bp, SARS Virus
aaaggtaaggtatacacacaccagc

SEQ ID NO: 22486 - DNA, 25 bp, SARS Virus
aaggtaaggtactcacacaccagca

SEQ ID NO: 22487 - DNA, 25 bp, SARS Virus
aggtaaggtacatacacaccagcac

SEQ ID NO: 22488 - DNA, 25 bp, SARS Virus
ggtaaggtacactcacaccagcact

SEQ ID NO: 22489 - DNA, 25 bp, SARS Virus
gtaaggtacacatacaccagcacta

SEQ ID NO: 22490 - DNA, 25 bp, SARS Virus
taaggtacacactcaccagcactac

SEQ ID NO: 22491 - DNA, 25 bp, SARS Virus
aaggtacacacataccagcactacg

SEQ ID NO: 22492 - DNA, 25 bp, SARS Virus
aggtacacacactccagcactacga

SEQ ID NO: 22493 - DNA, 25 bp, SARS Virus
ggtacacacacatcagcactacgat

SEQ ID NO: 22494 - DNA, 25 bp, SARS Virus
gtacacacacactagcactacgatg

SEQ ID NO: 22495 - DNA, 25 bp, SARS Virus
tacacacacacctgcactacgatgt

SEQ ID NO: 22496 - DNA, 25 bp, SARS Virus
acacacacaccatcactacgatgtg

SEQ ID NO: 22497 - DNA, 25 bp, SARS Virus
cacacacaccagtactacgatgtgt

SEQ ID NO: 22498 - DNA, 25 bp, SARS Virus
acacacaccagctctacgatgtgtt

SEQ ID NO: 22499 - DNA, 25 bp, SARS Virus
cacacaccagcattacgatgtgtta

SEQ ID NO: 22500 - DNA, 25 bp, SARS Virus
acacaccagcactacgatgtgttat

SEQ ID NO: 22501 - DNA, 25 bp, SARS Virus
cacaccagcacttcgatgtgttata

SEQ ID NO: 22502 - DNA, 25 bp, SARS Virus
acaccagcactatgatgtgttatag

SEQ ID NO: 22503 - DNA, 25 bp, SARS Virus
caccagcactactatgtgttataga

SEQ ID NO: 22504 - DNA, 25 bp, SARS Virus
accagcactacgttgtgttatagat

SEQ ID NO: 22505 - DNA, 25 bp, SARS Virus
ccagcactacgatgtgttatagatc

SEQ ID NO: 22506 - DNA, 25 bp, SARS Virus
cagcactacgatttgttatagatca

SEQ ID NO: 22507 - DNA, 25 bp, SARS Virus
agcactacgatgtgttatagatcat

SEQ ID NO: 22508 - DNA, 25 bp, SARS Virus
gcactacgatgttttatagatcatg

SEQ ID NO: 22509 - DNA, 25 bp, SARS Virus
cactacgatgtgttatagatcatgt

SEQ ID NO: 22510 - DNA, 25 bp, SARS Virus
actacgatgtgttatagatcatgtt

SEQ ID NO: 22511 - DNA, 25 bp, SARS Virus
ctacgatgtgttttagatcatgttg

SEQ ID NO: 22512 - DNA, 25 bp, SARS Virus
tacgatgtgttatagatcatgttgt

SEQ ID NO: 22513 - DNA, 25 bp, SARS Virus
acgatgtgttattgatcatgttgtt

SEQ ID NO: 22514 - DNA, 25 bp, SARS Virus
cgatgtgttatatatcatgttgttc

SEQ ID NO: 22515 - DNA, 25 bp, SARS Virus
gatgtgttatagttcatgttgttct

SEQ ID NO: 22516 - DNA, 25 bp, SARS Virus
atgtgttatagatcatgttgttctc

SEQ ID NO: 22517 - DNA, 25 bp, SARS Virus
tgtgttatagattatgttgttctca

SEQ ID NO: 22518 - DNA, 25 bp, SARS Virus
gtgttatagatcttgttgttctcag

SEQ ID NO: 22519 - DNA, 25 bp, SARS Virus
tgttatagatcatgttgttctcaga

SEQ ID NO: 22520 - DNA, 25 bp, SARS Virus
gttatagatcattttgttctcagaa

SEQ ID NO: 22521 - DNA, 25 bp, SARS Virus
ttatagatcatgttgttctcagaag

SEQ ID NO: 22522 - DNA, 25 bp, SARS Virus
tatagatcatgttgttctcagaaga

SEQ ID NO: 22523 - DNA, 25 bp, SARS Virus
atagatcatgtttttctcagaagaa

SEQ ID NO: 22524 - DNA, 25 bp, SARS Virus
tagatcatgttgttctcagaagaaa

SEQ ID NO: 22525 - DNA, 25 bp, SARS Virus
agatcatgttgttctcagaagaaaa

SEQ ID NO: 22526 - DNA, 25 bp, SARS Virus
gatcatgttgttttcagaagaaaac

SEQ ID NO: 22527 - DNA, 25 bp, SARS Virus
atcatgttgttctcagaagaaaaca

SEQ ID NO: 22528 - DNA, 25 bp, SARS Virus
tcatgttgttcttagaagaaaacaa

SEQ ID NO: 22529 - DNA, 25 bp, SARS Virus
catgttgttctctgaagaaaacaat

SEQ ID NO: 22530 - DNA, 25 bp, SARS Virus
atgttgttctcataagaaaacaata

SEQ ID NO: 22531 - DNA, 25 bp, SARS Virus
tgttgttctcagtagaaaacaatac

SEQ ID NO: 22532 - DNA, 25 bp, SARS Virus
gttgttctcagatgaaaacaatact

SEQ ID NO: 22533 - DNA, 25 bp, SARS Virus
ttgttctcagaataaaacaatacta

SEQ ID NO: 22534 - DNA, 25 bp, SARS Virus
tgttctcagaagtaaacaatactac

SEQ ID NO: 22535 - DNA, 25 bp, SARS Virus
gttctcagaagataacaatactaca

SEQ ID NO: 22536 - DNA, 25 bp, SARS Virus
ttctcagaagaatacaatactacag

SEQ ID NO: 22537 - DNA, 25 bp, SARS Virus
tctcagaagaaatcaatactacaga

SEQ ID NO: 22538 - DNA, 25 bp, SARS Virus
ctcagaagaaaataatactacagac

SEQ ID NO: 22539 - DNA, 25 bp, SARS Virus
tcagaagaaaactatactacagacg

SEQ ID NO: 22540 - DNA, 25 bp, SARS Virus
cagaagaaaacattactacagacgt

SEQ ID NO: 22541 - DNA, 25 bp, SARS Virus
agaagaaaacaatactacagacgtg

SEQ ID NO: 22542 - DNA, 25 bp, SARS Virus
gaagaaaacaattctacagacgtgg

SEQ ID NO: 22543 - DNA, 25 bp, SARS Virus
aagaaaacaatattacagacgtggt

SEQ ID NO: 22544 - DNA, 25 bp, SARS Virus
agaaaacaatactacagacgtggtg

SEQ ID NO: 22545 - DNA, 25 bp, SARS Virus
gaaaacaatacttcagacgtggtgg

SEQ ID NO: 22546 - DNA, 25 bp, SARS Virus
aaaacaatactatagacgtggtgga

SEQ ID NO: 22547 - DNA, 25 bp, SARS Virus
aaacaatactactgacgtggtggac

SEQ ID NO: 22548 - DNA, 25 bp, SARS Virus
aacaatactacatacgtggtggacg

SEQ ID NO: 22549 - DNA, 25 bp, SARS Virus
acaatactacagtcgtggtggacga

SEQ ID NO: 22550 - DNA, 25 bp, SARS Virus
caatactacagatgtggtggacgac

SEQ ID NO: 22551 - DNA, 25 bp, SARS Virus
aatactacagacttggtggacgact

SEQ ID NO: 22552 - DNA, 25 bp, SARS Virus
atactacagacgtggtggacgactc

SEQ ID NO: 22553 - DNA, 25 bp, SARS Virus
tactacagacgttgtggacgactca

SEQ ID NO: 22554 - DNA, 25 bp, SARS Virus
actacagacgtgttggacgactcat

SEQ ID NO: 22555 - DNA, 25 bp, SARS Virus
ctacagacgtggtggacgactcata

SEQ ID NO: 22556 - DNA, 25 bp, SARS Virus
tacagacgtggttgacgactcatat

SEQ ID NO: 22557 - DNA, 25 bp, SARS Virus
acagacgtggtgtacgactcatatt

SEQ ID NO: 22558 - DNA, 25 bp, SARS Virus
cagacgtggtggtcgactcatattt

SEQ ID NO: 22559 - DNA, 25 bp, SARS Virus
agacgtggtggatgactcatattta

SEQ ID NO: 22560 - DNA, 25 bp, SARS Virus
gacgtggtggactactcatatttaa

SEQ ID NO: 22561 - DNA, 25 bp, SARS Virus
acgtggtggacgtctcatatttaat

SEQ ID NO: 22562 - DNA, 25 bp, SARS Virus
cgtggtggacgattcatatttaatg

SEQ ID NO: 22563 - DNA, 25 bp, SARS Virus
gtggtggacgactcatatttaatgt

SEQ ID NO: 22564 - DNA, 25 bp, SARS Virus
tggtggacgacttatatttaatgtc

SEQ ID NO: 22565 - DNA, 25 bp, SARS Virus
ggtggacgactcttatttaatgtcg

SEQ ID NO: 22566 - DNA, 25 bp, SARS Virus
gtggacgactcatatttaatgtcgt

SEQ ID NO: 22567 - DNA, 25 bp, SARS Virus
tggacgactcatttttaatgtcgtt

SEQ ID NO: 22568 - DNA, 25 bp, SARS Virus
ggacgactcatatttaatgtcgttc

SEQ ID NO: 22569 - DNA, 25 bp, SARS Virus
gacgactcatatttaatgtcgttcc

SEQ ID NO: 22570 - DNA, 25 bp, SARS Virus
acgactcatatttaatgtcgttcca

SEQ ID NO: 22571 - DNA, 25 bp, SARS Virus
cgactcatattttatgtcgttccat

SEQ ID NO: 22572 - DNA, 25 bp, SARS Virus
gactcatatttattgtcgttccatg

SEQ ID NO: 22573 - DNA, 25 bp, SARS Virus
actcatatttaatgtcgttccatgt

SEQ ID NO: 22574 - DNA, 25 bp, SARS Virus
ctcatatttaatttcgttccatgta

SEQ ID NO: 22575 - DNA, 25 bp, SARS Virus
tcatatttaatgtcgttccatgtaa

SEQ ID NO: 22576 - DNA, 25 bp, SARS Virus
catatttaatgttgttccatgtaag

SEQ ID NO: 22577 - DNA, 25 bp, SARS Virus
atatttaatgtcattccatgtaaga

SEQ ID NO: 22578 - DNA, 25 bp, SARS Virus
tatttaatgtcgatccatgtaagaa

SEQ ID NO: 22579 - DNA, 25 bp, SARS Virus
atttaatgtcgtaccatgtaagaat

SEQ ID NO: 22580 - DNA, 25 bp, SARS Virus
tttaatgtcgttacatgtaagaata

SEQ ID NO: 22581 - DNA, 25 bp, SARS Virus
ttaatgtcgttcaatgtaagaatac

SEQ ID NO: 22582 - DNA, 25 bp, SARS Virus
taatgtcgttccatgtaagaataca

SEQ ID NO: 22583 - DNA, 25 bp, SARS Virus
aatgtcgttccaagtaagaatacac

SEQ ID NO: 22584 - DNA, 25 bp, SARS Virus
atgtcgttccatataagaatacacg

SEQ ID NO: 22585 - DNA, 25 bp, SARS Virus
tgtcgttccatgaaagaatacacgc

SEQ ID NO: 22586 - DNA, 25 bp, SARS Virus
gtcgttccatgtaagaatacacgct

SEQ ID NO: 22587 - DNA, 25 bp, SARS Virus
tcgttccatgtaagaatacacgctt

SEQ ID NO: 22588 - DNA, 25 bp, SARS Virus
cgttccatgtaaaaatacacgctta

SEQ ID NO: 22589 - DNA, 25 bp, SARS Virus
gttccatgtaagaatacacgcttac

SEQ ID NO: 22590 - DNA, 25 bp, SARS Virus
ttccatgtaagaatacacgcttact

SEQ ID NO: 22591 - DNA, 25 bp, SARS Virus
tccatgtaagaaaacacgcttactc

SEQ ID NO: 22592 - DNA, 25 bp, SARS Virus
ccatgtaagaatacacgcttactca

SEQ ID NO: 22593 - DNA, 25 bp, SARS Virus
catgtaagaataaacgcttactcat

SEQ ID NO: 22594 - DNA, 25 bp, SARS Virus
atgtaagaatacacgcttactcatg

SEQ ID NO: 22595 - DNA, 25 bp, SARS Virus
tgtaagaatacaagcttactcatgt

SEQ ID NO: 22596 - DNA, 25 bp, SARS Virus
gtaagaatacacacttactcatgtg

SEQ ID NO: 22597 - DNA, 25 bp, SARS Virus
taagaatacacgattactcatgtga

SEQ ID NO: 22598 - DNA, 25 bp, SARS Virus
aagaatacacgcatactcatgtgac

SEQ ID NO: 22599 - DNA, 25 bp, SARS Virus
agaatacacgctaactcatgtgacc

SEQ ID NO: 22600 - DNA, 25 bp, SARS Virus
gaatacacgcttactcatgtgacca

SEQ ID NO: 22601 - DNA, 25 bp, SARS Virus
aatacacgcttaatcatgtgaccat

SEQ ID NO: 22602 - DNA, 25 bp, SARS Virus
atacacgcttacacatgtgaccatt

SEQ ID NO: 22603 - DNA, 25 bp, SARS Virus
tacacgcttactaatgtgaccattg

SEQ ID NO: 22604 - DNA, 25 bp, SARS Virus
acacgcttactcatgtgaccattga

SEQ ID NO: 22605 - DNA, 25 bp, SARS Virus
cacgcttactcaagtgaccattgat

SEQ ID NO: 22606 - DNA, 25 bp, SARS Virus
acgcttactcatatgaccattgata

SEQ ID NO: 22607 - DNA, 25 bp, SARS Virus
cgcttactcatgagaccattgatag

SEQ ID NO: 22608 - DNA, 25 bp, SARS Virus
gcttactcatgtaaccattgatagt

SEQ ID NO: 22609 - DNA, 25 bp, SARS Virus
cttactcatgtgaccattgatagtc

SEQ ID NO: 22610 - DNA, 25 bp, SARS Virus
ttactcatgtgaacattgatagtca

SEQ ID NO: 22611 - DNA, 25 bp, SARS Virus
tactcatgtgacaattgatagtcac

SEQ ID NO: 22612 - DNA, 25 bp, SARS Virus
actcatgtgaccattgatagtcaca

SEQ ID NO: 22613 - DNA, 25 bp, SARS Virus
ctcatgtgaccaatgatagtcacac

SEQ ID NO: 22614 - DNA, 25 bp, SARS Virus
tcatgtgaccatagatagtcacacc

SEQ ID NO: 22615 - DNA, 25 bp, SARS Virus
catgtgaccattaatagtcacacca

SEQ ID NO: 22616 - DNA, 25 bp, SARS Virus
atgtgaccattgatagtcacaccag

SEQ ID NO: 22617 - DNA, 25 bp, SARS Virus
tgtgaccattgaaagtcacaccagt

SEQ ID NO: 22618 - DNA, 25 bp, SARS Virus
gtgaccattgatagtcacaccagta

SEQ ID NO: 22619 - DNA, 25 bp, SARS Virus
tgaccattgataatcacaccagtaa

SEQ ID NO: 22620 - DNA, 25 bp, SARS Virus
gaccattgatagacacaccagtaat

SEQ ID NO: 22621 - DNA, 25 bp, SARS Virus
accattgatagtaacaccagtaatg

SEQ ID NO: 22622 - DNA, 25 bp, SARS Virus
ccattgatagtcacaccagtaatgt

SEQ ID NO: 22623 - DNA, 25 bp, SARS Virus
cattgatagtcaaaccagtaatgtg

SEQ ID NO: 22624 - DNA, 25 bp, SARS Virus
attgatagtcacaccagtaatgtga

SEQ ID NO: 22625 - DNA, 25 bp, SARS Virus
ttgatagtcacaacagtaatgtgag

SEQ ID NO: 22626 - DNA, 25 bp, SARS Virus
tgatagtcacacaagtaatgtgagt

SEQ ID NO: 22627 - DNA, 25 bp, SARS Virus
gatagtcacaccagtaatgtgagta

SEQ ID NO: 22628 - DNA, 25 bp, SARS Virus
atagtcacaccaataatgtgagtat

SEQ ID NO: 22629 - DNA, 25 bp, SARS Virus
tagtcacaccagaaatgtgagtata

SEQ ID NO: 22630 - DNA, 25 bp, SARS Virus
agtcacaccagtaatgtgagtatat

SEQ ID NO: 22631 - DNA, 25 bp, SARS Virus
gtcacaccagtaatgtgagtatatt

SEQ ID NO: 22632 - DNA, 25 bp, SARS Virus
tcacaccagtaaagtgagtatattg

SEQ ID NO: 22633 - DNA, 25 bp, SARS Virus
cacaccagtaatatgagtatattga

SEQ ID NO: 22634 - DNA, 25 bp, SARS Virus
acaccagtaatgagagtatattgac

SEQ ID NO: 22635 - DNA, 25 bp, SARS Virus
caccagtaatgtaagtatattgacg

SEQ ID NO: 22636 - DNA, 25 bp, SARS Virus
accagtaatgtgagtatattgacga

SEQ ID NO: 22637 - DNA, 25 bp, SARS Virus
ccagtaatgtgaatatattgacgat

SEQ ID NO: 22638 - DNA, 25 bp, SARS Virus
cagtaatgtgagaatattgacgatt

SEQ ID NO: 22639 - DNA, 25 bp, SARS Virus
agtaatgtgagtatattgacgattc

SEQ ID NO: 22640 - DNA, 25 bp, SARS Virus
gtaatgtgagtaaattgacgattcc

SEQ ID NO: 22641 - DNA, 25 bp, SARS Virus
taatgtgagtatattgacgattcct

SEQ ID NO: 22642 - DNA, 25 bp, SARS Virus
aatgtgagtataatgacgattcctc

SEQ ID NO: 22643 - DNA, 25 bp, SARS Virus
atgtgagtatatagacgattcctct

SEQ ID NO: 22644 - DNA, 25 bp, SARS Virus
tgtgagtatattaacgattcctctg

SEQ ID NO: 22645 - DNA, 25 bp, SARS Virus
gtgagtatattgacgattcctctgg

SEQ ID NO: 22646 - DNA, 25 bp, SARS Virus
tgagtatattgaagattcctctggg

SEQ ID NO: 22647 - DNA, 25 bp, SARS Virus
gagtatattgacaattcctctggga

SEQ ID NO: 22648 - DNA, 25 bp, SARS Virus
agtatattgacgattcctctgggag

SEQ ID NO: 22649 - DNA, 25 bp, SARS Virus
gtatattgacgaatcctctgggaga

SEQ ID NO: 22650 - DNA, 25 bp, SARS Virus
tatattgacgatacctctgggagat

SEQ ID NO: 22651 - DNA, 25 bp, SARS Virus
atattgacgattactctgggagata

SEQ ID NO: 22652 - DNA, 25 bp, SARS Virus
tattgacgattcatctgggagatag

SEQ ID NO: 22653 - DNA, 25 bp, SARS Virus
attgacgattccactgggagatagc

SEQ ID NO: 22654 - DNA, 25 bp, SARS Virus
ttgacgattcctatgggagatagca

SEQ ID NO: 22655 - DNA, 25 bp, SARS Virus
tgacgattcctcagggagatagcat

SEQ ID NO: 22656 - DNA, 25 bp, SARS Virus
gacgattcctctaggagatagcata

SEQ ID NO: 22657 - DNA, 25 bp, SARS Virus
acgattcctctgagagatagcataa

SEQ ID NO: 22658 - DNA, 25 bp, SARS Virus
cgattcctctggaagatagcataac

SEQ ID NO: 22659 - DNA, 25 bp, SARS Virus
gattcctctgggagatagcataact

SEQ ID NO: 22660 - DNA, 25 bp, SARS Virus
attcctctgggaaatagcataactg

SEQ ID NO: 22661 - DNA, 25 bp, SARS Virus
ttcctctgggagatagcataactgc

SEQ ID NO: 22662 - DNA, 25 bp, SARS Virus
tcctctgggagaaagcataactgcc

SEQ ID NO: 22663 - DNA, 25 bp, SARS Virus
cctctgggagatagcataactgcct

SEQ ID NO: 22664 - DNA, 25 bp, SARS Virus
ctctgggagataacataactgcctc

SEQ ID NO: 22665 - DNA, 25 bp, SARS Virus
tctgggagatagaataactgcctcg

SEQ ID NO: 22666 - DNA, 25 bp, SARS Virus
ctgggagatagcataactgcctcga

SEQ ID NO: 22667 - DNA, 25 bp, SARS Virus
tgggagatagcaaaactgcctcgag

SEQ ID NO: 22668 - DNA, 25 bp, SARS Virus
gggagatagcataactgcctcgagt

SEQ ID NO: 22669 - DNA, 25 bp, SARS Virus
ggagatagcataactgcctcgagtg

SEQ ID NO: 22670 - DNA, 25 bp, SARS Virus
gagatagcataaatgcctcgagtgg

SEQ ID NO: 22671 - DNA, 25 bp, SARS Virus
agatagcataacagcctcgagtgga

SEQ ID NO: 22672 - DNA, 25 bp, SARS Virus
gatagcataactacctcgagtggaa

SEQ ID NO: 22673 - DNA, 25 bp, SARS Virus
atagcataactgactcgagtggaat

SEQ ID NO: 22674 - DNA, 25 bp, SARS Virus
tagcataactgcatcgagtggaatg

SEQ ID NO: 22675 - DNA, 25 bp, SARS Virus
agcataactgccacgagtggaatgt

SEQ ID NO: 22676 - DNA, 25 bp, SARS Virus
gcataactgcctagagtggaatgtt

SEQ ID NO: 22677 - DNA, 25 bp, SARS Virus
cataactgcctcaagtggaatgttt

SEQ ID NO: 22678 - DNA, 25 bp, SARS Virus
ataactgcctcgagtggaatgtttc

SEQ ID NO: 22679 - DNA, 25 bp, SARS Virus
taactgcctcgaatggaatgtttct

SEQ ID NO: 22680 - DNA, 25 bp, SARS Virus
aactgcctcgagaggaatgtttcta

SEQ ID NO: 22681 - DNA, 25 bp, SARS Virus
actgcctcgagtagaatgtttctac

SEQ ID NO: 22682 - DNA, 25 bp, SARS Virus
ctgcctcgagtgaaatgtttctaca

SEQ ID NO: 22683 - DNA, 25 bp, SARS Virus
tgcctcgagtggaatgtttctacag

SEQ ID NO: 22684 - DNA, 25 bp, SARS Virus
gcctcgagtggaatgtttctacagt

SEQ ID NO: 22685 - DNA, 25 bp, SARS Virus
cctcgagtggaaagtttctacagtc

SEQ ID NO: 22686 - DNA, 25 bp, SARS Virus
ctcgagtggaatatttctacagtct

SEQ ID NO: 22687 - DNA, 25 bp, SARS Virus
tcgagtggaatgattctacagtctc

SEQ ID NO: 22688 - DNA, 25 bp, SARS Virus
cgagtggaatgtatctacagtctca

SEQ ID NO: 22689 - DNA, 25 bp, SARS Virus
gagtggaatgttactacagtctcat

SEQ ID NO: 22690 - DNA, 25 bp, SARS Virus
agtggaatgtttatacagtctcatg

SEQ ID NO: 22691 - DNA, 25 bp, SARS Virus
gtggaatgtttcaacagtctcatgt

SEQ ID NO: 22692 - DNA, 25 bp, SARS Virus
tggaatgtttctacagtctcatgtt

SEQ ID NO: 22693 - DNA, 25 bp, SARS Virus
ggaatgtttctaaagtctcatgttt

SEQ ID NO: 22694 - DNA, 25 bp, SARS Virus
gaatgtttctacagtctcatgtttc

SEQ ID NO: 22695 - DNA, 25 bp, SARS Virus
aatgtttctacaatctcatgtttcc

SEQ ID NO: 22696 - DNA, 25 bp, SARS Virus
atgtttctacagactcatgtttcct

SEQ ID NO: 22697 - DNA, 25 bp, SARS Virus
tgtttctacagtatcatgtttcctg

SEQ ID NO: 22698 - DNA, 25 bp, SARS Virus
gtttctacagtcacatgtttcctgg

SEQ ID NO: 22699 - DNA, 25 bp, SARS Virus
tttctacagtctaatgtttcctggt

SEQ ID NO: 22700 - DNA, 25 bp, SARS Virus
ttctacagtctcatgtttcctggtc

SEQ ID NO: 22701 - DNA, 25 bp, SARS Virus
tctacagtctcaagtttcctggtca

SEQ ID NO: 22702 - DNA, 25 bp, SARS Virus
ctacagtctcatatttcctggtcac

SEQ ID NO: 22703 - DNA, 25 bp, SARS Virus
tacagtctcatgattcctggtcact

SEQ ID NO: 22704 - DNA, 25 bp, SARS Virus
acagtctcatgtatcctggtcactg

SEQ ID NO: 22705 - DNA, 25 bp, SARS Virus
cagtctcatgttacctggtcactga

SEQ ID NO: 22706 - DNA, 25 bp, SARS Virus
agtctcatgtttactggtcactgac

SEQ ID NO: 22707 - DNA, 25 bp, SARS Virus
gtctcatgtttcatggtcactgact

SEQ ID NO: 22708 - DNA, 25 bp, SARS Virus
tctcatgtttccaggtcactgacta

SEQ ID NO: 22709 - DNA, 25 bp, SARS Virus
ctcatgtttcctagtcactgactac

SEQ ID NO: 22710 - DNA, 25 bp, SARS Virus
tcatgtttcctgatcactgactaca

SEQ ID NO: 22711 - DNA, 25 bp, SARS Virus
catgtttcctggacactgactacaa

SEQ ID NO: 22712 - DNA, 25 bp, SARS Virus
atgtttcctggtaactgactacaaa

SEQ ID NO: 22713 - DNA, 25 bp, SARS Virus
tgtttcctggtcactgactacaaaa

SEQ ID NO: 22714 - DNA, 25 bp, SARS Virus
gtttcctggtcaatgactacaaaag

SEQ ID NO: 22715 - DNA, 25 bp, SARS Virus
tttcctggtcacagactacaaaaga

SEQ ID NO: 22716 - DNA, 25 bp, SARS Virus
ttcctggtcactaactacaaaagat

SEQ ID NO: 22717 - DNA, 25 bp, SARS Virus
tcctggtcactgactacaaaagatg

SEQ ID NO: 22718 - DNA, 25 bp, SARS Virus
cctggtcactgaatacaaaagatgt

SEQ ID NO: 22719 - DNA, 25 bp, SARS Virus
ctggtcactgacaacaaaagatgtt

SEQ ID NO: 22720 - DNA, 25 bp, SARS Virus
tggtcactgactacaaaagatgttc

SEQ ID NO: 22721 - DNA, 25 bp, SARS Virus
ggtcactgactaaaaaagatgttcc

SEQ ID NO: 22722 - DNA, 25 bp, SARS Virus
gtcactgactacaaaagatgttcct

SEQ ID NO: 22723 - DNA, 25 bp, SARS Virus
tcactgactacaaaagatgttcctt

SEQ ID NO: 22724 - DNA, 25 bp, SARS Virus
cactgactacaaaagatgttccttt

SEQ ID NO: 22725 - DNA, 25 bp, SARS Virus
actgactacaaaagatgttcctttg

SEQ ID NO: 22726 - DNA, 25 bp, SARS Virus
ctgactacaaaaaatgttcctttgt

SEQ ID NO: 22727 - DNA, 25 bp, SARS Virus
tgactacaaaagatgttcctttgta

SEQ ID NO: 22728 - DNA, 25 bp, SARS Virus
gactacaaaagaagttcctttgtag

SEQ ID NO: 22729 - DNA, 25 bp, SARS Virus
actacaaaagatattcctttgtaga

SEQ ID NO: 22730 - DNA, 25 bp, SARS Virus
ctacaaaagatgatcctttgtagaa

SEQ ID NO: 22731 - DNA, 25 bp, SARS Virus
tacaaaagatgtacctttgtagaat

SEQ ID NO: 22732 - DNA, 25 bp, SARS Virus
acaaaagatgttactttgtagaatg

SEQ ID NO: 22733 - DNA, 25 bp, SARS Virus
caaaagatgttcatttgtagaatgt

SEQ ID NO: 22734 - DNA, 25 bp, SARS Virus
aaaagatgttccattgtagaatgtg

SEQ ID NO: 22735 - DNA, 25 bp, SARS Virus
aaagatgttcctatgtagaatgtga

SEQ ID NO: 22736 - DNA, 25 bp, SARS Virus
aagatgttccttagtagaatgtgat

SEQ ID NO: 22737 - DNA, 25 bp, SARS Virus
agatgttcctttatagaatgtgatg

SEQ ID NO: 22738 - DNA, 25 bp, SARS Virus
gatgttcctttgaagaatgtgatgt

SEQ ID NO: 22739 - DNA, 25 bp, SARS Virus
atgttcctttgtagaatgtgatgtt

SEQ ID NO: 22740 - DNA, 25 bp, SARS Virus
tgttcctttgtaaaatgtgatgttg

SEQ ID NO: 22741 - DNA, 25 bp, SARS Virus
gttcctttgtagaatgtgatgttgg

SEQ ID NO: 22742 - DNA, 25 bp, SARS Virus
ttcctttgtagaatgtgatgttggt

SEQ ID NO: 22743 - DNA, 25 bp, SARS Virus
tcctttgtagaaagtgatgttggta

SEQ ID NO: 22744 - DNA, 25 bp, SARS Virus
cctttgtagaatatgatgttggtag

SEQ ID NO: 22745 - DNA, 25 bp, SARS Virus
ctttgtagaatgagatgttggtagt

SEQ ID NO: 22746 - DNA, 25 bp, SARS Virus
tttgtagaatgtaatgttggtagtt

SEQ ID NO: 22747 - DNA, 25 bp, SARS Virus
ttgtagaatgtgatgttggtagttc

SEQ ID NO: 22748 - DNA, 25 bp, SARS Virus
tgtagaatgtgaagttggtagttcg

SEQ ID NO: 22749 - DNA, 25 bp, SARS Virus
gtagaatgtgatattggtagttcgg

SEQ ID NO: 22750 - DNA, 25 bp, SARS Virus
tagaatgtgatgatggtagttcgga

SEQ ID NO: 22751 - DNA, 25 bp, SARS Virus
agaatgtgatgtaggtagttcggac

SEQ ID NO: 22752 - DNA, 25 bp, SARS Virus
gaatgtgatgttagtagttcggaca

SEQ ID NO: 22753 - DNA, 25 bp, SARS Virus
aatgtgatgttgatagttcggacac

SEQ ID NO: 22754 - DNA, 25 bp, SARS Virus
atgtgatgttggaagttcggacaca

SEQ ID NO: 22755 - DNA, 25 bp, SARS Virus
tgtgatgttggtagttcggacacag

SEQ ID NO: 22756 - DNA, 25 bp, SARS Virus
gtgatgttggtaattcggacacagc

SEQ ID NO: 22757 - DNA, 25 bp, SARS Virus
tgatgttggtagatcggacacagca

SEQ ID NO: 22758 - DNA, 25 bp, SARS Virus
gatgttggtagtacggacacagcat

SEQ ID NO: 22759 - DNA, 25 bp, SARS Virus
atgttggtagttaggacacagcata

SEQ ID NO: 22760 - DNA, 25 bp, SARS Virus
tgttggtagttcagacacagcatat

SEQ ID NO: 22761 - DNA, 25 bp, SARS Virus
gttggtagttcgaacacagcatatt

SEQ ID NO: 22762 - DNA, 25 bp, SARS Virus
ttggtagttcggacacagcatattt

SEQ ID NO: 22763 - DNA, 25 bp, SARS Virus
tggtagttcggaaacagcatatttg

SEQ ID NO: 22764 - DNA, 25 bp, SARS Virus
ggtagttcggacacagcatatttga

SEQ ID NO: 22765 - DNA, 25 bp, SARS Virus
gtagttcggacaaagcatatttgag

SEQ ID NO: 22766 - DNA, 25 bp, SARS Virus
tagttcggacacagcatatttgagc

SEQ ID NO: 22767 - DNA, 25 bp, SARS Virus
agttcggacacaacatatttgagct

SEQ ID NO: 22768 - DNA, 25 bp, SARS Virus
gttcggacacagaatatttgagcta

SEQ ID NO: 22769 - DNA, 25 bp, SARS Virus
ttcggacacagcatatttgagctac

SEQ ID NO: 22770 - DNA, 25 bp, SARS Virus
tcggacacagcaaatttgagctacc

SEQ ID NO: 22771 - DNA, 25 bp, SARS Virus
cggacacagcatatttgagctacct

SEQ ID NO: 22772 - DNA, 25 bp, SARS Virus
ggacacagcataattgagctacctc

SEQ ID NO: 22773 - DNA, 25 bp, SARS Virus
gacacagcatatatgagctacctca

SEQ ID NO: 22774 - DNA, 25 bp, SARS Virus
acacagcatattagagctacctcaa

SEQ ID NO: 22775 - DNA, 25 bp, SARS Virus
cacagcatatttaagctacctcaat

SEQ ID NO: 22776 - DNA, 25 bp, SARS Virus
acagcatatttgagctacctcaatg

SEQ ID NO: 22777 - DNA, 25 bp, SARS Virus
cagcatatttgaactacctcaatga

SEQ ID NO: 22778 - DNA, 25 bp, SARS Virus
agcatatttgagatacctcaatgaa

SEQ ID NO: 22779 - DNA, 25 bp, SARS Virus
gcatatttgagcaacctcaatgaat

SEQ ID NO: 22780 - DNA, 25 bp, SARS Virus
catatttgagctacctcaatgaatg

SEQ ID NO: 22781 - DNA, 25 bp, SARS Virus
atatttgagctaactcaatgaatgt

SEQ ID NO: 22782 - DNA, 25 bp, SARS Virus
tatttgagctacatcaatgaatgtg

SEQ ID NO: 22783 - DNA, 25 bp, SARS Virus
atttgagctaccacaatgaatgtgt

SEQ ID NO: 22784 - DNA, 25 bp, SARS Virus
tttgagctacctaaatgaatgtgtc

SEQ ID NO: 22785 - DNA, 25 bp, SARS Virus
ttgagctacctcaatgaatgtgtct

SEQ ID NO: 22786 - DNA, 25 bp, SARS Virus
tgagctacctcaatgaatgtgtctc

SEQ ID NO: 22787 - DNA, 25 bp, SARS Virus
gagctacctcaaagaatgtgtctct

SEQ ID NO: 22788 - DNA, 25 bp, SARS Virus
agctacctcaataaatgtgtctcta

SEQ ID NO: 22789 - DNA, 25 bp, SARS Virus
gctacctcaatgaatgtgtctctaa

SEQ ID NO: 22790 - DNA, 25 bp, SARS Virus
ctacctcaatgaatgtgtctctaac

SEQ ID NO: 22791 - DNA, 25 bp, SARS Virus
tacctcaatgaaagtgtctctaact

SEQ ID NO: 22792 - DNA, 25 bp, SARS Virus
acctcaatgaatatgtctctaactt

SEQ ID NO: 22793 - DNA, 25 bp, SARS Virus
cctcaatgaatgagtctctaacttg

SEQ ID NO: 22794 - DNA, 25 bp, SARS Virus
ctcaatgaatgtatctctaacttgg

SEQ ID NO: 22795 - DNA, 25 bp, SARS Virus
tcaatgaatgtgactctaacttggt

SEQ ID NO: 22796 - DNA, 25 bp, SARS Virus
caatgaatgtgtatctaacttggtt

SEQ ID NO: 22797 - DNA, 25 bp, SARS Virus
aatgaatgtgtcactaacttggttt

SEQ ID NO: 22798 - DNA, 25 bp, SARS Virus
atgaatgtgtctataacttggtttt

SEQ ID NO: 22799 - DNA, 25 bp, SARS Virus
tgaatgtgtctcaaacttggtttta

SEQ ID NO: 22800 - DNA, 25 bp, SARS Virus
gaatgtgtctctaacttggttttaa

SEQ ID NO: 22801 - DNA, 25 bp, SARS Virus
aatgtgtctctaacttggttttaac

SEQ ID NO: 22802 - DNA, 25 bp, SARS Virus
atgtgtctctaaattggttttaacc

SEQ ID NO: 22803 - DNA, 25 bp, SARS Virus
tgtgtctctaacatggttttaacct

SEQ ID NO: 22804 - DNA, 25 bp, SARS Virus
gtgtctctaactaggttttaaccta

SEQ ID NO: 22805 - DNA, 25 bp, SARS Virus
tgtctctaacttagttttaacctac

SEQ ID NO: 22806 - DNA, 25 bp, SARS Virus
gtctctaacttgattttaacctacc

SEQ ID NO: 22807 - DNA, 25 bp, SARS Virus
tctctaacttggatttaacctaccc

SEQ ID NO: 22808 - DNA, 25 bp, SARS Virus
ctctaacttggtattaacctaccca

SEQ ID NO: 22809 - DNA, 25 bp, SARS Virus
tctaacttggttataacctacccat

SEQ ID NO: 22810 - DNA, 25 bp, SARS Virus
ctaacttggtttaaacctacccata

SEQ ID NO: 22811 - DNA, 25 bp, SARS Virus
taacttggttttaacctacccataa

SEQ ID NO: 22812 - DNA, 25 bp, SARS Virus
aacttggttttaacctacccataat

SEQ ID NO: 22813 - DNA, 25 bp, SARS Virus
acttggttttaaactacccataata

SEQ ID NO: 22814 - DNA, 25 bp, SARS Virus
cttggttttaacatacccataatat

SEQ ID NO: 22815 - DNA, 25 bp, SARS Virus
ttggttttaaccaacccataatatt

SEQ ID NO: 22816 - DNA, 25 bp, SARS Virus
tggttttaacctacccataatattt

SEQ ID NO: 22817 - DNA, 25 bp, SARS Virus
ggttttaacctaaccataatatttt

SEQ ID NO: 22818 - DNA, 25 bp, SARS Virus
gttttaacctacacataatattttt

SEQ ID NO: 22819 - DNA, 25 bp, SARS Virus
ttttaacctaccaataatatttttc

SEQ ID NO: 22820 - DNA, 25 bp, SARS Virus
tttaacctacccataatatttttcc

SEQ ID NO: 22821 - DNA, 25 bp, SARS Virus
ttaacctacccaaaatatttttcct

SEQ ID NO: 22822 - DNA, 25 bp, SARS Virus
taacctacccataatatttttccta

SEQ ID NO: 22823 - DNA, 25 bp, SARS Virus
aacctacccataatatttttcctat

SEQ ID NO: 22824 - DNA, 25 bp, SARS Virus
acctacccataaaatttttcctatt

SEQ ID NO: 22825 - DNA, 25 bp, SARS Virus
cctacccataatatttttcctatta

SEQ ID NO: 22826 - DNA, 25 bp, SARS Virus
ctacccataataattttcctattac

SEQ ID NO: 22827 - DNA, 25 bp, SARS Virus
tacccataatatatttcctattacg

SEQ ID NO: 22828 - DNA, 25 bp, SARS Virus
acccataatattattcctattacga

SEQ ID NO: 22829 - DNA, 25 bp, SARS Virus
cccataatatttatcctattacgaa

SEQ ID NO: 22830 - DNA, 25 bp, SARS Virus
ccataatattttacctattacgaat

SEQ ID NO: 22831 - DNA, 25 bp, SARS Virus
cataatatttttactattacgaatg

SEQ ID NO: 22832 - DNA, 25 bp, SARS Virus
ataatatttttcatattacgaatga

SEQ ID NO: 22833 - DNA, 25 bp, SARS Virus
taatatttttccaattacgaatgat

SEQ ID NO: 22834 - DNA, 25 bp, SARS Virus
aatatttttcctattacgaatgata

SEQ ID NO: 22835 - DNA, 25 bp, SARS Virus
atatttttcctaatacgaatgatat

SEQ ID NO: 22836 - DNA, 25 bp, SARS Virus
tatttttcctataacgaatgatatg

SEQ ID NO: 22837 - DNA, 25 bp, SARS Virus
atttttcctattacgaatgatatgt

SEQ ID NO: 22838 - DNA, 25 bp, SARS Virus
tttttcctattaagaatgatatgtc

SEQ ID NO: 22839 - DNA, 25 bp, SARS Virus
ttttcctattacaaatgatatgtct

SEQ ID NO: 22840 - DNA, 25 bp, SARS Virus
tttcctattacgaatgatatgtctc

SEQ ID NO: 22841 - DNA, 25 bp, SARS Virus
ttcctattacgaatgatatgtctcg

SEQ ID NO: 22842 - DNA, 25 bp, SARS Virus
tcctattacgaaagatatgtctcgt

SEQ ID NO: 22843 - DNA, 25 bp, SARS Virus
cctattacgaataatatgtctcgtc

SEQ ID NO: 22844 - DNA, 25 bp, SARS Virus
ctattacgaatgatatgtctcgtcg

SEQ ID NO: 22845 - DNA, 25 bp, SARS Virus
tattacgaatgaaatgtctcgtcgg

SEQ ID NO: 22846 - DNA, 25 bp, SARS Virus
attacgaatgatatgtctcgtcgga

SEQ ID NO: 22847 - DNA, 25 bp, SARS Virus
ttacgaatgataagtctcgtcggat

SEQ ID NO: 22848 - DNA, 25 bp, SARS Virus
tacgaatgatatatctcgtcggata

SEQ ID NO: 22849 - DNA, 25 bp, SARS Virus
acgaatgatatgactcgtcggatat

SEQ ID NO: 22850 - DNA, 25 bp, SARS Virus
cgaatgatatgtatcgtcggatatc

SEQ ID NO: 22851 - DNA, 25 bp, SARS Virus
gaatgatatgtcacgtcggatatct

SEQ ID NO: 22852 - DNA, 25 bp, SARS Virus
aatgatatgtctagtcggatatctg

SEQ ID NO: 22853 - DNA, 25 bp, SARS Virus
atgatatgtctcatcggatatctgg

SEQ ID NO: 22854 - DNA, 25 bp, SARS Virus
tgatatgtctcgacggatatctgga

SEQ ID NO: 22855 - DNA, 25 bp, SARS Virus
gatatgtctcgtaggatatctggaa

SEQ ID NO: 22856 - DNA, 25 bp, SARS Virus
atatgtctcgtcagatatctggaac

SEQ ID NO: 22857 - DNA, 25 bp, SARS Virus
tatgtctcgtcgaatatctggaaca

SEQ ID NO: 22858 - DNA, 25 bp, SARS Virus
atgtctcgtcggatatctggaacat

SEQ ID NO: 22859 - DNA, 25 bp, SARS Virus
tgtctcgtcggaaatctggaacatg

SEQ ID NO: 22860 - DNA, 25 bp, SARS Virus
gtctcgtcggatatctggaacatgg

SEQ ID NO: 22861 - DNA, 25 bp, SARS Virus
tctcgtcggataactggaacatggt

SEQ ID NO: 22862 - DNA, 25 bp, SARS Virus
ctcgtcggatatatggaacatggtt

SEQ ID NO: 22863 - DNA, 25 bp, SARS Virus
tcgtcggatatcaggaacatggttg

SEQ ID NO: 22864 - DNA, 25 bp, SARS Virus
cgtcggatatctagaacatggttga

SEQ ID NO: 22865 - DNA, 25 bp, SARS Virus
gtcggatatctgaaacatggttgag

SEQ ID NO: 22866 - DNA, 25 bp, SARS Virus
tcggatatctggaacatggttgagt

SEQ ID NO: 22867 - DNA, 25 bp, SARS Virus
cggatatctggaacatggttgagtt

SEQ ID NO: 22868 - DNA, 25 bp, SARS Virus
ggatatctggaaaatggttgagttg

SEQ ID NO: 22869 - DNA, 25 bp, SARS Virus
gatatctggaacatggttgagttgg

SEQ ID NO: 22870 - DNA, 25 bp, SARS Virus
atatctggaacaaggttgagttggt

SEQ ID NO: 22871 - DNA, 25 bp, SARS Virus
tatctggaacatagttgagttggta

SEQ ID NO: 22872 - DNA, 25 bp, SARS Virus
atctggaacatgattgagttggtaa

SEQ ID NO: 22873 - DNA, 25 bp, SARS Virus
tctggaacatggatgagttggtaat

SEQ ID NO: 22874 - DNA, 25 bp, SARS Virus
ctggaacatggtagagttggtaatg

SEQ ID NO: 22875 - DNA, 25 bp, SARS Virus
tggaacatggttaagttggtaatgg

SEQ ID NO: 22876 - DNA, 25 bp, SARS Virus
ggaacatggttgagttggtaatggt

SEQ ID NO: 22877 - DNA, 25 bp, SARS Virus
gaacatggttgaattggtaatggtt

SEQ ID NO: 22878 - DNA, 25 bp, SARS Virus
aacatggttgagatggtaatggttt

SEQ ID NO: 22879 - DNA, 25 bp, SARS Virus
acatggttgagtaggtaatggttta

SEQ ID NO: 22880 - DNA, 25 bp, SARS Virus
catggttgagttagtaatggtttac

SEQ ID NO: 22881 - DNA, 25 bp, SARS Virus
atggttgagttgataatggtttacg

SEQ ID NO: 22882 - DNA, 25 bp, SARS Virus
tggttgagttggaaatggtttacgc

SEQ ID NO: 22883 - DNA, 25 bp, SARS Virus
ggttgagttggtaatggtttacgct

SEQ ID NO: 22884 - DNA, 25 bp, SARS Virus
gttgagttggtaatggtttacgctc

SEQ ID NO: 22885 - DNA, 25 bp, SARS Virus
ttgagttggtaaaggtttacgctca

SEQ ID NO: 22886 - DNA, 25 bp, SARS Virus
tgagttggtaatagtttacgctcaa

SEQ ID NO: 22887 - DNA, 25 bp, SARS Virus
gagttggtaatgatttacgctcaaa

SEQ ID NO: 22888 - DNA, 25 bp, SARS Virus
agttggtaatggattacgctcaaaa

SEQ ID NO: 22889 - DNA, 25 bp, SARS Virus
gttggtaatggtatacgctcaaaac

SEQ ID NO: 22890 - DNA, 25 bp, SARS Virus
ttggtaatggttaacgctcaaaact

SEQ ID NO: 22891 - DNA, 25 bp, SARS Virus
tggtaatggtttacgctcaaaacta

SEQ ID NO: 22892 - DNA, 25 bp, SARS Virus
ggtaatggtttaagctcaaaactat

SEQ ID NO: 22893 - DNA, 25 bp, SARS Virus
gtaatggtttacactcaaaactatt

SEQ ID NO: 22894 - DNA, 25 bp, SARS Virus
taatggtttacgatcaaaactatta

SEQ ID NO: 22895 - DNA, 25 bp, SARS Virus
aatggtttacgcacaaaactattaa

SEQ ID NO: 22896 - DNA, 25 bp, SARS Virus
atggtttacgctaaaaactattaaa

SEQ ID NO: 22897 - DNA, 25 bp, SARS Virus
tggtttacgctcaaaactattaaag

SEQ ID NO: 22898 - DNA, 25 bp, SARS Virus
ggtttacgctcaaaactattaaagt

SEQ ID NO: 22899 - DNA, 25 bp, SARS Virus
gtttacgctcaaaactattaaagtt

SEQ ID NO: 22900 - DNA, 25 bp, SARS Virus
tttacgctcaaaactattaaagttt

SEQ ID NO: 22901 - DNA, 25 bp, SARS Virus
ttacgctcaaaaatattaaagtttg

SEQ ID NO: 22902 - DNA, 25 bp, SARS Virus
tacgctcaaaacaattaaagtttga

SEQ ID NO: 22903 - DNA, 25 bp, SARS Virus
acgctcaaaactattaaagtttgag

SEQ ID NO: 22904 - DNA, 25 bp, SARS Virus
cgctcaaaactaataaagtttgagt

SEQ ID NO: 22905 - DNA, 25 bp, SARS Virus
gctcaaaactataaaagtttgagtg

SEQ ID NO: 22906 - DNA, 25 bp, SARS Virus
ctcaaaactattaaagtttgagtgt

SEQ ID NO: 22907 - DNA, 25 bp, SARS Virus
tcaaaactattaaagtttgagtgta

SEQ ID NO: 22908 - DNA, 25 bp, SARS Virus
caaaactattaaagtttgagtgtac

SEQ ID NO: 22909 - DNA, 25 bp, SARS Virus
aaaactattaaaatttgagtgtaca

SEQ ID NO: 22910 - DNA, 25 bp, SARS Virus
aaactattaaagattgagtgtacaa

SEQ ID NO: 22911 - DNA, 25 bp, SARS Virus
aactattaaagtatgagtgtacaag

SEQ ID NO: 22912 - DNA, 25 bp, SARS Virus
actattaaagttagagtgtacaaga

SEQ ID NO: 22913 - DNA, 25 bp, SARS Virus
ctattaaagtttaagtgtacaagat

SEQ ID NO: 22914 - DNA, 25 bp, SARS Virus
tattaaagtttgagtgtacaagatt

SEQ ID NO: 22915 - DNA, 25 bp, SARS Virus
attaaagtttgaatgtacaagattg

SEQ ID NO: 22916 - DNA, 25 bp, SARS Virus
ttaaagtttgagagtacaagattgt

SEQ ID NO: 22917 - DNA, 25 bp, SARS Virus
taaagtttgagtatacaagattgtg

SEQ ID NO: 22918 - DNA, 25 bp, SARS Virus
aaagtttgagtgaacaagattgtgt

SEQ ID NO: 22919 - DNA, 25 bp, SARS Virus
aagtttgagtgtacaagattgtgtt

SEQ ID NO: 22920 - DNA, 25 bp, SARS Virus
agtttgagtgtaaaagattgtgttt

SEQ ID NO: 22921 - DNA, 25 bp, SARS Virus
gtttgagtgtacaagattgtgtttt

SEQ ID NO: 22922 - DNA, 25 bp, SARS Virus
tttgagtgtacaagattgtgtttta

SEQ ID NO: 22923 - DNA, 25 bp, SARS Virus
ttgagtgtacaaaattgtgttttaa

SEQ ID NO: 22924 - DNA, 25 bp, SARS Virus
tgagtgtacaagattgtgttttaaa

SEQ ID NO: 22925 - DNA, 25 bp, SARS Virus
gagtgtacaagaatgtgttttaaac

SEQ ID NO: 22926 - DNA, 25 bp, SARS Virus
agtgtacaagatagtgttttaaacg

SEQ ID NO: 22927 - DNA, 25 bp, SARS Virus
gtgtacaagattatgttttaaacga

SEQ ID NO: 22928 - DNA, 25 bp, SARS Virus
tgtacaagattgagttttaaacgac

SEQ ID NO: 22929 - DNA, 25 bp, SARS Virus
gtacaagattgtattttaaacgact

SEQ ID NO: 22930 - DNA, 25 bp, SARS Virus
tacaagattgtgatttaaacgacta

SEQ ID NO: 22931 - DNA, 25 bp, SARS Virus
acaagattgtgtattaaacgactac

SEQ ID NO: 22932 - DNA, 25 bp, SARS Virus
caagattgtgttataaacgactact

SEQ ID NO: 22933 - DNA, 25 bp, SARS Virus
aagattgtgtttaaaacgactacta

SEQ ID NO: 22934 - DNA, 25 bp, SARS Virus
agattgtgttttaaacgactactaa

SEQ ID NO: 22935 - DNA, 25 bp, SARS Virus
gattgtgttttaaacgactactaaa

SEQ ID NO: 22936 - DNA, 25 bp, SARS Virus
attgtgttttaaacgactactaaat

SEQ ID NO: 22937 - DNA, 25 bp, SARS Virus
ttgtgttttaaaagactactaaatt

SEQ ID NO: 22938 - DNA, 25 bp, SARS Virus
tgtgttttaaacaactactaaattt

SEQ ID NO: 22939 - DNA, 25 bp, SARS Virus
gtgttttaaacgactactaaattta

SEQ ID NO: 22940 - DNA, 25 bp, SARS Virus
tgttttaaacgaatactaaatttag

SEQ ID NO: 22941 - DNA, 25 bp, SARS Virus
gttttaaacgacaactaaatttagt

SEQ ID NO: 22942 - DNA, 25 bp, SARS Virus
ttttaaacgactactaaatttagtt

SEQ ID NO: 22943 - DNA, 25 bp, SARS Virus
tttaaacgactaataaatttagttt

SEQ ID NO: 22944 - DNA, 25 bp, SARS Virus
ttaaacgactacaaaatttagttta

SEQ ID NO: 22945 - DNA, 25 bp, SARS Virus
taaacgactactaaatttagtttac

SEQ ID NO: 22946 - DNA, 25 bp, SARS Virus
aaacgactactaaatttagtttact

SEQ ID NO: 22947 - DNA, 25 bp, SARS Virus
aacgactactaaatttagtttactg

SEQ ID NO: 22948 - DNA, 25 bp, SARS Virus
acgactactaaaattagtttactgt

SEQ ID NO: 22949 - DNA, 25 bp, SARS Virus
cgactactaaatatagtttactgtc

SEQ ID NO: 22950 - DNA, 25 bp, SARS Virus
gactactaaattaagtttactgtcc

SEQ ID NO: 22951 - DNA, 25 bp, SARS Virus
actactaaatttagtttactgtccg

SEQ ID NO: 22952 - DNA, 25 bp, SARS Virus
ctactaaatttaatttactgtccga

SEQ ID NO: 22953 - DNA, 25 bp, SARS Virus
tactaaatttagattactgtccgaa

SEQ ID NO: 22954 - DNA, 25 bp, SARS Virus
actaaatttagtatactgtccgaag

SEQ ID NO: 22955 - DNA, 25 bp, SARS Virus
ctaaatttagttaactgtccgaagt

SEQ ID NO: 22956 - DNA, 25 bp, SARS Virus
taaatttagtttactgtccgaagtg

SEQ ID NO: 22957 - DNA, 25 bp, SARS Virus
aaatttagtttaatgtccgaagtgt

SEQ ID NO: 22958 - DNA, 25 bp, SARS Virus
aatttagtttacagtccgaagtgtt

SEQ ID NO: 22959 - DNA, 25 bp, SARS Virus
atttagtttactatccgaagtgttt

SEQ ID NO: 22960 - DNA, 25 bp, SARS Virus
tttagtttactgaccgaagtgtttc

SEQ ID NO: 22961 - DNA, 25 bp, SARS Virus
ttagtttactgtacgaagtgtttcg

SEQ ID NO: 22962 - DNA, 25 bp, SARS Virus
tagtttactgtcagaagtgtttcgg

SEQ ID NO: 22963 - DNA, 25 bp, SARS Virus
agtttactgtccaaagtgtttcggt

SEQ ID NO: 22964 - DNA, 25 bp, SARS Virus
gtttactgtccgaagtgtttcggtc

SEQ ID NO: 22965 - DNA, 25 bp, SARS Virus
tttactgtccgaagtgtttcggtcg

SEQ ID NO: 22966 - DNA, 25 bp, SARS Virus
ttactgtccgaaatgtttcggtcga

SEQ ID NO: 22967 - DNA, 25 bp, SARS Virus
tactgtccgaagagtttcggtcgaa

SEQ ID NO: 22968 - DNA, 25 bp, SARS Virus
actgtccgaagtatttcggtcgaag

SEQ ID NO: 22969 - DNA, 25 bp, SARS Virus
ctgtccgaagtgattcggtcgaagt

SEQ ID NO: 22970 - DNA, 25 bp, SARS Virus
tgtccgaagtgtatcggtcgaagtg

SEQ ID NO: 22971 - DNA, 25 bp, SARS Virus
gtccgaagtgttacggtcgaagtgc

SEQ ID NO: 22972 - DNA, 25 bp, SARS Virus
tccgaagtgtttaggtcgaagtgct

SEQ ID NO: 22973 - DNA, 25 bp, SARS Virus
ccgaagtgtttcagtcgaagtgctc

SEQ ID NO: 22974 - DNA, 25 bp, SARS Virus
cgaagtgtttcgatcgaagtgctct

SEQ ID NO: 22975 - DNA, 25 bp, SARS Virus
gaagtgtttcggacgaagtgctctc

SEQ ID NO: 22976 - DNA, 25 bp, SARS Virus
aagtgtttcggtagaagtgctctcg

SEQ ID NO: 22977 - DNA, 25 bp, SARS Virus
agtgtttcggtcaaagtgctctcga

SEQ ID NO: 22978 - DNA, 25 bp, SARS Virus
gtgtttcggtcgaagtgctctcgat

SEQ ID NO: 22979 - DNA, 25 bp, SARS Virus
tgtttcggtcgaagtgctctcgata

SEQ ID NO: 22980 - DNA, 25 bp, SARS Virus
gtttcggtcgaaatgctctcgatag

SEQ ID NO: 22981 - DNA, 25 bp, SARS Virus
tttcggtcgaagagctctcgataga

SEQ ID NO: 22982 - DNA, 25 bp, SARS Virus
ttcggtcgaagtactctcgatagac

SEQ ID NO: 22983 - DNA, 25 bp, SARS Virus
tcggtcgaagtgatctcgatagaca

SEQ ID NO: 22984 - DNA, 25 bp, SARS Virus
cggtcgaagtgcactcgatagacag

SEQ ID NO: 22985 - DNA, 25 bp, SARS Virus
ggtcgaagtgctatcgatagacagt

SEQ ID NO: 22986 - DNA, 25 bp, SARS Virus
gtcgaagtgctcacgatagacagtg

SEQ ID NO: 22987 - DNA, 25 bp, SARS Virus
tcgaagtgctctagatagacagtgt

SEQ ID NO: 22988 - DNA, 25 bp, SARS Virus
cgaagtgctctcaatagacagtgta

SEQ ID NO: 22989 - DNA, 25 bp, SARS Virus
gaagtgctctcgatagacagtgtaa

SEQ ID NO: 22990 - DNA, 25 bp, SARS Virus
aagtgctctcgaaagacagtgtaag

SEQ ID NO: 22991 - DNA, 25 bp, SARS Virus
agtgctctcgatagacagtgtaaga

SEQ ID NO: 22992 - DNA, 25 bp, SARS Virus
gtgctctcgataaacagtgtaagaa

SEQ ID NO: 22993 - DNA, 25 bp, SARS Virus
tgctctcgatagacagtgtaagaag

SEQ ID NO: 22994 - DNA, 25 bp, SARS Virus
gctctcgatagaaagtgtaagaagg

SEQ ID NO: 22995 - DNA, 25 bp, SARS Virus
ctctcgatagacagtgtaagaaggg

SEQ ID NO: 22996 - DNA, 25 bp, SARS Virus
tctcgatagacaatgtaagaagggt

SEQ ID NO: 22997 - DNA, 25 bp, SARS Virus
ctcgatagacagagtaagaagggtc

SEQ ID NO: 22998 - DNA, 25 bp, SARS Virus
tcgatagacagtataagaagggtct

SEQ ID NO: 22999 - DNA, 25 bp, SARS Virus
cgatagacagtgaaagaagggtctg

SEQ ID NO: 23000 - DNA, 25 bp, SARS Virus
gatagacagtgtaagaagggtctga

SEQ ID NO: 23001 - DNA, 25 bp, SARS Virus
atagacagtgtaagaagggtctgaa

SEQ ID NO: 23002 - DNA, 25 bp, SARS Virus
tagacagtgtaaaaagggtctgaac

SEQ ID NO: 23003 - DNA, 25 bp, SARS Virus
agacagtgtaagaagggtctgaact

SEQ ID NO: 23004 - DNA, 25 bp, SARS Virus
gacagtgtaagaagggtctgaactt

SEQ ID NO: 23005 - DNA, 25 bp, SARS Virus
acagtgtaagaaaggtctgaactta

SEQ ID NO: 23006 - DNA, 25 bp, SARS Virus
cagtgtaagaagagtctgaacttac

SEQ ID NO: 23007 - DNA, 25 bp, SARS Virus
agtgtaagaaggatctgaacttacc

SEQ ID NO: 23008 - DNA, 25 bp, SARS Virus
gtgtaagaagggactgaacttaccg

SEQ ID NO: 23009 - DNA, 25 bp, SARS Virus
tgtaagaagggtatgaacttaccgc

SEQ ID NO: 23010 - DNA, 25 bp, SARS Virus
gtaagaagggtcagaacttaccgct

SEQ ID NO: 23011 - DNA, 25 bp, SARS Virus
taagaagggtctaaacttaccgcta

SEQ ID NO: 23012 - DNA, 25 bp, SARS Virus
aagaagggtctgaacttaccgctac

SEQ ID NO: 23013 - DNA, 25 bp, SARS Virus
agaagggtctgaacttaccgctaca

SEQ ID NO: 23014 - DNA, 25 bp, SARS Virus
gaagggtctgaaattaccgctacat

SEQ ID NO: 23015 - DNA, 25 bp, SARS Virus
aagggtctgaacataccgctacatc

SEQ ID NO: 23016 - DNA, 25 bp, SARS Virus
agggtctgaactaaccgctacatca

SEQ ID NO: 23017 - DNA, 25 bp, SARS Virus
gggtctgaacttaccgctacatcac

SEQ ID NO: 23018 - DNA, 25 bp, SARS Virus
ggtctgaacttaacgctacatcacc

SEQ ID NO: 23019 - DNA, 25 bp, SARS Virus
gtctgaacttacagctacatcaccg

SEQ ID NO: 23020 - DNA, 25 bp, SARS Virus
tctgaacttaccactacatcaccga

SEQ ID NO: 23021 - DNA, 25 bp, SARS Virus
ctgaacttaccgatacatcaccgat

SEQ ID NO: 23022 - DNA, 25 bp, SARS Virus
tgaacttaccgcaacatcaccgata

SEQ ID NO: 23023 - DNA, 25 bp, SARS Virus
gaacttaccgctacatcaccgataa

SEQ ID NO: 23024 - DNA, 25 bp, SARS Virus
aacttaccgctaaatcaccgataac

SEQ ID NO: 23025 - DNA, 25 bp, SARS Virus
acttaccgctacatcaccgataact

SEQ ID NO: 23026 - DNA, 25 bp, SARS Virus
cttaccgctacaacaccgataactg

SEQ ID NO: 23027 - DNA, 25 bp, SARS Virus
ttaccgctacataaccgataactga

SEQ ID NO: 23028 - DNA, 25 bp, SARS Virus
taccgctacatcaccgataactgat

SEQ ID NO: 23029 - DNA, 25 bp, SARS Virus
accgctacatcaacgataactgata

SEQ ID NO: 23030 - DNA, 25 bp, SARS Virus
ccgctacatcacagataactgatat

SEQ ID NO: 23031 - DNA, 25 bp, SARS Virus
cgctacatcaccaataactgatatc

SEQ ID NO: 23032 - DNA, 25 bp, SARS Virus
gctacatcaccgataactgatatct

SEQ ID NO: 23033 - DNA, 25 bp, SARS Virus
ctacatcaccgaaaactgatatctg

SEQ ID NO: 23034 - DNA, 25 bp, SARS Virus
tacatcaccgataactgatatctgt

SEQ ID NO: 23035 - DNA, 25 bp, SARS Virus
acatcaccgataactgatatctgtg

SEQ ID NO: 23036 - DNA, 25 bp, SARS Virus
catcaccgataaatgatatctgtga

SEQ ID NO: 23037 - DNA, 25 bp, SARS Virus
atcaccgataacagatatctgtgat

SEQ ID NO: 23038 - DNA, 25 bp, SARS Virus
tcaccgataactaatatctgtgata

SEQ ID NO: 23039 - DNA, 25 bp, SARS Virus
caccgataactgatatctgtgataa

SEQ ID NO: 23040 - DNA, 25 bp, SARS Virus
accgataactgaaatctgtgataag

SEQ ID NO: 23041 - DNA, 25 bp, SARS Virus
ccgataactgatatctgtgataagt

SEQ ID NO: 23042 - DNA, 25 bp, SARS Virus
cgataactgataactgtgataagtc

SEQ ID NO: 23043 - DNA, 25 bp, SARS Virus
gataactgatatatgtgataagtcg

SEQ ID NO: 23044 - DNA, 25 bp, SARS Virus
ataactgatatcagtgataagtcgc

SEQ ID NO: 23045 - DNA, 25 bp, SARS Virus
taactgatatctatgataagtcgct

SEQ ID NO: 23046 - DNA, 25 bp, SARS Virus
aactgatatctgagataagtcgctc

SEQ ID NO: 23047 - DNA, 25 bp, SARS Virus
actgatatctgtaataagtcgctca

SEQ ID NO: 23048 - DNA, 25 bp, SARS Virus
ctgatatctgtgataagtcgctcaa

SEQ ID NO: 23049 - DNA, 25 bp, SARS Virus
tgatatctgtgaaaagtcgctcaaa

SEQ ID NO: 23050 - DNA, 25 bp, SARS Virus
gatatctgtgataagtcgctcaaag

SEQ ID NO: 23051 - DNA, 25 bp, SARS Virus
atatctgtgataagtcgctcaaagt

SEQ ID NO: 23052 - DNA, 25 bp, SARS Virus
tatctgtgataaatcgctcaaagtt

SEQ ID NO: 23053 - DNA, 25 bp, SARS Virus
atctgtgataagacgctcaaagttc

SEQ ID NO: 23054 - DNA, 25 bp, SARS Virus
tctgtgataagtagctcaaagttct

SEQ ID NO: 23055 - DNA, 25 bp, SARS Virus
ctgtgataagtcactcaaagttctt

SEQ ID NO: 23056 - DNA, 25 bp, SARS Virus
tgtgataagtcgatcaaagttcttt

SEQ ID NO: 23057 - DNA, 25 bp, SARS Virus
gtgataagtcgcacaaagttctttc

SEQ ID NO: 23058 - DNA, 25 bp, SARS Virus
tgataagtcgctaaaagttctttcc

SEQ ID NO: 23059 - DNA, 25 bp, SARS Virus
gataagtcgctcaaagttctttcca

SEQ ID NO: 23060 - DNA, 25 bp, SARS Virus
ataagtcgctcaaagttctttccac

SEQ ID NO: 23061 - DNA, 25 bp, SARS Virus
taagtcgctcaaagttctttccacg

SEQ ID NO: 23062 - DNA, 25 bp, SARS Virus
aagtcgctcaaaattctttccacga

SEQ ID NO: 23063 - DNA, 25 bp, SARS Virus
agtcgctcaaagatctttccacgat

SEQ ID NO: 23064 - DNA, 25 bp, SARS Virus
gtcgctcaaagtactttccacgatt

SEQ ID NO: 23065 - DNA, 25 bp, SARS Virus
atatttaatgtccttccatgtaaga

SEQ ID NO: 23066 - DNA, 25 bp, SARS Virus
tatttaatgtcgctccatgtaagaa

SEQ ID NO: 23067 - DNA, 25 bp, SARS Virus
atttaatgtcgtcccatgtaagaat

SEQ ID NO: 23068 - DNA, 25 bp, SARS Virus
tttaatgtcgttccatgtaagaata

SEQ ID NO: 23069 - DNA, 25 bp, SARS Virus
ttaatgtcgttccatgtaagaatac

SEQ ID NO: 23070 - DNA, 25 bp, SARS Virus
taatgtcgttccctgtaagaataca

SEQ ID NO: 23071 - DNA, 25 bp, SARS Virus
aatgtcgttccacgtaagaatacac

SEQ ID NO: 23072 - DNA, 25 bp, SARS Virus
atgtcgttccatctaagaatacacg

SEQ ID NO: 23073 - DNA, 25 bp, SARS Virus
tgtcgttccatgcaagaatacacgc

SEQ ID NO: 23074 - DNA, 25 bp, SARS Virus
gtcgttccatgtcagaatacacgct

SEQ ID NO: 23075 - DNA, 25 bp, SARS Virus
tcgttccatgtacgaatacacgctt

SEQ ID NO: 23076 - DNA, 25 bp, SARS Virus
cgttccatgtaacaatacacgctta

SEQ ID NO: 23077 - DNA, 25 bp, SARS Virus
gttccatgtaagcatacacgcttac

SEQ ID NO: 23078 - DNA, 25 bp, SARS Virus
ttccatgtaagactacacgcttact

SEQ ID NO: 23079 - DNA, 25 bp, SARS Virus
tccatgtaagaacacacgcttactc

SEQ ID NO: 23080 - DNA, 25 bp, SARS Virus
ccatgtaagaatccacgcttactca

SEQ ID NO: 23081 - DNA, 25 bp, SARS Virus
catgtaagaatacacgcttactcat

SEQ ID NO: 23082 - DNA, 25 bp, SARS Virus
atgtaagaatacccgcttactcatg

SEQ ID NO: 23083 - DNA, 25 bp, SARS Virus
tgtaagaatacacgcttactcatgt

SEQ ID NO: 23084 - DNA, 25 bp, SARS Virus
gtaagaatacacccttactcatgtg

SEQ ID NO: 23085 - DNA, 25 bp, SARS Virus
taagaatacacgcttactcatgtga

SEQ ID NO: 23086 - DNA, 25 bp, SARS Virus
aagaatacacgcctactcatgtgac

SEQ ID NO: 23087 - DNA, 25 bp, SARS Virus
agaatacacgctcactcatgtgacc

SEQ ID NO: 23088 - DNA, 25 bp, SARS Virus
gaatacacgcttcctcatgtgacca

SEQ ID NO: 23089 - DNA, 25 bp, SARS Virus
aatacacgcttactcatgtgaccat

SEQ ID NO: 23090 - DNA, 25 bp, SARS Virus
atacacgcttacccatgtgaccatt

SEQ ID NO: 23091 - DNA, 25 bp, SARS Virus
tacacgcttactcatgtgaccattg

SEQ ID NO: 23092 - DNA, 25 bp, SARS Virus
acacgcttactcctgtgaccattga

SEQ ID NO: 23093 - DNA, 25 bp, SARS Virus
cacgcttactcacgtgaccattgat

SEQ ID NO: 23094 - DNA, 25 bp, SARS Virus
acgcttactcatctgaccattgata

SEQ ID NO: 23095 - DNA, 25 bp, SARS Virus
cgcttactcatgcgaccattgatag

SEQ ID NO: 23096 - DNA, 25 bp, SARS Virus
gcttactcatgtcaccattgatagt

SEQ ID NO: 23097 - DNA, 25 bp, SARS Virus
cttactcatgtgcccattgatagtc

SEQ ID NO: 23098 - DNA, 25 bp, SARS Virus
ttactcatgtgaccattgatagtca

SEQ ID NO: 23099 - DNA, 25 bp, SARS Virus
tactcatgtgaccattgatagtcac

SEQ ID NO: 23100 - DNA, 25 bp, SARS Virus
actcatgtgacccttgatagtcaca

SEQ ID NO: 23101 - DNA, 25 bp, SARS Virus
ctcatgtgaccactgatagtcacac

SEQ ID NO: 23102 - DNA, 25 bp, SARS Virus
tcatgtgaccatcgatagtcacacc

SEQ ID NO: 23103 - DNA, 25 bp, SARS Virus
catgtgaccattcatagtcacacca

SEQ ID NO: 23104 - DNA, 25 bp, SARS Virus
atgtgaccattgctagtcacaccag

SEQ ID NO: 23105 - DNA, 25 bp, SARS Virus
tgtgaccattgacagtcacaccagt

SEQ ID NO: 23106 - DNA, 25 bp, SARS Virus
gtgaccattgatcgtcacaccagta

SEQ ID NO: 23107 - DNA, 25 bp, SARS Virus
tgaccattgatactcacaccagtaa

SEQ ID NO: 23108 - DNA, 25 bp, SARS Virus
gaccattgatagccacaccagtaat

SEQ ID NO: 23109 - DNA, 25 bp, SARS Virus
accattgatagtcacaccagtaatg

SEQ ID NO: 23110 - DNA, 25 bp, SARS Virus
ccattgatagtcccaccagtaatgt

SEQ ID NO: 23111 - DNA, 25 bp, SARS Virus
cattgatagtcacaccagtaatgtg

SEQ ID NO: 23112 - DNA, 25 bp, SARS Virus
attgatagtcaccccagtaatgtga

SEQ ID NO: 23113 - DNA, 25 bp, SARS Virus
ttgatagtcacaccagtaatgtgag

SEQ ID NO: 23114 - DNA, 25 bp, SARS Virus
tgatagtcacaccagtaatgtgagt

SEQ ID NO: 23115 - DNA, 25 bp, SARS Virus
gatagtcacacccgtaatgtgagta

SEQ ID NO: 23116 - DNA, 25 bp, SARS Virus
atagtcacaccactaatgtgagtat

SEQ ID NO: 23117 - DNA, 25 bp, SARS Virus
tagtcacaccagcaatgtgagtata

SEQ ID NO: 23118 - DNA, 25 bp, SARS Virus
agtcacaccagtcatgtgagtatat

SEQ ID NO: 23119 - DNA, 25 bp, SARS Virus
gtcacaccagtactgtgagtatatt

SEQ ID NO: 23120 - DNA, 25 bp, SARS Virus
tcacaccagtaacgtgagtatattg

SEQ ID NO: 23121 - DNA, 25 bp, SARS Virus
cacaccagtaatctgagtatattga

SEQ ID NO: 23122 - DNA, 25 bp, SARS Virus
acaccagtaatgcgagtatattgac

SEQ ID NO: 23123 - DNA, 25 bp, SARS Virus
caccagtaatgtcagtatattgacg

SEQ ID NO: 23124 - DNA, 25 bp, SARS Virus
accagtaatgtgcgtatattgacga

SEQ ID NO: 23125 - DNA, 25 bp, SARS Virus
ccagtaatgtgactatattgacgat

SEQ ID NO: 23126 - DNA, 25 bp, SARS Virus
cagtaatgtgagcatattgacgatt

SEQ ID NO: 23127 - DNA, 25 bp, SARS Virus
agtaatgtgagtctattgacgattc

SEQ ID NO: 23128 - DNA, 25 bp, SARS Virus
gtaatgtgagtacattgacgattcc

SEQ ID NO: 23129 - DNA, 25 bp, SARS Virus
taatgtgagtatcttgacgattcct

SEQ ID NO: 23130 - DNA, 25 bp, SARS Virus
aatgtgagtatactgacgattcctc

SEQ ID NO: 23131 - DNA, 25 bp, SARS Virus
atgtgagtatatcgacgattcctct

SEQ ID NO: 23132 - DNA, 25 bp, SARS Virus
tgtgagtatattcacgattcctctg

SEQ ID NO: 23133 - DNA, 25 bp, SARS Virus
gtgagtatattgccgattcctctgg

SEQ ID NO: 23134 - DNA, 25 bp, SARS Virus
tgagtatattgacgattcctctggg

SEQ ID NO: 23135 - DNA, 25 bp, SARS Virus
gagtatattgaccattcctctggga

SEQ ID NO: 23136 - DNA, 25 bp, SARS Virus
agtatattgacgcttcctctgggag

SEQ ID NO: 23137 - DNA, 25 bp, SARS Virus
gtatattgacgactcctctgggaga

SEQ ID NO: 23138 - DNA, 25 bp, SARS Virus
tatattgacgatccctctgggagat

SEQ ID NO: 23139 - DNA, 25 bp, SARS Virus
atattgacgattcctctgggagata

SEQ ID NO: 23140 - DNA, 25 bp, SARS Virus
tattgacgattcctctgggagatag

SEQ ID NO: 23141 - DNA, 25 bp, SARS Virus
attgacgattcccctgggagatagc

SEQ ID NO: 23142 - DNA, 25 bp, SARS Virus
ttgacgattcctctgggagatagca

SEQ ID NO: 23143 - DNA, 25 bp, SARS Virus
tgacgattcctccgggagatagcat

SEQ ID NO: 23144 - DNA, 25 bp, SARS Virus
gacgattcctctcggagatagcata

SEQ ID NO: 23145 - DNA, 25 bp, SARS Virus
acgattcctctgcgagatagcataa

SEQ ID NO: 23146 - DNA, 25 bp, SARS Virus
cgattcctctggcagatagcataac

SEQ ID NO: 23147 - DNA, 25 bp, SARS Virus
gattcctctgggcgatagcataact

SEQ ID NO: 23148 - DNA, 25 bp, SARS Virus
attcctctgggacatagcataactg

SEQ ID NO: 23149 - DNA, 25 bp, SARS Virus
ttcctctgggagctagcataactgc

SEQ ID NO: 23150 - DNA, 25 bp, SARS Virus
tcctctgggagacagcataactgcc

SEQ ID NO: 23151 - DNA, 25 bp, SARS Virus
cctctgggagatcgcataactgcct

SEQ ID NO: 23152 - DNA, 25 bp, SARS Virus
ctctgggagataccataactgcctc

SEQ ID NO: 23153 - DNA, 25 bp, SARS Virus
tctgggagatagcataactgcctcg

SEQ ID NO: 23154 - DNA, 25 bp, SARS Virus
ctgggagatagcctaactgcctcga

SEQ ID NO: 23155 - DNA, 25 bp, SARS Virus
tgggagatagcacaactgcctcgag

SEQ ID NO: 23156 - DNA, 25 bp, SARS Virus
gggagatagcatcactgcctcgagt

SEQ ID NO: 23157 - DNA, 25 bp, SARS Virus
ggagatagcatacctgcctcgagtg

SEQ ID NO: 23158 - DNA, 25 bp, SARS Virus
gagatagcataactgcctcgagtgg

SEQ ID NO: 23159 - DNA, 25 bp, SARS Virus
agatagcataaccgcctcgagtgga

SEQ ID NO: 23160 - DNA, 25 bp, SARS Virus
gatagcataactccctcgagtggaa

SEQ ID NO: 23161 - DNA, 25 bp, SARS Virus
atagcataactgcctcgagtggaat

SEQ ID NO: 23162 - DNA, 25 bp, SARS Virus
tagcataactgcctcgagtggaatg

SEQ ID NO: 23163 - DNA, 25 bp, SARS Virus
agcataactgccccgagtggaatgt

SEQ ID NO: 23164 - DNA, 25 bp, SARS Virus
gcataactgcctcgagtggaatgtt

SEQ ID NO: 23165 - DNA, 25 bp, SARS Virus
cataactgcctccagtggaatgttt

SEQ ID NO: 23166 - DNA, 25 bp, SARS Virus
ataactgcctcgcgtggaatgtttc

SEQ ID NO: 23167 - DNA, 25 bp, SARS Virus
taactgcctcgactggaatgtttct

SEQ ID NO: 23168 - DNA, 25 bp, SARS Virus
aactgcctcgagcggaatgtttcta

SEQ ID NO: 23169 - DNA, 25 bp, SARS Virus
actgcctcgagtcgaatgtttctac

SEQ ID NO: 23170 - DNA, 25 bp, SARS Virus
ctgcctcgagtgcaatgtttctaca

SEQ ID NO: 23171 - DNA, 25 bp, SARS Virus
tgcctcgagtggcatgtttctacag

SEQ ID NO: 23172 - DNA, 25 bp, SARS Virus
gcctcgagtggactgtttctacagt

SEQ ID NO: 23173 - DNA, 25 bp, SARS Virus
cctcgagtggaacgtttctacagtc

SEQ ID NO: 23174 - DNA, 25 bp, SARS Virus
ctcgagtggaatctttctacagtct

SEQ ID NO: 23175 - DNA, 25 bp, SARS Virus
tcgagtggaatgcttctacagtctc

SEQ ID NO: 23176 - DNA, 25 bp, SARS Virus
cgagtggaatgtctctacagtctca

SEQ ID NO: 23177 - DNA, 25 bp, SARS Virus
gagtggaatgttcctacagtctcat

SEQ ID NO: 23178 - DNA, 25 bp, SARS Virus
agtggaatgtttctacagtctcatg

SEQ ID NO: 23179 - DNA, 25 bp, SARS Virus
gtggaatgtttccacagtctcatgt

SEQ ID NO: 23180 - DNA, 25 bp, SARS Virus
tggaatgtttctccagtctcatgtt

SEQ ID NO: 23181 - DNA, 25 bp, SARS Virus
ggaatgtttctacagtctcatgttt

SEQ ID NO: 23182 - DNA, 25 bp, SARS Virus
gaatgtttctaccgtctcatgtttc

SEQ ID NO: 23183 - DNA, 25 bp, SARS Virus
aatgtttctacactctcatgtttcc

SEQ ID NO: 23184 - DNA, 25 bp, SARS Virus
atgtttctacagcctcatgtttcct

SEQ ID NO: 23185 - DNA, 25 bp, SARS Virus
tgtttctacagtctcatgtttcctg

SEQ ID NO: 23186 - DNA, 25 bp, SARS Virus
gtttctacagtcccatgtttcctgg

SEQ ID NO: 23187 - DNA, 25 bp, SARS Virus
tttctacagtctcatgtttcctggt

SEQ ID NO: 23188 - DNA, 25 bp, SARS Virus
ttctacagtctcctgtttcctggtc

SEQ ID NO: 23189 - DNA, 25 bp, SARS Virus
tctacagtctcacgtttcctggtca

SEQ ID NO: 23190 - DNA, 25 bp, SARS Virus
ctacagtctcatctttcctggtcac

SEQ ID NO: 23191 - DNA, 25 bp, SARS Virus
tacagtctcatgcttcctggtcact

SEQ ID NO: 23192 - DNA, 25 bp, SARS Virus
acagtctcatgtctcctggtcactg

SEQ ID NO: 23193 - DNA, 25 bp, SARS Virus
cagtctcatgttccctggtcactga

SEQ ID NO: 23194 - DNA, 25 bp, SARS Virus
agtctcatgtttcctggtcactgac

SEQ ID NO: 23195 - DNA, 25 bp, SARS Virus
gtctcatgtttcctggtcactgact

SEQ ID NO: 23196 - DNA, 25 bp, SARS Virus
tctcatgtttcccggtcactgacta

SEQ ID NO: 23197 - DNA, 25 bp, SARS Virus
ctcatgtttcctcgtcactgactac

SEQ ID NO: 23198 - DNA, 25 bp, SARS Virus
tcatgtttcctgctcactgactaca

SEQ ID NO: 23199 - DNA, 25 bp, SARS Virus
catgtttcctggccactgactacaa

SEQ ID NO: 23200 - DNA, 25 bp, SARS Virus
atgtttcctggtcactgactacaaa

SEQ ID NO: 23201 - DNA, 25 bp, SARS Virus
tgtttcctggtccctgactacaaaa

SEQ ID NO: 23202 - DNA, 25 bp, SARS Virus
gtttcctggtcactgactacaaaag

SEQ ID NO: 23203 - DNA, 25 bp, SARS Virus
tttcctggtcaccgactacaaaaga

SEQ ID NO: 23204 - DNA, 25 bp, SARS Virus
ttcctggtcactcactacaaaagat

SEQ ID NO: 23205 - DNA, 25 bp, SARS Virus
tcctggtcactgcctacaaaagatg

SEQ ID NO: 23206 - DNA, 25 bp, SARS Virus
cctggtcactgactacaaaagatgt

SEQ ID NO: 23207 - DNA, 25 bp, SARS Virus
ctggtcactgaccacaaaagatgtt

SEQ ID NO: 23208 - DNA, 25 bp, SARS Virus
tggtcactgactccaaaagatgttc

SEQ ID NO: 23209 - DNA, 25 bp, SARS Virus
ggtcactgactacaaaagatgttcc

SEQ ID NO: 23210 - DNA, 25 bp, SARS Virus
gtcactgactaccaaagatgttcct

SEQ ID NO: 23211 - DNA, 25 bp, SARS Virus
tcactgactacacaagatgttcctt

SEQ ID NO: 23212 - DNA, 25 bp, SARS Virus
cactgactacaacagatgttccttt

SEQ ID NO: 23213 - DNA, 25 bp, SARS Virus
actgactacaaacgatgttcctttg

SEQ ID NO: 23214 - DNA, 25 bp, SARS Virus
ctgactacaaaacatgttcctttgt

SEQ ID NO: 23215 - DNA, 25 bp, SARS Virus
tgactacaaaagctgttcctttgta

SEQ ID NO: 23216 - DNA, 25 bp, SARS Virus
gactacaaaagacgttcctttgtag

SEQ ID NO: 23217 - DNA, 25 bp, SARS Virus
actacaaaagatcttcctttgtaga

SEQ ID NO: 23218 - DNA, 25 bp, SARS Virus
ctacaaaagatgctcctttgtagaa

SEQ ID NO: 23219 - DNA, 25 bp, SARS Virus
tacaaaagatgtccctttgtagaat

SEQ ID NO: 23220 - DNA, 25 bp, SARS Virus
acaaaagatgttcctttgtagaatg

SEQ ID NO: 23221 - DNA, 25 bp, SARS Virus
caaaagatgttcctttgtagaatgt

SEQ ID NO: 23222 - DNA, 25 bp, SARS Virus
aaaagatgttcccttgtagaatgtg

SEQ ID NO: 23223 - DNA, 25 bp, SARS Virus
aaagatgttcctctgtagaatgtga

SEQ ID NO: 23224 - DNA, 25 bp, SARS Virus
aagatgttccttcgtagaatgtgat

SEQ ID NO: 23225 - DNA, 25 bp, SARS Virus
agatgttcctttctagaatgtgatg

SEQ ID NO: 23226 - DNA, 25 bp, SARS Virus
gatgttcctttgcagaatgtgatgt

SEQ ID NO: 23227 - DNA, 25 bp, SARS Virus
atgttcctttgtcgaatgtgatgtt

SEQ ID NO: 23228 - DNA, 25 bp, SARS Virus
tgttcctttgtacaatgtgatgttg

SEQ ID NO: 23229 - DNA, 25 bp, SARS Virus
gttcctttgtagcatgtgatgttgg

SEQ ID NO: 23230 - DNA, 25 bp, SARS Virus
ttcctttgtagactgtgatgttggt

SEQ ID NO: 23231 - DNA, 25 bp, SARS Virus
tcctttgtagaacgtgatgttggta

SEQ ID NO: 23232 - DNA, 25 bp, SARS Virus
cctttgtagaatctgatgttggtag

SEQ ID NO: 23233 - DNA, 25 bp, SARS Virus
ctttgtagaatgcgatgttggtagt

SEQ ID NO: 23234 - DNA, 25 bp, SARS Virus
tttgtagaatgtcatgttggtagtt

SEQ ID NO: 23235 - DNA, 25 bp, SARS Virus
ttgtagaatgtgctgttggtagttc

SEQ ID NO: 23236 - DNA, 25 bp, SARS Virus
tgtagaatgtgacgttggtagttcg

SEQ ID NO: 23237 - DNA, 25 bp, SARS Virus
gtagaatgtgatcttggtagttcgg

SEQ ID NO: 23238 - DNA, 25 bp, SARS Virus
tagaatgtgatgctggtagttcgga

SEQ ID NO: 23239 - DNA, 25 bp, SARS Virus
agaatgtgatgtcggtagttcggac

SEQ ID NO: 23240 - DNA, 25 bp, SARS Virus
gaatgtgatgttcgtagttcggaca

SEQ ID NO: 23241 - DNA, 25 bp, SARS Virus
aatgtgatgttgctagttcggacac

SEQ ID NO: 23242 - DNA, 25 bp, SARS Virus
atgtgatgttggcagttcggacaca

SEQ ID NO: 23243 - DNA, 25 bp, SARS Virus
tgtgatgttggtcgttcggacacag

SEQ ID NO: 23244 - DNA, 25 bp, SARS Virus
gtgatgttggtacttcggacacagc

SEQ ID NO: 23245 - DNA, 25 bp, SARS Virus
tgatgttggtagctcggacacagca

SEQ ID NO: 23246 - DNA, 25 bp, SARS Virus
gatgttggtagtccggacacagcat

SEQ ID NO: 23247 - DNA, 25 bp, SARS Virus
atgttggtagttcggacacagcata

SEQ ID NO: 23248 - DNA, 25 bp, SARS Virus
tgttggtagttccgacacagcatat

SEQ ID NO: 23249 - DNA, 25 bp, SARS Virus
gttggtagttcgcacacagcatatt

SEQ ID NO: 23250 - DNA, 25 bp, SARS Virus
ttggtagttcggccacagcatattt

SEQ ID NO: 23251 - DNA, 25 bp, SARS Virus
tggtagttcggacacagcatatttg

SEQ ID NO: 23252 - DNA, 25 bp, SARS Virus
ggtagttcggacccagcatatttga

SEQ ID NO: 23253 - DNA, 25 bp, SARS Virus
gtagttcggacacagcatatttgag

SEQ ID NO: 23254 - DNA, 25 bp, SARS Virus
tagttcggacaccgcatatttgagc

SEQ ID NO: 23255 - DNA, 25 bp, SARS Virus
agttcggacacaccatatttgagct

SEQ ID NO: 23256 - DNA, 25 bp, SARS Virus
gttcggacacagcatatttgagcta

SEQ ID NO: 23257 - DNA, 25 bp, SARS Virus
ttcggacacagcctatttgagctac

SEQ ID NO: 23258 - DNA, 25 bp, SARS Virus
tcggacacagcacatttgagctacc

SEQ ID NO: 23259 - DNA, 25 bp, SARS Virus
cggacacagcatctttgagctacct

SEQ ID NO: 23260 - DNA, 25 bp, SARS Virus
ggacacagcatacttgagctacctc

SEQ ID NO: 23261 - DNA, 25 bp, SARS Virus
gacacagcatatctgagctacctca

SEQ ID NO: 23262 - DNA, 25 bp, SARS Virus
acacagcatattcgagctacctcaa

SEQ ID NO: 23263 - DNA, 25 bp, SARS Virus
cacagcatatttcagctacctcaat

SEQ ID NO: 23264 - DNA, 25 bp, SARS Virus
acagcatatttgcgctacctcaatg

SEQ ID NO: 23265 - DNA, 25 bp, SARS Virus
cagcatatttgacctacctcaatga

SEQ ID NO: 23266 - DNA, 25 bp, SARS Virus
agcatatttgagctacctcaatgaa

SEQ ID NO: 23267 - DNA, 25 bp, SARS Virus
gcatatttgagccacctcaatgaat

SEQ ID NO: 23268 - DNA, 25 bp, SARS Virus
catatttgagctccctcaatgaatg

SEQ ID NO: 23269 - DNA, 25 bp, SARS Virus
atatttgagctacctcaatgaatgt

SEQ ID NO: 23270 - DNA, 25 bp, SARS Virus
tatttgagctacctcaatgaatgtg

SEQ ID NO: 23271 - DNA, 25 bp, SARS Virus
atttgagctaccccaatgaatgtgt

SEQ ID NO: 23272 - DNA, 25 bp, SARS Virus
tttgagctacctcaatgaatgtgtc

SEQ ID NO: 23273 - DNA, 25 bp, SARS Virus
ttgagctacctccatgaatgtgtct

SEQ ID NO: 23274 - DNA, 25 bp, SARS Virus
tgagctacctcactgaatgtgtctc

SEQ ID NO: 23275 - DNA, 25 bp, SARS Virus
gagctacctcaacgaatgtgtctct

SEQ ID NO: 23276 - DNA, 25 bp, SARS Virus
agctacctcaatcaatgtgtctcta

SEQ ID NO: 23277 - DNA, 25 bp, SARS Virus
gctacctcaatgcatgtgtctctaa

SEQ ID NO: 23278 - DNA, 25 bp, SARS Virus
ctacctcaatgactgtgtctctaac

SEQ ID NO: 23279 - DNA, 25 bp, SARS Virus
tacctcaatgaacgtgtctctaact

SEQ ID NO: 23280 - DNA, 25 bp, SARS Virus
acctcaatgaatctgtctctaactt

SEQ ID NO: 23281 - DNA, 25 bp, SARS Virus
cctcaatgaatgcgtctctaacttg

SEQ ID NO: 23282 - DNA, 25 bp, SARS Virus
ctcaatgaatgtctctctaacttgg

SEQ ID NO: 23283 - DNA, 25 bp, SARS Virus
tcaatgaatgtgcctctaacttggt

SEQ ID NO: 23284 - DNA, 25 bp, SARS Virus
caatgaatgtgtctctaacttggtt

SEQ ID NO: 23285 - DNA, 25 bp, SARS Virus
aatgaatgtgtccctaacttggttt

SEQ ID NO: 23286 - DNA, 25 bp, SARS Virus
atgaatgtgtctctaacttggtttt

SEQ ID NO: 23287 - DNA, 25 bp, SARS Virus
tgaatgtgtctccaacttggtttta

SEQ ID NO: 23288 - DNA, 25 bp, SARS Virus
gaatgtgtctctcacttggttttaa

SEQ ID NO: 23289 - DNA, 25 bp, SARS Virus
aatgtgtctctaccttggttttaac

SEQ ID NO: 23290 - DNA, 25 bp, SARS Virus
atgtgtctctaacttggttttaacc

SEQ ID NO: 23291 - DNA, 25 bp, SARS Virus
tgtgtctctaacctggttttaacct

SEQ ID NO: 23292 - DNA, 25 bp, SARS Virus
gtgtctctaactcggttttaaccta

SEQ ID NO: 23293 - DNA, 25 bp, SARS Virus
tgtctctaacttcgttttaacctac

SEQ ID NO: 23294 - DNA, 25 bp, SARS Virus
gtctctaacttgcttttaacctacc

SEQ ID NO: 23295 - DNA, 25 bp, SARS Virus
tctctaacttggctttaacctaccc

SEQ ID NO: 23296 - DNA, 25 bp, SARS Virus
ctctaacttggtcttaacctaccca

SEQ ID NO: 23297 - DNA, 25 bp, SARS Virus
tctaacttggttctaacctacccat

SEQ ID NO: 23298 - DNA, 25 bp, SARS Virus
ctaacttggtttcaacctacccata

SEQ ID NO: 23299 - DNA, 25 bp, SARS Virus
taacttggttttcacctacccataa

SEQ ID NO: 23300 - DNA, 25 bp, SARS Virus
aacttggttttaccctacccataat

SEQ ID NO: 23301 - DNA, 25 bp, SARS Virus
acttggttttaacctacccataata

SEQ ID NO: 23302 - DNA, 25 bp, SARS Virus
cttggttttaacctacccataatat

SEQ ID NO: 23303 - DNA, 25 bp, SARS Virus
ttggttttaacccacccataatatt

SEQ ID NO: 23304 - DNA, 25 bp, SARS Virus
tggttttaacctccccataatattt

SEQ ID NO: 23305 - DNA, 25 bp, SARS Virus
ggttttaacctacccataatatttt

SEQ ID NO: 23306 - DNA, 25 bp, SARS Virus
gttttaacctacccataatattttt

SEQ ID NO: 23307 - DNA, 25 bp, SARS Virus
ttttaacctacccataatatttttc

SEQ ID NO: 23308 - DNA, 25 bp, SARS Virus
tttaacctacccctaatatttttcc

SEQ ID NO: 23309 - DNA, 25 bp, SARS Virus
ttaacctacccacaatatttttcct

SEQ ID NO: 23310 - DNA, 25 bp, SARS Virus
taacctacccatcatatttttccta

SEQ ID NO: 23311 - DNA, 25 bp, SARS Virus
aacctacccatactatttttcctat

SEQ ID NO: 23312 - DNA, 25 bp, SARS Virus
acctacccataacatttttcctatt

SEQ ID NO: 23313 - DNA, 25 bp, SARS Virus
cctacccataatctttttcctatta

SEQ ID NO: 23314 - DNA, 25 bp, SARS Virus
ctacccataatacttttcctattac

SEQ ID NO: 23315 - DNA, 25 bp, SARS Virus
tacccataatatctttcctattacg

SEQ ID NO: 23316 - DNA, 25 bp, SARS Virus
acccataatattcttcctattacga

SEQ ID NO: 23317 - DNA, 25 bp, SARS Virus
cccataatatttctcctattacgaa

SEQ ID NO: 23318 - DNA, 25 bp, SARS Virus
ccataatattttccctattacgaat

SEQ ID NO: 23319 - DNA, 25 bp, SARS Virus
cataatatttttcctattacgaatg

SEQ ID NO: 23320 - DNA, 25 bp, SARS Virus
ataatatttttcctattacgaatga

SEQ ID NO: 23321 - DNA, 25 bp, SARS Virus
taatatttttcccattacgaatgat

SEQ ID NO: 23322 - DNA, 25 bp, SARS Virus
aatatttttcctcttacgaatgata

SEQ ID NO: 23323 - DNA, 25 bp, SARS Virus
atatttttcctactacgaatgatat

SEQ ID NO: 23324 - DNA, 25 bp, SARS Virus
tatttttcctatcacgaatgatatg

SEQ ID NO: 23325 - DNA, 25 bp, SARS Virus
atttttcctattccgaatgatatgt

SEQ ID NO: 23326 - DNA, 25 bp, SARS Virus
tttttcctattacgaatgatatgtc

SEQ ID NO: 23327 - DNA, 25 bp, SARS Virus
ttttcctattaccaatgatatgtct

SEQ ID NO: 23328 - DNA, 25 bp, SARS Virus
tttcctattacgcatgatatgtctc

SEQ ID NO: 23329 - DNA, 25 bp, SARS Virus
ttcctattacgactgatatgtctcg

SEQ ID NO: 23330 - DNA, 25 bp, SARS Virus
tcctattacgaacgatatgtctcgt

SEQ ID NO: 23331 - DNA, 25 bp, SARS Virus
cctattacgaatcatatgtctcgtc

SEQ ID NO: 23332 - DNA, 25 bp, SARS Virus
ctattacgaatgctatgtctcgtcg

SEQ ID NO: 23333 - DNA, 25 bp, SARS Virus
tattacgaatgacatgtctcgtcgg

SEQ ID NO: 23334 - DNA, 25 bp, SARS Virus
attacgaatgatctgtctcgtcgga

SEQ ID NO: 23335 - DNA, 25 bp, SARS Virus
ttacgaatgatacgtctcgtcggat

SEQ ID NO: 23336 - DNA, 25 bp, SARS Virus
tacgaatgatatctctcgtcggata

SEQ ID NO: 23337 - DNA, 25 bp, SARS Virus
acgaatgatatgcctcgtcggatat

SEQ ID NO: 23338 - DNA, 25 bp, SARS Virus
cgaatgatatgtctcgtcggatatc

SEQ ID NO: 23339 - DNA, 25 bp, SARS Virus
gaatgatatgtcccgtcggatatct

SEQ ID NO: 23340 - DNA, 25 bp, SARS Virus
aatgatatgtctcgtcggatatctg

SEQ ID NO: 23341 - DNA, 25 bp, SARS Virus
atgatatgtctcctcggatatctgg

SEQ ID NO: 23342 - DNA, 25 bp, SARS Virus
tgatatgtctcgccggatatctgga

SEQ ID NO: 23343 - DNA, 25 bp, SARS Virus
gatatgtctcgtcggatatctggaa

SEQ ID NO: 23344 - DNA, 25 bp, SARS Virus
atatgtctcgtccgatatctggaac

SEQ ID NO: 23345 - DNA, 25 bp, SARS Virus
tatgtctcgtcgcatatctggaaca

SEQ ID NO: 23346 - DNA, 25 bp, SARS Virus
atgtctcgtcggctatctggaacat

SEQ ID NO: 23347 - DNA, 25 bp, SARS Virus
tgtctcgtcggacatctggaacatg

SEQ ID NO: 23348 - DNA, 25 bp, SARS Virus
gtctcgtcggatctctggaacatgg

SEQ ID NO: 23349 - DNA, 25 bp, SARS Virus
tctcgtcggatacctggaacatggt

SEQ ID NO: 23350 - DNA, 25 bp, SARS Virus
ctcgtcggatatctggaacatggtt

SEQ ID NO: 23351 - DNA, 25 bp, SARS Virus
tcgtcggatatccggaacatggttg

SEQ ID NO: 23352 - DNA, 25 bp, SARS Virus
cgtcggatatctcgaacatggttga

SEQ ID NO: 23353 - DNA, 25 bp, SARS Virus
gtcggatatctgcaacatggttgag

SEQ ID NO: 23354 - DNA, 25 bp, SARS Virus
tcggatatctggcacatggttgagt

SEQ ID NO: 23355 - DNA, 25 bp, SARS Virus
cggatatctggaccatggttgagtt

SEQ ID NO: 23356 - DNA, 25 bp, SARS Virus
ggatatctggaacatggttgagttg

SEQ ID NO: 23357 - DNA, 25 bp, SARS Virus
gatatctggaacctggttgagttgg

SEQ ID NO: 23358 - DNA, 25 bp, SARS Virus
atatctggaacacggttgagttggt

SEQ ID NO: 23359 - DNA, 25 bp, SARS Virus
tatctggaacatcgttgagttggta

SEQ ID NO: 23360 - DNA, 25 bp, SARS Virus
atctggaacatgcttgagttggtaa

SEQ ID NO: 23361 - DNA, 25 bp, SARS Virus
tctggaacatggctgagttggtaat

SEQ ID NO: 23362 - DNA, 25 bp, SARS Virus
ctggaacatggtcgagttggtaatg

SEQ ID NO: 23363 - DNA, 25 bp, SARS Virus
tggaacatggttcagttggtaatgg

SEQ ID NO: 23364 - DNA, 25 bp, SARS Virus
ggaacatggttgcgttggtaatggt

SEQ ID NO: 23365 - DNA, 25 bp, SARS Virus
gaacatggttgacttggtaatggtt

SEQ ID NO: 23366 - DNA, 25 bp, SARS Virus
aacatggttgagctggtaatggttt

SEQ ID NO: 23367 - DNA, 25 bp, SARS Virus
acatggttgagtcggtaatggttta

SEQ ID NO: 23368 - DNA, 25 bp, SARS Virus
catggttgagttcgtaatggtttac

SEQ ID NO: 23369 - DNA, 25 bp, SARS Virus
atggttgagttgctaatggtttacg

SEQ ID NO: 23370 - DNA, 25 bp, SARS Virus
tggttgagttggcaatggtttacgc

SEQ ID NO: 23371 - DNA, 25 bp, SARS Virus
ggttgagttggtcatggtttacgct

SEQ ID NO: 23372 - DNA, 25 bp, SARS Virus
gttgagttggtactggtttacgctc

SEQ ID NO: 23373 - DNA, 25 bp, SARS Virus
ttgagttggtaacggtttacgctca

SEQ ID NO: 23374 - DNA, 25 bp, SARS Virus
tgagttggtaatcgtttacgctcaa

SEQ ID NO: 23375 - DNA, 25 bp, SARS Virus
gagttggtaatgctttacgctcaaa

SEQ ID NO: 23376 - DNA, 25 bp, SARS Virus
agttggtaatggcttacgctcaaaa

SEQ ID NO: 23377 - DNA, 25 bp, SARS Virus
gttggtaatggtctacgctcaaaac

SEQ ID NO: 23378 - DNA, 25 bp, SARS Virus
ttggtaatggttcacgctcaaaact

SEQ ID NO: 23379 - DNA, 25 bp, SARS Virus
tggtaatggtttccgctcaaaacta

SEQ ID NO: 23380 - DNA, 25 bp, SARS Virus
ggtaatggtttacgctcaaaactat

SEQ ID NO: 23381 - DNA, 25 bp, SARS Virus
gtaatggtttaccctcaaaactatt

SEQ ID NO: 23382 - DNA, 25 bp, SARS Virus
taatggtttacgctcaaaactatta

SEQ ID NO: 23383 - DNA, 25 bp, SARS Virus
aatggtttacgcccaaaactattaa

SEQ ID NO: 23384 - DNA, 25 bp, SARS Virus
atggtttacgctcaaaactattaaa

SEQ ID NO: 23385 - DNA, 25 bp, SARS Virus
tggtttacgctccaaactattaaag

SEQ ID NO: 23386 - DNA, 25 bp, SARS Virus
ggtttacgctcacaactattaaagt

SEQ ID NO: 23387 - DNA, 25 bp, SARS Virus
gtttacgctcaacactattaaagtt

SEQ ID NO: 23388 - DNA, 25 bp, SARS Virus
tttacgctcaaacctattaaagttt

SEQ ID NO: 23389 - DNA, 25 bp, SARS Virus
ttacgctcaaaactattaaagtttg

SEQ ID NO: 23390 - DNA, 25 bp, SARS Virus
tacgctcaaaaccattaaagtttga

SEQ ID NO: 23391 - DNA, 25 bp, SARS Virus
acgctcaaaactcttaaagtttgag

SEQ ID NO: 23392 - DNA, 25 bp, SARS Virus
cgctcaaaactactaaagtttgagt

SEQ ID NO: 23393 - DNA, 25 bp, SARS Virus
gctcaaaactatcaaagtttgagtg

SEQ ID NO: 23394 - DNA, 25 bp, SARS Virus
ctcaaaactattcaagtttgagtgt

SEQ ID NO: 23395 - DNA, 25 bp, SARS Virus
tcaaaactattacagtttgagtgta

SEQ ID NO: 23396 - DNA, 25 bp, SARS Virus
caaaactattaacgtttgagtgtac

SEQ ID NO: 23397 - DNA, 25 bp, SARS Virus
aaaactattaaactttgagtgtaca

SEQ ID NO: 23398 - DNA, 25 bp, SARS Virus
aaactattaaagcttgagtgtacaa

SEQ ID NO: 23399 - DNA, 25 bp, SARS Virus
aactattaaagtctgagtgtacaag

SEQ ID NO: 23400 - DNA, 25 bp, SARS Virus
actattaaagttcgagtgtacaaga

SEQ ID NO: 23401 - DNA, 25 bp, SARS Virus
ctattaaagtttcagtgtacaagat

SEQ ID NO: 23402 - DNA, 25 bp, SARS Virus
tattaaagtttgcgtgtacaagatt

SEQ ID NO: 23403 - DNA, 25 bp, SARS Virus
attaaagtttgactgtacaagattg

SEQ ID NO: 23404 - DNA, 25 bp, SARS Virus
ttaaagtttgagcgtacaagattgt

SEQ ID NO: 23405 - DNA, 25 bp, SARS Virus
taaagtttgagtctacaagattgtg

SEQ ID NO: 23406 - DNA, 25 bp, SARS Virus
aaagtttgagtgcacaagattgtgt

SEQ ID NO: 23407 - DNA, 25 bp, SARS Virus
aagtttgagtgtccaagattgtgtt

SEQ ID NO: 23408 - DNA, 25 bp, SARS Virus
agtttgagtgtacaagattgtgttt

SEQ ID NO: 23409 - DNA, 25 bp, SARS Virus
gtttgagtgtaccagattgtgtttt

SEQ ID NO: 23410 - DNA, 25 bp, SARS Virus
tttgagtgtacacgattgtgtttta

SEQ ID NO: 23411 - DNA, 25 bp, SARS Virus
ttgagtgtacaacattgtgttttaa

SEQ ID NO: 23412 - DNA, 25 bp, SARS Virus
tgagtgtacaagcttgtgttttaaa

SEQ ID NO: 23413 - DNA, 25 bp, SARS Virus
gagtgtacaagactgtgttttaaac

SEQ ID NO: 23414 - DNA, 25 bp, SARS Virus
agtgtacaagatcgtgttttaaacg

SEQ ID NO: 23415 - DNA, 25 bp, SARS Virus
gtgtacaagattctgttttaaacga

SEQ ID NO: 23416 - DNA, 25 bp, SARS Virus
tgtacaagattgcgttttaaacgac

SEQ ID NO: 23417 - DNA, 25 bp, SARS Virus
gtacaagattgtcttttaaacgact

SEQ ID NO: 23418 - DNA, 25 bp, SARS Virus
tacaagattgtgctttaaacgacta

SEQ ID NO: 23419 - DNA, 25 bp, SARS Virus
acaagattgtgtcttaaacgactac

SEQ ID NO: 23420 - DNA, 25 bp, SARS Virus
caagattgtgttctaaacgactact

SEQ ID NO: 23421 - DNA, 25 bp, SARS Virus
aagattgtgtttcaaacgactacta

SEQ ID NO: 23422 - DNA, 25 bp, SARS Virus
agattgtgttttcaacgactactaa

SEQ ID NO: 23423 - DNA, 25 bp, SARS Virus
gattgtgttttacacgactactaaa

SEQ ID NO: 23424 - DNA, 25 bp, SARS Virus
attgtgttttaaccgactactaaat

SEQ ID NO: 23425 - DNA, 25 bp, SARS Virus
ttgtgttttaaacgactactaaatt

SEQ ID NO: 23426 - DNA, 25 bp, SARS Virus
tgtgttttaaaccactactaaattt

SEQ ID NO: 23427 - DNA, 25 bp, SARS Virus
gtgttttaaacgcctactaaattta

SEQ ID NO: 23428 - DNA, 25 bp, SARS Virus
tgttttaaacgactactaaatttag

SEQ ID NO: 23429 - DNA, 25 bp, SARS Virus
gttttaaacgaccactaaatttagt

SEQ ID NO: 23430 - DNA, 25 bp, SARS Virus
ttttaaacgactcctaaatttagtt

SEQ ID NO: 23431 - DNA, 25 bp, SARS Virus
tttaaacgactactaaatttagttt

SEQ ID NO: 23432 - DNA, 25 bp, SARS Virus
ttaaacgactaccaaatttagttta

SEQ ID NO: 23433 - DNA, 25 bp, SARS Virus
taaacgactactcaatttagtttac

SEQ ID NO: 23434 - DNA, 25 bp, SARS Virus
aaacgactactacatttagtttact

SEQ ID NO: 23435 - DNA, 25 bp, SARS Virus
aacgactactaactttagtttactg

SEQ ID NO: 23436 - DNA, 25 bp, SARS Virus
acgactactaaacttagtttactgt

SEQ ID NO: 23437 - DNA, 25 bp, SARS Virus
cgactactaaatctagtttactgtc

SEQ ID NO: 23438 - DNA, 25 bp, SARS Virus
gactactaaattcagtttactgtcc

SEQ ID NO: 23439 - DNA, 25 bp, SARS Virus
actactaaatttcgtttactgtccg

SEQ ID NO: 23440 - DNA, 25 bp, SARS Virus
ctactaaatttactttactgtccga

SEQ ID NO: 23441 - DNA, 25 bp, SARS Virus
tactaaatttagcttactgtccgaa

SEQ ID NO: 23442 - DNA, 25 bp, SARS Virus
actaaatttagtctactgtccgaag

SEQ ID NO: 23443 - DNA, 25 bp, SARS Virus
ctaaatttagttcactgtccgaagt

SEQ ID NO: 23444 - DNA, 25 bp, SARS Virus
taaatttagtttcctgtccgaagtg

SEQ ID NO: 23445 - DNA, 25 bp, SARS Virus
aaatttagtttactgtccgaagtgt

SEQ ID NO: 23446 - DNA, 25 bp, SARS Virus
aatttagtttaccgtccgaagtgtt

SEQ ID NO: 23447 - DNA, 25 bp, SARS Virus
atttagtttactctccgaagtgttt

SEQ ID NO: 23448 - DNA, 25 bp, SARS Virus
tttagtttactgcccgaagtgtttc

SEQ ID NO: 23449 - DNA, 25 bp, SARS Virus
ttagtttactgtccgaagtgtttcg

SEQ ID NO: 23450 - DNA, 25 bp, SARS Virus
tagtttactgtccgaagtgtttcgg

SEQ ID NO: 23451 - DNA, 25 bp, SARS Virus
agtttactgtcccaagtgtttcggt

SEQ ID NO: 23452 - DNA, 25 bp, SARS Virus
gtttactgtccgcagtgtttcggtc

SEQ ID NO: 23453 - DNA, 25 bp, SARS Virus
tttactgtccgacgtgtttcggtcg

SEQ ID NO: 23454 - DNA, 25 bp, SARS Virus
ttactgtccgaactgtttcggtcga

SEQ ID NO: 23455 - DNA, 25 bp, SARS Virus
tactgtccgaagcgtttcggtcgaa

SEQ ID NO: 23456 - DNA, 25 bp, SARS Virus
actgtccgaagtctttcggtcgaag

SEQ ID NO: 23457 - DNA, 25 bp, SARS Virus
ctgtccgaagtgcttcggtcgaagt

SEQ ID NO: 23458 - DNA, 25 bp, SARS Virus
tgtccgaagtgtctcggtcgaagtg

SEQ ID NO: 23459 - DNA, 25 bp, SARS Virus
gtccgaagtgttccggtcgaagtgc

SEQ ID NO: 23460 - DNA, 25 bp, SARS Virus
tccgaagtgtttcggtcgaagtgct

SEQ ID NO: 23461 - DNA, 25 bp, SARS Virus
ccgaagtgtttccgtcgaagtgctc

SEQ ID NO: 23462 - DNA, 25 bp, SARS Virus
cgaagtgtttcgctcgaagtgctct

SEQ ID NO: 23463 - DNA, 25 bp, SARS Virus
gaagtgtttcggccgaagtgctctc

SEQ ID NO: 23464 - DNA, 25 bp, SARS Virus
aagtgtttcggtcgaagtgctctcg

SEQ ID NO: 23465 - DNA, 25 bp, SARS Virus
agtgtttcggtccaagtgctctcga

SEQ ID NO: 23466 - DNA, 25 bp, SARS Virus
gtgtttcggtcgcagtgctctcgat

SEQ ID NO: 23467 - DNA, 25 bp, SARS Virus
tgtttcggtcgacgtgctctcgata

SEQ ID NO: 23468 - DNA, 25 bp, SARS Virus
gtttcggtcgaactgctctcgatag

SEQ ID NO: 23469 - DNA, 25 bp, SARS Virus
tttcggtcgaagcgctctcgataga

SEQ ID NO: 23470 - DNA, 25 bp, SARS Virus
ttcggtcgaagtcctctcgatagac

SEQ ID NO: 23471 - DNA, 25 bp, SARS Virus
tcggtcgaagtgctctcgatagaca

SEQ ID NO: 23472 - DNA, 25 bp, SARS Virus
cggtcgaagtgccctcgatagacag

SEQ ID NO: 23473 - DNA, 25 bp, SARS Virus
ggtcgaagtgctctcgatagacagt

SEQ ID NO: 23474 - DNA, 25 bp, SARS Virus
gtcgaagtgctcccgatagacagtg

SEQ ID NO: 23475 - DNA, 25 bp, SARS Virus
tcgaagtgctctcgatagacagtgt

SEQ ID NO: 23476 - DNA, 25 bp, SARS Virus
cgaagtgctctccatagacagtgta

SEQ ID NO: 23477 - DNA, 25 bp, SARS Virus
gaagtgctctcgctagacagtgtaa

SEQ ID NO: 23478 - DNA, 25 bp, SARS Virus
aagtgctctcgacagacagtgtaag

SEQ ID NO: 23479 - DNA, 25 bp, SARS Virus
agtgctctcgatcgacagtgtaaga

SEQ ID NO: 23480 - DNA, 25 bp, SARS Virus
gtgctctcgatacacagtgtaagaa

SEQ ID NO: 23481 - DNA, 25 bp, SARS Virus
tgctctcgatagccagtgtaagaag

SEQ ID NO: 23482 - DNA, 25 bp, SARS Virus
gctctcgatagacagtgtaagaagg

SEQ ID NO: 23483 - DNA, 25 bp, SARS Virus
ctctcgatagaccgtgtaagaaggg

SEQ ID NO: 23484 - DNA, 25 bp, SARS Virus
tctcgatagacactgtaagaagggt

SEQ ID NO: 23485 - DNA, 25 bp, SARS Virus
ctcgatagacagcgtaagaagggtc

SEQ ID NO: 23486 - DNA, 25 bp, SARS Virus
tcgatagacagtctaagaagggtct

SEQ ID NO: 23487 - DNA, 25 bp, SARS Virus
cgatagacagtgcaagaagggtctg

SEQ ID NO: 23488 - DNA, 25 bp, SARS Virus
gatagacagtgtcagaagggtctga

SEQ ID NO: 23489 - DNA, 25 bp, SARS Virus
atagacagtgtacgaagggtctgaa

SEQ ID NO: 23490 - DNA, 25 bp, SARS Virus
tagacagtgtaacaagggtctgaac

SEQ ID NO: 23491 - DNA, 25 bp, SARS Virus
agacagtgtaagcagggtctgaact

SEQ ID NO: 23492 - DNA, 25 bp, SARS Virus
gacagtgtaagacgggtctgaactt

SEQ ID NO: 23493 - DNA, 25 bp, SARS Virus
acagtgtaagaacggtctgaactta

SEQ ID NO: 23494 - DNA, 25 bp, SARS Virus
cagtgtaagaagcgtctgaacttac

SEQ ID NO: 23495 - DNA, 25 bp, SARS Virus
agtgtaagaaggctctgaacttacc

SEQ ID NO: 23496 - DNA, 25 bp, SARS Virus
gtgtaagaagggcctgaacttaccg

SEQ ID NO: 23497 - DNA, 25 bp, SARS Virus
tgtaagaagggtctgaacttaccgc

SEQ ID NO: 23498 - DNA, 25 bp, SARS Virus
gtaagaagggtccgaacttaccgct

SEQ ID NO: 23499 - DNA, 25 bp, SARS Virus
taagaagggtctcaacttaccgcta

SEQ ID NO: 23500 - DNA, 25 bp, SARS Virus
aagaagggtctgcacttaccgctac

SEQ ID NO: 23501 - DNA, 25 bp, SARS Virus
agaagggtctgaccttaccgctaca

SEQ ID NO: 23502 - DNA, 25 bp, SARS Virus
gaagggtctgaacttaccgctacat

SEQ ID NO: 23503 - DNA, 25 bp, SARS Virus
aagggtctgaacctaccgctacatc

SEQ ID NO: 23504 - DNA, 25 bp, SARS Virus
agggtctgaactcaccgctacatca

SEQ ID NO: 23505 - DNA, 25 bp, SARS Virus
gggtctgaacttcccgctacatcac

SEQ ID NO: 23506 - DNA, 25 bp, SARS Virus
ggtctgaacttaccgctacatcacc

SEQ ID NO: 23507 - DNA, 25 bp, SARS Virus
gtctgaacttaccgctacatcaccg

SEQ ID NO: 23508 - DNA, 25 bp, SARS Virus
tctgaacttacccctacatcaccga

SEQ ID NO: 23509 - DNA, 25 bp, SARS Virus
ctgaacttaccgctacatcaccgat

SEQ ID NO: 23510 - DNA, 25 bp, SARS Virus
tgaacttaccgccacatcaccgata

SEQ ID NO: 23511 - DNA, 25 bp, SARS Virus
gaacttaccgctccatcaccgataa

SEQ ID NO: 23512 - DNA, 25 bp, SARS Virus
aacttaccgctacatcaccgataac

SEQ ID NO: 23513 - DNA, 25 bp, SARS Virus
acttaccgctacctcaccgataact

SEQ ID NO: 23514 - DNA, 25 bp, SARS Virus
cttaccgctacaccaccgataactg

SEQ ID NO: 23515 - DNA, 25 bp, SARS Virus
ttaccgctacatcaccgataactga

SEQ ID NO: 23516 - DNA, 25 bp, SARS Virus
taccgctacatccccgataactgat

SEQ ID NO: 23517 - DNA, 25 bp, SARS Virus
accgctacatcaccgataactgata

SEQ ID NO: 23518 - DNA, 25 bp, SARS Virus
ccgctacatcaccgataactgatat

SEQ ID NO: 23519 - DNA, 25 bp, SARS Virus
cgctacatcacccataactgatatc

SEQ ID NO: 23520 - DNA, 25 bp, SARS Virus
gctacatcaccgctaactgatatct

SEQ ID NO: 23521 - DNA, 25 bp, SARS Virus
ctacatcaccgacaactgatatctg

SEQ ID NO: 23522 - DNA, 25 bp, SARS Virus
tacatcaccgatcactgatatctgt

SEQ ID NO: 23523 - DNA, 25 bp, SARS Virus
acatcaccgatacctgatatctgtg

SEQ ID NO: 23524 - DNA, 25 bp, SARS Virus
catcaccgataactgatatctgtga

SEQ ID NO: 23525 - DNA, 25 bp, SARS Virus
atcaccgataaccgatatctgtgat

SEQ ID NO: 23526 - DNA, 25 bp, SARS Virus
tcaccgataactcatatctgtgata

SEQ ID NO: 23527 - DNA, 25 bp, SARS Virus
caccgataactgctatctgtgataa

SEQ ID NO: 23528 - DNA, 25 bp, SARS Virus
accgataactgacatctgtgataag

SEQ ID NO: 23529 - DNA, 25 bp, SARS Virus
ccgataactgatctctgtgataagt

SEQ ID NO: 23530 - DNA, 25 bp, SARS Virus
cgataactgatacctgtgataagtc

SEQ ID NO: 23531 - DNA, 25 bp, SARS Virus
gataactgatatctgtgataagtcg

SEQ ID NO: 23532 - DNA, 25 bp, SARS Virus
ataactgatatccgtgataagtcgc

SEQ ID NO: 23533 - DNA, 25 bp, SARS Virus
taactgatatctctgataagtcgct

SEQ ID NO: 23534 - DNA, 25 bp, SARS Virus
aactgatatctgcgataagtcgctc

SEQ ID NO: 23535 - DNA, 25 bp, SARS Virus
actgatatctgtcataagtcgctca

SEQ ID NO: 23536 - DNA, 25 bp, SARS Virus
ctgatatctgtgctaagtcgctcaa

SEQ ID NO: 23537 - DNA, 25 bp, SARS Virus
tgatatctgtgacaagtcgctcaaa

SEQ ID NO: 23538 - DNA, 25 bp, SARS Virus
gatatctgtgatcagtcgctcaaag

SEQ ID NO: 23539 - DNA, 25 bp, SARS Virus
atatctgtgatacgtcgctcaaagt

SEQ ID NO: 23540 - DNA, 25 bp, SARS Virus
tatctgtgataactcgctcaaagtt

SEQ ID NO: 23541 - DNA, 25 bp, SARS Virus
atctgtgataagccgctcaaagttc

SEQ ID NO: 23542 - DNA, 25 bp, SARS Virus
tctgtgataagtcgctcaaagttct

SEQ ID NO: 23543 - DNA, 25 bp, SARS Virus
ctgtgataagtccctcaaagttctt

SEQ ID NO: 23544 - DNA, 25 bp, SARS Virus
tgtgataagtcgctcaaagttcttt

SEQ ID NO: 23545 - DNA, 25 bp, SARS Virus
gtgataagtcgcccaaagttctttc

SEQ ID NO: 23546 - DNA, 25 bp, SARS Virus
tgataagtcgctcaaagttctttcc

SEQ ID NO: 23547 - DNA, 25 bp, SARS Virus
gataagtcgctccaagttctttcca

SEQ ID NO: 23548 - DNA, 25 bp, SARS Virus
ataagtcgctcacagttctttccac

SEQ ID NO: 23549 - DNA, 25 bp, SARS Virus
taagtcgctcaacgttctttccacg

SEQ ID NO: 23550 - DNA, 25 bp, SARS Virus
aagtcgctcaaacttctttccacga

SEQ ID NO: 23551 - DNA, 25 bp, SARS Virus
agtcgctcaaagctctttccacgat

SEQ ID NO: 23552 - DNA, 25 bp, SARS Virus
gtcgctcaaagtcctttccacgatt

SEQ ID NO: 23553 - DNA, 25 bp, SARS Virus
atatttaatgtcgttccatgtaaga

SEQ ID NO: 23554 - DNA, 25 bp, SARS Virus
tatttaatgtcggtccatgtaagaa

SEQ ID NO: 23555 - DNA, 25 bp, SARS Virus
atttaatgtcgtgccatgtaagaat

SEQ ID NO: 23556 - DNA, 25 bp, SARS Virus
tttaatgtcgttgcatgtaagaata

SEQ ID NO: 23557 - DNA, 25 bp, SARS Virus
ttaatgtcgttcgatgtaagaatac

SEQ ID NO: 23558 - DNA, 25 bp, SARS Virus
taatgtcgttccgtgtaagaataca

SEQ ID NO: 23559 - DNA, 25 bp, SARS Virus
aatgtcgttccaggtaagaatacac

SEQ ID NO: 23560 - DNA, 25 bp, SARS Virus
atgtcgttccatgtaagaatacacg

SEQ ID NO: 23561 - DNA, 25 bp, SARS Virus
tgtcgttccatggaagaatacacgc

SEQ ID NO: 23562 - DNA, 25 bp, SARS Virus
gtcgttccatgtgagaatacacgct

SEQ ID NO: 23563 - DNA, 25 bp, SARS Virus
tcgttccatgtaggaatacacgctt

SEQ ID NO: 23564 - DNA, 25 bp, SARS Virus
cgttccatgtaagaatacacgctta

SEQ ID NO: 23565 - DNA, 25 bp, SARS Virus
gttccatgtaaggatacacgcttac

SEQ ID NO: 23566 - DNA, 25 bp, SARS Virus
ttccatgtaagagtacacgcttact

SEQ ID NO: 23567 - DNA, 25 bp, SARS Virus
tccatgtaagaagacacgcttactc

SEQ ID NO: 23568 - DNA, 25 bp, SARS Virus
ccatgtaagaatgcacgcttactca

SEQ ID NO: 23569 - DNA, 25 bp, SARS Virus
catgtaagaatagacgcttactcat

SEQ ID NO: 23570 - DNA, 25 bp, SARS Virus
atgtaagaatacgcgcttactcatg

SEQ ID NO: 23571 - DNA, 25 bp, SARS Virus
tgtaagaatacaggcttactcatgt

SEQ ID NO: 23572 - DNA, 25 bp, SARS Virus
gtaagaatacacgcttactcatgtg

SEQ ID NO: 23573 - DNA, 25 bp, SARS Virus
taagaatacacggttactcatgtga

SEQ ID NO: 23574 - DNA, 25 bp, SARS Virus
aagaatacacgcgtactcatgtgac

SEQ ID NO: 23575 - DNA, 25 bp, SARS Virus
agaatacacgctgactcatgtgacc

SEQ ID NO: 23576 - DNA, 25 bp, SARS Virus
gaatacacgcttgctcatgtgacca

SEQ ID NO: 23577 - DNA, 25 bp, SARS Virus
aatacacgcttagtcatgtgaccat

SEQ ID NO: 23578 - DNA, 25 bp, SARS Virus
atacacgcttacgcatgtgaccatt

SEQ ID NO: 23579 - DNA, 25 bp, SARS Virus
tacacgcttactgatgtgaccattg

SEQ ID NO: 23580 - DNA, 25 bp, SARS Virus
acacgcttactcgtgtgaccattga

SEQ ID NO: 23581 - DNA, 25 bp, SARS Virus
cacgcttactcaggtgaccattgat

SEQ ID NO: 23582 - DNA, 25 bp, SARS Virus
acgcttactcatgtgaccattgata

SEQ ID NO: 23583 - DNA, 25 bp, SARS Virus
cgcttactcatgggaccattgatag

SEQ ID NO: 23584 - DNA, 25 bp, SARS Virus
gcttactcatgtgaccattgatagt

SEQ ID NO: 23585 - DNA, 25 bp, SARS Virus
cttactcatgtggccattgatagtc

SEQ ID NO: 23586 - DNA, 25 bp, SARS Virus
ttactcatgtgagcattgatagtca

SEQ ID NO: 23587 - DNA, 25 bp, SARS Virus
tactcatgtgacgattgatagtcac

SEQ ID NO: 23588 - DNA, 25 bp, SARS Virus
actcatgtgaccgttgatagtcaca

SEQ ID NO: 23589 - DNA, 25 bp, SARS Virus
ctcatgtgaccagtgatagtcacac

SEQ ID NO: 23590 - DNA, 25 bp, SARS Virus
tcatgtgaccatggatagtcacacc

SEQ ID NO: 23591 - DNA, 25 bp, SARS Virus
catgtgaccattgatagtcacacca

SEQ ID NO: 23592 - DNA, 25 bp, SARS Virus
atgtgaccattggtagtcacaccag

SEQ ID NO: 23593 - DNA, 25 bp, SARS Virus
tgtgaccattgagagtcacaccagt

SEQ ID NO: 23594 - DNA, 25 bp, SARS Virus
gtgaccattgatggtcacaccagta

SEQ ID NO: 23595 - DNA, 25 bp, SARS Virus
tgaccattgatagtcacaccagtaa

SEQ ID NO: 23596 - DNA, 25 bp, SARS Virus
gaccattgataggcacaccagtaat

SEQ ID NO: 23597 - DNA, 25 bp, SARS Virus
accattgatagtgacaccagtaatg

SEQ ID NO: 23598 - DNA, 25 bp, SARS Virus
ccattgatagtcgcaccagtaatgt

SEQ ID NO: 23599 - DNA, 25 bp, SARS Virus
cattgatagtcagaccagtaatgtg

SEQ ID NO: 23600 - DNA, 25 bp, SARS Virus
attgatagtcacgccagtaatgtga

SEQ ID NO: 23601 - DNA, 25 bp, SARS Virus
ttgatagtcacagcagtaatgtgag

SEQ ID NO: 23602 - DNA, 25 bp, SARS Virus
tgatagtcacacgagtaatgtgagt

SEQ ID NO: 23603 - DNA, 25 bp, SARS Virus
gatagtcacaccggtaatgtgagta

SEQ ID NO: 23604 - DNA, 25 bp, SARS Virus
atagtcacaccagtaatgtgagtat

SEQ ID NO: 23605 - DNA, 25 bp, SARS Virus
tagtcacaccaggaatgtgagtata

SEQ ID NO: 23606 - DNA, 25 bp, SARS Virus
agtcacaccagtgatgtgagtatat

SEQ ID NO: 23607 - DNA, 25 bp, SARS Virus
gtcacaccagtagtgtgagtatatt

SEQ ID NO: 23608 - DNA, 25 bp, SARS Virus
tcacaccagtaaggtgagtatattg

SEQ ID NO: 23609 - DNA, 25 bp, SARS Virus
cacaccagtaatgtgagtatattga

SEQ ID NO: 23610 - DNA, 25 bp, SARS Virus
acaccagtaatgggagtatattgac

SEQ ID NO: 23611 - DNA, 25 bp, SARS Virus
caccagtaatgtgagtatattgacg

SEQ ID NO: 23612 - DNA, 25 bp, SARS Virus
accagtaatgtgggtatattgacga

SEQ ID NO: 23613 - DNA, 25 bp, SARS Virus
ccagtaatgtgagtatattgacgat

SEQ ID NO: 23614 - DNA, 25 bp, SARS Virus
cagtaatgtgaggatattgacgatt

SEQ ID NO: 23615 - DNA, 25 bp, SARS Virus
agtaatgtgagtgtattgacgattc

SEQ ID NO: 23616 - DNA, 25 bp, SARS Virus
gtaatgtgagtagattgacgattcc

SEQ ID NO: 23617 - DNA, 25 bp, SARS Virus
taatgtgagtatgttgacgattcct

SEQ ID NO: 23618 - DNA, 25 bp, SARS Virus
aatgtgagtatagtgacgattcctc

SEQ ID NO: 23619 - DNA, 25 bp, SARS Virus
atgtgagtatatggacgattcctct

SEQ ID NO: 23620 - DNA, 25 bp, SARS Virus
tgtgagtatattgacgattcctctg

SEQ ID NO: 23621 - DNA, 25 bp, SARS Virus
gtgagtatattggcgattcctctgg

SEQ ID NO: 23622 - DNA, 25 bp, SARS Virus
tgagtatattgaggattcctctggg

SEQ ID NO: 23623 - DNA, 25 bp, SARS Virus
gagtatattgacgattcctctggga

SEQ ID NO: 23624 - DNA, 25 bp, SARS Virus
agtatattgacggttcctctgggag

SEQ ID NO: 23625 - DNA, 25 bp, SARS Virus
gtatattgacgagtcctctgggaga

SEQ ID NO: 23626 - DNA, 25 bp, SARS Virus
tatattgacgatgcctctgggagat

SEQ ID NO: 23627 - DNA, 25 bp, SARS Virus
atattgacgattgctctgggagata

SEQ ID NO: 23628 - DNA, 25 bp, SARS Virus
tattgacgattcgtctgggagatag

SEQ ID NO: 23629 - DNA, 25 bp, SARS Virus
attgacgattccgctgggagatagc

SEQ ID NO: 23630 - DNA, 25 bp, SARS Virus
ttgacgattcctgtgggagatagca

SEQ ID NO: 23631 - DNA, 25 bp, SARS Virus
tgacgattcctcggggagatagcat

SEQ ID NO: 23632 - DNA, 25 bp, SARS Virus
gacgattcctctgggagatagcata

SEQ ID NO: 23633 - DNA, 25 bp, SARS Virus
acgattcctctgggagatagcataa

SEQ ID NO: 23634 - DNA, 25 bp, SARS Virus
cgattcctctgggagatagcataac

SEQ ID NO: 23635 - DNA, 25 bp, SARS Virus
gattcctctgggggatagcataact

SEQ ID NO: 23636 - DNA, 25 bp, SARS Virus
attcctctgggagatagcataactg

SEQ ID NO: 23637 - DNA, 25 bp, SARS Virus
ttcctctgggaggtagcataactgc

SEQ ID NO: 23638 - DNA, 25 bp, SARS Virus
tcctctgggagagagcataactgcc

SEQ ID NO: 23639 - DNA, 25 bp, SARS Virus
cctctgggagatggcataactgcct

SEQ ID NO: 23640 - DNA, 25 bp, SARS Virus
ctctgggagatagcataactgcctc

SEQ ID NO: 23641 - DNA, 25 bp, SARS Virus
tctgggagataggataactgcctcg

SEQ ID NO: 23642 - DNA, 25 bp, SARS Virus
ctgggagatagcgtaactgcctcga

SEQ ID NO: 23643 - DNA, 25 bp, SARS Virus
tgggagatagcagaactgcctcgag

SEQ ID NO: 23644 - DNA, 25 bp, SARS Virus
gggagatagcatgactgcctcgagt

SEQ ID NO: 23645 - DNA, 25 bp, SARS Virus
ggagatagcatagctgcctcgagtg

SEQ ID NO: 23646 - DNA, 25 bp, SARS Virus
gagatagcataagtgcctcgagtgg

SEQ ID NO: 23647 - DNA, 25 bp, SARS Virus
agatagcataacggcctcgagtgga

SEQ ID NO: 23648 - DNA, 25 bp, SARS Virus
gatagcataactgcctcgagtggaa

SEQ ID NO: 23649 - DNA, 25 bp, SARS Virus
atagcataactggctcgagtggaat

SEQ ID NO: 23650 - DNA, 25 bp, SARS Virus
tagcataactgcgtcgagtggaatg

SEQ ID NO: 23651 - DNA, 25 bp, SARS Virus
agcataactgccgcgagtggaatgt

SEQ ID NO: 23652 - DNA, 25 bp, SARS Virus
gcataactgcctggagtggaatgtt

SEQ ID NO: 23653 - DNA, 25 bp, SARS Virus
cataactgcctcgagtggaatgttt

SEQ ID NO: 23654 - DNA, 25 bp, SARS Virus
ataactgcctcgggtggaatgtttc

SEQ ID NO: 23655 - DNA, 25 bp, SARS Virus
taactgcctcgagtggaatgtttct

SEQ ID NO: 23656 - DNA, 25 bp, SARS Virus
aactgcctcgaggggaatgtttcta

SEQ ID NO: 23657 - DNA, 25 bp, SARS Virus
actgcctcgagtggaatgtttctac

SEQ ID NO: 23658 - DNA, 25 bp, SARS Virus
ctgcctcgagtggaatgtttctaca

SEQ ID NO: 23659 - DNA, 25 bp, SARS Virus
tgcctcgagtgggatgtttctacag

SEQ ID NO: 23660 - DNA, 25 bp, SARS Virus
gcctcgagtggagtgtttctacagt

SEQ ID NO: 23661 - DNA, 25 bp, SARS Virus
cctcgagtggaaggtttctacagtc

SEQ ID NO: 23662 - DNA, 25 bp, SARS Virus
ctcgagtggaatgtttctacagtct

SEQ ID NO: 23663 - DNA, 25 bp, SARS Virus
tcgagtggaatggttctacagtctc

SEQ ID NO: 23664 - DNA, 25 bp, SARS Virus
cgagtggaatgtgtctacagtctca

SEQ ID NO: 23665 - DNA, 25 bp, SARS Virus
gagtggaatgttgctacagtctcat

SEQ ID NO: 23666 - DNA, 25 bp, SARS Virus
agtggaatgtttgtacagtctcatg

SEQ ID NO: 23667 - DNA, 25 bp, SARS Virus
gtggaatgtttcgacagtctcatgt

SEQ ID NO: 23668 - DNA, 25 bp, SARS Virus
tggaatgtttctgcagtctcatgtt

SEQ ID NO: 23669 - DNA, 25 bp, SARS Virus
ggaatgtttctagagtctcatgttt

SEQ ID NO: 23670 - DNA, 25 bp, SARS Virus
gaatgtttctacggtctcatgtttc

SEQ ID NO: 23671 - DNA, 25 bp, SARS Virus
aatgtttctacagtctcatgtttcc

SEQ ID NO: 23672 - DNA, 25 bp, SARS Virus
atgtttctacaggctcatgtttcct

SEQ ID NO: 23673 - DNA, 25 bp, SARS Virus
tgtttctacagtgtcatgtttcctg

SEQ ID NO: 23674 - DNA, 25 bp, SARS Virus
gtttctacagtcgcatgtttcctgg

SEQ ID NO: 23675 - DNA, 25 bp, SARS Virus
tttctacagtctgatgtttcctggt

SEQ ID NO: 23676 - DNA, 25 bp, SARS Virus
ttctacagtctcgtgtttcctggtc

SEQ ID NO: 23677 - DNA, 25 bp, SARS Virus
tctacagtctcaggtttcctggtca

SEQ ID NO: 23678 - DNA, 25 bp, SARS Virus
ctacagtctcatgtttcctggtcac

SEQ ID NO: 23679 - DNA, 25 bp, SARS Virus
tacagtctcatggttcctggtcact

SEQ ID NO: 23680 - DNA, 25 bp, SARS Virus
acagtctcatgtgtcctggtcactg

SEQ ID NO: 23681 - DNA, 25 bp, SARS Virus
cagtctcatgttgcctggtcactga

SEQ ID NO: 23682 - DNA, 25 bp, SARS Virus
agtctcatgtttgctggtcactgac

SEQ ID NO: 23683 - DNA, 25 bp, SARS Virus
gtctcatgtttcgtggtcactgact

SEQ ID NO: 23684 - DNA, 25 bp, SARS Virus
tctcatgtttccgggtcactgacta

SEQ ID NO: 23685 - DNA, 25 bp, SARS Virus
ctcatgtttcctggtcactgactac

SEQ ID NO: 23686 - DNA, 25 bp, SARS Virus
tcatgtttcctggtcactgactaca

SEQ ID NO: 23687 - DNA, 25 bp, SARS Virus
catgtttcctgggcactgactacaa

SEQ ID NO: 23688 - DNA, 25 bp, SARS Virus
atgtttcctggtgactgactacaaa

SEQ ID NO: 23689 - DNA, 25 bp, SARS Virus
tgtttcctggtcgctgactacaaaa

SEQ ID NO: 23690 - DNA, 25 bp, SARS Virus
gtttcctggtcagtgactacaaaag

SEQ ID NO: 23691 - DNA, 25 bp, SARS Virus
tttcctggtcacggactacaaaaga

SEQ ID NO: 23692 - DNA, 25 bp, SARS Virus
ttcctggtcactgactacaaaagat

SEQ ID NO: 23693 - DNA, 25 bp, SARS Virus
tcctggtcactggctacaaaagatg

SEQ ID NO: 23694 - DNA, 25 bp, SARS Virus
cctggtcactgagtacaaaagatgt

SEQ ID NO: 23695 - DNA, 25 bp, SARS Virus
ctggtcactgacgacaaaagatgtt

SEQ ID NO: 23696 - DNA, 25 bp, SARS Virus
tggtcactgactgcaaaagatgttc

SEQ ID NO: 23697 - DNA, 25 bp, SARS Virus
ggtcactgactagaaaagatgttcc

SEQ ID NO: 23698 - DNA, 25 bp, SARS Virus
gtcactgactacgaaagatgttcct

SEQ ID NO: 23699 - DNA, 25 bp, SARS Virus
tcactgactacagaagatgttcctt

SEQ ID NO: 23700 - DNA, 25 bp, SARS Virus
cactgactacaagagatgttccttt

SEQ ID NO: 23701 - DNA, 25 bp, SARS Virus
actgactacaaaggatgttcctttg

SEQ ID NO: 23702 - DNA, 25 bp, SARS Virus
ctgactacaaaagatgttcctttgt

SEQ ID NO: 23703 - DNA, 25 bp, SARS Virus
tgactacaaaaggtgttcctttgta

SEQ ID NO: 23704 - DNA, 25 bp, SARS Virus
gactacaaaagaggttcctttgtag

SEQ ID NO: 23705 - DNA, 25 bp, SARS Virus
actacaaaagatgttcctttgtaga

SEQ ID NO: 23706 - DNA, 25 bp, SARS Virus
ctacaaaagatggtcctttgtagaa

SEQ ID NO: 23707 - DNA, 25 bp, SARS Virus
tacaaaagatgtgcctttgtagaat

SEQ ID NO: 23708 - DNA, 25 bp, SARS Virus
acaaaagatgttgctttgtagaatg

SEQ ID NO: 23709 - DNA, 25 bp, SARS Virus
caaaagatgttcgtttgtagaatgt

SEQ ID NO: 23710 - DNA, 25 bp, SARS Virus
aaaagatgttccgttgtagaatgtg

SEQ ID NO: 23711 - DNA, 25 bp, SARS Virus
aaagatgttcctgtgtagaatgtga

SEQ ID NO: 23712 - DNA, 25 bp, SARS Virus
aagatgttccttggtagaatgtgat

SEQ ID NO: 23713 - DNA, 25 bp, SARS Virus
agatgttcctttgtagaatgtgatg

SEQ ID NO: 23714 - DNA, 25 bp, SARS Virus
gatgttcctttggagaatgtgatgt

SEQ ID NO: 23715 - DNA, 25 bp, SARS Virus
atgttcctttgtggaatgtgatgtt

SEQ ID NO: 23716 - DNA, 25 bp, SARS Virus
tgttcctttgtagaatgtgatgttg

SEQ ID NO: 23717 - DNA, 25 bp, SARS Virus
gttcctttgtaggatgtgatgttgg

SEQ ID NO: 23718 - DNA, 25 bp, SARS Virus
ttcctttgtagagtgtgatgttggt

SEQ ID NO: 23719 - DNA, 25 bp, SARS Virus
tcctttgtagaaggtgatgttggta

SEQ ID NO: 23720 - DNA, 25 bp, SARS Virus
cctttgtagaatgtgatgttggtag

SEQ ID NO: 23721 - DNA, 25 bp, SARS Virus
ctttgtagaatgggatgttggtagt

SEQ ID NO: 23722 - DNA, 25 bp, SARS Virus
tttgtagaatgtgatgttggtagtt

SEQ ID NO: 23723 - DNA, 25 bp, SARS Virus
ttgtagaatgtggtgttggtagttc

SEQ ID NO: 23724 - DNA, 25 bp, SARS Virus
tgtagaatgtgaggttggtagttcg

SEQ ID NO: 23725 - DNA, 25 bp, SARS Virus
gtagaatgtgatgttggtagttcgg

SEQ ID NO: 23726 - DNA, 25 bp, SARS Virus
tagaatgtgatggtggtagttcgga

SEQ ID NO: 23727 - DNA, 25 bp, SARS Virus
agaatgtgatgtgggtagttcggac

SEQ ID NO: 23728 - DNA, 25 bp, SARS Virus
gaatgtgatgttggtagttcggaca

SEQ ID NO: 23729 - DNA, 25 bp, SARS Virus
aatgtgatgttggtagttcggacac

SEQ ID NO: 23730 - DNA, 25 bp, SARS Virus
atgtgatgttgggagttcggacaca

SEQ ID NO: 23731 - DNA, 25 bp, SARS Virus
tgtgatgttggtggttcggacacag

SEQ ID NO: 23732 - DNA, 25 bp, SARS Virus
gtgatgttggtagttcggacacagc

SEQ ID NO: 23733 - DNA, 25 bp, SARS Virus
tgatgttggtaggtcggacacagca

SEQ ID NO: 23734 - DNA, 25 bp, SARS Virus
gatgttggtagtgcggacacagcat

SEQ ID NO: 23735 - DNA, 25 bp, SARS Virus
atgttggtagttgggacacagcata

SEQ ID NO: 23736 - DNA, 25 bp, SARS Virus
tgttggtagttcggacacagcatat

SEQ ID NO: 23737 - DNA, 25 bp, SARS Virus
gttggtagttcggacacagcatatt

SEQ ID NO: 23738 - DNA, 25 bp, SARS Virus
ttggtagttcgggcacagcatattt

SEQ ID NO: 23739 - DNA, 25 bp, SARS Virus
tggtagttcggagacagcatatttg

SEQ ID NO: 23740 - DNA, 25 bp, SARS Virus
ggtagttcggacgcagcatatttga

SEQ ID NO: 23741 - DNA, 25 bp, SARS Virus
gtagttcggacagagcatatttgag

SEQ ID NO: 23742 - DNA, 25 bp, SARS Virus
tagttcggacacggcatatttgagc

SEQ ID NO: 23743 - DNA, 25 bp, SARS Virus
agttcggacacagcatatttgagct

SEQ ID NO: 23744 - DNA, 25 bp, SARS Virus
gttcggacacaggatatttgagcta

SEQ ID NO: 23745 - DNA, 25 bp, SARS Virus
ttcggacacagcgtatttgagctac

SEQ ID NO: 23746 - DNA, 25 bp, SARS Virus
tcggacacagcagatttgagctacc

SEQ ID NO: 23747 - DNA, 25 bp, SARS Virus
cggacacagcatgtttgagctacct

SEQ ID NO: 23748 - DNA, 25 bp, SARS Virus
ggacacagcatagttgagctacctc

SEQ ID NO: 23749 - DNA, 25 bp, SARS Virus
gacacagcatatgtgagctacctca

SEQ ID NO: 23750 - DNA, 25 bp, SARS Virus
acacagcatattggagctacctcaa

SEQ ID NO: 23751 - DNA, 25 bp, SARS Virus
cacagcatatttgagctacctcaat

SEQ ID NO: 23752 - DNA, 25 bp, SARS Virus
acagcatatttgggctacctcaatg

SEQ ID NO: 23753 - DNA, 25 bp, SARS Virus
cagcatatttgagctacctcaatga

SEQ ID NO: 23754 - DNA, 25 bp, SARS Virus
agcatatttgaggtacctcaatgaa

SEQ ID NO: 23755 - DNA, 25 bp, SARS Virus
gcatatttgagcgacctcaatgaat

SEQ ID NO: 23756 - DNA, 25 bp, SARS Virus
catatttgagctgcctcaatgaatg

SEQ ID NO: 23757 - DNA, 25 bp, SARS Virus
atatttgagctagctcaatgaatgt

SEQ ID NO: 23758 - DNA, 25 bp, SARS Virus
tatttgagctacgtcaatgaatgtg

SEQ ID NO: 23759 - DNA, 25 bp, SARS Virus
atttgagctaccgcaatgaatgtgt

SEQ ID NO: 23760 - DNA, 25 bp, SARS Virus
tttgagctacctgaatgaatgtgtc

SEQ ID NO: 23761 - DNA, 25 bp, SARS Virus
ttgagctacctcgatgaatgtgtct

SEQ ID NO: 23762 - DNA, 25 bp, SARS Virus
tgagctacctcagtgaatgtgtctc

SEQ ID NO: 23763 - DNA, 25 bp, SARS Virus
gagctacctcaaggaatgtgtctct

SEQ ID NO: 23764 - DNA, 25 bp, SARS Virus
agctacctcaatgaatgtgtctcta

SEQ ID NO: 23765 - DNA, 25 bp, SARS Virus
gctacctcaatggatgtgtctctaa

SEQ ID NO: 23766 - DNA, 25 bp, SARS Virus
ctacctcaatgagtgtgtctctaac

SEQ ID NO: 23767 - DNA, 25 bp, SARS Virus
tacctcaatgaaggtgtctctaact

SEQ ID NO: 23768 - DNA, 25 bp, SARS Virus
acctcaatgaatgtgtctctaactt

SEQ ID NO: 23769 - DNA, 25 bp, SARS Virus
cctcaatgaatgggtctctaacttg

SEQ ID NO: 23770 - DNA, 25 bp, SARS Virus
ctcaatgaatgtgtctctaacttgg

SEQ ID NO: 23771 - DNA, 25 bp, SARS Virus
tcaatgaatgtggctctaacttggt

SEQ ID NO: 23772 - DNA, 25 bp, SARS Virus
caatgaatgtgtgtctaacttggtt

SEQ ID NO: 23773 - DNA, 25 bp, SARS Virus
aatgaatgtgtcgctaacttggttt

SEQ ID NO: 23774 - DNA, 25 bp, SARS Virus
atgaatgtgtctgtaacttggtttt

SEQ ID NO: 23775 - DNA, 25 bp, SARS Virus
tgaatgtgtctcgaacttggtttta

SEQ ID NO: 23776 - DNA, 25 bp, SARS Virus
gaatgtgtctctgacttggttttaa

SEQ ID NO: 23777 - DNA, 25 bp, SARS Virus
aatgtgtctctagcttggttttaac

SEQ ID NO: 23778 - DNA, 25 bp, SARS Virus
atgtgtctctaagttggttttaacc

SEQ ID NO: 23779 - DNA, 25 bp, SARS Virus
tgtgtctctaacgtggttttaacct

SEQ ID NO: 23780 - DNA, 25 bp, SARS Virus
gtgtctctaactgggttttaaccta

SEQ ID NO: 23781 - DNA, 25 bp, SARS Virus
tgtctctaacttggttttaacctac

SEQ ID NO: 23782 - DNA, 25 bp, SARS Virus
gtctctaacttggttttaacctacc

SEQ ID NO: 23783 - DNA, 25 bp, SARS Virus
tctctaacttgggtttaacctaccc

SEQ ID NO: 23784 - DNA, 25 bp, SARS Virus
ctctaacttggtgttaacctaccca

SEQ ID NO: 23785 - DNA, 25 bp, SARS Virus
tctaacttggttgtaacctacccat

SEQ ID NO: 23786 - DNA, 25 bp, SARS Virus
ctaacttggtttgaacctacccata

SEQ ID NO: 23787 - DNA, 25 bp, SARS Virus
taacttggttttgacctacccataa

SEQ ID NO: 23788 - DNA, 25 bp, SARS Virus
aacttggttttagcctacccataat

SEQ ID NO: 23789 - DNA, 25 bp, SARS Virus
acttggttttaagctacccataata

SEQ ID NO: 23790 - DNA, 25 bp, SARS Virus
cttggttttaacgtacccataatat

SEQ ID NO: 23791 - DNA, 25 bp, SARS Virus
ttggttttaaccgacccataatatt

SEQ ID NO: 23792 - DNA, 25 bp, SARS Virus
tggttttaacctgcccataatattt

SEQ ID NO: 23793 - DNA, 25 bp, SARS Virus
ggttttaacctagccataatatttt

SEQ ID NO: 23794 - DNA, 25 bp, SARS Virus
gttttaacctacgcataatattttt

SEQ ID NO: 23795 - DNA, 25 bp, SARS Virus
ttttaacctaccgataatatttttc

SEQ ID NO: 23796 - DNA, 25 bp, SARS Virus
tttaacctacccgtaatatttttcc

SEQ ID NO: 23797 - DNA, 25 bp, SARS Virus
ttaacctacccagaatatttttcct

SEQ ID NO: 23798 - DNA, 25 bp, SARS Virus
taacctacccatgatatttttccta

SEQ ID NO: 23799 - DNA, 25 bp, SARS Virus
aacctacccatagtatttttcctat

SEQ ID NO: 23800 - DNA, 25 bp, SARS Virus
acctacccataagatttttcctatt

SEQ ID NO: 23801 - DNA, 25 bp, SARS Virus
cctacccataatgtttttcctatta

SEQ ID NO: 23802 - DNA, 25 bp, SARS Virus
ctacccataatagttttcctattac

SEQ ID NO: 23803 - DNA, 25 bp, SARS Virus
tacccataatatgtttcctattacg

SEQ ID NO: 23804 - DNA, 25 bp, SARS Virus
acccataatattgttcctattacga

SEQ ID NO: 23805 - DNA, 25 bp, SARS Virus
cccataatatttgtcctattacgaa

SEQ ID NO: 23806 - DNA, 25 bp, SARS Virus
ccataatattttgcctattacgaat

SEQ ID NO: 23807 - DNA, 25 bp, SARS Virus
cataatatttttgctattacgaatg

SEQ ID NO: 23808 - DNA, 25 bp, SARS Virus
ataatatttttcgtattacgaatga

SEQ ID NO: 23809 - DNA, 25 bp, SARS Virus
taatatttttccgattacgaatgat

SEQ ID NO: 23810 - DNA, 25 bp, SARS Virus
aatatttttcctgttacgaatgata

SEQ ID NO: 23811 - DNA, 25 bp, SARS Virus
atatttttcctagtacgaatgatat

SEQ ID NO: 23812 - DNA, 25 bp, SARS Virus
tatttttcctatgacgaatgatatg

SEQ ID NO: 23813 - DNA, 25 bp, SARS Virus
atttttcctattgcgaatgatatgt

SEQ ID NO: 23814 - DNA, 25 bp, SARS Virus
tttttcctattaggaatgatatgtc

SEQ ID NO: 23815 - DNA, 25 bp, SARS Virus
ttttcctattacgaatgatatgtct

SEQ ID NO: 23816 - DNA, 25 bp, SARS Virus
tttcctattacggatgatatgtctc

SEQ ID NO: 23817 - DNA, 25 bp, SARS Virus
ttcctattacgagtgatatgtctcg

SEQ ID NO: 23818 - DNA, 25 bp, SARS Virus
tcctattacgaaggatatgtctcgt

SEQ ID NO: 23819 - DNA, 25 bp, SARS Virus
cctattacgaatgatatgtctcgtc

SEQ ID NO: 23820 - DNA, 25 bp, SARS Virus
ctattacgaatggtatgtctcgtcg

SEQ ID NO: 23821 - DNA, 25 bp, SARS Virus
tattacgaatgagatgtctcgtcgg

SEQ ID NO: 23822 - DNA, 25 bp, SARS Virus
attacgaatgatgtgtctcgtcgga

SEQ ID NO: 23823 - DNA, 25 bp, SARS Virus
ttacgaatgataggtctcgtcggat

SEQ ID NO: 23824 - DNA, 25 bp, SARS Virus
tacgaatgatatgtctcgtcggata

SEQ ID NO: 23825 - DNA, 25 bp, SARS Virus
acgaatgatatggctcgtcggatat

SEQ ID NO: 23826 - DNA, 25 bp, SARS Virus
cgaatgatatgtgtcgtcggatatc

SEQ ID NO: 23827 - DNA, 25 bp, SARS Virus
gaatgatatgtcgcgtcggatatct

SEQ ID NO: 23828 - DNA, 25 bp, SARS Virus
aatgatatgtctggtcggatatctg

SEQ ID NO: 23829 - DNA, 25 bp, SARS Virus
atgatatgtctcgtcggatatctgg

SEQ ID NO: 23830 - DNA, 25 bp, SARS Virus
tgatatgtctcggcggatatctgga

SEQ ID NO: 23831 - DNA, 25 bp, SARS Virus
gatatgtctcgtgggatatctggaa

SEQ ID NO: 23832 - DNA, 25 bp, SARS Virus
atatgtctcgtcggatatctggaac

SEQ ID NO: 23833 - DNA, 25 bp, SARS Virus
tatgtctcgtcggatatctggaaca

SEQ ID NO: 23834 - DNA, 25 bp, SARS Virus
atgtctcgtcgggtatctggaacat

SEQ ID NO: 23835 - DNA, 25 bp, SARS Virus
tgtctcgtcggagatctggaacatg

SEQ ID NO: 23836 - DNA, 25 bp, SARS Virus
gtctcgtcggatgtctggaacatgg

SEQ ID NO: 23837 - DNA, 25 bp, SARS Virus
tctcgtcggatagctggaacatggt

SEQ ID NO: 23838 - DNA, 25 bp, SARS Virus
ctcgtcggatatgtggaacatggtt

SEQ ID NO: 23839 - DNA, 25 bp, SARS Virus
tcgtcggatatcgggaacatggttg

SEQ ID NO: 23840 - DNA, 25 bp, SARS Virus
cgtcggatatctggaacatggttga

SEQ ID NO: 23841 - DNA, 25 bp, SARS Virus
gtcggatatctggaacatggttgag

SEQ ID NO: 23842 - DNA, 25 bp, SARS Virus
tcggatatctgggacatggttgagt

SEQ ID NO: 23843 - DNA, 25 bp, SARS Virus
cggatatctggagcatggttgagtt

SEQ ID NO: 23844 - DNA, 25 bp, SARS Virus
ggatatctggaagatggttgagttg

SEQ ID NO: 23845 - DNA, 25 bp, SARS Virus
gatatctggaacgtggttgagttgg

SEQ ID NO: 23846 - DNA, 25 bp, SARS Virus
atatctggaacagggttgagttggt

SEQ ID NO: 23847 - DNA, 25 bp, SARS Virus
tatctggaacatggttgagttggta

SEQ ID NO: 23848 - DNA, 25 bp, SARS Virus
atctggaacatggttgagttggtaa

SEQ ID NO: 23849 - DNA, 25 bp, SARS Virus
tctggaacatgggtgagttggtaat

SEQ ID NO: 23850 - DNA, 25 bp, SARS Virus
ctggaacatggtggagttggtaatg

SEQ ID NO: 23851 - DNA, 25 bp, SARS Virus
tggaacatggttgagttggtaatgg

SEQ ID NO: 23852 - DNA, 25 bp, SARS Virus
ggaacatggttgggttggtaatggt

SEQ ID NO: 23853 - DNA, 25 bp, SARS Virus
gaacatggttgagttggtaatggtt

SEQ ID NO: 23854 - DNA, 25 bp, SARS Virus
aacatggttgaggtggtaatggttt

SEQ ID NO: 23855 - DNA, 25 bp, SARS Virus
acatggttgagtgggtaatggttta

SEQ ID NO: 23856 - DNA, 25 bp, SARS Virus
catggttgagttggtaatggtttac

SEQ ID NO: 23857 - DNA, 25 bp, SARS Virus
atggttgagttggtaatggtttacg

SEQ ID NO: 23858 - DNA, 25 bp, SARS Virus
tggttgagttgggaatggtttacgc

SEQ ID NO: 23859 - DNA, 25 bp, SARS Virus
ggttgagttggtgatggtttacgct

SEQ ID NO: 23860 - DNA, 25 bp, SARS Virus
gttgagttggtagtggtttacgctc

SEQ ID NO: 23861 - DNA, 25 bp, SARS Virus
ttgagttggtaagggtttacgctca

SEQ ID NO: 23862 - DNA, 25 bp, SARS Virus
tgagttggtaatggtttacgctcaa

SEQ ID NO: 23863 - DNA, 25 bp, SARS Virus
gagttggtaatggtttacgctcaaa

SEQ ID NO: 23864 - DNA, 25 bp, SARS Virus
agttggtaatgggttacgctcaaaa

SEQ ID NO: 23865 - DNA, 25 bp, SARS Virus
gttggtaatggtgtacgctcaaaac

SEQ ID NO: 23866 - DNA, 25 bp, SARS Virus
ttggtaatggttgacgctcaaaact

SEQ ID NO: 23867 - DNA, 25 bp, SARS Virus
tggtaatggtttgcgctcaaaacta

SEQ ID NO: 23868 - DNA, 25 bp, SARS Virus
ggtaatggtttaggctcaaaactat

SEQ ID NO: 23869 - DNA, 25 bp, SARS Virus
gtaatggtttacgctcaaaactatt

SEQ ID NO: 23870 - DNA, 25 bp, SARS Virus
taatggtttacggtcaaaactatta

SEQ ID NO: 23871 - DNA, 25 bp, SARS Virus
aatggtttacgcgcaaaactattaa

SEQ ID NO: 23872 - DNA, 25 bp, SARS Virus
atggtttacgctgaaaactattaaa

SEQ ID NO: 23873 - DNA, 25 bp, SARS Virus
tggtttacgctcgaaactattaaag

SEQ ID NO: 23874 - DNA, 25 bp, SARS Virus
ggtttacgctcagaactattaaagt

SEQ ID NO: 23875 - DNA, 25 bp, SARS Virus
gtttacgctcaagactattaaagtt

SEQ ID NO: 23876 - DNA, 25 bp, SARS Virus
tttacgctcaaagctattaaagttt

SEQ ID NO: 23877 - DNA, 25 bp, SARS Virus
ttacgctcaaaagtattaaagtttg

SEQ ID NO: 23878 - DNA, 25 bp, SARS Virus
tacgctcaaaacgattaaagtttga

SEQ ID NO: 23879 - DNA, 25 bp, SARS Virus
acgctcaaaactgttaaagtttgag

SEQ ID NO: 23880 - DNA, 25 bp, SARS Virus
cgctcaaaactagtaaagtttgagt

SEQ ID NO: 23881 - DNA, 25 bp, SARS Virus
gctcaaaactatgaaagtttgagtg

SEQ ID NO: 23882 - DNA, 25 bp, SARS Virus
ctcaaaactattgaagtttgagtgt

SEQ ID NO: 23883 - DNA, 25 bp, SARS Virus
tcaaaactattagagtttgagtgta

SEQ ID NO: 23884 - DNA, 25 bp, SARS Virus
caaaactattaaggtttgagtgtac

SEQ ID NO: 23885 - DNA, 25 bp, SARS Virus
aaaactattaaagtttgagtgtaca

SEQ ID NO: 23886 - DNA, 25 bp, SARS Virus
aaactattaaaggttgagtgtacaa

SEQ ID NO: 23887 - DNA, 25 bp, SARS Virus
aactattaaagtgtgagtgtacaag

SEQ ID NO: 23888 - DNA, 25 bp, SARS Virus
actattaaagttggagtgtacaaga

SEQ ID NO: 23889 - DNA, 25 bp, SARS Virus
ctattaaagtttgagtgtacaagat

SEQ ID NO: 23890 - DNA, 25 bp, SARS Virus
tattaaagtttgggtgtacaagatt

SEQ ID NO: 23891 - DNA, 25 bp, SARS Virus
attaaagtttgagtgtacaagattg

SEQ ID NO: 23892 - DNA, 25 bp, SARS Virus
ttaaagtttgagggtacaagattgt

SEQ ID NO: 23893 - DNA, 25 bp, SARS Virus
taaagtttgagtgtacaagattgtg

SEQ ID NO: 23894 - DNA, 25 bp, SARS Virus
aaagtttgagtggacaagattgtgt

SEQ ID NO: 23895 - DNA, 25 bp, SARS Virus
aagtttgagtgtgcaagattgtgtt

SEQ ID NO: 23896 - DNA, 25 bp, SARS Virus
agtttgagtgtagaagattgtgttt

SEQ ID NO: 23897 - DNA, 25 bp, SARS Virus
gtttgagtgtacgagattgtgtttt

SEQ ID NO: 23898 - DNA, 25 bp, SARS Virus
tttgagtgtacaggattgtgtttta

SEQ ID NO: 23899 - DNA, 25 bp, SARS Virus
ttgagtgtacaagattgtgttttaa

SEQ ID NO: 23900 - DNA, 25 bp, SARS Virus
tgagtgtacaaggttgtgttttaaa

SEQ ID NO: 23901 - DNA, 25 bp, SARS Virus
gagtgtacaagagtgtgttttaaac

SEQ ID NO: 23902 - DNA, 25 bp, SARS Virus
agtgtacaagatggtgttttaaacg

SEQ ID NO: 23903 - DNA, 25 bp, SARS Virus
gtgtacaagattgtgttttaaacga

SEQ ID NO: 23904 - DNA, 25 bp, SARS Virus
tgtacaagattgggttttaaacgac

SEQ ID NO: 23905 - DNA, 25 bp, SARS Virus
gtacaagattgtgttttaaacgact

SEQ ID NO: 23906 - DNA, 25 bp, SARS Virus
tacaagattgtggtttaaacgacta

SEQ ID NO: 23907 - DNA, 25 bp, SARS Virus
acaagattgtgtgttaaacgactac

SEQ ID NO: 23908 - DNA, 25 bp, SARS Virus
caagattgtgttgtaaacgactact

SEQ ID NO: 23909 - DNA, 25 bp, SARS Virus
aagattgtgtttgaaacgactacta

SEQ ID NO: 23910 - DNA, 25 bp, SARS Virus
agattgtgttttgaacgactactaa

SEQ ID NO: 23911 - DNA, 25 bp, SARS Virus
gattgtgttttagacgactactaaa

SEQ ID NO: 23912 - DNA, 25 bp, SARS Virus
attgtgttttaagcgactactaaat

SEQ ID NO: 23913 - DNA, 25 bp, SARS Virus
ttgtgttttaaaggactactaaatt

SEQ ID NO: 23914 - DNA, 25 bp, SARS Virus
tgtgttttaaacgactactaaattt

SEQ ID NO: 23915 - DNA, 25 bp, SARS Virus
gtgttttaaacggctactaaattta

SEQ ID NO: 23916 - DNA, 25 bp, SARS Virus
tgttttaaacgagtactaaatttag

SEQ ID NO: 23917 - DNA, 25 bp, SARS Virus
gttttaaacgacgactaaatttagt

SEQ ID NO: 23918 - DNA, 25 bp, SARS Virus
ttttaaacgactgctaaatttagtt

SEQ ID NO: 23919 - DNA, 25 bp, SARS Virus
tttaaacgactagtaaatttagttt

SEQ ID NO: 23920 - DNA, 25 bp, SARS Virus
ttaaacgactacgaaatttagttta

SEQ ID NO: 23921 - DNA, 25 bp, SARS Virus
taaacgactactgaatttagtttac

SEQ ID NO: 23922 - DNA, 25 bp, SARS Virus
aaacgactactagatttagtttact

SEQ ID NO: 23923 - DNA, 25 bp, SARS Virus
aacgactactaagtttagtttactg

SEQ ID NO: 23924 - DNA, 25 bp, SARS Virus
acgactactaaagttagtttactgt

SEQ ID NO: 23925 - DNA, 25 bp, SARS Virus
cgactactaaatgtagtttactgtc

SEQ ID NO: 23926 - DNA, 25 bp, SARS Virus
gactactaaattgagtttactgtcc

SEQ ID NO: 23927 - DNA, 25 bp, SARS Virus
actactaaatttggtttactgtccg

SEQ ID NO: 23928 - DNA, 25 bp, SARS Virus
ctactaaatttagtttactgtccga

SEQ ID NO: 23929 - DNA, 25 bp, SARS Virus
tactaaatttaggttactgtccgaa

SEQ ID NO: 23930 - DNA, 25 bp, SARS Virus
actaaatttagtgtactgtccgaag

SEQ ID NO: 23931 - DNA, 25 bp, SARS Virus
ctaaatttagttgactgtccgaagt

SEQ ID NO: 23932 - DNA, 25 bp, SARS Virus
taaatttagtttgctgtccgaagtg

SEQ ID NO: 23933 - DNA, 25 bp, SARS Virus
aaatttagtttagtgtccgaagtgt

SEQ ID NO: 23934 - DNA, 25 bp, SARS Virus
aatttagtttacggtccgaagtgtt

SEQ ID NO: 23935 - DNA, 25 bp, SARS Virus
atttagtttactgtccgaagtgttt

SEQ ID NO: 23936 - DNA, 25 bp, SARS Virus
tttagtttactggccgaagtgtttc

SEQ ID NO: 23937 - DNA, 25 bp, SARS Virus
ttagtttactgtgcgaagtgtttcg

SEQ ID NO: 23938 - DNA, 25 bp, SARS Virus
tagtttactgtcggaagtgtttcgg

SEQ ID NO: 23939 - DNA, 25 bp, SARS Virus
agtttactgtccgaagtgtttcggt

SEQ ID NO: 23940 - DNA, 25 bp, SARS Virus
gtttactgtccggagtgtttcggtc

SEQ ID NO: 23941 - DNA, 25 bp, SARS Virus
tttactgtccgaggtgtttcggtcg

SEQ ID NO: 23942 - DNA, 25 bp, SARS Virus
ttactgtccgaagtgtttcggtcga

SEQ ID NO: 23943 - DNA, 25 bp, SARS Virus
tactgtccgaagggtttcggtcgaa

SEQ ID NO: 23944 - DNA, 25 bp, SARS Virus
actgtccgaagtgtttcggtcgaag

SEQ ID NO: 23945 - DNA, 25 bp, SARS Virus
ctgtccgaagtggttcggtcgaagt

SEQ ID NO: 23946 - DNA, 25 bp, SARS Virus
tgtccgaagtgtgtcggtcgaagtg

SEQ ID NO: 23947 - DNA, 25 bp, SARS Virus
gtccgaagtgttgcggtcgaagtgc

SEQ ID NO: 23948 - DNA, 25 bp, SARS Virus
tccgaagtgtttgggtcgaagtgct

SEQ ID NO: 23949 - DNA, 25 bp, SARS Virus
ccgaagtgtttcggtcgaagtgctc

SEQ ID NO: 23950 - DNA, 25 bp, SARS Virus
cgaagtgtttcggtcgaagtgctct

SEQ ID NO: 23951 - DNA, 25 bp, SARS Virus
gaagtgtttcgggcgaagtgctctc

SEQ ID NO: 23952 - DNA, 25 bp, SARS Virus
aagtgtttcggtggaagtgctctcg

SEQ ID NO: 23953 - DNA, 25 bp, SARS Virus
agtgtttcggtcgaagtgctctcga

SEQ ID NO: 23954 - DNA, 25 bp, SARS Virus
gtgtttcggtcggagtgctctcgat

SEQ ID NO: 23955 - DNA, 25 bp, SARS Virus
tgtttcggtcgaggtgctctcgata

SEQ ID NO: 23956 - DNA, 25 bp, SARS Virus
gtttcggtcgaagtgctctcgatag

SEQ ID NO: 23957 - DNA, 25 bp, SARS Virus
tttcggtcgaagggctctcgataga

SEQ ID NO: 23958 - DNA, 25 bp, SARS Virus
ttcggtcgaagtgctctcgatagac

SEQ ID NO: 23959 - DNA, 25 bp, SARS Virus
tcggtcgaagtggtctcgatagaca

SEQ ID NO: 23960 - DNA, 25 bp, SARS Virus
cggtcgaagtgcgctcgatagacag

SEQ ID NO: 23961 - DNA, 25 bp, SARS Virus
ggtcgaagtgctgtcgatagacagt

SEQ ID NO: 23962 - DNA, 25 bp, SARS Virus
gtcgaagtgctcgcgatagacagtg

SEQ ID NO: 23963 - DNA, 25 bp, SARS Virus
tcgaagtgctctggatagacagtgt

SEQ ID NO: 23964 - DNA, 25 bp, SARS Virus
cgaagtgctctcgatagacagtgta

SEQ ID NO: 23965 - DNA, 25 bp, SARS Virus
gaagtgctctcggtagacagtgtaa

SEQ ID NO: 23966 - DNA, 25 bp, SARS Virus
aagtgctctcgagagacagtgtaag

SEQ ID NO: 23967 - DNA, 25 bp, SARS Virus
agtgctctcgatggacagtgtaaga

SEQ ID NO: 23968 - DNA, 25 bp, SARS Virus
gtgctctcgatagacagtgtaagaa

SEQ ID NO: 23969 - DNA, 25 bp, SARS Virus
tgctctcgataggcagtgtaagaag

SEQ ID NO: 23970 - DNA, 25 bp, SARS Virus
gctctcgatagagagtgtaagaagg

SEQ ID NO: 23971 - DNA, 25 bp, SARS Virus
ctctcgatagacggtgtaagaaggg

SEQ ID NO: 23972 - DNA, 25 bp, SARS Virus
tctcgatagacagtgtaagaagggt

SEQ ID NO: 23973 - DNA, 25 bp, SARS Virus
ctcgatagacagggtaagaagggtc

SEQ ID NO: 23974 - DNA, 25 bp, SARS Virus
tcgatagacagtgtaagaagggtct

SEQ ID NO: 23975 - DNA, 25 bp, SARS Virus
cgatagacagtggaagaagggtctg

SEQ ID NO: 23976 - DNA, 25 bp, SARS Virus
gatagacagtgtgagaagggtctga

SEQ ID NO: 23977 - DNA, 25 bp, SARS Virus
atagacagtgtaggaagggtctgaa

SEQ ID NO: 23978 - DNA, 25 bp, SARS Virus
tagacagtgtaagaagggtctgaac

SEQ ID NO: 23979 - DNA, 25 bp, SARS Virus
agacagtgtaaggagggtctgaact

SEQ ID NO: 23980 - DNA, 25 bp, SARS Virus
gacagtgtaagaggggtctgaactt

SEQ ID NO: 23981 - DNA, 25 bp, SARS Virus
acagtgtaagaagggtctgaactta

SEQ ID NO: 23982 - DNA, 25 bp, SARS Virus
cagtgtaagaagggtctgaacttac

SEQ ID NO: 23983 - DNA, 25 bp, SARS Virus
agtgtaagaagggtctgaacttacc

SEQ ID NO: 23984 - DNA, 25 bp, SARS Virus
gtgtaagaaggggctgaacttaccg

SEQ ID NO: 23985 - DNA, 25 bp, SARS Virus
tgtaagaagggtgtgaacttaccgc

SEQ ID NO: 23986 - DNA, 25 bp, SARS Virus
gtaagaagggtcggaacttaccgct

SEQ ID NO: 23987 - DNA, 25 bp, SARS Virus
taagaagggtctgaacttaccgcta

SEQ ID NO: 23988 - DNA, 25 bp, SARS Virus
aagaagggtctggacttaccgctac

SEQ ID NO: 23989 - DNA, 25 bp, SARS Virus
agaagggtctgagcttaccgctaca

SEQ ID NO: 23990 - DNA, 25 bp, SARS Virus
gaagggtctgaagttaccgctacat

SEQ ID NO: 23991 - DNA, 25 bp, SARS Virus
aagggtctgaacgtaccgctacatc

SEQ ID NO: 23992 - DNA, 25 bp, SARS Virus
agggtctgaactgaccgctacatca

SEQ ID NO: 23993 - DNA, 25 bp, SARS Virus
gggtctgaacttgccgctacatcac

SEQ ID NO: 23994 - DNA, 25 bp, SARS Virus
ggtctgaacttagcgctacatcacc

SEQ ID NO: 23995 - DNA, 25 bp, SARS Virus
gtctgaacttacggctacatcaccg

SEQ ID NO: 23996 - DNA, 25 bp, SARS Virus
tctgaacttaccgctacatcaccga

SEQ ID NO: 23997 - DNA, 25 bp, SARS Virus
ctgaacttaccggtacatcaccgat

SEQ ID NO: 23998 - DNA, 25 bp, SARS Virus
tgaacttaccgcgacatcaccgata

SEQ ID NO: 23999 - DNA, 25 bp, SARS Virus
gaacttaccgctgcatcaccgataa

SEQ ID NO: 24000 - DNA, 25 bp, SARS Virus
aacttaccgctagatcaccgataac

SEQ ID NO: 24001 - DNA, 25 bp, SARS Virus
acttaccgctacgtcaccgataact

SEQ ID NO: 24002 - DNA, 25 bp, SARS Virus
cttaccgctacagcaccgataactg

SEQ ID NO: 24003 - DNA, 25 bp, SARS Virus
ttaccgctacatgaccgataactga

SEQ ID NO: 24004 - DNA, 25 bp, SARS Virus
taccgctacatcgccgataactgat

SEQ ID NO: 24005 - DNA, 25 bp, SARS Virus
accgctacatcagcgataactgata

SEQ ID NO: 24006 - DNA, 25 bp, SARS Virus
ccgctacatcacggataactgatat

SEQ ID NO: 24007 - DNA, 25 bp, SARS Virus
cgctacatcaccgataactgatatc

SEQ ID NO: 24008 - DNA, 25 bp, SARS Virus
gctacatcaccggtaactgatatct

SEQ ID NO: 24009 - DNA, 25 bp, SARS Virus
ctacatcaccgagaactgatatctg

SEQ ID NO: 24010 - DNA, 25 bp, SARS Virus
tacatcaccgatgactgatatctgt

SEQ ID NO: 24011 - DNA, 25 bp, SARS Virus
acatcaccgatagctgatatctgtg

SEQ ID NO: 24012 - DNA, 25 bp, SARS Virus
catcaccgataagtgatatctgtga

SEQ ID NO: 24013 - DNA, 25 bp, SARS Virus
atcaccgataacggatatctgtgat

SEQ ID NO: 24014 - DNA, 25 bp, SARS Virus
tcaccgataactgatatctgtgata

SEQ ID NO: 24015 - DNA, 25 bp, SARS Virus
caccgataactggtatctgtgataa

SEQ ID NO: 24016 - DNA, 25 bp, SARS Virus
accgataactgagatctgtgataag

SEQ ID NO: 24017 - DNA, 25 bp, SARS Virus
ccgataactgatgtctgtgataagt

SEQ ID NO: 24018 - DNA, 25 bp, SARS Virus
cgataactgatagctgtgataagtc

SEQ ID NO: 24019 - DNA, 25 bp, SARS Virus
gataactgatatgtgtgataagtcg

SEQ ID NO: 24020 - DNA, 25 bp, SARS Virus
ataactgatatcggtgataagtcgc

SEQ ID NO: 24021 - DNA, 25 bp, SARS Virus
taactgatatctgtgataagtcgct

SEQ ID NO: 24022 - DNA, 25 bp, SARS Virus
aactgatatctgggataagtcgctc

SEQ ID NO: 24023 - DNA, 25 bp, SARS Virus
actgatatctgtgataagtcgctca

SEQ ID NO: 24024 - DNA, 25 bp, SARS Virus
ctgatatctgtggtaagtcgctcaa

SEQ ID NO: 24025 - DNA, 25 bp, SARS Virus
tgatatctgtgagaagtcgctcaaa

SEQ ID NO: 24026 - DNA, 25 bp, SARS Virus
gatatctgtgatgagtcgctcaaag

SEQ ID NO: 24027 - DNA, 25 bp, SARS Virus
atatctgtgataggtcgctcaaagt

SEQ ID NO: 24028 - DNA, 25 bp, SARS Virus
tatctgtgataagtcgctcaaagtt

SEQ ID NO: 24029 - DNA, 25 bp, SARS Virus
atctgtgataaggcgctcaaagttc

SEQ ID NO: 24030 - DNA, 25 bp, SARS Virus
tctgtgataagtggctcaaagttct

SEQ ID NO: 24031 - DNA, 25 bp, SARS Virus
ctgtgataagtcgctcaaagttctt

SEQ ID NO: 24032 - DNA, 25 bp, SARS Virus
tgtgataagtcggtcaaagttcttt

SEQ ID NO: 24033 - DNA, 25 bp, SARS Virus
gtgataagtcgcgcaaagttctttc

SEQ ID NO: 24034 - DNA, 25 bp, SARS Virus
tgataagtcgctgaaagttctttcc

SEQ ID NO: 24035 - DNA, 25 bp, SARS Virus
gataagtcgctcgaagttctttcca

SEQ ID NO: 24036 - DNA, 25 bp, SARS Virus
ataagtcgctcagagttctttccac

SEQ ID NO: 24037 - DNA, 25 bp, SARS Virus
taagtcgctcaaggttctttccacg

SEQ ID NO: 24038 - DNA, 25 bp, SARS Virus
aagtcgctcaaagttctttccacga

SEQ ID NO: 24039 - DNA, 25 bp, SARS Virus
agtcgctcaaaggtctttccacgat

SEQ ID NO: 24040 - DNA, 25 bp, SARS Virus
gtcgctcaaagtgctttccacgatt

SEQ ID NO: 24041 - DNA, 25 bp, SARS Virus
atatttaatgtctttccatgtaaga

SEQ ID NO: 24042 - DNA, 25 bp, SARS Virus
tatttaatgtcgttccatgtaagaa

SEQ ID NO: 24043 - DNA, 25 bp, SARS Virus
atttaatgtcgttccatgtaagaat

SEQ ID NO: 24044 - DNA, 25 bp, SARS Virus
tttaatgtcgtttcatgtaagaata

SEQ ID NO: 24045 - DNA, 25 bp, SARS Virus
ttaatgtcgttctatgtaagaatac

SEQ ID NO: 24046 - DNA, 25 bp, SARS Virus
taatgtcgttccttgtaagaataca

SEQ ID NO: 24047 - DNA, 25 bp, SARS Virus
aatgtcgttccatgtaagaatacac

SEQ ID NO: 24048 - DNA, 25 bp, SARS Virus
atgtcgttccatttaagaatacacg

SEQ ID NO: 24049 - DNA, 25 bp, SARS Virus
tgtcgttccatgtaagaatacacgc

SEQ ID NO: 24050 - DNA, 25 bp, SARS Virus
gtcgttccatgttagaatacacgct

SEQ ID NO: 24051 - DNA, 25 bp, SARS Virus
tcgttccatgtatgaatacacgctt

SEQ ID NO: 24052 - DNA, 25 bp, SARS Virus
cgttccatgtaataatacacgctta

SEQ ID NO: 24053 - DNA, 25 bp, SARS Virus
gttccatgtaagtatacacgcttac

SEQ ID NO: 24054 - DNA, 25 bp, SARS Virus
ttccatgtaagattacacgcttact

SEQ ID NO: 24055 - DNA, 25 bp, SARS Virus
tccatgtaagaatacacgcttactc

SEQ ID NO: 24056 - DNA, 25 bp, SARS Virus
ccatgtaagaattcacgcttactca

SEQ ID NO: 24057 - DNA, 25 bp, SARS Virus
catgtaagaatatacgcttactcat

SEQ ID NO: 24058 - DNA, 25 bp, SARS Virus
atgtaagaatactcgcttactcatg

SEQ ID NO: 24059 - DNA, 25 bp, SARS Virus
tgtaagaatacatgcttactcatgt

SEQ ID NO: 24060 - DNA, 25 bp, SARS Virus
gtaagaatacactcttactcatgtg

SEQ ID NO: 24061 - DNA, 25 bp, SARS Virus
taagaatacacgtttactcatgtga

SEQ ID NO: 24062 - DNA, 25 bp, SARS Virus
aagaatacacgcttactcatgtgac

SEQ ID NO: 24063 - DNA, 25 bp, SARS Virus
agaatacacgcttactcatgtgacc

SEQ ID NO: 24064 - DNA, 25 bp, SARS Virus
gaatacacgctttctcatgtgacca

SEQ ID NO: 24065 - DNA, 25 bp, SARS Virus
aatacacgcttattcatgtgaccat

SEQ ID NO: 24066 - DNA, 25 bp, SARS Virus
atacacgcttactcatgtgaccatt

SEQ ID NO: 24067 - DNA, 25 bp, SARS Virus
tacacgcttacttatgtgaccattg

SEQ ID NO: 24068 - DNA, 25 bp, SARS Virus
acacgcttactcttgtgaccattga

SEQ ID NO: 24069 - DNA, 25 bp, SARS Virus
cacgcttactcatgtgaccattgat

SEQ ID NO: 24070 - DNA, 25 bp, SARS Virus
acgcttactcatttgaccattgata

SEQ ID NO: 24071 - DNA, 25 bp, SARS Virus
cgcttactcatgtgaccattgatag

SEQ ID NO: 24072 - DNA, 25 bp, SARS Virus
gcttactcatgttaccattgatagt

SEQ ID NO: 24073 - DNA, 25 bp, SARS Virus
cttactcatgtgtccattgatagtc

SEQ ID NO: 24074 - DNA, 25 bp, SARS Virus
ttactcatgtgatcattgatagtca

SEQ ID NO: 24075 - DNA, 25 bp, SARS Virus
tactcatgtgactattgatagtcac

SEQ ID NO: 24076 - DNA, 25 bp, SARS Virus
actcatgtgacctttgatagtcaca

SEQ ID NO: 24077 - DNA, 25 bp, SARS Virus
ctcatgtgaccattgatagtcacac

SEQ ID NO: 24078 - DNA, 25 bp, SARS Virus
tcatgtgaccattgatagtcacacc

SEQ ID NO: 24079 - DNA, 25 bp, SARS Virus
catgtgaccatttatagtcacacca

SEQ ID NO: 24080 - DNA, 25 bp, SARS Virus
atgtgaccattgttagtcacaccag

SEQ ID NO: 24081 - DNA, 25 bp, SARS Virus
tgtgaccattgatagtcacaccagt

SEQ ID NO: 24082 - DNA, 25 bp, SARS Virus
gtgaccattgattgtcacaccagta

SEQ ID NO: 24083 - DNA, 25 bp, SARS Virus
tgaccattgatattcacaccagtaa

SEQ ID NO: 24084 - DNA, 25 bp, SARS Virus
gaccattgatagtcacaccagtaat

SEQ ID NO: 24085 - DNA, 25 bp, SARS Virus
accattgatagttacaccagtaatg

SEQ ID NO: 24086 - DNA, 25 bp, SARS Virus
ccattgatagtctcaccagtaatgt

SEQ ID NO: 24087 - DNA, 25 bp, SARS Virus
cattgatagtcataccagtaatgtg

SEQ ID NO: 24088 - DNA, 25 bp, SARS Virus
attgatagtcactccagtaatgtga

SEQ ID NO: 24089 - DNA, 25 bp, SARS Virus
ttgatagtcacatcagtaatgtgag

SEQ ID NO: 24090 - DNA, 25 bp, SARS Virus
tgatagtcacactagtaatgtgagt

SEQ ID NO: 24091 - DNA, 25 bp, SARS Virus
gatagtcacacctgtaatgtgagta

SEQ ID NO: 24092 - DNA, 25 bp, SARS Virus
atagtcacaccattaatgtgagtat

SEQ ID NO: 24093 - DNA, 25 bp, SARS Virus
tagtcacaccagtaatgtgagtata

SEQ ID NO: 24094 - DNA, 25 bp, SARS Virus
agtcacaccagttatgtgagtatat

SEQ ID NO: 24095 - DNA, 25 bp, SARS Virus
gtcacaccagtattgtgagtatatt

SEQ ID NO: 24096 - DNA, 25 bp, SARS Virus
tcacaccagtaatgtgagtatattg

SEQ ID NO: 24097 - DNA, 25 bp, SARS Virus
cacaccagtaatttgagtatattga

SEQ ID NO: 24098 - DNA, 25 bp, SARS Virus
acaccagtaatgtgagtatattgac

SEQ ID NO: 24099 - DNA, 25 bp, SARS Virus
caccagtaatgttagtatattgacg

SEQ ID NO: 24100 - DNA, 25 bp, SARS Virus
accagtaatgtgtgtatattgacga

SEQ ID NO: 24101 - DNA, 25 bp, SARS Virus
ccagtaatgtgattatattgacgat

SEQ ID NO: 24102 - DNA, 25 bp, SARS Virus
cagtaatgtgagtatattgacgatt

SEQ ID NO: 24103 - DNA, 25 bp, SARS Virus
agtaatgtgagtttattgacgattc

SEQ ID NO: 24104 - DNA, 25 bp, SARS Virus
gtaatgtgagtatattgacgattcc

SEQ ID NO: 24105 - DNA, 25 bp, SARS Virus
taatgtgagtattttgacgattcct

SEQ ID NO: 24106 - DNA, 25 bp, SARS Virus
aatgtgagtatattgacgattcctc

SEQ ID NO: 24107 - DNA, 25 bp, SARS Virus
atgtgagtatattgacgattcctct

SEQ ID NO: 24108 - DNA, 25 bp, SARS Virus
tgtgagtatatttacgattcctctg

SEQ ID NO: 24109 - DNA, 25 bp, SARS Virus
gtgagtatattgtcgattcctctgg

SEQ ID NO: 24110 - DNA, 25 bp, SARS Virus
tgagtatattgatgattcctctggg

SEQ ID NO: 24111 - DNA, 25 bp, SARS Virus
gagtatattgactattcctctggga

SEQ ID NO: 24112 - DNA, 25 bp, SARS Virus
agtatattgacgtttcctctgggag

SEQ ID NO: 24113 - DNA, 25 bp, SARS Virus
gtatattgacgattcctctgggaga

SEQ ID NO: 24114 - DNA, 25 bp, SARS Virus
tatattgacgattcctctgggagat

SEQ ID NO: 24115 - DNA, 25 bp, SARS Virus
atattgacgatttctctgggagata

SEQ ID NO: 24116 - DNA, 25 bp, SARS Virus
tattgacgattcttctgggagatag

SEQ ID NO: 24117 - DNA, 25 bp, SARS Virus
attgacgattcctctgggagatagc

SEQ ID NO: 24118 - DNA, 25 bp, SARS Virus
ttgacgattcctttgggagatagca

SEQ ID NO: 24119 - DNA, 25 bp, SARS Virus
tgacgattcctctgggagatagcat

SEQ ID NO: 24120 - DNA, 25 bp, SARS Virus
gacgattcctcttggagatagcata

SEQ ID NO: 24121 - DNA, 25 bp, SARS Virus
acgattcctctgtgagatagcataa

SEQ ID NO: 24122 - DNA, 25 bp, SARS Virus
cgattcctctggtagatagcataac

SEQ ID NO: 24123 - DNA, 25 bp, SARS Virus
gattcctctgggtgatagcataact

SEQ ID NO: 24124 - DNA, 25 bp, SARS Virus
attcctctgggatatagcataactg

SEQ ID NO: 24125 - DNA, 25 bp, SARS Virus
ttcctctgggagttagcataactgc

SEQ ID NO: 24126 - DNA, 25 bp, SARS Virus
tcctctgggagatagcataactgcc

SEQ ID NO: 24127 - DNA, 25 bp, SARS Virus
cctctgggagattgcataactgcct

SEQ ID NO: 24128 - DNA, 25 bp, SARS Virus
ctctgggagatatcataactgcctc

SEQ ID NO: 24129 - DNA, 25 bp, SARS Virus
tctgggagatagtataactgcctcg

SEQ ID NO: 24130 - DNA, 25 bp, SARS Virus
ctgggagatagcttaactgcctcga

SEQ ID NO: 24131 - DNA, 25 bp, SARS Virus
tgggagatagcataactgcctcgag

SEQ ID NO: 24132 - DNA, 25 bp, SARS Virus
gggagatagcattactgcctcgagt

SEQ ID NO: 24133 - DNA, 25 bp, SARS Virus
ggagatagcatatctgcctcgagtg

SEQ ID NO: 24134 - DNA, 25 bp, SARS Virus
gagatagcataattgcctcgagtgg

SEQ ID NO: 24135 - DNA, 25 bp, SARS Virus
agatagcataactgcctcgagtgga

SEQ ID NO: 24136 - DNA, 25 bp, SARS Virus
gatagcataacttcctcgagtggaa

SEQ ID NO: 24137 - DNA, 25 bp, SARS Virus
atagcataactgtctcgagtggaat

SEQ ID NO: 24138 - DNA, 25 bp, SARS Virus
tagcataactgcttcgagtggaatg

SEQ ID NO: 24139 - DNA, 25 bp, SARS Virus
agcataactgcctcgagtggaatgt

SEQ ID NO: 24140 - DNA, 25 bp, SARS Virus
gcataactgccttgagtggaatgtt

SEQ ID NO: 24141 - DNA, 25 bp, SARS Virus
cataactgcctctagtggaatgttt

SEQ ID NO: 24142 - DNA, 25 bp, SARS Virus
ataactgcctcgtgtggaatgtttc

SEQ ID NO: 24143 - DNA, 25 bp, SARS Virus
taactgcctcgattggaatgtttct

SEQ ID NO: 24144 - DNA, 25 bp, SARS Virus
aactgcctcgagtggaatgtttcta

SEQ ID NO: 24145 - DNA, 25 bp, SARS Virus
actgcctcgagttgaatgtttctac

SEQ ID NO: 24146 - DNA, 25 bp, SARS Virus
ctgcctcgagtgtaatgtttctaca

SEQ ID NO: 24147 - DNA, 25 bp, SARS Virus
tgcctcgagtggtatgtttctacag

SEQ ID NO: 24148 - DNA, 25 bp, SARS Virus
gcctcgagtggattgtttctacagt

SEQ ID NO: 24149 - DNA, 25 bp, SARS Virus
cctcgagtggaatgtttctacagtc

SEQ ID NO: 24150 - DNA, 25 bp, SARS Virus
ctcgagtggaatttttctacagtct

SEQ ID NO: 24151 - DNA, 25 bp, SARS Virus
tcgagtggaatgtttctacagtctc

SEQ ID NO: 24152 - DNA, 25 bp, SARS Virus
cgagtggaatgtttctacagtctca

SEQ ID NO: 24153 - DNA, 25 bp, SARS Virus
gagtggaatgtttctacagtctcat

SEQ ID NO: 24154 - DNA, 25 bp, SARS Virus
agtggaatgtttttacagtctcatg

SEQ ID NO: 24155 - DNA, 25 bp, SARS Virus
gtggaatgtttctacagtctcatgt

SEQ ID NO: 24156 - DNA, 25 bp, SARS Virus
tggaatgtttcttcagtctcatgtt

SEQ ID NO: 24157 - DNA, 25 bp, SARS Virus
ggaatgtttctatagtctcatgttt

SEQ ID NO: 24158 - DNA, 25 bp, SARS Virus
gaatgtttctactgtctcatgtttc

SEQ ID NO: 24159 - DNA, 25 bp, SARS Virus
aatgtttctacattctcatgtttcc

SEQ ID NO: 24160 - DNA, 25 bp, SARS Virus
atgtttctacagtctcatgtttcct

SEQ ID NO: 24161 - DNA, 25 bp, SARS Virus
tgtttctacagtttcatgtttcctg

SEQ ID NO: 24162 - DNA, 25 bp, SARS Virus
gtttctacagtctcatgtttcctgg

SEQ ID NO: 24163 - DNA, 25 bp, SARS Virus
tttctacagtcttatgtttcctggt

SEQ ID NO: 24164 - DNA, 25 bp, SARS Virus
ttctacagtctcttgtttcctggtc

SEQ ID NO: 24165 - DNA, 25 bp, SARS Virus
tctacagtctcatgtttcctggtca

SEQ ID NO: 24166 - DNA, 25 bp, SARS Virus
ctacagtctcatttttcctggtcac

SEQ ID NO: 24167 - DNA, 25 bp, SARS Virus
tacagtctcatgtttcctggtcact

SEQ ID NO: 24168 - DNA, 25 bp, SARS Virus
acagtctcatgtttcctggtcactg

SEQ ID NO: 24169 - DNA, 25 bp, SARS Virus
cagtctcatgtttcctggtcactga

SEQ ID NO: 24170 - DNA, 25 bp, SARS Virus
agtctcatgttttctggtcactgac

SEQ ID NO: 24171 - DNA, 25 bp, SARS Virus
gtctcatgtttcttggtcactgact

SEQ ID NO: 24172 - DNA, 25 bp, SARS Virus
tctcatgtttcctggtcactgacta

SEQ ID NO: 24173 - DNA, 25 bp, SARS Virus
ctcatgtttccttgtcactgactac

SEQ ID NO: 24174 - DNA, 25 bp, SARS Virus
tcatgtttcctgttcactgactaca

SEQ ID NO: 24175 - DNA, 25 bp, SARS Virus
catgtttcctggtcactgactacaa

SEQ ID NO: 24176 - DNA, 25 bp, SARS Virus
atgtttcctggttactgactacaaa

SEQ ID NO: 24177 - DNA, 25 bp, SARS Virus
tgtttcctggtctctgactacaaaa

SEQ ID NO: 24178 - DNA, 25 bp, SARS Virus
gtttcctggtcattgactacaaaag

SEQ ID NO: 24179 - DNA, 25 bp, SARS Virus
tttcctggtcactgactacaaaaga

SEQ ID NO: 24180 - DNA, 25 bp, SARS Virus
ttcctggtcacttactacaaaagat

SEQ ID NO: 24181 - DNA, 25 bp, SARS Virus
tcctggtcactgtctacaaaagatg

SEQ ID NO: 24182 - DNA, 25 bp, SARS Virus
cctggtcactgattacaaaagatgt

SEQ ID NO: 24183 - DNA, 25 bp, SARS Virus
ctggtcactgactacaaaagatgtt

SEQ ID NO: 24184 - DNA, 25 bp, SARS Virus
tggtcactgacttcaaaagatgttc

SEQ ID NO: 24185 - DNA, 25 bp, SARS Virus
ggtcactgactataaaagatgttcc

SEQ ID NO: 24186 - DNA, 25 bp, SARS Virus
gtcactgactactaaagatgttcct

SEQ ID NO: 24187 - DNA, 25 bp, SARS Virus
tcactgactacataagatgttcctt

SEQ ID NO: 24188 - DNA, 25 bp, SARS Virus
cactgactacaatagatgttccttt

SEQ ID NO: 24189 - DNA, 25 bp, SARS Virus
actgactacaaatgatgttcctttg

SEQ ID NO: 24190 - DNA, 25 bp, SARS Virus
ctgactacaaaatatgttcctttgt

SEQ ID NO: 24191 - DNA, 25 bp, SARS Virus
tgactacaaaagttgttcctttgta

SEQ ID NO: 24192 - DNA, 25 bp, SARS Virus
gactacaaaagatgttcctttgtag

SEQ ID NO: 24193 - DNA, 25 bp, SARS Virus
actacaaaagattttcctttgtaga

SEQ ID NO: 24194 - DNA, 25 bp, SARS Virus
ctacaaaagatgttcctttgtagaa

SEQ ID NO: 24195 - DNA, 25 bp, SARS Virus
tacaaaagatgttcctttgtagaat

SEQ ID NO: 24196 - DNA, 25 bp, SARS Virus
acaaaagatgtttctttgtagaatg

SEQ ID NO: 24197 - DNA, 25 bp, SARS Virus
caaaagatgttcttttgtagaatgt

SEQ ID NO: 24198 - DNA, 25 bp, SARS Virus
aaaagatgttcctttgtagaatgtg

SEQ ID NO: 24199 - DNA, 25 bp, SARS Virus
aaagatgttcctttgtagaatgtga

SEQ ID NO: 24200 - DNA, 25 bp, SARS Virus
aagatgttcctttgtagaatgtgat

SEQ ID NO: 24201 - DNA, 25 bp, SARS Virus
agatgttcctttttagaatgtgatg

SEQ ID NO: 24202 - DNA, 25 bp, SARS Virus
gatgttcctttgtagaatgtgatgt

SEQ ID NO: 24203 - DNA, 25 bp, SARS Virus
atgttcctttgttgaatgtgatgtt

SEQ ID NO: 24204 - DNA, 25 bp, SARS Virus
tgttcctttgtataatgtgatgttg

SEQ ID NO: 24205 - DNA, 25 bp, SARS Virus
gttcctttgtagtatgtgatgttgg

SEQ ID NO: 24206 - DNA, 25 bp, SARS Virus
ttcctttgtagattgtgatgttggt

SEQ ID NO: 24207 - DNA, 25 bp, SARS Virus
tcctttgtagaatgtgatgttggta

SEQ ID NO: 24208 - DNA, 25 bp, SARS Virus
cctttgtagaatttgatgttggtag

SEQ ID NO: 24209 - DNA, 25 bp, SARS Virus
ctttgtagaatgtgatgttggtagt

SEQ ID NO: 24210 - DNA, 25 bp, SARS Virus
tttgtagaatgttatgttggtagtt

SEQ ID NO: 24211 - DNA, 25 bp, SARS Virus
ttgtagaatgtgttgttggtagttc

SEQ ID NO: 24212 - DNA, 25 bp, SARS Virus
tgtagaatgtgatgttggtagttcg

SEQ ID NO: 24213 - DNA, 25 bp, SARS Virus
gtagaatgtgattttggtagttcgg

SEQ ID NO: 24214 - DNA, 25 bp, SARS Virus
tagaatgtgatgttggtagttcgga

SEQ ID NO: 24215 - DNA, 25 bp, SARS Virus
agaatgtgatgttggtagttcggac

SEQ ID NO: 24216 - DNA, 25 bp, SARS Virus
gaatgtgatgtttgtagttcggaca

SEQ ID NO: 24217 - DNA, 25 bp, SARS Virus
aatgtgatgttgttagttcggacac

SEQ ID NO: 24218 - DNA, 25 bp, SARS Virus
atgtgatgttggtagttcggacaca

SEQ ID NO: 24219 - DNA, 25 bp, SARS Virus
tgtgatgttggttgttcggacacag

SEQ ID NO: 24220 - DNA, 25 bp, SARS Virus
gtgatgttggtatttcggacacagc

SEQ ID NO: 24221 - DNA, 25 bp, SARS Virus
tgatgttggtagttcggacacagca

SEQ ID NO: 24222 - DNA, 25 bp, SARS Virus
gatgttggtagttcggacacagcat

SEQ ID NO: 24223 - DNA, 25 bp, SARS Virus
atgttggtagtttggacacagcata

SEQ ID NO: 24224 - DNA, 25 bp, SARS Virus
tgttggtagttctgacacagcatat

SEQ ID NO: 24225 - DNA, 25 bp, SARS Virus
gttggtagttcgtacacagcatatt

SEQ ID NO: 24226 - DNA, 25 bp, SARS Virus
ttggtagttcggtcacagcatattt

SEQ ID NO: 24227 - DNA, 25 bp, SARS Virus
tggtagttcggatacagcatatttg

SEQ ID NO: 24228 - DNA, 25 bp, SARS Virus
ggtagttcggactcagcatatttga

SEQ ID NO: 24229 - DNA, 25 bp, SARS Virus
gtagttcggacatagcatatttgag

SEQ ID NO: 24230 - DNA, 25 bp, SARS Virus
tagttcggacactgcatatttgagc

SEQ ID NO: 24231 - DNA, 25 bp, SARS Virus
agttcggacacatcatatttgagct

SEQ ID NO: 24232 - DNA, 25 bp, SARS Virus
gttcggacacagtatatttgagcta

SEQ ID NO: 24233 - DNA, 25 bp, SARS Virus
ttcggacacagcttatttgagctac

SEQ ID NO: 24234 - DNA, 25 bp, SARS Virus
tcggacacagcatatttgagctacc

SEQ ID NO: 24235 - DNA, 25 bp, SARS Virus
cggacacagcatttttgagctacct

SEQ ID NO: 24236 - DNA, 25 bp, SARS Virus
ggacacagcatatttgagctacctc

SEQ ID NO: 24237 - DNA, 25 bp, SARS Virus
gacacagcatatttgagctacctca

SEQ ID NO: 24238 - DNA, 25 bp, SARS Virus
acacagcatatttgagctacctcaa

SEQ ID NO: 24239 - DNA, 25 bp, SARS Virus
cacagcatattttagctacctcaat

SEQ ID NO: 24240 - DNA, 25 bp, SARS Virus
acagcatatttgtgctacctcaatg

SEQ ID NO: 24241 - DNA, 25 bp, SARS Virus
cagcatatttgatctacctcaatga

SEQ ID NO: 24242 - DNA, 25 bp, SARS Virus
agcatatttgagttacctcaatgaa

SEQ ID NO: 24243 - DNA, 25 bp, SARS Virus
gcatatttgagctacctcaatgaat

SEQ ID NO: 24244 - DNA, 25 bp, SARS Virus
catatttgagcttcctcaatgaatg

SEQ ID NO: 24245 - DNA, 25 bp, SARS Virus
atatttgagctatctcaatgaatgt

SEQ ID NO: 24246 - DNA, 25 bp, SARS Virus
tatttgagctacttcaatgaatgtg

SEQ ID NO: 24247 - DNA, 25 bp, SARS Virus
atttgagctacctcaatgaatgtgt

SEQ ID NO: 24248 - DNA, 25 bp, SARS Virus
tttgagctaccttaatgaatgtgtc

SEQ ID NO: 24249 - DNA, 25 bp, SARS Virus
ttgagctacctctatgaatgtgtct

SEQ ID NO: 24250 - DNA, 25 bp, SARS Virus
tgagctacctcattgaatgtgtctc

SEQ ID NO: 24251 - DNA, 25 bp, SARS Virus
gagctacctcaatgaatgtgtctct

SEQ ID NO: 24252 - DNA, 25 bp, SARS Virus
agctacctcaattaatgtgtctcta

SEQ ID NO: 24253 - DNA, 25 bp, SARS Virus
gctacctcaatgtatgtgtctctaa

SEQ ID NO: 24254 - DNA, 25 bp, SARS Virus
ctacctcaatgattgtgtctctaac

SEQ ID NO: 24255 - DNA, 25 bp, SARS Virus
tacctcaatgaatgtgtctctaact

SEQ ID NO: 24256 - DNA, 25 bp, SARS Virus
acctcaatgaatttgtctctaactt

SEQ ID NO: 24257 - DNA, 25 bp, SARS Virus
cctcaatgaatgtgtctctaacttg

SEQ ID NO: 24258 - DNA, 25 bp, SARS Virus
ctcaatgaatgtttctctaacttgg

SEQ ID NO: 24259 - DNA, 25 bp, SARS Virus
tcaatgaatgtgtctctaacttggt

SEQ ID NO: 24260 - DNA, 25 bp, SARS Virus
caatgaatgtgtttctaacttggtt

SEQ ID NO: 24261 - DNA, 25 bp, SARS Virus
aatgaatgtgtctctaacttggttt

SEQ ID NO: 24262 - DNA, 25 bp, SARS Virus
atgaatgtgtctttaacttggtttt

SEQ ID NO: 24263 - DNA, 25 bp, SARS Virus
tgaatgtgtctctaacttggtttta

SEQ ID NO: 24264 - DNA, 25 bp, SARS Virus
gaatgtgtctcttacttggttttaa

SEQ ID NO: 24265 - DNA, 25 bp, SARS Virus
aatgtgtctctatcttggttttaac

SEQ ID NO: 24266 - DNA, 25 bp, SARS Virus
atgtgtctctaatttggttttaacc

SEQ ID NO: 24267 - DNA, 25 bp, SARS Virus
tgtgtctctaacttggttttaacct

SEQ ID NO: 24268 - DNA, 25 bp, SARS Virus
gtgtctctaacttggttttaaccta

SEQ ID NO: 24269 - DNA, 25 bp, SARS Virus
tgtctctaactttgttttaacctac

SEQ ID NO: 24270 - DNA, 25 bp, SARS Virus
gtctctaacttgtttttaacctacc

SEQ ID NO: 24271 - DNA, 25 bp, SARS Virus
tctctaacttggttttaacctaccc

SEQ ID NO: 24272 - DNA, 25 bp, SARS Virus
ctctaacttggttttaacctaccca

SEQ ID NO: 24273 - DNA, 25 bp, SARS Virus
tctaacttggttttaacctacccat

SEQ ID NO: 24274 - DNA, 25 bp, SARS Virus
ctaacttggttttaacctacccata

SEQ ID NO: 24275 - DNA, 25 bp, SARS Virus
taacttggtttttacctacccataa

SEQ ID NO: 24276 - DNA, 25 bp, SARS Virus
aacttggttttatcctacccataat

SEQ ID NO: 24277 - DNA, 25 bp, SARS Virus
acttggttttaatctacccataata

SEQ ID NO: 24278 - DNA, 25 bp, SARS Virus
cttggttttaacttacccataatat

SEQ ID NO: 24279 - DNA, 25 bp, SARS Virus
ttggttttaacctacccataatatt

SEQ ID NO: 24280 - DNA, 25 bp, SARS Virus
tggttttaaccttcccataatattt

SEQ ID NO: 24281 - DNA, 25 bp, SARS Virus
ggttttaacctatccataatatttt

SEQ ID NO: 24282 - DNA, 25 bp, SARS Virus
gttttaacctactcataatattttt

SEQ ID NO: 24283 - DNA, 25 bp, SARS Virus
ttttaacctacctataatatttttc

SEQ ID NO: 24284 - DNA, 25 bp, SARS Virus
tttaacctacccttaatatttttcc

SEQ ID NO: 24285 - DNA, 25 bp, SARS Virus
ttaacctacccataatatttttcct

SEQ ID NO: 24286 - DNA, 25 bp, SARS Virus
taacctacccattatatttttccta

SEQ ID NO: 24287 - DNA, 25 bp, SARS Virus
aacctacccatattatttttcctat

SEQ ID NO: 24288 - DNA, 25 bp, SARS Virus
acctacccataatatttttcctatt

SEQ ID NO: 24289 - DNA, 25 bp, SARS Virus
cctacccataatttttttcctatta

SEQ ID NO: 24290 - DNA, 25 bp, SARS Virus
ctacccataatatttttcctattac

SEQ ID NO: 24291 - DNA, 25 bp, SARS Virus
tacccataatatttttcctattacg

SEQ ID NO: 24292 - DNA, 25 bp, SARS Virus
acccataatatttttcctattacga

SEQ ID NO: 24293 - DNA, 25 bp, SARS Virus
cccataatatttttcctattacgaa

SEQ ID NO: 24294 - DNA, 25 bp, SARS Virus
ccataatatttttcctattacgaat

SEQ ID NO: 24295 - DNA, 25 bp, SARS Virus
cataatattttttctattacgaatg

SEQ ID NO: 24296 - DNA, 25 bp, SARS Virus
ataatatttttcttattacgaatga

SEQ ID NO: 24297 - DNA, 25 bp, SARS Virus
taatatttttcctattacgaatgat

SEQ ID NO: 24298 - DNA, 25 bp, SARS Virus
aatatttttccttttacgaatgata

SEQ ID NO: 24299 - DNA, 25 bp, SARS Virus
atatttttcctattacgaatgatat

SEQ ID NO: 24300 - DNA, 25 bp, SARS Virus
tatttttcctattacgaatgatatg

SEQ ID NO: 24301 - DNA, 25 bp, SARS Virus
atttttcctatttcgaatgatatgt

SEQ ID NO: 24302 - DNA, 25 bp, SARS Virus
tttttcctattatgaatgatatgtc

SEQ ID NO: 24303 - DNA, 25 bp, SARS Virus
ttttcctattactaatgatatgtct

SEQ ID NO: 24304 - DNA, 25 bp, SARS Virus
tttcctattacgtatgatatgtctc

SEQ ID NO: 24305 - DNA, 25 bp, SARS Virus
ttcctattacgattgatatgtctcg

SEQ ID NO: 24306 - DNA, 25 bp, SARS Virus
tcctattacgaatgatatgtctcgt

SEQ ID NO: 24307 - DNA, 25 bp, SARS Virus
cctattacgaattatatgtctcgtc

SEQ ID NO: 24308 - DNA, 25 bp, SARS Virus
ctattacgaatgttatgtctcgtcg

SEQ ID NO: 24309 - DNA, 25 bp, SARS Virus
tattacgaatgatatgtctcgtcgg

SEQ ID NO: 24310 - DNA, 25 bp, SARS Virus
attacgaatgatttgtctcgtcgga

SEQ ID NO: 24311 - DNA, 25 bp, SARS Virus
ttacgaatgatatgtctcgtcggat

SEQ ID NO: 24312 - DNA, 25 bp, SARS Virus
tacgaatgatatttctcgtcggata

SEQ ID NO: 24313 - DNA, 25 bp, SARS Virus
acgaatgatatgtctcgtcggatat

SEQ ID NO: 24314 - DNA, 25 bp, SARS Virus
cgaatgatatgtttcgtcggatatc

SEQ ID NO: 24315 - DNA, 25 bp, SARS Virus
gaatgatatgtctcgtcggatatct

SEQ ID NO: 24316 - DNA, 25 bp, SARS Virus
aatgatatgtcttgtcggatatctg

SEQ ID NO: 24317 - DNA, 25 bp, SARS Virus
atgatatgtctcttcggatatctgg

SEQ ID NO: 24318 - DNA, 25 bp, SARS Virus
tgatatgtctcgtcggatatctgga

SEQ ID NO: 24319 - DNA, 25 bp, SARS Virus
gatatgtctcgttggatatctggaa

SEQ ID NO: 24320 - DNA, 25 bp, SARS Virus
atatgtctcgtctgatatctggaac

SEQ ID NO: 24321 - DNA, 25 bp, SARS Virus
tatgtctcgtcgtatatctggaaca

SEQ ID NO: 24322 - DNA, 25 bp, SARS Virus
atgtctcgtcggttatctggaacat

SEQ ID NO: 24323 - DNA, 25 bp, SARS Virus
tgtctcgtcggatatctggaacatg

SEQ ID NO: 24324 - DNA, 25 bp, SARS Virus
gtctcgtcggatttctggaacatgg

SEQ ID NO: 24325 - DNA, 25 bp, SARS Virus
tctcgtcggatatctggaacatggt

SEQ ID NO: 24326 - DNA, 25 bp, SARS Virus
ctcgtcggatatttggaacatggtt

SEQ ID NO: 24327 - DNA, 25 bp, SARS Virus
tcgtcggatatctggaacatggttg

SEQ ID NO: 24328 - DNA, 25 bp, SARS Virus
cgtcggatatcttgaacatggttga

SEQ ID NO: 24329 - DNA, 25 bp, SARS Virus
gtcggatatctgtaacatggttgag

SEQ ID NO: 24330 - DNA, 25 bp, SARS Virus
tcggatatctggtacatggttgagt

SEQ ID NO: 24331 - DNA, 25 bp, SARS Virus
cggatatctggatcatggttgagtt

SEQ ID NO: 24332 - DNA, 25 bp, SARS Virus
ggatatctggaatatggttgagttg

SEQ ID NO: 24333 - DNA, 25 bp, SARS Virus
gatatctggaacttggttgagttgg

SEQ ID NO: 24334 - DNA, 25 bp, SARS Virus
atatctggaacatggttgagttggt

SEQ ID NO: 24335 - DNA, 25 bp, SARS Virus
tatctggaacattgttgagttggta

SEQ ID NO: 24336 - DNA, 25 bp, SARS Virus
atctggaacatgtttgagttggtaa

SEQ ID NO: 24337 - DNA, 25 bp, SARS Virus
tctggaacatggttgagttggtaat

SEQ ID NO: 24338 - DNA, 25 bp, SARS Virus
ctggaacatggttgagttggtaatg

SEQ ID NO: 24339 - DNA, 25 bp, SARS Virus
tggaacatggtttagttggtaatgg

SEQ ID NO: 24340 - DNA, 25 bp, SARS Virus
ggaacatggttgtgttggtaatggt

SEQ ID NO: 24341 - DNA, 25 bp, SARS Virus
gaacatggttgatttggtaatggtt

SEQ ID NO: 24342 - DNA, 25 bp, SARS Virus
aacatggttgagttggtaatggttt

SEQ ID NO: 24343 - DNA, 25 bp, SARS Virus
acatggttgagttggtaatggttta

SEQ ID NO: 24344 - DNA, 25 bp, SARS Virus
catggttgagtttgtaatggtttac

SEQ ID NO: 24345 - DNA, 25 bp, SARS Virus
atggttgagttgttaatggtttacg

SEQ ID NO: 24346 - DNA, 25 bp, SARS Virus
tggttgagttggtaatggtttacgc

SEQ ID NO: 24347 - DNA, 25 bp, SARS Virus
ggttgagttggttatggtttacgct

SEQ ID NO: 24348 - DNA, 25 bp, SARS Virus
gttgagttggtattggtttacgctc

SEQ ID NO: 24349 - DNA, 25 bp, SARS Virus
ttgagttggtaatggtttacgctca

SEQ ID NO: 24350 - DNA, 25 bp, SARS Virus
tgagttggtaattgtttacgctcaa

SEQ ID NO: 24351 - DNA, 25 bp, SARS Virus
gagttggtaatgttttacgctcaaa

SEQ ID NO: 24352 - DNA, 25 bp, SARS Virus
agttggtaatggtttacgctcaaaa

SEQ ID NO: 24353 - DNA, 25 bp, SARS Virus
gttggtaatggtttacgctcaaaac

SEQ ID NO: 24354 - DNA, 25 bp, SARS Virus
ttggtaatggtttacgctcaaaact

SEQ ID NO: 24355 - DNA, 25 bp, SARS Virus
tggtaatggttttcgctcaaaacta

SEQ ID NO: 24356 - DNA, 25 bp, SARS Virus
ggtaatggtttatgctcaaaactat

SEQ ID NO: 24357 - DNA, 25 bp, SARS Virus
gtaatggtttactctcaaaactatt

SEQ ID NO: 24358 - DNA, 25 bp, SARS Virus
taatggtttacgttcaaaactatta

SEQ ID NO: 24359 - DNA, 25 bp, SARS Virus
aatggtttacgctcaaaactattaa

SEQ ID NO: 24360 - DNA, 25 bp, SARS Virus
atggtttacgcttaaaactattaaa

SEQ ID NO: 24361 - DNA, 25 bp, SARS Virus
tggtttacgctctaaactattaaag

SEQ ID NO: 24362 - DNA, 25 bp, SARS Virus
ggtttacgctcataactattaaagt

SEQ ID NO: 24363 - DNA, 25 bp, SARS Virus
gtttacgctcaatactattaaagtt

SEQ ID NO: 24364 - DNA, 25 bp, SARS Virus
tttacgctcaaatctattaaagttt

SEQ ID NO: 24365 - DNA, 25 bp, SARS Virus
ttacgctcaaaattattaaagtttg

SEQ ID NO: 24366 - DNA, 25 bp, SARS Virus
tacgctcaaaactattaaagtttga

SEQ ID NO: 24367 - DNA, 25 bp, SARS Virus
acgctcaaaacttttaaagtttgag

SEQ ID NO: 24368 - DNA, 25 bp, SARS Virus
cgctcaaaactattaaagtttgagt

SEQ ID NO: 24369 - DNA, 25 bp, SARS Virus
gctcaaaactattaaagtttgagtg

SEQ ID NO: 24370 - DNA, 25 bp, SARS Virus
ctcaaaactatttaagtttgagtgt

SEQ ID NO: 24371 - DNA, 25 bp, SARS Virus
tcaaaactattatagtttgagtgta

SEQ ID NO: 24372 - DNA, 25 bp, SARS Virus
caaaactattaatgtttgagtgtac

SEQ ID NO: 24373 - DNA, 25 bp, SARS Virus
aaaactattaaattttgagtgtaca

SEQ ID NO: 24374 - DNA, 25 bp, SARS Virus
aaactattaaagtttgagtgtacaa

SEQ ID NO: 24375 - DNA, 25 bp, SARS Virus
aactattaaagtttgagtgtacaag

SEQ ID NO: 24376 - DNA, 25 bp, SARS Virus
actattaaagtttgagtgtacaaga

SEQ ID NO: 24377 - DNA, 25 bp, SARS Virus
ctattaaagttttagtgtacaagat

SEQ ID NO: 24378 - DNA, 25 bp, SARS Virus
tattaaagtttgtgtgtacaagatt

SEQ ID NO: 24379 - DNA, 25 bp, SARS Virus
attaaagtttgattgtacaagattg

SEQ ID NO: 24380 - DNA, 25 bp, SARS Virus
ttaaagtttgagtgtacaagattgt

SEQ ID NO: 24381 - DNA, 25 bp, SARS Virus
taaagtttgagtttacaagattgtg

SEQ ID NO: 24382 - DNA, 25 bp, SARS Virus
aaagtttgagtgtacaagattgtgt

SEQ ID NO: 24383 - DNA, 25 bp, SARS Virus
aagtttgagtgttcaagattgtgtt

SEQ ID NO: 24384 - DNA, 25 bp, SARS Virus
agtttgagtgtataagattgtgttt

SEQ ID NO: 24385 - DNA, 25 bp, SARS Virus
gtttgagtgtactagattgtgtttt

SEQ ID NO: 24386 - DNA, 25 bp, SARS Virus
tttgagtgtacatgattgtgtttta

SEQ ID NO: 24387 - DNA, 25 bp, SARS Virus
ttgagtgtacaatattgtgttttaa

SEQ ID NO: 24388 - DNA, 25 bp, SARS Virus
tgagtgtacaagtttgtgttttaaa

SEQ ID NO: 24389 - DNA, 25 bp, SARS Virus
gagtgtacaagattgtgttttaaac

SEQ ID NO: 24390 - DNA, 25 bp, SARS Virus
agtgtacaagattgtgttttaaacg

SEQ ID NO: 24391 - DNA, 25 bp, SARS Virus
gtgtacaagattttgttttaaacga

SEQ ID NO: 24392 - DNA, 25 bp, SARS Virus
tgtacaagattgtgttttaaacgac

SEQ ID NO: 24393 - DNA, 25 bp, SARS Virus
gtacaagattgttttttaaacgact

SEQ ID NO: 24394 - DNA, 25 bp, SARS Virus
tacaagattgtgttttaaacgacta

SEQ ID NO: 24395 - DNA, 25 bp, SARS Virus
acaagattgtgttttaaacgactac

SEQ ID NO: 24396 - DNA, 25 bp, SARS Virus
caagattgtgttttaaacgactact

SEQ ID NO: 24397 - DNA, 25 bp, SARS Virus
aagattgtgttttaaacgactacta

SEQ ID NO: 24398 - DNA, 25 bp, SARS Virus
agattgtgtttttaacgactactaa

SEQ ID NO: 24399 - DNA, 25 bp, SARS Virus
gattgtgttttatacgactactaaa

SEQ ID NO: 24400 - DNA, 25 bp, SARS Virus
attgtgttttaatcgactactaaat

SEQ ID NO: 24401 - DNA, 25 bp, SARS Virus
ttgtgttttaaatgactactaaatt

SEQ ID NO: 24402 - DNA, 25 bp, SARS Virus
tgtgttttaaactactactaaattt

SEQ ID NO: 24403 - DNA, 25 bp, SARS Virus
gtgttttaaacgtctactaaattta

SEQ ID NO: 24404 - DNA, 25 bp, SARS Virus
tgttttaaacgattactaaatttag

SEQ ID NO: 24405 - DNA, 25 bp, SARS Virus
gttttaaacgactactaaatttagt

SEQ ID NO: 24406 - DNA, 25 bp, SARS Virus
ttttaaacgacttctaaatttagtt

SEQ ID NO: 24407 - DNA, 25 bp, SARS Virus
tttaaacgactattaaatttagttt

SEQ ID NO: 24408 - DNA, 25 bp, SARS Virus
ttaaacgactactaaatttagttta

SEQ ID NO: 24409 - DNA, 25 bp, SARS Virus
taaacgactacttaatttagtttac

SEQ ID NO: 24410 - DNA, 25 bp, SARS Virus
aaacgactactatatttagtttact

SEQ ID NO: 24411 - DNA, 25 bp, SARS Virus
aacgactactaattttagtttactg

SEQ ID NO: 24412 - DNA, 25 bp, SARS Virus
acgactactaaatttagtttactgt

SEQ ID NO: 24413 - DNA, 25 bp, SARS Virus
cgactactaaatttagtttactgtc

SEQ ID NO: 24414 - DNA, 25 bp, SARS Virus
gactactaaatttagtttactgtcc

SEQ ID NO: 24415 - DNA, 25 bp, SARS Virus
actactaaattttgtttactgtccg

SEQ ID NO: 24416 - DNA, 25 bp, SARS Virus
ctactaaatttattttactgtccga

SEQ ID NO: 24417 - DNA, 25 bp, SARS Virus
tactaaatttagtttactgtccgaa

SEQ ID NO: 24418 - DNA, 25 bp, SARS Virus
actaaatttagtttactgtccgaag

SEQ ID NO: 24419 - DNA, 25 bp, SARS Virus
ctaaatttagtttactgtccgaagt

SEQ ID NO: 24420 - DNA, 25 bp, SARS Virus
taaatttagttttctgtccgaagtg

SEQ ID NO: 24421 - DNA, 25 bp, SARS Virus
aaatttagtttattgtccgaagtgt

SEQ ID NO: 24422 - DNA, 25 bp, SARS Virus
aatttagtttactgtccgaagtgtt

SEQ ID NO: 24423 - DNA, 25 bp, SARS Virus
atttagtttactttccgaagtgttt

SEQ ID NO: 24424 - DNA, 25 bp, SARS Virus
tttagtttactgtccgaagtgtttc

SEQ ID NO: 24425 - DNA, 25 bp, SARS Virus
ttagtttactgttcgaagtgtttcg

SEQ ID NO: 24426 - DNA, 25 bp, SARS Virus
tagtttactgtctgaagtgtttcgg

SEQ ID NO: 24427 - DNA, 25 bp, SARS Virus
agtttactgtcctaagtgtttcggt

SEQ ID NO: 24428 - DNA, 25 bp, SARS Virus
gtttactgtccgtagtgtttcggtc

SEQ ID NO: 24429 - DNA, 25 bp, SARS Virus
tttactgtccgatgtgtttcggtcg

SEQ ID NO: 24430 - DNA, 25 bp, SARS Virus
ttactgtccgaattgtttcggtcga

SEQ ID NO: 24431 - DNA, 25 bp, SARS Virus
tactgtccgaagtgtttcggtcgaa

SEQ ID NO: 24432 - DNA, 25 bp, SARS Virus
actgtccgaagtttttcggtcgaag

SEQ ID NO: 24433 - DNA, 25 bp, SARS Virus
ctgtccgaagtgtttcggtcgaagt

SEQ ID NO: 24434 - DNA, 25 bp, SARS Virus
tgtccgaagtgtttcggtcgaagtg

SEQ ID NO: 24435 - DNA, 25 bp, SARS Virus
gtccgaagtgtttcggtcgaagtgc

SEQ ID NO: 24436 - DNA, 25 bp, SARS Virus
tccgaagtgttttggtcgaagtgct

SEQ ID NO: 24437 - DNA, 25 bp, SARS Virus
ccgaagtgtttctgtcgaagtgctc

SEQ ID NO: 24438 - DNA, 25 bp, SARS Virus
cgaagtgtttcgttcgaagtgctct

SEQ ID NO: 24439 - DNA, 25 bp, SARS Virus
gaagtgtttcggtcgaagtgctctc

SEQ ID NO: 24440 - DNA, 25 bp, SARS Virus
aagtgtttcggttgaagtgctctcg

SEQ ID NO: 24441 - DNA, 25 bp, SARS Virus
agtgtttcggtctaagtgctctcga

SEQ ID NO: 24442 - DNA, 25 bp, SARS Virus
gtgtttcggtcgtagtgctctcgat

SEQ ID NO: 24443 - DNA, 25 bp, SARS Virus
tgtttcggtcgatgtgctctcgata

SEQ ID NO: 24444 - DNA, 25 bp, SARS Virus
gtttcggtcgaattgctctcgatag

SEQ ID NO: 24445 - DNA, 25 bp, SARS Virus
tttcggtcgaagtgctctcgataga

SEQ ID NO: 24446 - DNA, 25 bp, SARS Virus
ttcggtcgaagttctctcgatagac

SEQ ID NO: 24447 - DNA, 25 bp, SARS Virus
tcggtcgaagtgttctcgatagaca

SEQ ID NO: 24448 - DNA, 25 bp, SARS Virus
cggtcgaagtgctctcgatagacag

SEQ ID NO: 24449 - DNA, 25 bp, SARS Virus
ggtcgaagtgctttcgatagacagt

SEQ ID NO: 24450 - DNA, 25 bp, SARS Virus
gtcgaagtgctctcgatagacagtg

SEQ ID NO: 24451 - DNA, 25 bp, SARS Virus
tcgaagtgctcttgatagacagtgt

SEQ ID NO: 24452 - DNA, 25 bp, SARS Virus
cgaagtgctctctatagacagtgta

SEQ ID NO: 24453 - DNA, 25 bp, SARS Virus
gaagtgctctcgttagacagtgtaa

SEQ ID NO: 24454 - DNA, 25 bp, SARS Virus
aagtgctctcgatagacagtgtaag

SEQ ID NO: 24455 - DNA, 25 bp, SARS Virus
agtgctctcgattgacagtgtaaga

SEQ ID NO: 24456 - DNA, 25 bp, SARS Virus
gtgctctcgatatacagtgtaagaa

SEQ ID NO: 24457 - DNA, 25 bp, SARS Virus
tgctctcgatagtcagtgtaagaag

SEQ ID NO: 24458 - DNA, 25 bp, SARS Virus
gctctcgatagatagtgtaagaagg

SEQ ID NO: 24459 - DNA, 25 bp, SARS Virus
ctctcgatagactgtgtaagaaggg

SEQ ID NO: 24460 - DNA, 25 bp, SARS Virus
tctcgatagacattgtaagaagggt

SEQ ID NO: 24461 - DNA, 25 bp, SARS Virus
ctcgatagacagtgtaagaagggtc

SEQ ID NO: 24462 - DNA, 25 bp, SARS Virus
tcgatagacagtttaagaagggtct

SEQ ID NO: 24463 - DNA, 25 bp, SARS Virus
cgatagacagtgtaagaagggtctg

SEQ ID NO: 24464 - DNA, 25 bp, SARS Virus
gatagacagtgttagaagggtctga

SEQ ID NO: 24465 - DNA, 25 bp, SARS Virus
atagacagtgtatgaagggtctgaa

SEQ ID NO: 24466 - DNA, 25 bp, SARS Virus
tagacagtgtaataagggtctgaac

SEQ ID NO: 24467 - DNA, 25 bp, SARS Virus
agacagtgtaagtagggtctgaact

SEQ ID NO: 24468 - DNA, 25 bp, SARS Virus
gacagtgtaagatgggtctgaactt

SEQ ID NO: 24469 - DNA, 25 bp, SARS Virus
acagtgtaagaatggtctgaactta

SEQ ID NO: 24470 - DNA, 25 bp, SARS Virus
cagtgtaagaagtgtctgaacttac

SEQ ID NO: 24471 - DNA, 25 bp, SARS Virus
agtgtaagaaggttctgaacttacc

SEQ ID NO: 24472 - DNA, 25 bp, SARS Virus
gtgtaagaagggtctgaacttaccg

SEQ ID NO: 24473 - DNA, 25 bp, SARS Virus
tgtaagaagggtttgaacttaccgc

SEQ ID NO: 24474 - DNA, 25 bp, SARS Virus
gtaagaagggtctgaacttaccgct

SEQ ID NO: 24475 - DNA, 25 bp, SARS Virus
taagaagggtcttaacttaccgcta

SEQ ID NO: 24476 - DNA, 25 bp, SARS Virus
aagaagggtctgtacttaccgctac

SEQ ID NO: 24477 - DNA, 25 bp, SARS Virus
agaagggtctgatcttaccgctaca

SEQ ID NO: 24478 - DNA, 25 bp, SARS Virus
gaagggtctgaatttaccgctacat

SEQ ID NO: 24479 - DNA, 25 bp, SARS Virus
aagggtctgaacttaccgctacatc

SEQ ID NO: 24480 - DNA, 25 bp, SARS Virus
agggtctgaacttaccgctacatca

SEQ ID NO: 24481 - DNA, 25 bp, SARS Virus
gggtctgaactttccgctacatcac

SEQ ID NO: 24482 - DNA, 25 bp, SARS Virus
ggtctgaacttatcgctacatcacc

SEQ ID NO: 24483 - DNA, 25 bp, SARS Virus
gtctgaacttactgctacatcaccg

SEQ ID NO: 24484 - DNA, 25 bp, SARS Virus
tctgaacttacctctacatcaccga

SEQ ID NO: 24485 - DNA, 25 bp, SARS Virus
ctgaacttaccgttacatcaccgat

SEQ ID NO: 24486 - DNA, 25 bp, SARS Virus
tgaacttaccgctacatcaccgata

SEQ ID NO: 24487 - DNA, 25 bp, SARS Virus
gaacttaccgcttcatcaccgataa

SEQ ID NO: 24488 - DNA, 25 bp, SARS Virus
aacttaccgctatatcaccgataac

SEQ ID NO: 24489 - DNA, 25 bp, SARS Virus
acttaccgctacttcaccgataact

SEQ ID NO: 24490 - DNA, 25 bp, SARS Virus
cttaccgctacatcaccgataactg

SEQ ID NO: 24491 - DNA, 25 bp, SARS Virus
ttaccgctacattaccgataactga

SEQ ID NO: 24492 - DNA, 25 bp, SARS Virus
taccgctacatctccgataactgat

SEQ ID NO: 24493 - DNA, 25 bp, SARS Virus
accgctacatcatcgataactgata

SEQ ID NO: 24494 - DNA, 25 bp, SARS Virus
ccgctacatcactgataactgatat

SEQ ID NO: 24495 - DNA, 25 bp, SARS Virus
cgctacatcacctataactgatatc

SEQ ID NO: 24496 - DNA, 25 bp, SARS Virus
gctacatcaccgttaactgatatct

SEQ ID NO: 24497 - DNA, 25 bp, SARS Virus
ctacatcaccgataactgatatctg

SEQ ID NO: 24498 - DNA, 25 bp, SARS Virus
tacatcaccgattactgatatctgt

SEQ ID NO: 24499 - DNA, 25 bp, SARS Virus
acatcaccgatatctgatatctgtg

SEQ ID NO: 24500 - DNA, 25 bp, SARS Virus
catcaccgataattgatatctgtga

SEQ ID NO: 24501 - DNA, 25 bp, SARS Virus
atcaccgataactgatatctgtgat

SEQ ID NO: 24502 - DNA, 25 bp, SARS Virus
tcaccgataacttatatctgtgata

SEQ ID NO: 24503 - DNA, 25 bp, SARS Virus
caccgataactgttatctgtgataa

SEQ ID NO: 24504 - DNA, 25 bp, SARS Virus
accgataactgatatctgtgataag

SEQ ID NO: 24505 - DNA, 25 bp, SARS Virus
ccgataactgatttctgtgataagt

SEQ ID NO: 24506 - DNA, 25 bp, SARS Virus
cgataactgatatctgtgataagtc

SEQ ID NO: 24507 - DNA, 25 bp, SARS Virus
gataactgatatttgtgataagtcg

SEQ ID NO: 24508 - DNA, 25 bp, SARS Virus
ataactgatatctgtgataagtcgc

SEQ ID NO: 24509 - DNA, 25 bp, SARS Virus
taactgatatctttgataagtcgct

SEQ ID NO: 24510 - DNA, 25 bp, SARS Virus
aactgatatctgtgataagtcgctc

SEQ ID NO: 24511 - DNA, 25 bp, SARS Virus
actgatatctgttataagtcgctca

SEQ ID NO: 24512 - DNA, 25 bp, SARS Virus
ctgatatctgtgttaagtcgctcaa

SEQ ID NO: 24513 - DNA, 25 bp, SARS Virus
tgatatctgtgataagtcgctcaaa

SEQ ID NO: 24514 - DNA, 25 bp, SARS Virus
gatatctgtgattagtcgctcaaag

SEQ ID NO: 24515 - DNA, 25 bp, SARS Virus
atatctgtgatatgtcgctcaaagt

SEQ ID NO: 24516 - DNA, 25 bp, SARS Virus
tatctgtgataattcgctcaaagtt

SEQ ID NO: 24517 - DNA, 25 bp, SARS Virus
atctgtgataagtcgctcaaagttc

SEQ ID NO: 24518 - DNA, 25 bp, SARS Virus
tctgtgataagttgctcaaagttct

SEQ ID NO: 24519 - DNA, 25 bp, SARS Virus
ctgtgataagtctctcaaagttctt

SEQ ID NO: 24520 - DNA, 25 bp, SARS Virus
tgtgataagtcgttcaaagttcttt

SEQ ID NO: 24521 - DNA, 25 bp, SARS Virus
gtgataagtcgctcaaagttctttc

SEQ ID NO: 24522 - DNA, 25 bp, SARS Virus
tgataagtcgcttaaagttctttcc

SEQ ID NO: 24523 - DNA, 25 bp, SARS Virus
gataagtcgctctaagttctttcca

SEQ ID NO: 24524 - DNA, 25 bp, SARS Virus
ataagtcgctcatagttctttccac

SEQ ID NO: 24525 - DNA, 25 bp, SARS Virus
taagtcgctcaatgttctttccacg

SEQ ID NO: 24526 - DNA, 25 bp, SARS Virus
aagtcgctcaaatttctttccacga

SEQ ID NO: 24527 - DNA, 25 bp, SARS Virus
agtcgctcaaagttctttccacgat

SEQ ID NO: 24528 - DNA, 25 bp, SARS Virus
gtcgctcaaagttctttccacgatt

SEQ ID NO: 24529 - DNA, 25 bp, SARS Virus
tcgctcaaagttatttccacgattt

SEQ ID NO: 24530 - DNA, 25 bp, SARS Virus
cgctcaaagttcattccacgattta

SEQ ID NO: 24531 - DNA, 25 bp, SARS Virus
gctcaaagttctatccacgatttaa

SEQ ID NO: 24532 - DNA, 25 bp, SARS Virus
ctcaaagttcttaccacgatttaat

SEQ ID NO: 24533 - DNA, 25 bp, SARS Virus
tcaaagttctttacacgatttaatg

SEQ ID NO: 24534 - DNA, 25 bp, SARS Virus
caaagttctttcaacgatttaatga

SEQ ID NO: 24535 - DNA, 25 bp, SARS Virus
aaagttctttccacgatttaatgac

SEQ ID NO: 24536 - DNA, 25 bp, SARS Virus
aagttctttccaagatttaatgacg

SEQ ID NO: 24537 - DNA, 25 bp, SARS Virus
agttctttccacaatttaatgacgt

SEQ ID NO: 24538 - DNA, 25 bp, SARS Virus
gttctttccacgatttaatgacgta

SEQ ID NO: 24539 - DNA, 25 bp, SARS Virus
ttctttccacgaattaatgacgtat

SEQ ID NO: 24540 - DNA, 25 bp, SARS Virus
tctttccacgatataatgacgtatt

SEQ ID NO: 24541 - DNA, 25 bp, SARS Virus
ctttccacgattaaatgacgtattc

SEQ ID NO: 24542 - DNA, 25 bp, SARS Virus
tttccacgatttaatgacgtattcg

SEQ ID NO: 24543 - DNA, 25 bp, SARS Virus
ttccacgatttaatgacgtattcgg

SEQ ID NO: 24544 - DNA, 25 bp, SARS Virus
tccacgatttaaagacgtattcggt

SEQ ID NO: 24545 - DNA, 25 bp, SARS Virus
ccacgatttaataacgtattcggtt

SEQ ID NO: 24546 - DNA, 25 bp, SARS Virus
cacgatttaatgacgtattcggtta

SEQ ID NO: 24547 - DNA, 25 bp, SARS Virus
acgatttaatgaagtattcggttaa

SEQ ID NO: 24548 - DNA, 25 bp, SARS Virus
cgatttaatgacatattcggttaac

SEQ ID NO: 24549 - DNA, 25 bp, SARS Virus
gatttaatgacgaattcggttaaca

SEQ ID NO: 24550 - DNA, 25 bp, SARS Virus
atttaatgacgtattcggttaacaa

SEQ ID NO: 24551 - DNA, 25 bp, SARS Virus
tttaatgacgtaatcggttaacaaa

SEQ ID NO: 24552 - DNA, 25 bp, SARS Virus
ttaatgacgtatacggttaacaaac

SEQ ID NO: 24553 - DNA, 25 bp, SARS Virus
taatgacgtattaggttaacaaacc

SEQ ID NO: 24554 - DNA, 25 bp, SARS Virus
aatgacgtattcagttaacaaaccg

SEQ ID NO: 24555 - DNA, 25 bp, SARS Virus
atgacgtattcgattaacaaaccgt

SEQ ID NO: 24556 - DNA, 25 bp, SARS Virus
tgacgtattcggataacaaaccgtg

SEQ ID NO: 24557 - DNA, 25 bp, SARS Virus
gacgtattcggtaaacaaaccgtgt

SEQ ID NO: 24558 - DNA, 25 bp, SARS Virus
acgtattcggttaacaaaccgtgta

SEQ ID NO: 24559 - DNA, 25 bp, SARS Virus
cgtattcggttaacaaaccgtgtaa

SEQ ID NO: 24560 - DNA, 25 bp, SARS Virus
gtattcggttaaaaaaccgtgtaat

SEQ ID NO: 24561 - DNA, 25 bp, SARS Virus
tattcggttaacaaaccgtgtaatt

SEQ ID NO: 24562 - DNA, 25 bp, SARS Virus
attcggttaacaaaccgtgtaattg

SEQ ID NO: 24563 - DNA, 25 bp, SARS Virus
ttcggttaacaaaccgtgtaattgg

SEQ ID NO: 24564 - DNA, 25 bp, SARS Virus
tcggttaacaaaacgtgtaattggt

SEQ ID NO: 24565 - DNA, 25 bp, SARS Virus
cggttaacaaacagtgtaattggtc

SEQ ID NO: 24566 - DNA, 25 bp, SARS Virus
ggttaacaaaccatgtaattggtcc

SEQ ID NO: 24567 - DNA, 25 bp, SARS Virus
gttaacaaaccgagtaattggtccg

SEQ ID NO: 24568 - DNA, 25 bp, SARS Virus
ttaacaaaccgtataattggtccga

SEQ ID NO: 24569 - DNA, 25 bp, SARS Virus
taacaaaccgtgaaattggtccgat

SEQ ID NO: 24570 - DNA, 25 bp, SARS Virus
aacaaaccgtgtaattggtccgatg

SEQ ID NO: 24571 - DNA, 25 bp, SARS Virus
acaaaccgtgtaattggtccgatgt

SEQ ID NO: 24572 - DNA, 25 bp, SARS Virus
caaaccgtgtaaatggtccgatgtt

SEQ ID NO: 24573 - DNA, 25 bp, SARS Virus
aaaccgtgtaataggtccgatgttg

SEQ ID NO: 24574 - DNA, 25 bp, SARS Virus
aaccgtgtaattagtccgatgttgg

SEQ ID NO: 24575 - DNA, 25 bp, SARS Virus
accgtgtaattgatccgatgttggt

SEQ ID NO: 24576 - DNA, 25 bp, SARS Virus
ccgtgtaattggaccgatgttggtt

SEQ ID NO: 24577 - DNA, 25 bp, SARS Virus
cgtgtaattggtacgatgttggttc

SEQ ID NO: 24578 - DNA, 25 bp, SARS Virus
gtgtaattggtcagatgttggttct

SEQ ID NO: 24579 - DNA, 25 bp, SARS Virus
tgtaattggtccaatgttggttctg

SEQ ID NO: 24580 - DNA, 25 bp, SARS Virus
gtaattggtccgatgttggttctgt

SEQ ID NO: 24581 - DNA, 25 bp, SARS Virus
taattggtccgaagttggttctgtt

SEQ ID NO: 24582 - DNA, 25 bp, SARS Virus
aattggtccgatattggttctgttg

SEQ ID NO: 24583 - DNA, 25 bp, SARS Virus
attggtccgatgatggttctgttgc

SEQ ID NO: 24584 - DNA, 25 bp, SARS Virus
ttggtccgatgtaggttctgttgca

SEQ ID NO: 24585 - DNA, 25 bp, SARS Virus
tggtccgatgttagttctgttgcaa

SEQ ID NO: 24586 - DNA, 25 bp, SARS Virus
ggtccgatgttgattctgttgcaag

SEQ ID NO: 24587 - DNA, 25 bp, SARS Virus
gtccgatgttggatctgttgcaagt

SEQ ID NO: 24588 - DNA, 25 bp, SARS Virus
tccgatgttggtactgttgcaagtt

SEQ ID NO: 24589 - DNA, 25 bp, SARS Virus
ccgatgttggttatgttgcaagttt

SEQ ID NO: 24590 - DNA, 25 bp, SARS Virus
cgatgttggttcagttgcaagtttg

SEQ ID NO: 24591 - DNA, 25 bp, SARS Virus
gatgttggttctattgcaagtttgg

SEQ ID NO: 24592 - DNA, 25 bp, SARS Virus
atgttggttctgatgcaagtttggt

SEQ ID NO: 24593 - DNA, 25 bp, SARS Virus
tgttggttctgtagcaagtttggtt

SEQ ID NO: 24594 - DNA, 25 bp, SARS Virus
gttggttctgttacaagtttggttt

SEQ ID NO: 24595 - DNA, 25 bp, SARS Virus
ttggttctgttgaaagtttggtttg

SEQ ID NO: 24596 - DNA, 25 bp, SARS Virus
tggttctgttgcaagtttggtttgt

SEQ ID NO: 24597 - DNA, 25 bp, SARS Virus
ggttctgttgcaagtttggtttgtg

SEQ ID NO: 24598 - DNA, 25 bp, SARS Virus
gttctgttgcaaatttggtttgtga

SEQ ID NO: 24599 - DNA, 25 bp, SARS Virus
ttctgttgcaagattggtttgtgaa

SEQ ID NO: 24600 - DNA, 25 bp, SARS Virus
tctgttgcaagtatggtttgtgaac

SEQ ID NO: 24601 - DNA, 25 bp, SARS Virus
ctgttgcaagttaggtttgtgaacc

SEQ ID NO: 24602 - DNA, 25 bp, SARS Virus
tgttgcaagtttagtttgtgaacca

SEQ ID NO: 24603 - DNA, 25 bp, SARS Virus
gttgcaagtttgatttgtgaaccac

SEQ ID NO: 24604 - DNA, 25 bp, SARS Virus
ttgcaagtttggattgtgaaccaca

SEQ ID NO: 24605 - DNA, 25 bp, SARS Virus
tgcaagtttggtatgtgaaccacaa

SEQ ID NO: 24606 - DNA, 25 bp, SARS Virus
gcaagtttggttagtgaaccacaaa

SEQ ID NO: 24607 - DNA, 25 bp, SARS Virus
caagtttggtttatgaaccacaaat

SEQ ID NO: 24608 - DNA, 25 bp, SARS Virus
aagtttggtttgagaaccacaaatg

SEQ ID NO: 24609 - DNA, 25 bp, SARS Virus
agtttggtttgtaaaccacaaatgc

SEQ ID NO: 24610 - DNA, 25 bp, SARS Virus
gtttggtttgtgaaccacaaatgca

SEQ ID NO: 24611 - DNA, 25 bp, SARS Virus
tttggtttgtgaaccacaaatgcaa

SEQ ID NO: 24612 - DNA, 25 bp, SARS Virus
ttggtttgtgaaacacaaatgcaac

SEQ ID NO: 24613 - DNA, 25 bp, SARS Virus
tggtttgtgaacaacaaatgcaaca

SEQ ID NO: 24614 - DNA, 25 bp, SARS Virus
ggtttgtgaaccacaaatgcaacag

SEQ ID NO: 24615 - DNA, 25 bp, SARS Virus
gtttgtgaaccaaaaatgcaacaga

SEQ ID NO: 24616 - DNA, 25 bp, SARS Virus
tttgtgaaccacaaatgcaacagaa

SEQ ID NO: 24617 - DNA, 25 bp, SARS Virus
ttgtgaaccacaaatgcaacagaaa

SEQ ID NO: 24618 - DNA, 25 bp, SARS Virus
tgtgaaccacaaatgcaacagaaac

SEQ ID NO: 24619 - DNA, 25 bp, SARS Virus
gtgaaccacaaaagcaacagaaacc

SEQ ID NO: 24620 - DNA, 25 bp, SARS Virus
tgaaccacaaatacaacagaaacct

SEQ ID NO: 24621 - DNA, 25 bp, SARS Virus
gaaccacaaatgaaacagaaacctc

SEQ ID NO: 24622 - DNA, 25 bp, SARS Virus
aaccacaaatgcaacagaaacctca

SEQ ID NO: 24623 - DNA, 25 bp, SARS Virus
accacaaatgcaacagaaacctcat

SEQ ID NO: 24624 - DNA, 25 bp, SARS Virus
ccacaaatgcaaaagaaacctcatg

SEQ ID NO: 24625 - DNA, 25 bp, SARS Virus
cacaaatgcaacagaaacctcatgt

SEQ ID NO: 24626 - DNA, 25 bp, SARS Virus
acaaatgcaacaaaaacctcatgtt

SEQ ID NO: 24627 - DNA, 25 bp, SARS Virus
caaatgcaacagaaacctcatgttt

SEQ ID NO: 24628 - DNA, 25 bp, SARS Virus
aaatgcaacagaaacctcatgtttc

SEQ ID NO: 24629 - DNA, 25 bp, SARS Virus
aatgcaacagaaacctcatgtttcg

SEQ ID NO: 24630 - DNA, 25 bp, SARS Virus
atgcaacagaaaactcatgtttcgg

SEQ ID NO: 24631 - DNA, 25 bp, SARS Virus
tgcaacagaaacatcatgtttcggt

SEQ ID NO: 24632 - DNA, 25 bp, SARS Virus
gcaacagaaaccacatgtttcggtc

SEQ ID NO: 24633 - DNA, 25 bp, SARS Virus
caacagaaacctaatgtttcggtca

SEQ ID NO: 24634 - DNA, 25 bp, SARS Virus
aacagaaacctcatgtttcggtcat

SEQ ID NO: 24635 - DNA, 25 bp, SARS Virus
acagaaacctcaagtttcggtcatc

SEQ ID NO: 24636 - DNA, 25 bp, SARS Virus
cagaaacctcatatttcggtcatct

SEQ ID NO: 24637 - DNA, 25 bp, SARS Virus
agaaacctcatgattcggtcatcta

SEQ ID NO: 24638 - DNA, 25 bp, SARS Virus
gaaacctcatgtatcggtcatctat

SEQ ID NO: 24639 - DNA, 25 bp, SARS Virus
aaacctcatgttacggtcatctatg

SEQ ID NO: 24640 - DNA, 25 bp, SARS Virus
aacctcatgtttaggtcatctatga

SEQ ID NO: 24641 - DNA, 25 bp, SARS Virus
acctcatgtttcagtcatctatgaa

SEQ ID NO: 24642 - DNA, 25 bp, SARS Virus
cctcatgtttcgatcatctatgaag

SEQ ID NO: 24643 - DNA, 25 bp, SARS Virus
ctcatgtttcggacatctatgaagt

SEQ ID NO: 24644 - DNA, 25 bp, SARS Virus
tcatgtttcggtaatctatgaagtt

SEQ ID NO: 24645 - DNA, 25 bp, SARS Virus
catgtttcggtcatctatgaagttt

SEQ ID NO: 24646 - DNA, 25 bp, SARS Virus
atgtttcggtcaactatgaagttta

SEQ ID NO: 24647 - DNA, 25 bp, SARS Virus
tgtttcggtcatatatgaagtttaa

SEQ ID NO: 24648 - DNA, 25 bp, SARS Virus
gtttcggtcatcaatgaagtttaag

SEQ ID NO: 24649 - DNA, 25 bp, SARS Virus
tttcggtcatctatgaagtttaagt

SEQ ID NO: 24650 - DNA, 25 bp, SARS Virus
ttcggtcatctaagaagtttaagta

SEQ ID NO: 24651 - DNA, 25 bp, SARS Virus
tcggtcatctataaagtttaagtaa

SEQ ID NO: 24652 - DNA, 25 bp, SARS Virus
cggtcatctatgaagtttaagtaaa

SEQ ID NO: 24653 - DNA, 25 bp, SARS Virus
ggtcatctatgaagtttaagtaaac

SEQ ID NO: 24654 - DNA, 25 bp, SARS Virus
gtcatctatgaaatttaagtaaact

SEQ ID NO: 24655 - DNA, 25 bp, SARS Virus
tcatctatgaagattaagtaaactt

SEQ ID NO: 24656 - DNA, 25 bp, SARS Virus
catctatgaagtataagtaaacttc

SEQ ID NO: 24657 - DNA, 25 bp, SARS Virus
atctatgaagttaaagtaaacttca

SEQ ID NO: 24658 - DNA, 25 bp, SARS Virus
tctatgaagtttaagtaaacttcaa

SEQ ID NO: 24659 - DNA, 25 bp, SARS Virus
ctatgaagtttaagtaaacttcaag

SEQ ID NO: 24660 - DNA, 25 bp, SARS Virus
tatgaagtttaaataaacttcaaga

SEQ ID NO: 24661 - DNA, 25 bp, SARS Virus
atgaagtttaagaaaacttcaagac

SEQ ID NO: 24662 - DNA, 25 bp, SARS Virus
tgaagtttaagtaaacttcaagacc

SEQ ID NO: 24663 - DNA, 25 bp, SARS Virus
gaagtttaagtaaacttcaagaccg

SEQ ID NO: 24664 - DNA, 25 bp, SARS Virus
aagtttaagtaaacttcaagaccgt

SEQ ID NO: 24665 - DNA, 25 bp, SARS Virus
agtttaagtaaaattcaagaccgtc

SEQ ID NO: 24666 - DNA, 25 bp, SARS Virus
gtttaagtaaacatcaagaccgtca

SEQ ID NO: 24667 - DNA, 25 bp, SARS Virus
tttaagtaaactacaagaccgtcat

SEQ ID NO: 24668 - DNA, 25 bp, SARS Virus
ttaagtaaacttaaagaccgtcatc

SEQ ID NO: 24669 - DNA, 25 bp, SARS Virus
taagtaaacttcaagaccgtcatct

SEQ ID NO: 24670 - DNA, 25 bp, SARS Virus
aagtaaacttcaagaccgtcatctt

SEQ ID NO: 24671 - DNA, 25 bp, SARS Virus
agtaaacttcaaaaccgtcatcttc

SEQ ID NO: 24672 - DNA, 25 bp, SARS Virus
gtaaacttcaagaccgtcatcttct

SEQ ID NO: 24673 - DNA, 25 bp, SARS Virus
taaacttcaagaacgtcatcttctg

SEQ ID NO: 24674 - DNA, 25 bp, SARS Virus
aaacttcaagacagtcatcttctgt

SEQ ID NO: 24675 - DNA, 25 bp, SARS Virus
aacttcaagaccatcatcttctgtg

SEQ ID NO: 24676 - DNA, 25 bp, SARS Virus
acttcaagaccgacatcttctgtgt

SEQ ID NO: 24677 - DNA, 25 bp, SARS Virus
cttcaagaccgtaatcttctgtgtg

SEQ ID NO: 24678 - DNA, 25 bp, SARS Virus
ttcaagaccgtcatcttctgtgtgt

SEQ ID NO: 24679 - DNA, 25 bp, SARS Virus
tcaagaccgtcaacttctgtgtgtt

SEQ ID NO: 24680 - DNA, 25 bp, SARS Virus
caagaccgtcatattctgtgtgttc

SEQ ID NO: 24681 - DNA, 25 bp, SARS Virus
aagaccgtcatcatctgtgtgttcc

SEQ ID NO: 24682 - DNA, 25 bp, SARS Virus
agaccgtcatctactgtgtgttcct

SEQ ID NO: 24683 - DNA, 25 bp, SARS Virus
gaccgtcatcttatgtgtgttcctt

SEQ ID NO: 24684 - DNA, 25 bp, SARS Virus
accgtcatcttcagtgtgttcctta

SEQ ID NO: 24685 - DNA, 25 bp, SARS Virus
ccgtcatcttctatgtgttccttac

SEQ ID NO: 24686 - DNA, 25 bp, SARS Virus
cgtcatcttctgagtgttccttacc

SEQ ID NO: 24687 - DNA, 25 bp, SARS Virus
gtcatcttctgtatgttccttacct

SEQ ID NO: 24688 - DNA, 25 bp, SARS Virus
tcatcttctgtgagttccttacctg

SEQ ID NO: 24689 - DNA, 25 bp, SARS Virus
catcttctgtgtattccttacctgt

SEQ ID NO: 24690 - DNA, 25 bp, SARS Virus
atcttctgtgtgatccttacctgtt

SEQ ID NO: 24691 - DNA, 25 bp, SARS Virus
tcttctgtgtgtaccttacctgtta

SEQ ID NO: 24692 - DNA, 25 bp, SARS Virus
cttctgtgtgttacttacctgttag

SEQ ID NO: 24693 - DNA, 25 bp, SARS Virus
ttctgtgtgttcattacctgttaga

SEQ ID NO: 24694 - DNA, 25 bp, SARS Virus
tctgtgtgttccatacctgttagaa

SEQ ID NO: 24695 - DNA, 25 bp, SARS Virus
ctgtgtgttcctaacctgttagaac

SEQ ID NO: 24696 - DNA, 25 bp, SARS Virus
tgtgtgttccttacctgttagaacg

SEQ ID NO: 24697 - DNA, 25 bp, SARS Virus
gtgtgttccttaactgttagaacga

SEQ ID NO: 24698 - DNA, 25 bp, SARS Virus
tgtgttccttacatgttagaacgaa

SEQ ID NO: 24699 - DNA, 25 bp, SARS Virus
gtgttccttaccagttagaacgaac

SEQ ID NO: 24700 - DNA, 25 bp, SARS Virus
tgttccttacctattagaacgaaca

SEQ ID NO: 24701 - DNA, 25 bp, SARS Virus
gttccttacctgatagaacgaacac

SEQ ID NO: 24702 - DNA, 25 bp, SARS Virus
ttccttacctgtaagaacgaacact

SEQ ID NO: 24703 - DNA, 25 bp, SARS Virus
tccttacctgttagaacgaacactt

SEQ ID NO: 24704 - DNA, 25 bp, SARS Virus
ccttacctgttaaaacgaacacttt

SEQ ID NO: 24705 - DNA, 25 bp, SARS Virus
cttacctgttagaacgaacactttc

SEQ ID NO: 24706 - DNA, 25 bp, SARS Virus
ttacctgttagaacgaacactttca

SEQ ID NO: 24707 - DNA, 25 bp, SARS Virus
tacctgttagaaagaacactttcag

SEQ ID NO: 24708 - DNA, 25 bp, SARS Virus
acctgttagaacaaacactttcagt

SEQ ID NO: 24709 - DNA, 25 bp, SARS Virus
cctgttagaacgaacactttcagtt

SEQ ID NO: 24710 - DNA, 25 bp, SARS Virus
ctgttagaacgaacactttcagttg

SEQ ID NO: 24711 - DNA, 25 bp, SARS Virus
tgttagaacgaaaactttcagttgt

SEQ ID NO: 24712 - DNA, 25 bp, SARS Virus
gttagaacgaacactttcagttgtt

SEQ ID NO: 24713 - DNA, 25 bp, SARS Virus
ttagaacgaacaatttcagttgttg

SEQ ID NO: 24714 - DNA, 25 bp, SARS Virus
tagaacgaacacattcagttgttgg

SEQ ID NO: 24715 - DNA, 25 bp, SARS Virus
agaacgaacactatcagttgttggg

SEQ ID NO: 24716 - DNA, 25 bp, SARS Virus
gaacgaacacttacagttgttgggt

SEQ ID NO: 24717 - DNA, 25 bp, SARS Virus
aacgaacactttaagttgttgggtg

SEQ ID NO: 24718 - DNA, 25 bp, SARS Virus
acgaacactttcagttgttgggtgg

SEQ ID NO: 24719 - DNA, 25 bp, SARS Virus
cgaacactttcaattgttgggtgga

SEQ ID NO: 24720 - DNA, 25 bp, SARS Virus
gaacactttcagatgttgggtggag

SEQ ID NO: 24721 - DNA, 25 bp, SARS Virus
aacactttcagtagttgggtggaga

SEQ ID NO: 24722 - DNA, 25 bp, SARS Virus
acactttcagttattgggtggagac

SEQ ID NO: 24723 - DNA, 25 bp, SARS Virus
cactttcagttgatgggtggagact

SEQ ID NO: 24724 - DNA, 25 bp, SARS Virus
actttcagttgtagggtggagactt

SEQ ID NO: 24725 - DNA, 25 bp, SARS Virus
ctttcagttgttaggtggagacttc

SEQ ID NO: 24726 - DNA, 25 bp, SARS Virus
tttcagttgttgagtggagacttct

SEQ ID NO: 24727 - DNA, 25 bp, SARS Virus
ttcagttgttggatggagacttctt

SEQ ID NO: 24728 - DNA, 25 bp, SARS Virus
tcagttgttgggaggagacttcttc

SEQ ID NO: 24729 - DNA, 25 bp, SARS Virus
cagttgttgggtagagacttcttca

SEQ ID NO: 24730 - DNA, 25 bp, SARS Virus
agttgttgggtgaagacttcttcat

SEQ ID NO: 24731 - DNA, 25 bp, SARS Virus
gttgttgggtggagacttcttcatc

SEQ ID NO: 24732 - DNA, 25 bp, SARS Virus
ttgttgggtggaaacttcttcatca

SEQ ID NO: 24733 - DNA, 25 bp, SARS Virus
tgttgggtggagacttcttcatcac

SEQ ID NO: 24734 - DNA, 25 bp, SARS Virus
gttgggtggagaattcttcatcacc

SEQ ID NO: 24735 - DNA, 25 bp, SARS Virus
ttgggtggagacatcttcatcacct

SEQ ID NO: 24736 - DNA, 25 bp, SARS Virus
tgggtggagactacttcatcacctt

SEQ ID NO: 24737 - DNA, 25 bp, SARS Virus
gggtggagacttattcatcaccttt

SEQ ID NO: 24738 - DNA, 25 bp, SARS Virus
ggtggagacttcatcatcacctttt

SEQ ID NO: 24739 - DNA, 25 bp, SARS Virus
gtggagacttctacatcacctttta

SEQ ID NO: 24740 - DNA, 25 bp, SARS Virus
tggagacttcttaatcaccttttag

SEQ ID NO: 24741 - DNA, 25 bp, SARS Virus
ggagacttcttcatcaccttttagg

SEQ ID NO: 24742 - DNA, 25 bp, SARS Virus
gagacttcttcaacaccttttagga

SEQ ID NO: 24743 - DNA, 25 bp, SARS Virus
agacttcttcataaccttttaggat

SEQ ID NO: 24744 - DNA, 25 bp, SARS Virus
gacttcttcatcaccttttaggatg

SEQ ID NO: 24745 - DNA, 25 bp, SARS Virus
acttcttcatcaacttttaggatgg

SEQ ID NO: 24746 - DNA, 25 bp, SARS Virus
cttcttcatcacattttaggatggt

SEQ ID NO: 24747 - DNA, 25 bp, SARS Virus
ttcttcatcaccatttaggatggta

SEQ ID NO: 24748 - DNA, 25 bp, SARS Virus
tcttcatcacctattaggatggtat

SEQ ID NO: 24749 - DNA, 25 bp, SARS Virus
cttcatcaccttataggatggtatg

SEQ ID NO: 24750 - DNA, 25 bp, SARS Virus
ttcatcacctttaaggatggtatgt

SEQ ID NO: 24751 - DNA, 25 bp, SARS Virus
tcatcaccttttaggatggtatgtc

SEQ ID NO: 24752 - DNA, 25 bp, SARS Virus
catcaccttttaagatggtatgtct

SEQ ID NO: 24753 - DNA, 25 bp, SARS Virus
atcaccttttagaatggtatgtctt

SEQ ID NO: 24754 - DNA, 25 bp, SARS Virus
tcaccttttaggatggtatgtcttc

SEQ ID NO: 24755 - DNA, 25 bp, SARS Virus
caccttttaggaaggtatgtcttcc

SEQ ID NO: 24756 - DNA, 25 bp, SARS Virus
accttttaggatagtatgtcttcct

SEQ ID NO: 24757 - DNA, 25 bp, SARS Virus
ccttttaggatgatatgtcttcctt

SEQ ID NO: 24758 - DNA, 25 bp, SARS Virus
cttttaggatggaatgtcttccttc

SEQ ID NO: 24759 - DNA, 25 bp, SARS Virus
ttttaggatggtatgtcttccttca

SEQ ID NO: 24760 - DNA, 25 bp, SARS Virus
tttaggatggtaagtcttccttcag

SEQ ID NO: 24761 - DNA, 25 bp, SARS Virus
ttaggatggtatatcttccttcagt

SEQ ID NO: 24762 - DNA, 25 bp, SARS Virus
taggatggtatgacttccttcagta

SEQ ID NO: 24763 - DNA, 25 bp, SARS Virus
aggatggtatgtattccttcagtat

SEQ ID NO: 24764 - DNA, 25 bp, SARS Virus
ggatggtatgtcatccttcagtatc

SEQ ID NO: 24765 - DNA, 25 bp, SARS Virus
gatggtatgtctaccttcagtatct

SEQ ID NO: 24766 - DNA, 25 bp, SARS Virus
atggtatgtcttacttcagtatctc

SEQ ID NO: 24767 - DNA, 25 bp, SARS Virus
tggtatgtcttcattcagtatctca

SEQ ID NO: 24768 - DNA, 25 bp, SARS Virus
ggtatgtcttccatcagtatctcac

SEQ ID NO: 24769 - DNA, 25 bp, SARS Virus
gtatgtcttcctacagtatctcaca

SEQ ID NO: 24770 - DNA, 25 bp, SARS Virus
tatgtcttccttaagtatctcacac

SEQ ID NO: 24771 - DNA, 25 bp, SARS Virus
atgtcttccttcagtatctcacact

SEQ ID NO: 24772 - DNA, 25 bp, SARS Virus
tgtcttccttcaatatctcacactg

SEQ ID NO: 24773 - DNA, 25 bp, SARS Virus
gtcttccttcagaatctcacactgc

SEQ ID NO: 24774 - DNA, 25 bp, SARS Virus
tcttccttcagtatctcacactgca

SEQ ID NO: 24775 - DNA, 25 bp, SARS Virus
cttccttcagtaactcacactgcac

SEQ ID NO: 24776 - DNA, 25 bp, SARS Virus
ttccttcagtatatcacactgcact

SEQ ID NO: 24777 - DNA, 25 bp, SARS Virus
tccttcagtatcacacactgcactt

SEQ ID NO: 24778 - DNA, 25 bp, SARS Virus
ccttcagtatctaacactgcacttt

SEQ ID NO: 24779 - DNA, 25 bp, SARS Virus
cttcagtatctcacactgcactttt

SEQ ID NO: 24780 - DNA, 25 bp, SARS Virus
ttcagtatctcaaactgcacttttg

SEQ ID NO: 24781 - DNA, 25 bp, SARS Virus
tcagtatctcacactgcacttttga

SEQ ID NO: 24782 - DNA, 25 bp, SARS Virus
cagtatctcacaatgcacttttgat

SEQ ID NO: 24783 - DNA, 25 bp, SARS Virus
agtatctcacacagcacttttgatg

SEQ ID NO: 24784 - DNA, 25 bp, SARS Virus
gtatctcacactacacttttgatgg

SEQ ID NO: 24785 - DNA, 25 bp, SARS Virus
tatctcacactgaacttttgatggc

SEQ ID NO: 24786 - DNA, 25 bp, SARS Virus
atctcacactgcacttttgatggct

SEQ ID NO: 24787 - DNA, 25 bp, SARS Virus
tctcacactgcaattttgatggctt

SEQ ID NO: 24788 - DNA, 25 bp, SARS Virus
ctcacactgcacatttgatggcttc

SEQ ID NO: 24789 - DNA, 25 bp, SARS Virus
tcacactgcactattgatggcttca

SEQ ID NO: 24790 - DNA, 25 bp, SARS Virus
cacactgcacttatgatggcttcaa

SEQ ID NO: 24791 - DNA, 25 bp, SARS Virus
acactgcactttagatggcttcaac

SEQ ID NO: 24792 - DNA, 25 bp, SARS Virus
cactgcacttttaatggcttcaaca

SEQ ID NO: 24793 - DNA, 25 bp, SARS Virus
actgcacttttgatggcttcaacat

SEQ ID NO: 24794 - DNA, 25 bp, SARS Virus
ctgcacttttgaaggcttcaacatc

SEQ ID NO: 24795 - DNA, 25 bp, SARS Virus
tgcacttttgatagcttcaacatcc

SEQ ID NO: 24796 - DNA, 25 bp, SARS Virus
gcacttttgatgacttcaacatccg

SEQ ID NO: 24797 - DNA, 25 bp, SARS Virus
cacttttgatggattcaacatccgt

SEQ ID NO: 24798 - DNA, 25 bp, SARS Virus
acttttgatggcatcaacatccgtt

SEQ ID NO: 24799 - DNA, 25 bp, SARS Virus
cttttgatggctacaacatccgtta

SEQ ID NO: 24800 - DNA, 25 bp, SARS Virus
ttttgatggcttaaacatccgttac

SEQ ID NO: 24801 - DNA, 25 bp, SARS Virus
tttgatggcttcaacatccgttaca

SEQ ID NO: 24802 - DNA, 25 bp, SARS Virus
ttgatggcttcaacatccgttacag

SEQ ID NO: 24803 - DNA, 25 bp, SARS Virus
tgatggcttcaaaatccgttacagt

SEQ ID NO: 24804 - DNA, 25 bp, SARS Virus
gatggcttcaacatccgttacagta

SEQ ID NO: 24805 - DNA, 25 bp, SARS Virus
atggcttcaacaaccgttacagtat

SEQ ID NO: 24806 - DNA, 25 bp, SARS Virus
tggcttcaacatacgttacagtatg

SEQ ID NO: 24807 - DNA, 25 bp, SARS Virus
ggcttcaacatcagttacagtatga

SEQ ID NO: 24808 - DNA, 25 bp, SARS Virus
gcttcaacatccattacagtatgaa

SEQ ID NO: 24809 - DNA, 25 bp, SARS Virus
cttcaacatccgatacagtatgaat

SEQ ID NO: 24810 - DNA, 25 bp, SARS Virus
ttcaacatccgtaacagtatgaatt

SEQ ID NO: 24811 - DNA, 25 bp, SARS Virus
tcaacatccgttacagtatgaattt

SEQ ID NO: 24812 - DNA, 25 bp, SARS Virus
caacatccgttaaagtatgaatttg

SEQ ID NO: 24813 - DNA, 25 bp, SARS Virus
aacatccgttacagtatgaatttgg

SEQ ID NO: 24814 - DNA, 25 bp, SARS Virus
acatccgttacaatatgaatttggt

SEQ ID NO: 24815 - DNA, 25 bp, SARS Virus
catccgttacagaatgaatttggta

SEQ ID NO: 24816 - DNA, 25 bp, SARS Virus
atccgttacagtatgaatttggtag

SEQ ID NO: 24817 - DNA, 25 bp, SARS Virus
tccgttacagtaagaatttggtagt

SEQ ID NO: 24818 - DNA, 25 bp, SARS Virus
ccgttacagtataaatttggtagtc

SEQ ID NO: 24819 - DNA, 25 bp, SARS Virus
cgttacagtatgaatttggtagtct

SEQ ID NO: 24820 - DNA, 25 bp, SARS Virus
gttacagtatgaatttggtagtcta

SEQ ID NO: 24821 - DNA, 25 bp, SARS Virus
ttacagtatgaaattggtagtctac

SEQ ID NO: 24822 - DNA, 25 bp, SARS Virus
tacagtatgaatatggtagtctact

SEQ ID NO: 24823 - DNA, 25 bp, SARS Virus
acagtatgaattaggtagtctactt

SEQ ID NO: 24824 - DNA, 25 bp, SARS Virus
cagtatgaatttagtagtctacttc

SEQ ID NO: 24825 - DNA, 25 bp, SARS Virus
agtatgaatttgatagtctacttcc

SEQ ID NO: 24826 - DNA, 25 bp, SARS Virus
gtatgaatttggaagtctacttcca

SEQ ID NO: 24827 - DNA, 25 bp, SARS Virus
tatgaatttggtagtctacttccac

SEQ ID NO: 24828 - DNA, 25 bp, SARS Virus
atgaatttggtaatctacttccaca

SEQ ID NO: 24829 - DNA, 25 bp, SARS Virus
tgaatttggtagactacttccacaa

SEQ ID NO: 24830 - DNA, 25 bp, SARS Virus
gaatttggtagtatacttccacaat

SEQ ID NO: 24831 - DNA, 25 bp, SARS Virus
aatttggtagtcaacttccacaatt

SEQ ID NO: 24832 - DNA, 25 bp, SARS Virus
atttggtagtctacttccacaattt

SEQ ID NO: 24833 - DNA, 25 bp, SARS Virus
tttggtagtctaattccacaatttc

SEQ ID NO: 24834 - DNA, 25 bp, SARS Virus
ttggtagtctacatccacaatttca

SEQ ID NO: 24835 - DNA, 25 bp, SARS Virus
tggtagtctactaccacaatttcat

SEQ ID NO: 24836 - DNA, 25 bp, SARS Virus
ggtagtctacttacacaatttcatt

SEQ ID NO: 24837 - DNA, 25 bp, SARS Virus
gtagtctacttcaacaatttcattg

SEQ ID NO: 24838 - DNA, 25 bp, SARS Virus
tagtctacttccacaatttcattgt

SEQ ID NO: 24839 - DNA, 25 bp, SARS Virus
agtctacttccaaaatttcattgtg

SEQ ID NO: 24840 - DNA, 25 bp, SARS Virus
gtctacttccacaatttcattgtgt

SEQ ID NO: 24841 - DNA, 25 bp, SARS Virus
tctacttccacaatttcattgtgtt

SEQ ID NO: 24842 - DNA, 25 bp, SARS Virus
ctacttccacaaattcattgtgttc

SEQ ID NO: 24843 - DNA, 25 bp, SARS Virus
tacttccacaatatcattgtgttct

SEQ ID NO: 24844 - DNA, 25 bp, SARS Virus
acttccacaattacattgtgttctc

SEQ ID NO: 24845 - DNA, 25 bp, SARS Virus
cttccacaatttaattgtgttctca

SEQ ID NO: 24846 - DNA, 25 bp, SARS Virus
ttccacaatttcattgtgttctcaa

SEQ ID NO: 24847 - DNA, 25 bp, SARS Virus
tccacaatttcaatgtgttctcaat

SEQ ID NO: 24848 - DNA, 25 bp, SARS Virus
ccacaatttcatagtgttctcaatc

SEQ ID NO: 24849 - DNA, 25 bp, SARS Virus
cacaatttcattatgttctcaatcc

SEQ ID NO: 24850 - DNA, 25 bp, SARS Virus
acaatttcattgagttctcaatcca

SEQ ID NO: 24851 - DNA, 25 bp, SARS Virus
caatttcattgtattctcaatccag

SEQ ID NO: 24852 - DNA, 25 bp, SARS Virus
aatttcattgtgatctcaatccagt

SEQ ID NO: 24853 - DNA, 25 bp, SARS Virus
atttcattgtgtactcaatccagta

SEQ ID NO: 24854 - DNA, 25 bp, SARS Virus
tttcattgtgttatcaatccagtac

SEQ ID NO: 24855 - DNA, 25 bp, SARS Virus
ttcattgtgttcacaatccagtact

SEQ ID NO: 24856 - DNA, 25 bp, SARS Virus
tcattgtgttctaaatccagtactc

SEQ ID NO: 24857 - DNA, 25 bp, SARS Virus
cattgtgttctcaatccagtactcc

SEQ ID NO: 24858 - DNA, 25 bp, SARS Virus
attgtgttctcaatccagtactcct

SEQ ID NO: 24859 - DNA, 25 bp, SARS Virus
ttgtgttctcaaaccagtactccta

SEQ ID NO: 24860 - DNA, 25 bp, SARS Virus
tgtgttctcaatacagtactcctag

SEQ ID NO: 24861 - DNA, 25 bp, SARS Virus
gtgttctcaatcaagtactcctaga

SEQ ID NO: 24862 - DNA, 25 bp, SARS Virus
tgttctcaatccagtactcctagaa

SEQ ID NO: 24863 - DNA, 25 bp, SARS Virus
gttctcaatccaatactcctagaat

SEQ ID NO: 24864 - DNA, 25 bp, SARS Virus
ttctcaatccagaactcctagaata

SEQ ID NO: 24865 - DNA, 25 bp, SARS Virus
tctcaatccagtactcctagaatac

SEQ ID NO: 24866 - DNA, 25 bp, SARS Virus
ctcaatccagtaatcctagaatacc

SEQ ID NO: 24867 - DNA, 25 bp, SARS Virus
tcaatccagtacacctagaataccg

SEQ ID NO: 24868 - DNA, 25 bp, SARS Virus
caatccagtactactagaataccga

SEQ ID NO: 24869 - DNA, 25 bp, SARS Virus
aatccagtactcatagaataccgac

SEQ ID NO: 24870 - DNA, 25 bp, SARS Virus
atccagtactccaagaataccgacg

SEQ ID NO: 24871 - DNA, 25 bp, SARS Virus
tccagtactcctagaataccgacga

SEQ ID NO: 24872 - DNA, 25 bp, SARS Virus
ccagtactcctaaaataccgacgaa

SEQ ID NO: 24873 - DNA, 25 bp, SARS Virus
cagtactcctagaataccgacgaat

SEQ ID NO: 24874 - DNA, 25 bp, SARS Virus
agtactcctagaataccgacgaata

SEQ ID NO: 24875 - DNA, 25 bp, SARS Virus
gtactcctagaaaaccgacgaatac

SEQ ID NO: 24876 - DNA, 25 bp, SARS Virus
tactcctagaataccgacgaataca

SEQ ID NO: 24877 - DNA, 25 bp, SARS Virus
actcctagaataacgacgaatacac

SEQ ID NO: 24878 - DNA, 25 bp, SARS Virus
ctcctagaatacagacgaatacacc

SEQ ID NO: 24879 - DNA, 25 bp, SARS Virus
tcctagaataccaacgaatacacct

SEQ ID NO: 24880 - DNA, 25 bp, SARS Virus
cctagaataccgacgaatacacctt

SEQ ID NO: 24881 - DNA, 25 bp, SARS Virus
ctagaataccgaagaatacaccttt

SEQ ID NO: 24882 - DNA, 25 bp, SARS Virus
tagaataccgacaaatacacctttt

SEQ ID NO: 24883 - DNA, 25 bp, SARS Virus
agaataccgacgaatacaccttttg

SEQ ID NO: 24884 - DNA, 25 bp, SARS Virus
gaataccgacgaatacaccttttgt

SEQ ID NO: 24885 - DNA, 25 bp, SARS Virus
aataccgacgaaaacaccttttgtg

SEQ ID NO: 24886 - DNA, 25 bp, SARS Virus
ataccgacgaatacaccttttgtgt

SEQ ID NO: 24887 - DNA, 25 bp, SARS Virus
taccgacgaataaaccttttgtgtt

SEQ ID NO: 24888 - DNA, 25 bp, SARS Virus
accgacgaatacaccttttgtgttc

SEQ ID NO: 24889 - DNA, 25 bp, SARS Virus
ccgacgaatacaacttttgtgttcg

SEQ ID NO: 24890 - DNA, 25 bp, SARS Virus
cgacgaatacacattttgtgttcgt

SEQ ID NO: 24891 - DNA, 25 bp, SARS Virus
gacgaatacaccatttgtgttcgta

SEQ ID NO: 24892 - DNA, 25 bp, SARS Virus
acgaatacacctattgtgttcgtaa

SEQ ID NO: 24893 - DNA, 25 bp, SARS Virus
cgaatacaccttatgtgttcgtaat

SEQ ID NO: 24894 - DNA, 25 bp, SARS Virus
gaatacacctttagtgttcgtaatg

SEQ ID NO: 24895 - DNA, 25 bp, SARS Virus
aatacaccttttatgttcgtaatgg

SEQ ID NO: 24896 - DNA, 25 bp, SARS Virus
atacaccttttgagttcgtaatggt

SEQ ID NO: 24897 - DNA, 25 bp, SARS Virus
tacaccttttgtattcgtaatggta

SEQ ID NO: 24898 - DNA, 25 bp, SARS Virus
acaccttttgtgatcgtaatggtaa

SEQ ID NO: 24899 - DNA, 25 bp, SARS Virus
caccttttgtgtacgtaatggtaat

SEQ ID NO: 24900 - DNA, 25 bp, SARS Virus
accttttgtgttagtaatggtaatt

SEQ ID NO: 24901 - DNA, 25 bp, SARS Virus
ccttttgtgttcataatggtaattc

SEQ ID NO: 24902 - DNA, 25 bp, SARS Virus
cttttgtgttcgaaatggtaattct

SEQ ID NO: 24903 - DNA, 25 bp, SARS Virus
ttttgtgttcgtaatggtaattctt

SEQ ID NO: 24904 - DNA, 25 bp, SARS Virus
tttgtgttcgtaatggtaattcttt

SEQ ID NO: 24905 - DNA, 25 bp, SARS Virus
ttgtgttcgtaaaggtaattctttg

SEQ ID NO: 24906 - DNA, 25 bp, SARS Virus
tgtgttcgtaatagtaattctttgg

SEQ ID NO: 24907 - DNA, 25 bp, SARS Virus
gtgttcgtaatgataattctttgga

SEQ ID NO: 24908 - DNA, 25 bp, SARS Virus
tgttcgtaatggaaattctttggat

SEQ ID NO: 24909 - DNA, 25 bp, SARS Virus
gttcgtaatggtaattctttggatt

SEQ ID NO: 24910 - DNA, 25 bp, SARS Virus
ttcgtaatggtaattctttggatta

SEQ ID NO: 24911 - DNA, 25 bp, SARS Virus
tcgtaatggtaaatctttggattac

SEQ ID NO: 24912 - DNA, 25 bp, SARS Virus
cgtaatggtaatactttggattact

SEQ ID NO: 24913 - DNA, 25 bp, SARS Virus
gtaatggtaattatttggattactc

SEQ ID NO: 24914 - DNA, 25 bp, SARS Virus
taatggtaattcattggattactcg

SEQ ID NO: 24915 - DNA, 25 bp, SARS Virus
aatggtaattctatggattactcga

SEQ ID NO: 24916 - DNA, 25 bp, SARS Virus
atggtaattcttaggattactcgaa

SEQ ID NO: 24917 - DNA, 25 bp, SARS Virus
tggtaattctttagattactcgaaa

SEQ ID NO: 24918 - DNA, 25 bp, SARS Virus
ggtaattctttgaattactcgaaag

SEQ ID NO: 24919 - DNA, 25 bp, SARS Virus
gtaattctttggattactcgaaagt

SEQ ID NO: 24920 - DNA, 25 bp, SARS Virus
taattctttggaatactcgaaagtg

SEQ ID NO: 24921 - DNA, 25 bp, SARS Virus
aattctttggataactcgaaagtga

SEQ ID NO: 24922 - DNA, 25 bp, SARS Virus
attctttggattactcgaaagtgat

SEQ ID NO: 24923 - DNA, 25 bp, SARS Virus
ttctttggattaatcgaaagtgatc

SEQ ID NO: 24924 - DNA, 25 bp, SARS Virus
tctttggattacacgaaagtgatcg

SEQ ID NO: 24925 - DNA, 25 bp, SARS Virus
ctttggattactagaaagtgatcgg

SEQ ID NO: 24926 - DNA, 25 bp, SARS Virus
tttggattactcaaaagtgatcgga

SEQ ID NO: 24927 - DNA, 25 bp, SARS Virus
ttggattactcgaaagtgatcggaa

SEQ ID NO: 24928 - DNA, 25 bp, SARS Virus
tggattactcgaaagtgatcggaat

SEQ ID NO: 24929 - DNA, 25 bp, SARS Virus
ggattactcgaaagtgatcggaatc

SEQ ID NO: 24930 - DNA, 25 bp, SARS Virus
gattactcgaaaatgatcggaatcc

SEQ ID NO: 24931 - DNA, 25 bp, SARS Virus
attactcgaaagagatcggaatcca

SEQ ID NO: 24932 - DNA, 25 bp, SARS Virus
ttactcgaaagtaatcggaatccaa

SEQ ID NO: 24933 - DNA, 25 bp, SARS Virus
tactcgaaagtgatcggaatccaaa

SEQ ID NO: 24934 - DNA, 25 bp, SARS Virus
actcgaaagtgaacggaatccaaat

SEQ ID NO: 24935 - DNA, 25 bp, SARS Virus
ctcgaaagtgataggaatccaaatt

SEQ ID NO: 24936 - DNA, 25 bp, SARS Virus
tcgaaagtgatcagaatccaaattt

SEQ ID NO: 24937 - DNA, 25 bp, SARS Virus
cgaaagtgatcgaaatccaaatttt

SEQ ID NO: 24938 - DNA, 25 bp, SARS Virus
gaaagtgatcggaatccaaattttt

SEQ ID NO: 24939 - DNA, 25 bp, SARS Virus
aaagtgatcggaatccaaatttttg

SEQ ID NO: 24940 - DNA, 25 bp, SARS Virus
aagtgatcggaaaccaaatttttgt

SEQ ID NO: 24941 - DNA, 25 bp, SARS Virus
agtgatcggaatacaaatttttgtt

SEQ ID NO: 24942 - DNA, 25 bp, SARS Virus
gtgatcggaatcaaaatttttgtta

SEQ ID NO: 24943 - DNA, 25 bp, SARS Virus
tgatcggaatccaaatttttgttaa

SEQ ID NO: 24944 - DNA, 25 bp, SARS Virus
gatcggaatccaaatttttgttaac

SEQ ID NO: 24945 - DNA, 25 bp, SARS Virus
atcggaatccaaatttttgttaacg

SEQ ID NO: 24946 - DNA, 25 bp, SARS Virus
tcggaatccaaaattttgttaacgg

SEQ ID NO: 24947 - DNA, 25 bp, SARS Virus
cggaatccaaatatttgttaacggt

SEQ ID NO: 24948 - DNA, 25 bp, SARS Virus
ggaatccaaattattgttaacggtg

SEQ ID NO: 24949 - DNA, 25 bp, SARS Virus
gaatccaaatttatgttaacggtga

SEQ ID NO: 24950 - DNA, 25 bp, SARS Virus
aatccaaattttagttaacggtgag

SEQ ID NO: 24951 - DNA, 25 bp, SARS Virus
atccaaatttttattaacggtgagt

SEQ ID NO: 24952 - DNA, 25 bp, SARS Virus
tccaaatttttgataacggtgagta

SEQ ID NO: 24953 - DNA, 25 bp, SARS Virus
ccaaatttttgtaaacggtgagtac

SEQ ID NO: 24954 - DNA, 25 bp, SARS Virus
caaatttttgttaacggtgagtacc

SEQ ID NO: 24955 - DNA, 25 bp, SARS Virus
aaatttttgttaacggtgagtacca

SEQ ID NO: 24956 - DNA, 25 bp, SARS Virus
aatttttgttaaaggtgagtaccat

SEQ ID NO: 24957 - DNA, 25 bp, SARS Virus
atttttgttaacagtgagtaccata

SEQ ID NO: 24958 - DNA, 25 bp, SARS Virus
tttttgttaacgatgagtaccataa

SEQ ID NO: 24959 - DNA, 25 bp, SARS Virus
ttttgttaacggagagtaccataac

SEQ ID NO: 24960 - DNA, 25 bp, SARS Virus
tttgttaacggtaagtaccataacg

SEQ ID NO: 24961 - DNA, 25 bp, SARS Virus
ttgttaacggtgagtaccataacga

SEQ ID NO: 24962 - DNA, 25 bp, SARS Virus
tgttaacggtgaataccataacgac

SEQ ID NO: 24963 - DNA, 25 bp, SARS Virus
gttaacggtgagaaccataacgacg

SEQ ID NO: 24964 - DNA, 25 bp, SARS Virus
ttaacggtgagtaccataacgacgt

SEQ ID NO: 24965 - DNA, 25 bp, SARS Virus
taacggtgagtaacataacgacgtt

SEQ ID NO: 24966 - DNA, 25 bp, SARS Virus
aacggtgagtacaataacgacgtta

SEQ ID NO: 24967 - DNA, 25 bp, SARS Virus
acggtgagtaccataacgacgttaa

SEQ ID NO: 24968 - DNA, 25 bp, SARS Virus
cggtgagtaccaaaacgacgttaat

SEQ ID NO: 24969 - DNA, 25 bp, SARS Virus
ggtgagtaccataacgacgttaatt

SEQ ID NO: 24970 - DNA, 25 bp, SARS Virus
gtgagtaccataacgacgttaatta

SEQ ID NO: 24971 - DNA, 25 bp, SARS Virus
tgagtaccataaagacgttaattat

SEQ ID NO: 24972 - DNA, 25 bp, SARS Virus
gagtaccataacaacgttaattatc

SEQ ID NO: 24973 - DNA, 25 bp, SARS Virus
agtaccataacgacgttaattatca

SEQ ID NO: 24974 - DNA, 25 bp, SARS Virus
gtaccataacgaagttaattatcac

SEQ ID NO: 24975 - DNA, 25 bp, SARS Virus
taccataacgacattaattatcaca

SEQ ID NO: 24976 - DNA, 25 bp, SARS Virus
accataacgacgataattatcacaa

SEQ ID NO: 24977 - DNA, 25 bp, SARS Virus
ccataacgacgtaaattatcacaag

SEQ ID NO: 24978 - DNA, 25 bp, SARS Virus
cataacgacgttaattatcacaagg

SEQ ID NO: 24979 - DNA, 25 bp, SARS Virus
ataacgacgttaattatcacaagga

SEQ ID NO: 24980 - DNA, 25 bp, SARS Virus
taacgacgttaaatatcacaaggaa

SEQ ID NO: 24981 - DNA, 25 bp, SARS Virus
aacgacgttaataatcacaaggaac

SEQ ID NO: 24982 - DNA, 25 bp, SARS Virus
acgacgttaattatcacaaggaacc

SEQ ID NO: 24983 - DNA, 25 bp, SARS Virus
cgacgttaattaacacaaggaacct

SEQ ID NO: 24984 - DNA, 25 bp, SARS Virus
gacgttaattataacaaggaacctc

SEQ ID NO: 24985 - DNA, 25 bp, SARS Virus
acgttaattatcacaaggaacctca

SEQ ID NO: 24986 - DNA, 25 bp, SARS Virus
cgttaattatcaaaaggaacctcat

SEQ ID NO: 24987 - DNA, 25 bp, SARS Virus
gttaattatcacaaggaacctcatt

SEQ ID NO: 24988 - DNA, 25 bp, SARS Virus
ttaattatcacaaggaacctcattt

SEQ ID NO: 24989 - DNA, 25 bp, SARS Virus
taattatcacaaagaacctcatttt

SEQ ID NO: 24990 - DNA, 25 bp, SARS Virus
aattatcacaagaaacctcatttta

SEQ ID NO: 24991 - DNA, 25 bp, SARS Virus
attatcacaaggaacctcattttaa

SEQ ID NO: 24992 - DNA, 25 bp, SARS Virus
ttatcacaaggaacctcattttaaa

SEQ ID NO: 24993 - DNA, 25 bp, SARS Virus
tatcacaaggaaactcattttaaaa

SEQ ID NO: 24994 - DNA, 25 bp, SARS Virus
atcacaaggaacatcattttaaaac

SEQ ID NO: 24995 - DNA, 25 bp, SARS Virus
tcacaaggaaccacattttaaaacc

SEQ ID NO: 24996 - DNA, 25 bp, SARS Virus
cacaaggaacctaattttaaaaccg

SEQ ID NO: 24997 - DNA, 25 bp, SARS Virus
acaaggaacctcattttaaaaccga

SEQ ID NO: 24998 - DNA, 25 bp, SARS Virus
caaggaacctcaatttaaaaccgaa

SEQ ID NO: 24999 - DNA, 25 bp, SARS Virus
aaggaacctcatattaaaaccgaat

SEQ ID NO: 25000 - DNA, 25 bp, SARS Virus
aggaacctcattataaaaccgaata

SEQ ID NO: 25001 - DNA, 25 bp, SARS Virus
ggaacctcatttaaaaaccgaatac

SEQ ID NO: 25002 - DNA, 25 bp, SARS Virus
gaacctcattttaaaaccgaataca

SEQ ID NO: 25003 - DNA, 25 bp, SARS Virus
aacctcattttaaaaccgaatacag

SEQ ID NO: 25004 - DNA, 25 bp, SARS Virus
acctcattttaaaaccgaatacagt

SEQ ID NO: 25005 - DNA, 25 bp, SARS Virus
cctcattttaaaaccgaatacagtt

SEQ ID NO: 25006 - DNA, 25 bp, SARS Virus
ctcattttaaaaacgaatacagttt

SEQ ID NO: 25007 - DNA, 25 bp, SARS Virus
tcattttaaaacagaatacagtttg

SEQ ID NO: 25008 - DNA, 25 bp, SARS Virus
cattttaaaaccaaatacagtttgg

SEQ ID NO: 25009 - DNA, 25 bp, SARS Virus
attttaaaaccgaatacagtttggt

SEQ ID NO: 25010 - DNA, 25 bp, SARS Virus
ttttaaaaccgaatacagtttggta

SEQ ID NO: 25011 - DNA, 25 bp, SARS Virus
tttaaaaccgaaaacagtttggtaa

SEQ ID NO: 25012 - DNA, 25 bp, SARS Virus
ttaaaaccgaatacagtttggtaag

SEQ ID NO: 25013 - DNA, 25 bp, SARS Virus
taaaaccgaataaagtttggtaaga

SEQ ID NO: 25014 - DNA, 25 bp, SARS Virus
aaaaccgaatacagtttggtaagaa

SEQ ID NO: 25015 - DNA, 25 bp, SARS Virus
aaaccgaatacaatttggtaagaat

SEQ ID NO: 25016 - DNA, 25 bp, SARS Virus
aaccgaatacagattggtaagaatc

SEQ ID NO: 25017 - DNA, 25 bp, SARS Virus
tcgctcaaagttctttccacgattt

SEQ ID NO: 25018 - DNA, 25 bp, SARS Virus
cgctcaaagttccttccacgattta

SEQ ID NO: 25019 - DNA, 25 bp, SARS Virus
gctcaaagttctctccacgatttaa

SEQ ID NO: 25020 - DNA, 25 bp, SARS Virus
ctcaaagttcttcccacgatttaat

SEQ ID NO: 25021 - DNA, 25 bp, SARS Virus
tcaaagttctttccacgatttaatg

SEQ ID NO: 25022 - DNA, 25 bp, SARS Virus
caaagttctttccacgatttaatga

SEQ ID NO: 25023 - DNA, 25 bp, SARS Virus
aaagttctttccccgatttaatgac

SEQ ID NO: 25024 - DNA, 25 bp, SARS Virus
aagttctttccacgatttaatgacg

SEQ ID NO: 25025 - DNA, 25 bp, SARS Virus
agttctttccaccatttaatgacgt

SEQ ID NO: 25026 - DNA, 25 bp, SARS Virus
gttctttccacgctttaatgacgta

SEQ ID NO: 25027 - DNA, 25 bp, SARS Virus
ttctttccacgacttaatgacgtat

SEQ ID NO: 25028 - DNA, 25 bp, SARS Virus
tctttccacgatctaatgacgtatt

SEQ ID NO: 25029 - DNA, 25 bp, SARS Virus
ctttccacgattcaatgacgtattc

SEQ ID NO: 25030 - DNA, 25 bp, SARS Virus
tttccacgatttcatgacgtattcg

SEQ ID NO: 25031 - DNA, 25 bp, SARS Virus
ttccacgatttactgacgtattcgg

SEQ ID NO: 25032 - DNA, 25 bp, SARS Virus
tccacgatttaacgacgtattcggt

SEQ ID NO: 25033 - DNA, 25 bp, SARS Virus
ccacgatttaatcacgtattcggtt

SEQ ID NO: 25034 - DNA, 25 bp, SARS Virus
cacgatttaatgccgtattcggtta

SEQ ID NO: 25035 - DNA, 25 bp, SARS Virus
acgatttaatgacgtattcggttaa

SEQ ID NO: 25036 - DNA, 25 bp, SARS Virus
cgatttaatgacctattcggttaac

SEQ ID NO: 25037 - DNA, 25 bp, SARS Virus
gatttaatgacgcattcggttaaca

SEQ ID NO: 25038 - DNA, 25 bp, SARS Virus
atttaatgacgtcttcggttaacaa

SEQ ID NO: 25039 - DNA, 25 bp, SARS Virus
tttaatgacgtactcggttaacaaa

SEQ ID NO: 25040 - DNA, 25 bp, SARS Virus
ttaatgacgtatccggttaacaaac

SEQ ID NO: 25041 - DNA, 25 bp, SARS Virus
taatgacgtattcggttaacaaacc

SEQ ID NO: 25042 - DNA, 25 bp, SARS Virus
aatgacgtattccgttaacaaaccg

SEQ ID NO: 25043 - DNA, 25 bp, SARS Virus
atgacgtattcgcttaacaaaccgt

SEQ ID NO: 25044 - DNA, 25 bp, SARS Virus
tgacgtattcggctaacaaaccgtg

SEQ ID NO: 25045 - DNA, 25 bp, SARS Virus
gacgtattcggtcaacaaaccgtgt

SEQ ID NO: 25046 - DNA, 25 bp, SARS Virus
acgtattcggttcacaaaccgtgta

SEQ ID NO: 25047 - DNA, 25 bp, SARS Virus
cgtattcggttaccaaaccgtgtaa

SEQ ID NO: 25048 - DNA, 25 bp, SARS Virus
gtattcggttaacaaaccgtgtaat

SEQ ID NO: 25049 - DNA, 25 bp, SARS Virus
tattcggttaaccaaccgtgtaatt

SEQ ID NO: 25050 - DNA, 25 bp, SARS Virus
attcggttaacacaccgtgtaattg

SEQ ID NO: 25051 - DNA, 25 bp, SARS Virus
ttcggttaacaacccgtgtaattgg

SEQ ID NO: 25052 - DNA, 25 bp, SARS Virus
tcggttaacaaaccgtgtaattggt

SEQ ID NO: 25053 - DNA, 25 bp, SARS Virus
cggttaacaaaccgtgtaattggtc

SEQ ID NO: 25054 - DNA, 25 bp, SARS Virus
ggttaacaaaccctgtaattggtcc

SEQ ID NO: 25055 - DNA, 25 bp, SARS Virus
gttaacaaaccgcgtaattggtccg

SEQ ID NO: 25056 - DNA, 25 bp, SARS Virus
ttaacaaaccgtctaattggtccga

SEQ ID NO: 25057 - DNA, 25 bp, SARS Virus
taacaaaccgtgcaattggtccgat

SEQ ID NO: 25058 - DNA, 25 bp, SARS Virus
aacaaaccgtgtcattggtccgatg

SEQ ID NO: 25059 - DNA, 25 bp, SARS Virus
acaaaccgtgtacttggtccgatgt

SEQ ID NO: 25060 - DNA, 25 bp, SARS Virus
caaaccgtgtaactggtccgatgtt

SEQ ID NO: 25061 - DNA, 25 bp, SARS Virus
aaaccgtgtaatcggtccgatgttg

SEQ ID NO: 25062 - DNA, 25 bp, SARS Virus
aaccgtgtaattcgtccgatgttgg

SEQ ID NO: 25063 - DNA, 25 bp, SARS Virus
accgtgtaattgctccgatgttggt

SEQ ID NO: 25064 - DNA, 25 bp, SARS Virus
ccgtgtaattggcccgatgttggtt

SEQ ID NO: 25065 - DNA, 25 bp, SARS Virus
cgtgtaattggtccgatgttggttc

SEQ ID NO: 25066 - DNA, 25 bp, SARS Virus
gtgtaattggtccgatgttggttct

SEQ ID NO: 25067 - DNA, 25 bp, SARS Virus
tgtaattggtcccatgttggttctg

SEQ ID NO: 25068 - DNA, 25 bp, SARS Virus
gtaattggtccgctgttggttctgt

SEQ ID NO: 25069 - DNA, 25 bp, SARS Virus
taattggtccgacgttggttctgtt

SEQ ID NO: 25070 - DNA, 25 bp, SARS Virus
aattggtccgatcttggttctgttg

SEQ ID NO: 25071 - DNA, 25 bp, SARS Virus
attggtccgatgctggttctgttgc

SEQ ID NO: 25072 - DNA, 25 bp, SARS Virus
ttggtccgatgtcggttctgttgca

SEQ ID NO: 25073 - DNA, 25 bp, SARS Virus
tggtccgatgttcgttctgttgcaa

SEQ ID NO: 25074 - DNA, 25 bp, SARS Virus
ggtccgatgttgcttctgttgcaag

SEQ ID NO: 25075 - DNA, 25 bp, SARS Virus
gtccgatgttggctctgttgcaagt

SEQ ID NO: 25076 - DNA, 25 bp, SARS Virus
tccgatgttggtcctgttgcaagtt

SEQ ID NO: 25077 - DNA, 25 bp, SARS Virus
ccgatgttggttctgttgcaagttt

SEQ ID NO: 25078 - DNA, 25 bp, SARS Virus
cgatgttggttccgttgcaagtttg

SEQ ID NO: 25079 - DNA, 25 bp, SARS Virus
gatgttggttctcttgcaagtttgg

SEQ ID NO: 25080 - DNA, 25 bp, SARS Virus
atgttggttctgctgcaagtttggt

SEQ ID NO: 25081 - DNA, 25 bp, SARS Virus
tgttggttctgtcgcaagtttggtt

SEQ ID NO: 25082 - DNA, 25 bp, SARS Virus
gttggttctgttccaagtttggttt

SEQ ID NO: 25083 - DNA, 25 bp, SARS Virus
ttggttctgttgcaagtttggtttg

SEQ ID NO: 25084 - DNA, 25 bp, SARS Virus
tggttctgttgccagtttggtttgt

SEQ ID NO: 25085 - DNA, 25 bp, SARS Virus
ggttctgttgcacgtttggtttgtg

SEQ ID NO: 25086 - DNA, 25 bp, SARS Virus
gttctgttgcaactttggtttgtga

SEQ ID NO: 25087 - DNA, 25 bp, SARS Virus
ttctgttgcaagcttggtttgtgaa

SEQ ID NO: 25088 - DNA, 25 bp, SARS Virus
tctgttgcaagtctggtttgtgaac

SEQ ID NO: 25089 - DNA, 25 bp, SARS Virus
ctgttgcaagttcggtttgtgaacc

SEQ ID NO: 25090 - DNA, 25 bp, SARS Virus
tgttgcaagtttcgtttgtgaacca

SEQ ID NO: 25091 - DNA, 25 bp, SARS Virus
gttgcaagtttgctttgtgaaccac

SEQ ID NO: 25092 - DNA, 25 bp, SARS Virus
ttgcaagtttggcttgtgaaccaca

SEQ ID NO: 25093 - DNA, 25 bp, SARS Virus
tgcaagtttggtctgtgaaccacaa

SEQ ID NO: 25094 - DNA, 25 bp, SARS Virus
gcaagtttggttcgtgaaccacaaa

SEQ ID NO: 25095 - DNA, 25 bp, SARS Virus
caagtttggtttctgaaccacaaat

SEQ ID NO: 25096 - DNA, 25 bp, SARS Virus
aagtttggtttgcgaaccacaaatg

SEQ ID NO: 25097 - DNA, 25 bp, SARS Virus
agtttggtttgtcaaccacaaatgc

SEQ ID NO: 25098 - DNA, 25 bp, SARS Virus
gtttggtttgtgcaccacaaatgca

SEQ ID NO: 25099 - DNA, 25 bp, SARS Virus
tttggtttgtgacccacaaatgcaa

SEQ ID NO: 25100 - DNA, 25 bp, SARS Virus
ttggtttgtgaaccacaaatgcaac

SEQ ID NO: 25101 - DNA, 25 bp, SARS Virus
tggtttgtgaaccacaaatgcaaca

SEQ ID NO: 25102 - DNA, 25 bp, SARS Virus
ggtttgtgaaccccaaatgcaacag

SEQ ID NO: 25103 - DNA, 25 bp, SARS Virus
gtttgtgaaccacaaatgcaacaga

SEQ ID NO: 25104 - DNA, 25 bp, SARS Virus
tttgtgaaccaccaatgcaacagaa

SEQ ID NO: 25105 - DNA, 25 bp, SARS Virus
ttgtgaaccacacatgcaacagaaa

SEQ ID NO: 25106 - DNA, 25 bp, SARS Virus
tgtgaaccacaactgcaacagaaac

SEQ ID NO: 25107 - DNA, 25 bp, SARS Virus
gtgaaccacaaacgcaacagaaacc

SEQ ID NO: 25108 - DNA, 25 bp, SARS Virus
tgaaccacaaatccaacagaaacct

SEQ ID NO: 25109 - DNA, 25 bp, SARS Virus
gaaccacaaatgcaacagaaacctc

SEQ ID NO: 25110 - DNA, 25 bp, SARS Virus
aaccacaaatgccacagaaacctca

SEQ ID NO: 25111 - DNA, 25 bp, SARS Virus
accacaaatgcaccagaaacctcat

SEQ ID NO: 25112 - DNA, 25 bp, SARS Virus
ccacaaatgcaacagaaacctcatg

SEQ ID NO: 25113 - DNA, 25 bp, SARS Virus
cacaaatgcaaccgaaacctcatgt

SEQ ID NO: 25114 - DNA, 25 bp, SARS Virus
acaaatgcaacacaaacctcatgtt

SEQ ID NO: 25115 - DNA, 25 bp, SARS Virus
caaatgcaacagcaacctcatgttt

SEQ ID NO: 25116 - DNA, 25 bp, SARS Virus
aaatgcaacagacacctcatgtttc

SEQ ID NO: 25117 - DNA, 25 bp, SARS Virus
aatgcaacagaaccctcatgtttcg

SEQ ID NO: 25118 - DNA, 25 bp, SARS Virus
atgcaacagaaacctcatgtttcgg

SEQ ID NO: 25119 - DNA, 25 bp, SARS Virus
tgcaacagaaacctcatgtttcggt

SEQ ID NO: 25120 - DNA, 25 bp, SARS Virus
gcaacagaaaccccatgtttcggtc

SEQ ID NO: 25121 - DNA, 25 bp, SARS Virus
caacagaaacctcatgtttcggtca

SEQ ID NO: 25122 - DNA, 25 bp, SARS Virus
aacagaaacctcctgtttcggtcat

SEQ ID NO: 25123 - DNA, 25 bp, SARS Virus
acagaaacctcacgtttcggtcatc

SEQ ID NO: 25124 - DNA, 25 bp, SARS Virus
cagaaacctcatctttcggtcatct

SEQ ID NO: 25125 - DNA, 25 bp, SARS Virus
agaaacctcatgcttcggtcatcta

SEQ ID NO: 25126 - DNA, 25 bp, SARS Virus
gaaacctcatgtctcggtcatctat

SEQ ID NO: 25127 - DNA, 25 bp, SARS Virus
aaacctcatgttccggtcatctatg

SEQ ID NO: 25128 - DNA, 25 bp, SARS Virus
aacctcatgtttcggtcatctatga

SEQ ID NO: 25129 - DNA, 25 bp, SARS Virus
acctcatgtttccgtcatctatgaa

SEQ ID NO: 25130 - DNA, 25 bp, SARS Virus
cctcatgtttcgctcatctatgaag

SEQ ID NO: 25131 - DNA, 25 bp, SARS Virus
ctcatgtttcggccatctatgaagt

SEQ ID NO: 25132 - DNA, 25 bp, SARS Virus
tcatgtttcggtcatctatgaagtt

SEQ ID NO: 25133 - DNA, 25 bp, SARS Virus
catgtttcggtcctctatgaagttt

SEQ ID NO: 25134 - DNA, 25 bp, SARS Virus
atgtttcggtcacctatgaagttta

SEQ ID NO: 25135 - DNA, 25 bp, SARS Virus
tgtttcggtcatctatgaagtttaa

SEQ ID NO: 25136 - DNA, 25 bp, SARS Virus
gtttcggtcatccatgaagtttaag

SEQ ID NO: 25137 - DNA, 25 bp, SARS Virus
tttcggtcatctctgaagtttaagt

SEQ ID NO: 25138 - DNA, 25 bp, SARS Virus
ttcggtcatctacgaagtttaagta

SEQ ID NO: 25139 - DNA, 25 bp, SARS Virus
tcggtcatctatcaagtttaagtaa

SEQ ID NO: 25140 - DNA, 25 bp, SARS Virus
cggtcatctatgcagtttaagtaaa

SEQ ID NO: 25141 - DNA, 25 bp, SARS Virus
ggtcatctatgacgtttaagtaaac

SEQ ID NO: 25142 - DNA, 25 bp, SARS Virus
gtcatctatgaactttaagtaaact

SEQ ID NO: 25143 - DNA, 25 bp, SARS Virus
tcatctatgaagcttaagtaaactt

SEQ ID NO: 25144 - DNA, 25 bp, SARS Virus
catctatgaagtctaagtaaacttc

SEQ ID NO: 25145 - DNA, 25 bp, SARS Virus
atctatgaagttcaagtaaacttca

SEQ ID NO: 25146 - DNA, 25 bp, SARS Virus
tctatgaagtttcagtaaacttcaa

SEQ ID NO: 25147 - DNA, 25 bp, SARS Virus
ctatgaagtttacgtaaacttcaag

SEQ ID NO: 25148 - DNA, 25 bp, SARS Virus
tatgaagtttaactaaacttcaaga

SEQ ID NO: 25149 - DNA, 25 bp, SARS Virus
atgaagtttaagcaaacttcaagac

SEQ ID NO: 25150 - DNA, 25 bp, SARS Virus
tgaagtttaagtcaacttcaagacc

SEQ ID NO: 25151 - DNA, 25 bp, SARS Virus
gaagtttaagtacacttcaagaccg

SEQ ID NO: 25152 - DNA, 25 bp, SARS Virus
aagtttaagtaaccttcaagaccgt

SEQ ID NO: 25153 - DNA, 25 bp, SARS Virus
agtttaagtaaacttcaagaccgtc

SEQ ID NO: 25154 - DNA, 25 bp, SARS Virus
gtttaagtaaacctcaagaccgtca

SEQ ID NO: 25155 - DNA, 25 bp, SARS Virus
tttaagtaaactccaagaccgtcat

SEQ ID NO: 25156 - DNA, 25 bp, SARS Virus
ttaagtaaacttcaagaccgtcatc

SEQ ID NO: 25157 - DNA, 25 bp, SARS Virus
taagtaaacttccagaccgtcatct

SEQ ID NO: 25158 - DNA, 25 bp, SARS Virus
aagtaaacttcacgaccgtcatctt

SEQ ID NO: 25159 - DNA, 25 bp, SARS Virus
agtaaacttcaacaccgtcatcttc

SEQ ID NO: 25160 - DNA, 25 bp, SARS Virus
gtaaacttcaagcccgtcatcttct

SEQ ID NO: 25161 - DNA, 25 bp, SARS Virus
taaacttcaagaccgtcatcttctg

SEQ ID NO: 25162 - DNA, 25 bp, SARS Virus
aaacttcaagaccgtcatcttctgt

SEQ ID NO: 25163 - DNA, 25 bp, SARS Virus
aacttcaagaccctcatcttctgtg

SEQ ID NO: 25164 - DNA, 25 bp, SARS Virus
acttcaagaccgccatcttctgtgt

SEQ ID NO: 25165 - DNA, 25 bp, SARS Virus
cttcaagaccgtcatcttctgtgtg

SEQ ID NO: 25166 - DNA, 25 bp, SARS Virus
ttcaagaccgtcctcttctgtgtgt

SEQ ID NO: 25167 - DNA, 25 bp, SARS Virus
tcaagaccgtcaccttctgtgtgtt

SEQ ID NO: 25168 - DNA, 25 bp, SARS Virus
caagaccgtcatcttctgtgtgttc

SEQ ID NO: 25169 - DNA, 25 bp, SARS Virus
aagaccgtcatcctctgtgtgttcc

SEQ ID NO: 25170 - DNA, 25 bp, SARS Virus
agaccgtcatctcctgtgtgttcct

SEQ ID NO: 25171 - DNA, 25 bp, SARS Virus
gaccgtcatcttctgtgtgttcctt

SEQ ID NO: 25172 - DNA, 25 bp, SARS Virus
accgtcatcttccgtgtgttcctta

SEQ ID NO: 25173 - DNA, 25 bp, SARS Virus
ccgtcatcttctctgtgttccttac

SEQ ID NO: 25174 - DNA, 25 bp, SARS Virus
cgtcatcttctgcgtgttccttacc

SEQ ID NO: 25175 - DNA, 25 bp, SARS Virus
gtcatcttctgtctgttccttacct

SEQ ID NO: 25176 - DNA, 25 bp, SARS Virus
tcatcttctgtgcgttccttacctg

SEQ ID NO: 25177 - DNA, 25 bp, SARS Virus
catcttctgtgtcttccttacctgt

SEQ ID NO: 25178 - DNA, 25 bp, SARS Virus
atcttctgtgtgctccttacctgtt

SEQ ID NO: 25179 - DNA, 25 bp, SARS Virus
tcttctgtgtgtcccttacctgtta

SEQ ID NO: 25180 - DNA, 25 bp, SARS Virus
cttctgtgtgttccttacctgttag

SEQ ID NO: 25181 - DNA, 25 bp, SARS Virus
ttctgtgtgttccttacctgttaga

SEQ ID NO: 25182 - DNA, 25 bp, SARS Virus
tctgtgtgttccctacctgttagaa

SEQ ID NO: 25183 - DNA, 25 bp, SARS Virus
ctgtgtgttcctcacctgttagaac

SEQ ID NO: 25184 - DNA, 25 bp, SARS Virus
tgtgtgttccttccctgttagaacg

SEQ ID NO: 25185 - DNA, 25 bp, SARS Virus
gtgtgttccttacctgttagaacga

SEQ ID NO: 25186 - DNA, 25 bp, SARS Virus
tgtgttccttacctgttagaacgaa

SEQ ID NO: 25187 - DNA, 25 bp, SARS Virus
gtgttccttacccgttagaacgaac

SEQ ID NO: 25188 - DNA, 25 bp, SARS Virus
tgttccttacctcttagaacgaaca

SEQ ID NO: 25189 - DNA, 25 bp, SARS Virus
gttccttacctgctagaacgaacac

SEQ ID NO: 25190 - DNA, 25 bp, SARS Virus
ttccttacctgtcagaacgaacact

SEQ ID NO: 25191 - DNA, 25 bp, SARS Virus
tccttacctgttcgaacgaacactt

SEQ ID NO: 25192 - DNA, 25 bp, SARS Virus
ccttacctgttacaacgaacacttt

SEQ ID NO: 25193 - DNA, 25 bp, SARS Virus
cttacctgttagcacgaacactttc

SEQ ID NO: 25194 - DNA, 25 bp, SARS Virus
ttacctgttagaccgaacactttca

SEQ ID NO: 25195 - DNA, 25 bp, SARS Virus
tacctgttagaacgaacactttcag

SEQ ID NO: 25196 - DNA, 25 bp, SARS Virus
acctgttagaaccaacactttcagt

SEQ ID NO: 25197 - DNA, 25 bp, SARS Virus
cctgttagaacgcacactttcagtt

SEQ ID NO: 25198 - DNA, 25 bp, SARS Virus
ctgttagaacgaccactttcagttg

SEQ ID NO: 25199 - DNA, 25 bp, SARS Virus
tgttagaacgaacactttcagttgt

SEQ ID NO: 25200 - DNA, 25 bp, SARS Virus
gttagaacgaaccctttcagttgtt

SEQ ID NO: 25201 - DNA, 25 bp, SARS Virus
ttagaacgaacactttcagttgttg

SEQ ID NO: 25202 - DNA, 25 bp, SARS Virus
tagaacgaacaccttcagttgttgg

SEQ ID NO: 25203 - DNA, 25 bp, SARS Virus
agaacgaacactctcagttgttggg

SEQ ID NO: 25204 - DNA, 25 bp, SARS Virus
gaacgaacacttccagttgttgggt

SEQ ID NO: 25205 - DNA, 25 bp, SARS Virus
aacgaacactttcagttgttgggtg

SEQ ID NO: 25206 - DNA, 25 bp, SARS Virus
acgaacactttccgttgttgggtgg

SEQ ID NO: 25207 - DNA, 25 bp, SARS Virus
cgaacactttcacttgttgggtgga

SEQ ID NO: 25208 - DNA, 25 bp, SARS Virus
gaacactttcagctgttgggtggag

SEQ ID NO: 25209 - DNA, 25 bp, SARS Virus
aacactttcagtcgttgggtggaga

SEQ ID NO: 25210 - DNA, 25 bp, SARS Virus
acactttcagttcttgggtggagac

SEQ ID NO: 25211 - DNA, 25 bp, SARS Virus
cactttcagttgctgggtggagact

SEQ ID NO: 25212 - DNA, 25 bp, SARS Virus
actttcagttgtcgggtggagactt

SEQ ID NO: 25213 - DNA, 25 bp, SARS Virus
ctttcagttgttcggtggagacttc

SEQ ID NO: 25214 - DNA, 25 bp, SARS Virus
tttcagttgttgcgtggagacttct

SEQ ID NO: 25215 - DNA, 25 bp, SARS Virus
ttcagttgttggctggagacttctt

SEQ ID NO: 25216 - DNA, 25 bp, SARS Virus
tcagttgttgggcggagacttcttc

SEQ ID NO: 25217 - DNA, 25 bp, SARS Virus
cagttgttgggtcgagacttcttca

SEQ ID NO: 25218 - DNA, 25 bp, SARS Virus
agttgttgggtgcagacttcttcat

SEQ ID NO: 25219 - DNA, 25 bp, SARS Virus
gttgttgggtggcgacttcttcatc

SEQ ID NO: 25220 - DNA, 25 bp, SARS Virus
ttgttgggtggacacttcttcatca

SEQ ID NO: 25221 - DNA, 25 bp, SARS Virus
tgttgggtggagccttcttcatcac

SEQ ID NO: 25222 - DNA, 25 bp, SARS Virus
gttgggtggagacttcttcatcacc

SEQ ID NO: 25223 - DNA, 25 bp, SARS Virus
ttgggtggagacctcttcatcacct

SEQ ID NO: 25224 - DNA, 25 bp, SARS Virus
tgggtggagactccttcatcacctt

SEQ ID NO: 25225 - DNA, 25 bp, SARS Virus
gggtggagacttcttcatcaccttt

SEQ ID NO: 25226 - DNA, 25 bp, SARS Virus
ggtggagacttcctcatcacctttt

SEQ ID NO: 25227 - DNA, 25 bp, SARS Virus
gtggagacttctccatcacctttta

SEQ ID NO: 25228 - DNA, 25 bp, SARS Virus
tggagacttcttcatcaccttttag

SEQ ID NO: 25229 - DNA, 25 bp, SARS Virus
ggagacttcttcctcaccttttagg

SEQ ID NO: 25230 - DNA, 25 bp, SARS Virus
gagacttcttcaccaccttttagga

SEQ ID NO: 25231 - DNA, 25 bp, SARS Virus
agacttcttcatcaccttttaggat

SEQ ID NO: 25232 - DNA, 25 bp, SARS Virus
gacttcttcatccccttttaggatg

SEQ ID NO: 25233 - DNA, 25 bp, SARS Virus
acttcttcatcaccttttaggatgg

SEQ ID NO: 25234 - DNA, 25 bp, SARS Virus
cttcttcatcaccttttaggatggt

SEQ ID NO: 25235 - DNA, 25 bp, SARS Virus
ttcttcatcaccctttaggatggta

SEQ ID NO: 25236 - DNA, 25 bp, SARS Virus
tcttcatcacctcttaggatggtat

SEQ ID NO: 25237 - DNA, 25 bp, SARS Virus
cttcatcaccttctaggatggtatg

SEQ ID NO: 25238 - DNA, 25 bp, SARS Virus
ttcatcacctttcaggatggtatgt

SEQ ID NO: 25239 - DNA, 25 bp, SARS Virus
tcatcaccttttcggatggtatgtc

SEQ ID NO: 25240 - DNA, 25 bp, SARS Virus
catcaccttttacgatggtatgtct

SEQ ID NO: 25241 - DNA, 25 bp, SARS Virus
atcaccttttagcatggtatgtctt

SEQ ID NO: 25242 - DNA, 25 bp, SARS Virus
tcaccttttaggctggtatgtcttc

SEQ ID NO: 25243 - DNA, 25 bp, SARS Virus
caccttttaggacggtatgtcttcc

SEQ ID NO: 25244 - DNA, 25 bp, SARS Virus
accttttaggatcgtatgtcttcct

SEQ ID NO: 25245 - DNA, 25 bp, SARS Virus
ccttttaggatgctatgtcttcctt

SEQ ID NO: 25246 - DNA, 25 bp, SARS Virus
cttttaggatggcatgtcttccttc

SEQ ID NO: 25247 - DNA, 25 bp, SARS Virus
ttttaggatggtctgtcttccttca

SEQ ID NO: 25248 - DNA, 25 bp, SARS Virus
tttaggatggtacgtcttccttcag

SEQ ID NO: 25249 - DNA, 25 bp, SARS Virus
ttaggatggtatctcttccttcagt

SEQ ID NO: 25250 - DNA, 25 bp, SARS Virus
taggatggtatgccttccttcagta

SEQ ID NO: 25251 - DNA, 25 bp, SARS Virus
aggatggtatgtcttccttcagtat

SEQ ID NO: 25252 - DNA, 25 bp, SARS Virus
ggatggtatgtcctccttcagtatc

SEQ ID NO: 25253 - DNA, 25 bp, SARS Virus
gatggtatgtctcccttcagtatct

SEQ ID NO: 25254 - DNA, 25 bp, SARS Virus
atggtatgtcttccttcagtatctc

SEQ ID NO: 25255 - DNA, 25 bp, SARS Virus
tggtatgtcttccttcagtatctca

SEQ ID NO: 25256 - DNA, 25 bp, SARS Virus
ggtatgtcttccctcagtatctcac

SEQ ID NO: 25257 - DNA, 25 bp, SARS Virus
gtatgtcttcctccagtatctcaca

SEQ ID NO: 25258 - DNA, 25 bp, SARS Virus
tatgtcttccttcagtatctcacac

SEQ ID NO: 25259 - DNA, 25 bp, SARS Virus
atgtcttccttccgtatctcacact

SEQ ID NO: 25260 - DNA, 25 bp, SARS Virus
tgtcttccttcactatctcacactg

SEQ ID NO: 25261 - DNA, 25 bp, SARS Virus
gtcttccttcagcatctcacactgc

SEQ ID NO: 25262 - DNA, 25 bp, SARS Virus
tcttccttcagtctctcacactgca

SEQ ID NO: 25263 - DNA, 25 bp, SARS Virus
cttccttcagtacctcacactgcac

SEQ ID NO: 25264 - DNA, 25 bp, SARS Virus
ttccttcagtatctcacactgcact

SEQ ID NO: 25265 - DNA, 25 bp, SARS Virus
tccttcagtatcccacactgcactt

SEQ ID NO: 25266 - DNA, 25 bp, SARS Virus
ccttcagtatctcacactgcacttt

SEQ ID NO: 25267 - DNA, 25 bp, SARS Virus
cttcagtatctcccactgcactttt

SEQ ID NO: 25268 - DNA, 25 bp, SARS Virus
ttcagtatctcacactgcacttttg

SEQ ID NO: 25269 - DNA, 25 bp, SARS Virus
tcagtatctcaccctgcacttttga

SEQ ID NO: 25270 - DNA, 25 bp, SARS Virus
cagtatctcacactgcacttttgat

SEQ ID NO: 25271 - DNA, 25 bp, SARS Virus
agtatctcacaccgcacttttgatg

SEQ ID NO: 25272 - DNA, 25 bp, SARS Virus
gtatctcacactccacttttgatgg

SEQ ID NO: 25273 - DNA, 25 bp, SARS Virus
tatctcacactgcacttttgatggc

SEQ ID NO: 25274 - DNA, 25 bp, SARS Virus
atctcacactgcccttttgatggct

SEQ ID NO: 25275 - DNA, 25 bp, SARS Virus
tctcacactgcacttttgatggctt

SEQ ID NO: 25276 - DNA, 25 bp, SARS Virus
ctcacactgcacctttgatggcttc

SEQ ID NO: 25277 - DNA, 25 bp, SARS Virus
tcacactgcactcttgatggcttca

SEQ ID NO: 25278 - DNA, 25 bp, SARS Virus
cacactgcacttctgatggcttcaa

SEQ ID NO: 25279 - DNA, 25 bp, SARS Virus
acactgcactttcgatggcttcaac

SEQ ID NO: 25280 - DNA, 25 bp, SARS Virus
cactgcacttttcatggcttcaaca

SEQ ID NO: 25281 - DNA, 25 bp, SARS Virus
actgcacttttgctggcttcaacat

SEQ ID NO: 25282 - DNA, 25 bp, SARS Virus
ctgcacttttgacggcttcaacatc

SEQ ID NO: 25283 - DNA, 25 bp, SARS Virus
tgcacttttgatcgcttcaacatcc

SEQ ID NO: 25284 - DNA, 25 bp, SARS Virus
gcacttttgatgccttcaacatccg

SEQ ID NO: 25285 - DNA, 25 bp, SARS Virus
cacttttgatggcttcaacatccgt

SEQ ID NO: 25286 - DNA, 25 bp, SARS Virus
acttttgatggcctcaacatccgtt

SEQ ID NO: 25287 - DNA, 25 bp, SARS Virus
cttttgatggctccaacatccgtta

SEQ ID NO: 25288 - DNA, 25 bp, SARS Virus
ttttgatggcttcaacatccgttac

SEQ ID NO: 25289 - DNA, 25 bp, SARS Virus
tttgatggcttccacatccgttaca

SEQ ID NO: 25290 - DNA, 25 bp, SARS Virus
ttgatggcttcaccatccgttacag

SEQ ID NO: 25291 - DNA, 25 bp, SARS Virus
tgatggcttcaacatccgttacagt

SEQ ID NO: 25292 - DNA, 25 bp, SARS Virus
gatggcttcaacctccgttacagta

SEQ ID NO: 25293 - DNA, 25 bp, SARS Virus
atggcttcaacacccgttacagtat

SEQ ID NO: 25294 - DNA, 25 bp, SARS Virus
tggcttcaacatccgttacagtatg

SEQ ID NO: 25295 - DNA, 25 bp, SARS Virus
ggcttcaacatccgttacagtatga

SEQ ID NO: 25296 - DNA, 25 bp, SARS Virus
gcttcaacatcccttacagtatgaa

SEQ ID NO: 25297 - DNA, 25 bp, SARS Virus
cttcaacatccgctacagtatgaat

SEQ ID NO: 25298 - DNA, 25 bp, SARS Virus
ttcaacatccgtcacagtatgaatt

SEQ ID NO: 25299 - DNA, 25 bp, SARS Virus
tcaacatccgttccagtatgaattt

SEQ ID NO: 25300 - DNA, 25 bp, SARS Virus
caacatccgttacagtatgaatttg

SEQ ID NO: 25301 - DNA, 25 bp, SARS Virus
aacatccgttaccgtatgaatttgg

SEQ ID NO: 25302 - DNA, 25 bp, SARS Virus
acatccgttacactatgaatttggt

SEQ ID NO: 25303 - DNA, 25 bp, SARS Virus
catccgttacagcatgaatttggta

SEQ ID NO: 25304 - DNA, 25 bp, SARS Virus
atccgttacagtctgaatttggtag

SEQ ID NO: 25305 - DNA, 25 bp, SARS Virus
tccgttacagtacgaatttggtagt

SEQ ID NO: 25306 - DNA, 25 bp, SARS Virus
ccgttacagtatcaatttggtagtc

SEQ ID NO: 25307 - DNA, 25 bp, SARS Virus
cgttacagtatgcatttggtagtct

SEQ ID NO: 25308 - DNA, 25 bp, SARS Virus
gttacagtatgactttggtagtcta

SEQ ID NO: 25309 - DNA, 25 bp, SARS Virus
ttacagtatgaacttggtagtctac

SEQ ID NO: 25310 - DNA, 25 bp, SARS Virus
tacagtatgaatctggtagtctact

SEQ ID NO: 25311 - DNA, 25 bp, SARS Virus
acagtatgaattcggtagtctactt

SEQ ID NO: 25312 - DNA, 25 bp, SARS Virus
cagtatgaatttcgtagtctacttc

SEQ ID NO: 25313 - DNA, 25 bp, SARS Virus
agtatgaatttgctagtctacttcc

SEQ ID NO: 25314 - DNA, 25 bp, SARS Virus
gtatgaatttggcagtctacttcca

SEQ ID NO: 25315 - DNA, 25 bp, SARS Virus
tatgaatttggtcgtctacttccac

SEQ ID NO: 25316 - DNA, 25 bp, SARS Virus
atgaatttggtactctacttccaca

SEQ ID NO: 25317 - DNA, 25 bp, SARS Virus
tgaatttggtagcctacttccacaa

SEQ ID NO: 25318 - DNA, 25 bp, SARS Virus
gaatttggtagtctacttccacaat

SEQ ID NO: 25319 - DNA, 25 bp, SARS Virus
aatttggtagtccacttccacaatt

SEQ ID NO: 25320 - DNA, 25 bp, SARS Virus
atttggtagtctccttccacaattt

SEQ ID NO: 25321 - DNA, 25 bp, SARS Virus
tttggtagtctacttccacaatttc

SEQ ID NO: 25322 - DNA, 25 bp, SARS Virus
ttggtagtctacctccacaatttca

SEQ ID NO: 25323 - DNA, 25 bp, SARS Virus
tggtagtctactcccacaatttcat

SEQ ID NO: 25324 - DNA, 25 bp, SARS Virus
ggtagtctacttccacaatttcatt

SEQ ID NO: 25325 - DNA, 25 bp, SARS Virus
gtagtctacttccacaatttcattg

SEQ ID NO: 25326 - DNA, 25 bp, SARS Virus
tagtctacttccccaatttcattgt

SEQ ID NO: 25327 - DNA, 25 bp, SARS Virus
agtctacttccacaatttcattgtg

SEQ ID NO: 25328 - DNA, 25 bp, SARS Virus
gtctacttccaccatttcattgtgt

SEQ ID NO: 25329 - DNA, 25 bp, SARS Virus
tctacttccacactttcattgtgtt

SEQ ID NO: 25330 - DNA, 25 bp, SARS Virus
ctacttccacaacttcattgtgttc

SEQ ID NO: 25331 - DNA, 25 bp, SARS Virus
tacttccacaatctcattgtgttct

SEQ ID NO: 25332 - DNA, 25 bp, SARS Virus
acttccacaattccattgtgttctc

SEQ ID NO: 25333 - DNA, 25 bp, SARS Virus
cttccacaatttcattgtgttctca

SEQ ID NO: 25334 - DNA, 25 bp, SARS Virus
ttccacaatttccttgtgttctcaa

SEQ ID NO: 25335 - DNA, 25 bp, SARS Virus
tccacaatttcactgtgttctcaat

SEQ ID NO: 25336 - DNA, 25 bp, SARS Virus
ccacaatttcatcgtgttctcaatc

SEQ ID NO: 25337 - DNA, 25 bp, SARS Virus
cacaatttcattctgttctcaatcc

SEQ ID NO: 25338 - DNA, 25 bp, SARS Virus
acaatttcattgcgttctcaatcca

SEQ ID NO: 25339 - DNA, 25 bp, SARS Virus
caatttcattgtcttctcaatccag

SEQ ID NO: 25340 - DNA, 25 bp, SARS Virus
aatttcattgtgctctcaatccagt

SEQ ID NO: 25341 - DNA, 25 bp, SARS Virus
atttcattgtgtcctcaatccagta

SEQ ID NO: 25342 - DNA, 25 bp, SARS Virus
tttcattgtgttctcaatccagtac

SEQ ID NO: 25343 - DNA, 25 bp, SARS Virus
ttcattgtgttcccaatccagtact

SEQ ID NO: 25344 - DNA, 25 bp, SARS Virus
tcattgtgttctcaatccagtactc

SEQ ID NO: 25345 - DNA, 25 bp, SARS Virus
cattgtgttctccatccagtactcc

SEQ ID NO: 25346 - DNA, 25 bp, SARS Virus
attgtgttctcactccagtactcct

SEQ ID NO: 25347 - DNA, 25 bp, SARS Virus
ttgtgttctcaacccagtactccta

SEQ ID NO: 25348 - DNA, 25 bp, SARS Virus
tgtgttctcaatccagtactcctag

SEQ ID NO: 25349 - DNA, 25 bp, SARS Virus
gtgttctcaatccagtactcctaga

SEQ ID NO: 25350 - DNA, 25 bp, SARS Virus
tgttctcaatcccgtactcctagaa

SEQ ID NO: 25351 - DNA, 25 bp, SARS Virus
gttctcaatccactactcctagaat

SEQ ID NO: 25352 - DNA, 25 bp, SARS Virus
ttctcaatccagcactcctagaata

SEQ ID NO: 25353 - DNA, 25 bp, SARS Virus
tctcaatccagtcctcctagaatac

SEQ ID NO: 25354 - DNA, 25 bp, SARS Virus
ctcaatccagtactcctagaatacc

SEQ ID NO: 25355 - DNA, 25 bp, SARS Virus
tcaatccagtacccctagaataccg

SEQ ID NO: 25356 - DNA, 25 bp, SARS Virus
caatccagtactcctagaataccga

SEQ ID NO: 25357 - DNA, 25 bp, SARS Virus
aatccagtactcctagaataccgac

SEQ ID NO: 25358 - DNA, 25 bp, SARS Virus
atccagtactcccagaataccgacg

SEQ ID NO: 25359 - DNA, 25 bp, SARS Virus
tccagtactcctcgaataccgacga

SEQ ID NO: 25360 - DNA, 25 bp, SARS Virus
ccagtactcctacaataccgacgaa

SEQ ID NO: 25361 - DNA, 25 bp, SARS Virus
cagtactcctagcataccgacgaat

SEQ ID NO: 25362 - DNA, 25 bp, SARS Virus
agtactcctagactaccgacgaata

SEQ ID NO: 25363 - DNA, 25 bp, SARS Virus
gtactcctagaacaccgacgaatac

SEQ ID NO: 25364 - DNA, 25 bp, SARS Virus
tactcctagaatcccgacgaataca

SEQ ID NO: 25365 - DNA, 25 bp, SARS Virus
actcctagaataccgacgaatacac

SEQ ID NO: 25366 - DNA, 25 bp, SARS Virus
ctcctagaataccgacgaatacacc

SEQ ID NO: 25367 - DNA, 25 bp, SARS Virus
tcctagaatacccacgaatacacct

SEQ ID NO: 25368 - DNA, 25 bp, SARS Virus
cctagaataccgccgaatacacctt

SEQ ID NO: 25369 - DNA, 25 bp, SARS Virus
ctagaataccgacgaatacaccttt

SEQ ID NO: 25370 - DNA, 25 bp, SARS Virus
tagaataccgaccaatacacctttt

SEQ ID NO: 25371 - DNA, 25 bp, SARS Virus
agaataccgacgcatacaccttttg

SEQ ID NO: 25372 - DNA, 25 bp, SARS Virus
gaataccgacgactacaccttttgt

SEQ ID NO: 25373 - DNA, 25 bp, SARS Virus
aataccgacgaacacaccttttgtg

SEQ ID NO: 25374 - DNA, 25 bp, SARS Virus
ataccgacgaatccaccttttgtgt

SEQ ID NO: 25375 - DNA, 25 bp, SARS Virus
taccgacgaatacaccttttgtgtt

SEQ ID NO: 25376 - DNA, 25 bp, SARS Virus
accgacgaataccccttttgtgttc

SEQ ID NO: 25377 - DNA, 25 bp, SARS Virus
ccgacgaatacaccttttgtgttcg

SEQ ID NO: 25378 - DNA, 25 bp, SARS Virus
cgacgaatacaccttttgtgttcgt

SEQ ID NO: 25379 - DNA, 25 bp, SARS Virus
gacgaatacaccctttgtgttcgta

SEQ ID NO: 25380 - DNA, 25 bp, SARS Virus
acgaatacacctcttgtgttcgtaa

SEQ ID NO: 25381 - DNA, 25 bp, SARS Virus
cgaatacaccttctgtgttcgtaat

SEQ ID NO: 25382 - DNA, 25 bp, SARS Virus
gaatacacctttcgtgttcgtaatg

SEQ ID NO: 25383 - DNA, 25 bp, SARS Virus
aatacaccttttctgttcgtaatgg

SEQ ID NO: 25384 - DNA, 25 bp, SARS Virus
atacaccttttgcgttcgtaatggt

SEQ ID NO: 25385 - DNA, 25 bp, SARS Virus
tacaccttttgtcttcgtaatggta

SEQ ID NO: 25386 - DNA, 25 bp, SARS Virus
acaccttttgtgctcgtaatggtaa

SEQ ID NO: 25387 - DNA, 25 bp, SARS Virus
caccttttgtgtccgtaatggtaat

SEQ ID NO: 25388 - DNA, 25 bp, SARS Virus
accttttgtgttcgtaatggtaatt

SEQ ID NO: 25389 - DNA, 25 bp, SARS Virus
ccttttgtgttcctaatggtaattc

SEQ ID NO: 25390 - DNA, 25 bp, SARS Virus
cttttgtgttcgcaatggtaattct

SEQ ID NO: 25391 - DNA, 25 bp, SARS Virus
ttttgtgttcgtcatggtaattctt

SEQ ID NO: 25392 - DNA, 25 bp, SARS Virus
tttgtgttcgtactggtaattcttt

SEQ ID NO: 25393 - DNA, 25 bp, SARS Virus
ttgtgttcgtaacggtaattctttg

SEQ ID NO: 25394 - DNA, 25 bp, SARS Virus
tgtgttcgtaatcgtaattctttgg

SEQ ID NO: 25395 - DNA, 25 bp, SARS Virus
gtgttcgtaatgctaattctttgga

SEQ ID NO: 25396 - DNA, 25 bp, SARS Virus
tgttcgtaatggcaattctttggat

SEQ ID NO: 25397 - DNA, 25 bp, SARS Virus
gttcgtaatggtcattctttggatt

SEQ ID NO: 25398 - DNA, 25 bp, SARS Virus
ttcgtaatggtacttctttggatta

SEQ ID NO: 25399 - DNA, 25 bp, SARS Virus
tcgtaatggtaactctttggattac

SEQ ID NO: 25400 - DNA, 25 bp, SARS Virus
cgtaatggtaatcctttggattact

SEQ ID NO: 25401 - DNA, 25 bp, SARS Virus
gtaatggtaattctttggattactc

SEQ ID NO: 25402 - DNA, 25 bp, SARS Virus
taatggtaattccttggattactcg

SEQ ID NO: 25403 - DNA, 25 bp, SARS Virus
aatggtaattctctggattactcga

SEQ ID NO: 25404 - DNA, 25 bp, SARS Virus
atggtaattcttcggattactcgaa

SEQ ID NO: 25405 - DNA, 25 bp, SARS Virus
tggtaattctttcgattactcgaaa

SEQ ID NO: 25406 - DNA, 25 bp, SARS Virus
ggtaattctttgcattactcgaaag

SEQ ID NO: 25407 - DNA, 25 bp, SARS Virus
gtaattctttggcttactcgaaagt

SEQ ID NO: 25408 - DNA, 25 bp, SARS Virus
taattctttggactactcgaaagtg

SEQ ID NO: 25409 - DNA, 25 bp, SARS Virus
aattctttggatcactcgaaagtga

SEQ ID NO: 25410 - DNA, 25 bp, SARS Virus
attctttggattcctcgaaagtgat

SEQ ID NO: 25411 - DNA, 25 bp, SARS Virus
ttctttggattactcgaaagtgatc

SEQ ID NO: 25412 - DNA, 25 bp, SARS Virus
tctttggattacccgaaagtgatcg

SEQ ID NO: 25413 - DNA, 25 bp, SARS Virus
ctttggattactcgaaagtgatcgg

SEQ ID NO: 25414 - DNA, 25 bp, SARS Virus
tttggattactccaaagtgatcgga

SEQ ID NO: 25415 - DNA, 25 bp, SARS Virus
ttggattactcgcaagtgatcggaa

SEQ ID NO: 25416 - DNA, 25 bp, SARS Virus
tggattactcgacagtgatcggaat

SEQ ID NO: 25417 - DNA, 25 bp, SARS Virus
ggattactcgaacgtgatcggaatc

SEQ ID NO: 25418 - DNA, 25 bp, SARS Virus
gattactcgaaactgatcggaatcc

SEQ ID NO: 25419 - DNA, 25 bp, SARS Virus
attactcgaaagcgatcggaatcca

SEQ ID NO: 25420 - DNA, 25 bp, SARS Virus
ttactcgaaagtcatcggaatccaa

SEQ ID NO: 25421 - DNA, 25 bp, SARS Virus
tactcgaaagtgctcggaatccaaa

SEQ ID NO: 25422 - DNA, 25 bp, SARS Virus
actcgaaagtgaccggaatccaaat

SEQ ID NO: 25423 - DNA, 25 bp, SARS Virus
ctcgaaagtgatcggaatccaaatt

SEQ ID NO: 25424 - DNA, 25 bp, SARS Virus
tcgaaagtgatccgaatccaaattt

SEQ ID NO: 25425 - DNA, 25 bp, SARS Virus
cgaaagtgatcgcaatccaaatttt

SEQ ID NO: 25426 - DNA, 25 bp, SARS Virus
gaaagtgatcggcatccaaattttt

SEQ ID NO: 25427 - DNA, 25 bp, SARS Virus
aaagtgatcggactccaaatttttg

SEQ ID NO: 25428 - DNA, 25 bp, SARS Virus
aagtgatcggaacccaaatttttgt

SEQ ID NO: 25429 - DNA, 25 bp, SARS Virus
agtgatcggaatccaaatttttgtt

SEQ ID NO: 25430 - DNA, 25 bp, SARS Virus
gtgatcggaatccaaatttttgtta

SEQ ID NO: 25431 - DNA, 25 bp, SARS Virus
tgatcggaatcccaatttttgttaa

SEQ ID NO: 25432 - DNA, 25 bp, SARS Virus
gatcggaatccacatttttgttaac

SEQ ID NO: 25433 - DNA, 25 bp, SARS Virus
atcggaatccaactttttgttaacg

SEQ ID NO: 25434 - DNA, 25 bp, SARS Virus
tcggaatccaaacttttgttaacgg

SEQ ID NO: 25435 - DNA, 25 bp, SARS Virus
cggaatccaaatctttgttaacggt

SEQ ID NO: 25436 - DNA, 25 bp, SARS Virus
ggaatccaaattcttgttaacggtg

SEQ ID NO: 25437 - DNA, 25 bp, SARS Virus
gaatccaaatttctgttaacggtga

SEQ ID NO: 25438 - DNA, 25 bp, SARS Virus
aatccaaattttcgttaacggtgag

SEQ ID NO: 25439 - DNA, 25 bp, SARS Virus
atccaaatttttcttaacggtgagt

SEQ ID NO: 25440 - DNA, 25 bp, SARS Virus
tccaaatttttgctaacggtgagta

SEQ ID NO: 25441 - DNA, 25 bp, SARS Virus
ccaaatttttgtcaacggtgagtac

SEQ ID NO: 25442 - DNA, 25 bp, SARS Virus
caaatttttgttcacggtgagtacc

SEQ ID NO: 25443 - DNA, 25 bp, SARS Virus
aaatttttgttaccggtgagtacca

SEQ ID NO: 25444 - DNA, 25 bp, SARS Virus
aatttttgttaacggtgagtaccat

SEQ ID NO: 25445 - DNA, 25 bp, SARS Virus
atttttgttaaccgtgagtaccata

SEQ ID NO: 25446 - DNA, 25 bp, SARS Virus
tttttgttaacgctgagtaccataa

SEQ ID NO: 25447 - DNA, 25 bp, SARS Virus
ttttgttaacggcgagtaccataac

SEQ ID NO: 25448 - DNA, 25 bp, SARS Virus
tttgttaacggtcagtaccataacg

SEQ ID NO: 25449 - DNA, 25 bp, SARS Virus
ttgttaacggtgcgtaccataacga

SEQ ID NO: 25450 - DNA, 25 bp, SARS Virus
tgttaacggtgactaccataacgac

SEQ ID NO: 25451 - DNA, 25 bp, SARS Virus
gttaacggtgagcaccataacgacg

SEQ ID NO: 25452 - DNA, 25 bp, SARS Virus
ttaacggtgagtcccataacgacgt

SEQ ID NO: 25453 - DNA, 25 bp, SARS Virus
taacggtgagtaccataacgacgtt

SEQ ID NO: 25454 - DNA, 25 bp, SARS Virus
aacggtgagtaccataacgacgtta

SEQ ID NO: 25455 - DNA, 25 bp, SARS Virus
acggtgagtaccctaacgacgttaa

SEQ ID NO: 25456 - DNA, 25 bp, SARS Virus
cggtgagtaccacaacgacgttaat

SEQ ID NO: 25457 - DNA, 25 bp, SARS Virus
ggtgagtaccatcacgacgttaatt

SEQ ID NO: 25458 - DNA, 25 bp, SARS Virus
gtgagtaccataccgacgttaatta

SEQ ID NO: 25459 - DNA, 25 bp, SARS Virus
tgagtaccataacgacgttaattat

SEQ ID NO: 25460 - DNA, 25 bp, SARS Virus
gagtaccataaccacgttaattatc

SEQ ID NO: 25461 - DNA, 25 bp, SARS Virus
agtaccataacgccgttaattatca

SEQ ID NO: 25462 - DNA, 25 bp, SARS Virus
gtaccataacgacgttaattatcac

SEQ ID NO: 25463 - DNA, 25 bp, SARS Virus
taccataacgaccttaattatcaca

SEQ ID NO: 25464 - DNA, 25 bp, SARS Virus
accataacgacgctaattatcacaa

SEQ ID NO: 25465 - DNA, 25 bp, SARS Virus
ccataacgacgtcaattatcacaag

SEQ ID NO: 25466 - DNA, 25 bp, SARS Virus
cataacgacgttcattatcacaagg

SEQ ID NO: 25467 - DNA, 25 bp, SARS Virus
ataacgacgttacttatcacaagga

SEQ ID NO: 25468 - DNA, 25 bp, SARS Virus
taacgacgttaactatcacaaggaa

SEQ ID NO: 25469 - DNA, 25 bp, SARS Virus
aacgacgttaatcatcacaaggaac

SEQ ID NO: 25470 - DNA, 25 bp, SARS Virus
acgacgttaattctcacaaggaacc

SEQ ID NO: 25471 - DNA, 25 bp, SARS Virus
cgacgttaattaccacaaggaacct

SEQ ID NO: 25472 - DNA, 25 bp, SARS Virus
gacgttaattatcacaaggaacctc

SEQ ID NO: 25473 - DNA, 25 bp, SARS Virus
acgttaattatcccaaggaacctca

SEQ ID NO: 25474 - DNA, 25 bp, SARS Virus
cgttaattatcacaaggaacctcat

SEQ ID NO: 25475 - DNA, 25 bp, SARS Virus
gttaattatcaccaggaacctcatt

SEQ ID NO: 25476 - DNA, 25 bp, SARS Virus
ttaattatcacacggaacctcattt

SEQ ID NO: 25477 - DNA, 25 bp, SARS Virus
taattatcacaacgaacctcatttt

SEQ ID NO: 25478 - DNA, 25 bp, SARS Virus
aattatcacaagcaacctcatttta

SEQ ID NO: 25479 - DNA, 25 bp, SARS Virus
attatcacaaggcacctcattttaa

SEQ ID NO: 25480 - DNA, 25 bp, SARS Virus
ttatcacaaggaccctcattttaaa

SEQ ID NO: 25481 - DNA, 25 bp, SARS Virus
tatcacaaggaacctcattttaaaa

SEQ ID NO: 25482 - DNA, 25 bp, SARS Virus
atcacaaggaacctcattttaaaac

SEQ ID NO: 25483 - DNA, 25 bp, SARS Virus
tcacaaggaaccccattttaaaacc

SEQ ID NO: 25484 - DNA, 25 bp, SARS Virus
cacaaggaacctcattttaaaaccg

SEQ ID NO: 25485 - DNA, 25 bp, SARS Virus
acaaggaacctccttttaaaaccga

SEQ ID NO: 25486 - DNA, 25 bp, SARS Virus
caaggaacctcactttaaaaccgaa

SEQ ID NO: 25487 - DNA, 25 bp, SARS Virus
aaggaacctcatcttaaaaccgaat

SEQ ID NO: 25488 - DNA, 25 bp, SARS Virus
aggaacctcattctaaaaccgaata

SEQ ID NO: 25489 - DNA, 25 bp, SARS Virus
ggaacctcatttcaaaaccgaatac

SEQ ID NO: 25490 - DNA, 25 bp, SARS Virus
gaacctcattttcaaaccgaataca

SEQ ID NO: 25491 - DNA, 25 bp, SARS Virus
aacctcattttacaaccgaatacag

SEQ ID NO: 25492 - DNA, 25 bp, SARS Virus
acctcattttaacaccgaatacagt

SEQ ID NO: 25493 - DNA, 25 bp, SARS Virus
cctcattttaaacccgaatacagtt

SEQ ID NO: 25494 - DNA, 25 bp, SARS Virus
ctcattttaaaaccgaatacagttt

SEQ ID NO: 25495 - DNA, 25 bp, SARS Virus
tcattttaaaaccgaatacagtttg

SEQ ID NO: 25496 - DNA, 25 bp, SARS Virus
cattttaaaacccaatacagtttgg

SEQ ID NO: 25497 - DNA, 25 bp, SARS Virus
attttaaaaccgcatacagtttggt

SEQ ID NO: 25498 - DNA, 25 bp, SARS Virus
ttttaaaaccgactacagtttggta

SEQ ID NO: 25499 - DNA, 25 bp, SARS Virus
tttaaaaccgaacacagtttggtaa

SEQ ID NO: 25500 - DNA, 25 bp, SARS Virus
ttaaaaccgaatccagtttggtaag

SEQ ID NO: 25501 - DNA, 25 bp, SARS Virus
taaaaccgaatacagtttggtaaga

SEQ ID NO: 25502 - DNA, 25 bp, SARS Virus
aaaaccgaataccgtttggtaagaa

SEQ ID NO: 25503 - DNA, 25 bp, SARS Virus
aaaccgaatacactttggtaagaat

SEQ ID NO: 25504 - DNA, 25 bp, SARS Virus
aaccgaatacagcttggtaagaatc

SEQ ID NO: 25505 - DNA, 25 bp, SARS Virus
tcgctcaaagttgtttccacgattt

SEQ ID NO: 25506 - DNA, 25 bp, SARS Virus
cgctcaaagttcgttccacgattta

SEQ ID NO: 25507 - DNA, 25 bp, SARS Virus
gctcaaagttctgtccacgatttaa

SEQ ID NO: 25508 - DNA, 25 bp, SARS Virus
ctcaaagttcttgccacgatttaat

SEQ ID NO: 25509 - DNA, 25 bp, SARS Virus
tcaaagttctttgcacgatttaatg

SEQ ID NO: 25510 - DNA, 25 bp, SARS Virus
caaagttctttcgacgatttaatga

SEQ ID NO: 25511 - DNA, 25 bp, SARS Virus
aaagttctttccgcgatttaatgac

SEQ ID NO: 25512 - DNA, 25 bp, SARS Virus
aagttctttccaggatttaatgacg

SEQ ID NO: 25513 - DNA, 25 bp, SARS Virus
agttctttccacgatttaatgacgt

SEQ ID NO: 25514 - DNA, 25 bp, SARS Virus
gttctttccacggtttaatgacgta

SEQ ID NO: 25515 - DNA, 25 bp, SARS Virus
ttctttccacgagttaatgacgtat

SEQ ID NO: 25516 - DNA, 25 bp, SARS Virus
tctttccacgatgtaatgacgtatt

SEQ ID NO: 25517 - DNA, 25 bp, SARS Virus
ctttccacgattgaatgacgtattc

SEQ ID NO: 25518 - DNA, 25 bp, SARS Virus
tttccacgatttgatgacgtattcg

SEQ ID NO: 25519 - DNA, 25 bp, SARS Virus
ttccacgatttagtgacgtattcgg

SEQ ID NO: 25520 - DNA, 25 bp, SARS Virus
tccacgatttaaggacgtattcggt

SEQ ID NO: 25521 - DNA, 25 bp, SARS Virus
ccacgatttaatgacgtattcggtt

SEQ ID NO: 25522 - DNA, 25 bp, SARS Virus
cacgatttaatggcgtattcggtta

SEQ ID NO: 25523 - DNA, 25 bp, SARS Virus
acgatttaatgaggtattcggttaa

SEQ ID NO: 25524 - DNA, 25 bp, SARS Virus
cgatttaatgacgtattcggttaac

SEQ ID NO: 25525 - DNA, 25 bp, SARS Virus
gatttaatgacggattcggttaaca

SEQ ID NO: 25526 - DNA, 25 bp, SARS Virus
atttaatgacgtgttcggttaacaa

SEQ ID NO: 25527 - DNA, 25 bp, SARS Virus
tttaatgacgtagtcggttaacaaa

SEQ ID NO: 25528 - DNA, 25 bp, SARS Virus
ttaatgacgtatgcggttaacaaac

SEQ ID NO: 25529 - DNA, 25 bp, SARS Virus
taatgacgtattgggttaacaaacc

SEQ ID NO: 25530 - DNA, 25 bp, SARS Virus
aatgacgtattcggttaacaaaccg

SEQ ID NO: 25531 - DNA, 25 bp, SARS Virus
atgacgtattcggttaacaaaccgt

SEQ ID NO: 25532 - DNA, 25 bp, SARS Virus
tgacgtattcgggtaacaaaccgtg

SEQ ID NO: 25533 - DNA, 25 bp, SARS Virus
gacgtattcggtgaacaaaccgtgt

SEQ ID NO: 25534 - DNA, 25 bp, SARS Virus
acgtattcggttgacaaaccgtgta

SEQ ID NO: 25535 - DNA, 25 bp, SARS Virus
cgtattcggttagcaaaccgtgtaa

SEQ ID NO: 25536 - DNA, 25 bp, SARS Virus
gtattcggttaagaaaccgtgtaat

SEQ ID NO: 25537 - DNA, 25 bp, SARS Virus
tattcggttaacgaaccgtgtaatt

SEQ ID NO: 25538 - DNA, 25 bp, SARS Virus
attcggttaacagaccgtgtaattg

SEQ ID NO: 25539 - DNA, 25 bp, SARS Virus
ttcggttaacaagccgtgtaattgg

SEQ ID NO: 25540 - DNA, 25 bp, SARS Virus
tcggttaacaaagcgtgtaattggt

SEQ ID NO: 25541 - DNA, 25 bp, SARS Virus
cggttaacaaacggtgtaattggtc

SEQ ID NO: 25542 - DNA, 25 bp, SARS Virus
ggttaacaaaccgtgtaattggtcc

SEQ ID NO: 25543 - DNA, 25 bp, SARS Virus
gttaacaaaccgggtaattggtccg

SEQ ID NO: 25544 - DNA, 25 bp, SARS Virus
ttaacaaaccgtgtaattggtccga

SEQ ID NO: 25545 - DNA, 25 bp, SARS Virus
taacaaaccgtggaattggtccgat

SEQ ID NO: 25546 - DNA, 25 bp, SARS Virus
aacaaaccgtgtgattggtccgatg

SEQ ID NO: 25547 - DNA, 25 bp, SARS Virus
acaaaccgtgtagttggtccgatgt

SEQ ID NO: 25548 - DNA, 25 bp, SARS Virus
caaaccgtgtaagtggtccgatgtt

SEQ ID NO: 25549 - DNA, 25 bp, SARS Virus
aaaccgtgtaatgggtccgatgttg

SEQ ID NO: 25550 - DNA, 25 bp, SARS Virus
aaccgtgtaattggtccgatgttgg

SEQ ID NO: 25551 - DNA, 25 bp, SARS Virus
accgtgtaattggtccgatgttggt

SEQ ID NO: 25552 - DNA, 25 bp, SARS Virus
ccgtgtaattgggccgatgttggtt

SEQ ID NO: 25553 - DNA, 25 bp, SARS Virus
cgtgtaattggtgcgatgttggttc

SEQ ID NO: 25554 - DNA, 25 bp, SARS Virus
gtgtaattggtcggatgttggttct

SEQ ID NO: 25555 - DNA, 25 bp, SARS Virus
tgtaattggtccgatgttggttctg

SEQ ID NO: 25556 - DNA, 25 bp, SARS Virus
gtaattggtccggtgttggttctgt

SEQ ID NO: 25557 - DNA, 25 bp, SARS Virus
taattggtccgaggttggttctgtt

SEQ ID NO: 25558 - DNA, 25 bp, SARS Virus
aattggtccgatgttggttctgttg

SEQ ID NO: 25559 - DNA, 25 bp, SARS Virus
attggtccgatggtggttctgttgc

SEQ ID NO: 25560 - DNA, 25 bp, SARS Virus
ttggtccgatgtgggttctgttgca

SEQ ID NO: 25561 - DNA, 25 bp, SARS Virus
tggtccgatgttggttctgttgcaa

SEQ ID NO: 25562 - DNA, 25 bp, SARS Virus
ggtccgatgttggttctgttgcaag

SEQ ID NO: 25563 - DNA, 25 bp, SARS Virus
gtccgatgttgggtctgttgcaagt

SEQ ID NO: 25564 - DNA, 25 bp, SARS Virus
tccgatgttggtgctgttgcaagtt

SEQ ID NO: 25565 - DNA, 25 bp, SARS Virus
ccgatgttggttgtgttgcaagttt

SEQ ID NO: 25566 - DNA, 25 bp, SARS Virus
cgatgttggttcggttgcaagtttg

SEQ ID NO: 25567 - DNA, 25 bp, SARS Virus
gatgttggttctgttgcaagtttgg

SEQ ID NO: 25568 - DNA, 25 bp, SARS Virus
atgttggttctggtgcaagtttggt

SEQ ID NO: 25569 - DNA, 25 bp, SARS Virus
tgttggttctgtggcaagtttggtt

SEQ ID NO: 25570 - DNA, 25 bp, SARS Virus
gttggttctgttgcaagtttggttt

SEQ ID NO: 25571 - DNA, 25 bp, SARS Virus
ttggttctgttggaagtttggtttg

SEQ ID NO: 25572 - DNA, 25 bp, SARS Virus
tggttctgttgcgagtttggtttgt

SEQ ID NO: 25573 - DNA, 25 bp, SARS Virus
ggttctgttgcaggtttggtttgtg

SEQ ID NO: 25574 - DNA, 25 bp, SARS Virus
gttctgttgcaagtttggtttgtga

SEQ ID NO: 25575 - DNA, 25 bp, SARS Virus
ttctgttgcaaggttggtttgtgaa

SEQ ID NO: 25576 - DNA, 25 bp, SARS Virus
tctgttgcaagtgtggtttgtgaac

SEQ ID NO: 25577 - DNA, 25 bp, SARS Virus
ctgttgcaagttgggtttgtgaacc

SEQ ID NO: 25578 - DNA, 25 bp, SARS Virus
tgttgcaagtttggtttgtgaacca

SEQ ID NO: 25579 - DNA, 25 bp, SARS Virus
gttgcaagtttggtttgtgaaccac

SEQ ID NO: 25580 - DNA, 25 bp, SARS Virus
ttgcaagtttgggttgtgaaccaca

SEQ ID NO: 25581 - DNA, 25 bp, SARS Virus
tgcaagtttggtgtgtgaaccacaa

SEQ ID NO: 25582 - DNA, 25 bp, SARS Virus
gcaagtttggttggtgaaccacaaa

SEQ ID NO: 25583 - DNA, 25 bp, SARS Virus
caagtttggtttgtgaaccacaaat

SEQ ID NO: 25584 - DNA, 25 bp, SARS Virus
aagtttggtttgggaaccacaaatg

SEQ ID NO: 25585 - DNA, 25 bp, SARS Virus
agtttggtttgtgaaccacaaatgc

SEQ ID NO: 25586 - DNA, 25 bp, SARS Virus
gtttggtttgtggaccacaaatgca

SEQ ID NO: 25587 - DNA, 25 bp, SARS Virus
tttggtttgtgagccacaaatgcaa

SEQ ID NO: 25588 - DNA, 25 bp, SARS Virus
ttggtttgtgaagcacaaatgcaac

SEQ ID NO: 25589 - DNA, 25 bp, SARS Virus
tggtttgtgaacgacaaatgcaaca

SEQ ID NO: 25590 - DNA, 25 bp, SARS Virus
ggtttgtgaaccgcaaatgcaacag

SEQ ID NO: 25591 - DNA, 25 bp, SARS Virus
gtttgtgaaccagaaatgcaacaga

SEQ ID NO: 25592 - DNA, 25 bp, SARS Virus
tttgtgaaccacgaatgcaacagaa

SEQ ID NO: 25593 - DNA, 25 bp, SARS Virus
ttgtgaaccacagatgcaacagaaa

SEQ ID NO: 25594 - DNA, 25 bp, SARS Virus
tgtgaaccacaagtgcaacagaaac

SEQ ID NO: 25595 - DNA, 25 bp, SARS Virus
gtgaaccacaaaggcaacagaaacc

SEQ ID NO: 25596 - DNA, 25 bp, SARS Virus
tgaaccacaaatgcaacagaaacct

SEQ ID NO: 25597 - DNA, 25 bp, SARS Virus
gaaccacaaatggaacagaaacctc

SEQ ID NO: 25598 - DNA, 25 bp, SARS Virus
aaccacaaatgcgacagaaacctca

SEQ ID NO: 25599 - DNA, 25 bp, SARS Virus
accacaaatgcagcagaaacctcat

SEQ ID NO: 25600 - DNA, 25 bp, SARS Virus
ccacaaatgcaagagaaacctcatg

SEQ ID NO: 25601 - DNA, 25 bp, SARS Virus
cacaaatgcaacggaaacctcatgt

SEQ ID NO: 25602 - DNA, 25 bp, SARS Virus
acaaatgcaacagaaacctcatgtt

SEQ ID NO: 25603 - DNA, 25 bp, SARS Virus
caaatgcaacaggaacctcatgttt

SEQ ID NO: 25604 - DNA, 25 bp, SARS Virus
aaatgcaacagagacctcatgtttc

SEQ ID NO: 25605 - DNA, 25 bp, SARS Virus
aatgcaacagaagcctcatgtttcg

SEQ ID NO: 25606 - DNA, 25 bp, SARS Virus
atgcaacagaaagctcatgtttcgg

SEQ ID NO: 25607 - DNA, 25 bp, SARS Virus
tgcaacagaaacgtcatgtttcggt

SEQ ID NO: 25608 - DNA, 25 bp, SARS Virus
gcaacagaaaccgcatgtttcggtc

SEQ ID NO: 25609 - DNA, 25 bp, SARS Virus
caacagaaacctgatgtttcggtca

SEQ ID NO: 25610 - DNA, 25 bp, SARS Virus
aacagaaacctcgtgtttcggtcat

SEQ ID NO: 25611 - DNA, 25 bp, SARS Virus
acagaaacctcaggtttcggtcatc

SEQ ID NO: 25612 - DNA, 25 bp, SARS Virus
cagaaacctcatgtttcggtcatct

SEQ ID NO: 25613 - DNA, 25 bp, SARS Virus
agaaacctcatggttcggtcatcta

SEQ ID NO: 25614 - DNA, 25 bp, SARS Virus
gaaacctcatgtgtcggtcatctat

SEQ ID NO: 25615 - DNA, 25 bp, SARS Virus
aaacctcatgttgcggtcatctatg

SEQ ID NO: 25616 - DNA, 25 bp, SARS Virus
aacctcatgtttgggtcatctatga

SEQ ID NO: 25617 - DNA, 25 bp, SARS Virus
acctcatgtttcggtcatctatgaa

SEQ ID NO: 25618 - DNA, 25 bp, SARS Virus
cctcatgtttcggtcatctatgaag

SEQ ID NO: 25619 - DNA, 25 bp, SARS Virus
ctcatgtttcgggcatctatgaagt

SEQ ID NO: 25620 - DNA, 25 bp, SARS Virus
tcatgtttcggtgatctatgaagtt

SEQ ID NO: 25621 - DNA, 25 bp, SARS Virus
catgtttcggtcgtctatgaagttt

SEQ ID NO: 25622 - DNA, 25 bp, SARS Virus
atgtttcggtcagctatgaagttta

SEQ ID NO: 25623 - DNA, 25 bp, SARS Virus
tgtttcggtcatgtatgaagtttaa

SEQ ID NO: 25624 - DNA, 25 bp, SARS Virus
gtttcggtcatcgatgaagtttaag

SEQ ID NO: 25625 - DNA, 25 bp, SARS Virus
tttcggtcatctgtgaagtttaagt

SEQ ID NO: 25626 - DNA, 25 bp, SARS Virus
ttcggtcatctaggaagtttaagta

SEQ ID NO: 25627 - DNA, 25 bp, SARS Virus
tcggtcatctatgaagtttaagtaa

SEQ ID NO: 25628 - DNA, 25 bp, SARS Virus
cggtcatctatggagtttaagtaaa

SEQ ID NO: 25629 - DNA, 25 bp, SARS Virus
ggtcatctatgaggtttaagtaaac

SEQ ID NO: 25630 - DNA, 25 bp, SARS Virus
gtcatctatgaagtttaagtaaact

SEQ ID NO: 25631 - DNA, 25 bp, SARS Virus
tcatctatgaaggttaagtaaactt

SEQ ID NO: 25632 - DNA, 25 bp, SARS Virus
catctatgaagtgtaagtaaacttc

SEQ ID NO: 25633 - DNA, 25 bp, SARS Virus
atctatgaagttgaagtaaacttca

SEQ ID NO: 25634 - DNA, 25 bp, SARS Virus
tctatgaagtttgagtaaacttcaa

SEQ ID NO: 25635 - DNA, 25 bp, SARS Virus
ctatgaagtttaggtaaacttcaag

SEQ ID NO: 25636 - DNA, 25 bp, SARS Virus
tatgaagtttaagtaaacttcaaga

SEQ ID NO: 25637 - DNA, 25 bp, SARS Virus
atgaagtttaaggaaacttcaagac

SEQ ID NO: 25638 - DNA, 25 bp, SARS Virus
tgaagtttaagtgaacttcaagacc

SEQ ID NO: 25639 - DNA, 25 bp, SARS Virus
gaagtttaagtagacttcaagaccg

SEQ ID NO: 25640 - DNA, 25 bp, SARS Virus
aagtttaagtaagcttcaagaccgt

SEQ ID NO: 25641 - DNA, 25 bp, SARS Virus
agtttaagtaaagttcaagaccgtc

SEQ ID NO: 25642 - DNA, 25 bp, SARS Virus
gtttaagtaaacgtcaagaccgtca

SEQ ID NO: 25643 - DNA, 25 bp, SARS Virus
tttaagtaaactgcaagaccgtcat

SEQ ID NO: 25644 - DNA, 25 bp, SARS Virus
ttaagtaaacttgaagaccgtcatc

SEQ ID NO: 25645 - DNA, 25 bp, SARS Virus
taagtaaacttcgagaccgtcatct

SEQ ID NO: 25646 - DNA, 25 bp, SARS Virus
aagtaaacttcaggaccgtcatctt

SEQ ID NO: 25647 - DNA, 25 bp, SARS Virus
agtaaacttcaagaccgtcatcttc

SEQ ID NO: 25648 - DNA, 25 bp, SARS Virus
gtaaacttcaaggccgtcatcttct

SEQ ID NO: 25649 - DNA, 25 bp, SARS Virus
taaacttcaagagcgtcatcttctg

SEQ ID NO: 25650 - DNA, 25 bp, SARS Virus
aaacttcaagacggtcatcttctgt

SEQ ID NO: 25651 - DNA, 25 bp, SARS Virus
aacttcaagaccgtcatcttctgtg

SEQ ID NO: 25652 - DNA, 25 bp, SARS Virus
acttcaagaccggcatcttctgtgt

SEQ ID NO: 25653 - DNA, 25 bp, SARS Virus
cttcaagaccgtgatcttctgtgtg

SEQ ID NO: 25654 - DNA, 25 bp, SARS Virus
ttcaagaccgtcgtcttctgtgtgt

SEQ ID NO: 25655 - DNA, 25 bp, SARS Virus
tcaagaccgtcagcttctgtgtgtt

SEQ ID NO: 25656 - DNA, 25 bp, SARS Virus
caagaccgtcatgttctgtgtgttc

SEQ ID NO: 25657 - DNA, 25 bp, SARS Virus
aagaccgtcatcgtctgtgtgttcc

SEQ ID NO: 25658 - DNA, 25 bp, SARS Virus
agaccgtcatctgctgtgtgttcct

SEQ ID NO: 25659 - DNA, 25 bp, SARS Virus
gaccgtcatcttgtgtgtgttcctt

SEQ ID NO: 25660 - DNA, 25 bp, SARS Virus
accgtcatcttcggtgtgttcctta

SEQ ID NO: 25661 - DNA, 25 bp, SARS Virus
ccgtcatcttctgtgtgttccttac

SEQ ID NO: 25662 - DNA, 25 bp, SARS Virus
cgtcatcttctgggtgttccttacc

SEQ ID NO: 25663 - DNA, 25 bp, SARS Virus
gtcatcttctgtgtgttccttacct

SEQ ID NO: 25664 - DNA, 25 bp, SARS Virus
tcatcttctgtgggttccttacctg

SEQ ID NO: 25665 - DNA, 25 bp, SARS Virus
catcttctgtgtgttccttacctgt

SEQ ID NO: 25666 - DNA, 25 bp, SARS Virus
atcttctgtgtggtccttacctgtt

SEQ ID NO: 25667 - DNA, 25 bp, SARS Virus
tcttctgtgtgtgccttacctgtta

SEQ ID NO: 25668 - DNA, 25 bp, SARS Virus
cttctgtgtgttgcttacctgttag

SEQ ID NO: 25669 - DNA, 25 bp, SARS Virus
ttctgtgtgttcgttacctgttaga

SEQ ID NO: 25670 - DNA, 25 bp, SARS Virus
tctgtgtgttccgtacctgttagaa

SEQ ID NO: 25671 - DNA, 25 bp, SARS Virus
ctgtgtgttcctgacctgttagaac

SEQ ID NO: 25672 - DNA, 25 bp, SARS Virus
tgtgtgttccttgcctgttagaacg

SEQ ID NO: 25673 - DNA, 25 bp, SARS Virus
gtgtgttccttagctgttagaacga

SEQ ID NO: 25674 - DNA, 25 bp, SARS Virus
tgtgttccttacgtgttagaacgaa

SEQ ID NO: 25675 - DNA, 25 bp, SARS Virus
gtgttccttaccggttagaacgaac

SEQ ID NO: 25676 - DNA, 25 bp, SARS Virus
tgttccttacctgttagaacgaaca

SEQ ID NO: 25677 - DNA, 25 bp, SARS Virus
gttccttacctggtagaacgaacac

SEQ ID NO: 25678 - DNA, 25 bp, SARS Virus
ttccttacctgtgagaacgaacact

SEQ ID NO: 25679 - DNA, 25 bp, SARS Virus
tccttacctgttggaacgaacactt

SEQ ID NO: 25680 - DNA, 25 bp, SARS Virus
ccttacctgttagaacgaacacttt

SEQ ID NO: 25681 - DNA, 25 bp, SARS Virus
cttacctgttaggacgaacactttc

SEQ ID NO: 25682 - DNA, 25 bp, SARS Virus
ttacctgttagagcgaacactttca

SEQ ID NO: 25683 - DNA, 25 bp, SARS Virus
tacctgttagaaggaacactttcag

SEQ ID NO: 25684 - DNA, 25 bp, SARS Virus
acctgttagaacgaacactttcagt

SEQ ID NO: 25685 - DNA, 25 bp, SARS Virus
cctgttagaacggacactttcagtt

SEQ ID NO: 25686 - DNA, 25 bp, SARS Virus
ctgttagaacgagcactttcagttg

SEQ ID NO: 25687 - DNA, 25 bp, SARS Virus
tgttagaacgaagactttcagttgt

SEQ ID NO: 25688 - DNA, 25 bp, SARS Virus
gttagaacgaacgctttcagttgtt

SEQ ID NO: 25689 - DNA, 25 bp, SARS Virus
ttagaacgaacagtttcagttgttg

SEQ ID NO: 25690 - DNA, 25 bp, SARS Virus
tagaacgaacacgttcagttgttgg

SEQ ID NO: 25691 - DNA, 25 bp, SARS Virus
agaacgaacactgtcagttgttggg

SEQ ID NO: 25692 - DNA, 25 bp, SARS Virus
gaacgaacacttgcagttgttgggt

SEQ ID NO: 25693 - DNA, 25 bp, SARS Virus
aacgaacactttgagttgttgggtg

SEQ ID NO: 25694 - DNA, 25 bp, SARS Virus
acgaacactttcggttgttgggtgg

SEQ ID NO: 25695 - DNA, 25 bp, SARS Virus
cgaacactttcagttgttgggtgga

SEQ ID NO: 25696 - DNA, 25 bp, SARS Virus
gaacactttcaggtgttgggtggag

SEQ ID NO: 25697 - DNA, 25 bp, SARS Virus
aacactttcagtggttgggtggaga

SEQ ID NO: 25698 - DNA, 25 bp, SARS Virus
acactttcagttgttgggtggagac

SEQ ID NO: 25699 - DNA, 25 bp, SARS Virus
cactttcagttggtgggtggagact

SEQ ID NO: 25700 - DNA, 25 bp, SARS Virus
actttcagttgtggggtggagactt

SEQ ID NO: 25701 - DNA, 25 bp, SARS Virus
ctttcagttgttgggtggagacttc

SEQ ID NO: 25702 - DNA, 25 bp, SARS Virus
tttcagttgttgggtggagacttct

SEQ ID NO: 25703 - DNA, 25 bp, SARS Virus
ttcagttgttgggtggagacttctt

SEQ ID NO: 25704 - DNA, 25 bp, SARS Virus
tcagttgttggggggagacttcttc

SEQ ID NO: 25705 - DNA, 25 bp, SARS Virus
cagttgttgggtggagacttcttca

SEQ ID NO: 25706 - DNA, 25 bp, SARS Virus
agttgttgggtggagacttcttcat

SEQ ID NO: 25707 - DNA, 25 bp, SARS Virus
gttgttgggtggggacttcttcatc

SEQ ID NO: 25708 - DNA, 25 bp, SARS Virus
ttgttgggtggagacttcttcatca

SEQ ID NO: 25709 - DNA, 25 bp, SARS Virus
tgttgggtggaggcttcttcatcac

SEQ ID NO: 25710 - DNA, 25 bp, SARS Virus
gttgggtggagagttcttcatcacc

SEQ ID NO: 25711 - DNA, 25 bp, SARS Virus
ttgggtggagacgtcttcatcacct

SEQ ID NO: 25712 - DNA, 25 bp, SARS Virus
tgggtggagactgcttcatcacctt

SEQ ID NO: 25713 - DNA, 25 bp, SARS Virus
gggtggagacttgttcatcaccttt

SEQ ID NO: 25714 - DNA, 25 bp, SARS Virus
ggtggagacttcgtcatcacctttt

SEQ ID NO: 25715 - DNA, 25 bp, SARS Virus
gtggagacttctgcatcacctttta

SEQ ID NO: 25716 - DNA, 25 bp, SARS Virus
tggagacttcttgatcaccttttag

SEQ ID NO: 25717 - DNA, 25 bp, SARS Virus
ggagacttcttcgtcaccttttagg

SEQ ID NO: 25718 - DNA, 25 bp, SARS Virus
gagacttcttcagcaccttttagga

SEQ ID NO: 25719 - DNA, 25 bp, SARS Virus
agacttcttcatgaccttttaggat

SEQ ID NO: 25720 - DNA, 25 bp, SARS Virus
gacttcttcatcgccttttaggatg

SEQ ID NO: 25721 - DNA, 25 bp, SARS Virus
acttcttcatcagcttttaggatgg

SEQ ID NO: 25722 - DNA, 25 bp, SARS Virus
cttcttcatcacgttttaggatggt

SEQ ID NO: 25723 - DNA, 25 bp, SARS Virus
ttcttcatcaccgtttaggatggta

SEQ ID NO: 25724 - DNA, 25 bp, SARS Virus
tcttcatcacctgttaggatggtat

SEQ ID NO: 25725 - DNA, 25 bp, SARS Virus
cttcatcaccttgtaggatggtatg

SEQ ID NO: 25726 - DNA, 25 bp, SARS Virus
ttcatcacctttgaggatggtatgt

SEQ ID NO: 25727 - DNA, 25 bp, SARS Virus
tcatcaccttttgggatggtatgtc

SEQ ID NO: 25728 - DNA, 25 bp, SARS Virus
catcaccttttaggatggtatgtct

SEQ ID NO: 25729 - DNA, 25 bp, SARS Virus
atcaccttttaggatggtatgtctt

SEQ ID NO: 25730 - DNA, 25 bp, SARS Virus
tcaccttttagggtggtatgtcttc

SEQ ID NO: 25731 - DNA, 25 bp, SARS Virus
caccttttaggagggtatgtcttcc

SEQ ID NO: 25732 - DNA, 25 bp, SARS Virus
accttttaggatggtatgtcttcct

SEQ ID NO: 25733 - DNA, 25 bp, SARS Virus
ccttttaggatggtatgtcttcctt

SEQ ID NO: 25734 - DNA, 25 bp, SARS Virus
cttttaggatgggatgtcttccttc

SEQ ID NO: 25735 - DNA, 25 bp, SARS Virus
ttttaggatggtgtgtcttccttca

SEQ ID NO: 25736 - DNA, 25 bp, SARS Virus
tttaggatggtaggtcttccttcag

SEQ ID NO: 25737 - DNA, 25 bp, SARS Virus
ttaggatggtatgtcttccttcagt

SEQ ID NO: 25738 - DNA, 25 bp, SARS Virus
taggatggtatggcttccttcagta

SEQ ID NO: 25739 - DNA, 25 bp, SARS Virus
aggatggtatgtgttccttcagtat

SEQ ID NO: 25740 - DNA, 25 bp, SARS Virus
ggatggtatgtcgtccttcagtatc

SEQ ID NO: 25741 - DNA, 25 bp, SARS Virus
gatggtatgtctgccttcagtatct

SEQ ID NO: 25742 - DNA, 25 bp, SARS Virus
atggtatgtcttgcttcagtatctc

SEQ ID NO: 25743 - DNA, 25 bp, SARS Virus
tggtatgtcttcgttcagtatctca

SEQ ID NO: 25744 - DNA, 25 bp, SARS Virus
ggtatgtcttccgtcagtatctcac

SEQ ID NO: 25745 - DNA, 25 bp, SARS Virus
gtatgtcttcctgcagtatctcaca

SEQ ID NO: 25746 - DNA, 25 bp, SARS Virus
tatgtcttccttgagtatctcacac

SEQ ID NO: 25747 - DNA, 25 bp, SARS Virus
atgtcttccttcggtatctcacact

SEQ ID NO: 25748 - DNA, 25 bp, SARS Virus
tgtcttccttcagtatctcacactg

SEQ ID NO: 25749 - DNA, 25 bp, SARS Virus
gtcttccttcaggatctcacactgc

SEQ ID NO: 25750 - DNA, 25 bp, SARS Virus
tcttccttcagtgtctcacactgca

SEQ ID NO: 25751 - DNA, 25 bp, SARS Virus
cttccttcagtagctcacactgcac

SEQ ID NO: 25752 - DNA, 25 bp, SARS Virus
ttccttcagtatgtcacactgcact

SEQ ID NO: 25753 - DNA, 25 bp, SARS Virus
tccttcagtatcgcacactgcactt

SEQ ID NO: 25754 - DNA, 25 bp, SARS Virus
ccttcagtatctgacactgcacttt

SEQ ID NO: 25755 - DNA, 25 bp, SARS Virus
cttcagtatctcgcactgcactttt

SEQ ID NO: 25756 - DNA, 25 bp, SARS Virus
ttcagtatctcagactgcacttttg

SEQ ID NO: 25757 - DNA, 25 bp, SARS Virus
tcagtatctcacgctgcacttttga

SEQ ID NO: 25758 - DNA, 25 bp, SARS Virus
cagtatctcacagtgcacttttgat

SEQ ID NO: 25759 - DNA, 25 bp, SARS Virus
agtatctcacacggcacttttgatg

SEQ ID NO: 25760 - DNA, 25 bp, SARS Virus
gtatctcacactgcacttttgatgg

SEQ ID NO: 25761 - DNA, 25 bp, SARS Virus
tatctcacactggacttttgatggc

SEQ ID NO: 25762 - DNA, 25 bp, SARS Virus
atctcacactgcgcttttgatggct

SEQ ID NO: 25763 - DNA, 25 bp, SARS Virus
tctcacactgcagttttgatggctt

SEQ ID NO: 25764 - DNA, 25 bp, SARS Virus
ctcacactgcacgtttgatggcttc

SEQ ID NO: 25765 - DNA, 25 bp, SARS Virus
tcacactgcactgttgatggcttca

SEQ ID NO: 25766 - DNA, 25 bp, SARS Virus
cacactgcacttgtgatggcttcaa

SEQ ID NO: 25767 - DNA, 25 bp, SARS Virus
acactgcactttggatggcttcaac

SEQ ID NO: 25768 - DNA, 25 bp, SARS Virus
cactgcacttttgatggcttcaaca

SEQ ID NO: 25769 - DNA, 25 bp, SARS Virus
actgcacttttggtggcttcaacat

SEQ ID NO: 25770 - DNA, 25 bp, SARS Virus
ctgcacttttgagggcttcaacatc

SEQ ID NO: 25771 - DNA, 25 bp, SARS Virus
tgcacttttgatggcttcaacatcc

SEQ ID NO: 25772 - DNA, 25 bp, SARS Virus
gcacttttgatggcttcaacatccg

SEQ ID NO: 25773 - DNA, 25 bp, SARS Virus
cacttttgatgggttcaacatccgt

SEQ ID NO: 25774 - DNA, 25 bp, SARS Virus
acttttgatggcgtcaacatccgtt

SEQ ID NO: 25775 - DNA, 25 bp, SARS Virus
cttttgatggctgcaacatccgtta

SEQ ID NO: 25776 - DNA, 25 bp, SARS Virus
ttttgatggcttgaacatccgttac

SEQ ID NO: 25777 - DNA, 25 bp, SARS Virus
tttgatggcttcgacatccgttaca

SEQ ID NO: 25778 - DNA, 25 bp, SARS Virus
ttgatggcttcagcatccgttacag

SEQ ID NO: 25779 - DNA, 25 bp, SARS Virus
tgatggcttcaagatccgttacagt

SEQ ID NO: 25780 - DNA, 25 bp, SARS Virus
gatggcttcaacgtccgttacagta

SEQ ID NO: 25781 - DNA, 25 bp, SARS Virus
atggcttcaacagccgttacagtat

SEQ ID NO: 25782 - DNA, 25 bp, SARS Virus
tggcttcaacatgcgttacagtatg

SEQ ID NO: 25783 - DNA, 25 bp, SARS Virus
ggcttcaacatcggttacagtatga

SEQ ID NO: 25784 - DNA, 25 bp, SARS Virus
gcttcaacatccgttacagtatgaa

SEQ ID NO: 25785 - DNA, 25 bp, SARS Virus
cttcaacatccggtacagtatgaat

SEQ ID NO: 25786 - DNA, 25 bp, SARS Virus
ttcaacatccgtgacagtatgaatt

SEQ ID NO: 25787 - DNA, 25 bp, SARS Virus
tcaacatccgttgcagtatgaattt

SEQ ID NO: 25788 - DNA, 25 bp, SARS Virus
caacatccgttagagtatgaatttg

SEQ ID NO: 25789 - DNA, 25 bp, SARS Virus
aacatccgttacggtatgaatttgg

SEQ ID NO: 25790 - DNA, 25 bp, SARS Virus
acatccgttacagtatgaatttggt

SEQ ID NO: 25791 - DNA, 25 bp, SARS Virus
catccgttacaggatgaatttggta

SEQ ID NO: 25792 - DNA, 25 bp, SARS Virus
atccgttacagtgtgaatttggtag

SEQ ID NO: 25793 - DNA, 25 bp, SARS Virus
tccgttacagtaggaatttggtagt

SEQ ID NO: 25794 - DNA, 25 bp, SARS Virus
ccgttacagtatgaatttggtagtc

SEQ ID NO: 25795 - DNA, 25 bp, SARS Virus
cgttacagtatggatttggtagtct

SEQ ID NO: 25796 - DNA, 25 bp, SARS Virus
gttacagtatgagtttggtagtcta

SEQ ID NO: 25797 - DNA, 25 bp, SARS Virus
ttacagtatgaagttggtagtctac

SEQ ID NO: 25798 - DNA, 25 bp, SARS Virus
tacagtatgaatgtggtagtctact

SEQ ID NO: 25799 - DNA, 25 bp, SARS Virus
acagtatgaattgggtagtctactt

SEQ ID NO: 25800 - DNA, 25 bp, SARS Virus
cagtatgaatttggtagtctacttc

SEQ ID NO: 25801 - DNA, 25 bp, SARS Virus
agtatgaatttggtagtctacttcc

SEQ ID NO: 25802 - DNA, 25 bp, SARS Virus
gtatgaatttgggagtctacttcca

SEQ ID NO: 25803 - DNA, 25 bp, SARS Virus
tatgaatttggtggtctacttccac

SEQ ID NO: 25804 - DNA, 25 bp, SARS Virus
atgaatttggtagtctacttccaca

SEQ ID NO: 25805 - DNA, 25 bp, SARS Virus
tgaatttggtaggctacttccacaa

SEQ ID NO: 25806 - DNA, 25 bp, SARS Virus
gaatttggtagtgtacttccacaat

SEQ ID NO: 25807 - DNA, 25 bp, SARS Virus
aatttggtagtcgacttccacaatt

SEQ ID NO: 25808 - DNA, 25 bp, SARS Virus
atttggtagtctgcttccacaattt

SEQ ID NO: 25809 - DNA, 25 bp, SARS Virus
tttggtagtctagttccacaatttc

SEQ ID NO: 25810 - DNA, 25 bp, SARS Virus
ttggtagtctacgtccacaatttca

SEQ ID NO: 25811 - DNA, 25 bp, SARS Virus
tggtagtctactgccacaatttcat

SEQ ID NO: 25812 - DNA, 25 bp, SARS Virus
ggtagtctacttgcacaatttcatt

SEQ ID NO: 25813 - DNA, 25 bp, SARS Virus
gtagtctacttcgacaatttcattg

SEQ ID NO: 25814 - DNA, 25 bp, SARS Virus
tagtctacttccgcaatttcattgt

SEQ ID NO: 25815 - DNA, 25 bp, SARS Virus
agtctacttccagaatttcattgtg

SEQ ID NO: 25816 - DNA, 25 bp, SARS Virus
gtctacttccacgatttcattgtgt

SEQ ID NO: 25817 - DNA, 25 bp, SARS Virus
tctacttccacagtttcattgtgtt

SEQ ID NO: 25818 - DNA, 25 bp, SARS Virus
ctacttccacaagttcattgtgttc

SEQ ID NO: 25819 - DNA, 25 bp, SARS Virus
tacttccacaatgtcattgtgttct

SEQ ID NO: 25820 - DNA, 25 bp, SARS Virus
acttccacaattgcattgtgttctc

SEQ ID NO: 25821 - DNA, 25 bp, SARS Virus
cttccacaatttgattgtgttctca

SEQ ID NO: 25822 - DNA, 25 bp, SARS Virus
ttccacaatttcgttgtgttctcaa

SEQ ID NO: 25823 - DNA, 25 bp, SARS Virus
tccacaatttcagtgtgttctcaat

SEQ ID NO: 25824 - DNA, 25 bp, SARS Virus
ccacaatttcatggtgttctcaatc

SEQ ID NO: 25825 - DNA, 25 bp, SARS Virus
cacaatttcattgtgttctcaatcc

SEQ ID NO: 25826 - DNA, 25 bp, SARS Virus
acaatttcattgggttctcaatcca

SEQ ID NO: 25827 - DNA, 25 bp, SARS Virus
caatttcattgtgttctcaatccag

SEQ ID NO: 25828 - DNA, 25 bp, SARS Virus
aatttcattgtggtctcaatccagt

SEQ ID NO: 25829 - DNA, 25 bp, SARS Virus
atttcattgtgtgctcaatccagta

SEQ ID NO: 25830 - DNA, 25 bp, SARS Virus
tttcattgtgttgtcaatccagtac

SEQ ID NO: 25831 - DNA, 25 bp, SARS Virus
ttcattgtgttcgcaatccagtact

SEQ ID NO: 25832 - DNA, 25 bp, SARS Virus
tcattgtgttctgaatccagtactc

SEQ ID NO: 25833 - DNA, 25 bp, SARS Virus
cattgtgttctcgatccagtactcc

SEQ ID NO: 25834 - DNA, 25 bp, SARS Virus
attgtgttctcagtccagtactcct

SEQ ID NO: 25835 - DNA, 25 bp, SARS Virus
ttgtgttctcaagccagtactccta

SEQ ID NO: 25836 - DNA, 25 bp, SARS Virus
tgtgttctcaatgcagtactcctag

SEQ ID NO: 25837 - DNA, 25 bp, SARS Virus
gtgttctcaatcgagtactcctaga

SEQ ID NO: 25838 - DNA, 25 bp, SARS Virus
tgttctcaatccggtactcctagaa

SEQ ID NO: 25839 - DNA, 25 bp, SARS Virus
gttctcaatccagtactcctagaat

SEQ ID NO: 25840 - DNA, 25 bp, SARS Virus
ttctcaatccaggactcctagaata

SEQ ID NO: 25841 - DNA, 25 bp, SARS Virus
tctcaatccagtgctcctagaatac

SEQ ID NO: 25842 - DNA, 25 bp, SARS Virus
ctcaatccagtagtcctagaatacc

SEQ ID NO: 25843 - DNA, 25 bp, SARS Virus
tcaatccagtacgcctagaataccg

SEQ ID NO: 25844 - DNA, 25 bp, SARS Virus
caatccagtactgctagaataccga

SEQ ID NO: 25845 - DNA, 25 bp, SARS Virus
aatccagtactcgtagaataccgac

SEQ ID NO: 25846 - DNA, 25 bp, SARS Virus
atccagtactccgagaataccgacg

SEQ ID NO: 25847 - DNA, 25 bp, SARS Virus
tccagtactcctggaataccgacga

SEQ ID NO: 25848 - DNA, 25 bp, SARS Virus
ccagtactcctagaataccgacgaa

SEQ ID NO: 25849 - DNA, 25 bp, SARS Virus
cagtactcctaggataccgacgaat

SEQ ID NO: 25850 - DNA, 25 bp, SARS Virus
agtactcctagagtaccgacgaata

SEQ ID NO: 25851 - DNA, 25 bp, SARS Virus
gtactcctagaagaccgacgaatac

SEQ ID NO: 25852 - DNA, 25 bp, SARS Virus
tactcctagaatgccgacgaataca

SEQ ID NO: 25853 - DNA, 25 bp, SARS Virus
actcctagaatagcgacgaatacac

SEQ ID NO: 25854 - DNA, 25 bp, SARS Virus
ctcctagaatacggacgaatacacc

SEQ ID NO: 25855 - DNA, 25 bp, SARS Virus
tcctagaataccgacgaatacacct

SEQ ID NO: 25856 - DNA, 25 bp, SARS Virus
cctagaataccggcgaatacacctt

SEQ ID NO: 25857 - DNA, 25 bp, SARS Virus
ctagaataccgaggaatacaccttt

SEQ ID NO: 25858 - DNA, 25 bp, SARS Virus
tagaataccgacgaatacacctttt

SEQ ID NO: 25859 - DNA, 25 bp, SARS Virus
agaataccgacggatacaccttttg

SEQ ID NO: 25860 - DNA, 25 bp, SARS Virus
gaataccgacgagtacaccttttgt

SEQ ID NO: 25861 - DNA, 25 bp, SARS Virus
aataccgacgaagacaccttttgtg

SEQ ID NO: 25862 - DNA, 25 bp, SARS Virus
ataccgacgaatgcaccttttgtgt

SEQ ID NO: 25863 - DNA, 25 bp, SARS Virus
taccgacgaatagaccttttgtgtt

SEQ ID NO: 25864 - DNA, 25 bp, SARS Virus
accgacgaatacgccttttgtgttc

SEQ ID NO: 25865 - DNA, 25 bp, SARS Virus
ccgacgaatacagcttttgtgttcg

SEQ ID NO: 25866 - DNA, 25 bp, SARS Virus
cgacgaatacacgttttgtgttcgt

SEQ ID NO: 25867 - DNA, 25 bp, SARS Virus
gacgaatacaccgtttgtgttcgta

SEQ ID NO: 25868 - DNA, 25 bp, SARS Virus
acgaatacacctgttgtgttcgtaa

SEQ ID NO: 25869 - DNA, 25 bp, SARS Virus
cgaatacaccttgtgtgttcgtaat

SEQ ID NO: 25870 - DNA, 25 bp, SARS Virus
gaatacacctttggtgttcgtaatg

SEQ ID NO: 25871 - DNA, 25 bp, SARS Virus
aatacaccttttgtgttcgtaatgg

SEQ ID NO: 25872 - DNA, 25 bp, SARS Virus
atacaccttttgggttcgtaatggt

SEQ ID NO: 25873 - DNA, 25 bp, SARS Virus
tacaccttttgtgttcgtaatggta

SEQ ID NO: 25874 - DNA, 25 bp, SARS Virus
acaccttttgtggtcgtaatggtaa

SEQ ID NO: 25875 - DNA, 25 bp, SARS Virus
caccttttgtgtgcgtaatggtaat

SEQ ID NO: 25876 - DNA, 25 bp, SARS Virus
accttttgtgttggtaatggtaatt

SEQ ID NO: 25877 - DNA, 25 bp, SARS Virus
ccttttgtgttcgtaatggtaattc

SEQ ID NO: 25878 - DNA, 25 bp, SARS Virus
cttttgtgttcggaatggtaattct

SEQ ID NO: 25879 - DNA, 25 bp, SARS Virus
ttttgtgttcgtgatggtaattctt

SEQ ID NO: 25880 - DNA, 25 bp, SARS Virus
tttgtgttcgtagtggtaattcttt

SEQ ID NO: 25881 - DNA, 25 bp, SARS Virus
ttgtgttcgtaagggtaattctttg

SEQ ID NO: 25882 - DNA, 25 bp, SARS Virus
tgtgttcgtaatggtaattctttgg

SEQ ID NO: 25883 - DNA, 25 bp, SARS Virus
gtgttcgtaatggtaattctttgga

SEQ ID NO: 25884 - DNA, 25 bp, SARS Virus
tgttcgtaatgggaattctttggat

SEQ ID NO: 25885 - DNA, 25 bp, SARS Virus
gttcgtaatggtgattctttggatt

SEQ ID NO: 25886 - DNA, 25 bp, SARS Virus
ttcgtaatggtagttctttggatta

SEQ ID NO: 25887 - DNA, 25 bp, SARS Virus
tcgtaatggtaagtctttggattac

SEQ ID NO: 25888 - DNA, 25 bp, SARS Virus
cgtaatggtaatgctttggattact

SEQ ID NO: 25889 - DNA, 25 bp, SARS Virus
gtaatggtaattgtttggattactc

SEQ ID NO: 25890 - DNA, 25 bp, SARS Virus
taatggtaattcgttggattactcg

SEQ ID NO: 25891 - DNA, 25 bp, SARS Virus
aatggtaattctgtggattactcga

SEQ ID NO: 25892 - DNA, 25 bp, SARS Virus
atggtaattcttgggattactcgaa

SEQ ID NO: 25893 - DNA, 25 bp, SARS Virus
tggtaattctttggattactcgaaa

SEQ ID NO: 25894 - DNA, 25 bp, SARS Virus
ggtaattctttggattactcgaaag

SEQ ID NO: 25895 - DNA, 25 bp, SARS Virus
gtaattctttgggttactcgaaagt

SEQ ID NO: 25896 - DNA, 25 bp, SARS Virus
taattctttggagtactcgaaagtg

SEQ ID NO: 25897 - DNA, 25 bp, SARS Virus
aattctttggatgactcgaaagtga

SEQ ID NO: 25898 - DNA, 25 bp, SARS Virus
attctttggattgctcgaaagtgat

SEQ ID NO: 25899 - DNA, 25 bp, SARS Virus
ttctttggattagtcgaaagtgatc

SEQ ID NO: 25900 - DNA, 25 bp, SARS Virus
tctttggattacgcgaaagtgatcg

SEQ ID NO: 25901 - DNA, 25 bp, SARS Virus
ctttggattactggaaagtgatcgg

SEQ ID NO: 25902 - DNA, 25 bp, SARS Virus
tttggattactcgaaagtgatcgga

SEQ ID NO: 25903 - DNA, 25 bp, SARS Virus
ttggattactcggaagtgatcggaa

SEQ ID NO: 25904 - DNA, 25 bp, SARS Virus
tggattactcgagagtgatcggaat

SEQ ID NO: 25905 - DNA, 25 bp, SARS Virus
ggattactcgaaggtgatcggaatc

SEQ ID NO: 25906 - DNA, 25 bp, SARS Virus
gattactcgaaagtgatcggaatcc

SEQ ID NO: 25907 - DNA, 25 bp, SARS Virus
attactcgaaagggatcggaatcca

SEQ ID NO: 25908 - DNA, 25 bp, SARS Virus
ttactcgaaagtgatcggaatccaa

SEQ ID NO: 25909 - DNA, 25 bp, SARS Virus
tactcgaaagtggtcggaatccaaa

SEQ ID NO: 25910 - DNA, 25 bp, SARS Virus
actcgaaagtgagcggaatccaaat

SEQ ID NO: 25911 - DNA, 25 bp, SARS Virus
ctcgaaagtgatgggaatccaaatt

SEQ ID NO: 25912 - DNA, 25 bp, SARS Virus
tcgaaagtgatcggaatccaaattt

SEQ ID NO: 25913 - DNA, 25 bp, SARS Virus
cgaaagtgatcggaatccaaatttt

SEQ ID NO: 25914 - DNA, 25 bp, SARS Virus
gaaagtgatcgggatccaaattttt

SEQ ID NO: 25915 - DNA, 25 bp, SARS Virus
aaagtgatcggagtccaaatttttg

SEQ ID NO: 25916 - DNA, 25 bp, SARS Virus
aagtgatcggaagccaaatttttgt

SEQ ID NO: 25917 - DNA, 25 bp, SARS Virus
agtgatcggaatgcaaatttttgtt

SEQ ID NO: 25918 - DNA, 25 bp, SARS Virus
gtgatcggaatcgaaatttttgtta

SEQ ID NO: 25919 - DNA, 25 bp, SARS Virus
tgatcggaatccgaatttttgttaa

SEQ ID NO: 25920 - DNA, 25 bp, SARS Virus
gatcggaatccagatttttgttaac

SEQ ID NO: 25921 - DNA, 25 bp, SARS Virus
atcggaatccaagtttttgttaacg

SEQ ID NO: 25922 - DNA, 25 bp, SARS Virus
tcggaatccaaagttttgttaacgg

SEQ ID NO: 25923 - DNA, 25 bp, SARS Virus
cggaatccaaatgtttgttaacggt

SEQ ID NO: 25924 - DNA, 25 bp, SARS Virus
ggaatccaaattgttgttaacggtg

SEQ ID NO: 25925 - DNA, 25 bp, SARS Virus
gaatccaaatttgtgttaacggtga

SEQ ID NO: 25926 - DNA, 25 bp, SARS Virus
aatccaaattttggttaacggtgag

SEQ ID NO: 25927 - DNA, 25 bp, SARS Virus
atccaaatttttgttaacggtgagt

SEQ ID NO: 25928 - DNA, 25 bp, SARS Virus
tccaaatttttggtaacggtgagta

SEQ ID NO: 25929 - DNA, 25 bp, SARS Virus
ccaaatttttgtgaacggtgagtac

SEQ ID NO: 25930 - DNA, 25 bp, SARS Virus
caaatttttgttgacggtgagtacc

SEQ ID NO: 25931 - DNA, 25 bp, SARS Virus
aaatttttgttagcggtgagtacca

SEQ ID NO: 25932 - DNA, 25 bp, SARS Virus
aatttttgttaagggtgagtaccat

SEQ ID NO: 25933 - DNA, 25 bp, SARS Virus
atttttgttaacggtgagtaccata

SEQ ID NO: 25934 - DNA, 25 bp, SARS Virus
tttttgttaacggtgagtaccataa

SEQ ID NO: 25935 - DNA, 25 bp, SARS Virus
ttttgttaacggggagtaccataac

SEQ ID NO: 25936 - DNA, 25 bp, SARS Virus
tttgttaacggtgagtaccataacg

SEQ ID NO: 25937 - DNA, 25 bp, SARS Virus
ttgttaacggtgggtaccataacga

SEQ ID NO: 25938 - DNA, 25 bp, SARS Virus
tgttaacggtgagtaccataacgac

SEQ ID NO: 25939 - DNA, 25 bp, SARS Virus
gttaacggtgaggaccataacgacg

SEQ ID NO: 25940 - DNA, 25 bp, SARS Virus
ttaacggtgagtgccataacgacgt

SEQ ID NO: 25941 - DNA, 25 bp, SARS Virus
taacggtgagtagcataacgacgtt

SEQ ID NO: 25942 - DNA, 25 bp, SARS Virus
aacggtgagtacgataacgacgtta

SEQ ID NO: 25943 - DNA, 25 bp, SARS Virus
acggtgagtaccgtaacgacgttaa

SEQ ID NO: 25944 - DNA, 25 bp, SARS Virus
cggtgagtaccagaacgacgttaat

SEQ ID NO: 25945 - DNA, 25 bp, SARS Virus
ggtgagtaccatgacgacgttaatt

SEQ ID NO: 25946 - DNA, 25 bp, SARS Virus
gtgagtaccatagcgacgttaatta

SEQ ID NO: 25947 - DNA, 25 bp, SARS Virus
tgagtaccataaggacgttaattat

SEQ ID NO: 25948 - DNA, 25 bp, SARS Virus
gagtaccataacgacgttaattatc

SEQ ID NO: 25949 - DNA, 25 bp, SARS Virus
agtaccataacggcgttaattatca

SEQ ID NO: 25950 - DNA, 25 bp, SARS Virus
gtaccataacgaggttaattatcac

SEQ ID NO: 25951 - DNA, 25 bp, SARS Virus
taccataacgacgttaattatcaca

SEQ ID NO: 25952 - DNA, 25 bp, SARS Virus
accataacgacggtaattatcacaa

SEQ ID NO: 25953 - DNA, 25 bp, SARS Virus
ccataacgacgtgaattatcacaag

SEQ ID NO: 25954 - DNA, 25 bp, SARS Virus
cataacgacgttgattatcacaagg

SEQ ID NO: 25955 - DNA, 25 bp, SARS Virus
ataacgacgttagttatcacaagga

SEQ ID NO: 25956 - DNA, 25 bp, SARS Virus
taacgacgttaagtatcacaaggaa

SEQ ID NO: 25957 - DNA, 25 bp, SARS Virus
aacgacgttaatgatcacaaggaac

SEQ ID NO: 25958 - DNA, 25 bp, SARS Virus
acgacgttaattgtcacaaggaacc

SEQ ID NO: 25959 - DNA, 25 bp, SARS Virus
cgacgttaattagcacaaggaacct

SEQ ID NO: 25960 - DNA, 25 bp, SARS Virus
gacgttaattatgacaaggaacctc

SEQ ID NO: 25961 - DNA, 25 bp, SARS Virus
acgttaattatcgcaaggaacctca

SEQ ID NO: 25962 - DNA, 25 bp, SARS Virus
cgttaattatcagaaggaacctcat

SEQ ID NO: 25963 - DNA, 25 bp, SARS Virus
gttaattatcacgaggaacctcatt

SEQ ID NO: 25964 - DNA, 25 bp, SARS Virus
ttaattatcacagggaacctcattt

SEQ ID NO: 25965 - DNA, 25 bp, SARS Virus
taattatcacaaggaacctcatttt

SEQ ID NO: 25966 - DNA, 25 bp, SARS Virus
aattatcacaaggaacctcatttta

SEQ ID NO: 25967 - DNA, 25 bp, SARS Virus
attatcacaagggacctcattttaa

SEQ ID NO: 25968 - DNA, 25 bp, SARS Virus
ttatcacaaggagcctcattttaaa

SEQ ID NO: 25969 - DNA, 25 bp, SARS Virus
tatcacaaggaagctcattttaaaa

SEQ ID NO: 25970 - DNA, 25 bp, SARS Virus
atcacaaggaacgtcattttaaaac

SEQ ID NO: 25971 - DNA, 25 bp, SARS Virus
tcacaaggaaccgcattttaaaacc

SEQ ID NO: 25972 - DNA, 25 bp, SARS Virus
cacaaggaacctgattttaaaaccg

SEQ ID NO: 25973 - DNA, 25 bp, SARS Virus
acaaggaacctcgttttaaaaccga

SEQ ID NO: 25974 - DNA, 25 bp, SARS Virus
caaggaacctcagtttaaaaccgaa

SEQ ID NO: 25975 - DNA, 25 bp, SARS Virus
aaggaacctcatgttaaaaccgaat

SEQ ID NO: 25976 - DNA, 25 bp, SARS Virus
aggaacctcattgtaaaaccgaata

SEQ ID NO: 25977 - DNA, 25 bp, SARS Virus
ggaacctcatttgaaaaccgaatac

SEQ ID NO: 25978 - DNA, 25 bp, SARS Virus
gaacctcattttgaaaccgaataca

SEQ ID NO: 25979 - DNA, 25 bp, SARS Virus
aacctcattttagaaccgaatacag

SEQ ID NO: 25980 - DNA, 25 bp, SARS Virus
acctcattttaagaccgaatacagt

SEQ ID NO: 25981 - DNA, 25 bp, SARS Virus
cctcattttaaagccgaatacagtt

SEQ ID NO: 25982 - DNA, 25 bp, SARS Virus
ctcattttaaaagcgaatacagttt

SEQ ID NO: 25983 - DNA, 25 bp, SARS Virus
tcattttaaaacggaatacagtttg

SEQ ID NO: 25984 - DNA, 25 bp, SARS Virus
cattttaaaaccgaatacagtttgg

SEQ ID NO: 25985 - DNA, 25 bp, SARS Virus
attttaaaaccggatacagtttggt

SEQ ID NO: 25986 - DNA, 25 bp, SARS Virus
ttttaaaaccgagtacagtttggta

SEQ ID NO: 25987 - DNA, 25 bp, SARS Virus
tttaaaaccgaagacagtttggtaa

SEQ ID NO: 25988 - DNA, 25 bp, SARS Virus
ttaaaaccgaatgcagtttggtaag

SEQ ID NO: 25989 - DNA, 25 bp, SARS Virus
taaaaccgaatagagtttggtaaga

SEQ ID NO: 25990 - DNA, 25 bp, SARS Virus
aaaaccgaatacggtttggtaagaa

SEQ ID NO: 25991 - DNA, 25 bp, SARS Virus
aaaccgaatacagtttggtaagaat

SEQ ID NO: 25992 - DNA, 25 bp, SARS Virus
aaccgaatacaggttggtaagaatc

SEQ ID NO: 25993 - DNA, 25 bp, SARS Virus
tcgctcaaagttttttccacgattt

SEQ ID NO: 25994 - DNA, 25 bp, SARS Virus
cgctcaaagttctttccacgattta

SEQ ID NO: 25995 - DNA, 25 bp, SARS Virus
gctcaaagttctttccacgatttaa

SEQ ID NO: 25996 - DNA, 25 bp, SARS Virus
ctcaaagttctttccacgatttaat

SEQ ID NO: 25997 - DNA, 25 bp, SARS Virus
tcaaagttcttttcacgatttaatg

SEQ ID NO: 25998 - DNA, 25 bp, SARS Virus
caaagttctttctacgatttaatga

SEQ ID NO: 25999 - DNA, 25 bp, SARS Virus
aaagttctttcctcgatttaatgac

SEQ ID NO: 26000 - DNA, 25 bp, SARS Virus
aagttctttccatgatttaatgacg

SEQ ID NO: 26001 - DNA, 25 bp, SARS Virus
agttctttccactatttaatgacgt

SEQ ID NO: 26002 - DNA, 25 bp, SARS Virus
gttctttccacgttttaatgacgta

SEQ ID NO: 26003 - DNA, 25 bp, SARS Virus
ttctttccacgatttaatgacgtat

SEQ ID NO: 26004 - DNA, 25 bp, SARS Virus
tctttccacgatttaatgacgtatt

SEQ ID NO: 26005 - DNA, 25 bp, SARS Virus
ctttccacgatttaatgacgtattc

SEQ ID NO: 26006 - DNA, 25 bp, SARS Virus
tttccacgattttatgacgtattcg

SEQ ID NO: 26007 - DNA, 25 bp, SARS Virus
ttccacgatttattgacgtattcgg

SEQ ID NO: 26008 - DNA, 25 bp, SARS Virus
tccacgatttaatgacgtattcggt

SEQ ID NO: 26009 - DNA, 25 bp, SARS Virus
ccacgatttaattacgtattcggtt

SEQ ID NO: 26010 - DNA, 25 bp, SARS Virus
cacgatttaatgtcgtattcggtta

SEQ ID NO: 26011 - DNA, 25 bp, SARS Virus
acgatttaatgatgtattcggttaa

SEQ ID NO: 26012 - DNA, 25 bp, SARS Virus
cgatttaatgacttattcggttaac

SEQ ID NO: 26013 - DNA, 25 bp, SARS Virus
gatttaatgacgtattcggttaaca

SEQ ID NO: 26014 - DNA, 25 bp, SARS Virus
atttaatgacgttttcggttaacaa

SEQ ID NO: 26015 - DNA, 25 bp, SARS Virus
tttaatgacgtattcggttaacaaa

SEQ ID NO: 26016 - DNA, 25 bp, SARS Virus
ttaatgacgtattcggttaacaaac

SEQ ID NO: 26017 - DNA, 25 bp, SARS Virus
taatgacgtatttggttaacaaacc

SEQ ID NO: 26018 - DNA, 25 bp, SARS Virus
aatgacgtattctgttaacaaaccg

SEQ ID NO: 26019 - DNA, 25 bp, SARS Virus
atgacgtattcgtttaacaaaccgt

SEQ ID NO: 26020 - DNA, 25 bp, SARS Virus
tgacgtattcggttaacaaaccgtg

SEQ ID NO: 26021 - DNA, 25 bp, SARS Virus
gacgtattcggttaacaaaccgtgt

SEQ ID NO: 26022 - DNA, 25 bp, SARS Virus
acgtattcggtttacaaaccgtgta

SEQ ID NO: 26023 - DNA, 25 bp, SARS Virus
cgtattcggttatcaaaccgtgtaa

SEQ ID NO: 26024 - DNA, 25 bp, SARS Virus
gtattcggttaataaaccgtgtaat

SEQ ID NO: 26025 - DNA, 25 bp, SARS Virus
tattcggttaactaaccgtgtaatt

SEQ ID NO: 26026 - DNA, 25 bp, SARS Virus
attcggttaacataccgtgtaattg

SEQ ID NO: 26027 - DNA, 25 bp, SARS Virus
ttcggttaacaatccgtgtaattgg

SEQ ID NO: 26028 - DNA, 25 bp, SARS Virus
tcggttaacaaatcgtgtaattggt

SEQ ID NO: 26029 - DNA, 25 bp, SARS Virus
cggttaacaaactgtgtaattggtc

SEQ ID NO: 26030 - DNA, 25 bp, SARS Virus
ggttaacaaaccttgtaattggtcc

SEQ ID NO: 26031 - DNA, 25 bp, SARS Virus
gttaacaaaccgtgtaattggtccg

SEQ ID NO: 26032 - DNA, 25 bp, SARS Virus
ttaacaaaccgtttaattggtccga

SEQ ID NO: 26033 - DNA, 25 bp, SARS Virus
taacaaaccgtgtaattggtccgat

SEQ ID NO: 26034 - DNA, 25 bp, SARS Virus
aacaaaccgtgttattggtccgatg

SEQ ID NO: 26035 - DNA, 25 bp, SARS Virus
acaaaccgtgtatttggtccgatgt

SEQ ID NO: 26036 - DNA, 25 bp, SARS Virus
caaaccgtgtaattggtccgatgtt

SEQ ID NO: 26037 - DNA, 25 bp, SARS Virus
aaaccgtgtaattggtccgatgttg

SEQ ID NO: 26038 - DNA, 25 bp, SARS Virus
aaccgtgtaatttgtccgatgttgg

SEQ ID NO: 26039 - DNA, 25 bp, SARS Virus
accgtgtaattgttccgatgttggt

SEQ ID NO: 26040 - DNA, 25 bp, SARS Virus
ccgtgtaattggtccgatgttggtt

SEQ ID NO: 26041 - DNA, 25 bp, SARS Virus
cgtgtaattggttcgatgttggttc

SEQ ID NO: 26042 - DNA, 25 bp, SARS Virus
gtgtaattggtctgatgttggttct

SEQ ID NO: 26043 - DNA, 25 bp, SARS Virus
tgtaattggtcctatgttggttctg

SEQ ID NO: 26044 - DNA, 25 bp, SARS Virus
gtaattggtccgttgttggttctgt

SEQ ID NO: 26045 - DNA, 25 bp, SARS Virus
taattggtccgatgttggttctgtt

SEQ ID NO: 26046 - DNA, 25 bp, SARS Virus
aattggtccgattttggttctgttg

SEQ ID NO: 26047 - DNA, 25 bp, SARS Virus
attggtccgatgttggttctgttgc

SEQ ID NO: 26048 - DNA, 25 bp, SARS Virus
ttggtccgatgttggttctgttgca

SEQ ID NO: 26049 - DNA, 25 bp, SARS Virus
tggtccgatgtttgttctgttgcaa

SEQ ID NO: 26050 - DNA, 25 bp, SARS Virus
ggtccgatgttgtttctgttgcaag

SEQ ID NO: 26051 - DNA, 25 bp, SARS Virus
gtccgatgttggttctgttgcaagt

SEQ ID NO: 26052 - DNA, 25 bp, SARS Virus
tccgatgttggttctgttgcaagtt

SEQ ID NO: 26053 - DNA, 25 bp, SARS Virus
ccgatgttggttttgttgcaagttt

SEQ ID NO: 26054 - DNA, 25 bp, SARS Virus
cgatgttggttctgttgcaagtttg

SEQ ID NO: 26055 - DNA, 25 bp, SARS Virus
gatgttggttcttttgcaagtttgg

SEQ ID NO: 26056 - DNA, 25 bp, SARS Virus
atgttggttctgttgcaagtttggt

SEQ ID NO: 26057 - DNA, 25 bp, SARS Virus
tgttggttctgttgcaagtttggtt

SEQ ID NO: 26058 - DNA, 25 bp, SARS Virus
gttggttctgtttcaagtttggttt

SEQ ID NO: 26059 - DNA, 25 bp, SARS Virus
ttggttctgttgtaagtttggtttg

SEQ ID NO: 26060 - DNA, 25 bp, SARS Virus
tggttctgttgctagtttggtttgt

SEQ ID NO: 26061 - DNA, 25 bp, SARS Virus
ggttctgttgcatgtttggtttgtg

SEQ ID NO: 26062 - DNA, 25 bp, SARS Virus
gttctgttgcaattttggtttgtga

SEQ ID NO: 26063 - DNA, 25 bp, SARS Virus
ttctgttgcaagtttggtttgtgaa

SEQ ID NO: 26064 - DNA, 25 bp, SARS Virus
tctgttgcaagtttggtttgtgaac

SEQ ID NO: 26065 - DNA, 25 bp, SARS Virus
ctgttgcaagtttggtttgtgaacc

SEQ ID NO: 26066 - DNA, 25 bp, SARS Virus
tgttgcaagttttgtttgtgaacca

SEQ ID NO: 26067 - DNA, 25 bp, SARS Virus
gttgcaagtttgttttgtgaaccac

SEQ ID NO: 26068 - DNA, 25 bp, SARS Virus
ttgcaagtttggtttgtgaaccaca

SEQ ID NO: 26069 - DNA, 25 bp, SARS Virus
tgcaagtttggtttgtgaaccacaa

SEQ ID NO: 26070 - DNA, 25 bp, SARS Virus
gcaagtttggtttgtgaaccacaaa

SEQ ID NO: 26071 - DNA, 25 bp, SARS Virus
caagtttggtttttgaaccacaaat

SEQ ID NO: 26072 - DNA, 25 bp, SARS Virus
aagtttggtttgtgaaccacaaatg

SEQ ID NO: 26073 - DNA, 25 bp, SARS Virus
agtttggtttgttaaccacaaatgc

SEQ ID NO: 26074 - DNA, 25 bp, SARS Virus
gtttggtttgtgtaccacaaatgca

SEQ ID NO: 26075 - DNA, 25 bp, SARS Virus
tttggtttgtgatccacaaatgcaa

SEQ ID NO: 26076 - DNA, 25 bp, SARS Virus
ttggtttgtgaatcacaaatgcaac

SEQ ID NO: 26077 - DNA, 25 bp, SARS Virus
tggtttgtgaactacaaatgcaaca

SEQ ID NO: 26078 - DNA, 25 bp, SARS Virus
ggtttgtgaacctcaaatgcaacag

SEQ ID NO: 26079 - DNA, 25 bp, SARS Virus
gtttgtgaaccataaatgcaacaga

SEQ ID NO: 26080 - DNA, 25 bp, SARS Virus
tttgtgaaccactaatgcaacagaa

SEQ ID NO: 26081 - DNA, 25 bp, SARS Virus
ttgtgaaccacatatgcaacagaaa

SEQ ID NO: 26082 - DNA, 25 bp, SARS Virus
tgtgaaccacaattgcaacagaaac

SEQ ID NO: 26083 - DNA, 25 bp, SARS Virus
gtgaaccacaaatgcaacagaaacc

SEQ ID NO: 26084 - DNA, 25 bp, SARS Virus
tgaaccacaaattcaacagaaacct

SEQ ID NO: 26085 - DNA, 25 bp, SARS Virus
gaaccacaaatgtaacagaaacctc

SEQ ID NO: 26086 - DNA, 25 bp, SARS Virus
aaccacaaatgctacagaaacctca

SEQ ID NO: 26087 - DNA, 25 bp, SARS Virus
accacaaatgcatcagaaacctcat

SEQ ID NO: 26088 - DNA, 25 bp, SARS Virus
ccacaaatgcaatagaaacctcatg

SEQ ID NO: 26089 - DNA, 25 bp, SARS Virus
cacaaatgcaactgaaacctcatgt

SEQ ID NO: 26090 - DNA, 25 bp, SARS Virus
acaaatgcaacataaacctcatgtt

SEQ ID NO: 26091 - DNA, 25 bp, SARS Virus
caaatgcaacagtaacctcatgttt

SEQ ID NO: 26092 - DNA, 25 bp, SARS Virus
aaatgcaacagatacctcatgtttc

SEQ ID NO: 26093 - DNA, 25 bp, SARS Virus
aatgcaacagaatcctcatgtttcg

SEQ ID NO: 26094 - DNA, 25 bp, SARS Virus
atgcaacagaaatctcatgtttcgg

SEQ ID NO: 26095 - DNA, 25 bp, SARS Virus
tgcaacagaaacttcatgtttcggt

SEQ ID NO: 26096 - DNA, 25 bp, SARS Virus
gcaacagaaacctcatgtttcggtc

SEQ ID NO: 26097 - DNA, 25 bp, SARS Virus
caacagaaaccttatgtttcggtca

SEQ ID NO: 26098 - DNA, 25 bp, SARS Virus
aacagaaacctcttgtttcggtcat

SEQ ID NO: 26099 - DNA, 25 bp, SARS Virus
acagaaacctcatgtttcggtcatc

SEQ ID NO: 26100 - DNA, 25 bp, SARS Virus
cagaaacctcatttttcggtcatct

SEQ ID NO: 26101 - DNA, 25 bp, SARS Virus
agaaacctcatgtttcggtcatcta

SEQ ID NO: 26102 - DNA, 25 bp, SARS Virus
gaaacctcatgtttcggtcatctat

SEQ ID NO: 26103 - DNA, 25 bp, SARS Virus
aaacctcatgtttcggtcatctatg

SEQ ID NO: 26104 - DNA, 25 bp, SARS Virus
aacctcatgttttggtcatctatga

SEQ ID NO: 26105 - DNA, 25 bp, SARS Virus
acctcatgtttctgtcatctatgaa

SEQ ID NO: 26106 - DNA, 25 bp, SARS Virus
cctcatgtttcgttcatctatgaag

SEQ ID NO: 26107 - DNA, 25 bp, SARS Virus
ctcatgtttcggtcatctatgaagt

SEQ ID NO: 26108 - DNA, 25 bp, SARS Virus
tcatgtttcggttatctatgaagtt

SEQ ID NO: 26109 - DNA, 25 bp, SARS Virus
catgtttcggtcttctatgaagttt

SEQ ID NO: 26110 - DNA, 25 bp, SARS Virus
atgtttcggtcatctatgaagttta

SEQ ID NO: 26111 - DNA, 25 bp, SARS Virus
tgtttcggtcatttatgaagtttaa

SEQ ID NO: 26112 - DNA, 25 bp, SARS Virus
gtttcggtcatctatgaagtttaag

SEQ ID NO: 26113 - DNA, 25 bp, SARS Virus
tttcggtcatctttgaagtttaagt

SEQ ID NO: 26114 - DNA, 25 bp, SARS Virus
ttcggtcatctatgaagtttaagta

SEQ ID NO: 26115 - DNA, 25 bp, SARS Virus
tcggtcatctattaagtttaagtaa

SEQ ID NO: 26116 - DNA, 25 bp, SARS Virus
cggtcatctatgtagtttaagtaaa

SEQ ID NO: 26117 - DNA, 25 bp, SARS Virus
ggtcatctatgatgtttaagtaaac

SEQ ID NO: 26118 - DNA, 25 bp, SARS Virus
gtcatctatgaattttaagtaaact

SEQ ID NO: 26119 - DNA, 25 bp, SARS Virus
tcatctatgaagtttaagtaaactt

SEQ ID NO: 26120 - DNA, 25 bp, SARS Virus
catctatgaagtttaagtaaacttc

SEQ ID NO: 26121 - DNA, 25 bp, SARS Virus
atctatgaagtttaagtaaacttca

SEQ ID NO: 26122 - DNA, 25 bp, SARS Virus
tctatgaagttttagtaaacttcaa

SEQ ID NO: 26123 - DNA, 25 bp, SARS Virus
ctatgaagtttatgtaaacttcaag

SEQ ID NO: 26124 - DNA, 25 bp, SARS Virus
tatgaagtttaattaaacttcaaga

SEQ ID NO: 26125 - DNA, 25 bp, SARS Virus
atgaagtttaagtaaacttcaagac

SEQ ID NO: 26126 - DNA, 25 bp, SARS Virus
tgaagtttaagttaacttcaagacc

SEQ ID NO: 26127 - DNA, 25 bp, SARS Virus
gaagtttaagtatacttcaagaccg

SEQ ID NO: 26128 - DNA, 25 bp, SARS Virus
aagtttaagtaatcttcaagaccgt

SEQ ID NO: 26129 - DNA, 25 bp, SARS Virus
agtttaagtaaatttcaagaccgtc

SEQ ID NO: 26130 - DNA, 25 bp, SARS Virus
gtttaagtaaacttcaagaccgtca

SEQ ID NO: 26131 - DNA, 25 bp, SARS Virus
tttaagtaaacttcaagaccgtcat

SEQ ID NO: 26132 - DNA, 25 bp, SARS Virus
ttaagtaaactttaagaccgtcatc

SEQ ID NO: 26133 - DNA, 25 bp, SARS Virus
taagtaaacttctagaccgtcatct

SEQ ID NO: 26134 - DNA, 25 bp, SARS Virus
aagtaaacttcatgaccgtcatctt

SEQ ID NO: 26135 - DNA, 25 bp, SARS Virus
agtaaacttcaataccgtcatcttc

SEQ ID NO: 26136 - DNA, 25 bp, SARS Virus
gtaaacttcaagtccgtcatcttct

SEQ ID NO: 26137 - DNA, 25 bp, SARS Virus
taaacttcaagatcgtcatcttctg

SEQ ID NO: 26138 - DNA, 25 bp, SARS Virus
aaacttcaagactgtcatcttctgt

SEQ ID NO: 26139 - DNA, 25 bp, SARS Virus
aacttcaagaccttcatcttctgtg

SEQ ID NO: 26140 - DNA, 25 bp, SARS Virus
acttcaagaccgtcatcttctgtgt

SEQ ID NO: 26141 - DNA, 25 bp, SARS Virus
cttcaagaccgttatcttctgtgtg

SEQ ID NO: 26142 - DNA, 25 bp, SARS Virus
ttcaagaccgtcttcttctgtgtgt

SEQ ID NO: 26143 - DNA, 25 bp, SARS Virus
tcaagaccgtcatcttctgtgtgtt

SEQ ID NO: 26144 - DNA, 25 bp, SARS Virus
caagaccgtcattttctgtgtgttc

SEQ ID NO: 26145 - DNA, 25 bp, SARS Virus
aagaccgtcatcttctgtgtgttcc

SEQ ID NO: 26146 - DNA, 25 bp, SARS Virus
agaccgtcatcttctgtgtgttcct

SEQ ID NO: 26147 - DNA, 25 bp, SARS Virus
gaccgtcatcttttgtgtgttcctt

SEQ ID NO: 26148 - DNA, 25 bp, SARS Virus
accgtcatcttctgtgtgttcctta

SEQ ID NO: 26149 - DNA, 25 bp, SARS Virus
ccgtcatcttctttgtgttccttac

SEQ ID NO: 26150 - DNA, 25 bp, SARS Virus
cgtcatcttctgtgtgttccttacc

SEQ ID NO: 26151 - DNA, 25 bp, SARS Virus
gtcatcttctgtttgttccttacct

SEQ ID NO: 26152 - DNA, 25 bp, SARS Virus
tcatcttctgtgtgttccttacctg

SEQ ID NO: 26153 - DNA, 25 bp, SARS Virus
catcttctgtgttttccttacctgt

SEQ ID NO: 26154 - DNA, 25 bp, SARS Virus
atcttctgtgtgttccttacctgtt

SEQ ID NO: 26155 - DNA, 25 bp, SARS Virus
tcttctgtgtgttccttacctgtta

SEQ ID NO: 26156 - DNA, 25 bp, SARS Virus
cttctgtgtgtttcttacctgttag

SEQ ID NO: 26157 - DNA, 25 bp, SARS Virus
ttctgtgtgttctttacctgttaga

SEQ ID NO: 26158 - DNA, 25 bp, SARS Virus
tctgtgtgttccttacctgttagaa

SEQ ID NO: 26159 - DNA, 25 bp, SARS Virus
ctgtgtgttccttacctgttagaac

SEQ ID NO: 26160 - DNA, 25 bp, SARS Virus
tgtgtgttcctttcctgttagaacg

SEQ ID NO: 26161 - DNA, 25 bp, SARS Virus
gtgtgttccttatctgttagaacga

SEQ ID NO: 26162 - DNA, 25 bp, SARS Virus
tgtgttccttacttgttagaacgaa

SEQ ID NO: 26163 - DNA, 25 bp, SARS Virus
gtgttccttacctgttagaacgaac

SEQ ID NO: 26164 - DNA, 25 bp, SARS Virus
tgttccttaccttttagaacgaaca

SEQ ID NO: 26165 - DNA, 25 bp, SARS Virus
gttccttacctgttagaacgaacac

SEQ ID NO: 26166 - DNA, 25 bp, SARS Virus
ttccttacctgttagaacgaacact

SEQ ID NO: 26167 - DNA, 25 bp, SARS Virus
tccttacctgtttgaacgaacactt

SEQ ID NO: 26168 - DNA, 25 bp, SARS Virus
ccttacctgttataacgaacacttt

SEQ ID NO: 26169 - DNA, 25 bp, SARS Virus
cttacctgttagtacgaacactttc

SEQ ID NO: 26170 - DNA, 25 bp, SARS Virus
ttacctgttagatcgaacactttca

SEQ ID NO: 26171 - DNA, 25 bp, SARS Virus
tacctgttagaatgaacactttcag

SEQ ID NO: 26172 - DNA, 25 bp, SARS Virus
acctgttagaactaacactttcagt

SEQ ID NO: 26173 - DNA, 25 bp, SARS Virus
cctgttagaacgtacactttcagtt

SEQ ID NO: 26174 - DNA, 25 bp, SARS Virus
ctgttagaacgatcactttcagttg

SEQ ID NO: 26175 - DNA, 25 bp, SARS Virus
tgttagaacgaatactttcagttgt

SEQ ID NO: 26176 - DNA, 25 bp, SARS Virus
gttagaacgaactctttcagttgtt

SEQ ID NO: 26177 - DNA, 25 bp, SARS Virus
ttagaacgaacattttcagttgttg

SEQ ID NO: 26178 - DNA, 25 bp, SARS Virus
tagaacgaacactttcagttgttgg

SEQ ID NO: 26179 - DNA, 25 bp, SARS Virus
agaacgaacactttcagttgttggg

SEQ ID NO: 26180 - DNA, 25 bp, SARS Virus
gaacgaacactttcagttgttgggt

SEQ ID NO: 26181 - DNA, 25 bp, SARS Virus
aacgaacacttttagttgttgggtg

SEQ ID NO: 26182 - DNA, 25 bp, SARS Virus
acgaacactttctgttgttgggtgg

SEQ ID NO: 26183 - DNA, 25 bp, SARS Virus
cgaacactttcatttgttgggtgga

SEQ ID NO: 26184 - DNA, 25 bp, SARS Virus
gaacactttcagttgttgggtggag

SEQ ID NO: 26185 - DNA, 25 bp, SARS Virus
aacactttcagttgttgggtggaga

SEQ ID NO: 26186 - DNA, 25 bp, SARS Virus
acactttcagtttttgggtggagac

SEQ ID NO: 26187 - DNA, 25 bp, SARS Virus
cactttcagttgttgggtggagact

SEQ ID NO: 26188 - DNA, 25 bp, SARS Virus
actttcagttgttgggtggagactt

SEQ ID NO: 26189 - DNA, 25 bp, SARS Virus
ctttcagttgtttggtggagacttc

SEQ ID NO: 26190 - DNA, 25 bp, SARS Virus
tttcagttgttgtgtggagacttct

SEQ ID NO: 26191 - DNA, 25 bp, SARS Virus
ttcagttgttggttggagacttctt

SEQ ID NO: 26192 - DNA, 25 bp, SARS Virus
tcagttgttgggtggagacttcttc

SEQ ID NO: 26193 - DNA, 25 bp, SARS Virus
cagttgttgggttgagacttcttca

SEQ ID NO: 26194 - DNA, 25 bp, SARS Virus
agttgttgggtgtagacttcttcat

SEQ ID NO: 26195 - DNA, 25 bp, SARS Virus
gttgttgggtggtgacttcttcatc

SEQ ID NO: 26196 - DNA, 25 bp, SARS Virus
ttgttgggtggatacttcttcatca

SEQ ID NO: 26197 - DNA, 25 bp, SARS Virus
tgttgggtggagtcttcttcatcac

SEQ ID NO: 26198 - DNA, 25 bp, SARS Virus
gttgggtggagatttcttcatcacc

SEQ ID NO: 26199 - DNA, 25 bp, SARS Virus
ttgggtggagacttcttcatcacct

SEQ ID NO: 26200 - DNA, 25 bp, SARS Virus
tgggtggagacttcttcatcacctt

SEQ ID NO: 26201 - DNA, 25 bp, SARS Virus
gggtggagactttttcatcaccttt

SEQ ID NO: 26202 - DNA, 25 bp, SARS Virus
ggtggagacttcttcatcacctttt

SEQ ID NO: 26203 - DNA, 25 bp, SARS Virus
gtggagacttcttcatcacctttta

SEQ ID NO: 26204 - DNA, 25 bp, SARS Virus
tggagacttctttatcaccttttag

SEQ ID NO: 26205 - DNA, 25 bp, SARS Virus
ggagacttcttcttcaccttttagg

SEQ ID NO: 26206 - DNA, 25 bp, SARS Virus
gagacttcttcatcaccttttagga

SEQ ID NO: 26207 - DNA, 25 bp, SARS Virus
agacttcttcattaccttttaggat

SEQ ID NO: 26208 - DNA, 25 bp, SARS Virus
gacttcttcatctccttttaggatg

SEQ ID NO: 26209 - DNA, 25 bp, SARS Virus
acttcttcatcatcttttaggatgg

SEQ ID NO: 26210 - DNA, 25 bp, SARS Virus
cttcttcatcactttttaggatggt

SEQ ID NO: 26211 - DNA, 25 bp, SARS Virus
ttcttcatcaccttttaggatggta

SEQ ID NO: 26212 - DNA, 25 bp, SARS Virus
tcttcatcaccttttaggatggtat

SEQ ID NO: 26213 - DNA, 25 bp, SARS Virus
cttcatcaccttttaggatggtatg

SEQ ID NO: 26214 - DNA, 25 bp, SARS Virus
ttcatcaccttttaggatggtatgt

SEQ ID NO: 26215 - DNA, 25 bp, SARS Virus
tcatcacctttttggatggtatgtc

SEQ ID NO: 26216 - DNA, 25 bp, SARS Virus
catcaccttttatgatggtatgtct

SEQ ID NO: 26217 - DNA, 25 bp, SARS Virus
atcaccttttagtatggtatgtctt

SEQ ID NO: 26218 - DNA, 25 bp, SARS Virus
tcaccttttaggttggtatgtcttc

SEQ ID NO: 26219 - DNA, 25 bp, SARS Virus
caccttttaggatggtatgtcttcc

SEQ ID NO: 26220 - DNA, 25 bp, SARS Virus
accttttaggattgtatgtcttcct

SEQ ID NO: 26221 - DNA, 25 bp, SARS Virus
ccttttaggatgttatgtcttcctt

SEQ ID NO: 26222 - DNA, 25 bp, SARS Virus
cttttaggatggtatgtcttccttc

SEQ ID NO: 26223 - DNA, 25 bp, SARS Virus
ttttaggatggtttgtcttccttca

SEQ ID NO: 26224 - DNA, 25 bp, SARS Virus
tttaggatggtatgtcttccttcag

SEQ ID NO: 26225 - DNA, 25 bp, SARS Virus
ttaggatggtatttcttccttcagt

SEQ ID NO: 26226 - DNA, 25 bp, SARS Virus
taggatggtatgtcttccttcagta

SEQ ID NO: 26227 - DNA, 25 bp, SARS Virus
aggatggtatgttttccttcagtat

SEQ ID NO: 26228 - DNA, 25 bp, SARS Virus
ggatggtatgtcttccttcagtatc

SEQ ID NO: 26229 - DNA, 25 bp, SARS Virus
gatggtatgtcttccttcagtatct

SEQ ID NO: 26230 - DNA, 25 bp, SARS Virus
atggtatgtctttcttcagtatctc

SEQ ID NO: 26231 - DNA, 25 bp, SARS Virus
tggtatgtcttctttcagtatctca

SEQ ID NO: 26232 - DNA, 25 bp, SARS Virus
ggtatgtcttccttcagtatctcac

SEQ ID NO: 26233 - DNA, 25 bp, SARS Virus
gtatgtcttccttcagtatctcaca

SEQ ID NO: 26234 - DNA, 25 bp, SARS Virus
tatgtcttcctttagtatctcacac

SEQ ID NO: 26235 - DNA, 25 bp, SARS Virus
atgtcttccttctgtatctcacact

SEQ ID NO: 26236 - DNA, 25 bp, SARS Virus
tgtcttccttcattatctcacactg

SEQ ID NO: 26237 - DNA, 25 bp, SARS Virus
gtcttccttcagtatctcacactgc

SEQ ID NO: 26238 - DNA, 25 bp, SARS Virus
tcttccttcagtttctcacactgca

SEQ ID NO: 26239 - DNA, 25 bp, SARS Virus
cttccttcagtatctcacactgcac

SEQ ID NO: 26240 - DNA, 25 bp, SARS Virus
ttccttcagtatttcacactgcact

SEQ ID NO: 26241 - DNA, 25 bp, SARS Virus
tccttcagtatctcacactgcactt

SEQ ID NO: 26242 - DNA, 25 bp, SARS Virus
ccttcagtatcttacactgcacttt

SEQ ID NO: 26243 - DNA, 25 bp, SARS Virus
cttcagtatctctcactgcactttt

SEQ ID NO: 26244 - DNA, 25 bp, SARS Virus
ttcagtatctcatactgcacttttg

SEQ ID NO: 26245 - DNA, 25 bp, SARS Virus
tcagtatctcactctgcacttttga

SEQ ID NO: 26246 - DNA, 25 bp, SARS Virus
cagtatctcacattgcacttttgat

SEQ ID NO: 26247 - DNA, 25 bp, SARS Virus
agtatctcacactgcacttttgatg

SEQ ID NO: 26248 - DNA, 25 bp, SARS Virus
gtatctcacacttcacttttgatgg

SEQ ID NO: 26249 - DNA, 25 bp, SARS Virus
tatctcacactgtacttttgatggc

SEQ ID NO: 26250 - DNA, 25 bp, SARS Virus
atctcacactgctcttttgatggct

SEQ ID NO: 26251 - DNA, 25 bp, SARS Virus
tctcacactgcatttttgatggctt

SEQ ID NO: 26252 - DNA, 25 bp, SARS Virus
ctcacactgcacttttgatggcttc

SEQ ID NO: 26253 - DNA, 25 bp, SARS Virus
tcacactgcacttttgatggcttca

SEQ ID NO: 26254 - DNA, 25 bp, SARS Virus
cacactgcacttttgatggcttcaa

SEQ ID NO: 26255 - DNA, 25 bp, SARS Virus
acactgcacttttgatggcttcaac

SEQ ID NO: 26256 - DNA, 25 bp, SARS Virus
cactgcactttttatggcttcaaca

SEQ ID NO: 26257 - DNA, 25 bp, SARS Virus
actgcacttttgttggcttcaacat

SEQ ID NO: 26258 - DNA, 25 bp, SARS Virus
ctgcacttttgatggcttcaacatc

SEQ ID NO: 26259 - DNA, 25 bp, SARS Virus
tgcacttttgattgcttcaacatcc

SEQ ID NO: 26260 - DNA, 25 bp, SARS Virus
gcacttttgatgtcttcaacatccg

SEQ ID NO: 26261 - DNA, 25 bp, SARS Virus
cacttttgatggtttcaacatccgt

SEQ ID NO: 26262 - DNA, 25 bp, SARS Virus
acttttgatggcttcaacatccgtt

SEQ ID NO: 26263 - DNA, 25 bp, SARS Virus
cttttgatggcttcaacatccgtta

SEQ ID NO: 26264 - DNA, 25 bp, SARS Virus
ttttgatggctttaacatccgttac

SEQ ID NO: 26265 - DNA, 25 bp, SARS Virus
tttgatggcttctacatccgttaca

SEQ ID NO: 26266 - DNA, 25 bp, SARS Virus
ttgatggcttcatcatccgttacag

SEQ ID NO: 26267 - DNA, 25 bp, SARS Virus
tgatggcttcaatatccgttacagt

SEQ ID NO: 26268 - DNA, 25 bp, SARS Virus
gatggcttcaacttccgttacagta

SEQ ID NO: 26269 - DNA, 25 bp, SARS Virus
atggcttcaacatccgttacagtat

SEQ ID NO: 26270 - DNA, 25 bp, SARS Virus
tggcttcaacattcgttacagtatg

SEQ ID NO: 26271 - DNA, 25 bp, SARS Virus
ggcttcaacatctgttacagtatga

SEQ ID NO: 26272 - DNA, 25 bp, SARS Virus
gcttcaacatcctttacagtatgaa

SEQ ID NO: 26273 - DNA, 25 bp, SARS Virus
cttcaacatccgttacagtatgaat

SEQ ID NO: 26274 - DNA, 25 bp, SARS Virus
ttcaacatccgttacagtatgaatt

SEQ ID NO: 26275 - DNA, 25 bp, SARS Virus
tcaacatccgtttcagtatgaattt

SEQ ID NO: 26276 - DNA, 25 bp, SARS Virus
caacatccgttatagtatgaatttg

SEQ ID NO: 26277 - DNA, 25 bp, SARS Virus
aacatccgttactgtatgaatttgg

SEQ ID NO: 26278 - DNA, 25 bp, SARS Virus
acatccgttacattatgaatttggt

SEQ ID NO: 26279 - DNA, 25 bp, SARS Virus
catccgttacagtatgaatttggta

SEQ ID NO: 26280 - DNA, 25 bp, SARS Virus
atccgttacagtttgaatttggtag

SEQ ID NO: 26281 - DNA, 25 bp, SARS Virus
tccgttacagtatgaatttggtagt

SEQ ID NO: 26282 - DNA, 25 bp, SARS Virus
ccgttacagtattaatttggtagtc

SEQ ID NO: 26283 - DNA, 25 bp, SARS Virus
cgttacagtatgtatttggtagtct

SEQ ID NO: 26284 - DNA, 25 bp, SARS Virus
gttacagtatgattttggtagtcta

SEQ ID NO: 26285 - DNA, 25 bp, SARS Virus
ttacagtatgaatttggtagtctac

SEQ ID NO: 26286 - DNA, 25 bp, SARS Virus
tacagtatgaatttggtagtctact

SEQ ID NO: 26287 - DNA, 25 bp, SARS Virus
acagtatgaatttggtagtctactt

SEQ ID NO: 26288 - DNA, 25 bp, SARS Virus
cagtatgaattttgtagtctacttc

SEQ ID NO: 26289 - DNA, 25 bp, SARS Virus
agtatgaatttgttagtctacttcc

SEQ ID NO: 26290 - DNA, 25 bp, SARS Virus
gtatgaatttggtagtctacttcca

SEQ ID NO: 26291 - DNA, 25 bp, SARS Virus
tatgaatttggttgtctacttccac

SEQ ID NO: 26292 - DNA, 25 bp, SARS Virus
atgaatttggtattctacttccaca

SEQ ID NO: 26293 - DNA, 25 bp, SARS Virus
tgaatttggtagtctacttccacaa

SEQ ID NO: 26294 - DNA, 25 bp, SARS Virus
gaatttggtagtttacttccacaat

SEQ ID NO: 26295 - DNA, 25 bp, SARS Virus
aatttggtagtctacttccacaatt

SEQ ID NO: 26296 - DNA, 25 bp, SARS Virus
atttggtagtcttcttccacaattt

SEQ ID NO: 26297 - DNA, 25 bp, SARS Virus
tttggtagtctatttccacaatttc

SEQ ID NO: 26298 - DNA, 25 bp, SARS Virus
ttggtagtctacttccacaatttca

SEQ ID NO: 26299 - DNA, 25 bp, SARS Virus
tggtagtctacttccacaatttcat

SEQ ID NO: 26300 - DNA, 25 bp, SARS Virus
ggtagtctactttcacaatttcatt

SEQ ID NO: 26301 - DNA, 25 bp, SARS Virus
gtagtctacttctacaatttcattg

SEQ ID NO: 26302 - DNA, 25 bp, SARS Virus
tagtctacttcctcaatttcattgt

SEQ ID NO: 26303 - DNA, 25 bp, SARS Virus
agtctacttccataatttcattgtg

SEQ ID NO: 26304 - DNA, 25 bp, SARS Virus
gtctacttccactatttcattgtgt

SEQ ID NO: 26305 - DNA, 25 bp, SARS Virus
tctacttccacattttcattgtgtt

SEQ ID NO: 26306 - DNA, 25 bp, SARS Virus
ctacttccacaatttcattgtgttc

SEQ ID NO: 26307 - DNA, 25 bp, SARS Virus
tacttccacaatttcattgtgttct

SEQ ID NO: 26308 - DNA, 25 bp, SARS Virus
acttccacaatttcattgtgttctc

SEQ ID NO: 26309 - DNA, 25 bp, SARS Virus
cttccacaattttattgtgttctca

SEQ ID NO: 26310 - DNA, 25 bp, SARS Virus
ttccacaatttctttgtgttctcaa

SEQ ID NO: 26311 - DNA, 25 bp, SARS Virus
tccacaatttcattgtgttctcaat

SEQ ID NO: 26312 - DNA, 25 bp, SARS Virus
ccacaatttcattgtgttctcaatc

SEQ ID NO: 26313 - DNA, 25 bp, SARS Virus
cacaatttcattttgttctcaatcc

SEQ ID NO: 26314 - DNA, 25 bp, SARS Virus
acaatttcattgtgttctcaatcca

SEQ ID NO: 26315 - DNA, 25 bp, SARS Virus
caatttcattgttttctcaatccag

SEQ ID NO: 26316 - DNA, 25 bp, SARS Virus
aatttcattgtgttctcaatccagt

SEQ ID NO: 26317 - DNA, 25 bp, SARS Virus
atttcattgtgttctcaatccagta

SEQ ID NO: 26318 - DNA, 25 bp, SARS Virus
tttcattgtgttttcaatccagtac

SEQ ID NO: 26319 - DNA, 25 bp, SARS Virus
ttcattgtgttctcaatccagtact

SEQ ID NO: 26320 - DNA, 25 bp, SARS Virus
tcattgtgttcttaatccagtactc

SEQ ID NO: 26321 - DNA, 25 bp, SARS Virus
cattgtgttctctatccagtactcc

SEQ ID NO: 26322 - DNA, 25 bp, SARS Virus
attgtgttctcattccagtactcct

SEQ ID NO: 26323 - DNA, 25 bp, SARS Virus
ttgtgttctcaatccagtactccta

SEQ ID NO: 26324 - DNA, 25 bp, SARS Virus
tgtgttctcaattcagtactcctag

SEQ ID NO: 26325 - DNA, 25 bp, SARS Virus
gtgttctcaatctagtactcctaga

SEQ ID NO: 26326 - DNA, 25 bp, SARS Virus
tgttctcaatcctgtactcctagaa

SEQ ID NO: 26327 - DNA, 25 bp, SARS Virus
gttctcaatccattactcctagaat

SEQ ID NO: 26328 - DNA, 25 bp, SARS Virus
ttctcaatccagtactcctagaata

SEQ ID NO: 26329 - DNA, 25 bp, SARS Virus
tctcaatccagttctcctagaatac

SEQ ID NO: 26330 - DNA, 25 bp, SARS Virus
ctcaatccagtattcctagaatacc

SEQ ID NO: 26331 - DNA, 25 bp, SARS Virus
tcaatccagtactcctagaataccg

SEQ ID NO: 26332 - DNA, 25 bp, SARS Virus
caatccagtacttctagaataccga

SEQ ID NO: 26333 - DNA, 25 bp, SARS Virus
aatccagtactcttagaataccgac

SEQ ID NO: 26334 - DNA, 25 bp, SARS Virus
atccagtactcctagaataccgacg

SEQ ID NO: 26335 - DNA, 25 bp, SARS Virus
tccagtactccttgaataccgacga

SEQ ID NO: 26336 - DNA, 25 bp, SARS Virus
ccagtactcctataataccgacgaa

SEQ ID NO: 26337 - DNA, 25 bp, SARS Virus
cagtactcctagtataccgacgaat

SEQ ID NO: 26338 - DNA, 25 bp, SARS Virus
agtactcctagattaccgacgaata

SEQ ID NO: 26339 - DNA, 25 bp, SARS Virus
gtactcctagaataccgacgaatac

SEQ ID NO: 26340 - DNA, 25 bp, SARS Virus
tactcctagaattccgacgaataca

SEQ ID NO: 26341 - DNA, 25 bp, SARS Virus
actcctagaatatcgacgaatacac

SEQ ID NO: 26342 - DNA, 25 bp, SARS Virus
ctcctagaatactgacgaatacacc

SEQ ID NO: 26343 - DNA, 25 bp, SARS Virus
tcctagaatacctacgaatacacct

SEQ ID NO: 26344 - DNA, 25 bp, SARS Virus
cctagaataccgtcgaatacacctt

SEQ ID NO: 26345 - DNA, 25 bp, SARS Virus
ctagaataccgatgaatacaccttt

SEQ ID NO: 26346 - DNA, 25 bp, SARS Virus
tagaataccgactaatacacctttt

SEQ ID NO: 26347 - DNA, 25 bp, SARS Virus
agaataccgacgtatacaccttttg

SEQ ID NO: 26348 - DNA, 25 bp, SARS Virus
gaataccgacgattacaccttttgt

SEQ ID NO: 26349 - DNA, 25 bp, SARS Virus
aataccgacgaatacaccttttgtg

SEQ ID NO: 26350 - DNA, 25 bp, SARS Virus
ataccgacgaattcaccttttgtgt

SEQ ID NO: 26351 - DNA, 25 bp, SARS Virus
taccgacgaatataccttttgtgtt

SEQ ID NO: 26352 - DNA, 25 bp, SARS Virus
accgacgaatactccttttgtgttc

SEQ ID NO: 26353 - DNA, 25 bp, SARS Virus
ccgacgaatacatcttttgtgttcg

SEQ ID NO: 26354 - DNA, 25 bp, SARS Virus
cgacgaatacactttttgtgttcgt

SEQ ID NO: 26355 - DNA, 25 bp, SARS Virus
gacgaatacaccttttgtgttcgta

SEQ ID NO: 26356 - DNA, 25 bp, SARS Virus
acgaatacaccttttgtgttcgtaa

SEQ ID NO: 26357 - DNA, 25 bp, SARS Virus
cgaatacaccttttgtgttcgtaat

SEQ ID NO: 26358 - DNA, 25 bp, SARS Virus
gaatacaccttttgtgttcgtaatg

SEQ ID NO: 26359 - DNA, 25 bp, SARS Virus
aatacaccttttttgttcgtaatgg

SEQ ID NO: 26360 - DNA, 25 bp, SARS Virus
atacaccttttgtgttcgtaatggt

SEQ ID NO: 26361 - DNA, 25 bp, SARS Virus
tacaccttttgttttcgtaatggta

SEQ ID NO: 26362 - DNA, 25 bp, SARS Virus
acaccttttgtgttcgtaatggtaa

SEQ ID NO: 26363 - DNA, 25 bp, SARS Virus
caccttttgtgttcgtaatggtaat

SEQ ID NO: 26364 - DNA, 25 bp, SARS Virus
accttttgtgtttgtaatggtaatt

SEQ ID NO: 26365 - DNA, 25 bp, SARS Virus
ccttttgtgttcttaatggtaattc

SEQ ID NO: 26366 - DNA, 25 bp, SARS Virus
cttttgtgttcgtaatggtaattct

SEQ ID NO: 26367 - DNA, 25 bp, SARS Virus
ttttgtgttcgttatggtaattctt

SEQ ID NO: 26368 - DNA, 25 bp, SARS Virus
tttgtgttcgtattggtaattcttt

SEQ ID NO: 26369 - DNA, 25 bp, SARS Virus
ttgtgttcgtaatggtaattctttg

SEQ ID NO: 26370 - DNA, 25 bp, SARS Virus
tgtgttcgtaattgtaattctttgg

SEQ ID NO: 26371 - DNA, 25 bp, SARS Virus
gtgttcgtaatgttaattctttgga

SEQ ID NO: 26372 - DNA, 25 bp, SARS Virus
tgttcgtaatggtaattctttggat

SEQ ID NO: 26373 - DNA, 25 bp, SARS Virus
gttcgtaatggttattctttggatt

SEQ ID NO: 26374 - DNA, 25 bp, SARS Virus
ttcgtaatggtatttctttggatta

SEQ ID NO: 26375 - DNA, 25 bp, SARS Virus
tcgtaatggtaattctttggattac

SEQ ID NO: 26376 - DNA, 25 bp, SARS Virus
cgtaatggtaattctttggattact

SEQ ID NO: 26377 - DNA, 25 bp, SARS Virus
gtaatggtaattttttggattactc

SEQ ID NO: 26378 - DNA, 25 bp, SARS Virus
taatggtaattctttggattactcg

SEQ ID NO: 26379 - DNA, 25 bp, SARS Virus
aatggtaattctttggattactcga

SEQ ID NO: 26380 - DNA, 25 bp, SARS Virus
atggtaattctttggattactcgaa

SEQ ID NO: 26381 - DNA, 25 bp, SARS Virus
tggtaattcttttgattactcgaaa

SEQ ID NO: 26382 - DNA, 25 bp, SARS Virus
ggtaattctttgtattactcgaaag

SEQ ID NO: 26383 - DNA, 25 bp, SARS Virus
gtaattctttggtttactcgaaagt

SEQ ID NO: 26384 - DNA, 25 bp, SARS Virus
taattctttggattactcgaaagtg

SEQ ID NO: 26385 - DNA, 25 bp, SARS Virus
aattctttggattactcgaaagtga

SEQ ID NO: 26386 - DNA, 25 bp, SARS Virus
attctttggatttctcgaaagtgat

SEQ ID NO: 26387 - DNA, 25 bp, SARS Virus
ttctttggattattcgaaagtgatc

SEQ ID NO: 26388 - DNA, 25 bp, SARS Virus
tctttggattactcgaaagtgatcg

SEQ ID NO: 26389 - DNA, 25 bp, SARS Virus
ctttggattacttgaaagtgatcgg

SEQ ID NO: 26390 - DNA, 25 bp, SARS Virus
tttggattactctaaagtgatcgga

SEQ ID NO: 26391 - DNA, 25 bp, SARS Virus
ttggattactcgtaagtgatcggaa

SEQ ID NO: 26392 - DNA, 25 bp, SARS Virus
tggattactcgatagtgatcggaat

SEQ ID NO: 26393 - DNA, 25 bp, SARS Virus
ggattactcgaatgtgatcggaatc

SEQ ID NO: 26394 - DNA, 25 bp, SARS Virus
gattactcgaaattgatcggaatcc

SEQ ID NO: 26395 - DNA, 25 bp, SARS Virus
attactcgaaagtgatcggaatcca

SEQ ID NO: 26396 - DNA, 25 bp, SARS Virus
ttactcgaaagttatcggaatccaa

SEQ ID NO: 26397 - DNA, 25 bp, SARS Virus
tactcgaaagtgttcggaatccaaa

SEQ ID NO: 26398 - DNA, 25 bp, SARS Virus
actcgaaagtgatcggaatccaaat

SEQ ID NO: 26399 - DNA, 25 bp, SARS Virus
ctcgaaagtgattggaatccaaatt

SEQ ID NO: 26400 - DNA, 25 bp, SARS Virus
tcgaaagtgatctgaatccaaattt

SEQ ID NO: 26401 - DNA, 25 bp, SARS Virus
cgaaagtgatcgtaatccaaatttt

SEQ ID NO: 26402 - DNA, 25 bp, SARS Virus
gaaagtgatcggtatccaaattttt

SEQ ID NO: 26403 - DNA, 25 bp, SARS Virus
aaagtgatcggattccaaatttttg

SEQ ID NO: 26404 - DNA, 25 bp, SARS Virus
aagtgatcggaatccaaatttttgt

SEQ ID NO: 26405 - DNA, 25 bp, SARS Virus
agtgatcggaattcaaatttttgtt

SEQ ID NO: 26406 - DNA, 25 bp, SARS Virus
gtgatcggaatctaaatttttgtta

SEQ ID NO: 26407 - DNA, 25 bp, SARS Virus
tgatcggaatcctaatttttgttaa

SEQ ID NO: 26408 - DNA, 25 bp, SARS Virus
gatcggaatccatatttttgttaac

SEQ ID NO: 26409 - DNA, 25 bp, SARS Virus
atcggaatccaattttttgttaacg

SEQ ID NO: 26410 - DNA, 25 bp, SARS Virus
tcggaatccaaatttttgttaacgg

SEQ ID NO: 26411 - DNA, 25 bp, SARS Virus
cggaatccaaatttttgttaacggt

SEQ ID NO: 26412 - DNA, 25 bp, SARS Virus
ggaatccaaatttttgttaacggtg

SEQ ID NO: 26413 - DNA, 25 bp, SARS Virus
gaatccaaatttttgttaacggtga

SEQ ID NO: 26414 - DNA, 25 bp, SARS Virus
aatccaaatttttgttaacggtgag

SEQ ID NO: 26415 - DNA, 25 bp, SARS Virus
atccaaattttttttaacggtgagt

SEQ ID NO: 26416 - DNA, 25 bp, SARS Virus
tccaaatttttgttaacggtgagta

SEQ ID NO: 26417 - DNA, 25 bp, SARS Virus
ccaaatttttgttaacggtgagtac

SEQ ID NO: 26418 - DNA, 25 bp, SARS Virus
caaatttttgtttacggtgagtacc

SEQ ID NO: 26419 - DNA, 25 bp, SARS Virus
aaatttttgttatcggtgagtacca

SEQ ID NO: 26420 - DNA, 25 bp, SARS Virus
aatttttgttaatggtgagtaccat

SEQ ID NO: 26421 - DNA, 25 bp, SARS Virus
atttttgttaactgtgagtaccata

SEQ ID NO: 26422 - DNA, 25 bp, SARS Virus
tttttgttaacgttgagtaccataa

SEQ ID NO: 26423 - DNA, 25 bp, SARS Virus
ttttgttaacggtgagtaccataac

SEQ ID NO: 26424 - DNA, 25 bp, SARS Virus
tttgttaacggttagtaccataacg

SEQ ID NO: 26425 - DNA, 25 bp, SARS Virus
ttgttaacggtgtgtaccataacga

SEQ ID NO: 26426 - DNA, 25 bp, SARS Virus
tgttaacggtgattaccataacgac

SEQ ID NO: 26427 - DNA, 25 bp, SARS Virus
gttaacggtgagtaccataacgacg

SEQ ID NO: 26428 - DNA, 25 bp, SARS Virus
ttaacggtgagttccataacgacgt

SEQ ID NO: 26429 - DNA, 25 bp, SARS Virus
taacggtgagtatcataacgacgtt

SEQ ID NO: 26430 - DNA, 25 bp, SARS Virus
aacggtgagtactataacgacgtta

SEQ ID NO: 26431 - DNA, 25 bp, SARS Virus
acggtgagtaccttaacgacgttaa

SEQ ID NO: 26432 - DNA, 25 bp, SARS Virus
cggtgagtaccataacgacgttaat

SEQ ID NO: 26433 - DNA, 25 bp, SARS Virus
ggtgagtaccattacgacgttaatt

SEQ ID NO: 26434 - DNA, 25 bp, SARS Virus
gtgagtaccatatcgacgttaatta

SEQ ID NO: 26435 - DNA, 25 bp, SARS Virus
tgagtaccataatgacgttaattat

SEQ ID NO: 26436 - DNA, 25 bp, SARS Virus
gagtaccataactacgttaattatc

SEQ ID NO: 26437 - DNA, 25 bp, SARS Virus
agtaccataacgtcgttaattatca

SEQ ID NO: 26438 - DNA, 25 bp, SARS Virus
gtaccataacgatgttaattatcac

SEQ ID NO: 26439 - DNA, 25 bp, SARS Virus
taccataacgactttaattatcaca

SEQ ID NO: 26440 - DNA, 25 bp, SARS Virus
accataacgacgttaattatcacaa

SEQ ID NO: 26441 - DNA, 25 bp, SARS Virus
ccataacgacgttaattatcacaag

SEQ ID NO: 26442 - DNA, 25 bp, SARS Virus
cataacgacgtttattatcacaagg

SEQ ID NO: 26443 - DNA, 25 bp, SARS Virus
ataacgacgttatttatcacaagga

SEQ ID NO: 26444 - DNA, 25 bp, SARS Virus
taacgacgttaattatcacaaggaa

SEQ ID NO: 26445 - DNA, 25 bp, SARS Virus
aacgacgttaattatcacaaggaac

SEQ ID NO: 26446 - DNA, 25 bp, SARS Virus
acgacgttaattttcacaaggaacc

SEQ ID NO: 26447 - DNA, 25 bp, SARS Virus
cgacgttaattatcacaaggaacct

SEQ ID NO: 26448 - DNA, 25 bp, SARS Virus
gacgttaattattacaaggaacctc

SEQ ID NO: 26449 - DNA, 25 bp, SARS Virus
acgttaattatctcaaggaacctca

SEQ ID NO: 26450 - DNA, 25 bp, SARS Virus
cgttaattatcataaggaacctcat

SEQ ID NO: 26451 - DNA, 25 bp, SARS Virus
gttaattatcactaggaacctcatt

SEQ ID NO: 26452 - DNA, 25 bp, SARS Virus
ttaattatcacatggaacctcattt

SEQ ID NO: 26453 - DNA, 25 bp, SARS Virus
taattatcacaatgaacctcatttt

SEQ ID NO: 26454 - DNA, 25 bp, SARS Virus
aattatcacaagtaacctcatttta

SEQ ID NO: 26455 - DNA, 25 bp, SARS Virus
attatcacaaggtacctcattttaa

SEQ ID NO: 26456 - DNA, 25 bp, SARS Virus
ttatcacaaggatcctcattttaaa

SEQ ID NO: 26457 - DNA, 25 bp, SARS Virus
tatcacaaggaatctcattttaaaa

SEQ ID NO: 26458 - DNA, 25 bp, SARS Virus
atcacaaggaacttcattttaaaac

SEQ ID NO: 26459 - DNA, 25 bp, SARS Virus
tcacaaggaacctcattttaaaacc

SEQ ID NO: 26460 - DNA, 25 bp, SARS Virus
cacaaggaaccttattttaaaaccg

SEQ ID NO: 26461 - DNA, 25 bp, SARS Virus
acaaggaacctctttttaaaaccga

SEQ ID NO: 26462 - DNA, 25 bp, SARS Virus
caaggaacctcattttaaaaccgaa

SEQ ID NO: 26463 - DNA, 25 bp, SARS Virus
aaggaacctcattttaaaaccgaat

SEQ ID NO: 26464 - DNA, 25 bp, SARS Virus
aggaacctcattttaaaaccgaata

SEQ ID NO: 26465 - DNA, 25 bp, SARS Virus
ggaacctcattttaaaaccgaatac

SEQ ID NO: 26466 - DNA, 25 bp, SARS Virus
gaacctcatttttaaaccgaataca

SEQ ID NO: 26467 - DNA, 25 bp, SARS Virus
aacctcattttataaccgaatacag

SEQ ID NO: 26468 - DNA, 25 bp, SARS Virus
acctcattttaataccgaatacagt

SEQ ID NO: 26469 - DNA, 25 bp, SARS Virus
cctcattttaaatccgaatacagtt

SEQ ID NO: 26470 - DNA, 25 bp, SARS Virus
ctcattttaaaatcgaatacagttt

SEQ ID NO: 26471 - DNA, 25 bp, SARS Virus
tcattttaaaactgaatacagtttg

SEQ ID NO: 26472 - DNA, 25 bp, SARS Virus
cattttaaaacctaatacagtttgg

SEQ ID NO: 26473 - DNA, 25 bp, SARS Virus
attttaaaaccgtatacagtttggt

SEQ ID NO: 26474 - DNA, 25 bp, SARS Virus
ttttaaaaccgattacagtttggta

SEQ ID NO: 26475 - DNA, 25 bp, SARS Virus
tttaaaaccgaatacagtttggtaa

SEQ ID NO: 26476 - DNA, 25 bp, SARS Virus
ttaaaaccgaattcagtttggtaag

SEQ ID NO: 26477 - DNA, 25 bp, SARS Virus
taaaaccgaatatagtttggtaaga

SEQ ID NO: 26478 - DNA, 25 bp, SARS Virus
aaaaccgaatactgtttggtaagaa

SEQ ID NO: 26479 - DNA, 25 bp, SARS Virus
aaaccgaatacattttggtaagaat

SEQ ID NO: 26480 - DNA, 25 bp, SARS Virus
aaccgaatacagtttggtaagaatc

SEQ ID NO: 26481 - DNA, 25 bp, SARS Virus
accgaatacagtatggtaagaatcc

SEQ ID NO: 26482 - DNA, 25 bp, SARS Virus
ccgaatacagttaggtaagaatcct

SEQ ID NO: 26483 - DNA, 25 bp, SARS Virus
cgaatacagtttagtaagaatcctg

SEQ ID NO: 26484 - DNA, 25 bp, SARS Virus
gaatacagtttgataagaatcctgt

SEQ ID NO: 26485 - DNA, 25 bp, SARS Virus
aatacagtttggaaagaatcctgtt

SEQ ID NO: 26486 - DNA, 25 bp, SARS Virus
atacagtttggtaagaatcctgttc

SEQ ID NO: 26487 - DNA, 25 bp, SARS Virus
tacagtttggtaagaatcctgttcg

SEQ ID NO: 26488 - DNA, 25 bp, SARS Virus
acagtttggtaaaaatcctgttcgt

SEQ ID NO: 26489 - DNA, 25 bp, SARS Virus
cagtttggtaagaatcctgttcgtc

SEQ ID NO: 26490 - DNA, 25 bp, SARS Virus
agtttggtaagaatcctgttcgtcg

SEQ ID NO: 26491 - DNA, 25 bp, SARS Virus
gtttggtaagaaacctgttcgtcgt

SEQ ID NO: 26492 - DNA, 25 bp, SARS Virus
tttggtaagaatactgttcgtcgtt

SEQ ID NO: 26493 - DNA, 25 bp, SARS Virus
ttggtaagaatcatgttcgtcgtta

SEQ ID NO: 26494 - DNA, 25 bp, SARS Virus
tggtaagaatccagttcgtcgttaa

SEQ ID NO: 26495 - DNA, 25 bp, SARS Virus
ggtaagaatcctattcgtcgttaat

SEQ ID NO: 26496 - DNA, 25 bp, SARS Virus
gtaagaatcctgatcgtcgttaatg

SEQ ID NO: 26497 - DNA, 25 bp, SARS Virus
taagaatcctgtacgtcgttaatgt

SEQ ID NO: 26498 - DNA, 25 bp, SARS Virus
aagaatcctgttagtcgttaatgtt

SEQ ID NO: 26499 - DNA, 25 bp, SARS Virus
agaatcctgttcatcgttaatgttg

SEQ ID NO: 26500 - DNA, 25 bp, SARS Virus
gaatcctgttcgacgttaatgttgt

SEQ ID NO: 26501 - DNA, 25 bp, SARS Virus
aatcctgttcgtagttaatgttgta

SEQ ID NO: 26502 - DNA, 25 bp, SARS Virus
atcctgttcgtcattaatgttgtag

SEQ ID NO: 26503 - DNA, 25 bp, SARS Virus
tcctgttcgtcgataatgttgtagt

SEQ ID NO: 26504 - DNA, 25 bp, SARS Virus
cctgttcgtcgtaaatgttgtagtt

SEQ ID NO: 26505 - DNA, 25 bp, SARS Virus
ctgttcgtcgttaatgttgtagttt

SEQ ID NO: 26506 - DNA, 25 bp, SARS Virus
tgttcgtcgttaatgttgtagttta

SEQ ID NO: 26507 - DNA, 25 bp, SARS Virus
gttcgtcgttaaagttgtagtttaa

SEQ ID NO: 26508 - DNA, 25 bp, SARS Virus
ttcgtcgttaatattgtagtttaac

SEQ ID NO: 26509 - DNA, 25 bp, SARS Virus
tcgtcgttaatgatgtagtttaacg

SEQ ID NO: 26510 - DNA, 25 bp, SARS Virus
cgtcgttaatgtagtagtttaacgc

SEQ ID NO: 26511 - DNA, 25 bp, SARS Virus
gtcgttaatgttatagtttaacgcg

SEQ ID NO: 26512 - DNA, 25 bp, SARS Virus
tcgttaatgttgaagtttaacgcga

SEQ ID NO: 26513 - DNA, 25 bp, SARS Virus
cgttaatgttgtagtttaacgcgat

SEQ ID NO: 26514 - DNA, 25 bp, SARS Virus
gttaatgttgtaatttaacgcgatt

SEQ ID NO: 26515 - DNA, 25 bp, SARS Virus
ttaatgttgtagattaacgcgattc

SEQ ID NO: 26516 - DNA, 25 bp, SARS Virus
taatgttgtagtataacgcgattct

SEQ ID NO: 26517 - DNA, 25 bp, SARS Virus
aatgttgtagttaaacgcgattctc

SEQ ID NO: 26518 - DNA, 25 bp, SARS Virus
atgttgtagtttaacgcgattctct

SEQ ID NO: 26519 - DNA, 25 bp, SARS Virus
tgttgtagtttaacgcgattctcta

SEQ ID NO: 26520 - DNA, 25 bp, SARS Virus
gttgtagtttaaagcgattctctaa

SEQ ID NO: 26521 - DNA, 25 bp, SARS Virus
ttgtagtttaacacgattctctaat

SEQ ID NO: 26522 - DNA, 25 bp, SARS Virus
tgtagtttaacgagattctctaatc

SEQ ID NO: 26523 - DNA, 25 bp, SARS Virus
gtagtttaacgcaattctctaatcg

SEQ ID NO: 26524 - DNA, 25 bp, SARS Virus
tagtttaacgcgattctctaatcgt

SEQ ID NO: 26525 - DNA, 25 bp, SARS Virus
agtttaacgcgaatctctaatcgtg

SEQ ID NO: 26526 - DNA, 25 bp, SARS Virus
gtttaacgcgatactctaatcgtgt

SEQ ID NO: 26527 - DNA, 25 bp, SARS Virus
tttaacgcgattatctaatcgtgtt

SEQ ID NO: 26528 - DNA, 25 bp, SARS Virus
ttaacgcgattcactaatcgtgttg

SEQ ID NO: 26529 - DNA, 25 bp, SARS Virus
taacgcgattctataatcgtgttgc

SEQ ID NO: 26530 - DNA, 25 bp, SARS Virus
aacgcgattctcaaatcgtgttgca

SEQ ID NO: 26531 - DNA, 25 bp, SARS Virus
acgcgattctctaatcgtgttgcac

SEQ ID NO: 26532 - DNA, 25 bp, SARS Virus
cgcgattctctaatcgtgttgcaca

SEQ ID NO: 26533 - DNA, 25 bp, SARS Virus
gcgattctctaaacgtgttgcacac

SEQ ID NO: 26534 - DNA, 25 bp, SARS Virus
cgattctctaatagtgttgcacaca

SEQ ID NO: 26535 - DNA, 25 bp, SARS Virus
gattctctaatcatgttgcacacaa

SEQ ID NO: 26536 - DNA, 25 bp, SARS Virus
attctctaatcgagttgcacacaaa

SEQ ID NO: 26537 - DNA, 25 bp, SARS Virus
ttctctaatcgtattgcacacaaat

SEQ ID NO: 26538 - DNA, 25 bp, SARS Virus
tctctaatcgtgatgcacacaaatt

SEQ ID NO: 26539 - DNA, 25 bp, SARS Virus
ctctaatcgtgtagcacacaaattg

SEQ ID NO: 26540 - DNA, 25 bp, SARS Virus
tctaatcgtgttacacacaaattgt

SEQ ID NO: 26541 - DNA, 25 bp, SARS Virus
ctaatcgtgttgaacacaaattgtt

SEQ ID NO: 26542 - DNA, 25 bp, SARS Virus
taatcgtgttgcacacaaattgtta

SEQ ID NO: 26543 - DNA, 25 bp, SARS Virus
aatcgtgttgcaaacaaattgttaa

SEQ ID NO: 26544 - DNA, 25 bp, SARS Virus
atcgtgttgcacacaaattgttaat

SEQ ID NO: 26545 - DNA, 25 bp, SARS Virus
tcgtgttgcacaaaaattgttaata

SEQ ID NO: 26546 - DNA, 25 bp, SARS Virus
cgtgttgcacacaaattgttaatat

SEQ ID NO: 26547 - DNA, 25 bp, SARS Virus
gtgttgcacacaaattgttaatata

SEQ ID NO: 26548 - DNA, 25 bp, SARS Virus
tgttgcacacaaattgttaatatac

SEQ ID NO: 26549 - DNA, 25 bp, SARS Virus
gttgcacacaaaatgttaatatacg

SEQ ID NO: 26550 - DNA, 25 bp, SARS Virus
ttgcacacaaatagttaatatacgg

SEQ ID NO: 26551 - DNA, 25 bp, SARS Virus
tgcacacaaattattaatatacgga

SEQ ID NO: 26552 - DNA, 25 bp, SARS Virus
gcacacaaattgataatatacggaa

SEQ ID NO: 26553 - DNA, 25 bp, SARS Virus
cacacaaattgtaaatatacggaat

SEQ ID NO: 26554 - DNA, 25 bp, SARS Virus
acacaaattgttaatatacggaata

SEQ ID NO: 26555 - DNA, 25 bp, SARS Virus
cacaaattgttaatatacggaatac

SEQ ID NO: 26556 - DNA, 25 bp, SARS Virus
acaaattgttaaaatacggaataca

SEQ ID NO: 26557 - DNA, 25 bp, SARS Virus
caaattgttaatatacggaatacac

SEQ ID NO: 26558 - DNA, 25 bp, SARS Virus
aaattgttaataaacggaatacaca

SEQ ID NO: 26559 - DNA, 25 bp, SARS Virus
aattgttaatatacggaatacacaa

SEQ ID NO: 26560 - DNA, 25 bp, SARS Virus
attgttaatataaggaatacacaaa

SEQ ID NO: 26561 - DNA, 25 bp, SARS Virus
ttgttaatatacagaatacacaaat

SEQ ID NO: 26562 - DNA, 25 bp, SARS Virus
tgttaatatacgaaatacacaaatg

SEQ ID NO: 26563 - DNA, 25 bp, SARS Virus
gttaatatacggaatacacaaatgt

SEQ ID NO: 26564 - DNA, 25 bp, SARS Virus
ttaatatacggaatacacaaatgta

SEQ ID NO: 26565 - DNA, 25 bp, SARS Virus
taatatacggaaaacacaaatgtaa

SEQ ID NO: 26566 - DNA, 25 bp, SARS Virus
aatatacggaatacacaaatgtaat

SEQ ID NO: 26567 - DNA, 25 bp, SARS Virus
atatacggaataaacaaatgtaata

SEQ ID NO: 26568 - DNA, 25 bp, SARS Virus
tatacggaatacacaaatgtaataa

SEQ ID NO: 26569 - DNA, 25 bp, SARS Virus
atacggaatacaaaaatgtaataac

SEQ ID NO: 26570 - DNA, 25 bp, SARS Virus
tacggaatacacaaatgtaataaca

SEQ ID NO: 26571 - DNA, 25 bp, SARS Virus
acggaatacacaaatgtaataacaa

SEQ ID NO: 26572 - DNA, 25 bp, SARS Virus
cggaatacacaaatgtaataacaag

SEQ ID NO: 26573 - DNA, 25 bp, SARS Virus
ggaatacacaaaagtaataacaagg

SEQ ID NO: 26574 - DNA, 25 bp, SARS Virus
gaatacacaaatataataacaaggt

SEQ ID NO: 26575 - DNA, 25 bp, SARS Virus
aatacacaaatgaaataacaaggtt

SEQ ID NO: 26576 - DNA, 25 bp, SARS Virus
atacacaaatgtaataacaaggtta

SEQ ID NO: 26577 - DNA, 25 bp, SARS Virus
tacacaaatgtaataacaaggttaa

SEQ ID NO: 26578 - DNA, 25 bp, SARS Virus
acacaaatgtaaaaacaaggttaac

SEQ ID NO: 26579 - DNA, 25 bp, SARS Virus
cacaaatgtaataacaaggttaaca

SEQ ID NO: 26580 - DNA, 25 bp, SARS Virus
acaaatgtaataacaaggttaacac

SEQ ID NO: 26581 - DNA, 25 bp, SARS Virus
caaatgtaataaaaaggttaacaca

SEQ ID NO: 26582 - DNA, 25 bp, SARS Virus
aaatgtaataacaaggttaacacat

SEQ ID NO: 26583 - DNA, 25 bp, SARS Virus
aatgtaataacaaggttaacacatg

SEQ ID NO: 26584 - DNA, 25 bp, SARS Virus
atgtaataacaaagttaacacatga

SEQ ID NO: 26585 - DNA, 25 bp, SARS Virus
tgtaataacaagattaacacatgaa

SEQ ID NO: 26586 - DNA, 25 bp, SARS Virus
gtaataacaaggataacacatgaaa

SEQ ID NO: 26587 - DNA, 25 bp, SARS Virus
taataacaaggtaaacacatgaaaa

SEQ ID NO: 26588 - DNA, 25 bp, SARS Virus
aataacaaggttaacacatgaaaat

SEQ ID NO: 26589 - DNA, 25 bp, SARS Virus
ataacaaggttaacacatgaaaatg

SEQ ID NO: 26590 - DNA, 25 bp, SARS Virus
taacaaggttaaaacatgaaaatga

SEQ ID NO: 26591 - DNA, 25 bp, SARS Virus
aacaaggttaacacatgaaaatgat

SEQ ID NO: 26592 - DNA, 25 bp, SARS Virus
acaaggttaacaaatgaaaatgatt

SEQ ID NO: 26593 - DNA, 25 bp, SARS Virus
caaggttaacacatgaaaatgattt

SEQ ID NO: 26594 - DNA, 25 bp, SARS Virus
aaggttaacacaagaaaatgatttt

SEQ ID NO: 26595 - DNA, 25 bp, SARS Virus
aggttaacacataaaaatgattttc

SEQ ID NO: 26596 - DNA, 25 bp, SARS Virus
ggttaacacatgaaaatgattttca

SEQ ID NO: 26597 - DNA, 25 bp, SARS Virus
gttaacacatgaaaatgattttcat

SEQ ID NO: 26598 - DNA, 25 bp, SARS Virus
ttaacacatgaaaatgattttcatg

SEQ ID NO: 26599 - DNA, 25 bp, SARS Virus
taacacatgaaaatgattttcatgg

SEQ ID NO: 26600 - DNA, 25 bp, SARS Virus
aacacatgaaaaagattttcatggt

SEQ ID NO: 26601 - DNA, 25 bp, SARS Virus
acacatgaaaataattttcatggtt

SEQ ID NO: 26602 - DNA, 25 bp, SARS Virus
cacatgaaaatgattttcatggtta

SEQ ID NO: 26603 - DNA, 25 bp, SARS Virus
acatgaaaatgaatttcatggttaa

SEQ ID NO: 26604 - DNA, 25 bp, SARS Virus
catgaaaatgatattcatggttaag

SEQ ID NO: 26605 - DNA, 25 bp, SARS Virus
atgaaaatgattatcatggttaaga

SEQ ID NO: 26606 - DNA, 25 bp, SARS Virus
tgaaaatgatttacatggttaagat

SEQ ID NO: 26607 - DNA, 25 bp, SARS Virus
gaaaatgattttaatggttaagatc

SEQ ID NO: 26608 - DNA, 25 bp, SARS Virus
aaaatgattttcatggttaagatct

SEQ ID NO: 26609 - DNA, 25 bp, SARS Virus
aaatgattttcaaggttaagatctt

SEQ ID NO: 26610 - DNA, 25 bp, SARS Virus
aatgattttcatagttaagatctta

SEQ ID NO: 26611 - DNA, 25 bp, SARS Virus
atgattttcatgattaagatcttaa

SEQ ID NO: 26612 - DNA, 25 bp, SARS Virus
tgattttcatggataagatcttaat

SEQ ID NO: 26613 - DNA, 25 bp, SARS Virus
gattttcatggtaaagatcttaatc

SEQ ID NO: 26614 - DNA, 25 bp, SARS Virus
attttcatggttaagatcttaatct

SEQ ID NO: 26615 - DNA, 25 bp, SARS Virus
ttttcatggttaagatcttaatctc

SEQ ID NO: 26616 - DNA, 25 bp, SARS Virus
tttcatggttaaaatcttaatctcg

SEQ ID NO: 26617 - DNA, 25 bp, SARS Virus
ttcatggttaagatcttaatctcga

SEQ ID NO: 26618 - DNA, 25 bp, SARS Virus
tcatggttaagaacttaatctcgaa

SEQ ID NO: 26619 - DNA, 25 bp, SARS Virus
catggttaagatattaatctcgaag

SEQ ID NO: 26620 - DNA, 25 bp, SARS Virus
atggttaagatcataatctcgaagt

SEQ ID NO: 26621 - DNA, 25 bp, SARS Virus
tggttaagatctaaatctcgaagtg

SEQ ID NO: 26622 - DNA, 25 bp, SARS Virus
ggttaagatcttaatctcgaagtga

SEQ ID NO: 26623 - DNA, 25 bp, SARS Virus
gttaagatcttaatctcgaagtgat

SEQ ID NO: 26624 - DNA, 25 bp, SARS Virus
ttaagatcttaaactcgaagtgatg

SEQ ID NO: 26625 - DNA, 25 bp, SARS Virus
taagatcttaatatcgaagtgatgg

SEQ ID NO: 26626 - DNA, 25 bp, SARS Virus
aagatcttaatcacgaagtgatgga

SEQ ID NO: 26627 - DNA, 25 bp, SARS Virus
agatcttaatctagaagtgatggat

SEQ ID NO: 26628 - DNA, 25 bp, SARS Virus
gatcttaatctcaaagtgatggatg

SEQ ID NO: 26629 - DNA, 25 bp, SARS Virus
atcttaatctcgaagtgatggatgt

SEQ ID NO: 26630 - DNA, 25 bp, SARS Virus
tcttaatctcgaagtgatggatgtt

SEQ ID NO: 26631 - DNA, 25 bp, SARS Virus
cttaatctcgaaatgatggatgttg

SEQ ID NO: 26632 - DNA, 25 bp, SARS Virus
ttaatctcgaagagatggatgttga

SEQ ID NO: 26633 - DNA, 25 bp, SARS Virus
taatctcgaagtaatggatgttgat

SEQ ID NO: 26634 - DNA, 25 bp, SARS Virus
aatctcgaagtgatggatgttgata

SEQ ID NO: 26635 - DNA, 25 bp, SARS Virus
atctcgaagtgaaggatgttgataa

SEQ ID NO: 26636 - DNA, 25 bp, SARS Virus
tctcgaagtgatagatgttgataac

SEQ ID NO: 26637 - DNA, 25 bp, SARS Virus
ctcgaagtgatgaatgttgataacg

SEQ ID NO: 26638 - DNA, 25 bp, SARS Virus
tcgaagtgatggatgttgataacga

SEQ ID NO: 26639 - DNA, 25 bp, SARS Virus
cgaagtgatggaagttgataacgat

SEQ ID NO: 26640 - DNA, 25 bp, SARS Virus
gaagtgatggatattgataacgatt

SEQ ID NO: 26641 - DNA, 25 bp, SARS Virus
aagtgatggatgatgataacgattt

SEQ ID NO: 26642 - DNA, 25 bp, SARS Virus
agtgatggatgtagataacgatttt

SEQ ID NO: 26643 - DNA, 25 bp, SARS Virus
gtgatggatgttaataacgattttt

SEQ ID NO: 26644 - DNA, 25 bp, SARS Virus
tgatggatgttgataacgattttta

SEQ ID NO: 26645 - DNA, 25 bp, SARS Virus
gatggatgttgaaaacgatttttat

SEQ ID NO: 26646 - DNA, 25 bp, SARS Virus
atggatgttgataacgatttttatc

SEQ ID NO: 26647 - DNA, 25 bp, SARS Virus
tggatgttgataacgatttttatca

SEQ ID NO: 26648 - DNA, 25 bp, SARS Virus
ggatgttgataaagatttttatcac

SEQ ID NO: 26649 - DNA, 25 bp, SARS Virus
gatgttgataacaatttttatcaca

SEQ ID NO: 26650 - DNA, 25 bp, SARS Virus
atgttgataacgatttttatcacaa

SEQ ID NO: 26651 - DNA, 25 bp, SARS Virus
tgttgataacgaattttatcacaat

SEQ ID NO: 26652 - DNA, 25 bp, SARS Virus
gttgataacgatatttatcacaatt

SEQ ID NO: 26653 - DNA, 25 bp, SARS Virus
ttgataacgattattatcacaattc

SEQ ID NO: 26654 - DNA, 25 bp, SARS Virus
tgataacgatttatatcacaattct

SEQ ID NO: 26655 - DNA, 25 bp, SARS Virus
gataacgattttaatcacaattctc

SEQ ID NO: 26656 - DNA, 25 bp, SARS Virus
ataacgatttttatcacaattctca

SEQ ID NO: 26657 - DNA, 25 bp, SARS Virus
taacgatttttaacacaattctcac

SEQ ID NO: 26658 - DNA, 25 bp, SARS Virus
aacgatttttataacaattctcaca

SEQ ID NO: 26659 - DNA, 25 bp, SARS Virus
acgatttttatcacaattctcacaa

SEQ ID NO: 26660 - DNA, 25 bp, SARS Virus
cgatttttatcaaaattctcacaac

SEQ ID NO: 26661 - DNA, 25 bp, SARS Virus
gatttttatcacaattctcacaacg

SEQ ID NO: 26662 - DNA, 25 bp, SARS Virus
atttttatcacaattctcacaacga

SEQ ID NO: 26663 - DNA, 25 bp, SARS Virus
tttttatcacaaatctcacaacgat

SEQ ID NO: 26664 - DNA, 25 bp, SARS Virus
ttttatcacaatactcacaacgatt

SEQ ID NO: 26665 - DNA, 25 bp, SARS Virus
tttatcacaattatcacaacgattt

SEQ ID NO: 26666 - DNA, 25 bp, SARS Virus
ttatcacaattcacacaacgattta

SEQ ID NO: 26667 - DNA, 25 bp, SARS Virus
tatcacaattctaacaacgatttaa

SEQ ID NO: 26668 - DNA, 25 bp, SARS Virus
atcacaattctcacaacgatttaat

SEQ ID NO: 26669 - DNA, 25 bp, SARS Virus
tcacaattctcaaaacgatttaata

SEQ ID NO: 26670 - DNA, 25 bp, SARS Virus
cacaattctcacaacgatttaatac

SEQ ID NO: 26671 - DNA, 25 bp, SARS Virus
acaattctcacaacgatttaataca

SEQ ID NO: 26672 - DNA, 25 bp, SARS Virus
caattctcacaaagatttaatacaa

SEQ ID NO: 26673 - DNA, 25 bp, SARS Virus
aattctcacaacaatttaatacaaa

SEQ ID NO: 26674 - DNA, 25 bp, SARS Virus
attctcacaacgatttaatacaaac

SEQ ID NO: 26675 - DNA, 25 bp, SARS Virus
ttctcacaacgaattaatacaaacc

SEQ ID NO: 26676 - DNA, 25 bp, SARS Virus
tctcacaacgatataatacaaacct

SEQ ID NO: 26677 - DNA, 25 bp, SARS Virus
ctcacaacgattaaatacaaaccta

SEQ ID NO: 26678 - DNA, 25 bp, SARS Virus
tcacaacgatttaatacaaacctac

SEQ ID NO: 26679 - DNA, 25 bp, SARS Virus
cacaacgatttaatacaaacctacg

SEQ ID NO: 26680 - DNA, 25 bp, SARS Virus
acaacgatttaaaacaaacctacgg

SEQ ID NO: 26681 - DNA, 25 bp, SARS Virus
caacgatttaatacaaacctacggc

SEQ ID NO: 26682 - DNA, 25 bp, SARS Virus
aacgatttaataaaaacctacggcc

SEQ ID NO: 26683 - DNA, 25 bp, SARS Virus
acgatttaatacaaacctacggccg

SEQ ID NO: 26684 - DNA, 25 bp, SARS Virus
cgatttaatacaaacctacggccgt

SEQ ID NO: 26685 - DNA, 25 bp, SARS Virus
gatttaatacaaacctacggccgta

SEQ ID NO: 26686 - DNA, 25 bp, SARS Virus
atttaatacaaaactacggccgtaa

SEQ ID NO: 26687 - DNA, 25 bp, SARS Virus
tttaatacaaacatacggccgtaat

SEQ ID NO: 26688 - DNA, 25 bp, SARS Virus
ttaatacaaaccaacggccgtaatt

SEQ ID NO: 26689 - DNA, 25 bp, SARS Virus
taatacaaacctacggccgtaatta

SEQ ID NO: 26690 - DNA, 25 bp, SARS Virus
aatacaaacctaaggccgtaattaa

SEQ ID NO: 26691 - DNA, 25 bp, SARS Virus
atacaaacctacagccgtaattaat

SEQ ID NO: 26692 - DNA, 25 bp, SARS Virus
tacaaacctacgaccgtaattaata

SEQ ID NO: 26693 - DNA, 25 bp, SARS Virus
acaaacctacggacgtaattaatac

SEQ ID NO: 26694 - DNA, 25 bp, SARS Virus
caaacctacggcagtaattaataca

SEQ ID NO: 26695 - DNA, 25 bp, SARS Virus
aaacctacggccataattaatacac

SEQ ID NO: 26696 - DNA, 25 bp, SARS Virus
aacctacggccgaaattaatacact

SEQ ID NO: 26697 - DNA, 25 bp, SARS Virus
acctacggccgtaattaatacactt

SEQ ID NO: 26698 - DNA, 25 bp, SARS Virus
cctacggccgtaattaatacacttc

SEQ ID NO: 26699 - DNA, 25 bp, SARS Virus
ctacggccgtaaataatacacttca

SEQ ID NO: 26700 - DNA, 25 bp, SARS Virus
tacggccgtaataaatacacttcag

SEQ ID NO: 26701 - DNA, 25 bp, SARS Virus
acggccgtaattaatacacttcagt

SEQ ID NO: 26702 - DNA, 25 bp, SARS Virus
cggccgtaattaatacacttcagtg

SEQ ID NO: 26703 - DNA, 25 bp, SARS Virus
ggccgtaattaaaacacttcagtgg

SEQ ID NO: 26704 - DNA, 25 bp, SARS Virus
gccgtaattaatacacttcagtggg

SEQ ID NO: 26705 - DNA, 25 bp, SARS Virus
ccgtaattaataaacttcagtgggt

SEQ ID NO: 26706 - DNA, 25 bp, SARS Virus
cgtaattaatacacttcagtgggtt

SEQ ID NO: 26707 - DNA, 25 bp, SARS Virus
gtaattaatacaattcagtgggttt

SEQ ID NO: 26708 - DNA, 25 bp, SARS Virus
taattaatacacatcagtgggttta

SEQ ID NO: 26709 - DNA, 25 bp, SARS Virus
aattaatacactacagtgggtttaa

SEQ ID NO: 26710 - DNA, 25 bp, SARS Virus
attaatacacttaagtgggtttaaa

SEQ ID NO: 26711 - DNA, 25 bp, SARS Virus
ttaatacacttcagtgggtttaaaa

SEQ ID NO: 26712 - DNA, 25 bp, SARS Virus
taatacacttcaatgggtttaaaag

SEQ ID NO: 26713 - DNA, 25 bp, SARS Virus
aatacacttcagagggtttaaaaga

SEQ ID NO: 26714 - DNA, 25 bp, SARS Virus
atacacttcagtaggtttaaaagat

SEQ ID NO: 26715 - DNA, 25 bp, SARS Virus
tacacttcagtgagtttaaaagatt

SEQ ID NO: 26716 - DNA, 25 bp, SARS Virus
acacttcagtggatttaaaagattt

SEQ ID NO: 26717 - DNA, 25 bp, SARS Virus
cacttcagtgggattaaaagattta

SEQ ID NO: 26718 - DNA, 25 bp, SARS Virus
acttcagtgggtataaaagatttaa

SEQ ID NO: 26719 - DNA, 25 bp, SARS Virus
cttcagtgggttaaaaagatttaac

SEQ ID NO: 26720 - DNA, 25 bp, SARS Virus
ttcagtgggtttaaaagatttaaca

SEQ ID NO: 26721 - DNA, 25 bp, SARS Virus
tcagtgggtttaaaagatttaacaa

SEQ ID NO: 26722 - DNA, 25 bp, SARS Virus
cagtgggtttaaaagatttaacaag

SEQ ID NO: 26723 - DNA, 25 bp, SARS Virus
agtgggtttaaaagatttaacaagt

SEQ ID NO: 26724 - DNA, 25 bp, SARS Virus
gtgggtttaaaaaatttaacaagtg

SEQ ID NO: 26725 - DNA, 25 bp, SARS Virus
tgggtttaaaagatttaacaagtgt

SEQ ID NO: 26726 - DNA, 25 bp, SARS Virus
gggtttaaaagaattaacaagtgtt

SEQ ID NO: 26727 - DNA, 25 bp, SARS Virus
ggtttaaaagatataacaagtgtta

SEQ ID NO: 26728 - DNA, 25 bp, SARS Virus
gtttaaaagattaaacaagtgttag

SEQ ID NO: 26729 - DNA, 25 bp, SARS Virus
tttaaaagatttaacaagtgttagc

SEQ ID NO: 26730 - DNA, 25 bp, SARS Virus
ttaaaagatttaacaagtgttagcg

SEQ ID NO: 26731 - DNA, 25 bp, SARS Virus
taaaagatttaaaaagtgttagcga

SEQ ID NO: 26732 - DNA, 25 bp, SARS Virus
aaaagatttaacaagtgttagcgat

SEQ ID NO: 26733 - DNA, 25 bp, SARS Virus
aaagatttaacaagtgttagcgata

SEQ ID NO: 26734 - DNA, 25 bp, SARS Virus
aagatttaacaaatgttagcgatac

SEQ ID NO: 26735 - DNA, 25 bp, SARS Virus
agatttaacaagagttagcgataca

SEQ ID NO: 26736 - DNA, 25 bp, SARS Virus
gatttaacaagtattagcgatacac

SEQ ID NO: 26737 - DNA, 25 bp, SARS Virus
atttaacaagtgatagcgatacacc

SEQ ID NO: 26738 - DNA, 25 bp, SARS Virus
tttaacaagtgtaagcgatacaccg

SEQ ID NO: 26739 - DNA, 25 bp, SARS Virus
ttaacaagtgttagcgatacaccga

SEQ ID NO: 26740 - DNA, 25 bp, SARS Virus
taacaagtgttaacgatacaccgat

SEQ ID NO: 26741 - DNA, 25 bp, SARS Virus
aacaagtgttagagatacaccgata

SEQ ID NO: 26742 - DNA, 25 bp, SARS Virus
acaagtgttagcaatacaccgataa

SEQ ID NO: 26743 - DNA, 25 bp, SARS Virus
caagtgttagcgatacaccgataac

SEQ ID NO: 26744 - DNA, 25 bp, SARS Virus
aagtgttagcgaaacaccgataaca

SEQ ID NO: 26745 - DNA, 25 bp, SARS Virus
agtgttagcgatacaccgataacaa

SEQ ID NO: 26746 - DNA, 25 bp, SARS Virus
gtgttagcgataaaccgataacaac

SEQ ID NO: 26747 - DNA, 25 bp, SARS Virus
tgttagcgatacaccgataacaaca

SEQ ID NO: 26748 - DNA, 25 bp, SARS Virus
gttagcgatacaacgataacaacaa

SEQ ID NO: 26749 - DNA, 25 bp, SARS Virus
ttagcgatacacagataacaacaat

SEQ ID NO: 26750 - DNA, 25 bp, SARS Virus
tagcgatacaccaataacaacaatt

SEQ ID NO: 26751 - DNA, 25 bp, SARS Virus
agcgatacaccgataacaacaattc

SEQ ID NO: 26752 - DNA, 25 bp, SARS Virus
gcgatacaccgaaaacaacaattca

SEQ ID NO: 26753 - DNA, 25 bp, SARS Virus
cgatacaccgataacaacaattcat

SEQ ID NO: 26754 - DNA, 25 bp, SARS Virus
gatacaccgataacaacaattcata

SEQ ID NO: 26755 - DNA, 25 bp, SARS Virus
atacaccgataaaaacaattcataa

SEQ ID NO: 26756 - DNA, 25 bp, SARS Virus
tacaccgataacaacaattcataaa

SEQ ID NO: 26757 - DNA, 25 bp, SARS Virus
acaccgataacaacaattcataaac

SEQ ID NO: 26758 - DNA, 25 bp, SARS Virus
caccgataacaaaaattcataaacg

SEQ ID NO: 26759 - DNA, 25 bp, SARS Virus
accgataacaacaattcataaacga

SEQ ID NO: 26760 - DNA, 25 bp, SARS Virus
ccgataacaacaattcataaacgaa

SEQ ID NO: 26761 - DNA, 25 bp, SARS Virus
cgataacaacaaatcataaacgaat

SEQ ID NO: 26762 - DNA, 25 bp, SARS Virus
gataacaacaatacataaacgaatc

SEQ ID NO: 26763 - DNA, 25 bp, SARS Virus
ataacaacaattaataaacgaatcc

SEQ ID NO: 26764 - DNA, 25 bp, SARS Virus
taacaacaattcataaacgaatcca

SEQ ID NO: 26765 - DNA, 25 bp, SARS Virus
aacaacaattcaaaaacgaatccaa

SEQ ID NO: 26766 - DNA, 25 bp, SARS Virus
acaacaattcataaacgaatccaag

SEQ ID NO: 26767 - DNA, 25 bp, SARS Virus
caacaattcataaacgaatccaaga

SEQ ID NO: 26768 - DNA, 25 bp, SARS Virus
aacaattcataaacgaatccaagag

SEQ ID NO: 26769 - DNA, 25 bp, SARS Virus
acaattcataaaagaatccaagaga

SEQ ID NO: 26770 - DNA, 25 bp, SARS Virus
caattcataaacaaatccaagagat

SEQ ID NO: 26771 - DNA, 25 bp, SARS Virus
aattcataaacgaatccaagagatt

SEQ ID NO: 26772 - DNA, 25 bp, SARS Virus
attcataaacgaatccaagagatta

SEQ ID NO: 26773 - DNA, 25 bp, SARS Virus
ttcataaacgaaaccaagagattag

SEQ ID NO: 26774 - DNA, 25 bp, SARS Virus
tcataaacgaatacaagagattaga

SEQ ID NO: 26775 - DNA, 25 bp, SARS Virus
cataaacgaatcaaagagattagac

SEQ ID NO: 26776 - DNA, 25 bp, SARS Virus
ataaacgaatccaagagattagaca

SEQ ID NO: 26777 - DNA, 25 bp, SARS Virus
taaacgaatccaagagattagacac

SEQ ID NO: 26778 - DNA, 25 bp, SARS Virus
aaacgaatccaaaagattagacaca

SEQ ID NO: 26779 - DNA, 25 bp, SARS Virus
aacgaatccaagagattagacacat

SEQ ID NO: 26780 - DNA, 25 bp, SARS Virus
acgaatccaagaaattagacacatt

SEQ ID NO: 26781 - DNA, 25 bp, SARS Virus
cgaatccaagagattagacacattg

SEQ ID NO: 26782 - DNA, 25 bp, SARS Virus
gaatccaagagaatagacacattga

SEQ ID NO: 26783 - DNA, 25 bp, SARS Virus
aatccaagagataagacacattgac

SEQ ID NO: 26784 - DNA, 25 bp, SARS Virus
atccaagagattagacacattgacg

SEQ ID NO: 26785 - DNA, 25 bp, SARS Virus
tccaagagattaaacacattgacga

SEQ ID NO: 26786 - DNA, 25 bp, SARS Virus
ccaagagattagacacattgacgac

SEQ ID NO: 26787 - DNA, 25 bp, SARS Virus
caagagattagaaacattgacgacg

SEQ ID NO: 26788 - DNA, 25 bp, SARS Virus
aagagattagacacattgacgacga

SEQ ID NO: 26789 - DNA, 25 bp, SARS Virus
agagattagacaaattgacgacgaa

SEQ ID NO: 26790 - DNA, 25 bp, SARS Virus
gagattagacacattgacgacgaaa

SEQ ID NO: 26791 - DNA, 25 bp, SARS Virus
agattagacacaatgacgacgaaaa

SEQ ID NO: 26792 - DNA, 25 bp, SARS Virus
gattagacacatagacgacgaaaac

SEQ ID NO: 26793 - DNA, 25 bp, SARS Virus
attagacacattaacgacgaaaacc

SEQ ID NO: 26794 - DNA, 25 bp, SARS Virus
ttagacacattgacgacgaaaacca

SEQ ID NO: 26795 - DNA, 25 bp, SARS Virus
tagacacattgaagacgaaaaccac

SEQ ID NO: 26796 - DNA, 25 bp, SARS Virus
agacacattgacaacgaaaaccaca

SEQ ID NO: 26797 - DNA, 25 bp, SARS Virus
gacacattgacgacgaaaaccacat

SEQ ID NO: 26798 - DNA, 25 bp, SARS Virus
acacattgacgaagaaaaccacatg

SEQ ID NO: 26799 - DNA, 25 bp, SARS Virus
cacattgacgacaaaaaccacatga

SEQ ID NO: 26800 - DNA, 25 bp, SARS Virus
acattgacgacgaaaaccacatgag

SEQ ID NO: 26801 - DNA, 25 bp, SARS Virus
cattgacgacgaaaaccacatgaga

SEQ ID NO: 26802 - DNA, 25 bp, SARS Virus
attgacgacgaaaaccacatgagaa

SEQ ID NO: 26803 - DNA, 25 bp, SARS Virus
ttgacgacgaaaaccacatgagaat

SEQ ID NO: 26804 - DNA, 25 bp, SARS Virus
tgacgacgaaaaacacatgagaata

SEQ ID NO: 26805 - DNA, 25 bp, SARS Virus
gacgacgaaaacaacatgagaatag

SEQ ID NO: 26806 - DNA, 25 bp, SARS Virus
acgacgaaaaccacatgagaataga

SEQ ID NO: 26807 - DNA, 25 bp, SARS Virus
cgacgaaaaccaaatgagaatagat

SEQ ID NO: 26808 - DNA, 25 bp, SARS Virus
gacgaaaaccacatgagaatagatt

SEQ ID NO: 26809 - DNA, 25 bp, SARS Virus
acgaaaaccacaagagaatagatta

SEQ ID NO: 26810 - DNA, 25 bp, SARS Virus
cgaaaaccacataagaatagattaa

SEQ ID NO: 26811 - DNA, 25 bp, SARS Virus
gaaaaccacatgagaatagattaaa

SEQ ID NO: 26812 - DNA, 25 bp, SARS Virus
aaaaccacatgaaaatagattaaaa

SEQ ID NO: 26813 - DNA, 25 bp, SARS Virus
aaaccacatgagaatagattaaaac

SEQ ID NO: 26814 - DNA, 25 bp, SARS Virus
aaccacatgagaatagattaaaacc

SEQ ID NO: 26815 - DNA, 25 bp, SARS Virus
accacatgagaaaagattaaaacca

SEQ ID NO: 26816 - DNA, 25 bp, SARS Virus
ccacatgagaatagattaaaaccac

SEQ ID NO: 26817 - DNA, 25 bp, SARS Virus
cacatgagaataaattaaaaccacg

SEQ ID NO: 26818 - DNA, 25 bp, SARS Virus
acatgagaatagattaaaaccacga

SEQ ID NO: 26819 - DNA, 25 bp, SARS Virus
catgagaatagaataaaaccacgag

SEQ ID NO: 26820 - DNA, 25 bp, SARS Virus
atgagaatagataaaaaccacgagg

SEQ ID NO: 26821 - DNA, 25 bp, SARS Virus
tgagaatagattaaaaccacgagga

SEQ ID NO: 26822 - DNA, 25 bp, SARS Virus
gagaatagattaaaaccacgaggaa

SEQ ID NO: 26823 - DNA, 25 bp, SARS Virus
agaatagattaaaaccacgaggaag

SEQ ID NO: 26824 - DNA, 25 bp, SARS Virus
gaatagattaaaaccacgaggaaga

SEQ ID NO: 26825 - DNA, 25 bp, SARS Virus
aatagattaaaaacacgaggaagaa

SEQ ID NO: 26826 - DNA, 25 bp, SARS Virus
atagattaaaacaacgaggaagaat

SEQ ID NO: 26827 - DNA, 25 bp, SARS Virus
tagattaaaaccacgaggaagaata

SEQ ID NO: 26828 - DNA, 25 bp, SARS Virus
agattaaaaccaagaggaagaataa

SEQ ID NO: 26829 - DNA, 25 bp, SARS Virus
gattaaaaccacaaggaagaataac

SEQ ID NO: 26830 - DNA, 25 bp, SARS Virus
attaaaaccacgaggaagaataaca

SEQ ID NO: 26831 - DNA, 25 bp, SARS Virus
ttaaaaccacgaagaagaataacat

SEQ ID NO: 26832 - DNA, 25 bp, SARS Virus
taaaaccacgagaaagaataacatt

SEQ ID NO: 26833 - DNA, 25 bp, SARS Virus
aaaaccacgaggaagaataacatta

SEQ ID NO: 26834 - DNA, 25 bp, SARS Virus
aaaccacgaggaagaataacattac

SEQ ID NO: 26835 - DNA, 25 bp, SARS Virus
aaccacgaggaaaaataacattacc

SEQ ID NO: 26836 - DNA, 25 bp, SARS Virus
accacgaggaagaataacattaccg

SEQ ID NO: 26837 - DNA, 25 bp, SARS Virus
ccacgaggaagaataacattaccgc

SEQ ID NO: 26838 - DNA, 25 bp, SARS Virus
cacgaggaagaaaaacattaccgca

SEQ ID NO: 26839 - DNA, 25 bp, SARS Virus
acgaggaagaataacattaccgcaa

SEQ ID NO: 26840 - DNA, 25 bp, SARS Virus
cgaggaagaataacattaccgcaat

SEQ ID NO: 26841 - DNA, 25 bp, SARS Virus
gaggaagaataaaattaccgcaatc

SEQ ID NO: 26842 - DNA, 25 bp, SARS Virus
aggaagaataacattaccgcaatct

SEQ ID NO: 26843 - DNA, 25 bp, SARS Virus
ggaagaataacaataccgcaatctc

SEQ ID NO: 26844 - DNA, 25 bp, SARS Virus
gaagaataacataaccgcaatctct

SEQ ID NO: 26845 - DNA, 25 bp, SARS Virus
aagaataacattaccgcaatctctt

SEQ ID NO: 26846 - DNA, 25 bp, SARS Virus
agaataacattaacgcaatctctta

SEQ ID NO: 26847 - DNA, 25 bp, SARS Virus
gaataacattacagcaatctcttaa

SEQ ID NO: 26848 - DNA, 25 bp, SARS Virus
aataacattaccacaatctcttaac

SEQ ID NO: 26849 - DNA, 25 bp, SARS Virus
ataacattaccgaaatctcttaaca

SEQ ID NO: 26850 - DNA, 25 bp, SARS Virus
taacattaccgcaatctcttaacat

SEQ ID NO: 26851 - DNA, 25 bp, SARS Virus
aacattaccgcaatctcttaacata

SEQ ID NO: 26852 - DNA, 25 bp, SARS Virus
acattaccgcaaactcttaacatag

SEQ ID NO: 26853 - DNA, 25 bp, SARS Virus
cattaccgcaatatcttaacataga

SEQ ID NO: 26854 - DNA, 25 bp, SARS Virus
attaccgcaatcacttaacatagaa

SEQ ID NO: 26855 - DNA, 25 bp, SARS Virus
ttaccgcaatctattaacatagaat

SEQ ID NO: 26856 - DNA, 25 bp, SARS Virus
taccgcaatctcataacatagaatt

SEQ ID NO: 26857 - DNA, 25 bp, SARS Virus
accgcaatctctaaacatagaatta

SEQ ID NO: 26858 - DNA, 25 bp, SARS Virus
ccgcaatctcttaacatagaattaa

SEQ ID NO: 26859 - DNA, 25 bp, SARS Virus
cgcaatctcttaacatagaattaag

SEQ ID NO: 26860 - DNA, 25 bp, SARS Virus
gcaatctcttaaaatagaattaagc

SEQ ID NO: 26861 - DNA, 25 bp, SARS Virus
caatctcttaacatagaattaagca

SEQ ID NO: 26862 - DNA, 25 bp, SARS Virus
aatctcttaacaaagaattaagcag

SEQ ID NO: 26863 - DNA, 25 bp, SARS Virus
atctcttaacatagaattaagcaga

SEQ ID NO: 26864 - DNA, 25 bp, SARS Virus
tctcttaacataaaattaagcagat

SEQ ID NO: 26865 - DNA, 25 bp, SARS Virus
ctcttaacatagaattaagcagatt

SEQ ID NO: 26866 - DNA, 25 bp, SARS Virus
tcttaacatagaattaagcagattg

SEQ ID NO: 26867 - DNA, 25 bp, SARS Virus
cttaacatagaaataagcagattgc

SEQ ID NO: 26868 - DNA, 25 bp, SARS Virus
ttaacatagaataaagcagattgca

SEQ ID NO: 26869 - DNA, 25 bp, SARS Virus
taacatagaattaagcagattgcaa

SEQ ID NO: 26870 - DNA, 25 bp, SARS Virus
aacatagaattaagcagattgcaat

SEQ ID NO: 26871 - DNA, 25 bp, SARS Virus
acatagaattaaacagattgcaatg

SEQ ID NO: 26872 - DNA, 25 bp, SARS Virus
catagaattaagaagattgcaatga

SEQ ID NO: 26873 - DNA, 25 bp, SARS Virus
atagaattaagcagattgcaatgat

SEQ ID NO: 26874 - DNA, 25 bp, SARS Virus
tagaattaagcaaattgcaatgatg

SEQ ID NO: 26875 - DNA, 25 bp, SARS Virus
agaattaagcagattgcaatgatga

SEQ ID NO: 26876 - DNA, 25 bp, SARS Virus
gaattaagcagaatgcaatgatgat

SEQ ID NO: 26877 - DNA, 25 bp, SARS Virus
aattaagcagatagcaatgatgata

SEQ ID NO: 26878 - DNA, 25 bp, SARS Virus
attaagcagattacaatgatgatac

SEQ ID NO: 26879 - DNA, 25 bp, SARS Virus
ttaagcagattgaaatgatgatacc

SEQ ID NO: 26880 - DNA, 25 bp, SARS Virus
taagcagattgcaatgatgatacct

SEQ ID NO: 26881 - DNA, 25 bp, SARS Virus
aagcagattgcaatgatgataccta

SEQ ID NO: 26882 - DNA, 25 bp, SARS Virus
agcagattgcaaagatgatacctaa

SEQ ID NO: 26883 - DNA, 25 bp, SARS Virus
gcagattgcaataatgatacctaaa

SEQ ID NO: 26884 - DNA, 25 bp, SARS Virus
cagattgcaatgatgatacctaaag

SEQ ID NO: 26885 - DNA, 25 bp, SARS Virus
agattgcaatgaagatacctaaaga

SEQ ID NO: 26886 - DNA, 25 bp, SARS Virus
gattgcaatgataatacctaaagac

SEQ ID NO: 26887 - DNA, 25 bp, SARS Virus
attgcaatgatgatacctaaagaca

SEQ ID NO: 26888 - DNA, 25 bp, SARS Virus
ttgcaatgatgaaacctaaagacac

SEQ ID NO: 26889 - DNA, 25 bp, SARS Virus
tgcaatgatgatacctaaagacact

SEQ ID NO: 26890 - DNA, 25 bp, SARS Virus
gcaatgatgataactaaagacactt

SEQ ID NO: 26891 - DNA, 25 bp, SARS Virus
caatgatgatacataaagacacttc

SEQ ID NO: 26892 - DNA, 25 bp, SARS Virus
aatgatgataccaaaagacacttcc

SEQ ID NO: 26893 - DNA, 25 bp, SARS Virus
atgatgatacctaaagacacttcca

SEQ ID NO: 26894 - DNA, 25 bp, SARS Virus
tgatgatacctaaagacacttccaa

SEQ ID NO: 26895 - DNA, 25 bp, SARS Virus
gatgatacctaaagacacttccaag

SEQ ID NO: 26896 - DNA, 25 bp, SARS Virus
atgatacctaaaaacacttccaaga

SEQ ID NO: 26897 - DNA, 25 bp, SARS Virus
tgatacctaaagacacttccaagaa

SEQ ID NO: 26898 - DNA, 25 bp, SARS Virus
gatacctaaagaaacttccaagaaa

SEQ ID NO: 26899 - DNA, 25 bp, SARS Virus
atacctaaagacacttccaagaaaa

SEQ ID NO: 26900 - DNA, 25 bp, SARS Virus
tacctaaagacaattccaagaaaag

SEQ ID NO: 26901 - DNA, 25 bp, SARS Virus
acctaaagacacatccaagaaaagg

SEQ ID NO: 26902 - DNA, 25 bp, SARS Virus
cctaaagacactaccaagaaaagga

SEQ ID NO: 26903 - DNA, 25 bp, SARS Virus
ctaaagacacttacaagaaaaggaa

SEQ ID NO: 26904 - DNA, 25 bp, SARS Virus
taaagacacttcaaagaaaaggaac

SEQ ID NO: 26905 - DNA, 25 bp, SARS Virus
aaagacacttccaagaaaaggaacg

SEQ ID NO: 26906 - DNA, 25 bp, SARS Virus
aagacacttccaagaaaaggaacgt

SEQ ID NO: 26907 - DNA, 25 bp, SARS Virus
agacacttccaaaaaaaggaacgtc

SEQ ID NO: 26908 - DNA, 25 bp, SARS Virus
gacacttccaagaaaaggaacgtcg

SEQ ID NO: 26909 - DNA, 25 bp, SARS Virus
acacttccaagaaaaggaacgtcgt

SEQ ID NO: 26910 - DNA, 25 bp, SARS Virus
cacttccaagaaaaggaacgtcgta

SEQ ID NO: 26911 - DNA, 25 bp, SARS Virus
acttccaagaaaaggaacgtcgtaa

SEQ ID NO: 26912 - DNA, 25 bp, SARS Virus
cttccaagaaaaagaacgtcgtaaa

SEQ ID NO: 26913 - DNA, 25 bp, SARS Virus
ttccaagaaaagaaacgtcgtaaac

SEQ ID NO: 26914 - DNA, 25 bp, SARS Virus
tccaagaaaaggaacgtcgtaaaca

SEQ ID NO: 26915 - DNA, 25 bp, SARS Virus
ccaagaaaaggaacgtcgtaaacaa

SEQ ID NO: 26916 - DNA, 25 bp, SARS Virus
caagaaaaggaaagtcgtaaacaaa

SEQ ID NO: 26917 - DNA, 25 bp, SARS Virus
aagaaaaggaacatcgtaaacaaat

SEQ ID NO: 26918 - DNA, 25 bp, SARS Virus
agaaaaggaacgacgtaaacaaatt

SEQ ID NO: 26919 - DNA, 25 bp, SARS Virus
gaaaaggaacgtagtaaacaaattc

SEQ ID NO: 26920 - DNA, 25 bp, SARS Virus
aaaaggaacgtcataaacaaattca

SEQ ID NO: 26921 - DNA, 25 bp, SARS Virus
aaaggaacgtcgaaaacaaattcac

SEQ ID NO: 26922 - DNA, 25 bp, SARS Virus
aaggaacgtcgtaaacaaattcacc

SEQ ID NO: 26923 - DNA, 25 bp, SARS Virus
aggaacgtcgtaaacaaattcacct

SEQ ID NO: 26924 - DNA, 25 bp, SARS Virus
ggaacgtcgtaaacaaattcaccta

SEQ ID NO: 26925 - DNA, 25 bp, SARS Virus
gaacgtcgtaaaaaaattcacctaa

SEQ ID NO: 26926 - DNA, 25 bp, SARS Virus
aacgtcgtaaacaaattcacctaat

SEQ ID NO: 26927 - DNA, 25 bp, SARS Virus
acgtcgtaaacaaattcacctaatc

SEQ ID NO: 26928 - DNA, 25 bp, SARS Virus
cgtcgtaaacaaattcacctaatct

SEQ ID NO: 26929 - DNA, 25 bp, SARS Virus
gtcgtaaacaaaatcacctaatctg

SEQ ID NO: 26930 - DNA, 25 bp, SARS Virus
tcgtaaacaaatacacctaatctga

SEQ ID NO: 26931 - DNA, 25 bp, SARS Virus
cgtaaacaaattaacctaatctgag

SEQ ID NO: 26932 - DNA, 25 bp, SARS Virus
gtaaacaaattcacctaatctgagg

SEQ ID NO: 26933 - DNA, 25 bp, SARS Virus
taaacaaattcaactaatctgaggg

SEQ ID NO: 26934 - DNA, 25 bp, SARS Virus
aaacaaattcacataatctgaggga

SEQ ID NO: 26935 - DNA, 25 bp, SARS Virus
aacaaattcaccaaatctgagggaa

SEQ ID NO: 26936 - DNA, 25 bp, SARS Virus
acaaattcacctaatctgagggaac

SEQ ID NO: 26937 - DNA, 25 bp, SARS Virus
caaattcacctaatctgagggaact

SEQ ID NO: 26938 - DNA, 25 bp, SARS Virus
aaattcacctaaactgagggaacta

SEQ ID NO: 26939 - DNA, 25 bp, SARS Virus
aattcacctaatatgagggaactaa

SEQ ID NO: 26940 - DNA, 25 bp, SARS Virus
attcacctaatcagagggaactaag

SEQ ID NO: 26941 - DNA, 25 bp, SARS Virus
ttcacctaatctaagggaactaaga

SEQ ID NO: 26942 - DNA, 25 bp, SARS Virus
tcacctaatctgagggaactaagaa

SEQ ID NO: 26943 - DNA, 25 bp, SARS Virus
cacctaatctgaaggaactaagaat

SEQ ID NO: 26944 - DNA, 25 bp, SARS Virus
acctaatctgagagaactaagaata

SEQ ID NO: 26945 - DNA, 25 bp, SARS Virus
cctaatctgaggaaactaagaatag

SEQ ID NO: 26946 - DNA, 25 bp, SARS Virus
ctaatctgagggaactaagaatagg

SEQ ID NO: 26947 - DNA, 25 bp, SARS Virus
taatctgagggaactaagaataggt

SEQ ID NO: 26948 - DNA, 25 bp, SARS Virus
aatctgagggaaataagaataggtc

SEQ ID NO: 26949 - DNA, 25 bp, SARS Virus
atctgagggaacaaagaataggtcg

SEQ ID NO: 26950 - DNA, 25 bp, SARS Virus
tctgagggaactaagaataggtcga

SEQ ID NO: 26951 - DNA, 25 bp, SARS Virus
ctgagggaactaagaataggtcgag

SEQ ID NO: 26952 - DNA, 25 bp, SARS Virus
tgagggaactaaaaataggtcgaga

SEQ ID NO: 26953 - DNA, 25 bp, SARS Virus
gagggaactaagaataggtcgagaa

SEQ ID NO: 26954 - DNA, 25 bp, SARS Virus
agggaactaagaataggtcgagaac

SEQ ID NO: 26955 - DNA, 25 bp, SARS Virus
gggaactaagaaaaggtcgagaact

SEQ ID NO: 26956 - DNA, 25 bp, SARS Virus
ggaactaagaataggtcgagaactt

SEQ ID NO: 26957 - DNA, 25 bp, SARS Virus
gaactaagaataagtcgagaacttt

SEQ ID NO: 26958 - DNA, 25 bp, SARS Virus
aactaagaatagatcgagaactttg

SEQ ID NO: 26959 - DNA, 25 bp, SARS Virus
actaagaataggacgagaactttgg

SEQ ID NO: 26960 - DNA, 25 bp, SARS Virus
ctaagaataggtagagaactttggt

SEQ ID NO: 26961 - DNA, 25 bp, SARS Virus
taagaataggtcaagaactttggta

SEQ ID NO: 26962 - DNA, 25 bp, SARS Virus
aagaataggtcgagaactttggtaa

SEQ ID NO: 26963 - DNA, 25 bp, SARS Virus
agaataggtcgaaaactttggtaag

SEQ ID NO: 26964 - DNA, 25 bp, SARS Virus
gaataggtcgagaactttggtaagt

SEQ ID NO: 26965 - DNA, 25 bp, SARS Virus
aataggtcgagaactttggtaagtc

SEQ ID NO: 26966 - DNA, 25 bp, SARS Virus
ataggtcgagaaatttggtaagtcc

SEQ ID NO: 26967 - DNA, 25 bp, SARS Virus
taggtcgagaacattggtaagtcca

SEQ ID NO: 26968 - DNA, 25 bp, SARS Virus
aggtcgagaactatggtaagtccac

SEQ ID NO: 26969 - DNA, 25 bp, SARS Virus
accgaatacagtctggtaagaatcc

SEQ ID NO: 26970 - DNA, 25 bp, SARS Virus
ccgaatacagttcggtaagaatcct

SEQ ID NO: 26971 - DNA, 25 bp, SARS Virus
cgaatacagtttcgtaagaatcctg

SEQ ID NO: 26972 - DNA, 25 bp, SARS Virus
gaatacagtttgctaagaatcctgt

SEQ ID NO: 26973 - DNA, 25 bp, SARS Virus
aatacagtttggcaagaatcctgtt

SEQ ID NO: 26974 - DNA, 25 bp, SARS Virus
atacagtttggtcagaatcctgttc

SEQ ID NO: 26975 - DNA, 25 bp, SARS Virus
tacagtttggtacgaatcctgttcg

SEQ ID NO: 26976 - DNA, 25 bp, SARS Virus
acagtttggtaacaatcctgttcgt

SEQ ID NO: 26977 - DNA, 25 bp, SARS Virus
cagtttggtaagcatcctgttcgtc

SEQ ID NO: 26978 - DNA, 25 bp, SARS Virus
agtttggtaagactcctgttcgtcg

SEQ ID NO: 26979 - DNA, 25 bp, SARS Virus
gtttggtaagaaccctgttcgtcgt

SEQ ID NO: 26980 - DNA, 25 bp, SARS Virus
tttggtaagaatcctgttcgtcgtt

SEQ ID NO: 26981 - DNA, 25 bp, SARS Virus
ttggtaagaatcctgttcgtcgtta

SEQ ID NO: 26982 - DNA, 25 bp, SARS Virus
tggtaagaatcccgttcgtcgttaa

SEQ ID NO: 26983 - DNA, 25 bp, SARS Virus
ggtaagaatcctcttcgtcgttaat

SEQ ID NO: 26984 - DNA, 25 bp, SARS Virus
gtaagaatcctgctcgtcgttaatg

SEQ ID NO: 26985 - DNA, 25 bp, SARS Virus
taagaatcctgtccgtcgttaatgt

SEQ ID NO: 26986 - DNA, 25 bp, SARS Virus
aagaatcctgttcgtcgttaatgtt

SEQ ID NO: 26987 - DNA, 25 bp, SARS Virus
agaatcctgttcctcgttaatgttg

SEQ ID NO: 26988 - DNA, 25 bp, SARS Virus
gaatcctgttcgccgttaatgttgt

SEQ ID NO: 26989 - DNA, 25 bp, SARS Virus
aatcctgttcgtcgttaatgttgta

SEQ ID NO: 26990 - DNA, 25 bp, SARS Virus
atcctgttcgtccttaatgttgtag

SEQ ID NO: 26991 - DNA, 25 bp, SARS Virus
tcctgttcgtcgctaatgttgtagt

SEQ ID NO: 26992 - DNA, 25 bp, SARS Virus
cctgttcgtcgtcaatgttgtagtt

SEQ ID NO: 26993 - DNA, 25 bp, SARS Virus
ctgttcgtcgttcatgttgtagttt

SEQ ID NO: 26994 - DNA, 25 bp, SARS Virus
tgttcgtcgttactgttgtagttta

SEQ ID NO: 26995 - DNA, 25 bp, SARS Virus
gttcgtcgttaacgttgtagtttaa

SEQ ID NO: 26996 - DNA, 25 bp, SARS Virus
ttcgtcgttaatcttgtagtttaac

SEQ ID NO: 26997 - DNA, 25 bp, SARS Virus
tcgtcgttaatgctgtagtttaacg

SEQ ID NO: 26998 - DNA, 25 bp, SARS Virus
cgtcgttaatgtcgtagtttaacgc

SEQ ID NO: 26999 - DNA, 25 bp, SARS Virus
gtcgttaatgttctagtttaacgcg

SEQ ID NO: 27000 - DNA, 25 bp, SARS Virus
tcgttaatgttgcagtttaacgcga

SEQ ID NO: 27001 - DNA, 25 bp, SARS Virus
cgttaatgttgtcgtttaacgcgat

SEQ ID NO: 27002 - DNA, 25 bp, SARS Virus
gttaatgttgtactttaacgcgatt

SEQ ID NO: 27003 - DNA, 25 bp, SARS Virus
ttaatgttgtagcttaacgcgattc

SEQ ID NO: 27004 - DNA, 25 bp, SARS Virus
taatgttgtagtctaacgcgattct

SEQ ID NO: 27005 - DNA, 25 bp, SARS Virus
aatgttgtagttcaacgcgattctc

SEQ ID NO: 27006 - DNA, 25 bp, SARS Virus
atgttgtagtttcacgcgattctct

SEQ ID NO: 27007 - DNA, 25 bp, SARS Virus
tgttgtagtttaccgcgattctcta

SEQ ID NO: 27008 - DNA, 25 bp, SARS Virus
gttgtagtttaacgcgattctctaa

SEQ ID NO: 27009 - DNA, 25 bp, SARS Virus
ttgtagtttaacccgattctctaat

SEQ ID NO: 27010 - DNA, 25 bp, SARS Virus
tgtagtttaacgcgattctctaatc

SEQ ID NO: 27011 - DNA, 25 bp, SARS Virus
gtagtttaacgccattctctaatcg

SEQ ID NO: 27012 - DNA, 25 bp, SARS Virus
tagtttaacgcgcttctctaatcgt

SEQ ID NO: 27013 - DNA, 25 bp, SARS Virus
agtttaacgcgactctctaatcgtg

SEQ ID NO: 27014 - DNA, 25 bp, SARS Virus
gtttaacgcgatcctctaatcgtgt

SEQ ID NO: 27015 - DNA, 25 bp, SARS Virus
tttaacgcgattctctaatcgtgtt

SEQ ID NO: 27016 - DNA, 25 bp, SARS Virus
ttaacgcgattccctaatcgtgttg

SEQ ID NO: 27017 - DNA, 25 bp, SARS Virus
taacgcgattctctaatcgtgttgc

SEQ ID NO: 27018 - DNA, 25 bp, SARS Virus
aacgcgattctccaatcgtgttgca

SEQ ID NO: 27019 - DNA, 25 bp, SARS Virus
acgcgattctctcatcgtgttgcac

SEQ ID NO: 27020 - DNA, 25 bp, SARS Virus
cgcgattctctactcgtgttgcaca

SEQ ID NO: 27021 - DNA, 25 bp, SARS Virus
gcgattctctaaccgtgttgcacac

SEQ ID NO: 27022 - DNA, 25 bp, SARS Virus
cgattctctaatcgtgttgcacaca

SEQ ID NO: 27023 - DNA, 25 bp, SARS Virus
gattctctaatcctgttgcacacaa

SEQ ID NO: 27024 - DNA, 25 bp, SARS Virus
attctctaatcgcgttgcacacaaa

SEQ ID NO: 27025 - DNA, 25 bp, SARS Virus
ttctctaatcgtcttgcacacaaat

SEQ ID NO: 27026 - DNA, 25 bp, SARS Virus
tctctaatcgtgctgcacacaaatt

SEQ ID NO: 27027 - DNA, 25 bp, SARS Virus
ctctaatcgtgtcgcacacaaattg

SEQ ID NO: 27028 - DNA, 25 bp, SARS Virus
tctaatcgtgttccacacaaattgt

SEQ ID NO: 27029 - DNA, 25 bp, SARS Virus
ctaatcgtgttgcacacaaattgtt

SEQ ID NO: 27030 - DNA, 25 bp, SARS Virus
taatcgtgttgcccacaaattgtta

SEQ ID NO: 27031 - DNA, 25 bp, SARS Virus
aatcgtgttgcacacaaattgttaa

SEQ ID NO: 27032 - DNA, 25 bp, SARS Virus
atcgtgttgcacccaaattgttaat

SEQ ID NO: 27033 - DNA, 25 bp, SARS Virus
tcgtgttgcacacaaattgttaata

SEQ ID NO: 27034 - DNA, 25 bp, SARS Virus
cgtgttgcacaccaattgttaatat

SEQ ID NO: 27035 - DNA, 25 bp, SARS Virus
gtgttgcacacacattgttaatata

SEQ ID NO: 27036 - DNA, 25 bp, SARS Virus
tgttgcacacaacttgttaatatac

SEQ ID NO: 27037 - DNA, 25 bp, SARS Virus
gttgcacacaaactgttaatatacg

SEQ ID NO: 27038 - DNA, 25 bp, SARS Virus
ttgcacacaaatcgttaatatacgg

SEQ ID NO: 27039 - DNA, 25 bp, SARS Virus
tgcacacaaattcttaatatacgga

SEQ ID NO: 27040 - DNA, 25 bp, SARS Virus
gcacacaaattgctaatatacggaa

SEQ ID NO: 27041 - DNA, 25 bp, SARS Virus
cacacaaattgtcaatatacggaat

SEQ ID NO: 27042 - DNA, 25 bp, SARS Virus
acacaaattgttcatatacggaata

SEQ ID NO: 27043 - DNA, 25 bp, SARS Virus
cacaaattgttactatacggaatac

SEQ ID NO: 27044 - DNA, 25 bp, SARS Virus
acaaattgttaacatacggaataca

SEQ ID NO: 27045 - DNA, 25 bp, SARS Virus
caaattgttaatctacggaatacac

SEQ ID NO: 27046 - DNA, 25 bp, SARS Virus
aaattgttaatacacggaatacaca

SEQ ID NO: 27047 - DNA, 25 bp, SARS Virus
aattgttaatatccggaatacacaa

SEQ ID NO: 27048 - DNA, 25 bp, SARS Virus
attgttaatatacggaatacacaaa

SEQ ID NO: 27049 - DNA, 25 bp, SARS Virus
ttgttaatataccgaatacacaaat

SEQ ID NO: 27050 - DNA, 25 bp, SARS Virus
tgttaatatacgcaatacacaaatg

SEQ ID NO: 27051 - DNA, 25 bp, SARS Virus
gttaatatacggcatacacaaatgt

SEQ ID NO: 27052 - DNA, 25 bp, SARS Virus
ttaatatacggactacacaaatgta

SEQ ID NO: 27053 - DNA, 25 bp, SARS Virus
taatatacggaacacacaaatgtaa

SEQ ID NO: 27054 - DNA, 25 bp, SARS Virus
aatatacggaatccacaaatgtaat

SEQ ID NO: 27055 - DNA, 25 bp, SARS Virus
atatacggaatacacaaatgtaata

SEQ ID NO: 27056 - DNA, 25 bp, SARS Virus
tatacggaatacccaaatgtaataa

SEQ ID NO: 27057 - DNA, 25 bp, SARS Virus
atacggaatacacaaatgtaataac

SEQ ID NO: 27058 - DNA, 25 bp, SARS Virus
tacggaatacaccaatgtaataaca

SEQ ID NO: 27059 - DNA, 25 bp, SARS Virus
acggaatacacacatgtaataacaa

SEQ ID NO: 27060 - DNA, 25 bp, SARS Virus
cggaatacacaactgtaataacaag

SEQ ID NO: 27061 - DNA, 25 bp, SARS Virus
ggaatacacaaacgtaataacaagg

SEQ ID NO: 27062 - DNA, 25 bp, SARS Virus
gaatacacaaatctaataacaaggt

SEQ ID NO: 27063 - DNA, 25 bp, SARS Virus
aatacacaaatgcaataacaaggtt

SEQ ID NO: 27064 - DNA, 25 bp, SARS Virus
atacacaaatgtcataacaaggtta

SEQ ID NO: 27065 - DNA, 25 bp, SARS Virus
tacacaaatgtactaacaaggttaa

SEQ ID NO: 27066 - DNA, 25 bp, SARS Virus
acacaaatgtaacaacaaggttaac

SEQ ID NO: 27067 - DNA, 25 bp, SARS Virus
cacaaatgtaatcacaaggttaaca

SEQ ID NO: 27068 - DNA, 25 bp, SARS Virus
acaaatgtaataccaaggttaacac

SEQ ID NO: 27069 - DNA, 25 bp, SARS Virus
caaatgtaataacaaggttaacaca

SEQ ID NO: 27070 - DNA, 25 bp, SARS Virus
aaatgtaataaccaggttaacacat

SEQ ID NO: 27071 - DNA, 25 bp, SARS Virus
aatgtaataacacggttaacacatg

SEQ ID NO: 27072 - DNA, 25 bp, SARS Virus
atgtaataacaacgttaacacatga

SEQ ID NO: 27073 - DNA, 25 bp, SARS Virus
tgtaataacaagcttaacacatgaa

SEQ ID NO: 27074 - DNA, 25 bp, SARS Virus
gtaataacaaggctaacacatgaaa

SEQ ID NO: 27075 - DNA, 25 bp, SARS Virus
taataacaaggtcaacacatgaaaa

SEQ ID NO: 27076 - DNA, 25 bp, SARS Virus
aataacaaggttcacacatgaaaat

SEQ ID NO: 27077 - DNA, 25 bp, SARS Virus
ataacaaggttaccacatgaaaatg

SEQ ID NO: 27078 - DNA, 25 bp, SARS Virus
taacaaggttaacacatgaaaatga

SEQ ID NO: 27079 - DNA, 25 bp, SARS Virus
aacaaggttaacccatgaaaatgat

SEQ ID NO: 27080 - DNA, 25 bp, SARS Virus
acaaggttaacacatgaaaatgatt

SEQ ID NO: 27081 - DNA, 25 bp, SARS Virus
caaggttaacacctgaaaatgattt

SEQ ID NO: 27082 - DNA, 25 bp, SARS Virus
aaggttaacacacgaaaatgatttt

SEQ ID NO: 27083 - DNA, 25 bp, SARS Virus
aggttaacacatcaaaatgattttc

SEQ ID NO: 27084 - DNA, 25 bp, SARS Virus
ggttaacacatgcaaatgattttca

SEQ ID NO: 27085 - DNA, 25 bp, SARS Virus
gttaacacatgacaatgattttcat

SEQ ID NO: 27086 - DNA, 25 bp, SARS Virus
ttaacacatgaacatgattttcatg

SEQ ID NO: 27087 - DNA, 25 bp, SARS Virus
taacacatgaaactgattttcatgg

SEQ ID NO: 27088 - DNA, 25 bp, SARS Virus
aacacatgaaaacgattttcatggt

SEQ ID NO: 27089 - DNA, 25 bp, SARS Virus
acacatgaaaatcattttcatggtt

SEQ ID NO: 27090 - DNA, 25 bp, SARS Virus
cacatgaaaatgcttttcatggtta

SEQ ID NO: 27091 - DNA, 25 bp, SARS Virus
acatgaaaatgactttcatggttaa

SEQ ID NO: 27092 - DNA, 25 bp, SARS Virus
catgaaaatgatcttcatggttaag

SEQ ID NO: 27093 - DNA, 25 bp, SARS Virus
atgaaaatgattctcatggttaaga

SEQ ID NO: 27094 - DNA, 25 bp, SARS Virus
tgaaaatgatttccatggttaagat

SEQ ID NO: 27095 - DNA, 25 bp, SARS Virus
gaaaatgattttcatggttaagatc

SEQ ID NO: 27096 - DNA, 25 bp, SARS Virus
aaaatgattttcctggttaagatct

SEQ ID NO: 27097 - DNA, 25 bp, SARS Virus
aaatgattttcacggttaagatctt

SEQ ID NO: 27098 - DNA, 25 bp, SARS Virus
aatgattttcatcgttaagatctta

SEQ ID NO: 27099 - DNA, 25 bp, SARS Virus
atgattttcatgcttaagatcttaa

SEQ ID NO: 27100 - DNA, 25 bp, SARS Virus
tgattttcatggctaagatcttaat

SEQ ID NO: 27101 - DNA, 25 bp, SARS Virus
gattttcatggtcaagatcttaatc

SEQ ID NO: 27102 - DNA, 25 bp, SARS Virus
attttcatggttcagatcttaatct

SEQ ID NO: 27103 - DNA, 25 bp, SARS Virus
ttttcatggttacgatcttaatctc

SEQ ID NO: 27104 - DNA, 25 bp, SARS Virus
tttcatggttaacatcttaatctcg

SEQ ID NO: 27105 - DNA, 25 bp, SARS Virus
ttcatggttaagctcttaatctcga

SEQ ID NO: 27106 - DNA, 25 bp, SARS Virus
tcatggttaagaccttaatctcgaa

SEQ ID NO: 27107 - DNA, 25 bp, SARS Virus
catggttaagatcttaatctcgaag

SEQ ID NO: 27108 - DNA, 25 bp, SARS Virus
atggttaagatcctaatctcgaagt

SEQ ID NO: 27109 - DNA, 25 bp, SARS Virus
tggttaagatctcaatctcgaagtg

SEQ ID NO: 27110 - DNA, 25 bp, SARS Virus
ggttaagatcttcatctcgaagtga

SEQ ID NO: 27111 - DNA, 25 bp, SARS Virus
gttaagatcttactctcgaagtgat

SEQ ID NO: 27112 - DNA, 25 bp, SARS Virus
ttaagatcttaacctcgaagtgatg

SEQ ID NO: 27113 - DNA, 25 bp, SARS Virus
taagatcttaatctcgaagtgatgg

SEQ ID NO: 27114 - DNA, 25 bp, SARS Virus
aagatcttaatcccgaagtgatgga

SEQ ID NO: 27115 - DNA, 25 bp, SARS Virus
agatcttaatctcgaagtgatggat

SEQ ID NO: 27116 - DNA, 25 bp, SARS Virus
gatcttaatctccaagtgatggatg

SEQ ID NO: 27117 - DNA, 25 bp, SARS Virus
atcttaatctcgcagtgatggatgt

SEQ ID NO: 27118 - DNA, 25 bp, SARS Virus
tcttaatctcgacgtgatggatgtt

SEQ ID NO: 27119 - DNA, 25 bp, SARS Virus
cttaatctcgaactgatggatgttg

SEQ ID NO: 27120 - DNA, 25 bp, SARS Virus
ttaatctcgaagcgatggatgttga

SEQ ID NO: 27121 - DNA, 25 bp, SARS Virus
taatctcgaagtcatggatgttgat

SEQ ID NO: 27122 - DNA, 25 bp, SARS Virus
aatctcgaagtgctggatgttgata

SEQ ID NO: 27123 - DNA, 25 bp, SARS Virus
atctcgaagtgacggatgttgataa

SEQ ID NO: 27124 - DNA, 25 bp, SARS Virus
tctcgaagtgatcgatgttgataac

SEQ ID NO: 27125 - DNA, 25 bp, SARS Virus
ctcgaagtgatgcatgttgataacg

SEQ ID NO: 27126 - DNA, 25 bp, SARS Virus
tcgaagtgatggctgttgataacga

SEQ ID NO: 27127 - DNA, 25 bp, SARS Virus
cgaagtgatggacgttgataacgat

SEQ ID NO: 27128 - DNA, 25 bp, SARS Virus
gaagtgatggatcttgataacgatt

SEQ ID NO: 27129 - DNA, 25 bp, SARS Virus
aagtgatggatgctgataacgattt

SEQ ID NO: 27130 - DNA, 25 bp, SARS Virus
agtgatggatgtcgataacgatttt

SEQ ID NO: 27131 - DNA, 25 bp, SARS Virus
gtgatggatgttcataacgattttt

SEQ ID NO: 27132 - DNA, 25 bp, SARS Virus
tgatggatgttgctaacgattttta

SEQ ID NO: 27133 - DNA, 25 bp, SARS Virus
gatggatgttgacaacgatttttat

SEQ ID NO: 27134 - DNA, 25 bp, SARS Virus
atggatgttgatcacgatttttatc

SEQ ID NO: 27135 - DNA, 25 bp, SARS Virus
tggatgttgataccgatttttatca

SEQ ID NO: 27136 - DNA, 25 bp, SARS Virus
ggatgttgataacgatttttatcac

SEQ ID NO: 27137 - DNA, 25 bp, SARS Virus
gatgttgataaccatttttatcaca

SEQ ID NO: 27138 - DNA, 25 bp, SARS Virus
atgttgataacgctttttatcacaa

SEQ ID NO: 27139 - DNA, 25 bp, SARS Virus
tgttgataacgacttttatcacaat

SEQ ID NO: 27140 - DNA, 25 bp, SARS Virus
gttgataacgatctttatcacaatt

SEQ ID NO: 27141 - DNA, 25 bp, SARS Virus
ttgataacgattcttatcacaattc

SEQ ID NO: 27142 - DNA, 25 bp, SARS Virus
tgataacgatttctatcacaattct

SEQ ID NO: 27143 - DNA, 25 bp, SARS Virus
gataacgattttcatcacaattctc

SEQ ID NO: 27144 - DNA, 25 bp, SARS Virus
ataacgatttttctcacaattctca

SEQ ID NO: 27145 - DNA, 25 bp, SARS Virus
taacgatttttaccacaattctcac

SEQ ID NO: 27146 - DNA, 25 bp, SARS Virus
aacgatttttatcacaattctcaca

SEQ ID NO: 27147 - DNA, 25 bp, SARS Virus
acgatttttatcccaattctcacaa

SEQ ID NO: 27148 - DNA, 25 bp, SARS Virus
cgatttttatcacaattctcacaac

SEQ ID NO: 27149 - DNA, 25 bp, SARS Virus
gatttttatcaccattctcacaacg

SEQ ID NO: 27150 - DNA, 25 bp, SARS Virus
atttttatcacacttctcacaacga

SEQ ID NO: 27151 - DNA, 25 bp, SARS Virus
tttttatcacaactctcacaacgat

SEQ ID NO: 27152 - DNA, 25 bp, SARS Virus
ttttatcacaatcctcacaacgatt

SEQ ID NO: 27153 - DNA, 25 bp, SARS Virus
tttatcacaattctcacaacgattt

SEQ ID NO: 27154 - DNA, 25 bp, SARS Virus
ttatcacaattcccacaacgattta

SEQ ID NO: 27155 - DNA, 25 bp, SARS Virus
tatcacaattctcacaacgatttaa

SEQ ID NO: 27156 - DNA, 25 bp, SARS Virus
atcacaattctcccaacgatttaat

SEQ ID NO: 27157 - DNA, 25 bp, SARS Virus
tcacaattctcacaacgatttaata

SEQ ID NO: 27158 - DNA, 25 bp, SARS Virus
cacaattctcaccacgatttaatac

SEQ ID NO: 27159 - DNA, 25 bp, SARS Virus
acaattctcacaccgatttaataca

SEQ ID NO: 27160 - DNA, 25 bp, SARS Virus
caattctcacaacgatttaatacaa

SEQ ID NO: 27161 - DNA, 25 bp, SARS Virus
aattctcacaaccatttaatacaaa

SEQ ID NO: 27162 - DNA, 25 bp, SARS Virus
attctcacaacgctttaatacaaac

SEQ ID NO: 27163 - DNA, 25 bp, SARS Virus
ttctcacaacgacttaatacaaacc

SEQ ID NO: 27164 - DNA, 25 bp, SARS Virus
tctcacaacgatctaatacaaacct

SEQ ID NO: 27165 - DNA, 25 bp, SARS Virus
ctcacaacgattcaatacaaaccta

SEQ ID NO: 27166 - DNA, 25 bp, SARS Virus
tcacaacgatttcatacaaacctac

SEQ ID NO: 27167 - DNA, 25 bp, SARS Virus
cacaacgatttactacaaacctacg

SEQ ID NO: 27168 - DNA, 25 bp, SARS Virus
acaacgatttaacacaaacctacgg

SEQ ID NO: 27169 - DNA, 25 bp, SARS Virus
caacgatttaatccaaacctacggc

SEQ ID NO: 27170 - DNA, 25 bp, SARS Virus
aacgatttaatacaaacctacggcc

SEQ ID NO: 27171 - DNA, 25 bp, SARS Virus
acgatttaataccaacctacggccg

SEQ ID NO: 27172 - DNA, 25 bp, SARS Virus
cgatttaatacacacctacggccgt

SEQ ID NO: 27173 - DNA, 25 bp, SARS Virus
gatttaatacaaccctacggccgta

SEQ ID NO: 27174 - DNA, 25 bp, SARS Virus
atttaatacaaacctacggccgtaa

SEQ ID NO: 27175 - DNA, 25 bp, SARS Virus
tttaatacaaacctacggccgtaat

SEQ ID NO: 27176 - DNA, 25 bp, SARS Virus
ttaatacaaacccacggccgtaatt

SEQ ID NO: 27177 - DNA, 25 bp, SARS Virus
taatacaaacctccggccgtaatta

SEQ ID NO: 27178 - DNA, 25 bp, SARS Virus
aatacaaacctacggccgtaattaa

SEQ ID NO: 27179 - DNA, 25 bp, SARS Virus
atacaaacctaccgccgtaattaat

SEQ ID NO: 27180 - DNA, 25 bp, SARS Virus
tacaaacctacgcccgtaattaata

SEQ ID NO: 27181 - DNA, 25 bp, SARS Virus
acaaacctacggccgtaattaatac

SEQ ID NO: 27182 - DNA, 25 bp, SARS Virus
caaacctacggccgtaattaataca

SEQ ID NO: 27183 - DNA, 25 bp, SARS Virus
aaacctacggccctaattaatacac

SEQ ID NO: 27184 - DNA, 25 bp, SARS Virus
aacctacggccgcaattaatacact

SEQ ID NO: 27185 - DNA, 25 bp, SARS Virus
acctacggccgtcattaatacactt

SEQ ID NO: 27186 - DNA, 25 bp, SARS Virus
cctacggccgtacttaatacacttc

SEQ ID NO: 27187 - DNA, 25 bp, SARS Virus
ctacggccgtaactaatacacttca

SEQ ID NO: 27188 - DNA, 25 bp, SARS Virus
tacggccgtaatcaatacacttcag

SEQ ID NO: 27189 - DNA, 25 bp, SARS Virus
acggccgtaattcatacacttcagt

SEQ ID NO: 27190 - DNA, 25 bp, SARS Virus
cggccgtaattactacacttcagtg

SEQ ID NO: 27191 - DNA, 25 bp, SARS Virus
ggccgtaattaacacacttcagtgg

SEQ ID NO: 27192 - DNA, 25 bp, SARS Virus
gccgtaattaatccacttcagtggg

SEQ ID NO: 27193 - DNA, 25 bp, SARS Virus
ccgtaattaatacacttcagtgggt

SEQ ID NO: 27194 - DNA, 25 bp, SARS Virus
cgtaattaatacccttcagtgggtt

SEQ ID NO: 27195 - DNA, 25 bp, SARS Virus
gtaattaatacacttcagtgggttt

SEQ ID NO: 27196 - DNA, 25 bp, SARS Virus
taattaatacacctcagtgggttta

SEQ ID NO: 27197 - DNA, 25 bp, SARS Virus
aattaatacactccagtgggtttaa

SEQ ID NO: 27198 - DNA, 25 bp, SARS Virus
attaatacacttcagtgggtttaaa

SEQ ID NO: 27199 - DNA, 25 bp, SARS Virus
ttaatacacttccgtgggtttaaaa

SEQ ID NO: 27200 - DNA, 25 bp, SARS Virus
taatacacttcactgggtttaaaag

SEQ ID NO: 27201 - DNA, 25 bp, SARS Virus
aatacacttcagcgggtttaaaaga

SEQ ID NO: 27202 - DNA, 25 bp, SARS Virus
atacacttcagtcggtttaaaagat

SEQ ID NO: 27203 - DNA, 25 bp, SARS Virus
tacacttcagtgcgtttaaaagatt

SEQ ID NO: 27204 - DNA, 25 bp, SARS Virus
acacttcagtggctttaaaagattt

SEQ ID NO: 27205 - DNA, 25 bp, SARS Virus
cacttcagtgggcttaaaagattta

SEQ ID NO: 27206 - DNA, 25 bp, SARS Virus
acttcagtgggtctaaaagatttaa

SEQ ID NO: 27207 - DNA, 25 bp, SARS Virus
cttcagtgggttcaaaagatttaac

SEQ ID NO: 27208 - DNA, 25 bp, SARS Virus
ttcagtgggtttcaaagatttaaca

SEQ ID NO: 27209 - DNA, 25 bp, SARS Virus
tcagtgggtttacaagatttaacaa

SEQ ID NO: 27210 - DNA, 25 bp, SARS Virus
cagtgggtttaacagatttaacaag

SEQ ID NO: 27211 - DNA, 25 bp, SARS Virus
agtgggtttaaacgatttaacaagt

SEQ ID NO: 27212 - DNA, 25 bp, SARS Virus
gtgggtttaaaacatttaacaagtg

SEQ ID NO: 27213 - DNA, 25 bp, SARS Virus
tgggtttaaaagctttaacaagtgt

SEQ ID NO: 27214 - DNA, 25 bp, SARS Virus
gggtttaaaagacttaacaagtgtt

SEQ ID NO: 27215 - DNA, 25 bp, SARS Virus
ggtttaaaagatctaacaagtgtta

SEQ ID NO: 27216 - DNA, 25 bp, SARS Virus
gtttaaaagattcaacaagtgttag

SEQ ID NO: 27217 - DNA, 25 bp, SARS Virus
tttaaaagatttcacaagtgttagc

SEQ ID NO: 27218 - DNA, 25 bp, SARS Virus
ttaaaagatttaccaagtgttagcg

SEQ ID NO: 27219 - DNA, 25 bp, SARS Virus
taaaagatttaacaagtgttagcga

SEQ ID NO: 27220 - DNA, 25 bp, SARS Virus
aaaagatttaaccagtgttagcgat

SEQ ID NO: 27221 - DNA, 25 bp, SARS Virus
aaagatttaacacgtgttagcgata

SEQ ID NO: 27222 - DNA, 25 bp, SARS Virus
aagatttaacaactgttagcgatac

SEQ ID NO: 27223 - DNA, 25 bp, SARS Virus
agatttaacaagcgttagcgataca

SEQ ID NO: 27224 - DNA, 25 bp, SARS Virus
gatttaacaagtcttagcgatacac

SEQ ID NO: 27225 - DNA, 25 bp, SARS Virus
atttaacaagtgctagcgatacacc

SEQ ID NO: 27226 - DNA, 25 bp, SARS Virus
tttaacaagtgtcagcgatacaccg

SEQ ID NO: 27227 - DNA, 25 bp, SARS Virus
ttaacaagtgttcgcgatacaccga

SEQ ID NO: 27228 - DNA, 25 bp, SARS Virus
taacaagtgttaccgatacaccgat

SEQ ID NO: 27229 - DNA, 25 bp, SARS Virus
aacaagtgttagcgatacaccgata

SEQ ID NO: 27230 - DNA, 25 bp, SARS Virus
acaagtgttagccatacaccgataa

SEQ ID NO: 27231 - DNA, 25 bp, SARS Virus
caagtgttagcgctacaccgataac

SEQ ID NO: 27232 - DNA, 25 bp, SARS Virus
aagtgttagcgacacaccgataaca

SEQ ID NO: 27233 - DNA, 25 bp, SARS Virus
agtgttagcgatccaccgataacaa

SEQ ID NO: 27234 - DNA, 25 bp, SARS Virus
gtgttagcgatacaccgataacaac

SEQ ID NO: 27235 - DNA, 25 bp, SARS Virus
tgttagcgataccccgataacaaca

SEQ ID NO: 27236 - DNA, 25 bp, SARS Virus
gttagcgatacaccgataacaacaa

SEQ ID NO: 27237 - DNA, 25 bp, SARS Virus
ttagcgatacaccgataacaacaat

SEQ ID NO: 27238 - DNA, 25 bp, SARS Virus
tagcgatacacccataacaacaatt

SEQ ID NO: 27239 - DNA, 25 bp, SARS Virus
agcgatacaccgctaacaacaattc

SEQ ID NO: 27240 - DNA, 25 bp, SARS Virus
gcgatacaccgacaacaacaattca

SEQ ID NO: 27241 - DNA, 25 bp, SARS Virus
cgatacaccgatcacaacaattcat

SEQ ID NO: 27242 - DNA, 25 bp, SARS Virus
gatacaccgataccaacaattcata

SEQ ID NO: 27243 - DNA, 25 bp, SARS Virus
atacaccgataacaacaattcataa

SEQ ID NO: 27244 - DNA, 25 bp, SARS Virus
tacaccgataaccacaattcataaa

SEQ ID NO: 27245 - DNA, 25 bp, SARS Virus
acaccgataacaccaattcataaac

SEQ ID NO: 27246 - DNA, 25 bp, SARS Virus
caccgataacaacaattcataaacg

SEQ ID NO: 27247 - DNA, 25 bp, SARS Virus
accgataacaaccattcataaacga

SEQ ID NO: 27248 - DNA, 25 bp, SARS Virus
ccgataacaacacttcataaacgaa

SEQ ID NO: 27249 - DNA, 25 bp, SARS Virus
cgataacaacaactcataaacgaat

SEQ ID NO: 27250 - DNA, 25 bp, SARS Virus
gataacaacaatccataaacgaatc

SEQ ID NO: 27251 - DNA, 25 bp, SARS Virus
ataacaacaattcataaacgaatcc

SEQ ID NO: 27252 - DNA, 25 bp, SARS Virus
taacaacaattcctaaacgaatcca

SEQ ID NO: 27253 - DNA, 25 bp, SARS Virus
aacaacaattcacaaacgaatccaa

SEQ ID NO: 27254 - DNA, 25 bp, SARS Virus
acaacaattcatcaacgaatccaag

SEQ ID NO: 27255 - DNA, 25 bp, SARS Virus
caacaattcatacacgaatccaaga

SEQ ID NO: 27256 - DNA, 25 bp, SARS Virus
aacaattcataaccgaatccaagag

SEQ ID NO: 27257 - DNA, 25 bp, SARS Virus
acaattcataaacgaatccaagaga

SEQ ID NO: 27258 - DNA, 25 bp, SARS Virus
caattcataaaccaatccaagagat

SEQ ID NO: 27259 - DNA, 25 bp, SARS Virus
aattcataaacgcatccaagagatt

SEQ ID NO: 27260 - DNA, 25 bp, SARS Virus
attcataaacgactccaagagatta

SEQ ID NO: 27261 - DNA, 25 bp, SARS Virus
ttcataaacgaacccaagagattag

SEQ ID NO: 27262 - DNA, 25 bp, SARS Virus
tcataaacgaatccaagagattaga

SEQ ID NO: 27263 - DNA, 25 bp, SARS Virus
cataaacgaatccaagagattagac

SEQ ID NO: 27264 - DNA, 25 bp, SARS Virus
ataaacgaatcccagagattagaca

SEQ ID NO: 27265 - DNA, 25 bp, SARS Virus
taaacgaatccacgagattagacac

SEQ ID NO: 27266 - DNA, 25 bp, SARS Virus
aaacgaatccaacagattagacaca

SEQ ID NO: 27267 - DNA, 25 bp, SARS Virus
aacgaatccaagcgattagacacat

SEQ ID NO: 27268 - DNA, 25 bp, SARS Virus
acgaatccaagacattagacacatt

SEQ ID NO: 27269 - DNA, 25 bp, SARS Virus
cgaatccaagagcttagacacattg

SEQ ID NO: 27270 - DNA, 25 bp, SARS Virus
gaatccaagagactagacacattga

SEQ ID NO: 27271 - DNA, 25 bp, SARS Virus
aatccaagagatcagacacattgac

SEQ ID NO: 27272 - DNA, 25 bp, SARS Virus
atccaagagattcgacacattgacg

SEQ ID NO: 27273 - DNA, 25 bp, SARS Virus
tccaagagattacacacattgacga

SEQ ID NO: 27274 - DNA, 25 bp, SARS Virus
ccaagagattagccacattgacgac

SEQ ID NO: 27275 - DNA, 25 bp, SARS Virus
caagagattagacacattgacgacg

SEQ ID NO: 27276 - DNA, 25 bp, SARS Virus
aagagattagacccattgacgacga

SEQ ID NO: 27277 - DNA, 25 bp, SARS Virus
agagattagacacattgacgacgaa

SEQ ID NO: 27278 - DNA, 25 bp, SARS Virus
gagattagacaccttgacgacgaaa

SEQ ID NO: 27279 - DNA, 25 bp, SARS Virus
agattagacacactgacgacgaaaa

SEQ ID NO: 27280 - DNA, 25 bp, SARS Virus
gattagacacatcgacgacgaaaac

SEQ ID NO: 27281 - DNA, 25 bp, SARS Virus
attagacacattcacgacgaaaacc

SEQ ID NO: 27282 - DNA, 25 bp, SARS Virus
ttagacacattgccgacgaaaacca

SEQ ID NO: 27283 - DNA, 25 bp, SARS Virus
tagacacattgacgacgaaaaccac

SEQ ID NO: 27284 - DNA, 25 bp, SARS Virus
agacacattgaccacgaaaaccaca

SEQ ID NO: 27285 - DNA, 25 bp, SARS Virus
gacacattgacgccgaaaaccacat

SEQ ID NO: 27286 - DNA, 25 bp, SARS Virus
acacattgacgacgaaaaccacatg

SEQ ID NO: 27287 - DNA, 25 bp, SARS Virus
cacattgacgaccaaaaccacatga

SEQ ID NO: 27288 - DNA, 25 bp, SARS Virus
acattgacgacgcaaaccacatgag

SEQ ID NO: 27289 - DNA, 25 bp, SARS Virus
cattgacgacgacaaccacatgaga

SEQ ID NO: 27290 - DNA, 25 bp, SARS Virus
attgacgacgaacaccacatgagaa

SEQ ID NO: 27291 - DNA, 25 bp, SARS Virus
ttgacgacgaaacccacatgagaat

SEQ ID NO: 27292 - DNA, 25 bp, SARS Virus
tgacgacgaaaaccacatgagaata

SEQ ID NO: 27293 - DNA, 25 bp, SARS Virus
gacgacgaaaaccacatgagaatag

SEQ ID NO: 27294 - DNA, 25 bp, SARS Virus
acgacgaaaaccccatgagaataga

SEQ ID NO: 27295 - DNA, 25 bp, SARS Virus
cgacgaaaaccacatgagaatagat

SEQ ID NO: 27296 - DNA, 25 bp, SARS Virus
gacgaaaaccacctgagaatagatt

SEQ ID NO: 27297 - DNA, 25 bp, SARS Virus
acgaaaaccacacgagaatagatta

SEQ ID NO: 27298 - DNA, 25 bp, SARS Virus
cgaaaaccacatcagaatagattaa

SEQ ID NO: 27299 - DNA, 25 bp, SARS Virus
gaaaaccacatgcgaatagattaaa

SEQ ID NO: 27300 - DNA, 25 bp, SARS Virus
aaaaccacatgacaatagattaaaa

SEQ ID NO: 27301 - DNA, 25 bp, SARS Virus
aaaccacatgagcatagattaaaac

SEQ ID NO: 27302 - DNA, 25 bp, SARS Virus
aaccacatgagactagattaaaacc

SEQ ID NO: 27303 - DNA, 25 bp, SARS Virus
accacatgagaacagattaaaacca

SEQ ID NO: 27304 - DNA, 25 bp, SARS Virus
ccacatgagaatcgattaaaaccac

SEQ ID NO: 27305 - DNA, 25 bp, SARS Virus
cacatgagaatacattaaaaccacg

SEQ ID NO: 27306 - DNA, 25 bp, SARS Virus
acatgagaatagcttaaaaccacga

SEQ ID NO: 27307 - DNA, 25 bp, SARS Virus
catgagaatagactaaaaccacgag

SEQ ID NO: 27308 - DNA, 25 bp, SARS Virus
atgagaatagatcaaaaccacgagg

SEQ ID NO: 27309 - DNA, 25 bp, SARS Virus
tgagaatagattcaaaccacgagga

SEQ ID NO: 27310 - DNA, 25 bp, SARS Virus
gagaatagattacaaccacgaggaa

SEQ ID NO: 27311 - DNA, 25 bp, SARS Virus
agaatagattaacaccacgaggaag

SEQ ID NO: 27312 - DNA, 25 bp, SARS Virus
gaatagattaaacccacgaggaaga

SEQ ID NO: 27313 - DNA, 25 bp, SARS Virus
aatagattaaaaccacgaggaagaa

SEQ ID NO: 27314 - DNA, 25 bp, SARS Virus
atagattaaaaccacgaggaagaat

SEQ ID NO: 27315 - DNA, 25 bp, SARS Virus
tagattaaaaccccgaggaagaata

SEQ ID NO: 27316 - DNA, 25 bp, SARS Virus
agattaaaaccacgaggaagaataa

SEQ ID NO: 27317 - DNA, 25 bp, SARS Virus
gattaaaaccaccaggaagaataac

SEQ ID NO: 27318 - DNA, 25 bp, SARS Virus
attaaaaccacgcggaagaataaca

SEQ ID NO: 27319 - DNA, 25 bp, SARS Virus
ttaaaaccacgacgaagaataacat

SEQ ID NO: 27320 - DNA, 25 bp, SARS Virus
taaaaccacgagcaagaataacatt

SEQ ID NO: 27321 - DNA, 25 bp, SARS Virus
aaaaccacgaggcagaataacatta

SEQ ID NO: 27322 - DNA, 25 bp, SARS Virus
aaaccacgaggacgaataacattac

SEQ ID NO: 27323 - DNA, 25 bp, SARS Virus
aaccacgaggaacaataacattacc

SEQ ID NO: 27324 - DNA, 25 bp, SARS Virus
accacgaggaagcataacattaccg

SEQ ID NO: 27325 - DNA, 25 bp, SARS Virus
ccacgaggaagactaacattaccgc

SEQ ID NO: 27326 - DNA, 25 bp, SARS Virus
cacgaggaagaacaacattaccgca

SEQ ID NO: 27327 - DNA, 25 bp, SARS Virus
acgaggaagaatcacattaccgcaa

SEQ ID NO: 27328 - DNA, 25 bp, SARS Virus
cgaggaagaataccattaccgcaat

SEQ ID NO: 27329 - DNA, 25 bp, SARS Virus
gaggaagaataacattaccgcaatc

SEQ ID NO: 27330 - DNA, 25 bp, SARS Virus
aggaagaataaccttaccgcaatct

SEQ ID NO: 27331 - DNA, 25 bp, SARS Virus
ggaagaataacactaccgcaatctc

SEQ ID NO: 27332 - DNA, 25 bp, SARS Virus
gaagaataacatcaccgcaatctct

SEQ ID NO: 27333 - DNA, 25 bp, SARS Virus
aagaataacattcccgcaatctctt

SEQ ID NO: 27334 - DNA, 25 bp, SARS Virus
agaataacattaccgcaatctctta

SEQ ID NO: 27335 - DNA, 25 bp, SARS Virus
gaataacattaccgcaatctcttaa

SEQ ID NO: 27336 - DNA, 25 bp, SARS Virus
aataacattaccccaatctcttaac

SEQ ID NO: 27337 - DNA, 25 bp, SARS Virus
ataacattaccgcaatctcttaaca

SEQ ID NO: 27338 - DNA, 25 bp, SARS Virus
taacattaccgccatctcttaacat

SEQ ID NO: 27339 - DNA, 25 bp, SARS Virus
aacattaccgcactctcttaacata

SEQ ID NO: 27340 - DNA, 25 bp, SARS Virus
acattaccgcaacctcttaacatag

SEQ ID NO: 27341 - DNA, 25 bp, SARS Virus
cattaccgcaatctcttaacataga

SEQ ID NO: 27342 - DNA, 25 bp, SARS Virus
attaccgcaatcccttaacatagaa

SEQ ID NO: 27343 - DNA, 25 bp, SARS Virus
ttaccgcaatctcttaacatagaat

SEQ ID NO: 27344 - DNA, 25 bp, SARS Virus
taccgcaatctcctaacatagaatt

SEQ ID NO: 27345 - DNA, 25 bp, SARS Virus
accgcaatctctcaacatagaatta

SEQ ID NO: 27346 - DNA, 25 bp, SARS Virus
ccgcaatctcttcacatagaattaa

SEQ ID NO: 27347 - DNA, 25 bp, SARS Virus
cgcaatctcttaccatagaattaag

SEQ ID NO: 27348 - DNA, 25 bp, SARS Virus
gcaatctcttaacatagaattaagc

SEQ ID NO: 27349 - DNA, 25 bp, SARS Virus
caatctcttaacctagaattaagca

SEQ ID NO: 27350 - DNA, 25 bp, SARS Virus
aatctcttaacacagaattaagcag

SEQ ID NO: 27351 - DNA, 25 bp, SARS Virus
atctcttaacatcgaattaagcaga

SEQ ID NO: 27352 - DNA, 25 bp, SARS Virus
tctcttaacatacaattaagcagat

SEQ ID NO: 27353 - DNA, 25 bp, SARS Virus
ctcttaacatagcattaagcagatt

SEQ ID NO: 27354 - DNA, 25 bp, SARS Virus
tcttaacatagacttaagcagattg

SEQ ID NO: 27355 - DNA, 25 bp, SARS Virus
cttaacatagaactaagcagattgc

SEQ ID NO: 27356 - DNA, 25 bp, SARS Virus
ttaacatagaatcaagcagattgca

SEQ ID NO: 27357 - DNA, 25 bp, SARS Virus
taacatagaattcagcagattgcaa

SEQ ID NO: 27358 - DNA, 25 bp, SARS Virus
aacatagaattacgcagattgcaat

SEQ ID NO: 27359 - DNA, 25 bp, SARS Virus
acatagaattaaccagattgcaatg

SEQ ID NO: 27360 - DNA, 25 bp, SARS Virus
catagaattaagcagattgcaatga

SEQ ID NO: 27361 - DNA, 25 bp, SARS Virus
atagaattaagccgattgcaatgat

SEQ ID NO: 27362 - DNA, 25 bp, SARS Virus
tagaattaagcacattgcaatgatg

SEQ ID NO: 27363 - DNA, 25 bp, SARS Virus
agaattaagcagcttgcaatgatga

SEQ ID NO: 27364 - DNA, 25 bp, SARS Virus
gaattaagcagactgcaatgatgat

SEQ ID NO: 27365 - DNA, 25 bp, SARS Virus
aattaagcagatcgcaatgatgata

SEQ ID NO: 27366 - DNA, 25 bp, SARS Virus
attaagcagattccaatgatgatac

SEQ ID NO: 27367 - DNA, 25 bp, SARS Virus
ttaagcagattgcaatgatgatacc

SEQ ID NO: 27368 - DNA, 25 bp, SARS Virus
taagcagattgccatgatgatacct

SEQ ID NO: 27369 - DNA, 25 bp, SARS Virus
aagcagattgcactgatgataccta

SEQ ID NO: 27370 - DNA, 25 bp, SARS Virus
agcagattgcaacgatgatacctaa

SEQ ID NO: 27371 - DNA, 25 bp, SARS Virus
gcagattgcaatcatgatacctaaa

SEQ ID NO: 27372 - DNA, 25 bp, SARS Virus
cagattgcaatgctgatacctaaag

SEQ ID NO: 27373 - DNA, 25 bp, SARS Virus
agattgcaatgacgatacctaaaga

SEQ ID NO: 27374 - DNA, 25 bp, SARS Virus
gattgcaatgatcatacctaaagac

SEQ ID NO: 27375 - DNA, 25 bp, SARS Virus
attgcaatgatgctacctaaagaca

SEQ ID NO: 27376 - DNA, 25 bp, SARS Virus
ttgcaatgatgacacctaaagacac

SEQ ID NO: 27377 - DNA, 25 bp, SARS Virus
tgcaatgatgatccctaaagacact

SEQ ID NO: 27378 - DNA, 25 bp, SARS Virus
gcaatgatgatacctaaagacactt

SEQ ID NO: 27379 - DNA, 25 bp, SARS Virus
caatgatgatacctaaagacacttc

SEQ ID NO: 27380 - DNA, 25 bp, SARS Virus
aatgatgatacccaaagacacttcc

SEQ ID NO: 27381 - DNA, 25 bp, SARS Virus
atgatgatacctcaagacacttcca

SEQ ID NO: 27382 - DNA, 25 bp, SARS Virus
tgatgatacctacagacacttccaa

SEQ ID NO: 27383 - DNA, 25 bp, SARS Virus
gatgatacctaacgacacttccaag

SEQ ID NO: 27384 - DNA, 25 bp, SARS Virus
atgatacctaaacacacttccaaga

SEQ ID NO: 27385 - DNA, 25 bp, SARS Virus
tgatacctaaagccacttccaagaa

SEQ ID NO: 27386 - DNA, 25 bp, SARS Virus
gatacctaaagacacttccaagaaa

SEQ ID NO: 27387 - DNA, 25 bp, SARS Virus
atacctaaagacccttccaagaaaa

SEQ ID NO: 27388 - DNA, 25 bp, SARS Virus
tacctaaagacacttccaagaaaag

SEQ ID NO: 27389 - DNA, 25 bp, SARS Virus
acctaaagacacctccaagaaaagg

SEQ ID NO: 27390 - DNA, 25 bp, SARS Virus
cctaaagacactcccaagaaaagga

SEQ ID NO: 27391 - DNA, 25 bp, SARS Virus
ctaaagacacttccaagaaaaggaa

SEQ ID NO: 27392 - DNA, 25 bp, SARS Virus
taaagacacttccaagaaaaggaac

SEQ ID NO: 27393 - DNA, 25 bp, SARS Virus
aaagacacttcccagaaaaggaacg

SEQ ID NO: 27394 - DNA, 25 bp, SARS Virus
aagacacttccacgaaaaggaacgt

SEQ ID NO: 27395 - DNA, 25 bp, SARS Virus
agacacttccaacaaaaggaacgtc

SEQ ID NO: 27396 - DNA, 25 bp, SARS Virus
gacacttccaagcaaaggaacgtcg

SEQ ID NO: 27397 - DNA, 25 bp, SARS Virus
acacttccaagacaaggaacgtcgt

SEQ ID NO: 27398 - DNA, 25 bp, SARS Virus
cacttccaagaacaggaacgtcgta

SEQ ID NO: 27399 - DNA, 25 bp, SARS Virus
acttccaagaaacggaacgtcgtaa

SEQ ID NO: 27400 - DNA, 25 bp, SARS Virus
cttccaagaaaacgaacgtcgtaaa

SEQ ID NO: 27401 - DNA, 25 bp, SARS Virus
ttccaagaaaagcaacgtcgtaaac

SEQ ID NO: 27402 - DNA, 25 bp, SARS Virus
tccaagaaaaggcacgtcgtaaaca

SEQ ID NO: 27403 - DNA, 25 bp, SARS Virus
ccaagaaaaggaccgtcgtaaacaa

SEQ ID NO: 27404 - DNA, 25 bp, SARS Virus
caagaaaaggaacgtcgtaaacaaa

SEQ ID NO: 27405 - DNA, 25 bp, SARS Virus
aagaaaaggaacctcgtaaacaaat

SEQ ID NO: 27406 - DNA, 25 bp, SARS Virus
agaaaaggaacgccgtaaacaaatt

SEQ ID NO: 27407 - DNA, 25 bp, SARS Virus
gaaaaggaacgtcgtaaacaaattc

SEQ ID NO: 27408 - DNA, 25 bp, SARS Virus
aaaaggaacgtcctaaacaaattca

SEQ ID NO: 27409 - DNA, 25 bp, SARS Virus
aaaggaacgtcgcaaacaaattcac

SEQ ID NO: 27410 - DNA, 25 bp, SARS Virus
aaggaacgtcgtcaacaaattcacc

SEQ ID NO: 27411 - DNA, 25 bp, SARS Virus
aggaacgtcgtacacaaattcacct

SEQ ID NO: 27412 - DNA, 25 bp, SARS Virus
ggaacgtcgtaaccaaattcaccta

SEQ ID NO: 27413 - DNA, 25 bp, SARS Virus
gaacgtcgtaaacaaattcacctaa

SEQ ID NO: 27414 - DNA, 25 bp, SARS Virus
aacgtcgtaaaccaattcacctaat

SEQ ID NO: 27415 - DNA, 25 bp, SARS Virus
acgtcgtaaacacattcacctaatc

SEQ ID NO: 27416 - DNA, 25 bp, SARS Virus
cgtcgtaaacaacttcacctaatct

SEQ ID NO: 27417 - DNA, 25 bp, SARS Virus
gtcgtaaacaaactcacctaatctg

SEQ ID NO: 27418 - DNA, 25 bp, SARS Virus
tcgtaaacaaatccacctaatctga

SEQ ID NO: 27419 - DNA, 25 bp, SARS Virus
cgtaaacaaattcacctaatctgag

SEQ ID NO: 27420 - DNA, 25 bp, SARS Virus
gtaaacaaattcccctaatctgagg

SEQ ID NO: 27421 - DNA, 25 bp, SARS Virus
taaacaaattcacctaatctgaggg

SEQ ID NO: 27422 - DNA, 25 bp, SARS Virus
aaacaaattcacctaatctgaggga

SEQ ID NO: 27423 - DNA, 25 bp, SARS Virus
aacaaattcacccaatctgagggaa

SEQ ID NO: 27424 - DNA, 25 bp, SARS Virus
acaaattcacctcatctgagggaac

SEQ ID NO: 27425 - DNA, 25 bp, SARS Virus
caaattcacctactctgagggaact

SEQ ID NO: 27426 - DNA, 25 bp, SARS Virus
aaattcacctaacctgagggaacta

SEQ ID NO: 27427 - DNA, 25 bp, SARS Virus
aattcacctaatctgagggaactaa

SEQ ID NO: 27428 - DNA, 25 bp, SARS Virus
attcacctaatccgagggaactaag

SEQ ID NO: 27429 - DNA, 25 bp, SARS Virus
ttcacctaatctcagggaactaaga

SEQ ID NO: 27430 - DNA, 25 bp, SARS Virus
tcacctaatctgcgggaactaagaa

SEQ ID NO: 27431 - DNA, 25 bp, SARS Virus
cacctaatctgacggaactaagaat

SEQ ID NO: 27432 - DNA, 25 bp, SARS Virus
acctaatctgagcgaactaagaata

SEQ ID NO: 27433 - DNA, 25 bp, SARS Virus
cctaatctgaggcaactaagaatag

SEQ ID NO: 27434 - DNA, 25 bp, SARS Virus
ctaatctgagggcactaagaatagg

SEQ ID NO: 27435 - DNA, 25 bp, SARS Virus
taatctgagggacctaagaataggt

SEQ ID NO: 27436 - DNA, 25 bp, SARS Virus
aatctgagggaactaagaataggtc

SEQ ID NO: 27437 - DNA, 25 bp, SARS Virus
atctgagggaaccaagaataggtcg

SEQ ID NO: 27438 - DNA, 25 bp, SARS Virus
tctgagggaactcagaataggtcga

SEQ ID NO: 27439 - DNA, 25 bp, SARS Virus
ctgagggaactacgaataggtcgag

SEQ ID NO: 27440 - DNA, 25 bp, SARS Virus
tgagggaactaacaataggtcgaga

SEQ ID NO: 27441 - DNA, 25 bp, SARS Virus
gagggaactaagcataggtcgagaa

SEQ ID NO: 27442 - DNA, 25 bp, SARS Virus
agggaactaagactaggtcgagaac

SEQ ID NO: 27443 - DNA, 25 bp, SARS Virus
gggaactaagaacaggtcgagaact

SEQ ID NO: 27444 - DNA, 25 bp, SARS Virus
ggaactaagaatcggtcgagaactt

SEQ ID NO: 27445 - DNA, 25 bp, SARS Virus
gaactaagaatacgtcgagaacttt

SEQ ID NO: 27446 - DNA, 25 bp, SARS Virus
aactaagaatagctcgagaactttg

SEQ ID NO: 27447 - DNA, 25 bp, SARS Virus
actaagaataggccgagaactttgg

SEQ ID NO: 27448 - DNA, 25 bp, SARS Virus
ctaagaataggtcgagaactttggt

SEQ ID NO: 27449 - DNA, 25 bp, SARS Virus
taagaataggtccagaactttggta

SEQ ID NO: 27450 - DNA, 25 bp, SARS Virus
aagaataggtcgcgaactttggtaa

SEQ ID NO: 27451 - DNA, 25 bp, SARS Virus
agaataggtcgacaactttggtaag

SEQ ID NO: 27452 - DNA, 25 bp, SARS Virus
gaataggtcgagcactttggtaagt

SEQ ID NO: 27453 - DNA, 25 bp, SARS Virus
aataggtcgagacctttggtaagtc

SEQ ID NO: 27454 - DNA, 25 bp, SARS Virus
ataggtcgagaactttggtaagtcc

SEQ ID NO: 27455 - DNA, 25 bp, SARS Virus
taggtcgagaaccttggtaagtcca

SEQ ID NO: 27456 - DNA, 25 bp, SARS Virus
aggtcgagaactctggtaagtccac

SEQ ID NO: 27457 - DNA, 25 bp, SARS Virus
accgaatacagtgtggtaagaatcc

SEQ ID NO: 27458 - DNA, 25 bp, SARS Virus
ccgaatacagttgggtaagaatcct

SEQ ID NO: 27459 - DNA, 25 bp, SARS Virus
cgaatacagtttggtaagaatcctg

SEQ ID NO: 27460 - DNA, 25 bp, SARS Virus
gaatacagtttggtaagaatcctgt

SEQ ID NO: 27461 - DNA, 25 bp, SARS Virus
aatacagtttgggaagaatcctgtt

SEQ ID NO: 27462 - DNA, 25 bp, SARS Virus
atacagtttggtgagaatcctgttc

SEQ ID NO: 27463 - DNA, 25 bp, SARS Virus
tacagtttggtaggaatcctgttcg

SEQ ID NO: 27464 - DNA, 25 bp, SARS Virus
acagtttggtaagaatcctgttcgt

SEQ ID NO: 27465 - DNA, 25 bp, SARS Virus
cagtttggtaaggatcctgttcgtc

SEQ ID NO: 27466 - DNA, 25 bp, SARS Virus
agtttggtaagagtcctgttcgtcg

SEQ ID NO: 27467 - DNA, 25 bp, SARS Virus
gtttggtaagaagcctgttcgtcgt

SEQ ID NO: 27468 - DNA, 25 bp, SARS Virus
tttggtaagaatgctgttcgtcgtt

SEQ ID NO: 27469 - DNA, 25 bp, SARS Virus
ttggtaagaatcgtgttcgtcgtta

SEQ ID NO: 27470 - DNA, 25 bp, SARS Virus
tggtaagaatccggttcgtcgttaa

SEQ ID NO: 27471 - DNA, 25 bp, SARS Virus
ggtaagaatcctgttcgtcgttaat

SEQ ID NO: 27472 - DNA, 25 bp, SARS Virus
gtaagaatcctggtcgtcgttaatg

SEQ ID NO: 27473 - DNA, 25 bp, SARS Virus
taagaatcctgtgcgtcgttaatgt

SEQ ID NO: 27474 - DNA, 25 bp, SARS Virus
aagaatcctgttggtcgttaatgtt

SEQ ID NO: 27475 - DNA, 25 bp, SARS Virus
agaatcctgttcgtcgttaatgttg

SEQ ID NO: 27476 - DNA, 25 bp, SARS Virus
gaatcctgttcggcgttaatgttgt

SEQ ID NO: 27477 - DNA, 25 bp, SARS Virus
aatcctgttcgtggttaatgttgta

SEQ ID NO: 27478 - DNA, 25 bp, SARS Virus
atcctgttcgtcgttaatgttgtag

SEQ ID NO: 27479 - DNA, 25 bp, SARS Virus
tcctgttcgtcggtaatgttgtagt

SEQ ID NO: 27480 - DNA, 25 bp, SARS Virus
cctgttcgtcgtgaatgttgtagtt

SEQ ID NO: 27481 - DNA, 25 bp, SARS Virus
ctgttcgtcgttgatgttgtagttt

SEQ ID NO: 27482 - DNA, 25 bp, SARS Virus
tgttcgtcgttagtgttgtagttta

SEQ ID NO: 27483 - DNA, 25 bp, SARS Virus
gttcgtcgttaaggttgtagtttaa

SEQ ID NO: 27484 - DNA, 25 bp, SARS Virus
ttcgtcgttaatgttgtagtttaac

SEQ ID NO: 27485 - DNA, 25 bp, SARS Virus
tcgtcgttaatggtgtagtttaacg

SEQ ID NO: 27486 - DNA, 25 bp, SARS Virus
cgtcgttaatgtggtagtttaacgc

SEQ ID NO: 27487 - DNA, 25 bp, SARS Virus
gtcgttaatgttgtagtttaacgcg

SEQ ID NO: 27488 - DNA, 25 bp, SARS Virus
tcgttaatgttggagtttaacgcga

SEQ ID NO: 27489 - DNA, 25 bp, SARS Virus
cgttaatgttgtggtttaacgcgat

SEQ ID NO: 27490 - DNA, 25 bp, SARS Virus
gttaatgttgtagtttaacgcgatt

SEQ ID NO: 27491 - DNA, 25 bp, SARS Virus
ttaatgttgtaggttaacgcgattc

SEQ ID NO: 27492 - DNA, 25 bp, SARS Virus
taatgttgtagtgtaacgcgattct

SEQ ID NO: 27493 - DNA, 25 bp, SARS Virus
aatgttgtagttgaacgcgattctc

SEQ ID NO: 27494 - DNA, 25 bp, SARS Virus
atgttgtagtttgacgcgattctct

SEQ ID NO: 27495 - DNA, 25 bp, SARS Virus
tgttgtagtttagcgcgattctcta

SEQ ID NO: 27496 - DNA, 25 bp, SARS Virus
gttgtagtttaaggcgattctctaa

SEQ ID NO: 27497 - DNA, 25 bp, SARS Virus
ttgtagtttaacgcgattctctaat

SEQ ID NO: 27498 - DNA, 25 bp, SARS Virus
tgtagtttaacgggattctctaatc

SEQ ID NO: 27499 - DNA, 25 bp, SARS Virus
gtagtttaacgcgattctctaatcg

SEQ ID NO: 27500 - DNA, 25 bp, SARS Virus
tagtttaacgcggttctctaatcgt

SEQ ID NO: 27501 - DNA, 25 bp, SARS Virus
agtttaacgcgagtctctaatcgtg

SEQ ID NO: 27502 - DNA, 25 bp, SARS Virus
gtttaacgcgatgctctaatcgtgt

SEQ ID NO: 27503 - DNA, 25 bp, SARS Virus
tttaacgcgattgtctaatcgtgtt

SEQ ID NO: 27504 - DNA, 25 bp, SARS Virus
ttaacgcgattcgctaatcgtgttg

SEQ ID NO: 27505 - DNA, 25 bp, SARS Virus
taacgcgattctgtaatcgtgttgc

SEQ ID NO: 27506 - DNA, 25 bp, SARS Virus
aacgcgattctcgaatcgtgttgca

SEQ ID NO: 27507 - DNA, 25 bp, SARS Virus
acgcgattctctgatcgtgttgcac

SEQ ID NO: 27508 - DNA, 25 bp, SARS Virus
cgcgattctctagtcgtgttgcaca

SEQ ID NO: 27509 - DNA, 25 bp, SARS Virus
gcgattctctaagcgtgttgcacac

SEQ ID NO: 27510 - DNA, 25 bp, SARS Virus
cgattctctaatggtgttgcacaca

SEQ ID NO: 27511 - DNA, 25 bp, SARS Virus
gattctctaatcgtgttgcacacaa

SEQ ID NO: 27512 - DNA, 25 bp, SARS Virus
attctctaatcgggttgcacacaaa

SEQ ID NO: 27513 - DNA, 25 bp, SARS Virus
ttctctaatcgtgttgcacacaaat

SEQ ID NO: 27514 - DNA, 25 bp, SARS Virus
tctctaatcgtggtgcacacaaatt

SEQ ID NO: 27515 - DNA, 25 bp, SARS Virus
ctctaatcgtgtggcacacaaattg

SEQ ID NO: 27516 - DNA, 25 bp, SARS Virus
tctaatcgtgttgcacacaaattgt

SEQ ID NO: 27517 - DNA, 25 bp, SARS Virus
ctaatcgtgttggacacaaattgtt

SEQ ID NO: 27518 - DNA, 25 bp, SARS Virus
taatcgtgttgcgcacaaattgtta

SEQ ID NO: 27519 - DNA, 25 bp, SARS Virus
aatcgtgttgcagacaaattgttaa

SEQ ID NO: 27520 - DNA, 25 bp, SARS Virus
atcgtgttgcacgcaaattgttaat

SEQ ID NO: 27521 - DNA, 25 bp, SARS Virus
tcgtgttgcacagaaattgttaata

SEQ ID NO: 27522 - DNA, 25 bp, SARS Virus
cgtgttgcacacgaattgttaatat

SEQ ID NO: 27523 - DNA, 25 bp, SARS Virus
gtgttgcacacagattgttaatata

SEQ ID NO: 27524 - DNA, 25 bp, SARS Virus
tgttgcacacaagttgttaatatac

SEQ ID NO: 27525 - DNA, 25 bp, SARS Virus
gttgcacacaaagtgttaatatacg

SEQ ID NO: 27526 - DNA, 25 bp, SARS Virus
ttgcacacaaatggttaatatacgg

SEQ ID NO: 27527 - DNA, 25 bp, SARS Virus
tgcacacaaattgttaatatacgga

SEQ ID NO: 27528 - DNA, 25 bp, SARS Virus
gcacacaaattggtaatatacggaa

SEQ ID NO: 27529 - DNA, 25 bp, SARS Virus
cacacaaattgtgaatatacggaat

SEQ ID NO: 27530 - DNA, 25 bp, SARS Virus
acacaaattgttgatatacggaata

SEQ ID NO: 27531 - DNA, 25 bp, SARS Virus
cacaaattgttagtatacggaatac

SEQ ID NO: 27532 - DNA, 25 bp, SARS Virus
acaaattgttaagatacggaataca

SEQ ID NO: 27533 - DNA, 25 bp, SARS Virus
caaattgttaatgtacggaatacac

SEQ ID NO: 27534 - DNA, 25 bp, SARS Virus
aaattgttaatagacggaatacaca

SEQ ID NO: 27535 - DNA, 25 bp, SARS Virus
aattgttaatatgcggaatacacaa

SEQ ID NO: 27536 - DNA, 25 bp, SARS Virus
attgttaatatagggaatacacaaa

SEQ ID NO: 27537 - DNA, 25 bp, SARS Virus
ttgttaatatacggaatacacaaat

SEQ ID NO: 27538 - DNA, 25 bp, SARS Virus
tgttaatatacggaatacacaaatg

SEQ ID NO: 27539 - DNA, 25 bp, SARS Virus
gttaatatacgggatacacaaatgt

SEQ ID NO: 27540 - DNA, 25 bp, SARS Virus
ttaatatacggagtacacaaatgta

SEQ ID NO: 27541 - DNA, 25 bp, SARS Virus
taatatacggaagacacaaatgtaa

SEQ ID NO: 27542 - DNA, 25 bp, SARS Virus
aatatacggaatgcacaaatgtaat

SEQ ID NO: 27543 - DNA, 25 bp, SARS Virus
atatacggaatagacaaatgtaata

SEQ ID NO: 27544 - DNA, 25 bp, SARS Virus
tatacggaatacgcaaatgtaataa

SEQ ID NO: 27545 - DNA, 25 bp, SARS Virus
atacggaatacagaaatgtaataac

SEQ ID NO: 27546 - DNA, 25 bp, SARS Virus
tacggaatacacgaatgtaataaca

SEQ ID NO: 27547 - DNA, 25 bp, SARS Virus
acggaatacacagatgtaataacaa

SEQ ID NO: 27548 - DNA, 25 bp, SARS Virus
cggaatacacaagtgtaataacaag

SEQ ID NO: 27549 - DNA, 25 bp, SARS Virus
ggaatacacaaaggtaataacaagg

SEQ ID NO: 27550 - DNA, 25 bp, SARS Virus
gaatacacaaatgtaataacaaggt

SEQ ID NO: 27551 - DNA, 25 bp, SARS Virus
aatacacaaatggaataacaaggtt

SEQ ID NO: 27552 - DNA, 25 bp, SARS Virus
atacacaaatgtgataacaaggtta

SEQ ID NO: 27553 - DNA, 25 bp, SARS Virus
tacacaaatgtagtaacaaggttaa

SEQ ID NO: 27554 - DNA, 25 bp, SARS Virus
acacaaatgtaagaacaaggttaac

SEQ ID NO: 27555 - DNA, 25 bp, SARS Virus
cacaaatgtaatgacaaggttaaca

SEQ ID NO: 27556 - DNA, 25 bp, SARS Virus
acaaatgtaatagcaaggttaacac

SEQ ID NO: 27557 - DNA, 25 bp, SARS Virus
caaatgtaataagaaggttaacaca

SEQ ID NO: 27558 - DNA, 25 bp, SARS Virus
aaatgtaataacgaggttaacacat

SEQ ID NO: 27559 - DNA, 25 bp, SARS Virus
aatgtaataacagggttaacacatg

SEQ ID NO: 27560 - DNA, 25 bp, SARS Virus
atgtaataacaaggttaacacatga

SEQ ID NO: 27561 - DNA, 25 bp, SARS Virus
tgtaataacaaggttaacacatgaa

SEQ ID NO: 27562 - DNA, 25 bp, SARS Virus
gtaataacaagggtaacacatgaaa

SEQ ID NO: 27563 - DNA, 25 bp, SARS Virus
taataacaaggtgaacacatgaaaa

SEQ ID NO: 27564 - DNA, 25 bp, SARS Virus
aataacaaggttgacacatgaaaat

SEQ ID NO: 27565 - DNA, 25 bp, SARS Virus
ataacaaggttagcacatgaaaatg

SEQ ID NO: 27566 - DNA, 25 bp, SARS Virus
taacaaggttaagacatgaaaatga

SEQ ID NO: 27567 - DNA, 25 bp, SARS Virus
aacaaggttaacgcatgaaaatgat

SEQ ID NO: 27568 - DNA, 25 bp, SARS Virus
acaaggttaacagatgaaaatgatt

SEQ ID NO: 27569 - DNA, 25 bp, SARS Virus
caaggttaacacgtgaaaatgattt

SEQ ID NO: 27570 - DNA, 25 bp, SARS Virus
aaggttaacacaggaaaatgatttt

SEQ ID NO: 27571 - DNA, 25 bp, SARS Virus
aggttaacacatgaaaatgattttc

SEQ ID NO: 27572 - DNA, 25 bp, SARS Virus
ggttaacacatggaaatgattttca

SEQ ID NO: 27573 - DNA, 25 bp, SARS Virus
gttaacacatgagaatgattttcat

SEQ ID NO: 27574 - DNA, 25 bp, SARS Virus
ttaacacatgaagatgattttcatg

SEQ ID NO: 27575 - DNA, 25 bp, SARS Virus
taacacatgaaagtgattttcatgg

SEQ ID NO: 27576 - DNA, 25 bp, SARS Virus
aacacatgaaaaggattttcatggt

SEQ ID NO: 27577 - DNA, 25 bp, SARS Virus
acacatgaaaatgattttcatggtt

SEQ ID NO: 27578 - DNA, 25 bp, SARS Virus
cacatgaaaatggttttcatggtta

SEQ ID NO: 27579 - DNA, 25 bp, SARS Virus
acatgaaaatgagtttcatggttaa

SEQ ID NO: 27580 - DNA, 25 bp, SARS Virus
catgaaaatgatgttcatggttaag

SEQ ID NO: 27581 - DNA, 25 bp, SARS Virus
atgaaaatgattgtcatggttaaga

SEQ ID NO: 27582 - DNA, 25 bp, SARS Virus
tgaaaatgatttgcatggttaagat

SEQ ID NO: 27583 - DNA, 25 bp, SARS Virus
gaaaatgattttgatggttaagatc

SEQ ID NO: 27584 - DNA, 25 bp, SARS Virus
aaaatgattttcgtggttaagatct

SEQ ID NO: 27585 - DNA, 25 bp, SARS Virus
aaatgattttcagggttaagatctt

SEQ ID NO: 27586 - DNA, 25 bp, SARS Virus
aatgattttcatggttaagatctta

SEQ ID NO: 27587 - DNA, 25 bp, SARS Virus
atgattttcatggttaagatcttaa

SEQ ID NO: 27588 - DNA, 25 bp, SARS Virus
tgattttcatgggtaagatcttaat

SEQ ID NO: 27589 - DNA, 25 bp, SARS Virus
gattttcatggtgaagatcttaatc

SEQ ID NO: 27590 - DNA, 25 bp, SARS Virus
attttcatggttgagatcttaatct

SEQ ID NO: 27591 - DNA, 25 bp, SARS Virus
ttttcatggttaggatcttaatctc

SEQ ID NO: 27592 - DNA, 25 bp, SARS Virus
tttcatggttaagatcttaatctcg

SEQ ID NO: 27593 - DNA, 25 bp, SARS Virus
ttcatggttaaggtcttaatctcga

SEQ ID NO: 27594 - DNA, 25 bp, SARS Virus
tcatggttaagagcttaatctcgaa

SEQ ID NO: 27595 - DNA, 25 bp, SARS Virus
catggttaagatgttaatctcgaag

SEQ ID NO: 27596 - DNA, 25 bp, SARS Virus
atggttaagatcgtaatctcgaagt

SEQ ID NO: 27597 - DNA, 25 bp, SARS Virus
tggttaagatctgaatctcgaagtg

SEQ ID NO: 27598 - DNA, 25 bp, SARS Virus
ggttaagatcttgatctcgaagtga

SEQ ID NO: 27599 - DNA, 25 bp, SARS Virus
gttaagatcttagtctcgaagtgat

SEQ ID NO: 27600 - DNA, 25 bp, SARS Virus
ttaagatcttaagctcgaagtgatg

SEQ ID NO: 27601 - DNA, 25 bp, SARS Virus
taagatcttaatgtcgaagtgatgg

SEQ ID NO: 27602 - DNA, 25 bp, SARS Virus
aagatcttaatcgcgaagtgatgga

SEQ ID NO: 27603 - DNA, 25 bp, SARS Virus
agatcttaatctggaagtgatggat

SEQ ID NO: 27604 - DNA, 25 bp, SARS Virus
gatcttaatctcgaagtgatggatg

SEQ ID NO: 27605 - DNA, 25 bp, SARS Virus
atcttaatctcggagtgatggatgt

SEQ ID NO: 27606 - DNA, 25 bp, SARS Virus
tcttaatctcgaggtgatggatgtt

SEQ ID NO: 27607 - DNA, 25 bp, SARS Virus
cttaatctcgaagtgatggatgttg

SEQ ID NO: 27608 - DNA, 25 bp, SARS Virus
ttaatctcgaagggatggatgttga

SEQ ID NO: 27609 - DNA, 25 bp, SARS Virus
taatctcgaagtgatggatgttgat

SEQ ID NO: 27610 - DNA, 25 bp, SARS Virus
aatctcgaagtggtggatgttgata

SEQ ID NO: 27611 - DNA, 25 bp, SARS Virus
atctcgaagtgagggatgttgataa

SEQ ID NO: 27612 - DNA, 25 bp, SARS Virus
tctcgaagtgatggatgttgataac

SEQ ID NO: 27613 - DNA, 25 bp, SARS Virus
ctcgaagtgatggatgttgataacg

SEQ ID NO: 27614 - DNA, 25 bp, SARS Virus
tcgaagtgatgggtgttgataacga

SEQ ID NO: 27615 - DNA, 25 bp, SARS Virus
cgaagtgatggaggttgataacgat

SEQ ID NO: 27616 - DNA, 25 bp, SARS Virus
gaagtgatggatgttgataacgatt

SEQ ID NO: 27617 - DNA, 25 bp, SARS Virus
aagtgatggatggtgataacgattt

SEQ ID NO: 27618 - DNA, 25 bp, SARS Virus
agtgatggatgtggataacgatttt

SEQ ID NO: 27619 - DNA, 25 bp, SARS Virus
gtgatggatgttgataacgattttt

SEQ ID NO: 27620 - DNA, 25 bp, SARS Virus
tgatggatgttggtaacgattttta

SEQ ID NO: 27621 - DNA, 25 bp, SARS Virus
gatggatgttgagaacgatttttat

SEQ ID NO: 27622 - DNA, 25 bp, SARS Virus
atggatgttgatgacgatttttatc

SEQ ID NO: 27623 - DNA, 25 bp, SARS Virus
tggatgttgatagcgatttttatca

SEQ ID NO: 27624 - DNA, 25 bp, SARS Virus
ggatgttgataaggatttttatcac

SEQ ID NO: 27625 - DNA, 25 bp, SARS Virus
gatgttgataacgatttttatcaca

SEQ ID NO: 27626 - DNA, 25 bp, SARS Virus
atgttgataacggtttttatcacaa

SEQ ID NO: 27627 - DNA, 25 bp, SARS Virus
tgttgataacgagttttatcacaat

SEQ ID NO: 27628 - DNA, 25 bp, SARS Virus
gttgataacgatgtttatcacaatt

SEQ ID NO: 27629 - DNA, 25 bp, SARS Virus
ttgataacgattgttatcacaattc

SEQ ID NO: 27630 - DNA, 25 bp, SARS Virus
tgataacgatttgtatcacaattct

SEQ ID NO: 27631 - DNA, 25 bp, SARS Virus
gataacgattttgatcacaattctc

SEQ ID NO: 27632 - DNA, 25 bp, SARS Virus
ataacgatttttgtcacaattctca

SEQ ID NO: 27633 - DNA, 25 bp, SARS Virus
taacgatttttagcacaattctcac

SEQ ID NO: 27634 - DNA, 25 bp, SARS Virus
aacgatttttatgacaattctcaca

SEQ ID NO: 27635 - DNA, 25 bp, SARS Virus
acgatttttatcgcaattctcacaa

SEQ ID NO: 27636 - DNA, 25 bp, SARS Virus
cgatttttatcagaattctcacaac

SEQ ID NO: 27637 - DNA, 25 bp, SARS Virus
gatttttatcacgattctcacaacg

SEQ ID NO: 27638 - DNA, 25 bp, SARS Virus
atttttatcacagttctcacaacga

SEQ ID NO: 27639 - DNA, 25 bp, SARS Virus
tttttatcacaagtctcacaacgat

SEQ ID NO: 27640 - DNA, 25 bp, SARS Virus
ttttatcacaatgctcacaacgatt

SEQ ID NO: 27641 - DNA, 25 bp, SARS Virus
tttatcacaattgtcacaacgattt

SEQ ID NO: 27642 - DNA, 25 bp, SARS Virus
ttatcacaattcgcacaacgattta

SEQ ID NO: 27643 - DNA, 25 bp, SARS Virus
tatcacaattctgacaacgatttaa

SEQ ID NO: 27644 - DNA, 25 bp, SARS Virus
atcacaattctcgcaacgatttaat

SEQ ID NO: 27645 - DNA, 25 bp, SARS Virus
tcacaattctcagaacgatttaata

SEQ ID NO: 27646 - DNA, 25 bp, SARS Virus
cacaattctcacgacgatttaatac

SEQ ID NO: 27647 - DNA, 25 bp, SARS Virus
acaattctcacagcgatttaataca

SEQ ID NO: 27648 - DNA, 25 bp, SARS Virus
caattctcacaaggatttaatacaa

SEQ ID NO: 27649 - DNA, 25 bp, SARS Virus
aattctcacaacgatttaatacaaa

SEQ ID NO: 27650 - DNA, 25 bp, SARS Virus
attctcacaacggtttaatacaaac

SEQ ID NO: 27651 - DNA, 25 bp, SARS Virus
ttctcacaacgagttaatacaaacc

SEQ ID NO: 27652 - DNA, 25 bp, SARS Virus
tctcacaacgatgtaatacaaacct

SEQ ID NO: 27653 - DNA, 25 bp, SARS Virus
ctcacaacgattgaatacaaaccta

SEQ ID NO: 27654 - DNA, 25 bp, SARS Virus
tcacaacgatttgatacaaacctac

SEQ ID NO: 27655 - DNA, 25 bp, SARS Virus
cacaacgatttagtacaaacctacg

SEQ ID NO: 27656 - DNA, 25 bp, SARS Virus
acaacgatttaagacaaacctacgg

SEQ ID NO: 27657 - DNA, 25 bp, SARS Virus
caacgatttaatgcaaacctacggc

SEQ ID NO: 27658 - DNA, 25 bp, SARS Virus
aacgatttaatagaaacctacggcc

SEQ ID NO: 27659 - DNA, 25 bp, SARS Virus
acgatttaatacgaacctacggccg

SEQ ID NO: 27660 - DNA, 25 bp, SARS Virus
cgatttaatacagacctacggccgt

SEQ ID NO: 27661 - DNA, 25 bp, SARS Virus
gatttaatacaagcctacggccgta

SEQ ID NO: 27662 - DNA, 25 bp, SARS Virus
atttaatacaaagctacggccgtaa

SEQ ID NO: 27663 - DNA, 25 bp, SARS Virus
tttaatacaaacgtacggccgtaat

SEQ ID NO: 27664 - DNA, 25 bp, SARS Virus
ttaatacaaaccgacggccgtaatt

SEQ ID NO: 27665 - DNA, 25 bp, SARS Virus
taatacaaacctgcggccgtaatta

SEQ ID NO: 27666 - DNA, 25 bp, SARS Virus
aatacaaacctagggccgtaattaa

SEQ ID NO: 27667 - DNA, 25 bp, SARS Virus
atacaaacctacggccgtaattaat

SEQ ID NO: 27668 - DNA, 25 bp, SARS Virus
tacaaacctacggccgtaattaata

SEQ ID NO: 27669 - DNA, 25 bp, SARS Virus
acaaacctacgggcgtaattaatac

SEQ ID NO: 27670 - DNA, 25 bp, SARS Virus
caaacctacggcggtaattaataca

SEQ ID NO: 27671 - DNA, 25 bp, SARS Virus
aaacctacggccgtaattaatacac

SEQ ID NO: 27672 - DNA, 25 bp, SARS Virus
aacctacggccggaattaatacact

SEQ ID NO: 27673 - DNA, 25 bp, SARS Virus
acctacggccgtgattaatacactt

SEQ ID NO: 27674 - DNA, 25 bp, SARS Virus
cctacggccgtagttaatacacttc

SEQ ID NO: 27675 - DNA, 25 bp, SARS Virus
ctacggccgtaagtaatacacttca

SEQ ID NO: 27676 - DNA, 25 bp, SARS Virus
tacggccgtaatgaatacacttcag

SEQ ID NO: 27677 - DNA, 25 bp, SARS Virus
acggccgtaattgatacacttcagt

SEQ ID NO: 27678 - DNA, 25 bp, SARS Virus
cggccgtaattagtacacttcagtg

SEQ ID NO: 27679 - DNA, 25 bp, SARS Virus
ggccgtaattaagacacttcagtgg

SEQ ID NO: 27680 - DNA, 25 bp, SARS Virus
gccgtaattaatgcacttcagtggg

SEQ ID NO: 27681 - DNA, 25 bp, SARS Virus
ccgtaattaatagacttcagtgggt

SEQ ID NO: 27682 - DNA, 25 bp, SARS Virus
cgtaattaatacgcttcagtgggtt

SEQ ID NO: 27683 - DNA, 25 bp, SARS Virus
gtaattaatacagttcagtgggttt

SEQ ID NO: 27684 - DNA, 25 bp, SARS Virus
taattaatacacgtcagtgggttta

SEQ ID NO: 27685 - DNA, 25 bp, SARS Virus
aattaatacactgcagtgggtttaa

SEQ ID NO: 27686 - DNA, 25 bp, SARS Virus
attaatacacttgagtgggtttaaa

SEQ ID NO: 27687 - DNA, 25 bp, SARS Virus
ttaatacacttcggtgggtttaaaa

SEQ ID NO: 27688 - DNA, 25 bp, SARS Virus
taatacacttcagtgggtttaaaag

SEQ ID NO: 27689 - DNA, 25 bp, SARS Virus
aatacacttcagggggtttaaaaga

SEQ ID NO: 27690 - DNA, 25 bp, SARS Virus
atacacttcagtgggtttaaaagat

SEQ ID NO: 27691 - DNA, 25 bp, SARS Virus
tacacttcagtgggtttaaaagatt

SEQ ID NO: 27692 - DNA, 25 bp, SARS Virus
acacttcagtgggtttaaaagattt

SEQ ID NO: 27693 - DNA, 25 bp, SARS Virus
cacttcagtggggttaaaagattta

SEQ ID NO: 27694 - DNA, 25 bp, SARS Virus
acttcagtgggtgtaaaagatttaa

SEQ ID NO: 27695 - DNA, 25 bp, SARS Virus
cttcagtgggttgaaaagatttaac

SEQ ID NO: 27696 - DNA, 25 bp, SARS Virus
ttcagtgggtttgaaagatttaaca

SEQ ID NO: 27697 - DNA, 25 bp, SARS Virus
tcagtgggtttagaagatttaacaa

SEQ ID NO: 27698 - DNA, 25 bp, SARS Virus
cagtgggtttaagagatttaacaag

SEQ ID NO: 27699 - DNA, 25 bp, SARS Virus
agtgggtttaaaggatttaacaagt

SEQ ID NO: 27700 - DNA, 25 bp, SARS Virus
gtgggtttaaaagatttaacaagtg

SEQ ID NO: 27701 - DNA, 25 bp, SARS Virus
tgggtttaaaaggtttaacaagtgt

SEQ ID NO: 27702 - DNA, 25 bp, SARS Virus
gggtttaaaagagttaacaagtgtt

SEQ ID NO: 27703 - DNA, 25 bp, SARS Virus
ggtttaaaagatgtaacaagtgtta

SEQ ID NO: 27704 - DNA, 25 bp, SARS Virus
gtttaaaagattgaacaagtgttag

SEQ ID NO: 27705 - DNA, 25 bp, SARS Virus
tttaaaagatttgacaagtgttagc

SEQ ID NO: 27706 - DNA, 25 bp, SARS Virus
ttaaaagatttagcaagtgttagcg

SEQ ID NO: 27707 - DNA, 25 bp, SARS Virus
taaaagatttaagaagtgttagcga

SEQ ID NO: 27708 - DNA, 25 bp, SARS Virus
aaaagatttaacgagtgttagcgat

SEQ ID NO: 27709 - DNA, 25 bp, SARS Virus
aaagatttaacaggtgttagcgata

SEQ ID NO: 27710 - DNA, 25 bp, SARS Virus
aagatttaacaagtgttagcgatac

SEQ ID NO: 27711 - DNA, 25 bp, SARS Virus
agatttaacaagggttagcgataca

SEQ ID NO: 27712 - DNA, 25 bp, SARS Virus
gatttaacaagtgttagcgatacac

SEQ ID NO: 27713 - DNA, 25 bp, SARS Virus
atttaacaagtggtagcgatacacc

SEQ ID NO: 27714 - DNA, 25 bp, SARS Virus
tttaacaagtgtgagcgatacaccg

SEQ ID NO: 27715 - DNA, 25 bp, SARS Virus
ttaacaagtgttggcgatacaccga

SEQ ID NO: 27716 - DNA, 25 bp, SARS Virus
taacaagtgttagcgatacaccgat

SEQ ID NO: 27717 - DNA, 25 bp, SARS Virus
aacaagtgttagggatacaccgata

SEQ ID NO: 27718 - DNA, 25 bp, SARS Virus
acaagtgttagcgatacaccgataa

SEQ ID NO: 27719 - DNA, 25 bp, SARS Virus
caagtgttagcggtacaccgataac

SEQ ID NO: 27720 - DNA, 25 bp, SARS Virus
aagtgttagcgagacaccgataaca

SEQ ID NO: 27721 - DNA, 25 bp, SARS Virus
agtgttagcgatgcaccgataacaa

SEQ ID NO: 27722 - DNA, 25 bp, SARS Virus
gtgttagcgatagaccgataacaac

SEQ ID NO: 27723 - DNA, 25 bp, SARS Virus
tgttagcgatacgccgataacaaca

SEQ ID NO: 27724 - DNA, 25 bp, SARS Virus
gttagcgatacagcgataacaacaa

SEQ ID NO: 27725 - DNA, 25 bp, SARS Virus
ttagcgatacacggataacaacaat

SEQ ID NO: 27726 - DNA, 25 bp, SARS Virus
tagcgatacaccgataacaacaatt

SEQ ID NO: 27727 - DNA, 25 bp, SARS Virus
agcgatacaccggtaacaacaattc

SEQ ID NO: 27728 - DNA, 25 bp, SARS Virus
gcgatacaccgagaacaacaattca

SEQ ID NO: 27729 - DNA, 25 bp, SARS Virus
cgatacaccgatgacaacaattcat

SEQ ID NO: 27730 - DNA, 25 bp, SARS Virus
gatacaccgatagcaacaattcata

SEQ ID NO: 27731 - DNA, 25 bp, SARS Virus
atacaccgataagaacaattcataa

SEQ ID NO: 27732 - DNA, 25 bp, SARS Virus
tacaccgataacgacaattcataaa

SEQ ID NO: 27733 - DNA, 25 bp, SARS Virus
acaccgataacagcaattcataaac

SEQ ID NO: 27734 - DNA, 25 bp, SARS Virus
caccgataacaagaattcataaacg

SEQ ID NO: 27735 - DNA, 25 bp, SARS Virus
accgataacaacgattcataaacga

SEQ ID NO: 27736 - DNA, 25 bp, SARS Virus
ccgataacaacagttcataaacgaa

SEQ ID NO: 27737 - DNA, 25 bp, SARS Virus
cgataacaacaagtcataaacgaat

SEQ ID NO: 27738 - DNA, 25 bp, SARS Virus
gataacaacaatgcataaacgaatc

SEQ ID NO: 27739 - DNA, 25 bp, SARS Virus
ataacaacaattgataaacgaatcc

SEQ ID NO: 27740 - DNA, 25 bp, SARS Virus
taacaacaattcgtaaacgaatcca

SEQ ID NO: 27741 - DNA, 25 bp, SARS Virus
aacaacaattcagaaacgaatccaa

SEQ ID NO: 27742 - DNA, 25 bp, SARS Virus
acaacaattcatgaacgaatccaag

SEQ ID NO: 27743 - DNA, 25 bp, SARS Virus
caacaattcatagacgaatccaaga

SEQ ID NO: 27744 - DNA, 25 bp, SARS Virus
aacaattcataagcgaatccaagag

SEQ ID NO: 27745 - DNA, 25 bp, SARS Virus
acaattcataaaggaatccaagaga

SEQ ID NO: 27746 - DNA, 25 bp, SARS Virus
caattcataaacgaatccaagagat

SEQ ID NO: 27747 - DNA, 25 bp, SARS Virus
aattcataaacggatccaagagatt

SEQ ID NO: 27748 - DNA, 25 bp, SARS Virus
attcataaacgagtccaagagatta

SEQ ID NO: 27749 - DNA, 25 bp, SARS Virus
ttcataaacgaagccaagagattag

SEQ ID NO: 27750 - DNA, 25 bp, SARS Virus
tcataaacgaatgcaagagattaga

SEQ ID NO: 27751 - DNA, 25 bp, SARS Virus
cataaacgaatcgaagagattagac

SEQ ID NO: 27752 - DNA, 25 bp, SARS Virus
ataaacgaatccgagagattagaca

SEQ ID NO: 27753 - DNA, 25 bp, SARS Virus
taaacgaatccaggagattagacac

SEQ ID NO: 27754 - DNA, 25 bp, SARS Virus
aaacgaatccaagagattagacaca

SEQ ID NO: 27755 - DNA, 25 bp, SARS Virus
aacgaatccaagggattagacacat

SEQ ID NO: 27756 - DNA, 25 bp, SARS Virus
acgaatccaagagattagacacatt

SEQ ID NO: 27757 - DNA, 25 bp, SARS Virus
cgaatccaagaggttagacacattg

SEQ ID NO: 27758 - DNA, 25 bp, SARS Virus
gaatccaagagagtagacacattga

SEQ ID NO: 27759 - DNA, 25 bp, SARS Virus
aatccaagagatgagacacattgac

SEQ ID NO: 27760 - DNA, 25 bp, SARS Virus
atccaagagattggacacattgacg

SEQ ID NO: 27761 - DNA, 25 bp, SARS Virus
tccaagagattagacacattgacga

SEQ ID NO: 27762 - DNA, 25 bp, SARS Virus
ccaagagattaggcacattgacgac

SEQ ID NO: 27763 - DNA, 25 bp, SARS Virus
caagagattagagacattgacgacg

SEQ ID NO: 27764 - DNA, 25 bp, SARS Virus
aagagattagacgcattgacgacga

SEQ ID NO: 27765 - DNA, 25 bp, SARS Virus
agagattagacagattgacgacgaa

SEQ ID NO: 27766 - DNA, 25 bp, SARS Virus
gagattagacacgttgacgacgaaa

SEQ ID NO: 27767 - DNA, 25 bp, SARS Virus
agattagacacagtgacgacgaaaa

SEQ ID NO: 27768 - DNA, 25 bp, SARS Virus
gattagacacatggacgacgaaaac

SEQ ID NO: 27769 - DNA, 25 bp, SARS Virus
attagacacattgacgacgaaaacc

SEQ ID NO: 27770 - DNA, 25 bp, SARS Virus
ttagacacattggcgacgaaaacca

SEQ ID NO: 27771 - DNA, 25 bp, SARS Virus
tagacacattgaggacgaaaaccac

SEQ ID NO: 27772 - DNA, 25 bp, SARS Virus
agacacattgacgacgaaaaccaca

SEQ ID NO: 27773 - DNA, 25 bp, SARS Virus
gacacattgacggcgaaaaccacat

SEQ ID NO: 27774 - DNA, 25 bp, SARS Virus
acacattgacgaggaaaaccacatg

SEQ ID NO: 27775 - DNA, 25 bp, SARS Virus
cacattgacgacgaaaaccacatga

SEQ ID NO: 27776 - DNA, 25 bp, SARS Virus
acattgacgacggaaaccacatgag

SEQ ID NO: 27777 - DNA, 25 bp, SARS Virus
cattgacgacgagaaccacatgaga

SEQ ID NO: 27778 - DNA, 25 bp, SARS Virus
attgacgacgaagaccacatgagaa

SEQ ID NO: 27779 - DNA, 25 bp, SARS Virus
ttgacgacgaaagccacatgagaat

SEQ ID NO: 27780 - DNA, 25 bp, SARS Virus
tgacgacgaaaagcacatgagaata

SEQ ID NO: 27781 - DNA, 25 bp, SARS Virus
gacgacgaaaacgacatgagaatag

SEQ ID NO: 27782 - DNA, 25 bp, SARS Virus
acgacgaaaaccgcatgagaataga

SEQ ID NO: 27783 - DNA, 25 bp, SARS Virus
cgacgaaaaccagatgagaatagat

SEQ ID NO: 27784 - DNA, 25 bp, SARS Virus
gacgaaaaccacgtgagaatagatt

SEQ ID NO: 27785 - DNA, 25 bp, SARS Virus
acgaaaaccacaggagaatagatta

SEQ ID NO: 27786 - DNA, 25 bp, SARS Virus
cgaaaaccacatgagaatagattaa

SEQ ID NO: 27787 - DNA, 25 bp, SARS Virus
gaaaaccacatgggaatagattaaa

SEQ ID NO: 27788 - DNA, 25 bp, SARS Virus
aaaaccacatgagaatagattaaaa

SEQ ID NO: 27789 - DNA, 25 bp, SARS Virus
aaaccacatgaggatagattaaaac

SEQ ID NO: 27790 - DNA, 25 bp, SARS Virus
aaccacatgagagtagattaaaacc

SEQ ID NO: 27791 - DNA, 25 bp, SARS Virus
accacatgagaagagattaaaacca

SEQ ID NO: 27792 - DNA, 25 bp, SARS Virus
ccacatgagaatggattaaaaccac

SEQ ID NO: 27793 - DNA, 25 bp, SARS Virus
cacatgagaatagattaaaaccacg

SEQ ID NO: 27794 - DNA, 25 bp, SARS Virus
acatgagaataggttaaaaccacga

SEQ ID NO: 27795 - DNA, 25 bp, SARS Virus
catgagaatagagtaaaaccacgag

SEQ ID NO: 27796 - DNA, 25 bp, SARS Virus
atgagaatagatgaaaaccacgagg

SEQ ID NO: 27797 - DNA, 25 bp, SARS Virus
tgagaatagattgaaaccacgagga

SEQ ID NO: 27798 - DNA, 25 bp, SARS Virus
gagaatagattagaaccacgaggaa

SEQ ID NO: 27799 - DNA, 25 bp, SARS Virus
agaatagattaagaccacgaggaag

SEQ ID NO: 27800 - DNA, 25 bp, SARS Virus
gaatagattaaagccacgaggaaga

SEQ ID NO: 27801 - DNA, 25 bp, SARS Virus
aatagattaaaagcacgaggaagaa

SEQ ID NO: 27802 - DNA, 25 bp, SARS Virus
atagattaaaacgacgaggaagaat

SEQ ID NO: 27803 - DNA, 25 bp, SARS Virus
tagattaaaaccgcgaggaagaata

SEQ ID NO: 27804 - DNA, 25 bp, SARS Virus
agattaaaaccaggaggaagaataa

SEQ ID NO: 27805 - DNA, 25 bp, SARS Virus
gattaaaaccacgaggaagaataac

SEQ ID NO: 27806 - DNA, 25 bp, SARS Virus
attaaaaccacggggaagaataaca

SEQ ID NO: 27807 - DNA, 25 bp, SARS Virus
ttaaaaccacgaggaagaataacat

SEQ ID NO: 27808 - DNA, 25 bp, SARS Virus
taaaaccacgaggaagaataacatt

SEQ ID NO: 27809 - DNA, 25 bp, SARS Virus
aaaaccacgagggagaataacatta

SEQ ID NO: 27810 - DNA, 25 bp, SARS Virus
aaaccacgaggaggaataacattac

SEQ ID NO: 27811 - DNA, 25 bp, SARS Virus
aaccacgaggaagaataacattacc

SEQ ID NO: 27812 - DNA, 25 bp, SARS Virus
accacgaggaaggataacattaccg

SEQ ID NO: 27813 - DNA, 25 bp, SARS Virus
ccacgaggaagagtaacattaccgc

SEQ ID NO: 27814 - DNA, 25 bp, SARS Virus
cacgaggaagaagaacattaccgca

SEQ ID NO: 27815 - DNA, 25 bp, SARS Virus
acgaggaagaatgacattaccgcaa

SEQ ID NO: 27816 - DNA, 25 bp, SARS Virus
cgaggaagaatagcattaccgcaat

SEQ ID NO: 27817 - DNA, 25 bp, SARS Virus
gaggaagaataagattaccgcaatc

SEQ ID NO: 27818 - DNA, 25 bp, SARS Virus
aggaagaataacgttaccgcaatct

SEQ ID NO: 27819 - DNA, 25 bp, SARS Virus
ggaagaataacagtaccgcaatctc

SEQ ID NO: 27820 - DNA, 25 bp, SARS Virus
gaagaataacatgaccgcaatctct

SEQ ID NO: 27821 - DNA, 25 bp, SARS Virus
aagaataacattgccgcaatctctt

SEQ ID NO: 27822 - DNA, 25 bp, SARS Virus
agaataacattagcgcaatctctta

SEQ ID NO: 27823 - DNA, 25 bp, SARS Virus
gaataacattacggcaatctcttaa

SEQ ID NO: 27824 - DNA, 25 bp, SARS Virus
aataacattaccgcaatctcttaac

SEQ ID NO: 27825 - DNA, 25 bp, SARS Virus
ataacattaccggaatctcttaaca

SEQ ID NO: 27826 - DNA, 25 bp, SARS Virus
taacattaccgcgatctcttaacat

SEQ ID NO: 27827 - DNA, 25 bp, SARS Virus
aacattaccgcagtctcttaacata

SEQ ID NO: 27828 - DNA, 25 bp, SARS Virus
acattaccgcaagctcttaacatag

SEQ ID NO: 27829 - DNA, 25 bp, SARS Virus
cattaccgcaatgtcttaacataga

SEQ ID NO: 27830 - DNA, 25 bp, SARS Virus
attaccgcaatcgcttaacatagaa

SEQ ID NO: 27831 - DNA, 25 bp, SARS Virus
ttaccgcaatctgttaacatagaat

SEQ ID NO: 27832 - DNA, 25 bp, SARS Virus
taccgcaatctcgtaacatagaatt

SEQ ID NO: 27833 - DNA, 25 bp, SARS Virus
accgcaatctctgaacatagaatta

SEQ ID NO: 27834 - DNA, 25 bp, SARS Virus
ccgcaatctcttgacatagaattaa

SEQ ID NO: 27835 - DNA, 25 bp, SARS Virus
cgcaatctcttagcatagaattaag

SEQ ID NO: 27836 - DNA, 25 bp, SARS Virus
gcaatctcttaagatagaattaagc

SEQ ID NO: 27837 - DNA, 25 bp, SARS Virus
caatctcttaacgtagaattaagca

SEQ ID NO: 27838 - DNA, 25 bp, SARS Virus
aatctcttaacagagaattaagcag

SEQ ID NO: 27839 - DNA, 25 bp, SARS Virus
atctcttaacatggaattaagcaga

SEQ ID NO: 27840 - DNA, 25 bp, SARS Virus
tctcttaacatagaattaagcagat

SEQ ID NO: 27841 - DNA, 25 bp, SARS Virus
ctcttaacataggattaagcagatt

SEQ ID NO: 27842 - DNA, 25 bp, SARS Virus
tcttaacatagagttaagcagattg

SEQ ID NO: 27843 - DNA, 25 bp, SARS Virus
cttaacatagaagtaagcagattgc

SEQ ID NO: 27844 - DNA, 25 bp, SARS Virus
ttaacatagaatgaagcagattgca

SEQ ID NO: 27845 - DNA, 25 bp, SARS Virus
taacatagaattgagcagattgcaa

SEQ ID NO: 27846 - DNA, 25 bp, SARS Virus
aacatagaattaggcagattgcaat

SEQ ID NO: 27847 - DNA, 25 bp, SARS Virus
acatagaattaagcagattgcaatg

SEQ ID NO: 27848 - DNA, 25 bp, SARS Virus
catagaattaaggagattgcaatga

SEQ ID NO: 27849 - DNA, 25 bp, SARS Virus
atagaattaagcggattgcaatgat

SEQ ID NO: 27850 - DNA, 25 bp, SARS Virus
tagaattaagcagattgcaatgatg

SEQ ID NO: 27851 - DNA, 25 bp, SARS Virus
agaattaagcaggttgcaatgatga

SEQ ID NO: 27852 - DNA, 25 bp, SARS Virus
gaattaagcagagtgcaatgatgat

SEQ ID NO: 27853 - DNA, 25 bp, SARS Virus
aattaagcagatggcaatgatgata

SEQ ID NO: 27854 - DNA, 25 bp, SARS Virus
attaagcagattgcaatgatgatac

SEQ ID NO: 27855 - DNA, 25 bp, SARS Virus
ttaagcagattggaatgatgatacc

SEQ ID NO: 27856 - DNA, 25 bp, SARS Virus
taagcagattgcgatgatgatacct

SEQ ID NO: 27857 - DNA, 25 bp, SARS Virus
aagcagattgcagtgatgataccta

SEQ ID NO: 27858 - DNA, 25 bp, SARS Virus
agcagattgcaaggatgatacctaa

SEQ ID NO: 27859 - DNA, 25 bp, SARS Virus
gcagattgcaatgatgatacctaaa

SEQ ID NO: 27860 - DNA, 25 bp, SARS Virus
cagattgcaatggtgatacctaaag

SEQ ID NO: 27861 - DNA, 25 bp, SARS Virus
agattgcaatgaggatacctaaaga

SEQ ID NO: 27862 - DNA, 25 bp, SARS Virus
gattgcaatgatgatacctaaagac

SEQ ID NO: 27863 - DNA, 25 bp, SARS Virus
attgcaatgatggtacctaaagaca

SEQ ID NO: 27864 - DNA, 25 bp, SARS Virus
ttgcaatgatgagacctaaagacac

SEQ ID NO: 27865 - DNA, 25 bp, SARS Virus
tgcaatgatgatgcctaaagacact

SEQ ID NO: 27866 - DNA, 25 bp, SARS Virus
gcaatgatgatagctaaagacactt

SEQ ID NO: 27867 - DNA, 25 bp, SARS Virus
caatgatgatacgtaaagacacttc

SEQ ID NO: 27868 - DNA, 25 bp, SARS Virus
aatgatgataccgaaagacacttcc

SEQ ID NO: 27869 - DNA, 25 bp, SARS Virus
atgatgatacctgaagacacttcca

SEQ ID NO: 27870 - DNA, 25 bp, SARS Virus
tgatgatacctagagacacttccaa

SEQ ID NO: 27871 - DNA, 25 bp, SARS Virus
gatgatacctaaggacacttccaag

SEQ ID NO: 27872 - DNA, 25 bp, SARS Virus
atgatacctaaagacacttccaaga

SEQ ID NO: 27873 - DNA, 25 bp, SARS Virus
tgatacctaaaggcacttccaagaa

SEQ ID NO: 27874 - DNA, 25 bp, SARS Virus
gatacctaaagagacttccaagaaa

SEQ ID NO: 27875 - DNA, 25 bp, SARS Virus
atacctaaagacgcttccaagaaaa

SEQ ID NO: 27876 - DNA, 25 bp, SARS Virus
tacctaaagacagttccaagaaaag

SEQ ID NO: 27877 - DNA, 25 bp, SARS Virus
acctaaagacacgtccaagaaaagg

SEQ ID NO: 27878 - DNA, 25 bp, SARS Virus
cctaaagacactgccaagaaaagga

SEQ ID NO: 27879 - DNA, 25 bp, SARS Virus
ctaaagacacttgcaagaaaaggaa

SEQ ID NO: 27880 - DNA, 25 bp, SARS Virus
taaagacacttcgaagaaaaggaac

SEQ ID NO: 27881 - DNA, 25 bp, SARS Virus
aaagacacttccgagaaaaggaacg

SEQ ID NO: 27882 - DNA, 25 bp, SARS Virus
aagacacttccaggaaaaggaacgt

SEQ ID NO: 27883 - DNA, 25 bp, SARS Virus
agacacttccaagaaaaggaacgtc

SEQ ID NO: 27884 - DNA, 25 bp, SARS Virus
gacacttccaaggaaaggaacgtcg

SEQ ID NO: 27885 - DNA, 25 bp, SARS Virus
acacttccaagagaaggaacgtcgt

SEQ ID NO: 27886 - DNA, 25 bp, SARS Virus
cacttccaagaagaggaacgtcgta

SEQ ID NO: 27887 - DNA, 25 bp, SARS Virus
acttccaagaaagggaacgtcgtaa

SEQ ID NO: 27888 - DNA, 25 bp, SARS Virus
cttccaagaaaaggaacgtcgtaaa

SEQ ID NO: 27889 - DNA, 25 bp, SARS Virus
ttccaagaaaaggaacgtcgtaaac

SEQ ID NO: 27890 - DNA, 25 bp, SARS Virus
tccaagaaaagggacgtcgtaaaca

SEQ ID NO: 27891 - DNA, 25 bp, SARS Virus
ccaagaaaaggagcgtcgtaaacaa

SEQ ID NO: 27892 - DNA, 25 bp, SARS Virus
caagaaaaggaaggtcgtaaacaaa

SEQ ID NO: 27893 - DNA, 25 bp, SARS Virus
aagaaaaggaacgtcgtaaacaaat

SEQ ID NO: 27894 - DNA, 25 bp, SARS Virus
agaaaaggaacggcgtaaacaaatt

SEQ ID NO: 27895 - DNA, 25 bp, SARS Virus
gaaaaggaacgtggtaaacaaattc

SEQ ID NO: 27896 - DNA, 25 bp, SARS Virus
aaaaggaacgtcgtaaacaaattca

SEQ ID NO: 27897 - DNA, 25 bp, SARS Virus
aaaggaacgtcggaaacaaattcac

SEQ ID NO: 27898 - DNA, 25 bp, SARS Virus
aaggaacgtcgtgaacaaattcacc

SEQ ID NO: 27899 - DNA, 25 bp, SARS Virus
aggaacgtcgtagacaaattcacct

SEQ ID NO: 27900 - DNA, 25 bp, SARS Virus
ggaacgtcgtaagcaaattcaccta

SEQ ID NO: 27901 - DNA, 25 bp, SARS Virus
gaacgtcgtaaagaaattcacctaa

SEQ ID NO: 27902 - DNA, 25 bp, SARS Virus
aacgtcgtaaacgaattcacctaat

SEQ ID NO: 27903 - DNA, 25 bp, SARS Virus
acgtcgtaaacagattcacctaatc

SEQ ID NO: 27904 - DNA, 25 bp, SARS Virus
cgtcgtaaacaagttcacctaatct

SEQ ID NO: 27905 - DNA, 25 bp, SARS Virus
gtcgtaaacaaagtcacctaatctg

SEQ ID NO: 27906 - DNA, 25 bp, SARS Virus
tcgtaaacaaatgcacctaatctga

SEQ ID NO: 27907 - DNA, 25 bp, SARS Virus
cgtaaacaaattgacctaatctgag

SEQ ID NO: 27908 - DNA, 25 bp, SARS Virus
gtaaacaaattcgcctaatctgagg

SEQ ID NO: 27909 - DNA, 25 bp, SARS Virus
taaacaaattcagctaatctgaggg

SEQ ID NO: 27910 - DNA, 25 bp, SARS Virus
aaacaaattcacgtaatctgaggga

SEQ ID NO: 27911 - DNA, 25 bp, SARS Virus
aacaaattcaccgaatctgagggaa

SEQ ID NO: 27912 - DNA, 25 bp, SARS Virus
acaaattcacctgatctgagggaac

SEQ ID NO: 27913 - DNA, 25 bp, SARS Virus
caaattcacctagtctgagggaact

SEQ ID NO: 27914 - DNA, 25 bp, SARS Virus
aaattcacctaagctgagggaacta

SEQ ID NO: 27915 - DNA, 25 bp, SARS Virus
aattcacctaatgtgagggaactaa

SEQ ID NO: 27916 - DNA, 25 bp, SARS Virus
attcacctaatcggagggaactaag

SEQ ID NO: 27917 - DNA, 25 bp, SARS Virus
ttcacctaatctgagggaactaaga

SEQ ID NO: 27918 - DNA, 25 bp, SARS Virus
tcacctaatctgggggaactaagaa

SEQ ID NO: 27919 - DNA, 25 bp, SARS Virus
cacctaatctgagggaactaagaat

SEQ ID NO: 27920 - DNA, 25 bp, SARS Virus
acctaatctgagggaactaagaata

SEQ ID NO: 27921 - DNA, 25 bp, SARS Virus
cctaatctgagggaactaagaatag

SEQ ID NO: 27922 - DNA, 25 bp, SARS Virus
ctaatctgaggggactaagaatagg

SEQ ID NO: 27923 - DNA, 25 bp, SARS Virus
taatctgagggagctaagaataggt

SEQ ID NO: 27924 - DNA, 25 bp, SARS Virus
aatctgagggaagtaagaataggtc

SEQ ID NO: 27925 - DNA, 25 bp, SARS Virus
atctgagggaacgaagaataggtcg

SEQ ID NO: 27926 - DNA, 25 bp, SARS Virus
tctgagggaactgagaataggtcga

SEQ ID NO: 27927 - DNA, 25 bp, SARS Virus
ctgagggaactaggaataggtcgag

SEQ ID NO: 27928 - DNA, 25 bp, SARS Virus
tgagggaactaagaataggtcgaga

SEQ ID NO: 27929 - DNA, 25 bp, SARS Virus
gagggaactaaggataggtcgagaa

SEQ ID NO: 27930 - DNA, 25 bp, SARS Virus
agggaactaagagtaggtcgagaac

SEQ ID NO: 27931 - DNA, 25 bp, SARS Virus
gggaactaagaagaggtcgagaact

SEQ ID NO: 27932 - DNA, 25 bp, SARS Virus
ggaactaagaatgggtcgagaactt

SEQ ID NO: 27933 - DNA, 25 bp, SARS Virus
gaactaagaataggtcgagaacttt

SEQ ID NO: 27934 - DNA, 25 bp, SARS Virus
aactaagaataggtcgagaactttg

SEQ ID NO: 27935 - DNA, 25 bp, SARS Virus
actaagaatagggcgagaactttgg

SEQ ID NO: 27936 - DNA, 25 bp, SARS Virus
ctaagaataggtggagaactttggt

SEQ ID NO: 27937 - DNA, 25 bp, SARS Virus
taagaataggtcgagaactttggta

SEQ ID NO: 27938 - DNA, 25 bp, SARS Virus
aagaataggtcgggaactttggtaa

SEQ ID NO: 27939 - DNA, 25 bp, SARS Virus
agaataggtcgagaactttggtaag

SEQ ID NO: 27940 - DNA, 25 bp, SARS Virus
gaataggtcgaggactttggtaagt

SEQ ID NO: 27941 - DNA, 25 bp, SARS Virus
aataggtcgagagctttggtaagtc

SEQ ID NO: 27942 - DNA, 25 bp, SARS Virus
ataggtcgagaagtttggtaagtcc

SEQ ID NO: 27943 - DNA, 25 bp, SARS Virus
taggtcgagaacgttggtaagtcca

SEQ ID NO: 27944 - DNA, 25 bp, SARS Virus
aggtcgagaactgtggtaagtccac

SEQ ID NO: 27945 - DNA, 25 bp, SARS Virus
accgaatacagtttggtaagaatcc

SEQ ID NO: 27946 - DNA, 25 bp, SARS Virus
ccgaatacagtttggtaagaatcct

SEQ ID NO: 27947 - DNA, 25 bp, SARS Virus
cgaatacagttttgtaagaatcctg

SEQ ID NO: 27948 - DNA, 25 bp, SARS Virus
gaatacagtttgttaagaatcctgt

SEQ ID NO: 27949 - DNA, 25 bp, SARS Virus
aatacagtttggtaagaatcctgtt

SEQ ID NO: 27950 - DNA, 25 bp, SARS Virus
atacagtttggttagaatcctgttc

SEQ ID NO: 27951 - DNA, 25 bp, SARS Virus
tacagtttggtatgaatcctgttcg

SEQ ID NO: 27952 - DNA, 25 bp, SARS Virus
acagtttggtaataatcctgttcgt

SEQ ID NO: 27953 - DNA, 25 bp, SARS Virus
cagtttggtaagtatcctgttcgtc

SEQ ID NO: 27954 - DNA, 25 bp, SARS Virus
agtttggtaagattcctgttcgtcg

SEQ ID NO: 27955 - DNA, 25 bp, SARS Virus
gtttggtaagaatcctgttcgtcgt

SEQ ID NO: 27956 - DNA, 25 bp, SARS Virus
tttggtaagaattctgttcgtcgtt

SEQ ID NO: 27957 - DNA, 25 bp, SARS Virus
ttggtaagaatcttgttcgtcgtta

SEQ ID NO: 27958 - DNA, 25 bp, SARS Virus
tggtaagaatcctgttcgtcgttaa

SEQ ID NO: 27959 - DNA, 25 bp, SARS Virus
ggtaagaatccttttcgtcgttaat

SEQ ID NO: 27960 - DNA, 25 bp, SARS Virus
gtaagaatcctgttcgtcgttaatg

SEQ ID NO: 27961 - DNA, 25 bp, SARS Virus
taagaatcctgttcgtcgttaatgt

SEQ ID NO: 27962 - DNA, 25 bp, SARS Virus
aagaatcctgtttgtcgttaatgtt

SEQ ID NO: 27963 - DNA, 25 bp, SARS Virus
agaatcctgttcttcgttaatgttg

SEQ ID NO: 27964 - DNA, 25 bp, SARS Virus
gaatcctgttcgtcgttaatgttgt

SEQ ID NO: 27965 - DNA, 25 bp, SARS Virus
aatcctgttcgttgttaatgttgta

SEQ ID NO: 27966 - DNA, 25 bp, SARS Virus
atcctgttcgtctttaatgttgtag

SEQ ID NO: 27967 - DNA, 25 bp, SARS Virus
tcctgttcgtcgttaatgttgtagt

SEQ ID NO: 27968 - DNA, 25 bp, SARS Virus
cctgttcgtcgttaatgttgtagtt

SEQ ID NO: 27969 - DNA, 25 bp, SARS Virus
ctgttcgtcgtttatgttgtagttt

SEQ ID NO: 27970 - DNA, 25 bp, SARS Virus
tgttcgtcgttattgttgtagttta

SEQ ID NO: 27971 - DNA, 25 bp, SARS Virus
gttcgtcgttaatgttgtagtttaa

SEQ ID NO: 27972 - DNA, 25 bp, SARS Virus
ttcgtcgttaattttgtagtttaac

SEQ ID NO: 27973 - DNA, 25 bp, SARS Virus
tcgtcgttaatgttgtagtttaacg

SEQ ID NO: 27974 - DNA, 25 bp, SARS Virus
cgtcgttaatgttgtagtttaacgc

SEQ ID NO: 27975 - DNA, 25 bp, SARS Virus
gtcgttaatgttttagtttaacgcg

SEQ ID NO: 27976 - DNA, 25 bp, SARS Virus
tcgttaatgttgtagtttaacgcga

SEQ ID NO: 27977 - DNA, 25 bp, SARS Virus
cgttaatgttgttgtttaacgcgat

SEQ ID NO: 27978 - DNA, 25 bp, SARS Virus
gttaatgttgtattttaacgcgatt

SEQ ID NO: 27979 - DNA, 25 bp, SARS Virus
ttaatgttgtagtttaacgcgattc

SEQ ID NO: 27980 - DNA, 25 bp, SARS Virus
taatgttgtagtttaacgcgattct

SEQ ID NO: 27981 - DNA, 25 bp, SARS Virus
aatgttgtagtttaacgcgattctc

SEQ ID NO: 27982 - DNA, 25 bp, SARS Virus
atgttgtagttttacgcgattctct

SEQ ID NO: 27983 - DNA, 25 bp, SARS Virus
tgttgtagtttatcgcgattctcta

SEQ ID NO: 27984 - DNA, 25 bp, SARS Virus
gttgtagtttaatgcgattctctaa

SEQ ID NO: 27985 - DNA, 25 bp, SARS Virus
ttgtagtttaactcgattctctaat

SEQ ID NO: 27986 - DNA, 25 bp, SARS Virus
tgtagtttaacgtgattctctaatc

SEQ ID NO: 27987 - DNA, 25 bp, SARS Virus
gtagtttaacgctattctctaatcg

SEQ ID NO: 27988 - DNA, 25 bp, SARS Virus
tagtttaacgcgtttctctaatcgt

SEQ ID NO: 27989 - DNA, 25 bp, SARS Virus
agtttaacgcgattctctaatcgtg

SEQ ID NO: 27990 - DNA, 25 bp, SARS Virus
gtttaacgcgattctctaatcgtgt

SEQ ID NO: 27991 - DNA, 25 bp, SARS Virus
tttaacgcgattttctaatcgtgtt

SEQ ID NO: 27992 - DNA, 25 bp, SARS Virus
ttaacgcgattctctaatcgtgttg

SEQ ID NO: 27993 - DNA, 25 bp, SARS Virus
taacgcgattctttaatcgtgttgc

SEQ ID NO: 27994 - DNA, 25 bp, SARS Virus
aacgcgattctctaatcgtgttgca

SEQ ID NO: 27995 - DNA, 25 bp, SARS Virus
acgcgattctcttatcgtgttgcac

SEQ ID NO: 27996 - DNA, 25 bp, SARS Virus
cgcgattctctattcgtgttgcaca

SEQ ID NO: 27997 - DNA, 25 bp, SARS Virus
gcgattctctaatcgtgttgcacac

SEQ ID NO: 27998 - DNA, 25 bp, SARS Virus
cgattctctaattgtgttgcacaca

SEQ ID NO: 27999 - DNA, 25 bp, SARS Virus
gattctctaatcttgttgcacacaa

SEQ ID NO: 28000 - DNA, 25 bp, SARS Virus
attctctaatcgtgttgcacacaaa

SEQ ID NO: 28001 - DNA, 25 bp, SARS Virus
ttctctaatcgttttgcacacaaat

SEQ ID NO: 28002 - DNA, 25 bp, SARS Virus
tctctaatcgtgttgcacacaaatt

SEQ ID NO: 28003 - DNA, 25 bp, SARS Virus
ctctaatcgtgttgcacacaaattg

SEQ ID NO: 28004 - DNA, 25 bp, SARS Virus
tctaatcgtgtttcacacaaattgt

SEQ ID NO: 28005 - DNA, 25 bp, SARS Virus
ctaatcgtgttgtacacaaattgtt

SEQ ID NO: 28006 - DNA, 25 bp, SARS Virus
taatcgtgttgctcacaaattgtta

SEQ ID NO: 28007 - DNA, 25 bp, SARS Virus
aatcgtgttgcatacaaattgttaa

SEQ ID NO: 28008 - DNA, 25 bp, SARS Virus
atcgtgttgcactcaaattgttaat

SEQ ID NO: 28009 - DNA, 25 bp, SARS Virus
tcgtgttgcacataaattgttaata

SEQ ID NO: 28010 - DNA, 25 bp, SARS Virus
cgtgttgcacactaattgttaatat

SEQ ID NO: 28011 - DNA, 25 bp, SARS Virus
gtgttgcacacatattgttaatata

SEQ ID NO: 28012 - DNA, 25 bp, SARS Virus
tgttgcacacaatttgttaatatac

SEQ ID NO: 28013 - DNA, 25 bp, SARS Virus
gttgcacacaaattgttaatatacg

SEQ ID NO: 28014 - DNA, 25 bp, SARS Virus
ttgcacacaaattgttaatatacgg

SEQ ID NO: 28015 - DNA, 25 bp, SARS Virus
tgcacacaaatttttaatatacgga

SEQ ID NO: 28016 - DNA, 25 bp, SARS Virus
gcacacaaattgttaatatacggaa

SEQ ID NO: 28017 - DNA, 25 bp, SARS Virus
cacacaaattgttaatatacggaat

SEQ ID NO: 28018 - DNA, 25 bp, SARS Virus
acacaaattgtttatatacggaata

SEQ ID NO: 28019 - DNA, 25 bp, SARS Virus
cacaaattgttattatacggaatac

SEQ ID NO: 28020 - DNA, 25 bp, SARS Virus
acaaattgttaatatacggaataca

SEQ ID NO: 28021 - DNA, 25 bp, SARS Virus
caaattgttaatttacggaatacac

SEQ ID NO: 28022 - DNA, 25 bp, SARS Virus
aaattgttaatatacggaatacaca

SEQ ID NO: 28023 - DNA, 25 bp, SARS Virus
aattgttaatattcggaatacacaa

SEQ ID NO: 28024 - DNA, 25 bp, SARS Virus
attgttaatatatggaatacacaaa

SEQ ID NO: 28025 - DNA, 25 bp, SARS Virus
ttgttaatatactgaatacacaaat

SEQ ID NO: 28026 - DNA, 25 bp, SARS Virus
tgttaatatacgtaatacacaaatg

SEQ ID NO: 28027 - DNA, 25 bp, SARS Virus
gttaatatacggtatacacaaatgt

SEQ ID NO: 28028 - DNA, 25 bp, SARS Virus
ttaatatacggattacacaaatgta

SEQ ID NO: 28029 - DNA, 25 bp, SARS Virus
taatatacggaatacacaaatgtaa

SEQ ID NO: 28030 - DNA, 25 bp, SARS Virus
aatatacggaattcacaaatgtaat

SEQ ID NO: 28031 - DNA, 25 bp, SARS Virus
atatacggaatatacaaatgtaata

SEQ ID NO: 28032 - DNA, 25 bp, SARS Virus
tatacggaatactcaaatgtaataa

SEQ ID NO: 28033 - DNA, 25 bp, SARS Virus
atacggaatacataaatgtaataac

SEQ ID NO: 28034 - DNA, 25 bp, SARS Virus
tacggaatacactaatgtaataaca

SEQ ID NO: 28035 - DNA, 25 bp, SARS Virus
acggaatacacatatgtaataacaa

SEQ ID NO: 28036 - DNA, 25 bp, SARS Virus
cggaatacacaattgtaataacaag

SEQ ID NO: 28037 - DNA, 25 bp, SARS Virus
ggaatacacaaatgtaataacaagg

SEQ ID NO: 28038 - DNA, 25 bp, SARS Virus
gaatacacaaatttaataacaaggt

SEQ ID NO: 28039 - DNA, 25 bp, SARS Virus
aatacacaaatgtaataacaaggtt

SEQ ID NO: 28040 - DNA, 25 bp, SARS Virus
atacacaaatgttataacaaggtta

SEQ ID NO: 28041 - DNA, 25 bp, SARS Virus
tacacaaatgtattaacaaggttaa

SEQ ID NO: 28042 - DNA, 25 bp, SARS Virus
acacaaatgtaataacaaggttaac

SEQ ID NO: 28043 - DNA, 25 bp, SARS Virus
cacaaatgtaattacaaggttaaca

SEQ ID NO: 28044 - DNA, 25 bp, SARS Virus
acaaatgtaatatcaaggttaacac

SEQ ID NO: 28045 - DNA, 25 bp, SARS Virus
caaatgtaataataaggttaacaca

SEQ ID NO: 28046 - DNA, 25 bp, SARS Virus
aaatgtaataactaggttaacacat

SEQ ID NO: 28047 - DNA, 25 bp, SARS Virus
aatgtaataacatggttaacacatg

SEQ ID NO: 28048 - DNA, 25 bp, SARS Virus
atgtaataacaatgttaacacatga

SEQ ID NO: 28049 - DNA, 25 bp, SARS Virus
tgtaataacaagtttaacacatgaa

SEQ ID NO: 28050 - DNA, 25 bp, SARS Virus
gtaataacaaggttaacacatgaaa

SEQ ID NO: 28051 - DNA, 25 bp, SARS Virus
taataacaaggttaacacatgaaaa

SEQ ID NO: 28052 - DNA, 25 bp, SARS Virus
aataacaaggtttacacatgaaaat

SEQ ID NO: 28053 - DNA, 25 bp, SARS Virus
ataacaaggttatcacatgaaaatg

SEQ ID NO: 28054 - DNA, 25 bp, SARS Virus
taacaaggttaatacatgaaaatga

SEQ ID NO: 28055 - DNA, 25 bp, SARS Virus
aacaaggttaactcatgaaaatgat

SEQ ID NO: 28056 - DNA, 25 bp, SARS Virus
acaaggttaacatatgaaaatgatt

SEQ ID NO: 28057 - DNA, 25 bp, SARS Virus
caaggttaacacttgaaaatgattt

SEQ ID NO: 28058 - DNA, 25 bp, SARS Virus
aaggttaacacatgaaaatgatttt

SEQ ID NO: 28059 - DNA, 25 bp, SARS Virus
aggttaacacattaaaatgattttc

SEQ ID NO: 28060 - DNA, 25 bp, SARS Virus
ggttaacacatgtaaatgattttca

SEQ ID NO: 28061 - DNA, 25 bp, SARS Virus
gttaacacatgataatgattttcat

SEQ ID NO: 28062 - DNA, 25 bp, SARS Virus
ttaacacatgaatatgattttcatg

SEQ ID NO: 28063 - DNA, 25 bp, SARS Virus
taacacatgaaattgattttcatgg

SEQ ID NO: 28064 - DNA, 25 bp, SARS Virus
aacacatgaaaatgattttcatggt

SEQ ID NO: 28065 - DNA, 25 bp, SARS Virus
acacatgaaaattattttcatggtt

SEQ ID NO: 28066 - DNA, 25 bp, SARS Virus
cacatgaaaatgtttttcatggtta

SEQ ID NO: 28067 - DNA, 25 bp, SARS Virus
acatgaaaatgattttcatggttaa

SEQ ID NO: 28068 - DNA, 25 bp, SARS Virus
catgaaaatgattttcatggttaag

SEQ ID NO: 28069 - DNA, 25 bp, SARS Virus
atgaaaatgattttcatggttaaga

SEQ ID NO: 28070 - DNA, 25 bp, SARS Virus
tgaaaatgattttcatggttaagat

SEQ ID NO: 28071 - DNA, 25 bp, SARS Virus
gaaaatgatttttatggttaagatc

SEQ ID NO: 28072 - DNA, 25 bp, SARS Virus
aaaatgattttcttggttaagatct

SEQ ID NO: 28073 - DNA, 25 bp, SARS Virus
aaatgattttcatggttaagatctt

SEQ ID NO: 28074 - DNA, 25 bp, SARS Virus
aatgattttcattgttaagatctta

SEQ ID NO: 28075 - DNA, 25 bp, SARS Virus
atgattttcatgtttaagatcttaa

SEQ ID NO: 28076 - DNA, 25 bp, SARS Virus
tgattttcatggttaagatcttaat

SEQ ID NO: 28077 - DNA, 25 bp, SARS Virus
gattttcatggttaagatcttaatc

SEQ ID NO: 28078 - DNA, 25 bp, SARS Virus
attttcatggtttagatcttaatct

SEQ ID NO: 28079 - DNA, 25 bp, SARS Virus
ttttcatggttatgatcttaatctc

SEQ ID NO: 28080 - DNA, 25 bp, SARS Virus
tttcatggttaatatcttaatctcg

SEQ ID NO: 28081 - DNA, 25 bp, SARS Virus
ttcatggttaagttcttaatctcga

SEQ ID NO: 28082 - DNA, 25 bp, SARS Virus
tcatggttaagatcttaatctcgaa

SEQ ID NO: 28083 - DNA, 25 bp, SARS Virus
catggttaagattttaatctcgaag

SEQ ID NO: 28084 - DNA, 25 bp, SARS Virus
atggttaagatcttaatctcgaagt

SEQ ID NO: 28085 - DNA, 25 bp, SARS Virus
tggttaagatcttaatctcgaagtg

SEQ ID NO: 28086 - DNA, 25 bp, SARS Virus
ggttaagatctttatctcgaagtga

SEQ ID NO: 28087 - DNA, 25 bp, SARS Virus
gttaagatcttattctcgaagtgat

SEQ ID NO: 28088 - DNA, 25 bp, SARS Virus
ttaagatcttaatctcgaagtgatg

SEQ ID NO: 28089 - DNA, 25 bp, SARS Virus
taagatcttaatttcgaagtgatgg

SEQ ID NO: 28090 - DNA, 25 bp, SARS Virus
aagatcttaatctcgaagtgatgga

SEQ ID NO: 28091 - DNA, 25 bp, SARS Virus
agatcttaatcttgaagtgatggat

SEQ ID NO: 28092 - DNA, 25 bp, SARS Virus
gatcttaatctctaagtgatggatg

SEQ ID NO: 28093 - DNA, 25 bp, SARS Virus
atcttaatctcgtagtgatggatgt

SEQ ID NO: 28094 - DNA, 25 bp, SARS Virus
tcttaatctcgatgtgatggatgtt

SEQ ID NO: 28095 - DNA, 25 bp, SARS Virus
cttaatctcgaattgatggatgttg

SEQ ID NO: 28096 - DNA, 25 bp, SARS Virus
ttaatctcgaagtgatggatgttga

SEQ ID NO: 28097 - DNA, 25 bp, SARS Virus
taatctcgaagttatggatgttgat

SEQ ID NO: 28098 - DNA, 25 bp, SARS Virus
aatctcgaagtgttggatgttgata

SEQ ID NO: 28099 - DNA, 25 bp, SARS Virus
atctcgaagtgatggatgttgataa

SEQ ID NO: 28100 - DNA, 25 bp, SARS Virus
tctcgaagtgattgatgttgataac

SEQ ID NO: 28101 - DNA, 25 bp, SARS Virus
ctcgaagtgatgtatgttgataacg

SEQ ID NO: 28102 - DNA, 25 bp, SARS Virus
tcgaagtgatggttgttgataacga

SEQ ID NO: 28103 - DNA, 25 bp, SARS Virus
cgaagtgatggatgttgataacgat

SEQ ID NO: 28104 - DNA, 25 bp, SARS Virus
gaagtgatggattttgataacgatt

SEQ ID NO: 28105 - DNA, 25 bp, SARS Virus
aagtgatggatgttgataacgattt

SEQ ID NO: 28106 - DNA, 25 bp, SARS Virus
agtgatggatgttgataacgatttt

SEQ ID NO: 28107 - DNA, 25 bp, SARS Virus
gtgatggatgtttataacgattttt

SEQ ID NO: 28108 - DNA, 25 bp, SARS Virus
tgatggatgttgttaacgattttta

SEQ ID NO: 28109 - DNA, 25 bp, SARS Virus
gatggatgttgataacgatttttat

SEQ ID NO: 28110 - DNA, 25 bp, SARS Virus
atggatgttgattacgatttttatc

SEQ ID NO: 28111 - DNA, 25 bp, SARS Virus
tggatgttgatatcgatttttatca

SEQ ID NO: 28112 - DNA, 25 bp, SARS Virus
ggatgttgataatgatttttatcac

SEQ ID NO: 28113 - DNA, 25 bp, SARS Virus
gatgttgataactatttttatcaca

SEQ ID NO: 28114 - DNA, 25 bp, SARS Virus
atgttgataacgttttttatcacaa

SEQ ID NO: 28115 - DNA, 25 bp, SARS Virus
tgttgataacgatttttatcacaat

SEQ ID NO: 28116 - DNA, 25 bp, SARS Virus
gttgataacgatttttatcacaatt

SEQ ID NO: 28117 - DNA, 25 bp, SARS Virus
ttgataacgatttttatcacaattc

SEQ ID NO: 28118 - DNA, 25 bp, SARS Virus
tgataacgatttttatcacaattct

SEQ ID NO: 28119 - DNA, 25 bp, SARS Virus
gataacgatttttatcacaattctc

SEQ ID NO: 28120 - DNA, 25 bp, SARS Virus
ataacgatttttttcacaattctca

SEQ ID NO: 28121 - DNA, 25 bp, SARS Virus
taacgatttttatcacaattctcac

SEQ ID NO: 28122 - DNA, 25 bp, SARS Virus
aacgatttttattacaattctcaca

SEQ ID NO: 28123 - DNA, 25 bp, SARS Virus
acgatttttatctcaattctcacaa

SEQ ID NO: 28124 - DNA, 25 bp, SARS Virus
cgatttttatcataattctcacaac

SEQ ID NO: 28125 - DNA, 25 bp, SARS Virus
gatttttatcactattctcacaacg

SEQ ID NO: 28126 - DNA, 25 bp, SARS Virus
atttttatcacatttctcacaacga

SEQ ID NO: 28127 - DNA, 25 bp, SARS Virus
tttttatcacaattctcacaacgat

SEQ ID NO: 28128 - DNA, 25 bp, SARS Virus
ttttatcacaattctcacaacgatt

SEQ ID NO: 28129 - DNA, 25 bp, SARS Virus
tttatcacaattttcacaacgattt

SEQ ID NO: 28130 - DNA, 25 bp, SARS Virus
ttatcacaattctcacaacgattta

SEQ ID NO: 28131 - DNA, 25 bp, SARS Virus
tatcacaattcttacaacgatttaa

SEQ ID NO: 28132 - DNA, 25 bp, SARS Virus
atcacaattctctcaacgatttaat

SEQ ID NO: 28133 - DNA, 25 bp, SARS Virus
tcacaattctcataacgatttaata

SEQ ID NO: 28134 - DNA, 25 bp, SARS Virus
cacaattctcactacgatttaatac

SEQ ID NO: 28135 - DNA, 25 bp, SARS Virus
acaattctcacatcgatttaataca

SEQ ID NO: 28136 - DNA, 25 bp, SARS Virus
caattctcacaatgatttaatacaa

SEQ ID NO: 28137 - DNA, 25 bp, SARS Virus
aattctcacaactatttaatacaaa

SEQ ID NO: 28138 - DNA, 25 bp, SARS Virus
attctcacaacgttttaatacaaac

SEQ ID NO: 28139 - DNA, 25 bp, SARS Virus
ttctcacaacgatttaatacaaacc

SEQ ID NO: 28140 - DNA, 25 bp, SARS Virus
tctcacaacgatttaatacaaacct

SEQ ID NO: 28141 - DNA, 25 bp, SARS Virus
ctcacaacgatttaatacaaaccta

SEQ ID NO: 28142 - DNA, 25 bp, SARS Virus
tcacaacgattttatacaaacctac

SEQ ID NO: 28143 - DNA, 25 bp, SARS Virus
cacaacgatttattacaaacctacg

SEQ ID NO: 28144 - DNA, 25 bp, SARS Virus
acaacgatttaatacaaacctacgg

SEQ ID NO: 28145 - DNA, 25 bp, SARS Virus
caacgatttaattcaaacctacggc

SEQ ID NO: 28146 - DNA, 25 bp, SARS Virus
aacgatttaatataaacctacggcc

SEQ ID NO: 28147 - DNA, 25 bp, SARS Virus
acgatttaatactaacctacggccg

SEQ ID NO: 28148 - DNA, 25 bp, SARS Virus
cgatttaatacatacctacggccgt

SEQ ID NO: 28149 - DNA, 25 bp, SARS Virus
gatttaatacaatcctacggccgta

SEQ ID NO: 28150 - DNA, 25 bp, SARS Virus
atttaatacaaatctacggccgtaa

SEQ ID NO: 28151 - DNA, 25 bp, SARS Virus
tttaatacaaacttacggccgtaat

SEQ ID NO: 28152 - DNA, 25 bp, SARS Virus
ttaatacaaacctacggccgtaatt

SEQ ID NO: 28153 - DNA, 25 bp, SARS Virus
taatacaaaccttcggccgtaatta

SEQ ID NO: 28154 - DNA, 25 bp, SARS Virus
aatacaaacctatggccgtaattaa

SEQ ID NO: 28155 - DNA, 25 bp, SARS Virus
atacaaacctactgccgtaattaat

SEQ ID NO: 28156 - DNA, 25 bp, SARS Virus
tacaaacctacgtccgtaattaata

SEQ ID NO: 28157 - DNA, 25 bp, SARS Virus
acaaacctacggtcgtaattaatac

SEQ ID NO: 28158 - DNA, 25 bp, SARS Virus
caaacctacggctgtaattaataca

SEQ ID NO: 28159 - DNA, 25 bp, SARS Virus
aaacctacggccttaattaatacac

SEQ ID NO: 28160 - DNA, 25 bp, SARS Virus
aacctacggccgtaattaatacact

SEQ ID NO: 28161 - DNA, 25 bp, SARS Virus
acctacggccgttattaatacactt

SEQ ID NO: 28162 - DNA, 25 bp, SARS Virus
cctacggccgtatttaatacacttc

SEQ ID NO: 28163 - DNA, 25 bp, SARS Virus
ctacggccgtaattaatacacttca

SEQ ID NO: 28164 - DNA, 25 bp, SARS Virus
tacggccgtaattaatacacttcag

SEQ ID NO: 28165 - DNA, 25 bp, SARS Virus
acggccgtaatttatacacttcagt

SEQ ID NO: 28166 - DNA, 25 bp, SARS Virus
cggccgtaattattacacttcagtg

SEQ ID NO: 28167 - DNA, 25 bp, SARS Virus
ggccgtaattaatacacttcagtgg

SEQ ID NO: 28168 - DNA, 25 bp, SARS Virus
gccgtaattaattcacttcagtggg

SEQ ID NO: 28169 - DNA, 25 bp, SARS Virus
ccgtaattaatatacttcagtgggt

SEQ ID NO: 28170 - DNA, 25 bp, SARS Virus
cgtaattaatactcttcagtgggtt

SEQ ID NO: 28171 - DNA, 25 bp, SARS Virus
gtaattaatacatttcagtgggttt

SEQ ID NO: 28172 - DNA, 25 bp, SARS Virus
taattaatacacttcagtgggttta

SEQ ID NO: 28173 - DNA, 25 bp, SARS Virus
aattaatacacttcagtgggtttaa

SEQ ID NO: 28174 - DNA, 25 bp, SARS Virus
attaatacactttagtgggtttaaa

SEQ ID NO: 28175 - DNA, 25 bp, SARS Virus
ttaatacacttctgtgggtttaaaa

SEQ ID NO: 28176 - DNA, 25 bp, SARS Virus
taatacacttcattgggtttaaaag

SEQ ID NO: 28177 - DNA, 25 bp, SARS Virus
aatacacttcagtgggtttaaaaga

SEQ ID NO: 28178 - DNA, 25 bp, SARS Virus
atacacttcagttggtttaaaagat

SEQ ID NO: 28179 - DNA, 25 bp, SARS Virus
tacacttcagtgtgtttaaaagatt

SEQ ID NO: 28180 - DNA, 25 bp, SARS Virus
acacttcagtggttttaaaagattt

SEQ ID NO: 28181 - DNA, 25 bp, SARS Virus
cacttcagtgggtttaaaagattta

SEQ ID NO: 28182 - DNA, 25 bp, SARS Virus
acttcagtgggtttaaaagatttaa

SEQ ID NO: 28183 - DNA, 25 bp, SARS Virus
cttcagtgggtttaaaagatttaac

SEQ ID NO: 28184 - DNA, 25 bp, SARS Virus
ttcagtgggttttaaagatttaaca

SEQ ID NO: 28185 - DNA, 25 bp, SARS Virus
tcagtgggtttataagatttaacaa

SEQ ID NO: 28186 - DNA, 25 bp, SARS Virus
cagtgggtttaatagatttaacaag

SEQ ID NO: 28187 - DNA, 25 bp, SARS Virus
agtgggtttaaatgatttaacaagt

SEQ ID NO: 28188 - DNA, 25 bp, SARS Virus
gtgggtttaaaatatttaacaagtg

SEQ ID NO: 28189 - DNA, 25 bp, SARS Virus
tgggtttaaaagttttaacaagtgt

SEQ ID NO: 28190 - DNA, 25 bp, SARS Virus
gggtttaaaagatttaacaagtgtt

SEQ ID NO: 28191 - DNA, 25 bp, SARS Virus
ggtttaaaagatttaacaagtgtta

SEQ ID NO: 28192 - DNA, 25 bp, SARS Virus
gtttaaaagatttaacaagtgttag

SEQ ID NO: 28193 - DNA, 25 bp, SARS Virus
tttaaaagattttacaagtgttagc

SEQ ID NO: 28194 - DNA, 25 bp, SARS Virus
ttaaaagatttatcaagtgttagcg

SEQ ID NO: 28195 - DNA, 25 bp, SARS Virus
taaaagatttaataagtgttagcga

SEQ ID NO: 28196 - DNA, 25 bp, SARS Virus
aaaagatttaactagtgttagcgat

SEQ ID NO: 28197 - DNA, 25 bp, SARS Virus
aaagatttaacatgtgttagcgata

SEQ ID NO: 28198 - DNA, 25 bp, SARS Virus
aagatttaacaattgttagcgatac

SEQ ID NO: 28199 - DNA, 25 bp, SARS Virus
agatttaacaagtgttagcgataca

SEQ ID NO: 28200 - DNA, 25 bp, SARS Virus
gatttaacaagttttagcgatacac

SEQ ID NO: 28201 - DNA, 25 bp, SARS Virus
atttaacaagtgttagcgatacacc

SEQ ID NO: 28202 - DNA, 25 bp, SARS Virus
tttaacaagtgttagcgatacaccg

SEQ ID NO: 28203 - DNA, 25 bp, SARS Virus
ttaacaagtgtttgcgatacaccga

SEQ ID NO: 28204 - DNA, 25 bp, SARS Virus
taacaagtgttatcgatacaccgat

SEQ ID NO: 28205 - DNA, 25 bp, SARS Virus
aacaagtgttagtgatacaccgata

SEQ ID NO: 28206 - DNA, 25 bp, SARS Virus
acaagtgttagctatacaccgataa

SEQ ID NO: 28207 - DNA, 25 bp, SARS Virus
caagtgttagcgttacaccgataac

SEQ ID NO: 28208 - DNA, 25 bp, SARS Virus
aagtgttagcgatacaccgataaca

SEQ ID NO: 28209 - DNA, 25 bp, SARS Virus
agtgttagcgattcaccgataacaa

SEQ ID NO: 28210 - DNA, 25 bp, SARS Virus
gtgttagcgatataccgataacaac

SEQ ID NO: 28211 - DNA, 25 bp, SARS Virus
tgttagcgatactccgataacaaca

SEQ ID NO: 28212 - DNA, 25 bp, SARS Virus
gttagcgatacatcgataacaacaa

SEQ ID NO: 28213 - DNA, 25 bp, SARS Virus
ttagcgatacactgataacaacaat

SEQ ID NO: 28214 - DNA, 25 bp, SARS Virus
tagcgatacacctataacaacaatt

SEQ ID NO: 28215 - DNA, 25 bp, SARS Virus
agcgatacaccgttaacaacaattc

SEQ ID NO: 28216 - DNA, 25 bp, SARS Virus
gcgatacaccgataacaacaattca

SEQ ID NO: 28217 - DNA, 25 bp, SARS Virus
cgatacaccgattacaacaattcat

SEQ ID NO: 28218 - DNA, 25 bp, SARS Virus
gatacaccgatatcaacaattcata

SEQ ID NO: 28219 - DNA, 25 bp, SARS Virus
atacaccgataataacaattcataa

SEQ ID NO: 28220 - DNA, 25 bp, SARS Virus
tacaccgataactacaattcataaa

SEQ ID NO: 28221 - DNA, 25 bp, SARS Virus
acaccgataacatcaattcataaac

SEQ ID NO: 28222 - DNA, 25 bp, SARS Virus
caccgataacaataattcataaacg

SEQ ID NO: 28223 - DNA, 25 bp, SARS Virus
accgataacaactattcataaacga

SEQ ID NO: 28224 - DNA, 25 bp, SARS Virus
ccgataacaacatttcataaacgaa

SEQ ID NO: 28225 - DNA, 25 bp, SARS Virus
cgataacaacaattcataaacgaat

SEQ ID NO: 28226 - DNA, 25 bp, SARS Virus
gataacaacaattcataaacgaatc

SEQ ID NO: 28227 - DNA, 25 bp, SARS Virus
ataacaacaatttataaacgaatcc

SEQ ID NO: 28228 - DNA, 25 bp, SARS Virus
taacaacaattcttaaacgaatcca

SEQ ID NO: 28229 - DNA, 25 bp, SARS Virus
aacaacaattcataaacgaatccaa

SEQ ID NO: 28230 - DNA, 25 bp, SARS Virus
acaacaattcattaacgaatccaag

SEQ ID NO: 28231 - DNA, 25 bp, SARS Virus
caacaattcatatacgaatccaaga

SEQ ID NO: 28232 - DNA, 25 bp, SARS Virus
aacaattcataatcgaatccaagag

SEQ ID NO: 28233 - DNA, 25 bp, SARS Virus
acaattcataaatgaatccaagaga

SEQ ID NO: 28234 - DNA, 25 bp, SARS Virus
caattcataaactaatccaagagat

SEQ ID NO: 28235 - DNA, 25 bp, SARS Virus
aattcataaacgtatccaagagatt

SEQ ID NO: 28236 - DNA, 25 bp, SARS Virus
attcataaacgattccaagagatta

SEQ ID NO: 28237 - DNA, 25 bp, SARS Virus
ttcataaacgaatccaagagattag

SEQ ID NO: 28238 - DNA, 25 bp, SARS Virus
tcataaacgaattcaagagattaga

SEQ ID NO: 28239 - DNA, 25 bp, SARS Virus
cataaacgaatctaagagattagac

SEQ ID NO: 28240 - DNA, 25 bp, SARS Virus
ataaacgaatcctagagattagaca

SEQ ID NO: 28241 - DNA, 25 bp, SARS Virus
taaacgaatccatgagattagacac

SEQ ID NO: 28242 - DNA, 25 bp, SARS Virus
aaacgaatccaatagattagacaca

SEQ ID NO: 28243 - DNA, 25 bp, SARS Virus
aacgaatccaagtgattagacacat

SEQ ID NO: 28244 - DNA, 25 bp, SARS Virus
acgaatccaagatattagacacatt

SEQ ID NO: 28245 - DNA, 25 bp, SARS Virus
cgaatccaagagtttagacacattg

SEQ ID NO: 28246 - DNA, 25 bp, SARS Virus
gaatccaagagattagacacattga

SEQ ID NO: 28247 - DNA, 25 bp, SARS Virus
aatccaagagattagacacattgac

SEQ ID NO: 28248 - DNA, 25 bp, SARS Virus
atccaagagatttgacacattgacg

SEQ ID NO: 28249 - DNA, 25 bp, SARS Virus
tccaagagattatacacattgacga

SEQ ID NO: 28250 - DNA, 25 bp, SARS Virus
ccaagagattagtcacattgacgac

SEQ ID NO: 28251 - DNA, 25 bp, SARS Virus
caagagattagatacattgacgacg

SEQ ID NO: 28252 - DNA, 25 bp, SARS Virus
aagagattagactcattgacgacga

SEQ ID NO: 28253 - DNA, 25 bp, SARS Virus
agagattagacatattgacgacgaa

SEQ ID NO: 28254 - DNA, 25 bp, SARS Virus
gagattagacactttgacgacgaaa

SEQ ID NO: 28255 - DNA, 25 bp, SARS Virus
agattagacacattgacgacgaaaa

SEQ ID NO: 28256 - DNA, 25 bp, SARS Virus
gattagacacattgacgacgaaaac

SEQ ID NO: 28257 - DNA, 25 bp, SARS Virus
attagacacatttacgacgaaaacc

SEQ ID NO: 28258 - DNA, 25 bp, SARS Virus
ttagacacattgtcgacgaaaacca

SEQ ID NO: 28259 - DNA, 25 bp, SARS Virus
tagacacattgatgacgaaaaccac

SEQ ID NO: 28260 - DNA, 25 bp, SARS Virus
agacacattgactacgaaaaccaca

SEQ ID NO: 28261 - DNA, 25 bp, SARS Virus
gacacattgacgtcgaaaaccacat

SEQ ID NO: 28262 - DNA, 25 bp, SARS Virus
acacattgacgatgaaaaccacatg

SEQ ID NO: 28263 - DNA, 25 bp, SARS Virus
cacattgacgactaaaaccacatga

SEQ ID NO: 28264 - DNA, 25 bp, SARS Virus
acattgacgacgtaaaccacatgag

SEQ ID NO: 28265 - DNA, 25 bp, SARS Virus
cattgacgacgataaccacatgaga

SEQ ID NO: 28266 - DNA, 25 bp, SARS Virus
attgacgacgaataccacatgagaa

SEQ ID NO: 28267 - DNA, 25 bp, SARS Virus
ttgacgacgaaatccacatgagaat

SEQ ID NO: 28268 - DNA, 25 bp, SARS Virus
tgacgacgaaaatcacatgagaata

SEQ ID NO: 28269 - DNA, 25 bp, SARS Virus
gacgacgaaaactacatgagaatag

SEQ ID NO: 28270 - DNA, 25 bp, SARS Virus
acgacgaaaacctcatgagaataga

SEQ ID NO: 28271 - DNA, 25 bp, SARS Virus
cgacgaaaaccatatgagaatagat

SEQ ID NO: 28272 - DNA, 25 bp, SARS Virus
gacgaaaaccacttgagaatagatt

SEQ ID NO: 28273 - DNA, 25 bp, SARS Virus
acgaaaaccacatgagaatagatta

SEQ ID NO: 28274 - DNA, 25 bp, SARS Virus
cgaaaaccacattagaatagattaa

SEQ ID NO: 28275 - DNA, 25 bp, SARS Virus
gaaaaccacatgtgaatagattaaa

SEQ ID NO: 28276 - DNA, 25 bp, SARS Virus
aaaaccacatgataatagattaaaa

SEQ ID NO: 28277 - DNA, 25 bp, SARS Virus
aaaccacatgagtatagattaaaac

SEQ ID NO: 28278 - DNA, 25 bp, SARS Virus
aaccacatgagattagattaaaacc

SEQ ID NO: 28279 - DNA, 25 bp, SARS Virus
accacatgagaatagattaaaacca

SEQ ID NO: 28280 - DNA, 25 bp, SARS Virus
ccacatgagaattgattaaaaccac

SEQ ID NO: 28281 - DNA, 25 bp, SARS Virus
cacatgagaatatattaaaaccacg

SEQ ID NO: 28282 - DNA, 25 bp, SARS Virus
acatgagaatagtttaaaaccacga

SEQ ID NO: 28283 - DNA, 25 bp, SARS Virus
catgagaatagattaaaaccacgag

SEQ ID NO: 28284 - DNA, 25 bp, SARS Virus
atgagaatagattaaaaccacgagg

SEQ ID NO: 28285 - DNA, 25 bp, SARS Virus
tgagaatagatttaaaccacgagga

SEQ ID NO: 28286 - DNA, 25 bp, SARS Virus
gagaatagattataaccacgaggaa

SEQ ID NO: 28287 - DNA, 25 bp, SARS Virus
agaatagattaataccacgaggaag

SEQ ID NO: 28288 - DNA, 25 bp, SARS Virus
gaatagattaaatccacgaggaaga

SEQ ID NO: 28289 - DNA, 25 bp, SARS Virus
aatagattaaaatcacgaggaagaa

SEQ ID NO: 28290 - DNA, 25 bp, SARS Virus
atagattaaaactacgaggaagaat

SEQ ID NO: 28291 - DNA, 25 bp, SARS Virus
tagattaaaacctcgaggaagaata

SEQ ID NO: 28292 - DNA, 25 bp, SARS Virus
agattaaaaccatgaggaagaataa

SEQ ID NO: 28293 - DNA, 25 bp, SARS Virus
gattaaaaccactaggaagaataac

SEQ ID NO: 28294 - DNA, 25 bp, SARS Virus
attaaaaccacgtggaagaataaca

SEQ ID NO: 28295 - DNA, 25 bp, SARS Virus
ttaaaaccacgatgaagaataacat

SEQ ID NO: 28296 - DNA, 25 bp, SARS Virus
taaaaccacgagtaagaataacatt

SEQ ID NO: 28297 - DNA, 25 bp, SARS Virus
aaaaccacgaggtagaataacatta

SEQ ID NO: 28298 - DNA, 25 bp, SARS Virus
aaaccacgaggatgaataacattac

SEQ ID NO: 28299 - DNA, 25 bp, SARS Virus
aaccacgaggaataataacattacc

SEQ ID NO: 28300 - DNA, 25 bp, SARS Virus
accacgaggaagtataacattaccg

SEQ ID NO: 28301 - DNA, 25 bp, SARS Virus
ccacgaggaagattaacattaccgc

SEQ ID NO: 28302 - DNA, 25 bp, SARS Virus
cacgaggaagaataacattaccgca

SEQ ID NO: 28303 - DNA, 25 bp, SARS Virus
acgaggaagaattacattaccgcaa

SEQ ID NO: 28304 - DNA, 25 bp, SARS Virus
cgaggaagaatatcattaccgcaat

SEQ ID NO: 28305 - DNA, 25 bp, SARS Virus
gaggaagaataatattaccgcaatc

SEQ ID NO: 28306 - DNA, 25 bp, SARS Virus
aggaagaataactttaccgcaatct

SEQ ID NO: 28307 - DNA, 25 bp, SARS Virus
ggaagaataacattaccgcaatctc

SEQ ID NO: 28308 - DNA, 25 bp, SARS Virus
gaagaataacattaccgcaatctct

SEQ ID NO: 28309 - DNA, 25 bp, SARS Virus
aagaataacatttccgcaatctctt

SEQ ID NO: 28310 - DNA, 25 bp, SARS Virus
agaataacattatcgcaatctctta

SEQ ID NO: 28311 - DNA, 25 bp, SARS Virus
gaataacattactgcaatctcttaa

SEQ ID NO: 28312 - DNA, 25 bp, SARS Virus
aataacattacctcaatctcttaac

SEQ ID NO: 28313 - DNA, 25 bp, SARS Virus
ataacattaccgtaatctcttaaca

SEQ ID NO: 28314 - DNA, 25 bp, SARS Virus
taacattaccgctatctcttaacat

SEQ ID NO: 28315 - DNA, 25 bp, SARS Virus
aacattaccgcattctcttaacata

SEQ ID NO: 28316 - DNA, 25 bp, SARS Virus
acattaccgcaatctcttaacatag

SEQ ID NO: 28317 - DNA, 25 bp, SARS Virus
cattaccgcaatttcttaacataga

SEQ ID NO: 28318 - DNA, 25 bp, SARS Virus
attaccgcaatctcttaacatagaa

SEQ ID NO: 28319 - DNA, 25 bp, SARS Virus
ttaccgcaatcttttaacatagaat

SEQ ID NO: 28320 - DNA, 25 bp, SARS Virus
taccgcaatctcttaacatagaatt

SEQ ID NO: 28321 - DNA, 25 bp, SARS Virus
accgcaatctcttaacatagaatta

SEQ ID NO: 28322 - DNA, 25 bp, SARS Virus
ccgcaatctctttacatagaattaa

SEQ ID NO: 28323 - DNA, 25 bp, SARS Virus
cgcaatctcttatcatagaattaag

SEQ ID NO: 28324 - DNA, 25 bp, SARS Virus
gcaatctcttaatatagaattaagc

SEQ ID NO: 28325 - DNA, 25 bp, SARS Virus
caatctcttaacttagaattaagca

SEQ ID NO: 28326 - DNA, 25 bp, SARS Virus
aatctcttaacatagaattaagcag

SEQ ID NO: 28327 - DNA, 25 bp, SARS Virus
atctcttaacattgaattaagcaga

SEQ ID NO: 28328 - DNA, 25 bp, SARS Virus
tctcttaacatataattaagcagat

SEQ ID NO: 28329 - DNA, 25 bp, SARS Virus
ctcttaacatagtattaagcagatt

SEQ ID NO: 28330 - DNA, 25 bp, SARS Virus
tcttaacatagatttaagcagattg

SEQ ID NO: 28331 - DNA, 25 bp, SARS Virus
cttaacatagaattaagcagattgc

SEQ ID NO: 28332 - DNA, 25 bp, SARS Virus
ttaacatagaattaagcagattgca

SEQ ID NO: 28333 - DNA, 25 bp, SARS Virus
taacatagaatttagcagattgcaa

SEQ ID NO: 28334 - DNA, 25 bp, SARS Virus
aacatagaattatgcagattgcaat

SEQ ID NO: 28335 - DNA, 25 bp, SARS Virus
acatagaattaatcagattgcaatg

SEQ ID NO: 28336 - DNA, 25 bp, SARS Virus
catagaattaagtagattgcaatga

SEQ ID NO: 28337 - DNA, 25 bp, SARS Virus
atagaattaagctgattgcaatgat

SEQ ID NO: 28338 - DNA, 25 bp, SARS Virus
tagaattaagcatattgcaatgatg

SEQ ID NO: 28339 - DNA, 25 bp, SARS Virus
agaattaagcagtttgcaatgatga

SEQ ID NO: 28340 - DNA, 25 bp, SARS Virus
gaattaagcagattgcaatgatgat

SEQ ID NO: 28341 - DNA, 25 bp, SARS Virus
aattaagcagattgcaatgatgata

SEQ ID NO: 28342 - DNA, 25 bp, SARS Virus
attaagcagatttcaatgatgatac

SEQ ID NO: 28343 - DNA, 25 bp, SARS Virus
ttaagcagattgtaatgatgatacc

SEQ ID NO: 28344 - DNA, 25 bp, SARS Virus
taagcagattgctatgatgatacct

SEQ ID NO: 28345 - DNA, 25 bp, SARS Virus
aagcagattgcattgatgataccta

SEQ ID NO: 28346 - DNA, 25 bp, SARS Virus
agcagattgcaatgatgatacctaa

SEQ ID NO: 28347 - DNA, 25 bp, SARS Virus
gcagattgcaattatgatacctaaa

SEQ ID NO: 28348 - DNA, 25 bp, SARS Virus
cagattgcaatgttgatacctaaag

SEQ ID NO: 28349 - DNA, 25 bp, SARS Virus
agattgcaatgatgatacctaaaga

SEQ ID NO: 28350 - DNA, 25 bp, SARS Virus
gattgcaatgattatacctaaagac

SEQ ID NO: 28351 - DNA, 25 bp, SARS Virus
attgcaatgatgttacctaaagaca

SEQ ID NO: 28352 - DNA, 25 bp, SARS Virus
ttgcaatgatgatacctaaagacac

SEQ ID NO: 28353 - DNA, 25 bp, SARS Virus
tgcaatgatgattcctaaagacact

SEQ ID NO: 28354 - DNA, 25 bp, SARS Virus
gcaatgatgatatctaaagacactt

SEQ ID NO: 28355 - DNA, 25 bp, SARS Virus
caatgatgatacttaaagacacttc

SEQ ID NO: 28356 - DNA, 25 bp, SARS Virus
aatgatgatacctaaagacacttcc

SEQ ID NO: 28357 - DNA, 25 bp, SARS Virus
atgatgataccttaagacacttcca

SEQ ID NO: 28358 - DNA, 25 bp, SARS Virus
tgatgatacctatagacacttccaa

SEQ ID NO: 28359 - DNA, 25 bp, SARS Virus
gatgatacctaatgacacttccaag

SEQ ID NO: 28360 - DNA, 25 bp, SARS Virus
atgatacctaaatacacttccaaga

SEQ ID NO: 28361 - DNA, 25 bp, SARS Virus
tgatacctaaagtcacttccaagaa

SEQ ID NO: 28362 - DNA, 25 bp, SARS Virus
gatacctaaagatacttccaagaaa

SEQ ID NO: 28363 - DNA, 25 bp, SARS Virus
atacctaaagactcttccaagaaaa

SEQ ID NO: 28364 - DNA, 25 bp, SARS Virus
tacctaaagacatttccaagaaaag

SEQ ID NO: 28365 - DNA, 25 bp, SARS Virus
acctaaagacacttccaagaaaagg

SEQ ID NO: 28366 - DNA, 25 bp, SARS Virus
cctaaagacacttccaagaaaagga

SEQ ID NO: 28367 - DNA, 25 bp, SARS Virus
ctaaagacactttcaagaaaaggaa

SEQ ID NO: 28368 - DNA, 25 bp, SARS Virus
taaagacacttctaagaaaaggaac

SEQ ID NO: 28369 - DNA, 25 bp, SARS Virus
aaagacacttcctagaaaaggaacg

SEQ ID NO: 28370 - DNA, 25 bp, SARS Virus
aagacacttccatgaaaaggaacgt

SEQ ID NO: 28371 - DNA, 25 bp, SARS Virus
agacacttccaataaaaggaacgtc

SEQ ID NO: 28372 - DNA, 25 bp, SARS Virus
gacacttccaagtaaaggaacgtcg

SEQ ID NO: 28373 - DNA, 25 bp, SARS Virus
acacttccaagataaggaacgtcgt

SEQ ID NO: 28374 - DNA, 25 bp, SARS Virus
cacttccaagaataggaacgtcgta

SEQ ID NO: 28375 - DNA, 25 bp, SARS Virus
acttccaagaaatggaacgtcgtaa

SEQ ID NO: 28376 - DNA, 25 bp, SARS Virus
cttccaagaaaatgaacgtcgtaaa

SEQ ID NO: 28377 - DNA, 25 bp, SARS Virus
ttccaagaaaagtaacgtcgtaaac

SEQ ID NO: 28378 - DNA, 25 bp, SARS Virus
tccaagaaaaggtacgtcgtaaaca

SEQ ID NO: 28379 - DNA, 25 bp, SARS Virus
ccaagaaaaggatcgtcgtaaacaa

SEQ ID NO: 28380 - DNA, 25 bp, SARS Virus
caagaaaaggaatgtcgtaaacaaa

SEQ ID NO: 28381 - DNA, 25 bp, SARS Virus
aagaaaaggaacttcgtaaacaaat

SEQ ID NO: 28382 - DNA, 25 bp, SARS Virus
agaaaaggaacgtcgtaaacaaatt

SEQ ID NO: 28383 - DNA, 25 bp, SARS Virus
gaaaaggaacgttgtaaacaaattc

SEQ ID NO: 28384 - DNA, 25 bp, SARS Virus
aaaaggaacgtcttaaacaaattca

SEQ ID NO: 28385 - DNA, 25 bp, SARS Virus
aaaggaacgtcgtaaacaaattcac

SEQ ID NO: 28386 - DNA, 25 bp, SARS Virus
aaggaacgtcgttaacaaattcacc

SEQ ID NO: 28387 - DNA, 25 bp, SARS Virus
aggaacgtcgtatacaaattcacct

SEQ ID NO: 28388 - DNA, 25 bp, SARS Virus
ggaacgtcgtaatcaaattcaccta

SEQ ID NO: 28389 - DNA, 25 bp, SARS Virus
gaacgtcgtaaataaattcacctaa

SEQ ID NO: 28390 - DNA, 25 bp, SARS Virus
aacgtcgtaaactaattcacctaat

SEQ ID NO: 28391 - DNA, 25 bp, SARS Virus
acgtcgtaaacatattcacctaatc

SEQ ID NO: 28392 - DNA, 25 bp, SARS Virus
cgtcgtaaacaatttcacctaatct

SEQ ID NO: 28393 - DNA, 25 bp, SARS Virus
gtcgtaaacaaattcacctaatctg

SEQ ID NO: 28394 - DNA, 25 bp, SARS Virus
tcgtaaacaaattcacctaatctga

SEQ ID NO: 28395 - DNA, 25 bp, SARS Virus
cgtaaacaaatttacctaatctgag

SEQ ID NO: 28396 - DNA, 25 bp, SARS Virus
gtaaacaaattctcctaatctgagg

SEQ ID NO: 28397 - DNA, 25 bp, SARS Virus
taaacaaattcatctaatctgaggg

SEQ ID NO: 28398 - DNA, 25 bp, SARS Virus
aaacaaattcacttaatctgaggga

SEQ ID NO: 28399 - DNA, 25 bp, SARS Virus
aacaaattcacctaatctgagggaa

SEQ ID NO: 28400 - DNA, 25 bp, SARS Virus
acaaattcaccttatctgagggaac

SEQ ID NO: 28401 - DNA, 25 bp, SARS Virus
caaattcacctattctgagggaact

SEQ ID NO: 28402 - DNA, 25 bp, SARS Virus
aaattcacctaatctgagggaacta

SEQ ID NO: 28403 - DNA, 25 bp, SARS Virus
aattcacctaatttgagggaactaa

SEQ ID NO: 28404 - DNA, 25 bp, SARS Virus
attcacctaatctgagggaactaag

SEQ ID NO: 28405 - DNA, 25 bp, SARS Virus
ttcacctaatcttagggaactaaga

SEQ ID NO: 28406 - DNA, 25 bp, SARS Virus
tcacctaatctgtgggaactaagaa

SEQ ID NO: 28407 - DNA, 25 bp, SARS Virus
cacctaatctgatggaactaagaat

SEQ ID NO: 28408 - DNA, 25 bp, SARS Virus
acctaatctgagtgaactaagaata

SEQ ID NO: 28409 - DNA, 25 bp, SARS Virus
cctaatctgaggtaactaagaatag

SEQ ID NO: 28410 - DNA, 25 bp, SARS Virus
ctaatctgagggtactaagaatagg

SEQ ID NO: 28411 - DNA, 25 bp, SARS Virus
taatctgagggatctaagaataggt

SEQ ID NO: 28412 - DNA, 25 bp, SARS Virus
aatctgagggaattaagaataggtc

SEQ ID NO: 28413 - DNA, 25 bp, SARS Virus
atctgagggaactaagaataggtcg

SEQ ID NO: 28414 - DNA, 25 bp, SARS Virus
tctgagggaacttagaataggtcga

SEQ ID NO: 28415 - DNA, 25 bp, SARS Virus
ctgagggaactatgaataggtcgag

SEQ ID NO: 28416 - DNA, 25 bp, SARS Virus
tgagggaactaataataggtcgaga

SEQ ID NO: 28417 - DNA, 25 bp, SARS Virus
gagggaactaagtataggtcgagaa

SEQ ID NO: 28418 - DNA, 25 bp, SARS Virus
agggaactaagattaggtcgagaac

SEQ ID NO: 28419 - DNA, 25 bp, SARS Virus
gggaactaagaataggtcgagaact

SEQ ID NO: 28420 - DNA, 25 bp, SARS Virus
ggaactaagaattggtcgagaactt

SEQ ID NO: 28421 - DNA, 25 bp, SARS Virus
gaactaagaatatgtcgagaacttt

SEQ ID NO: 28422 - DNA, 25 bp, SARS Virus
aactaagaatagttcgagaactttg

SEQ ID NO: 28423 - DNA, 25 bp, SARS Virus
actaagaataggtcgagaactttgg

SEQ ID NO: 28424 - DNA, 25 bp, SARS Virus
ctaagaataggttgagaactttggt

SEQ ID NO: 28425 - DNA, 25 bp, SARS Virus
taagaataggtctagaactttggta

SEQ ID NO: 28426 - DNA, 25 bp, SARS Virus
aagaataggtcgtgaactttggtaa

SEQ ID NO: 28427 - DNA, 25 bp, SARS Virus
agaataggtcgataactttggtaag

SEQ ID NO: 28428 - DNA, 25 bp, SARS Virus
gaataggtcgagtactttggtaagt

SEQ ID NO: 28429 - DNA, 25 bp, SARS Virus
aataggtcgagatctttggtaagtc

SEQ ID NO: 28430 - DNA, 25 bp, SARS Virus
ataggtcgagaattttggtaagtcc

SEQ ID NO: 28431 - DNA, 25 bp, SARS Virus
taggtcgagaactttggtaagtcca

SEQ ID NO: 28432 - DNA, 25 bp, SARS Virus
aggtcgagaactttggtaagtccac

SEQ ID NO: 28433 - DNA, 25 bp, SARS Virus
ggtcgagaacttaggtaagtccact

SEQ ID NO: 28434 - DNA, 25 bp, SARS Virus
gtcgagaactttagtaagtccactg

SEQ ID NO: 28435 - DNA, 25 bp, SARS Virus
tcgagaactttgataagtccactgc

SEQ ID NO: 28436 - DNA, 25 bp, SARS Virus
cgagaactttggaaagtccactgct

SEQ ID NO: 28437 - DNA, 25 bp, SARS Virus
gagaactttggtaagtccactgcta

SEQ ID NO: 28438 - DNA, 25 bp, SARS Virus
agaactttggtaagtccactgctaa

SEQ ID NO: 28439 - DNA, 25 bp, SARS Virus
gaactttggtaaatccactgctaaa

SEQ ID NO: 28440 - DNA, 25 bp, SARS Virus
aactttggtaagaccactgctaaag

SEQ ID NO: 28441 - DNA, 25 bp, SARS Virus
actttggtaagtacactgctaaagt

SEQ ID NO: 28442 - DNA, 25 bp, SARS Virus
ctttggtaagtcaactgctaaagta

SEQ ID NO: 28443 - DNA, 25 bp, SARS Virus
tttggtaagtccactgctaaagtag

SEQ ID NO: 28444 - DNA, 25 bp, SARS Virus
ttggtaagtccaatgctaaagtagc

SEQ ID NO: 28445 - DNA, 25 bp, SARS Virus
tggtaagtccacagctaaagtagca

SEQ ID NO: 28446 - DNA, 25 bp, SARS Virus
ggtaagtccactactaaagtagcat

SEQ ID NO: 28447 - DNA, 25 bp, SARS Virus
gtaagtccactgataaagtagcatg

SEQ ID NO: 28448 - DNA, 25 bp, SARS Virus
taagtccactgcaaaagtagcatgt

SEQ ID NO: 28449 - DNA, 25 bp, SARS Virus
aagtccactgctaaagtagcatgtt

SEQ ID NO: 28450 - DNA, 25 bp, SARS Virus
agtccactgctaaagtagcatgttc

SEQ ID NO: 28451 - DNA, 25 bp, SARS Virus
gtccactgctaaagtagcatgttcg

SEQ ID NO: 28452 - DNA, 25 bp, SARS Virus
tccactgctaaaatagcatgttcga

SEQ ID NO: 28453 - DNA, 25 bp, SARS Virus
ccactgctaaagaagcatgttcgat

SEQ ID NO: 28454 - DNA, 25 bp, SARS Virus
cactgctaaagtagcatgttcgatc

SEQ ID NO: 28455 - DNA, 25 bp, SARS Virus
actgctaaagtaacatgttcgatct

SEQ ID NO: 28456 - DNA, 25 bp, SARS Virus
ctgctaaagtagaatgttcgatctg

SEQ ID NO: 28457 - DNA, 25 bp, SARS Virus
tgctaaagtagcatgttcgatctga

SEQ ID NO: 28458 - DNA, 25 bp, SARS Virus
gctaaagtagcaagttcgatctgaa

SEQ ID NO: 28459 - DNA, 25 bp, SARS Virus
ctaaagtagcatattcgatctgaac

SEQ ID NO: 28460 - DNA, 25 bp, SARS Virus
taaagtagcatgatcgatctgaact

SEQ ID NO: 28461 - DNA, 25 bp, SARS Virus
aaagtagcatgtacgatctgaactg

SEQ ID NO: 28462 - DNA, 25 bp, SARS Virus
aagtagcatgttagatctgaactgt

SEQ ID NO: 28463 - DNA, 25 bp, SARS Virus
agtagcatgttcaatctgaactgtt

SEQ ID NO: 28464 - DNA, 25 bp, SARS Virus
gtagcatgttcgatctgaactgtta

SEQ ID NO: 28465 - DNA, 25 bp, SARS Virus
tagcatgttcgaactgaactgttaa

SEQ ID NO: 28466 - DNA, 25 bp, SARS Virus
agcatgttcgatatgaactgttaaa

SEQ ID NO: 28467 - DNA, 25 bp, SARS Virus
gcatgttcgatcagaactgttaaaa

SEQ ID NO: 28468 - DNA, 25 bp, SARS Virus
catgttcgatctaaactgttaaaat

SEQ ID NO: 28469 - DNA, 25 bp, SARS Virus
atgttcgatctgaactgttaaaatc

SEQ ID NO: 28470 - DNA, 25 bp, SARS Virus
tgttcgatctgaactgttaaaatcc

SEQ ID NO: 28471 - DNA, 25 bp, SARS Virus
gttcgatctgaaatgttaaaatcca

SEQ ID NO: 28472 - DNA, 25 bp, SARS Virus
ttcgatctgaacagttaaaatccag

SEQ ID NO: 28473 - DNA, 25 bp, SARS Virus
tcgatctgaactattaaaatccaga

SEQ ID NO: 28474 - DNA, 25 bp, SARS Virus
cgatctgaactgataaaatccagac

SEQ ID NO: 28475 - DNA, 25 bp, SARS Virus
gatctgaactgtaaaaatccagacc

SEQ ID NO: 28476 - DNA, 25 bp, SARS Virus
atctgaactgttaaaatccagaccg

SEQ ID NO: 28477 - DNA, 25 bp, SARS Virus
tctgaactgttaaaatccagaccgg

SEQ ID NO: 28478 - DNA, 25 bp, SARS Virus
ctgaactgttaaaatccagaccggc

SEQ ID NO: 28479 - DNA, 25 bp, SARS Virus
tgaactgttaaaatccagaccggcg

SEQ ID NO: 28480 - DNA, 25 bp, SARS Virus
gaactgttaaaaaccagaccggcga

SEQ ID NO: 28481 - DNA, 25 bp, SARS Virus
aactgttaaaatacagaccggcgac

SEQ ID NO: 28482 - DNA, 25 bp, SARS Virus
actgttaaaatcaagaccggcgact

SEQ ID NO: 28483 - DNA, 25 bp, SARS Virus
ctgttaaaatccagaccggcgactc

SEQ ID NO: 28484 - DNA, 25 bp, SARS Virus
tgttaaaatccaaaccggcgactca

SEQ ID NO: 28485 - DNA, 25 bp, SARS Virus
gttaaaatccagaccggcgactcac

SEQ ID NO: 28486 - DNA, 25 bp, SARS Virus
ttaaaatccagaacggcgactcacc

SEQ ID NO: 28487 - DNA, 25 bp, SARS Virus
taaaatccagacaggcgactcaccc

SEQ ID NO: 28488 - DNA, 25 bp, SARS Virus
aaaatccagaccagcgactcaccca

SEQ ID NO: 28489 - DNA, 25 bp, SARS Virus
aaatccagaccgacgactcacccaa

SEQ ID NO: 28490 - DNA, 25 bp, SARS Virus
aatccagaccggagactcacccaaa

SEQ ID NO: 28491 - DNA, 25 bp, SARS Virus
atccagaccggcaactcacccaaaa

SEQ ID NO: 28492 - DNA, 25 bp, SARS Virus
tccagaccggcgactcacccaaaac

SEQ ID NO: 28493 - DNA, 25 bp, SARS Virus
ccagaccggcgaatcacccaaaacc

SEQ ID NO: 28494 - DNA, 25 bp, SARS Virus
cagaccggcgacacacccaaaaccg

SEQ ID NO: 28495 - DNA, 25 bp, SARS Virus
agaccggcgactaacccaaaaccgt

SEQ ID NO: 28496 - DNA, 25 bp, SARS Virus
gaccggcgactcacccaaaaccgta

SEQ ID NO: 28497 - DNA, 25 bp, SARS Virus
accggcgactcaaccaaaaccgtat

SEQ ID NO: 28498 - DNA, 25 bp, SARS Virus
ccggcgactcacacaaaaccgtata

SEQ ID NO: 28499 - DNA, 25 bp, SARS Virus
cggcgactcaccaaaaaccgtatat

SEQ ID NO: 28500 - DNA, 25 bp, SARS Virus
ggcgactcacccaaaaccgtatata

SEQ ID NO: 28501 - DNA, 25 bp, SARS Virus
gcgactcacccaaaaccgtatatac

SEQ ID NO: 28502 - DNA, 25 bp, SARS Virus
cgactcacccaaaaccgtatataca

SEQ ID NO: 28503 - DNA, 25 bp, SARS Virus
gactcacccaaaaccgtatatacaa

SEQ ID NO: 28504 - DNA, 25 bp, SARS Virus
actcacccaaaaacgtatatacaac

SEQ ID NO: 28505 - DNA, 25 bp, SARS Virus
ctcacccaaaacagtatatacaaca

SEQ ID NO: 28506 - DNA, 25 bp, SARS Virus
tcacccaaaaccatatatacaacaa

SEQ ID NO: 28507 - DNA, 25 bp, SARS Virus
cacccaaaaccgaatatacaacaag

SEQ ID NO: 28508 - DNA, 25 bp, SARS Virus
acccaaaaccgtatatacaacaagt

SEQ ID NO: 28509 - DNA, 25 bp, SARS Virus
cccaaaaccgtaaatacaacaagtg

SEQ ID NO: 28510 - DNA, 25 bp, SARS Virus
ccaaaaccgtatatacaacaagtgt

SEQ ID NO: 28511 - DNA, 25 bp, SARS Virus
caaaaccgtataaacaacaagtgtt

SEQ ID NO: 28512 - DNA, 25 bp, SARS Virus
aaaaccgtatatacaacaagtgttt

SEQ ID NO: 28513 - DNA, 25 bp, SARS Virus
aaaccgtatataaaacaagtgtttt

SEQ ID NO: 28514 - DNA, 25 bp, SARS Virus
aaccgtatatacaacaagtgtttta

SEQ ID NO: 28515 - DNA, 25 bp, SARS Virus
accgtatatacaacaagtgttttaa

SEQ ID NO: 28516 - DNA, 25 bp, SARS Virus
ccgtatatacaaaaagtgttttaag

SEQ ID NO: 28517 - DNA, 25 bp, SARS Virus
cgtatatacaacaagtgttttaaga

SEQ ID NO: 28518 - DNA, 25 bp, SARS Virus
gtatatacaacaagtgttttaagaa

SEQ ID NO: 28519 - DNA, 25 bp, SARS Virus
tatatacaacaaatgttttaagaaa

SEQ ID NO: 28520 - DNA, 25 bp, SARS Virus
atatacaacaagagttttaagaaaa

SEQ ID NO: 28521 - DNA, 25 bp, SARS Virus
tatacaacaagtattttaagaaaat

SEQ ID NO: 28522 - DNA, 25 bp, SARS Virus
atacaacaagtgatttaagaaaata

SEQ ID NO: 28523 - DNA, 25 bp, SARS Virus
tacaacaagtgtattaagaaaataa

SEQ ID NO: 28524 - DNA, 25 bp, SARS Virus
acaacaagtgttataagaaaataaa

SEQ ID NO: 28525 - DNA, 25 bp, SARS Virus
caacaagtgtttaaagaaaataaat

SEQ ID NO: 28526 - DNA, 25 bp, SARS Virus
aacaagtgttttaagaaaataaata

SEQ ID NO: 28527 - DNA, 25 bp, SARS Virus
acaagtgttttaagaaaataaataa

SEQ ID NO: 28528 - DNA, 25 bp, SARS Virus
caagtgttttaaaaaaataaataat

SEQ ID NO: 28529 - DNA, 25 bp, SARS Virus
aagtgttttaagaaaataaataatc

SEQ ID NO: 28530 - DNA, 25 bp, SARS Virus
agtgttttaagaaaataaataatcc

SEQ ID NO: 28531 - DNA, 25 bp, SARS Virus
gtgttttaagaaaataaataatcca

SEQ ID NO: 28532 - DNA, 25 bp, SARS Virus
tgttttaagaaaataaataatccag

SEQ ID NO: 28533 - DNA, 25 bp, SARS Virus
gttttaagaaaaaaaataatccaga

SEQ ID NO: 28534 - DNA, 25 bp, SARS Virus
ttttaagaaaataaataatccagaa

SEQ ID NO: 28535 - DNA, 25 bp, SARS Virus
tttaagaaaataaataatccagaaa

SEQ ID NO: 28536 - DNA, 25 bp, SARS Virus
ttaagaaaataaataatccagaaag

SEQ ID NO: 28537 - DNA, 25 bp, SARS Virus
taagaaaataaaaaatccagaaagt

SEQ ID NO: 28538 - DNA, 25 bp, SARS Virus
aagaaaataaataatccagaaagtc

SEQ ID NO: 28539 - DNA, 25 bp, SARS Virus
agaaaataaataatccagaaagtcg

SEQ ID NO: 28540 - DNA, 25 bp, SARS Virus
gaaaataaataaaccagaaagtcga

SEQ ID NO: 28541 - DNA, 25 bp, SARS Virus
aaaataaataatacagaaagtcgat

SEQ ID NO: 28542 - DNA, 25 bp, SARS Virus
aaataaataatcaagaaagtcgata

SEQ ID NO: 28543 - DNA, 25 bp, SARS Virus
aataaataatccagaaagtcgatat

SEQ ID NO: 28544 - DNA, 25 bp, SARS Virus
ataaataatccaaaaagtcgatatt

SEQ ID NO: 28545 - DNA, 25 bp, SARS Virus
taaataatccagaaagtcgatatta

SEQ ID NO: 28546 - DNA, 25 bp, SARS Virus
aaataatccagaaagtcgatattac

SEQ ID NO: 28547 - DNA, 25 bp, SARS Virus
aataatccagaaagtcgatattacg

SEQ ID NO: 28548 - DNA, 25 bp, SARS Virus
ataatccagaaaatcgatattacgt

SEQ ID NO: 28549 - DNA, 25 bp, SARS Virus
taatccagaaagacgatattacgtc

SEQ ID NO: 28550 - DNA, 25 bp, SARS Virus
aatccagaaagtagatattacgtcc

SEQ ID NO: 28551 - DNA, 25 bp, SARS Virus
atccagaaagtcaatattacgtcca

SEQ ID NO: 28552 - DNA, 25 bp, SARS Virus
tccagaaagtcgatattacgtccac

SEQ ID NO: 28553 - DNA, 25 bp, SARS Virus
ccagaaagtcgaaattacgtccaca

SEQ ID NO: 28554 - DNA, 25 bp, SARS Virus
cagaaagtcgatattacgtccacaa

SEQ ID NO: 28555 - DNA, 25 bp, SARS Virus
agaaagtcgataatacgtccacaag

SEQ ID NO: 28556 - DNA, 25 bp, SARS Virus
gaaagtcgatataacgtccacaaga

SEQ ID NO: 28557 - DNA, 25 bp, SARS Virus
aaagtcgatattacgtccacaagaa

SEQ ID NO: 28558 - DNA, 25 bp, SARS Virus
aagtcgatattaagtccacaagaaa

SEQ ID NO: 28559 - DNA, 25 bp, SARS Virus
agtcgatattacatccacaagaaac

SEQ ID NO: 28560 - DNA, 25 bp, SARS Virus
gtcgatattacgaccacaagaaacc

SEQ ID NO: 28561 - DNA, 25 bp, SARS Virus
tcgatattacgtacacaagaaaccg

SEQ ID NO: 28562 - DNA, 25 bp, SARS Virus
cgatattacgtcaacaagaaaccga

SEQ ID NO: 28563 - DNA, 25 bp, SARS Virus
gatattacgtccacaagaaaccgat

SEQ ID NO: 28564 - DNA, 25 bp, SARS Virus
atattacgtccaaaagaaaccgata

SEQ ID NO: 28565 - DNA, 25 bp, SARS Virus
tattacgtccacaagaaaccgataa

SEQ ID NO: 28566 - DNA, 25 bp, SARS Virus
attacgtccacaagaaaccgataaa

SEQ ID NO: 28567 - DNA, 25 bp, SARS Virus
ttacgtccacaaaaaaccgataaaa

SEQ ID NO: 28568 - DNA, 25 bp, SARS Virus
tacgtccacaagaaaccgataaaac

SEQ ID NO: 28569 - DNA, 25 bp, SARS Virus
acgtccacaagaaaccgataaaacg

SEQ ID NO: 28570 - DNA, 25 bp, SARS Virus
cgtccacaagaaaccgataaaacga

SEQ ID NO: 28571 - DNA, 25 bp, SARS Virus
gtccacaagaaaacgataaaacgat

SEQ ID NO: 28572 - DNA, 25 bp, SARS Virus
tccacaagaaacagataaaacgatc

SEQ ID NO: 28573 - DNA, 25 bp, SARS Virus
ccacaagaaaccaataaaacgatca

SEQ ID NO: 28574 - DNA, 25 bp, SARS Virus
cacaagaaaccgataaaacgatcag

SEQ ID NO: 28575 - DNA, 25 bp, SARS Virus
acaagaaaccgaaaaaacgatcagt

SEQ ID NO: 28576 - DNA, 25 bp, SARS Virus
caagaaaccgataaaacgatcagta

SEQ ID NO: 28577 - DNA, 25 bp, SARS Virus
aagaaaccgataaaacgatcagtaa

SEQ ID NO: 28578 - DNA, 25 bp, SARS Virus
agaaaccgataaaacgatcagtaaa

SEQ ID NO: 28579 - DNA, 25 bp, SARS Virus
gaaaccgataaaacgatcagtaaag

SEQ ID NO: 28580 - DNA, 25 bp, SARS Virus
aaaccgataaaaagatcagtaaagt

SEQ ID NO: 28581 - DNA, 25 bp, SARS Virus
aaccgataaaacaatcagtaaagta

SEQ ID NO: 28582 - DNA, 25 bp, SARS Virus
accgataaaacgatcagtaaagtag

SEQ ID NO: 28583 - DNA, 25 bp, SARS Virus
ccgataaaacgaacagtaaagtagt

SEQ ID NO: 28584 - DNA, 25 bp, SARS Virus
cgataaaacgataagtaaagtagtc

SEQ ID NO: 28585 - DNA, 25 bp, SARS Virus
gataaaacgatcagtaaagtagtcg

SEQ ID NO: 28586 - DNA, 25 bp, SARS Virus
ataaaacgatcaataaagtagtcgt

SEQ ID NO: 28587 - DNA, 25 bp, SARS Virus
taaaacgatcagaaaagtagtcgtt

SEQ ID NO: 28588 - DNA, 25 bp, SARS Virus
aaaacgatcagtaaagtagtcgtta

SEQ ID NO: 28589 - DNA, 25 bp, SARS Virus
aaacgatcagtaaagtagtcgttaa

SEQ ID NO: 28590 - DNA, 25 bp, SARS Virus
aacgatcagtaaagtagtcgttaag

SEQ ID NO: 28591 - DNA, 25 bp, SARS Virus
acgatcagtaaaatagtcgttaaga

SEQ ID NO: 28592 - DNA, 25 bp, SARS Virus
cgatcagtaaagaagtcgttaagaa

SEQ ID NO: 28593 - DNA, 25 bp, SARS Virus
gatcagtaaagtagtcgttaagaac

SEQ ID NO: 28594 - DNA, 25 bp, SARS Virus
atcagtaaagtaatcgttaagaacc

SEQ ID NO: 28595 - DNA, 25 bp, SARS Virus
tcagtaaagtagacgttaagaaccg

SEQ ID NO: 28596 - DNA, 25 bp, SARS Virus
cagtaaagtagtagttaagaaccga

SEQ ID NO: 28597 - DNA, 25 bp, SARS Virus
agtaaagtagtcattaagaaccgag

SEQ ID NO: 28598 - DNA, 25 bp, SARS Virus
gtaaagtagtcgataagaaccgagt

SEQ ID NO: 28599 - DNA, 25 bp, SARS Virus
taaagtagtcgtaaagaaccgagta

SEQ ID NO: 28600 - DNA, 25 bp, SARS Virus
aaagtagtcgttaagaaccgagtac

SEQ ID NO: 28601 - DNA, 25 bp, SARS Virus
aagtagtcgttaagaaccgagtaca

SEQ ID NO: 28602 - DNA, 25 bp, SARS Virus
agtagtcgttaaaaaccgagtacac

SEQ ID NO: 28603 - DNA, 25 bp, SARS Virus
gtagtcgttaagaaccgagtacacc

SEQ ID NO: 28604 - DNA, 25 bp, SARS Virus
tagtcgttaagaaccgagtacacca

SEQ ID NO: 28605 - DNA, 25 bp, SARS Virus
agtcgttaagaaacgagtacaccaa

SEQ ID NO: 28606 - DNA, 25 bp, SARS Virus
gtcgttaagaacagagtacaccaaa

SEQ ID NO: 28607 - DNA, 25 bp, SARS Virus
tcgttaagaaccaagtacaccaaat

SEQ ID NO: 28608 - DNA, 25 bp, SARS Virus
cgttaagaaccgagtacaccaaata

SEQ ID NO: 28609 - DNA, 25 bp, SARS Virus
gttaagaaccgaatacaccaaatag

SEQ ID NO: 28610 - DNA, 25 bp, SARS Virus
ttaagaaccgagaacaccaaatagt

SEQ ID NO: 28611 - DNA, 25 bp, SARS Virus
taagaaccgagtacaccaaatagta

SEQ ID NO: 28612 - DNA, 25 bp, SARS Virus
aagaaccgagtaaaccaaatagtaa

SEQ ID NO: 28613 - DNA, 25 bp, SARS Virus
agaaccgagtacaccaaatagtaat

SEQ ID NO: 28614 - DNA, 25 bp, SARS Virus
gaaccgagtacaacaaatagtaatc

SEQ ID NO: 28615 - DNA, 25 bp, SARS Virus
aaccgagtacacaaaatagtaatca

SEQ ID NO: 28616 - DNA, 25 bp, SARS Virus
accgagtacaccaaatagtaatcat

SEQ ID NO: 28617 - DNA, 25 bp, SARS Virus
ccgagtacaccaaatagtaatcata

SEQ ID NO: 28618 - DNA, 25 bp, SARS Virus
cgagtacaccaaatagtaatcataa

SEQ ID NO: 28619 - DNA, 25 bp, SARS Virus
gagtacaccaaaaagtaatcataac

SEQ ID NO: 28620 - DNA, 25 bp, SARS Virus
agtacaccaaatagtaatcataaca

SEQ ID NO: 28621 - DNA, 25 bp, SARS Virus
gtacaccaaataataatcataacat

SEQ ID NO: 28622 - DNA, 25 bp, SARS Virus
tacaccaaatagaaatcataacatg

SEQ ID NO: 28623 - DNA, 25 bp, SARS Virus
acaccaaatagtaatcataacatgt

SEQ ID NO: 28624 - DNA, 25 bp, SARS Virus
caccaaatagtaatcataacatgtt

SEQ ID NO: 28625 - DNA, 25 bp, SARS Virus
accaaatagtaaacataacatgttt

SEQ ID NO: 28626 - DNA, 25 bp, SARS Virus
ccaaatagtaataataacatgttta

SEQ ID NO: 28627 - DNA, 25 bp, SARS Virus
caaatagtaatcataacatgtttac

SEQ ID NO: 28628 - DNA, 25 bp, SARS Virus
aaatagtaatcaaaacatgtttacc

SEQ ID NO: 28629 - DNA, 25 bp, SARS Virus
aatagtaatcataacatgtttaccg

SEQ ID NO: 28630 - DNA, 25 bp, SARS Virus
atagtaatcataacatgtttaccgt

SEQ ID NO: 28631 - DNA, 25 bp, SARS Virus
tagtaatcataaaatgtttaccgtg

SEQ ID NO: 28632 - DNA, 25 bp, SARS Virus
agtaatcataacatgtttaccgtgg

SEQ ID NO: 28633 - DNA, 25 bp, SARS Virus
gtaatcataacaagtttaccgtggg

SEQ ID NO: 28634 - DNA, 25 bp, SARS Virus
taatcataacatatttaccgtgggc

SEQ ID NO: 28635 - DNA, 25 bp, SARS Virus
aatcataacatgattaccgtgggca

SEQ ID NO: 28636 - DNA, 25 bp, SARS Virus
atcataacatgtataccgtgggcaa

SEQ ID NO: 28637 - DNA, 25 bp, SARS Virus
tcataacatgttaaccgtgggcaaa

SEQ ID NO: 28638 - DNA, 25 bp, SARS Virus
cataacatgtttaccgtgggcaaag

SEQ ID NO: 28639 - DNA, 25 bp, SARS Virus
ataacatgtttaacgtgggcaaaga

SEQ ID NO: 28640 - DNA, 25 bp, SARS Virus
taacatgtttacagtgggcaaagac

SEQ ID NO: 28641 - DNA, 25 bp, SARS Virus
aacatgtttaccatgggcaaagacg

SEQ ID NO: 28642 - DNA, 25 bp, SARS Virus
acatgtttaccgagggcaaagacgt

SEQ ID NO: 28643 - DNA, 25 bp, SARS Virus
catgtttaccgtaggcaaagacgtt

SEQ ID NO: 28644 - DNA, 25 bp, SARS Virus
atgtttaccgtgagcaaagacgtta

SEQ ID NO: 28645 - DNA, 25 bp, SARS Virus
tgtttaccgtggacaaagacgttac

SEQ ID NO: 28646 - DNA, 25 bp, SARS Virus
gtttaccgtgggaaaagacgttacc

SEQ ID NO: 28647 - DNA, 25 bp, SARS Virus
tttaccgtgggcaaagacgttacca

SEQ ID NO: 28648 - DNA, 25 bp, SARS Virus
ttaccgtgggcaaagacgttaccaa

SEQ ID NO: 28649 - DNA, 25 bp, SARS Virus
taccgtgggcaaagacgttaccaat

SEQ ID NO: 28650 - DNA, 25 bp, SARS Virus
accgtgggcaaaaacgttaccaatc

SEQ ID NO: 28651 - DNA, 25 bp, SARS Virus
ccgtgggcaaagacgttaccaatcc

SEQ ID NO: 28652 - DNA, 25 bp, SARS Virus
cgtgggcaaagaagttaccaatcct

SEQ ID NO: 28653 - DNA, 25 bp, SARS Virus
gtgggcaaagacattaccaatccta

SEQ ID NO: 28654 - DNA, 25 bp, SARS Virus
tgggcaaagacgataccaatcctac

SEQ ID NO: 28655 - DNA, 25 bp, SARS Virus
gggcaaagacgtaaccaatcctaca

SEQ ID NO: 28656 - DNA, 25 bp, SARS Virus
ggcaaagacgttaccaatcctacat

SEQ ID NO: 28657 - DNA, 25 bp, SARS Virus
gcaaagacgttaacaatcctacatg

SEQ ID NO: 28658 - DNA, 25 bp, SARS Virus
caaagacgttacaaatcctacatgt

SEQ ID NO: 28659 - DNA, 25 bp, SARS Virus
aaagacgttaccaatcctacatgta

SEQ ID NO: 28660 - DNA, 25 bp, SARS Virus
aagacgttaccaatcctacatgtag

SEQ ID NO: 28661 - DNA, 25 bp, SARS Virus
agacgttaccaaacctacatgtaga

SEQ ID NO: 28662 - DNA, 25 bp, SARS Virus
gacgttaccaatactacatgtagaa

SEQ ID NO: 28663 - DNA, 25 bp, SARS Virus
acgttaccaatcatacatgtagaag

SEQ ID NO: 28664 - DNA, 25 bp, SARS Virus
cgttaccaatccaacatgtagaaga

SEQ ID NO: 28665 - DNA, 25 bp, SARS Virus
gttaccaatcctacatgtagaagaa

SEQ ID NO: 28666 - DNA, 25 bp, SARS Virus
ttaccaatcctaaatgtagaagaaa

SEQ ID NO: 28667 - DNA, 25 bp, SARS Virus
taccaatcctacatgtagaagaaac

SEQ ID NO: 28668 - DNA, 25 bp, SARS Virus
accaatcctacaagtagaagaaacg

SEQ ID NO: 28669 - DNA, 25 bp, SARS Virus
ccaatcctacatatagaagaaacga

SEQ ID NO: 28670 - DNA, 25 bp, SARS Virus
caatcctacatgaagaagaaacgaa

SEQ ID NO: 28671 - DNA, 25 bp, SARS Virus
aatcctacatgtagaagaaacgaag

SEQ ID NO: 28672 - DNA, 25 bp, SARS Virus
atcctacatgtaaaagaaacgaaga

SEQ ID NO: 28673 - DNA, 25 bp, SARS Virus
tcctacatgtagaagaaacgaagaa

SEQ ID NO: 28674 - DNA, 25 bp, SARS Virus
cctacatgtagaagaaacgaagaaa

SEQ ID NO: 28675 - DNA, 25 bp, SARS Virus
ctacatgtagaaaaaacgaagaaag

SEQ ID NO: 28676 - DNA, 25 bp, SARS Virus
tacatgtagaagaaacgaagaaaga

SEQ ID NO: 28677 - DNA, 25 bp, SARS Virus
acatgtagaagaaacgaagaaagat

SEQ ID NO: 28678 - DNA, 25 bp, SARS Virus
catgtagaagaaacgaagaaagatg

SEQ ID NO: 28679 - DNA, 25 bp, SARS Virus
atgtagaagaaaagaagaaagatga

SEQ ID NO: 28680 - DNA, 25 bp, SARS Virus
tgtagaagaaacaaagaaagatgat

SEQ ID NO: 28681 - DNA, 25 bp, SARS Virus
gtagaagaaacgaagaaagatgatg

SEQ ID NO: 28682 - DNA, 25 bp, SARS Virus
tagaagaaacgaagaaagatgatgt

SEQ ID NO: 28683 - DNA, 25 bp, SARS Virus
agaagaaacgaaaaaagatgatgta

SEQ ID NO: 28684 - DNA, 25 bp, SARS Virus
gaagaaacgaagaaagatgatgtat

SEQ ID NO: 28685 - DNA, 25 bp, SARS Virus
aagaaacgaagaaagatgatgtata

SEQ ID NO: 28686 - DNA, 25 bp, SARS Virus
agaaacgaagaaagatgatgtatac

SEQ ID NO: 28687 - DNA, 25 bp, SARS Virus
gaaacgaagaaaaatgatgtatacc

SEQ ID NO: 28688 - DNA, 25 bp, SARS Virus
aaacgaagaaagatgatgtatacct

SEQ ID NO: 28689 - DNA, 25 bp, SARS Virus
aacgaagaaagaagatgtatacctt

SEQ ID NO: 28690 - DNA, 25 bp, SARS Virus
acgaagaaagataatgtataccttc

SEQ ID NO: 28691 - DNA, 25 bp, SARS Virus
cgaagaaagatgatgtataccttct

SEQ ID NO: 28692 - DNA, 25 bp, SARS Virus
gaagaaagatgaagtataccttctc

SEQ ID NO: 28693 - DNA, 25 bp, SARS Virus
aagaaagatgatatataccttctcg

SEQ ID NO: 28694 - DNA, 25 bp, SARS Virus
agaaagatgatgaataccttctcga

SEQ ID NO: 28695 - DNA, 25 bp, SARS Virus
gaaagatgatgtataccttctcgat

SEQ ID NO: 28696 - DNA, 25 bp, SARS Virus
aaagatgatgtaaaccttctcgata

SEQ ID NO: 28697 - DNA, 25 bp, SARS Virus
aagatgatgtataccttctcgatac

SEQ ID NO: 28698 - DNA, 25 bp, SARS Virus
agatgatgtataacttctcgataca

SEQ ID NO: 28699 - DNA, 25 bp, SARS Virus
gatgatgtatacattctcgatacaa

SEQ ID NO: 28700 - DNA, 25 bp, SARS Virus
atgatgtataccatctcgatacaag

SEQ ID NO: 28701 - DNA, 25 bp, SARS Virus
tgatgtatacctactcgatacaagt

SEQ ID NO: 28702 - DNA, 25 bp, SARS Virus
gatgtataccttatcgatacaagta

SEQ ID NO: 28703 - DNA, 25 bp, SARS Virus
atgtataccttcacgatacaagtat

SEQ ID NO: 28704 - DNA, 25 bp, SARS Virus
tgtataccttctagatacaagtata

SEQ ID NO: 28705 - DNA, 25 bp, SARS Virus
gtataccttctcaatacaagtatag

SEQ ID NO: 28706 - DNA, 25 bp, SARS Virus
tataccttctcgatacaagtatagt

SEQ ID NO: 28707 - DNA, 25 bp, SARS Virus
ataccttctcgaaacaagtatagta

SEQ ID NO: 28708 - DNA, 25 bp, SARS Virus
taccttctcgatacaagtatagtac

SEQ ID NO: 28709 - DNA, 25 bp, SARS Virus
accttctcgataaaagtatagtacc

SEQ ID NO: 28710 - DNA, 25 bp, SARS Virus
ccttctcgatacaagtatagtacct

SEQ ID NO: 28711 - DNA, 25 bp, SARS Virus
cttctcgatacaagtatagtaccta

SEQ ID NO: 28712 - DNA, 25 bp, SARS Virus
ttctcgatacaaatatagtacctac

SEQ ID NO: 28713 - DNA, 25 bp, SARS Virus
tctcgatacaagaatagtacctacc

SEQ ID NO: 28714 - DNA, 25 bp, SARS Virus
ctcgatacaagtatagtacctacca

SEQ ID NO: 28715 - DNA, 25 bp, SARS Virus
tcgatacaagtaaagtacctaccaa

SEQ ID NO: 28716 - DNA, 25 bp, SARS Virus
cgatacaagtatagtacctaccaac

SEQ ID NO: 28717 - DNA, 25 bp, SARS Virus
gatacaagtataatacctaccaacg

SEQ ID NO: 28718 - DNA, 25 bp, SARS Virus
atacaagtatagaacctaccaacgt

SEQ ID NO: 28719 - DNA, 25 bp, SARS Virus
tacaagtatagtacctaccaacgtg

SEQ ID NO: 28720 - DNA, 25 bp, SARS Virus
acaagtatagtaactaccaacgtgg

SEQ ID NO: 28721 - DNA, 25 bp, SARS Virus
caagtatagtacataccaacgtgga

SEQ ID NO: 28722 - DNA, 25 bp, SARS Virus
aagtatagtaccaaccaacgtggag

SEQ ID NO: 28723 - DNA, 25 bp, SARS Virus
agtatagtacctaccaacgtggaga

SEQ ID NO: 28724 - DNA, 25 bp, SARS Virus
gtatagtacctaacaacgtggagaa

SEQ ID NO: 28725 - DNA, 25 bp, SARS Virus
tatagtacctacaaacgtggagaag

SEQ ID NO: 28726 - DNA, 25 bp, SARS Virus
atagtacctaccaacgtggagaagc

SEQ ID NO: 28727 - DNA, 25 bp, SARS Virus
tagtacctaccaacgtggagaagct

SEQ ID NO: 28728 - DNA, 25 bp, SARS Virus
agtacctaccaaagtggagaagctg

SEQ ID NO: 28729 - DNA, 25 bp, SARS Virus
gtacctaccaacatggagaagctga

SEQ ID NO: 28730 - DNA, 25 bp, SARS Virus
tacctaccaacgaggagaagctgaa

SEQ ID NO: 28731 - DNA, 25 bp, SARS Virus
acctaccaacgtagagaagctgaac

SEQ ID NO: 28732 - DNA, 25 bp, SARS Virus
cctaccaacgtgaagaagctgaacg

SEQ ID NO: 28733 - DNA, 25 bp, SARS Virus
ctaccaacgtggagaagctgaacgt

SEQ ID NO: 28734 - DNA, 25 bp, SARS Virus
taccaacgtggaaaagctgaacgta

SEQ ID NO: 28735 - DNA, 25 bp, SARS Virus
accaacgtggagaagctgaacgtac

SEQ ID NO: 28736 - DNA, 25 bp, SARS Virus
ccaacgtggagaagctgaacgtact

SEQ ID NO: 28737 - DNA, 25 bp, SARS Virus
caacgtggagaaactgaacgtacta

SEQ ID NO: 28738 - DNA, 25 bp, SARS Virus
aacgtggagaagatgaacgtactac

SEQ ID NO: 28739 - DNA, 25 bp, SARS Virus
acgtggagaagcagaacgtactaca

SEQ ID NO: 28740 - DNA, 25 bp, SARS Virus
cgtggagaagctaaacgtactacac

SEQ ID NO: 28741 - DNA, 25 bp, SARS Virus
gtggagaagctgaacgtactacacg

SEQ ID NO: 28742 - DNA, 25 bp, SARS Virus
tggagaagctgaacgtactacacga

SEQ ID NO: 28743 - DNA, 25 bp, SARS Virus
ggagaagctgaaagtactacacgat

SEQ ID NO: 28744 - DNA, 25 bp, SARS Virus
gagaagctgaacatactacacgata

SEQ ID NO: 28745 - DNA, 25 bp, SARS Virus
agaagctgaacgaactacacgatat

SEQ ID NO: 28746 - DNA, 25 bp, SARS Virus
gaagctgaacgtactacacgatatt

SEQ ID NO: 28747 - DNA, 25 bp, SARS Virus
aagctgaacgtaatacacgatattc

SEQ ID NO: 28748 - DNA, 25 bp, SARS Virus
agctgaacgtacaacacgatattcg

SEQ ID NO: 28749 - DNA, 25 bp, SARS Virus
gctgaacgtactacacgatattcgc

SEQ ID NO: 28750 - DNA, 25 bp, SARS Virus
ctgaacgtactaaacgatattcgcg

SEQ ID NO: 28751 - DNA, 25 bp, SARS Virus
tgaacgtactacacgatattcgcgt

SEQ ID NO: 28752 - DNA, 25 bp, SARS Virus
gaacgtactacaagatattcgcgtt

SEQ ID NO: 28753 - DNA, 25 bp, SARS Virus
aacgtactacacaatattcgcgtta

SEQ ID NO: 28754 - DNA, 25 bp, SARS Virus
acgtactacacgatattcgcgttag

SEQ ID NO: 28755 - DNA, 25 bp, SARS Virus
cgtactacacgaaattcgcgttagc

SEQ ID NO: 28756 - DNA, 25 bp, SARS Virus
gtactacacgatattcgcgttagca

SEQ ID NO: 28757 - DNA, 25 bp, SARS Virus
tactacacgataatcgcgttagcac

SEQ ID NO: 28758 - DNA, 25 bp, SARS Virus
actacacgatatacgcgttagcacg

SEQ ID NO: 28759 - DNA, 25 bp, SARS Virus
ctacacgatattagcgttagcacgg

SEQ ID NO: 28760 - DNA, 25 bp, SARS Virus
tacacgatattcacgttagcacggt

SEQ ID NO: 28761 - DNA, 25 bp, SARS Virus
acacgatattcgagttagcacggtg

SEQ ID NO: 28762 - DNA, 25 bp, SARS Virus
cacgatattcgcattagcacggtgt

SEQ ID NO: 28763 - DNA, 25 bp, SARS Virus
acgatattcgcgatagcacggtgtg

SEQ ID NO: 28764 - DNA, 25 bp, SARS Virus
cgatattcgcgtaagcacggtgtgc

SEQ ID NO: 28765 - DNA, 25 bp, SARS Virus
gatattcgcgttagcacggtgtgcg

SEQ ID NO: 28766 - DNA, 25 bp, SARS Virus
atattcgcgttaacacggtgtgcgc

SEQ ID NO: 28767 - DNA, 25 bp, SARS Virus
tattcgcgttagaacggtgtgcgca

SEQ ID NO: 28768 - DNA, 25 bp, SARS Virus
attcgcgttagcacggtgtgcgcaa

SEQ ID NO: 28769 - DNA, 25 bp, SARS Virus
ttcgcgttagcaaggtgtgcgcaac

SEQ ID NO: 28770 - DNA, 25 bp, SARS Virus
tcgcgttagcacagtgtgcgcaact

SEQ ID NO: 28771 - DNA, 25 bp, SARS Virus
cgcgttagcacgatgtgcgcaactc

SEQ ID NO: 28772 - DNA, 25 bp, SARS Virus
gcgttagcacggagtgcgcaactca

SEQ ID NO: 28773 - DNA, 25 bp, SARS Virus
cgttagcacggtatgcgcaactcac

SEQ ID NO: 28774 - DNA, 25 bp, SARS Virus
gttagcacggtgagcgcaactcaca

SEQ ID NO: 28775 - DNA, 25 bp, SARS Virus
ttagcacggtgtacgcaactcacat

SEQ ID NO: 28776 - DNA, 25 bp, SARS Virus
tagcacggtgtgagcaactcacatg

SEQ ID NO: 28777 - DNA, 25 bp, SARS Virus
agcacggtgtgcacaactcacatgt

SEQ ID NO: 28778 - DNA, 25 bp, SARS Virus
gcacggtgtgcgaaactcacatgtt

SEQ ID NO: 28779 - DNA, 25 bp, SARS Virus
cacggtgtgcgcaactcacatgttg

SEQ ID NO: 28780 - DNA, 25 bp, SARS Virus
acggtgtgcgcaactcacatgttga

SEQ ID NO: 28781 - DNA, 25 bp, SARS Virus
cggtgtgcgcaaatcacatgttgat

SEQ ID NO: 28782 - DNA, 25 bp, SARS Virus
ggtgtgcgcaacacacatgttgata

SEQ ID NO: 28783 - DNA, 25 bp, SARS Virus
gtgtgcgcaactaacatgttgataa

SEQ ID NO: 28784 - DNA, 25 bp, SARS Virus
tgtgcgcaactcacatgttgataac

SEQ ID NO: 28785 - DNA, 25 bp, SARS Virus
gtgcgcaactcaaatgttgataaca

SEQ ID NO: 28786 - DNA, 25 bp, SARS Virus
tgcgcaactcacatgttgataacaa

SEQ ID NO: 28787 - DNA, 25 bp, SARS Virus
gcgcaactcacaagttgataacaat

SEQ ID NO: 28788 - DNA, 25 bp, SARS Virus
cgcaactcacatattgataacaatt

SEQ ID NO: 28789 - DNA, 25 bp, SARS Virus
gcaactcacatgatgataacaatta

SEQ ID NO: 28790 - DNA, 25 bp, SARS Virus
caactcacatgtagataacaattac

SEQ ID NO: 28791 - DNA, 25 bp, SARS Virus
aactcacatgttaataacaattacc

SEQ ID NO: 28792 - DNA, 25 bp, SARS Virus
actcacatgttgataacaattaccg

SEQ ID NO: 28793 - DNA, 25 bp, SARS Virus
ctcacatgttgaaaacaattaccgt

SEQ ID NO: 28794 - DNA, 25 bp, SARS Virus
tcacatgttgataacaattaccgta

SEQ ID NO: 28795 - DNA, 25 bp, SARS Virus
cacatgttgataacaattaccgtac

SEQ ID NO: 28796 - DNA, 25 bp, SARS Virus
acatgttgataaaaattaccgtact

SEQ ID NO: 28797 - DNA, 25 bp, SARS Virus
catgttgataacaattaccgtactt

SEQ ID NO: 28798 - DNA, 25 bp, SARS Virus
atgttgataacaattaccgtacttc

SEQ ID NO: 28799 - DNA, 25 bp, SARS Virus
tgttgataacaaataccgtacttct

SEQ ID NO: 28800 - DNA, 25 bp, SARS Virus
gttgataacaataaccgtacttctc

SEQ ID NO: 28801 - DNA, 25 bp, SARS Virus
ttgataacaattaccgtacttctct

SEQ ID NO: 28802 - DNA, 25 bp, SARS Virus
tgataacaattaacgtacttctcta

SEQ ID NO: 28803 - DNA, 25 bp, SARS Virus
gataacaattacagtacttctctag

SEQ ID NO: 28804 - DNA, 25 bp, SARS Virus
ataacaattaccatacttctctaga

SEQ ID NO: 28805 - DNA, 25 bp, SARS Virus
taacaattaccgaacttctctagaa

SEQ ID NO: 28806 - DNA, 25 bp, SARS Virus
aacaattaccgtacttctctagaaa

SEQ ID NO: 28807 - DNA, 25 bp, SARS Virus
acaattaccgtaattctctagaaag

SEQ ID NO: 28808 - DNA, 25 bp, SARS Virus
caattaccgtacatctctagaaaga

SEQ ID NO: 28809 - DNA, 25 bp, SARS Virus
aattaccgtactactctagaaagat

SEQ ID NO: 28810 - DNA, 25 bp, SARS Virus
attaccgtacttatctagaaagata

SEQ ID NO: 28811 - DNA, 25 bp, SARS Virus
ttaccgtacttcactagaaagatac

SEQ ID NO: 28812 - DNA, 25 bp, SARS Virus
taccgtacttctatagaaagataca

SEQ ID NO: 28813 - DNA, 25 bp, SARS Virus
accgtacttctcaagaaagatacag

SEQ ID NO: 28814 - DNA, 25 bp, SARS Virus
ccgtacttctctagaaagatacaga

SEQ ID NO: 28815 - DNA, 25 bp, SARS Virus
cgtacttctctaaaaagatacagat

SEQ ID NO: 28816 - DNA, 25 bp, SARS Virus
gtacttctctagaaagatacagata

SEQ ID NO: 28817 - DNA, 25 bp, SARS Virus
tacttctctagaaagatacagatac

SEQ ID NO: 28818 - DNA, 25 bp, SARS Virus
acttctctagaaagatacagatacg

SEQ ID NO: 28819 - DNA, 25 bp, SARS Virus
cttctctagaaaaatacagatacgt

SEQ ID NO: 28820 - DNA, 25 bp, SARS Virus
ttctctagaaagatacagatacgtt

SEQ ID NO: 28821 - DNA, 25 bp, SARS Virus
tctctagaaagaaacagatacgttt

SEQ ID NO: 28822 - DNA, 25 bp, SARS Virus
ctctagaaagatacagatacgttta

SEQ ID NO: 28823 - DNA, 25 bp, SARS Virus
tctagaaagataaagatacgtttac

SEQ ID NO: 28824 - DNA, 25 bp, SARS Virus
ctagaaagatacagatacgtttacc

SEQ ID NO: 28825 - DNA, 25 bp, SARS Virus
tagaaagatacaaatacgtttacct

SEQ ID NO: 28826 - DNA, 25 bp, SARS Virus
agaaagatacagatacgtttacctc

SEQ ID NO: 28827 - DNA, 25 bp, SARS Virus
gaaagatacagaaacgtttacctcc

SEQ ID NO: 28828 - DNA, 25 bp, SARS Virus
aaagatacagatacgtttacctccg

SEQ ID NO: 28829 - DNA, 25 bp, SARS Virus
aagatacagataagtttacctccgg

SEQ ID NO: 28830 - DNA, 25 bp, SARS Virus
agatacagatacatttacctccggc

SEQ ID NO: 28831 - DNA, 25 bp, SARS Virus
gatacagatacgattacctccggca

SEQ ID NO: 28832 - DNA, 25 bp, SARS Virus
atacagatacgtatacctccggcac

SEQ ID NO: 28833 - DNA, 25 bp, SARS Virus
tacagatacgttaacctccggcacc

SEQ ID NO: 28834 - DNA, 25 bp, SARS Virus
acagatacgtttacctccggcaccg

SEQ ID NO: 28835 - DNA, 25 bp, SARS Virus
cagatacgtttaactccggcaccga

SEQ ID NO: 28836 - DNA, 25 bp, SARS Virus
agatacgtttacatccggcaccgaa

SEQ ID NO: 28837 - DNA, 25 bp, SARS Virus
gatacgtttaccaccggcaccgaag

SEQ ID NO: 28838 - DNA, 25 bp, SARS Virus
atacgtttacctacggcaccgaaga

SEQ ID NO: 28839 - DNA, 25 bp, SARS Virus
tacgtttacctcaggcaccgaagac

SEQ ID NO: 28840 - DNA, 25 bp, SARS Virus
acgtttacctccagcaccgaagacg

SEQ ID NO: 28841 - DNA, 25 bp, SARS Virus
cgtttacctccgacaccgaagacgt

SEQ ID NO: 28842 - DNA, 25 bp, SARS Virus
gtttacctccggaaccgaagacgtt

SEQ ID NO: 28843 - DNA, 25 bp, SARS Virus
tttacctccggcaccgaagacgttc

SEQ ID NO: 28844 - DNA, 25 bp, SARS Virus
ttacctccggcaacgaagacgttct

SEQ ID NO: 28845 - DNA, 25 bp, SARS Virus
tacctccggcacagaagacgttctg

SEQ ID NO: 28846 - DNA, 25 bp, SARS Virus
acctccggcaccaaagacgttctga

SEQ ID NO: 28847 - DNA, 25 bp, SARS Virus
cctccggcaccgaagacgttctgag

SEQ ID NO: 28848 - DNA, 25 bp, SARS Virus
ctccggcaccgaagacgttctgagt

SEQ ID NO: 28849 - DNA, 25 bp, SARS Virus
tccggcaccgaaaacgttctgagtg

SEQ ID NO: 28850 - DNA, 25 bp, SARS Virus
ccggcaccgaagacgttctgagtgt

SEQ ID NO: 28851 - DNA, 25 bp, SARS Virus
cggcaccgaagaagttctgagtgtt

SEQ ID NO: 28852 - DNA, 25 bp, SARS Virus
ggcaccgaagacattctgagtgtta

SEQ ID NO: 28853 - DNA, 25 bp, SARS Virus
gcaccgaagacgatctgagtgttaa

SEQ ID NO: 28854 - DNA, 25 bp, SARS Virus
caccgaagacgtactgagtgttaac

SEQ ID NO: 28855 - DNA, 25 bp, SARS Virus
accgaagacgttatgagtgttaacc

SEQ ID NO: 28856 - DNA, 25 bp, SARS Virus
ccgaagacgttcagagtgttaacct

SEQ ID NO: 28857 - DNA, 25 bp, SARS Virus
cgaagacgttctaagtgttaacctt

SEQ ID NO: 28858 - DNA, 25 bp, SARS Virus
gaagacgttctgagtgttaacctta

SEQ ID NO: 28859 - DNA, 25 bp, SARS Virus
aagacgttctgaatgttaaccttaa

SEQ ID NO: 28860 - DNA, 25 bp, SARS Virus
agacgttctgagagttaaccttaac

SEQ ID NO: 28861 - DNA, 25 bp, SARS Virus
gacgttctgagtattaaccttaaca

SEQ ID NO: 28862 - DNA, 25 bp, SARS Virus
acgttctgagtgataaccttaacag

SEQ ID NO: 28863 - DNA, 25 bp, SARS Virus
cgttctgagtgtaaaccttaacaga

SEQ ID NO: 28864 - DNA, 25 bp, SARS Virus
gttctgagtgttaaccttaacagag

SEQ ID NO: 28865 - DNA, 25 bp, SARS Virus
ttctgagtgttaaccttaacagagt

SEQ ID NO: 28866 - DNA, 25 bp, SARS Virus
tctgagtgttaaacttaacagagtt

SEQ ID NO: 28867 - DNA, 25 bp, SARS Virus
ctgagtgttaacattaacagagtta

SEQ ID NO: 28868 - DNA, 25 bp, SARS Virus
tgagtgttaaccataacagagttaa

SEQ ID NO: 28869 - DNA, 25 bp, SARS Virus
gagtgttaacctaaacagagttaac

SEQ ID NO: 28870 - DNA, 25 bp, SARS Virus
agtgttaaccttaacagagttaaca

SEQ ID NO: 28871 - DNA, 25 bp, SARS Virus
gtgttaaccttaacagagttaacac

SEQ ID NO: 28872 - DNA, 25 bp, SARS Virus
tgttaaccttaaaagagttaacact

SEQ ID NO: 28873 - DNA, 25 bp, SARS Virus
gttaaccttaacagagttaacactg

SEQ ID NO: 28874 - DNA, 25 bp, SARS Virus
ttaaccttaacaaagttaacactgt

SEQ ID NO: 28875 - DNA, 25 bp, SARS Virus
taaccttaacagagttaacactgtg

SEQ ID NO: 28876 - DNA, 25 bp, SARS Virus
aaccttaacagaattaacactgtgt

SEQ ID NO: 28877 - DNA, 25 bp, SARS Virus
accttaacagagataacactgtgta

SEQ ID NO: 28878 - DNA, 25 bp, SARS Virus
ccttaacagagtaaacactgtgtaa

SEQ ID NO: 28879 - DNA, 25 bp, SARS Virus
cttaacagagttaacactgtgtaaa

SEQ ID NO: 28880 - DNA, 25 bp, SARS Virus
ttaacagagttaacactgtgtaaaa

SEQ ID NO: 28881 - DNA, 25 bp, SARS Virus
taacagagttaaaactgtgtaaaac

SEQ ID NO: 28882 - DNA, 25 bp, SARS Virus
aacagagttaacactgtgtaaaacg

SEQ ID NO: 28883 - DNA, 25 bp, SARS Virus
acagagttaacaatgtgtaaaacgt

SEQ ID NO: 28884 - DNA, 25 bp, SARS Virus
cagagttaacacagtgtaaaacgtg

SEQ ID NO: 28885 - DNA, 25 bp, SARS Virus
agagttaacactatgtaaaacgtga

SEQ ID NO: 28886 - DNA, 25 bp, SARS Virus
gagttaacactgagtaaaacgtgac

SEQ ID NO: 28887 - DNA, 25 bp, SARS Virus
agttaacactgtataaaacgtgacc

SEQ ID NO: 28888 - DNA, 25 bp, SARS Virus
gttaacactgtgaaaaacgtgacca

SEQ ID NO: 28889 - DNA, 25 bp, SARS Virus
ttaacactgtgtaaaacgtgaccat

SEQ ID NO: 28890 - DNA, 25 bp, SARS Virus
taacactgtgtaaaacgtgaccatc

SEQ ID NO: 28891 - DNA, 25 bp, SARS Virus
aacactgtgtaaaacgtgaccatca

SEQ ID NO: 28892 - DNA, 25 bp, SARS Virus
acactgtgtaaaacgtgaccatcat

SEQ ID NO: 28893 - DNA, 25 bp, SARS Virus
cactgtgtaaaaagtgaccatcatg

SEQ ID NO: 28894 - DNA, 25 bp, SARS Virus
actgtgtaaaacatgaccatcatgt

SEQ ID NO: 28895 - DNA, 25 bp, SARS Virus
ctgtgtaaaacgagaccatcatgta

SEQ ID NO: 28896 - DNA, 25 bp, SARS Virus
tgtgtaaaacgtaaccatcatgtaa

SEQ ID NO: 28897 - DNA, 25 bp, SARS Virus
gtgtaaaacgtgaccatcatgtaag

SEQ ID NO: 28898 - DNA, 25 bp, SARS Virus
tgtaaaacgtgaacatcatgtaagt

SEQ ID NO: 28899 - DNA, 25 bp, SARS Virus
gtaaaacgtgacaatcatgtaagta

SEQ ID NO: 28900 - DNA, 25 bp, SARS Virus
taaaacgtgaccatcatgtaagtaa

SEQ ID NO: 28901 - DNA, 25 bp, SARS Virus
aaaacgtgaccaacatgtaagtaat

SEQ ID NO: 28902 - DNA, 25 bp, SARS Virus
aaacgtgaccataatgtaagtaatc

SEQ ID NO: 28903 - DNA, 25 bp, SARS Virus
aacgtgaccatcatgtaagtaatca

SEQ ID NO: 28904 - DNA, 25 bp, SARS Virus
acgtgaccatcaagtaagtaatcac

SEQ ID NO: 28905 - DNA, 25 bp, SARS Virus
cgtgaccatcatataagtaatcact

SEQ ID NO: 28906 - DNA, 25 bp, SARS Virus
gtgaccatcatgaaagtaatcacta

SEQ ID NO: 28907 - DNA, 25 bp, SARS Virus
tgaccatcatgtaagtaatcactac

SEQ ID NO: 28908 - DNA, 25 bp, SARS Virus
gaccatcatgtaagtaatcactact

SEQ ID NO: 28909 - DNA, 25 bp, SARS Virus
accatcatgtaaataatcactactt

SEQ ID NO: 28910 - DNA, 25 bp, SARS Virus
ccatcatgtaagaaatcactacttc

SEQ ID NO: 28911 - DNA, 25 bp, SARS Virus
catcatgtaagtaatcactacttca

SEQ ID NO: 28912 - DNA, 25 bp, SARS Virus
atcatgtaagtaatcactacttcaa

SEQ ID NO: 28913 - DNA, 25 bp, SARS Virus
tcatgtaagtaaacactacttcaac

SEQ ID NO: 28914 - DNA, 25 bp, SARS Virus
catgtaagtaataactacttcaacg

SEQ ID NO: 28915 - DNA, 25 bp, SARS Virus
atgtaagtaatcactacttcaacga

SEQ ID NO: 28916 - DNA, 25 bp, SARS Virus
tgtaagtaatcaatacttcaacgag

SEQ ID NO: 28917 - DNA, 25 bp, SARS Virus
gtaagtaatcacaacttcaacgagc

SEQ ID NO: 28918 - DNA, 25 bp, SARS Virus
taagtaatcactacttcaacgagca

SEQ ID NO: 28919 - DNA, 25 bp, SARS Virus
aagtaatcactaattcaacgagcac

SEQ ID NO: 28920 - DNA, 25 bp, SARS Virus
agtaatcactacatcaacgagcact

SEQ ID NO: 28921 - DNA, 25 bp, SARS Virus
ggtcgagaacttcggtaagtccact

SEQ ID NO: 28922 - DNA, 25 bp, SARS Virus
gtcgagaactttcgtaagtccactg

SEQ ID NO: 28923 - DNA, 25 bp, SARS Virus
tcgagaactttgctaagtccactgc

SEQ ID NO: 28924 - DNA, 25 bp, SARS Virus
cgagaactttggcaagtccactgct

SEQ ID NO: 28925 - DNA, 25 bp, SARS Virus
gagaactttggtcagtccactgcta

SEQ ID NO: 28926 - DNA, 25 bp, SARS Virus
agaactttggtacgtccactgctaa

SEQ ID NO: 28927 - DNA, 25 bp, SARS Virus
gaactttggtaactccactgctaaa

SEQ ID NO: 28928 - DNA, 25 bp, SARS Virus
aactttggtaagcccactgctaaag

SEQ ID NO: 28929 - DNA, 25 bp, SARS Virus
actttggtaagtccactgctaaagt

SEQ ID NO: 28930 - DNA, 25 bp, SARS Virus
ctttggtaagtccactgctaaagta

SEQ ID NO: 28931 - DNA, 25 bp, SARS Virus
tttggtaagtcccctgctaaagtag

SEQ ID NO: 28932 - DNA, 25 bp, SARS Virus
ttggtaagtccactgctaaagtagc

SEQ ID NO: 28933 - DNA, 25 bp, SARS Virus
tggtaagtccaccgctaaagtagca

SEQ ID NO: 28934 - DNA, 25 bp, SARS Virus
ggtaagtccactcctaaagtagcat

SEQ ID NO: 28935 - DNA, 25 bp, SARS Virus
gtaagtccactgctaaagtagcatg

SEQ ID NO: 28936 - DNA, 25 bp, SARS Virus
taagtccactgccaaagtagcatgt

SEQ ID NO: 28937 - DNA, 25 bp, SARS Virus
aagtccactgctcaagtagcatgtt

SEQ ID NO: 28938 - DNA, 25 bp, SARS Virus
agtccactgctacagtagcatgttc

SEQ ID NO: 28939 - DNA, 25 bp, SARS Virus
gtccactgctaacgtagcatgttcg

SEQ ID NO: 28940 - DNA, 25 bp, SARS Virus
tccactgctaaactagcatgttcga

SEQ ID NO: 28941 - DNA, 25 bp, SARS Virus
ccactgctaaagcagcatgttcgat

SEQ ID NO: 28942 - DNA, 25 bp, SARS Virus
cactgctaaagtcgcatgttcgatc

SEQ ID NO: 28943 - DNA, 25 bp, SARS Virus
actgctaaagtaccatgttcgatct

SEQ ID NO: 28944 - DNA, 25 bp, SARS Virus
ctgctaaagtagcatgttcgatctg

SEQ ID NO: 28945 - DNA, 25 bp, SARS Virus
tgctaaagtagcctgttcgatctga

SEQ ID NO: 28946 - DNA, 25 bp, SARS Virus
gctaaagtagcacgttcgatctgaa

SEQ ID NO: 28947 - DNA, 25 bp, SARS Virus
ctaaagtagcatcttcgatctgaac

SEQ ID NO: 28948 - DNA, 25 bp, SARS Virus
taaagtagcatgctcgatctgaact

SEQ ID NO: 28949 - DNA, 25 bp, SARS Virus
aaagtagcatgtccgatctgaactg

SEQ ID NO: 28950 - DNA, 25 bp, SARS Virus
aagtagcatgttcgatctgaactgt

SEQ ID NO: 28951 - DNA, 25 bp, SARS Virus
agtagcatgttccatctgaactgtt

SEQ ID NO: 28952 - DNA, 25 bp, SARS Virus
gtagcatgttcgctctgaactgtta

SEQ ID NO: 28953 - DNA, 25 bp, SARS Virus
tagcatgttcgacctgaactgttaa

SEQ ID NO: 28954 - DNA, 25 bp, SARS Virus
agcatgttcgatctgaactgttaaa

SEQ ID NO: 28955 - DNA, 25 bp, SARS Virus
gcatgttcgatccgaactgttaaaa

SEQ ID NO: 28956 - DNA, 25 bp, SARS Virus
catgttcgatctcaactgttaaaat

SEQ ID NO: 28957 - DNA, 25 bp, SARS Virus
atgttcgatctgcactgttaaaatc

SEQ ID NO: 28958 - DNA, 25 bp, SARS Virus
tgttcgatctgacctgttaaaatcc

SEQ ID NO: 28959 - DNA, 25 bp, SARS Virus
gttcgatctgaactgttaaaatcca

SEQ ID NO: 28960 - DNA, 25 bp, SARS Virus
ttcgatctgaaccgttaaaatccag

SEQ ID NO: 28961 - DNA, 25 bp, SARS Virus
tcgatctgaactcttaaaatccaga

SEQ ID NO: 28962 - DNA, 25 bp, SARS Virus
cgatctgaactgctaaaatccagac

SEQ ID NO: 28963 - DNA, 25 bp, SARS Virus
gatctgaactgtcaaaatccagacc

SEQ ID NO: 28964 - DNA, 25 bp, SARS Virus
atctgaactgttcaaatccagaccg

SEQ ID NO: 28965 - DNA, 25 bp, SARS Virus
tctgaactgttacaatccagaccgg

SEQ ID NO: 28966 - DNA, 25 bp, SARS Virus
ctgaactgttaacatccagaccggc

SEQ ID NO: 28967 - DNA, 25 bp, SARS Virus
tgaactgttaaactccagaccggcg

SEQ ID NO: 28968 - DNA, 25 bp, SARS Virus
gaactgttaaaacccagaccggcga

SEQ ID NO: 28969 - DNA, 25 bp, SARS Virus
aactgttaaaatccagaccggcgac

SEQ ID NO: 28970 - DNA, 25 bp, SARS Virus
actgttaaaatccagaccggcgact

SEQ ID NO: 28971 - DNA, 25 bp, SARS Virus
ctgttaaaatcccgaccggcgactc

SEQ ID NO: 28972 - DNA, 25 bp, SARS Virus
tgttaaaatccacaccggcgactca

SEQ ID NO: 28973 - DNA, 25 bp, SARS Virus
gttaaaatccagcccggcgactcac

SEQ ID NO: 28974 - DNA, 25 bp, SARS Virus
ttaaaatccagaccggcgactcacc

SEQ ID NO: 28975 - DNA, 25 bp, SARS Virus
taaaatccagaccggcgactcaccc

SEQ ID NO: 28976 - DNA, 25 bp, SARS Virus
aaaatccagacccgcgactcaccca

SEQ ID NO: 28977 - DNA, 25 bp, SARS Virus
aaatccagaccgccgactcacccaa

SEQ ID NO: 28978 - DNA, 25 bp, SARS Virus
aatccagaccggcgactcacccaaa

SEQ ID NO: 28979 - DNA, 25 bp, SARS Virus
atccagaccggccactcacccaaaa

SEQ ID NO: 28980 - DNA, 25 bp, SARS Virus
tccagaccggcgcctcacccaaaac

SEQ ID NO: 28981 - DNA, 25 bp, SARS Virus
ccagaccggcgactcacccaaaacc

SEQ ID NO: 28982 - DNA, 25 bp, SARS Virus
cagaccggcgacccacccaaaaccg

SEQ ID NO: 28983 - DNA, 25 bp, SARS Virus
agaccggcgactcacccaaaaccgt

SEQ ID NO: 28984 - DNA, 25 bp, SARS Virus
gaccggcgactcccccaaaaccgta

SEQ ID NO: 28985 - DNA, 25 bp, SARS Virus
accggcgactcacccaaaaccgtat

SEQ ID NO: 28986 - DNA, 25 bp, SARS Virus
ccggcgactcacccaaaaccgtata

SEQ ID NO: 28987 - DNA, 25 bp, SARS Virus
cggcgactcacccaaaaccgtatat

SEQ ID NO: 28988 - DNA, 25 bp, SARS Virus
ggcgactcaccccaaaccgtatata

SEQ ID NO: 28989 - DNA, 25 bp, SARS Virus
gcgactcacccacaaccgtatatac

SEQ ID NO: 28990 - DNA, 25 bp, SARS Virus
cgactcacccaacaccgtatataca

SEQ ID NO: 28991 - DNA, 25 bp, SARS Virus
gactcacccaaacccgtatatacaa

SEQ ID NO: 28992 - DNA, 25 bp, SARS Virus
actcacccaaaaccgtatatacaac

SEQ ID NO: 28993 - DNA, 25 bp, SARS Virus
ctcacccaaaaccgtatatacaaca

SEQ ID NO: 28994 - DNA, 25 bp, SARS Virus
tcacccaaaaccctatatacaacaa

SEQ ID NO: 28995 - DNA, 25 bp, SARS Virus
cacccaaaaccgcatatacaacaag

SEQ ID NO: 28996 - DNA, 25 bp, SARS Virus
acccaaaaccgtctatacaacaagt

SEQ ID NO: 28997 - DNA, 25 bp, SARS Virus
cccaaaaccgtacatacaacaagtg

SEQ ID NO: 28998 - DNA, 25 bp, SARS Virus
ccaaaaccgtatctacaacaagtgt

SEQ ID NO: 28999 - DNA, 25 bp, SARS Virus
caaaaccgtatacacaacaagtgtt

SEQ ID NO: 29000 - DNA, 25 bp, SARS Virus
aaaaccgtatatccaacaagtgttt

SEQ ID NO: 29001 - DNA, 25 bp, SARS Virus
aaaccgtatatacaacaagtgtttt

SEQ ID NO: 29002 - DNA, 25 bp, SARS Virus
aaccgtatataccacaagtgtttta

SEQ ID NO: 29003 - DNA, 25 bp, SARS Virus
accgtatatacaccaagtgttttaa

SEQ ID NO: 29004 - DNA, 25 bp, SARS Virus
ccgtatatacaacaagtgttttaag

SEQ ID NO: 29005 - DNA, 25 bp, SARS Virus
cgtatatacaaccagtgttttaaga

SEQ ID NO: 29006 - DNA, 25 bp, SARS Virus
gtatatacaacacgtgttttaagaa

SEQ ID NO: 29007 - DNA, 25 bp, SARS Virus
tatatacaacaactgttttaagaaa

SEQ ID NO: 29008 - DNA, 25 bp, SARS Virus
atatacaacaagcgttttaagaaaa

SEQ ID NO: 29009 - DNA, 25 bp, SARS Virus
tatacaacaagtcttttaagaaaat

SEQ ID NO: 29010 - DNA, 25 bp, SARS Virus
atacaacaagtgctttaagaaaata

SEQ ID NO: 29011 - DNA, 25 bp, SARS Virus
tacaacaagtgtcttaagaaaataa

SEQ ID NO: 29012 - DNA, 25 bp, SARS Virus
acaacaagtgttctaagaaaataaa

SEQ ID NO: 29013 - DNA, 25 bp, SARS Virus
caacaagtgtttcaagaaaataaat

SEQ ID NO: 29014 - DNA, 25 bp, SARS Virus
aacaagtgttttcagaaaataaata

SEQ ID NO: 29015 - DNA, 25 bp, SARS Virus
acaagtgttttacgaaaataaataa

SEQ ID NO: 29016 - DNA, 25 bp, SARS Virus
caagtgttttaacaaaataaataat

SEQ ID NO: 29017 - DNA, 25 bp, SARS Virus
aagtgttttaagcaaataaataatc

SEQ ID NO: 29018 - DNA, 25 bp, SARS Virus
agtgttttaagacaataaataatcc

SEQ ID NO: 29019 - DNA, 25 bp, SARS Virus
gtgttttaagaacataaataatcca

SEQ ID NO: 29020 - DNA, 25 bp, SARS Virus
tgttttaagaaactaaataatccag

SEQ ID NO: 29021 - DNA, 25 bp, SARS Virus
gttttaagaaaacaaataatccaga

SEQ ID NO: 29022 - DNA, 25 bp, SARS Virus
ttttaagaaaatcaataatccagaa

SEQ ID NO: 29023 - DNA, 25 bp, SARS Virus
tttaagaaaatacataatccagaaa

SEQ ID NO: 29024 - DNA, 25 bp, SARS Virus
ttaagaaaataactaatccagaaag

SEQ ID NO: 29025 - DNA, 25 bp, SARS Virus
taagaaaataaacaatccagaaagt

SEQ ID NO: 29026 - DNA, 25 bp, SARS Virus
aagaaaataaatcatccagaaagtc

SEQ ID NO: 29027 - DNA, 25 bp, SARS Virus
agaaaataaatactccagaaagtcg

SEQ ID NO: 29028 - DNA, 25 bp, SARS Virus
gaaaataaataacccagaaagtcga

SEQ ID NO: 29029 - DNA, 25 bp, SARS Virus
aaaataaataatccagaaagtcgat

SEQ ID NO: 29030 - DNA, 25 bp, SARS Virus
aaataaataatccagaaagtcgata

SEQ ID NO: 29031 - DNA, 25 bp, SARS Virus
aataaataatcccgaaagtcgatat

SEQ ID NO: 29032 - DNA, 25 bp, SARS Virus
ataaataatccacaaagtcgatatt

SEQ ID NO: 29033 - DNA, 25 bp, SARS Virus
taaataatccagcaagtcgatatta

SEQ ID NO: 29034 - DNA, 25 bp, SARS Virus
aaataatccagacagtcgatattac

SEQ ID NO: 29035 - DNA, 25 bp, SARS Virus
aataatccagaacgtcgatattacg

SEQ ID NO: 29036 - DNA, 25 bp, SARS Virus
ataatccagaaactcgatattacgt

SEQ ID NO: 29037 - DNA, 25 bp, SARS Virus
taatccagaaagccgatattacgtc

SEQ ID NO: 29038 - DNA, 25 bp, SARS Virus
aatccagaaagtcgatattacgtcc

SEQ ID NO: 29039 - DNA, 25 bp, SARS Virus
atccagaaagtccatattacgtcca

SEQ ID NO: 29040 - DNA, 25 bp, SARS Virus
tccagaaagtcgctattacgtccac

SEQ ID NO: 29041 - DNA, 25 bp, SARS Virus
ccagaaagtcgacattacgtccaca

SEQ ID NO: 29042 - DNA, 25 bp, SARS Virus
cagaaagtcgatcttacgtccacaa

SEQ ID NO: 29043 - DNA, 25 bp, SARS Virus
agaaagtcgatactacgtccacaag

SEQ ID NO: 29044 - DNA, 25 bp, SARS Virus
gaaagtcgatatcacgtccacaaga

SEQ ID NO: 29045 - DNA, 25 bp, SARS Virus
aaagtcgatattccgtccacaagaa

SEQ ID NO: 29046 - DNA, 25 bp, SARS Virus
aagtcgatattacgtccacaagaaa

SEQ ID NO: 29047 - DNA, 25 bp, SARS Virus
agtcgatattacctccacaagaaac

SEQ ID NO: 29048 - DNA, 25 bp, SARS Virus
gtcgatattacgcccacaagaaacc

SEQ ID NO: 29049 - DNA, 25 bp, SARS Virus
tcgatattacgtccacaagaaaccg

SEQ ID NO: 29050 - DNA, 25 bp, SARS Virus
cgatattacgtccacaagaaaccga

SEQ ID NO: 29051 - DNA, 25 bp, SARS Virus
gatattacgtccccaagaaaccgat

SEQ ID NO: 29052 - DNA, 25 bp, SARS Virus
atattacgtccacaagaaaccgata

SEQ ID NO: 29053 - DNA, 25 bp, SARS Virus
tattacgtccaccagaaaccgataa

SEQ ID NO: 29054 - DNA, 25 bp, SARS Virus
attacgtccacacgaaaccgataaa

SEQ ID NO: 29055 - DNA, 25 bp, SARS Virus
ttacgtccacaacaaaccgataaaa

SEQ ID NO: 29056 - DNA, 25 bp, SARS Virus
tacgtccacaagcaaccgataaaac

SEQ ID NO: 29057 - DNA, 25 bp, SARS Virus
acgtccacaagacaccgataaaacg

SEQ ID NO: 29058 - DNA, 25 bp, SARS Virus
cgtccacaagaacccgataaaacga

SEQ ID NO: 29059 - DNA, 25 bp, SARS Virus
gtccacaagaaaccgataaaacgat

SEQ ID NO: 29060 - DNA, 25 bp, SARS Virus
tccacaagaaaccgataaaacgatc

SEQ ID NO: 29061 - DNA, 25 bp, SARS Virus
ccacaagaaacccataaaacgatca

SEQ ID NO: 29062 - DNA, 25 bp, SARS Virus
cacaagaaaccgctaaaacgatcag

SEQ ID NO: 29063 - DNA, 25 bp, SARS Virus
acaagaaaccgacaaaacgatcagt

SEQ ID NO: 29064 - DNA, 25 bp, SARS Virus
caagaaaccgatcaaacgatcagta

SEQ ID NO: 29065 - DNA, 25 bp, SARS Virus
aagaaaccgatacaacgatcagtaa

SEQ ID NO: 29066 - DNA, 25 bp, SARS Virus
agaaaccgataacacgatcagtaaa

SEQ ID NO: 29067 - DNA, 25 bp, SARS Virus
gaaaccgataaaccgatcagtaaag

SEQ ID NO: 29068 - DNA, 25 bp, SARS Virus
aaaccgataaaacgatcagtaaagt

SEQ ID NO: 29069 - DNA, 25 bp, SARS Virus
aaccgataaaaccatcagtaaagta

SEQ ID NO: 29070 - DNA, 25 bp, SARS Virus
accgataaaacgctcagtaaagtag

SEQ ID NO: 29071 - DNA, 25 bp, SARS Virus
ccgataaaacgaccagtaaagtagt

SEQ ID NO: 29072 - DNA, 25 bp, SARS Virus
cgataaaacgatcagtaaagtagtc

SEQ ID NO: 29073 - DNA, 25 bp, SARS Virus
gataaaacgatccgtaaagtagtcg

SEQ ID NO: 29074 - DNA, 25 bp, SARS Virus
ataaaacgatcactaaagtagtcgt

SEQ ID NO: 29075 - DNA, 25 bp, SARS Virus
taaaacgatcagcaaagtagtcgtt

SEQ ID NO: 29076 - DNA, 25 bp, SARS Virus
aaaacgatcagtcaagtagtcgtta

SEQ ID NO: 29077 - DNA, 25 bp, SARS Virus
aaacgatcagtacagtagtcgttaa

SEQ ID NO: 29078 - DNA, 25 bp, SARS Virus
aacgatcagtaacgtagtcgttaag

SEQ ID NO: 29079 - DNA, 25 bp, SARS Virus
acgatcagtaaactagtcgttaaga

SEQ ID NO: 29080 - DNA, 25 bp, SARS Virus
cgatcagtaaagcagtcgttaagaa

SEQ ID NO: 29081 - DNA, 25 bp, SARS Virus
gatcagtaaagtcgtcgttaagaac

SEQ ID NO: 29082 - DNA, 25 bp, SARS Virus
atcagtaaagtactcgttaagaacc

SEQ ID NO: 29083 - DNA, 25 bp, SARS Virus
tcagtaaagtagccgttaagaaccg

SEQ ID NO: 29084 - DNA, 25 bp, SARS Virus
cagtaaagtagtcgttaagaaccga

SEQ ID NO: 29085 - DNA, 25 bp, SARS Virus
agtaaagtagtccttaagaaccgag

SEQ ID NO: 29086 - DNA, 25 bp, SARS Virus
gtaaagtagtcgctaagaaccgagt

SEQ ID NO: 29087 - DNA, 25 bp, SARS Virus
taaagtagtcgtcaagaaccgagta

SEQ ID NO: 29088 - DNA, 25 bp, SARS Virus
aaagtagtcgttcagaaccgagtac

SEQ ID NO: 29089 - DNA, 25 bp, SARS Virus
aagtagtcgttacgaaccgagtaca

SEQ ID NO: 29090 - DNA, 25 bp, SARS Virus
agtagtcgttaacaaccgagtacac

SEQ ID NO: 29091 - DNA, 25 bp, SARS Virus
gtagtcgttaagcaccgagtacacc

SEQ ID NO: 29092 - DNA, 25 bp, SARS Virus
tagtcgttaagacccgagtacacca

SEQ ID NO: 29093 - DNA, 25 bp, SARS Virus
agtcgttaagaaccgagtacaccaa

SEQ ID NO: 29094 - DNA, 25 bp, SARS Virus
gtcgttaagaaccgagtacaccaaa

SEQ ID NO: 29095 - DNA, 25 bp, SARS Virus
tcgttaagaacccagtacaccaaat

SEQ ID NO: 29096 - DNA, 25 bp, SARS Virus
cgttaagaaccgcgtacaccaaata

SEQ ID NO: 29097 - DNA, 25 bp, SARS Virus
gttaagaaccgactacaccaaatag

SEQ ID NO: 29098 - DNA, 25 bp, SARS Virus
ttaagaaccgagcacaccaaatagt

SEQ ID NO: 29099 - DNA, 25 bp, SARS Virus
taagaaccgagtccaccaaatagta

SEQ ID NO: 29100 - DNA, 25 bp, SARS Virus
aagaaccgagtacaccaaatagtaa

SEQ ID NO: 29101 - DNA, 25 bp, SARS Virus
agaaccgagtaccccaaatagtaat

SEQ ID NO: 29102 - DNA, 25 bp, SARS Virus
gaaccgagtacaccaaatagtaatc

SEQ ID NO: 29103 - DNA, 25 bp, SARS Virus
aaccgagtacaccaaatagtaatca

SEQ ID NO: 29104 - DNA, 25 bp, SARS Virus
accgagtacacccaatagtaatcat

SEQ ID NO: 29105 - DNA, 25 bp, SARS Virus
ccgagtacaccacatagtaatcata

SEQ ID NO: 29106 - DNA, 25 bp, SARS Virus
cgagtacaccaactagtaatcataa

SEQ ID NO: 29107 - DNA, 25 bp, SARS Virus
gagtacaccaaacagtaatcataac

SEQ ID NO: 29108 - DNA, 25 bp, SARS Virus
agtacaccaaatcgtaatcataaca

SEQ ID NO: 29109 - DNA, 25 bp, SARS Virus
gtacaccaaatactaatcataacat

SEQ ID NO: 29110 - DNA, 25 bp, SARS Virus
tacaccaaatagcaatcataacatg

SEQ ID NO: 29111 - DNA, 25 bp, SARS Virus
acaccaaatagtcatcataacatgt

SEQ ID NO: 29112 - DNA, 25 bp, SARS Virus
caccaaatagtactcataacatgtt

SEQ ID NO: 29113 - DNA, 25 bp, SARS Virus
accaaatagtaaccataacatgttt

SEQ ID NO: 29114 - DNA, 25 bp, SARS Virus
ccaaatagtaatcataacatgttta

SEQ ID NO: 29115 - DNA, 25 bp, SARS Virus
caaatagtaatcctaacatgtttac

SEQ ID NO: 29116 - DNA, 25 bp, SARS Virus
aaatagtaatcacaacatgtttacc

SEQ ID NO: 29117 - DNA, 25 bp, SARS Virus
aatagtaatcatcacatgtttaccg

SEQ ID NO: 29118 - DNA, 25 bp, SARS Virus
atagtaatcataccatgtttaccgt

SEQ ID NO: 29119 - DNA, 25 bp, SARS Virus
tagtaatcataacatgtttaccgtg

SEQ ID NO: 29120 - DNA, 25 bp, SARS Virus
agtaatcataacctgtttaccgtgg

SEQ ID NO: 29121 - DNA, 25 bp, SARS Virus
gtaatcataacacgtttaccgtggg

SEQ ID NO: 29122 - DNA, 25 bp, SARS Virus
taatcataacatctttaccgtgggc

SEQ ID NO: 29123 - DNA, 25 bp, SARS Virus
aatcataacatgcttaccgtgggca

SEQ ID NO: 29124 - DNA, 25 bp, SARS Virus
atcataacatgtctaccgtgggcaa

SEQ ID NO: 29125 - DNA, 25 bp, SARS Virus
tcataacatgttcaccgtgggcaaa

SEQ ID NO: 29126 - DNA, 25 bp, SARS Virus
cataacatgtttcccgtgggcaaag

SEQ ID NO: 29127 - DNA, 25 bp, SARS Virus
ataacatgtttaccgtgggcaaaga

SEQ ID NO: 29128 - DNA, 25 bp, SARS Virus
taacatgtttaccgtgggcaaagac

SEQ ID NO: 29129 - DNA, 25 bp, SARS Virus
aacatgtttaccctgggcaaagacg

SEQ ID NO: 29130 - DNA, 25 bp, SARS Virus
acatgtttaccgcgggcaaagacgt

SEQ ID NO: 29131 - DNA, 25 bp, SARS Virus
catgtttaccgtcggcaaagacgtt

SEQ ID NO: 29132 - DNA, 25 bp, SARS Virus
atgtttaccgtgcgcaaagacgtta

SEQ ID NO: 29133 - DNA, 25 bp, SARS Virus
tgtttaccgtggccaaagacgttac

SEQ ID NO: 29134 - DNA, 25 bp, SARS Virus
gtttaccgtgggcaaagacgttacc

SEQ ID NO: 29135 - DNA, 25 bp, SARS Virus
tttaccgtgggccaagacgttacca

SEQ ID NO: 29136 - DNA, 25 bp, SARS Virus
ttaccgtgggcacagacgttaccaa

SEQ ID NO: 29137 - DNA, 25 bp, SARS Virus
taccgtgggcaacgacgttaccaat

SEQ ID NO: 29138 - DNA, 25 bp, SARS Virus
accgtgggcaaacacgttaccaatc

SEQ ID NO: 29139 - DNA, 25 bp, SARS Virus
ccgtgggcaaagccgttaccaatcc

SEQ ID NO: 29140 - DNA, 25 bp, SARS Virus
cgtgggcaaagacgttaccaatcct

SEQ ID NO: 29141 - DNA, 25 bp, SARS Virus
gtgggcaaagaccttaccaatccta

SEQ ID NO: 29142 - DNA, 25 bp, SARS Virus
tgggcaaagacgctaccaatcctac

SEQ ID NO: 29143 - DNA, 25 bp, SARS Virus
gggcaaagacgtcaccaatcctaca

SEQ ID NO: 29144 - DNA, 25 bp, SARS Virus
ggcaaagacgttcccaatcctacat

SEQ ID NO: 29145 - DNA, 25 bp, SARS Virus
gcaaagacgttaccaatcctacatg

SEQ ID NO: 29146 - DNA, 25 bp, SARS Virus
caaagacgttaccaatcctacatgt

SEQ ID NO: 29147 - DNA, 25 bp, SARS Virus
aaagacgttacccatcctacatgta

SEQ ID NO: 29148 - DNA, 25 bp, SARS Virus
aagacgttaccactcctacatgtag

SEQ ID NO: 29149 - DNA, 25 bp, SARS Virus
agacgttaccaaccctacatgtaga

SEQ ID NO: 29150 - DNA, 25 bp, SARS Virus
gacgttaccaatcctacatgtagaa

SEQ ID NO: 29151 - DNA, 25 bp, SARS Virus
acgttaccaatcctacatgtagaag

SEQ ID NO: 29152 - DNA, 25 bp, SARS Virus
cgttaccaatcccacatgtagaaga

SEQ ID NO: 29153 - DNA, 25 bp, SARS Virus
gttaccaatcctccatgtagaagaa

SEQ ID NO: 29154 - DNA, 25 bp, SARS Virus
ttaccaatcctacatgtagaagaaa

SEQ ID NO: 29155 - DNA, 25 bp, SARS Virus
taccaatcctacctgtagaagaaac

SEQ ID NO: 29156 - DNA, 25 bp, SARS Virus
accaatcctacacgtagaagaaacg

SEQ ID NO: 29157 - DNA, 25 bp, SARS Virus
ccaatcctacatctagaagaaacga

SEQ ID NO: 29158 - DNA, 25 bp, SARS Virus
caatcctacatgcagaagaaacgaa

SEQ ID NO: 29159 - DNA, 25 bp, SARS Virus
aatcctacatgtcgaagaaacgaag

SEQ ID NO: 29160 - DNA, 25 bp, SARS Virus
atcctacatgtacaagaaacgaaga

SEQ ID NO: 29161 - DNA, 25 bp, SARS Virus
tcctacatgtagcagaaacgaagaa

SEQ ID NO: 29162 - DNA, 25 bp, SARS Virus
cctacatgtagacgaaacgaagaaa

SEQ ID NO: 29163 - DNA, 25 bp, SARS Virus
ctacatgtagaacaaacgaagaaag

SEQ ID NO: 29164 - DNA, 25 bp, SARS Virus
tacatgtagaagcaacgaagaaaga

SEQ ID NO: 29165 - DNA, 25 bp, SARS Virus
acatgtagaagacacgaagaaagat

SEQ ID NO: 29166 - DNA, 25 bp, SARS Virus
catgtagaagaaccgaagaaagatg

SEQ ID NO: 29167 - DNA, 25 bp, SARS Virus
atgtagaagaaacgaagaaagatga

SEQ ID NO: 29168 - DNA, 25 bp, SARS Virus
tgtagaagaaaccaagaaagatgat

SEQ ID NO: 29169 - DNA, 25 bp, SARS Virus
gtagaagaaacgcagaaagatgatg

SEQ ID NO: 29170 - DNA, 25 bp, SARS Virus
tagaagaaacgacgaaagatgatgt

SEQ ID NO: 29171 - DNA, 25 bp, SARS Virus
agaagaaacgaacaaagatgatgta

SEQ ID NO: 29172 - DNA, 25 bp, SARS Virus
gaagaaacgaagcaagatgatgtat

SEQ ID NO: 29173 - DNA, 25 bp, SARS Virus
aagaaacgaagacagatgatgtata

SEQ ID NO: 29174 - DNA, 25 bp, SARS Virus
agaaacgaagaacgatgatgtatac

SEQ ID NO: 29175 - DNA, 25 bp, SARS Virus
gaaacgaagaaacatgatgtatacc

SEQ ID NO: 29176 - DNA, 25 bp, SARS Virus
aaacgaagaaagctgatgtatacct

SEQ ID NO: 29177 - DNA, 25 bp, SARS Virus
aacgaagaaagacgatgtatacctt

SEQ ID NO: 29178 - DNA, 25 bp, SARS Virus
acgaagaaagatcatgtataccttc

SEQ ID NO: 29179 - DNA, 25 bp, SARS Virus
cgaagaaagatgctgtataccttct

SEQ ID NO: 29180 - DNA, 25 bp, SARS Virus
gaagaaagatgacgtataccttctc

SEQ ID NO: 29181 - DNA, 25 bp, SARS Virus
aagaaagatgatctataccttctcg

SEQ ID NO: 29182 - DNA, 25 bp, SARS Virus
agaaagatgatgcataccttctcga

SEQ ID NO: 29183 - DNA, 25 bp, SARS Virus
gaaagatgatgtctaccttctcgat

SEQ ID NO: 29184 - DNA, 25 bp, SARS Virus
aaagatgatgtacaccttctcgata

SEQ ID NO: 29185 - DNA, 25 bp, SARS Virus
aagatgatgtatcccttctcgatac

SEQ ID NO: 29186 - DNA, 25 bp, SARS Virus
agatgatgtataccttctcgataca

SEQ ID NO: 29187 - DNA, 25 bp, SARS Virus
gatgatgtataccttctcgatacaa

SEQ ID NO: 29188 - DNA, 25 bp, SARS Virus
atgatgtataccctctcgatacaag

SEQ ID NO: 29189 - DNA, 25 bp, SARS Virus
tgatgtatacctcctcgatacaagt

SEQ ID NO: 29190 - DNA, 25 bp, SARS Virus
gatgtataccttctcgatacaagta

SEQ ID NO: 29191 - DNA, 25 bp, SARS Virus
atgtataccttcccgatacaagtat

SEQ ID NO: 29192 - DNA, 25 bp, SARS Virus
tgtataccttctcgatacaagtata

SEQ ID NO: 29193 - DNA, 25 bp, SARS Virus
gtataccttctccatacaagtatag

SEQ ID NO: 29194 - DNA, 25 bp, SARS Virus
tataccttctcgctacaagtatagt

SEQ ID NO: 29195 - DNA, 25 bp, SARS Virus
ataccttctcgacacaagtatagta

SEQ ID NO: 29196 - DNA, 25 bp, SARS Virus
taccttctcgatccaagtatagtac

SEQ ID NO: 29197 - DNA, 25 bp, SARS Virus
accttctcgatacaagtatagtacc

SEQ ID NO: 29198 - DNA, 25 bp, SARS Virus
ccttctcgataccagtatagtacct

SEQ ID NO: 29199 - DNA, 25 bp, SARS Virus
cttctcgatacacgtatagtaccta

SEQ ID NO: 29200 - DNA, 25 bp, SARS Virus
ttctcgatacaactatagtacctac

SEQ ID NO: 29201 - DNA, 25 bp, SARS Virus
tctcgatacaagcatagtacctacc

SEQ ID NO: 29202 - DNA, 25 bp, SARS Virus
ctcgatacaagtctagtacctacca

SEQ ID NO: 29203 - DNA, 25 bp, SARS Virus
tcgatacaagtacagtacctaccaa

SEQ ID NO: 29204 - DNA, 25 bp, SARS Virus
cgatacaagtatcgtacctaccaac

SEQ ID NO: 29205 - DNA, 25 bp, SARS Virus
gatacaagtatactacctaccaacg

SEQ ID NO: 29206 - DNA, 25 bp, SARS Virus
atacaagtatagcacctaccaacgt

SEQ ID NO: 29207 - DNA, 25 bp, SARS Virus
tacaagtatagtccctaccaacgtg

SEQ ID NO: 29208 - DNA, 25 bp, SARS Virus
acaagtatagtacctaccaacgtgg

SEQ ID NO: 29209 - DNA, 25 bp, SARS Virus
caagtatagtacctaccaacgtgga

SEQ ID NO: 29210 - DNA, 25 bp, SARS Virus
aagtatagtacccaccaacgtggag

SEQ ID NO: 29211 - DNA, 25 bp, SARS Virus
agtatagtacctcccaacgtggaga

SEQ ID NO: 29212 - DNA, 25 bp, SARS Virus
gtatagtacctaccaacgtggagaa

SEQ ID NO: 29213 - DNA, 25 bp, SARS Virus
tatagtacctaccaacgtggagaag

SEQ ID NO: 29214 - DNA, 25 bp, SARS Virus
atagtacctacccacgtggagaagc

SEQ ID NO: 29215 - DNA, 25 bp, SARS Virus
tagtacctaccaccgtggagaagct

SEQ ID NO: 29216 - DNA, 25 bp, SARS Virus
agtacctaccaacgtggagaagctg

SEQ ID NO: 29217 - DNA, 25 bp, SARS Virus
gtacctaccaacctggagaagctga

SEQ ID NO: 29218 - DNA, 25 bp, SARS Virus
tacctaccaacgcggagaagctgaa

SEQ ID NO: 29219 - DNA, 25 bp, SARS Virus
acctaccaacgtcgagaagctgaac

SEQ ID NO: 29220 - DNA, 25 bp, SARS Virus
cctaccaacgtgcagaagctgaacg

SEQ ID NO: 29221 - DNA, 25 bp, SARS Virus
ctaccaacgtggcgaagctgaacgt

SEQ ID NO: 29222 - DNA, 25 bp, SARS Virus
taccaacgtggacaagctgaacgta

SEQ ID NO: 29223 - DNA, 25 bp, SARS Virus
accaacgtggagcagctgaacgtac

SEQ ID NO: 29224 - DNA, 25 bp, SARS Virus
ccaacgtggagacgctgaacgtact

SEQ ID NO: 29225 - DNA, 25 bp, SARS Virus
caacgtggagaacctgaacgtacta

SEQ ID NO: 29226 - DNA, 25 bp, SARS Virus
aacgtggagaagctgaacgtactac

SEQ ID NO: 29227 - DNA, 25 bp, SARS Virus
acgtggagaagccgaacgtactaca

SEQ ID NO: 29228 - DNA, 25 bp, SARS Virus
cgtggagaagctcaacgtactacac

SEQ ID NO: 29229 - DNA, 25 bp, SARS Virus
gtggagaagctgcacgtactacacg

SEQ ID NO: 29230 - DNA, 25 bp, SARS Virus
tggagaagctgaccgtactacacga

SEQ ID NO: 29231 - DNA, 25 bp, SARS Virus
ggagaagctgaacgtactacacgat

SEQ ID NO: 29232 - DNA, 25 bp, SARS Virus
gagaagctgaacctactacacgata

SEQ ID NO: 29233 - DNA, 25 bp, SARS Virus
agaagctgaacgcactacacgatat

SEQ ID NO: 29234 - DNA, 25 bp, SARS Virus
gaagctgaacgtcctacacgatatt

SEQ ID NO: 29235 - DNA, 25 bp, SARS Virus
aagctgaacgtactacacgatattc

SEQ ID NO: 29236 - DNA, 25 bp, SARS Virus
agctgaacgtaccacacgatattcg

SEQ ID NO: 29237 - DNA, 25 bp, SARS Virus
gctgaacgtactccacgatattcgc

SEQ ID NO: 29238 - DNA, 25 bp, SARS Virus
ctgaacgtactacacgatattcgcg

SEQ ID NO: 29239 - DNA, 25 bp, SARS Virus
tgaacgtactacccgatattcgcgt

SEQ ID NO: 29240 - DNA, 25 bp, SARS Virus
gaacgtactacacgatattcgcgtt

SEQ ID NO: 29241 - DNA, 25 bp, SARS Virus
aacgtactacaccatattcgcgtta

SEQ ID NO: 29242 - DNA, 25 bp, SARS Virus
acgtactacacgctattcgcgttag

SEQ ID NO: 29243 - DNA, 25 bp, SARS Virus
cgtactacacgacattcgcgttagc

SEQ ID NO: 29244 - DNA, 25 bp, SARS Virus
gtactacacgatcttcgcgttagca

SEQ ID NO: 29245 - DNA, 25 bp, SARS Virus
tactacacgatactcgcgttagcac

SEQ ID NO: 29246 - DNA, 25 bp, SARS Virus
actacacgatatccgcgttagcacg

SEQ ID NO: 29247 - DNA, 25 bp, SARS Virus
ctacacgatattcgcgttagcacgg

SEQ ID NO: 29248 - DNA, 25 bp, SARS Virus
tacacgatattcccgttagcacggt

SEQ ID NO: 29249 - DNA, 25 bp, SARS Virus
acacgatattcgcgttagcacggtg

SEQ ID NO: 29250 - DNA, 25 bp, SARS Virus
cacgatattcgccttagcacggtgt

SEQ ID NO: 29251 - DNA, 25 bp, SARS Virus
acgatattcgcgctagcacggtgtg

SEQ ID NO: 29252 - DNA, 25 bp, SARS Virus
cgatattcgcgtcagcacggtgtgc

SEQ ID NO: 29253 - DNA, 25 bp, SARS Virus
gatattcgcgttcgcacggtgtgcg

SEQ ID NO: 29254 - DNA, 25 bp, SARS Virus
atattcgcgttaccacggtgtgcgc

SEQ ID NO: 29255 - DNA, 25 bp, SARS Virus
tattcgcgttagcacggtgtgcgca

SEQ ID NO: 29256 - DNA, 25 bp, SARS Virus
attcgcgttagcccggtgtgcgcaa

SEQ ID NO: 29257 - DNA, 25 bp, SARS Virus
ttcgcgttagcacggtgtgcgcaac

SEQ ID NO: 29258 - DNA, 25 bp, SARS Virus
tcgcgttagcaccgtgtgcgcaact

SEQ ID NO: 29259 - DNA, 25 bp, SARS Virus
cgcgttagcacgctgtgcgcaactc

SEQ ID NO: 29260 - DNA, 25 bp, SARS Virus
gcgttagcacggcgtgcgcaactca

SEQ ID NO: 29261 - DNA, 25 bp, SARS Virus
cgttagcacggtctgcgcaactcac

SEQ ID NO: 29262 - DNA, 25 bp, SARS Virus
gttagcacggtgcgcgcaactcaca

SEQ ID NO: 29263 - DNA, 25 bp, SARS Virus
ttagcacggtgtccgcaactcacat

SEQ ID NO: 29264 - DNA, 25 bp, SARS Virus
tagcacggtgtgcgcaactcacatg

SEQ ID NO: 29265 - DNA, 25 bp, SARS Virus
agcacggtgtgcccaactcacatgt

SEQ ID NO: 29266 - DNA, 25 bp, SARS Virus
gcacggtgtgcgcaactcacatgtt

SEQ ID NO: 29267 - DNA, 25 bp, SARS Virus
cacggtgtgcgccactcacatgttg

SEQ ID NO: 29268 - DNA, 25 bp, SARS Virus
acggtgtgcgcacctcacatgttga

SEQ ID NO: 29269 - DNA, 25 bp, SARS Virus
cggtgtgcgcaactcacatgttgat

SEQ ID NO: 29270 - DNA, 25 bp, SARS Virus
ggtgtgcgcaacccacatgttgata

SEQ ID NO: 29271 - DNA, 25 bp, SARS Virus
gtgtgcgcaactcacatgttgataa

SEQ ID NO: 29272 - DNA, 25 bp, SARS Virus
tgtgcgcaactcccatgttgataac

SEQ ID NO: 29273 - DNA, 25 bp, SARS Virus
gtgcgcaactcacatgttgataaca

SEQ ID NO: 29274 - DNA, 25 bp, SARS Virus
tgcgcaactcacctgttgataacaa

SEQ ID NO: 29275 - DNA, 25 bp, SARS Virus
gcgcaactcacacgttgataacaat

SEQ ID NO: 29276 - DNA, 25 bp, SARS Virus
cgcaactcacatcttgataacaatt

SEQ ID NO: 29277 - DNA, 25 bp, SARS Virus
gcaactcacatgctgataacaatta

SEQ ID NO: 29278 - DNA, 25 bp, SARS Virus
caactcacatgtcgataacaattac

SEQ ID NO: 29279 - DNA, 25 bp, SARS Virus
aactcacatgttcataacaattacc

SEQ ID NO: 29280 - DNA, 25 bp, SARS Virus
actcacatgttgctaacaattaccg

SEQ ID NO: 29281 - DNA, 25 bp, SARS Virus
ctcacatgttgacaacaattaccgt

SEQ ID NO: 29282 - DNA, 25 bp, SARS Virus
tcacatgttgatcacaattaccgta

SEQ ID NO: 29283 - DNA, 25 bp, SARS Virus
cacatgttgataccaattaccgtac

SEQ ID NO: 29284 - DNA, 25 bp, SARS Virus
acatgttgataacaattaccgtact

SEQ ID NO: 29285 - DNA, 25 bp, SARS Virus
catgttgataaccattaccgtactt

SEQ ID NO: 29286 - DNA, 25 bp, SARS Virus
atgttgataacacttaccgtacttc

SEQ ID NO: 29287 - DNA, 25 bp, SARS Virus
tgttgataacaactaccgtacttct

SEQ ID NO: 29288 - DNA, 25 bp, SARS Virus
gttgataacaatcaccgtacttctc

SEQ ID NO: 29289 - DNA, 25 bp, SARS Virus
ttgataacaattcccgtacttctct

SEQ ID NO: 29290 - DNA, 25 bp, SARS Virus
tgataacaattaccgtacttctcta

SEQ ID NO: 29291 - DNA, 25 bp, SARS Virus
gataacaattaccgtacttctctag

SEQ ID NO: 29292 - DNA, 25 bp, SARS Virus
ataacaattaccctacttctctaga

SEQ ID NO: 29293 - DNA, 25 bp, SARS Virus
taacaattaccgcacttctctagaa

SEQ ID NO: 29294 - DNA, 25 bp, SARS Virus
aacaattaccgtccttctctagaaa

SEQ ID NO: 29295 - DNA, 25 bp, SARS Virus
acaattaccgtacttctctagaaag

SEQ ID NO: 29296 - DNA, 25 bp, SARS Virus
caattaccgtacctctctagaaaga

SEQ ID NO: 29297 - DNA, 25 bp, SARS Virus
aattaccgtactcctctagaaagat

SEQ ID NO: 29298 - DNA, 25 bp, SARS Virus
attaccgtacttctctagaaagata

SEQ ID NO: 29299 - DNA, 25 bp, SARS Virus
ttaccgtacttccctagaaagatac

SEQ ID NO: 29300 - DNA, 25 bp, SARS Virus
taccgtacttctctagaaagataca

SEQ ID NO: 29301 - DNA, 25 bp, SARS Virus
accgtacttctccagaaagatacag

SEQ ID NO: 29302 - DNA, 25 bp, SARS Virus
ccgtacttctctcgaaagatacaga

SEQ ID NO: 29303 - DNA, 25 bp, SARS Virus
cgtacttctctacaaagatacagat

SEQ ID NO: 29304 - DNA, 25 bp, SARS Virus
gtacttctctagcaagatacagata

SEQ ID NO: 29305 - DNA, 25 bp, SARS Virus
tacttctctagacagatacagatac

SEQ ID NO: 29306 - DNA, 25 bp, SARS Virus
acttctctagaacgatacagatacg

SEQ ID NO: 29307 - DNA, 25 bp, SARS Virus
cttctctagaaacatacagatacgt

SEQ ID NO: 29308 - DNA, 25 bp, SARS Virus
ttctctagaaagctacagatacgtt

SEQ ID NO: 29309 - DNA, 25 bp, SARS Virus
tctctagaaagacacagatacgttt

SEQ ID NO: 29310 - DNA, 25 bp, SARS Virus
ctctagaaagatccagatacgttta

SEQ ID NO: 29311 - DNA, 25 bp, SARS Virus
tctagaaagatacagatacgtttac

SEQ ID NO: 29312 - DNA, 25 bp, SARS Virus
ctagaaagataccgatacgtttacc

SEQ ID NO: 29313 - DNA, 25 bp, SARS Virus
tagaaagatacacatacgtttacct

SEQ ID NO: 29314 - DNA, 25 bp, SARS Virus
agaaagatacagctacgtttacctc

SEQ ID NO: 29315 - DNA, 25 bp, SARS Virus
gaaagatacagacacgtttacctcc

SEQ ID NO: 29316 - DNA, 25 bp, SARS Virus
aaagatacagatccgtttacctccg

SEQ ID NO: 29317 - DNA, 25 bp, SARS Virus
aagatacagatacgtttacctccgg

SEQ ID NO: 29318 - DNA, 25 bp, SARS Virus
agatacagatacctttacctccggc

SEQ ID NO: 29319 - DNA, 25 bp, SARS Virus
gatacagatacgcttacctccggca

SEQ ID NO: 29320 - DNA, 25 bp, SARS Virus
atacagatacgtctacctccggcac

SEQ ID NO: 29321 - DNA, 25 bp, SARS Virus
tacagatacgttcacctccggcacc

SEQ ID NO: 29322 - DNA, 25 bp, SARS Virus
acagatacgtttccctccggcaccg

SEQ ID NO: 29323 - DNA, 25 bp, SARS Virus
cagatacgtttacctccggcaccga

SEQ ID NO: 29324 - DNA, 25 bp, SARS Virus
agatacgtttacctccggcaccgaa

SEQ ID NO: 29325 - DNA, 25 bp, SARS Virus
gatacgtttacccccggcaccgaag

SEQ ID NO: 29326 - DNA, 25 bp, SARS Virus
atacgtttacctccggcaccgaaga

SEQ ID NO: 29327 - DNA, 25 bp, SARS Virus
tacgtttacctccggcaccgaagac

SEQ ID NO: 29328 - DNA, 25 bp, SARS Virus
acgtttacctcccgcaccgaagacg

SEQ ID NO: 29329 - DNA, 25 bp, SARS Virus
cgtttacctccgccaccgaagacgt

SEQ ID NO: 29330 - DNA, 25 bp, SARS Virus
gtttacctccggcaccgaagacgtt

SEQ ID NO: 29331 - DNA, 25 bp, SARS Virus
tttacctccggccccgaagacgttc

SEQ ID NO: 29332 - DNA, 25 bp, SARS Virus
ttacctccggcaccgaagacgttct

SEQ ID NO: 29333 - DNA, 25 bp, SARS Virus
tacctccggcaccgaagacgttctg

SEQ ID NO: 29334 - DNA, 25 bp, SARS Virus
acctccggcacccaagacgttctga

SEQ ID NO: 29335 - DNA, 25 bp, SARS Virus
cctccggcaccgcagacgttctgag

SEQ ID NO: 29336 - DNA, 25 bp, SARS Virus
ctccggcaccgacgacgttctgagt

SEQ ID NO: 29337 - DNA, 25 bp, SARS Virus
tccggcaccgaacacgttctgagtg

SEQ ID NO: 29338 - DNA, 25 bp, SARS Virus
ccggcaccgaagccgttctgagtgt

SEQ ID NO: 29339 - DNA, 25 bp, SARS Virus
cggcaccgaagacgttctgagtgtt

SEQ ID NO: 29340 - DNA, 25 bp, SARS Virus
ggcaccgaagaccttctgagtgtta

SEQ ID NO: 29341 - DNA, 25 bp, SARS Virus
gcaccgaagacgctctgagtgttaa

SEQ ID NO: 29342 - DNA, 25 bp, SARS Virus
caccgaagacgtcctgagtgttaac

SEQ ID NO: 29343 - DNA, 25 bp, SARS Virus
accgaagacgttctgagtgttaacc

SEQ ID NO: 29344 - DNA, 25 bp, SARS Virus
ccgaagacgttccgagtgttaacct

SEQ ID NO: 29345 - DNA, 25 bp, SARS Virus
cgaagacgttctcagtgttaacctt

SEQ ID NO: 29346 - DNA, 25 bp, SARS Virus
gaagacgttctgcgtgttaacctta

SEQ ID NO: 29347 - DNA, 25 bp, SARS Virus
aagacgttctgactgttaaccttaa

SEQ ID NO: 29348 - DNA, 25 bp, SARS Virus
agacgttctgagcgttaaccttaac

SEQ ID NO: 29349 - DNA, 25 bp, SARS Virus
gacgttctgagtcttaaccttaaca

SEQ ID NO: 29350 - DNA, 25 bp, SARS Virus
acgttctgagtgctaaccttaacag

SEQ ID NO: 29351 - DNA, 25 bp, SARS Virus
cgttctgagtgtcaaccttaacaga

SEQ ID NO: 29352 - DNA, 25 bp, SARS Virus
gttctgagtgttcaccttaacagag

SEQ ID NO: 29353 - DNA, 25 bp, SARS Virus
ttctgagtgttacccttaacagagt

SEQ ID NO: 29354 - DNA, 25 bp, SARS Virus
tctgagtgttaaccttaacagagtt

SEQ ID NO: 29355 - DNA, 25 bp, SARS Virus
ctgagtgttaaccttaacagagtta

SEQ ID NO: 29356 - DNA, 25 bp, SARS Virus
tgagtgttaaccctaacagagttaa

SEQ ID NO: 29357 - DNA, 25 bp, SARS Virus
gagtgttaacctcaacagagttaac

SEQ ID NO: 29358 - DNA, 25 bp, SARS Virus
agtgttaaccttcacagagttaaca

SEQ ID NO: 29359 - DNA, 25 bp, SARS Virus
gtgttaaccttaccagagttaacac

SEQ ID NO: 29360 - DNA, 25 bp, SARS Virus
tgttaaccttaacagagttaacact

SEQ ID NO: 29361 - DNA, 25 bp, SARS Virus
gttaaccttaaccgagttaacactg

SEQ ID NO: 29362 - DNA, 25 bp, SARS Virus
ttaaccttaacacagttaacactgt

SEQ ID NO: 29363 - DNA, 25 bp, SARS Virus
taaccttaacagcgttaacactgtg

SEQ ID NO: 29364 - DNA, 25 bp, SARS Virus
aaccttaacagacttaacactgtgt

SEQ ID NO: 29365 - DNA, 25 bp, SARS Virus
accttaacagagctaacactgtgta

SEQ ID NO: 29366 - DNA, 25 bp, SARS Virus
ccttaacagagtcaacactgtgtaa

SEQ ID NO: 29367 - DNA, 25 bp, SARS Virus
cttaacagagttcacactgtgtaaa

SEQ ID NO: 29368 - DNA, 25 bp, SARS Virus
ttaacagagttaccactgtgtaaaa

SEQ ID NO: 29369 - DNA, 25 bp, SARS Virus
taacagagttaacactgtgtaaaac

SEQ ID NO: 29370 - DNA, 25 bp, SARS Virus
aacagagttaaccctgtgtaaaacg

SEQ ID NO: 29371 - DNA, 25 bp, SARS Virus
acagagttaacactgtgtaaaacgt

SEQ ID NO: 29372 - DNA, 25 bp, SARS Virus
cagagttaacaccgtgtaaaacgtg

SEQ ID NO: 29373 - DNA, 25 bp, SARS Virus
agagttaacactctgtaaaacgtga

SEQ ID NO: 29374 - DNA, 25 bp, SARS Virus
gagttaacactgcgtaaaacgtgac

SEQ ID NO: 29375 - DNA, 25 bp, SARS Virus
agttaacactgtctaaaacgtgacc

SEQ ID NO: 29376 - DNA, 25 bp, SARS Virus
gttaacactgtgcaaaacgtgacca

SEQ ID NO: 29377 - DNA, 25 bp, SARS Virus
ttaacactgtgtcaaacgtgaccat

SEQ ID NO: 29378 - DNA, 25 bp, SARS Virus
taacactgtgtacaacgtgaccatc

SEQ ID NO: 29379 - DNA, 25 bp, SARS Virus
aacactgtgtaacacgtgaccatca

SEQ ID NO: 29380 - DNA, 25 bp, SARS Virus
acactgtgtaaaccgtgaccatcat

SEQ ID NO: 29381 - DNA, 25 bp, SARS Virus
cactgtgtaaaacgtgaccatcatg

SEQ ID NO: 29382 - DNA, 25 bp, SARS Virus
actgtgtaaaacctgaccatcatgt

SEQ ID NO: 29383 - DNA, 25 bp, SARS Virus
ctgtgtaaaacgcgaccatcatgta

SEQ ID NO: 29384 - DNA, 25 bp, SARS Virus
tgtgtaaaacgtcaccatcatgtaa

SEQ ID NO: 29385 - DNA, 25 bp, SARS Virus
gtgtaaaacgtgcccatcatgtaag

SEQ ID NO: 29386 - DNA, 25 bp, SARS Virus
tgtaaaacgtgaccatcatgtaagt

SEQ ID NO: 29387 - DNA, 25 bp, SARS Virus
gtaaaacgtgaccatcatgtaagta

SEQ ID NO: 29388 - DNA, 25 bp, SARS Virus
taaaacgtgaccctcatgtaagtaa

SEQ ID NO: 29389 - DNA, 25 bp, SARS Virus
aaaacgtgaccaccatgtaagtaat

SEQ ID NO: 29390 - DNA, 25 bp, SARS Virus
aaacgtgaccatcatgtaagtaatc

SEQ ID NO: 29391 - DNA, 25 bp, SARS Virus
aacgtgaccatcctgtaagtaatca

SEQ ID NO: 29392 - DNA, 25 bp, SARS Virus
acgtgaccatcacgtaagtaatcac

SEQ ID NO: 29393 - DNA, 25 bp, SARS Virus
cgtgaccatcatctaagtaatcact

SEQ ID NO: 29394 - DNA, 25 bp, SARS Virus
gtgaccatcatgcaagtaatcacta

SEQ ID NO: 29395 - DNA, 25 bp, SARS Virus
tgaccatcatgtcagtaatcactac

SEQ ID NO: 29396 - DNA, 25 bp, SARS Virus
gaccatcatgtacgtaatcactact

SEQ ID NO: 29397 - DNA, 25 bp, SARS Virus
accatcatgtaactaatcactactt

SEQ ID NO: 29398 - DNA, 25 bp, SARS Virus
ccatcatgtaagcaatcactacttc

SEQ ID NO: 29399 - DNA, 25 bp, SARS Virus
catcatgtaagtcatcactacttca

SEQ ID NO: 29400 - DNA, 25 bp, SARS Virus
atcatgtaagtactcactacttcaa

SEQ ID NO: 29401 - DNA, 25 bp, SARS Virus
tcatgtaagtaaccactacttcaac

SEQ ID NO: 29402 - DNA, 25 bp, SARS Virus
catgtaagtaatcactacttcaacg

SEQ ID NO: 29403 - DNA, 25 bp, SARS Virus
atgtaagtaatccctacttcaacga

SEQ ID NO: 29404 - DNA, 25 bp, SARS Virus
tgtaagtaatcactacttcaacgag

SEQ ID NO: 29405 - DNA, 25 bp, SARS Virus
gtaagtaatcaccacttcaacgagc

SEQ ID NO: 29406 - DNA, 25 bp, SARS Virus
taagtaatcactccttcaacgagca

SEQ ID NO: 29407 - DNA, 25 bp, SARS Virus
aagtaatcactacttcaacgagcac

SEQ ID NO: 29408 - DNA, 25 bp, SARS Virus
agtaatcactacctcaacgagcact

SEQ ID NO: 29409 - DNA, 25 bp, SARS Virus
ggtcgagaacttgggtaagtccact

SEQ ID NO: 29410 - DNA, 25 bp, SARS Virus
gtcgagaactttggtaagtccactg

SEQ ID NO: 29411 - DNA, 25 bp, SARS Virus
tcgagaactttggtaagtccactgc

SEQ ID NO: 29412 - DNA, 25 bp, SARS Virus
cgagaactttgggaagtccactgct

SEQ ID NO: 29413 - DNA, 25 bp, SARS Virus
gagaactttggtgagtccactgcta

SEQ ID NO: 29414 - DNA, 25 bp, SARS Virus
agaactttggtaggtccactgctaa

SEQ ID NO: 29415 - DNA, 25 bp, SARS Virus
gaactttggtaagtccactgctaaa

SEQ ID NO: 29416 - DNA, 25 bp, SARS Virus
aactttggtaaggccactgctaaag

SEQ ID NO: 29417 - DNA, 25 bp, SARS Virus
actttggtaagtgcactgctaaagt

SEQ ID NO: 29418 - DNA, 25 bp, SARS Virus
ctttggtaagtcgactgctaaagta

SEQ ID NO: 29419 - DNA, 25 bp, SARS Virus
tttggtaagtccgctgctaaagtag

SEQ ID NO: 29420 - DNA, 25 bp, SARS Virus
ttggtaagtccagtgctaaagtagc

SEQ ID NO: 29421 - DNA, 25 bp, SARS Virus
tggtaagtccacggctaaagtagca

SEQ ID NO: 29422 - DNA, 25 bp, SARS Virus
ggtaagtccactgctaaagtagcat

SEQ ID NO: 29423 - DNA, 25 bp, SARS Virus
gtaagtccactggtaaagtagcatg

SEQ ID NO: 29424 - DNA, 25 bp, SARS Virus
taagtccactgcgaaagtagcatgt

SEQ ID NO: 29425 - DNA, 25 bp, SARS Virus
aagtccactgctgaagtagcatgtt

SEQ ID NO: 29426 - DNA, 25 bp, SARS Virus
agtccactgctagagtagcatgttc

SEQ ID NO: 29427 - DNA, 25 bp, SARS Virus
gtccactgctaaggtagcatgttcg

SEQ ID NO: 29428 - DNA, 25 bp, SARS Virus
tccactgctaaagtagcatgttcga

SEQ ID NO: 29429 - DNA, 25 bp, SARS Virus
ccactgctaaaggagcatgttcgat

SEQ ID NO: 29430 - DNA, 25 bp, SARS Virus
cactgctaaagtggcatgttcgatc

SEQ ID NO: 29431 - DNA, 25 bp, SARS Virus
actgctaaagtagcatgttcgatct

SEQ ID NO: 29432 - DNA, 25 bp, SARS Virus
ctgctaaagtaggatgttcgatctg

SEQ ID NO: 29433 - DNA, 25 bp, SARS Virus
tgctaaagtagcgtgttcgatctga

SEQ ID NO: 29434 - DNA, 25 bp, SARS Virus
gctaaagtagcaggttcgatctgaa

SEQ ID NO: 29435 - DNA, 25 bp, SARS Virus
ctaaagtagcatgttcgatctgaac

SEQ ID NO: 29436 - DNA, 25 bp, SARS Virus
taaagtagcatggtcgatctgaact

SEQ ID NO: 29437 - DNA, 25 bp, SARS Virus
aaagtagcatgtgcgatctgaactg

SEQ ID NO: 29438 - DNA, 25 bp, SARS Virus
aagtagcatgttggatctgaactgt

SEQ ID NO: 29439 - DNA, 25 bp, SARS Virus
agtagcatgttcgatctgaactgtt

SEQ ID NO: 29440 - DNA, 25 bp, SARS Virus
gtagcatgttcggtctgaactgtta

SEQ ID NO: 29441 - DNA, 25 bp, SARS Virus
tagcatgttcgagctgaactgttaa

SEQ ID NO: 29442 - DNA, 25 bp, SARS Virus
agcatgttcgatgtgaactgttaaa

SEQ ID NO: 29443 - DNA, 25 bp, SARS Virus
gcatgttcgatcggaactgttaaaa

SEQ ID NO: 29444 - DNA, 25 bp, SARS Virus
catgttcgatctgaactgttaaaat

SEQ ID NO: 29445 - DNA, 25 bp, SARS Virus
atgttcgatctggactgttaaaatc

SEQ ID NO: 29446 - DNA, 25 bp, SARS Virus
tgttcgatctgagctgttaaaatcc

SEQ ID NO: 29447 - DNA, 25 bp, SARS Virus
gttcgatctgaagtgttaaaatcca

SEQ ID NO: 29448 - DNA, 25 bp, SARS Virus
ttcgatctgaacggttaaaatccag

SEQ ID NO: 29449 - DNA, 25 bp, SARS Virus
tcgatctgaactgttaaaatccaga

SEQ ID NO: 29450 - DNA, 25 bp, SARS Virus
cgatctgaactggtaaaatccagac

SEQ ID NO: 29451 - DNA, 25 bp, SARS Virus
gatctgaactgtgaaaatccagacc

SEQ ID NO: 29452 - DNA, 25 bp, SARS Virus
atctgaactgttgaaatccagaccg

SEQ ID NO: 29453 - DNA, 25 bp, SARS Virus
tctgaactgttagaatccagaccgg

SEQ ID NO: 29454 - DNA, 25 bp, SARS Virus
ctgaactgttaagatccagaccggc

SEQ ID NO: 29455 - DNA, 25 bp, SARS Virus
tgaactgttaaagtccagaccggcg

SEQ ID NO: 29456 - DNA, 25 bp, SARS Virus
gaactgttaaaagccagaccggcga

SEQ ID NO: 29457 - DNA, 25 bp, SARS Virus
aactgttaaaatgcagaccggcgac

SEQ ID NO: 29458 - DNA, 25 bp, SARS Virus
actgttaaaatcgagaccggcgact

SEQ ID NO: 29459 - DNA, 25 bp, SARS Virus
ctgttaaaatccggaccggcgactc

SEQ ID NO: 29460 - DNA, 25 bp, SARS Virus
tgttaaaatccagaccggcgactca

SEQ ID NO: 29461 - DNA, 25 bp, SARS Virus
gttaaaatccaggccggcgactcac

SEQ ID NO: 29462 - DNA, 25 bp, SARS Virus
ttaaaatccagagcggcgactcacc

SEQ ID NO: 29463 - DNA, 25 bp, SARS Virus
taaaatccagacgggcgactcaccc

SEQ ID NO: 29464 - DNA, 25 bp, SARS Virus
aaaatccagaccggcgactcaccca

SEQ ID NO: 29465 - DNA, 25 bp, SARS Virus
aaatccagaccggcgactcacccaa

SEQ ID NO: 29466 - DNA, 25 bp, SARS Virus
aatccagaccggggactcacccaaa

SEQ ID NO: 29467 - DNA, 25 bp, SARS Virus
atccagaccggcgactcacccaaaa

SEQ ID NO: 29468 - DNA, 25 bp, SARS Virus
tccagaccggcggctcacccaaaac

SEQ ID NO: 29469 - DNA, 25 bp, SARS Virus
ccagaccggcgagtcacccaaaacc

SEQ ID NO: 29470 - DNA, 25 bp, SARS Virus
cagaccggcgacgcacccaaaaccg

SEQ ID NO: 29471 - DNA, 25 bp, SARS Virus
agaccggcgactgacccaaaaccgt

SEQ ID NO: 29472 - DNA, 25 bp, SARS Virus
gaccggcgactcgcccaaaaccgta

SEQ ID NO: 29473 - DNA, 25 bp, SARS Virus
accggcgactcagccaaaaccgtat

SEQ ID NO: 29474 - DNA, 25 bp, SARS Virus
ccggcgactcacgcaaaaccgtata

SEQ ID NO: 29475 - DNA, 25 bp, SARS Virus
cggcgactcaccgaaaaccgtatat

SEQ ID NO: 29476 - DNA, 25 bp, SARS Virus
ggcgactcacccgaaaccgtatata

SEQ ID NO: 29477 - DNA, 25 bp, SARS Virus
gcgactcacccagaaccgtatatac

SEQ ID NO: 29478 - DNA, 25 bp, SARS Virus
cgactcacccaagaccgtatataca

SEQ ID NO: 29479 - DNA, 25 bp, SARS Virus
gactcacccaaagccgtatatacaa

SEQ ID NO: 29480 - DNA, 25 bp, SARS Virus
actcacccaaaagcgtatatacaac

SEQ ID NO: 29481 - DNA, 25 bp, SARS Virus
ctcacccaaaacggtatatacaaca

SEQ ID NO: 29482 - DNA, 25 bp, SARS Virus
tcacccaaaaccgtatatacaacaa

SEQ ID NO: 29483 - DNA, 25 bp, SARS Virus
cacccaaaaccggatatacaacaag

SEQ ID NO: 29484 - DNA, 25 bp, SARS Virus
acccaaaaccgtgtatacaacaagt

SEQ ID NO: 29485 - DNA, 25 bp, SARS Virus
cccaaaaccgtagatacaacaagtg

SEQ ID NO: 29486 - DNA, 25 bp, SARS Virus
ccaaaaccgtatgtacaacaagtgt

SEQ ID NO: 29487 - DNA, 25 bp, SARS Virus
caaaaccgtatagacaacaagtgtt

SEQ ID NO: 29488 - DNA, 25 bp, SARS Virus
aaaaccgtatatgcaacaagtgttt

SEQ ID NO: 29489 - DNA, 25 bp, SARS Virus
aaaccgtatatagaacaagtgtttt

SEQ ID NO: 29490 - DNA, 25 bp, SARS Virus
aaccgtatatacgacaagtgtttta

SEQ ID NO: 29491 - DNA, 25 bp, SARS Virus
accgtatatacagcaagtgttttaa

SEQ ID NO: 29492 - DNA, 25 bp, SARS Virus
ccgtatatacaagaagtgttttaag

SEQ ID NO: 29493 - DNA, 25 bp, SARS Virus
cgtatatacaacgagtgttttaaga

SEQ ID NO: 29494 - DNA, 25 bp, SARS Virus
gtatatacaacaggtgttttaagaa

SEQ ID NO: 29495 - DNA, 25 bp, SARS Virus
tatatacaacaagtgttttaagaaa

SEQ ID NO: 29496 - DNA, 25 bp, SARS Virus
atatacaacaagggttttaagaaaa

SEQ ID NO: 29497 - DNA, 25 bp, SARS Virus
tatacaacaagtgttttaagaaaat

SEQ ID NO: 29498 - DNA, 25 bp, SARS Virus
atacaacaagtggtttaagaaaata

SEQ ID NO: 29499 - DNA, 25 bp, SARS Virus
tacaacaagtgtgttaagaaaataa

SEQ ID NO: 29500 - DNA, 25 bp, SARS Virus
acaacaagtgttgtaagaaaataaa

SEQ ID NO: 29501 - DNA, 25 bp, SARS Virus
caacaagtgtttgaagaaaataaat

SEQ ID NO: 29502 - DNA, 25 bp, SARS Virus
aacaagtgttttgagaaaataaata

SEQ ID NO: 29503 - DNA, 25 bp, SARS Virus
acaagtgttttaggaaaataaataa

SEQ ID NO: 29504 - DNA, 25 bp, SARS Virus
caagtgttttaagaaaataaataat

SEQ ID NO: 29505 - DNA, 25 bp, SARS Virus
aagtgttttaaggaaataaataatc

SEQ ID NO: 29506 - DNA, 25 bp, SARS Virus
agtgttttaagagaataaataatcc

SEQ ID NO: 29507 - DNA, 25 bp, SARS Virus
gtgttttaagaagataaataatcca

SEQ ID NO: 29508 - DNA, 25 bp, SARS Virus
tgttttaagaaagtaaataatccag

SEQ ID NO: 29509 - DNA, 25 bp, SARS Virus
gttttaagaaaagaaataatccaga

SEQ ID NO: 29510 - DNA, 25 bp, SARS Virus
ttttaagaaaatgaataatccagaa

SEQ ID NO: 29511 - DNA, 25 bp, SARS Virus
tttaagaaaatagataatccagaaa

SEQ ID NO: 29512 - DNA, 25 bp, SARS Virus
ttaagaaaataagtaatccagaaag

SEQ ID NO: 29513 - DNA, 25 bp, SARS Virus
taagaaaataaagaatccagaaagt

SEQ ID NO: 29514 - DNA, 25 bp, SARS Virus
aagaaaataaatgatccagaaagtc

SEQ ID NO: 29515 - DNA, 25 bp, SARS Virus
agaaaataaatagtccagaaagtcg

SEQ ID NO: 29516 - DNA, 25 bp, SARS Virus
gaaaataaataagccagaaagtcga

SEQ ID NO: 29517 - DNA, 25 bp, SARS Virus
aaaataaataatgcagaaagtcgat

SEQ ID NO: 29518 - DNA, 25 bp, SARS Virus
aaataaataatcgagaaagtcgata

SEQ ID NO: 29519 - DNA, 25 bp, SARS Virus
aataaataatccggaaagtcgatat

SEQ ID NO: 29520 - DNA, 25 bp, SARS Virus
ataaataatccagaaagtcgatatt

SEQ ID NO: 29521 - DNA, 25 bp, SARS Virus
taaataatccaggaagtcgatatta

SEQ ID NO: 29522 - DNA, 25 bp, SARS Virus
aaataatccagagagtcgatattac

SEQ ID NO: 29523 - DNA, 25 bp, SARS Virus
aataatccagaaggtcgatattacg

SEQ ID NO: 29524 - DNA, 25 bp, SARS Virus
ataatccagaaagtcgatattacgt

SEQ ID NO: 29525 - DNA, 25 bp, SARS Virus
taatccagaaaggcgatattacgtc

SEQ ID NO: 29526 - DNA, 25 bp, SARS Virus
aatccagaaagtggatattacgtcc

SEQ ID NO: 29527 - DNA, 25 bp, SARS Virus
atccagaaagtcgatattacgtcca

SEQ ID NO: 29528 - DNA, 25 bp, SARS Virus
tccagaaagtcggtattacgtccac

SEQ ID NO: 29529 - DNA, 25 bp, SARS Virus
ccagaaagtcgagattacgtccaca

SEQ ID NO: 29530 - DNA, 25 bp, SARS Virus
cagaaagtcgatgttacgtccacaa

SEQ ID NO: 29531 - DNA, 25 bp, SARS Virus
agaaagtcgatagtacgtccacaag

SEQ ID NO: 29532 - DNA, 25 bp, SARS Virus
gaaagtcgatatgacgtccacaaga

SEQ ID NO: 29533 - DNA, 25 bp, SARS Virus
aaagtcgatattgcgtccacaagaa

SEQ ID NO: 29534 - DNA, 25 bp, SARS Virus
aagtcgatattaggtccacaagaaa

SEQ ID NO: 29535 - DNA, 25 bp, SARS Virus
agtcgatattacgtccacaagaaac

SEQ ID NO: 29536 - DNA, 25 bp, SARS Virus
gtcgatattacggccacaagaaacc

SEQ ID NO: 29537 - DNA, 25 bp, SARS Virus
tcgatattacgtgcacaagaaaccg

SEQ ID NO: 29538 - DNA, 25 bp, SARS Virus
cgatattacgtcgacaagaaaccga

SEQ ID NO: 29539 - DNA, 25 bp, SARS Virus
gatattacgtccgcaagaaaccgat

SEQ ID NO: 29540 - DNA, 25 bp, SARS Virus
atattacgtccagaagaaaccgata

SEQ ID NO: 29541 - DNA, 25 bp, SARS Virus
tattacgtccacgagaaaccgataa

SEQ ID NO: 29542 - DNA, 25 bp, SARS Virus
attacgtccacaggaaaccgataaa

SEQ ID NO: 29543 - DNA, 25 bp, SARS Virus
ttacgtccacaagaaaccgataaaa

SEQ ID NO: 29544 - DNA, 25 bp, SARS Virus
tacgtccacaaggaaccgataaaac

SEQ ID NO: 29545 - DNA, 25 bp, SARS Virus
acgtccacaagagaccgataaaacg

SEQ ID NO: 29546 - DNA, 25 bp, SARS Virus
cgtccacaagaagccgataaaacga

SEQ ID NO: 29547 - DNA, 25 bp, SARS Virus
gtccacaagaaagcgataaaacgat

SEQ ID NO: 29548 - DNA, 25 bp, SARS Virus
tccacaagaaacggataaaacgatc

SEQ ID NO: 29549 - DNA, 25 bp, SARS Virus
ccacaagaaaccgataaaacgatca

SEQ ID NO: 29550 - DNA, 25 bp, SARS Virus
cacaagaaaccggtaaaacgatcag

SEQ ID NO: 29551 - DNA, 25 bp, SARS Virus
acaagaaaccgagaaaacgatcagt

SEQ ID NO: 29552 - DNA, 25 bp, SARS Virus
caagaaaccgatgaaacgatcagta

SEQ ID NO: 29553 - DNA, 25 bp, SARS Virus
aagaaaccgatagaacgatcagtaa

SEQ ID NO: 29554 - DNA, 25 bp, SARS Virus
agaaaccgataagacgatcagtaaa

SEQ ID NO: 29555 - DNA, 25 bp, SARS Virus
gaaaccgataaagcgatcagtaaag

SEQ ID NO: 29556 - DNA, 25 bp, SARS Virus
aaaccgataaaaggatcagtaaagt

SEQ ID NO: 29557 - DNA, 25 bp, SARS Virus
aaccgataaaacgatcagtaaagta

SEQ ID NO: 29558 - DNA, 25 bp, SARS Virus
accgataaaacggtcagtaaagtag

SEQ ID NO: 29559 - DNA, 25 bp, SARS Virus
ccgataaaacgagcagtaaagtagt

SEQ ID NO: 29560 - DNA, 25 bp, SARS Virus
cgataaaacgatgagtaaagtagtc

SEQ ID NO: 29561 - DNA, 25 bp, SARS Virus
gataaaacgatcggtaaagtagtcg

SEQ ID NO: 29562 - DNA, 25 bp, SARS Virus
ataaaacgatcagtaaagtagtcgt

SEQ ID NO: 29563 - DNA, 25 bp, SARS Virus
taaaacgatcaggaaagtagtcgtt

SEQ ID NO: 29564 - DNA, 25 bp, SARS Virus
aaaacgatcagtgaagtagtcgtta

SEQ ID NO: 29565 - DNA, 25 bp, SARS Virus
aaacgatcagtagagtagtcgttaa

SEQ ID NO: 29566 - DNA, 25 bp, SARS Virus
aacgatcagtaaggtagtcgttaag

SEQ ID NO: 29567 - DNA, 25 bp, SARS Virus
acgatcagtaaagtagtcgttaaga

SEQ ID NO: 29568 - DNA, 25 bp, SARS Virus
cgatcagtaaaggagtcgttaagaa

SEQ ID NO: 29569 - DNA, 25 bp, SARS Virus
gatcagtaaagtggtcgttaagaac

SEQ ID NO: 29570 - DNA, 25 bp, SARS Virus
atcagtaaagtagtcgttaagaacc

SEQ ID NO: 29571 - DNA, 25 bp, SARS Virus
tcagtaaagtaggcgttaagaaccg

SEQ ID NO: 29572 - DNA, 25 bp, SARS Virus
cagtaaagtagtggttaagaaccga

SEQ ID NO: 29573 - DNA, 25 bp, SARS Virus
agtaaagtagtcgttaagaaccgag

SEQ ID NO: 29574 - DNA, 25 bp, SARS Virus
gtaaagtagtcggtaagaaccgagt

SEQ ID NO: 29575 - DNA, 25 bp, SARS Virus
taaagtagtcgtgaagaaccgagta

SEQ ID NO: 29576 - DNA, 25 bp, SARS Virus
aaagtagtcgttgagaaccgagtac

SEQ ID NO: 29577 - DNA, 25 bp, SARS Virus
aagtagtcgttaggaaccgagtaca

SEQ ID NO: 29578 - DNA, 25 bp, SARS Virus
agtagtcgttaagaaccgagtacac

SEQ ID NO: 29579 - DNA, 25 bp, SARS Virus
gtagtcgttaaggaccgagtacacc

SEQ ID NO: 29580 - DNA, 25 bp, SARS Virus
tagtcgttaagagccgagtacacca

SEQ ID NO: 29581 - DNA, 25 bp, SARS Virus
agtcgttaagaagcgagtacaccaa

SEQ ID NO: 29582 - DNA, 25 bp, SARS Virus
gtcgttaagaacggagtacaccaaa

SEQ ID NO: 29583 - DNA, 25 bp, SARS Virus
tcgttaagaaccgagtacaccaaat

SEQ ID NO: 29584 - DNA, 25 bp, SARS Virus
cgttaagaaccgggtacaccaaata

SEQ ID NO: 29585 - DNA, 25 bp, SARS Virus
gttaagaaccgagtacaccaaatag

SEQ ID NO: 29586 - DNA, 25 bp, SARS Virus
ttaagaaccgaggacaccaaatagt

SEQ ID NO: 29587 - DNA, 25 bp, SARS Virus
taagaaccgagtgcaccaaatagta

SEQ ID NO: 29588 - DNA, 25 bp, SARS Virus
aagaaccgagtagaccaaatagtaa

SEQ ID NO: 29589 - DNA, 25 bp, SARS Virus
agaaccgagtacgccaaatagtaat

SEQ ID NO: 29590 - DNA, 25 bp, SARS Virus
gaaccgagtacagcaaatagtaatc

SEQ ID NO: 29591 - DNA, 25 bp, SARS Virus
aaccgagtacacgaaatagtaatca

SEQ ID NO: 29592 - DNA, 25 bp, SARS Virus
accgagtacaccgaatagtaatcat

SEQ ID NO: 29593 - DNA, 25 bp, SARS Virus
ccgagtacaccagatagtaatcata

SEQ ID NO: 29594 - DNA, 25 bp, SARS Virus
cgagtacaccaagtagtaatcataa

SEQ ID NO: 29595 - DNA, 25 bp, SARS Virus
gagtacaccaaagagtaatcataac

SEQ ID NO: 29596 - DNA, 25 bp, SARS Virus
agtacaccaaatggtaatcataaca

SEQ ID NO: 29597 - DNA, 25 bp, SARS Virus
gtacaccaaatagtaatcataacat

SEQ ID NO: 29598 - DNA, 25 bp, SARS Virus
tacaccaaataggaatcataacatg

SEQ ID NO: 29599 - DNA, 25 bp, SARS Virus
acaccaaatagtgatcataacatgt

SEQ ID NO: 29600 - DNA, 25 bp, SARS Virus
caccaaatagtagtcataacatgtt

SEQ ID NO: 29601 - DNA, 25 bp, SARS Virus
accaaatagtaagcataacatgttt

SEQ ID NO: 29602 - DNA, 25 bp, SARS Virus
ccaaatagtaatgataacatgttta

SEQ ID NO: 29603 - DNA, 25 bp, SARS Virus
caaatagtaatcgtaacatgtttac

SEQ ID NO: 29604 - DNA, 25 bp, SARS Virus
aaatagtaatcagaacatgtttacc

SEQ ID NO: 29605 - DNA, 25 bp, SARS Virus
aatagtaatcatgacatgtttaccg

SEQ ID NO: 29606 - DNA, 25 bp, SARS Virus
atagtaatcatagcatgtttaccgt

SEQ ID NO: 29607 - DNA, 25 bp, SARS Virus
tagtaatcataagatgtttaccgtg

SEQ ID NO: 29608 - DNA, 25 bp, SARS Virus
agtaatcataacgtgtttaccgtgg

SEQ ID NO: 29609 - DNA, 25 bp, SARS Virus
gtaatcataacaggtttaccgtggg

SEQ ID NO: 29610 - DNA, 25 bp, SARS Virus
taatcataacatgtttaccgtgggc

SEQ ID NO: 29611 - DNA, 25 bp, SARS Virus
aatcataacatggttaccgtgggca

SEQ ID NO: 29612 - DNA, 25 bp, SARS Virus
atcataacatgtgtaccgtgggcaa

SEQ ID NO: 29613 - DNA, 25 bp, SARS Virus
tcataacatgttgaccgtgggcaaa

SEQ ID NO: 29614 - DNA, 25 bp, SARS Virus
cataacatgtttgccgtgggcaaag

SEQ ID NO: 29615 - DNA, 25 bp, SARS Virus
ataacatgtttagcgtgggcaaaga

SEQ ID NO: 29616 - DNA, 25 bp, SARS Virus
taacatgtttacggtgggcaaagac

SEQ ID NO: 29617 - DNA, 25 bp, SARS Virus
aacatgtttaccgtgggcaaagacg

SEQ ID NO: 29618 - DNA, 25 bp, SARS Virus
acatgtttaccgggggcaaagacgt

SEQ ID NO: 29619 - DNA, 25 bp, SARS Virus
catgtttaccgtgggcaaagacgtt

SEQ ID NO: 29620 - DNA, 25 bp, SARS Virus
atgtttaccgtgggcaaagacgtta

SEQ ID NO: 29621 - DNA, 25 bp, SARS Virus
tgtttaccgtgggcaaagacgttac

SEQ ID NO: 29622 - DNA, 25 bp, SARS Virus
gtttaccgtggggaaagacgttacc

SEQ ID NO: 29623 - DNA, 25 bp, SARS Virus
tttaccgtgggcgaagacgttacca

SEQ ID NO: 29624 - DNA, 25 bp, SARS Virus
ttaccgtgggcagagacgttaccaa

SEQ ID NO: 29625 - DNA, 25 bp, SARS Virus
taccgtgggcaaggacgttaccaat

SEQ ID NO: 29626 - DNA, 25 bp, SARS Virus
accgtgggcaaagacgttaccaatc

SEQ ID NO: 29627 - DNA, 25 bp, SARS Virus
ccgtgggcaaaggcgttaccaatcc

SEQ ID NO: 29628 - DNA, 25 bp, SARS Virus
cgtgggcaaagaggttaccaatcct

SEQ ID NO: 29629 - DNA, 25 bp, SARS Virus
gtgggcaaagacgttaccaatccta

SEQ ID NO: 29630 - DNA, 25 bp, SARS Virus
tgggcaaagacggtaccaatcctac

SEQ ID NO: 29631 - DNA, 25 bp, SARS Virus
gggcaaagacgtgaccaatcctaca

SEQ ID NO: 29632 - DNA, 25 bp, SARS Virus
ggcaaagacgttgccaatcctacat

SEQ ID NO: 29633 - DNA, 25 bp, SARS Virus
gcaaagacgttagcaatcctacatg

SEQ ID NO: 29634 - DNA, 25 bp, SARS Virus
caaagacgttacgaatcctacatgt

SEQ ID NO: 29635 - DNA, 25 bp, SARS Virus
aaagacgttaccgatcctacatgta

SEQ ID NO: 29636 - DNA, 25 bp, SARS Virus
aagacgttaccagtcctacatgtag

SEQ ID NO: 29637 - DNA, 25 bp, SARS Virus
agacgttaccaagcctacatgtaga

SEQ ID NO: 29638 - DNA, 25 bp, SARS Virus
gacgttaccaatgctacatgtagaa

SEQ ID NO: 29639 - DNA, 25 bp, SARS Virus
acgttaccaatcgtacatgtagaag

SEQ ID NO: 29640 - DNA, 25 bp, SARS Virus
cgttaccaatccgacatgtagaaga

SEQ ID NO: 29641 - DNA, 25 bp, SARS Virus
gttaccaatcctgcatgtagaagaa

SEQ ID NO: 29642 - DNA, 25 bp, SARS Virus
ttaccaatcctagatgtagaagaaa

SEQ ID NO: 29643 - DNA, 25 bp, SARS Virus
taccaatcctacgtgtagaagaaac

SEQ ID NO: 29644 - DNA, 25 bp, SARS Virus
accaatcctacaggtagaagaaacg

SEQ ID NO: 29645 - DNA, 25 bp, SARS Virus
ccaatcctacatgtagaagaaacga

SEQ ID NO: 29646 - DNA, 25 bp, SARS Virus
caatcctacatggagaagaaacgaa

SEQ ID NO: 29647 - DNA, 25 bp, SARS Virus
aatcctacatgtggaagaaacgaag

SEQ ID NO: 29648 - DNA, 25 bp, SARS Virus
atcctacatgtagaagaaacgaaga

SEQ ID NO: 29649 - DNA, 25 bp, SARS Virus
tcctacatgtaggagaaacgaagaa

SEQ ID NO: 29650 - DNA, 25 bp, SARS Virus
cctacatgtagaggaaacgaagaaa

SEQ ID NO: 29651 - DNA, 25 bp, SARS Virus
ctacatgtagaagaaacgaagaaag

SEQ ID NO: 29652 - DNA, 25 bp, SARS Virus
tacatgtagaaggaacgaagaaaga

SEQ ID NO: 29653 - DNA, 25 bp, SARS Virus
acatgtagaagagacgaagaaagat

SEQ ID NO: 29654 - DNA, 25 bp, SARS Virus
catgtagaagaagcgaagaaagatg

SEQ ID NO: 29655 - DNA, 25 bp, SARS Virus
atgtagaagaaaggaagaaagatga

SEQ ID NO: 29656 - DNA, 25 bp, SARS Virus
tgtagaagaaacgaagaaagatgat

SEQ ID NO: 29657 - DNA, 25 bp, SARS Virus
gtagaagaaacggagaaagatgatg

SEQ ID NO: 29658 - DNA, 25 bp, SARS Virus
tagaagaaacgaggaaagatgatgt

SEQ ID NO: 29659 - DNA, 25 bp, SARS Virus
agaagaaacgaagaaagatgatgta

SEQ ID NO: 29660 - DNA, 25 bp, SARS Virus
gaagaaacgaaggaagatgatgtat

SEQ ID NO: 29661 - DNA, 25 bp, SARS Virus
aagaaacgaagagagatgatgtata

SEQ ID NO: 29662 - DNA, 25 bp, SARS Virus
agaaacgaagaaggatgatgtatac

SEQ ID NO: 29663 - DNA, 25 bp, SARS Virus
gaaacgaagaaagatgatgtatacc

SEQ ID NO: 29664 - DNA, 25 bp, SARS Virus
aaacgaagaaaggtgatgtatacct

SEQ ID NO: 29665 - DNA, 25 bp, SARS Virus
aacgaagaaagaggatgtatacctt

SEQ ID NO: 29666 - DNA, 25 bp, SARS Virus
acgaagaaagatgatgtataccttc

SEQ ID NO: 29667 - DNA, 25 bp, SARS Virus
cgaagaaagatggtgtataccttct

SEQ ID NO: 29668 - DNA, 25 bp, SARS Virus
gaagaaagatgaggtataccttctc

SEQ ID NO: 29669 - DNA, 25 bp, SARS Virus
aagaaagatgatgtataccttctcg

SEQ ID NO: 29670 - DNA, 25 bp, SARS Virus
agaaagatgatggataccttctcga

SEQ ID NO: 29671 - DNA, 25 bp, SARS Virus
gaaagatgatgtgtaccttctcgat

SEQ ID NO: 29672 - DNA, 25 bp, SARS Virus
aaagatgatgtagaccttctcgata

SEQ ID NO: 29673 - DNA, 25 bp, SARS Virus
aagatgatgtatgccttctcgatac

SEQ ID NO: 29674 - DNA, 25 bp, SARS Virus
agatgatgtatagcttctcgataca

SEQ ID NO: 29675 - DNA, 25 bp, SARS Virus
gatgatgtatacgttctcgatacaa

SEQ ID NO: 29676 - DNA, 25 bp, SARS Virus
atgatgtataccgtctcgatacaag

SEQ ID NO: 29677 - DNA, 25 bp, SARS Virus
tgatgtatacctgctcgatacaagt

SEQ ID NO: 29678 - DNA, 25 bp, SARS Virus
gatgtataccttgtcgatacaagta

SEQ ID NO: 29679 - DNA, 25 bp, SARS Virus
atgtataccttcgcgatacaagtat

SEQ ID NO: 29680 - DNA, 25 bp, SARS Virus
tgtataccttctggatacaagtata

SEQ ID NO: 29681 - DNA, 25 bp, SARS Virus
gtataccttctcgatacaagtatag

SEQ ID NO: 29682 - DNA, 25 bp, SARS Virus
tataccttctcggtacaagtatagt

SEQ ID NO: 29683 - DNA, 25 bp, SARS Virus
ataccttctcgagacaagtatagta

SEQ ID NO: 29684 - DNA, 25 bp, SARS Virus
taccttctcgatgcaagtatagtac

SEQ ID NO: 29685 - DNA, 25 bp, SARS Virus
accttctcgatagaagtatagtacc

SEQ ID NO: 29686 - DNA, 25 bp, SARS Virus
ccttctcgatacgagtatagtacct

SEQ ID NO: 29687 - DNA, 25 bp, SARS Virus
cttctcgatacaggtatagtaccta

SEQ ID NO: 29688 - DNA, 25 bp, SARS Virus
ttctcgatacaagtatagtacctac

SEQ ID NO: 29689 - DNA, 25 bp, SARS Virus
tctcgatacaaggatagtacctacc

SEQ ID NO: 29690 - DNA, 25 bp, SARS Virus
ctcgatacaagtgtagtacctacca

SEQ ID NO: 29691 - DNA, 25 bp, SARS Virus
tcgatacaagtagagtacctaccaa

SEQ ID NO: 29692 - DNA, 25 bp, SARS Virus
cgatacaagtatggtacctaccaac

SEQ ID NO: 29693 - DNA, 25 bp, SARS Virus
gatacaagtatagtacctaccaacg

SEQ ID NO: 29694 - DNA, 25 bp, SARS Virus
atacaagtataggacctaccaacgt

SEQ ID NO: 29695 - DNA, 25 bp, SARS Virus
tacaagtatagtgcctaccaacgtg

SEQ ID NO: 29696 - DNA, 25 bp, SARS Virus
acaagtatagtagctaccaacgtgg

SEQ ID NO: 29697 - DNA, 25 bp, SARS Virus
caagtatagtacgtaccaacgtgga

SEQ ID NO: 29698 - DNA, 25 bp, SARS Virus
aagtatagtaccgaccaacgtggag

SEQ ID NO: 29699 - DNA, 25 bp, SARS Virus
agtatagtacctgccaacgtggaga

SEQ ID NO: 29700 - DNA, 25 bp, SARS Virus
gtatagtacctagcaacgtggagaa

SEQ ID NO: 29701 - DNA, 25 bp, SARS Virus
tatagtacctacgaacgtggagaag

SEQ ID NO: 29702 - DNA, 25 bp, SARS Virus
atagtacctaccgacgtggagaagc

SEQ ID NO: 29703 - DNA, 25 bp, SARS Virus
tagtacctaccagcgtggagaagct

SEQ ID NO: 29704 - DNA, 25 bp, SARS Virus
agtacctaccaaggtggagaagctg

SEQ ID NO: 29705 - DNA, 25 bp, SARS Virus
gtacctaccaacgtggagaagctga

SEQ ID NO: 29706 - DNA, 25 bp, SARS Virus
tacctaccaacggggagaagctgaa

SEQ ID NO: 29707 - DNA, 25 bp, SARS Virus
acctaccaacgtggagaagctgaac

SEQ ID NO: 29708 - DNA, 25 bp, SARS Virus
cctaccaacgtggagaagctgaacg

SEQ ID NO: 29709 - DNA, 25 bp, SARS Virus
ctaccaacgtggggaagctgaacgt

SEQ ID NO: 29710 - DNA, 25 bp, SARS Virus
taccaacgtggagaagctgaacgta

SEQ ID NO: 29711 - DNA, 25 bp, SARS Virus
accaacgtggaggagctgaacgtac

SEQ ID NO: 29712 - DNA, 25 bp, SARS Virus
ccaacgtggagaggctgaacgtact

SEQ ID NO: 29713 - DNA, 25 bp, SARS Virus
caacgtggagaagctgaacgtacta

SEQ ID NO: 29714 - DNA, 25 bp, SARS Virus
aacgtggagaaggtgaacgtactac

SEQ ID NO: 29715 - DNA, 25 bp, SARS Virus
acgtggagaagcggaacgtactaca

SEQ ID NO: 29716 - DNA, 25 bp, SARS Virus
cgtggagaagctgaacgtactacac

SEQ ID NO: 29717 - DNA, 25 bp, SARS Virus
gtggagaagctggacgtactacacg

SEQ ID NO: 29718 - DNA, 25 bp, SARS Virus
tggagaagctgagcgtactacacga

SEQ ID NO: 29719 - DNA, 25 bp, SARS Virus
ggagaagctgaaggtactacacgat

SEQ ID NO: 29720 - DNA, 25 bp, SARS Virus
gagaagctgaacgtactacacgata

SEQ ID NO: 29721 - DNA, 25 bp, SARS Virus
agaagctgaacggactacacgatat

SEQ ID NO: 29722 - DNA, 25 bp, SARS Virus
gaagctgaacgtgctacacgatatt

SEQ ID NO: 29723 - DNA, 25 bp, SARS Virus
aagctgaacgtagtacacgatattc

SEQ ID NO: 29724 - DNA, 25 bp, SARS Virus
agctgaacgtacgacacgatattcg

SEQ ID NO: 29725 - DNA, 25 bp, SARS Virus
gctgaacgtactgcacgatattcgc

SEQ ID NO: 29726 - DNA, 25 bp, SARS Virus
ctgaacgtactagacgatattcgcg

SEQ ID NO: 29727 - DNA, 25 bp, SARS Virus
tgaacgtactacgcgatattcgcgt

SEQ ID NO: 29728 - DNA, 25 bp, SARS Virus
gaacgtactacaggatattcgcgtt

SEQ ID NO: 29729 - DNA, 25 bp, SARS Virus
aacgtactacacgatattcgcgtta

SEQ ID NO: 29730 - DNA, 25 bp, SARS Virus
acgtactacacggtattcgcgttag

SEQ ID NO: 29731 - DNA, 25 bp, SARS Virus
cgtactacacgagattcgcgttagc

SEQ ID NO: 29732 - DNA, 25 bp, SARS Virus
gtactacacgatgttcgcgttagca

SEQ ID NO: 29733 - DNA, 25 bp, SARS Virus
tactacacgatagtcgcgttagcac

SEQ ID NO: 29734 - DNA, 25 bp, SARS Virus
actacacgatatgcgcgttagcacg

SEQ ID NO: 29735 - DNA, 25 bp, SARS Virus
ctacacgatattggcgttagcacgg

SEQ ID NO: 29736 - DNA, 25 bp, SARS Virus
tacacgatattcgcgttagcacggt

SEQ ID NO: 29737 - DNA, 25 bp, SARS Virus
acacgatattcgggttagcacggtg

SEQ ID NO: 29738 - DNA, 25 bp, SARS Virus
cacgatattcgcgttagcacggtgt

SEQ ID NO: 29739 - DNA, 25 bp, SARS Virus
acgatattcgcggtagcacggtgtg

SEQ ID NO: 29740 - DNA, 25 bp, SARS Virus
cgatattcgcgtgagcacggtgtgc

SEQ ID NO: 29741 - DNA, 25 bp, SARS Virus
gatattcgcgttggcacggtgtgcg

SEQ ID NO: 29742 - DNA, 25 bp, SARS Virus
atattcgcgttagcacggtgtgcgc

SEQ ID NO: 29743 - DNA, 25 bp, SARS Virus
tattcgcgttaggacggtgtgcgca

SEQ ID NO: 29744 - DNA, 25 bp, SARS Virus
attcgcgttagcgcggtgtgcgcaa

SEQ ID NO: 29745 - DNA, 25 bp, SARS Virus
ttcgcgttagcagggtgtgcgcaac

SEQ ID NO: 29746 - DNA, 25 bp, SARS Virus
tcgcgttagcacggtgtgcgcaact

SEQ ID NO: 29747 - DNA, 25 bp, SARS Virus
cgcgttagcacggtgtgcgcaactc

SEQ ID NO: 29748 - DNA, 25 bp, SARS Virus
gcgttagcacggggtgcgcaactca

SEQ ID NO: 29749 - DNA, 25 bp, SARS Virus
cgttagcacggtgtgcgcaactcac

SEQ ID NO: 29750 - DNA, 25 bp, SARS Virus
gttagcacggtgggcgcaactcaca

SEQ ID NO: 29751 - DNA, 25 bp, SARS Virus
ttagcacggtgtgcgcaactcacat

SEQ ID NO: 29752 - DNA, 25 bp, SARS Virus
tagcacggtgtgggcaactcacatg

SEQ ID NO: 29753 - DNA, 25 bp, SARS Virus
agcacggtgtgcgcaactcacatgt

SEQ ID NO: 29754 - DNA, 25 bp, SARS Virus
gcacggtgtgcggaactcacatgtt

SEQ ID NO: 29755 - DNA, 25 bp, SARS Virus
cacggtgtgcgcgactcacatgttg

SEQ ID NO: 29756 - DNA, 25 bp, SARS Virus
acggtgtgcgcagctcacatgttga

SEQ ID NO: 29757 - DNA, 25 bp, SARS Virus
cggtgtgcgcaagtcacatgttgat

SEQ ID NO: 29758 - DNA, 25 bp, SARS Virus
ggtgtgcgcaacgcacatgttgata

SEQ ID NO: 29759 - DNA, 25 bp, SARS Virus
gtgtgcgcaactgacatgttgataa

SEQ ID NO: 29760 - DNA, 25 bp, SARS Virus
tgtgcgcaactcgcatgttgataac

SEQ ID NO: 29761 - DNA, 25 bp, SARS Virus
gtgcgcaactcagatgttgataaca

SEQ ID NO: 29762 - DNA, 25 bp, SARS Virus
tgcgcaactcacgtgttgataacaa

SEQ ID NO: 29763 - DNA, 25 bp, SARS Virus
gcgcaactcacaggttgataacaat

SEQ ID NO: 29764 - DNA, 25 bp, SARS Virus
cgcaactcacatgttgataacaatt

SEQ ID NO: 29765 - DNA, 25 bp, SARS Virus
gcaactcacatggtgataacaatta

SEQ ID NO: 29766 - DNA, 25 bp, SARS Virus
caactcacatgtggataacaattac

SEQ ID NO: 29767 - DNA, 25 bp, SARS Virus
aactcacatgttgataacaattacc

SEQ ID NO: 29768 - DNA, 25 bp, SARS Virus
actcacatgttggtaacaattaccg

SEQ ID NO: 29769 - DNA, 25 bp, SARS Virus
ctcacatgttgagaacaattaccgt

SEQ ID NO: 29770 - DNA, 25 bp, SARS Virus
tcacatgttgatgacaattaccgta

SEQ ID NO: 29771 - DNA, 25 bp, SARS Virus
cacatgttgatagcaattaccgtac

SEQ ID NO: 29772 - DNA, 25 bp, SARS Virus
acatgttgataagaattaccgtact

SEQ ID NO: 29773 - DNA, 25 bp, SARS Virus
catgttgataacgattaccgtactt

SEQ ID NO: 29774 - DNA, 25 bp, SARS Virus
atgttgataacagttaccgtacttc

SEQ ID NO: 29775 - DNA, 25 bp, SARS Virus
tgttgataacaagtaccgtacttct

SEQ ID NO: 29776 - DNA, 25 bp, SARS Virus
gttgataacaatgaccgtacttctc

SEQ ID NO: 29777 - DNA, 25 bp, SARS Virus
ttgataacaattgccgtacttctct

SEQ ID NO: 29778 - DNA, 25 bp, SARS Virus
tgataacaattagcgtacttctcta

SEQ ID NO: 29779 - DNA, 25 bp, SARS Virus
gataacaattacggtacttctctag

SEQ ID NO: 29780 - DNA, 25 bp, SARS Virus
ataacaattaccgtacttctctaga

SEQ ID NO: 29781 - DNA, 25 bp, SARS Virus
taacaattaccggacttctctagaa

SEQ ID NO: 29782 - DNA, 25 bp, SARS Virus
aacaattaccgtgcttctctagaaa

SEQ ID NO: 29783 - DNA, 25 bp, SARS Virus
acaattaccgtagttctctagaaag

SEQ ID NO: 29784 - DNA, 25 bp, SARS Virus
caattaccgtacgtctctagaaaga

SEQ ID NO: 29785 - DNA, 25 bp, SARS Virus
aattaccgtactgctctagaaagat

SEQ ID NO: 29786 - DNA, 25 bp, SARS Virus
attaccgtacttgtctagaaagata

SEQ ID NO: 29787 - DNA, 25 bp, SARS Virus
ttaccgtacttcgctagaaagatac

SEQ ID NO: 29788 - DNA, 25 bp, SARS Virus
taccgtacttctgtagaaagataca

SEQ ID NO: 29789 - DNA, 25 bp, SARS Virus
accgtacttctcgagaaagatacag

SEQ ID NO: 29790 - DNA, 25 bp, SARS Virus
ccgtacttctctggaaagatacaga

SEQ ID NO: 29791 - DNA, 25 bp, SARS Virus
cgtacttctctagaaagatacagat

SEQ ID NO: 29792 - DNA, 25 bp, SARS Virus
gtacttctctaggaagatacagata

SEQ ID NO: 29793 - DNA, 25 bp, SARS Virus
tacttctctagagagatacagatac

SEQ ID NO: 29794 - DNA, 25 bp, SARS Virus
acttctctagaaggatacagatacg

SEQ ID NO: 29795 - DNA, 25 bp, SARS Virus
cttctctagaaagatacagatacgt

SEQ ID NO: 29796 - DNA, 25 bp, SARS Virus
ttctctagaaaggtacagatacgtt

SEQ ID NO: 29797 - DNA, 25 bp, SARS Virus
tctctagaaagagacagatacgttt

SEQ ID NO: 29798 - DNA, 25 bp, SARS Virus
ctctagaaagatgcagatacgttta

SEQ ID NO: 29799 - DNA, 25 bp, SARS Virus
tctagaaagatagagatacgtttac

SEQ ID NO: 29800 - DNA, 25 bp, SARS Virus
ctagaaagatacggatacgtttacc

SEQ ID NO: 29801 - DNA, 25 bp, SARS Virus
tagaaagatacagatacgtttacct

SEQ ID NO: 29802 - DNA, 25 bp, SARS Virus
agaaagatacaggtacgtttacctc

SEQ ID NO: 29803 - DNA, 25 bp, SARS Virus
gaaagatacagagacgtttacctcc

SEQ ID NO: 29804 - DNA, 25 bp, SARS Virus
aaagatacagatgcgtttacctccg

SEQ ID NO: 29805 - DNA, 25 bp, SARS Virus
aagatacagataggtttacctccgg

SEQ ID NO: 29806 - DNA, 25 bp, SARS Virus
agatacagatacgtttacctccggc

SEQ ID NO: 29807 - DNA, 25 bp, SARS Virus
gatacagatacggttacctccggca

SEQ ID NO: 29808 - DNA, 25 bp, SARS Virus
atacagatacgtgtacctccggcac

SEQ ID NO: 29809 - DNA, 25 bp, SARS Virus
tacagatacgttgacctccggcacc

SEQ ID NO: 29810 - DNA, 25 bp, SARS Virus
acagatacgtttgcctccggcaccg

SEQ ID NO: 29811 - DNA, 25 bp, SARS Virus
cagatacgtttagctccggcaccga

SEQ ID NO: 29812 - DNA, 25 bp, SARS Virus
agatacgtttacgtccggcaccgaa

SEQ ID NO: 29813 - DNA, 25 bp, SARS Virus
gatacgtttaccgccggcaccgaag

SEQ ID NO: 29814 - DNA, 25 bp, SARS Virus
atacgtttacctgcggcaccgaaga

SEQ ID NO: 29815 - DNA, 25 bp, SARS Virus
tacgtttacctcgggcaccgaagac

SEQ ID NO: 29816 - DNA, 25 bp, SARS Virus
acgtttacctccggcaccgaagacg

SEQ ID NO: 29817 - DNA, 25 bp, SARS Virus
cgtttacctccggcaccgaagacgt

SEQ ID NO: 29818 - DNA, 25 bp, SARS Virus
gtttacctccgggaccgaagacgtt

SEQ ID NO: 29819 - DNA, 25 bp, SARS Virus
tttacctccggcgccgaagacgttc

SEQ ID NO: 29820 - DNA, 25 bp, SARS Virus
ttacctccggcagcgaagacgttct

SEQ ID NO: 29821 - DNA, 25 bp, SARS Virus
tacctccggcacggaagacgttctg

SEQ ID NO: 29822 - DNA, 25 bp, SARS Virus
acctccggcaccgaagacgttctga

SEQ ID NO: 29823 - DNA, 25 bp, SARS Virus
cctccggcaccggagacgttctgag

SEQ ID NO: 29824 - DNA, 25 bp, SARS Virus
ctccggcaccgaggacgttctgagt

SEQ ID NO: 29825 - DNA, 25 bp, SARS Virus
tccggcaccgaagacgttctgagtg

SEQ ID NO: 29826 - DNA, 25 bp, SARS Virus
ccggcaccgaaggcgttctgagtgt

SEQ ID NO: 29827 - DNA, 25 bp, SARS Virus
cggcaccgaagaggttctgagtgtt

SEQ ID NO: 29828 - DNA, 25 bp, SARS Virus
ggcaccgaagacgttctgagtgtta

SEQ ID NO: 29829 - DNA, 25 bp, SARS Virus
gcaccgaagacggtctgagtgttaa

SEQ ID NO: 29830 - DNA, 25 bp, SARS Virus
caccgaagacgtgctgagtgttaac

SEQ ID NO: 29831 - DNA, 25 bp, SARS Virus
accgaagacgttgtgagtgttaacc

SEQ ID NO: 29832 - DNA, 25 bp, SARS Virus
ccgaagacgttcggagtgttaacct

SEQ ID NO: 29833 - DNA, 25 bp, SARS Virus
cgaagacgttctgagtgttaacctt

SEQ ID NO: 29834 - DNA, 25 bp, SARS Virus
gaagacgttctgggtgttaacctta

SEQ ID NO: 29835 - DNA, 25 bp, SARS Virus
aagacgttctgagtgttaaccttaa

SEQ ID NO: 29836 - DNA, 25 bp, SARS Virus
agacgttctgagggttaaccttaac

SEQ ID NO: 29837 - DNA, 25 bp, SARS Virus
gacgttctgagtgttaaccttaaca

SEQ ID NO: 29838 - DNA, 25 bp, SARS Virus
acgttctgagtggtaaccttaacag

SEQ ID NO: 29839 - DNA, 25 bp, SARS Virus
cgttctgagtgtgaaccttaacaga

SEQ ID NO: 29840 - DNA, 25 bp, SARS Virus
gttctgagtgttgaccttaacagag

SEQ ID NO: 29841 - DNA, 25 bp, SARS Virus
ttctgagtgttagccttaacagagt

SEQ ID NO: 29842 - DNA, 25 bp, SARS Virus
tctgagtgttaagcttaacagagtt

SEQ ID NO: 29843 - DNA, 25 bp, SARS Virus
ctgagtgttaacgttaacagagtta

SEQ ID NO: 29844 - DNA, 25 bp, SARS Virus
tgagtgttaaccgtaacagagttaa

SEQ ID NO: 29845 - DNA, 25 bp, SARS Virus
gagtgttaacctgaacagagttaac

SEQ ID NO: 29846 - DNA, 25 bp, SARS Virus
agtgttaaccttgacagagttaaca

SEQ ID NO: 29847 - DNA, 25 bp, SARS Virus
gtgttaaccttagcagagttaacac

SEQ ID NO: 29848 - DNA, 25 bp, SARS Virus
tgttaaccttaagagagttaacact

SEQ ID NO: 29849 - DNA, 25 bp, SARS Virus
gttaaccttaacggagttaacactg

SEQ ID NO: 29850 - DNA, 25 bp, SARS Virus
ttaaccttaacagagttaacactgt

SEQ ID NO: 29851 - DNA, 25 bp, SARS Virus
taaccttaacagggttaacactgtg

SEQ ID NO: 29852 - DNA, 25 bp, SARS Virus
aaccttaacagagttaacactgtgt

SEQ ID NO: 29853 - DNA, 25 bp, SARS Virus
accttaacagaggtaacactgtgta

SEQ ID NO: 29854 - DNA, 25 bp, SARS Virus
ccttaacagagtgaacactgtgtaa

SEQ ID NO: 29855 - DNA, 25 bp, SARS Virus
cttaacagagttgacactgtgtaaa

SEQ ID NO: 29856 - DNA, 25 bp, SARS Virus
ttaacagagttagcactgtgtaaaa

SEQ ID NO: 29857 - DNA, 25 bp, SARS Virus
taacagagttaagactgtgtaaaac

SEQ ID NO: 29858 - DNA, 25 bp, SARS Virus
aacagagttaacgctgtgtaaaacg

SEQ ID NO: 29859 - DNA, 25 bp, SARS Virus
acagagttaacagtgtgtaaaacgt

SEQ ID NO: 29860 - DNA, 25 bp, SARS Virus
cagagttaacacggtgtaaaacgtg

SEQ ID NO: 29861 - DNA, 25 bp, SARS Virus
agagttaacactgtgtaaaacgtga

SEQ ID NO: 29862 - DNA, 25 bp, SARS Virus
gagttaacactgggtaaaacgtgac

SEQ ID NO: 29863 - DNA, 25 bp, SARS Virus
agttaacactgtgtaaaacgtgacc

SEQ ID NO: 29864 - DNA, 25 bp, SARS Virus
gttaacactgtggaaaacgtgacca

SEQ ID NO: 29865 - DNA, 25 bp, SARS Virus
ttaacactgtgtgaaacgtgaccat

SEQ ID NO: 29866 - DNA, 25 bp, SARS Virus
taacactgtgtagaacgtgaccatc

SEQ ID NO: 29867 - DNA, 25 bp, SARS Virus
aacactgtgtaagacgtgaccatca

SEQ ID NO: 29868 - DNA, 25 bp, SARS Virus
acactgtgtaaagcgtgaccatcat

SEQ ID NO: 29869 - DNA, 25 bp, SARS Virus
cactgtgtaaaaggtgaccatcatg

SEQ ID NO: 29870 - DNA, 25 bp, SARS Virus
actgtgtaaaacgtgaccatcatgt

SEQ ID NO: 29871 - DNA, 25 bp, SARS Virus
ctgtgtaaaacgggaccatcatgta

SEQ ID NO: 29872 - DNA, 25 bp, SARS Virus
tgtgtaaaacgtgaccatcatgtaa

SEQ ID NO: 29873 - DNA, 25 bp, SARS Virus
gtgtaaaacgtggccatcatgtaag

SEQ ID NO: 29874 - DNA, 25 bp, SARS Virus
tgtaaaacgtgagcatcatgtaagt

SEQ ID NO: 29875 - DNA, 25 bp, SARS Virus
gtaaaacgtgacgatcatgtaagta

SEQ ID NO: 29876 - DNA, 25 bp, SARS Virus
taaaacgtgaccgtcatgtaagtaa

SEQ ID NO: 29877 - DNA, 25 bp, SARS Virus
aaaacgtgaccagcatgtaagtaat

SEQ ID NO: 29878 - DNA, 25 bp, SARS Virus
aaacgtgaccatgatgtaagtaatc

SEQ ID NO: 29879 - DNA, 25 bp, SARS Virus
aacgtgaccatcgtgtaagtaatca

SEQ ID NO: 29880 - DNA, 25 bp, SARS Virus
acgtgaccatcaggtaagtaatcac

SEQ ID NO: 29881 - DNA, 25 bp, SARS Virus
cgtgaccatcatgtaagtaatcact

SEQ ID NO: 29882 - DNA, 25 bp, SARS Virus
gtgaccatcatggaagtaatcacta

SEQ ID NO: 29883 - DNA, 25 bp, SARS Virus
tgaccatcatgtgagtaatcactac

SEQ ID NO: 29884 - DNA, 25 bp, SARS Virus
gaccatcatgtaggtaatcactact

SEQ ID NO: 29885 - DNA, 25 bp, SARS Virus
accatcatgtaagtaatcactactt

SEQ ID NO: 29886 - DNA, 25 bp, SARS Virus
ccatcatgtaaggaatcactacttc

SEQ ID NO: 29887 - DNA, 25 bp, SARS Virus
catcatgtaagtgatcactacttca

SEQ ID NO: 29888 - DNA, 25 bp, SARS Virus
atcatgtaagtagtcactacttcaa

SEQ ID NO: 29889 - DNA, 25 bp, SARS Virus
tcatgtaagtaagcactacttcaac

SEQ ID NO: 29890 - DNA, 25 bp, SARS Virus
catgtaagtaatgactacttcaacg

SEQ ID NO: 29891 - DNA, 25 bp, SARS Virus
atgtaagtaatcgctacttcaacga

SEQ ID NO: 29892 - DNA, 25 bp, SARS Virus
tgtaagtaatcagtacttcaacgag

SEQ ID NO: 29893 - DNA, 25 bp, SARS Virus
gtaagtaatcacgacttcaacgagc

SEQ ID NO: 29894 - DNA, 25 bp, SARS Virus
taagtaatcactgcttcaacgagca

SEQ ID NO: 29895 - DNA, 25 bp, SARS Virus
aagtaatcactagttcaacgagcac

SEQ ID NO: 29896 - DNA, 25 bp, SARS Virus
agtaatcactacgtcaacgagcact

SEQ ID NO: 29897 - DNA, 25 bp, SARS Virus
ggtcgagaactttggtaagtccact

SEQ ID NO: 29898 - DNA, 25 bp, SARS Virus
gtcgagaacttttgtaagtccactg

SEQ ID NO: 29899 - DNA, 25 bp, SARS Virus
tcgagaactttgttaagtccactgc

SEQ ID NO: 29900 - DNA, 25 bp, SARS Virus
cgagaactttggtaagtccactgct

SEQ ID NO: 29901 - DNA, 25 bp, SARS Virus
gagaactttggttagtccactgcta

SEQ ID NO: 29902 - DNA, 25 bp, SARS Virus
agaactttggtatgtccactgctaa

SEQ ID NO: 29903 - DNA, 25 bp, SARS Virus
gaactttggtaattccactgctaaa

SEQ ID NO: 29904 - DNA, 25 bp, SARS Virus
aactttggtaagtccactgctaaag

SEQ ID NO: 29905 - DNA, 25 bp, SARS Virus
actttggtaagttcactgctaaagt

SEQ ID NO: 29906 - DNA, 25 bp, SARS Virus
ctttggtaagtctactgctaaagta

SEQ ID NO: 29907 - DNA, 25 bp, SARS Virus
tttggtaagtcctctgctaaagtag

SEQ ID NO: 29908 - DNA, 25 bp, SARS Virus
ttggtaagtccattgctaaagtagc

SEQ ID NO: 29909 - DNA, 25 bp, SARS Virus
tggtaagtccactgctaaagtagca

SEQ ID NO: 29910 - DNA, 25 bp, SARS Virus
ggtaagtccacttctaaagtagcat

SEQ ID NO: 29911 - DNA, 25 bp, SARS Virus
gtaagtccactgttaaagtagcatg

SEQ ID NO: 29912 - DNA, 25 bp, SARS Virus
taagtccactgctaaagtagcatgt

SEQ ID NO: 29913 - DNA, 25 bp, SARS Virus
aagtccactgcttaagtagcatgtt

SEQ ID NO: 29914 - DNA, 25 bp, SARS Virus
agtccactgctatagtagcatgttc

SEQ ID NO: 29915 - DNA, 25 bp, SARS Virus
gtccactgctaatgtagcatgttcg

SEQ ID NO: 29916 - DNA, 25 bp, SARS Virus
tccactgctaaattagcatgttcga

SEQ ID NO: 29917 - DNA, 25 bp, SARS Virus
ccactgctaaagtagcatgttcgat

SEQ ID NO: 29918 - DNA, 25 bp, SARS Virus
cactgctaaagttgcatgttcgatc

SEQ ID NO: 29919 - DNA, 25 bp, SARS Virus
actgctaaagtatcatgttcgatct

SEQ ID NO: 29920 - DNA, 25 bp, SARS Virus
ctgctaaagtagtatgttcgatctg

SEQ ID NO: 29921 - DNA, 25 bp, SARS Virus
tgctaaagtagcttgttcgatctga

SEQ ID NO: 29922 - DNA, 25 bp, SARS Virus
gctaaagtagcatgttcgatctgaa

SEQ ID NO: 29923 - DNA, 25 bp, SARS Virus
ctaaagtagcattttcgatctgaac

SEQ ID NO: 29924 - DNA, 25 bp, SARS Virus
taaagtagcatgttcgatctgaact

SEQ ID NO: 29925 - DNA, 25 bp, SARS Virus
aaagtagcatgttcgatctgaactg

SEQ ID NO: 29926 - DNA, 25 bp, SARS Virus
aagtagcatgtttgatctgaactgt

SEQ ID NO: 29927 - DNA, 25 bp, SARS Virus
agtagcatgttctatctgaactgtt

SEQ ID NO: 29928 - DNA, 25 bp, SARS Virus
gtagcatgttcgttctgaactgtta

SEQ ID NO: 29929 - DNA, 25 bp, SARS Virus
tagcatgttcgatctgaactgttaa

SEQ ID NO: 29930 - DNA, 25 bp, SARS Virus
agcatgttcgatttgaactgttaaa

SEQ ID NO: 29931 - DNA, 25 bp, SARS Virus
gcatgttcgatctgaactgttaaaa

SEQ ID NO: 29932 - DNA, 25 bp, SARS Virus
catgttcgatcttaactgttaaaat

SEQ ID NO: 29933 - DNA, 25 bp, SARS Virus
atgttcgatctgtactgttaaaatc

SEQ ID NO: 29934 - DNA, 25 bp, SARS Virus
tgttcgatctgatctgttaaaatcc

SEQ ID NO: 29935 - DNA, 25 bp, SARS Virus
gttcgatctgaattgttaaaatcca

SEQ ID NO: 29936 - DNA, 25 bp, SARS Virus
ttcgatctgaactgttaaaatccag

SEQ ID NO: 29937 - DNA, 25 bp, SARS Virus
tcgatctgaacttttaaaatccaga

SEQ ID NO: 29938 - DNA, 25 bp, SARS Virus
cgatctgaactgttaaaatccagac

SEQ ID NO: 29939 - DNA, 25 bp, SARS Virus
gatctgaactgttaaaatccagacc

SEQ ID NO: 29940 - DNA, 25 bp, SARS Virus
atctgaactgtttaaatccagaccg

SEQ ID NO: 29941 - DNA, 25 bp, SARS Virus
tctgaactgttataatccagaccgg

SEQ ID NO: 29942 - DNA, 25 bp, SARS Virus
ctgaactgttaatatccagaccggc

SEQ ID NO: 29943 - DNA, 25 bp, SARS Virus
tgaactgttaaattccagaccggcg

SEQ ID NO: 29944 - DNA, 25 bp, SARS Virus
gaactgttaaaatccagaccggcga

SEQ ID NO: 29945 - DNA, 25 bp, SARS Virus
aactgttaaaattcagaccggcgac

SEQ ID NO: 29946 - DNA, 25 bp, SARS Virus
actgttaaaatctagaccggcgact

SEQ ID NO: 29947 - DNA, 25 bp, SARS Virus
ctgttaaaatcctgaccggcgactc

SEQ ID NO: 29948 - DNA, 25 bp, SARS Virus
tgttaaaatccataccggcgactca

SEQ ID NO: 29949 - DNA, 25 bp, SARS Virus
gttaaaatccagtccggcgactcac

SEQ ID NO: 29950 - DNA, 25 bp, SARS Virus
ttaaaatccagatcggcgactcacc

SEQ ID NO: 29951 - DNA, 25 bp, SARS Virus
taaaatccagactggcgactcaccc

SEQ ID NO: 29952 - DNA, 25 bp, SARS Virus
aaaatccagacctgcgactcaccca

SEQ ID NO: 29953 - DNA, 25 bp, SARS Virus
aaatccagaccgtcgactcacccaa

SEQ ID NO: 29954 - DNA, 25 bp, SARS Virus
aatccagaccggtgactcacccaaa

SEQ ID NO: 29955 - DNA, 25 bp, SARS Virus
atccagaccggctactcacccaaaa

SEQ ID NO: 29956 - DNA, 25 bp, SARS Virus
tccagaccggcgtctcacccaaaac

SEQ ID NO: 29957 - DNA, 25 bp, SARS Virus
ccagaccggcgattcacccaaaacc

SEQ ID NO: 29958 - DNA, 25 bp, SARS Virus
cagaccggcgactcacccaaaaccg

SEQ ID NO: 29959 - DNA, 25 bp, SARS Virus
agaccggcgacttacccaaaaccgt

SEQ ID NO: 29960 - DNA, 25 bp, SARS Virus
gaccggcgactctcccaaaaccgta

SEQ ID NO: 29961 - DNA, 25 bp, SARS Virus
accggcgactcatccaaaaccgtat

SEQ ID NO: 29962 - DNA, 25 bp, SARS Virus
ccggcgactcactcaaaaccgtata

SEQ ID NO: 29963 - DNA, 25 bp, SARS Virus
cggcgactcacctaaaaccgtatat

SEQ ID NO: 29964 - DNA, 25 bp, SARS Virus
ggcgactcaccctaaaccgtatata

SEQ ID NO: 29965 - DNA, 25 bp, SARS Virus
gcgactcacccataaccgtatatac

SEQ ID NO: 29966 - DNA, 25 bp, SARS Virus
cgactcacccaataccgtatataca

SEQ ID NO: 29967 - DNA, 25 bp, SARS Virus
gactcacccaaatccgtatatacaa

SEQ ID NO: 29968 - DNA, 25 bp, SARS Virus
actcacccaaaatcgtatatacaac

SEQ ID NO: 29969 - DNA, 25 bp, SARS Virus
ctcacccaaaactgtatatacaaca

SEQ ID NO: 29970 - DNA, 25 bp, SARS Virus
tcacccaaaaccttatatacaacaa

SEQ ID NO: 29971 - DNA, 25 bp, SARS Virus
cacccaaaaccgtatatacaacaag

SEQ ID NO: 29972 - DNA, 25 bp, SARS Virus
acccaaaaccgtttatacaacaagt

SEQ ID NO: 29973 - DNA, 25 bp, SARS Virus
cccaaaaccgtatatacaacaagtg

SEQ ID NO: 29974 - DNA, 25 bp, SARS Virus
ccaaaaccgtatttacaacaagtgt

SEQ ID NO: 29975 - DNA, 25 bp, SARS Virus
caaaaccgtatatacaacaagtgtt

SEQ ID NO: 29976 - DNA, 25 bp, SARS Virus
aaaaccgtatattcaacaagtgttt

SEQ ID NO: 29977 - DNA, 25 bp, SARS Virus
aaaccgtatatataacaagtgtttt

SEQ ID NO: 29978 - DNA, 25 bp, SARS Virus
aaccgtatatactacaagtgtttta

SEQ ID NO: 29979 - DNA, 25 bp, SARS Virus
accgtatatacatcaagtgttttaa

SEQ ID NO: 29980 - DNA, 25 bp, SARS Virus
ccgtatatacaataagtgttttaag

SEQ ID NO: 29981 - DNA, 25 bp, SARS Virus
cgtatatacaactagtgttttaaga

SEQ ID NO: 29982 - DNA, 25 bp, SARS Virus
gtatatacaacatgtgttttaagaa

SEQ ID NO: 29983 - DNA, 25 bp, SARS Virus
tatatacaacaattgttttaagaaa

SEQ ID NO: 29984 - DNA, 25 bp, SARS Virus
atatacaacaagtgttttaagaaaa

SEQ ID NO: 29985 - DNA, 25 bp, SARS Virus
tatacaacaagttttttaagaaaat

SEQ ID NO: 29986 - DNA, 25 bp, SARS Virus
atacaacaagtgttttaagaaaata

SEQ ID NO: 29987 - DNA, 25 bp, SARS Virus
tacaacaagtgttttaagaaaataa

SEQ ID NO: 29988 - DNA, 25 bp, SARS Virus
acaacaagtgttttaagaaaataaa

SEQ ID NO: 29989 - DNA, 25 bp, SARS Virus
caacaagtgttttaagaaaataaat

SEQ ID NO: 29990 - DNA, 25 bp, SARS Virus
aacaagtgtttttagaaaataaata

SEQ ID NO: 29991 - DNA, 25 bp, SARS Virus
acaagtgttttatgaaaataaataa

SEQ ID NO: 29992 - DNA, 25 bp, SARS Virus
caagtgttttaataaaataaataat

SEQ ID NO: 29993 - DNA, 25 bp, SARS Virus
aagtgttttaagtaaataaataatc

SEQ ID NO: 29994 - DNA, 25 bp, SARS Virus
agtgttttaagataataaataatcc

SEQ ID NO: 29995 - DNA, 25 bp, SARS Virus
gtgttttaagaatataaataatcca

SEQ ID NO: 29996 - DNA, 25 bp, SARS Virus
tgttttaagaaattaaataatccag

SEQ ID NO: 29997 - DNA, 25 bp, SARS Virus
gttttaagaaaataaataatccaga

SEQ ID NO: 29998 - DNA, 25 bp, SARS Virus
ttttaagaaaattaataatccagaa

SEQ ID NO: 29999 - DNA, 25 bp, SARS Virus
tttaagaaaatatataatccagaaa

SEQ ID NO: 30000 - DNA, 25 bp, SARS Virus
ttaagaaaataattaatccagaaag

SEQ ID NO: 30001 - DNA, 25 bp, SARS Virus
taagaaaataaataatccagaaagt

SEQ ID NO: 30002 - DNA, 25 bp, SARS Virus
aagaaaataaattatccagaaagtc

SEQ ID NO: 30003 - DNA, 25 bp, SARS Virus
agaaaataaatattccagaaagtcg

SEQ ID NO: 30004 - DNA, 25 bp, SARS Virus
gaaaataaataatccagaaagtcga

SEQ ID NO: 30005 - DNA, 25 bp, SARS Virus
aaaataaataattcagaaagtcgat

SEQ ID NO: 30006 - DNA, 25 bp, SARS Virus
aaataaataatctagaaagtcgata

SEQ ID NO: 30007 - DNA, 25 bp, SARS Virus
aataaataatcctgaaagtcgatat

SEQ ID NO: 30008 - DNA, 25 bp, SARS Virus
ataaataatccataaagtcgatatt

SEQ ID NO: 30009 - DNA, 25 bp, SARS Virus
taaataatccagtaagtcgatatta

SEQ ID NO: 30010 - DNA, 25 bp, SARS Virus
aaataatccagatagtcgatattac

SEQ ID NO: 30011 - DNA, 25 bp, SARS Virus
aataatccagaatgtcgatattacg

SEQ ID NO: 30012 - DNA, 25 bp, SARS Virus
ataatccagaaattcgatattacgt

SEQ ID NO: 30013 - DNA, 25 bp, SARS Virus
taatccagaaagtcgatattacgtc

SEQ ID NO: 30014 - DNA, 25 bp, SARS Virus
aatccagaaagttgatattacgtcc

SEQ ID NO: 30015 - DNA, 25 bp, SARS Virus
atccagaaagtctatattacgtcca

SEQ ID NO: 30016 - DNA, 25 bp, SARS Virus
tccagaaagtcgttattacgtccac

SEQ ID NO: 30017 - DNA, 25 bp, SARS Virus
ccagaaagtcgatattacgtccaca

SEQ ID NO: 30018 - DNA, 25 bp, SARS Virus
cagaaagtcgattttacgtccacaa

SEQ ID NO: 30019 - DNA, 25 bp, SARS Virus
agaaagtcgatattacgtccacaag

SEQ ID NO: 30020 - DNA, 25 bp, SARS Virus
gaaagtcgatattacgtccacaaga

SEQ ID NO: 30021 - DNA, 25 bp, SARS Virus
aaagtcgatatttcgtccacaagaa

SEQ ID NO: 30022 - DNA, 25 bp, SARS Virus
aagtcgatattatgtccacaagaaa

SEQ ID NO: 30023 - DNA, 25 bp, SARS Virus
agtcgatattacttccacaagaaac

SEQ ID NO: 30024 - DNA, 25 bp, SARS Virus
gtcgatattacgtccacaagaaacc

SEQ ID NO: 30025 - DNA, 25 bp, SARS Virus
tcgatattacgttcacaagaaaccg

SEQ ID NO: 30026 - DNA, 25 bp, SARS Virus
cgatattacgtctacaagaaaccga

SEQ ID NO: 30027 - DNA, 25 bp, SARS Virus
gatattacgtcctcaagaaaccgat

SEQ ID NO: 30028 - DNA, 25 bp, SARS Virus
atattacgtccataagaaaccgata

SEQ ID NO: 30029 - DNA, 25 bp, SARS Virus
tattacgtccactagaaaccgataa

SEQ ID NO: 30030 - DNA, 25 bp, SARS Virus
attacgtccacatgaaaccgataaa

SEQ ID NO: 30031 - DNA, 25 bp, SARS Virus
ttacgtccacaataaaccgataaaa

SEQ ID NO: 30032 - DNA, 25 bp, SARS Virus
tacgtccacaagtaaccgataaaac

SEQ ID NO: 30033 - DNA, 25 bp, SARS Virus
acgtccacaagataccgataaaacg

SEQ ID NO: 30034 - DNA, 25 bp, SARS Virus
cgtccacaagaatccgataaaacga

SEQ ID NO: 30035 - DNA, 25 bp, SARS Virus
gtccacaagaaatcgataaaacgat

SEQ ID NO: 30036 - DNA, 25 bp, SARS Virus
tccacaagaaactgataaaacgatc

SEQ ID NO: 30037 - DNA, 25 bp, SARS Virus
ccacaagaaacctataaaacgatca

SEQ ID NO: 30038 - DNA, 25 bp, SARS Virus
cacaagaaaccgttaaaacgatcag

SEQ ID NO: 30039 - DNA, 25 bp, SARS Virus
acaagaaaccgataaaacgatcagt

SEQ ID NO: 30040 - DNA, 25 bp, SARS Virus
caagaaaccgattaaacgatcagta

SEQ ID NO: 30041 - DNA, 25 bp, SARS Virus
aagaaaccgatataacgatcagtaa

SEQ ID NO: 30042 - DNA, 25 bp, SARS Virus
agaaaccgataatacgatcagtaaa

SEQ ID NO: 30043 - DNA, 25 bp, SARS Virus
gaaaccgataaatcgatcagtaaag

SEQ ID NO: 30044 - DNA, 25 bp, SARS Virus
aaaccgataaaatgatcagtaaagt

SEQ ID NO: 30045 - DNA, 25 bp, SARS Virus
aaccgataaaactatcagtaaagta

SEQ ID NO: 30046 - DNA, 25 bp, SARS Virus
accgataaaacgttcagtaaagtag

SEQ ID NO: 30047 - DNA, 25 bp, SARS Virus
ccgataaaacgatcagtaaagtagt

SEQ ID NO: 30048 - DNA, 25 bp, SARS Virus
cgataaaacgattagtaaagtagtc

SEQ ID NO: 30049 - DNA, 25 bp, SARS Virus
gataaaacgatctgtaaagtagtcg

SEQ ID NO: 30050 - DNA, 25 bp, SARS Virus
ataaaacgatcattaaagtagtcgt

SEQ ID NO: 30051 - DNA, 25 bp, SARS Virus
taaaacgatcagtaaagtagtcgtt

SEQ ID NO: 30052 - DNA, 25 bp, SARS Virus
aaaacgatcagttaagtagtcgtta

SEQ ID NO: 30053 - DNA, 25 bp, SARS Virus
aaacgatcagtatagtagtcgttaa

SEQ ID NO: 30054 - DNA, 25 bp, SARS Virus
aacgatcagtaatgtagtcgttaag

SEQ ID NO: 30055 - DNA, 25 bp, SARS Virus
acgatcagtaaattagtcgttaaga

SEQ ID NO: 30056 - DNA, 25 bp, SARS Virus
cgatcagtaaagtagtcgttaagaa

SEQ ID NO: 30057 - DNA, 25 bp, SARS Virus
gatcagtaaagttgtcgttaagaac

SEQ ID NO: 30058 - DNA, 25 bp, SARS Virus
atcagtaaagtattcgttaagaacc

SEQ ID NO: 30059 - DNA, 25 bp, SARS Virus
tcagtaaagtagtcgttaagaaccg

SEQ ID NO: 30060 - DNA, 25 bp, SARS Virus
cagtaaagtagttgttaagaaccga

SEQ ID NO: 30061 - DNA, 25 bp, SARS Virus
agtaaagtagtctttaagaaccgag

SEQ ID NO: 30062 - DNA, 25 bp, SARS Virus
gtaaagtagtcgttaagaaccgagt

SEQ ID NO: 30063 - DNA, 25 bp, SARS Virus
taaagtagtcgttaagaaccgagta

SEQ ID NO: 30064 - DNA, 25 bp, SARS Virus
aaagtagtcgtttagaaccgagtac

SEQ ID NO: 30065 - DNA, 25 bp, SARS Virus
aagtagtcgttatgaaccgagtaca

SEQ ID NO: 30066 - DNA, 25 bp, SARS Virus
agtagtcgttaataaccgagtacac

SEQ ID NO: 30067 - DNA, 25 bp, SARS Virus
gtagtcgttaagtaccgagtacacc

SEQ ID NO: 30068 - DNA, 25 bp, SARS Virus
tagtcgttaagatccgagtacacca

SEQ ID NO: 30069 - DNA, 25 bp, SARS Virus
agtcgttaagaatcgagtacaccaa

SEQ ID NO: 30070 - DNA, 25 bp, SARS Virus
gtcgttaagaactgagtacaccaaa

SEQ ID NO: 30071 - DNA, 25 bp, SARS Virus
tcgttaagaacctagtacaccaaat

SEQ ID NO: 30072 - DNA, 25 bp, SARS Virus
cgttaagaaccgtgtacaccaaata

SEQ ID NO: 30073 - DNA, 25 bp, SARS Virus
gttaagaaccgattacaccaaatag

SEQ ID NO: 30074 - DNA, 25 bp, SARS Virus
ttaagaaccgagtacaccaaatagt

SEQ ID NO: 30075 - DNA, 25 bp, SARS Virus
taagaaccgagttcaccaaatagta

SEQ ID NO: 30076 - DNA, 25 bp, SARS Virus
aagaaccgagtataccaaatagtaa

SEQ ID NO: 30077 - DNA, 25 bp, SARS Virus
agaaccgagtactccaaatagtaat

SEQ ID NO: 30078 - DNA, 25 bp, SARS Virus
gaaccgagtacatcaaatagtaatc

SEQ ID NO: 30079 - DNA, 25 bp, SARS Virus
aaccgagtacactaaatagtaatca

SEQ ID NO: 30080 - DNA, 25 bp, SARS Virus
accgagtacacctaatagtaatcat

SEQ ID NO: 30081 - DNA, 25 bp, SARS Virus
ccgagtacaccatatagtaatcata

SEQ ID NO: 30082 - DNA, 25 bp, SARS Virus
cgagtacaccaattagtaatcataa

SEQ ID NO: 30083 - DNA, 25 bp, SARS Virus
gagtacaccaaatagtaatcataac

SEQ ID NO: 30084 - DNA, 25 bp, SARS Virus
agtacaccaaattgtaatcataaca

SEQ ID NO: 30085 - DNA, 25 bp, SARS Virus
gtacaccaaatattaatcataacat

SEQ ID NO: 30086 - DNA, 25 bp, SARS Virus
tacaccaaatagtaatcataacatg

SEQ ID NO: 30087 - DNA, 25 bp, SARS Virus
acaccaaatagttatcataacatgt

SEQ ID NO: 30088 - DNA, 25 bp, SARS Virus
caccaaatagtattcataacatgtt

SEQ ID NO: 30089 - DNA, 25 bp, SARS Virus
accaaatagtaatcataacatgttt

SEQ ID NO: 30090 - DNA, 25 bp, SARS Virus
ccaaatagtaattataacatgttta

SEQ ID NO: 30091 - DNA, 25 bp, SARS Virus
caaatagtaatcttaacatgtttac

SEQ ID NO: 30092 - DNA, 25 bp, SARS Virus
aaatagtaatcataacatgtttacc

SEQ ID NO: 30093 - DNA, 25 bp, SARS Virus
aatagtaatcattacatgtttaccg

SEQ ID NO: 30094 - DNA, 25 bp, SARS Virus
atagtaatcatatcatgtttaccgt

SEQ ID NO: 30095 - DNA, 25 bp, SARS Virus
tagtaatcataatatgtttaccgtg

SEQ ID NO: 30096 - DNA, 25 bp, SARS Virus
agtaatcataacttgtttaccgtgg

SEQ ID NO: 30097 - DNA, 25 bp, SARS Virus
gtaatcataacatgtttaccgtggg

SEQ ID NO: 30098 - DNA, 25 bp, SARS Virus
taatcataacatttttaccgtgggc

SEQ ID NO: 30099 - DNA, 25 bp, SARS Virus
aatcataacatgtttaccgtgggca

SEQ ID NO: 30100 - DNA, 25 bp, SARS Virus
atcataacatgtttaccgtgggcaa

SEQ ID NO: 30101 - DNA, 25 bp, SARS Virus
tcataacatgtttaccgtgggcaaa

SEQ ID NO: 30102 - DNA, 25 bp, SARS Virus
cataacatgttttccgtgggcaaag

SEQ ID NO: 30103 - DNA, 25 bp, SARS Virus
ataacatgtttatcgtgggcaaaga

SEQ ID NO: 30104 - DNA, 25 bp, SARS Virus
taacatgtttactgtgggcaaagac

SEQ ID NO: 30105 - DNA, 25 bp, SARS Virus
aacatgtttaccttgggcaaagacg

SEQ ID NO: 30106 - DNA, 25 bp, SARS Virus
acatgtttaccgtgggcaaagacgt

SEQ ID NO: 30107 - DNA, 25 bp, SARS Virus
catgtttaccgttggcaaagacgtt

SEQ ID NO: 30108 - DNA, 25 bp, SARS Virus
atgtttaccgtgtgcaaagacgtta

SEQ ID NO: 30109 - DNA, 25 bp, SARS Virus
tgtttaccgtggtcaaagacgttac

SEQ ID NO: 30110 - DNA, 25 bp, SARS Virus
gtttaccgtgggtaaagacgttacc

SEQ ID NO: 30111 - DNA, 25 bp, SARS Virus
tttaccgtgggctaagacgttacca

SEQ ID NO: 30112 - DNA, 25 bp, SARS Virus
ttaccgtgggcatagacgttaccaa

SEQ ID NO: 30113 - DNA, 25 bp, SARS Virus
taccgtgggcaatgacgttaccaat

SEQ ID NO: 30114 - DNA, 25 bp, SARS Virus
accgtgggcaaatacgttaccaatc

SEQ ID NO: 30115 - DNA, 25 bp, SARS Virus
ccgtgggcaaagtcgttaccaatcc

SEQ ID NO: 30116 - DNA, 25 bp, SARS Virus
cgtgggcaaagatgttaccaatcct

SEQ ID NO: 30117 - DNA, 25 bp, SARS Virus
gtgggcaaagactttaccaatccta

SEQ ID NO: 30118 - DNA, 25 bp, SARS Virus
tgggcaaagacgttaccaatcctac

SEQ ID NO: 30119 - DNA, 25 bp, SARS Virus
gggcaaagacgttaccaatcctaca

SEQ ID NO: 30120 - DNA, 25 bp, SARS Virus
ggcaaagacgtttccaatcctacat

SEQ ID NO: 30121 - DNA, 25 bp, SARS Virus
gcaaagacgttatcaatcctacatg

SEQ ID NO: 30122 - DNA, 25 bp, SARS Virus
caaagacgttactaatcctacatgt

SEQ ID NO: 30123 - DNA, 25 bp, SARS Virus
aaagacgttacctatcctacatgta

SEQ ID NO: 30124 - DNA, 25 bp, SARS Virus
aagacgttaccattcctacatgtag

SEQ ID NO: 30125 - DNA, 25 bp, SARS Virus
agacgttaccaatcctacatgtaga

SEQ ID NO: 30126 - DNA, 25 bp, SARS Virus
gacgttaccaattctacatgtagaa

SEQ ID NO: 30127 - DNA, 25 bp, SARS Virus
acgttaccaatcttacatgtagaag

SEQ ID NO: 30128 - DNA, 25 bp, SARS Virus
cgttaccaatcctacatgtagaaga

SEQ ID NO: 30129 - DNA, 25 bp, SARS Virus
gttaccaatccttcatgtagaagaa

SEQ ID NO: 30130 - DNA, 25 bp, SARS Virus
ttaccaatcctatatgtagaagaaa

SEQ ID NO: 30131 - DNA, 25 bp, SARS Virus
taccaatcctacttgtagaagaaac

SEQ ID NO: 30132 - DNA, 25 bp, SARS Virus
accaatcctacatgtagaagaaacg

SEQ ID NO: 30133 - DNA, 25 bp, SARS Virus
ccaatcctacatttagaagaaacga

SEQ ID NO: 30134 - DNA, 25 bp, SARS Virus
caatcctacatgtagaagaaacgaa

SEQ ID NO: 30135 - DNA, 25 bp, SARS Virus
aatcctacatgttgaagaaacgaag

SEQ ID NO: 30136 - DNA, 25 bp, SARS Virus
atcctacatgtataagaaacgaaga

SEQ ID NO: 30137 - DNA, 25 bp, SARS Virus
tcctacatgtagtagaaacgaagaa

SEQ ID NO: 30138 - DNA, 25 bp, SARS Virus
cctacatgtagatgaaacgaagaaa

SEQ ID NO: 30139 - DNA, 25 bp, SARS Virus
ctacatgtagaataaacgaagaaag

SEQ ID NO: 30140 - DNA, 25 bp, SARS Virus
tacatgtagaagtaacgaagaaaga

SEQ ID NO: 30141 - DNA, 25 bp, SARS Virus
acatgtagaagatacgaagaaagat

SEQ ID NO: 30142 - DNA, 25 bp, SARS Virus
catgtagaagaatcgaagaaagatg

SEQ ID NO: 30143 - DNA, 25 bp, SARS Virus
atgtagaagaaatgaagaaagatga

SEQ ID NO: 30144 - DNA, 25 bp, SARS Virus
tgtagaagaaactaagaaagatgat

SEQ ID NO: 30145 - DNA, 25 bp, SARS Virus
gtagaagaaacgtagaaagatgatg

SEQ ID NO: 30146 - DNA, 25 bp, SARS Virus
tagaagaaacgatgaaagatgatgt

SEQ ID NO: 30147 - DNA, 25 bp, SARS Virus
agaagaaacgaataaagatgatgta

SEQ ID NO: 30148 - DNA, 25 bp, SARS Virus
gaagaaacgaagtaagatgatgtat

SEQ ID NO: 30149 - DNA, 25 bp, SARS Virus
aagaaacgaagatagatgatgtata

SEQ ID NO: 30150 - DNA, 25 bp, SARS Virus
agaaacgaagaatgatgatgtatac

SEQ ID NO: 30151 - DNA, 25 bp, SARS Virus
gaaacgaagaaatatgatgtatacc

SEQ ID NO: 30152 - DNA, 25 bp, SARS Virus
aaacgaagaaagttgatgtatacct

SEQ ID NO: 30153 - DNA, 25 bp, SARS Virus
aacgaagaaagatgatgtatacctt

SEQ ID NO: 30154 - DNA, 25 bp, SARS Virus
acgaagaaagattatgtataccttc

SEQ ID NO: 30155 - DNA, 25 bp, SARS Virus
cgaagaaagatgttgtataccttct

SEQ ID NO: 30156 - DNA, 25 bp, SARS Virus
gaagaaagatgatgtataccttctc

SEQ ID NO: 30157 - DNA, 25 bp, SARS Virus
aagaaagatgatttataccttctcg

SEQ ID NO: 30158 - DNA, 25 bp, SARS Virus
agaaagatgatgtataccttctcga

SEQ ID NO: 30159 - DNA, 25 bp, SARS Virus
gaaagatgatgtttaccttctcgat

SEQ ID NO: 30160 - DNA, 25 bp, SARS Virus
aaagatgatgtataccttctcgata

SEQ ID NO: 30161 - DNA, 25 bp, SARS Virus
aagatgatgtattccttctcgatac

SEQ ID NO: 30162 - DNA, 25 bp, SARS Virus
agatgatgtatatcttctcgataca

SEQ ID NO: 30163 - DNA, 25 bp, SARS Virus
gatgatgtatactttctcgatacaa

SEQ ID NO: 30164 - DNA, 25 bp, SARS Virus
atgatgtataccttctcgatacaag

SEQ ID NO: 30165 - DNA, 25 bp, SARS Virus
tgatgtataccttctcgatacaagt

SEQ ID NO: 30166 - DNA, 25 bp, SARS Virus
gatgtataccttttcgatacaagta

SEQ ID NO: 30167 - DNA, 25 bp, SARS Virus
atgtataccttctcgatacaagtat

SEQ ID NO: 30168 - DNA, 25 bp, SARS Virus
tgtataccttcttgatacaagtata

SEQ ID NO: 30169 - DNA, 25 bp, SARS Virus
gtataccttctctatacaagtatag

SEQ ID NO: 30170 - DNA, 25 bp, SARS Virus
tataccttctcgttacaagtatagt

SEQ ID NO: 30171 - DNA, 25 bp, SARS Virus
ataccttctcgatacaagtatagta

SEQ ID NO: 30172 - DNA, 25 bp, SARS Virus
taccttctcgattcaagtatagtac

SEQ ID NO: 30173 - DNA, 25 bp, SARS Virus
accttctcgatataagtatagtacc

SEQ ID NO: 30174 - DNA, 25 bp, SARS Virus
ccttctcgatactagtatagtacct

SEQ ID NO: 30175 - DNA, 25 bp, SARS Virus
cttctcgatacatgtatagtaccta

SEQ ID NO: 30176 - DNA, 25 bp, SARS Virus
ttctcgatacaattatagtacctac

SEQ ID NO: 30177 - DNA, 25 bp, SARS Virus
tctcgatacaagtatagtacctacc

SEQ ID NO: 30178 - DNA, 25 bp, SARS Virus
ctcgatacaagtttagtacctacca

SEQ ID NO: 30179 - DNA, 25 bp, SARS Virus
tcgatacaagtatagtacctaccaa

SEQ ID NO: 30180 - DNA, 25 bp, SARS Virus
cgatacaagtattgtacctaccaac

SEQ ID NO: 30181 - DNA, 25 bp, SARS Virus
gatacaagtatattacctaccaacg

SEQ ID NO: 30182 - DNA, 25 bp, SARS Virus
atacaagtatagtacctaccaacgt

SEQ ID NO: 30183 - DNA, 25 bp, SARS Virus
tacaagtatagttcctaccaacgtg

SEQ ID NO: 30184 - DNA, 25 bp, SARS Virus
acaagtatagtatctaccaacgtgg

SEQ ID NO: 30185 - DNA, 25 bp, SARS Virus
caagtatagtacttaccaacgtgga

SEQ ID NO: 30186 - DNA, 25 bp, SARS Virus
aagtatagtacctaccaacgtggag

SEQ ID NO: 30187 - DNA, 25 bp, SARS Virus
agtatagtaccttccaacgtggaga

SEQ ID NO: 30188 - DNA, 25 bp, SARS Virus
gtatagtacctatcaacgtggagaa

SEQ ID NO: 30189 - DNA, 25 bp, SARS Virus
tatagtacctactaacgtggagaag

SEQ ID NO: 30190 - DNA, 25 bp, SARS Virus
atagtacctacctacgtggagaagc

SEQ ID NO: 30191 - DNA, 25 bp, SARS Virus
tagtacctaccatcgtggagaagct

SEQ ID NO: 30192 - DNA, 25 bp, SARS Virus
agtacctaccaatgtggagaagctg

SEQ ID NO: 30193 - DNA, 25 bp, SARS Virus
gtacctaccaacttggagaagctga

SEQ ID NO: 30194 - DNA, 25 bp, SARS Virus
tacctaccaacgtggagaagctgaa

SEQ ID NO: 30195 - DNA, 25 bp, SARS Virus
acctaccaacgttgagaagctgaac

SEQ ID NO: 30196 - DNA, 25 bp, SARS Virus
cctaccaacgtgtagaagctgaacg

SEQ ID NO: 30197 - DNA, 25 bp, SARS Virus
ctaccaacgtggtgaagctgaacgt

SEQ ID NO: 30198 - DNA, 25 bp, SARS Virus
taccaacgtggataagctgaacgta

SEQ ID NO: 30199 - DNA, 25 bp, SARS Virus
accaacgtggagtagctgaacgtac

SEQ ID NO: 30200 - DNA, 25 bp, SARS Virus
ccaacgtggagatgctgaacgtact

SEQ ID NO: 30201 - DNA, 25 bp, SARS Virus
caacgtggagaatctgaacgtacta

SEQ ID NO: 30202 - DNA, 25 bp, SARS Virus
aacgtggagaagttgaacgtactac

SEQ ID NO: 30203 - DNA, 25 bp, SARS Virus
acgtggagaagctgaacgtactaca

SEQ ID NO: 30204 - DNA, 25 bp, SARS Virus
cgtggagaagcttaacgtactacac

SEQ ID NO: 30205 - DNA, 25 bp, SARS Virus
gtggagaagctgtacgtactacacg

SEQ ID NO: 30206 - DNA, 25 bp, SARS Virus
tggagaagctgatcgtactacacga

SEQ ID NO: 30207 - DNA, 25 bp, SARS Virus
ggagaagctgaatgtactacacgat

SEQ ID NO: 30208 - DNA, 25 bp, SARS Virus
gagaagctgaacttactacacgata

SEQ ID NO: 30209 - DNA, 25 bp, SARS Virus
agaagctgaacgtactacacgatat

SEQ ID NO: 30210 - DNA, 25 bp, SARS Virus
gaagctgaacgttctacacgatatt

SEQ ID NO: 30211 - DNA, 25 bp, SARS Virus
aagctgaacgtattacacgatattc

SEQ ID NO: 30212 - DNA, 25 bp, SARS Virus
agctgaacgtactacacgatattcg

SEQ ID NO: 30213 - DNA, 25 bp, SARS Virus
gctgaacgtacttcacgatattcgc

SEQ ID NO: 30214 - DNA, 25 bp, SARS Virus
ctgaacgtactatacgatattcgcg

SEQ ID NO: 30215 - DNA, 25 bp, SARS Virus
tgaacgtactactcgatattcgcgt

SEQ ID NO: 30216 - DNA, 25 bp, SARS Virus
gaacgtactacatgatattcgcgtt

SEQ ID NO: 30217 - DNA, 25 bp, SARS Virus
aacgtactacactatattcgcgtta

SEQ ID NO: 30218 - DNA, 25 bp, SARS Virus
acgtactacacgttattcgcgttag

SEQ ID NO: 30219 - DNA, 25 bp, SARS Virus
cgtactacacgatattcgcgttagc

SEQ ID NO: 30220 - DNA, 25 bp, SARS Virus
gtactacacgattttcgcgttagca

SEQ ID NO: 30221 - DNA, 25 bp, SARS Virus
tactacacgatattcgcgttagcac

SEQ ID NO: 30222 - DNA, 25 bp, SARS Virus
actacacgatattcgcgttagcacg

SEQ ID NO: 30223 - DNA, 25 bp, SARS Virus
ctacacgatatttgcgttagcacgg

SEQ ID NO: 30224 - DNA, 25 bp, SARS Virus
tacacgatattctcgttagcacggt

SEQ ID NO: 30225 - DNA, 25 bp, SARS Virus
acacgatattcgtgttagcacggtg

SEQ ID NO: 30226 - DNA, 25 bp, SARS Virus
cacgatattcgctttagcacggtgt

SEQ ID NO: 30227 - DNA, 25 bp, SARS Virus
acgatattcgcgttagcacggtgtg

SEQ ID NO: 30228 - DNA, 25 bp, SARS Virus
cgatattcgcgttagcacggtgtgc

SEQ ID NO: 30229 - DNA, 25 bp, SARS Virus
gatattcgcgtttgcacggtgtgcg

SEQ ID NO: 30230 - DNA, 25 bp, SARS Virus
atattcgcgttatcacggtgtgcgc

SEQ ID NO: 30231 - DNA, 25 bp, SARS Virus
tattcgcgttagtacggtgtgcgca

SEQ ID NO: 30232 - DNA, 25 bp, SARS Virus
attcgcgttagctcggtgtgcgcaa

SEQ ID NO: 30233 - DNA, 25 bp, SARS Virus
ttcgcgttagcatggtgtgcgcaac

SEQ ID NO: 30234 - DNA, 25 bp, SARS Virus
tcgcgttagcactgtgtgcgcaact

SEQ ID NO: 30235 - DNA, 25 bp, SARS Virus
cgcgttagcacgttgtgcgcaactc

SEQ ID NO: 30236 - DNA, 25 bp, SARS Virus
gcgttagcacggtgtgcgcaactca

SEQ ID NO: 30237 - DNA, 25 bp, SARS Virus
cgttagcacggtttgcgcaactcac

SEQ ID NO: 30238 - DNA, 25 bp, SARS Virus
gttagcacggtgtgcgcaactcaca

SEQ ID NO: 30239 - DNA, 25 bp, SARS Virus
ttagcacggtgttcgcaactcacat

SEQ ID NO: 30240 - DNA, 25 bp, SARS Virus
tagcacggtgtgtgcaactcacatg

SEQ ID NO: 30241 - DNA, 25 bp, SARS Virus
agcacggtgtgctcaactcacatgt

SEQ ID NO: 30242 - DNA, 25 bp, SARS Virus
gcacggtgtgcgtaactcacatgtt

SEQ ID NO: 30243 - DNA, 25 bp, SARS Virus
cacggtgtgcgctactcacatgttg

SEQ ID NO: 30244 - DNA, 25 bp, SARS Virus
acggtgtgcgcatctcacatgttga

SEQ ID NO: 30245 - DNA, 25 bp, SARS Virus
cggtgtgcgcaattcacatgttgat

SEQ ID NO: 30246 - DNA, 25 bp, SARS Virus
ggtgtgcgcaactcacatgttgata

SEQ ID NO: 30247 - DNA, 25 bp, SARS Virus
gtgtgcgcaacttacatgttgataa

SEQ ID NO: 30248 - DNA, 25 bp, SARS Virus
tgtgcgcaactctcatgttgataac

SEQ ID NO: 30249 - DNA, 25 bp, SARS Virus
gtgcgcaactcatatgttgataaca

SEQ ID NO: 30250 - DNA, 25 bp, SARS Virus
tgcgcaactcacttgttgataacaa

SEQ ID NO: 30251 - DNA, 25 bp, SARS Virus
gcgcaactcacatgttgataacaat

SEQ ID NO: 30252 - DNA, 25 bp, SARS Virus
cgcaactcacattttgataacaatt

SEQ ID NO: 30253 - DNA, 25 bp, SARS Virus
gcaactcacatgttgataacaatta

SEQ ID NO: 30254 - DNA, 25 bp, SARS Virus
caactcacatgttgataacaattac

SEQ ID NO: 30255 - DNA, 25 bp, SARS Virus
aactcacatgtttataacaattacc

SEQ ID NO: 30256 - DNA, 25 bp, SARS Virus
actcacatgttgttaacaattaccg

SEQ ID NO: 30257 - DNA, 25 bp, SARS Virus
ctcacatgttgataacaattaccgt

SEQ ID NO: 30258 - DNA, 25 bp, SARS Virus
tcacatgttgattacaattaccgta

SEQ ID NO: 30259 - DNA, 25 bp, SARS Virus
cacatgttgatatcaattaccgtac

SEQ ID NO: 30260 - DNA, 25 bp, SARS Virus
acatgttgataataattaccgtact

SEQ ID NO: 30261 - DNA, 25 bp, SARS Virus
catgttgataactattaccgtactt

SEQ ID NO: 30262 - DNA, 25 bp, SARS Virus
atgttgataacatttaccgtacttc

SEQ ID NO: 30263 - DNA, 25 bp, SARS Virus
tgttgataacaattaccgtacttct

SEQ ID NO: 30264 - DNA, 25 bp, SARS Virus
gttgataacaattaccgtacttctc

SEQ ID NO: 30265 - DNA, 25 bp, SARS Virus
ttgataacaatttccgtacttctct

SEQ ID NO: 30266 - DNA, 25 bp, SARS Virus
tgataacaattatcgtacttctcta

SEQ ID NO: 30267 - DNA, 25 bp, SARS Virus
gataacaattactgtacttctctag

SEQ ID NO: 30268 - DNA, 25 bp, SARS Virus
ataacaattaccttacttctctaga

SEQ ID NO: 30269 - DNA, 25 bp, SARS Virus
taacaattaccgtacttctctagaa

SEQ ID NO: 30270 - DNA, 25 bp, SARS Virus
aacaattaccgttcttctctagaaa

SEQ ID NO: 30271 - DNA, 25 bp, SARS Virus
acaattaccgtatttctctagaaag

SEQ ID NO: 30272 - DNA, 25 bp, SARS Virus
caattaccgtacttctctagaaaga

SEQ ID NO: 30273 - DNA, 25 bp, SARS Virus
aattaccgtacttctctagaaagat

SEQ ID NO: 30274 - DNA, 25 bp, SARS Virus
attaccgtacttttctagaaagata

SEQ ID NO: 30275 - DNA, 25 bp, SARS Virus
ttaccgtacttctctagaaagatac

SEQ ID NO: 30276 - DNA, 25 bp, SARS Virus
taccgtacttctttagaaagataca

SEQ ID NO: 30277 - DNA, 25 bp, SARS Virus
accgtacttctctagaaagatacag

SEQ ID NO: 30278 - DNA, 25 bp, SARS Virus
ccgtacttctcttgaaagatacaga

SEQ ID NO: 30279 - DNA, 25 bp, SARS Virus
cgtacttctctataaagatacagat

SEQ ID NO: 30280 - DNA, 25 bp, SARS Virus
gtacttctctagtaagatacagata

SEQ ID NO: 30281 - DNA, 25 bp, SARS Virus
tacttctctagatagatacagatac

SEQ ID NO: 30282 - DNA, 25 bp, SARS Virus
acttctctagaatgatacagatacg

SEQ ID NO: 30283 - DNA, 25 bp, SARS Virus
cttctctagaaatatacagatacgt

SEQ ID NO: 30284 - DNA, 25 bp, SARS Virus
ttctctagaaagttacagatacgtt

SEQ ID NO: 30285 - DNA, 25 bp, SARS Virus
tctctagaaagatacagatacgttt

SEQ ID NO: 30286 - DNA, 25 bp, SARS Virus
ctctagaaagattcagatacgttta

SEQ ID NO: 30287 - DNA, 25 bp, SARS Virus
tctagaaagatatagatacgtttac

SEQ ID NO: 30288 - DNA, 25 bp, SARS Virus
ctagaaagatactgatacgtttacc

SEQ ID NO: 30289 - DNA, 25 bp, SARS Virus
tagaaagatacatatacgtttacct

SEQ ID NO: 30290 - DNA, 25 bp, SARS Virus
agaaagatacagttacgtttacctc

SEQ ID NO: 30291 - DNA, 25 bp, SARS Virus
gaaagatacagatacgtttacctcc

SEQ ID NO: 30292 - DNA, 25 bp, SARS Virus
aaagatacagattcgtttacctccg

SEQ ID NO: 30293 - DNA, 25 bp, SARS Virus
aagatacagatatgtttacctccgg

SEQ ID NO: 30294 - DNA, 25 bp, SARS Virus
agatacagatacttttacctccggc

SEQ ID NO: 30295 - DNA, 25 bp, SARS Virus
gatacagatacgtttacctccggca

SEQ ID NO: 30296 - DNA, 25 bp, SARS Virus
atacagatacgtttacctccggcac

SEQ ID NO: 30297 - DNA, 25 bp, SARS Virus
tacagatacgtttacctccggcacc

SEQ ID NO: 30298 - DNA, 25 bp, SARS Virus
acagatacgttttcctccggcaccg

SEQ ID NO: 30299 - DNA, 25 bp, SARS Virus
cagatacgtttatctccggcaccga

SEQ ID NO: 30300 - DNA, 25 bp, SARS Virus
agatacgtttacttccggcaccgaa

SEQ ID NO: 30301 - DNA, 25 bp, SARS Virus
gatacgtttacctccggcaccgaag

SEQ ID NO: 30302 - DNA, 25 bp, SARS Virus
atacgtttaccttcggcaccgaaga

SEQ ID NO: 30303 - DNA, 25 bp, SARS Virus
tacgtttacctctggcaccgaagac

SEQ ID NO: 30304 - DNA, 25 bp, SARS Virus
acgtttacctcctgcaccgaagacg

SEQ ID NO: 30305 - DNA, 25 bp, SARS Virus
cgtttacctccgtcaccgaagacgt

SEQ ID NO: 30306 - DNA, 25 bp, SARS Virus
gtttacctccggtaccgaagacgtt

SEQ ID NO: 30307 - DNA, 25 bp, SARS Virus
tttacctccggctccgaagacgttc

SEQ ID NO: 30308 - DNA, 25 bp, SARS Virus
ttacctccggcatcgaagacgttct

SEQ ID NO: 30309 - DNA, 25 bp, SARS Virus
tacctccggcactgaagacgttctg

SEQ ID NO: 30310 - DNA, 25 bp, SARS Virus
acctccggcacctaagacgttctga

SEQ ID NO: 30311 - DNA, 25 bp, SARS Virus
cctccggcaccgtagacgttctgag

SEQ ID NO: 30312 - DNA, 25 bp, SARS Virus
ctccggcaccgatgacgttctgagt

SEQ ID NO: 30313 - DNA, 25 bp, SARS Virus
tccggcaccgaatacgttctgagtg

SEQ ID NO: 30314 - DNA, 25 bp, SARS Virus
ccggcaccgaagtcgttctgagtgt

SEQ ID NO: 30315 - DNA, 25 bp, SARS Virus
cggcaccgaagatgttctgagtgtt

SEQ ID NO: 30316 - DNA, 25 bp, SARS Virus
ggcaccgaagactttctgagtgtta

SEQ ID NO: 30317 - DNA, 25 bp, SARS Virus
gcaccgaagacgttctgagtgttaa

SEQ ID NO: 30318 - DNA, 25 bp, SARS Virus
caccgaagacgttctgagtgttaac

SEQ ID NO: 30319 - DNA, 25 bp, SARS Virus
accgaagacgttttgagtgttaacc

SEQ ID NO: 30320 - DNA, 25 bp, SARS Virus
ccgaagacgttctgagtgttaacct

SEQ ID NO: 30321 - DNA, 25 bp, SARS Virus
cgaagacgttcttagtgttaacctt

SEQ ID NO: 30322 - DNA, 25 bp, SARS Virus
gaagacgttctgtgtgttaacctta

SEQ ID NO: 30323 - DNA, 25 bp, SARS Virus
aagacgttctgattgttaaccttaa

SEQ ID NO: 30324 - DNA, 25 bp, SARS Virus
agacgttctgagtgttaaccttaac

SEQ ID NO: 30325 - DNA, 25 bp, SARS Virus
gacgttctgagttttaaccttaaca

SEQ ID NO: 30326 - DNA, 25 bp, SARS Virus
acgttctgagtgttaaccttaacag

SEQ ID NO: 30327 - DNA, 25 bp, SARS Virus
cgttctgagtgttaaccttaacaga

SEQ ID NO: 30328 - DNA, 25 bp, SARS Virus
gttctgagtgtttaccttaacagag

SEQ ID NO: 30329 - DNA, 25 bp, SARS Virus
ttctgagtgttatccttaacagagt

SEQ ID NO: 30330 - DNA, 25 bp, SARS Virus
tctgagtgttaatcttaacagagtt

SEQ ID NO: 30331 - DNA, 25 bp, SARS Virus
ctgagtgttaactttaacagagtta

SEQ ID NO: 30332 - DNA, 25 bp, SARS Virus
tgagtgttaaccttaacagagttaa

SEQ ID NO: 30333 - DNA, 25 bp, SARS Virus
gagtgttaaccttaacagagttaac

SEQ ID NO: 30334 - DNA, 25 bp, SARS Virus
agtgttaacctttacagagttaaca

SEQ ID NO: 30335 - DNA, 25 bp, SARS Virus
gtgttaaccttatcagagttaacac

SEQ ID NO: 30336 - DNA, 25 bp, SARS Virus
tgttaaccttaatagagttaacact

SEQ ID NO: 30337 - DNA, 25 bp, SARS Virus
gttaaccttaactgagttaacactg

SEQ ID NO: 30338 - DNA, 25 bp, SARS Virus
ttaaccttaacatagttaacactgt

SEQ ID NO: 30339 - DNA, 25 bp, SARS Virus
taaccttaacagtgttaacactgtg

SEQ ID NO: 30340 - DNA, 25 bp, SARS Virus
aaccttaacagatttaacactgtgt

SEQ ID NO: 30341 - DNA, 25 bp, SARS Virus
accttaacagagttaacactgtgta

SEQ ID NO: 30342 - DNA, 25 bp, SARS Virus
ccttaacagagttaacactgtgtaa

SEQ ID NO: 30343 - DNA, 25 bp, SARS Virus
cttaacagagtttacactgtgtaaa

SEQ ID NO: 30344 - DNA, 25 bp, SARS Virus
ttaacagagttatcactgtgtaaaa

SEQ ID NO: 30345 - DNA, 25 bp, SARS Virus
taacagagttaatactgtgtaaaac

SEQ ID NO: 30346 - DNA, 25 bp, SARS Virus
aacagagttaactctgtgtaaaacg

SEQ ID NO: 30347 - DNA, 25 bp, SARS Virus
acagagttaacattgtgtaaaacgt

SEQ ID NO: 30348 - DNA, 25 bp, SARS Virus
cagagttaacactgtgtaaaacgtg

SEQ ID NO: 30349 - DNA, 25 bp, SARS Virus
agagttaacactttgtaaaacgtga

SEQ ID NO: 30350 - DNA, 25 bp, SARS Virus
gagttaacactgtgtaaaacgtgac

SEQ ID NO: 30351 - DNA, 25 bp, SARS Virus
agttaacactgtttaaaacgtgacc

SEQ ID NO: 30352 - DNA, 25 bp, SARS Virus
gttaacactgtgtaaaacgtgacca

SEQ ID NO: 30353 - DNA, 25 bp, SARS Virus
ttaacactgtgttaaacgtgaccat

SEQ ID NO: 30354 - DNA, 25 bp, SARS Virus
taacactgtgtataacgtgaccatc

SEQ ID NO: 30355 - DNA, 25 bp, SARS Virus
aacactgtgtaatacgtgaccatca

SEQ ID NO: 30356 - DNA, 25 bp, SARS Virus
acactgtgtaaatcgtgaccatcat

SEQ ID NO: 30357 - DNA, 25 bp, SARS Virus
cactgtgtaaaatgtgaccatcatg

SEQ ID NO: 30358 - DNA, 25 bp, SARS Virus
actgtgtaaaacttgaccatcatgt

SEQ ID NO: 30359 - DNA, 25 bp, SARS Virus
ctgtgtaaaacgtgaccatcatgta

SEQ ID NO: 30360 - DNA, 25 bp, SARS Virus
tgtgtaaaacgttaccatcatgtaa

SEQ ID NO: 30361 - DNA, 25 bp, SARS Virus
gtgtaaaacgtgtccatcatgtaag

SEQ ID NO: 30362 - DNA, 25 bp, SARS Virus
tgtaaaacgtgatcatcatgtaagt

SEQ ID NO: 30363 - DNA, 25 bp, SARS Virus
gtaaaacgtgactatcatgtaagta

SEQ ID NO: 30364 - DNA, 25 bp, SARS Virus
taaaacgtgaccttcatgtaagtaa

SEQ ID NO: 30365 - DNA, 25 bp, SARS Virus
aaaacgtgaccatcatgtaagtaat

SEQ ID NO: 30366 - DNA, 25 bp, SARS Virus
aaacgtgaccattatgtaagtaatc

SEQ ID NO: 30367 - DNA, 25 bp, SARS Virus
aacgtgaccatcttgtaagtaatca

SEQ ID NO: 30368 - DNA, 25 bp, SARS Virus
acgtgaccatcatgtaagtaatcac

SEQ ID NO: 30369 - DNA, 25 bp, SARS Virus
cgtgaccatcatttaagtaatcact

SEQ ID NO: 30370 - DNA, 25 bp, SARS Virus
gtgaccatcatgtaagtaatcacta

SEQ ID NO: 30371 - DNA, 25 bp, SARS Virus
tgaccatcatgttagtaatcactac

SEQ ID NO: 30372 - DNA, 25 bp, SARS Virus
gaccatcatgtatgtaatcactact

SEQ ID NO: 30373 - DNA, 25 bp, SARS Virus
accatcatgtaattaatcactactt

SEQ ID NO: 30374 - DNA, 25 bp, SARS Virus
ccatcatgtaagtaatcactacttc

SEQ ID NO: 30375 - DNA, 25 bp, SARS Virus
catcatgtaagttatcactacttca

SEQ ID NO: 30376 - DNA, 25 bp, SARS Virus
atcatgtaagtattcactacttcaa

SEQ ID NO: 30377 - DNA, 25 bp, SARS Virus
tcatgtaagtaatcactacttcaac

SEQ ID NO: 30378 - DNA, 25 bp, SARS Virus
catgtaagtaattactacttcaacg

SEQ ID NO: 30379 - DNA, 25 bp, SARS Virus
atgtaagtaatctctacttcaacga

SEQ ID NO: 30380 - DNA, 25 bp, SARS Virus
tgtaagtaatcattacttcaacgag

SEQ ID NO: 30381 - DNA, 25 bp, SARS Virus
gtaagtaatcactacttcaacgagc

SEQ ID NO: 30382 - DNA, 25 bp, SARS Virus
taagtaatcacttcttcaacgagca

SEQ ID NO: 30383 - DNA, 25 bp, SARS Virus
aagtaatcactatttcaacgagcac

SEQ ID NO: 30384 - DNA, 25 bp, SARS Virus
agtaatcactacttcaacgagcact

SEQ ID NO: 30385 - DNA, 25 bp, SARS Virus
gtaatcactactacaacgagcacta

SEQ ID NO: 30386 - DNA, 25 bp, SARS Virus
taatcactacttaaacgagcactaa

SEQ ID NO: 30387 - DNA, 25 bp, SARS Virus
aatcactacttcaacgagcactaaa

SEQ ID NO: 30388 - DNA, 25 bp, SARS Virus
atcactacttcaacgagcactaaac

SEQ ID NO: 30389 - DNA, 25 bp, SARS Virus
tcactacttcaaagagcactaaaca

SEQ ID NO: 30390 - DNA, 25 bp, SARS Virus
cactacttcaacaagcactaaacag

SEQ ID NO: 30391 - DNA, 25 bp, SARS Virus
actacttcaacgagcactaaacagt

SEQ ID NO: 30392 - DNA, 25 bp, SARS Virus
ctacttcaacgaacactaaacagtg

SEQ ID NO: 30393 - DNA, 25 bp, SARS Virus
tacttcaacgagaactaaacagtga

SEQ ID NO: 30394 - DNA, 25 bp, SARS Virus
acttcaacgagcactaaacagtgag

SEQ ID NO: 30395 - DNA, 25 bp, SARS Virus
cttcaacgagcaataaacagtgagg

SEQ ID NO: 30396 - DNA, 25 bp, SARS Virus
ttcaacgagcacaaaacagtgaggt

SEQ ID NO: 30397 - DNA, 25 bp, SARS Virus
tcaacgagcactaaacagtgaggtc

SEQ ID NO: 30398 - DNA, 25 bp, SARS Virus
caacgagcactaaacagtgaggtca

SEQ ID NO: 30399 - DNA, 25 bp, SARS Virus
aacgagcactaaacagtgaggtcaa

SEQ ID NO: 30400 - DNA, 25 bp, SARS Virus
acgagcactaaaaagtgaggtcaaa

SEQ ID NO: 30401 - DNA, 25 bp, SARS Virus
cgagcactaaacagtgaggtcaaat

SEQ ID NO: 30402 - DNA, 25 bp, SARS Virus
gagcactaaacaatgaggtcaaatt

SEQ ID NO: 30403 - DNA, 25 bp, SARS Virus
agcactaaacagagaggtcaaattt

SEQ ID NO: 30404 - DNA, 25 bp, SARS Virus
gcactaaacagtaaggtcaaatttt

SEQ ID NO: 30405 - DNA, 25 bp, SARS Virus
cactaaacagtgaggtcaaattttc

SEQ ID NO: 30406 - DNA, 25 bp, SARS Virus
actaaacagtgaagtcaaattttct

SEQ ID NO: 30407 - DNA, 25 bp, SARS Virus
ctaaacagtgagatcaaattttctg

SEQ ID NO: 30408 - DNA, 25 bp, SARS Virus
taaacagtgaggacaaattttctgg

SEQ ID NO: 30409 - DNA, 25 bp, SARS Virus
aaacagtgaggtaaaattttctggt

SEQ ID NO: 30410 - DNA, 25 bp, SARS Virus
aacagtgaggtcaaattttctggtt

SEQ ID NO: 30411 - DNA, 25 bp, SARS Virus
acagtgaggtcaaattttctggtta

SEQ ID NO: 30412 - DNA, 25 bp, SARS Virus
cagtgaggtcaaattttctggttag

SEQ ID NO: 30413 - DNA, 25 bp, SARS Virus
agtgaggtcaaaatttctggttagt

SEQ ID NO: 30414 - DNA, 25 bp, SARS Virus
gtgaggtcaaatattctggttagtt

SEQ ID NO: 30415 - DNA, 25 bp, SARS Virus
tgaggtcaaattatctggttagttg

SEQ ID NO: 30416 - DNA, 25 bp, SARS Virus
gaggtcaaatttactggttagttgg

SEQ ID NO: 30417 - DNA, 25 bp, SARS Virus
aggtcaaattttatggttagttggg

SEQ ID NO: 30418 - DNA, 25 bp, SARS Virus
ggtcaaattttcaggttagttggga

SEQ ID NO: 30419 - DNA, 25 bp, SARS Virus
gtcaaattttctagttagttgggat

SEQ ID NO: 30420 - DNA, 25 bp, SARS Virus
tcaaattttctgattagttgggatg

SEQ ID NO: 30421 - DNA, 25 bp, SARS Virus
caaattttctggatagttgggatga

SEQ ID NO: 30422 - DNA, 25 bp, SARS Virus
aaattttctggtaagttgggatgac

SEQ ID NO: 30423 - DNA, 25 bp, SARS Virus
aattttctggttagttgggatgact

SEQ ID NO: 30424 - DNA, 25 bp, SARS Virus
attttctggttaattgggatgactg

SEQ ID NO: 30425 - DNA, 25 bp, SARS Virus
ttttctggttagatgggatgactgg

SEQ ID NO: 30426 - DNA, 25 bp, SARS Virus
tttctggttagtagggatgactggt

SEQ ID NO: 30427 - DNA, 25 bp, SARS Virus
ttctggttagttaggatgactggtc

SEQ ID NO: 30428 - DNA, 25 bp, SARS Virus
tctggttagttgagatgactggtca

SEQ ID NO: 30429 - DNA, 25 bp, SARS Virus
ctggttagttggaatgactggtcag

SEQ ID NO: 30430 - DNA, 25 bp, SARS Virus
tggttagttgggatgactggtcagt

SEQ ID NO: 30431 - DNA, 25 bp, SARS Virus
ggttagttgggaagactggtcagta

SEQ ID NO: 30432 - DNA, 25 bp, SARS Virus
gttagttgggataactggtcagtag

SEQ ID NO: 30433 - DNA, 25 bp, SARS Virus
ttagttgggatgactggtcagtagc

SEQ ID NO: 30434 - DNA, 25 bp, SARS Virus
tagttgggatgaatggtcagtagca

SEQ ID NO: 30435 - DNA, 25 bp, SARS Virus
agttgggatgacaggtcagtagcat

SEQ ID NO: 30436 - DNA, 25 bp, SARS Virus
gttgggatgactagtcagtagcata

SEQ ID NO: 30437 - DNA, 25 bp, SARS Virus
ttgggatgactgatcagtagcatat

SEQ ID NO: 30438 - DNA, 25 bp, SARS Virus
tgggatgactggacagtagcatata

SEQ ID NO: 30439 - DNA, 25 bp, SARS Virus
gggatgactggtaagtagcatataa

SEQ ID NO: 30440 - DNA, 25 bp, SARS Virus
ggatgactggtcagtagcatataac

SEQ ID NO: 30441 - DNA, 25 bp, SARS Virus
gatgactggtcaatagcatataaca

SEQ ID NO: 30442 - DNA, 25 bp, SARS Virus
atgactggtcagaagcatataacaa

SEQ ID NO: 30443 - DNA, 25 bp, SARS Virus
tgactggtcagtagcatataacaac

SEQ ID NO: 30444 - DNA, 25 bp, SARS Virus
gactggtcagtaacatataacaact

SEQ ID NO: 30445 - DNA, 25 bp, SARS Virus
actggtcagtagaatataacaacta

SEQ ID NO: 30446 - DNA, 25 bp, SARS Virus
ctggtcagtagcatataacaactat

SEQ ID NO: 30447 - DNA, 25 bp, SARS Virus
tggtcagtagcaaataacaactatc

SEQ ID NO: 30448 - DNA, 25 bp, SARS Virus
ggtcagtagcatataacaactatca

SEQ ID NO: 30449 - DNA, 25 bp, SARS Virus
gtcagtagcataaaacaactatcac

SEQ ID NO: 30450 - DNA, 25 bp, SARS Virus
tcagtagcatataacaactatcaca

SEQ ID NO: 30451 - DNA, 25 bp, SARS Virus
cagtagcatataacaactatcacaa

SEQ ID NO: 30452 - DNA, 25 bp, SARS Virus
agtagcatataaaaactatcacaac

SEQ ID NO: 30453 - DNA, 25 bp, SARS Virus
gtagcatataacaactatcacaacg

SEQ ID NO: 30454 - DNA, 25 bp, SARS Virus
tagcatataacaactatcacaacga

SEQ ID NO: 30455 - DNA, 25 bp, SARS Virus
agcatataacaaatatcacaacgac

SEQ ID NO: 30456 - DNA, 25 bp, SARS Virus
gcatataacaacaatcacaacgaca

SEQ ID NO: 30457 - DNA, 25 bp, SARS Virus
catataacaactatcacaacgacac

SEQ ID NO: 30458 - DNA, 25 bp, SARS Virus
atataacaactaacacaacgacact

SEQ ID NO: 30459 - DNA, 25 bp, SARS Virus
tataacaactataacaacgacactt

SEQ ID NO: 30460 - DNA, 25 bp, SARS Virus
ataacaactatcacaacgacacttt

SEQ ID NO: 30461 - DNA, 25 bp, SARS Virus
taacaactatcaaaacgacactttt

SEQ ID NO: 30462 - DNA, 25 bp, SARS Virus
aacaactatcacaacgacacttttt

SEQ ID NO: 30463 - DNA, 25 bp, SARS Virus
acaactatcacaacgacacttttta

SEQ ID NO: 30464 - DNA, 25 bp, SARS Virus
caactatcacaaagacactttttac

SEQ ID NO: 30465 - DNA, 25 bp, SARS Virus
aactatcacaacaacactttttacc

SEQ ID NO: 30466 - DNA, 25 bp, SARS Virus
actatcacaacgacactttttaccg

SEQ ID NO: 30467 - DNA, 25 bp, SARS Virus
ctatcacaacgaaactttttaccgc

SEQ ID NO: 30468 - DNA, 25 bp, SARS Virus
tatcacaacgacactttttaccgcg

SEQ ID NO: 30469 - DNA, 25 bp, SARS Virus
atcacaacgacaatttttaccgcgc

SEQ ID NO: 30470 - DNA, 25 bp, SARS Virus
tcacaacgacacattttaccgcgcg

SEQ ID NO: 30471 - DNA, 25 bp, SARS Virus
cacaacgacactatttaccgcgcga

SEQ ID NO: 30472 - DNA, 25 bp, SARS Virus
acaacgacacttattaccgcgcgaa

SEQ ID NO: 30473 - DNA, 25 bp, SARS Virus
caacgacactttataccgcgcgaag

SEQ ID NO: 30474 - DNA, 25 bp, SARS Virus
aacgacacttttaaccgcgcgaagt

SEQ ID NO: 30475 - DNA, 25 bp, SARS Virus
acgacactttttaccgcgcgaagtg

SEQ ID NO: 30476 - DNA, 25 bp, SARS Virus
cgacactttttaacgcgcgaagtgg

SEQ ID NO: 30477 - DNA, 25 bp, SARS Virus
gacactttttacagcgcgaagtgga

SEQ ID NO: 30478 - DNA, 25 bp, SARS Virus
acactttttaccacgcgaagtggag

SEQ ID NO: 30479 - DNA, 25 bp, SARS Virus
cactttttaccgagcgaagtggaga

SEQ ID NO: 30480 - DNA, 25 bp, SARS Virus
actttttaccgcacgaagtggagat

SEQ ID NO: 30481 - DNA, 25 bp, SARS Virus
ctttttaccgcgagaagtggagatg

SEQ ID NO: 30482 - DNA, 25 bp, SARS Virus
tttttaccgcgcaaagtggagatga

SEQ ID NO: 30483 - DNA, 25 bp, SARS Virus
ttttaccgcgcgaagtggagatgaa

SEQ ID NO: 30484 - DNA, 25 bp, SARS Virus
tttaccgcgcgaagtggagatgaaa

SEQ ID NO: 30485 - DNA, 25 bp, SARS Virus
ttaccgcgcgaaatggagatgaaac

SEQ ID NO: 30486 - DNA, 25 bp, SARS Virus
taccgcgcgaagaggagatgaaact

SEQ ID NO: 30487 - DNA, 25 bp, SARS Virus
accgcgcgaagtagagatgaaactg

SEQ ID NO: 30488 - DNA, 25 bp, SARS Virus
ccgcgcgaagtgaagatgaaactgt

SEQ ID NO: 30489 - DNA, 25 bp, SARS Virus
cgcgcgaagtggagatgaaactgtt

SEQ ID NO: 30490 - DNA, 25 bp, SARS Virus
gcgcgaagtggaaatgaaactgttc

SEQ ID NO: 30491 - DNA, 25 bp, SARS Virus
cgcgaagtggagatgaaactgttcc

SEQ ID NO: 30492 - DNA, 25 bp, SARS Virus
gcgaagtggagaagaaactgttccg

SEQ ID NO: 30493 - DNA, 25 bp, SARS Virus
cgaagtggagataaaactgttccga

SEQ ID NO: 30494 - DNA, 25 bp, SARS Virus
gaagtggagatgaaactgttccgac

SEQ ID NO: 30495 - DNA, 25 bp, SARS Virus
aagtggagatgaaactgttccgacc

SEQ ID NO: 30496 - DNA, 25 bp, SARS Virus
agtggagatgaaactgttccgacca

SEQ ID NO: 30497 - DNA, 25 bp, SARS Virus
gtggagatgaaaatgttccgaccag

SEQ ID NO: 30498 - DNA, 25 bp, SARS Virus
tggagatgaaacagttccgaccagt

SEQ ID NO: 30499 - DNA, 25 bp, SARS Virus
ggagatgaaactattccgaccagtt

SEQ ID NO: 30500 - DNA, 25 bp, SARS Virus
gagatgaaactgatccgaccagttt

SEQ ID NO: 30501 - DNA, 25 bp, SARS Virus
agatgaaactgtaccgaccagtttt

SEQ ID NO: 30502 - DNA, 25 bp, SARS Virus
gatgaaactgttacgaccagttttc

SEQ ID NO: 30503 - DNA, 25 bp, SARS Virus
atgaaactgttcagaccagttttct

SEQ ID NO: 30504 - DNA, 25 bp, SARS Virus
tgaaactgttccaaccagttttctg

SEQ ID NO: 30505 - DNA, 25 bp, SARS Virus
gaaactgttccgaccagttttctgg

SEQ ID NO: 30506 - DNA, 25 bp, SARS Virus
aaactgttccgaacagttttctgga

SEQ ID NO: 30507 - DNA, 25 bp, SARS Virus
aactgttccgacaagttttctggat

SEQ ID NO: 30508 - DNA, 25 bp, SARS Virus
actgttccgaccagttttctggata

SEQ ID NO: 30509 - DNA, 25 bp, SARS Virus
ctgttccgaccaattttctggatac

SEQ ID NO: 30510 - DNA, 25 bp, SARS Virus
tgttccgaccagatttctggatact

SEQ ID NO: 30511 - DNA, 25 bp, SARS Virus
gttccgaccagtattctggatactc

SEQ ID NO: 30512 - DNA, 25 bp, SARS Virus
ttccgaccagttatctggatactct

SEQ ID NO: 30513 - DNA, 25 bp, SARS Virus
tccgaccagtttactggatactctc

SEQ ID NO: 30514 - DNA, 25 bp, SARS Virus
ccgaccagttttatggatactctct

SEQ ID NO: 30515 - DNA, 25 bp, SARS Virus
cgaccagttttcaggatactctctg

SEQ ID NO: 30516 - DNA, 25 bp, SARS Virus
gaccagttttctagatactctctgt

SEQ ID NO: 30517 - DNA, 25 bp, SARS Virus
accagttttctgaatactctctgta

SEQ ID NO: 30518 - DNA, 25 bp, SARS Virus
ccagttttctggatactctctgtag

SEQ ID NO: 30519 - DNA, 25 bp, SARS Virus
cagttttctggaaactctctgtagg

SEQ ID NO: 30520 - DNA, 25 bp, SARS Virus
agttttctggatactctctgtaggc

SEQ ID NO: 30521 - DNA, 25 bp, SARS Virus
gttttctggataatctctgtaggcg

SEQ ID NO: 30522 - DNA, 25 bp, SARS Virus
ttttctggatacactctgtaggcga

SEQ ID NO: 30523 - DNA, 25 bp, SARS Virus
tttctggatactatctgtaggcgag

SEQ ID NO: 30524 - DNA, 25 bp, SARS Virus
ttctggatactcactgtaggcgaga

SEQ ID NO: 30525 - DNA, 25 bp, SARS Virus
tctggatactctatgtaggcgagag

SEQ ID NO: 30526 - DNA, 25 bp, SARS Virus
ctggatactctcagtaggcgagagg

SEQ ID NO: 30527 - DNA, 25 bp, SARS Virus
tggatactctctataggcgagaggg

SEQ ID NO: 30528 - DNA, 25 bp, SARS Virus
ggatactctctgaaggcgagagggt

SEQ ID NO: 30529 - DNA, 25 bp, SARS Virus
gatactctctgtaggcgagagggta

SEQ ID NO: 30530 - DNA, 25 bp, SARS Virus
atactctctgtaagcgagagggtaa

SEQ ID NO: 30531 - DNA, 25 bp, SARS Virus
tactctctgtagacgagagggtaaa

SEQ ID NO: 30532 - DNA, 25 bp, SARS Virus
actctctgtaggagagagggtaaaa

SEQ ID NO: 30533 - DNA, 25 bp, SARS Virus
ctctctgtaggcaagagggtaaaac

SEQ ID NO: 30534 - DNA, 25 bp, SARS Virus
tctctgtaggcgagagggtaaaaca

SEQ ID NO: 30535 - DNA, 25 bp, SARS Virus
ctctgtaggcgaaagggtaaaacag

SEQ ID NO: 30536 - DNA, 25 bp, SARS Virus
tctgtaggcgagagggtaaaacagt

SEQ ID NO: 30537 - DNA, 25 bp, SARS Virus
ctgtaggcgagaaggtaaaacagtt

SEQ ID NO: 30538 - DNA, 25 bp, SARS Virus
tgtaggcgagagagtaaaacagtta

SEQ ID NO: 30539 - DNA, 25 bp, SARS Virus
gtaggcgagaggataaaacagttaa

SEQ ID NO: 30540 - DNA, 25 bp, SARS Virus
taggcgagagggaaaaacagttaaa

SEQ ID NO: 30541 - DNA, 25 bp, SARS Virus
aggcgagagggtaaaacagttaaat

SEQ ID NO: 30542 - DNA, 25 bp, SARS Virus
ggcgagagggtaaaacagttaaatc

SEQ ID NO: 30543 - DNA, 25 bp, SARS Virus
gcgagagggtaaaacagttaaatct

SEQ ID NO: 30544 - DNA, 25 bp, SARS Virus
cgagagggtaaaacagttaaatctg

SEQ ID NO: 30545 - DNA, 25 bp, SARS Virus
gagagggtaaaaaagttaaatctgt

SEQ ID NO: 30546 - DNA, 25 bp, SARS Virus
agagggtaaaacagttaaatctgtt

SEQ ID NO: 30547 - DNA, 25 bp, SARS Virus
gagggtaaaacaattaaatctgtta

SEQ ID NO: 30548 - DNA, 25 bp, SARS Virus
agggtaaaacagataaatctgttaa

SEQ ID NO: 30549 - DNA, 25 bp, SARS Virus
gggtaaaacagtaaaatctgttaaa

SEQ ID NO: 30550 - DNA, 25 bp, SARS Virus
ggtaaaacagttaaatctgttaaac

SEQ ID NO: 30551 - DNA, 25 bp, SARS Virus
gtaaaacagttaaatctgttaaact

SEQ ID NO: 30552 - DNA, 25 bp, SARS Virus
taaaacagttaaatctgttaaactc

SEQ ID NO: 30553 - DNA, 25 bp, SARS Virus
aaaacagttaaaactgttaaactct

SEQ ID NO: 30554 - DNA, 25 bp, SARS Virus
aaacagttaaatatgttaaactctc

SEQ ID NO: 30555 - DNA, 25 bp, SARS Virus
aacagttaaatcagttaaactctcg

SEQ ID NO: 30556 - DNA, 25 bp, SARS Virus
acagttaaatctattaaactctcga

SEQ ID NO: 30557 - DNA, 25 bp, SARS Virus
cagttaaatctgataaactctcgat

SEQ ID NO: 30558 - DNA, 25 bp, SARS Virus
agttaaatctgtaaaactctcgatt

SEQ ID NO: 30559 - DNA, 25 bp, SARS Virus
gttaaatctgttaaactctcgattg

SEQ ID NO: 30560 - DNA, 25 bp, SARS Virus
ttaaatctgttaaactctcgattgt

SEQ ID NO: 30561 - DNA, 25 bp, SARS Virus
taaatctgttaaactctcgattgtt

SEQ ID NO: 30562 - DNA, 25 bp, SARS Virus
aaatctgttaaaatctcgattgttg

SEQ ID NO: 30563 - DNA, 25 bp, SARS Virus
aatctgttaaacactcgattgttgt

SEQ ID NO: 30564 - DNA, 25 bp, SARS Virus
atctgttaaactatcgattgttgtg

SEQ ID NO: 30565 - DNA, 25 bp, SARS Virus
tctgttaaactcacgattgttgtga

SEQ ID NO: 30566 - DNA, 25 bp, SARS Virus
ctgttaaactctagattgttgtgat

SEQ ID NO: 30567 - DNA, 25 bp, SARS Virus
tgttaaactctcaattgttgtgatt

SEQ ID NO: 30568 - DNA, 25 bp, SARS Virus
gttaaactctcgattgttgtgattt

SEQ ID NO: 30569 - DNA, 25 bp, SARS Virus
ttaaactctcgaatgttgtgatttc

SEQ ID NO: 30570 - DNA, 25 bp, SARS Virus
taaactctcgatagttgtgatttcc

SEQ ID NO: 30571 - DNA, 25 bp, SARS Virus
aaactctcgattattgtgatttcca

SEQ ID NO: 30572 - DNA, 25 bp, SARS Virus
aactctcgattgatgtgatttccaa

SEQ ID NO: 30573 - DNA, 25 bp, SARS Virus
actctcgattgtagtgatttccaag

SEQ ID NO: 30574 - DNA, 25 bp, SARS Virus
ctctcgattgttatgatttccaagt

SEQ ID NO: 30575 - DNA, 25 bp, SARS Virus
tctcgattgttgagatttccaagtg

SEQ ID NO: 30576 - DNA, 25 bp, SARS Virus
ctcgattgttgtaatttccaagtga

SEQ ID NO: 30577 - DNA, 25 bp, SARS Virus
tcgattgttgtgatttccaagtgac

SEQ ID NO: 30578 - DNA, 25 bp, SARS Virus
cgattgttgtgaattccaagtgacg

SEQ ID NO: 30579 - DNA, 25 bp, SARS Virus
gattgttgtgatatccaagtgacgg

SEQ ID NO: 30580 - DNA, 25 bp, SARS Virus
attgttgtgattaccaagtgacgga

SEQ ID NO: 30581 - DNA, 25 bp, SARS Virus
ttgttgtgatttacaagtgacggat

SEQ ID NO: 30582 - DNA, 25 bp, SARS Virus
tgttgtgatttcaaagtgacggata

SEQ ID NO: 30583 - DNA, 25 bp, SARS Virus
gttgtgatttccaagtgacggataa

SEQ ID NO: 30584 - DNA, 25 bp, SARS Virus
ttgtgatttccaagtgacggataat

SEQ ID NO: 30585 - DNA, 25 bp, SARS Virus
tgtgatttccaaatgacggataatt

SEQ ID NO: 30586 - DNA, 25 bp, SARS Virus
gtgatttccaagagacggataatta

SEQ ID NO: 30587 - DNA, 25 bp, SARS Virus
tgatttccaagtaacggataattac

SEQ ID NO: 30588 - DNA, 25 bp, SARS Virus
gatttccaagtgacggataattaca

SEQ ID NO: 30589 - DNA, 25 bp, SARS Virus
atttccaagtgaaggataattacag

SEQ ID NO: 30590 - DNA, 25 bp, SARS Virus
tttccaagtgacagataattacagt

SEQ ID NO: 30591 - DNA, 25 bp, SARS Virus
ttccaagtgacgaataattacagta

SEQ ID NO: 30592 - DNA, 25 bp, SARS Virus
tccaagtgacggataattacagtat

SEQ ID NO: 30593 - DNA, 25 bp, SARS Virus
ccaagtgacggaaaattacagtatc

SEQ ID NO: 30594 - DNA, 25 bp, SARS Virus
caagtgacggataattacagtatca

SEQ ID NO: 30595 - DNA, 25 bp, SARS Virus
aagtgacggataattacagtatcaa

SEQ ID NO: 30596 - DNA, 25 bp, SARS Virus
agtgacggataaatacagtatcaaa

SEQ ID NO: 30597 - DNA, 25 bp, SARS Virus
gtgacggataataacagtatcaaaa

SEQ ID NO: 30598 - DNA, 25 bp, SARS Virus
tgacggataattacagtatcaaaaa

SEQ ID NO: 30599 - DNA, 25 bp, SARS Virus
gacggataattaaagtatcaaaaac

SEQ ID NO: 30600 - DNA, 25 bp, SARS Virus
acggataattacagtatcaaaaact

SEQ ID NO: 30601 - DNA, 25 bp, SARS Virus
cggataattacaatatcaaaaacta

SEQ ID NO: 30602 - DNA, 25 bp, SARS Virus
ggataattacagaatcaaaaactac

SEQ ID NO: 30603 - DNA, 25 bp, SARS Virus
gataattacagtatcaaaaactacc

SEQ ID NO: 30604 - DNA, 25 bp, SARS Virus
ataattacagtaacaaaaactaccg

SEQ ID NO: 30605 - DNA, 25 bp, SARS Virus
taattacagtataaaaaactaccgt

SEQ ID NO: 30606 - DNA, 25 bp, SARS Virus
aattacagtatcaaaaactaccgtt

SEQ ID NO: 30607 - DNA, 25 bp, SARS Virus
attacagtatcaaaaactaccgttc

SEQ ID NO: 30608 - DNA, 25 bp, SARS Virus
ttacagtatcaaaaactaccgttca

SEQ ID NO: 30609 - DNA, 25 bp, SARS Virus
tacagtatcaaaaactaccgttcag

SEQ ID NO: 30610 - DNA, 25 bp, SARS Virus
acagtatcaaaaactaccgttcagg

SEQ ID NO: 30611 - DNA, 25 bp, SARS Virus
cagtatcaaaaaataccgttcaggt

SEQ ID NO: 30612 - DNA, 25 bp, SARS Virus
agtatcaaaaacaaccgttcaggtt

SEQ ID NO: 30613 - DNA, 25 bp, SARS Virus
gtatcaaaaactaccgttcaggttt

SEQ ID NO: 30614 - DNA, 25 bp, SARS Virus
tatcaaaaactaacgttcaggttta

SEQ ID NO: 30615 - DNA, 25 bp, SARS Virus
atcaaaaactacagttcaggtttac

SEQ ID NO: 30616 - DNA, 25 bp, SARS Virus
tcaaaaactaccattcaggtttacg

SEQ ID NO: 30617 - DNA, 25 bp, SARS Virus
caaaaactaccgatcaggtttacgc

SEQ ID NO: 30618 - DNA, 25 bp, SARS Virus
aaaaactaccgtacaggtttacgct

SEQ ID NO: 30619 - DNA, 25 bp, SARS Virus
aaaactaccgttaaggtttacgctg

SEQ ID NO: 30620 - DNA, 25 bp, SARS Virus
aaactaccgttcaggtttacgctgc

SEQ ID NO: 30621 - DNA, 25 bp, SARS Virus
aactaccgttcaagtttacgctgct

SEQ ID NO: 30622 - DNA, 25 bp, SARS Virus
actaccgttcagatttacgctgctc

SEQ ID NO: 30623 - DNA, 25 bp, SARS Virus
ctaccgttcaggattacgctgctca

SEQ ID NO: 30624 - DNA, 25 bp, SARS Virus
taccgttcaggtatacgctgctcag

SEQ ID NO: 30625 - DNA, 25 bp, SARS Virus
accgttcaggttaacgctgctcaga

SEQ ID NO: 30626 - DNA, 25 bp, SARS Virus
ccgttcaggtttacgctgctcagac

SEQ ID NO: 30627 - DNA, 25 bp, SARS Virus
cgttcaggtttaagctgctcagacg

SEQ ID NO: 30628 - DNA, 25 bp, SARS Virus
gttcaggtttacactgctcagacga

SEQ ID NO: 30629 - DNA, 25 bp, SARS Virus
ttcaggtttacgatgctcagacgaa

SEQ ID NO: 30630 - DNA, 25 bp, SARS Virus
tcaggtttacgcagctcagacgaag

SEQ ID NO: 30631 - DNA, 25 bp, SARS Virus
caggtttacgctactcagacgaaga

SEQ ID NO: 30632 - DNA, 25 bp, SARS Virus
aggtttacgctgatcagacgaagat

SEQ ID NO: 30633 - DNA, 25 bp, SARS Virus
ggtttacgctgcacagacgaagatt

SEQ ID NO: 30634 - DNA, 25 bp, SARS Virus
gtttacgctgctaagacgaagattc

SEQ ID NO: 30635 - DNA, 25 bp, SARS Virus
tttacgctgctcagacgaagattca

SEQ ID NO: 30636 - DNA, 25 bp, SARS Virus
ttacgctgctcaaacgaagattcag

SEQ ID NO: 30637 - DNA, 25 bp, SARS Virus
tacgctgctcagacgaagattcaga

SEQ ID NO: 30638 - DNA, 25 bp, SARS Virus
acgctgctcagaagaagattcagac

SEQ ID NO: 30639 - DNA, 25 bp, SARS Virus
cgctgctcagacaaagattcagacg

SEQ ID NO: 30640 - DNA, 25 bp, SARS Virus
gctgctcagacgaagattcagacga

SEQ ID NO: 30641 - DNA, 25 bp, SARS Virus
ctgctcagacgaagattcagacgaa

SEQ ID NO: 30642 - DNA, 25 bp, SARS Virus
tgctcagacgaaaattcagacgaag

SEQ ID NO: 30643 - DNA, 25 bp, SARS Virus
gctcagacgaagattcagacgaaga

SEQ ID NO: 30644 - DNA, 25 bp, SARS Virus
ctcagacgaagaatcagacgaagac

SEQ ID NO: 30645 - DNA, 25 bp, SARS Virus
tcagacgaagatacagacgaagaca

SEQ ID NO: 30646 - DNA, 25 bp, SARS Virus
cagacgaagattaagacgaagacac

SEQ ID NO: 30647 - DNA, 25 bp, SARS Virus
agacgaagattcagacgaagacaca

SEQ ID NO: 30648 - DNA, 25 bp, SARS Virus
gacgaagattcaaacgaagacacat

SEQ ID NO: 30649 - DNA, 25 bp, SARS Virus
acgaagattcagacgaagacacatg

SEQ ID NO: 30650 - DNA, 25 bp, SARS Virus
cgaagattcagaagaagacacatga

SEQ ID NO: 30651 - DNA, 25 bp, SARS Virus
gaagattcagacaaagacacatgat

SEQ ID NO: 30652 - DNA, 25 bp, SARS Virus
aagattcagacgaagacacatgatg

SEQ ID NO: 30653 - DNA, 25 bp, SARS Virus
agattcagacgaagacacatgatgt

SEQ ID NO: 30654 - DNA, 25 bp, SARS Virus
gattcagacgaaaacacatgatgtc

SEQ ID NO: 30655 - DNA, 25 bp, SARS Virus
attcagacgaagacacatgatgtca

SEQ ID NO: 30656 - DNA, 25 bp, SARS Virus
ttcagacgaagaaacatgatgtcag

SEQ ID NO: 30657 - DNA, 25 bp, SARS Virus
tcagacgaagacacatgatgtcagt

SEQ ID NO: 30658 - DNA, 25 bp, SARS Virus
cagacgaagacaaatgatgtcagtc

SEQ ID NO: 30659 - DNA, 25 bp, SARS Virus
agacgaagacacatgatgtcagtcg

SEQ ID NO: 30660 - DNA, 25 bp, SARS Virus
gacgaagacacaagatgtcagtcga

SEQ ID NO: 30661 - DNA, 25 bp, SARS Virus
acgaagacacataatgtcagtcgac

SEQ ID NO: 30662 - DNA, 25 bp, SARS Virus
cgaagacacatgatgtcagtcgact

SEQ ID NO: 30663 - DNA, 25 bp, SARS Virus
gaagacacatgaagtcagtcgacta

SEQ ID NO: 30664 - DNA, 25 bp, SARS Virus
aagacacatgatatcagtcgactac

SEQ ID NO: 30665 - DNA, 25 bp, SARS Virus
agacacatgatgacagtcgactaca

SEQ ID NO: 30666 - DNA, 25 bp, SARS Virus
gacacatgatgtaagtcgactacac

SEQ ID NO: 30667 - DNA, 25 bp, SARS Virus
acacatgatgtcagtcgactacacg

SEQ ID NO: 30668 - DNA, 25 bp, SARS Virus
cacatgatgtcaatcgactacacgg

SEQ ID NO: 30669 - DNA, 25 bp, SARS Virus
acatgatgtcagacgactacacggt

SEQ ID NO: 30670 - DNA, 25 bp, SARS Virus
catgatgtcagtagactacacggtt

SEQ ID NO: 30671 - DNA, 25 bp, SARS Virus
atgatgtcagtcaactacacggttg

SEQ ID NO: 30672 - DNA, 25 bp, SARS Virus
tgatgtcagtcgactacacggttgg

SEQ ID NO: 30673 - DNA, 25 bp, SARS Virus
gatgtcagtcgaatacacggttgga

SEQ ID NO: 30674 - DNA, 25 bp, SARS Virus
atgtcagtcgacaacacggttggat

SEQ ID NO: 30675 - DNA, 25 bp, SARS Virus
tgtcagtcgactacacggttggata

SEQ ID NO: 30676 - DNA, 25 bp, SARS Virus
gtcagtcgactaaacggttggataa

SEQ ID NO: 30677 - DNA, 25 bp, SARS Virus
tcagtcgactacacggttggataag

SEQ ID NO: 30678 - DNA, 25 bp, SARS Virus
cagtcgactacaaggttggataaga

SEQ ID NO: 30679 - DNA, 25 bp, SARS Virus
agtcgactacacagttggataagac

SEQ ID NO: 30680 - DNA, 25 bp, SARS Virus
gtcgactacacgattggataagaca

SEQ ID NO: 30681 - DNA, 25 bp, SARS Virus
tcgactacacggatggataagacaa

SEQ ID NO: 30682 - DNA, 25 bp, SARS Virus
cgactacacggtaggataagacaac

SEQ ID NO: 30683 - DNA, 25 bp, SARS Virus
gactacacggttagataagacaacg

SEQ ID NO: 30684 - DNA, 25 bp, SARS Virus
actacacggttgaataagacaacga

SEQ ID NO: 30685 - DNA, 25 bp, SARS Virus
ctacacggttggataagacaacgaa

SEQ ID NO: 30686 - DNA, 25 bp, SARS Virus
tacacggttggaaaagacaacgaac

SEQ ID NO: 30687 - DNA, 25 bp, SARS Virus
acacggttggataagacaacgaact

SEQ ID NO: 30688 - DNA, 25 bp, SARS Virus
cacggttggataagacaacgaactg

SEQ ID NO: 30689 - DNA, 25 bp, SARS Virus
acggttggataaaacaacgaactgg

SEQ ID NO: 30690 - DNA, 25 bp, SARS Virus
cggttggataagacaacgaactggt

SEQ ID NO: 30691 - DNA, 25 bp, SARS Virus
ggttggataagaaaacgaactggtt

SEQ ID NO: 30692 - DNA, 25 bp, SARS Virus
gttggataagacaacgaactggttc

SEQ ID NO: 30693 - DNA, 25 bp, SARS Virus
ttggataagacaacgaactggttcg

SEQ ID NO: 30694 - DNA, 25 bp, SARS Virus
tggataagacaaagaactggttcga

SEQ ID NO: 30695 - DNA, 25 bp, SARS Virus
ggataagacaacaaactggttcgag

SEQ ID NO: 30696 - DNA, 25 bp, SARS Virus
gataagacaacgaactggttcgaga

SEQ ID NO: 30697 - DNA, 25 bp, SARS Virus
ataagacaacgaactggttcgagaa

SEQ ID NO: 30698 - DNA, 25 bp, SARS Virus
taagacaacgaaatggttcgagaac

SEQ ID NO: 30699 - DNA, 25 bp, SARS Virus
aagacaacgaacaggttcgagaaca

SEQ ID NO: 30700 - DNA, 25 bp, SARS Virus
agacaacgaactagttcgagaacat

SEQ ID NO: 30701 - DNA, 25 bp, SARS Virus
gacaacgaactgattcgagaacata

SEQ ID NO: 30702 - DNA, 25 bp, SARS Virus
acaacgaactggatcgagaacatag

SEQ ID NO: 30703 - DNA, 25 bp, SARS Virus
caacgaactggtacgagaacatagt

SEQ ID NO: 30704 - DNA, 25 bp, SARS Virus
aacgaactggttagagaacatagtc

SEQ ID NO: 30705 - DNA, 25 bp, SARS Virus
acgaactggttcaagaacatagtct

SEQ ID NO: 30706 - DNA, 25 bp, SARS Virus
cgaactggttcgagaacatagtctg

SEQ ID NO: 30707 - DNA, 25 bp, SARS Virus
gaactggttcgaaaacatagtctgc

SEQ ID NO: 30708 - DNA, 25 bp, SARS Virus
aactggttcgagaacatagtctgca

SEQ ID NO: 30709 - DNA, 25 bp, SARS Virus
actggttcgagaacatagtctgcaa

SEQ ID NO: 30710 - DNA, 25 bp, SARS Virus
ctggttcgagaaaatagtctgcaac

SEQ ID NO: 30711 - DNA, 25 bp, SARS Virus
tggttcgagaacatagtctgcaacc

SEQ ID NO: 30712 - DNA, 25 bp, SARS Virus
ggttcgagaacaaagtctgcaacct

SEQ ID NO: 30713 - DNA, 25 bp, SARS Virus
gttcgagaacatagtctgcaacctc

SEQ ID NO: 30714 - DNA, 25 bp, SARS Virus
ttcgagaacataatctgcaacctct

SEQ ID NO: 30715 - DNA, 25 bp, SARS Virus
tcgagaacatagactgcaacctcta

SEQ ID NO: 30716 - DNA, 25 bp, SARS Virus
cgagaacatagtatgcaacctctat

SEQ ID NO: 30717 - DNA, 25 bp, SARS Virus
gagaacatagtcagcaacctctatc

SEQ ID NO: 30718 - DNA, 25 bp, SARS Virus
agaacatagtctacaacctctatca

SEQ ID NO: 30719 - DNA, 25 bp, SARS Virus
gaacatagtctgaaacctctatcat

SEQ ID NO: 30720 - DNA, 25 bp, SARS Virus
aacatagtctgcaacctctatcatg

SEQ ID NO: 30721 - DNA, 25 bp, SARS Virus
acatagtctgcaacctctatcatga

SEQ ID NO: 30722 - DNA, 25 bp, SARS Virus
catagtctgcaaactctatcatgac

SEQ ID NO: 30723 - DNA, 25 bp, SARS Virus
atagtctgcaacatctatcatgact

SEQ ID NO: 30724 - DNA, 25 bp, SARS Virus
tagtctgcaaccactatcatgactt

SEQ ID NO: 30725 - DNA, 25 bp, SARS Virus
agtctgcaacctatatcatgacttc

SEQ ID NO: 30726 - DNA, 25 bp, SARS Virus
gtctgcaacctcaatcatgacttca

SEQ ID NO: 30727 - DNA, 25 bp, SARS Virus
tctgcaacctctatcatgacttcaa

SEQ ID NO: 30728 - DNA, 25 bp, SARS Virus
ctgcaacctctaacatgacttcaaa

SEQ ID NO: 30729 - DNA, 25 bp, SARS Virus
tgcaacctctataatgacttcaaag

SEQ ID NO: 30730 - DNA, 25 bp, SARS Virus
gcaacctctatcatgacttcaaagg

SEQ ID NO: 30731 - DNA, 25 bp, SARS Virus
caacctctatcaagacttcaaaggc

SEQ ID NO: 30732 - DNA, 25 bp, SARS Virus
aacctctatcataacttcaaaggca

SEQ ID NO: 30733 - DNA, 25 bp, SARS Virus
acctctatcatgacttcaaaggcaa

SEQ ID NO: 30734 - DNA, 25 bp, SARS Virus
cctctatcatgaattcaaaggcaat

SEQ ID NO: 30735 - DNA, 25 bp, SARS Virus
ctctatcatgacatcaaaggcaatt

SEQ ID NO: 30736 - DNA, 25 bp, SARS Virus
tctatcatgactacaaaggcaattc

SEQ ID NO: 30737 - DNA, 25 bp, SARS Virus
ctatcatgacttaaaaggcaattct

SEQ ID NO: 30738 - DNA, 25 bp, SARS Virus
tatcatgacttcaaaggcaattcta

SEQ ID NO: 30739 - DNA, 25 bp, SARS Virus
atcatgacttcaaaggcaattctac

SEQ ID NO: 30740 - DNA, 25 bp, SARS Virus
tcatgacttcaaaggcaattctaca

SEQ ID NO: 30741 - DNA, 25 bp, SARS Virus
catgacttcaaaagcaattctacaa

SEQ ID NO: 30742 - DNA, 25 bp, SARS Virus
atgacttcaaagacaattctacaaa

SEQ ID NO: 30743 - DNA, 25 bp, SARS Virus
tgacttcaaaggaaattctacaaac

SEQ ID NO: 30744 - DNA, 25 bp, SARS Virus
gacttcaaaggcaattctacaaact

SEQ ID NO: 30745 - DNA, 25 bp, SARS Virus
acttcaaaggcaattctacaaacta

SEQ ID NO: 30746 - DNA, 25 bp, SARS Virus
cttcaaaggcaaatctacaaactac

SEQ ID NO: 30747 - DNA, 25 bp, SARS Virus
ttcaaaggcaatactacaaactacg

SEQ ID NO: 30748 - DNA, 25 bp, SARS Virus
tcaaaggcaattatacaaactacga

SEQ ID NO: 30749 - DNA, 25 bp, SARS Virus
caaaggcaattcaacaaactacgaa

SEQ ID NO: 30750 - DNA, 25 bp, SARS Virus
aaaggcaattctacaaactacgaat

SEQ ID NO: 30751 - DNA, 25 bp, SARS Virus
aaggcaattctaaaaactacgaata

SEQ ID NO: 30752 - DNA, 25 bp, SARS Virus
aggcaattctacaaactacgaatac

SEQ ID NO: 30753 - DNA, 25 bp, SARS Virus
ggcaattctacaaactacgaataca

SEQ ID NO: 30754 - DNA, 25 bp, SARS Virus
gcaattctacaaactacgaatacag

SEQ ID NO: 30755 - DNA, 25 bp, SARS Virus
caattctacaaaatacgaatacagc

SEQ ID NO: 30756 - DNA, 25 bp, SARS Virus
aattctacaaacaacgaatacagct

SEQ ID NO: 30757 - DNA, 25 bp, SARS Virus
attctacaaactacgaatacagctg

SEQ ID NO: 30758 - DNA, 25 bp, SARS Virus
ttctacaaactaagaatacagctgt

SEQ ID NO: 30759 - DNA, 25 bp, SARS Virus
tctacaaactacaaatacagctgtg

SEQ ID NO: 30760 - DNA, 25 bp, SARS Virus
ctacaaactacgaatacagctgtgg

SEQ ID NO: 30761 - DNA, 25 bp, SARS Virus
tacaaactacgaatacagctgtgga

SEQ ID NO: 30762 - DNA, 25 bp, SARS Virus
acaaactacgaaaacagctgtggaa

SEQ ID NO: 30763 - DNA, 25 bp, SARS Virus
caaactacgaatacagctgtggaaa

SEQ ID NO: 30764 - DNA, 25 bp, SARS Virus
aaactacgaataaagctgtggaaaa

SEQ ID NO: 30765 - DNA, 25 bp, SARS Virus
aactacgaatacagctgtggaaaag

SEQ ID NO: 30766 - DNA, 25 bp, SARS Virus
actacgaatacaactgtggaaaagt

SEQ ID NO: 30767 - DNA, 25 bp, SARS Virus
ctacgaatacagatgtggaaaagtc

SEQ ID NO: 30768 - DNA, 25 bp, SARS Virus
tacgaatacagcagtggaaaagtcg

SEQ ID NO: 30769 - DNA, 25 bp, SARS Virus
acgaatacagctatggaaaagtcgt

SEQ ID NO: 30770 - DNA, 25 bp, SARS Virus
cgaatacagctgaggaaaagtcgtt

SEQ ID NO: 30771 - DNA, 25 bp, SARS Virus
gaatacagctgtagaaaagtcgttg

SEQ ID NO: 30772 - DNA, 25 bp, SARS Virus
aatacagctgtgaaaaagtcgttga

SEQ ID NO: 30773 - DNA, 25 bp, SARS Virus
atacagctgtggaaaagtcgttgaa

SEQ ID NO: 30774 - DNA, 25 bp, SARS Virus
tacagctgtggaaaagtcgttgaaa

SEQ ID NO: 30775 - DNA, 25 bp, SARS Virus
acagctgtggaaaagtcgttgaaaa

SEQ ID NO: 30776 - DNA, 25 bp, SARS Virus
cagctgtggaaaagtcgttgaaaat

SEQ ID NO: 30777 - DNA, 25 bp, SARS Virus
agctgtggaaaaatcgttgaaaatc

SEQ ID NO: 30778 - DNA, 25 bp, SARS Virus
gctgtggaaaagacgttgaaaatca

SEQ ID NO: 30779 - DNA, 25 bp, SARS Virus
ctgtggaaaagtagttgaaaatcac

SEQ ID NO: 30780 - DNA, 25 bp, SARS Virus
tgtggaaaagtcattgaaaatcaca

SEQ ID NO: 30781 - DNA, 25 bp, SARS Virus
gtggaaaagtcgatgaaaatcacaa

SEQ ID NO: 30782 - DNA, 25 bp, SARS Virus
tggaaaagtcgtagaaaatcacaag

SEQ ID NO: 30783 - DNA, 25 bp, SARS Virus
ggaaaagtcgttaaaaatcacaagg

SEQ ID NO: 30784 - DNA, 25 bp, SARS Virus
gaaaagtcgttgaaaatcacaagga

SEQ ID NO: 30785 - DNA, 25 bp, SARS Virus
aaaagtcgttgaaaatcacaaggat

SEQ ID NO: 30786 - DNA, 25 bp, SARS Virus
aaagtcgttgaaaatcacaaggata

SEQ ID NO: 30787 - DNA, 25 bp, SARS Virus
aagtcgttgaaaatcacaaggatac

SEQ ID NO: 30788 - DNA, 25 bp, SARS Virus
agtcgttgaaaaacacaaggatacc

SEQ ID NO: 30789 - DNA, 25 bp, SARS Virus
gtcgttgaaaataacaaggatacct

SEQ ID NO: 30790 - DNA, 25 bp, SARS Virus
tcgttgaaaatcacaaggatacctt

SEQ ID NO: 30791 - DNA, 25 bp, SARS Virus
cgttgaaaatcaaaaggataccttt

SEQ ID NO: 30792 - DNA, 25 bp, SARS Virus
gttgaaaatcacaaggatacctttt

SEQ ID NO: 30793 - DNA, 25 bp, SARS Virus
ttgaaaatcacaaggataccttttt

SEQ ID NO: 30794 - DNA, 25 bp, SARS Virus
tgaaaatcacaaagatacctttttg

SEQ ID NO: 30795 - DNA, 25 bp, SARS Virus
gaaaatcacaagaatacctttttga

SEQ ID NO: 30796 - DNA, 25 bp, SARS Virus
aaaatcacaaggatacctttttgaa

SEQ ID NO: 30797 - DNA, 25 bp, SARS Virus
aaatcacaaggaaacctttttgaat

SEQ ID NO: 30798 - DNA, 25 bp, SARS Virus
aatcacaaggatacctttttgaatt

SEQ ID NO: 30799 - DNA, 25 bp, SARS Virus
atcacaaggataactttttgaattc

SEQ ID NO: 30800 - DNA, 25 bp, SARS Virus
tcacaaggatacatttttgaattcc

SEQ ID NO: 30801 - DNA, 25 bp, SARS Virus
cacaaggataccattttgaattccg

SEQ ID NO: 30802 - DNA, 25 bp, SARS Virus
acaaggatacctatttgaattccgt

SEQ ID NO: 30803 - DNA, 25 bp, SARS Virus
caaggataccttattgaattccgtg

SEQ ID NO: 30804 - DNA, 25 bp, SARS Virus
aaggatacctttatgaattccgtga

SEQ ID NO: 30805 - DNA, 25 bp, SARS Virus
aggataccttttagaattccgtgaa

SEQ ID NO: 30806 - DNA, 25 bp, SARS Virus
ggatacctttttaaattccgtgaac

SEQ ID NO: 30807 - DNA, 25 bp, SARS Virus
gatacctttttgaattccgtgaaca

SEQ ID NO: 30808 - DNA, 25 bp, SARS Virus
atacctttttgaattccgtgaacaa

SEQ ID NO: 30809 - DNA, 25 bp, SARS Virus
tacctttttgaaatccgtgaacaac

SEQ ID NO: 30810 - DNA, 25 bp, SARS Virus
acctttttgaataccgtgaacaacg

SEQ ID NO: 30811 - DNA, 25 bp, SARS Virus
cctttttgaattacgtgaacaacga

SEQ ID NO: 30812 - DNA, 25 bp, SARS Virus
ctttttgaattcagtgaacaacgat

SEQ ID NO: 30813 - DNA, 25 bp, SARS Virus
tttttgaattccatgaacaacgatg

SEQ ID NO: 30814 - DNA, 25 bp, SARS Virus
ttttgaattccgagaacaacgatgt

SEQ ID NO: 30815 - DNA, 25 bp, SARS Virus
tttgaattccgtaaacaacgatgtc

SEQ ID NO: 30816 - DNA, 25 bp, SARS Virus
ttgaattccgtgaacaacgatgtcg

SEQ ID NO: 30817 - DNA, 25 bp, SARS Virus
tgaattccgtgaacaacgatgtcga

SEQ ID NO: 30818 - DNA, 25 bp, SARS Virus
gaattccgtgaaaaacgatgtcgag

SEQ ID NO: 30819 - DNA, 25 bp, SARS Virus
aattccgtgaacaacgatgtcgagt

SEQ ID NO: 30820 - DNA, 25 bp, SARS Virus
attccgtgaacaacgatgtcgagtg

SEQ ID NO: 30821 - DNA, 25 bp, SARS Virus
ttccgtgaacaaagatgtcgagtgt

SEQ ID NO: 30822 - DNA, 25 bp, SARS Virus
tccgtgaacaacaatgtcgagtgtc

SEQ ID NO: 30823 - DNA, 25 bp, SARS Virus
ccgtgaacaacgatgtcgagtgtcg

SEQ ID NO: 30824 - DNA, 25 bp, SARS Virus
cgtgaacaacgaagtcgagtgtcgc

SEQ ID NO: 30825 - DNA, 25 bp, SARS Virus
gtgaacaacgatatcgagtgtcgct

SEQ ID NO: 30826 - DNA, 25 bp, SARS Virus
tgaacaacgatgacgagtgtcgctc

SEQ ID NO: 30827 - DNA, 25 bp, SARS Virus
gaacaacgatgtagagtgtcgctca

SEQ ID NO: 30828 - DNA, 25 bp, SARS Virus
aacaacgatgtcaagtgtcgctcaa

SEQ ID NO: 30829 - DNA, 25 bp, SARS Virus
acaacgatgtcgagtgtcgctcaat

SEQ ID NO: 30830 - DNA, 25 bp, SARS Virus
caacgatgtcgaatgtcgctcaatc

SEQ ID NO: 30831 - DNA, 25 bp, SARS Virus
aacgatgtcgagagtcgctcaatcg

SEQ ID NO: 30832 - DNA, 25 bp, SARS Virus
acgatgtcgagtatcgctcaatcgt

SEQ ID NO: 30833 - DNA, 25 bp, SARS Virus
cgatgtcgagtgacgctcaatcgtt

SEQ ID NO: 30834 - DNA, 25 bp, SARS Virus
gatgtcgagtgtagctcaatcgttt

SEQ ID NO: 30835 - DNA, 25 bp, SARS Virus
atgtcgagtgtcactcaatcgtttc

SEQ ID NO: 30836 - DNA, 25 bp, SARS Virus
tgtcgagtgtcgatcaatcgtttcc

SEQ ID NO: 30837 - DNA, 25 bp, SARS Virus
gtcgagtgtcgcacaatcgtttccc

SEQ ID NO: 30838 - DNA, 25 bp, SARS Virus
tcgagtgtcgctaaatcgtttccca

SEQ ID NO: 30839 - DNA, 25 bp, SARS Virus
cgagtgtcgctcaatcgtttcccac

SEQ ID NO: 30840 - DNA, 25 bp, SARS Virus
gagtgtcgctcaatcgtttcccaca

SEQ ID NO: 30841 - DNA, 25 bp, SARS Virus
agtgtcgctcaaacgtttcccacat

SEQ ID NO: 30842 - DNA, 25 bp, SARS Virus
gtgtcgctcaatagtttcccacatc

SEQ ID NO: 30843 - DNA, 25 bp, SARS Virus
tgtcgctcaatcatttcccacatcg

SEQ ID NO: 30844 - DNA, 25 bp, SARS Virus
gtcgctcaatcgattcccacatcga

SEQ ID NO: 30845 - DNA, 25 bp, SARS Virus
tcgctcaatcgtatcccacatcgaa

SEQ ID NO: 30846 - DNA, 25 bp, SARS Virus
cgctcaatcgttacccacatcgaaa

SEQ ID NO: 30847 - DNA, 25 bp, SARS Virus
gctcaatcgtttaccacatcgaaat

SEQ ID NO: 30848 - DNA, 25 bp, SARS Virus
ctcaatcgtttcacacatcgaaatc

SEQ ID NO: 30849 - DNA, 25 bp, SARS Virus
tcaatcgtttccaacatcgaaatct

SEQ ID NO: 30850 - DNA, 25 bp, SARS Virus
caatcgtttcccacatcgaaatcta

SEQ ID NO: 30851 - DNA, 25 bp, SARS Virus
aatcgtttcccaaatcgaaatctac

SEQ ID NO: 30852 - DNA, 25 bp, SARS Virus
atcgtttcccacatcgaaatctacc

SEQ ID NO: 30853 - DNA, 25 bp, SARS Virus
tcgtttcccacaacgaaatctacca

SEQ ID NO: 30854 - DNA, 25 bp, SARS Virus
cgtttcccacatagaaatctaccac

SEQ ID NO: 30855 - DNA, 25 bp, SARS Virus
gtttcccacatcaaaatctaccaca

SEQ ID NO: 30856 - DNA, 25 bp, SARS Virus
tttcccacatcgaaatctaccacag

SEQ ID NO: 30857 - DNA, 25 bp, SARS Virus
ttcccacatcgaaatctaccacagg

SEQ ID NO: 30858 - DNA, 25 bp, SARS Virus
tcccacatcgaaatctaccacagga

SEQ ID NO: 30859 - DNA, 25 bp, SARS Virus
cccacatcgaaaactaccacaggaa

SEQ ID NO: 30860 - DNA, 25 bp, SARS Virus
ccacatcgaaatataccacaggaaa

SEQ ID NO: 30861 - DNA, 25 bp, SARS Virus
cacatcgaaatcaaccacaggaaag

SEQ ID NO: 30862 - DNA, 25 bp, SARS Virus
acatcgaaatctaccacaggaaaga

SEQ ID NO: 30863 - DNA, 25 bp, SARS Virus
catcgaaatctaacacaggaaagat

SEQ ID NO: 30864 - DNA, 25 bp, SARS Virus
atcgaaatctacaacaggaaagatg

SEQ ID NO: 30865 - DNA, 25 bp, SARS Virus
tcgaaatctaccacaggaaagatgt

SEQ ID NO: 30866 - DNA, 25 bp, SARS Virus
cgaaatctaccaaaggaaagatgta

SEQ ID NO: 30867 - DNA, 25 bp, SARS Virus
gaaatctaccacaggaaagatgtaa

SEQ ID NO: 30868 - DNA, 25 bp, SARS Virus
aaatctaccacaagaaagatgtaag

SEQ ID NO: 30869 - DNA, 25 bp, SARS Virus
aatctaccacagaaaagatgtaagc

SEQ ID NO: 30870 - DNA, 25 bp, SARS Virus
atctaccacaggaaagatgtaagca

SEQ ID NO: 30871 - DNA, 25 bp, SARS Virus
tctaccacaggaaagatgtaagcac

SEQ ID NO: 30872 - DNA, 25 bp, SARS Virus
ctaccacaggaaagatgtaagcaca

SEQ ID NO: 30873 - DNA, 25 bp, SARS Virus
gtaatcactactccaacgagcacta

SEQ ID NO: 30874 - DNA, 25 bp, SARS Virus
taatcactacttcaacgagcactaa

SEQ ID NO: 30875 - DNA, 25 bp, SARS Virus
aatcactacttccacgagcactaaa

SEQ ID NO: 30876 - DNA, 25 bp, SARS Virus
atcactacttcaccgagcactaaac

SEQ ID NO: 30877 - DNA, 25 bp, SARS Virus
tcactacttcaacgagcactaaaca

SEQ ID NO: 30878 - DNA, 25 bp, SARS Virus
cactacttcaaccagcactaaacag

SEQ ID NO: 30879 - DNA, 25 bp, SARS Virus
actacttcaacgcgcactaaacagt

SEQ ID NO: 30880 - DNA, 25 bp, SARS Virus
ctacttcaacgaccactaaacagtg

SEQ ID NO: 30881 - DNA, 25 bp, SARS Virus
tacttcaacgagcactaaacagtga

SEQ ID NO: 30882 - DNA, 25 bp, SARS Virus
acttcaacgagccctaaacagtgag

SEQ ID NO: 30883 - DNA, 25 bp, SARS Virus
cttcaacgagcactaaacagtgagg

SEQ ID NO: 30884 - DNA, 25 bp, SARS Virus
ttcaacgagcaccaaacagtgaggt

SEQ ID NO: 30885 - DNA, 25 bp, SARS Virus
tcaacgagcactcaacagtgaggtc

SEQ ID NO: 30886 - DNA, 25 bp, SARS Virus
caacgagcactacacagtgaggtca

SEQ ID NO: 30887 - DNA, 25 bp, SARS Virus
aacgagcactaaccagtgaggtcaa

SEQ ID NO: 30888 - DNA, 25 bp, SARS Virus
acgagcactaaacagtgaggtcaaa

SEQ ID NO: 30889 - DNA, 25 bp, SARS Virus
cgagcactaaaccgtgaggtcaaat

SEQ ID NO: 30890 - DNA, 25 bp, SARS Virus
gagcactaaacactgaggtcaaatt

SEQ ID NO: 30891 - DNA, 25 bp, SARS Virus
agcactaaacagcgaggtcaaattt

SEQ ID NO: 30892 - DNA, 25 bp, SARS Virus
gcactaaacagtcaggtcaaatttt

SEQ ID NO: 30893 - DNA, 25 bp, SARS Virus
cactaaacagtgcggtcaaattttc

SEQ ID NO: 30894 - DNA, 25 bp, SARS Virus
actaaacagtgacgtcaaattttct

SEQ ID NO: 30895 - DNA, 25 bp, SARS Virus
ctaaacagtgagctcaaattttctg

SEQ ID NO: 30896 - DNA, 25 bp, SARS Virus
taaacagtgaggccaaattttctgg

SEQ ID NO: 30897 - DNA, 25 bp, SARS Virus
aaacagtgaggtcaaattttctggt

SEQ ID NO: 30898 - DNA, 25 bp, SARS Virus
aacagtgaggtccaattttctggtt

SEQ ID NO: 30899 - DNA, 25 bp, SARS Virus
acagtgaggtcacattttctggtta

SEQ ID NO: 30900 - DNA, 25 bp, SARS Virus
cagtgaggtcaacttttctggttag

SEQ ID NO: 30901 - DNA, 25 bp, SARS Virus
agtgaggtcaaactttctggttagt

SEQ ID NO: 30902 - DNA, 25 bp, SARS Virus
gtgaggtcaaatcttctggttagtt

SEQ ID NO: 30903 - DNA, 25 bp, SARS Virus
tgaggtcaaattctctggttagttg

SEQ ID NO: 30904 - DNA, 25 bp, SARS Virus
gaggtcaaatttcctggttagttgg

SEQ ID NO: 30905 - DNA, 25 bp, SARS Virus
aggtcaaattttctggttagttggg

SEQ ID NO: 30906 - DNA, 25 bp, SARS Virus
ggtcaaattttccggttagttggga

SEQ ID NO: 30907 - DNA, 25 bp, SARS Virus
gtcaaattttctcgttagttgggat

SEQ ID NO: 30908 - DNA, 25 bp, SARS Virus
tcaaattttctgcttagttgggatg

SEQ ID NO: 30909 - DNA, 25 bp, SARS Virus
caaattttctggctagttgggatga

SEQ ID NO: 30910 - DNA, 25 bp, SARS Virus
aaattttctggtcagttgggatgac

SEQ ID NO: 30911 - DNA, 25 bp, SARS Virus
aattttctggttcgttgggatgact

SEQ ID NO: 30912 - DNA, 25 bp, SARS Virus
attttctggttacttgggatgactg

SEQ ID NO: 30913 - DNA, 25 bp, SARS Virus
ttttctggttagctgggatgactgg

SEQ ID NO: 30914 - DNA, 25 bp, SARS Virus
tttctggttagtcgggatgactggt

SEQ ID NO: 30915 - DNA, 25 bp, SARS Virus
ttctggttagttcggatgactggtc

SEQ ID NO: 30916 - DNA, 25 bp, SARS Virus
tctggttagttgcgatgactggtca

SEQ ID NO: 30917 - DNA, 25 bp, SARS Virus
ctggttagttggcatgactggtcag

SEQ ID NO: 30918 - DNA, 25 bp, SARS Virus
tggttagttgggctgactggtcagt

SEQ ID NO: 30919 - DNA, 25 bp, SARS Virus
ggttagttgggacgactggtcagta

SEQ ID NO: 30920 - DNA, 25 bp, SARS Virus
gttagttgggatcactggtcagtag

SEQ ID NO: 30921 - DNA, 25 bp, SARS Virus
ttagttgggatgcctggtcagtagc

SEQ ID NO: 30922 - DNA, 25 bp, SARS Virus
tagttgggatgactggtcagtagca

SEQ ID NO: 30923 - DNA, 25 bp, SARS Virus
agttgggatgaccggtcagtagcat

SEQ ID NO: 30924 - DNA, 25 bp, SARS Virus
gttgggatgactcgtcagtagcata

SEQ ID NO: 30925 - DNA, 25 bp, SARS Virus
ttgggatgactgctcagtagcatat

SEQ ID NO: 30926 - DNA, 25 bp, SARS Virus
tgggatgactggccagtagcatata

SEQ ID NO: 30927 - DNA, 25 bp, SARS Virus
gggatgactggtcagtagcatataa

SEQ ID NO: 30928 - DNA, 25 bp, SARS Virus
ggatgactggtccgtagcatataac

SEQ ID NO: 30929 - DNA, 25 bp, SARS Virus
gatgactggtcactagcatataaca

SEQ ID NO: 30930 - DNA, 25 bp, SARS Virus
atgactggtcagcagcatataacaa

SEQ ID NO: 30931 - DNA, 25 bp, SARS Virus
tgactggtcagtcgcatataacaac

SEQ ID NO: 30932 - DNA, 25 bp, SARS Virus
gactggtcagtaccatataacaact

SEQ ID NO: 30933 - DNA, 25 bp, SARS Virus
actggtcagtagcatataacaacta

SEQ ID NO: 30934 - DNA, 25 bp, SARS Virus
ctggtcagtagcctataacaactat

SEQ ID NO: 30935 - DNA, 25 bp, SARS Virus
tggtcagtagcacataacaactatc

SEQ ID NO: 30936 - DNA, 25 bp, SARS Virus
ggtcagtagcatctaacaactatca

SEQ ID NO: 30937 - DNA, 25 bp, SARS Virus
gtcagtagcatacaacaactatcac

SEQ ID NO: 30938 - DNA, 25 bp, SARS Virus
tcagtagcatatcacaactatcaca

SEQ ID NO: 30939 - DNA, 25 bp, SARS Virus
cagtagcatataccaactatcacaa

SEQ ID NO: 30940 - DNA, 25 bp, SARS Virus
agtagcatataacaactatcacaac

SEQ ID NO: 30941 - DNA, 25 bp, SARS Virus
gtagcatataaccactatcacaacg

SEQ ID NO: 30942 - DNA, 25 bp, SARS Virus
tagcatataacacctatcacaacga

SEQ ID NO: 30943 - DNA, 25 bp, SARS Virus
agcatataacaactatcacaacgac

SEQ ID NO: 30944 - DNA, 25 bp, SARS Virus
gcatataacaaccatcacaacgaca

SEQ ID NO: 30945 - DNA, 25 bp, SARS Virus
catataacaactctcacaacgacac

SEQ ID NO: 30946 - DNA, 25 bp, SARS Virus
atataacaactaccacaacgacact

SEQ ID NO: 30947 - DNA, 25 bp, SARS Virus
tataacaactatcacaacgacactt

SEQ ID NO: 30948 - DNA, 25 bp, SARS Virus
ataacaactatcccaacgacacttt

SEQ ID NO: 30949 - DNA, 25 bp, SARS Virus
taacaactatcacaacgacactttt

SEQ ID NO: 30950 - DNA, 25 bp, SARS Virus
aacaactatcaccacgacacttttt

SEQ ID NO: 30951 - DNA, 25 bp, SARS Virus
acaactatcacaccgacacttttta

SEQ ID NO: 30952 - DNA, 25 bp, SARS Virus
caactatcacaacgacactttttac

SEQ ID NO: 30953 - DNA, 25 bp, SARS Virus
aactatcacaaccacactttttacc

SEQ ID NO: 30954 - DNA, 25 bp, SARS Virus
actatcacaacgccactttttaccg

SEQ ID NO: 30955 - DNA, 25 bp, SARS Virus
ctatcacaacgacactttttaccgc

SEQ ID NO: 30956 - DNA, 25 bp, SARS Virus
tatcacaacgaccctttttaccgcg

SEQ ID NO: 30957 - DNA, 25 bp, SARS Virus
atcacaacgacactttttaccgcgc

SEQ ID NO: 30958 - DNA, 25 bp, SARS Virus
tcacaacgacaccttttaccgcgcg

SEQ ID NO: 30959 - DNA, 25 bp, SARS Virus
cacaacgacactctttaccgcgcga

SEQ ID NO: 30960 - DNA, 25 bp, SARS Virus
acaacgacacttcttaccgcgcgaa

SEQ ID NO: 30961 - DNA, 25 bp, SARS Virus
caacgacactttctaccgcgcgaag

SEQ ID NO: 30962 - DNA, 25 bp, SARS Virus
aacgacacttttcaccgcgcgaagt

SEQ ID NO: 30963 - DNA, 25 bp, SARS Virus
acgacactttttcccgcgcgaagtg

SEQ ID NO: 30964 - DNA, 25 bp, SARS Virus
cgacactttttaccgcgcgaagtgg

SEQ ID NO: 30965 - DNA, 25 bp, SARS Virus
gacactttttaccgcgcgaagtgga

SEQ ID NO: 30966 - DNA, 25 bp, SARS Virus
acactttttaccccgcgaagtggag

SEQ ID NO: 30967 - DNA, 25 bp, SARS Virus
cactttttaccgcgcgaagtggaga

SEQ ID NO: 30968 - DNA, 25 bp, SARS Virus
actttttaccgcccgaagtggagat

SEQ ID NO: 30969 - DNA, 25 bp, SARS Virus
ctttttaccgcgcgaagtggagatg

SEQ ID NO: 30970 - DNA, 25 bp, SARS Virus
tttttaccgcgccaagtggagatga

SEQ ID NO: 30971 - DNA, 25 bp, SARS Virus
ttttaccgcgcgcagtggagatgaa

SEQ ID NO: 30972 - DNA, 25 bp, SARS Virus
tttaccgcgcgacgtggagatgaaa

SEQ ID NO: 30973 - DNA, 25 bp, SARS Virus
ttaccgcgcgaactggagatgaaac

SEQ ID NO: 30974 - DNA, 25 bp, SARS Virus
taccgcgcgaagcggagatgaaact

SEQ ID NO: 30975 - DNA, 25 bp, SARS Virus
accgcgcgaagtcgagatgaaactg

SEQ ID NO: 30976 - DNA, 25 bp, SARS Virus
ccgcgcgaagtgcagatgaaactgt

SEQ ID NO: 30977 - DNA, 25 bp, SARS Virus
cgcgcgaagtggcgatgaaactgtt

SEQ ID NO: 30978 - DNA, 25 bp, SARS Virus
gcgcgaagtggacatgaaactgttc

SEQ ID NO: 30979 - DNA, 25 bp, SARS Virus
cgcgaagtggagctgaaactgttcc

SEQ ID NO: 30980 - DNA, 25 bp, SARS Virus
gcgaagtggagacgaaactgttccg

SEQ ID NO: 30981 - DNA, 25 bp, SARS Virus
cgaagtggagatcaaactgttccga

SEQ ID NO: 30982 - DNA, 25 bp, SARS Virus
gaagtggagatgcaactgttccgac

SEQ ID NO: 30983 - DNA, 25 bp, SARS Virus
aagtggagatgacactgttccgacc

SEQ ID NO: 30984 - DNA, 25 bp, SARS Virus
agtggagatgaacctgttccgacca

SEQ ID NO: 30985 - DNA, 25 bp, SARS Virus
gtggagatgaaactgttccgaccag

SEQ ID NO: 30986 - DNA, 25 bp, SARS Virus
tggagatgaaaccgttccgaccagt

SEQ ID NO: 30987 - DNA, 25 bp, SARS Virus
ggagatgaaactcttccgaccagtt

SEQ ID NO: 30988 - DNA, 25 bp, SARS Virus
gagatgaaactgctccgaccagttt

SEQ ID NO: 30989 - DNA, 25 bp, SARS Virus
agatgaaactgtcccgaccagtttt

SEQ ID NO: 30990 - DNA, 25 bp, SARS Virus
gatgaaactgttccgaccagttttc

SEQ ID NO: 30991 - DNA, 25 bp, SARS Virus
atgaaactgttccgaccagttttct

SEQ ID NO: 30992 - DNA, 25 bp, SARS Virus
tgaaactgttcccaccagttttctg

SEQ ID NO: 30993 - DNA, 25 bp, SARS Virus
gaaactgttccgcccagttttctgg

SEQ ID NO: 30994 - DNA, 25 bp, SARS Virus
aaactgttccgaccagttttctgga

SEQ ID NO: 30995 - DNA, 25 bp, SARS Virus
aactgttccgaccagttttctggat

SEQ ID NO: 30996 - DNA, 25 bp, SARS Virus
actgttccgacccgttttctggata

SEQ ID NO: 30997 - DNA, 25 bp, SARS Virus
ctgttccgaccacttttctggatac

SEQ ID NO: 30998 - DNA, 25 bp, SARS Virus
tgttccgaccagctttctggatact

SEQ ID NO: 30999 - DNA, 25 bp, SARS Virus
gttccgaccagtcttctggatactc

SEQ ID NO: 31000 - DNA, 25 bp, SARS Virus
ttccgaccagttctctggatactct

SEQ ID NO: 31001 - DNA, 25 bp, SARS Virus
tccgaccagtttcctggatactctc

SEQ ID NO: 31002 - DNA, 25 bp, SARS Virus
ccgaccagttttctggatactctct

SEQ ID NO: 31003 - DNA, 25 bp, SARS Virus
cgaccagttttccggatactctctg

SEQ ID NO: 31004 - DNA, 25 bp, SARS Virus
gaccagttttctcgatactctctgt

SEQ ID NO: 31005 - DNA, 25 bp, SARS Virus
accagttttctgcatactctctgta

SEQ ID NO: 31006 - DNA, 25 bp, SARS Virus
ccagttttctggctactctctgtag

SEQ ID NO: 31007 - DNA, 25 bp, SARS Virus
cagttttctggacactctctgtagg

SEQ ID NO: 31008 - DNA, 25 bp, SARS Virus
agttttctggatcctctctgtaggc

SEQ ID NO: 31009 - DNA, 25 bp, SARS Virus
gttttctggatactctctgtaggcg

SEQ ID NO: 31010 - DNA, 25 bp, SARS Virus
ttttctggataccctctgtaggcga

SEQ ID NO: 31011 - DNA, 25 bp, SARS Virus
tttctggatactctctgtaggcgag

SEQ ID NO: 31012 - DNA, 25 bp, SARS Virus
ttctggatactccctgtaggcgaga

SEQ ID NO: 31013 - DNA, 25 bp, SARS Virus
tctggatactctctgtaggcgagag

SEQ ID NO: 31014 - DNA, 25 bp, SARS Virus
ctggatactctccgtaggcgagagg

SEQ ID NO: 31015 - DNA, 25 bp, SARS Virus
tggatactctctctaggcgagaggg

SEQ ID NO: 31016 - DNA, 25 bp, SARS Virus
ggatactctctgcaggcgagagggt

SEQ ID NO: 31017 - DNA, 25 bp, SARS Virus
gatactctctgtcggcgagagggta

SEQ ID NO: 31018 - DNA, 25 bp, SARS Virus
atactctctgtacgcgagagggtaa

SEQ ID NO: 31019 - DNA, 25 bp, SARS Virus
tactctctgtagccgagagggtaaa

SEQ ID NO: 31020 - DNA, 25 bp, SARS Virus
actctctgtaggcgagagggtaaaa

SEQ ID NO: 31021 - DNA, 25 bp, SARS Virus
ctctctgtaggccagagggtaaaac

SEQ ID NO: 31022 - DNA, 25 bp, SARS Virus
tctctgtaggcgcgagggtaaaaca

SEQ ID NO: 31023 - DNA, 25 bp, SARS Virus
ctctgtaggcgacagggtaaaacag

SEQ ID NO: 31024 - DNA, 25 bp, SARS Virus
tctgtaggcgagcgggtaaaacagt

SEQ ID NO: 31025 - DNA, 25 bp, SARS Virus
ctgtaggcgagacggtaaaacagtt

SEQ ID NO: 31026 - DNA, 25 bp, SARS Virus
tgtaggcgagagcgtaaaacagtta

SEQ ID NO: 31027 - DNA, 25 bp, SARS Virus
gtaggcgagaggctaaaacagttaa

SEQ ID NO: 31028 - DNA, 25 bp, SARS Virus
taggcgagagggcaaaacagttaaa

SEQ ID NO: 31029 - DNA, 25 bp, SARS Virus
aggcgagagggtcaaacagttaaat

SEQ ID NO: 31030 - DNA, 25 bp, SARS Virus
ggcgagagggtacaacagttaaatc

SEQ ID NO: 31031 - DNA, 25 bp, SARS Virus
gcgagagggtaacacagttaaatct

SEQ ID NO: 31032 - DNA, 25 bp, SARS Virus
cgagagggtaaaccagttaaatctg

SEQ ID NO: 31033 - DNA, 25 bp, SARS Virus
gagagggtaaaacagttaaatctgt

SEQ ID NO: 31034 - DNA, 25 bp, SARS Virus
agagggtaaaaccgttaaatctgtt

SEQ ID NO: 31035 - DNA, 25 bp, SARS Virus
gagggtaaaacacttaaatctgtta

SEQ ID NO: 31036 - DNA, 25 bp, SARS Virus
agggtaaaacagctaaatctgttaa

SEQ ID NO: 31037 - DNA, 25 bp, SARS Virus
gggtaaaacagtcaaatctgttaaa

SEQ ID NO: 31038 - DNA, 25 bp, SARS Virus
ggtaaaacagttcaatctgttaaac

SEQ ID NO: 31039 - DNA, 25 bp, SARS Virus
gtaaaacagttacatctgttaaact

SEQ ID NO: 31040 - DNA, 25 bp, SARS Virus
taaaacagttaactctgttaaactc

SEQ ID NO: 31041 - DNA, 25 bp, SARS Virus
aaaacagttaaacctgttaaactct

SEQ ID NO: 31042 - DNA, 25 bp, SARS Virus
aaacagttaaatctgttaaactctc

SEQ ID NO: 31043 - DNA, 25 bp, SARS Virus
aacagttaaatccgttaaactctcg

SEQ ID NO: 31044 - DNA, 25 bp, SARS Virus
acagttaaatctcttaaactctcga

SEQ ID NO: 31045 - DNA, 25 bp, SARS Virus
cagttaaatctgctaaactctcgat

SEQ ID NO: 31046 - DNA, 25 bp, SARS Virus
agttaaatctgtcaaactctcgatt

SEQ ID NO: 31047 - DNA, 25 bp, SARS Virus
gttaaatctgttcaactctcgattg

SEQ ID NO: 31048 - DNA, 25 bp, SARS Virus
ttaaatctgttacactctcgattgt

SEQ ID NO: 31049 - DNA, 25 bp, SARS Virus
taaatctgttaacctctcgattgtt

SEQ ID NO: 31050 - DNA, 25 bp, SARS Virus
aaatctgttaaactctcgattgttg

SEQ ID NO: 31051 - DNA, 25 bp, SARS Virus
aatctgttaaaccctcgattgttgt

SEQ ID NO: 31052 - DNA, 25 bp, SARS Virus
atctgttaaactctcgattgttgtg

SEQ ID NO: 31053 - DNA, 25 bp, SARS Virus
tctgttaaactcccgattgttgtga

SEQ ID NO: 31054 - DNA, 25 bp, SARS Virus
ctgttaaactctcgattgttgtgat

SEQ ID NO: 31055 - DNA, 25 bp, SARS Virus
tgttaaactctccattgttgtgatt

SEQ ID NO: 31056 - DNA, 25 bp, SARS Virus
gttaaactctcgcttgttgtgattt

SEQ ID NO: 31057 - DNA, 25 bp, SARS Virus
ttaaactctcgactgttgtgatttc

SEQ ID NO: 31058 - DNA, 25 bp, SARS Virus
taaactctcgatcgttgtgatttcc

SEQ ID NO: 31059 - DNA, 25 bp, SARS Virus
aaactctcgattcttgtgatttcca

SEQ ID NO: 31060 - DNA, 25 bp, SARS Virus
aactctcgattgctgtgatttccaa

SEQ ID NO: 31061 - DNA, 25 bp, SARS Virus
actctcgattgtcgtgatttccaag

SEQ ID NO: 31062 - DNA, 25 bp, SARS Virus
ctctcgattgttctgatttccaagt

SEQ ID NO: 31063 - DNA, 25 bp, SARS Virus
tctcgattgttgcgatttccaagtg

SEQ ID NO: 31064 - DNA, 25 bp, SARS Virus
ctcgattgttgtcatttccaagtga

SEQ ID NO: 31065 - DNA, 25 bp, SARS Virus
tcgattgttgtgctttccaagtgac

SEQ ID NO: 31066 - DNA, 25 bp, SARS Virus
cgattgttgtgacttccaagtgacg

SEQ ID NO: 31067 - DNA, 25 bp, SARS Virus
gattgttgtgatctccaagtgacgg

SEQ ID NO: 31068 - DNA, 25 bp, SARS Virus
attgttgtgattcccaagtgacgga

SEQ ID NO: 31069 - DNA, 25 bp, SARS Virus
ttgttgtgatttccaagtgacggat

SEQ ID NO: 31070 - DNA, 25 bp, SARS Virus
tgttgtgatttccaagtgacggata

SEQ ID NO: 31071 - DNA, 25 bp, SARS Virus
gttgtgatttcccagtgacggataa

SEQ ID NO: 31072 - DNA, 25 bp, SARS Virus
ttgtgatttccacgtgacggataat

SEQ ID NO: 31073 - DNA, 25 bp, SARS Virus
tgtgatttccaactgacggataatt

SEQ ID NO: 31074 - DNA, 25 bp, SARS Virus
gtgatttccaagcgacggataatta

SEQ ID NO: 31075 - DNA, 25 bp, SARS Virus
tgatttccaagtcacggataattac

SEQ ID NO: 31076 - DNA, 25 bp, SARS Virus
gatttccaagtgccggataattaca

SEQ ID NO: 31077 - DNA, 25 bp, SARS Virus
atttccaagtgacggataattacag

SEQ ID NO: 31078 - DNA, 25 bp, SARS Virus
tttccaagtgaccgataattacagt

SEQ ID NO: 31079 - DNA, 25 bp, SARS Virus
ttccaagtgacgcataattacagta

SEQ ID NO: 31080 - DNA, 25 bp, SARS Virus
tccaagtgacggctaattacagtat

SEQ ID NO: 31081 - DNA, 25 bp, SARS Virus
ccaagtgacggacaattacagtatc

SEQ ID NO: 31082 - DNA, 25 bp, SARS Virus
caagtgacggatcattacagtatca

SEQ ID NO: 31083 - DNA, 25 bp, SARS Virus
aagtgacggatacttacagtatcaa

SEQ ID NO: 31084 - DNA, 25 bp, SARS Virus
agtgacggataactacagtatcaaa

SEQ ID NO: 31085 - DNA, 25 bp, SARS Virus
gtgacggataatcacagtatcaaaa

SEQ ID NO: 31086 - DNA, 25 bp, SARS Virus
tgacggataattccagtatcaaaaa

SEQ ID NO: 31087 - DNA, 25 bp, SARS Virus
gacggataattacagtatcaaaaac

SEQ ID NO: 31088 - DNA, 25 bp, SARS Virus
acggataattaccgtatcaaaaact

SEQ ID NO: 31089 - DNA, 25 bp, SARS Virus
cggataattacactatcaaaaacta

SEQ ID NO: 31090 - DNA, 25 bp, SARS Virus
ggataattacagcatcaaaaactac

SEQ ID NO: 31091 - DNA, 25 bp, SARS Virus
gataattacagtctcaaaaactacc

SEQ ID NO: 31092 - DNA, 25 bp, SARS Virus
ataattacagtaccaaaaactaccg

SEQ ID NO: 31093 - DNA, 25 bp, SARS Virus
taattacagtatcaaaaactaccgt

SEQ ID NO: 31094 - DNA, 25 bp, SARS Virus
aattacagtatccaaaactaccgtt

SEQ ID NO: 31095 - DNA, 25 bp, SARS Virus
attacagtatcacaaactaccgttc

SEQ ID NO: 31096 - DNA, 25 bp, SARS Virus
ttacagtatcaacaactaccgttca

SEQ ID NO: 31097 - DNA, 25 bp, SARS Virus
tacagtatcaaacactaccgttcag

SEQ ID NO: 31098 - DNA, 25 bp, SARS Virus
acagtatcaaaacctaccgttcagg

SEQ ID NO: 31099 - DNA, 25 bp, SARS Virus
cagtatcaaaaactaccgttcaggt

SEQ ID NO: 31100 - DNA, 25 bp, SARS Virus
agtatcaaaaaccaccgttcaggtt

SEQ ID NO: 31101 - DNA, 25 bp, SARS Virus
gtatcaaaaactcccgttcaggttt

SEQ ID NO: 31102 - DNA, 25 bp, SARS Virus
tatcaaaaactaccgttcaggttta

SEQ ID NO: 31103 - DNA, 25 bp, SARS Virus
atcaaaaactaccgttcaggtttac

SEQ ID NO: 31104 - DNA, 25 bp, SARS Virus
tcaaaaactacccttcaggtttacg

SEQ ID NO: 31105 - DNA, 25 bp, SARS Virus
caaaaactaccgctcaggtttacgc

SEQ ID NO: 31106 - DNA, 25 bp, SARS Virus
aaaaactaccgtccaggtttacgct

SEQ ID NO: 31107 - DNA, 25 bp, SARS Virus
aaaactaccgttcaggtttacgctg

SEQ ID NO: 31108 - DNA, 25 bp, SARS Virus
aaactaccgttccggtttacgctgc

SEQ ID NO: 31109 - DNA, 25 bp, SARS Virus
aactaccgttcacgtttacgctgct

SEQ ID NO: 31110 - DNA, 25 bp, SARS Virus
actaccgttcagctttacgctgctc

SEQ ID NO: 31111 - DNA, 25 bp, SARS Virus
ctaccgttcaggcttacgctgctca

SEQ ID NO: 31112 - DNA, 25 bp, SARS Virus
taccgttcaggtctacgctgctcag

SEQ ID NO: 31113 - DNA, 25 bp, SARS Virus
accgttcaggttcacgctgctcaga

SEQ ID NO: 31114 - DNA, 25 bp, SARS Virus
ccgttcaggtttccgctgctcagac

SEQ ID NO: 31115 - DNA, 25 bp, SARS Virus
cgttcaggtttacgctgctcagacg

SEQ ID NO: 31116 - DNA, 25 bp, SARS Virus
gttcaggtttaccctgctcagacga

SEQ ID NO: 31117 - DNA, 25 bp, SARS Virus
ttcaggtttacgctgctcagacgaa

SEQ ID NO: 31118 - DNA, 25 bp, SARS Virus
tcaggtttacgccgctcagacgaag

SEQ ID NO: 31119 - DNA, 25 bp, SARS Virus
caggtttacgctcctcagacgaaga

SEQ ID NO: 31120 - DNA, 25 bp, SARS Virus
aggtttacgctgctcagacgaagat

SEQ ID NO: 31121 - DNA, 25 bp, SARS Virus
ggtttacgctgcccagacgaagatt

SEQ ID NO: 31122 - DNA, 25 bp, SARS Virus
gtttacgctgctcagacgaagattc

SEQ ID NO: 31123 - DNA, 25 bp, SARS Virus
tttacgctgctccgacgaagattca

SEQ ID NO: 31124 - DNA, 25 bp, SARS Virus
ttacgctgctcacacgaagattcag

SEQ ID NO: 31125 - DNA, 25 bp, SARS Virus
tacgctgctcagccgaagattcaga

SEQ ID NO: 31126 - DNA, 25 bp, SARS Virus
acgctgctcagacgaagattcagac

SEQ ID NO: 31127 - DNA, 25 bp, SARS Virus
cgctgctcagaccaagattcagacg

SEQ ID NO: 31128 - DNA, 25 bp, SARS Virus
gctgctcagacgcagattcagacga

SEQ ID NO: 31129 - DNA, 25 bp, SARS Virus
ctgctcagacgacgattcagacgaa

SEQ ID NO: 31130 - DNA, 25 bp, SARS Virus
tgctcagacgaacattcagacgaag

SEQ ID NO: 31131 - DNA, 25 bp, SARS Virus
gctcagacgaagcttcagacgaaga

SEQ ID NO: 31132 - DNA, 25 bp, SARS Virus
ctcagacgaagactcagacgaagac

SEQ ID NO: 31133 - DNA, 25 bp, SARS Virus
tcagacgaagatccagacgaagaca

SEQ ID NO: 31134 - DNA, 25 bp, SARS Virus
cagacgaagattcagacgaagacac

SEQ ID NO: 31135 - DNA, 25 bp, SARS Virus
agacgaagattccgacgaagacaca

SEQ ID NO: 31136 - DNA, 25 bp, SARS Virus
gacgaagattcacacgaagacacat

SEQ ID NO: 31137 - DNA, 25 bp, SARS Virus
acgaagattcagccgaagacacatg

SEQ ID NO: 31138 - DNA, 25 bp, SARS Virus
cgaagattcagacgaagacacatga

SEQ ID NO: 31139 - DNA, 25 bp, SARS Virus
gaagattcagaccaagacacatgat

SEQ ID NO: 31140 - DNA, 25 bp, SARS Virus
aagattcagacgcagacacatgatg

SEQ ID NO: 31141 - DNA, 25 bp, SARS Virus
agattcagacgacgacacatgatgt

SEQ ID NO: 31142 - DNA, 25 bp, SARS Virus
gattcagacgaacacacatgatgtc

SEQ ID NO: 31143 - DNA, 25 bp, SARS Virus
attcagacgaagccacatgatgtca

SEQ ID NO: 31144 - DNA, 25 bp, SARS Virus
ttcagacgaagacacatgatgtcag

SEQ ID NO: 31145 - DNA, 25 bp, SARS Virus
tcagacgaagacccatgatgtcagt

SEQ ID NO: 31146 - DNA, 25 bp, SARS Virus
cagacgaagacacatgatgtcagtc

SEQ ID NO: 31147 - DNA, 25 bp, SARS Virus
agacgaagacacctgatgtcagtcg

SEQ ID NO: 31148 - DNA, 25 bp, SARS Virus
gacgaagacacacgatgtcagtcga

SEQ ID NO: 31149 - DNA, 25 bp, SARS Virus
acgaagacacatcatgtcagtcgac

SEQ ID NO: 31150 - DNA, 25 bp, SARS Virus
cgaagacacatgctgtcagtcgact

SEQ ID NO: 31151 - DNA, 25 bp, SARS Virus
gaagacacatgacgtcagtcgacta

SEQ ID NO: 31152 - DNA, 25 bp, SARS Virus
aagacacatgatctcagtcgactac

SEQ ID NO: 31153 - DNA, 25 bp, SARS Virus
agacacatgatgccagtcgactaca

SEQ ID NO: 31154 - DNA, 25 bp, SARS Virus
gacacatgatgtcagtcgactacac

SEQ ID NO: 31155 - DNA, 25 bp, SARS Virus
acacatgatgtccgtcgactacacg

SEQ ID NO: 31156 - DNA, 25 bp, SARS Virus
cacatgatgtcactcgactacacgg

SEQ ID NO: 31157 - DNA, 25 bp, SARS Virus
acatgatgtcagccgactacacggt

SEQ ID NO: 31158 - DNA, 25 bp, SARS Virus
catgatgtcagtcgactacacggtt

SEQ ID NO: 31159 - DNA, 25 bp, SARS Virus
atgatgtcagtccactacacggttg

SEQ ID NO: 31160 - DNA, 25 bp, SARS Virus
tgatgtcagtcgcctacacggttgg

SEQ ID NO: 31161 - DNA, 25 bp, SARS Virus
gatgtcagtcgactacacggttgga

SEQ ID NO: 31162 - DNA, 25 bp, SARS Virus
atgtcagtcgaccacacggttggat

SEQ ID NO: 31163 - DNA, 25 bp, SARS Virus
tgtcagtcgactccacggttggata

SEQ ID NO: 31164 - DNA, 25 bp, SARS Virus
gtcagtcgactacacggttggataa

SEQ ID NO: 31165 - DNA, 25 bp, SARS Virus
tcagtcgactacccggttggataag

SEQ ID NO: 31166 - DNA, 25 bp, SARS Virus
cagtcgactacacggttggataaga

SEQ ID NO: 31167 - DNA, 25 bp, SARS Virus
agtcgactacaccgttggataagac

SEQ ID NO: 31168 - DNA, 25 bp, SARS Virus
gtcgactacacgcttggataagaca

SEQ ID NO: 31169 - DNA, 25 bp, SARS Virus
tcgactacacggctggataagacaa

SEQ ID NO: 31170 - DNA, 25 bp, SARS Virus
cgactacacggtcggataagacaac

SEQ ID NO: 31171 - DNA, 25 bp, SARS Virus
gactacacggttcgataagacaacg

SEQ ID NO: 31172 - DNA, 25 bp, SARS Virus
actacacggttgcataagacaacga

SEQ ID NO: 31173 - DNA, 25 bp, SARS Virus
ctacacggttggctaagacaacgaa

SEQ ID NO: 31174 - DNA, 25 bp, SARS Virus
tacacggttggacaagacaacgaac

SEQ ID NO: 31175 - DNA, 25 bp, SARS Virus
acacggttggatcagacaacgaact

SEQ ID NO: 31176 - DNA, 25 bp, SARS Virus
cacggttggatacgacaacgaactg

SEQ ID NO: 31177 - DNA, 25 bp, SARS Virus
acggttggataacacaacgaactgg

SEQ ID NO: 31178 - DNA, 25 bp, SARS Virus
cggttggataagccaacgaactggt

SEQ ID NO: 31179 - DNA, 25 bp, SARS Virus
ggttggataagacaacgaactggtt

SEQ ID NO: 31180 - DNA, 25 bp, SARS Virus
gttggataagaccacgaactggttc

SEQ ID NO: 31181 - DNA, 25 bp, SARS Virus
ttggataagacaccgaactggttcg

SEQ ID NO: 31182 - DNA, 25 bp, SARS Virus
tggataagacaacgaactggttcga

SEQ ID NO: 31183 - DNA, 25 bp, SARS Virus
ggataagacaaccaactggttcgag

SEQ ID NO: 31184 - DNA, 25 bp, SARS Virus
gataagacaacgcactggttcgaga

SEQ ID NO: 31185 - DNA, 25 bp, SARS Virus
ataagacaacgacctggttcgagaa

SEQ ID NO: 31186 - DNA, 25 bp, SARS Virus
taagacaacgaactggttcgagaac

SEQ ID NO: 31187 - DNA, 25 bp, SARS Virus
aagacaacgaaccggttcgagaaca

SEQ ID NO: 31188 - DNA, 25 bp, SARS Virus
agacaacgaactcgttcgagaacat

SEQ ID NO: 31189 - DNA, 25 bp, SARS Virus
gacaacgaactgcttcgagaacata

SEQ ID NO: 31190 - DNA, 25 bp, SARS Virus
acaacgaactggctcgagaacatag

SEQ ID NO: 31191 - DNA, 25 bp, SARS Virus
caacgaactggtccgagaacatagt

SEQ ID NO: 31192 - DNA, 25 bp, SARS Virus
aacgaactggttcgagaacatagtc

SEQ ID NO: 31193 - DNA, 25 bp, SARS Virus
acgaactggttccagaacatagtct

SEQ ID NO: 31194 - DNA, 25 bp, SARS Virus
cgaactggttcgcgaacatagtctg

SEQ ID NO: 31195 - DNA, 25 bp, SARS Virus
gaactggttcgacaacatagtctgc

SEQ ID NO: 31196 - DNA, 25 bp, SARS Virus
aactggttcgagcacatagtctgca

SEQ ID NO: 31197 - DNA, 25 bp, SARS Virus
actggttcgagaccatagtctgcaa

SEQ ID NO: 31198 - DNA, 25 bp, SARS Virus
ctggttcgagaacatagtctgcaac

SEQ ID NO: 31199 - DNA, 25 bp, SARS Virus
tggttcgagaacctagtctgcaacc

SEQ ID NO: 31200 - DNA, 25 bp, SARS Virus
ggttcgagaacacagtctgcaacct

SEQ ID NO: 31201 - DNA, 25 bp, SARS Virus
gttcgagaacatcgtctgcaacctc

SEQ ID NO: 31202 - DNA, 25 bp, SARS Virus
ttcgagaacatactctgcaacctct

SEQ ID NO: 31203 - DNA, 25 bp, SARS Virus
tcgagaacatagcctgcaacctcta

SEQ ID NO: 31204 - DNA, 25 bp, SARS Virus
cgagaacatagtctgcaacctctat

SEQ ID NO: 31205 - DNA, 25 bp, SARS Virus
gagaacatagtccgcaacctctatc

SEQ ID NO: 31206 - DNA, 25 bp, SARS Virus
agaacatagtctccaacctctatca

SEQ ID NO: 31207 - DNA, 25 bp, SARS Virus
gaacatagtctgcaacctctatcat

SEQ ID NO: 31208 - DNA, 25 bp, SARS Virus
aacatagtctgccacctctatcatg

SEQ ID NO: 31209 - DNA, 25 bp, SARS Virus
acatagtctgcaccctctatcatga

SEQ ID NO: 31210 - DNA, 25 bp, SARS Virus
catagtctgcaacctctatcatgac

SEQ ID NO: 31211 - DNA, 25 bp, SARS Virus
atagtctgcaacctctatcatgact

SEQ ID NO: 31212 - DNA, 25 bp, SARS Virus
tagtctgcaacccctatcatgactt

SEQ ID NO: 31213 - DNA, 25 bp, SARS Virus
agtctgcaacctctatcatgacttc

SEQ ID NO: 31214 - DNA, 25 bp, SARS Virus
gtctgcaacctccatcatgacttca

SEQ ID NO: 31215 - DNA, 25 bp, SARS Virus
tctgcaacctctctcatgacttcaa

SEQ ID NO: 31216 - DNA, 25 bp, SARS Virus
ctgcaacctctaccatgacttcaaa

SEQ ID NO: 31217 - DNA, 25 bp, SARS Virus
tgcaacctctatcatgacttcaaag

SEQ ID NO: 31218 - DNA, 25 bp, SARS Virus
gcaacctctatcctgacttcaaagg

SEQ ID NO: 31219 - DNA, 25 bp, SARS Virus
caacctctatcacgacttcaaaggc

SEQ ID NO: 31220 - DNA, 25 bp, SARS Virus
aacctctatcatcacttcaaaggca

SEQ ID NO: 31221 - DNA, 25 bp, SARS Virus
acctctatcatgccttcaaaggcaa

SEQ ID NO: 31222 - DNA, 25 bp, SARS Virus
cctctatcatgacttcaaaggcaat

SEQ ID NO: 31223 - DNA, 25 bp, SARS Virus
ctctatcatgacctcaaaggcaatt

SEQ ID NO: 31224 - DNA, 25 bp, SARS Virus
tctatcatgactccaaaggcaattc

SEQ ID NO: 31225 - DNA, 25 bp, SARS Virus
ctatcatgacttcaaaggcaattct

SEQ ID NO: 31226 - DNA, 25 bp, SARS Virus
tatcatgacttccaaggcaattcta

SEQ ID NO: 31227 - DNA, 25 bp, SARS Virus
atcatgacttcacaggcaattctac

SEQ ID NO: 31228 - DNA, 25 bp, SARS Virus
tcatgacttcaacggcaattctaca

SEQ ID NO: 31229 - DNA, 25 bp, SARS Virus
catgacttcaaacgcaattctacaa

SEQ ID NO: 31230 - DNA, 25 bp, SARS Virus
atgacttcaaagccaattctacaaa

SEQ ID NO: 31231 - DNA, 25 bp, SARS Virus
tgacttcaaaggcaattctacaaac

SEQ ID NO: 31232 - DNA, 25 bp, SARS Virus
gacttcaaaggccattctacaaact

SEQ ID NO: 31233 - DNA, 25 bp, SARS Virus
acttcaaaggcacttctacaaacta

SEQ ID NO: 31234 - DNA, 25 bp, SARS Virus
cttcaaaggcaactctacaaactac

SEQ ID NO: 31235 - DNA, 25 bp, SARS Virus
ttcaaaggcaatcctacaaactacg

SEQ ID NO: 31236 - DNA, 25 bp, SARS Virus
tcaaaggcaattctacaaactacga

SEQ ID NO: 31237 - DNA, 25 bp, SARS Virus
caaaggcaattccacaaactacgaa

SEQ ID NO: 31238 - DNA, 25 bp, SARS Virus
aaaggcaattctccaaactacgaat

SEQ ID NO: 31239 - DNA, 25 bp, SARS Virus
aaggcaattctacaaactacgaata

SEQ ID NO: 31240 - DNA, 25 bp, SARS Virus
aggcaattctaccaactacgaatac

SEQ ID NO: 31241 - DNA, 25 bp, SARS Virus
ggcaattctacacactacgaataca

SEQ ID NO: 31242 - DNA, 25 bp, SARS Virus
gcaattctacaacctacgaatacag

SEQ ID NO: 31243 - DNA, 25 bp, SARS Virus
caattctacaaactacgaatacagc

SEQ ID NO: 31244 - DNA, 25 bp, SARS Virus
aattctacaaaccacgaatacagct

SEQ ID NO: 31245 - DNA, 25 bp, SARS Virus
attctacaaactccgaatacagctg

SEQ ID NO: 31246 - DNA, 25 bp, SARS Virus
ttctacaaactacgaatacagctgt

SEQ ID NO: 31247 - DNA, 25 bp, SARS Virus
tctacaaactaccaatacagctgtg

SEQ ID NO: 31248 - DNA, 25 bp, SARS Virus
ctacaaactacgcatacagctgtgg

SEQ ID NO: 31249 - DNA, 25 bp, SARS Virus
tacaaactacgactacagctgtgga

SEQ ID NO: 31250 - DNA, 25 bp, SARS Virus
acaaactacgaacacagctgtggaa

SEQ ID NO: 31251 - DNA, 25 bp, SARS Virus
caaactacgaatccagctgtggaaa

SEQ ID NO: 31252 - DNA, 25 bp, SARS Virus
aaactacgaatacagctgtggaaaa

SEQ ID NO: 31253 - DNA, 25 bp, SARS Virus
aactacgaataccgctgtggaaaag

SEQ ID NO: 31254 - DNA, 25 bp, SARS Virus
actacgaatacacctgtggaaaagt

SEQ ID NO: 31255 - DNA, 25 bp, SARS Virus
ctacgaatacagctgtggaaaagtc

SEQ ID NO: 31256 - DNA, 25 bp, SARS Virus
tacgaatacagccgtggaaaagtcg

SEQ ID NO: 31257 - DNA, 25 bp, SARS Virus
acgaatacagctctggaaaagtcgt

SEQ ID NO: 31258 - DNA, 25 bp, SARS Virus
cgaatacagctgcggaaaagtcgtt

SEQ ID NO: 31259 - DNA, 25 bp, SARS Virus
gaatacagctgtcgaaaagtcgttg

SEQ ID NO: 31260 - DNA, 25 bp, SARS Virus
aatacagctgtgcaaaagtcgttga

SEQ ID NO: 31261 - DNA, 25 bp, SARS Virus
atacagctgtggcaaagtcgttgaa

SEQ ID NO: 31262 - DNA, 25 bp, SARS Virus
tacagctgtggacaagtcgttgaaa

SEQ ID NO: 31263 - DNA, 25 bp, SARS Virus
acagctgtggaacagtcgttgaaaa

SEQ ID NO: 31264 - DNA, 25 bp, SARS Virus
cagctgtggaaacgtcgttgaaaat

SEQ ID NO: 31265 - DNA, 25 bp, SARS Virus
agctgtggaaaactcgttgaaaatc

SEQ ID NO: 31266 - DNA, 25 bp, SARS Virus
gctgtggaaaagccgttgaaaatca

SEQ ID NO: 31267 - DNA, 25 bp, SARS Virus
ctgtggaaaagtcgttgaaaatcac

SEQ ID NO: 31268 - DNA, 25 bp, SARS Virus
tgtggaaaagtccttgaaaatcaca

SEQ ID NO: 31269 - DNA, 25 bp, SARS Virus
gtggaaaagtcgctgaaaatcacaa

SEQ ID NO: 31270 - DNA, 25 bp, SARS Virus
tggaaaagtcgtcgaaaatcacaag

SEQ ID NO: 31271 - DNA, 25 bp, SARS Virus
ggaaaagtcgttcaaaatcacaagg

SEQ ID NO: 31272 - DNA, 25 bp, SARS Virus
gaaaagtcgttgcaaatcacaagga

SEQ ID NO: 31273 - DNA, 25 bp, SARS Virus
aaaagtcgttgacaatcacaaggat

SEQ ID NO: 31274 - DNA, 25 bp, SARS Virus
aaagtcgttgaacatcacaaggata

SEQ ID NO: 31275 - DNA, 25 bp, SARS Virus
aagtcgttgaaactcacaaggatac

SEQ ID NO: 31276 - DNA, 25 bp, SARS Virus
agtcgttgaaaaccacaaggatacc

SEQ ID NO: 31277 - DNA, 25 bp, SARS Virus
gtcgttgaaaatcacaaggatacct

SEQ ID NO: 31278 - DNA, 25 bp, SARS Virus
tcgttgaaaatcccaaggatacctt

SEQ ID NO: 31279 - DNA, 25 bp, SARS Virus
cgttgaaaatcacaaggataccttt

SEQ ID NO: 31280 - DNA, 25 bp, SARS Virus
gttgaaaatcaccaggatacctttt

SEQ ID NO: 31281 - DNA, 25 bp, SARS Virus
ttgaaaatcacacggataccttttt

SEQ ID NO: 31282 - DNA, 25 bp, SARS Virus
tgaaaatcacaacgatacctttttg

SEQ ID NO: 31283 - DNA, 25 bp, SARS Virus
gaaaatcacaagcatacctttttga

SEQ ID NO: 31284 - DNA, 25 bp, SARS Virus
aaaatcacaaggctacctttttgaa

SEQ ID NO: 31285 - DNA, 25 bp, SARS Virus
aaatcacaaggacacctttttgaat

SEQ ID NO: 31286 - DNA, 25 bp, SARS Virus
aatcacaaggatccctttttgaatt

SEQ ID NO: 31287 - DNA, 25 bp, SARS Virus
atcacaaggatacctttttgaattc

SEQ ID NO: 31288 - DNA, 25 bp, SARS Virus
tcacaaggatacctttttgaattcc

SEQ ID NO: 31289 - DNA, 25 bp, SARS Virus
cacaaggatacccttttgaattccg

SEQ ID NO: 31290 - DNA, 25 bp, SARS Virus
acaaggatacctctttgaattccgt

SEQ ID NO: 31291 - DNA, 25 bp, SARS Virus
caaggataccttcttgaattccgtg

SEQ ID NO: 31292 - DNA, 25 bp, SARS Virus
aaggatacctttctgaattccgtga

SEQ ID NO: 31293 - DNA, 25 bp, SARS Virus
aggataccttttcgaattccgtgaa

SEQ ID NO: 31294 - DNA, 25 bp, SARS Virus
ggatacctttttcaattccgtgaac

SEQ ID NO: 31295 - DNA, 25 bp, SARS Virus
gatacctttttgcattccgtgaaca

SEQ ID NO: 31296 - DNA, 25 bp, SARS Virus
atacctttttgacttccgtgaacaa

SEQ ID NO: 31297 - DNA, 25 bp, SARS Virus
tacctttttgaactccgtgaacaac

SEQ ID NO: 31298 - DNA, 25 bp, SARS Virus
acctttttgaatcccgtgaacaacg

SEQ ID NO: 31299 - DNA, 25 bp, SARS Virus
cctttttgaattccgtgaacaacga

SEQ ID NO: 31300 - DNA, 25 bp, SARS Virus
ctttttgaattccgtgaacaacgat

SEQ ID NO: 31301 - DNA, 25 bp, SARS Virus
tttttgaattccctgaacaacgatg

SEQ ID NO: 31302 - DNA, 25 bp, SARS Virus
ttttgaattccgcgaacaacgatgt

SEQ ID NO: 31303 - DNA, 25 bp, SARS Virus
tttgaattccgtcaacaacgatgtc

SEQ ID NO: 31304 - DNA, 25 bp, SARS Virus
ttgaattccgtgcacaacgatgtcg

SEQ ID NO: 31305 - DNA, 25 bp, SARS Virus
tgaattccgtgaccaacgatgtcga

SEQ ID NO: 31306 - DNA, 25 bp, SARS Virus
gaattccgtgaacaacgatgtcgag

SEQ ID NO: 31307 - DNA, 25 bp, SARS Virus
aattccgtgaaccacgatgtcgagt

SEQ ID NO: 31308 - DNA, 25 bp, SARS Virus
attccgtgaacaccgatgtcgagtg

SEQ ID NO: 31309 - DNA, 25 bp, SARS Virus
ttccgtgaacaacgatgtcgagtgt

SEQ ID NO: 31310 - DNA, 25 bp, SARS Virus
tccgtgaacaaccatgtcgagtgtc

SEQ ID NO: 31311 - DNA, 25 bp, SARS Virus
ccgtgaacaacgctgtcgagtgtcg

SEQ ID NO: 31312 - DNA, 25 bp, SARS Virus
cgtgaacaacgacgtcgagtgtcgc

SEQ ID NO: 31313 - DNA, 25 bp, SARS Virus
gtgaacaacgatctcgagtgtcgct

SEQ ID NO: 31314 - DNA, 25 bp, SARS Virus
tgaacaacgatgccgagtgtcgctc

SEQ ID NO: 31315 - DNA, 25 bp, SARS Virus
gaacaacgatgtcgagtgtcgctca

SEQ ID NO: 31316 - DNA, 25 bp, SARS Virus
aacaacgatgtccagtgtcgctcaa

SEQ ID NO: 31317 - DNA, 25 bp, SARS Virus
acaacgatgtcgcgtgtcgctcaat

SEQ ID NO: 31318 - DNA, 25 bp, SARS Virus
caacgatgtcgactgtcgctcaatc

SEQ ID NO: 31319 - DNA, 25 bp, SARS Virus
aacgatgtcgagcgtcgctcaatcg

SEQ ID NO: 31320 - DNA, 25 bp, SARS Virus
acgatgtcgagtctcgctcaatcgt

SEQ ID NO: 31321 - DNA, 25 bp, SARS Virus
cgatgtcgagtgccgctcaatcgtt

SEQ ID NO: 31322 - DNA, 25 bp, SARS Virus
gatgtcgagtgtcgctcaatcgttt

SEQ ID NO: 31323 - DNA, 25 bp, SARS Virus
atgtcgagtgtccctcaatcgtttc

SEQ ID NO: 31324 - DNA, 25 bp, SARS Virus
tgtcgagtgtcgctcaatcgtttcc

SEQ ID NO: 31325 - DNA, 25 bp, SARS Virus
gtcgagtgtcgcccaatcgtttccc

SEQ ID NO: 31326 - DNA, 25 bp, SARS Virus
tcgagtgtcgctcaatcgtttccca

SEQ ID NO: 31327 - DNA, 25 bp, SARS Virus
cgagtgtcgctccatcgtttcccac

SEQ ID NO: 31328 - DNA, 25 bp, SARS Virus
gagtgtcgctcactcgtttcccaca

SEQ ID NO: 31329 - DNA, 25 bp, SARS Virus
agtgtcgctcaaccgtttcccacat

SEQ ID NO: 31330 - DNA, 25 bp, SARS Virus
gtgtcgctcaatcgtttcccacatc

SEQ ID NO: 31331 - DNA, 25 bp, SARS Virus
tgtcgctcaatcctttcccacatcg

SEQ ID NO: 31332 - DNA, 25 bp, SARS Virus
gtcgctcaatcgcttcccacatcga

SEQ ID NO: 31333 - DNA, 25 bp, SARS Virus
tcgctcaatcgtctcccacatcgaa

SEQ ID NO: 31334 - DNA, 25 bp, SARS Virus
cgctcaatcgttccccacatcgaaa

SEQ ID NO: 31335 - DNA, 25 bp, SARS Virus
gctcaatcgtttcccacatcgaaat

SEQ ID NO: 31336 - DNA, 25 bp, SARS Virus
ctcaatcgtttcccacatcgaaatc

SEQ ID NO: 31337 - DNA, 25 bp, SARS Virus
tcaatcgtttcccacatcgaaatct

SEQ ID NO: 31338 - DNA, 25 bp, SARS Virus
caatcgtttcccccatcgaaatcta

SEQ ID NO: 31339 - DNA, 25 bp, SARS Virus
aatcgtttcccacatcgaaatctac

SEQ ID NO: 31340 - DNA, 25 bp, SARS Virus
atcgtttcccacctcgaaatctacc

SEQ ID NO: 31341 - DNA, 25 bp, SARS Virus
tcgtttcccacaccgaaatctacca

SEQ ID NO: 31342 - DNA, 25 bp, SARS Virus
cgtttcccacatcgaaatctaccac

SEQ ID NO: 31343 - DNA, 25 bp, SARS Virus
gtttcccacatccaaatctaccaca

SEQ ID NO: 31344 - DNA, 25 bp, SARS Virus
tttcccacatcgcaatctaccacag

SEQ ID NO: 31345 - DNA, 25 bp, SARS Virus
ttcccacatcgacatctaccacagg

SEQ ID NO: 31346 - DNA, 25 bp, SARS Virus
tcccacatcgaactctaccacagga

SEQ ID NO: 31347 - DNA, 25 bp, SARS Virus
cccacatcgaaacctaccacaggaa

SEQ ID NO: 31348 - DNA, 25 bp, SARS Virus
ccacatcgaaatctaccacaggaaa

SEQ ID NO: 31349 - DNA, 25 bp, SARS Virus
cacatcgaaatccaccacaggaaag

SEQ ID NO: 31350 - DNA, 25 bp, SARS Virus
acatcgaaatctcccacaggaaaga

SEQ ID NO: 31351 - DNA, 25 bp, SARS Virus
catcgaaatctaccacaggaaagat

SEQ ID NO: 31352 - DNA, 25 bp, SARS Virus
atcgaaatctaccacaggaaagatg

SEQ ID NO: 31353 - DNA, 25 bp, SARS Virus
tcgaaatctaccccaggaaagatgt

SEQ ID NO: 31354 - DNA, 25 bp, SARS Virus
cgaaatctaccacaggaaagatgta

SEQ ID NO: 31355 - DNA, 25 bp, SARS Virus
gaaatctaccaccggaaagatgtaa

SEQ ID NO: 31356 - DNA, 25 bp, SARS Virus
aaatctaccacacgaaagatgtaag

SEQ ID NO: 31357 - DNA, 25 bp, SARS Virus
aatctaccacagcaaagatgtaagc

SEQ ID NO: 31358 - DNA, 25 bp, SARS Virus
atctaccacaggcaagatgtaagca

SEQ ID NO: 31359 - DNA, 25 bp, SARS Virus
tctaccacaggacagatgtaagcac

SEQ ID NO: 31360 - DNA, 25 bp, SARS Virus
ctaccacaggaacgatgtaagcaca

SEQ ID NO: 31361 - DNA, 25 bp, SARS Virus
gtaatcactactgcaacgagcacta

SEQ ID NO: 31362 - DNA, 25 bp, SARS Virus
taatcactacttgaacgagcactaa

SEQ ID NO: 31363 - DNA, 25 bp, SARS Virus
aatcactacttcgacgagcactaaa

SEQ ID NO: 31364 - DNA, 25 bp, SARS Virus
atcactacttcagcgagcactaaac

SEQ ID NO: 31365 - DNA, 25 bp, SARS Virus
tcactacttcaaggagcactaaaca

SEQ ID NO: 31366 - DNA, 25 bp, SARS Virus
cactacttcaacgagcactaaacag

SEQ ID NO: 31367 - DNA, 25 bp, SARS Virus
actacttcaacgggcactaaacagt

SEQ ID NO: 31368 - DNA, 25 bp, SARS Virus
ctacttcaacgagcactaaacagtg

SEQ ID NO: 31369 - DNA, 25 bp, SARS Virus
tacttcaacgaggactaaacagtga

SEQ ID NO: 31370 - DNA, 25 bp, SARS Virus
acttcaacgagcgctaaacagtgag

SEQ ID NO: 31371 - DNA, 25 bp, SARS Virus
cttcaacgagcagtaaacagtgagg

SEQ ID NO: 31372 - DNA, 25 bp, SARS Virus
ttcaacgagcacgaaacagtgaggt

SEQ ID NO: 31373 - DNA, 25 bp, SARS Virus
tcaacgagcactgaacagtgaggtc

SEQ ID NO: 31374 - DNA, 25 bp, SARS Virus
caacgagcactagacagtgaggtca

SEQ ID NO: 31375 - DNA, 25 bp, SARS Virus
aacgagcactaagcagtgaggtcaa

SEQ ID NO: 31376 - DNA, 25 bp, SARS Virus
acgagcactaaagagtgaggtcaaa

SEQ ID NO: 31377 - DNA, 25 bp, SARS Virus
cgagcactaaacggtgaggtcaaat

SEQ ID NO: 31378 - DNA, 25 bp, SARS Virus
gagcactaaacagtgaggtcaaatt

SEQ ID NO: 31379 - DNA, 25 bp, SARS Virus
agcactaaacagggaggtcaaattt

SEQ ID NO: 31380 - DNA, 25 bp, SARS Virus
gcactaaacagtgaggtcaaatttt

SEQ ID NO: 31381 - DNA, 25 bp, SARS Virus
cactaaacagtggggtcaaattttc

SEQ ID NO: 31382 - DNA, 25 bp, SARS Virus
actaaacagtgaggtcaaattttct

SEQ ID NO: 31383 - DNA, 25 bp, SARS Virus
ctaaacagtgaggtcaaattttctg

SEQ ID NO: 31384 - DNA, 25 bp, SARS Virus
taaacagtgagggcaaattttctgg

SEQ ID NO: 31385 - DNA, 25 bp, SARS Virus
aaacagtgaggtgaaattttctggt

SEQ ID NO: 31386 - DNA, 25 bp, SARS Virus
aacagtgaggtcgaattttctggtt

SEQ ID NO: 31387 - DNA, 25 bp, SARS Virus
acagtgaggtcagattttctggtta

SEQ ID NO: 31388 - DNA, 25 bp, SARS Virus
cagtgaggtcaagttttctggttag

SEQ ID NO: 31389 - DNA, 25 bp, SARS Virus
agtgaggtcaaagtttctggttagt

SEQ ID NO: 31390 - DNA, 25 bp, SARS Virus
gtgaggtcaaatgttctggttagtt

SEQ ID NO: 31391 - DNA, 25 bp, SARS Virus
tgaggtcaaattgtctggttagttg

SEQ ID NO: 31392 - DNA, 25 bp, SARS Virus
gaggtcaaatttgctggttagttgg

SEQ ID NO: 31393 - DNA, 25 bp, SARS Virus
aggtcaaattttgtggttagttggg

SEQ ID NO: 31394 - DNA, 25 bp, SARS Virus
ggtcaaattttcgggttagttggga

SEQ ID NO: 31395 - DNA, 25 bp, SARS Virus
gtcaaattttctggttagttgggat

SEQ ID NO: 31396 - DNA, 25 bp, SARS Virus
tcaaattttctggttagttgggatg

SEQ ID NO: 31397 - DNA, 25 bp, SARS Virus
caaattttctgggtagttgggatga

SEQ ID NO: 31398 - DNA, 25 bp, SARS Virus
aaattttctggtgagttgggatgac

SEQ ID NO: 31399 - DNA, 25 bp, SARS Virus
aattttctggttggttgggatgact

SEQ ID NO: 31400 - DNA, 25 bp, SARS Virus
attttctggttagttgggatgactg

SEQ ID NO: 31401 - DNA, 25 bp, SARS Virus
ttttctggttaggtgggatgactgg

SEQ ID NO: 31402 - DNA, 25 bp, SARS Virus
tttctggttagtggggatgactggt

SEQ ID NO: 31403 - DNA, 25 bp, SARS Virus
ttctggttagttgggatgactggtc

SEQ ID NO: 31404 - DNA, 25 bp, SARS Virus
tctggttagttgggatgactggtca

SEQ ID NO: 31405 - DNA, 25 bp, SARS Virus
ctggttagttgggatgactggtcag

SEQ ID NO: 31406 - DNA, 25 bp, SARS Virus
tggttagttggggtgactggtcagt

SEQ ID NO: 31407 - DNA, 25 bp, SARS Virus
ggttagttgggaggactggtcagta

SEQ ID NO: 31408 - DNA, 25 bp, SARS Virus
gttagttgggatgactggtcagtag

SEQ ID NO: 31409 - DNA, 25 bp, SARS Virus
ttagttgggatggctggtcagtagc

SEQ ID NO: 31410 - DNA, 25 bp, SARS Virus
tagttgggatgagtggtcagtagca

SEQ ID NO: 31411 - DNA, 25 bp, SARS Virus
agttgggatgacgggtcagtagcat

SEQ ID NO: 31412 - DNA, 25 bp, SARS Virus
gttgggatgactggtcagtagcata

SEQ ID NO: 31413 - DNA, 25 bp, SARS Virus
ttgggatgactggtcagtagcatat

SEQ ID NO: 31414 - DNA, 25 bp, SARS Virus
tgggatgactgggcagtagcatata

SEQ ID NO: 31415 - DNA, 25 bp, SARS Virus
gggatgactggtgagtagcatataa

SEQ ID NO: 31416 - DNA, 25 bp, SARS Virus
ggatgactggtcggtagcatataac

SEQ ID NO: 31417 - DNA, 25 bp, SARS Virus
gatgactggtcagtagcatataaca

SEQ ID NO: 31418 - DNA, 25 bp, SARS Virus
atgactggtcaggagcatataacaa

SEQ ID NO: 31419 - DNA, 25 bp, SARS Virus
tgactggtcagtggcatataacaac

SEQ ID NO: 31420 - DNA, 25 bp, SARS Virus
gactggtcagtagcatataacaact

SEQ ID NO: 31421 - DNA, 25 bp, SARS Virus
actggtcagtaggatataacaacta

SEQ ID NO: 31422 - DNA, 25 bp, SARS Virus
ctggtcagtagcgtataacaactat

SEQ ID NO: 31423 - DNA, 25 bp, SARS Virus
tggtcagtagcagataacaactatc

SEQ ID NO: 31424 - DNA, 25 bp, SARS Virus
ggtcagtagcatgtaacaactatca

SEQ ID NO: 31425 - DNA, 25 bp, SARS Virus
gtcagtagcatagaacaactatcac

SEQ ID NO: 31426 - DNA, 25 bp, SARS Virus
tcagtagcatatgacaactatcaca

SEQ ID NO: 31427 - DNA, 25 bp, SARS Virus
cagtagcatatagcaactatcacaa

SEQ ID NO: 31428 - DNA, 25 bp, SARS Virus
agtagcatataagaactatcacaac

SEQ ID NO: 31429 - DNA, 25 bp, SARS Virus
gtagcatataacgactatcacaacg

SEQ ID NO: 31430 - DNA, 25 bp, SARS Virus
tagcatataacagctatcacaacga

SEQ ID NO: 31431 - DNA, 25 bp, SARS Virus
agcatataacaagtatcacaacgac

SEQ ID NO: 31432 - DNA, 25 bp, SARS Virus
gcatataacaacgatcacaacgaca

SEQ ID NO: 31433 - DNA, 25 bp, SARS Virus
catataacaactgtcacaacgacac

SEQ ID NO: 31434 - DNA, 25 bp, SARS Virus
atataacaactagcacaacgacact

SEQ ID NO: 31435 - DNA, 25 bp, SARS Virus
tataacaactatgacaacgacactt

SEQ ID NO: 31436 - DNA, 25 bp, SARS Virus
ataacaactatcgcaacgacacttt

SEQ ID NO: 31437 - DNA, 25 bp, SARS Virus
taacaactatcagaacgacactttt

SEQ ID NO: 31438 - DNA, 25 bp, SARS Virus
aacaactatcacgacgacacttttt

SEQ ID NO: 31439 - DNA, 25 bp, SARS Virus
acaactatcacagcgacacttttta

SEQ ID NO: 31440 - DNA, 25 bp, SARS Virus
caactatcacaaggacactttttac

SEQ ID NO: 31441 - DNA, 25 bp, SARS Virus
aactatcacaacgacactttttacc

SEQ ID NO: 31442 - DNA, 25 bp, SARS Virus
actatcacaacggcactttttaccg

SEQ ID NO: 31443 - DNA, 25 bp, SARS Virus
ctatcacaacgagactttttaccgc

SEQ ID NO: 31444 - DNA, 25 bp, SARS Virus
tatcacaacgacgctttttaccgcg

SEQ ID NO: 31445 - DNA, 25 bp, SARS Virus
atcacaacgacagtttttaccgcgc

SEQ ID NO: 31446 - DNA, 25 bp, SARS Virus
tcacaacgacacgttttaccgcgcg

SEQ ID NO: 31447 - DNA, 25 bp, SARS Virus
cacaacgacactgtttaccgcgcga

SEQ ID NO: 31448 - DNA, 25 bp, SARS Virus
acaacgacacttgttaccgcgcgaa

SEQ ID NO: 31449 - DNA, 25 bp, SARS Virus
caacgacactttgtaccgcgcgaag

SEQ ID NO: 31450 - DNA, 25 bp, SARS Virus
aacgacacttttgaccgcgcgaagt

SEQ ID NO: 31451 - DNA, 25 bp, SARS Virus
acgacactttttgccgcgcgaagtg

SEQ ID NO: 31452 - DNA, 25 bp, SARS Virus
cgacactttttagcgcgcgaagtgg

SEQ ID NO: 31453 - DNA, 25 bp, SARS Virus
gacactttttacggcgcgaagtgga

SEQ ID NO: 31454 - DNA, 25 bp, SARS Virus
acactttttaccgcgcgaagtggag

SEQ ID NO: 31455 - DNA, 25 bp, SARS Virus
cactttttaccgggcgaagtggaga

SEQ ID NO: 31456 - DNA, 25 bp, SARS Virus
actttttaccgcgcgaagtggagat

SEQ ID NO: 31457 - DNA, 25 bp, SARS Virus
ctttttaccgcgggaagtggagatg

SEQ ID NO: 31458 - DNA, 25 bp, SARS Virus
tttttaccgcgcgaagtggagatga

SEQ ID NO: 31459 - DNA, 25 bp, SARS Virus
ttttaccgcgcggagtggagatgaa

SEQ ID NO: 31460 - DNA, 25 bp, SARS Virus
tttaccgcgcgaggtggagatgaaa

SEQ ID NO: 31461 - DNA, 25 bp, SARS Virus
ttaccgcgcgaagtggagatgaaac

SEQ ID NO: 31462 - DNA, 25 bp, SARS Virus
taccgcgcgaaggggagatgaaact

SEQ ID NO: 31463 - DNA, 25 bp, SARS Virus
accgcgcgaagtggagatgaaactg

SEQ ID NO: 31464 - DNA, 25 bp, SARS Virus
ccgcgcgaagtggagatgaaactgt

SEQ ID NO: 31465 - DNA, 25 bp, SARS Virus
cgcgcgaagtggggatgaaactgtt

SEQ ID NO: 31466 - DNA, 25 bp, SARS Virus
gcgcgaagtggagatgaaactgttc

SEQ ID NO: 31467 - DNA, 25 bp, SARS Virus
cgcgaagtggaggtgaaactgttcc

SEQ ID NO: 31468 - DNA, 25 bp, SARS Virus
gcgaagtggagaggaaactgttccg

SEQ ID NO: 31469 - DNA, 25 bp, SARS Virus
cgaagtggagatgaaactgttccga

SEQ ID NO: 31470 - DNA, 25 bp, SARS Virus
gaagtggagatggaactgttccgac

SEQ ID NO: 31471 - DNA, 25 bp, SARS Virus
aagtggagatgagactgttccgacc

SEQ ID NO: 31472 - DNA, 25 bp, SARS Virus
agtggagatgaagctgttccgacca

SEQ ID NO: 31473 - DNA, 25 bp, SARS Virus
gtggagatgaaagtgttccgaccag

SEQ ID NO: 31474 - DNA, 25 bp, SARS Virus
tggagatgaaacggttccgaccagt

SEQ ID NO: 31475 - DNA, 25 bp, SARS Virus
ggagatgaaactgttccgaccagtt

SEQ ID NO: 31476 - DNA, 25 bp, SARS Virus
gagatgaaactggtccgaccagttt

SEQ ID NO: 31477 - DNA, 25 bp, SARS Virus
agatgaaactgtgccgaccagtttt

SEQ ID NO: 31478 - DNA, 25 bp, SARS Virus
gatgaaactgttgcgaccagttttc

SEQ ID NO: 31479 - DNA, 25 bp, SARS Virus
atgaaactgttcggaccagttttct

SEQ ID NO: 31480 - DNA, 25 bp, SARS Virus
tgaaactgttccgaccagttttctg

SEQ ID NO: 31481 - DNA, 25 bp, SARS Virus
gaaactgttccggccagttttctgg

SEQ ID NO: 31482 - DNA, 25 bp, SARS Virus
aaactgttccgagcagttttctgga

SEQ ID NO: 31483 - DNA, 25 bp, SARS Virus
aactgttccgacgagttttctggat

SEQ ID NO: 31484 - DNA, 25 bp, SARS Virus
actgttccgaccggttttctggata

SEQ ID NO: 31485 - DNA, 25 bp, SARS Virus
ctgttccgaccagttttctggatac

SEQ ID NO: 31486 - DNA, 25 bp, SARS Virus
tgttccgaccaggtttctggatact

SEQ ID NO: 31487 - DNA, 25 bp, SARS Virus
gttccgaccagtgttctggatactc

SEQ ID NO: 31488 - DNA, 25 bp, SARS Virus
ttccgaccagttgtctggatactct

SEQ ID NO: 31489 - DNA, 25 bp, SARS Virus
tccgaccagtttgctggatactctc

SEQ ID NO: 31490 - DNA, 25 bp, SARS Virus
ccgaccagttttgtggatactctct

SEQ ID NO: 31491 - DNA, 25 bp, SARS Virus
cgaccagttttcgggatactctctg

SEQ ID NO: 31492 - DNA, 25 bp, SARS Virus
gaccagttttctggatactctctgt

SEQ ID NO: 31493 - DNA, 25 bp, SARS Virus
accagttttctggatactctctgta

SEQ ID NO: 31494 - DNA, 25 bp, SARS Virus
ccagttttctgggtactctctgtag

SEQ ID NO: 31495 - DNA, 25 bp, SARS Virus
cagttttctggagactctctgtagg

SEQ ID NO: 31496 - DNA, 25 bp, SARS Virus
agttttctggatgctctctgtaggc

SEQ ID NO: 31497 - DNA, 25 bp, SARS Virus
gttttctggatagtctctgtaggcg

SEQ ID NO: 31498 - DNA, 25 bp, SARS Virus
ttttctggatacgctctgtaggcga

SEQ ID NO: 31499 - DNA, 25 bp, SARS Virus
tttctggatactgtctgtaggcgag

SEQ ID NO: 31500 - DNA, 25 bp, SARS Virus
ttctggatactcgctgtaggcgaga

SEQ ID NO: 31501 - DNA, 25 bp, SARS Virus
tctggatactctgtgtaggcgagag

SEQ ID NO: 31502 - DNA, 25 bp, SARS Virus
ctggatactctcggtaggcgagagg

SEQ ID NO: 31503 - DNA, 25 bp, SARS Virus
tggatactctctgtaggcgagaggg

SEQ ID NO: 31504 - DNA, 25 bp, SARS Virus
ggatactctctggaggcgagagggt

SEQ ID NO: 31505 - DNA, 25 bp, SARS Virus
gatactctctgtgggcgagagggta

SEQ ID NO: 31506 - DNA, 25 bp, SARS Virus
atactctctgtaggcgagagggtaa

SEQ ID NO: 31507 - DNA, 25 bp, SARS Virus
tactctctgtaggcgagagggtaaa

SEQ ID NO: 31508 - DNA, 25 bp, SARS Virus
actctctgtaggggagagggtaaaa

SEQ ID NO: 31509 - DNA, 25 bp, SARS Virus
ctctctgtaggcgagagggtaaaac

SEQ ID NO: 31510 - DNA, 25 bp, SARS Virus
tctctgtaggcgggagggtaaaaca

SEQ ID NO: 31511 - DNA, 25 bp, SARS Virus
ctctgtaggcgagagggtaaaacag

SEQ ID NO: 31512 - DNA, 25 bp, SARS Virus
tctgtaggcgagggggtaaaacagt

SEQ ID NO: 31513 - DNA, 25 bp, SARS Virus
ctgtaggcgagagggtaaaacagtt

SEQ ID NO: 31514 - DNA, 25 bp, SARS Virus
tgtaggcgagagggtaaaacagtta

SEQ ID NO: 31515 - DNA, 25 bp, SARS Virus
gtaggcgagagggtaaaacagttaa

SEQ ID NO: 31516 - DNA, 25 bp, SARS Virus
taggcgagaggggaaaacagttaaa

SEQ ID NO: 31517 - DNA, 25 bp, SARS Virus
aggcgagagggtgaaacagttaaat

SEQ ID NO: 31518 - DNA, 25 bp, SARS Virus
ggcgagagggtagaacagttaaatc

SEQ ID NO: 31519 - DNA, 25 bp, SARS Virus
gcgagagggtaagacagttaaatct

SEQ ID NO: 31520 - DNA, 25 bp, SARS Virus
cgagagggtaaagcagttaaatctg

SEQ ID NO: 31521 - DNA, 25 bp, SARS Virus
gagagggtaaaagagttaaatctgt

SEQ ID NO: 31522 - DNA, 25 bp, SARS Virus
agagggtaaaacggttaaatctgtt

SEQ ID NO: 31523 - DNA, 25 bp, SARS Virus
gagggtaaaacagttaaatctgtta

SEQ ID NO: 31524 - DNA, 25 bp, SARS Virus
agggtaaaacaggtaaatctgttaa

SEQ ID NO: 31525 - DNA, 25 bp, SARS Virus
gggtaaaacagtgaaatctgttaaa

SEQ ID NO: 31526 - DNA, 25 bp, SARS Virus
ggtaaaacagttgaatctgttaaac

SEQ ID NO: 31527 - DNA, 25 bp, SARS Virus
gtaaaacagttagatctgttaaact

SEQ ID NO: 31528 - DNA, 25 bp, SARS Virus
taaaacagttaagtctgttaaactc

SEQ ID NO: 31529 - DNA, 25 bp, SARS Virus
aaaacagttaaagctgttaaactct

SEQ ID NO: 31530 - DNA, 25 bp, SARS Virus
aaacagttaaatgtgttaaactctc

SEQ ID NO: 31531 - DNA, 25 bp, SARS Virus
aacagttaaatcggttaaactctcg

SEQ ID NO: 31532 - DNA, 25 bp, SARS Virus
acagttaaatctgttaaactctcga

SEQ ID NO: 31533 - DNA, 25 bp, SARS Virus
cagttaaatctggtaaactctcgat

SEQ ID NO: 31534 - DNA, 25 bp, SARS Virus
agttaaatctgtgaaactctcgatt

SEQ ID NO: 31535 - DNA, 25 bp, SARS Virus
gttaaatctgttgaactctcgattg

SEQ ID NO: 31536 - DNA, 25 bp, SARS Virus
ttaaatctgttagactctcgattgt

SEQ ID NO: 31537 - DNA, 25 bp, SARS Virus
taaatctgttaagctctcgattgtt

SEQ ID NO: 31538 - DNA, 25 bp, SARS Virus
aaatctgttaaagtctcgattgttg

SEQ ID NO: 31539 - DNA, 25 bp, SARS Virus
aatctgttaaacgctcgattgttgt

SEQ ID NO: 31540 - DNA, 25 bp, SARS Virus
atctgttaaactgtcgattgttgtg

SEQ ID NO: 31541 - DNA, 25 bp, SARS Virus
tctgttaaactcgcgattgttgtga

SEQ ID NO: 31542 - DNA, 25 bp, SARS Virus
ctgttaaactctggattgttgtgat

SEQ ID NO: 31543 - DNA, 25 bp, SARS Virus
tgttaaactctcgattgttgtgatt

SEQ ID NO: 31544 - DNA, 25 bp, SARS Virus
gttaaactctcggttgttgtgattt

SEQ ID NO: 31545 - DNA, 25 bp, SARS Virus
ttaaactctcgagtgttgtgatttc

SEQ ID NO: 31546 - DNA, 25 bp, SARS Virus
taaactctcgatggttgtgatttcc

SEQ ID NO: 31547 - DNA, 25 bp, SARS Virus
aaactctcgattgttgtgatttcca

SEQ ID NO: 31548 - DNA, 25 bp, SARS Virus
aactctcgattggtgtgatttccaa

SEQ ID NO: 31549 - DNA, 25 bp, SARS Virus
actctcgattgtggtgatttccaag

SEQ ID NO: 31550 - DNA, 25 bp, SARS Virus
ctctcgattgttgtgatttccaagt

SEQ ID NO: 31551 - DNA, 25 bp, SARS Virus
tctcgattgttgggatttccaagtg

SEQ ID NO: 31552 - DNA, 25 bp, SARS Virus
ctcgattgttgtgatttccaagtga

SEQ ID NO: 31553 - DNA, 25 bp, SARS Virus
tcgattgttgtggtttccaagtgac

SEQ ID NO: 31554 - DNA, 25 bp, SARS Virus
cgattgttgtgagttccaagtgacg

SEQ ID NO: 31555 - DNA, 25 bp, SARS Virus
gattgttgtgatgtccaagtgacgg

SEQ ID NO: 31556 - DNA, 25 bp, SARS Virus
attgttgtgattgccaagtgacgga

SEQ ID NO: 31557 - DNA, 25 bp, SARS Virus
ttgttgtgatttgcaagtgacggat

SEQ ID NO: 31558 - DNA, 25 bp, SARS Virus
tgttgtgatttcgaagtgacggata

SEQ ID NO: 31559 - DNA, 25 bp, SARS Virus
gttgtgatttccgagtgacggataa

SEQ ID NO: 31560 - DNA, 25 bp, SARS Virus
ttgtgatttccaggtgacggataat

SEQ ID NO: 31561 - DNA, 25 bp, SARS Virus
tgtgatttccaagtgacggataatt

SEQ ID NO: 31562 - DNA, 25 bp, SARS Virus
gtgatttccaagggacggataatta

SEQ ID NO: 31563 - DNA, 25 bp, SARS Virus
tgatttccaagtgacggataattac

SEQ ID NO: 31564 - DNA, 25 bp, SARS Virus
gatttccaagtggcggataattaca

SEQ ID NO: 31565 - DNA, 25 bp, SARS Virus
atttccaagtgagggataattacag

SEQ ID NO: 31566 - DNA, 25 bp, SARS Virus
tttccaagtgacggataattacagt

SEQ ID NO: 31567 - DNA, 25 bp, SARS Virus
ttccaagtgacggataattacagta

SEQ ID NO: 31568 - DNA, 25 bp, SARS Virus
tccaagtgacgggtaattacagtat

SEQ ID NO: 31569 - DNA, 25 bp, SARS Virus
ccaagtgacggagaattacagtatc

SEQ ID NO: 31570 - DNA, 25 bp, SARS Virus
caagtgacggatgattacagtatca

SEQ ID NO: 31571 - DNA, 25 bp, SARS Virus
aagtgacggatagttacagtatcaa

SEQ ID NO: 31572 - DNA, 25 bp, SARS Virus
agtgacggataagtacagtatcaaa

SEQ ID NO: 31573 - DNA, 25 bp, SARS Virus
gtgacggataatgacagtatcaaaa

SEQ ID NO: 31574 - DNA, 25 bp, SARS Virus
tgacggataattgcagtatcaaaaa

SEQ ID NO: 31575 - DNA, 25 bp, SARS Virus
gacggataattagagtatcaaaaac

SEQ ID NO: 31576 - DNA, 25 bp, SARS Virus
acggataattacggtatcaaaaact

SEQ ID NO: 31577 - DNA, 25 bp, SARS Virus
cggataattacagtatcaaaaacta

SEQ ID NO: 31578 - DNA, 25 bp, SARS Virus
ggataattacaggatcaaaaactac

SEQ ID NO: 31579 - DNA, 25 bp, SARS Virus
gataattacagtgtcaaaaactacc

SEQ ID NO: 31580 - DNA, 25 bp, SARS Virus
ataattacagtagcaaaaactaccg

SEQ ID NO: 31581 - DNA, 25 bp, SARS Virus
taattacagtatgaaaaactaccgt

SEQ ID NO: 31582 - DNA, 25 bp, SARS Virus
aattacagtatcgaaaactaccgtt

SEQ ID NO: 31583 - DNA, 25 bp, SARS Virus
attacagtatcagaaactaccgttc

SEQ ID NO: 31584 - DNA, 25 bp, SARS Virus
ttacagtatcaagaactaccgttca

SEQ ID NO: 31585 - DNA, 25 bp, SARS Virus
tacagtatcaaagactaccgttcag

SEQ ID NO: 31586 - DNA, 25 bp, SARS Virus
acagtatcaaaagctaccgttcagg

SEQ ID NO: 31587 - DNA, 25 bp, SARS Virus
cagtatcaaaaagtaccgttcaggt

SEQ ID NO: 31588 - DNA, 25 bp, SARS Virus
agtatcaaaaacgaccgttcaggtt

SEQ ID NO: 31589 - DNA, 25 bp, SARS Virus
gtatcaaaaactgccgttcaggttt

SEQ ID NO: 31590 - DNA, 25 bp, SARS Virus
tatcaaaaactagcgttcaggttta

SEQ ID NO: 31591 - DNA, 25 bp, SARS Virus
atcaaaaactacggttcaggtttac

SEQ ID NO: 31592 - DNA, 25 bp, SARS Virus
tcaaaaactaccgttcaggtttacg

SEQ ID NO: 31593 - DNA, 25 bp, SARS Virus
caaaaactaccggtcaggtttacgc

SEQ ID NO: 31594 - DNA, 25 bp, SARS Virus
aaaaactaccgtgcaggtttacgct

SEQ ID NO: 31595 - DNA, 25 bp, SARS Virus
aaaactaccgttgaggtttacgctg

SEQ ID NO: 31596 - DNA, 25 bp, SARS Virus
aaactaccgttcgggtttacgctgc

SEQ ID NO: 31597 - DNA, 25 bp, SARS Virus
aactaccgttcaggtttacgctgct

SEQ ID NO: 31598 - DNA, 25 bp, SARS Virus
actaccgttcaggtttacgctgctc

SEQ ID NO: 31599 - DNA, 25 bp, SARS Virus
ctaccgttcagggttacgctgctca

SEQ ID NO: 31600 - DNA, 25 bp, SARS Virus
taccgttcaggtgtacgctgctcag

SEQ ID NO: 31601 - DNA, 25 bp, SARS Virus
accgttcaggttgacgctgctcaga

SEQ ID NO: 31602 - DNA, 25 bp, SARS Virus
ccgttcaggtttgcgctgctcagac

SEQ ID NO: 31603 - DNA, 25 bp, SARS Virus
cgttcaggtttaggctgctcagacg

SEQ ID NO: 31604 - DNA, 25 bp, SARS Virus
gttcaggtttacgctgctcagacga

SEQ ID NO: 31605 - DNA, 25 bp, SARS Virus
ttcaggtttacggtgctcagacgaa

SEQ ID NO: 31606 - DNA, 25 bp, SARS Virus
tcaggtttacgcggctcagacgaag

SEQ ID NO: 31607 - DNA, 25 bp, SARS Virus
caggtttacgctgctcagacgaaga

SEQ ID NO: 31608 - DNA, 25 bp, SARS Virus
aggtttacgctggtcagacgaagat

SEQ ID NO: 31609 - DNA, 25 bp, SARS Virus
ggtttacgctgcgcagacgaagatt

SEQ ID NO: 31610 - DNA, 25 bp, SARS Virus
gtttacgctgctgagacgaagattc

SEQ ID NO: 31611 - DNA, 25 bp, SARS Virus
tttacgctgctcggacgaagattca

SEQ ID NO: 31612 - DNA, 25 bp, SARS Virus
ttacgctgctcagacgaagattcag

SEQ ID NO: 31613 - DNA, 25 bp, SARS Virus
tacgctgctcaggcgaagattcaga

SEQ ID NO: 31614 - DNA, 25 bp, SARS Virus
acgctgctcagaggaagattcagac

SEQ ID NO: 31615 - DNA, 25 bp, SARS Virus
cgctgctcagacgaagattcagacg

SEQ ID NO: 31616 - DNA, 25 bp, SARS Virus
gctgctcagacggagattcagacga

SEQ ID NO: 31617 - DNA, 25 bp, SARS Virus
ctgctcagacgaggattcagacgaa

SEQ ID NO: 31618 - DNA, 25 bp, SARS Virus
tgctcagacgaagattcagacgaag

SEQ ID NO: 31619 - DNA, 25 bp, SARS Virus
gctcagacgaaggttcagacgaaga

SEQ ID NO: 31620 - DNA, 25 bp, SARS Virus
ctcagacgaagagtcagacgaagac

SEQ ID NO: 31621 - DNA, 25 bp, SARS Virus
tcagacgaagatgcagacgaagaca

SEQ ID NO: 31622 - DNA, 25 bp, SARS Virus
cagacgaagattgagacgaagacac

SEQ ID NO: 31623 - DNA, 25 bp, SARS Virus
agacgaagattcggacgaagacaca

SEQ ID NO: 31624 - DNA, 25 bp, SARS Virus
gacgaagattcagacgaagacacat

SEQ ID NO: 31625 - DNA, 25 bp, SARS Virus
acgaagattcaggcgaagacacatg

SEQ ID NO: 31626 - DNA, 25 bp, SARS Virus
cgaagattcagaggaagacacatga

SEQ ID NO: 31627 - DNA, 25 bp, SARS Virus
gaagattcagacgaagacacatgat

SEQ ID NO: 31628 - DNA, 25 bp, SARS Virus
aagattcagacggagacacatgatg

SEQ ID NO: 31629 - DNA, 25 bp, SARS Virus
agattcagacgaggacacatgatgt

SEQ ID NO: 31630 - DNA, 25 bp, SARS Virus
gattcagacgaagacacatgatgtc

SEQ ID NO: 31631 - DNA, 25 bp, SARS Virus
attcagacgaaggcacatgatgtca

SEQ ID NO: 31632 - DNA, 25 bp, SARS Virus
ttcagacgaagagacatgatgtcag

SEQ ID NO: 31633 - DNA, 25 bp, SARS Virus
tcagacgaagacgcatgatgtcagt

SEQ ID NO: 31634 - DNA, 25 bp, SARS Virus
cagacgaagacagatgatgtcagtc

SEQ ID NO: 31635 - DNA, 25 bp, SARS Virus
agacgaagacacgtgatgtcagtcg

SEQ ID NO: 31636 - DNA, 25 bp, SARS Virus
gacgaagacacaggatgtcagtcga

SEQ ID NO: 31637 - DNA, 25 bp, SARS Virus
acgaagacacatgatgtcagtcgac

SEQ ID NO: 31638 - DNA, 25 bp, SARS Virus
cgaagacacatggtgtcagtcgact

SEQ ID NO: 31639 - DNA, 25 bp, SARS Virus
gaagacacatgaggtcagtcgacta

SEQ ID NO: 31640 - DNA, 25 bp, SARS Virus
aagacacatgatgtcagtcgactac

SEQ ID NO: 31641 - DNA, 25 bp, SARS Virus
agacacatgatggcagtcgactaca

SEQ ID NO: 31642 - DNA, 25 bp, SARS Virus
gacacatgatgtgagtcgactacac

SEQ ID NO: 31643 - DNA, 25 bp, SARS Virus
acacatgatgtcggtcgactacacg

SEQ ID NO: 31644 - DNA, 25 bp, SARS Virus
cacatgatgtcagtcgactacacgg

SEQ ID NO: 31645 - DNA, 25 bp, SARS Virus
acatgatgtcaggcgactacacggt

SEQ ID NO: 31646 - DNA, 25 bp, SARS Virus
catgatgtcagtggactacacggtt

SEQ ID NO: 31647 - DNA, 25 bp, SARS Virus
atgatgtcagtcgactacacggttg

SEQ ID NO: 31648 - DNA, 25 bp, SARS Virus
tgatgtcagtcggctacacggttgg

SEQ ID NO: 31649 - DNA, 25 bp, SARS Virus
gatgtcagtcgagtacacggttgga

SEQ ID NO: 31650 - DNA, 25 bp, SARS Virus
atgtcagtcgacgacacggttggat

SEQ ID NO: 31651 - DNA, 25 bp, SARS Virus
tgtcagtcgactgcacggttggata

SEQ ID NO: 31652 - DNA, 25 bp, SARS Virus
gtcagtcgactagacggttggataa

SEQ ID NO: 31653 - DNA, 25 bp, SARS Virus
tcagtcgactacgcggttggataag

SEQ ID NO: 31654 - DNA, 25 bp, SARS Virus
cagtcgactacagggttggataaga

SEQ ID NO: 31655 - DNA, 25 bp, SARS Virus
agtcgactacacggttggataagac

SEQ ID NO: 31656 - DNA, 25 bp, SARS Virus
gtcgactacacggttggataagaca

SEQ ID NO: 31657 - DNA, 25 bp, SARS Virus
tcgactacacgggtggataagacaa

SEQ ID NO: 31658 - DNA, 25 bp, SARS Virus
cgactacacggtgggataagacaac

SEQ ID NO: 31659 - DNA, 25 bp, SARS Virus
gactacacggttggataagacaacg

SEQ ID NO: 31660 - DNA, 25 bp, SARS Virus
actacacggttggataagacaacga

SEQ ID NO: 31661 - DNA, 25 bp, SARS Virus
ctacacggttgggtaagacaacgaa

SEQ ID NO: 31662 - DNA, 25 bp, SARS Virus
tacacggttggagaagacaacgaac

SEQ ID NO: 31663 - DNA, 25 bp, SARS Virus
acacggttggatgagacaacgaact

SEQ ID NO: 31664 - DNA, 25 bp, SARS Virus
cacggttggataggacaacgaactg

SEQ ID NO: 31665 - DNA, 25 bp, SARS Virus
acggttggataagacaacgaactgg

SEQ ID NO: 31666 - DNA, 25 bp, SARS Virus
cggttggataaggcaacgaactggt

SEQ ID NO: 31667 - DNA, 25 bp, SARS Virus
ggttggataagagaacgaactggtt

SEQ ID NO: 31668 - DNA, 25 bp, SARS Virus
gttggataagacgacgaactggttc

SEQ ID NO: 31669 - DNA, 25 bp, SARS Virus
ttggataagacagcgaactggttcg

SEQ ID NO: 31670 - DNA, 25 bp, SARS Virus
tggataagacaaggaactggttcga

SEQ ID NO: 31671 - DNA, 25 bp, SARS Virus
ggataagacaacgaactggttcgag

SEQ ID NO: 31672 - DNA, 25 bp, SARS Virus
gataagacaacggactggttcgaga

SEQ ID NO: 31673 - DNA, 25 bp, SARS Virus
ataagacaacgagctggttcgagaa

SEQ ID NO: 31674 - DNA, 25 bp, SARS Virus
taagacaacgaagtggttcgagaac

SEQ ID NO: 31675 - DNA, 25 bp, SARS Virus
aagacaacgaacgggttcgagaaca

SEQ ID NO: 31676 - DNA, 25 bp, SARS Virus
agacaacgaactggttcgagaacat

SEQ ID NO: 31677 - DNA, 25 bp, SARS Virus
gacaacgaactggttcgagaacata

SEQ ID NO: 31678 - DNA, 25 bp, SARS Virus
acaacgaactgggtcgagaacatag

SEQ ID NO: 31679 - DNA, 25 bp, SARS Virus
caacgaactggtgcgagaacatagt

SEQ ID NO: 31680 - DNA, 25 bp, SARS Virus
aacgaactggttggagaacatagtc

SEQ ID NO: 31681 - DNA, 25 bp, SARS Virus
acgaactggttcgagaacatagtct

SEQ ID NO: 31682 - DNA, 25 bp, SARS Virus
cgaactggttcgggaacatagtctg

SEQ ID NO: 31683 - DNA, 25 bp, SARS Virus
gaactggttcgagaacatagtctgc

SEQ ID NO: 31684 - DNA, 25 bp, SARS Virus
aactggttcgaggacatagtctgca

SEQ ID NO: 31685 - DNA, 25 bp, SARS Virus
actggttcgagagcatagtctgcaa

SEQ ID NO: 31686 - DNA, 25 bp, SARS Virus
ctggttcgagaagatagtctgcaac

SEQ ID NO: 31687 - DNA, 25 bp, SARS Virus
tggttcgagaacgtagtctgcaacc

SEQ ID NO: 31688 - DNA, 25 bp, SARS Virus
ggttcgagaacagagtctgcaacct

SEQ ID NO: 31689 - DNA, 25 bp, SARS Virus
gttcgagaacatggtctgcaacctc

SEQ ID NO: 31690 - DNA, 25 bp, SARS Virus
ttcgagaacatagtctgcaacctct

SEQ ID NO: 31691 - DNA, 25 bp, SARS Virus
tcgagaacataggctgcaacctcta

SEQ ID NO: 31692 - DNA, 25 bp, SARS Virus
cgagaacatagtgtgcaacctctat

SEQ ID NO: 31693 - DNA, 25 bp, SARS Virus
gagaacatagtcggcaacctctatc

SEQ ID NO: 31694 - DNA, 25 bp, SARS Virus
agaacatagtctgcaacctctatca

SEQ ID NO: 31695 - DNA, 25 bp, SARS Virus
gaacatagtctggaacctctatcat

SEQ ID NO: 31696 - DNA, 25 bp, SARS Virus
aacatagtctgcgacctctatcatg

SEQ ID NO: 31697 - DNA, 25 bp, SARS Virus
acatagtctgcagcctctatcatga

SEQ ID NO: 31698 - DNA, 25 bp, SARS Virus
catagtctgcaagctctatcatgac

SEQ ID NO: 31699 - DNA, 25 bp, SARS Virus
atagtctgcaacgtctatcatgact

SEQ ID NO: 31700 - DNA, 25 bp, SARS Virus
tagtctgcaaccgctatcatgactt

SEQ ID NO: 31701 - DNA, 25 bp, SARS Virus
agtctgcaacctgtatcatgacttc

SEQ ID NO: 31702 - DNA, 25 bp, SARS Virus
gtctgcaacctcgatcatgacttca

SEQ ID NO: 31703 - DNA, 25 bp, SARS Virus
tctgcaacctctgtcatgacttcaa

SEQ ID NO: 31704 - DNA, 25 bp, SARS Virus
ctgcaacctctagcatgacttcaaa

SEQ ID NO: 31705 - DNA, 25 bp, SARS Virus
tgcaacctctatgatgacttcaaag

SEQ ID NO: 31706 - DNA, 25 bp, SARS Virus
gcaacctctatcgtgacttcaaagg

SEQ ID NO: 31707 - DNA, 25 bp, SARS Virus
caacctctatcaggacttcaaaggc

SEQ ID NO: 31708 - DNA, 25 bp, SARS Virus
aacctctatcatgacttcaaaggca

SEQ ID NO: 31709 - DNA, 25 bp, SARS Virus
acctctatcatggcttcaaaggcaa

SEQ ID NO: 31710 - DNA, 25 bp, SARS Virus
cctctatcatgagttcaaaggcaat

SEQ ID NO: 31711 - DNA, 25 bp, SARS Virus
ctctatcatgacgtcaaaggcaatt

SEQ ID NO: 31712 - DNA, 25 bp, SARS Virus
tctatcatgactgcaaaggcaattc

SEQ ID NO: 31713 - DNA, 25 bp, SARS Virus
ctatcatgacttgaaaggcaattct

SEQ ID NO: 31714 - DNA, 25 bp, SARS Virus
tatcatgacttcgaaggcaattcta

SEQ ID NO: 31715 - DNA, 25 bp, SARS Virus
atcatgacttcagaggcaattctac

SEQ ID NO: 31716 - DNA, 25 bp, SARS Virus
tcatgacttcaagggcaattctaca

SEQ ID NO: 31717 - DNA, 25 bp, SARS Virus
catgacttcaaaggcaattctacaa

SEQ ID NO: 31718 - DNA, 25 bp, SARS Virus
atgacttcaaaggcaattctacaaa

SEQ ID NO: 31719 - DNA, 25 bp, SARS Virus
tgacttcaaagggaattctacaaac

SEQ ID NO: 31720 - DNA, 25 bp, SARS Virus
gacttcaaaggcgattctacaaact

SEQ ID NO: 31721 - DNA, 25 bp, SARS Virus
acttcaaaggcagttctacaaacta

SEQ ID NO: 31722 - DNA, 25 bp, SARS Virus
cttcaaaggcaagtctacaaactac

SEQ ID NO: 31723 - DNA, 25 bp, SARS Virus
ttcaaaggcaatgctacaaactacg

SEQ ID NO: 31724 - DNA, 25 bp, SARS Virus
tcaaaggcaattgtacaaactacga

SEQ ID NO: 31725 - DNA, 25 bp, SARS Virus
caaaggcaattcgacaaactacgaa

SEQ ID NO: 31726 - DNA, 25 bp, SARS Virus
aaaggcaattctgcaaactacgaat

SEQ ID NO: 31727 - DNA, 25 bp, SARS Virus
aaggcaattctagaaactacgaata

SEQ ID NO: 31728 - DNA, 25 bp, SARS Virus
aggcaattctacgaactacgaatac

SEQ ID NO: 31729 - DNA, 25 bp, SARS Virus
ggcaattctacagactacgaataca

SEQ ID NO: 31730 - DNA, 25 bp, SARS Virus
gcaattctacaagctacgaatacag

SEQ ID NO: 31731 - DNA, 25 bp, SARS Virus
caattctacaaagtacgaatacagc

SEQ ID NO: 31732 - DNA, 25 bp, SARS Virus
aattctacaaacgacgaatacagct

SEQ ID NO: 31733 - DNA, 25 bp, SARS Virus
attctacaaactgcgaatacagctg

SEQ ID NO: 31734 - DNA, 25 bp, SARS Virus
ttctacaaactaggaatacagctgt

SEQ ID NO: 31735 - DNA, 25 bp, SARS Virus
tctacaaactacgaatacagctgtg

SEQ ID NO: 31736 - DNA, 25 bp, SARS Virus
ctacaaactacggatacagctgtgg

SEQ ID NO: 31737 - DNA, 25 bp, SARS Virus
tacaaactacgagtacagctgtgga

SEQ ID NO: 31738 - DNA, 25 bp, SARS Virus
acaaactacgaagacagctgtggaa

SEQ ID NO: 31739 - DNA, 25 bp, SARS Virus
caaactacgaatgcagctgtggaaa

SEQ ID NO: 31740 - DNA, 25 bp, SARS Virus
aaactacgaatagagctgtggaaaa

SEQ ID NO: 31741 - DNA, 25 bp, SARS Virus
aactacgaatacggctgtggaaaag

SEQ ID NO: 31742 - DNA, 25 bp, SARS Virus
actacgaatacagctgtggaaaagt

SEQ ID NO: 31743 - DNA, 25 bp, SARS Virus
ctacgaatacaggtgtggaaaagtc

SEQ ID NO: 31744 - DNA, 25 bp, SARS Virus
tacgaatacagcggtggaaaagtcg

SEQ ID NO: 31745 - DNA, 25 bp, SARS Virus
acgaatacagctgtggaaaagtcgt

SEQ ID NO: 31746 - DNA, 25 bp, SARS Virus
cgaatacagctggggaaaagtcgtt

SEQ ID NO: 31747 - DNA, 25 bp, SARS Virus
gaatacagctgtggaaaagtcgttg

SEQ ID NO: 31748 - DNA, 25 bp, SARS Virus
aatacagctgtggaaaagtcgttga

SEQ ID NO: 31749 - DNA, 25 bp, SARS Virus
atacagctgtgggaaagtcgttgaa

SEQ ID NO: 31750 - DNA, 25 bp, SARS Virus
tacagctgtggagaagtcgttgaaa

SEQ ID NO: 31751 - DNA, 25 bp, SARS Virus
acagctgtggaagagtcgttgaaaa

SEQ ID NO: 31752 - DNA, 25 bp, SARS Virus
cagctgtggaaaggtcgttgaaaat

SEQ ID NO: 31753 - DNA, 25 bp, SARS Virus
agctgtggaaaagtcgttgaaaatc

SEQ ID NO: 31754 - DNA, 25 bp, SARS Virus
gctgtggaaaaggcgttgaaaatca

SEQ ID NO: 31755 - DNA, 25 bp, SARS Virus
ctgtggaaaagtggttgaaaatcac

SEQ ID NO: 31756 - DNA, 25 bp, SARS Virus
tgtggaaaagtcgttgaaaatcaca

SEQ ID NO: 31757 - DNA, 25 bp, SARS Virus
gtggaaaagtcggtgaaaatcacaa

SEQ ID NO: 31758 - DNA, 25 bp, SARS Virus
tggaaaagtcgtggaaaatcacaag

SEQ ID NO: 31759 - DNA, 25 bp, SARS Virus
ggaaaagtcgttgaaaatcacaagg

SEQ ID NO: 31760 - DNA, 25 bp, SARS Virus
gaaaagtcgttggaaatcacaagga

SEQ ID NO: 31761 - DNA, 25 bp, SARS Virus
aaaagtcgttgagaatcacaaggat

SEQ ID NO: 31762 - DNA, 25 bp, SARS Virus
aaagtcgttgaagatcacaaggata

SEQ ID NO: 31763 - DNA, 25 bp, SARS Virus
aagtcgttgaaagtcacaaggatac

SEQ ID NO: 31764 - DNA, 25 bp, SARS Virus
agtcgttgaaaagcacaaggatacc

SEQ ID NO: 31765 - DNA, 25 bp, SARS Virus
gtcgttgaaaatgacaaggatacct

SEQ ID NO: 31766 - DNA, 25 bp, SARS Virus
tcgttgaaaatcgcaaggatacctt

SEQ ID NO: 31767 - DNA, 25 bp, SARS Virus
cgttgaaaatcagaaggataccttt

SEQ ID NO: 31768 - DNA, 25 bp, SARS Virus
gttgaaaatcacgaggatacctttt

SEQ ID NO: 31769 - DNA, 25 bp, SARS Virus
ttgaaaatcacagggataccttttt

SEQ ID NO: 31770 - DNA, 25 bp, SARS Virus
tgaaaatcacaaggatacctttttg

SEQ ID NO: 31771 - DNA, 25 bp, SARS Virus
gaaaatcacaaggatacctttttga

SEQ ID NO: 31772 - DNA, 25 bp, SARS Virus
aaaatcacaagggtacctttttgaa

SEQ ID NO: 31773 - DNA, 25 bp, SARS Virus
aaatcacaaggagacctttttgaat

SEQ ID NO: 31774 - DNA, 25 bp, SARS Virus
aatcacaaggatgcctttttgaatt

SEQ ID NO: 31775 - DNA, 25 bp, SARS Virus
atcacaaggatagctttttgaattc

SEQ ID NO: 31776 - DNA, 25 bp, SARS Virus
tcacaaggatacgtttttgaattcc

SEQ ID NO: 31777 - DNA, 25 bp, SARS Virus
cacaaggataccgttttgaattccg

SEQ ID NO: 31778 - DNA, 25 bp, SARS Virus
acaaggatacctgtttgaattccgt

SEQ ID NO: 31779 - DNA, 25 bp, SARS Virus
caaggataccttgttgaattccgtg

SEQ ID NO: 31780 - DNA, 25 bp, SARS Virus
aaggatacctttgtgaattccgtga

SEQ ID NO: 31781 - DNA, 25 bp, SARS Virus
aggataccttttggaattccgtgaa

SEQ ID NO: 31782 - DNA, 25 bp, SARS Virus
ggatacctttttgaattccgtgaac

SEQ ID NO: 31783 - DNA, 25 bp, SARS Virus
gatacctttttggattccgtgaaca

SEQ ID NO: 31784 - DNA, 25 bp, SARS Virus
atacctttttgagttccgtgaacaa

SEQ ID NO: 31785 - DNA, 25 bp, SARS Virus
tacctttttgaagtccgtgaacaac

SEQ ID NO: 31786 - DNA, 25 bp, SARS Virus
acctttttgaatgccgtgaacaacg

SEQ ID NO: 31787 - DNA, 25 bp, SARS Virus
cctttttgaattgcgtgaacaacga

SEQ ID NO: 31788 - DNA, 25 bp, SARS Virus
ctttttgaattcggtgaacaacgat

SEQ ID NO: 31789 - DNA, 25 bp, SARS Virus
tttttgaattccgtgaacaacgatg

SEQ ID NO: 31790 - DNA, 25 bp, SARS Virus
ttttgaattccgggaacaacgatgt

SEQ ID NO: 31791 - DNA, 25 bp, SARS Virus
tttgaattccgtgaacaacgatgtc

SEQ ID NO: 31792 - DNA, 25 bp, SARS Virus
ttgaattccgtggacaacgatgtcg

SEQ ID NO: 31793 - DNA, 25 bp, SARS Virus
tgaattccgtgagcaacgatgtcga

SEQ ID NO: 31794 - DNA, 25 bp, SARS Virus
gaattccgtgaagaacgatgtcgag

SEQ ID NO: 31795 - DNA, 25 bp, SARS Virus
aattccgtgaacgacgatgtcgagt

SEQ ID NO: 31796 - DNA, 25 bp, SARS Virus
attccgtgaacagcgatgtcgagtg

SEQ ID NO: 31797 - DNA, 25 bp, SARS Virus
ttccgtgaacaaggatgtcgagtgt

SEQ ID NO: 31798 - DNA, 25 bp, SARS Virus
tccgtgaacaacgatgtcgagtgtc

SEQ ID NO: 31799 - DNA, 25 bp, SARS Virus
ccgtgaacaacggtgtcgagtgtcg

SEQ ID NO: 31800 - DNA, 25 bp, SARS Virus
cgtgaacaacgaggtcgagtgtcgc

SEQ ID NO: 31801 - DNA, 25 bp, SARS Virus
gtgaacaacgatgtcgagtgtcgct

SEQ ID NO: 31802 - DNA, 25 bp, SARS Virus
tgaacaacgatggcgagtgtcgctc

SEQ ID NO: 31803 - DNA, 25 bp, SARS Virus
gaacaacgatgtggagtgtcgctca

SEQ ID NO: 31804 - DNA, 25 bp, SARS Virus
aacaacgatgtcgagtgtcgctcaa

SEQ ID NO: 31805 - DNA, 25 bp, SARS Virus
acaacgatgtcgggtgtcgctcaat

SEQ ID NO: 31806 - DNA, 25 bp, SARS Virus
caacgatgtcgagtgtcgctcaatc

SEQ ID NO: 31807 - DNA, 25 bp, SARS Virus
aacgatgtcgagggtcgctcaatcg

SEQ ID NO: 31808 - DNA, 25 bp, SARS Virus
acgatgtcgagtgtcgctcaatcgt

SEQ ID NO: 31809 - DNA, 25 bp, SARS Virus
cgatgtcgagtggcgctcaatcgtt

SEQ ID NO: 31810 - DNA, 25 bp, SARS Virus
gatgtcgagtgtggctcaatcgttt

SEQ ID NO: 31811 - DNA, 25 bp, SARS Virus
atgtcgagtgtcgctcaatcgtttc

SEQ ID NO: 31812 - DNA, 25 bp, SARS Virus
tgtcgagtgtcggtcaatcgtttcc

SEQ ID NO: 31813 - DNA, 25 bp, SARS Virus
gtcgagtgtcgcgcaatcgtttccc

SEQ ID NO: 31814 - DNA, 25 bp, SARS Virus
tcgagtgtcgctgaatcgtttccca

SEQ ID NO: 31815 - DNA, 25 bp, SARS Virus
cgagtgtcgctcgatcgtttcccac

SEQ ID NO: 31816 - DNA, 25 bp, SARS Virus
gagtgtcgctcagtcgtttcccaca

SEQ ID NO: 31817 - DNA, 25 bp, SARS Virus
agtgtcgctcaagcgtttcccacat

SEQ ID NO: 31818 - DNA, 25 bp, SARS Virus
gtgtcgctcaatggtttcccacatc

SEQ ID NO: 31819 - DNA, 25 bp, SARS Virus
tgtcgctcaatcgtttcccacatcg

SEQ ID NO: 31820 - DNA, 25 bp, SARS Virus
gtcgctcaatcggttcccacatcga

SEQ ID NO: 31821 - DNA, 25 bp, SARS Virus
tcgctcaatcgtgtcccacatcgaa

SEQ ID NO: 31822 - DNA, 25 bp, SARS Virus
cgctcaatcgttgcccacatcgaaa

SEQ ID NO: 31823 - DNA, 25 bp, SARS Virus
gctcaatcgtttgccacatcgaaat

SEQ ID NO: 31824 - DNA, 25 bp, SARS Virus
ctcaatcgtttcgcacatcgaaatc

SEQ ID NO: 31825 - DNA, 25 bp, SARS Virus
tcaatcgtttccgacatcgaaatct

SEQ ID NO: 31826 - DNA, 25 bp, SARS Virus
caatcgtttcccgcatcgaaatcta

SEQ ID NO: 31827 - DNA, 25 bp, SARS Virus
aatcgtttcccagatcgaaatctac

SEQ ID NO: 31828 - DNA, 25 bp, SARS Virus
atcgtttcccacgtcgaaatctacc

SEQ ID NO: 31829 - DNA, 25 bp, SARS Virus
tcgtttcccacagcgaaatctacca

SEQ ID NO: 31830 - DNA, 25 bp, SARS Virus
cgtttcccacatggaaatctaccac

SEQ ID NO: 31831 - DNA, 25 bp, SARS Virus
gtttcccacatcgaaatctaccaca

SEQ ID NO: 31832 - DNA, 25 bp, SARS Virus
tttcccacatcggaatctaccacag

SEQ ID NO: 31833 - DNA, 25 bp, SARS Virus
ttcccacatcgagatctaccacagg

SEQ ID NO: 31834 - DNA, 25 bp, SARS Virus
tcccacatcgaagtctaccacagga

SEQ ID NO: 31835 - DNA, 25 bp, SARS Virus
cccacatcgaaagctaccacaggaa

SEQ ID NO: 31836 - DNA, 25 bp, SARS Virus
ccacatcgaaatgtaccacaggaaa

SEQ ID NO: 31837 - DNA, 25 bp, SARS Virus
cacatcgaaatcgaccacaggaaag

SEQ ID NO: 31838 - DNA, 25 bp, SARS Virus
acatcgaaatctgccacaggaaaga

SEQ ID NO: 31839 - DNA, 25 bp, SARS Virus
catcgaaatctagcacaggaaagat

SEQ ID NO: 31840 - DNA, 25 bp, SARS Virus
atcgaaatctacgacaggaaagatg

SEQ ID NO: 31841 - DNA, 25 bp, SARS Virus
tcgaaatctaccgcaggaaagatgt

SEQ ID NO: 31842 - DNA, 25 bp, SARS Virus
cgaaatctaccagaggaaagatgta

SEQ ID NO: 31843 - DNA, 25 bp, SARS Virus
gaaatctaccacgggaaagatgtaa

SEQ ID NO: 31844 - DNA, 25 bp, SARS Virus
aaatctaccacaggaaagatgtaag

SEQ ID NO: 31845 - DNA, 25 bp, SARS Virus
aatctaccacaggaaagatgtaagc

SEQ ID NO: 31846 - DNA, 25 bp, SARS Virus
atctaccacagggaagatgtaagca

SEQ ID NO: 31847 - DNA, 25 bp, SARS Virus
tctaccacaggagagatgtaagcac

SEQ ID NO: 31848 - DNA, 25 bp, SARS Virus
ctaccacaggaaggatgtaagcaca

SEQ ID NO: 31849 - DNA, 25 bp, SARS Virus
gtaatcactacttcaacgagcacta

SEQ ID NO: 31850 - DNA, 25 bp, SARS Virus
taatcactactttaacgagcactaa

SEQ ID NO: 31851 - DNA, 25 bp, SARS Virus
aatcactacttctacgagcactaaa

SEQ ID NO: 31852 - DNA, 25 bp, SARS Virus
atcactacttcatcgagcactaaac

SEQ ID NO: 31853 - DNA, 25 bp, SARS Virus
tcactacttcaatgagcactaaaca

SEQ ID NO: 31854 - DNA, 25 bp, SARS Virus
cactacttcaactagcactaaacag

SEQ ID NO: 31855 - DNA, 25 bp, SARS Virus
actacttcaacgtgcactaaacagt

SEQ ID NO: 31856 - DNA, 25 bp, SARS Virus
ctacttcaacgatcactaaacagtg

SEQ ID NO: 31857 - DNA, 25 bp, SARS Virus
tacttcaacgagtactaaacagtga

SEQ ID NO: 31858 - DNA, 25 bp, SARS Virus
acttcaacgagctctaaacagtgag

SEQ ID NO: 31859 - DNA, 25 bp, SARS Virus
cttcaacgagcattaaacagtgagg

SEQ ID NO: 31860 - DNA, 25 bp, SARS Virus
ttcaacgagcactaaacagtgaggt

SEQ ID NO: 31861 - DNA, 25 bp, SARS Virus
tcaacgagcacttaacagtgaggtc

SEQ ID NO: 31862 - DNA, 25 bp, SARS Virus
caacgagcactatacagtgaggtca

SEQ ID NO: 31863 - DNA, 25 bp, SARS Virus
aacgagcactaatcagtgaggtcaa

SEQ ID NO: 31864 - DNA, 25 bp, SARS Virus
acgagcactaaatagtgaggtcaaa

SEQ ID NO: 31865 - DNA, 25 bp, SARS Virus
cgagcactaaactgtgaggtcaaat

SEQ ID NO: 31866 - DNA, 25 bp, SARS Virus
gagcactaaacattgaggtcaaatt

SEQ ID NO: 31867 - DNA, 25 bp, SARS Virus
agcactaaacagtgaggtcaaattt

SEQ ID NO: 31868 - DNA, 25 bp, SARS Virus
gcactaaacagttaggtcaaatttt

SEQ ID NO: 31869 - DNA, 25 bp, SARS Virus
cactaaacagtgtggtcaaattttc

SEQ ID NO: 31870 - DNA, 25 bp, SARS Virus
actaaacagtgatgtcaaattttct

SEQ ID NO: 31871 - DNA, 25 bp, SARS Virus
ctaaacagtgagttcaaattttctg

SEQ ID NO: 31872 - DNA, 25 bp, SARS Virus
taaacagtgaggtcaaattttctgg

SEQ ID NO: 31873 - DNA, 25 bp, SARS Virus
aaacagtgaggttaaattttctggt

SEQ ID NO: 31874 - DNA, 25 bp, SARS Virus
aacagtgaggtctaattttctggtt

SEQ ID NO: 31875 - DNA, 25 bp, SARS Virus
acagtgaggtcatattttctggtta

SEQ ID NO: 31876 - DNA, 25 bp, SARS Virus
cagtgaggtcaatttttctggttag

SEQ ID NO: 31877 - DNA, 25 bp, SARS Virus
agtgaggtcaaattttctggttagt

SEQ ID NO: 31878 - DNA, 25 bp, SARS Virus
gtgaggtcaaattttctggttagtt

SEQ ID NO: 31879 - DNA, 25 bp, SARS Virus
tgaggtcaaattttctggttagttg

SEQ ID NO: 31880 - DNA, 25 bp, SARS Virus
gaggtcaaattttctggttagttgg

SEQ ID NO: 31881 - DNA, 25 bp, SARS Virus
aggtcaaattttttggttagttggg

SEQ ID NO: 31882 - DNA, 25 bp, SARS Virus
ggtcaaattttctggttagttggga

SEQ ID NO: 31883 - DNA, 25 bp, SARS Virus
gtcaaattttcttgttagttgggat

SEQ ID NO: 31884 - DNA, 25 bp, SARS Virus
tcaaattttctgtttagttgggatg

SEQ ID NO: 31885 - DNA, 25 bp, SARS Virus
caaattttctggttagttgggatga

SEQ ID NO: 31886 - DNA, 25 bp, SARS Virus
aaattttctggttagttgggatgac

SEQ ID NO: 31887 - DNA, 25 bp, SARS Virus
aattttctggtttgttgggatgact

SEQ ID NO: 31888 - DNA, 25 bp, SARS Virus
attttctggttatttgggatgactg

SEQ ID NO: 31889 - DNA, 25 bp, SARS Virus
ttttctggttagttgggatgactgg

SEQ ID NO: 31890 - DNA, 25 bp, SARS Virus
tttctggttagttgggatgactggt

SEQ ID NO: 31891 - DNA, 25 bp, SARS Virus
ttctggttagtttggatgactggtc

SEQ ID NO: 31892 - DNA, 25 bp, SARS Virus
tctggttagttgtgatgactggtca

SEQ ID NO: 31893 - DNA, 25 bp, SARS Virus
ctggttagttggtatgactggtcag

SEQ ID NO: 31894 - DNA, 25 bp, SARS Virus
tggttagttgggttgactggtcagt

SEQ ID NO: 31895 - DNA, 25 bp, SARS Virus
ggttagttgggatgactggtcagta

SEQ ID NO: 31896 - DNA, 25 bp, SARS Virus
gttagttgggattactggtcagtag

SEQ ID NO: 31897 - DNA, 25 bp, SARS Virus
ttagttgggatgtctggtcagtagc

SEQ ID NO: 31898 - DNA, 25 bp, SARS Virus
tagttgggatgattggtcagtagca

SEQ ID NO: 31899 - DNA, 25 bp, SARS Virus
agttgggatgactggtcagtagcat

SEQ ID NO: 31900 - DNA, 25 bp, SARS Virus
gttgggatgacttgtcagtagcata

SEQ ID NO: 31901 - DNA, 25 bp, SARS Virus
ttgggatgactgttcagtagcatat

SEQ ID NO: 31902 - DNA, 25 bp, SARS Virus
tgggatgactggtcagtagcatata

SEQ ID NO: 31903 - DNA, 25 bp, SARS Virus
gggatgactggttagtagcatataa

SEQ ID NO: 31904 - DNA, 25 bp, SARS Virus
ggatgactggtctgtagcatataac

SEQ ID NO: 31905 - DNA, 25 bp, SARS Virus
gatgactggtcattagcatataaca

SEQ ID NO: 31906 - DNA, 25 bp, SARS Virus
atgactggtcagtagcatataacaa

SEQ ID NO: 31907 - DNA, 25 bp, SARS Virus
tgactggtcagttgcatataacaac

SEQ ID NO: 31908 - DNA, 25 bp, SARS Virus
gactggtcagtatcatataacaact

SEQ ID NO: 31909 - DNA, 25 bp, SARS Virus
actggtcagtagtatataacaacta

SEQ ID NO: 31910 - DNA, 25 bp, SARS Virus
ctggtcagtagcttataacaactat

SEQ ID NO: 31911 - DNA, 25 bp, SARS Virus
tggtcagtagcatataacaactatc

SEQ ID NO: 31912 - DNA, 25 bp, SARS Virus
ggtcagtagcatttaacaactatca

SEQ ID NO: 31913 - DNA, 25 bp, SARS Virus
gtcagtagcatataacaactatcac

SEQ ID NO: 31914 - DNA, 25 bp, SARS Virus
tcagtagcatattacaactatcaca

SEQ ID NO: 31915 - DNA, 25 bp, SARS Virus
cagtagcatatatcaactatcacaa

SEQ ID NO: 31916 - DNA, 25 bp, SARS Virus
agtagcatataataactatcacaac

SEQ ID NO: 31917 - DNA, 25 bp, SARS Virus
gtagcatataactactatcacaacg

SEQ ID NO: 31918 - DNA, 25 bp, SARS Virus
tagcatataacatctatcacaacga

SEQ ID NO: 31919 - DNA, 25 bp, SARS Virus
agcatataacaattatcacaacgac

SEQ ID NO: 31920 - DNA, 25 bp, SARS Virus
gcatataacaactatcacaacgaca

SEQ ID NO: 31921 - DNA, 25 bp, SARS Virus
catataacaactttcacaacgacac

SEQ ID NO: 31922 - DNA, 25 bp, SARS Virus
atataacaactatcacaacgacact

SEQ ID NO: 31923 - DNA, 25 bp, SARS Virus
tataacaactattacaacgacactt

SEQ ID NO: 31924 - DNA, 25 bp, SARS Virus
ataacaactatctcaacgacacttt

SEQ ID NO: 31925 - DNA, 25 bp, SARS Virus
taacaactatcataacgacactttt

SEQ ID NO: 31926 - DNA, 25 bp, SARS Virus
aacaactatcactacgacacttttt

SEQ ID NO: 31927 - DNA, 25 bp, SARS Virus
acaactatcacatcgacacttttta

SEQ ID NO: 31928 - DNA, 25 bp, SARS Virus
caactatcacaatgacactttttac

SEQ ID NO: 31929 - DNA, 25 bp, SARS Virus
aactatcacaactacactttttacc

SEQ ID NO: 31930 - DNA, 25 bp, SARS Virus
actatcacaacgtcactttttaccg

SEQ ID NO: 31931 - DNA, 25 bp, SARS Virus
ctatcacaacgatactttttaccgc

SEQ ID NO: 31932 - DNA, 25 bp, SARS Virus
tatcacaacgactctttttaccgcg

SEQ ID NO: 31933 - DNA, 25 bp, SARS Virus
atcacaacgacattttttaccgcgc

SEQ ID NO: 31934 - DNA, 25 bp, SARS Virus
tcacaacgacactttttaccgcgcg

SEQ ID NO: 31935 - DNA, 25 bp, SARS Virus
cacaacgacactttttaccgcgcga

SEQ ID NO: 31936 - DNA, 25 bp, SARS Virus
acaacgacactttttaccgcgcgaa

SEQ ID NO: 31937 - DNA, 25 bp, SARS Virus
caacgacactttttaccgcgcgaag

SEQ ID NO: 31938 - DNA, 25 bp, SARS Virus
aacgacactttttaccgcgcgaagt

SEQ ID NO: 31939 - DNA, 25 bp, SARS Virus
acgacacttttttccgcgcgaagtg

SEQ ID NO: 31940 - DNA, 25 bp, SARS Virus
cgacactttttatcgcgcgaagtgg

SEQ ID NO: 31941 - DNA, 25 bp, SARS Virus
gacactttttactgcgcgaagtgga

SEQ ID NO: 31942 - DNA, 25 bp, SARS Virus
acactttttacctcgcgaagtggag

SEQ ID NO: 31943 - DNA, 25 bp, SARS Virus
cactttttaccgtgcgaagtggaga

SEQ ID NO: 31944 - DNA, 25 bp, SARS Virus
actttttaccgctcgaagtggagat

SEQ ID NO: 31945 - DNA, 25 bp, SARS Virus
ctttttaccgcgtgaagtggagatg

SEQ ID NO: 31946 - DNA, 25 bp, SARS Virus
tttttaccgcgctaagtggagatga

SEQ ID NO: 31947 - DNA, 25 bp, SARS Virus
ttttaccgcgcgtagtggagatgaa

SEQ ID NO: 31948 - DNA, 25 bp, SARS Virus
tttaccgcgcgatgtggagatgaaa

SEQ ID NO: 31949 - DNA, 25 bp, SARS Virus
ttaccgcgcgaattggagatgaaac

SEQ ID NO: 31950 - DNA, 25 bp, SARS Virus
taccgcgcgaagtggagatgaaact

SEQ ID NO: 31951 - DNA, 25 bp, SARS Virus
accgcgcgaagttgagatgaaactg

SEQ ID NO: 31952 - DNA, 25 bp, SARS Virus
ccgcgcgaagtgtagatgaaactgt

SEQ ID NO: 31953 - DNA, 25 bp, SARS Virus
cgcgcgaagtggtgatgaaactgtt

SEQ ID NO: 31954 - DNA, 25 bp, SARS Virus
gcgcgaagtggatatgaaactgttc

SEQ ID NO: 31955 - DNA, 25 bp, SARS Virus
cgcgaagtggagttgaaactgttcc

SEQ ID NO: 31956 - DNA, 25 bp, SARS Virus
gcgaagtggagatgaaactgttccg

SEQ ID NO: 31957 - DNA, 25 bp, SARS Virus
cgaagtggagattaaactgttccga

SEQ ID NO: 31958 - DNA, 25 bp, SARS Virus
gaagtggagatgtaactgttccgac

SEQ ID NO: 31959 - DNA, 25 bp, SARS Virus
aagtggagatgatactgttccgacc

SEQ ID NO: 31960 - DNA, 25 bp, SARS Virus
agtggagatgaatctgttccgacca

SEQ ID NO: 31961 - DNA, 25 bp, SARS Virus
gtggagatgaaattgttccgaccag

SEQ ID NO: 31962 - DNA, 25 bp, SARS Virus
tggagatgaaactgttccgaccagt

SEQ ID NO: 31963 - DNA, 25 bp, SARS Virus
ggagatgaaacttttccgaccagtt

SEQ ID NO: 31964 - DNA, 25 bp, SARS Virus
gagatgaaactgttccgaccagttt

SEQ ID NO: 31965 - DNA, 25 bp, SARS Virus
agatgaaactgttccgaccagtttt

SEQ ID NO: 31966 - DNA, 25 bp, SARS Virus
gatgaaactgtttcgaccagttttc

SEQ ID NO: 31967 - DNA, 25 bp, SARS Virus
atgaaactgttctgaccagttttct

SEQ ID NO: 31968 - DNA, 25 bp, SARS Virus
tgaaactgttcctaccagttttctg

SEQ ID NO: 31969 - DNA, 25 bp, SARS Virus
gaaactgttccgtccagttttctgg

SEQ ID NO: 31970 - DNA, 25 bp, SARS Virus
aaactgttccgatcagttttctgga

SEQ ID NO: 31971 - DNA, 25 bp, SARS Virus
aactgttccgactagttttctggat

SEQ ID NO: 31972 - DNA, 25 bp, SARS Virus
actgttccgacctgttttctggata

SEQ ID NO: 31973 - DNA, 25 bp, SARS Virus
ctgttccgaccatttttctggatac

SEQ ID NO: 31974 - DNA, 25 bp, SARS Virus
tgttccgaccagttttctggatact

SEQ ID NO: 31975 - DNA, 25 bp, SARS Virus
gttccgaccagttttctggatactc

SEQ ID NO: 31976 - DNA, 25 bp, SARS Virus
ttccgaccagttttctggatactct

SEQ ID NO: 31977 - DNA, 25 bp, SARS Virus
tccgaccagttttctggatactctc

SEQ ID NO: 31978 - DNA, 25 bp, SARS Virus
ccgaccagttttttggatactctct

SEQ ID NO: 31979 - DNA, 25 bp, SARS Virus
cgaccagttttctggatactctctg

SEQ ID NO: 31980 - DNA, 25 bp, SARS Virus
gaccagttttcttgatactctctgt

SEQ ID NO: 31981 - DNA, 25 bp, SARS Virus
accagttttctgtatactctctgta

SEQ ID NO: 31982 - DNA, 25 bp, SARS Virus
ccagttttctggttactctctgtag

SEQ ID NO: 31983 - DNA, 25 bp, SARS Virus
cagttttctggatactctctgtagg

SEQ ID NO: 31984 - DNA, 25 bp, SARS Virus
agttttctggattctctctgtaggc

SEQ ID NO: 31985 - DNA, 25 bp, SARS Virus
gttttctggatattctctgtaggcg

SEQ ID NO: 31986 - DNA, 25 bp, SARS Virus
ttttctggatactctctgtaggcga

SEQ ID NO: 31987 - DNA, 25 bp, SARS Virus
tttctggatactttctgtaggcgag

SEQ ID NO: 31988 - DNA, 25 bp, SARS Virus
ttctggatactctctgtaggcgaga

SEQ ID NO: 31989 - DNA, 25 bp, SARS Virus
tctggatactctttgtaggcgagag

SEQ ID NO: 31990 - DNA, 25 bp, SARS Virus
ctggatactctctgtaggcgagagg

SEQ ID NO: 31991 - DNA, 25 bp, SARS Virus
tggatactctctttaggcgagaggg

SEQ ID NO: 31992 - DNA, 25 bp, SARS Virus
ggatactctctgtaggcgagagggt

SEQ ID NO: 31993 - DNA, 25 bp, SARS Virus
gatactctctgttggcgagagggta

SEQ ID NO: 31994 - DNA, 25 bp, SARS Virus
atactctctgtatgcgagagggtaa

SEQ ID NO: 31995 - DNA, 25 bp, SARS Virus
tactctctgtagtcgagagggtaaa

SEQ ID NO: 31996 - DNA, 25 bp, SARS Virus
actctctgtaggtgagagggtaaaa

SEQ ID NO: 31997 - DNA, 25 bp, SARS Virus
ctctctgtaggctagagggtaaaac

SEQ ID NO: 31998 - DNA, 25 bp, SARS Virus
tctctgtaggcgtgagggtaaaaca

SEQ ID NO: 31999 - DNA, 25 bp, SARS Virus
ctctgtaggcgatagggtaaaacag

SEQ ID NO: 32000 - DNA, 25 bp, SARS Virus
tctgtaggcgagtgggtaaaacagt

SEQ ID NO: 32001 - DNA, 25 bp, SARS Virus
ctgtaggcgagatggtaaaacagtt

SEQ ID NO: 32002 - DNA, 25 bp, SARS Virus
tgtaggcgagagtgtaaaacagtta

SEQ ID NO: 32003 - DNA, 25 bp, SARS Virus
gtaggcgagaggttaaaacagttaa

SEQ ID NO: 32004 - DNA, 25 bp, SARS Virus
taggcgagagggtaaaacagttaaa

SEQ ID NO: 32005 - DNA, 25 bp, SARS Virus
aggcgagagggttaaacagttaaat

SEQ ID NO: 32006 - DNA, 25 bp, SARS Virus
ggcgagagggtataacagttaaatc

SEQ ID NO: 32007 - DNA, 25 bp, SARS Virus
gcgagagggtaatacagttaaatct

SEQ ID NO: 32008 - DNA, 25 bp, SARS Virus
cgagagggtaaatcagttaaatctg

SEQ ID NO: 32009 - DNA, 25 bp, SARS Virus
gagagggtaaaatagttaaatctgt

SEQ ID NO: 32010 - DNA, 25 bp, SARS Virus
agagggtaaaactgttaaatctgtt

SEQ ID NO: 32011 - DNA, 25 bp, SARS Virus
gagggtaaaacatttaaatctgtta

SEQ ID NO: 32012 - DNA, 25 bp, SARS Virus
agggtaaaacagttaaatctgttaa

SEQ ID NO: 32013 - DNA, 25 bp, SARS Virus
gggtaaaacagttaaatctgttaaa

SEQ ID NO: 32014 - DNA, 25 bp, SARS Virus
ggtaaaacagtttaatctgttaaac

SEQ ID NO: 32015 - DNA, 25 bp, SARS Virus
gtaaaacagttatatctgttaaact

SEQ ID NO: 32016 - DNA, 25 bp, SARS Virus
taaaacagttaattctgttaaactc

SEQ ID NO: 32017 - DNA, 25 bp, SARS Virus
aaaacagttaaatctgttaaactct

SEQ ID NO: 32018 - DNA, 25 bp, SARS Virus
aaacagttaaatttgttaaactctc

SEQ ID NO: 32019 - DNA, 25 bp, SARS Virus
aacagttaaatctgttaaactctcg

SEQ ID NO: 32020 - DNA, 25 bp, SARS Virus
acagttaaatcttttaaactctcga

SEQ ID NO: 32021 - DNA, 25 bp, SARS Virus
cagttaaatctgttaaactctcgat

SEQ ID NO: 32022 - DNA, 25 bp, SARS Virus
agttaaatctgttaaactctcgatt

SEQ ID NO: 32023 - DNA, 25 bp, SARS Virus
gttaaatctgtttaactctcgattg

SEQ ID NO: 32024 - DNA, 25 bp, SARS Virus
ttaaatctgttatactctcgattgt

SEQ ID NO: 32025 - DNA, 25 bp, SARS Virus
taaatctgttaatctctcgattgtt

SEQ ID NO: 32026 - DNA, 25 bp, SARS Virus
aaatctgttaaattctcgattgttg

SEQ ID NO: 32027 - DNA, 25 bp, SARS Virus
aatctgttaaactctcgattgttgt

SEQ ID NO: 32028 - DNA, 25 bp, SARS Virus
atctgttaaactttcgattgttgtg

SEQ ID NO: 32029 - DNA, 25 bp, SARS Virus
tctgttaaactctcgattgttgtga

SEQ ID NO: 32030 - DNA, 25 bp, SARS Virus
ctgttaaactcttgattgttgtgat

SEQ ID NO: 32031 - DNA, 25 bp, SARS Virus
tgttaaactctctattgttgtgatt

SEQ ID NO: 32032 - DNA, 25 bp, SARS Virus
gttaaactctcgtttgttgtgattt

SEQ ID NO: 32033 - DNA, 25 bp, SARS Virus
ttaaactctcgattgttgtgatttc

SEQ ID NO: 32034 - DNA, 25 bp, SARS Virus
taaactctcgattgttgtgatttcc

SEQ ID NO: 32035 - DNA, 25 bp, SARS Virus
aaactctcgatttttgtgatttcca

SEQ ID NO: 32036 - DNA, 25 bp, SARS Virus
aactctcgattgttgtgatttccaa

SEQ ID NO: 32037 - DNA, 25 bp, SARS Virus
actctcgattgttgtgatttccaag

SEQ ID NO: 32038 - DNA, 25 bp, SARS Virus
ctctcgattgttttgatttccaagt

SEQ ID NO: 32039 - DNA, 25 bp, SARS Virus
tctcgattgttgtgatttccaagtg

SEQ ID NO: 32040 - DNA, 25 bp, SARS Virus
ctcgattgttgttatttccaagtga

SEQ ID NO: 32041 - DNA, 25 bp, SARS Virus
tcgattgttgtgttttccaagtgac

SEQ ID NO: 32042 - DNA, 25 bp, SARS Virus
cgattgttgtgatttccaagtgacg

SEQ ID NO: 32043 - DNA, 25 bp, SARS Virus
gattgttgtgatttccaagtgacgg

SEQ ID NO: 32044 - DNA, 25 bp, SARS Virus
attgttgtgatttccaagtgacgga

SEQ ID NO: 32045 - DNA, 25 bp, SARS Virus
ttgttgtgattttcaagtgacggat

SEQ ID NO: 32046 - DNA, 25 bp, SARS Virus
tgttgtgatttctaagtgacggata

SEQ ID NO: 32047 - DNA, 25 bp, SARS Virus
gttgtgatttcctagtgacggataa

SEQ ID NO: 32048 - DNA, 25 bp, SARS Virus
ttgtgatttccatgtgacggataat

SEQ ID NO: 32049 - DNA, 25 bp, SARS Virus
tgtgatttccaattgacggataatt

SEQ ID NO: 32050 - DNA, 25 bp, SARS Virus
gtgatttccaagtgacggataatta

SEQ ID NO: 32051 - DNA, 25 bp, SARS Virus
tgatttccaagttacggataattac

SEQ ID NO: 32052 - DNA, 25 bp, SARS Virus
gatttccaagtgtcggataattaca

SEQ ID NO: 32053 - DNA, 25 bp, SARS Virus
atttccaagtgatggataattacag

SEQ ID NO: 32054 - DNA, 25 bp, SARS Virus
tttccaagtgactgataattacagt

SEQ ID NO: 32055 - DNA, 25 bp, SARS Virus
ttccaagtgacgtataattacagta

SEQ ID NO: 32056 - DNA, 25 bp, SARS Virus
tccaagtgacggttaattacagtat

SEQ ID NO: 32057 - DNA, 25 bp, SARS Virus
ccaagtgacggataattacagtatc

SEQ ID NO: 32058 - DNA, 25 bp, SARS Virus
caagtgacggattattacagtatca

SEQ ID NO: 32059 - DNA, 25 bp, SARS Virus
aagtgacggatatttacagtatcaa

SEQ ID NO: 32060 - DNA, 25 bp, SARS Virus
agtgacggataattacagtatcaaa

SEQ ID NO: 32061 - DNA, 25 bp, SARS Virus
gtgacggataattacagtatcaaaa

SEQ ID NO: 32062 - DNA, 25 bp, SARS Virus
tgacggataatttcagtatcaaaaa

SEQ ID NO: 32063 - DNA, 25 bp, SARS Virus
gacggataattatagtatcaaaaac

SEQ ID NO: 32064 - DNA, 25 bp, SARS Virus
acggataattactgtatcaaaaact

SEQ ID NO: 32065 - DNA, 25 bp, SARS Virus
cggataattacattatcaaaaacta

SEQ ID NO: 32066 - DNA, 25 bp, SARS Virus
ggataattacagtatcaaaaactac

SEQ ID NO: 32067 - DNA, 25 bp, SARS Virus
gataattacagtttcaaaaactacc

SEQ ID NO: 32068 - DNA, 25 bp, SARS Virus
ataattacagtatcaaaaactaccg

SEQ ID NO: 32069 - DNA, 25 bp, SARS Virus
taattacagtattaaaaactaccgt

SEQ ID NO: 32070 - DNA, 25 bp, SARS Virus
aattacagtatctaaaactaccgtt

SEQ ID NO: 32071 - DNA, 25 bp, SARS Virus
attacagtatcataaactaccgttc

SEQ ID NO: 32072 - DNA, 25 bp, SARS Virus
ttacagtatcaataactaccgttca

SEQ ID NO: 32073 - DNA, 25 bp, SARS Virus
tacagtatcaaatactaccgttcag

SEQ ID NO: 32074 - DNA, 25 bp, SARS Virus
acagtatcaaaatctaccgttcagg

SEQ ID NO: 32075 - DNA, 25 bp, SARS Virus
cagtatcaaaaattaccgttcaggt

SEQ ID NO: 32076 - DNA, 25 bp, SARS Virus
agtatcaaaaactaccgttcaggtt

SEQ ID NO: 32077 - DNA, 25 bp, SARS Virus
gtatcaaaaacttccgttcaggttt

SEQ ID NO: 32078 - DNA, 25 bp, SARS Virus
tatcaaaaactatcgttcaggttta

SEQ ID NO: 32079 - DNA, 25 bp, SARS Virus
atcaaaaactactgttcaggtttac

SEQ ID NO: 32080 - DNA, 25 bp, SARS Virus
tcaaaaactacctttcaggtttacg

SEQ ID NO: 32081 - DNA, 25 bp, SARS Virus
caaaaactaccgttcaggtttacgc

SEQ ID NO: 32082 - DNA, 25 bp, SARS Virus
aaaaactaccgttcaggtttacgct

SEQ ID NO: 32083 - DNA, 25 bp, SARS Virus
aaaactaccgtttaggtttacgctg

SEQ ID NO: 32084 - DNA, 25 bp, SARS Virus
aaactaccgttctggtttacgctgc

SEQ ID NO: 32085 - DNA, 25 bp, SARS Virus
aactaccgttcatgtttacgctgct

SEQ ID NO: 32086 - DNA, 25 bp, SARS Virus
actaccgttcagttttacgctgctc

SEQ ID NO: 32087 - DNA, 25 bp, SARS Virus
ctaccgttcaggtttacgctgctca

SEQ ID NO: 32088 - DNA, 25 bp, SARS Virus
taccgttcaggtttacgctgctcag

SEQ ID NO: 32089 - DNA, 25 bp, SARS Virus
accgttcaggtttacgctgctcaga

SEQ ID NO: 32090 - DNA, 25 bp, SARS Virus
ccgttcaggttttcgctgctcagac

SEQ ID NO: 32091 - DNA, 25 bp, SARS Virus
cgttcaggtttatgctgctcagacg

SEQ ID NO: 32092 - DNA, 25 bp, SARS Virus
gttcaggtttactctgctcagacga

SEQ ID NO: 32093 - DNA, 25 bp, SARS Virus
ttcaggtttacgttgctcagacgaa

SEQ ID NO: 32094 - DNA, 25 bp, SARS Virus
tcaggtttacgctgctcagacgaag

SEQ ID NO: 32095 - DNA, 25 bp, SARS Virus
caggtttacgcttctcagacgaaga

SEQ ID NO: 32096 - DNA, 25 bp, SARS Virus
aggtttacgctgttcagacgaagat

SEQ ID NO: 32097 - DNA, 25 bp, SARS Virus
ggtttacgctgctcagacgaagatt

SEQ ID NO: 32098 - DNA, 25 bp, SARS Virus
gtttacgctgcttagacgaagattc

SEQ ID NO: 32099 - DNA, 25 bp, SARS Virus
tttacgctgctctgacgaagattca

SEQ ID NO: 32100 - DNA, 25 bp, SARS Virus
ttacgctgctcatacgaagattcag

SEQ ID NO: 32101 - DNA, 25 bp, SARS Virus
tacgctgctcagtcgaagattcaga

SEQ ID NO: 32102 - DNA, 25 bp, SARS Virus
acgctgctcagatgaagattcagac

SEQ ID NO: 32103 - DNA, 25 bp, SARS Virus
cgctgctcagactaagattcagacg

SEQ ID NO: 32104 - DNA, 25 bp, SARS Virus
gctgctcagacgtagattcagacga

SEQ ID NO: 32105 - DNA, 25 bp, SARS Virus
ctgctcagacgatgattcagacgaa

SEQ ID NO: 32106 - DNA, 25 bp, SARS Virus
tgctcagacgaatattcagacgaag

SEQ ID NO: 32107 - DNA, 25 bp, SARS Virus
gctcagacgaagtttcagacgaaga

SEQ ID NO: 32108 - DNA, 25 bp, SARS Virus
ctcagacgaagattcagacgaagac

SEQ ID NO: 32109 - DNA, 25 bp, SARS Virus
tcagacgaagattcagacgaagaca

SEQ ID NO: 32110 - DNA, 25 bp, SARS Virus
cagacgaagatttagacgaagacac

SEQ ID NO: 32111 - DNA, 25 bp, SARS Virus
agacgaagattctgacgaagacaca

SEQ ID NO: 32112 - DNA, 25 bp, SARS Virus
gacgaagattcatacgaagacacat

SEQ ID NO: 32113 - DNA, 25 bp, SARS Virus
acgaagattcagtcgaagacacatg

SEQ ID NO: 32114 - DNA, 25 bp, SARS Virus
cgaagattcagatgaagacacatga

SEQ ID NO: 32115 - DNA, 25 bp, SARS Virus
gaagattcagactaagacacatgat

SEQ ID NO: 32116 - DNA, 25 bp, SARS Virus
aagattcagacgtagacacatgatg

SEQ ID NO: 32117 - DNA, 25 bp, SARS Virus
agattcagacgatgacacatgatgt

SEQ ID NO: 32118 - DNA, 25 bp, SARS Virus
gattcagacgaatacacatgatgtc

SEQ ID NO: 32119 - DNA, 25 bp, SARS Virus
attcagacgaagtcacatgatgtca

SEQ ID NO: 32120 - DNA, 25 bp, SARS Virus
ttcagacgaagatacatgatgtcag

SEQ ID NO: 32121 - DNA, 25 bp, SARS Virus
tcagacgaagactcatgatgtcagt

SEQ ID NO: 32122 - DNA, 25 bp, SARS Virus
cagacgaagacatatgatgtcagtc

SEQ ID NO: 32123 - DNA, 25 bp, SARS Virus
agacgaagacacttgatgtcagtcg

SEQ ID NO: 32124 - DNA, 25 bp, SARS Virus
gacgaagacacatgatgtcagtcga

SEQ ID NO: 32125 - DNA, 25 bp, SARS Virus
acgaagacacattatgtcagtcgac

SEQ ID NO: 32126 - DNA, 25 bp, SARS Virus
cgaagacacatgttgtcagtcgact

SEQ ID NO: 32127 - DNA, 25 bp, SARS Virus
gaagacacatgatgtcagtcgacta

SEQ ID NO: 32128 - DNA, 25 bp, SARS Virus
aagacacatgatttcagtcgactac

SEQ ID NO: 32129 - DNA, 25 bp, SARS Virus
agacacatgatgtcagtcgactaca

SEQ ID NO: 32130 - DNA, 25 bp, SARS Virus
gacacatgatgttagtcgactacac

SEQ ID NO: 32131 - DNA, 25 bp, SARS Virus
acacatgatgtctgtcgactacacg

SEQ ID NO: 32132 - DNA, 25 bp, SARS Virus
cacatgatgtcattcgactacacgg

SEQ ID NO: 32133 - DNA, 25 bp, SARS Virus
acatgatgtcagtcgactacacggt

SEQ ID NO: 32134 - DNA, 25 bp, SARS Virus
catgatgtcagttgactacacggtt

SEQ ID NO: 32135 - DNA, 25 bp, SARS Virus
atgatgtcagtctactacacggttg

SEQ ID NO: 32136 - DNA, 25 bp, SARS Virus
tgatgtcagtcgtctacacggttgg

SEQ ID NO: 32137 - DNA, 25 bp, SARS Virus
gatgtcagtcgattacacggttgga

SEQ ID NO: 32138 - DNA, 25 bp, SARS Virus
atgtcagtcgactacacggttggat

SEQ ID NO: 32139 - DNA, 25 bp, SARS Virus
tgtcagtcgacttcacggttggata

SEQ ID NO: 32140 - DNA, 25 bp, SARS Virus
gtcagtcgactatacggttggataa

SEQ ID NO: 32141 - DNA, 25 bp, SARS Virus
tcagtcgactactcggttggataag

SEQ ID NO: 32142 - DNA, 25 bp, SARS Virus
cagtcgactacatggttggataaga

SEQ ID NO: 32143 - DNA, 25 bp, SARS Virus
agtcgactacactgttggataagac

SEQ ID NO: 32144 - DNA, 25 bp, SARS Virus
gtcgactacacgtttggataagaca

SEQ ID NO: 32145 - DNA, 25 bp, SARS Virus
tcgactacacggttggataagacaa

SEQ ID NO: 32146 - DNA, 25 bp, SARS Virus
cgactacacggttggataagacaac

SEQ ID NO: 32147 - DNA, 25 bp, SARS Virus
gactacacggtttgataagacaacg

SEQ ID NO: 32148 - DNA, 25 bp, SARS Virus
actacacggttgtataagacaacga

SEQ ID NO: 32149 - DNA, 25 bp, SARS Virus
ctacacggttggttaagacaacgaa

SEQ ID NO: 32150 - DNA, 25 bp, SARS Virus
tacacggttggataagacaacgaac

SEQ ID NO: 32151 - DNA, 25 bp, SARS Virus
acacggttggattagacaacgaact

SEQ ID NO: 32152 - DNA, 25 bp, SARS Virus
cacggttggatatgacaacgaactg

SEQ ID NO: 32153 - DNA, 25 bp, SARS Virus
acggttggataatacaacgaactgg

SEQ ID NO: 32154 - DNA, 25 bp, SARS Virus
cggttggataagtcaacgaactggt

SEQ ID NO: 32155 - DNA, 25 bp, SARS Virus
ggttggataagataacgaactggtt

SEQ ID NO: 32156 - DNA, 25 bp, SARS Virus
gttggataagactacgaactggttc

SEQ ID NO: 32157 - DNA, 25 bp, SARS Virus
ttggataagacatcgaactggttcg

SEQ ID NO: 32158 - DNA, 25 bp, SARS Virus
tggataagacaatgaactggttcga

SEQ ID NO: 32159 - DNA, 25 bp, SARS Virus
ggataagacaactaactggttcgag

SEQ ID NO: 32160 - DNA, 25 bp, SARS Virus
gataagacaacgtactggttcgaga

SEQ ID NO: 32161 - DNA, 25 bp, SARS Virus
ataagacaacgatctggttcgagaa

SEQ ID NO: 32162 - DNA, 25 bp, SARS Virus
taagacaacgaattggttcgagaac

SEQ ID NO: 32163 - DNA, 25 bp, SARS Virus
aagacaacgaactggttcgagaaca

SEQ ID NO: 32164 - DNA, 25 bp, SARS Virus
agacaacgaacttgttcgagaacat

SEQ ID NO: 32165 - DNA, 25 bp, SARS Virus
gacaacgaactgtttcgagaacata

SEQ ID NO: 32166 - DNA, 25 bp, SARS Virus
acaacgaactggttcgagaacatag

SEQ ID NO: 32167 - DNA, 25 bp, SARS Virus
caacgaactggttcgagaacatagt

SEQ ID NO: 32168 - DNA, 25 bp, SARS Virus
aacgaactggtttgagaacatagtc

SEQ ID NO: 32169 - DNA, 25 bp, SARS Virus
acgaactggttctagaacatagtct

SEQ ID NO: 32170 - DNA, 25 bp, SARS Virus
cgaactggttcgtgaacatagtctg

SEQ ID NO: 32171 - DNA, 25 bp, SARS Virus
gaactggttcgataacatagtctgc

SEQ ID NO: 32172 - DNA, 25 bp, SARS Virus
aactggttcgagtacatagtctgca

SEQ ID NO: 32173 - DNA, 25 bp, SARS Virus
actggttcgagatcatagtctgcaa

SEQ ID NO: 32174 - DNA, 25 bp, SARS Virus
ctggttcgagaatatagtctgcaac

SEQ ID NO: 32175 - DNA, 25 bp, SARS Virus
tggttcgagaacttagtctgcaacc

SEQ ID NO: 32176 - DNA, 25 bp, SARS Virus
ggttcgagaacatagtctgcaacct

SEQ ID NO: 32177 - DNA, 25 bp, SARS Virus
gttcgagaacattgtctgcaacctc

SEQ ID NO: 32178 - DNA, 25 bp, SARS Virus
ttcgagaacatattctgcaacctct

SEQ ID NO: 32179 - DNA, 25 bp, SARS Virus
tcgagaacatagtctgcaacctcta

SEQ ID NO: 32180 - DNA, 25 bp, SARS Virus
cgagaacatagtttgcaacctctat

SEQ ID NO: 32181 - DNA, 25 bp, SARS Virus
gagaacatagtctgcaacctctatc

SEQ ID NO: 32182 - DNA, 25 bp, SARS Virus
agaacatagtcttcaacctctatca

SEQ ID NO: 32183 - DNA, 25 bp, SARS Virus
gaacatagtctgtaacctctatcat

SEQ ID NO: 32184 - DNA, 25 bp, SARS Virus
aacatagtctgctacctctatcatg

SEQ ID NO: 32185 - DNA, 25 bp, SARS Virus
acatagtctgcatcctctatcatga

SEQ ID NO: 32186 - DNA, 25 bp, SARS Virus
catagtctgcaatctctatcatgac

SEQ ID NO: 32187 - DNA, 25 bp, SARS Virus
atagtctgcaacttctatcatgact

SEQ ID NO: 32188 - DNA, 25 bp, SARS Virus
tagtctgcaacctctatcatgactt

SEQ ID NO: 32189 - DNA, 25 bp, SARS Virus
agtctgcaacctttatcatgacttc

SEQ ID NO: 32190 - DNA, 25 bp, SARS Virus
gtctgcaacctctatcatgacttca

SEQ ID NO: 32191 - DNA, 25 bp, SARS Virus
tctgcaacctctttcatgacttcaa

SEQ ID NO: 32192 - DNA, 25 bp, SARS Virus
ctgcaacctctatcatgacttcaaa

SEQ ID NO: 32193 - DNA, 25 bp, SARS Virus
tgcaacctctattatgacttcaaag

SEQ ID NO: 32194 - DNA, 25 bp, SARS Virus
gcaacctctatcttgacttcaaagg

SEQ ID NO: 32195 - DNA, 25 bp, SARS Virus
caacctctatcatgacttcaaaggc

SEQ ID NO: 32196 - DNA, 25 bp, SARS Virus
aacctctatcattacttcaaaggca

SEQ ID NO: 32197 - DNA, 25 bp, SARS Virus
acctctatcatgtcttcaaaggcaa

SEQ ID NO: 32198 - DNA, 25 bp, SARS Virus
cctctatcatgatttcaaaggcaat

SEQ ID NO: 32199 - DNA, 25 bp, SARS Virus
ctctatcatgacttcaaaggcaatt

SEQ ID NO: 32200 - DNA, 25 bp, SARS Virus
tctatcatgacttcaaaggcaattc

SEQ ID NO: 32201 - DNA, 25 bp, SARS Virus
ctatcatgactttaaaggcaattct

SEQ ID NO: 32202 - DNA, 25 bp, SARS Virus
tatcatgacttctaaggcaattcta

SEQ ID NO: 32203 - DNA, 25 bp, SARS Virus
atcatgacttcataggcaattctac

SEQ ID NO: 32204 - DNA, 25 bp, SARS Virus
tcatgacttcaatggcaattctaca

SEQ ID NO: 32205 - DNA, 25 bp, SARS Virus
catgacttcaaatgcaattctacaa

SEQ ID NO: 32206 - DNA, 25 bp, SARS Virus
atgacttcaaagtcaattctacaaa

SEQ ID NO: 32207 - DNA, 25 bp, SARS Virus
tgacttcaaaggtaattctacaaac

SEQ ID NO: 32208 - DNA, 25 bp, SARS Virus
gacttcaaaggctattctacaaact

SEQ ID NO: 32209 - DNA, 25 bp, SARS Virus
acttcaaaggcatttctacaaacta

SEQ ID NO: 32210 - DNA, 25 bp, SARS Virus
cttcaaaggcaattctacaaactac

SEQ ID NO: 32211 - DNA, 25 bp, SARS Virus
ttcaaaggcaattctacaaactacg

SEQ ID NO: 32212 - DNA, 25 bp, SARS Virus
tcaaaggcaattttacaaactacga

SEQ ID NO: 32213 - DNA, 25 bp, SARS Virus
caaaggcaattctacaaactacgaa

SEQ ID NO: 32214 - DNA, 25 bp, SARS Virus
aaaggcaattcttcaaactacgaat

SEQ ID NO: 32215 - DNA, 25 bp, SARS Virus
aaggcaattctataaactacgaata

SEQ ID NO: 32216 - DNA, 25 bp, SARS Virus
aggcaattctactaactacgaatac

SEQ ID NO: 32217 - DNA, 25 bp, SARS Virus
ggcaattctacatactacgaataca

SEQ ID NO: 32218 - DNA, 25 bp, SARS Virus
gcaattctacaatctacgaatacag

SEQ ID NO: 32219 - DNA, 25 bp, SARS Virus
caattctacaaattacgaatacagc

SEQ ID NO: 32220 - DNA, 25 bp, SARS Virus
aattctacaaactacgaatacagct

SEQ ID NO: 32221 - DNA, 25 bp, SARS Virus
attctacaaacttcgaatacagctg

SEQ ID NO: 32222 - DNA, 25 bp, SARS Virus
ttctacaaactatgaatacagctgt

SEQ ID NO: 32223 - DNA, 25 bp, SARS Virus
tctacaaactactaatacagctgtg

SEQ ID NO: 32224 - DNA, 25 bp, SARS Virus
ctacaaactacgtatacagctgtgg

SEQ ID NO: 32225 - DNA, 25 bp, SARS Virus
tacaaactacgattacagctgtgga

SEQ ID NO: 32226 - DNA, 25 bp, SARS Virus
acaaactacgaatacagctgtggaa

SEQ ID NO: 32227 - DNA, 25 bp, SARS Virus
caaactacgaattcagctgtggaaa

SEQ ID NO: 32228 - DNA, 25 bp, SARS Virus
aaactacgaatatagctgtggaaaa

SEQ ID NO: 32229 - DNA, 25 bp, SARS Virus
aactacgaatactgctgtggaaaag

SEQ ID NO: 32230 - DNA, 25 bp, SARS Virus
actacgaatacatctgtggaaaagt

SEQ ID NO: 32231 - DNA, 25 bp, SARS Virus
ctacgaatacagttgtggaaaagtc

SEQ ID NO: 32232 - DNA, 25 bp, SARS Virus
tacgaatacagctgtggaaaagtcg

SEQ ID NO: 32233 - DNA, 25 bp, SARS Virus
acgaatacagctttggaaaagtcgt

SEQ ID NO: 32234 - DNA, 25 bp, SARS Virus
cgaatacagctgtggaaaagtcgtt

SEQ ID NO: 32235 - DNA, 25 bp, SARS Virus
gaatacagctgttgaaaagtcgttg

SEQ ID NO: 32236 - DNA, 25 bp, SARS Virus
aatacagctgtgtaaaagtcgttga

SEQ ID NO: 32237 - DNA, 25 bp, SARS Virus
atacagctgtggtaaagtcgttgaa

SEQ ID NO: 32238 - DNA, 25 bp, SARS Virus
tacagctgtggataagtcgttgaaa

SEQ ID NO: 32239 - DNA, 25 bp, SARS Virus
acagctgtggaatagtcgttgaaaa

SEQ ID NO: 32240 - DNA, 25 bp, SARS Virus
cagctgtggaaatgtcgttgaaaat

SEQ ID NO: 32241 - DNA, 25 bp, SARS Virus
agctgtggaaaattcgttgaaaatc

SEQ ID NO: 32242 - DNA, 25 bp, SARS Virus
gctgtggaaaagtcgttgaaaatca

SEQ ID NO: 32243 - DNA, 25 bp, SARS Virus
ctgtggaaaagttgttgaaaatcac

SEQ ID NO: 32244 - DNA, 25 bp, SARS Virus
tgtggaaaagtctttgaaaatcaca

SEQ ID NO: 32245 - DNA, 25 bp, SARS Virus
gtggaaaagtcgttgaaaatcacaa

SEQ ID NO: 32246 - DNA, 25 bp, SARS Virus
tggaaaagtcgttgaaaatcacaag

SEQ ID NO: 32247 - DNA, 25 bp, SARS Virus
ggaaaagtcgtttaaaatcacaagg

SEQ ID NO: 32248 - DNA, 25 bp, SARS Virus
gaaaagtcgttgtaaatcacaagga

SEQ ID NO: 32249 - DNA, 25 bp, SARS Virus
aaaagtcgttgataatcacaaggat

SEQ ID NO: 32250 - DNA, 25 bp, SARS Virus
aaagtcgttgaatatcacaaggata

SEQ ID NO: 32251 - DNA, 25 bp, SARS Virus
aagtcgttgaaattcacaaggatac

SEQ ID NO: 32252 - DNA, 25 bp, SARS Virus
agtcgttgaaaatcacaaggatacc

SEQ ID NO: 32253 - DNA, 25 bp, SARS Virus
gtcgttgaaaattacaaggatacct

SEQ ID NO: 32254 - DNA, 25 bp, SARS Virus
tcgttgaaaatctcaaggatacctt

SEQ ID NO: 32255 - DNA, 25 bp, SARS Virus
cgttgaaaatcataaggataccttt

SEQ ID NO: 32256 - DNA, 25 bp, SARS Virus
gttgaaaatcactaggatacctttt

SEQ ID NO: 32257 - DNA, 25 bp, SARS Virus
ttgaaaatcacatggataccttttt

SEQ ID NO: 32258 - DNA, 25 bp, SARS Virus
tgaaaatcacaatgatacctttttg

SEQ ID NO: 32259 - DNA, 25 bp, SARS Virus
gaaaatcacaagtatacctttttga

SEQ ID NO: 32260 - DNA, 25 bp, SARS Virus
aaaatcacaaggttacctttttgaa

SEQ ID NO: 32261 - DNA, 25 bp, SARS Virus
aaatcacaaggatacctttttgaat

SEQ ID NO: 32262 - DNA, 25 bp, SARS Virus
aatcacaaggattcctttttgaatt

SEQ ID NO: 32263 - DNA, 25 bp, SARS Virus
atcacaaggatatctttttgaattc

SEQ ID NO: 32264 - DNA, 25 bp, SARS Virus
tcacaaggatacttttttgaattcc

SEQ ID NO: 32265 - DNA, 25 bp, SARS Virus
cacaaggatacctttttgaattccg

SEQ ID NO: 32266 - DNA, 25 bp, SARS Virus
acaaggatacctttttgaattccgt

SEQ ID NO: 32267 - DNA, 25 bp, SARS Virus
caaggatacctttttgaattccgtg

SEQ ID NO: 32268 - DNA, 25 bp, SARS Virus
aaggatacctttttgaattccgtga

SEQ ID NO: 32269 - DNA, 25 bp, SARS Virus
aggatacctttttgaattccgtgaa

SEQ ID NO: 32270 - DNA, 25 bp, SARS Virus
ggataccttttttaattccgtgaac

SEQ ID NO: 32271 - DNA, 25 bp, SARS Virus
gatacctttttgtattccgtgaaca

SEQ ID NO: 32272 - DNA, 25 bp, SARS Virus
atacctttttgatttccgtgaacaa

SEQ ID NO: 32273 - DNA, 25 bp, SARS Virus
tacctttttgaattccgtgaacaac

SEQ ID NO: 32274 - DNA, 25 bp, SARS Virus
acctttttgaattccgtgaacaacg

SEQ ID NO: 32275 - DNA, 25 bp, SARS Virus
cctttttgaatttcgtgaacaacga

SEQ ID NO: 32276 - DNA, 25 bp, SARS Virus
ctttttgaattctgtgaacaacgat

SEQ ID NO: 32277 - DNA, 25 bp, SARS Virus
tttttgaattccttgaacaacgatg

SEQ ID NO: 32278 - DNA, 25 bp, SARS Virus
ttttgaattccgtgaacaacgatgt

SEQ ID NO: 32279 - DNA, 25 bp, SARS Virus
tttgaattccgttaacaacgatgtc

SEQ ID NO: 32280 - DNA, 25 bp, SARS Virus
ttgaattccgtgtacaacgatgtcg

SEQ ID NO: 32281 - DNA, 25 bp, SARS Virus
tgaattccgtgatcaacgatgtcga

SEQ ID NO: 32282 - DNA, 25 bp, SARS Virus
gaattccgtgaataacgatgtcgag

SEQ ID NO: 32283 - DNA, 25 bp, SARS Virus
aattccgtgaactacgatgtcgagt

SEQ ID NO: 32284 - DNA, 25 bp, SARS Virus
attccgtgaacatcgatgtcgagtg

SEQ ID NO: 32285 - DNA, 25 bp, SARS Virus
ttccgtgaacaatgatgtcgagtgt

SEQ ID NO: 32286 - DNA, 25 bp, SARS Virus
tccgtgaacaactatgtcgagtgtc

SEQ ID NO: 32287 - DNA, 25 bp, SARS Virus
ccgtgaacaacgttgtcgagtgtcg

SEQ ID NO: 32288 - DNA, 25 bp, SARS Virus
cgtgaacaacgatgtcgagtgtcgc

SEQ ID NO: 32289 - DNA, 25 bp, SARS Virus
gtgaacaacgatttcgagtgtcgct

SEQ ID NO: 32290 - DNA, 25 bp, SARS Virus
tgaacaacgatgtcgagtgtcgctc

SEQ ID NO: 32291 - DNA, 25 bp, SARS Virus
gaacaacgatgttgagtgtcgctca

SEQ ID NO: 32292 - DNA, 25 bp, SARS Virus
aacaacgatgtctagtgtcgctcaa

SEQ ID NO: 32293 - DNA, 25 bp, SARS Virus
acaacgatgtcgtgtgtcgctcaat

SEQ ID NO: 32294 - DNA, 25 bp, SARS Virus
caacgatgtcgattgtcgctcaatc

SEQ ID NO: 32295 - DNA, 25 bp, SARS Virus
aacgatgtcgagtgtcgctcaatcg

SEQ ID NO: 32296 - DNA, 25 bp, SARS Virus
acgatgtcgagtttcgctcaatcgt

SEQ ID NO: 32297 - DNA, 25 bp, SARS Virus
cgatgtcgagtgtcgctcaatcgtt

SEQ ID NO: 32298 - DNA, 25 bp, SARS Virus
gatgtcgagtgttgctcaatcgttt

SEQ ID NO: 32299 - DNA, 25 bp, SARS Virus
atgtcgagtgtctctcaatcgtttc

SEQ ID NO: 32300 - DNA, 25 bp, SARS Virus
tgtcgagtgtcgttcaatcgtttcc

SEQ ID NO: 32301 - DNA, 25 bp, SARS Virus
gtcgagtgtcgctcaatcgtttccc

SEQ ID NO: 32302 - DNA, 25 bp, SARS Virus
tcgagtgtcgcttaatcgtttccca

SEQ ID NO: 32303 - DNA, 25 bp, SARS Virus
cgagtgtcgctctatcgtttcccac

SEQ ID NO: 32304 - DNA, 25 bp, SARS Virus
gagtgtcgctcattcgtttcccaca

SEQ ID NO: 32305 - DNA, 25 bp, SARS Virus
agtgtcgctcaatcgtttcccacat

SEQ ID NO: 32306 - DNA, 25 bp, SARS Virus
gtgtcgctcaattgtttcccacatc

SEQ ID NO: 32307 - DNA, 25 bp, SARS Virus
tgtcgctcaatcttttcccacatcg

SEQ ID NO: 32308 - DNA, 25 bp, SARS Virus
gtcgctcaatcgtttcccacatcga

SEQ ID NO: 32309 - DNA, 25 bp, SARS Virus
tcgctcaatcgtttcccacatcgaa

SEQ ID NO: 32310 - DNA, 25 bp, SARS Virus
cgctcaatcgtttcccacatcgaaa

SEQ ID NO: 32311 - DNA, 25 bp, SARS Virus
gctcaatcgttttccacatcgaaat

SEQ ID NO: 32312 - DNA, 25 bp, SARS Virus
ctcaatcgtttctcacatcgaaatc

SEQ ID NO: 32313 - DNA, 25 bp, SARS Virus
tcaatcgtttcctacatcgaaatct

SEQ ID NO: 32314 - DNA, 25 bp, SARS Virus
caatcgtttccctcatcgaaatcta

SEQ ID NO: 32315 - DNA, 25 bp, SARS Virus
aatcgtttcccatatcgaaatctac

SEQ ID NO: 32316 - DNA, 25 bp, SARS Virus
atcgtttcccacttcgaaatctacc

SEQ ID NO: 32317 - DNA, 25 bp, SARS Virus
tcgtttcccacatcgaaatctacca

SEQ ID NO: 32318 - DNA, 25 bp, SARS Virus
cgtttcccacattgaaatctaccac

SEQ ID NO: 32319 - DNA, 25 bp, SARS Virus
gtttcccacatctaaatctaccaca

SEQ ID NO: 32320 - DNA, 25 bp, SARS Virus
tttcccacatcgtaatctaccacag

SEQ ID NO: 32321 - DNA, 25 bp, SARS Virus
ttcccacatcgatatctaccacagg

SEQ ID NO: 32322 - DNA, 25 bp, SARS Virus
tcccacatcgaattctaccacagga

SEQ ID NO: 32323 - DNA, 25 bp, SARS Virus
cccacatcgaaatctaccacaggaa

SEQ ID NO: 32324 - DNA, 25 bp, SARS Virus
ccacatcgaaatttaccacaggaaa

SEQ ID NO: 32325 - DNA, 25 bp, SARS Virus
cacatcgaaatctaccacaggaaag

SEQ ID NO: 32326 - DNA, 25 bp, SARS Virus
acatcgaaatcttccacaggaaaga

SEQ ID NO: 32327 - DNA, 25 bp, SARS Virus
catcgaaatctatcacaggaaagat

SEQ ID NO: 32328 - DNA, 25 bp, SARS Virus
atcgaaatctactacaggaaagatg

SEQ ID NO: 32329 - DNA, 25 bp, SARS Virus
tcgaaatctacctcaggaaagatgt

SEQ ID NO: 32330 - DNA, 25 bp, SARS Virus
cgaaatctaccataggaaagatgta

SEQ ID NO: 32331 - DNA, 25 bp, SARS Virus
gaaatctaccactggaaagatgtaa

SEQ ID NO: 32332 - DNA, 25 bp, SARS Virus
aaatctaccacatgaaagatgtaag

SEQ ID NO: 32333 - DNA, 25 bp, SARS Virus
aatctaccacagtaaagatgtaagc

SEQ ID NO: 32334 - DNA, 25 bp, SARS Virus
atctaccacaggtaagatgtaagca

SEQ ID NO: 32335 - DNA, 25 bp, SARS Virus
tctaccacaggatagatgtaagcac

SEQ ID NO: 32336 - DNA, 25 bp, SARS Virus
ctaccacaggaatgatgtaagcaca

SEQ ID NO: 32337 - DNA, 25 bp, SARS Virus
taccacaggaaaaatgtaagcacag

SEQ ID NO: 32338 - DNA, 25 bp, SARS Virus
accacaggaaagatgtaagcacagt

SEQ ID NO: 32339 - DNA, 25 bp, SARS Virus
ccacaggaaagaagtaagcacagtc

SEQ ID NO: 32340 - DNA, 25 bp, SARS Virus
cacaggaaagatataagcacagtcg

SEQ ID NO: 32341 - DNA, 25 bp, SARS Virus
acaggaaagatgaaagcacagtcga

SEQ ID NO: 32342 - DNA, 25 bp, SARS Virus
caggaaagatgtaagcacagtcgac

SEQ ID NO: 32343 - DNA, 25 bp, SARS Virus
aggaaagatgtaagcacagtcgacg

SEQ ID NO: 32344 - DNA, 25 bp, SARS Virus
ggaaagatgtaaacacagtcgacgg

SEQ ID NO: 32345 - DNA, 25 bp, SARS Virus
gaaagatgtaagaacagtcgacggg

SEQ ID NO: 32346 - DNA, 25 bp, SARS Virus
aaagatgtaagcacagtcgacgggc

SEQ ID NO: 32347 - DNA, 25 bp, SARS Virus
aagatgtaagcaaagtcgacgggct

SEQ ID NO: 32348 - DNA, 25 bp, SARS Virus
agatgtaagcacagtcgacgggctg

SEQ ID NO: 32349 - DNA, 25 bp, SARS Virus
gatgtaagcacaatcgacgggctgt

SEQ ID NO: 32350 - DNA, 25 bp, SARS Virus
atgtaagcacagacgacgggctgtt

SEQ ID NO: 32351 - DNA, 25 bp, SARS Virus
tgtaagcacagtagacgggctgttc

SEQ ID NO: 32352 - DNA, 25 bp, SARS Virus
gtaagcacagtcaacgggctgttcc

SEQ ID NO: 32353 - DNA, 25 bp, SARS Virus
taagcacagtcgacgggctgttcca

SEQ ID NO: 32354 - DNA, 25 bp, SARS Virus
aagcacagtcgaagggctgttccac

SEQ ID NO: 32355 - DNA, 25 bp, SARS Virus
agcacagtcgacaggctgttccaca

SEQ ID NO: 32356 - DNA, 25 bp, SARS Virus
gcacagtcgacgagctgttccacaa

SEQ ID NO: 32357 - DNA, 25 bp, SARS Virus
cacagtcgacggactgttccacaac

SEQ ID NO: 32358 - DNA, 25 bp, SARS Virus
acagtcgacgggatgttccacaaca

SEQ ID NO: 32359 - DNA, 25 bp, SARS Virus
cagtcgacgggcagttccacaacaa

SEQ ID NO: 32360 - DNA, 25 bp, SARS Virus
agtcgacgggctattccacaacaac

SEQ ID NO: 32361 - DNA, 25 bp, SARS Virus
gtcgacgggctgatccacaacaact

SEQ ID NO: 32362 - DNA, 25 bp, SARS Virus
tcgacgggctgtaccacaacaacta

SEQ ID NO: 32363 - DNA, 25 bp, SARS Virus
cgacgggctgttacacaacaactat

SEQ ID NO: 32364 - DNA, 25 bp, SARS Virus
gacgggctgttcaacaacaactatg

SEQ ID NO: 32365 - DNA, 25 bp, SARS Virus
acgggctgttccacaacaactatgg

SEQ ID NO: 32366 - DNA, 25 bp, SARS Virus
cgggctgttccaaaacaactatggc

SEQ ID NO: 32367 - DNA, 25 bp, SARS Virus
gggctgttccacaacaactatggct

SEQ ID NO: 32368 - DNA, 25 bp, SARS Virus
ggctgttccacaacaactatggcta

SEQ ID NO: 32369 - DNA, 25 bp, SARS Virus
gctgttccacaaaaactatggctac

SEQ ID NO: 32370 - DNA, 25 bp, SARS Virus
ctgttccacaacaactatggctaca

SEQ ID NO: 32371 - DNA, 25 bp, SARS Virus
tgttccacaacaactatggctacaa

SEQ ID NO: 32372 - DNA, 25 bp, SARS Virus
gttccacaacaaatatggctacaac

SEQ ID NO: 32373 - DNA, 25 bp, SARS Virus
ttccacaacaacaatggctacaact

SEQ ID NO: 32374 - DNA, 25 bp, SARS Virus
tccacaacaactatggctacaactg

SEQ ID NO: 32375 - DNA, 25 bp, SARS Virus
ccacaacaactaaggctacaactgt

SEQ ID NO: 32376 - DNA, 25 bp, SARS Virus
cacaacaactatagctacaactgtg

SEQ ID NO: 32377 - DNA, 25 bp, SARS Virus
acaacaactatgactacaactgtgt

SEQ ID NO: 32378 - DNA, 25 bp, SARS Virus
caacaactatggatacaactgtgtt

SEQ ID NO: 32379 - DNA, 25 bp, SARS Virus
aacaactatggcaacaactgtgttt

SEQ ID NO: 32380 - DNA, 25 bp, SARS Virus
acaactatggctacaactgtgtttc

SEQ ID NO: 32381 - DNA, 25 bp, SARS Virus
caactatggctaaaactgtgtttcc

SEQ ID NO: 32382 - DNA, 25 bp, SARS Virus
aactatggctacaactgtgtttcct

SEQ ID NO: 32383 - DNA, 25 bp, SARS Virus
actatggctacaactgtgtttccta

SEQ ID NO: 32384 - DNA, 25 bp, SARS Virus
ctatggctacaaatgtgtttcctac

SEQ ID NO: 32385 - DNA, 25 bp, SARS Virus
tatggctacaacagtgtttcctaca

SEQ ID NO: 32386 - DNA, 25 bp, SARS Virus
atggctacaactatgtttcctacaa

SEQ ID NO: 32387 - DNA, 25 bp, SARS Virus
tggctacaactgagtttcctacaat

SEQ ID NO: 32388 - DNA, 25 bp, SARS Virus
ggctacaactgtatttcctacaata

SEQ ID NO: 32389 - DNA, 25 bp, SARS Virus
gctacaactgtgattcctacaataa

SEQ ID NO: 32390 - DNA, 25 bp, SARS Virus
ctacaactgtgtatcctacaataac

SEQ ID NO: 32391 - DNA, 25 bp, SARS Virus
tacaactgtgttacctacaataact

SEQ ID NO: 32392 - DNA, 25 bp, SARS Virus
acaactgtgtttactacaataactt

SEQ ID NO: 32393 - DNA, 25 bp, SARS Virus
caactgtgtttcatacaataactta

SEQ ID NO: 32394 - DNA, 25 bp, SARS Virus
aactgtgtttccaacaataacttac

SEQ ID NO: 32395 - DNA, 25 bp, SARS Virus
actgtgtttcctacaataacttaca

SEQ ID NO: 32396 - DNA, 25 bp, SARS Virus
ctgtgtttcctaaaataacttacag

SEQ ID NO: 32397 - DNA, 25 bp, SARS Virus
tgtgtttcctacaataacttacaga

SEQ ID NO: 32398 - DNA, 25 bp, SARS Virus
gtgtttcctacaataacttacagag

SEQ ID NO: 32399 - DNA, 25 bp, SARS Virus
tgtttcctacaaaaacttacagagt

SEQ ID NO: 32400 - DNA, 25 bp, SARS Virus
gtttcctacaataacttacagagtt

SEQ ID NO: 32401 - DNA, 25 bp, SARS Virus
tttcctacaataacttacagagttt

SEQ ID NO: 32402 - DNA, 25 bp, SARS Virus
ttcctacaataaattacagagtttg

SEQ ID NO: 32403 - DNA, 25 bp, SARS Virus
tcctacaataacatacagagtttga

SEQ ID NO: 32404 - DNA, 25 bp, SARS Virus
cctacaataactaacagagtttgaa

SEQ ID NO: 32405 - DNA, 25 bp, SARS Virus
ctacaataacttacagagtttgaaa

SEQ ID NO: 32406 - DNA, 25 bp, SARS Virus
tacaataacttaaagagtttgaaag

SEQ ID NO: 32407 - DNA, 25 bp, SARS Virus
acaataacttacagagtttgaaagt

SEQ ID NO: 32408 - DNA, 25 bp, SARS Virus
caataacttacaaagtttgaaagtg

SEQ ID NO: 32409 - DNA, 25 bp, SARS Virus
aataacttacagagtttgaaagtgt

SEQ ID NO: 32410 - DNA, 25 bp, SARS Virus
ataacttacagaatttgaaagtgta

SEQ ID NO: 32411 - DNA, 25 bp, SARS Virus
taacttacagagattgaaagtgtag

SEQ ID NO: 32412 - DNA, 25 bp, SARS Virus
aacttacagagtatgaaagtgtagt

SEQ ID NO: 32413 - DNA, 25 bp, SARS Virus
acttacagagttagaaagtgtagtg

SEQ ID NO: 32414 - DNA, 25 bp, SARS Virus
cttacagagtttaaaagtgtagtga

SEQ ID NO: 32415 - DNA, 25 bp, SARS Virus
ttacagagtttgaaagtgtagtgag

SEQ ID NO: 32416 - DNA, 25 bp, SARS Virus
tacagagtttgaaagtgtagtgaga

SEQ ID NO: 32417 - DNA, 25 bp, SARS Virus
acagagtttgaaagtgtagtgagac

SEQ ID NO: 32418 - DNA, 25 bp, SARS Virus
cagagtttgaaaatgtagtgagact

SEQ ID NO: 32419 - DNA, 25 bp, SARS Virus
agagtttgaaagagtagtgagactg

SEQ ID NO: 32420 - DNA, 25 bp, SARS Virus
gagtttgaaagtatagtgagactga

SEQ ID NO: 32421 - DNA, 25 bp, SARS Virus
agtttgaaagtgaagtgagactgaa

SEQ ID NO: 32422 - DNA, 25 bp, SARS Virus
gtttgaaagtgtagtgagactgaat

SEQ ID NO: 32423 - DNA, 25 bp, SARS Virus
tttgaaagtgtaatgagactgaatc

SEQ ID NO: 32424 - DNA, 25 bp, SARS Virus
ttgaaagtgtagagagactgaatct

SEQ ID NO: 32425 - DNA, 25 bp, SARS Virus
tgaaagtgtagtaagactgaatctt

SEQ ID NO: 32426 - DNA, 25 bp, SARS Virus
gaaagtgtagtgagactgaatcttc

SEQ ID NO: 32427 - DNA, 25 bp, SARS Virus
aaagtgtagtgaaactgaatcttca

SEQ ID NO: 32428 - DNA, 25 bp, SARS Virus
aagtgtagtgagactgaatcttcac

SEQ ID NO: 32429 - DNA, 25 bp, SARS Virus
agtgtagtgagaatgaatcttcact

SEQ ID NO: 32430 - DNA, 25 bp, SARS Virus
gtgtagtgagacagaatcttcactg

SEQ ID NO: 32431 - DNA, 25 bp, SARS Virus
tgtagtgagactaaatcttcactgt

SEQ ID NO: 32432 - DNA, 25 bp, SARS Virus
gtagtgagactgaatcttcactgtc

SEQ ID NO: 32433 - DNA, 25 bp, SARS Virus
tagtgagactgaatcttcactgtcc

SEQ ID NO: 32434 - DNA, 25 bp, SARS Virus
agtgagactgaaacttcactgtcca

SEQ ID NO: 32435 - DNA, 25 bp, SARS Virus
gtgagactgaatattcactgtccac

SEQ ID NO: 32436 - DNA, 25 bp, SARS Virus
tgagactgaatcatcactgtccact

SEQ ID NO: 32437 - DNA, 25 bp, SARS Virus
gagactgaatctacactgtccactg

SEQ ID NO: 32438 - DNA, 25 bp, SARS Virus
agactgaatcttaactgtccactgt

SEQ ID NO: 32439 - DNA, 25 bp, SARS Virus
gactgaatcttcactgtccactgtc

SEQ ID NO: 32440 - DNA, 25 bp, SARS Virus
actgaatcttcaatgtccactgtca

SEQ ID NO: 32441 - DNA, 25 bp, SARS Virus
ctgaatcttcacagtccactgtcaa

SEQ ID NO: 32442 - DNA, 25 bp, SARS Virus
tgaatcttcactatccactgtcaac

SEQ ID NO: 32443 - DNA, 25 bp, SARS Virus
gaatcttcactgaccactgtcaaca

SEQ ID NO: 32444 - DNA, 25 bp, SARS Virus
aatcttcactgtacactgtcaacat

SEQ ID NO: 32445 - DNA, 25 bp, SARS Virus
atcttcactgtcaactgtcaacatt

SEQ ID NO: 32446 - DNA, 25 bp, SARS Virus
tcttcactgtccactgtcaacattg

SEQ ID NO: 32447 - DNA, 25 bp, SARS Virus
cttcactgtccaatgtcaacattgt

SEQ ID NO: 32448 - DNA, 25 bp, SARS Virus
ttcactgtccacagtcaacattgtt

SEQ ID NO: 32449 - DNA, 25 bp, SARS Virus
tcactgtccactatcaacattgtta

SEQ ID NO: 32450 - DNA, 25 bp, SARS Virus
cactgtccactgacaacattgttaa

SEQ ID NO: 32451 - DNA, 25 bp, SARS Virus
actgtccactgtaaacattgttaaa

SEQ ID NO: 32452 - DNA, 25 bp, SARS Virus
ctgtccactgtcaacattgttaaag

SEQ ID NO: 32453 - DNA, 25 bp, SARS Virus
tgtccactgtcaacattgttaaagt

SEQ ID NO: 32454 - DNA, 25 bp, SARS Virus
gtccactgtcaaaattgttaaagta

SEQ ID NO: 32455 - DNA, 25 bp, SARS Virus
tccactgtcaacattgttaaagtac

SEQ ID NO: 32456 - DNA, 25 bp, SARS Virus
ccactgtcaacaatgttaaagtacg

SEQ ID NO: 32457 - DNA, 25 bp, SARS Virus
cactgtcaacatagttaaagtacga

SEQ ID NO: 32458 - DNA, 25 bp, SARS Virus
actgtcaacattattaaagtacgag

SEQ ID NO: 32459 - DNA, 25 bp, SARS Virus
ctgtcaacattgataaagtacgagt

SEQ ID NO: 32460 - DNA, 25 bp, SARS Virus
tgtcaacattgtaaaagtacgagtg

SEQ ID NO: 32461 - DNA, 25 bp, SARS Virus
gtcaacattgttaaagtacgagtgg

SEQ ID NO: 32462 - DNA, 25 bp, SARS Virus
tcaacattgttaaagtacgagtgga

SEQ ID NO: 32463 - DNA, 25 bp, SARS Virus
caacattgttaaagtacgagtggat

SEQ ID NO: 32464 - DNA, 25 bp, SARS Virus
aacattgttaaaatacgagtggata

SEQ ID NO: 32465 - DNA, 25 bp, SARS Virus
acattgttaaagaacgagtggatat

SEQ ID NO: 32466 - DNA, 25 bp, SARS Virus
cattgttaaagtacgagtggatatt

SEQ ID NO: 32467 - DNA, 25 bp, SARS Virus
attgttaaagtaagagtggatatta

SEQ ID NO: 32468 - DNA, 25 bp, SARS Virus
ttgttaaagtacaagtggatattat

SEQ ID NO: 32469 - DNA, 25 bp, SARS Virus
tgttaaagtacgagtggatattatt

SEQ ID NO: 32470 - DNA, 25 bp, SARS Virus
gttaaagtacgaatggatattattc

SEQ ID NO: 32471 - DNA, 25 bp, SARS Virus
ttaaagtacgagaggatattattcc

SEQ ID NO: 32472 - DNA, 25 bp, SARS Virus
taaagtacgagtagatattattcca

SEQ ID NO: 32473 - DNA, 25 bp, SARS Virus
aaagtacgagtgaatattattccaa

SEQ ID NO: 32474 - DNA, 25 bp, SARS Virus
aagtacgagtggatattattccaac

SEQ ID NO: 32475 - DNA, 25 bp, SARS Virus
agtacgagtggaaattattccaact

SEQ ID NO: 32476 - DNA, 25 bp, SARS Virus
gtacgagtggatattattccaactt

SEQ ID NO: 32477 - DNA, 25 bp, SARS Virus
tacgagtggataatattccaacttt

SEQ ID NO: 32478 - DNA, 25 bp, SARS Virus
acgagtggatataattccaactttt

SEQ ID NO: 32479 - DNA, 25 bp, SARS Virus
cgagtggatattattccaacttttg

SEQ ID NO: 32480 - DNA, 25 bp, SARS Virus
gagtggatattaatccaacttttgt

SEQ ID NO: 32481 - DNA, 25 bp, SARS Virus
agtggatattataccaacttttgta

SEQ ID NO: 32482 - DNA, 25 bp, SARS Virus
gtggatattattacaacttttgtac

SEQ ID NO: 32483 - DNA, 25 bp, SARS Virus
tggatattattcaaacttttgtact

SEQ ID NO: 32484 - DNA, 25 bp, SARS Virus
ggatattattccaacttttgtactg

SEQ ID NO: 32485 - DNA, 25 bp, SARS Virus
gatattattccaacttttgtactgc

SEQ ID NO: 32486 - DNA, 25 bp, SARS Virus
atattattccaaattttgtactgcg

SEQ ID NO: 32487 - DNA, 25 bp, SARS Virus
tattattccaacatttgtactgcgg

SEQ ID NO: 32488 - DNA, 25 bp, SARS Virus
attattccaactattgtactgcggg

SEQ ID NO: 32489 - DNA, 25 bp, SARS Virus
ttattccaacttatgtactgcgggt

SEQ ID NO: 32490 - DNA, 25 bp, SARS Virus
tattccaactttagtactgcgggtc

SEQ ID NO: 32491 - DNA, 25 bp, SARS Virus
attccaacttttatactgcgggtct

SEQ ID NO: 32492 - DNA, 25 bp, SARS Virus
ttccaacttttgaactgcgggtctc

SEQ ID NO: 32493 - DNA, 25 bp, SARS Virus
tccaacttttgtactgcgggtctct

SEQ ID NO: 32494 - DNA, 25 bp, SARS Virus
ccaacttttgtaatgcgggtctcta

SEQ ID NO: 32495 - DNA, 25 bp, SARS Virus
caacttttgtacagcgggtctctag

SEQ ID NO: 32496 - DNA, 25 bp, SARS Virus
aacttttgtactacgggtctctaga

SEQ ID NO: 32497 - DNA, 25 bp, SARS Virus
acttttgtactgagggtctctagaa

SEQ ID NO: 32498 - DNA, 25 bp, SARS Virus
cttttgtactgcaggtctctagaac

SEQ ID NO: 32499 - DNA, 25 bp, SARS Virus
ttttgtactgcgagtctctagaacc

SEQ ID NO: 32500 - DNA, 25 bp, SARS Virus
tttgtactgcggatctctagaaccg

SEQ ID NO: 32501 - DNA, 25 bp, SARS Virus
ttgtactgcgggactctagaaccgc

SEQ ID NO: 32502 - DNA, 25 bp, SARS Virus
tgtactgcgggtatctagaaccgcg

SEQ ID NO: 32503 - DNA, 25 bp, SARS Virus
gtactgcgggtcactagaaccgcgt

SEQ ID NO: 32504 - DNA, 25 bp, SARS Virus
tactgcgggtctatagaaccgcgta

SEQ ID NO: 32505 - DNA, 25 bp, SARS Virus
actgcgggtctcaagaaccgcgtac

SEQ ID NO: 32506 - DNA, 25 bp, SARS Virus
ctgcgggtctctagaaccgcgtaca

SEQ ID NO: 32507 - DNA, 25 bp, SARS Virus
tgcgggtctctaaaaccgcgtacat

SEQ ID NO: 32508 - DNA, 25 bp, SARS Virus
gcgggtctctagaaccgcgtacata

SEQ ID NO: 32509 - DNA, 25 bp, SARS Virus
cgggtctctagaaccgcgtacataa

SEQ ID NO: 32510 - DNA, 25 bp, SARS Virus
gggtctctagaaacgcgtacataac

SEQ ID NO: 32511 - DNA, 25 bp, SARS Virus
ggtctctagaacagcgtacataact

SEQ ID NO: 32512 - DNA, 25 bp, SARS Virus
gtctctagaaccacgtacataactg

SEQ ID NO: 32513 - DNA, 25 bp, SARS Virus
tctctagaaccgagtacataactga

SEQ ID NO: 32514 - DNA, 25 bp, SARS Virus
ctctagaaccgcatacataactgac

SEQ ID NO: 32515 - DNA, 25 bp, SARS Virus
tctagaaccgcgaacataactgaca

SEQ ID NO: 32516 - DNA, 25 bp, SARS Virus
ctagaaccgcgtacataactgacat

SEQ ID NO: 32517 - DNA, 25 bp, SARS Virus
tagaaccgcgtaaataactgacatt

SEQ ID NO: 32518 - DNA, 25 bp, SARS Virus
agaaccgcgtacataactgacatta

SEQ ID NO: 32519 - DNA, 25 bp, SARS Virus
gaaccgcgtacaaaactgacattac

SEQ ID NO: 32520 - DNA, 25 bp, SARS Virus
aaccgcgtacataactgacattacg

SEQ ID NO: 32521 - DNA, 25 bp, SARS Virus
accgcgtacataactgacattacgt

SEQ ID NO: 32522 - DNA, 25 bp, SARS Virus
ccgcgtacataaatgacattacgtt

SEQ ID NO: 32523 - DNA, 25 bp, SARS Virus
cgcgtacataacagacattacgttc

SEQ ID NO: 32524 - DNA, 25 bp, SARS Virus
gcgtacataactaacattacgttcc

SEQ ID NO: 32525 - DNA, 25 bp, SARS Virus
cgtacataactgacattacgttccg

SEQ ID NO: 32526 - DNA, 25 bp, SARS Virus
gtacataactgaaattacgttccgt

SEQ ID NO: 32527 - DNA, 25 bp, SARS Virus
tacataactgacattacgttccgta

SEQ ID NO: 32528 - DNA, 25 bp, SARS Virus
acataactgacaatacgttccgtat

SEQ ID NO: 32529 - DNA, 25 bp, SARS Virus
cataactgacataacgttccgtata

SEQ ID NO: 32530 - DNA, 25 bp, SARS Virus
ataactgacattacgttccgtatag

SEQ ID NO: 32531 - DNA, 25 bp, SARS Virus
taactgacattaagttccgtatagt

SEQ ID NO: 32532 - DNA, 25 bp, SARS Virus
aactgacattacattccgtatagtt

SEQ ID NO: 32533 - DNA, 25 bp, SARS Virus
actgacattacgatccgtatagtta

SEQ ID NO: 32534 - DNA, 25 bp, SARS Virus
ctgacattacgtaccgtatagttac

SEQ ID NO: 32535 - DNA, 25 bp, SARS Virus
tgacattacgttacgtatagttacg

SEQ ID NO: 32536 - DNA, 25 bp, SARS Virus
gacattacgttcagtatagttacgg

SEQ ID NO: 32537 - DNA, 25 bp, SARS Virus
acattacgttccatatagttacggg

SEQ ID NO: 32538 - DNA, 25 bp, SARS Virus
cattacgttccgaatagttacgggt

SEQ ID NO: 32539 - DNA, 25 bp, SARS Virus
attacgttccgtatagttacgggtt

SEQ ID NO: 32540 - DNA, 25 bp, SARS Virus
ttacgttccgtaaagttacgggttc

SEQ ID NO: 32541 - DNA, 25 bp, SARS Virus
tacgttccgtatagttacgggttca

SEQ ID NO: 32542 - DNA, 25 bp, SARS Virus
acgttccgtataattacgggttcat

SEQ ID NO: 32543 - DNA, 25 bp, SARS Virus
cgttccgtatagatacgggttcatc

SEQ ID NO: 32544 - DNA, 25 bp, SARS Virus
gttccgtatagtaacgggttcatcg

SEQ ID NO: 32545 - DNA, 25 bp, SARS Virus
ttccgtatagttacgggttcatcgt

SEQ ID NO: 32546 - DNA, 25 bp, SARS Virus
tccgtatagttaagggttcatcgtt

SEQ ID NO: 32547 - DNA, 25 bp, SARS Virus
ccgtatagttacaggttcatcgttt

SEQ ID NO: 32548 - DNA, 25 bp, SARS Virus
cgtatagttacgagttcatcgtttt

SEQ ID NO: 32549 - DNA, 25 bp, SARS Virus
gtatagttacggattcatcgttttt

SEQ ID NO: 32550 - DNA, 25 bp, SARS Virus
tatagttacgggatcatcgtttttc

SEQ ID NO: 32551 - DNA, 25 bp, SARS Virus
atagttacgggtacatcgtttttca

SEQ ID NO: 32552 - DNA, 25 bp, SARS Virus
tagttacgggttaatcgtttttcag

SEQ ID NO: 32553 - DNA, 25 bp, SARS Virus
agttacgggttcatcgtttttcagt

SEQ ID NO: 32554 - DNA, 25 bp, SARS Virus
gttacgggttcaacgtttttcagtg

SEQ ID NO: 32555 - DNA, 25 bp, SARS Virus
ttacgggttcatagtttttcagtgt

SEQ ID NO: 32556 - DNA, 25 bp, SARS Virus
tacgggttcatcatttttcagtgtt

SEQ ID NO: 32557 - DNA, 25 bp, SARS Virus
acgggttcatcgattttcagtgtta

SEQ ID NO: 32558 - DNA, 25 bp, SARS Virus
cgggttcatcgtatttcagtgttac

SEQ ID NO: 32559 - DNA, 25 bp, SARS Virus
gggttcatcgttattcagtgttaca

SEQ ID NO: 32560 - DNA, 25 bp, SARS Virus
ggttcatcgtttatcagtgttacaa

SEQ ID NO: 32561 - DNA, 25 bp, SARS Virus
gttcatcgttttacagtgttacaaa

SEQ ID NO: 32562 - DNA, 25 bp, SARS Virus
ttcatcgtttttaagtgttacaaag

SEQ ID NO: 32563 - DNA, 25 bp, SARS Virus
tcatcgtttttcagtgttacaaagt

SEQ ID NO: 32564 - DNA, 25 bp, SARS Virus
catcgtttttcaatgttacaaagtg

SEQ ID NO: 32565 - DNA, 25 bp, SARS Virus
atcgtttttcagagttacaaagtga

SEQ ID NO: 32566 - DNA, 25 bp, SARS Virus
tcgtttttcagtattacaaagtgag

SEQ ID NO: 32567 - DNA, 25 bp, SARS Virus
cgtttttcagtgatacaaagtgagt

SEQ ID NO: 32568 - DNA, 25 bp, SARS Virus
gtttttcagtgtaacaaagtgagta

SEQ ID NO: 32569 - DNA, 25 bp, SARS Virus
tttttcagtgttacaaagtgagtag

SEQ ID NO: 32570 - DNA, 25 bp, SARS Virus
ttttcagtgttaaaaagtgagtaga

SEQ ID NO: 32571 - DNA, 25 bp, SARS Virus
tttcagtgttacaaagtgagtagac

SEQ ID NO: 32572 - DNA, 25 bp, SARS Virus
ttcagtgttacaaagtgagtagacc

SEQ ID NO: 32573 - DNA, 25 bp, SARS Virus
tcagtgttacaaagtgagtagacct

SEQ ID NO: 32574 - DNA, 25 bp, SARS Virus
cagtgttacaaaatgagtagacctt

SEQ ID NO: 32575 - DNA, 25 bp, SARS Virus
agtgttacaaagagagtagacctta

SEQ ID NO: 32576 - DNA, 25 bp, SARS Virus
gtgttacaaagtaagtagaccttac

SEQ ID NO: 32577 - DNA, 25 bp, SARS Virus
tgttacaaagtgagtagaccttaca

SEQ ID NO: 32578 - DNA, 25 bp, SARS Virus
gttacaaagtgaatagaccttacat

SEQ ID NO: 32579 - DNA, 25 bp, SARS Virus
ttacaaagtgagaagaccttacatt

SEQ ID NO: 32580 - DNA, 25 bp, SARS Virus
tacaaagtgagtagaccttacattt

SEQ ID NO: 32581 - DNA, 25 bp, SARS Virus
acaaagtgagtaaaccttacatttt

SEQ ID NO: 32582 - DNA, 25 bp, SARS Virus
caaagtgagtagaccttacattttc

SEQ ID NO: 32583 - DNA, 25 bp, SARS Virus
aaagtgagtagaacttacattttct

SEQ ID NO: 32584 - DNA, 25 bp, SARS Virus
aagtgagtagacattacattttctg

SEQ ID NO: 32585 - DNA, 25 bp, SARS Virus
agtgagtagaccatacattttctga

SEQ ID NO: 32586 - DNA, 25 bp, SARS Virus
gtgagtagacctaacattttctgat

SEQ ID NO: 32587 - DNA, 25 bp, SARS Virus
tgagtagaccttacattttctgatg

SEQ ID NO: 32588 - DNA, 25 bp, SARS Virus
gagtagaccttaaattttctgatgt

SEQ ID NO: 32589 - DNA, 25 bp, SARS Virus
agtagaccttacattttctgatgta

SEQ ID NO: 32590 - DNA, 25 bp, SARS Virus
gtagaccttacaatttctgatgtac

SEQ ID NO: 32591 - DNA, 25 bp, SARS Virus
tagaccttacatattctgatgtaca

SEQ ID NO: 32592 - DNA, 25 bp, SARS Virus
agaccttacattatctgatgtacag

SEQ ID NO: 32593 - DNA, 25 bp, SARS Virus
gaccttacatttactgatgtacaga

SEQ ID NO: 32594 - DNA, 25 bp, SARS Virus
accttacattttatgatgtacagaa

SEQ ID NO: 32595 - DNA, 25 bp, SARS Virus
ccttacattttcagatgtacagaaa

SEQ ID NO: 32596 - DNA, 25 bp, SARS Virus
cttacattttctaatgtacagaaat

SEQ ID NO: 32597 - DNA, 25 bp, SARS Virus
ttacattttctgatgtacagaaata

SEQ ID NO: 32598 - DNA, 25 bp, SARS Virus
tacattttctgaagtacagaaatag

SEQ ID NO: 32599 - DNA, 25 bp, SARS Virus
acattttctgatatacagaaataga

SEQ ID NO: 32600 - DNA, 25 bp, SARS Virus
cattttctgatgaacagaaatagac

SEQ ID NO: 32601 - DNA, 25 bp, SARS Virus
attttctgatgtacagaaatagact

SEQ ID NO: 32602 - DNA, 25 bp, SARS Virus
ttttctgatgtaaagaaatagactt

SEQ ID NO: 32603 - DNA, 25 bp, SARS Virus
tttctgatgtacagaaatagacttg

SEQ ID NO: 32604 - DNA, 25 bp, SARS Virus
ttctgatgtacaaaaatagacttgt

SEQ ID NO: 32605 - DNA, 25 bp, SARS Virus
tctgatgtacagaaatagacttgtc

SEQ ID NO: 32606 - DNA, 25 bp, SARS Virus
ctgatgtacagaaatagacttgtcg

SEQ ID NO: 32607 - DNA, 25 bp, SARS Virus
tgatgtacagaaatagacttgtcga

SEQ ID NO: 32608 - DNA, 25 bp, SARS Virus
gatgtacagaaaaagacttgtcgac

SEQ ID NO: 32609 - DNA, 25 bp, SARS Virus
atgtacagaaatagacttgtcgacg

SEQ ID NO: 32610 - DNA, 25 bp, SARS Virus
tgtacagaaataaacttgtcgacgc

SEQ ID NO: 32611 - DNA, 25 bp, SARS Virus
gtacagaaatagacttgtcgacgca

SEQ ID NO: 32612 - DNA, 25 bp, SARS Virus
tacagaaatagaattgtcgacgcat

SEQ ID NO: 32613 - DNA, 25 bp, SARS Virus
acagaaatagacatgtcgacgcatt

SEQ ID NO: 32614 - DNA, 25 bp, SARS Virus
cagaaatagactagtcgacgcattt

SEQ ID NO: 32615 - DNA, 25 bp, SARS Virus
agaaatagacttatcgacgcatttg

SEQ ID NO: 32616 - DNA, 25 bp, SARS Virus
gaaatagacttgacgacgcatttgt

SEQ ID NO: 32617 - DNA, 25 bp, SARS Virus
aaatagacttgtagacgcatttgtt

SEQ ID NO: 32618 - DNA, 25 bp, SARS Virus
aatagacttgtcaacgcatttgttt

SEQ ID NO: 32619 - DNA, 25 bp, SARS Virus
atagacttgtcgacgcatttgttta

SEQ ID NO: 32620 - DNA, 25 bp, SARS Virus
tagacttgtcgaagcatttgtttaa

SEQ ID NO: 32621 - DNA, 25 bp, SARS Virus
agacttgtcgacacatttgtttaag

SEQ ID NO: 32622 - DNA, 25 bp, SARS Virus
gacttgtcgacgaatttgtttaagc

SEQ ID NO: 32623 - DNA, 25 bp, SARS Virus
acttgtcgacgcatttgtttaagca

SEQ ID NO: 32624 - DNA, 25 bp, SARS Virus
cttgtcgacgcaattgtttaagcat

SEQ ID NO: 32625 - DNA, 25 bp, SARS Virus
ttgtcgacgcatatgtttaagcatc

SEQ ID NO: 32626 - DNA, 25 bp, SARS Virus
tgtcgacgcattagtttaagcatca

SEQ ID NO: 32627 - DNA, 25 bp, SARS Virus
gtcgacgcatttatttaagcatcac

SEQ ID NO: 32628 - DNA, 25 bp, SARS Virus
tcgacgcatttgattaagcatcacg

SEQ ID NO: 32629 - DNA, 25 bp, SARS Virus
cgacgcatttgtataagcatcacga

SEQ ID NO: 32630 - DNA, 25 bp, SARS Virus
gacgcatttgttaaagcatcacgac

SEQ ID NO: 32631 - DNA, 25 bp, SARS Virus
acgcatttgtttaagcatcacgacg

SEQ ID NO: 32632 - DNA, 25 bp, SARS Virus
cgcatttgtttaagcatcacgacgg

SEQ ID NO: 32633 - DNA, 25 bp, SARS Virus
gcatttgtttaaacatcacgacggt

SEQ ID NO: 32634 - DNA, 25 bp, SARS Virus
catttgtttaagaatcacgacggtt

SEQ ID NO: 32635 - DNA, 25 bp, SARS Virus
atttgtttaagcatcacgacggttc

SEQ ID NO: 32636 - DNA, 25 bp, SARS Virus
tttgtttaagcaacacgacggttct

SEQ ID NO: 32637 - DNA, 25 bp, SARS Virus
ttgtttaagcataacgacggttctt

SEQ ID NO: 32638 - DNA, 25 bp, SARS Virus
tgtttaagcatcacgacggttcttc

SEQ ID NO: 32639 - DNA, 25 bp, SARS Virus
gtttaagcatcaagacggttcttct

SEQ ID NO: 32640 - DNA, 25 bp, SARS Virus
tttaagcatcacaacggttcttctt

SEQ ID NO: 32641 - DNA, 25 bp, SARS Virus
ttaagcatcacgacggttcttcttg

SEQ ID NO: 32642 - DNA, 25 bp, SARS Virus
taagcatcacgaaggttcttcttgt

SEQ ID NO: 32643 - DNA, 25 bp, SARS Virus
aagcatcacgacagttcttcttgtt

SEQ ID NO: 32644 - DNA, 25 bp, SARS Virus
agcatcacgacgattcttcttgttg

SEQ ID NO: 32645 - DNA, 25 bp, SARS Virus
gcatcacgacggatcttcttgttgt

SEQ ID NO: 32646 - DNA, 25 bp, SARS Virus
catcacgacggtacttcttgttgta

SEQ ID NO: 32647 - DNA, 25 bp, SARS Virus
atcacgacggttattcttgttgtat

SEQ ID NO: 32648 - DNA, 25 bp, SARS Virus
tcacgacggttcatcttgttgtatg

SEQ ID NO: 32649 - DNA, 25 bp, SARS Virus
cacgacggttctacttgttgtatgg

SEQ ID NO: 32650 - DNA, 25 bp, SARS Virus
acgacggttcttattgttgtatgga

SEQ ID NO: 32651 - DNA, 25 bp, SARS Virus
cgacggttcttcatgttgtatggaa

SEQ ID NO: 32652 - DNA, 25 bp, SARS Virus
gacggttcttctagttgtatggaaa

SEQ ID NO: 32653 - DNA, 25 bp, SARS Virus
acggttcttcttattgtatggaaaa

SEQ ID NO: 32654 - DNA, 25 bp, SARS Virus
cggttcttcttgatgtatggaaaat

SEQ ID NO: 32655 - DNA, 25 bp, SARS Virus
ggttcttcttgtagtatggaaaatc

SEQ ID NO: 32656 - DNA, 25 bp, SARS Virus
gttcttcttgttatatggaaaatct

SEQ ID NO: 32657 - DNA, 25 bp, SARS Virus
ttcttcttgttgaatggaaaatctg

SEQ ID NO: 32658 - DNA, 25 bp, SARS Virus
tcttcttgttgtatggaaaatctga

SEQ ID NO: 32659 - DNA, 25 bp, SARS Virus
cttcttgttgtaaggaaaatctgat

SEQ ID NO: 32660 - DNA, 25 bp, SARS Virus
ttcttgttgtatagaaaatctgatt

SEQ ID NO: 32661 - DNA, 25 bp, SARS Virus
tcttgttgtatgaaaaatctgattg

SEQ ID NO: 32662 - DNA, 25 bp, SARS Virus
cttgttgtatggaaaatctgattga

SEQ ID NO: 32663 - DNA, 25 bp, SARS Virus
ttgttgtatggaaaatctgattgaa

SEQ ID NO: 32664 - DNA, 25 bp, SARS Virus
tgttgtatggaaaatctgattgaac

SEQ ID NO: 32665 - DNA, 25 bp, SARS Virus
gttgtatggaaaatctgattgaaca

SEQ ID NO: 32666 - DNA, 25 bp, SARS Virus
ttgtatggaaaaactgattgaacac

SEQ ID NO: 32667 - DNA, 25 bp, SARS Virus
tgtatggaaaatatgattgaacacg

SEQ ID NO: 32668 - DNA, 25 bp, SARS Virus
gtatggaaaatcagattgaacacga

SEQ ID NO: 32669 - DNA, 25 bp, SARS Virus
tatggaaaatctaattgaacacgat

SEQ ID NO: 32670 - DNA, 25 bp, SARS Virus
atggaaaatctgattgaacacgatg

SEQ ID NO: 32671 - DNA, 25 bp, SARS Virus
tggaaaatctgaatgaacacgatgt

SEQ ID NO: 32672 - DNA, 25 bp, SARS Virus
ggaaaatctgatagaacacgatgtt

SEQ ID NO: 32673 - DNA, 25 bp, SARS Virus
gaaaatctgattaaacacgatgttg

SEQ ID NO: 32674 - DNA, 25 bp, SARS Virus
aaaatctgattgaacacgatgttga

SEQ ID NO: 32675 - DNA, 25 bp, SARS Virus
aaatctgattgaacacgatgttgat

SEQ ID NO: 32676 - DNA, 25 bp, SARS Virus
aatctgattgaaaacgatgttgatc

SEQ ID NO: 32677 - DNA, 25 bp, SARS Virus
atctgattgaacacgatgttgatct

SEQ ID NO: 32678 - DNA, 25 bp, SARS Virus
tctgattgaacaagatgttgatctg

SEQ ID NO: 32679 - DNA, 25 bp, SARS Virus
ctgattgaacacaatgttgatctgt

SEQ ID NO: 32680 - DNA, 25 bp, SARS Virus
tgattgaacacgatgttgatctgtc

SEQ ID NO: 32681 - DNA, 25 bp, SARS Virus
gattgaacacgaagttgatctgtcc

SEQ ID NO: 32682 - DNA, 25 bp, SARS Virus
attgaacacgatattgatctgtcca

SEQ ID NO: 32683 - DNA, 25 bp, SARS Virus
ttgaacacgatgatgatctgtccaa

SEQ ID NO: 32684 - DNA, 25 bp, SARS Virus
tgaacacgatgtagatctgtccaac

SEQ ID NO: 32685 - DNA, 25 bp, SARS Virus
gaacacgatgttaatctgtccaaca

SEQ ID NO: 32686 - DNA, 25 bp, SARS Virus
aacacgatgttgatctgtccaacag

SEQ ID NO: 32687 - DNA, 25 bp, SARS Virus
acacgatgttgaactgtccaacagt

SEQ ID NO: 32688 - DNA, 25 bp, SARS Virus
cacgatgttgatatgtccaacagtt

SEQ ID NO: 32689 - DNA, 25 bp, SARS Virus
acgatgttgatcagtccaacagtta

SEQ ID NO: 32690 - DNA, 25 bp, SARS Virus
cgatgttgatctatccaacagttac

SEQ ID NO: 32691 - DNA, 25 bp, SARS Virus
gatgttgatctgaccaacagttaca

SEQ ID NO: 32692 - DNA, 25 bp, SARS Virus
atgttgatctgtacaacagttacag

SEQ ID NO: 32693 - DNA, 25 bp, SARS Virus
tgttgatctgtcaaacagttacagt

SEQ ID NO: 32694 - DNA, 25 bp, SARS Virus
gttgatctgtccaacagttacagta

SEQ ID NO: 32695 - DNA, 25 bp, SARS Virus
ttgatctgtccaacagttacagtat

SEQ ID NO: 32696 - DNA, 25 bp, SARS Virus
tgatctgtccaaaagttacagtatt

SEQ ID NO: 32697 - DNA, 25 bp, SARS Virus
gatctgtccaacagttacagtattg

SEQ ID NO: 32698 - DNA, 25 bp, SARS Virus
atctgtccaacaattacagtattga

SEQ ID NO: 32699 - DNA, 25 bp, SARS Virus
tctgtccaacagatacagtattgat

SEQ ID NO: 32700 - DNA, 25 bp, SARS Virus
ctgtccaacagtaacagtattgatg

SEQ ID NO: 32701 - DNA, 25 bp, SARS Virus
tgtccaacagttacagtattgatga

SEQ ID NO: 32702 - DNA, 25 bp, SARS Virus
gtccaacagttaaagtattgatgat

SEQ ID NO: 32703 - DNA, 25 bp, SARS Virus
tccaacagttacagtattgatgatt

SEQ ID NO: 32704 - DNA, 25 bp, SARS Virus
ccaacagttacaatattgatgattt

SEQ ID NO: 32705 - DNA, 25 bp, SARS Virus
caacagttacagaattgatgatttt

SEQ ID NO: 32706 - DNA, 25 bp, SARS Virus
aacagttacagtattgatgatttta

SEQ ID NO: 32707 - DNA, 25 bp, SARS Virus
acagttacagtaatgatgattttag

SEQ ID NO: 32708 - DNA, 25 bp, SARS Virus
cagttacagtatagatgattttaga

SEQ ID NO: 32709 - DNA, 25 bp, SARS Virus
agttacagtattaatgattttagag

SEQ ID NO: 32710 - DNA, 25 bp, SARS Virus
gttacagtattgatgattttagagt

SEQ ID NO: 32711 - DNA, 25 bp, SARS Virus
ttacagtattgaagattttagagtg

SEQ ID NO: 32712 - DNA, 25 bp, SARS Virus
tacagtattgataattttagagtga

SEQ ID NO: 32713 - DNA, 25 bp, SARS Virus
acagtattgatgattttagagtgag

SEQ ID NO: 32714 - DNA, 25 bp, SARS Virus
cagtattgatgaatttagagtgagt

SEQ ID NO: 32715 - DNA, 25 bp, SARS Virus
agtattgatgatattagagtgagtt

SEQ ID NO: 32716 - DNA, 25 bp, SARS Virus
gtattgatgattatagagtgagttc

SEQ ID NO: 32717 - DNA, 25 bp, SARS Virus
tattgatgatttaagagtgagttcc

SEQ ID NO: 32718 - DNA, 25 bp, SARS Virus
attgatgattttagagtgagttccc

SEQ ID NO: 32719 - DNA, 25 bp, SARS Virus
ttgatgattttaaagtgagttccca

SEQ ID NO: 32720 - DNA, 25 bp, SARS Virus
tgatgattttagagtgagttcccac

SEQ ID NO: 32721 - DNA, 25 bp, SARS Virus
gatgattttagaatgagttcccacc

SEQ ID NO: 32722 - DNA, 25 bp, SARS Virus
atgattttagagagagttcccacca

SEQ ID NO: 32723 - DNA, 25 bp, SARS Virus
tgattttagagtaagttcccaccat

SEQ ID NO: 32724 - DNA, 25 bp, SARS Virus
gattttagagtgagttcccaccatt

SEQ ID NO: 32725 - DNA, 25 bp, SARS Virus
attttagagtgaattcccaccattc

SEQ ID NO: 32726 - DNA, 25 bp, SARS Virus
ttttagagtgagatcccaccattct

SEQ ID NO: 32727 - DNA, 25 bp, SARS Virus
tttagagtgagtacccaccattcta

SEQ ID NO: 32728 - DNA, 25 bp, SARS Virus
ttagagtgagttaccaccattctaa

SEQ ID NO: 32729 - DNA, 25 bp, SARS Virus
tagagtgagttcacaccattctaac

SEQ ID NO: 32730 - DNA, 25 bp, SARS Virus
agagtgagttccaaccattctaaca

SEQ ID NO: 32731 - DNA, 25 bp, SARS Virus
gagtgagttcccaccattctaacaa

SEQ ID NO: 32732 - DNA, 25 bp, SARS Virus
agtgagttcccaacattctaacaat

SEQ ID NO: 32733 - DNA, 25 bp, SARS Virus
gtgagttcccacaattctaacaatc

SEQ ID NO: 32734 - DNA, 25 bp, SARS Virus
tgagttcccaccattctaacaatca

SEQ ID NO: 32735 - DNA, 25 bp, SARS Virus
gagttcccaccaatctaacaatcat

SEQ ID NO: 32736 - DNA, 25 bp, SARS Virus
agttcccaccatactaacaatcatg

SEQ ID NO: 32737 - DNA, 25 bp, SARS Virus
gttcccaccattataacaatcatga

SEQ ID NO: 32738 - DNA, 25 bp, SARS Virus
ttcccaccattcaaacaatcatgaa

SEQ ID NO: 32739 - DNA, 25 bp, SARS Virus
tcccaccattctaacaatcatgaac

SEQ ID NO: 32740 - DNA, 25 bp, SARS Virus
cccaccattctaacaatcatgaaca

SEQ ID NO: 32741 - DNA, 25 bp, SARS Virus
ccaccattctaaaaatcatgaacaa

SEQ ID NO: 32742 - DNA, 25 bp, SARS Virus
caccattctaacaatcatgaacaaa

SEQ ID NO: 32743 - DNA, 25 bp, SARS Virus
accattctaacaatcatgaacaaaa

SEQ ID NO: 32744 - DNA, 25 bp, SARS Virus
ccattctaacaaacatgaacaaaat

SEQ ID NO: 32745 - DNA, 25 bp, SARS Virus
cattctaacaataatgaacaaaatt

SEQ ID NO: 32746 - DNA, 25 bp, SARS Virus
attctaacaatcatgaacaaaattt

SEQ ID NO: 32747 - DNA, 25 bp, SARS Virus
ttctaacaatcaagaacaaaatttg

SEQ ID NO: 32748 - DNA, 25 bp, SARS Virus
tctaacaatcataaacaaaatttga

SEQ ID NO: 32749 - DNA, 25 bp, SARS Virus
ctaacaatcatgaacaaaatttgaa

SEQ ID NO: 32750 - DNA, 25 bp, SARS Virus
taacaatcatgaacaaaatttgaat

SEQ ID NO: 32751 - DNA, 25 bp, SARS Virus
aacaatcatgaaaaaaatttgaata

SEQ ID NO: 32752 - DNA, 25 bp, SARS Virus
acaatcatgaacaaaatttgaatac

SEQ ID NO: 32753 - DNA, 25 bp, SARS Virus
caatcatgaacaaaatttgaatacg

SEQ ID NO: 32754 - DNA, 25 bp, SARS Virus
aatcatgaacaaaatttgaatacga

SEQ ID NO: 32755 - DNA, 25 bp, SARS Virus
atcatgaacaaaatttgaatacgaa

SEQ ID NO: 32756 - DNA, 25 bp, SARS Virus
tcatgaacaaaaattgaatacgaat

SEQ ID NO: 32757 - DNA, 25 bp, SARS Virus
catgaacaaaatatgaatacgaatt

SEQ ID NO: 32758 - DNA, 25 bp, SARS Virus
atgaacaaaattagaatacgaattc

SEQ ID NO: 32759 - DNA, 25 bp, SARS Virus
tgaacaaaatttaaatacgaattcc

SEQ ID NO: 32760 - DNA, 25 bp, SARS Virus
gaacaaaatttgaatacgaattccg

SEQ ID NO: 32761 - DNA, 25 bp, SARS Virus
aacaaaatttgaatacgaattccgg

SEQ ID NO: 32762 - DNA, 25 bp, SARS Virus
acaaaatttgaaaacgaattccggt

SEQ ID NO: 32763 - DNA, 25 bp, SARS Virus
caaaatttgaatacgaattccggtg

SEQ ID NO: 32764 - DNA, 25 bp, SARS Virus
aaaatttgaataagaattccggtgt

SEQ ID NO: 32765 - DNA, 25 bp, SARS Virus
aaatttgaatacaaattccggtgta

SEQ ID NO: 32766 - DNA, 25 bp, SARS Virus
aatttgaatacgaattccggtgtaa

SEQ ID NO: 32767 - DNA, 25 bp, SARS Virus
atttgaatacgaattccggtgtaat

SEQ ID NO: 32768 - DNA, 25 bp, SARS Virus
tttgaatacgaaatccggtgtaata

SEQ ID NO: 32769 - DNA, 25 bp, SARS Virus
ttgaatacgaataccggtgtaataa

SEQ ID NO: 32770 - DNA, 25 bp, SARS Virus
tgaatacgaattacggtgtaataac

SEQ ID NO: 32771 - DNA, 25 bp, SARS Virus
gaatacgaattcaggtgtaataaca

SEQ ID NO: 32772 - DNA, 25 bp, SARS Virus
aatacgaattccagtgtaataacac

SEQ ID NO: 32773 - DNA, 25 bp, SARS Virus
atacgaattccgatgtaataacacg

SEQ ID NO: 32774 - DNA, 25 bp, SARS Virus
tacgaattccggagtaataacacgc

SEQ ID NO: 32775 - DNA, 25 bp, SARS Virus
acgaattccggtataataacacgca

SEQ ID NO: 32776 - DNA, 25 bp, SARS Virus
cgaattccggtgaaataacacgcaa

SEQ ID NO: 32777 - DNA, 25 bp, SARS Virus
gaattccggtgtaataacacgcaag

SEQ ID NO: 32778 - DNA, 25 bp, SARS Virus
aattccggtgtaataacacgcaaga

SEQ ID NO: 32779 - DNA, 25 bp, SARS Virus
attccggtgtaaaaacacgcaagaa

SEQ ID NO: 32780 - DNA, 25 bp, SARS Virus
ttccggtgtaataacacgcaagaac

SEQ ID NO: 32781 - DNA, 25 bp, SARS Virus
tccggtgtaataacacgcaagaacg

SEQ ID NO: 32782 - DNA, 25 bp, SARS Virus
ccggtgtaataaaacgcaagaacga

SEQ ID NO: 32783 - DNA, 25 bp, SARS Virus
cggtgtaataacacgcaagaacgac

SEQ ID NO: 32784 - DNA, 25 bp, SARS Virus
ggtgtaataacaagcaagaacgacg

SEQ ID NO: 32785 - DNA, 25 bp, SARS Virus
gtgtaataacacacaagaacgacgt

SEQ ID NO: 32786 - DNA, 25 bp, SARS Virus
tgtaataacacgaaagaacgacgta

SEQ ID NO: 32787 - DNA, 25 bp, SARS Virus
gtaataacacgcaagaacgacgtaa

SEQ ID NO: 32788 - DNA, 25 bp, SARS Virus
taataacacgcaagaacgacgtaac

SEQ ID NO: 32789 - DNA, 25 bp, SARS Virus
aataacacgcaaaaacgacgtaacc

SEQ ID NO: 32790 - DNA, 25 bp, SARS Virus
ataacacgcaagaacgacgtaacca

SEQ ID NO: 32791 - DNA, 25 bp, SARS Virus
taacacgcaagaacgacgtaaccaa

SEQ ID NO: 32792 - DNA, 25 bp, SARS Virus
aacacgcaagaaagacgtaaccaaa

SEQ ID NO: 32793 - DNA, 25 bp, SARS Virus
acacgcaagaacaacgtaaccaaac

SEQ ID NO: 32794 - DNA, 25 bp, SARS Virus
cacgcaagaacgacgtaaccaaaca

SEQ ID NO: 32795 - DNA, 25 bp, SARS Virus
acgcaagaacgaagtaaccaaacaa

SEQ ID NO: 32796 - DNA, 25 bp, SARS Virus
cgcaagaacgacataaccaaacaat

SEQ ID NO: 32797 - DNA, 25 bp, SARS Virus
gcaagaacgacgaaaccaaacaata

SEQ ID NO: 32798 - DNA, 25 bp, SARS Virus
caagaacgacgtaaccaaacaatat

SEQ ID NO: 32799 - DNA, 25 bp, SARS Virus
aagaacgacgtaaccaaacaatata

SEQ ID NO: 32800 - DNA, 25 bp, SARS Virus
agaacgacgtaaacaaacaatatag

SEQ ID NO: 32801 - DNA, 25 bp, SARS Virus
gaacgacgtaacaaaacaatatagc

SEQ ID NO: 32802 - DNA, 25 bp, SARS Virus
aacgacgtaaccaaacaatatagca

SEQ ID NO: 32803 - DNA, 25 bp, SARS Virus
acgacgtaaccaaacaatatagcaa

SEQ ID NO: 32804 - DNA, 25 bp, SARS Virus
cgacgtaaccaaacaatatagcaat

SEQ ID NO: 32805 - DNA, 25 bp, SARS Virus
gacgtaaccaaaaaatatagcaata

SEQ ID NO: 32806 - DNA, 25 bp, SARS Virus
acgtaaccaaacaatatagcaatac

SEQ ID NO: 32807 - DNA, 25 bp, SARS Virus
cgtaaccaaacaatatagcaatacg

SEQ ID NO: 32808 - DNA, 25 bp, SARS Virus
gtaaccaaacaaaatagcaatacgg

SEQ ID NO: 32809 - DNA, 25 bp, SARS Virus
taaccaaacaatatagcaatacggt

SEQ ID NO: 32810 - DNA, 25 bp, SARS Virus
aaccaaacaataaagcaatacggtc

SEQ ID NO: 32811 - DNA, 25 bp, SARS Virus
accaaacaatatagcaatacggtca

SEQ ID NO: 32812 - DNA, 25 bp, SARS Virus
ccaaacaatataacaatacggtcat

SEQ ID NO: 32813 - DNA, 25 bp, SARS Virus
caaacaatatagaaatacggtcatg

SEQ ID NO: 32814 - DNA, 25 bp, SARS Virus
aaacaatatagcaatacggtcatgt

SEQ ID NO: 32815 - DNA, 25 bp, SARS Virus
aacaatatagcaatacggtcatgta

SEQ ID NO: 32816 - DNA, 25 bp, SARS Virus
acaatatagcaaaacggtcatgtat

SEQ ID NO: 32817 - DNA, 25 bp, SARS Virus
caatatagcaatacggtcatgtatg

SEQ ID NO: 32818 - DNA, 25 bp, SARS Virus
aatatagcaataaggtcatgtatgt

SEQ ID NO: 32819 - DNA, 25 bp, SARS Virus
atatagcaatacagtcatgtatgta

SEQ ID NO: 32820 - DNA, 25 bp, SARS Virus
tatagcaatacgatcatgtatgtaa

SEQ ID NO: 32821 - DNA, 25 bp, SARS Virus
atagcaatacggacatgtatgtaac

SEQ ID NO: 32822 - DNA, 25 bp, SARS Virus
tagcaatacggtaatgtatgtaaca

SEQ ID NO: 32823 - DNA, 25 bp, SARS Virus
agcaatacggtcatgtatgtaacag

SEQ ID NO: 32824 - DNA, 25 bp, SARS Virus
gcaatacggtcaagtatgtaacagt

SEQ ID NO: 32825 - DNA, 25 bp, SARS Virus
taccacaggaaacatgtaagcacag

SEQ ID NO: 32826 - DNA, 25 bp, SARS Virus
accacaggaaagctgtaagcacagt

SEQ ID NO: 32827 - DNA, 25 bp, SARS Virus
ccacaggaaagacgtaagcacagtc

SEQ ID NO: 32828 - DNA, 25 bp, SARS Virus
cacaggaaagatctaagcacagtcg

SEQ ID NO: 32829 - DNA, 25 bp, SARS Virus
acaggaaagatgcaagcacagtcga

SEQ ID NO: 32830 - DNA, 25 bp, SARS Virus
caggaaagatgtcagcacagtcgac

SEQ ID NO: 32831 - DNA, 25 bp, SARS Virus
aggaaagatgtacgcacagtcgacg

SEQ ID NO: 32832 - DNA, 25 bp, SARS Virus
ggaaagatgtaaccacagtcgacgg

SEQ ID NO: 32833 - DNA, 25 bp, SARS Virus
gaaagatgtaagcacagtcgacggg

SEQ ID NO: 32834 - DNA, 25 bp, SARS Virus
aaagatgtaagcccagtcgacgggc

SEQ ID NO: 32835 - DNA, 25 bp, SARS Virus
aagatgtaagcacagtcgacgggct

SEQ ID NO: 32836 - DNA, 25 bp, SARS Virus
agatgtaagcaccgtcgacgggctg

SEQ ID NO: 32837 - DNA, 25 bp, SARS Virus
gatgtaagcacactcgacgggctgt

SEQ ID NO: 32838 - DNA, 25 bp, SARS Virus
atgtaagcacagccgacgggctgtt

SEQ ID NO: 32839 - DNA, 25 bp, SARS Virus
tgtaagcacagtcgacgggctgttc

SEQ ID NO: 32840 - DNA, 25 bp, SARS Virus
gtaagcacagtccacgggctgttcc

SEQ ID NO: 32841 - DNA, 25 bp, SARS Virus
taagcacagtcgccgggctgttcca

SEQ ID NO: 32842 - DNA, 25 bp, SARS Virus
aagcacagtcgacgggctgttccac

SEQ ID NO: 32843 - DNA, 25 bp, SARS Virus
agcacagtcgaccggctgttccaca

SEQ ID NO: 32844 - DNA, 25 bp, SARS Virus
gcacagtcgacgcgctgttccacaa

SEQ ID NO: 32845 - DNA, 25 bp, SARS Virus
cacagtcgacggcctgttccacaac

SEQ ID NO: 32846 - DNA, 25 bp, SARS Virus
acagtcgacgggctgttccacaaca

SEQ ID NO: 32847 - DNA, 25 bp, SARS Virus
cagtcgacgggccgttccacaacaa

SEQ ID NO: 32848 - DNA, 25 bp, SARS Virus
agtcgacgggctcttccacaacaac

SEQ ID NO: 32849 - DNA, 25 bp, SARS Virus
gtcgacgggctgctccacaacaact

SEQ ID NO: 32850 - DNA, 25 bp, SARS Virus
tcgacgggctgtcccacaacaacta

SEQ ID NO: 32851 - DNA, 25 bp, SARS Virus
cgacgggctgttccacaacaactat

SEQ ID NO: 32852 - DNA, 25 bp, SARS Virus
gacgggctgttccacaacaactatg

SEQ ID NO: 32853 - DNA, 25 bp, SARS Virus
acgggctgttccccaacaactatgg

SEQ ID NO: 32854 - DNA, 25 bp, SARS Virus
cgggctgttccacaacaactatggc

SEQ ID NO: 32855 - DNA, 25 bp, SARS Virus
gggctgttccaccacaactatggct

SEQ ID NO: 32856 - DNA, 25 bp, SARS Virus
ggctgttccacaccaactatggcta

SEQ ID NO: 32857 - DNA, 25 bp, SARS Virus
gctgttccacaacaactatggctac

SEQ ID NO: 32858 - DNA, 25 bp, SARS Virus
ctgttccacaaccactatggctaca

SEQ ID NO: 32859 - DNA, 25 bp, SARS Virus
tgttccacaacacctatggctacaa

SEQ ID NO: 32860 - DNA, 25 bp, SARS Virus
gttccacaacaactatggctacaac

SEQ ID NO: 32861 - DNA, 25 bp, SARS Virus
ttccacaacaaccatggctacaact

SEQ ID NO: 32862 - DNA, 25 bp, SARS Virus
tccacaacaactctggctacaactg

SEQ ID NO: 32863 - DNA, 25 bp, SARS Virus
ccacaacaactacggctacaactgt

SEQ ID NO: 32864 - DNA, 25 bp, SARS Virus
cacaacaactatcgctacaactgtg

SEQ ID NO: 32865 - DNA, 25 bp, SARS Virus
acaacaactatgcctacaactgtgt

SEQ ID NO: 32866 - DNA, 25 bp, SARS Virus
caacaactatggctacaactgtgtt

SEQ ID NO: 32867 - DNA, 25 bp, SARS Virus
aacaactatggccacaactgtgttt

SEQ ID NO: 32868 - DNA, 25 bp, SARS Virus
acaactatggctccaactgtgtttc

SEQ ID NO: 32869 - DNA, 25 bp, SARS Virus
caactatggctacaactgtgtttcc

SEQ ID NO: 32870 - DNA, 25 bp, SARS Virus
aactatggctaccactgtgtttcct

SEQ ID NO: 32871 - DNA, 25 bp, SARS Virus
actatggctacacctgtgtttccta

SEQ ID NO: 32872 - DNA, 25 bp, SARS Virus
ctatggctacaactgtgtttcctac

SEQ ID NO: 32873 - DNA, 25 bp, SARS Virus
tatggctacaaccgtgtttcctaca

SEQ ID NO: 32874 - DNA, 25 bp, SARS Virus
atggctacaactctgtttcctacaa

SEQ ID NO: 32875 - DNA, 25 bp, SARS Virus
tggctacaactgcgtttcctacaat

SEQ ID NO: 32876 - DNA, 25 bp, SARS Virus
ggctacaactgtctttcctacaata

SEQ ID NO: 32877 - DNA, 25 bp, SARS Virus
gctacaactgtgcttcctacaataa

SEQ ID NO: 32878 - DNA, 25 bp, SARS Virus
ctacaactgtgtctcctacaataac

SEQ ID NO: 32879 - DNA, 25 bp, SARS Virus
tacaactgtgttccctacaataact

SEQ ID NO: 32880 - DNA, 25 bp, SARS Virus
acaactgtgtttcctacaataactt

SEQ ID NO: 32881 - DNA, 25 bp, SARS Virus
caactgtgtttcctacaataactta

SEQ ID NO: 32882 - DNA, 25 bp, SARS Virus
aactgtgtttcccacaataacttac

SEQ ID NO: 32883 - DNA, 25 bp, SARS Virus
actgtgtttcctccaataacttaca

SEQ ID NO: 32884 - DNA, 25 bp, SARS Virus
ctgtgtttcctacaataacttacag

SEQ ID NO: 32885 - DNA, 25 bp, SARS Virus
tgtgtttcctaccataacttacaga

SEQ ID NO: 32886 - DNA, 25 bp, SARS Virus
gtgtttcctacactaacttacagag

SEQ ID NO: 32887 - DNA, 25 bp, SARS Virus
tgtttcctacaacaacttacagagt

SEQ ID NO: 32888 - DNA, 25 bp, SARS Virus
gtttcctacaatcacttacagagtt

SEQ ID NO: 32889 - DNA, 25 bp, SARS Virus
tttcctacaataccttacagagttt

SEQ ID NO: 32890 - DNA, 25 bp, SARS Virus
ttcctacaataacttacagagtttg

SEQ ID NO: 32891 - DNA, 25 bp, SARS Virus
tcctacaataacctacagagtttga

SEQ ID NO: 32892 - DNA, 25 bp, SARS Virus
cctacaataactcacagagtttgaa

SEQ ID NO: 32893 - DNA, 25 bp, SARS Virus
ctacaataacttccagagtttgaaa

SEQ ID NO: 32894 - DNA, 25 bp, SARS Virus
tacaataacttacagagtttgaaag

SEQ ID NO: 32895 - DNA, 25 bp, SARS Virus
acaataacttaccgagtttgaaagt

SEQ ID NO: 32896 - DNA, 25 bp, SARS Virus
caataacttacacagtttgaaagtg

SEQ ID NO: 32897 - DNA, 25 bp, SARS Virus
aataacttacagcgtttgaaagtgt

SEQ ID NO: 32898 - DNA, 25 bp, SARS Virus
ataacttacagactttgaaagtgta

SEQ ID NO: 32899 - DNA, 25 bp, SARS Virus
taacttacagagcttgaaagtgtag

SEQ ID NO: 32900 - DNA, 25 bp, SARS Virus
aacttacagagtctgaaagtgtagt

SEQ ID NO: 32901 - DNA, 25 bp, SARS Virus
acttacagagttcgaaagtgtagtg

SEQ ID NO: 32902 - DNA, 25 bp, SARS Virus
cttacagagtttcaaagtgtagtga

SEQ ID NO: 32903 - DNA, 25 bp, SARS Virus
ttacagagtttgcaagtgtagtgag

SEQ ID NO: 32904 - DNA, 25 bp, SARS Virus
tacagagtttgacagtgtagtgaga

SEQ ID NO: 32905 - DNA, 25 bp, SARS Virus
acagagtttgaacgtgtagtgagac

SEQ ID NO: 32906 - DNA, 25 bp, SARS Virus
cagagtttgaaactgtagtgagact

SEQ ID NO: 32907 - DNA, 25 bp, SARS Virus
agagtttgaaagcgtagtgagactg

SEQ ID NO: 32908 - DNA, 25 bp, SARS Virus
gagtttgaaagtctagtgagactga

SEQ ID NO: 32909 - DNA, 25 bp, SARS Virus
agtttgaaagtgcagtgagactgaa

SEQ ID NO: 32910 - DNA, 25 bp, SARS Virus
gtttgaaagtgtcgtgagactgaat

SEQ ID NO: 32911 - DNA, 25 bp, SARS Virus
tttgaaagtgtactgagactgaatc

SEQ ID NO: 32912 - DNA, 25 bp, SARS Virus
ttgaaagtgtagcgagactgaatct

SEQ ID NO: 32913 - DNA, 25 bp, SARS Virus
tgaaagtgtagtcagactgaatctt

SEQ ID NO: 32914 - DNA, 25 bp, SARS Virus
gaaagtgtagtgcgactgaatcttc

SEQ ID NO: 32915 - DNA, 25 bp, SARS Virus
aaagtgtagtgacactgaatcttca

SEQ ID NO: 32916 - DNA, 25 bp, SARS Virus
aagtgtagtgagcctgaatcttcac

SEQ ID NO: 32917 - DNA, 25 bp, SARS Virus
agtgtagtgagactgaatcttcact

SEQ ID NO: 32918 - DNA, 25 bp, SARS Virus
gtgtagtgagaccgaatcttcactg

SEQ ID NO: 32919 - DNA, 25 bp, SARS Virus
tgtagtgagactcaatcttcactgt

SEQ ID NO: 32920 - DNA, 25 bp, SARS Virus
gtagtgagactgcatcttcactgtc

SEQ ID NO: 32921 - DNA, 25 bp, SARS Virus
tagtgagactgactcttcactgtcc

SEQ ID NO: 32922 - DNA, 25 bp, SARS Virus
agtgagactgaaccttcactgtcca

SEQ ID NO: 32923 - DNA, 25 bp, SARS Virus
gtgagactgaatcttcactgtccac

SEQ ID NO: 32924 - DNA, 25 bp, SARS Virus
tgagactgaatcctcactgtccact

SEQ ID NO: 32925 - DNA, 25 bp, SARS Virus
gagactgaatctccactgtccactg

SEQ ID NO: 32926 - DNA, 25 bp, SARS Virus
agactgaatcttcactgtccactgt

SEQ ID NO: 32927 - DNA, 25 bp, SARS Virus
gactgaatcttccctgtccactgtc

SEQ ID NO: 32928 - DNA, 25 bp, SARS Virus
actgaatcttcactgtccactgtca

SEQ ID NO: 32929 - DNA, 25 bp, SARS Virus
ctgaatcttcaccgtccactgtcaa

SEQ ID NO: 32930 - DNA, 25 bp, SARS Virus
tgaatcttcactctccactgtcaac

SEQ ID NO: 32931 - DNA, 25 bp, SARS Virus
gaatcttcactgcccactgtcaaca

SEQ ID NO: 32932 - DNA, 25 bp, SARS Virus
aatcttcactgtccactgtcaacat

SEQ ID NO: 32933 - DNA, 25 bp, SARS Virus
atcttcactgtccactgtcaacatt

SEQ ID NO: 32934 - DNA, 25 bp, SARS Virus
tcttcactgtcccctgtcaacattg

SEQ ID NO: 32935 - DNA, 25 bp, SARS Virus
cttcactgtccactgtcaacattgt

SEQ ID NO: 32936 - DNA, 25 bp, SARS Virus
ttcactgtccaccgtcaacattgtt

SEQ ID NO: 32937 - DNA, 25 bp, SARS Virus
tcactgtccactctcaacattgtta

SEQ ID NO: 32938 - DNA, 25 bp, SARS Virus
cactgtccactgccaacattgttaa

SEQ ID NO: 32939 - DNA, 25 bp, SARS Virus
actgtccactgtcaacattgttaaa

SEQ ID NO: 32940 - DNA, 25 bp, SARS Virus
ctgtccactgtccacattgttaaag

SEQ ID NO: 32941 - DNA, 25 bp, SARS Virus
tgtccactgtcaccattgttaaagt

SEQ ID NO: 32942 - DNA, 25 bp, SARS Virus
gtccactgtcaacattgttaaagta

SEQ ID NO: 32943 - DNA, 25 bp, SARS Virus
tccactgtcaaccttgttaaagtac

SEQ ID NO: 32944 - DNA, 25 bp, SARS Virus
ccactgtcaacactgttaaagtacg

SEQ ID NO: 32945 - DNA, 25 bp, SARS Virus
cactgtcaacatcgttaaagtacga

SEQ ID NO: 32946 - DNA, 25 bp, SARS Virus
actgtcaacattcttaaagtacgag

SEQ ID NO: 32947 - DNA, 25 bp, SARS Virus
ctgtcaacattgctaaagtacgagt

SEQ ID NO: 32948 - DNA, 25 bp, SARS Virus
tgtcaacattgtcaaagtacgagtg

SEQ ID NO: 32949 - DNA, 25 bp, SARS Virus
gtcaacattgttcaagtacgagtgg

SEQ ID NO: 32950 - DNA, 25 bp, SARS Virus
tcaacattgttacagtacgagtgga

SEQ ID NO: 32951 - DNA, 25 bp, SARS Virus
caacattgttaacgtacgagtggat

SEQ ID NO: 32952 - DNA, 25 bp, SARS Virus
aacattgttaaactacgagtggata

SEQ ID NO: 32953 - DNA, 25 bp, SARS Virus
acattgttaaagcacgagtggatat

SEQ ID NO: 32954 - DNA, 25 bp, SARS Virus
cattgttaaagtccgagtggatatt

SEQ ID NO: 32955 - DNA, 25 bp, SARS Virus
attgttaaagtacgagtggatatta

SEQ ID NO: 32956 - DNA, 25 bp, SARS Virus
ttgttaaagtaccagtggatattat

SEQ ID NO: 32957 - DNA, 25 bp, SARS Virus
tgttaaagtacgcgtggatattatt

SEQ ID NO: 32958 - DNA, 25 bp, SARS Virus
gttaaagtacgactggatattattc

SEQ ID NO: 32959 - DNA, 25 bp, SARS Virus
ttaaagtacgagcggatattattcc

SEQ ID NO: 32960 - DNA, 25 bp, SARS Virus
taaagtacgagtcgatattattcca

SEQ ID NO: 32961 - DNA, 25 bp, SARS Virus
aaagtacgagtgcatattattccaa

SEQ ID NO: 32962 - DNA, 25 bp, SARS Virus
aagtacgagtggctattattccaac

SEQ ID NO: 32963 - DNA, 25 bp, SARS Virus
agtacgagtggacattattccaact

SEQ ID NO: 32964 - DNA, 25 bp, SARS Virus
gtacgagtggatcttattccaactt

SEQ ID NO: 32965 - DNA, 25 bp, SARS Virus
tacgagtggatactattccaacttt

SEQ ID NO: 32966 - DNA, 25 bp, SARS Virus
acgagtggatatcattccaactttt

SEQ ID NO: 32967 - DNA, 25 bp, SARS Virus
cgagtggatattcttccaacttttg

SEQ ID NO: 32968 - DNA, 25 bp, SARS Virus
gagtggatattactccaacttttgt

SEQ ID NO: 32969 - DNA, 25 bp, SARS Virus
agtggatattatcccaacttttgta

SEQ ID NO: 32970 - DNA, 25 bp, SARS Virus
gtggatattattccaacttttgtac

SEQ ID NO: 32971 - DNA, 25 bp, SARS Virus
tggatattattccaacttttgtact

SEQ ID NO: 32972 - DNA, 25 bp, SARS Virus
ggatattattcccacttttgtactg

SEQ ID NO: 32973 - DNA, 25 bp, SARS Virus
gatattattccaccttttgtactgc

SEQ ID NO: 32974 - DNA, 25 bp, SARS Virus
atattattccaacttttgtactgcg

SEQ ID NO: 32975 - DNA, 25 bp, SARS Virus
tattattccaacctttgtactgcgg

SEQ ID NO: 32976 - DNA, 25 bp, SARS Virus
attattccaactcttgtactgcggg

SEQ ID NO: 32977 - DNA, 25 bp, SARS Virus
ttattccaacttctgtactgcgggt

SEQ ID NO: 32978 - DNA, 25 bp, SARS Virus
tattccaactttcgtactgcgggtc

SEQ ID NO: 32979 - DNA, 25 bp, SARS Virus
attccaacttttctactgcgggtct

SEQ ID NO: 32980 - DNA, 25 bp, SARS Virus
ttccaacttttgcactgcgggtctc

SEQ ID NO: 32981 - DNA, 25 bp, SARS Virus
tccaacttttgtcctgcgggtctct

SEQ ID NO: 32982 - DNA, 25 bp, SARS Virus
ccaacttttgtactgcgggtctcta

SEQ ID NO: 32983 - DNA, 25 bp, SARS Virus
caacttttgtaccgcgggtctctag

SEQ ID NO: 32984 - DNA, 25 bp, SARS Virus
aacttttgtactccgggtctctaga

SEQ ID NO: 32985 - DNA, 25 bp, SARS Virus
acttttgtactgcgggtctctagaa

SEQ ID NO: 32986 - DNA, 25 bp, SARS Virus
cttttgtactgccggtctctagaac

SEQ ID NO: 32987 - DNA, 25 bp, SARS Virus
ttttgtactgcgcgtctctagaacc

SEQ ID NO: 32988 - DNA, 25 bp, SARS Virus
tttgtactgcggctctctagaaccg

SEQ ID NO: 32989 - DNA, 25 bp, SARS Virus
ttgtactgcgggcctctagaaccgc

SEQ ID NO: 32990 - DNA, 25 bp, SARS Virus
tgtactgcgggtctctagaaccgcg

SEQ ID NO: 32991 - DNA, 25 bp, SARS Virus
gtactgcgggtccctagaaccgcgt

SEQ ID NO: 32992 - DNA, 25 bp, SARS Virus
tactgcgggtctctagaaccgcgta

SEQ ID NO: 32993 - DNA, 25 bp, SARS Virus
actgcgggtctccagaaccgcgtac

SEQ ID NO: 32994 - DNA, 25 bp, SARS Virus
ctgcgggtctctcgaaccgcgtaca

SEQ ID NO: 32995 - DNA, 25 bp, SARS Virus
tgcgggtctctacaaccgcgtacat

SEQ ID NO: 32996 - DNA, 25 bp, SARS Virus
gcgggtctctagcaccgcgtacata

SEQ ID NO: 32997 - DNA, 25 bp, SARS Virus
cgggtctctagacccgcgtacataa

SEQ ID NO: 32998 - DNA, 25 bp, SARS Virus
gggtctctagaaccgcgtacataac

SEQ ID NO: 32999 - DNA, 25 bp, SARS Virus
ggtctctagaaccgcgtacataact

SEQ ID NO: 33000 - DNA, 25 bp, SARS Virus
gtctctagaaccccgtacataactg

SEQ ID NO: 33001 - DNA, 25 bp, SARS Virus
tctctagaaccgcgtacataactga

SEQ ID NO: 33002 - DNA, 25 bp, SARS Virus
ctctagaaccgcctacataactgac

SEQ ID NO: 33003 - DNA, 25 bp, SARS Virus
tctagaaccgcgcacataactgaca

SEQ ID NO: 33004 - DNA, 25 bp, SARS Virus
ctagaaccgcgtccataactgacat

SEQ ID NO: 33005 - DNA, 25 bp, SARS Virus
tagaaccgcgtacataactgacatt

SEQ ID NO: 33006 - DNA, 25 bp, SARS Virus
agaaccgcgtacctaactgacatta

SEQ ID NO: 33007 - DNA, 25 bp, SARS Virus
gaaccgcgtacacaactgacattac

SEQ ID NO: 33008 - DNA, 25 bp, SARS Virus
aaccgcgtacatcactgacattacg

SEQ ID NO: 33009 - DNA, 25 bp, SARS Virus
accgcgtacatacctgacattacgt

SEQ ID NO: 33010 - DNA, 25 bp, SARS Virus
ccgcgtacataactgacattacgtt

SEQ ID NO: 33011 - DNA, 25 bp, SARS Virus
cgcgtacataaccgacattacgttc

SEQ ID NO: 33012 - DNA, 25 bp, SARS Virus
gcgtacataactcacattacgttcc

SEQ ID NO: 33013 - DNA, 25 bp, SARS Virus
cgtacataactgccattacgttccg

SEQ ID NO: 33014 - DNA, 25 bp, SARS Virus
gtacataactgacattacgttccgt

SEQ ID NO: 33015 - DNA, 25 bp, SARS Virus
tacataactgaccttacgttccgta

SEQ ID NO: 33016 - DNA, 25 bp, SARS Virus
acataactgacactacgttccgtat

SEQ ID NO: 33017 - DNA, 25 bp, SARS Virus
cataactgacatcacgttccgtata

SEQ ID NO: 33018 - DNA, 25 bp, SARS Virus
ataactgacattccgttccgtatag

SEQ ID NO: 33019 - DNA, 25 bp, SARS Virus
taactgacattacgttccgtatagt

SEQ ID NO: 33020 - DNA, 25 bp, SARS Virus
aactgacattaccttccgtatagtt

SEQ ID NO: 33021 - DNA, 25 bp, SARS Virus
actgacattacgctccgtatagtta

SEQ ID NO: 33022 - DNA, 25 bp, SARS Virus
ctgacattacgtcccgtatagttac

SEQ ID NO: 33023 - DNA, 25 bp, SARS Virus
tgacattacgttccgtatagttacg

SEQ ID NO: 33024 - DNA, 25 bp, SARS Virus
gacattacgttccgtatagttacgg

SEQ ID NO: 33025 - DNA, 25 bp, SARS Virus
acattacgttccctatagttacggg

SEQ ID NO: 33026 - DNA, 25 bp, SARS Virus
cattacgttccgcatagttacgggt

SEQ ID NO: 33027 - DNA, 25 bp, SARS Virus
attacgttccgtctagttacgggtt

SEQ ID NO: 33028 - DNA, 25 bp, SARS Virus
ttacgttccgtacagttacgggttc

SEQ ID NO: 33029 - DNA, 25 bp, SARS Virus
tacgttccgtatcgttacgggttca

SEQ ID NO: 33030 - DNA, 25 bp, SARS Virus
acgttccgtatacttacgggttcat

SEQ ID NO: 33031 - DNA, 25 bp, SARS Virus
cgttccgtatagctacgggttcatc

SEQ ID NO: 33032 - DNA, 25 bp, SARS Virus
gttccgtatagtcacgggttcatcg

SEQ ID NO: 33033 - DNA, 25 bp, SARS Virus
ttccgtatagttccgggttcatcgt

SEQ ID NO: 33034 - DNA, 25 bp, SARS Virus
tccgtatagttacgggttcatcgtt

SEQ ID NO: 33035 - DNA, 25 bp, SARS Virus
ccgtatagttaccggttcatcgttt

SEQ ID NO: 33036 - DNA, 25 bp, SARS Virus
cgtatagttacgcgttcatcgtttt

SEQ ID NO: 33037 - DNA, 25 bp, SARS Virus
gtatagttacggcttcatcgttttt

SEQ ID NO: 33038 - DNA, 25 bp, SARS Virus
tatagttacgggctcatcgtttttc

SEQ ID NO: 33039 - DNA, 25 bp, SARS Virus
atagttacgggtccatcgtttttca

SEQ ID NO: 33040 - DNA, 25 bp, SARS Virus
tagttacgggttcatcgtttttcag

SEQ ID NO: 33041 - DNA, 25 bp, SARS Virus
agttacgggttcctcgtttttcagt

SEQ ID NO: 33042 - DNA, 25 bp, SARS Virus
gttacgggttcaccgtttttcagtg

SEQ ID NO: 33043 - DNA, 25 bp, SARS Virus
ttacgggttcatcgtttttcagtgt

SEQ ID NO: 33044 - DNA, 25 bp, SARS Virus
tacgggttcatcctttttcagtgtt

SEQ ID NO: 33045 - DNA, 25 bp, SARS Virus
acgggttcatcgcttttcagtgtta

SEQ ID NO: 33046 - DNA, 25 bp, SARS Virus
cgggttcatcgtctttcagtgttac

SEQ ID NO: 33047 - DNA, 25 bp, SARS Virus
gggttcatcgttcttcagtgttaca

SEQ ID NO: 33048 - DNA, 25 bp, SARS Virus
ggttcatcgtttctcagtgttacaa

SEQ ID NO: 33049 - DNA, 25 bp, SARS Virus
gttcatcgttttccagtgttacaaa

SEQ ID NO: 33050 - DNA, 25 bp, SARS Virus
ttcatcgtttttcagtgttacaaag

SEQ ID NO: 33051 - DNA, 25 bp, SARS Virus
tcatcgtttttccgtgttacaaagt

SEQ ID NO: 33052 - DNA, 25 bp, SARS Virus
catcgtttttcactgttacaaagtg

SEQ ID NO: 33053 - DNA, 25 bp, SARS Virus
atcgtttttcagcgttacaaagtga

SEQ ID NO: 33054 - DNA, 25 bp, SARS Virus
tcgtttttcagtcttacaaagtgag

SEQ ID NO: 33055 - DNA, 25 bp, SARS Virus
cgtttttcagtgctacaaagtgagt

SEQ ID NO: 33056 - DNA, 25 bp, SARS Virus
gtttttcagtgtcacaaagtgagta

SEQ ID NO: 33057 - DNA, 25 bp, SARS Virus
tttttcagtgttccaaagtgagtag

SEQ ID NO: 33058 - DNA, 25 bp, SARS Virus
ttttcagtgttacaaagtgagtaga

SEQ ID NO: 33059 - DNA, 25 bp, SARS Virus
tttcagtgttaccaagtgagtagac

SEQ ID NO: 33060 - DNA, 25 bp, SARS Virus
ttcagtgttacacagtgagtagacc

SEQ ID NO: 33061 - DNA, 25 bp, SARS Virus
tcagtgttacaacgtgagtagacct

SEQ ID NO: 33062 - DNA, 25 bp, SARS Virus
cagtgttacaaactgagtagacctt

SEQ ID NO: 33063 - DNA, 25 bp, SARS Virus
agtgttacaaagcgagtagacctta

SEQ ID NO: 33064 - DNA, 25 bp, SARS Virus
gtgttacaaagtcagtagaccttac

SEQ ID NO: 33065 - DNA, 25 bp, SARS Virus
tgttacaaagtgcgtagaccttaca

SEQ ID NO: 33066 - DNA, 25 bp, SARS Virus
gttacaaagtgactagaccttacat

SEQ ID NO: 33067 - DNA, 25 bp, SARS Virus
ttacaaagtgagcagaccttacatt

SEQ ID NO: 33068 - DNA, 25 bp, SARS Virus
tacaaagtgagtcgaccttacattt

SEQ ID NO: 33069 - DNA, 25 bp, SARS Virus
acaaagtgagtacaccttacatttt

SEQ ID NO: 33070 - DNA, 25 bp, SARS Virus
caaagtgagtagcccttacattttc

SEQ ID NO: 33071 - DNA, 25 bp, SARS Virus
aaagtgagtagaccttacattttct

SEQ ID NO: 33072 - DNA, 25 bp, SARS Virus
aagtgagtagaccttacattttctg

SEQ ID NO: 33073 - DNA, 25 bp, SARS Virus
agtgagtagaccctacattttctga

SEQ ID NO: 33074 - DNA, 25 bp, SARS Virus
gtgagtagacctcacattttctgat

SEQ ID NO: 33075 - DNA, 25 bp, SARS Virus
tgagtagaccttccattttctgatg

SEQ ID NO: 33076 - DNA, 25 bp, SARS Virus
gagtagaccttacattttctgatgt

SEQ ID NO: 33077 - DNA, 25 bp, SARS Virus
agtagaccttaccttttctgatgta

SEQ ID NO: 33078 - DNA, 25 bp, SARS Virus
gtagaccttacactttctgatgtac

SEQ ID NO: 33079 - DNA, 25 bp, SARS Virus
tagaccttacatcttctgatgtaca

SEQ ID NO: 33080 - DNA, 25 bp, SARS Virus
agaccttacattctctgatgtacag

SEQ ID NO: 33081 - DNA, 25 bp, SARS Virus
gaccttacatttcctgatgtacaga

SEQ ID NO: 33082 - DNA, 25 bp, SARS Virus
accttacattttctgatgtacagaa

SEQ ID NO: 33083 - DNA, 25 bp, SARS Virus
ccttacattttccgatgtacagaaa

SEQ ID NO: 33084 - DNA, 25 bp, SARS Virus
cttacattttctcatgtacagaaat

SEQ ID NO: 33085 - DNA, 25 bp, SARS Virus
ttacattttctgctgtacagaaata

SEQ ID NO: 33086 - DNA, 25 bp, SARS Virus
tacattttctgacgtacagaaatag

SEQ ID NO: 33087 - DNA, 25 bp, SARS Virus
acattttctgatctacagaaataga

SEQ ID NO: 33088 - DNA, 25 bp, SARS Virus
cattttctgatgcacagaaatagac

SEQ ID NO: 33089 - DNA, 25 bp, SARS Virus
attttctgatgtccagaaatagact

SEQ ID NO: 33090 - DNA, 25 bp, SARS Virus
ttttctgatgtacagaaatagactt

SEQ ID NO: 33091 - DNA, 25 bp, SARS Virus
tttctgatgtaccgaaatagacttg

SEQ ID NO: 33092 - DNA, 25 bp, SARS Virus
ttctgatgtacacaaatagacttgt

SEQ ID NO: 33093 - DNA, 25 bp, SARS Virus
tctgatgtacagcaatagacttgtc

SEQ ID NO: 33094 - DNA, 25 bp, SARS Virus
ctgatgtacagacatagacttgtcg

SEQ ID NO: 33095 - DNA, 25 bp, SARS Virus
tgatgtacagaactagacttgtcga

SEQ ID NO: 33096 - DNA, 25 bp, SARS Virus
gatgtacagaaacagacttgtcgac

SEQ ID NO: 33097 - DNA, 25 bp, SARS Virus
atgtacagaaatcgacttgtcgacg

SEQ ID NO: 33098 - DNA, 25 bp, SARS Virus
tgtacagaaatacacttgtcgacgc

SEQ ID NO: 33099 - DNA, 25 bp, SARS Virus
gtacagaaatagccttgtcgacgca

SEQ ID NO: 33100 - DNA, 25 bp, SARS Virus
tacagaaatagacttgtcgacgcat

SEQ ID NO: 33101 - DNA, 25 bp, SARS Virus
acagaaatagacctgtcgacgcatt

SEQ ID NO: 33102 - DNA, 25 bp, SARS Virus
cagaaatagactcgtcgacgcattt

SEQ ID NO: 33103 - DNA, 25 bp, SARS Virus
agaaatagacttctcgacgcatttg

SEQ ID NO: 33104 - DNA, 25 bp, SARS Virus
gaaatagacttgccgacgcatttgt

SEQ ID NO: 33105 - DNA, 25 bp, SARS Virus
aaatagacttgtcgacgcatttgtt

SEQ ID NO: 33106 - DNA, 25 bp, SARS Virus
aatagacttgtccacgcatttgttt

SEQ ID NO: 33107 - DNA, 25 bp, SARS Virus
atagacttgtcgccgcatttgttta

SEQ ID NO: 33108 - DNA, 25 bp, SARS Virus
tagacttgtcgacgcatttgtttaa

SEQ ID NO: 33109 - DNA, 25 bp, SARS Virus
agacttgtcgacccatttgtttaag

SEQ ID NO: 33110 - DNA, 25 bp, SARS Virus
gacttgtcgacgcatttgtttaagc

SEQ ID NO: 33111 - DNA, 25 bp, SARS Virus
acttgtcgacgcctttgtttaagca

SEQ ID NO: 33112 - DNA, 25 bp, SARS Virus
cttgtcgacgcacttgtttaagcat

SEQ ID NO: 33113 - DNA, 25 bp, SARS Virus
ttgtcgacgcatctgtttaagcatc

SEQ ID NO: 33114 - DNA, 25 bp, SARS Virus
tgtcgacgcattcgtttaagcatca

SEQ ID NO: 33115 - DNA, 25 bp, SARS Virus
gtcgacgcatttctttaagcatcac

SEQ ID NO: 33116 - DNA, 25 bp, SARS Virus
tcgacgcatttgcttaagcatcacg

SEQ ID NO: 33117 - DNA, 25 bp, SARS Virus
cgacgcatttgtctaagcatcacga

SEQ ID NO: 33118 - DNA, 25 bp, SARS Virus
gacgcatttgttcaagcatcacgac

SEQ ID NO: 33119 - DNA, 25 bp, SARS Virus
acgcatttgtttcagcatcacgacg

SEQ ID NO: 33120 - DNA, 25 bp, SARS Virus
cgcatttgtttacgcatcacgacgg

SEQ ID NO: 33121 - DNA, 25 bp, SARS Virus
gcatttgtttaaccatcacgacggt

SEQ ID NO: 33122 - DNA, 25 bp, SARS Virus
catttgtttaagcatcacgacggtt

SEQ ID NO: 33123 - DNA, 25 bp, SARS Virus
atttgtttaagcctcacgacggttc

SEQ ID NO: 33124 - DNA, 25 bp, SARS Virus
tttgtttaagcaccacgacggttct

SEQ ID NO: 33125 - DNA, 25 bp, SARS Virus
ttgtttaagcatcacgacggttctt

SEQ ID NO: 33126 - DNA, 25 bp, SARS Virus
tgtttaagcatcccgacggttcttc

SEQ ID NO: 33127 - DNA, 25 bp, SARS Virus
gtttaagcatcacgacggttcttct

SEQ ID NO: 33128 - DNA, 25 bp, SARS Virus
tttaagcatcaccacggttcttctt

SEQ ID NO: 33129 - DNA, 25 bp, SARS Virus
ttaagcatcacgccggttcttcttg

SEQ ID NO: 33130 - DNA, 25 bp, SARS Virus
taagcatcacgacggttcttcttgt

SEQ ID NO: 33131 - DNA, 25 bp, SARS Virus
aagcatcacgaccgttcttcttgtt

SEQ ID NO: 33132 - DNA, 25 bp, SARS Virus
agcatcacgacgcttcttcttgttg

SEQ ID NO: 33133 - DNA, 25 bp, SARS Virus
gcatcacgacggctcttcttgttgt

SEQ ID NO: 33134 - DNA, 25 bp, SARS Virus
catcacgacggtccttcttgttgta

SEQ ID NO: 33135 - DNA, 25 bp, SARS Virus
atcacgacggttcttcttgttgtat

SEQ ID NO: 33136 - DNA, 25 bp, SARS Virus
tcacgacggttcctcttgttgtatg

SEQ ID NO: 33137 - DNA, 25 bp, SARS Virus
cacgacggttctccttgttgtatgg

SEQ ID NO: 33138 - DNA, 25 bp, SARS Virus
acgacggttcttcttgttgtatgga

SEQ ID NO: 33139 - DNA, 25 bp, SARS Virus
cgacggttcttcctgttgtatggaa

SEQ ID NO: 33140 - DNA, 25 bp, SARS Virus
gacggttcttctcgttgtatggaaa

SEQ ID NO: 33141 - DNA, 25 bp, SARS Virus
acggttcttcttcttgtatggaaaa

SEQ ID NO: 33142 - DNA, 25 bp, SARS Virus
cggttcttcttgctgtatggaaaat

SEQ ID NO: 33143 - DNA, 25 bp, SARS Virus
ggttcttcttgtcgtatggaaaatc

SEQ ID NO: 33144 - DNA, 25 bp, SARS Virus
gttcttcttgttctatggaaaatct

SEQ ID NO: 33145 - DNA, 25 bp, SARS Virus
ttcttcttgttgcatggaaaatctg

SEQ ID NO: 33146 - DNA, 25 bp, SARS Virus
tcttcttgttgtctggaaaatctga

SEQ ID NO: 33147 - DNA, 25 bp, SARS Virus
cttcttgttgtacggaaaatctgat

SEQ ID NO: 33148 - DNA, 25 bp, SARS Virus
ttcttgttgtatcgaaaatctgatt

SEQ ID NO: 33149 - DNA, 25 bp, SARS Virus
tcttgttgtatgcaaaatctgattg

SEQ ID NO: 33150 - DNA, 25 bp, SARS Virus
cttgttgtatggcaaatctgattga

SEQ ID NO: 33151 - DNA, 25 bp, SARS Virus
ttgttgtatggacaatctgattgaa

SEQ ID NO: 33152 - DNA, 25 bp, SARS Virus
tgttgtatggaacatctgattgaac

SEQ ID NO: 33153 - DNA, 25 bp, SARS Virus
gttgtatggaaactctgattgaaca

SEQ ID NO: 33154 - DNA, 25 bp, SARS Virus
ttgtatggaaaacctgattgaacac

SEQ ID NO: 33155 - DNA, 25 bp, SARS Virus
tgtatggaaaatctgattgaacacg

SEQ ID NO: 33156 - DNA, 25 bp, SARS Virus
gtatggaaaatccgattgaacacga

SEQ ID NO: 33157 - DNA, 25 bp, SARS Virus
tatggaaaatctcattgaacacgat

SEQ ID NO: 33158 - DNA, 25 bp, SARS Virus
atggaaaatctgcttgaacacgatg

SEQ ID NO: 33159 - DNA, 25 bp, SARS Virus
tggaaaatctgactgaacacgatgt

SEQ ID NO: 33160 - DNA, 25 bp, SARS Virus
ggaaaatctgatcgaacacgatgtt

SEQ ID NO: 33161 - DNA, 25 bp, SARS Virus
gaaaatctgattcaacacgatgttg

SEQ ID NO: 33162 - DNA, 25 bp, SARS Virus
aaaatctgattgcacacgatgttga

SEQ ID NO: 33163 - DNA, 25 bp, SARS Virus
aaatctgattgaccacgatgttgat

SEQ ID NO: 33164 - DNA, 25 bp, SARS Virus
aatctgattgaacacgatgttgatc

SEQ ID NO: 33165 - DNA, 25 bp, SARS Virus
atctgattgaacccgatgttgatct

SEQ ID NO: 33166 - DNA, 25 bp, SARS Virus
tctgattgaacacgatgttgatctg

SEQ ID NO: 33167 - DNA, 25 bp, SARS Virus
ctgattgaacaccatgttgatctgt

SEQ ID NO: 33168 - DNA, 25 bp, SARS Virus
tgattgaacacgctgttgatctgtc

SEQ ID NO: 33169 - DNA, 25 bp, SARS Virus
gattgaacacgacgttgatctgtcc

SEQ ID NO: 33170 - DNA, 25 bp, SARS Virus
attgaacacgatcttgatctgtcca

SEQ ID NO: 33171 - DNA, 25 bp, SARS Virus
ttgaacacgatgctgatctgtccaa

SEQ ID NO: 33172 - DNA, 25 bp, SARS Virus
tgaacacgatgtcgatctgtccaac

SEQ ID NO: 33173 - DNA, 25 bp, SARS Virus
gaacacgatgttcatctgtccaaca

SEQ ID NO: 33174 - DNA, 25 bp, SARS Virus
aacacgatgttgctctgtccaacag

SEQ ID NO: 33175 - DNA, 25 bp, SARS Virus
acacgatgttgacctgtccaacagt

SEQ ID NO: 33176 - DNA, 25 bp, SARS Virus
cacgatgttgatctgtccaacagtt

SEQ ID NO: 33177 - DNA, 25 bp, SARS Virus
acgatgttgatccgtccaacagtta

SEQ ID NO: 33178 - DNA, 25 bp, SARS Virus
cgatgttgatctctccaacagttac

SEQ ID NO: 33179 - DNA, 25 bp, SARS Virus
gatgttgatctgcccaacagttaca

SEQ ID NO: 33180 - DNA, 25 bp, SARS Virus
atgttgatctgtccaacagttacag

SEQ ID NO: 33181 - DNA, 25 bp, SARS Virus
tgttgatctgtccaacagttacagt

SEQ ID NO: 33182 - DNA, 25 bp, SARS Virus
gttgatctgtcccacagttacagta

SEQ ID NO: 33183 - DNA, 25 bp, SARS Virus
ttgatctgtccaccagttacagtat

SEQ ID NO: 33184 - DNA, 25 bp, SARS Virus
tgatctgtccaacagttacagtatt

SEQ ID NO: 33185 - DNA, 25 bp, SARS Virus
gatctgtccaaccgttacagtattg

SEQ ID NO: 33186 - DNA, 25 bp, SARS Virus
atctgtccaacacttacagtattga

SEQ ID NO: 33187 - DNA, 25 bp, SARS Virus
tctgtccaacagctacagtattgat

SEQ ID NO: 33188 - DNA, 25 bp, SARS Virus
ctgtccaacagtcacagtattgatg

SEQ ID NO: 33189 - DNA, 25 bp, SARS Virus
tgtccaacagttccagtattgatga

SEQ ID NO: 33190 - DNA, 25 bp, SARS Virus
gtccaacagttacagtattgatgat

SEQ ID NO: 33191 - DNA, 25 bp, SARS Virus
tccaacagttaccgtattgatgatt

SEQ ID NO: 33192 - DNA, 25 bp, SARS Virus
ccaacagttacactattgatgattt

SEQ ID NO: 33193 - DNA, 25 bp, SARS Virus
caacagttacagcattgatgatttt

SEQ ID NO: 33194 - DNA, 25 bp, SARS Virus
aacagttacagtcttgatgatttta

SEQ ID NO: 33195 - DNA, 25 bp, SARS Virus
acagttacagtactgatgattttag

SEQ ID NO: 33196 - DNA, 25 bp, SARS Virus
cagttacagtatcgatgattttaga

SEQ ID NO: 33197 - DNA, 25 bp, SARS Virus
agttacagtattcatgattttagag

SEQ ID NO: 33198 - DNA, 25 bp, SARS Virus
gttacagtattgctgattttagagt

SEQ ID NO: 33199 - DNA, 25 bp, SARS Virus
ttacagtattgacgattttagagtg

SEQ ID NO: 33200 - DNA, 25 bp, SARS Virus
tacagtattgatcattttagagtga

SEQ ID NO: 33201 - DNA, 25 bp, SARS Virus
acagtattgatgcttttagagtgag

SEQ ID NO: 33202 - DNA, 25 bp, SARS Virus
cagtattgatgactttagagtgagt

SEQ ID NO: 33203 - DNA, 25 bp, SARS Virus
agtattgatgatcttagagtgagtt

SEQ ID NO: 33204 - DNA, 25 bp, SARS Virus
gtattgatgattctagagtgagttc

SEQ ID NO: 33205 - DNA, 25 bp, SARS Virus
tattgatgatttcagagtgagttcc

SEQ ID NO: 33206 - DNA, 25 bp, SARS Virus
attgatgattttcgagtgagttccc

SEQ ID NO: 33207 - DNA, 25 bp, SARS Virus
ttgatgattttacagtgagttccca

SEQ ID NO: 33208 - DNA, 25 bp, SARS Virus
tgatgattttagcgtgagttcccac

SEQ ID NO: 33209 - DNA, 25 bp, SARS Virus
gatgattttagactgagttcccacc

SEQ ID NO: 33210 - DNA, 25 bp, SARS Virus
atgattttagagcgagttcccacca

SEQ ID NO: 33211 - DNA, 25 bp, SARS Virus
tgattttagagtcagttcccaccat

SEQ ID NO: 33212 - DNA, 25 bp, SARS Virus
gattttagagtgcgttcccaccatt

SEQ ID NO: 33213 - DNA, 25 bp, SARS Virus
attttagagtgacttcccaccattc

SEQ ID NO: 33214 - DNA, 25 bp, SARS Virus
ttttagagtgagctcccaccattct

SEQ ID NO: 33215 - DNA, 25 bp, SARS Virus
tttagagtgagtccccaccattcta

SEQ ID NO: 33216 - DNA, 25 bp, SARS Virus
ttagagtgagttcccaccattctaa

SEQ ID NO: 33217 - DNA, 25 bp, SARS Virus
tagagtgagttcccaccattctaac

SEQ ID NO: 33218 - DNA, 25 bp, SARS Virus
agagtgagttcccaccattctaaca

SEQ ID NO: 33219 - DNA, 25 bp, SARS Virus
gagtgagttccccccattctaacaa

SEQ ID NO: 33220 - DNA, 25 bp, SARS Virus
agtgagttcccaccattctaacaat

SEQ ID NO: 33221 - DNA, 25 bp, SARS Virus
gtgagttcccaccattctaacaatc

SEQ ID NO: 33222 - DNA, 25 bp, SARS Virus
tgagttcccacccttctaacaatca

SEQ ID NO: 33223 - DNA, 25 bp, SARS Virus
gagttcccaccactctaacaatcat

SEQ ID NO: 33224 - DNA, 25 bp, SARS Virus
agttcccaccatcctaacaatcatg

SEQ ID NO: 33225 - DNA, 25 bp, SARS Virus
gttcccaccattctaacaatcatga

SEQ ID NO: 33226 - DNA, 25 bp, SARS Virus
ttcccaccattccaacaatcatgaa

SEQ ID NO: 33227 - DNA, 25 bp, SARS Virus
tcccaccattctcacaatcatgaac

SEQ ID NO: 33228 - DNA, 25 bp, SARS Virus
cccaccattctaccaatcatgaaca

SEQ ID NO: 33229 - DNA, 25 bp, SARS Virus
ccaccattctaacaatcatgaacaa

SEQ ID NO: 33230 - DNA, 25 bp, SARS Virus
caccattctaaccatcatgaacaaa

SEQ ID NO: 33231 - DNA, 25 bp, SARS Virus
accattctaacactcatgaacaaaa

SEQ ID NO: 33232 - DNA, 25 bp, SARS Virus
ccattctaacaaccatgaacaaaat

SEQ ID NO: 33233 - DNA, 25 bp, SARS Virus
cattctaacaatcatgaacaaaatt

SEQ ID NO: 33234 - DNA, 25 bp, SARS Virus
attctaacaatcctgaacaaaattt

SEQ ID NO: 33235 - DNA, 25 bp, SARS Virus
ttctaacaatcacgaacaaaatttg

SEQ ID NO: 33236 - DNA, 25 bp, SARS Virus
tctaacaatcatcaacaaaatttga

SEQ ID NO: 33237 - DNA, 25 bp, SARS Virus
ctaacaatcatgcacaaaatttgaa

SEQ ID NO: 33238 - DNA, 25 bp, SARS Virus
taacaatcatgaccaaaatttgaat

SEQ ID NO: 33239 - DNA, 25 bp, SARS Virus
aacaatcatgaacaaaatttgaata

SEQ ID NO: 33240 - DNA, 25 bp, SARS Virus
acaatcatgaaccaaatttgaatac

SEQ ID NO: 33241 - DNA, 25 bp, SARS Virus
caatcatgaacacaatttgaatacg

SEQ ID NO: 33242 - DNA, 25 bp, SARS Virus
aatcatgaacaacatttgaatacga

SEQ ID NO: 33243 - DNA, 25 bp, SARS Virus
atcatgaacaaactttgaatacgaa

SEQ ID NO: 33244 - DNA, 25 bp, SARS Virus
tcatgaacaaaacttgaatacgaat

SEQ ID NO: 33245 - DNA, 25 bp, SARS Virus
catgaacaaaatctgaatacgaatt

SEQ ID NO: 33246 - DNA, 25 bp, SARS Virus
atgaacaaaattcgaatacgaattc

SEQ ID NO: 33247 - DNA, 25 bp, SARS Virus
tgaacaaaatttcaatacgaattcc

SEQ ID NO: 33248 - DNA, 25 bp, SARS Virus
gaacaaaatttgcatacgaattccg

SEQ ID NO: 33249 - DNA, 25 bp, SARS Virus
aacaaaatttgactacgaattccgg

SEQ ID NO: 33250 - DNA, 25 bp, SARS Virus
acaaaatttgaacacgaattccggt

SEQ ID NO: 33251 - DNA, 25 bp, SARS Virus
caaaatttgaatccgaattccggtg

SEQ ID NO: 33252 - DNA, 25 bp, SARS Virus
aaaatttgaatacgaattccggtgt

SEQ ID NO: 33253 - DNA, 25 bp, SARS Virus
aaatttgaataccaattccggtgta

SEQ ID NO: 33254 - DNA, 25 bp, SARS Virus
aatttgaatacgcattccggtgtaa

SEQ ID NO: 33255 - DNA, 25 bp, SARS Virus
atttgaatacgacttccggtgtaat

SEQ ID NO: 33256 - DNA, 25 bp, SARS Virus
tttgaatacgaactccggtgtaata

SEQ ID NO: 33257 - DNA, 25 bp, SARS Virus
ttgaatacgaatcccggtgtaataa

SEQ ID NO: 33258 - DNA, 25 bp, SARS Virus
tgaatacgaattccggtgtaataac

SEQ ID NO: 33259 - DNA, 25 bp, SARS Virus
gaatacgaattccggtgtaataaca

SEQ ID NO: 33260 - DNA, 25 bp, SARS Virus
aatacgaattcccgtgtaataacac

SEQ ID NO: 33261 - DNA, 25 bp, SARS Virus
atacgaattccgctgtaataacacg

SEQ ID NO: 33262 - DNA, 25 bp, SARS Virus
tacgaattccggcgtaataacacgc

SEQ ID NO: 33263 - DNA, 25 bp, SARS Virus
acgaattccggtctaataacacgca

SEQ ID NO: 33264 - DNA, 25 bp, SARS Virus
cgaattccggtgcaataacacgcaa

SEQ ID NO: 33265 - DNA, 25 bp, SARS Virus
gaattccggtgtcataacacgcaag

SEQ ID NO: 33266 - DNA, 25 bp, SARS Virus
aattccggtgtactaacacgcaaga

SEQ ID NO: 33267 - DNA, 25 bp, SARS Virus
attccggtgtaacaacacgcaagaa

SEQ ID NO: 33268 - DNA, 25 bp, SARS Virus
ttccggtgtaatcacacgcaagaac

SEQ ID NO: 33269 - DNA, 25 bp, SARS Virus
tccggtgtaataccacgcaagaacg

SEQ ID NO: 33270 - DNA, 25 bp, SARS Virus
ccggtgtaataacacgcaagaacga

SEQ ID NO: 33271 - DNA, 25 bp, SARS Virus
cggtgtaataacccgcaagaacgac

SEQ ID NO: 33272 - DNA, 25 bp, SARS Virus
ggtgtaataacacgcaagaacgacg

SEQ ID NO: 33273 - DNA, 25 bp, SARS Virus
gtgtaataacacccaagaacgacgt

SEQ ID NO: 33274 - DNA, 25 bp, SARS Virus
tgtaataacacgcaagaacgacgta

SEQ ID NO: 33275 - DNA, 25 bp, SARS Virus
gtaataacacgccagaacgacgtaa

SEQ ID NO: 33276 - DNA, 25 bp, SARS Virus
taataacacgcacgaacgacgtaac

SEQ ID NO: 33277 - DNA, 25 bp, SARS Virus
aataacacgcaacaacgacgtaacc

SEQ ID NO: 33278 - DNA, 25 bp, SARS Virus
ataacacgcaagcacgacgtaacca

SEQ ID NO: 33279 - DNA, 25 bp, SARS Virus
taacacgcaagaccgacgtaaccaa

SEQ ID NO: 33280 - DNA, 25 bp, SARS Virus
aacacgcaagaacgacgtaaccaaa

SEQ ID NO: 33281 - DNA, 25 bp, SARS Virus
acacgcaagaaccacgtaaccaaac

SEQ ID NO: 33282 - DNA, 25 bp, SARS Virus
cacgcaagaacgccgtaaccaaaca

SEQ ID NO: 33283 - DNA, 25 bp, SARS Virus
acgcaagaacgacgtaaccaaacaa

SEQ ID NO: 33284 - DNA, 25 bp, SARS Virus
cgcaagaacgacctaaccaaacaat

SEQ ID NO: 33285 - DNA, 25 bp, SARS Virus
gcaagaacgacgcaaccaaacaata

SEQ ID NO: 33286 - DNA, 25 bp, SARS Virus
caagaacgacgtcaccaaacaatat

SEQ ID NO: 33287 - DNA, 25 bp, SARS Virus
aagaacgacgtacccaaacaatata

SEQ ID NO: 33288 - DNA, 25 bp, SARS Virus
agaacgacgtaaccaaacaatatag

SEQ ID NO: 33289 - DNA, 25 bp, SARS Virus
gaacgacgtaaccaaacaatatagc

SEQ ID NO: 33290 - DNA, 25 bp, SARS Virus
aacgacgtaacccaacaatatagca

SEQ ID NO: 33291 - DNA, 25 bp, SARS Virus
acgacgtaaccacacaatatagcaa

SEQ ID NO: 33292 - DNA, 25 bp, SARS Virus
cgacgtaaccaaccaatatagcaat

SEQ ID NO: 33293 - DNA, 25 bp, SARS Virus
gacgtaaccaaacaatatagcaata

SEQ ID NO: 33294 - DNA, 25 bp, SARS Virus
acgtaaccaaaccatatagcaatac

SEQ ID NO: 33295 - DNA, 25 bp, SARS Virus
cgtaaccaaacactatagcaatacg

SEQ ID NO: 33296 - DNA, 25 bp, SARS Virus
gtaaccaaacaacatagcaatacgg

SEQ ID NO: 33297 - DNA, 25 bp, SARS Virus
taaccaaacaatctagcaatacggt

SEQ ID NO: 33298 - DNA, 25 bp, SARS Virus
aaccaaacaatacagcaatacggtc

SEQ ID NO: 33299 - DNA, 25 bp, SARS Virus
accaaacaatatcgcaatacggtca

SEQ ID NO: 33300 - DNA, 25 bp, SARS Virus
ccaaacaatataccaatacggtcat

SEQ ID NO: 33301 - DNA, 25 bp, SARS Virus
caaacaatatagcaatacggtcatg

SEQ ID NO: 33302 - DNA, 25 bp, SARS Virus
aaacaatatagccatacggtcatgt

SEQ ID NO: 33303 - DNA, 25 bp, SARS Virus
aacaatatagcactacggtcatgta

SEQ ID NO: 33304 - DNA, 25 bp, SARS Virus
acaatatagcaacacggtcatgtat

SEQ ID NO: 33305 - DNA, 25 bp, SARS Virus
caatatagcaatccggtcatgtatg

SEQ ID NO: 33306 - DNA, 25 bp, SARS Virus
aatatagcaatacggtcatgtatgt

SEQ ID NO: 33307 - DNA, 25 bp, SARS Virus
atatagcaataccgtcatgtatgta

SEQ ID NO: 33308 - DNA, 25 bp, SARS Virus
tatagcaatacgctcatgtatgtaa

SEQ ID NO: 33309 - DNA, 25 bp, SARS Virus
atagcaatacggccatgtatgtaac

SEQ ID NO: 33310 - DNA, 25 bp, SARS Virus
tagcaatacggtcatgtatgtaaca

SEQ ID NO: 33311 - DNA, 25 bp, SARS Virus
agcaatacggtcctgtatgtaacag

SEQ ID NO: 33312 - DNA, 25 bp, SARS Virus
gcaatacggtcacgtatgtaacagt

SEQ ID NO: 33313 - DNA, 25 bp, SARS Virus
taccacaggaaagatgtaagcacag

SEQ ID NO: 33314 - DNA, 25 bp, SARS Virus
accacaggaaaggtgtaagcacagt

SEQ ID NO: 33315 - DNA, 25 bp, SARS Virus
ccacaggaaagaggtaagcacagtc

SEQ ID NO: 33316 - DNA, 25 bp, SARS Virus
cacaggaaagatgtaagcacagtcg

SEQ ID NO: 33317 - DNA, 25 bp, SARS Virus
acaggaaagatggaagcacagtcga

SEQ ID NO: 33318 - DNA, 25 bp, SARS Virus
caggaaagatgtgagcacagtcgac

SEQ ID NO: 33319 - DNA, 25 bp, SARS Virus
aggaaagatgtaggcacagtcgacg

SEQ ID NO: 33320 - DNA, 25 bp, SARS Virus
ggaaagatgtaagcacagtcgacgg

SEQ ID NO: 33321 - DNA, 25 bp, SARS Virus
gaaagatgtaaggacagtcgacggg

SEQ ID NO: 33322 - DNA, 25 bp, SARS Virus
aaagatgtaagcgcagtcgacgggc

SEQ ID NO: 33323 - DNA, 25 bp, SARS Virus
aagatgtaagcagagtcgacgggct

SEQ ID NO: 33324 - DNA, 25 bp, SARS Virus
agatgtaagcacggtcgacgggctg

SEQ ID NO: 33325 - DNA, 25 bp, SARS Virus
gatgtaagcacagtcgacgggctgt

SEQ ID NO: 33326 - DNA, 25 bp, SARS Virus
atgtaagcacaggcgacgggctgtt

SEQ ID NO: 33327 - DNA, 25 bp, SARS Virus
tgtaagcacagtggacgggctgttc

SEQ ID NO: 33328 - DNA, 25 bp, SARS Virus
gtaagcacagtcgacgggctgttcc

SEQ ID NO: 33329 - DNA, 25 bp, SARS Virus
taagcacagtcggcgggctgttcca

SEQ ID NO: 33330 - DNA, 25 bp, SARS Virus
aagcacagtcgaggggctgttccac

SEQ ID NO: 33331 - DNA, 25 bp, SARS Virus
agcacagtcgacgggctgttccaca

SEQ ID NO: 33332 - DNA, 25 bp, SARS Virus
gcacagtcgacgggctgttccacaa

SEQ ID NO: 33333 - DNA, 25 bp, SARS Virus
cacagtcgacgggctgttccacaac

SEQ ID NO: 33334 - DNA, 25 bp, SARS Virus
acagtcgacggggtgttccacaaca

SEQ ID NO: 33335 - DNA, 25 bp, SARS Virus
cagtcgacgggcggttccacaacaa

SEQ ID NO: 33336 - DNA, 25 bp, SARS Virus
agtcgacgggctgttccacaacaac

SEQ ID NO: 33337 - DNA, 25 bp, SARS Virus
gtcgacgggctggtccacaacaact

SEQ ID NO: 33338 - DNA, 25 bp, SARS Virus
tcgacgggctgtgccacaacaacta

SEQ ID NO: 33339 - DNA, 25 bp, SARS Virus
cgacgggctgttgcacaacaactat

SEQ ID NO: 33340 - DNA, 25 bp, SARS Virus
gacgggctgttcgacaacaactatg

SEQ ID NO: 33341 - DNA, 25 bp, SARS Virus
acgggctgttccgcaacaactatgg

SEQ ID NO: 33342 - DNA, 25 bp, SARS Virus
cgggctgttccagaacaactatggc

SEQ ID NO: 33343 - DNA, 25 bp, SARS Virus
gggctgttccacgacaactatggct

SEQ ID NO: 33344 - DNA, 25 bp, SARS Virus
ggctgttccacagcaactatggcta

SEQ ID NO: 33345 - DNA, 25 bp, SARS Virus
gctgttccacaagaactatggctac

SEQ ID NO: 33346 - DNA, 25 bp, SARS Virus
ctgttccacaacgactatggctaca

SEQ ID NO: 33347 - DNA, 25 bp, SARS Virus
tgttccacaacagctatggctacaa

SEQ ID NO: 33348 - DNA, 25 bp, SARS Virus
gttccacaacaagtatggctacaac

SEQ ID NO: 33349 - DNA, 25 bp, SARS Virus
ttccacaacaacgatggctacaact

SEQ ID NO: 33350 - DNA, 25 bp, SARS Virus
tccacaacaactgtggctacaactg

SEQ ID NO: 33351 - DNA, 25 bp, SARS Virus
ccacaacaactagggctacaactgt

SEQ ID NO: 33352 - DNA, 25 bp, SARS Virus
cacaacaactatggctacaactgtg

SEQ ID NO: 33353 - DNA, 25 bp, SARS Virus
acaacaactatggctacaactgtgt

SEQ ID NO: 33354 - DNA, 25 bp, SARS Virus
caacaactatgggtacaactgtgtt

SEQ ID NO: 33355 - DNA, 25 bp, SARS Virus
aacaactatggcgacaactgtgttt

SEQ ID NO: 33356 - DNA, 25 bp, SARS Virus
acaactatggctgcaactgtgtttc

SEQ ID NO: 33357 - DNA, 25 bp, SARS Virus
caactatggctagaactgtgtttcc

SEQ ID NO: 33358 - DNA, 25 bp, SARS Virus
aactatggctacgactgtgtttcct

SEQ ID NO: 33359 - DNA, 25 bp, SARS Virus
actatggctacagctgtgtttccta

SEQ ID NO: 33360 - DNA, 25 bp, SARS Virus
ctatggctacaagtgtgtttcctac

SEQ ID NO: 33361 - DNA, 25 bp, SARS Virus
tatggctacaacggtgtttcctaca

SEQ ID NO: 33362 - DNA, 25 bp, SARS Virus
atggctacaactgtgtttcctacaa

SEQ ID NO: 33363 - DNA, 25 bp, SARS Virus
tggctacaactgggtttcctacaat

SEQ ID NO: 33364 - DNA, 25 bp, SARS Virus
ggctacaactgtgtttcctacaata

SEQ ID NO: 33365 - DNA, 25 bp, SARS Virus
gctacaactgtggttcctacaataa

SEQ ID NO: 33366 - DNA, 25 bp, SARS Virus
ctacaactgtgtgtcctacaataac

SEQ ID NO: 33367 - DNA, 25 bp, SARS Virus
tacaactgtgttgcctacaataact

SEQ ID NO: 33368 - DNA, 25 bp, SARS Virus
acaactgtgtttgctacaataactt

SEQ ID NO: 33369 - DNA, 25 bp, SARS Virus
caactgtgtttcgtacaataactta

SEQ ID NO: 33370 - DNA, 25 bp, SARS Virus
aactgtgtttccgacaataacttac

SEQ ID NO: 33371 - DNA, 25 bp, SARS Virus
actgtgtttcctgcaataacttaca

SEQ ID NO: 33372 - DNA, 25 bp, SARS Virus
ctgtgtttcctagaataacttacag

SEQ ID NO: 33373 - DNA, 25 bp, SARS Virus
tgtgtttcctacgataacttacaga

SEQ ID NO: 33374 - DNA, 25 bp, SARS Virus
gtgtttcctacagtaacttacagag

SEQ ID NO: 33375 - DNA, 25 bp, SARS Virus
tgtttcctacaagaacttacagagt

SEQ ID NO: 33376 - DNA, 25 bp, SARS Virus
gtttcctacaatgacttacagagtt

SEQ ID NO: 33377 - DNA, 25 bp, SARS Virus
tttcctacaatagcttacagagttt

SEQ ID NO: 33378 - DNA, 25 bp, SARS Virus
ttcctacaataagttacagagtttg

SEQ ID NO: 33379 - DNA, 25 bp, SARS Virus
tcctacaataacgtacagagtttga

SEQ ID NO: 33380 - DNA, 25 bp, SARS Virus
cctacaataactgacagagtttgaa

SEQ ID NO: 33381 - DNA, 25 bp, SARS Virus
ctacaataacttgcagagtttgaaa

SEQ ID NO: 33382 - DNA, 25 bp, SARS Virus
tacaataacttagagagtttgaaag

SEQ ID NO: 33383 - DNA, 25 bp, SARS Virus
acaataacttacggagtttgaaagt

SEQ ID NO: 33384 - DNA, 25 bp, SARS Virus
caataacttacagagtttgaaagtg

SEQ ID NO: 33385 - DNA, 25 bp, SARS Virus
aataacttacagggtttgaaagtgt

SEQ ID NO: 33386 - DNA, 25 bp, SARS Virus
ataacttacagagtttgaaagtgta

SEQ ID NO: 33387 - DNA, 25 bp, SARS Virus
taacttacagaggttgaaagtgtag

SEQ ID NO: 33388 - DNA, 25 bp, SARS Virus
aacttacagagtgtgaaagtgtagt

SEQ ID NO: 33389 - DNA, 25 bp, SARS Virus
acttacagagttggaaagtgtagtg

SEQ ID NO: 33390 - DNA, 25 bp, SARS Virus
cttacagagtttgaaagtgtagtga

SEQ ID NO: 33391 - DNA, 25 bp, SARS Virus
ttacagagtttggaagtgtagtgag

SEQ ID NO: 33392 - DNA, 25 bp, SARS Virus
tacagagtttgagagtgtagtgaga

SEQ ID NO: 33393 - DNA, 25 bp, SARS Virus
acagagtttgaaggtgtagtgagac

SEQ ID NO: 33394 - DNA, 25 bp, SARS Virus
cagagtttgaaagtgtagtgagact

SEQ ID NO: 33395 - DNA, 25 bp, SARS Virus
agagtttgaaagggtagtgagactg

SEQ ID NO: 33396 - DNA, 25 bp, SARS Virus
gagtttgaaagtgtagtgagactga

SEQ ID NO: 33397 - DNA, 25 bp, SARS Virus
agtttgaaagtggagtgagactgaa

SEQ ID NO: 33398 - DNA, 25 bp, SARS Virus
gtttgaaagtgtggtgagactgaat

SEQ ID NO: 33399 - DNA, 25 bp, SARS Virus
tttgaaagtgtagtgagactgaatc

SEQ ID NO: 33400 - DNA, 25 bp, SARS Virus
ttgaaagtgtagggagactgaatct

SEQ ID NO: 33401 - DNA, 25 bp, SARS Virus
tgaaagtgtagtgagactgaatctt

SEQ ID NO: 33402 - DNA, 25 bp, SARS Virus
gaaagtgtagtgggactgaatcttc

SEQ ID NO: 33403 - DNA, 25 bp, SARS Virus
aaagtgtagtgagactgaatcttca

SEQ ID NO: 33404 - DNA, 25 bp, SARS Virus
aagtgtagtgaggctgaatcttcac

SEQ ID NO: 33405 - DNA, 25 bp, SARS Virus
agtgtagtgagagtgaatcttcact

SEQ ID NO: 33406 - DNA, 25 bp, SARS Virus
gtgtagtgagacggaatcttcactg

SEQ ID NO: 33407 - DNA, 25 bp, SARS Virus
tgtagtgagactgaatcttcactgt

SEQ ID NO: 33408 - DNA, 25 bp, SARS Virus
gtagtgagactggatcttcactgtc

SEQ ID NO: 33409 - DNA, 25 bp, SARS Virus
tagtgagactgagtcttcactgtcc

SEQ ID NO: 33410 - DNA, 25 bp, SARS Virus
agtgagactgaagcttcactgtcca

SEQ ID NO: 33411 - DNA, 25 bp, SARS Virus
gtgagactgaatgttcactgtccac

SEQ ID NO: 33412 - DNA, 25 bp, SARS Virus
tgagactgaatcgtcactgtccact

SEQ ID NO: 33413 - DNA, 25 bp, SARS Virus
gagactgaatctgcactgtccactg

SEQ ID NO: 33414 - DNA, 25 bp, SARS Virus
agactgaatcttgactgtccactgt

SEQ ID NO: 33415 - DNA, 25 bp, SARS Virus
gactgaatcttcgctgtccactgtc

SEQ ID NO: 33416 - DNA, 25 bp, SARS Virus
actgaatcttcagtgtccactgtca

SEQ ID NO: 33417 - DNA, 25 bp, SARS Virus
ctgaatcttcacggtccactgtcaa

SEQ ID NO: 33418 - DNA, 25 bp, SARS Virus
tgaatcttcactgtccactgtcaac

SEQ ID NO: 33419 - DNA, 25 bp, SARS Virus
gaatcttcactggccactgtcaaca

SEQ ID NO: 33420 - DNA, 25 bp, SARS Virus
aatcttcactgtgcactgtcaacat

SEQ ID NO: 33421 - DNA, 25 bp, SARS Virus
atcttcactgtcgactgtcaacatt

SEQ ID NO: 33422 - DNA, 25 bp, SARS Virus
tcttcactgtccgctgtcaacattg

SEQ ID NO: 33423 - DNA, 25 bp, SARS Virus
cttcactgtccagtgtcaacattgt

SEQ ID NO: 33424 - DNA, 25 bp, SARS Virus
ttcactgtccacggtcaacattgtt

SEQ ID NO: 33425 - DNA, 25 bp, SARS Virus
tcactgtccactgtcaacattgtta

SEQ ID NO: 33426 - DNA, 25 bp, SARS Virus
cactgtccactggcaacattgttaa

SEQ ID NO: 33427 - DNA, 25 bp, SARS Virus
actgtccactgtgaacattgttaaa

SEQ ID NO: 33428 - DNA, 25 bp, SARS Virus
ctgtccactgtcgacattgttaaag

SEQ ID NO: 33429 - DNA, 25 bp, SARS Virus
tgtccactgtcagcattgttaaagt

SEQ ID NO: 33430 - DNA, 25 bp, SARS Virus
gtccactgtcaagattgttaaagta

SEQ ID NO: 33431 - DNA, 25 bp, SARS Virus
tccactgtcaacgttgttaaagtac

SEQ ID NO: 33432 - DNA, 25 bp, SARS Virus
ccactgtcaacagtgttaaagtacg

SEQ ID NO: 33433 - DNA, 25 bp, SARS Virus
cactgtcaacatggttaaagtacga

SEQ ID NO: 33434 - DNA, 25 bp, SARS Virus
actgtcaacattgttaaagtacgag

SEQ ID NO: 33435 - DNA, 25 bp, SARS Virus
ctgtcaacattggtaaagtacgagt

SEQ ID NO: 33436 - DNA, 25 bp, SARS Virus
tgtcaacattgtgaaagtacgagtg

SEQ ID NO: 33437 - DNA, 25 bp, SARS Virus
gtcaacattgttgaagtacgagtgg

SEQ ID NO: 33438 - DNA, 25 bp, SARS Virus
tcaacattgttagagtacgagtgga

SEQ ID NO: 33439 - DNA, 25 bp, SARS Virus
caacattgttaaggtacgagtggat

SEQ ID NO: 33440 - DNA, 25 bp, SARS Virus
aacattgttaaagtacgagtggata

SEQ ID NO: 33441 - DNA, 25 bp, SARS Virus
acattgttaaaggacgagtggatat

SEQ ID NO: 33442 - DNA, 25 bp, SARS Virus
cattgttaaagtgcgagtggatatt

SEQ ID NO: 33443 - DNA, 25 bp, SARS Virus
attgttaaagtaggagtggatatta

SEQ ID NO: 33444 - DNA, 25 bp, SARS Virus
ttgttaaagtacgagtggatattat

SEQ ID NO: 33445 - DNA, 25 bp, SARS Virus
tgttaaagtacgggtggatattatt

SEQ ID NO: 33446 - DNA, 25 bp, SARS Virus
gttaaagtacgagtggatattattc

SEQ ID NO: 33447 - DNA, 25 bp, SARS Virus
ttaaagtacgaggggatattattcc

SEQ ID NO: 33448 - DNA, 25 bp, SARS Virus
taaagtacgagtggatattattcca

SEQ ID NO: 33449 - DNA, 25 bp, SARS Virus
aaagtacgagtggatattattccaa

SEQ ID NO: 33450 - DNA, 25 bp, SARS Virus
aagtacgagtgggtattattccaac

SEQ ID NO: 33451 - DNA, 25 bp, SARS Virus
agtacgagtggagattattccaact

SEQ ID NO: 33452 - DNA, 25 bp, SARS Virus
gtacgagtggatgttattccaactt

SEQ ID NO: 33453 - DNA, 25 bp, SARS Virus
tacgagtggatagtattccaacttt

SEQ ID NO: 33454 - DNA, 25 bp, SARS Virus
acgagtggatatgattccaactttt

SEQ ID NO: 33455 - DNA, 25 bp, SARS Virus
cgagtggatattgttccaacttttg

SEQ ID NO: 33456 - DNA, 25 bp, SARS Virus
gagtggatattagtccaacttttgt

SEQ ID NO: 33457 - DNA, 25 bp, SARS Virus
agtggatattatgccaacttttgta

SEQ ID NO: 33458 - DNA, 25 bp, SARS Virus
gtggatattattgcaacttttgtac

SEQ ID NO: 33459 - DNA, 25 bp, SARS Virus
tggatattattcgaacttttgtact

SEQ ID NO: 33460 - DNA, 25 bp, SARS Virus
ggatattattccgacttttgtactg

SEQ ID NO: 33461 - DNA, 25 bp, SARS Virus
gatattattccagcttttgtactgc

SEQ ID NO: 33462 - DNA, 25 bp, SARS Virus
atattattccaagttttgtactgcg

SEQ ID NO: 33463 - DNA, 25 bp, SARS Virus
tattattccaacgtttgtactgcgg

SEQ ID NO: 33464 - DNA, 25 bp, SARS Virus
attattccaactgttgtactgcggg

SEQ ID NO: 33465 - DNA, 25 bp, SARS Virus
ttattccaacttgtgtactgcgggt

SEQ ID NO: 33466 - DNA, 25 bp, SARS Virus
tattccaactttggtactgcgggtc

SEQ ID NO: 33467 - DNA, 25 bp, SARS Virus
attccaacttttgtactgcgggtct

SEQ ID NO: 33468 - DNA, 25 bp, SARS Virus
ttccaacttttggactgcgggtctc

SEQ ID NO: 33469 - DNA, 25 bp, SARS Virus
tccaacttttgtgctgcgggtctct

SEQ ID NO: 33470 - DNA, 25 bp, SARS Virus
ccaacttttgtagtgcgggtctcta

SEQ ID NO: 33471 - DNA, 25 bp, SARS Virus
caacttttgtacggcgggtctctag

SEQ ID NO: 33472 - DNA, 25 bp, SARS Virus
aacttttgtactgcgggtctctaga

SEQ ID NO: 33473 - DNA, 25 bp, SARS Virus
acttttgtactgggggtctctagaa

SEQ ID NO: 33474 - DNA, 25 bp, SARS Virus
cttttgtactgcgggtctctagaac

SEQ ID NO: 33475 - DNA, 25 bp, SARS Virus
ttttgtactgcgggtctctagaacc

SEQ ID NO: 33476 - DNA, 25 bp, SARS Virus
tttgtactgcgggtctctagaaccg

SEQ ID NO: 33477 - DNA, 25 bp, SARS Virus
ttgtactgcggggctctagaaccgc

SEQ ID NO: 33478 - DNA, 25 bp, SARS Virus
tgtactgcgggtgtctagaaccgcg

SEQ ID NO: 33479 - DNA, 25 bp, SARS Virus
gtactgcgggtcgctagaaccgcgt

SEQ ID NO: 33480 - DNA, 25 bp, SARS Virus
tactgcgggtctgtagaaccgcgta

SEQ ID NO: 33481 - DNA, 25 bp, SARS Virus
actgcgggtctcgagaaccgcgtac

SEQ ID NO: 33482 - DNA, 25 bp, SARS Virus
ctgcgggtctctggaaccgcgtaca

SEQ ID NO: 33483 - DNA, 25 bp, SARS Virus
tgcgggtctctagaaccgcgtacat

SEQ ID NO: 33484 - DNA, 25 bp, SARS Virus
gcgggtctctaggaccgcgtacata

SEQ ID NO: 33485 - DNA, 25 bp, SARS Virus
cgggtctctagagccgcgtacataa

SEQ ID NO: 33486 - DNA, 25 bp, SARS Virus
gggtctctagaagcgcgtacataac

SEQ ID NO: 33487 - DNA, 25 bp, SARS Virus
ggtctctagaacggcgtacataact

SEQ ID NO: 33488 - DNA, 25 bp, SARS Virus
gtctctagaaccgcgtacataactg

SEQ ID NO: 33489 - DNA, 25 bp, SARS Virus
tctctagaaccgggtacataactga

SEQ ID NO: 33490 - DNA, 25 bp, SARS Virus
ctctagaaccgcgtacataactgac

SEQ ID NO: 33491 - DNA, 25 bp, SARS Virus
tctagaaccgcggacataactgaca

SEQ ID NO: 33492 - DNA, 25 bp, SARS Virus
ctagaaccgcgtgcataactgacat

SEQ ID NO: 33493 - DNA, 25 bp, SARS Virus
tagaaccgcgtagataactgacatt

SEQ ID NO: 33494 - DNA, 25 bp, SARS Virus
agaaccgcgtacgtaactgacatta

SEQ ID NO: 33495 - DNA, 25 bp, SARS Virus
gaaccgcgtacagaactgacattac

SEQ ID NO: 33496 - DNA, 25 bp, SARS Virus
aaccgcgtacatgactgacattacg

SEQ ID NO: 33497 - DNA, 25 bp, SARS Virus
accgcgtacatagctgacattacgt

SEQ ID NO: 33498 - DNA, 25 bp, SARS Virus
ccgcgtacataagtgacattacgtt

SEQ ID NO: 33499 - DNA, 25 bp, SARS Virus
cgcgtacataacggacattacgttc

SEQ ID NO: 33500 - DNA, 25 bp, SARS Virus
gcgtacataactgacattacgttcc

SEQ ID NO: 33501 - DNA, 25 bp, SARS Virus
cgtacataactggcattacgttccg

SEQ ID NO: 33502 - DNA, 25 bp, SARS Virus
gtacataactgagattacgttccgt

SEQ ID NO: 33503 - DNA, 25 bp, SARS Virus
tacataactgacgttacgttccgta

SEQ ID NO: 33504 - DNA, 25 bp, SARS Virus
acataactgacagtacgttccgtat

SEQ ID NO: 33505 - DNA, 25 bp, SARS Virus
cataactgacatgacgttccgtata

SEQ ID NO: 33506 - DNA, 25 bp, SARS Virus
ataactgacattgcgttccgtatag

SEQ ID NO: 33507 - DNA, 25 bp, SARS Virus
taactgacattaggttccgtatagt

SEQ ID NO: 33508 - DNA, 25 bp, SARS Virus
aactgacattacgttccgtatagtt

SEQ ID NO: 33509 - DNA, 25 bp, SARS Virus
actgacattacggtccgtatagtta

SEQ ID NO: 33510 - DNA, 25 bp, SARS Virus
ctgacattacgtgccgtatagttac

SEQ ID NO: 33511 - DNA, 25 bp, SARS Virus
tgacattacgttgcgtatagttacg

SEQ ID NO: 33512 - DNA, 25 bp, SARS Virus
gacattacgttcggtatagttacgg

SEQ ID NO: 33513 - DNA, 25 bp, SARS Virus
acattacgttccgtatagttacggg

SEQ ID NO: 33514 - DNA, 25 bp, SARS Virus
cattacgttccggatagttacgggt

SEQ ID NO: 33515 - DNA, 25 bp, SARS Virus
attacgttccgtgtagttacgggtt

SEQ ID NO: 33516 - DNA, 25 bp, SARS Virus
ttacgttccgtagagttacgggttc

SEQ ID NO: 33517 - DNA, 25 bp, SARS Virus
tacgttccgtatggttacgggttca

SEQ ID NO: 33518 - DNA, 25 bp, SARS Virus
acgttccgtatagttacgggttcat

SEQ ID NO: 33519 - DNA, 25 bp, SARS Virus
cgttccgtataggtacgggttcatc

SEQ ID NO: 33520 - DNA, 25 bp, SARS Virus
gttccgtatagtgacgggttcatcg

SEQ ID NO: 33521 - DNA, 25 bp, SARS Virus
ttccgtatagttgcgggttcatcgt

SEQ ID NO: 33522 - DNA, 25 bp, SARS Virus
tccgtatagttaggggttcatcgtt

SEQ ID NO: 33523 - DNA, 25 bp, SARS Virus
ccgtatagttacgggttcatcgttt

SEQ ID NO: 33524 - DNA, 25 bp, SARS Virus
cgtatagttacgggttcatcgtttt

SEQ ID NO: 33525 - DNA, 25 bp, SARS Virus
gtatagttacgggttcatcgttttt

SEQ ID NO: 33526 - DNA, 25 bp, SARS Virus
tatagttacggggtcatcgtttttc

SEQ ID NO: 33527 - DNA, 25 bp, SARS Virus
atagttacgggtgcatcgtttttca

SEQ ID NO: 33528 - DNA, 25 bp, SARS Virus
tagttacgggttgatcgtttttcag

SEQ ID NO: 33529 - DNA, 25 bp, SARS Virus
agttacgggttcgtcgtttttcagt

SEQ ID NO: 33530 - DNA, 25 bp, SARS Virus
gttacgggttcagcgtttttcagtg

SEQ ID NO: 33531 - DNA, 25 bp, SARS Virus
ttacgggttcatggtttttcagtgt

SEQ ID NO: 33532 - DNA, 25 bp, SARS Virus
tacgggttcatcgtttttcagtgtt

SEQ ID NO: 33533 - DNA, 25 bp, SARS Virus
acgggttcatcggttttcagtgtta

SEQ ID NO: 33534 - DNA, 25 bp, SARS Virus
cgggttcatcgtgtttcagtgttac

SEQ ID NO: 33535 - DNA, 25 bp, SARS Virus
gggttcatcgttgttcagtgttaca

SEQ ID NO: 33536 - DNA, 25 bp, SARS Virus
ggttcatcgtttgtcagtgttacaa

SEQ ID NO: 33537 - DNA, 25 bp, SARS Virus
gttcatcgttttgcagtgttacaaa

SEQ ID NO: 33538 - DNA, 25 bp, SARS Virus
ttcatcgtttttgagtgttacaaag

SEQ ID NO: 33539 - DNA, 25 bp, SARS Virus
tcatcgtttttcggtgttacaaagt

SEQ ID NO: 33540 - DNA, 25 bp, SARS Virus
catcgtttttcagtgttacaaagtg

SEQ ID NO: 33541 - DNA, 25 bp, SARS Virus
atcgtttttcagggttacaaagtga

SEQ ID NO: 33542 - DNA, 25 bp, SARS Virus
tcgtttttcagtgttacaaagtgag

SEQ ID NO: 33543 - DNA, 25 bp, SARS Virus
cgtttttcagtggtacaaagtgagt

SEQ ID NO: 33544 - DNA, 25 bp, SARS Virus
gtttttcagtgtgacaaagtgagta

SEQ ID NO: 33545 - DNA, 25 bp, SARS Virus
tttttcagtgttgcaaagtgagtag

SEQ ID NO: 33546 - DNA, 25 bp, SARS Virus
ttttcagtgttagaaagtgagtaga

SEQ ID NO: 33547 - DNA, 25 bp, SARS Virus
tttcagtgttacgaagtgagtagac

SEQ ID NO: 33548 - DNA, 25 bp, SARS Virus
ttcagtgttacagagtgagtagacc

SEQ ID NO: 33549 - DNA, 25 bp, SARS Virus
tcagtgttacaaggtgagtagacct

SEQ ID NO: 33550 - DNA, 25 bp, SARS Virus
cagtgttacaaagtgagtagacctt

SEQ ID NO: 33551 - DNA, 25 bp, SARS Virus
agtgttacaaagggagtagacctta

SEQ ID NO: 33552 - DNA, 25 bp, SARS Virus
gtgttacaaagtgagtagaccttac

SEQ ID NO: 33553 - DNA, 25 bp, SARS Virus
tgttacaaagtgggtagaccttaca

SEQ ID NO: 33554 - DNA, 25 bp, SARS Virus
gttacaaagtgagtagaccttacat

SEQ ID NO: 33555 - DNA, 25 bp, SARS Virus
ttacaaagtgaggagaccttacatt

SEQ ID NO: 33556 - DNA, 25 bp, SARS Virus
tacaaagtgagtggaccttacattt

SEQ ID NO: 33557 - DNA, 25 bp, SARS Virus
acaaagtgagtagaccttacatttt

SEQ ID NO: 33558 - DNA, 25 bp, SARS Virus
caaagtgagtaggccttacattttc

SEQ ID NO: 33559 - DNA, 25 bp, SARS Virus
aaagtgagtagagcttacattttct

SEQ ID NO: 33560 - DNA, 25 bp, SARS Virus
aagtgagtagacgttacattttctg

SEQ ID NO: 33561 - DNA, 25 bp, SARS Virus
agtgagtagaccgtacattttctga

SEQ ID NO: 33562 - DNA, 25 bp, SARS Virus
gtgagtagacctgacattttctgat

SEQ ID NO: 33563 - DNA, 25 bp, SARS Virus
tgagtagaccttgcattttctgatg

SEQ ID NO: 33564 - DNA, 25 bp, SARS Virus
gagtagaccttagattttctgatgt

SEQ ID NO: 33565 - DNA, 25 bp, SARS Virus
agtagaccttacgttttctgatgta

SEQ ID NO: 33566 - DNA, 25 bp, SARS Virus
gtagaccttacagtttctgatgtac

SEQ ID NO: 33567 - DNA, 25 bp, SARS Virus
tagaccttacatgttctgatgtaca

SEQ ID NO: 33568 - DNA, 25 bp, SARS Virus
agaccttacattgtctgatgtacag

SEQ ID NO: 33569 - DNA, 25 bp, SARS Virus
gaccttacatttgctgatgtacaga

SEQ ID NO: 33570 - DNA, 25 bp, SARS Virus
accttacattttgtgatgtacagaa

SEQ ID NO: 33571 - DNA, 25 bp, SARS Virus
ccttacattttcggatgtacagaaa

SEQ ID NO: 33572 - DNA, 25 bp, SARS Virus
cttacattttctgatgtacagaaat

SEQ ID NO: 33573 - DNA, 25 bp, SARS Virus
ttacattttctggtgtacagaaata

SEQ ID NO: 33574 - DNA, 25 bp, SARS Virus
tacattttctgaggtacagaaatag

SEQ ID NO: 33575 - DNA, 25 bp, SARS Virus
acattttctgatgtacagaaataga

SEQ ID NO: 33576 - DNA, 25 bp, SARS Virus
cattttctgatggacagaaatagac

SEQ ID NO: 33577 - DNA, 25 bp, SARS Virus
attttctgatgtgcagaaatagact

SEQ ID NO: 33578 - DNA, 25 bp, SARS Virus
ttttctgatgtagagaaatagactt

SEQ ID NO: 33579 - DNA, 25 bp, SARS Virus
tttctgatgtacggaaatagacttg

SEQ ID NO: 33580 - DNA, 25 bp, SARS Virus
ttctgatgtacagaaatagacttgt

SEQ ID NO: 33581 - DNA, 25 bp, SARS Virus
tctgatgtacaggaatagacttgtc

SEQ ID NO: 33582 - DNA, 25 bp, SARS Virus
ctgatgtacagagatagacttgtcg

SEQ ID NO: 33583 - DNA, 25 bp, SARS Virus
tgatgtacagaagtagacttgtcga

SEQ ID NO: 33584 - DNA, 25 bp, SARS Virus
gatgtacagaaagagacttgtcgac

SEQ ID NO: 33585 - DNA, 25 bp, SARS Virus
atgtacagaaatggacttgtcgacg

SEQ ID NO: 33586 - DNA, 25 bp, SARS Virus
tgtacagaaatagacttgtcgacgc

SEQ ID NO: 33587 - DNA, 25 bp, SARS Virus
gtacagaaataggcttgtcgacgca

SEQ ID NO: 33588 - DNA, 25 bp, SARS Virus
tacagaaatagagttgtcgacgcat

SEQ ID NO: 33589 - DNA, 25 bp, SARS Virus
acagaaatagacgtgtcgacgcatt

SEQ ID NO: 33590 - DNA, 25 bp, SARS Virus
cagaaatagactggtcgacgcattt

SEQ ID NO: 33591 - DNA, 25 bp, SARS Virus
agaaatagacttgtcgacgcatttg

SEQ ID NO: 33592 - DNA, 25 bp, SARS Virus
gaaatagacttggcgacgcatttgt

SEQ ID NO: 33593 - DNA, 25 bp, SARS Virus
aaatagacttgtggacgcatttgtt

SEQ ID NO: 33594 - DNA, 25 bp, SARS Virus
aatagacttgtcgacgcatttgttt

SEQ ID NO: 33595 - DNA, 25 bp, SARS Virus
atagacttgtcggcgcatttgttta

SEQ ID NO: 33596 - DNA, 25 bp, SARS Virus
tagacttgtcgaggcatttgtttaa

SEQ ID NO: 33597 - DNA, 25 bp, SARS Virus
agacttgtcgacgcatttgtttaag

SEQ ID NO: 33598 - DNA, 25 bp, SARS Virus
gacttgtcgacggatttgtttaagc

SEQ ID NO: 33599 - DNA, 25 bp, SARS Virus
acttgtcgacgcgtttgtttaagca

SEQ ID NO: 33600 - DNA, 25 bp, SARS Virus
cttgtcgacgcagttgtttaagcat

SEQ ID NO: 33601 - DNA, 25 bp, SARS Virus
ttgtcgacgcatgtgtttaagcatc

SEQ ID NO: 33602 - DNA, 25 bp, SARS Virus
tgtcgacgcattggtttaagcatca

SEQ ID NO: 33603 - DNA, 25 bp, SARS Virus
gtcgacgcatttgtttaagcatcac

SEQ ID NO: 33604 - DNA, 25 bp, SARS Virus
tcgacgcatttggttaagcatcacg

SEQ ID NO: 33605 - DNA, 25 bp, SARS Virus
cgacgcatttgtgtaagcatcacga

SEQ ID NO: 33606 - DNA, 25 bp, SARS Virus
gacgcatttgttgaagcatcacgac

SEQ ID NO: 33607 - DNA, 25 bp, SARS Virus
acgcatttgtttgagcatcacgacg

SEQ ID NO: 33608 - DNA, 25 bp, SARS Virus
cgcatttgtttaggcatcacgacgg

SEQ ID NO: 33609 - DNA, 25 bp, SARS Virus
gcatttgtttaagcatcacgacggt

SEQ ID NO: 33610 - DNA, 25 bp, SARS Virus
catttgtttaaggatcacgacggtt

SEQ ID NO: 33611 - DNA, 25 bp, SARS Virus
atttgtttaagcgtcacgacggttc

SEQ ID NO: 33612 - DNA, 25 bp, SARS Virus
tttgtttaagcagcacgacggttct

SEQ ID NO: 33613 - DNA, 25 bp, SARS Virus
ttgtttaagcatgacgacggttctt

SEQ ID NO: 33614 - DNA, 25 bp, SARS Virus
tgtttaagcatcgcgacggttcttc

SEQ ID NO: 33615 - DNA, 25 bp, SARS Virus
gtttaagcatcaggacggttcttct

SEQ ID NO: 33616 - DNA, 25 bp, SARS Virus
tttaagcatcacgacggttcttctt

SEQ ID NO: 33617 - DNA, 25 bp, SARS Virus
ttaagcatcacggcggttcttcttg

SEQ ID NO: 33618 - DNA, 25 bp, SARS Virus
taagcatcacgagggttcttcttgt

SEQ ID NO: 33619 - DNA, 25 bp, SARS Virus
aagcatcacgacggttcttcttgtt

SEQ ID NO: 33620 - DNA, 25 bp, SARS Virus
agcatcacgacggttcttcttgttg

SEQ ID NO: 33621 - DNA, 25 bp, SARS Virus
gcatcacgacgggtcttcttgttgt

SEQ ID NO: 33622 - DNA, 25 bp, SARS Virus
catcacgacggtgcttcttgttgta

SEQ ID NO: 33623 - DNA, 25 bp, SARS Virus
atcacgacggttgttcttgttgtat

SEQ ID NO: 33624 - DNA, 25 bp, SARS Virus
tcacgacggttcgtcttgttgtatg

SEQ ID NO: 33625 - DNA, 25 bp, SARS Virus
cacgacggttctgcttgttgtatgg

SEQ ID NO: 33626 - DNA, 25 bp, SARS Virus
acgacggttcttgttgttgtatgga

SEQ ID NO: 33627 - DNA, 25 bp, SARS Virus
cgacggttcttcgtgttgtatggaa

SEQ ID NO: 33628 - DNA, 25 bp, SARS Virus
gacggttcttctggttgtatggaaa

SEQ ID NO: 33629 - DNA, 25 bp, SARS Virus
acggttcttcttgttgtatggaaaa

SEQ ID NO: 33630 - DNA, 25 bp, SARS Virus
cggttcttcttggtgtatggaaaat

SEQ ID NO: 33631 - DNA, 25 bp, SARS Virus
ggttcttcttgtggtatggaaaatc

SEQ ID NO: 33632 - DNA, 25 bp, SARS Virus
gttcttcttgttgtatggaaaatct

SEQ ID NO: 33633 - DNA, 25 bp, SARS Virus
ttcttcttgttggatggaaaatctg

SEQ ID NO: 33634 - DNA, 25 bp, SARS Virus
tcttcttgttgtgtggaaaatctga

SEQ ID NO: 33635 - DNA, 25 bp, SARS Virus
cttcttgttgtagggaaaatctgat

SEQ ID NO: 33636 - DNA, 25 bp, SARS Virus
ttcttgttgtatggaaaatctgatt

SEQ ID NO: 33637 - DNA, 25 bp, SARS Virus
tcttgttgtatggaaaatctgattg

SEQ ID NO: 33638 - DNA, 25 bp, SARS Virus
cttgttgtatgggaaatctgattga

SEQ ID NO: 33639 - DNA, 25 bp, SARS Virus
ttgttgtatggagaatctgattgaa

SEQ ID NO: 33640 - DNA, 25 bp, SARS Virus
tgttgtatggaagatctgattgaac

SEQ ID NO: 33641 - DNA, 25 bp, SARS Virus
gttgtatggaaagtctgattgaaca

SEQ ID NO: 33642 - DNA, 25 bp, SARS Virus
ttgtatggaaaagctgattgaacac

SEQ ID NO: 33643 - DNA, 25 bp, SARS Virus
tgtatggaaaatgtgattgaacacg

SEQ ID NO: 33644 - DNA, 25 bp, SARS Virus
gtatggaaaatcggattgaacacga

SEQ ID NO: 33645 - DNA, 25 bp, SARS Virus
tatggaaaatctgattgaacacgat

SEQ ID NO: 33646 - DNA, 25 bp, SARS Virus
atggaaaatctggttgaacacgatg

SEQ ID NO: 33647 - DNA, 25 bp, SARS Virus
tggaaaatctgagtgaacacgatgt

SEQ ID NO: 33648 - DNA, 25 bp, SARS Virus
ggaaaatctgatggaacacgatgtt

SEQ ID NO: 33649 - DNA, 25 bp, SARS Virus
gaaaatctgattgaacacgatgttg

SEQ ID NO: 33650 - DNA, 25 bp, SARS Virus
aaaatctgattggacacgatgttga

SEQ ID NO: 33651 - DNA, 25 bp, SARS Virus
aaatctgattgagcacgatgttgat

SEQ ID NO: 33652 - DNA, 25 bp, SARS Virus
aatctgattgaagacgatgttgatc

SEQ ID NO: 33653 - DNA, 25 bp, SARS Virus
atctgattgaacgcgatgttgatct

SEQ ID NO: 33654 - DNA, 25 bp, SARS Virus
tctgattgaacaggatgttgatctg

SEQ ID NO: 33655 - DNA, 25 bp, SARS Virus
ctgattgaacacgatgttgatctgt

SEQ ID NO: 33656 - DNA, 25 bp, SARS Virus
tgattgaacacggtgttgatctgtc

SEQ ID NO: 33657 - DNA, 25 bp, SARS Virus
gattgaacacgaggttgatctgtcc

SEQ ID NO: 33658 - DNA, 25 bp, SARS Virus
attgaacacgatgttgatctgtcca

SEQ ID NO: 33659 - DNA, 25 bp, SARS Virus
ttgaacacgatggtgatctgtccaa

SEQ ID NO: 33660 - DNA, 25 bp, SARS Virus
tgaacacgatgtggatctgtccaac

SEQ ID NO: 33661 - DNA, 25 bp, SARS Virus
gaacacgatgttgatctgtccaaca

SEQ ID NO: 33662 - DNA, 25 bp, SARS Virus
aacacgatgttggtctgtccaacag

SEQ ID NO: 33663 - DNA, 25 bp, SARS Virus
acacgatgttgagctgtccaacagt

SEQ ID NO: 33664 - DNA, 25 bp, SARS Virus
cacgatgttgatgtgtccaacagtt

SEQ ID NO: 33665 - DNA, 25 bp, SARS Virus
acgatgttgatcggtccaacagtta

SEQ ID NO: 33666 - DNA, 25 bp, SARS Virus
cgatgttgatctgtccaacagttac

SEQ ID NO: 33667 - DNA, 25 bp, SARS Virus
gatgttgatctggccaacagttaca

SEQ ID NO: 33668 - DNA, 25 bp, SARS Virus
atgttgatctgtgcaacagttacag

SEQ ID NO: 33669 - DNA, 25 bp, SARS Virus
tgttgatctgtcgaacagttacagt

SEQ ID NO: 33670 - DNA, 25 bp, SARS Virus
gttgatctgtccgacagttacagta

SEQ ID NO: 33671 - DNA, 25 bp, SARS Virus
ttgatctgtccagcagttacagtat

SEQ ID NO: 33672 - DNA, 25 bp, SARS Virus
tgatctgtccaagagttacagtatt

SEQ ID NO: 33673 - DNA, 25 bp, SARS Virus
gatctgtccaacggttacagtattg

SEQ ID NO: 33674 - DNA, 25 bp, SARS Virus
atctgtccaacagttacagtattga

SEQ ID NO: 33675 - DNA, 25 bp, SARS Virus
tctgtccaacaggtacagtattgat

SEQ ID NO: 33676 - DNA, 25 bp, SARS Virus
ctgtccaacagtgacagtattgatg

SEQ ID NO: 33677 - DNA, 25 bp, SARS Virus
tgtccaacagttgcagtattgatga

SEQ ID NO: 33678 - DNA, 25 bp, SARS Virus
gtccaacagttagagtattgatgat

SEQ ID NO: 33679 - DNA, 25 bp, SARS Virus
tccaacagttacggtattgatgatt

SEQ ID NO: 33680 - DNA, 25 bp, SARS Virus
ccaacagttacagtattgatgattt

SEQ ID NO: 33681 - DNA, 25 bp, SARS Virus
caacagttacaggattgatgatttt

SEQ ID NO: 33682 - DNA, 25 bp, SARS Virus
aacagttacagtgttgatgatttta

SEQ ID NO: 33683 - DNA, 25 bp, SARS Virus
acagttacagtagtgatgattttag

SEQ ID NO: 33684 - DNA, 25 bp, SARS Virus
cagttacagtatggatgattttaga

SEQ ID NO: 33685 - DNA, 25 bp, SARS Virus
agttacagtattgatgattttagag

SEQ ID NO: 33686 - DNA, 25 bp, SARS Virus
gttacagtattggtgattttagagt

SEQ ID NO: 33687 - DNA, 25 bp, SARS Virus
ttacagtattgaggattttagagtg

SEQ ID NO: 33688 - DNA, 25 bp, SARS Virus
tacagtattgatgattttagagtga

SEQ ID NO: 33689 - DNA, 25 bp, SARS Virus
acagtattgatggttttagagtgag

SEQ ID NO: 33690 - DNA, 25 bp, SARS Virus
cagtattgatgagtttagagtgagt

SEQ ID NO: 33691 - DNA, 25 bp, SARS Virus
agtattgatgatgttagagtgagtt

SEQ ID NO: 33692 - DNA, 25 bp, SARS Virus
gtattgatgattgtagagtgagttc

SEQ ID NO: 33693 - DNA, 25 bp, SARS Virus
tattgatgatttgagagtgagttcc

SEQ ID NO: 33694 - DNA, 25 bp, SARS Virus
attgatgattttggagtgagttccc

SEQ ID NO: 33695 - DNA, 25 bp, SARS Virus
ttgatgattttagagtgagttccca

SEQ ID NO: 33696 - DNA, 25 bp, SARS Virus
tgatgattttagggtgagttcccac

SEQ ID NO: 33697 - DNA, 25 bp, SARS Virus
gatgattttagagtgagttcccacc

SEQ ID NO: 33698 - DNA, 25 bp, SARS Virus
atgattttagagggagttcccacca

SEQ ID NO: 33699 - DNA, 25 bp, SARS Virus
tgattttagagtgagttcccaccat

SEQ ID NO: 33700 - DNA, 25 bp, SARS Virus
gattttagagtgggttcccaccatt

SEQ ID NO: 33701 - DNA, 25 bp, SARS Virus
attttagagtgagttcccaccattc

SEQ ID NO: 33702 - DNA, 25 bp, SARS Virus
ttttagagtgaggtcccaccattct

SEQ ID NO: 33703 - DNA, 25 bp, SARS Virus
tttagagtgagtgcccaccattcta

SEQ ID NO: 33704 - DNA, 25 bp, SARS Virus
ttagagtgagttgccaccattctaa

SEQ ID NO: 33705 - DNA, 25 bp, SARS Virus
tagagtgagttcgcaccattctaac

SEQ ID NO: 33706 - DNA, 25 bp, SARS Virus
agagtgagttccgaccattctaaca

SEQ ID NO: 33707 - DNA, 25 bp, SARS Virus
gagtgagttcccgccattctaacaa

SEQ ID NO: 33708 - DNA, 25 bp, SARS Virus
agtgagttcccagcattctaacaat

SEQ ID NO: 33709 - DNA, 25 bp, SARS Virus
gtgagttcccacgattctaacaatc

SEQ ID NO: 33710 - DNA, 25 bp, SARS Virus
tgagttcccaccgttctaacaatca

SEQ ID NO: 33711 - DNA, 25 bp, SARS Virus
gagttcccaccagtctaacaatcat

SEQ ID NO: 33712 - DNA, 25 bp, SARS Virus
agttcccaccatgctaacaatcatg

SEQ ID NO: 33713 - DNA, 25 bp, SARS Virus
gttcccaccattgtaacaatcatga

SEQ ID NO: 33714 - DNA, 25 bp, SARS Virus
ttcccaccattcgaacaatcatgaa

SEQ ID NO: 33715 - DNA, 25 bp, SARS Virus
tcccaccattctgacaatcatgaac

SEQ ID NO: 33716 - DNA, 25 bp, SARS Virus
cccaccattctagcaatcatgaaca

SEQ ID NO: 33717 - DNA, 25 bp, SARS Virus
ccaccattctaagaatcatgaacaa

SEQ ID NO: 33718 - DNA, 25 bp, SARS Virus
caccattctaacgatcatgaacaaa

SEQ ID NO: 33719 - DNA, 25 bp, SARS Virus
accattctaacagtcatgaacaaaa

SEQ ID NO: 33720 - DNA, 25 bp, SARS Virus
ccattctaacaagcatgaacaaaat

SEQ ID NO: 33721 - DNA, 25 bp, SARS Virus
cattctaacaatgatgaacaaaatt

SEQ ID NO: 33722 - DNA, 25 bp, SARS Virus
attctaacaatcgtgaacaaaattt

SEQ ID NO: 33723 - DNA, 25 bp, SARS Virus
ttctaacaatcaggaacaaaatttg

SEQ ID NO: 33724 - DNA, 25 bp, SARS Virus
tctaacaatcatgaacaaaatttga

SEQ ID NO: 33725 - DNA, 25 bp, SARS Virus
ctaacaatcatggacaaaatttgaa

SEQ ID NO: 33726 - DNA, 25 bp, SARS Virus
taacaatcatgagcaaaatttgaat

SEQ ID NO: 33727 - DNA, 25 bp, SARS Virus
aacaatcatgaagaaaatttgaata

SEQ ID NO: 33728 - DNA, 25 bp, SARS Virus
acaatcatgaacgaaatttgaatac

SEQ ID NO: 33729 - DNA, 25 bp, SARS Virus
caatcatgaacagaatttgaatacg

SEQ ID NO: 33730 - DNA, 25 bp, SARS Virus
aatcatgaacaagatttgaatacga

SEQ ID NO: 33731 - DNA, 25 bp, SARS Virus
atcatgaacaaagtttgaatacgaa

SEQ ID NO: 33732 - DNA, 25 bp, SARS Virus
tcatgaacaaaagttgaatacgaat

SEQ ID NO: 33733 - DNA, 25 bp, SARS Virus
catgaacaaaatgtgaatacgaatt

SEQ ID NO: 33734 - DNA, 25 bp, SARS Virus
atgaacaaaattggaatacgaattc

SEQ ID NO: 33735 - DNA, 25 bp, SARS Virus
tgaacaaaatttgaatacgaattcc

SEQ ID NO: 33736 - DNA, 25 bp, SARS Virus
gaacaaaatttggatacgaattccg

SEQ ID NO: 33737 - DNA, 25 bp, SARS Virus
aacaaaatttgagtacgaattccgg

SEQ ID NO: 33738 - DNA, 25 bp, SARS Virus
acaaaatttgaagacgaattccggt

SEQ ID NO: 33739 - DNA, 25 bp, SARS Virus
caaaatttgaatgcgaattccggtg

SEQ ID NO: 33740 - DNA, 25 bp, SARS Virus
aaaatttgaataggaattccggtgt

SEQ ID NO: 33741 - DNA, 25 bp, SARS Virus
aaatttgaatacgaattccggtgta

SEQ ID NO: 33742 - DNA, 25 bp, SARS Virus
aatttgaatacggattccggtgtaa

SEQ ID NO: 33743 - DNA, 25 bp, SARS Virus
atttgaatacgagttccggtgtaat

SEQ ID NO: 33744 - DNA, 25 bp, SARS Virus
tttgaatacgaagtccggtgtaata

SEQ ID NO: 33745 - DNA, 25 bp, SARS Virus
ttgaatacgaatgccggtgtaataa

SEQ ID NO: 33746 - DNA, 25 bp, SARS Virus
tgaatacgaattgcggtgtaataac

SEQ ID NO: 33747 - DNA, 25 bp, SARS Virus
gaatacgaattcgggtgtaataaca

SEQ ID NO: 33748 - DNA, 25 bp, SARS Virus
aatacgaattccggtgtaataacac

SEQ ID NO: 33749 - DNA, 25 bp, SARS Virus
atacgaattccggtgtaataacacg

SEQ ID NO: 33750 - DNA, 25 bp, SARS Virus
tacgaattccggggtaataacacgc

SEQ ID NO: 33751 - DNA, 25 bp, SARS Virus
acgaattccggtgtaataacacgca

SEQ ID NO: 33752 - DNA, 25 bp, SARS Virus
cgaattccggtggaataacacgcaa

SEQ ID NO: 33753 - DNA, 25 bp, SARS Virus
gaattccggtgtgataacacgcaag

SEQ ID NO: 33754 - DNA, 25 bp, SARS Virus
aattccggtgtagtaacacgcaaga

SEQ ID NO: 33755 - DNA, 25 bp, SARS Virus
attccggtgtaagaacacgcaagaa

SEQ ID NO: 33756 - DNA, 25 bp, SARS Virus
ttccggtgtaatgacacgcaagaac

SEQ ID NO: 33757 - DNA, 25 bp, SARS Virus
tccggtgtaatagcacgcaagaacg

SEQ ID NO: 33758 - DNA, 25 bp, SARS Virus
ccggtgtaataagacgcaagaacga

SEQ ID NO: 33759 - DNA, 25 bp, SARS Virus
cggtgtaataacgcgcaagaacgac

SEQ ID NO: 33760 - DNA, 25 bp, SARS Virus
ggtgtaataacaggcaagaacgacg

SEQ ID NO: 33761 - DNA, 25 bp, SARS Virus
gtgtaataacacgcaagaacgacgt

SEQ ID NO: 33762 - DNA, 25 bp, SARS Virus
tgtaataacacggaagaacgacgta

SEQ ID NO: 33763 - DNA, 25 bp, SARS Virus
gtaataacacgcgagaacgacgtaa

SEQ ID NO: 33764 - DNA, 25 bp, SARS Virus
taataacacgcaggaacgacgtaac

SEQ ID NO: 33765 - DNA, 25 bp, SARS Virus
aataacacgcaagaacgacgtaacc

SEQ ID NO: 33766 - DNA, 25 bp, SARS Virus
ataacacgcaaggacgacgtaacca

SEQ ID NO: 33767 - DNA, 25 bp, SARS Virus
taacacgcaagagcgacgtaaccaa

SEQ ID NO: 33768 - DNA, 25 bp, SARS Virus
aacacgcaagaaggacgtaaccaaa

SEQ ID NO: 33769 - DNA, 25 bp, SARS Virus
acacgcaagaacgacgtaaccaaac

SEQ ID NO: 33770 - DNA, 25 bp, SARS Virus
cacgcaagaacggcgtaaccaaaca

SEQ ID NO: 33771 - DNA, 25 bp, SARS Virus
acgcaagaacgaggtaaccaaacaa

SEQ ID NO: 33772 - DNA, 25 bp, SARS Virus
cgcaagaacgacgtaaccaaacaat

SEQ ID NO: 33773 - DNA, 25 bp, SARS Virus
gcaagaacgacggaaccaaacaata

SEQ ID NO: 33774 - DNA, 25 bp, SARS Virus
caagaacgacgtgaccaaacaatat

SEQ ID NO: 33775 - DNA, 25 bp, SARS Virus
aagaacgacgtagccaaacaatata

SEQ ID NO: 33776 - DNA, 25 bp, SARS Virus
agaacgacgtaagcaaacaatatag

SEQ ID NO: 33777 - DNA, 25 bp, SARS Virus
gaacgacgtaacgaaacaatatagc

SEQ ID NO: 33778 - DNA, 25 bp, SARS Virus
aacgacgtaaccgaacaatatagca

SEQ ID NO: 33779 - DNA, 25 bp, SARS Virus
acgacgtaaccagacaatatagcaa

SEQ ID NO: 33780 - DNA, 25 bp, SARS Virus
cgacgtaaccaagcaatatagcaat

SEQ ID NO: 33781 - DNA, 25 bp, SARS Virus
gacgtaaccaaagaatatagcaata

SEQ ID NO: 33782 - DNA, 25 bp, SARS Virus
acgtaaccaaacgatatagcaatac

SEQ ID NO: 33783 - DNA, 25 bp, SARS Virus
cgtaaccaaacagtatagcaatacg

SEQ ID NO: 33784 - DNA, 25 bp, SARS Virus
gtaaccaaacaagatagcaatacgg

SEQ ID NO: 33785 - DNA, 25 bp, SARS Virus
taaccaaacaatgtagcaatacggt

SEQ ID NO: 33786 - DNA, 25 bp, SARS Virus
aaccaaacaatagagcaatacggtc

SEQ ID NO: 33787 - DNA, 25 bp, SARS Virus
accaaacaatatggcaatacggtca

SEQ ID NO: 33788 - DNA, 25 bp, SARS Virus
ccaaacaatatagcaatacggtcat

SEQ ID NO: 33789 - DNA, 25 bp, SARS Virus
caaacaatataggaatacggtcatg

SEQ ID NO: 33790 - DNA, 25 bp, SARS Virus
aaacaatatagcgatacggtcatgt

SEQ ID NO: 33791 - DNA, 25 bp, SARS Virus
aacaatatagcagtacggtcatgta

SEQ ID NO: 33792 - DNA, 25 bp, SARS Virus
acaatatagcaagacggtcatgtat

SEQ ID NO: 33793 - DNA, 25 bp, SARS Virus
caatatagcaatgcggtcatgtatg

SEQ ID NO: 33794 - DNA, 25 bp, SARS Virus
aatatagcaatagggtcatgtatgt

SEQ ID NO: 33795 - DNA, 25 bp, SARS Virus
atatagcaatacggtcatgtatgta

SEQ ID NO: 33796 - DNA, 25 bp, SARS Virus
tatagcaatacggtcatgtatgtaa

SEQ ID NO: 33797 - DNA, 25 bp, SARS Virus
atagcaatacgggcatgtatgtaac

SEQ ID NO: 33798 - DNA, 25 bp, SARS Virus
tagcaatacggtgatgtatgtaaca

SEQ ID NO: 33799 - DNA, 25 bp, SARS Virus
agcaatacggtcgtgtatgtaacag

SEQ ID NO: 33800 - DNA, 25 bp, SARS Virus
gcaatacggtcaggtatgtaacagt

SEQ ID NO: 33801 - DNA, 25 bp, SARS Virus
taccacaggaaatatgtaagcacag

SEQ ID NO: 33802 - DNA, 25 bp, SARS Virus
accacaggaaagttgtaagcacagt

SEQ ID NO: 33803 - DNA, 25 bp, SARS Virus
ccacaggaaagatgtaagcacagtc

SEQ ID NO: 33804 - DNA, 25 bp, SARS Virus
cacaggaaagatttaagcacagtcg

SEQ ID NO: 33805 - DNA, 25 bp, SARS Virus
acaggaaagatgtaagcacagtcga

SEQ ID NO: 33806 - DNA, 25 bp, SARS Virus
caggaaagatgttagcacagtcgac

SEQ ID NO: 33807 - DNA, 25 bp, SARS Virus
aggaaagatgtatgcacagtcgacg

SEQ ID NO: 33808 - DNA, 25 bp, SARS Virus
ggaaagatgtaatcacagtcgacgg

SEQ ID NO: 33809 - DNA, 25 bp, SARS Virus
gaaagatgtaagtacagtcgacggg

SEQ ID NO: 33810 - DNA, 25 bp, SARS Virus
aaagatgtaagctcagtcgacgggc

SEQ ID NO: 33811 - DNA, 25 bp, SARS Virus
aagatgtaagcatagtcgacgggct

SEQ ID NO: 33812 - DNA, 25 bp, SARS Virus
agatgtaagcactgtcgacgggctg

SEQ ID NO: 33813 - DNA, 25 bp, SARS Virus
gatgtaagcacattcgacgggctgt

SEQ ID NO: 33814 - DNA, 25 bp, SARS Virus
atgtaagcacagtcgacgggctgtt

SEQ ID NO: 33815 - DNA, 25 bp, SARS Virus
tgtaagcacagttgacgggctgttc

SEQ ID NO: 33816 - DNA, 25 bp, SARS Virus
gtaagcacagtctacgggctgttcc

SEQ ID NO: 33817 - DNA, 25 bp, SARS Virus
taagcacagtcgtcgggctgttcca

SEQ ID NO: 33818 - DNA, 25 bp, SARS Virus
aagcacagtcgatgggctgttccac

SEQ ID NO: 33819 - DNA, 25 bp, SARS Virus
agcacagtcgactggctgttccaca

SEQ ID NO: 33820 - DNA, 25 bp, SARS Virus
gcacagtcgacgtgctgttccacaa

SEQ ID NO: 33821 - DNA, 25 bp, SARS Virus
cacagtcgacggtctgttccacaac

SEQ ID NO: 33822 - DNA, 25 bp, SARS Virus
acagtcgacgggttgttccacaaca

SEQ ID NO: 33823 - DNA, 25 bp, SARS Virus
cagtcgacgggctgttccacaacaa

SEQ ID NO: 33824 - DNA, 25 bp, SARS Virus
agtcgacgggcttttccacaacaac

SEQ ID NO: 33825 - DNA, 25 bp, SARS Virus
gtcgacgggctgttccacaacaact

SEQ ID NO: 33826 - DNA, 25 bp, SARS Virus
tcgacgggctgttccacaacaacta

SEQ ID NO: 33827 - DNA, 25 bp, SARS Virus
cgacgggctgtttcacaacaactat

SEQ ID NO: 33828 - DNA, 25 bp, SARS Virus
gacgggctgttctacaacaactatg

SEQ ID NO: 33829 - DNA, 25 bp, SARS Virus
acgggctgttcctcaacaactatgg

SEQ ID NO: 33830 - DNA, 25 bp, SARS Virus
cgggctgttccataacaactatggc

SEQ ID NO: 33831 - DNA, 25 bp, SARS Virus
gggctgttccactacaactatggct

SEQ ID NO: 33832 - DNA, 25 bp, SARS Virus
ggctgttccacatcaactatggcta

SEQ ID NO: 33833 - DNA, 25 bp, SARS Virus
gctgttccacaataactatggctac

SEQ ID NO: 33834 - DNA, 25 bp, SARS Virus
ctgttccacaactactatggctaca

SEQ ID NO: 33835 - DNA, 25 bp, SARS Virus
tgttccacaacatctatggctacaa

SEQ ID NO: 33836 - DNA, 25 bp, SARS Virus
gttccacaacaattatggctacaac

SEQ ID NO: 33837 - DNA, 25 bp, SARS Virus
ttccacaacaactatggctacaact

SEQ ID NO: 33838 - DNA, 25 bp, SARS Virus
tccacaacaactttggctacaactg

SEQ ID NO: 33839 - DNA, 25 bp, SARS Virus
ccacaacaactatggctacaactgt

SEQ ID NO: 33840 - DNA, 25 bp, SARS Virus
cacaacaactattgctacaactgtg

SEQ ID NO: 33841 - DNA, 25 bp, SARS Virus
acaacaactatgtctacaactgtgt

SEQ ID NO: 33842 - DNA, 25 bp, SARS Virus
caacaactatggttacaactgtgtt

SEQ ID NO: 33843 - DNA, 25 bp, SARS Virus
aacaactatggctacaactgtgttt

SEQ ID NO: 33844 - DNA, 25 bp, SARS Virus
acaactatggcttcaactgtgtttc

SEQ ID NO: 33845 - DNA, 25 bp, SARS Virus
caactatggctataactgtgtttcc

SEQ ID NO: 33846 - DNA, 25 bp, SARS Virus
aactatggctactactgtgtttcct

SEQ ID NO: 33847 - DNA, 25 bp, SARS Virus
actatggctacatctgtgtttccta

SEQ ID NO: 33848 - DNA, 25 bp, SARS Virus
ctatggctacaattgtgtttcctac

SEQ ID NO: 33849 - DNA, 25 bp, SARS Virus
tatggctacaactgtgtttcctaca

SEQ ID NO: 33850 - DNA, 25 bp, SARS Virus
atggctacaactttgtttcctacaa

SEQ ID NO: 33851 - DNA, 25 bp, SARS Virus
tggctacaactgtgtttcctacaat

SEQ ID NO: 33852 - DNA, 25 bp, SARS Virus
ggctacaactgtttttcctacaata

SEQ ID NO: 33853 - DNA, 25 bp, SARS Virus
gctacaactgtgtttcctacaataa

SEQ ID NO: 33854 - DNA, 25 bp, SARS Virus
ctacaactgtgtttcctacaataac

SEQ ID NO: 33855 - DNA, 25 bp, SARS Virus
tacaactgtgtttcctacaataact

SEQ ID NO: 33856 - DNA, 25 bp, SARS Virus
acaactgtgttttctacaataactt

SEQ ID NO: 33857 - DNA, 25 bp, SARS Virus
caactgtgtttcttacaataactta

SEQ ID NO: 33858 - DNA, 25 bp, SARS Virus
aactgtgtttcctacaataacttac

SEQ ID NO: 33859 - DNA, 25 bp, SARS Virus
actgtgtttccttcaataacttaca

SEQ ID NO: 33860 - DNA, 25 bp, SARS Virus
ctgtgtttcctataataacttacag

SEQ ID NO: 33861 - DNA, 25 bp, SARS Virus
tgtgtttcctactataacttacaga

SEQ ID NO: 33862 - DNA, 25 bp, SARS Virus
gtgtttcctacattaacttacagag

SEQ ID NO: 33863 - DNA, 25 bp, SARS Virus
tgtttcctacaataacttacagagt

SEQ ID NO: 33864 - DNA, 25 bp, SARS Virus
gtttcctacaattacttacagagtt

SEQ ID NO: 33865 - DNA, 25 bp, SARS Virus
tttcctacaatatcttacagagttt

SEQ ID NO: 33866 - DNA, 25 bp, SARS Virus
ttcctacaataatttacagagtttg

SEQ ID NO: 33867 - DNA, 25 bp, SARS Virus
tcctacaataacttacagagtttga

SEQ ID NO: 33868 - DNA, 25 bp, SARS Virus
cctacaataacttacagagtttgaa

SEQ ID NO: 33869 - DNA, 25 bp, SARS Virus
ctacaataactttcagagtttgaaa

SEQ ID NO: 33870 - DNA, 25 bp, SARS Virus
tacaataacttatagagtttgaaag

SEQ ID NO: 33871 - DNA, 25 bp, SARS Virus
acaataacttactgagtttgaaagt

SEQ ID NO: 33872 - DNA, 25 bp, SARS Virus
caataacttacatagtttgaaagtg

SEQ ID NO: 33873 - DNA, 25 bp, SARS Virus
aataacttacagtgtttgaaagtgt

SEQ ID NO: 33874 - DNA, 25 bp, SARS Virus
ataacttacagattttgaaagtgta

SEQ ID NO: 33875 - DNA, 25 bp, SARS Virus
taacttacagagtttgaaagtgtag

SEQ ID NO: 33876 - DNA, 25 bp, SARS Virus
aacttacagagtttgaaagtgtagt

SEQ ID NO: 33877 - DNA, 25 bp, SARS Virus
acttacagagtttgaaagtgtagtg

SEQ ID NO: 33878 - DNA, 25 bp, SARS Virus
cttacagagttttaaagtgtagtga

SEQ ID NO: 33879 - DNA, 25 bp, SARS Virus
ttacagagtttgtaagtgtagtgag

SEQ ID NO: 33880 - DNA, 25 bp, SARS Virus
tacagagtttgatagtgtagtgaga

SEQ ID NO: 33881 - DNA, 25 bp, SARS Virus
acagagtttgaatgtgtagtgagac

SEQ ID NO: 33882 - DNA, 25 bp, SARS Virus
cagagtttgaaattgtagtgagact

SEQ ID NO: 33883 - DNA, 25 bp, SARS Virus
agagtttgaaagtgtagtgagactg

SEQ ID NO: 33884 - DNA, 25 bp, SARS Virus
gagtttgaaagtttagtgagactga

SEQ ID NO: 33885 - DNA, 25 bp, SARS Virus
agtttgaaagtgtagtgagactgaa

SEQ ID NO: 33886 - DNA, 25 bp, SARS Virus
gtttgaaagtgttgtgagactgaat

SEQ ID NO: 33887 - DNA, 25 bp, SARS Virus
tttgaaagtgtattgagactgaatc

SEQ ID NO: 33888 - DNA, 25 bp, SARS Virus
ttgaaagtgtagtgagactgaatct

SEQ ID NO: 33889 - DNA, 25 bp, SARS Virus
tgaaagtgtagttagactgaatctt

SEQ ID NO: 33890 - DNA, 25 bp, SARS Virus
gaaagtgtagtgtgactgaatcttc

SEQ ID NO: 33891 - DNA, 25 bp, SARS Virus
aaagtgtagtgatactgaatcttca

SEQ ID NO: 33892 - DNA, 25 bp, SARS Virus
aagtgtagtgagtctgaatcttcac

SEQ ID NO: 33893 - DNA, 25 bp, SARS Virus
agtgtagtgagattgaatcttcact

SEQ ID NO: 33894 - DNA, 25 bp, SARS Virus
gtgtagtgagactgaatcttcactg

SEQ ID NO: 33895 - DNA, 25 bp, SARS Virus
tgtagtgagacttaatcttcactgt

SEQ ID NO: 33896 - DNA, 25 bp, SARS Virus
gtagtgagactgtatcttcactgtc

SEQ ID NO: 33897 - DNA, 25 bp, SARS Virus
tagtgagactgattcttcactgtcc

SEQ ID NO: 33898 - DNA, 25 bp, SARS Virus
agtgagactgaatcttcactgtcca

SEQ ID NO: 33899 - DNA, 25 bp, SARS Virus
gtgagactgaattttcactgtccac

SEQ ID NO: 33900 - DNA, 25 bp, SARS Virus
tgagactgaatcttcactgtccact

SEQ ID NO: 33901 - DNA, 25 bp, SARS Virus
gagactgaatcttcactgtccactg

SEQ ID NO: 33902 - DNA, 25 bp, SARS Virus
agactgaatctttactgtccactgt

SEQ ID NO: 33903 - DNA, 25 bp, SARS Virus
gactgaatcttctctgtccactgtc

SEQ ID NO: 33904 - DNA, 25 bp, SARS Virus
actgaatcttcattgtccactgtca

SEQ ID NO: 33905 - DNA, 25 bp, SARS Virus
ctgaatcttcactgtccactgtcaa

SEQ ID NO: 33906 - DNA, 25 bp, SARS Virus
tgaatcttcactttccactgtcaac

SEQ ID NO: 33907 - DNA, 25 bp, SARS Virus
gaatcttcactgtccactgtcaaca

SEQ ID NO: 33908 - DNA, 25 bp, SARS Virus
aatcttcactgttcactgtcaacat

SEQ ID NO: 33909 - DNA, 25 bp, SARS Virus
atcttcactgtctactgtcaacatt

SEQ ID NO: 33910 - DNA, 25 bp, SARS Virus
tcttcactgtcctctgtcaacattg

SEQ ID NO: 33911 - DNA, 25 bp, SARS Virus
cttcactgtccattgtcaacattgt

SEQ ID NO: 33912 - DNA, 25 bp, SARS Virus
ttcactgtccactgtcaacattgtt

SEQ ID NO: 33913 - DNA, 25 bp, SARS Virus
tcactgtccactttcaacattgtta

SEQ ID NO: 33914 - DNA, 25 bp, SARS Virus
cactgtccactgtcaacattgttaa

SEQ ID NO: 33915 - DNA, 25 bp, SARS Virus
actgtccactgttaacattgttaaa

SEQ ID NO: 33916 - DNA, 25 bp, SARS Virus
ctgtccactgtctacattgttaaag

SEQ ID NO: 33917 - DNA, 25 bp, SARS Virus
tgtccactgtcatcattgttaaagt

SEQ ID NO: 33918 - DNA, 25 bp, SARS Virus
gtccactgtcaatattgttaaagta

SEQ ID NO: 33919 - DNA, 25 bp, SARS Virus
tccactgtcaactttgttaaagtac

SEQ ID NO: 33920 - DNA, 25 bp, SARS Virus
ccactgtcaacattgttaaagtacg

SEQ ID NO: 33921 - DNA, 25 bp, SARS Virus
cactgtcaacattgttaaagtacga

SEQ ID NO: 33922 - DNA, 25 bp, SARS Virus
actgtcaacatttttaaagtacgag

SEQ ID NO: 33923 - DNA, 25 bp, SARS Virus
ctgtcaacattgttaaagtacgagt

SEQ ID NO: 33924 - DNA, 25 bp, SARS Virus
tgtcaacattgttaaagtacgagtg

SEQ ID NO: 33925 - DNA, 25 bp, SARS Virus
gtcaacattgtttaagtacgagtgg

SEQ ID NO: 33926 - DNA, 25 bp, SARS Virus
tcaacattgttatagtacgagtgga

SEQ ID NO: 33927 - DNA, 25 bp, SARS Virus
caacattgttaatgtacgagtggat

SEQ ID NO: 33928 - DNA, 25 bp, SARS Virus
aacattgttaaattacgagtggata

SEQ ID NO: 33929 - DNA, 25 bp, SARS Virus
acattgttaaagtacgagtggatat

SEQ ID NO: 33930 - DNA, 25 bp, SARS Virus
cattgttaaagttcgagtggatatt

SEQ ID NO: 33931 - DNA, 25 bp, SARS Virus
attgttaaagtatgagtggatatta

SEQ ID NO: 33932 - DNA, 25 bp, SARS Virus
ttgttaaagtactagtggatattat

SEQ ID NO: 33933 - DNA, 25 bp, SARS Virus
tgttaaagtacgtgtggatattatt

SEQ ID NO: 33934 - DNA, 25 bp, SARS Virus
gttaaagtacgattggatattattc

SEQ ID NO: 33935 - DNA, 25 bp, SARS Virus
ttaaagtacgagtggatattattcc

SEQ ID NO: 33936 - DNA, 25 bp, SARS Virus
taaagtacgagttgatattattcca

SEQ ID NO: 33937 - DNA, 25 bp, SARS Virus
aaagtacgagtgtatattattccaa

SEQ ID NO: 33938 - DNA, 25 bp, SARS Virus
aagtacgagtggttattattccaac

SEQ ID NO: 33939 - DNA, 25 bp, SARS Virus
agtacgagtggatattattccaact

SEQ ID NO: 33940 - DNA, 25 bp, SARS Virus
gtacgagtggattttattccaactt

SEQ ID NO: 33941 - DNA, 25 bp, SARS Virus
tacgagtggatattattccaacttt

SEQ ID NO: 33942 - DNA, 25 bp, SARS Virus
acgagtggatattattccaactttt

SEQ ID NO: 33943 - DNA, 25 bp, SARS Virus
cgagtggatatttttccaacttttg

SEQ ID NO: 33944 - DNA, 25 bp, SARS Virus
gagtggatattattccaacttttgt

SEQ ID NO: 33945 - DNA, 25 bp, SARS Virus
agtggatattattccaacttttgta

SEQ ID NO: 33946 - DNA, 25 bp, SARS Virus
gtggatattatttcaacttttgtac

SEQ ID NO: 33947 - DNA, 25 bp, SARS Virus
tggatattattctaacttttgtact

SEQ ID NO: 33948 - DNA, 25 bp, SARS Virus
ggatattattcctacttttgtactg

SEQ ID NO: 33949 - DNA, 25 bp, SARS Virus
gatattattccatcttttgtactgc

SEQ ID NO: 33950 - DNA, 25 bp, SARS Virus
atattattccaatttttgtactgcg

SEQ ID NO: 33951 - DNA, 25 bp, SARS Virus
tattattccaacttttgtactgcgg

SEQ ID NO: 33952 - DNA, 25 bp, SARS Virus
attattccaacttttgtactgcggg

SEQ ID NO: 33953 - DNA, 25 bp, SARS Virus
ttattccaacttttgtactgcgggt

SEQ ID NO: 33954 - DNA, 25 bp, SARS Virus
tattccaacttttgtactgcgggtc

SEQ ID NO: 33955 - DNA, 25 bp, SARS Virus
attccaacttttttactgcgggtct

SEQ ID NO: 33956 - DNA, 25 bp, SARS Virus
ttccaacttttgtactgcgggtctc

SEQ ID NO: 33957 - DNA, 25 bp, SARS Virus
tccaacttttgttctgcgggtctct

SEQ ID NO: 33958 - DNA, 25 bp, SARS Virus
ccaacttttgtattgcgggtctcta

SEQ ID NO: 33959 - DNA, 25 bp, SARS Virus
caacttttgtactgcgggtctctag

SEQ ID NO: 33960 - DNA, 25 bp, SARS Virus
aacttttgtacttcgggtctctaga

SEQ ID NO: 33961 - DNA, 25 bp, SARS Virus
acttttgtactgtgggtctctagaa

SEQ ID NO: 33962 - DNA, 25 bp, SARS Virus
cttttgtactgctggtctctagaac

SEQ ID NO: 33963 - DNA, 25 bp, SARS Virus
ttttgtactgcgtgtctctagaacc

SEQ ID NO: 33964 - DNA, 25 bp, SARS Virus
tttgtactgcggttctctagaaccg

SEQ ID NO: 33965 - DNA, 25 bp, SARS Virus
ttgtactgcgggtctctagaaccgc

SEQ ID NO: 33966 - DNA, 25 bp, SARS Virus
tgtactgcgggtttctagaaccgcg

SEQ ID NO: 33967 - DNA, 25 bp, SARS Virus
gtactgcgggtctctagaaccgcgt

SEQ ID NO: 33968 - DNA, 25 bp, SARS Virus
tactgcgggtctttagaaccgcgta

SEQ ID NO: 33969 - DNA, 25 bp, SARS Virus
actgcgggtctctagaaccgcgtac

SEQ ID NO: 33970 - DNA, 25 bp, SARS Virus
ctgcgggtctcttgaaccgcgtaca

SEQ ID NO: 33971 - DNA, 25 bp, SARS Virus
tgcgggtctctataaccgcgtacat

SEQ ID NO: 33972 - DNA, 25 bp, SARS Virus
gcgggtctctagtaccgcgtacata

SEQ ID NO: 33973 - DNA, 25 bp, SARS Virus
cgggtctctagatccgcgtacataa

SEQ ID NO: 33974 - DNA, 25 bp, SARS Virus
gggtctctagaatcgcgtacataac

SEQ ID NO: 33975 - DNA, 25 bp, SARS Virus
ggtctctagaactgcgtacataact

SEQ ID NO: 33976 - DNA, 25 bp, SARS Virus
gtctctagaacctcgtacataactg

SEQ ID NO: 33977 - DNA, 25 bp, SARS Virus
tctctagaaccgtgtacataactga

SEQ ID NO: 33978 - DNA, 25 bp, SARS Virus
ctctagaaccgcttacataactgac

SEQ ID NO: 33979 - DNA, 25 bp, SARS Virus
tctagaaccgcgtacataactgaca

SEQ ID NO: 33980 - DNA, 25 bp, SARS Virus
ctagaaccgcgttcataactgacat

SEQ ID NO: 33981 - DNA, 25 bp, SARS Virus
tagaaccgcgtatataactgacatt

SEQ ID NO: 33982 - DNA, 25 bp, SARS Virus
agaaccgcgtacttaactgacatta

SEQ ID NO: 33983 - DNA, 25 bp, SARS Virus
gaaccgcgtacataactgacattac

SEQ ID NO: 33984 - DNA, 25 bp, SARS Virus
aaccgcgtacattactgacattacg

SEQ ID NO: 33985 - DNA, 25 bp, SARS Virus
accgcgtacatatctgacattacgt

SEQ ID NO: 33986 - DNA, 25 bp, SARS Virus
ccgcgtacataattgacattacgtt

SEQ ID NO: 33987 - DNA, 25 bp, SARS Virus
cgcgtacataactgacattacgttc

SEQ ID NO: 33988 - DNA, 25 bp, SARS Virus
gcgtacataacttacattacgttcc

SEQ ID NO: 33989 - DNA, 25 bp, SARS Virus
cgtacataactgtcattacgttccg

SEQ ID NO: 33990 - DNA, 25 bp, SARS Virus
gtacataactgatattacgttccgt

SEQ ID NO: 33991 - DNA, 25 bp, SARS Virus
tacataactgactttacgttccgta

SEQ ID NO: 33992 - DNA, 25 bp, SARS Virus
acataactgacattacgttccgtat

SEQ ID NO: 33993 - DNA, 25 bp, SARS Virus
cataactgacattacgttccgtata

SEQ ID NO: 33994 - DNA, 25 bp, SARS Virus
ataactgacatttcgttccgtatag

SEQ ID NO: 33995 - DNA, 25 bp, SARS Virus
taactgacattatgttccgtatagt

SEQ ID NO: 33996 - DNA, 25 bp, SARS Virus
aactgacattactttccgtatagtt

SEQ ID NO: 33997 - DNA, 25 bp, SARS Virus
actgacattacgttccgtatagtta

SEQ ID NO: 33998 - DNA, 25 bp, SARS Virus
ctgacattacgttccgtatagttac

SEQ ID NO: 33999 - DNA, 25 bp, SARS Virus
tgacattacgtttcgtatagttacg

SEQ ID NO: 34000 - DNA, 25 bp, SARS Virus
gacattacgttctgtatagttacgg

SEQ ID NO: 34001 - DNA, 25 bp, SARS Virus
acattacgttccttatagttacggg

SEQ ID NO: 34002 - DNA, 25 bp, SARS Virus
cattacgttccgtatagttacgggt

SEQ ID NO: 34003 - DNA, 25 bp, SARS Virus
attacgttccgtttagttacgggtt

SEQ ID NO: 34004 - DNA, 25 bp, SARS Virus
ttacgttccgtatagttacgggttc

SEQ ID NO: 34005 - DNA, 25 bp, SARS Virus
tacgttccgtattgttacgggttca

SEQ ID NO: 34006 - DNA, 25 bp, SARS Virus
acgttccgtatatttacgggttcat

SEQ ID NO: 34007 - DNA, 25 bp, SARS Virus
cgttccgtatagttacgggttcatc

SEQ ID NO: 34008 - DNA, 25 bp, SARS Virus
gttccgtatagttacgggttcatcg

SEQ ID NO: 34009 - DNA, 25 bp, SARS Virus
ttccgtatagtttcgggttcatcgt

SEQ ID NO: 34010 - DNA, 25 bp, SARS Virus
tccgtatagttatgggttcatcgtt

SEQ ID NO: 34011 - DNA, 25 bp, SARS Virus
ccgtatagttactggttcatcgttt

SEQ ID NO: 34012 - DNA, 25 bp, SARS Virus
cgtatagttacgtgttcatcgtttt

SEQ ID NO: 34013 - DNA, 25 bp, SARS Virus
gtatagttacggtttcatcgttttt

SEQ ID NO: 34014 - DNA, 25 bp, SARS Virus
tatagttacgggttcatcgtttttc

SEQ ID NO: 34015 - DNA, 25 bp, SARS Virus
atagttacgggttcatcgtttttca

SEQ ID NO: 34016 - DNA, 25 bp, SARS Virus
tagttacgggtttatcgtttttcag

SEQ ID NO: 34017 - DNA, 25 bp, SARS Virus
agttacgggttcttcgtttttcagt

SEQ ID NO: 34018 - DNA, 25 bp, SARS Virus
gttacgggttcatcgtttttcagtg

SEQ ID NO: 34019 - DNA, 25 bp, SARS Virus
ttacgggttcattgtttttcagtgt

SEQ ID NO: 34020 - DNA, 25 bp, SARS Virus
tacgggttcatcttttttcagtgtt

SEQ ID NO: 34021 - DNA, 25 bp, SARS Virus
acgggttcatcgtttttcagtgtta

SEQ ID NO: 34022 - DNA, 25 bp, SARS Virus
cgggttcatcgtttttcagtgttac

SEQ ID NO: 34023 - DNA, 25 bp, SARS Virus
gggttcatcgtttttcagtgttaca

SEQ ID NO: 34024 - DNA, 25 bp, SARS Virus
ggttcatcgtttttcagtgttacaa

SEQ ID NO: 34025 - DNA, 25 bp, SARS Virus
gttcatcgtttttcagtgttacaaa

SEQ ID NO: 34026 - DNA, 25 bp, SARS Virus
ttcatcgttttttagtgttacaaag

SEQ ID NO: 34027 - DNA, 25 bp, SARS Virus
tcatcgtttttctgtgttacaaagt

SEQ ID NO: 34028 - DNA, 25 bp, SARS Virus
catcgtttttcattgttacaaagtg

SEQ ID NO: 34029 - DNA, 25 bp, SARS Virus
atcgtttttcagtgttacaaagtga

SEQ ID NO: 34030 - DNA, 25 bp, SARS Virus
tcgtttttcagttttacaaagtgag

SEQ ID NO: 34031 - DNA, 25 bp, SARS Virus
cgtttttcagtgttacaaagtgagt

SEQ ID NO: 34032 - DNA, 25 bp, SARS Virus
gtttttcagtgttacaaagtgagta

SEQ ID NO: 34033 - DNA, 25 bp, SARS Virus
tttttcagtgtttcaaagtgagtag

SEQ ID NO: 34034 - DNA, 25 bp, SARS Virus
ttttcagtgttataaagtgagtaga

SEQ ID NO: 34035 - DNA, 25 bp, SARS Virus
tttcagtgttactaagtgagtagac

SEQ ID NO: 34036 - DNA, 25 bp, SARS Virus
ttcagtgttacatagtgagtagacc

SEQ ID NO: 34037 - DNA, 25 bp, SARS Virus
tcagtgttacaatgtgagtagacct

SEQ ID NO: 34038 - DNA, 25 bp, SARS Virus
cagtgttacaaattgagtagacctt

SEQ ID NO: 34039 - DNA, 25 bp, SARS Virus
agtgttacaaagtgagtagacctta

SEQ ID NO: 34040 - DNA, 25 bp, SARS Virus
gtgttacaaagttagtagaccttac

SEQ ID NO: 34041 - DNA, 25 bp, SARS Virus
tgttacaaagtgtgtagaccttaca

SEQ ID NO: 34042 - DNA, 25 bp, SARS Virus
gttacaaagtgattagaccttacat

SEQ ID NO: 34043 - DNA, 25 bp, SARS Virus
ttacaaagtgagtagaccttacatt

SEQ ID NO: 34044 - DNA, 25 bp, SARS Virus
tacaaagtgagttgaccttacattt

SEQ ID NO: 34045 - DNA, 25 bp, SARS Virus
acaaagtgagtataccttacatttt

SEQ ID NO: 34046 - DNA, 25 bp, SARS Virus
caaagtgagtagtccttacattttc

SEQ ID NO: 34047 - DNA, 25 bp, SARS Virus
aaagtgagtagatcttacattttct

SEQ ID NO: 34048 - DNA, 25 bp, SARS Virus
aagtgagtagactttacattttctg

SEQ ID NO: 34049 - DNA, 25 bp, SARS Virus
agtgagtagaccttacattttctga

SEQ ID NO: 34050 - DNA, 25 bp, SARS Virus
gtgagtagaccttacattttctgat

SEQ ID NO: 34051 - DNA, 25 bp, SARS Virus
tgagtagacctttcattttctgatg

SEQ ID NO: 34052 - DNA, 25 bp, SARS Virus
gagtagaccttatattttctgatgt

SEQ ID NO: 34053 - DNA, 25 bp, SARS Virus
agtagaccttactttttctgatgta

SEQ ID NO: 34054 - DNA, 25 bp, SARS Virus
gtagaccttacattttctgatgtac

SEQ ID NO: 34055 - DNA, 25 bp, SARS Virus
tagaccttacattttctgatgtaca

SEQ ID NO: 34056 - DNA, 25 bp, SARS Virus
agaccttacattttctgatgtacag

SEQ ID NO: 34057 - DNA, 25 bp, SARS Virus
gaccttacattttctgatgtacaga

SEQ ID NO: 34058 - DNA, 25 bp, SARS Virus
accttacattttttgatgtacagaa

SEQ ID NO: 34059 - DNA, 25 bp, SARS Virus
ccttacattttctgatgtacagaaa

SEQ ID NO: 34060 - DNA, 25 bp, SARS Virus
cttacattttcttatgtacagaaat

SEQ ID NO: 34061 - DNA, 25 bp, SARS Virus
ttacattttctgttgtacagaaata

SEQ ID NO: 34062 - DNA, 25 bp, SARS Virus
tacattttctgatgtacagaaatag

SEQ ID NO: 34063 - DNA, 25 bp, SARS Virus
acattttctgatttacagaaataga

SEQ ID NO: 34064 - DNA, 25 bp, SARS Virus
cattttctgatgtacagaaatagac

SEQ ID NO: 34065 - DNA, 25 bp, SARS Virus
attttctgatgttcagaaatagact

SEQ ID NO: 34066 - DNA, 25 bp, SARS Virus
ttttctgatgtatagaaatagactt

SEQ ID NO: 34067 - DNA, 25 bp, SARS Virus
tttctgatgtactgaaatagacttg

SEQ ID NO: 34068 - DNA, 25 bp, SARS Virus
ttctgatgtacataaatagacttgt

SEQ ID NO: 34069 - DNA, 25 bp, SARS Virus
tctgatgtacagtaatagacttgtc

SEQ ID NO: 34070 - DNA, 25 bp, SARS Virus
ctgatgtacagatatagacttgtcg

SEQ ID NO: 34071 - DNA, 25 bp, SARS Virus
tgatgtacagaattagacttgtcga

SEQ ID NO: 34072 - DNA, 25 bp, SARS Virus
gatgtacagaaatagacttgtcgac

SEQ ID NO: 34073 - DNA, 25 bp, SARS Virus
atgtacagaaattgacttgtcgacg

SEQ ID NO: 34074 - DNA, 25 bp, SARS Virus
tgtacagaaatatacttgtcgacgc

SEQ ID NO: 34075 - DNA, 25 bp, SARS Virus
gtacagaaatagtcttgtcgacgca

SEQ ID NO: 34076 - DNA, 25 bp, SARS Virus
tacagaaatagatttgtcgacgcat

SEQ ID NO: 34077 - DNA, 25 bp, SARS Virus
acagaaatagacttgtcgacgcatt

SEQ ID NO: 34078 - DNA, 25 bp, SARS Virus
cagaaatagacttgtcgacgcattt

SEQ ID NO: 34079 - DNA, 25 bp, SARS Virus
agaaatagacttttcgacgcatttg

SEQ ID NO: 34080 - DNA, 25 bp, SARS Virus
gaaatagacttgtcgacgcatttgt

SEQ ID NO: 34081 - DNA, 25 bp, SARS Virus
aaatagacttgttgacgcatttgtt

SEQ ID NO: 34082 - DNA, 25 bp, SARS Virus
aatagacttgtctacgcatttgttt

SEQ ID NO: 34083 - DNA, 25 bp, SARS Virus
atagacttgtcgtcgcatttgttta

SEQ ID NO: 34084 - DNA, 25 bp, SARS Virus
tagacttgtcgatgcatttgtttaa

SEQ ID NO: 34085 - DNA, 25 bp, SARS Virus
agacttgtcgactcatttgtttaag

SEQ ID NO: 34086 - DNA, 25 bp, SARS Virus
gacttgtcgacgtatttgtttaagc

SEQ ID NO: 34087 - DNA, 25 bp, SARS Virus
acttgtcgacgcttttgtttaagca

SEQ ID NO: 34088 - DNA, 25 bp, SARS Virus
cttgtcgacgcatttgtttaagcat

SEQ ID NO: 34089 - DNA, 25 bp, SARS Virus
ttgtcgacgcatttgtttaagcatc

SEQ ID NO: 34090 - DNA, 25 bp, SARS Virus
tgtcgacgcatttgtttaagcatca

SEQ ID NO: 34091 - DNA, 25 bp, SARS Virus
gtcgacgcatttttttaagcatcac

SEQ ID NO: 34092 - DNA, 25 bp, SARS Virus
tcgacgcatttgtttaagcatcacg

SEQ ID NO: 34093 - DNA, 25 bp, SARS Virus
cgacgcatttgtttaagcatcacga

SEQ ID NO: 34094 - DNA, 25 bp, SARS Virus
gacgcatttgtttaagcatcacgac

SEQ ID NO: 34095 - DNA, 25 bp, SARS Virus
acgcatttgttttagcatcacgacg

SEQ ID NO: 34096 - DNA, 25 bp, SARS Virus
cgcatttgtttatgcatcacgacgg

SEQ ID NO: 34097 - DNA, 25 bp, SARS Virus
gcatttgtttaatcatcacgacggt

SEQ ID NO: 34098 - DNA, 25 bp, SARS Virus
catttgtttaagtatcacgacggtt

SEQ ID NO: 34099 - DNA, 25 bp, SARS Virus
atttgtttaagcttcacgacggttc

SEQ ID NO: 34100 - DNA, 25 bp, SARS Virus
tttgtttaagcatcacgacggttct

SEQ ID NO: 34101 - DNA, 25 bp, SARS Virus
ttgtttaagcattacgacggttctt

SEQ ID NO: 34102 - DNA, 25 bp, SARS Virus
tgtttaagcatctcgacggttcttc

SEQ ID NO: 34103 - DNA, 25 bp, SARS Virus
gtttaagcatcatgacggttcttct

SEQ ID NO: 34104 - DNA, 25 bp, SARS Virus
tttaagcatcactacggttcttctt

SEQ ID NO: 34105 - DNA, 25 bp, SARS Virus
ttaagcatcacgtcggttcttcttg

SEQ ID NO: 34106 - DNA, 25 bp, SARS Virus
taagcatcacgatggttcttcttgt

SEQ ID NO: 34107 - DNA, 25 bp, SARS Virus
aagcatcacgactgttcttcttgtt

SEQ ID NO: 34108 - DNA, 25 bp, SARS Virus
agcatcacgacgtttcttcttgttg

SEQ ID NO: 34109 - DNA, 25 bp, SARS Virus
gcatcacgacggttcttcttgttgt

SEQ ID NO: 34110 - DNA, 25 bp, SARS Virus
catcacgacggttcttcttgttgta

SEQ ID NO: 34111 - DNA, 25 bp, SARS Virus
atcacgacggtttttcttgttgtat

SEQ ID NO: 34112 - DNA, 25 bp, SARS Virus
tcacgacggttcttcttgttgtatg

SEQ ID NO: 34113 - DNA, 25 bp, SARS Virus
cacgacggttcttcttgttgtatgg

SEQ ID NO: 34114 - DNA, 25 bp, SARS Virus
acgacggttctttttgttgtatgga

SEQ ID NO: 34115 - DNA, 25 bp, SARS Virus
cgacggttcttcttgttgtatggaa

SEQ ID NO: 34116 - DNA, 25 bp, SARS Virus
gacggttcttcttgttgtatggaaa

SEQ ID NO: 34117 - DNA, 25 bp, SARS Virus
acggttcttctttttgtatggaaaa

SEQ ID NO: 34118 - DNA, 25 bp, SARS Virus
cggttcttcttgttgtatggaaaat

SEQ ID NO: 34119 - DNA, 25 bp, SARS Virus
ggttcttcttgttgtatggaaaatc

SEQ ID NO: 34120 - DNA, 25 bp, SARS Virus
gttcttcttgttttatggaaaatct

SEQ ID NO: 34121 - DNA, 25 bp, SARS Virus
ttcttcttgttgtatggaaaatctg

SEQ ID NO: 34122 - DNA, 25 bp, SARS Virus
tcttcttgttgtttggaaaatctga

SEQ ID NO: 34123 - DNA, 25 bp, SARS Virus
cttcttgttgtatggaaaatctgat

SEQ ID NO: 34124 - DNA, 25 bp, SARS Virus
ttcttgttgtattgaaaatctgatt

SEQ ID NO: 34125 - DNA, 25 bp, SARS Virus
tcttgttgtatgtaaaatctgattg

SEQ ID NO: 34126 - DNA, 25 bp, SARS Virus
cttgttgtatggtaaatctgattga

SEQ ID NO: 34127 - DNA, 25 bp, SARS Virus
ttgttgtatggataatctgattgaa

SEQ ID NO: 34128 - DNA, 25 bp, SARS Virus
tgttgtatggaatatctgattgaac

SEQ ID NO: 34129 - DNA, 25 bp, SARS Virus
gttgtatggaaattctgattgaaca

SEQ ID NO: 34130 - DNA, 25 bp, SARS Virus
ttgtatggaaaatctgattgaacac

SEQ ID NO: 34131 - DNA, 25 bp, SARS Virus
tgtatggaaaatttgattgaacacg

SEQ ID NO: 34132 - DNA, 25 bp, SARS Virus
gtatggaaaatctgattgaacacga

SEQ ID NO: 34133 - DNA, 25 bp, SARS Virus
tatggaaaatcttattgaacacgat

SEQ ID NO: 34134 - DNA, 25 bp, SARS Virus
atggaaaatctgtttgaacacgatg

SEQ ID NO: 34135 - DNA, 25 bp, SARS Virus
tggaaaatctgattgaacacgatgt

SEQ ID NO: 34136 - DNA, 25 bp, SARS Virus
ggaaaatctgattgaacacgatgtt

SEQ ID NO: 34137 - DNA, 25 bp, SARS Virus
gaaaatctgatttaacacgatgttg

SEQ ID NO: 34138 - DNA, 25 bp, SARS Virus
aaaatctgattgtacacgatgttga

SEQ ID NO: 34139 - DNA, 25 bp, SARS Virus
aaatctgattgatcacgatgttgat

SEQ ID NO: 34140 - DNA, 25 bp, SARS Virus
aatctgattgaatacgatgttgatc

SEQ ID NO: 34141 - DNA, 25 bp, SARS Virus
atctgattgaactcgatgttgatct

SEQ ID NO: 34142 - DNA, 25 bp, SARS Virus
tctgattgaacatgatgttgatctg

SEQ ID NO: 34143 - DNA, 25 bp, SARS Virus
ctgattgaacactatgttgatctgt

SEQ ID NO: 34144 - DNA, 25 bp, SARS Virus
tgattgaacacgttgttgatctgtc

SEQ ID NO: 34145 - DNA, 25 bp, SARS Virus
gattgaacacgatgttgatctgtcc

SEQ ID NO: 34146 - DNA, 25 bp, SARS Virus
attgaacacgattttgatctgtcca

SEQ ID NO: 34147 - DNA, 25 bp, SARS Virus
ttgaacacgatgttgatctgtccaa

SEQ ID NO: 34148 - DNA, 25 bp, SARS Virus
tgaacacgatgttgatctgtccaac

SEQ ID NO: 34149 - DNA, 25 bp, SARS Virus
gaacacgatgtttatctgtccaaca

SEQ ID NO: 34150 - DNA, 25 bp, SARS Virus
aacacgatgttgttctgtccaacag

SEQ ID NO: 34151 - DNA, 25 bp, SARS Virus
acacgatgttgatctgtccaacagt

SEQ ID NO: 34152 - DNA, 25 bp, SARS Virus
cacgatgttgatttgtccaacagtt

SEQ ID NO: 34153 - DNA, 25 bp, SARS Virus
acgatgttgatctgtccaacagtta

SEQ ID NO: 34154 - DNA, 25 bp, SARS Virus
cgatgttgatctttccaacagttac

SEQ ID NO: 34155 - DNA, 25 bp, SARS Virus
gatgttgatctgtccaacagttaca

SEQ ID NO: 34156 - DNA, 25 bp, SARS Virus
atgttgatctgttcaacagttacag

SEQ ID NO: 34157 - DNA, 25 bp, SARS Virus
tgttgatctgtctaacagttacagt

SEQ ID NO: 34158 - DNA, 25 bp, SARS Virus
gttgatctgtcctacagttacagta

SEQ ID NO: 34159 - DNA, 25 bp, SARS Virus
ttgatctgtccatcagttacagtat

SEQ ID NO: 34160 - DNA, 25 bp, SARS Virus
tgatctgtccaatagttacagtatt

SEQ ID NO: 34161 - DNA, 25 bp, SARS Virus
gatctgtccaactgttacagtattg

SEQ ID NO: 34162 - DNA, 25 bp, SARS Virus
atctgtccaacatttacagtattga

SEQ ID NO: 34163 - DNA, 25 bp, SARS Virus
tctgtccaacagttacagtattgat

SEQ ID NO: 34164 - DNA, 25 bp, SARS Virus
ctgtccaacagttacagtattgatg

SEQ ID NO: 34165 - DNA, 25 bp, SARS Virus
tgtccaacagtttcagtattgatga

SEQ ID NO: 34166 - DNA, 25 bp, SARS Virus
gtccaacagttatagtattgatgat

SEQ ID NO: 34167 - DNA, 25 bp, SARS Virus
tccaacagttactgtattgatgatt

SEQ ID NO: 34168 - DNA, 25 bp, SARS Virus
ccaacagttacattattgatgattt

SEQ ID NO: 34169 - DNA, 25 bp, SARS Virus
caacagttacagtattgatgatttt

SEQ ID NO: 34170 - DNA, 25 bp, SARS Virus
aacagttacagttttgatgatttta

SEQ ID NO: 34171 - DNA, 25 bp, SARS Virus
acagttacagtattgatgattttag

SEQ ID NO: 34172 - DNA, 25 bp, SARS Virus
cagttacagtattgatgattttaga

SEQ ID NO: 34173 - DNA, 25 bp, SARS Virus
agttacagtatttatgattttagag

SEQ ID NO: 34174 - DNA, 25 bp, SARS Virus
gttacagtattgttgattttagagt

SEQ ID NO: 34175 - DNA, 25 bp, SARS Virus
ttacagtattgatgattttagagtg

SEQ ID NO: 34176 - DNA, 25 bp, SARS Virus
tacagtattgattattttagagtga

SEQ ID NO: 34177 - DNA, 25 bp, SARS Virus
acagtattgatgtttttagagtgag

SEQ ID NO: 34178 - DNA, 25 bp, SARS Virus
cagtattgatgattttagagtgagt

SEQ ID NO: 34179 - DNA, 25 bp, SARS Virus
agtattgatgattttagagtgagtt

SEQ ID NO: 34180 - DNA, 25 bp, SARS Virus
gtattgatgattttagagtgagttc

SEQ ID NO: 34181 - DNA, 25 bp, SARS Virus
tattgatgattttagagtgagttcc

SEQ ID NO: 34182 - DNA, 25 bp, SARS Virus
attgatgatttttgagtgagttccc

SEQ ID NO: 34183 - DNA, 25 bp, SARS Virus
ttgatgattttatagtgagttccca

SEQ ID NO: 34184 - DNA, 25 bp, SARS Virus
tgatgattttagtgtgagttcccac

SEQ ID NO: 34185 - DNA, 25 bp, SARS Virus
gatgattttagattgagttcccacc

SEQ ID NO: 34186 - DNA, 25 bp, SARS Virus
atgattttagagtgagttcccacca

SEQ ID NO: 34187 - DNA, 25 bp, SARS Virus
tgattttagagttagttcccaccat

SEQ ID NO: 34188 - DNA, 25 bp, SARS Virus
gattttagagtgtgttcccaccatt

SEQ ID NO: 34189 - DNA, 25 bp, SARS Virus
attttagagtgatttcccaccattc

SEQ ID NO: 34190 - DNA, 25 bp, SARS Virus
ttttagagtgagttcccaccattct

SEQ ID NO: 34191 - DNA, 25 bp, SARS Virus
tttagagtgagttcccaccattcta

SEQ ID NO: 34192 - DNA, 25 bp, SARS Virus
ttagagtgagtttccaccattctaa

SEQ ID NO: 34193 - DNA, 25 bp, SARS Virus
tagagtgagttctcaccattctaac

SEQ ID NO: 34194 - DNA, 25 bp, SARS Virus
agagtgagttcctaccattctaaca

SEQ ID NO: 34195 - DNA, 25 bp, SARS Virus
gagtgagttccctccattctaacaa

SEQ ID NO: 34196 - DNA, 25 bp, SARS Virus
agtgagttcccatcattctaacaat

SEQ ID NO: 34197 - DNA, 25 bp, SARS Virus
gtgagttcccactattctaacaatc

SEQ ID NO: 34198 - DNA, 25 bp, SARS Virus
tgagttcccacctttctaacaatca

SEQ ID NO: 34199 - DNA, 25 bp, SARS Virus
gagttcccaccattctaacaatcat

SEQ ID NO: 34200 - DNA, 25 bp, SARS Virus
agttcccaccattctaacaatcatg

SEQ ID NO: 34201 - DNA, 25 bp, SARS Virus
gttcccaccattttaacaatcatga

SEQ ID NO: 34202 - DNA, 25 bp, SARS Virus
ttcccaccattctaacaatcatgaa

SEQ ID NO: 34203 - DNA, 25 bp, SARS Virus
tcccaccattcttacaatcatgaac

SEQ ID NO: 34204 - DNA, 25 bp, SARS Virus
cccaccattctatcaatcatgaaca

SEQ ID NO: 34205 - DNA, 25 bp, SARS Virus
ccaccattctaataatcatgaacaa

SEQ ID NO: 34206 - DNA, 25 bp, SARS Virus
caccattctaactatcatgaacaaa

SEQ ID NO: 34207 - DNA, 25 bp, SARS Virus
accattctaacattcatgaacaaaa

SEQ ID NO: 34208 - DNA, 25 bp, SARS Virus
ccattctaacaatcatgaacaaaat

SEQ ID NO: 34209 - DNA, 25 bp, SARS Virus
cattctaacaattatgaacaaaatt

SEQ ID NO: 34210 - DNA, 25 bp, SARS Virus
attctaacaatcttgaacaaaattt

SEQ ID NO: 34211 - DNA, 25 bp, SARS Virus
ttctaacaatcatgaacaaaatttg

SEQ ID NO: 34212 - DNA, 25 bp, SARS Virus
tctaacaatcattaacaaaatttga

SEQ ID NO: 34213 - DNA, 25 bp, SARS Virus
ctaacaatcatgtacaaaatttgaa

SEQ ID NO: 34214 - DNA, 25 bp, SARS Virus
taacaatcatgatcaaaatttgaat

SEQ ID NO: 34215 - DNA, 25 bp, SARS Virus
aacaatcatgaataaaatttgaata

SEQ ID NO: 34216 - DNA, 25 bp, SARS Virus
acaatcatgaactaaatttgaatac

SEQ ID NO: 34217 - DNA, 25 bp, SARS Virus
caatcatgaacataatttgaatacg

SEQ ID NO: 34218 - DNA, 25 bp, SARS Virus
aatcatgaacaatatttgaatacga

SEQ ID NO: 34219 - DNA, 25 bp, SARS Virus
atcatgaacaaattttgaatacgaa

SEQ ID NO: 34220 - DNA, 25 bp, SARS Virus
tcatgaacaaaatttgaatacgaat

SEQ ID NO: 34221 - DNA, 25 bp, SARS Virus
catgaacaaaatttgaatacgaatt

SEQ ID NO: 34222 - DNA, 25 bp, SARS Virus
atgaacaaaatttgaatacgaattc

SEQ ID NO: 34223 - DNA, 25 bp, SARS Virus
tgaacaaaattttaatacgaattcc

SEQ ID NO: 34224 - DNA, 25 bp, SARS Virus
gaacaaaatttgtatacgaattccg

SEQ ID NO: 34225 - DNA, 25 bp, SARS Virus
aacaaaatttgattacgaattccgg

SEQ ID NO: 34226 - DNA, 25 bp, SARS Virus
acaaaatttgaatacgaattccggt

SEQ ID NO: 34227 - DNA, 25 bp, SARS Virus
caaaatttgaattcgaattccggtg

SEQ ID NO: 34228 - DNA, 25 bp, SARS Virus
aaaatttgaatatgaattccggtgt

SEQ ID NO: 34229 - DNA, 25 bp, SARS Virus
aaatttgaatactaattccggtgta

SEQ ID NO: 34230 - DNA, 25 bp, SARS Virus
aatttgaatacgtattccggtgtaa

SEQ ID NO: 34231 - DNA, 25 bp, SARS Virus
atttgaatacgatttccggtgtaat

SEQ ID NO: 34232 - DNA, 25 bp, SARS Virus
tttgaatacgaattccggtgtaata

SEQ ID NO: 34233 - DNA, 25 bp, SARS Virus
ttgaatacgaattccggtgtaataa

SEQ ID NO: 34234 - DNA, 25 bp, SARS Virus
tgaatacgaatttcggtgtaataac

SEQ ID NO: 34235 - DNA, 25 bp, SARS Virus
gaatacgaattctggtgtaataaca

SEQ ID NO: 34236 - DNA, 25 bp, SARS Virus
aatacgaattcctgtgtaataacac

SEQ ID NO: 34237 - DNA, 25 bp, SARS Virus
atacgaattccgttgtaataacacg

SEQ ID NO: 34238 - DNA, 25 bp, SARS Virus
tacgaattccggtgtaataacacgc

SEQ ID NO: 34239 - DNA, 25 bp, SARS Virus
acgaattccggtttaataacacgca

SEQ ID NO: 34240 - DNA, 25 bp, SARS Virus
cgaattccggtgtaataacacgcaa

SEQ ID NO: 34241 - DNA, 25 bp, SARS Virus
gaattccggtgttataacacgcaag

SEQ ID NO: 34242 - DNA, 25 bp, SARS Virus
aattccggtgtattaacacgcaaga

SEQ ID NO: 34243 - DNA, 25 bp, SARS Virus
attccggtgtaataacacgcaagaa

SEQ ID NO: 34244 - DNA, 25 bp, SARS Virus
ttccggtgtaattacacgcaagaac

SEQ ID NO: 34245 - DNA, 25 bp, SARS Virus
tccggtgtaatatcacgcaagaacg

SEQ ID NO: 34246 - DNA, 25 bp, SARS Virus
ccggtgtaataatacgcaagaacga

SEQ ID NO: 34247 - DNA, 25 bp, SARS Virus
cggtgtaataactcgcaagaacgac

SEQ ID NO: 34248 - DNA, 25 bp, SARS Virus
ggtgtaataacatgcaagaacgacg

SEQ ID NO: 34249 - DNA, 25 bp, SARS Virus
gtgtaataacactcaagaacgacgt

SEQ ID NO: 34250 - DNA, 25 bp, SARS Virus
tgtaataacacgtaagaacgacgta

SEQ ID NO: 34251 - DNA, 25 bp, SARS Virus
gtaataacacgctagaacgacgtaa

SEQ ID NO: 34252 - DNA, 25 bp, SARS Virus
taataacacgcatgaacgacgtaac

SEQ ID NO: 34253 - DNA, 25 bp, SARS Virus
aataacacgcaataacgacgtaacc

SEQ ID NO: 34254 - DNA, 25 bp, SARS Virus
ataacacgcaagtacgacgtaacca

SEQ ID NO: 34255 - DNA, 25 bp, SARS Virus
taacacgcaagatcgacgtaaccaa

SEQ ID NO: 34256 - DNA, 25 bp, SARS Virus
aacacgcaagaatgacgtaaccaaa

SEQ ID NO: 34257 - DNA, 25 bp, SARS Virus
acacgcaagaactacgtaaccaaac

SEQ ID NO: 34258 - DNA, 25 bp, SARS Virus
cacgcaagaacgtcgtaaccaaaca

SEQ ID NO: 34259 - DNA, 25 bp, SARS Virus
acgcaagaacgatgtaaccaaacaa

SEQ ID NO: 34260 - DNA, 25 bp, SARS Virus
cgcaagaacgacttaaccaaacaat

SEQ ID NO: 34261 - DNA, 25 bp, SARS Virus
gcaagaacgacgtaaccaaacaata

SEQ ID NO: 34262 - DNA, 25 bp, SARS Virus
caagaacgacgttaccaaacaatat

SEQ ID NO: 34263 - DNA, 25 bp, SARS Virus
aagaacgacgtatccaaacaatata

SEQ ID NO: 34264 - DNA, 25 bp, SARS Virus
agaacgacgtaatcaaacaatatag

SEQ ID NO: 34265 - DNA, 25 bp, SARS Virus
gaacgacgtaactaaacaatatagc

SEQ ID NO: 34266 - DNA, 25 bp, SARS Virus
aacgacgtaacctaacaatatagca

SEQ ID NO: 34267 - DNA, 25 bp, SARS Virus
acgacgtaaccatacaatatagcaa

SEQ ID NO: 34268 - DNA, 25 bp, SARS Virus
cgacgtaaccaatcaatatagcaat

SEQ ID NO: 34269 - DNA, 25 bp, SARS Virus
gacgtaaccaaataatatagcaata

SEQ ID NO: 34270 - DNA, 25 bp, SARS Virus
acgtaaccaaactatatagcaatac

SEQ ID NO: 34271 - DNA, 25 bp, SARS Virus
cgtaaccaaacattatagcaatacg

SEQ ID NO: 34272 - DNA, 25 bp, SARS Virus
gtaaccaaacaatatagcaatacgg

SEQ ID NO: 34273 - DNA, 25 bp, SARS Virus
taaccaaacaatttagcaatacggt

SEQ ID NO: 34274 - DNA, 25 bp, SARS Virus
aaccaaacaatatagcaatacggtc

SEQ ID NO: 34275 - DNA, 25 bp, SARS Virus
accaaacaatattgcaatacggtca

SEQ ID NO: 34276 - DNA, 25 bp, SARS Virus
ccaaacaatatatcaatacggtcat

SEQ ID NO: 34277 - DNA, 25 bp, SARS Virus
caaacaatatagtaatacggtcatg

SEQ ID NO: 34278 - DNA, 25 bp, SARS Virus
aaacaatatagctatacggtcatgt

SEQ ID NO: 34279 - DNA, 25 bp, SARS Virus
aacaatatagcattacggtcatgta

SEQ ID NO: 34280 - DNA, 25 bp, SARS Virus
acaatatagcaatacggtcatgtat

SEQ ID NO: 34281 - DNA, 25 bp, SARS Virus
caatatagcaattcggtcatgtatg

SEQ ID NO: 34282 - DNA, 25 bp, SARS Virus
aatatagcaatatggtcatgtatgt

SEQ ID NO: 34283 - DNA, 25 bp, SARS Virus
atatagcaatactgtcatgtatgta

SEQ ID NO: 34284 - DNA, 25 bp, SARS Virus
tatagcaatacgttcatgtatgtaa

SEQ ID NO: 34285 - DNA, 25 bp, SARS Virus
atagcaatacggtcatgtatgtaac

SEQ ID NO: 34286 - DNA, 25 bp, SARS Virus
tagcaatacggttatgtatgtaaca

SEQ ID NO: 34287 - DNA, 25 bp, SARS Virus
agcaatacggtcttgtatgtaacag

SEQ ID NO: 34288 - DNA, 25 bp, SARS Virus
gcaatacggtcatgtatgtaacagt

SEQ ID NO: 34289 - DNA, 25 bp, SARS Virus
caatacggtcatatatgtaacagtt

SEQ ID NO: 34290 - DNA, 25 bp, SARS Virus
aatacggtcatgaatgtaacagtta

SEQ ID NO: 34291 - DNA, 25 bp, SARS Virus
atacggtcatgtatgtaacagttag

SEQ ID NO: 34292 - DNA, 25 bp, SARS Virus
tacggtcatgtaagtaacagttagg

SEQ ID NO: 34293 - DNA, 25 bp, SARS Virus
acggtcatgtatataacagttaggt

SEQ ID NO: 34294 - DNA, 25 bp, SARS Virus
cggtcatgtatgaaacagttaggta

SEQ ID NO: 34295 - DNA, 25 bp, SARS Virus
ggtcatgtatgtaacagttaggtac

SEQ ID NO: 34296 - DNA, 25 bp, SARS Virus
gtcatgtatgtaacagttaggtact

SEQ ID NO: 34297 - DNA, 25 bp, SARS Virus
tcatgtatgtaaaagttaggtacta

SEQ ID NO: 34298 - DNA, 25 bp, SARS Virus
catgtatgtaacagttaggtactac

SEQ ID NO: 34299 - DNA, 25 bp, SARS Virus
atgtatgtaacaattaggtactacc

SEQ ID NO: 34300 - DNA, 25 bp, SARS Virus
tgtatgtaacagataggtactacca

SEQ ID NO: 34301 - DNA, 25 bp, SARS Virus
gtatgtaacagtaaggtactaccaa

SEQ ID NO: 34302 - DNA, 25 bp, SARS Virus
tatgtaacagttaggtactaccaat

SEQ ID NO: 34303 - DNA, 25 bp, SARS Virus
atgtaacagttaagtactaccaatg

SEQ ID NO: 34304 - DNA, 25 bp, SARS Virus
tgtaacagttagatactaccaatgt

SEQ ID NO: 34305 - DNA, 25 bp, SARS Virus
gtaacagttaggaactaccaatgtg

SEQ ID NO: 34306 - DNA, 25 bp, SARS Virus
taacagttaggtactaccaatgtgt

SEQ ID NO: 34307 - DNA, 25 bp, SARS Virus
aacagttaggtaataccaatgtgtt

SEQ ID NO: 34308 - DNA, 25 bp, SARS Virus
acagttaggtacaaccaatgtgttt

SEQ ID NO: 34309 - DNA, 25 bp, SARS Virus
cagttaggtactaccaatgtgttta

SEQ ID NO: 34310 - DNA, 25 bp, SARS Virus
agttaggtactaacaatgtgtttac

SEQ ID NO: 34311 - DNA, 25 bp, SARS Virus
gttaggtactacaaatgtgtttact

SEQ ID NO: 34312 - DNA, 25 bp, SARS Virus
ttaggtactaccaatgtgtttactt

SEQ ID NO: 34313 - DNA, 25 bp, SARS Virus
taggtactaccaatgtgtttacttt

SEQ ID NO: 34314 - DNA, 25 bp, SARS Virus
aggtactaccaaagtgtttacttta

SEQ ID NO: 34315 - DNA, 25 bp, SARS Virus
ggtactaccaatatgtttactttag

SEQ ID NO: 34316 - DNA, 25 bp, SARS Virus
gtactaccaatgagtttactttagt

SEQ ID NO: 34317 - DNA, 25 bp, SARS Virus
tactaccaatgtatttactttagta

SEQ ID NO: 34318 - DNA, 25 bp, SARS Virus
actaccaatgtgattactttagtaa

SEQ ID NO: 34319 - DNA, 25 bp, SARS Virus
ctaccaatgtgtatactttagtaac

SEQ ID NO: 34320 - DNA, 25 bp, SARS Virus
taccaatgtgttaactttagtaacc

SEQ ID NO: 34321 - DNA, 25 bp, SARS Virus
accaatgtgtttactttagtaacca

SEQ ID NO: 34322 - DNA, 25 bp, SARS Virus
ccaatgtgtttaatttagtaaccaa

SEQ ID NO: 34323 - DNA, 25 bp, SARS Virus
caatgtgtttacattagtaaccaat

SEQ ID NO: 34324 - DNA, 25 bp, SARS Virus
aatgtgtttactatagtaaccaatg

SEQ ID NO: 34325 - DNA, 25 bp, SARS Virus
atgtgtttacttaagtaaccaatgt

SEQ ID NO: 34326 - DNA, 25 bp, SARS Virus
tgtgtttactttagtaaccaatgtt

SEQ ID NO: 34327 - DNA, 25 bp, SARS Virus
gtgtttactttaataaccaatgttt

SEQ ID NO: 34328 - DNA, 25 bp, SARS Virus
tgtttactttagaaaccaatgtttc

SEQ ID NO: 34329 - DNA, 25 bp, SARS Virus
gtttactttagtaaccaatgtttcg

SEQ ID NO: 34330 - DNA, 25 bp, SARS Virus
tttactttagtaaccaatgtttcgg

SEQ ID NO: 34331 - DNA, 25 bp, SARS Virus
ttactttagtaaacaatgtttcggt

SEQ ID NO: 34332 - DNA, 25 bp, SARS Virus
tactttagtaacaaatgtttcggta

SEQ ID NO: 34333 - DNA, 25 bp, SARS Virus
actttagtaaccaatgtttcggtaa

SEQ ID NO: 34334 - DNA, 25 bp, SARS Virus
ctttagtaaccaatgtttcggtaag

SEQ ID NO: 34335 - DNA, 25 bp, SARS Virus
tttagtaaccaaagtttcggtaagt

SEQ ID NO: 34336 - DNA, 25 bp, SARS Virus
ttagtaaccaatatttcggtaagtc

SEQ ID NO: 34337 - DNA, 25 bp, SARS Virus
tagtaaccaatgattcggtaagtcc

SEQ ID NO: 34338 - DNA, 25 bp, SARS Virus
agtaaccaatgtatcggtaagtcct

SEQ ID NO: 34339 - DNA, 25 bp, SARS Virus
gtaaccaatgttacggtaagtccta

SEQ ID NO: 34340 - DNA, 25 bp, SARS Virus
taaccaatgtttaggtaagtcctac

SEQ ID NO: 34341 - DNA, 25 bp, SARS Virus
aaccaatgtttcagtaagtcctacc

SEQ ID NO: 34342 - DNA, 25 bp, SARS Virus
accaatgtttcgataagtcctacca

SEQ ID NO: 34343 - DNA, 25 bp, SARS Virus
ccaatgtttcggaaagtcctaccac

SEQ ID NO: 34344 - DNA, 25 bp, SARS Virus
caatgtttcggtaagtcctaccaca

SEQ ID NO: 34345 - DNA, 25 bp, SARS Virus
aatgtttcggtaagtcctaccacag

SEQ ID NO: 34346 - DNA, 25 bp, SARS Virus
atgtttcggtaaatcctaccacagt

SEQ ID NO: 34347 - DNA, 25 bp, SARS Virus
tgtttcggtaagacctaccacagtg

SEQ ID NO: 34348 - DNA, 25 bp, SARS Virus
gtttcggtaagtactaccacagtga

SEQ ID NO: 34349 - DNA, 25 bp, SARS Virus
tttcggtaagtcataccacagtgag

SEQ ID NO: 34350 - DNA, 25 bp, SARS Virus
ttcggtaagtccaaccacagtgagc

SEQ ID NO: 34351 - DNA, 25 bp, SARS Virus
tcggtaagtcctaccacagtgagca

SEQ ID NO: 34352 - DNA, 25 bp, SARS Virus
cggtaagtcctaacacagtgagcac

SEQ ID NO: 34353 - DNA, 25 bp, SARS Virus
ggtaagtcctacaacagtgagcact

SEQ ID NO: 34354 - DNA, 25 bp, SARS Virus
gtaagtcctaccacagtgagcactg

SEQ ID NO: 34355 - DNA, 25 bp, SARS Virus
taagtcctaccaaagtgagcactgt

SEQ ID NO: 34356 - DNA, 25 bp, SARS Virus
aagtcctaccacagtgagcactgta

SEQ ID NO: 34357 - DNA, 25 bp, SARS Virus
agtcctaccacaatgagcactgtag

SEQ ID NO: 34358 - DNA, 25 bp, SARS Virus
gtcctaccacagagagcactgtagt

SEQ ID NO: 34359 - DNA, 25 bp, SARS Virus
tcctaccacagtaagcactgtagta

SEQ ID NO: 34360 - DNA, 25 bp, SARS Virus
cctaccacagtgagcactgtagtaa

SEQ ID NO: 34361 - DNA, 25 bp, SARS Virus
ctaccacagtgaacactgtagtaaa

SEQ ID NO: 34362 - DNA, 25 bp, SARS Virus
taccacagtgagaactgtagtaaag

SEQ ID NO: 34363 - DNA, 25 bp, SARS Virus
accacagtgagcactgtagtaaaga

SEQ ID NO: 34364 - DNA, 25 bp, SARS Virus
ccacagtgagcaatgtagtaaagat

SEQ ID NO: 34365 - DNA, 25 bp, SARS Virus
cacagtgagcacagtagtaaagatg

SEQ ID NO: 34366 - DNA, 25 bp, SARS Virus
acagtgagcactatagtaaagatga

SEQ ID NO: 34367 - DNA, 25 bp, SARS Virus
cagtgagcactgaagtaaagatgac

SEQ ID NO: 34368 - DNA, 25 bp, SARS Virus
agtgagcactgtagtaaagatgact

SEQ ID NO: 34369 - DNA, 25 bp, SARS Virus
gtgagcactgtaataaagatgacta

SEQ ID NO: 34370 - DNA, 25 bp, SARS Virus
tgagcactgtagaaaagatgactac

SEQ ID NO: 34371 - DNA, 25 bp, SARS Virus
gagcactgtagtaaagatgactact

SEQ ID NO: 34372 - DNA, 25 bp, SARS Virus
agcactgtagtaaagatgactacta

SEQ ID NO: 34373 - DNA, 25 bp, SARS Virus
gcactgtagtaaagatgactactaa

SEQ ID NO: 34374 - DNA, 25 bp, SARS Virus
cactgtagtaaaaatgactactaac

SEQ ID NO: 34375 - DNA, 25 bp, SARS Virus
actgtagtaaagatgactactaaca

SEQ ID NO: 34376 - DNA, 25 bp, SARS Virus
ctgtagtaaagaagactactaacaa

SEQ ID NO: 34377 - DNA, 25 bp, SARS Virus
tgtagtaaagataactactaacaaa

SEQ ID NO: 34378 - DNA, 25 bp, SARS Virus
gtagtaaagatgactactaacaaaa

SEQ ID NO: 34379 - DNA, 25 bp, SARS Virus
tagtaaagatgaatactaacaaaac

SEQ ID NO: 34380 - DNA, 25 bp, SARS Virus
agtaaagatgacaactaacaaaacg

SEQ ID NO: 34381 - DNA, 25 bp, SARS Virus
gtaaagatgactactaacaaaacgt

SEQ ID NO: 34382 - DNA, 25 bp, SARS Virus
taaagatgactaataacaaaacgtt

SEQ ID NO: 34383 - DNA, 25 bp, SARS Virus
aaagatgactacaaacaaaacgttt

SEQ ID NO: 34384 - DNA, 25 bp, SARS Virus
aagatgactactaacaaaacgttta

SEQ ID NO: 34385 - DNA, 25 bp, SARS Virus
agatgactactaacaaaacgtttat

SEQ ID NO: 34386 - DNA, 25 bp, SARS Virus
gatgactactaaaaaaacgtttatt

SEQ ID NO: 34387 - DNA, 25 bp, SARS Virus
atgactactaacaaaacgtttattt

SEQ ID NO: 34388 - DNA, 25 bp, SARS Virus
tgactactaacaaaacgtttatttg

SEQ ID NO: 34389 - DNA, 25 bp, SARS Virus
gactactaacaaaacgtttatttgt

SEQ ID NO: 34390 - DNA, 25 bp, SARS Virus
actactaacaaaacgtttatttgta

SEQ ID NO: 34391 - DNA, 25 bp, SARS Virus
ctactaacaaaaagtttatttgtac

SEQ ID NO: 34392 - DNA, 25 bp, SARS Virus
tactaacaaaacatttatttgtacg

SEQ ID NO: 34393 - DNA, 25 bp, SARS Virus
actaacaaaacgattatttgtacga

SEQ ID NO: 34394 - DNA, 25 bp, SARS Virus
ctaacaaaacgtatatttgtacgac

SEQ ID NO: 34395 - DNA, 25 bp, SARS Virus
taacaaaacgttaatttgtacgacc

SEQ ID NO: 34396 - DNA, 25 bp, SARS Virus
aacaaaacgtttatttgtacgacca

SEQ ID NO: 34397 - DNA, 25 bp, SARS Virus
acaaaacgtttaattgtacgaccaa

SEQ ID NO: 34398 - DNA, 25 bp, SARS Virus
caaaacgtttatatgtacgaccaaa

SEQ ID NO: 34399 - DNA, 25 bp, SARS Virus
aaaacgtttattagtacgaccaaaa

SEQ ID NO: 34400 - DNA, 25 bp, SARS Virus
aaacgtttatttatacgaccaaaac

SEQ ID NO: 34401 - DNA, 25 bp, SARS Virus
aacgtttatttgaacgaccaaaact

SEQ ID NO: 34402 - DNA, 25 bp, SARS Virus
acgtttatttgtacgaccaaaactg

SEQ ID NO: 34403 - DNA, 25 bp, SARS Virus
cgtttatttgtaagaccaaaactgc

SEQ ID NO: 34404 - DNA, 25 bp, SARS Virus
gtttatttgtacaaccaaaactgcg

SEQ ID NO: 34405 - DNA, 25 bp, SARS Virus
tttatttgtacgaccaaaactgcgt

SEQ ID NO: 34406 - DNA, 25 bp, SARS Virus
ttatttgtacgaacaaaactgcgta

SEQ ID NO: 34407 - DNA, 25 bp, SARS Virus
tatttgtacgacaaaaactgcgtac

SEQ ID NO: 34408 - DNA, 25 bp, SARS Virus
atttgtacgaccaaaactgcgtacc

SEQ ID NO: 34409 - DNA, 25 bp, SARS Virus
tttgtacgaccaaaactgcgtacca

SEQ ID NO: 34410 - DNA, 25 bp, SARS Virus
ttgtacgaccaaaactgcgtaccaa

SEQ ID NO: 34411 - DNA, 25 bp, SARS Virus
tgtacgaccaaaactgcgtaccaaa

SEQ ID NO: 34412 - DNA, 25 bp, SARS Virus
gtacgaccaaaaatgcgtaccaaat

SEQ ID NO: 34413 - DNA, 25 bp, SARS Virus
tacgaccaaaacagcgtaccaaatc

SEQ ID NO: 34414 - DNA, 25 bp, SARS Virus
acgaccaaaactacgtaccaaatcg

SEQ ID NO: 34415 - DNA, 25 bp, SARS Virus
cgaccaaaactgagtaccaaatcgg

SEQ ID NO: 34416 - DNA, 25 bp, SARS Virus
gaccaaaactgcataccaaatcggt

SEQ ID NO: 34417 - DNA, 25 bp, SARS Virus
accaaaactgcgaaccaaatcggtc

SEQ ID NO: 34418 - DNA, 25 bp, SARS Virus
ccaaaactgcgtaccaaatcggtcg

SEQ ID NO: 34419 - DNA, 25 bp, SARS Virus
caaaactgcgtaacaaatcggtcgc

SEQ ID NO: 34420 - DNA, 25 bp, SARS Virus
aaaactgcgtacaaaatcggtcgca

SEQ ID NO: 34421 - DNA, 25 bp, SARS Virus
aaactgcgtaccaaatcggtcgcac

SEQ ID NO: 34422 - DNA, 25 bp, SARS Virus
aactgcgtaccaaatcggtcgcacc

SEQ ID NO: 34423 - DNA, 25 bp, SARS Virus
actgcgtaccaaatcggtcgcacca

SEQ ID NO: 34424 - DNA, 25 bp, SARS Virus
ctgcgtaccaaaacggtcgcaccac

SEQ ID NO: 34425 - DNA, 25 bp, SARS Virus
tgcgtaccaaataggtcgcaccacc

SEQ ID NO: 34426 - DNA, 25 bp, SARS Virus
gcgtaccaaatcagtcgcaccacca

SEQ ID NO: 34427 - DNA, 25 bp, SARS Virus
cgtaccaaatcgatcgcaccaccaa

SEQ ID NO: 34428 - DNA, 25 bp, SARS Virus
gtaccaaatcggacgcaccaccaag

SEQ ID NO: 34429 - DNA, 25 bp, SARS Virus
taccaaatcggtagcaccaccaagt

SEQ ID NO: 34430 - DNA, 25 bp, SARS Virus
accaaatcggtcacaccaccaagta

SEQ ID NO: 34431 - DNA, 25 bp, SARS Virus
ccaaatcggtcgaaccaccaagtat

SEQ ID NO: 34432 - DNA, 25 bp, SARS Virus
caaatcggtcgcaccaccaagtatg

SEQ ID NO: 34433 - DNA, 25 bp, SARS Virus
aaatcggtcgcaacaccaagtatgt

SEQ ID NO: 34434 - DNA, 25 bp, SARS Virus
aatcggtcgcacaaccaagtatgtt

SEQ ID NO: 34435 - DNA, 25 bp, SARS Virus
atcggtcgcaccaccaagtatgttt

SEQ ID NO: 34436 - DNA, 25 bp, SARS Virus
tcggtcgcaccaacaagtatgtttt

SEQ ID NO: 34437 - DNA, 25 bp, SARS Virus
cggtcgcaccacaaagtatgttttt

SEQ ID NO: 34438 - DNA, 25 bp, SARS Virus
ggtcgcaccaccaagtatgttttta

SEQ ID NO: 34439 - DNA, 25 bp, SARS Virus
gtcgcaccaccaagtatgtttttac

SEQ ID NO: 34440 - DNA, 25 bp, SARS Virus
tcgcaccaccaaatatgtttttact

SEQ ID NO: 34441 - DNA, 25 bp, SARS Virus
cgcaccaccaagaatgtttttactg

SEQ ID NO: 34442 - DNA, 25 bp, SARS Virus
gcaccaccaagtatgtttttactgt

SEQ ID NO: 34443 - DNA, 25 bp, SARS Virus
caccaccaagtaagtttttactgtt

SEQ ID NO: 34444 - DNA, 25 bp, SARS Virus
accaccaagtatatttttactgttt

SEQ ID NO: 34445 - DNA, 25 bp, SARS Virus
ccaccaagtatgattttactgtttt

SEQ ID NO: 34446 - DNA, 25 bp, SARS Virus
caccaagtatgtatttactgttttc

SEQ ID NO: 34447 - DNA, 25 bp, SARS Virus
accaagtatgttattactgttttcg

SEQ ID NO: 34448 - DNA, 25 bp, SARS Virus
ccaagtatgtttatactgttttcga

SEQ ID NO: 34449 - DNA, 25 bp, SARS Virus
caagtatgttttaactgttttcgac

SEQ ID NO: 34450 - DNA, 25 bp, SARS Virus
aagtatgtttttactgttttcgacg

SEQ ID NO: 34451 - DNA, 25 bp, SARS Virus
agtatgtttttaatgttttcgacgg

SEQ ID NO: 34452 - DNA, 25 bp, SARS Virus
gtatgtttttacagttttcgacggg

SEQ ID NO: 34453 - DNA, 25 bp, SARS Virus
tatgtttttactattttcgacggga

SEQ ID NO: 34454 - DNA, 25 bp, SARS Virus
atgtttttactgatttcgacgggac

SEQ ID NO: 34455 - DNA, 25 bp, SARS Virus
tgtttttactgtattcgacgggaca

SEQ ID NO: 34456 - DNA, 25 bp, SARS Virus
gtttttactgttatcgacgggacat

SEQ ID NO: 34457 - DNA, 25 bp, SARS Virus
tttttactgtttacgacgggacatc

SEQ ID NO: 34458 - DNA, 25 bp, SARS Virus
ttttactgttttagacgggacatca

SEQ ID NO: 34459 - DNA, 25 bp, SARS Virus
tttactgttttcaacgggacatcat

SEQ ID NO: 34460 - DNA, 25 bp, SARS Virus
ttactgttttcgacgggacatcatc

SEQ ID NO: 34461 - DNA, 25 bp, SARS Virus
tactgttttcgaagggacatcatcg

SEQ ID NO: 34462 - DNA, 25 bp, SARS Virus
actgttttcgacaggacatcatcga

SEQ ID NO: 34463 - DNA, 25 bp, SARS Virus
ctgttttcgacgagacatcatcgac

SEQ ID NO: 34464 - DNA, 25 bp, SARS Virus
tgttttcgacggaacatcatcgacg

SEQ ID NO: 34465 - DNA, 25 bp, SARS Virus
gttttcgacgggacatcatcgacga

SEQ ID NO: 34466 - DNA, 25 bp, SARS Virus
ttttcgacgggaaatcatcgacgat

SEQ ID NO: 34467 - DNA, 25 bp, SARS Virus
tttcgacgggacatcatcgacgata

SEQ ID NO: 34468 - DNA, 25 bp, SARS Virus
ttcgacgggacaacatcgacgatag

SEQ ID NO: 34469 - DNA, 25 bp, SARS Virus
tcgacgggacataatcgacgatagt

SEQ ID NO: 34470 - DNA, 25 bp, SARS Virus
cgacgggacatcatcgacgatagta

SEQ ID NO: 34471 - DNA, 25 bp, SARS Virus
gacgggacatcaacgacgatagtaa

SEQ ID NO: 34472 - DNA, 25 bp, SARS Virus
acgggacatcatagacgatagtaat

SEQ ID NO: 34473 - DNA, 25 bp, SARS Virus
cgggacatcatcaacgatagtaatg

SEQ ID NO: 34474 - DNA, 25 bp, SARS Virus
gggacatcatcgacgatagtaatgt

SEQ ID NO: 34475 - DNA, 25 bp, SARS Virus
ggacatcatcgaagatagtaatgtt

SEQ ID NO: 34476 - DNA, 25 bp, SARS Virus
gacatcatcgacaatagtaatgttc

SEQ ID NO: 34477 - DNA, 25 bp, SARS Virus
acatcatcgacgatagtaatgttct

SEQ ID NO: 34478 - DNA, 25 bp, SARS Virus
catcatcgacgaaagtaatgttctc

SEQ ID NO: 34479 - DNA, 25 bp, SARS Virus
atcatcgacgatagtaatgttctct

SEQ ID NO: 34480 - DNA, 25 bp, SARS Virus
tcatcgacgataataatgttctctc

SEQ ID NO: 34481 - DNA, 25 bp, SARS Virus
catcgacgatagaaatgttctctct

SEQ ID NO: 34482 - DNA, 25 bp, SARS Virus
atcgacgatagtaatgttctctcta

SEQ ID NO: 34483 - DNA, 25 bp, SARS Virus
tcgacgatagtaatgttctctctaa

SEQ ID NO: 34484 - DNA, 25 bp, SARS Virus
cgacgatagtaaagttctctctaac

SEQ ID NO: 34485 - DNA, 25 bp, SARS Virus
gacgatagtaatattctctctaacc

SEQ ID NO: 34486 - DNA, 25 bp, SARS Virus
acgatagtaatgatctctctaacca

SEQ ID NO: 34487 - DNA, 25 bp, SARS Virus
cgatagtaatgtactctctaaccaa

SEQ ID NO: 34488 - DNA, 25 bp, SARS Virus
gatagtaatgttatctctaaccaaa

SEQ ID NO: 34489 - DNA, 25 bp, SARS Virus
atagtaatgttcactctaaccaaag

SEQ ID NO: 34490 - DNA, 25 bp, SARS Virus
tagtaatgttctatctaaccaaagt

SEQ ID NO: 34491 - DNA, 25 bp, SARS Virus
agtaatgttctcactaaccaaagta

SEQ ID NO: 34492 - DNA, 25 bp, SARS Virus
gtaatgttctctataaccaaagtat

SEQ ID NO: 34493 - DNA, 25 bp, SARS Virus
taatgttctctcaaaccaaagtatc

SEQ ID NO: 34494 - DNA, 25 bp, SARS Virus
aatgttctctctaaccaaagtatca

SEQ ID NO: 34495 - DNA, 25 bp, SARS Virus
atgttctctctaaccaaagtatcac

SEQ ID NO: 34496 - DNA, 25 bp, SARS Virus
tgttctctctaaacaaagtatcacg

SEQ ID NO: 34497 - DNA, 25 bp, SARS Virus
gttctctctaacaaaagtatcacgg

SEQ ID NO: 34498 - DNA, 25 bp, SARS Virus
ttctctctaaccaaagtatcacgga

SEQ ID NO: 34499 - DNA, 25 bp, SARS Virus
tctctctaaccaaagtatcacggac

SEQ ID NO: 34500 - DNA, 25 bp, SARS Virus
ctctctaaccaaagtatcacggacc

SEQ ID NO: 34501 - DNA, 25 bp, SARS Virus
tctctaaccaaaatatcacggaccg

SEQ ID NO: 34502 - DNA, 25 bp, SARS Virus
ctctaaccaaagaatcacggaccga

SEQ ID NO: 34503 - DNA, 25 bp, SARS Virus
tctaaccaaagtatcacggaccgaa

SEQ ID NO: 34504 - DNA, 25 bp, SARS Virus
ctaaccaaagtaacacggaccgaat

SEQ ID NO: 34505 - DNA, 25 bp, SARS Virus
taaccaaagtataacggaccgaatg

SEQ ID NO: 34506 - DNA, 25 bp, SARS Virus
aaccaaagtatcacggaccgaatgg

SEQ ID NO: 34507 - DNA, 25 bp, SARS Virus
accaaagtatcaaggaccgaatggc

SEQ ID NO: 34508 - DNA, 25 bp, SARS Virus
ccaaagtatcacagaccgaatggcc

SEQ ID NO: 34509 - DNA, 25 bp, SARS Virus
caaagtatcacgaaccgaatggccc

SEQ ID NO: 34510 - DNA, 25 bp, SARS Virus
aaagtatcacggaccgaatggccca

SEQ ID NO: 34511 - DNA, 25 bp, SARS Virus
aagtatcacggaacgaatggcccat

SEQ ID NO: 34512 - DNA, 25 bp, SARS Virus
agtatcacggacagaatggcccatg

SEQ ID NO: 34513 - DNA, 25 bp, SARS Virus
gtatcacggaccaaatggcccatga

SEQ ID NO: 34514 - DNA, 25 bp, SARS Virus
tatcacggaccgaatggcccatgac

SEQ ID NO: 34515 - DNA, 25 bp, SARS Virus
atcacggaccgaatggcccatgaca

SEQ ID NO: 34516 - DNA, 25 bp, SARS Virus
tcacggaccgaaaggcccatgacac

SEQ ID NO: 34517 - DNA, 25 bp, SARS Virus
cacggaccgaatagcccatgacacg

SEQ ID NO: 34518 - DNA, 25 bp, SARS Virus
acggaccgaatgacccatgacacga

SEQ ID NO: 34519 - DNA, 25 bp, SARS Virus
cggaccgaatggaccatgacacgac

SEQ ID NO: 34520 - DNA, 25 bp, SARS Virus
ggaccgaatggcacatgacacgact

SEQ ID NO: 34521 - DNA, 25 bp, SARS Virus
gaccgaatggccaatgacacgactc

SEQ ID NO: 34522 - DNA, 25 bp, SARS Virus
accgaatggcccatgacacgactct

SEQ ID NO: 34523 - DNA, 25 bp, SARS Virus
ccgaatggcccaagacacgactctc

SEQ ID NO: 34524 - DNA, 25 bp, SARS Virus
cgaatggcccataacacgactctcg

SEQ ID NO: 34525 - DNA, 25 bp, SARS Virus
gaatggcccatgacacgactctcgt

SEQ ID NO: 34526 - DNA, 25 bp, SARS Virus
aatggcccatgaaacgactctcgtt

SEQ ID NO: 34527 - DNA, 25 bp, SARS Virus
atggcccatgacacgactctcgtta

SEQ ID NO: 34528 - DNA, 25 bp, SARS Virus
tggcccatgacaagactctcgttag

SEQ ID NO: 34529 - DNA, 25 bp, SARS Virus
ggcccatgacacaactctcgttagt

SEQ ID NO: 34530 - DNA, 25 bp, SARS Virus
gcccatgacacgactctcgttagtt

SEQ ID NO: 34531 - DNA, 25 bp, SARS Virus
cccatgacacgaatctcgttagtta

SEQ ID NO: 34532 - DNA, 25 bp, SARS Virus
ccatgacacgacactcgttagttac

SEQ ID NO: 34533 - DNA, 25 bp, SARS Virus
catgacacgactatcgttagttacc

SEQ ID NO: 34534 - DNA, 25 bp, SARS Virus
atgacacgactcacgttagttacca

SEQ ID NO: 34535 - DNA, 25 bp, SARS Virus
tgacacgactctagttagttaccac

SEQ ID NO: 34536 - DNA, 25 bp, SARS Virus
gacacgactctcattagttaccact

SEQ ID NO: 34537 - DNA, 25 bp, SARS Virus
acacgactctcgatagttaccactg

SEQ ID NO: 34538 - DNA, 25 bp, SARS Virus
cacgactctcgtaagttaccactga

SEQ ID NO: 34539 - DNA, 25 bp, SARS Virus
acgactctcgttagttaccactgaa

SEQ ID NO: 34540 - DNA, 25 bp, SARS Virus
cgactctcgttaattaccactgaag

SEQ ID NO: 34541 - DNA, 25 bp, SARS Virus
gactctcgttagataccactgaaga

SEQ ID NO: 34542 - DNA, 25 bp, SARS Virus
actctcgttagtaaccactgaagaa

SEQ ID NO: 34543 - DNA, 25 bp, SARS Virus
ctctcgttagttaccactgaagaac

SEQ ID NO: 34544 - DNA, 25 bp, SARS Virus
tctcgttagttaacactgaagaacg

SEQ ID NO: 34545 - DNA, 25 bp, SARS Virus
ctcgttagttacaactgaagaacgt

SEQ ID NO: 34546 - DNA, 25 bp, SARS Virus
tcgttagttaccactgaagaacgta

SEQ ID NO: 34547 - DNA, 25 bp, SARS Virus
cgttagttaccaatgaagaacgtaa

SEQ ID NO: 34548 - DNA, 25 bp, SARS Virus
gttagttaccacagaagaacgtaaa

SEQ ID NO: 34549 - DNA, 25 bp, SARS Virus
ttagttaccactaaagaacgtaaaa

SEQ ID NO: 34550 - DNA, 25 bp, SARS Virus
tagttaccactgaagaacgtaaaag

SEQ ID NO: 34551 - DNA, 25 bp, SARS Virus
agttaccactgaagaacgtaaaaga

SEQ ID NO: 34552 - DNA, 25 bp, SARS Virus
gttaccactgaaaaacgtaaaagat

SEQ ID NO: 34553 - DNA, 25 bp, SARS Virus
ttaccactgaagaacgtaaaagatg

SEQ ID NO: 34554 - DNA, 25 bp, SARS Virus
taccactgaagaacgtaaaagatgg

SEQ ID NO: 34555 - DNA, 25 bp, SARS Virus
accactgaagaaagtaaaagatgga

SEQ ID NO: 34556 - DNA, 25 bp, SARS Virus
ccactgaagaacataaaagatggag

SEQ ID NO: 34557 - DNA, 25 bp, SARS Virus
cactgaagaacgaaaaagatggagc

SEQ ID NO: 34558 - DNA, 25 bp, SARS Virus
actgaagaacgtaaaagatggagca

SEQ ID NO: 34559 - DNA, 25 bp, SARS Virus
ctgaagaacgtaaaagatggagcac

SEQ ID NO: 34560 - DNA, 25 bp, SARS Virus
tgaagaacgtaaaagatggagcaca

SEQ ID NO: 34561 - DNA, 25 bp, SARS Virus
gaagaacgtaaaagatggagcacaa

SEQ ID NO: 34562 - DNA, 25 bp, SARS Virus
aagaacgtaaaaaatggagcacaaa

SEQ ID NO: 34563 - DNA, 25 bp, SARS Virus
agaacgtaaaagatggagcacaaaa

SEQ ID NO: 34564 - DNA, 25 bp, SARS Virus
gaacgtaaaagaaggagcacaaaaa

SEQ ID NO: 34565 - DNA, 25 bp, SARS Virus
aacgtaaaagatagagcacaaaaat

SEQ ID NO: 34566 - DNA, 25 bp, SARS Virus
acgtaaaagatgaagcacaaaaatc

SEQ ID NO: 34567 - DNA, 25 bp, SARS Virus
cgtaaaagatggagcacaaaaatca

SEQ ID NO: 34568 - DNA, 25 bp, SARS Virus
gtaaaagatggaacacaaaaatcac

SEQ ID NO: 34569 - DNA, 25 bp, SARS Virus
taaaagatggagaacaaaaatcacg

SEQ ID NO: 34570 - DNA, 25 bp, SARS Virus
aaaagatggagcacaaaaatcacga

SEQ ID NO: 34571 - DNA, 25 bp, SARS Virus
aaagatggagcaaaaaaatcacgac

SEQ ID NO: 34572 - DNA, 25 bp, SARS Virus
aagatggagcacaaaaatcacgaca

SEQ ID NO: 34573 - DNA, 25 bp, SARS Virus
agatggagcacaaaaatcacgacaa

SEQ ID NO: 34574 - DNA, 25 bp, SARS Virus
gatggagcacaaaaatcacgacaac

SEQ ID NO: 34575 - DNA, 25 bp, SARS Virus
atggagcacaaaaatcacgacaacc

SEQ ID NO: 34576 - DNA, 25 bp, SARS Virus
tggagcacaaaaatcacgacaaccg

SEQ ID NO: 34577 - DNA, 25 bp, SARS Virus
ggagcacaaaaaacacgacaaccgt

SEQ ID NO: 34578 - DNA, 25 bp, SARS Virus
gagcacaaaaataacgacaaccgtt

SEQ ID NO: 34579 - DNA, 25 bp, SARS Virus
agcacaaaaatcacgacaaccgttg

SEQ ID NO: 34580 - DNA, 25 bp, SARS Virus
gcacaaaaatcaagacaaccgttgt

SEQ ID NO: 34581 - DNA, 25 bp, SARS Virus
cacaaaaatcacaacaaccgttgta

SEQ ID NO: 34582 - DNA, 25 bp, SARS Virus
acaaaaatcacgacaaccgttgtaa

SEQ ID NO: 34583 - DNA, 25 bp, SARS Virus
caaaaatcacgaaaaccgttgtaaa

SEQ ID NO: 34584 - DNA, 25 bp, SARS Virus
aaaaatcacgacaaccgttgtaaac

SEQ ID NO: 34585 - DNA, 25 bp, SARS Virus
aaaatcacgacaaccgttgtaaacg

SEQ ID NO: 34586 - DNA, 25 bp, SARS Virus
aaatcacgacaaacgttgtaaacga

SEQ ID NO: 34587 - DNA, 25 bp, SARS Virus
aatcacgacaacagttgtaaacgat

SEQ ID NO: 34588 - DNA, 25 bp, SARS Virus
atcacgacaaccattgtaaacgatg

SEQ ID NO: 34589 - DNA, 25 bp, SARS Virus
tcacgacaaccgatgtaaacgatgt

SEQ ID NO: 34590 - DNA, 25 bp, SARS Virus
cacgacaaccgtagtaaacgatgtg

SEQ ID NO: 34591 - DNA, 25 bp, SARS Virus
acgacaaccgttataaacgatgtgt

SEQ ID NO: 34592 - DNA, 25 bp, SARS Virus
cgacaaccgttgaaaacgatgtgtg

SEQ ID NO: 34593 - DNA, 25 bp, SARS Virus
gacaaccgttgtaaacgatgtgtgg

SEQ ID NO: 34594 - DNA, 25 bp, SARS Virus
acaaccgttgtaaacgatgtgtgga

SEQ ID NO: 34595 - DNA, 25 bp, SARS Virus
caaccgttgtaaacgatgtgtggaa

SEQ ID NO: 34596 - DNA, 25 bp, SARS Virus
aaccgttgtaaaagatgtgtggaag

SEQ ID NO: 34597 - DNA, 25 bp, SARS Virus
accgttgtaaacaatgtgtggaagg

SEQ ID NO: 34598 - DNA, 25 bp, SARS Virus
ccgttgtaaacgatgtgtggaaggt

SEQ ID NO: 34599 - DNA, 25 bp, SARS Virus
cgttgtaaacgaagtgtggaaggtt

SEQ ID NO: 34600 - DNA, 25 bp, SARS Virus
gttgtaaacgatatgtggaaggttt

SEQ ID NO: 34601 - DNA, 25 bp, SARS Virus
ttgtaaacgatgagtggaaggtttg

SEQ ID NO: 34602 - DNA, 25 bp, SARS Virus
tgtaaacgatgtatggaaggtttga

SEQ ID NO: 34603 - DNA, 25 bp, SARS Virus
gtaaacgatgtgaggaaggtttgag

SEQ ID NO: 34604 - DNA, 25 bp, SARS Virus
taaacgatgtgtagaaggtttgagt

SEQ ID NO: 34605 - DNA, 25 bp, SARS Virus
aaacgatgtgtgaaaggtttgagta

SEQ ID NO: 34606 - DNA, 25 bp, SARS Virus
aacgatgtgtggaaggtttgagtaa

SEQ ID NO: 34607 - DNA, 25 bp, SARS Virus
acgatgtgtggaaggtttgagtaac

SEQ ID NO: 34608 - DNA, 25 bp, SARS Virus
cgatgtgtggaaagtttgagtaact

SEQ ID NO: 34609 - DNA, 25 bp, SARS Virus
gatgtgtggaagatttgagtaactc

SEQ ID NO: 34610 - DNA, 25 bp, SARS Virus
atgtgtggaaggattgagtaactca

SEQ ID NO: 34611 - DNA, 25 bp, SARS Virus
tgtgtggaaggtatgagtaactcat

SEQ ID NO: 34612 - DNA, 25 bp, SARS Virus
gtgtggaaggttagagtaactcata

SEQ ID NO: 34613 - DNA, 25 bp, SARS Virus
tgtggaaggtttaagtaactcatat

SEQ ID NO: 34614 - DNA, 25 bp, SARS Virus
gtggaaggtttgagtaactcatatc

SEQ ID NO: 34615 - DNA, 25 bp, SARS Virus
tggaaggtttgaataactcatatca

SEQ ID NO: 34616 - DNA, 25 bp, SARS Virus
ggaaggtttgagaaactcatatcac

SEQ ID NO: 34617 - DNA, 25 bp, SARS Virus
gaaggtttgagtaactcatatcact

SEQ ID NO: 34618 - DNA, 25 bp, SARS Virus
aaggtttgagtaactcatatcacta

SEQ ID NO: 34619 - DNA, 25 bp, SARS Virus
aggtttgagtaaatcatatcactaa

SEQ ID NO: 34620 - DNA, 25 bp, SARS Virus
ggtttgagtaacacatatcactaaa

SEQ ID NO: 34621 - DNA, 25 bp, SARS Virus
gtttgagtaactaatatcactaaaa

SEQ ID NO: 34622 - DNA, 25 bp, SARS Virus
tttgagtaactcatatcactaaaac

SEQ ID NO: 34623 - DNA, 25 bp, SARS Virus
ttgagtaactcaaatcactaaaacg

SEQ ID NO: 34624 - DNA, 25 bp, SARS Virus
tgagtaactcatatcactaaaacga

SEQ ID NO: 34625 - DNA, 25 bp, SARS Virus
gagtaactcataacactaaaacgat

SEQ ID NO: 34626 - DNA, 25 bp, SARS Virus
agtaactcatataactaaaacgatg

SEQ ID NO: 34627 - DNA, 25 bp, SARS Virus
gtaactcatatcactaaaacgatgg

SEQ ID NO: 34628 - DNA, 25 bp, SARS Virus
taactcatatcaataaaacgatgga

SEQ ID NO: 34629 - DNA, 25 bp, SARS Virus
aactcatatcacaaaaacgatggag

SEQ ID NO: 34630 - DNA, 25 bp, SARS Virus
actcatatcactaaaacgatggaga

SEQ ID NO: 34631 - DNA, 25 bp, SARS Virus
ctcatatcactaaaacgatggagac

SEQ ID NO: 34632 - DNA, 25 bp, SARS Virus
tcatatcactaaaacgatggagacg

SEQ ID NO: 34633 - DNA, 25 bp, SARS Virus
catatcactaaaacgatggagacga

SEQ ID NO: 34634 - DNA, 25 bp, SARS Virus
atatcactaaaaagatggagacgaa

SEQ ID NO: 34635 - DNA, 25 bp, SARS Virus
tatcactaaaacaatggagacgaac

SEQ ID NO: 34636 - DNA, 25 bp, SARS Virus
atcactaaaacgatggagacgaacg

SEQ ID NO: 34637 - DNA, 25 bp, SARS Virus
tcactaaaacgaaggagacgaacgc

SEQ ID NO: 34638 - DNA, 25 bp, SARS Virus
cactaaaacgatagagacgaacgca

SEQ ID NO: 34639 - DNA, 25 bp, SARS Virus
actaaaacgatgaagacgaacgcaa

SEQ ID NO: 34640 - DNA, 25 bp, SARS Virus
ctaaaacgatggagacgaacgcaag

SEQ ID NO: 34641 - DNA, 25 bp, SARS Virus
taaaacgatggaaacgaacgcaaga

SEQ ID NO: 34642 - DNA, 25 bp, SARS Virus
aaaacgatggagacgaacgcaagaa

SEQ ID NO: 34643 - DNA, 25 bp, SARS Virus
aaacgatggagaagaacgcaagaac

SEQ ID NO: 34644 - DNA, 25 bp, SARS Virus
aacgatggagacaaacgcaagaacg

SEQ ID NO: 34645 - DNA, 25 bp, SARS Virus
acgatggagacgaacgcaagaacga

SEQ ID NO: 34646 - DNA, 25 bp, SARS Virus
cgatggagacgaacgcaagaacgac

SEQ ID NO: 34647 - DNA, 25 bp, SARS Virus
gatggagacgaaagcaagaacgacg

SEQ ID NO: 34648 - DNA, 25 bp, SARS Virus
atggagacgaacacaagaacgacga

SEQ ID NO: 34649 - DNA, 25 bp, SARS Virus
tggagacgaacgaaagaacgacgac

SEQ ID NO: 34650 - DNA, 25 bp, SARS Virus
ggagacgaacgcaagaacgacgact

SEQ ID NO: 34651 - DNA, 25 bp, SARS Virus
gagacgaacgcaagaacgacgactc

SEQ ID NO: 34652 - DNA, 25 bp, SARS Virus
agacgaacgcaaaaacgacgactca

SEQ ID NO: 34653 - DNA, 25 bp, SARS Virus
gacgaacgcaagaacgacgactcac

SEQ ID NO: 34654 - DNA, 25 bp, SARS Virus
acgaacgcaagaacgacgactcaca

SEQ ID NO: 34655 - DNA, 25 bp, SARS Virus
cgaacgcaagaaagacgactcacat

SEQ ID NO: 34656 - DNA, 25 bp, SARS Virus
gaacgcaagaacaacgactcacatg

SEQ ID NO: 34657 - DNA, 25 bp, SARS Virus
aacgcaagaacgacgactcacatgt

SEQ ID NO: 34658 - DNA, 25 bp, SARS Virus
acgcaagaacgaagactcacatgtt

SEQ ID NO: 34659 - DNA, 25 bp, SARS Virus
cgcaagaacgacaactcacatgtta

SEQ ID NO: 34660 - DNA, 25 bp, SARS Virus
gcaagaacgacgactcacatgttaa

SEQ ID NO: 34661 - DNA, 25 bp, SARS Virus
caagaacgacgaatcacatgttaaa

SEQ ID NO: 34662 - DNA, 25 bp, SARS Virus
aagaacgacgacacacatgttaaaa

SEQ ID NO: 34663 - DNA, 25 bp, SARS Virus
agaacgacgactaacatgttaaaaa

SEQ ID NO: 34664 - DNA, 25 bp, SARS Virus
gaacgacgactcacatgttaaaaat

SEQ ID NO: 34665 - DNA, 25 bp, SARS Virus
aacgacgactcaaatgttaaaaatt

SEQ ID NO: 34666 - DNA, 25 bp, SARS Virus
acgacgactcacatgttaaaaattc

SEQ ID NO: 34667 - DNA, 25 bp, SARS Virus
cgacgactcacaagttaaaaattcc

SEQ ID NO: 34668 - DNA, 25 bp, SARS Virus
gacgactcacatattaaaaattcct

SEQ ID NO: 34669 - DNA, 25 bp, SARS Virus
acgactcacatgataaaaattccta

SEQ ID NO: 34670 - DNA, 25 bp, SARS Virus
cgactcacatgtaaaaaattcctac

SEQ ID NO: 34671 - DNA, 25 bp, SARS Virus
gactcacatgttaaaaattcctacg

SEQ ID NO: 34672 - DNA, 25 bp, SARS Virus
actcacatgttaaaaattcctacga

SEQ ID NO: 34673 - DNA, 25 bp, SARS Virus
ctcacatgttaaaaattcctacgat

SEQ ID NO: 34674 - DNA, 25 bp, SARS Virus
tcacatgttaaaaattcctacgata

SEQ ID NO: 34675 - DNA, 25 bp, SARS Virus
cacatgttaaaaattcctacgatac

SEQ ID NO: 34676 - DNA, 25 bp, SARS Virus
acatgttaaaaaatcctacgatacc

SEQ ID NO: 34677 - DNA, 25 bp, SARS Virus
catgttaaaaatacctacgataccc

SEQ ID NO: 34678 - DNA, 25 bp, SARS Virus
atgttaaaaattactacgatacccg

SEQ ID NO: 34679 - DNA, 25 bp, SARS Virus
tgttaaaaattcatacgatacccgt

SEQ ID NO: 34680 - DNA, 25 bp, SARS Virus
gttaaaaattccaacgatacccgtt

SEQ ID NO: 34681 - DNA, 25 bp, SARS Virus
ttaaaaattcctacgatacccgttt

SEQ ID NO: 34682 - DNA, 25 bp, SARS Virus
taaaaattcctaagatacccgtttg

SEQ ID NO: 34683 - DNA, 25 bp, SARS Virus
aaaaattcctacaatacccgtttgg

SEQ ID NO: 34684 - DNA, 25 bp, SARS Virus
aaaattcctacgatacccgtttgga

SEQ ID NO: 34685 - DNA, 25 bp, SARS Virus
aaattcctacgaaacccgtttggac

SEQ ID NO: 34686 - DNA, 25 bp, SARS Virus
aattcctacgatacccgtttggaca

SEQ ID NO: 34687 - DNA, 25 bp, SARS Virus
attcctacgataaccgtttggacac

SEQ ID NO: 34688 - DNA, 25 bp, SARS Virus
ttcctacgatacacgtttggacacg

SEQ ID NO: 34689 - DNA, 25 bp, SARS Virus
tcctacgataccagtttggacacgg

SEQ ID NO: 34690 - DNA, 25 bp, SARS Virus
cctacgatacccatttggacacggt

SEQ ID NO: 34691 - DNA, 25 bp, SARS Virus
ctacgatacccgattggacacggta

SEQ ID NO: 34692 - DNA, 25 bp, SARS Virus
tacgatacccgtatggacacggtat

SEQ ID NO: 34693 - DNA, 25 bp, SARS Virus
acgatacccgttaggacacggtata

SEQ ID NO: 34694 - DNA, 25 bp, SARS Virus
cgatacccgtttagacacggtataa

SEQ ID NO: 34695 - DNA, 25 bp, SARS Virus
gatacccgtttgaacacggtataac

SEQ ID NO: 34696 - DNA, 25 bp, SARS Virus
atacccgtttggacacggtataaca

SEQ ID NO: 34697 - DNA, 25 bp, SARS Virus
tacccgtttggaaacggtataacaa

SEQ ID NO: 34698 - DNA, 25 bp, SARS Virus
acccgtttggacacggtataacaat

SEQ ID NO: 34699 - DNA, 25 bp, SARS Virus
cccgtttggacaaggtataacaata

SEQ ID NO: 34700 - DNA, 25 bp, SARS Virus
ccgtttggacacagtataacaatac

SEQ ID NO: 34701 - DNA, 25 bp, SARS Virus
cgtttggacacgatataacaatact

SEQ ID NO: 34702 - DNA, 25 bp, SARS Virus
gtttggacacggaataacaatactg

SEQ ID NO: 34703 - DNA, 25 bp, SARS Virus
tttggacacggtataacaatactgt

SEQ ID NO: 34704 - DNA, 25 bp, SARS Virus
ttggacacggtaaaacaatactgtg

SEQ ID NO: 34705 - DNA, 25 bp, SARS Virus
tggacacggtataacaatactgtga

SEQ ID NO: 34706 - DNA, 25 bp, SARS Virus
ggacacggtataacaatactgtgat

SEQ ID NO: 34707 - DNA, 25 bp, SARS Virus
gacacggtataaaaatactgtgatt

SEQ ID NO: 34708 - DNA, 25 bp, SARS Virus
acacggtataacaatactgtgatta

SEQ ID NO: 34709 - DNA, 25 bp, SARS Virus
cacggtataacaatactgtgattaa

SEQ ID NO: 34710 - DNA, 25 bp, SARS Virus
acggtataacaaaactgtgattaaa

SEQ ID NO: 34711 - DNA, 25 bp, SARS Virus
cggtataacaatactgtgattaaac

SEQ ID NO: 34712 - DNA, 25 bp, SARS Virus
ggtataacaataatgtgattaaacg

SEQ ID NO: 34713 - DNA, 25 bp, SARS Virus
gtataacaatacagtgattaaacga

SEQ ID NO: 34714 - DNA, 25 bp, SARS Virus
tataacaatactatgattaaacgat

SEQ ID NO: 34715 - DNA, 25 bp, SARS Virus
ataacaatactgagattaaacgatc

SEQ ID NO: 34716 - DNA, 25 bp, SARS Virus
taacaatactgtaattaaacgatct

SEQ ID NO: 34717 - DNA, 25 bp, SARS Virus
aacaatactgtgattaaacgatctc

SEQ ID NO: 34718 - DNA, 25 bp, SARS Virus
acaatactgtgaataaacgatctcc

SEQ ID NO: 34719 - DNA, 25 bp, SARS Virus
caatactgtgataaaacgatctccc

SEQ ID NO: 34720 - DNA, 25 bp, SARS Virus
aatactgtgattaaacgatctccca

SEQ ID NO: 34721 - DNA, 25 bp, SARS Virus
atactgtgattaaacgatctcccaa

SEQ ID NO: 34722 - DNA, 25 bp, SARS Virus
tactgtgattaaacgatctcccaag

SEQ ID NO: 34723 - DNA, 25 bp, SARS Virus
actgtgattaaaagatctcccaaga

SEQ ID NO: 34724 - DNA, 25 bp, SARS Virus
ctgtgattaaacaatctcccaagat

SEQ ID NO: 34725 - DNA, 25 bp, SARS Virus
tgtgattaaacgatctcccaagata

SEQ ID NO: 34726 - DNA, 25 bp, SARS Virus
gtgattaaacgaactcccaagataa

SEQ ID NO: 34727 - DNA, 25 bp, SARS Virus
tgattaaacgatatcccaagataaa

SEQ ID NO: 34728 - DNA, 25 bp, SARS Virus
gattaaacgatcacccaagataaag

SEQ ID NO: 34729 - DNA, 25 bp, SARS Virus
attaaacgatctaccaagataaaga

SEQ ID NO: 34730 - DNA, 25 bp, SARS Virus
ttaaacgatctcacaagataaagaa

SEQ ID NO: 34731 - DNA, 25 bp, SARS Virus
taaacgatctccaaagataaagaat

SEQ ID NO: 34732 - DNA, 25 bp, SARS Virus
aaacgatctcccaagataaagaata

SEQ ID NO: 34733 - DNA, 25 bp, SARS Virus
aacgatctcccaagataaagaatat

SEQ ID NO: 34734 - DNA, 25 bp, SARS Virus
acgatctcccaaaataaagaatatc

SEQ ID NO: 34735 - DNA, 25 bp, SARS Virus
cgatctcccaagataaagaatatca

SEQ ID NO: 34736 - DNA, 25 bp, SARS Virus
gatctcccaagaaaaagaatatcac

SEQ ID NO: 34737 - DNA, 25 bp, SARS Virus
atctcccaagataaagaatatcact

SEQ ID NO: 34738 - DNA, 25 bp, SARS Virus
tctcccaagataaagaatatcactc

SEQ ID NO: 34739 - DNA, 25 bp, SARS Virus
ctcccaagataaagaatatcactcg

SEQ ID NO: 34740 - DNA, 25 bp, SARS Virus
tcccaagataaaaaatatcactcga

SEQ ID NO: 34741 - DNA, 25 bp, SARS Virus
cccaagataaagaatatcactcgaa

SEQ ID NO: 34742 - DNA, 25 bp, SARS Virus
ccaagataaagaatatcactcgaag

SEQ ID NO: 34743 - DNA, 25 bp, SARS Virus
caagataaagaaaatcactcgaagc

SEQ ID NO: 34744 - DNA, 25 bp, SARS Virus
aagataaagaatatcactcgaagca

SEQ ID NO: 34745 - DNA, 25 bp, SARS Virus
agataaagaataacactcgaagcag

SEQ ID NO: 34746 - DNA, 25 bp, SARS Virus
gataaagaatataactcgaagcagg

SEQ ID NO: 34747 - DNA, 25 bp, SARS Virus
ataaagaatatcactcgaagcaggt

SEQ ID NO: 34748 - DNA, 25 bp, SARS Virus
taaagaatatcaatcgaagcaggtc

SEQ ID NO: 34749 - DNA, 25 bp, SARS Virus
aaagaatatcacacgaagcaggtct

SEQ ID NO: 34750 - DNA, 25 bp, SARS Virus
aagaatatcactagaagcaggtctg

SEQ ID NO: 34751 - DNA, 25 bp, SARS Virus
agaatatcactcaaagcaggtctgt

SEQ ID NO: 34752 - DNA, 25 bp, SARS Virus
gaatatcactcgaagcaggtctgtg

SEQ ID NO: 34753 - DNA, 25 bp, SARS Virus
aatatcactcgaagcaggtctgtga

SEQ ID NO: 34754 - DNA, 25 bp, SARS Virus
atatcactcgaaacaggtctgtgag

SEQ ID NO: 34755 - DNA, 25 bp, SARS Virus
tatcactcgaagaaggtctgtgagc

SEQ ID NO: 34756 - DNA, 25 bp, SARS Virus
atcactcgaagcaggtctgtgagca

SEQ ID NO: 34757 - DNA, 25 bp, SARS Virus
tcactcgaagcaagtctgtgagcaa

SEQ ID NO: 34758 - DNA, 25 bp, SARS Virus
cactcgaagcagatctgtgagcaat

SEQ ID NO: 34759 - DNA, 25 bp, SARS Virus
actcgaagcaggactgtgagcaata

SEQ ID NO: 34760 - DNA, 25 bp, SARS Virus
ctcgaagcaggtatgtgagcaatac

SEQ ID NO: 34761 - DNA, 25 bp, SARS Virus
tcgaagcaggtcagtgagcaataca

SEQ ID NO: 34762 - DNA, 25 bp, SARS Virus
cgaagcaggtctatgagcaatacac

SEQ ID NO: 34763 - DNA, 25 bp, SARS Virus
gaagcaggtctgagagcaatacacg

SEQ ID NO: 34764 - DNA, 25 bp, SARS Virus
aagcaggtctgtaagcaatacacga

SEQ ID NO: 34765 - DNA, 25 bp, SARS Virus
agcaggtctgtgagcaatacacgaa

SEQ ID NO: 34766 - DNA, 25 bp, SARS Virus
gcaggtctgtgaacaatacacgaat

SEQ ID NO: 34767 - DNA, 25 bp, SARS Virus
caggtctgtgagaaatacacgaata

SEQ ID NO: 34768 - DNA, 25 bp, SARS Virus
aggtctgtgagcaatacacgaatac

SEQ ID NO: 34769 - DNA, 25 bp, SARS Virus
ggtctgtgagcaatacacgaatacc

SEQ ID NO: 34770 - DNA, 25 bp, SARS Virus
gtctgtgagcaaaacacgaatacct

SEQ ID NO: 34771 - DNA, 25 bp, SARS Virus
tctgtgagcaatacacgaataccta

SEQ ID NO: 34772 - DNA, 25 bp, SARS Virus
ctgtgagcaataaacgaatacctac

SEQ ID NO: 34773 - DNA, 25 bp, SARS Virus
tgtgagcaatacacgaatacctacc

SEQ ID NO: 34774 - DNA, 25 bp, SARS Virus
gtgagcaatacaagaatacctacca

SEQ ID NO: 34775 - DNA, 25 bp, SARS Virus
tgagcaatacacaaatacctaccaa

SEQ ID NO: 34776 - DNA, 25 bp, SARS Virus
gagcaatacacgaatacctaccaag

SEQ ID NO: 34777 - DNA, 25 bp, SARS Virus
caatacggtcatctatgtaacagtt

SEQ ID NO: 34778 - DNA, 25 bp, SARS Virus
aatacggtcatgcatgtaacagtta

SEQ ID NO: 34779 - DNA, 25 bp, SARS Virus
atacggtcatgtctgtaacagttag

SEQ ID NO: 34780 - DNA, 25 bp, SARS Virus
tacggtcatgtacgtaacagttagg

SEQ ID NO: 34781 - DNA, 25 bp, SARS Virus
acggtcatgtatctaacagttaggt

SEQ ID NO: 34782 - DNA, 25 bp, SARS Virus
cggtcatgtatgcaacagttaggta

SEQ ID NO: 34783 - DNA, 25 bp, SARS Virus
ggtcatgtatgtcacagttaggtac

SEQ ID NO: 34784 - DNA, 25 bp, SARS Virus
gtcatgtatgtaccagttaggtact

SEQ ID NO: 34785 - DNA, 25 bp, SARS Virus
tcatgtatgtaacagttaggtacta

SEQ ID NO: 34786 - DNA, 25 bp, SARS Virus
catgtatgtaaccgttaggtactac

SEQ ID NO: 34787 - DNA, 25 bp, SARS Virus
atgtatgtaacacttaggtactacc

SEQ ID NO: 34788 - DNA, 25 bp, SARS Virus
tgtatgtaacagctaggtactacca

SEQ ID NO: 34789 - DNA, 25 bp, SARS Virus
gtatgtaacagtcaggtactaccaa

SEQ ID NO: 34790 - DNA, 25 bp, SARS Virus
tatgtaacagttcggtactaccaat

SEQ ID NO: 34791 - DNA, 25 bp, SARS Virus
atgtaacagttacgtactaccaatg

SEQ ID NO: 34792 - DNA, 25 bp, SARS Virus
tgtaacagttagctactaccaatgt

SEQ ID NO: 34793 - DNA, 25 bp, SARS Virus
gtaacagttaggcactaccaatgtg

SEQ ID NO: 34794 - DNA, 25 bp, SARS Virus
taacagttaggtcctaccaatgtgt

SEQ ID NO: 34795 - DNA, 25 bp, SARS Virus
aacagttaggtactaccaatgtgtt

SEQ ID NO: 34796 - DNA, 25 bp, SARS Virus
acagttaggtaccaccaatgtgttt

SEQ ID NO: 34797 - DNA, 25 bp, SARS Virus
cagttaggtactcccaatgtgttta

SEQ ID NO: 34798 - DNA, 25 bp, SARS Virus
agttaggtactaccaatgtgtttac

SEQ ID NO: 34799 - DNA, 25 bp, SARS Virus
gttaggtactaccaatgtgtttact

SEQ ID NO: 34800 - DNA, 25 bp, SARS Virus
ttaggtactacccatgtgtttactt

SEQ ID NO: 34801 - DNA, 25 bp, SARS Virus
taggtactaccactgtgtttacttt

SEQ ID NO: 34802 - DNA, 25 bp, SARS Virus
aggtactaccaacgtgtttacttta

SEQ ID NO: 34803 - DNA, 25 bp, SARS Virus
ggtactaccaatctgtttactttag

SEQ ID NO: 34804 - DNA, 25 bp, SARS Virus
gtactaccaatgcgtttactttagt

SEQ ID NO: 34805 - DNA, 25 bp, SARS Virus
tactaccaatgtctttactttagta

SEQ ID NO: 34806 - DNA, 25 bp, SARS Virus
actaccaatgtgcttactttagtaa

SEQ ID NO: 34807 - DNA, 25 bp, SARS Virus
ctaccaatgtgtctactttagtaac

SEQ ID NO: 34808 - DNA, 25 bp, SARS Virus
taccaatgtgttcactttagtaacc

SEQ ID NO: 34809 - DNA, 25 bp, SARS Virus
accaatgtgtttcctttagtaacca

SEQ ID NO: 34810 - DNA, 25 bp, SARS Virus
ccaatgtgtttactttagtaaccaa

SEQ ID NO: 34811 - DNA, 25 bp, SARS Virus
caatgtgtttaccttagtaaccaat

SEQ ID NO: 34812 - DNA, 25 bp, SARS Virus
aatgtgtttactctagtaaccaatg

SEQ ID NO: 34813 - DNA, 25 bp, SARS Virus
atgtgtttacttcagtaaccaatgt

SEQ ID NO: 34814 - DNA, 25 bp, SARS Virus
tgtgtttactttcgtaaccaatgtt

SEQ ID NO: 34815 - DNA, 25 bp, SARS Virus
gtgtttactttactaaccaatgttt

SEQ ID NO: 34816 - DNA, 25 bp, SARS Virus
tgtttactttagcaaccaatgtttc

SEQ ID NO: 34817 - DNA, 25 bp, SARS Virus
gtttactttagtcaccaatgtttcg

SEQ ID NO: 34818 - DNA, 25 bp, SARS Virus
tttactttagtacccaatgtttcgg

SEQ ID NO: 34819 - DNA, 25 bp, SARS Virus
ttactttagtaaccaatgtttcggt

SEQ ID NO: 34820 - DNA, 25 bp, SARS Virus
tactttagtaaccaatgtttcggta

SEQ ID NO: 34821 - DNA, 25 bp, SARS Virus
actttagtaacccatgtttcggtaa

SEQ ID NO: 34822 - DNA, 25 bp, SARS Virus
ctttagtaaccactgtttcggtaag

SEQ ID NO: 34823 - DNA, 25 bp, SARS Virus
tttagtaaccaacgtttcggtaagt

SEQ ID NO: 34824 - DNA, 25 bp, SARS Virus
ttagtaaccaatctttcggtaagtc

SEQ ID NO: 34825 - DNA, 25 bp, SARS Virus
tagtaaccaatgcttcggtaagtcc

SEQ ID NO: 34826 - DNA, 25 bp, SARS Virus
agtaaccaatgtctcggtaagtcct

SEQ ID NO: 34827 - DNA, 25 bp, SARS Virus
gtaaccaatgttccggtaagtccta

SEQ ID NO: 34828 - DNA, 25 bp, SARS Virus
taaccaatgtttcggtaagtcctac

SEQ ID NO: 34829 - DNA, 25 bp, SARS Virus
aaccaatgtttccgtaagtcctacc

SEQ ID NO: 34830 - DNA, 25 bp, SARS Virus
accaatgtttcgctaagtcctacca

SEQ ID NO: 34831 - DNA, 25 bp, SARS Virus
ccaatgtttcggcaagtcctaccac

SEQ ID NO: 34832 - DNA, 25 bp, SARS Virus
caatgtttcggtcagtcctaccaca

SEQ ID NO: 34833 - DNA, 25 bp, SARS Virus
aatgtttcggtacgtcctaccacag

SEQ ID NO: 34834 - DNA, 25 bp, SARS Virus
atgtttcggtaactcctaccacagt

SEQ ID NO: 34835 - DNA, 25 bp, SARS Virus
tgtttcggtaagccctaccacagtg

SEQ ID NO: 34836 - DNA, 25 bp, SARS Virus
gtttcggtaagtcctaccacagtga

SEQ ID NO: 34837 - DNA, 25 bp, SARS Virus
tttcggtaagtcctaccacagtgag

SEQ ID NO: 34838 - DNA, 25 bp, SARS Virus
ttcggtaagtcccaccacagtgagc

SEQ ID NO: 34839 - DNA, 25 bp, SARS Virus
tcggtaagtcctcccacagtgagca

SEQ ID NO: 34840 - DNA, 25 bp, SARS Virus
cggtaagtcctaccacagtgagcac

SEQ ID NO: 34841 - DNA, 25 bp, SARS Virus
ggtaagtcctaccacagtgagcact

SEQ ID NO: 34842 - DNA, 25 bp, SARS Virus
gtaagtcctaccccagtgagcactg

SEQ ID NO: 34843 - DNA, 25 bp, SARS Virus
taagtcctaccacagtgagcactgt

SEQ ID NO: 34844 - DNA, 25 bp, SARS Virus
aagtcctaccaccgtgagcactgta

SEQ ID NO: 34845 - DNA, 25 bp, SARS Virus
agtcctaccacactgagcactgtag

SEQ ID NO: 34846 - DNA, 25 bp, SARS Virus
gtcctaccacagcgagcactgtagt

SEQ ID NO: 34847 - DNA, 25 bp, SARS Virus
tcctaccacagtcagcactgtagta

SEQ ID NO: 34848 - DNA, 25 bp, SARS Virus
cctaccacagtgcgcactgtagtaa

SEQ ID NO: 34849 - DNA, 25 bp, SARS Virus
ctaccacagtgaccactgtagtaaa

SEQ ID NO: 34850 - DNA, 25 bp, SARS Virus
taccacagtgagcactgtagtaaag

SEQ ID NO: 34851 - DNA, 25 bp, SARS Virus
accacagtgagccctgtagtaaaga

SEQ ID NO: 34852 - DNA, 25 bp, SARS Virus
ccacagtgagcactgtagtaaagat

SEQ ID NO: 34853 - DNA, 25 bp, SARS Virus
cacagtgagcaccgtagtaaagatg

SEQ ID NO: 34854 - DNA, 25 bp, SARS Virus
acagtgagcactctagtaaagatga

SEQ ID NO: 34855 - DNA, 25 bp, SARS Virus
cagtgagcactgcagtaaagatgac

SEQ ID NO: 34856 - DNA, 25 bp, SARS Virus
agtgagcactgtcgtaaagatgact

SEQ ID NO: 34857 - DNA, 25 bp, SARS Virus
gtgagcactgtactaaagatgacta

SEQ ID NO: 34858 - DNA, 25 bp, SARS Virus
tgagcactgtagcaaagatgactac

SEQ ID NO: 34859 - DNA, 25 bp, SARS Virus
gagcactgtagtcaagatgactact

SEQ ID NO: 34860 - DNA, 25 bp, SARS Virus
agcactgtagtacagatgactacta

SEQ ID NO: 34861 - DNA, 25 bp, SARS Virus
gcactgtagtaacgatgactactaa

SEQ ID NO: 34862 - DNA, 25 bp, SARS Virus
cactgtagtaaacatgactactaac

SEQ ID NO: 34863 - DNA, 25 bp, SARS Virus
actgtagtaaagctgactactaaca

SEQ ID NO: 34864 - DNA, 25 bp, SARS Virus
ctgtagtaaagacgactactaacaa

SEQ ID NO: 34865 - DNA, 25 bp, SARS Virus
tgtagtaaagatcactactaacaaa

SEQ ID NO: 34866 - DNA, 25 bp, SARS Virus
gtagtaaagatgcctactaacaaaa

SEQ ID NO: 34867 - DNA, 25 bp, SARS Virus
tagtaaagatgactactaacaaaac

SEQ ID NO: 34868 - DNA, 25 bp, SARS Virus
agtaaagatgaccactaacaaaacg

SEQ ID NO: 34869 - DNA, 25 bp, SARS Virus
gtaaagatgactcctaacaaaacgt

SEQ ID NO: 34870 - DNA, 25 bp, SARS Virus
taaagatgactactaacaaaacgtt

SEQ ID NO: 34871 - DNA, 25 bp, SARS Virus
aaagatgactaccaacaaaacgttt

SEQ ID NO: 34872 - DNA, 25 bp, SARS Virus
aagatgactactcacaaaacgttta

SEQ ID NO: 34873 - DNA, 25 bp, SARS Virus
agatgactactaccaaaacgtttat

SEQ ID NO: 34874 - DNA, 25 bp, SARS Virus
gatgactactaacaaaacgtttatt

SEQ ID NO: 34875 - DNA, 25 bp, SARS Virus
atgactactaaccaaacgtttattt

SEQ ID NO: 34876 - DNA, 25 bp, SARS Virus
tgactactaacacaacgtttatttg

SEQ ID NO: 34877 - DNA, 25 bp, SARS Virus
gactactaacaacacgtttatttgt

SEQ ID NO: 34878 - DNA, 25 bp, SARS Virus
actactaacaaaccgtttatttgta

SEQ ID NO: 34879 - DNA, 25 bp, SARS Virus
ctactaacaaaacgtttatttgtac

SEQ ID NO: 34880 - DNA, 25 bp, SARS Virus
tactaacaaaacctttatttgtacg

SEQ ID NO: 34881 - DNA, 25 bp, SARS Virus
actaacaaaacgcttatttgtacga

SEQ ID NO: 34882 - DNA, 25 bp, SARS Virus
ctaacaaaacgtctatttgtacgac

SEQ ID NO: 34883 - DNA, 25 bp, SARS Virus
taacaaaacgttcatttgtacgacc

SEQ ID NO: 34884 - DNA, 25 bp, SARS Virus
aacaaaacgtttctttgtacgacca

SEQ ID NO: 34885 - DNA, 25 bp, SARS Virus
acaaaacgtttacttgtacgaccaa

SEQ ID NO: 34886 - DNA, 25 bp, SARS Virus
caaaacgtttatctgtacgaccaaa

SEQ ID NO: 34887 - DNA, 25 bp, SARS Virus
aaaacgtttattcgtacgaccaaaa

SEQ ID NO: 34888 - DNA, 25 bp, SARS Virus
aaacgtttatttctacgaccaaaac

SEQ ID NO: 34889 - DNA, 25 bp, SARS Virus
aacgtttatttgcacgaccaaaact

SEQ ID NO: 34890 - DNA, 25 bp, SARS Virus
acgtttatttgtccgaccaaaactg

SEQ ID NO: 34891 - DNA, 25 bp, SARS Virus
cgtttatttgtacgaccaaaactgc

SEQ ID NO: 34892 - DNA, 25 bp, SARS Virus
gtttatttgtaccaccaaaactgcg

SEQ ID NO: 34893 - DNA, 25 bp, SARS Virus
tttatttgtacgcccaaaactgcgt

SEQ ID NO: 34894 - DNA, 25 bp, SARS Virus
ttatttgtacgaccaaaactgcgta

SEQ ID NO: 34895 - DNA, 25 bp, SARS Virus
tatttgtacgaccaaaactgcgtac

SEQ ID NO: 34896 - DNA, 25 bp, SARS Virus
atttgtacgacccaaactgcgtacc

SEQ ID NO: 34897 - DNA, 25 bp, SARS Virus
tttgtacgaccacaactgcgtacca

SEQ ID NO: 34898 - DNA, 25 bp, SARS Virus
ttgtacgaccaacactgcgtaccaa

SEQ ID NO: 34899 - DNA, 25 bp, SARS Virus
tgtacgaccaaacctgcgtaccaaa

SEQ ID NO: 34900 - DNA, 25 bp, SARS Virus
gtacgaccaaaactgcgtaccaaat

SEQ ID NO: 34901 - DNA, 25 bp, SARS Virus
tacgaccaaaaccgcgtaccaaatc

SEQ ID NO: 34902 - DNA, 25 bp, SARS Virus
acgaccaaaactccgtaccaaatcg

SEQ ID NO: 34903 - DNA, 25 bp, SARS Virus
cgaccaaaactgcgtaccaaatcgg

SEQ ID NO: 34904 - DNA, 25 bp, SARS Virus
gaccaaaactgcctaccaaatcggt

SEQ ID NO: 34905 - DNA, 25 bp, SARS Virus
accaaaactgcgcaccaaatcggtc

SEQ ID NO: 34906 - DNA, 25 bp, SARS Virus
ccaaaactgcgtcccaaatcggtcg

SEQ ID NO: 34907 - DNA, 25 bp, SARS Virus
caaaactgcgtaccaaatcggtcgc

SEQ ID NO: 34908 - DNA, 25 bp, SARS Virus
aaaactgcgtaccaaatcggtcgca

SEQ ID NO: 34909 - DNA, 25 bp, SARS Virus
aaactgcgtacccaatcggtcgcac

SEQ ID NO: 34910 - DNA, 25 bp, SARS Virus
aactgcgtaccacatcggtcgcacc

SEQ ID NO: 34911 - DNA, 25 bp, SARS Virus
actgcgtaccaactcggtcgcacca

SEQ ID NO: 34912 - DNA, 25 bp, SARS Virus
ctgcgtaccaaaccggtcgcaccac

SEQ ID NO: 34913 - DNA, 25 bp, SARS Virus
tgcgtaccaaatcggtcgcaccacc

SEQ ID NO: 34914 - DNA, 25 bp, SARS Virus
gcgtaccaaatccgtcgcaccacca

SEQ ID NO: 34915 - DNA, 25 bp, SARS Virus
cgtaccaaatcgctcgcaccaccaa

SEQ ID NO: 34916 - DNA, 25 bp, SARS Virus
gtaccaaatcggccgcaccaccaag

SEQ ID NO: 34917 - DNA, 25 bp, SARS Virus
taccaaatcggtcgcaccaccaagt

SEQ ID NO: 34918 - DNA, 25 bp, SARS Virus
accaaatcggtcccaccaccaagta

SEQ ID NO: 34919 - DNA, 25 bp, SARS Virus
ccaaatcggtcgcaccaccaagtat

SEQ ID NO: 34920 - DNA, 25 bp, SARS Virus
caaatcggtcgccccaccaagtatg

SEQ ID NO: 34921 - DNA, 25 bp, SARS Virus
aaatcggtcgcaccaccaagtatgt

SEQ ID NO: 34922 - DNA, 25 bp, SARS Virus
aatcggtcgcaccaccaagtatgtt

SEQ ID NO: 34923 - DNA, 25 bp, SARS Virus
atcggtcgcacccccaagtatgttt

SEQ ID NO: 34924 - DNA, 25 bp, SARS Virus
tcggtcgcaccaccaagtatgtttt

SEQ ID NO: 34925 - DNA, 25 bp, SARS Virus
cggtcgcaccaccaagtatgttttt

SEQ ID NO: 34926 - DNA, 25 bp, SARS Virus
ggtcgcaccacccagtatgttttta

SEQ ID NO: 34927 - DNA, 25 bp, SARS Virus
gtcgcaccaccacgtatgtttttac

SEQ ID NO: 34928 - DNA, 25 bp, SARS Virus
tcgcaccaccaactatgtttttact

SEQ ID NO: 34929 - DNA, 25 bp, SARS Virus
cgcaccaccaagcatgtttttactg

SEQ ID NO: 34930 - DNA, 25 bp, SARS Virus
gcaccaccaagtctgtttttactgt

SEQ ID NO: 34931 - DNA, 25 bp, SARS Virus
caccaccaagtacgtttttactgtt

SEQ ID NO: 34932 - DNA, 25 bp, SARS Virus
accaccaagtatctttttactgttt

SEQ ID NO: 34933 - DNA, 25 bp, SARS Virus
ccaccaagtatgcttttactgtttt

SEQ ID NO: 34934 - DNA, 25 bp, SARS Virus
caccaagtatgtctttactgttttc

SEQ ID NO: 34935 - DNA, 25 bp, SARS Virus
accaagtatgttcttactgttttcg

SEQ ID NO: 34936 - DNA, 25 bp, SARS Virus
ccaagtatgtttctactgttttcga

SEQ ID NO: 34937 - DNA, 25 bp, SARS Virus
caagtatgttttcactgttttcgac

SEQ ID NO: 34938 - DNA, 25 bp, SARS Virus
aagtatgtttttcctgttttcgacg

SEQ ID NO: 34939 - DNA, 25 bp, SARS Virus
agtatgtttttactgttttcgacgg

SEQ ID NO: 34940 - DNA, 25 bp, SARS Virus
gtatgtttttaccgttttcgacggg

SEQ ID NO: 34941 - DNA, 25 bp, SARS Virus
tatgtttttactcttttcgacggga

SEQ ID NO: 34942 - DNA, 25 bp, SARS Virus
atgtttttactgctttcgacgggac

SEQ ID NO: 34943 - DNA, 25 bp, SARS Virus
tgtttttactgtcttcgacgggaca

SEQ ID NO: 34944 - DNA, 25 bp, SARS Virus
gtttttactgttctcgacgggacat

SEQ ID NO: 34945 - DNA, 25 bp, SARS Virus
tttttactgtttccgacgggacatc

SEQ ID NO: 34946 - DNA, 25 bp, SARS Virus
ttttactgttttcgacgggacatca

SEQ ID NO: 34947 - DNA, 25 bp, SARS Virus
tttactgttttccacgggacatcat

SEQ ID NO: 34948 - DNA, 25 bp, SARS Virus
ttactgttttcgccgggacatcatc

SEQ ID NO: 34949 - DNA, 25 bp, SARS Virus
tactgttttcgacgggacatcatcg

SEQ ID NO: 34950 - DNA, 25 bp, SARS Virus
actgttttcgaccggacatcatcga

SEQ ID NO: 34951 - DNA, 25 bp, SARS Virus
ctgttttcgacgcgacatcatcgac

SEQ ID NO: 34952 - DNA, 25 bp, SARS Virus
tgttttcgacggcacatcatcgacg

SEQ ID NO: 34953 - DNA, 25 bp, SARS Virus
gttttcgacgggccatcatcgacga

SEQ ID NO: 34954 - DNA, 25 bp, SARS Virus
ttttcgacgggacatcatcgacgat

SEQ ID NO: 34955 - DNA, 25 bp, SARS Virus
tttcgacgggacctcatcgacgata

SEQ ID NO: 34956 - DNA, 25 bp, SARS Virus
ttcgacgggacaccatcgacgatag

SEQ ID NO: 34957 - DNA, 25 bp, SARS Virus
tcgacgggacatcatcgacgatagt

SEQ ID NO: 34958 - DNA, 25 bp, SARS Virus
cgacgggacatcctcgacgatagta

SEQ ID NO: 34959 - DNA, 25 bp, SARS Virus
gacgggacatcaccgacgatagtaa

SEQ ID NO: 34960 - DNA, 25 bp, SARS Virus
acgggacatcatcgacgatagtaat

SEQ ID NO: 34961 - DNA, 25 bp, SARS Virus
cgggacatcatccacgatagtaatg

SEQ ID NO: 34962 - DNA, 25 bp, SARS Virus
gggacatcatcgccgatagtaatgt

SEQ ID NO: 34963 - DNA, 25 bp, SARS Virus
ggacatcatcgacgatagtaatgtt

SEQ ID NO: 34964 - DNA, 25 bp, SARS Virus
gacatcatcgaccatagtaatgttc

SEQ ID NO: 34965 - DNA, 25 bp, SARS Virus
acatcatcgacgctagtaatgttct

SEQ ID NO: 34966 - DNA, 25 bp, SARS Virus
catcatcgacgacagtaatgttctc

SEQ ID NO: 34967 - DNA, 25 bp, SARS Virus
atcatcgacgatcgtaatgttctct

SEQ ID NO: 34968 - DNA, 25 bp, SARS Virus
tcatcgacgatactaatgttctctc

SEQ ID NO: 34969 - DNA, 25 bp, SARS Virus
catcgacgatagcaatgttctctct

SEQ ID NO: 34970 - DNA, 25 bp, SARS Virus
atcgacgatagtcatgttctctcta

SEQ ID NO: 34971 - DNA, 25 bp, SARS Virus
tcgacgatagtactgttctctctaa

SEQ ID NO: 34972 - DNA, 25 bp, SARS Virus
cgacgatagtaacgttctctctaac

SEQ ID NO: 34973 - DNA, 25 bp, SARS Virus
gacgatagtaatcttctctctaacc

SEQ ID NO: 34974 - DNA, 25 bp, SARS Virus
acgatagtaatgctctctctaacca

SEQ ID NO: 34975 - DNA, 25 bp, SARS Virus
cgatagtaatgtcctctctaaccaa

SEQ ID NO: 34976 - DNA, 25 bp, SARS Virus
gatagtaatgttctctctaaccaaa

SEQ ID NO: 34977 - DNA, 25 bp, SARS Virus
atagtaatgttccctctaaccaaag

SEQ ID NO: 34978 - DNA, 25 bp, SARS Virus
tagtaatgttctctctaaccaaagt

SEQ ID NO: 34979 - DNA, 25 bp, SARS Virus
agtaatgttctccctaaccaaagta

SEQ ID NO: 34980 - DNA, 25 bp, SARS Virus
gtaatgttctctctaaccaaagtat

SEQ ID NO: 34981 - DNA, 25 bp, SARS Virus
taatgttctctccaaccaaagtatc

SEQ ID NO: 34982 - DNA, 25 bp, SARS Virus
aatgttctctctcaccaaagtatca

SEQ ID NO: 34983 - DNA, 25 bp, SARS Virus
atgttctctctacccaaagtatcac

SEQ ID NO: 34984 - DNA, 25 bp, SARS Virus
tgttctctctaaccaaagtatcacg

SEQ ID NO: 34985 - DNA, 25 bp, SARS Virus
gttctctctaaccaaagtatcacgg

SEQ ID NO: 34986 - DNA, 25 bp, SARS Virus
ttctctctaacccaagtatcacgga

SEQ ID NO: 34987 - DNA, 25 bp, SARS Virus
tctctctaaccacagtatcacggac

SEQ ID NO: 34988 - DNA, 25 bp, SARS Virus
ctctctaaccaacgtatcacggacc

SEQ ID NO: 34989 - DNA, 25 bp, SARS Virus
tctctaaccaaactatcacggaccg

SEQ ID NO: 34990 - DNA, 25 bp, SARS Virus
ctctaaccaaagcatcacggaccga

SEQ ID NO: 34991 - DNA, 25 bp, SARS Virus
tctaaccaaagtctcacggaccgaa

SEQ ID NO: 34992 - DNA, 25 bp, SARS Virus
ctaaccaaagtaccacggaccgaat

SEQ ID NO: 34993 - DNA, 25 bp, SARS Virus
taaccaaagtatcacggaccgaatg

SEQ ID NO: 34994 - DNA, 25 bp, SARS Virus
aaccaaagtatcccggaccgaatgg

SEQ ID NO: 34995 - DNA, 25 bp, SARS Virus
accaaagtatcacggaccgaatggc

SEQ ID NO: 34996 - DNA, 25 bp, SARS Virus
ccaaagtatcaccgaccgaatggcc

SEQ ID NO: 34997 - DNA, 25 bp, SARS Virus
caaagtatcacgcaccgaatggccc

SEQ ID NO: 34998 - DNA, 25 bp, SARS Virus
aaagtatcacggcccgaatggccca

SEQ ID NO: 34999 - DNA, 25 bp, SARS Virus
aagtatcacggaccgaatggcccat

SEQ ID NO: 35000 - DNA, 25 bp, SARS Virus
agtatcacggaccgaatggcccatg

SEQ ID NO: 35001 - DNA, 25 bp, SARS Virus
gtatcacggacccaatggcccatga

SEQ ID NO: 35002 - DNA, 25 bp, SARS Virus
tatcacggaccgcatggcccatgac

SEQ ID NO: 35003 - DNA, 25 bp, SARS Virus
atcacggaccgactggcccatgaca

SEQ ID NO: 35004 - DNA, 25 bp, SARS Virus
tcacggaccgaacggcccatgacac

SEQ ID NO: 35005 - DNA, 25 bp, SARS Virus
cacggaccgaatcgcccatgacacg

SEQ ID NO: 35006 - DNA, 25 bp, SARS Virus
acggaccgaatgccccatgacacga

SEQ ID NO: 35007 - DNA, 25 bp, SARS Virus
cggaccgaatggcccatgacacgac

SEQ ID NO: 35008 - DNA, 25 bp, SARS Virus
ggaccgaatggcccatgacacgact

SEQ ID NO: 35009 - DNA, 25 bp, SARS Virus
gaccgaatggcccatgacacgactc

SEQ ID NO: 35010 - DNA, 25 bp, SARS Virus
accgaatggcccctgacacgactct

SEQ ID NO: 35011 - DNA, 25 bp, SARS Virus
ccgaatggcccacgacacgactctc

SEQ ID NO: 35012 - DNA, 25 bp, SARS Virus
cgaatggcccatcacacgactctcg

SEQ ID NO: 35013 - DNA, 25 bp, SARS Virus
gaatggcccatgccacgactctcgt

SEQ ID NO: 35014 - DNA, 25 bp, SARS Virus
aatggcccatgacacgactctcgtt

SEQ ID NO: 35015 - DNA, 25 bp, SARS Virus
atggcccatgacccgactctcgtta

SEQ ID NO: 35016 - DNA, 25 bp, SARS Virus
tggcccatgacacgactctcgttag

SEQ ID NO: 35017 - DNA, 25 bp, SARS Virus
ggcccatgacaccactctcgttagt

SEQ ID NO: 35018 - DNA, 25 bp, SARS Virus
gcccatgacacgcctctcgttagtt

SEQ ID NO: 35019 - DNA, 25 bp, SARS Virus
cccatgacacgactctcgttagtta

SEQ ID NO: 35020 - DNA, 25 bp, SARS Virus
ccatgacacgaccctcgttagttac

SEQ ID NO: 35021 - DNA, 25 bp, SARS Virus
catgacacgactctcgttagttacc

SEQ ID NO: 35022 - DNA, 25 bp, SARS Virus
atgacacgactcccgttagttacca

SEQ ID NO: 35023 - DNA, 25 bp, SARS Virus
tgacacgactctcgttagttaccac

SEQ ID NO: 35024 - DNA, 25 bp, SARS Virus
gacacgactctccttagttaccact

SEQ ID NO: 35025 - DNA, 25 bp, SARS Virus
acacgactctcgctagttaccactg

SEQ ID NO: 35026 - DNA, 25 bp, SARS Virus
cacgactctcgtcagttaccactga

SEQ ID NO: 35027 - DNA, 25 bp, SARS Virus
acgactctcgttcgttaccactgaa

SEQ ID NO: 35028 - DNA, 25 bp, SARS Virus
cgactctcgttacttaccactgaag

SEQ ID NO: 35029 - DNA, 25 bp, SARS Virus
gactctcgttagctaccactgaaga

SEQ ID NO: 35030 - DNA, 25 bp, SARS Virus
actctcgttagtcaccactgaagaa

SEQ ID NO: 35031 - DNA, 25 bp, SARS Virus
ctctcgttagttcccactgaagaac

SEQ ID NO: 35032 - DNA, 25 bp, SARS Virus
tctcgttagttaccactgaagaacg

SEQ ID NO: 35033 - DNA, 25 bp, SARS Virus
ctcgttagttaccactgaagaacgt

SEQ ID NO: 35034 - DNA, 25 bp, SARS Virus
tcgttagttacccctgaagaacgta

SEQ ID NO: 35035 - DNA, 25 bp, SARS Virus
cgttagttaccactgaagaacgtaa

SEQ ID NO: 35036 - DNA, 25 bp, SARS Virus
gttagttaccaccgaagaacgtaaa

SEQ ID NO: 35037 - DNA, 25 bp, SARS Virus
ttagttaccactcaagaacgtaaaa

SEQ ID NO: 35038 - DNA, 25 bp, SARS Virus
tagttaccactgcagaacgtaaaag

SEQ ID NO: 35039 - DNA, 25 bp, SARS Virus
agttaccactgacgaacgtaaaaga

SEQ ID NO: 35040 - DNA, 25 bp, SARS Virus
gttaccactgaacaacgtaaaagat

SEQ ID NO: 35041 - DNA, 25 bp, SARS Virus
ttaccactgaagcacgtaaaagatg

SEQ ID NO: 35042 - DNA, 25 bp, SARS Virus
taccactgaagaccgtaaaagatgg

SEQ ID NO: 35043 - DNA, 25 bp, SARS Virus
accactgaagaacgtaaaagatgga

SEQ ID NO: 35044 - DNA, 25 bp, SARS Virus
ccactgaagaacctaaaagatggag

SEQ ID NO: 35045 - DNA, 25 bp, SARS Virus
cactgaagaacgcaaaagatggagc

SEQ ID NO: 35046 - DNA, 25 bp, SARS Virus
actgaagaacgtcaaagatggagca

SEQ ID NO: 35047 - DNA, 25 bp, SARS Virus
ctgaagaacgtacaagatggagcac

SEQ ID NO: 35048 - DNA, 25 bp, SARS Virus
tgaagaacgtaacagatggagcaca

SEQ ID NO: 35049 - DNA, 25 bp, SARS Virus
gaagaacgtaaacgatggagcacaa

SEQ ID NO: 35050 - DNA, 25 bp, SARS Virus
aagaacgtaaaacatggagcacaaa

SEQ ID NO: 35051 - DNA, 25 bp, SARS Virus
agaacgtaaaagctggagcacaaaa

SEQ ID NO: 35052 - DNA, 25 bp, SARS Virus
gaacgtaaaagacggagcacaaaaa

SEQ ID NO: 35053 - DNA, 25 bp, SARS Virus
aacgtaaaagatcgagcacaaaaat

SEQ ID NO: 35054 - DNA, 25 bp, SARS Virus
acgtaaaagatgcagcacaaaaatc

SEQ ID NO: 35055 - DNA, 25 bp, SARS Virus
cgtaaaagatggcgcacaaaaatca

SEQ ID NO: 35056 - DNA, 25 bp, SARS Virus
gtaaaagatggaccacaaaaatcac

SEQ ID NO: 35057 - DNA, 25 bp, SARS Virus
taaaagatggagcacaaaaatcacg

SEQ ID NO: 35058 - DNA, 25 bp, SARS Virus
aaaagatggagcccaaaaatcacga

SEQ ID NO: 35059 - DNA, 25 bp, SARS Virus
aaagatggagcacaaaaatcacgac

SEQ ID NO: 35060 - DNA, 25 bp, SARS Virus
aagatggagcaccaaaatcacgaca

SEQ ID NO: 35061 - DNA, 25 bp, SARS Virus
agatggagcacacaaatcacgacaa

SEQ ID NO: 35062 - DNA, 25 bp, SARS Virus
gatggagcacaacaatcacgacaac

SEQ ID NO: 35063 - DNA, 25 bp, SARS Virus
atggagcacaaacatcacgacaacc

SEQ ID NO: 35064 - DNA, 25 bp, SARS Virus
tggagcacaaaactcacgacaaccg

SEQ ID NO: 35065 - DNA, 25 bp, SARS Virus
ggagcacaaaaaccacgacaaccgt

SEQ ID NO: 35066 - DNA, 25 bp, SARS Virus
gagcacaaaaatcacgacaaccgtt

SEQ ID NO: 35067 - DNA, 25 bp, SARS Virus
agcacaaaaatcccgacaaccgttg

SEQ ID NO: 35068 - DNA, 25 bp, SARS Virus
gcacaaaaatcacgacaaccgttgt

SEQ ID NO: 35069 - DNA, 25 bp, SARS Virus
cacaaaaatcaccacaaccgttgta

SEQ ID NO: 35070 - DNA, 25 bp, SARS Virus
acaaaaatcacgccaaccgttgtaa

SEQ ID NO: 35071 - DNA, 25 bp, SARS Virus
caaaaatcacgacaaccgttgtaaa

SEQ ID NO: 35072 - DNA, 25 bp, SARS Virus
aaaaatcacgaccaccgttgtaaac

SEQ ID NO: 35073 - DNA, 25 bp, SARS Virus
aaaatcacgacacccgttgtaaacg

SEQ ID NO: 35074 - DNA, 25 bp, SARS Virus
aaatcacgacaaccgttgtaaacga

SEQ ID NO: 35075 - DNA, 25 bp, SARS Virus
aatcacgacaaccgttgtaaacgat

SEQ ID NO: 35076 - DNA, 25 bp, SARS Virus
atcacgacaacccttgtaaacgatg

SEQ ID NO: 35077 - DNA, 25 bp, SARS Virus
tcacgacaaccgctgtaaacgatgt

SEQ ID NO: 35078 - DNA, 25 bp, SARS Virus
cacgacaaccgtcgtaaacgatgtg

SEQ ID NO: 35079 - DNA, 25 bp, SARS Virus
acgacaaccgttctaaacgatgtgt

SEQ ID NO: 35080 - DNA, 25 bp, SARS Virus
cgacaaccgttgcaaacgatgtgtg

SEQ ID NO: 35081 - DNA, 25 bp, SARS Virus
gacaaccgttgtcaacgatgtgtgg

SEQ ID NO: 35082 - DNA, 25 bp, SARS Virus
acaaccgttgtacacgatgtgtgga

SEQ ID NO: 35083 - DNA, 25 bp, SARS Virus
caaccgttgtaaccgatgtgtggaa

SEQ ID NO: 35084 - DNA, 25 bp, SARS Virus
aaccgttgtaaacgatgtgtggaag

SEQ ID NO: 35085 - DNA, 25 bp, SARS Virus
accgttgtaaaccatgtgtggaagg

SEQ ID NO: 35086 - DNA, 25 bp, SARS Virus
ccgttgtaaacgctgtgtggaaggt

SEQ ID NO: 35087 - DNA, 25 bp, SARS Virus
cgttgtaaacgacgtgtggaaggtt

SEQ ID NO: 35088 - DNA, 25 bp, SARS Virus
gttgtaaacgatctgtggaaggttt

SEQ ID NO: 35089 - DNA, 25 bp, SARS Virus
ttgtaaacgatgcgtggaaggtttg

SEQ ID NO: 35090 - DNA, 25 bp, SARS Virus
tgtaaacgatgtctggaaggtttga

SEQ ID NO: 35091 - DNA, 25 bp, SARS Virus
gtaaacgatgtgcggaaggtttgag

SEQ ID NO: 35092 - DNA, 25 bp, SARS Virus
taaacgatgtgtcgaaggtttgagt

SEQ ID NO: 35093 - DNA, 25 bp, SARS Virus
aaacgatgtgtgcaaggtttgagta

SEQ ID NO: 35094 - DNA, 25 bp, SARS Virus
aacgatgtgtggcaggtttgagtaa

SEQ ID NO: 35095 - DNA, 25 bp, SARS Virus
acgatgtgtggacggtttgagtaac

SEQ ID NO: 35096 - DNA, 25 bp, SARS Virus
cgatgtgtggaacgtttgagtaact

SEQ ID NO: 35097 - DNA, 25 bp, SARS Virus
gatgtgtggaagctttgagtaactc

SEQ ID NO: 35098 - DNA, 25 bp, SARS Virus
atgtgtggaaggcttgagtaactca

SEQ ID NO: 35099 - DNA, 25 bp, SARS Virus
tgtgtggaaggtctgagtaactcat

SEQ ID NO: 35100 - DNA, 25 bp, SARS Virus
gtgtggaaggttcgagtaactcata

SEQ ID NO: 35101 - DNA, 25 bp, SARS Virus
tgtggaaggtttcagtaactcatat

SEQ ID NO: 35102 - DNA, 25 bp, SARS Virus
gtggaaggtttgcgtaactcatatc

SEQ ID NO: 35103 - DNA, 25 bp, SARS Virus
tggaaggtttgactaactcatatca

SEQ ID NO: 35104 - DNA, 25 bp, SARS Virus
ggaaggtttgagcaactcatatcac

SEQ ID NO: 35105 - DNA, 25 bp, SARS Virus
gaaggtttgagtcactcatatcact

SEQ ID NO: 35106 - DNA, 25 bp, SARS Virus
aaggtttgagtacctcatatcacta

SEQ ID NO: 35107 - DNA, 25 bp, SARS Virus
aggtttgagtaactcatatcactaa

SEQ ID NO: 35108 - DNA, 25 bp, SARS Virus
ggtttgagtaacccatatcactaaa

SEQ ID NO: 35109 - DNA, 25 bp, SARS Virus
gtttgagtaactcatatcactaaaa

SEQ ID NO: 35110 - DNA, 25 bp, SARS Virus
tttgagtaactcctatcactaaaac

SEQ ID NO: 35111 - DNA, 25 bp, SARS Virus
ttgagtaactcacatcactaaaacg

SEQ ID NO: 35112 - DNA, 25 bp, SARS Virus
tgagtaactcatctcactaaaacga

SEQ ID NO: 35113 - DNA, 25 bp, SARS Virus
gagtaactcataccactaaaacgat

SEQ ID NO: 35114 - DNA, 25 bp, SARS Virus
agtaactcatatcactaaaacgatg

SEQ ID NO: 35115 - DNA, 25 bp, SARS Virus
gtaactcatatccctaaaacgatgg

SEQ ID NO: 35116 - DNA, 25 bp, SARS Virus
taactcatatcactaaaacgatgga

SEQ ID NO: 35117 - DNA, 25 bp, SARS Virus
aactcatatcaccaaaacgatggag

SEQ ID NO: 35118 - DNA, 25 bp, SARS Virus
actcatatcactcaaacgatggaga

SEQ ID NO: 35119 - DNA, 25 bp, SARS Virus
ctcatatcactacaacgatggagac

SEQ ID NO: 35120 - DNA, 25 bp, SARS Virus
tcatatcactaacacgatggagacg

SEQ ID NO: 35121 - DNA, 25 bp, SARS Virus
catatcactaaaccgatggagacga

SEQ ID NO: 35122 - DNA, 25 bp, SARS Virus
atatcactaaaacgatggagacgaa

SEQ ID NO: 35123 - DNA, 25 bp, SARS Virus
tatcactaaaaccatggagacgaac

SEQ ID NO: 35124 - DNA, 25 bp, SARS Virus
atcactaaaacgctggagacgaacg

SEQ ID NO: 35125 - DNA, 25 bp, SARS Virus
tcactaaaacgacggagacgaacgc

SEQ ID NO: 35126 - DNA, 25 bp, SARS Virus
cactaaaacgatcgagacgaacgca

SEQ ID NO: 35127 - DNA, 25 bp, SARS Virus
actaaaacgatgcagacgaacgcaa

SEQ ID NO: 35128 - DNA, 25 bp, SARS Virus
ctaaaacgatggcgacgaacgcaag

SEQ ID NO: 35129 - DNA, 25 bp, SARS Virus
taaaacgatggacacgaacgcaaga

SEQ ID NO: 35130 - DNA, 25 bp, SARS Virus
aaaacgatggagccgaacgcaagaa

SEQ ID NO: 35131 - DNA, 25 bp, SARS Virus
aaacgatggagacgaacgcaagaac

SEQ ID NO: 35132 - DNA, 25 bp, SARS Virus
aacgatggagaccaacgcaagaacg

SEQ ID NO: 35133 - DNA, 25 bp, SARS Virus
acgatggagacgcacgcaagaacga

SEQ ID NO: 35134 - DNA, 25 bp, SARS Virus
cgatggagacgaccgcaagaacgac

SEQ ID NO: 35135 - DNA, 25 bp, SARS Virus
gatggagacgaacgcaagaacgacg

SEQ ID NO: 35136 - DNA, 25 bp, SARS Virus
atggagacgaacccaagaacgacga

SEQ ID NO: 35137 - DNA, 25 bp, SARS Virus
tggagacgaacgcaagaacgacgac

SEQ ID NO: 35138 - DNA, 25 bp, SARS Virus
ggagacgaacgccagaacgacgact

SEQ ID NO: 35139 - DNA, 25 bp, SARS Virus
gagacgaacgcacgaacgacgactc

SEQ ID NO: 35140 - DNA, 25 bp, SARS Virus
agacgaacgcaacaacgacgactca

SEQ ID NO: 35141 - DNA, 25 bp, SARS Virus
gacgaacgcaagcacgacgactcac

SEQ ID NO: 35142 - DNA, 25 bp, SARS Virus
acgaacgcaagaccgacgactcaca

SEQ ID NO: 35143 - DNA, 25 bp, SARS Virus
cgaacgcaagaacgacgactcacat

SEQ ID NO: 35144 - DNA, 25 bp, SARS Virus
gaacgcaagaaccacgactcacatg

SEQ ID NO: 35145 - DNA, 25 bp, SARS Virus
aacgcaagaacgccgactcacatgt

SEQ ID NO: 35146 - DNA, 25 bp, SARS Virus
acgcaagaacgacgactcacatgtt

SEQ ID NO: 35147 - DNA, 25 bp, SARS Virus
cgcaagaacgaccactcacatgtta

SEQ ID NO: 35148 - DNA, 25 bp, SARS Virus
gcaagaacgacgcctcacatgttaa

SEQ ID NO: 35149 - DNA, 25 bp, SARS Virus
caagaacgacgactcacatgttaaa

SEQ ID NO: 35150 - DNA, 25 bp, SARS Virus
aagaacgacgacccacatgttaaaa

SEQ ID NO: 35151 - DNA, 25 bp, SARS Virus
agaacgacgactcacatgttaaaaa

SEQ ID NO: 35152 - DNA, 25 bp, SARS Virus
gaacgacgactcccatgttaaaaat

SEQ ID NO: 35153 - DNA, 25 bp, SARS Virus
aacgacgactcacatgttaaaaatt

SEQ ID NO: 35154 - DNA, 25 bp, SARS Virus
acgacgactcacctgttaaaaattc

SEQ ID NO: 35155 - DNA, 25 bp, SARS Virus
cgacgactcacacgttaaaaattcc

SEQ ID NO: 35156 - DNA, 25 bp, SARS Virus
gacgactcacatcttaaaaattcct

SEQ ID NO: 35157 - DNA, 25 bp, SARS Virus
acgactcacatgctaaaaattccta

SEQ ID NO: 35158 - DNA, 25 bp, SARS Virus
cgactcacatgtcaaaaattcctac

SEQ ID NO: 35159 - DNA, 25 bp, SARS Virus
gactcacatgttcaaaattcctacg

SEQ ID NO: 35160 - DNA, 25 bp, SARS Virus
actcacatgttacaaattcctacga

SEQ ID NO: 35161 - DNA, 25 bp, SARS Virus
ctcacatgttaacaattcctacgat

SEQ ID NO: 35162 - DNA, 25 bp, SARS Virus
tcacatgttaaacattcctacgata

SEQ ID NO: 35163 - DNA, 25 bp, SARS Virus
cacatgttaaaacttcctacgatac

SEQ ID NO: 35164 - DNA, 25 bp, SARS Virus
acatgttaaaaactcctacgatacc

SEQ ID NO: 35165 - DNA, 25 bp, SARS Virus
catgttaaaaatccctacgataccc

SEQ ID NO: 35166 - DNA, 25 bp, SARS Virus
atgttaaaaattcctacgatacccg

SEQ ID NO: 35167 - DNA, 25 bp, SARS Virus
tgttaaaaattcctacgatacccgt

SEQ ID NO: 35168 - DNA, 25 bp, SARS Virus
gttaaaaattcccacgatacccgtt

SEQ ID NO: 35169 - DNA, 25 bp, SARS Virus
ttaaaaattcctccgatacccgttt

SEQ ID NO: 35170 - DNA, 25 bp, SARS Virus
taaaaattcctacgatacccgtttg

SEQ ID NO: 35171 - DNA, 25 bp, SARS Virus
aaaaattcctaccatacccgtttgg

SEQ ID NO: 35172 - DNA, 25 bp, SARS Virus
aaaattcctacgctacccgtttgga

SEQ ID NO: 35173 - DNA, 25 bp, SARS Virus
aaattcctacgacacccgtttggac

SEQ ID NO: 35174 - DNA, 25 bp, SARS Virus
aattcctacgatccccgtttggaca

SEQ ID NO: 35175 - DNA, 25 bp, SARS Virus
attcctacgatacccgtttggacac

SEQ ID NO: 35176 - DNA, 25 bp, SARS Virus
ttcctacgatacccgtttggacacg

SEQ ID NO: 35177 - DNA, 25 bp, SARS Virus
tcctacgatacccgtttggacacgg

SEQ ID NO: 35178 - DNA, 25 bp, SARS Virus
cctacgatacccctttggacacggt

SEQ ID NO: 35179 - DNA, 25 bp, SARS Virus
ctacgatacccgcttggacacggta

SEQ ID NO: 35180 - DNA, 25 bp, SARS Virus
tacgatacccgtctggacacggtat

SEQ ID NO: 35181 - DNA, 25 bp, SARS Virus
acgatacccgttcggacacggtata

SEQ ID NO: 35182 - DNA, 25 bp, SARS Virus
cgatacccgtttcgacacggtataa

SEQ ID NO: 35183 - DNA, 25 bp, SARS Virus
gatacccgtttgcacacggtataac

SEQ ID NO: 35184 - DNA, 25 bp, SARS Virus
atacccgtttggccacggtataaca

SEQ ID NO: 35185 - DNA, 25 bp, SARS Virus
tacccgtttggacacggtataacaa

SEQ ID NO: 35186 - DNA, 25 bp, SARS Virus
acccgtttggacccggtataacaat

SEQ ID NO: 35187 - DNA, 25 bp, SARS Virus
cccgtttggacacggtataacaata

SEQ ID NO: 35188 - DNA, 25 bp, SARS Virus
ccgtttggacaccgtataacaatac

SEQ ID NO: 35189 - DNA, 25 bp, SARS Virus
cgtttggacacgctataacaatact

SEQ ID NO: 35190 - DNA, 25 bp, SARS Virus
gtttggacacggcataacaatactg

SEQ ID NO: 35191 - DNA, 25 bp, SARS Virus
tttggacacggtctaacaatactgt

SEQ ID NO: 35192 - DNA, 25 bp, SARS Virus
ttggacacggtacaacaatactgtg

SEQ ID NO: 35193 - DNA, 25 bp, SARS Virus
tggacacggtatcacaatactgtga

SEQ ID NO: 35194 - DNA, 25 bp, SARS Virus
ggacacggtataccaatactgtgat

SEQ ID NO: 35195 - DNA, 25 bp, SARS Virus
gacacggtataacaatactgtgatt

SEQ ID NO: 35196 - DNA, 25 bp, SARS Virus
acacggtataaccatactgtgatta

SEQ ID NO: 35197 - DNA, 25 bp, SARS Virus
cacggtataacactactgtgattaa

SEQ ID NO: 35198 - DNA, 25 bp, SARS Virus
acggtataacaacactgtgattaaa

SEQ ID NO: 35199 - DNA, 25 bp, SARS Virus
cggtataacaatcctgtgattaaac

SEQ ID NO: 35200 - DNA, 25 bp, SARS Virus
ggtataacaatactgtgattaaacg

SEQ ID NO: 35201 - DNA, 25 bp, SARS Virus
gtataacaataccgtgattaaacga

SEQ ID NO: 35202 - DNA, 25 bp, SARS Virus
tataacaatactctgattaaacgat

SEQ ID NO: 35203 - DNA, 25 bp, SARS Virus
ataacaatactgcgattaaacgatc

SEQ ID NO: 35204 - DNA, 25 bp, SARS Virus
taacaatactgtcattaaacgatct

SEQ ID NO: 35205 - DNA, 25 bp, SARS Virus
aacaatactgtgcttaaacgatctc

SEQ ID NO: 35206 - DNA, 25 bp, SARS Virus
acaatactgtgactaaacgatctcc

SEQ ID NO: 35207 - DNA, 25 bp, SARS Virus
caatactgtgatcaaacgatctccc

SEQ ID NO: 35208 - DNA, 25 bp, SARS Virus
aatactgtgattcaacgatctccca

SEQ ID NO: 35209 - DNA, 25 bp, SARS Virus
atactgtgattacacgatctcccaa

SEQ ID NO: 35210 - DNA, 25 bp, SARS Virus
tactgtgattaaccgatctcccaag

SEQ ID NO: 35211 - DNA, 25 bp, SARS Virus
actgtgattaaacgatctcccaaga

SEQ ID NO: 35212 - DNA, 25 bp, SARS Virus
ctgtgattaaaccatctcccaagat

SEQ ID NO: 35213 - DNA, 25 bp, SARS Virus
tgtgattaaacgctctcccaagata

SEQ ID NO: 35214 - DNA, 25 bp, SARS Virus
gtgattaaacgacctcccaagataa

SEQ ID NO: 35215 - DNA, 25 bp, SARS Virus
tgattaaacgatctcccaagataaa

SEQ ID NO: 35216 - DNA, 25 bp, SARS Virus
gattaaacgatcccccaagataaag

SEQ ID NO: 35217 - DNA, 25 bp, SARS Virus
attaaacgatctcccaagataaaga

SEQ ID NO: 35218 - DNA, 25 bp, SARS Virus
ttaaacgatctcccaagataaagaa

SEQ ID NO: 35219 - DNA, 25 bp, SARS Virus
taaacgatctcccaagataaagaat

SEQ ID NO: 35220 - DNA, 25 bp, SARS Virus
aaacgatctccccagataaagaata

SEQ ID NO: 35221 - DNA, 25 bp, SARS Virus
aacgatctcccacgataaagaatat

SEQ ID NO: 35222 - DNA, 25 bp, SARS Virus
acgatctcccaacataaagaatatc

SEQ ID NO: 35223 - DNA, 25 bp, SARS Virus
cgatctcccaagctaaagaatatca

SEQ ID NO: 35224 - DNA, 25 bp, SARS Virus
gatctcccaagacaaagaatatcac

SEQ ID NO: 35225 - DNA, 25 bp, SARS Virus
atctcccaagatcaagaatatcact

SEQ ID NO: 35226 - DNA, 25 bp, SARS Virus
tctcccaagatacagaatatcactc

SEQ ID NO: 35227 - DNA, 25 bp, SARS Virus
ctcccaagataacgaatatcactcg

SEQ ID NO: 35228 - DNA, 25 bp, SARS Virus
tcccaagataaacaatatcactcga

SEQ ID NO: 35229 - DNA, 25 bp, SARS Virus
cccaagataaagcatatcactcgaa

SEQ ID NO: 35230 - DNA, 25 bp, SARS Virus
ccaagataaagactatcactcgaag

SEQ ID NO: 35231 - DNA, 25 bp, SARS Virus
caagataaagaacatcactcgaagc

SEQ ID NO: 35232 - DNA, 25 bp, SARS Virus
aagataaagaatctcactcgaagca

SEQ ID NO: 35233 - DNA, 25 bp, SARS Virus
agataaagaataccactcgaagcag

SEQ ID NO: 35234 - DNA, 25 bp, SARS Virus
gataaagaatatcactcgaagcagg

SEQ ID NO: 35235 - DNA, 25 bp, SARS Virus
ataaagaatatccctcgaagcaggt

SEQ ID NO: 35236 - DNA, 25 bp, SARS Virus
taaagaatatcactcgaagcaggtc

SEQ ID NO: 35237 - DNA, 25 bp, SARS Virus
aaagaatatcacccgaagcaggtct

SEQ ID NO: 35238 - DNA, 25 bp, SARS Virus
aagaatatcactcgaagcaggtctg

SEQ ID NO: 35239 - DNA, 25 bp, SARS Virus
agaatatcactccaagcaggtctgt

SEQ ID NO: 35240 - DNA, 25 bp, SARS Virus
gaatatcactcgcagcaggtctgtg

SEQ ID NO: 35241 - DNA, 25 bp, SARS Virus
aatatcactcgacgcaggtctgtga

SEQ ID NO: 35242 - DNA, 25 bp, SARS Virus
atatcactcgaaccaggtctgtgag

SEQ ID NO: 35243 - DNA, 25 bp, SARS Virus
tatcactcgaagcaggtctgtgagc

SEQ ID NO: 35244 - DNA, 25 bp, SARS Virus
atcactcgaagccggtctgtgagca

SEQ ID NO: 35245 - DNA, 25 bp, SARS Virus
tcactcgaagcacgtctgtgagcaa

SEQ ID NO: 35246 - DNA, 25 bp, SARS Virus
cactcgaagcagctctgtgagcaat

SEQ ID NO: 35247 - DNA, 25 bp, SARS Virus
actcgaagcaggcctgtgagcaata

SEQ ID NO: 35248 - DNA, 25 bp, SARS Virus
ctcgaagcaggtctgtgagcaatac

SEQ ID NO: 35249 - DNA, 25 bp, SARS Virus
tcgaagcaggtccgtgagcaataca

SEQ ID NO: 35250 - DNA, 25 bp, SARS Virus
cgaagcaggtctctgagcaatacac

SEQ ID NO: 35251 - DNA, 25 bp, SARS Virus
gaagcaggtctgcgagcaatacacg

SEQ ID NO: 35252 - DNA, 25 bp, SARS Virus
aagcaggtctgtcagcaatacacga

SEQ ID NO: 35253 - DNA, 25 bp, SARS Virus
agcaggtctgtgcgcaatacacgaa

SEQ ID NO: 35254 - DNA, 25 bp, SARS Virus
gcaggtctgtgaccaatacacgaat

SEQ ID NO: 35255 - DNA, 25 bp, SARS Virus
caggtctgtgagcaatacacgaata

SEQ ID NO: 35256 - DNA, 25 bp, SARS Virus
aggtctgtgagccatacacgaatac

SEQ ID NO: 35257 - DNA, 25 bp, SARS Virus
ggtctgtgagcactacacgaatacc

SEQ ID NO: 35258 - DNA, 25 bp, SARS Virus
gtctgtgagcaacacacgaatacct

SEQ ID NO: 35259 - DNA, 25 bp, SARS Virus
tctgtgagcaatccacgaataccta

SEQ ID NO: 35260 - DNA, 25 bp, SARS Virus
ctgtgagcaatacacgaatacctac

SEQ ID NO: 35261 - DNA, 25 bp, SARS Virus
tgtgagcaatacccgaatacctacc

SEQ ID NO: 35262 - DNA, 25 bp, SARS Virus
gtgagcaatacacgaatacctacca

SEQ ID NO: 35263 - DNA, 25 bp, SARS Virus
tgagcaatacaccaatacctaccaa

SEQ ID NO: 35264 - DNA, 25 bp, SARS Virus
gagcaatacacgcatacctaccaag

SEQ ID NO: 35265 - DNA, 25 bp, SARS Virus
caatacggtcatgtatgtaacagtt

SEQ ID NO: 35266 - DNA, 25 bp, SARS Virus
aatacggtcatggatgtaacagtta

SEQ ID NO: 35267 - DNA, 25 bp, SARS Virus
atacggtcatgtgtgtaacagttag

SEQ ID NO: 35268 - DNA, 25 bp, SARS Virus
tacggtcatgtaggtaacagttagg

SEQ ID NO: 35269 - DNA, 25 bp, SARS Virus
acggtcatgtatgtaacagttaggt

SEQ ID NO: 35270 - DNA, 25 bp, SARS Virus
cggtcatgtatggaacagttaggta

SEQ ID NO: 35271 - DNA, 25 bp, SARS Virus
ggtcatgtatgtgacagttaggtac

SEQ ID NO: 35272 - DNA, 25 bp, SARS Virus
gtcatgtatgtagcagttaggtact

SEQ ID NO: 35273 - DNA, 25 bp, SARS Virus
tcatgtatgtaagagttaggtacta

SEQ ID NO: 35274 - DNA, 25 bp, SARS Virus
catgtatgtaacggttaggtactac

SEQ ID NO: 35275 - DNA, 25 bp, SARS Virus
atgtatgtaacagttaggtactacc

SEQ ID NO: 35276 - DNA, 25 bp, SARS Virus
tgtatgtaacaggtaggtactacca

SEQ ID NO: 35277 - DNA, 25 bp, SARS Virus
gtatgtaacagtgaggtactaccaa

SEQ ID NO: 35278 - DNA, 25 bp, SARS Virus
tatgtaacagttgggtactaccaat

SEQ ID NO: 35279 - DNA, 25 bp, SARS Virus
atgtaacagttaggtactaccaatg

SEQ ID NO: 35280 - DNA, 25 bp, SARS Virus
tgtaacagttaggtactaccaatgt

SEQ ID NO: 35281 - DNA, 25 bp, SARS Virus
gtaacagttagggactaccaatgtg

SEQ ID NO: 35282 - DNA, 25 bp, SARS Virus
taacagttaggtgctaccaatgtgt

SEQ ID NO: 35283 - DNA, 25 bp, SARS Virus
aacagttaggtagtaccaatgtgtt

SEQ ID NO: 35284 - DNA, 25 bp, SARS Virus
acagttaggtacgaccaatgtgttt

SEQ ID NO: 35285 - DNA, 25 bp, SARS Virus
cagttaggtactgccaatgtgttta

SEQ ID NO: 35286 - DNA, 25 bp, SARS Virus
agttaggtactagcaatgtgtttac

SEQ ID NO: 35287 - DNA, 25 bp, SARS Virus
gttaggtactacgaatgtgtttact

SEQ ID NO: 35288 - DNA, 25 bp, SARS Virus
ttaggtactaccgatgtgtttactt

SEQ ID NO: 35289 - DNA, 25 bp, SARS Virus
taggtactaccagtgtgtttacttt

SEQ ID NO: 35290 - DNA, 25 bp, SARS Virus
aggtactaccaaggtgtttacttta

SEQ ID NO: 35291 - DNA, 25 bp, SARS Virus
ggtactaccaatgtgtttactttag

SEQ ID NO: 35292 - DNA, 25 bp, SARS Virus
gtactaccaatgggtttactttagt

SEQ ID NO: 35293 - DNA, 25 bp, SARS Virus
tactaccaatgtgtttactttagta

SEQ ID NO: 35294 - DNA, 25 bp, SARS Virus
actaccaatgtggttactttagtaa

SEQ ID NO: 35295 - DNA, 25 bp, SARS Virus
ctaccaatgtgtgtactttagtaac

SEQ ID NO: 35296 - DNA, 25 bp, SARS Virus
taccaatgtgttgactttagtaacc

SEQ ID NO: 35297 - DNA, 25 bp, SARS Virus
accaatgtgtttgctttagtaacca

SEQ ID NO: 35298 - DNA, 25 bp, SARS Virus
ccaatgtgtttagtttagtaaccaa

SEQ ID NO: 35299 - DNA, 25 bp, SARS Virus
caatgtgtttacgttagtaaccaat

SEQ ID NO: 35300 - DNA, 25 bp, SARS Virus
aatgtgtttactgtagtaaccaatg

SEQ ID NO: 35301 - DNA, 25 bp, SARS Virus
atgtgtttacttgagtaaccaatgt

SEQ ID NO: 35302 - DNA, 25 bp, SARS Virus
tgtgtttactttggtaaccaatgtt

SEQ ID NO: 35303 - DNA, 25 bp, SARS Virus
gtgtttactttagtaaccaatgttt

SEQ ID NO: 35304 - DNA, 25 bp, SARS Virus
tgtttactttaggaaccaatgtttc

SEQ ID NO: 35305 - DNA, 25 bp, SARS Virus
gtttactttagtgaccaatgtttcg

SEQ ID NO: 35306 - DNA, 25 bp, SARS Virus
tttactttagtagccaatgtttcgg

SEQ ID NO: 35307 - DNA, 25 bp, SARS Virus
ttactttagtaagcaatgtttcggt

SEQ ID NO: 35308 - DNA, 25 bp, SARS Virus
tactttagtaacgaatgtttcggta

SEQ ID NO: 35309 - DNA, 25 bp, SARS Virus
actttagtaaccgatgtttcggtaa

SEQ ID NO: 35310 - DNA, 25 bp, SARS Virus
ctttagtaaccagtgtttcggtaag

SEQ ID NO: 35311 - DNA, 25 bp, SARS Virus
tttagtaaccaaggtttcggtaagt

SEQ ID NO: 35312 - DNA, 25 bp, SARS Virus
ttagtaaccaatgtttcggtaagtc

SEQ ID NO: 35313 - DNA, 25 bp, SARS Virus
tagtaaccaatggttcggtaagtcc

SEQ ID NO: 35314 - DNA, 25 bp, SARS Virus
agtaaccaatgtgtcggtaagtcct

SEQ ID NO: 35315 - DNA, 25 bp, SARS Virus
gtaaccaatgttgcggtaagtccta

SEQ ID NO: 35316 - DNA, 25 bp, SARS Virus
taaccaatgtttgggtaagtcctac

SEQ ID NO: 35317 - DNA, 25 bp, SARS Virus
aaccaatgtttcggtaagtcctacc

SEQ ID NO: 35318 - DNA, 25 bp, SARS Virus
accaatgtttcggtaagtcctacca

SEQ ID NO: 35319 - DNA, 25 bp, SARS Virus
ccaatgtttcgggaagtcctaccac

SEQ ID NO: 35320 - DNA, 25 bp, SARS Virus
caatgtttcggtgagtcctaccaca

SEQ ID NO: 35321 - DNA, 25 bp, SARS Virus
aatgtttcggtaggtcctaccacag

SEQ ID NO: 35322 - DNA, 25 bp, SARS Virus
atgtttcggtaagtcctaccacagt

SEQ ID NO: 35323 - DNA, 25 bp, SARS Virus
tgtttcggtaaggcctaccacagtg

SEQ ID NO: 35324 - DNA, 25 bp, SARS Virus
gtttcggtaagtgctaccacagtga

SEQ ID NO: 35325 - DNA, 25 bp, SARS Virus
tttcggtaagtcgtaccacagtgag

SEQ ID NO: 35326 - DNA, 25 bp, SARS Virus
ttcggtaagtccgaccacagtgagc

SEQ ID NO: 35327 - DNA, 25 bp, SARS Virus
tcggtaagtcctgccacagtgagca

SEQ ID NO: 35328 - DNA, 25 bp, SARS Virus
cggtaagtcctagcacagtgagcac

SEQ ID NO: 35329 - DNA, 25 bp, SARS Virus
ggtaagtcctacgacagtgagcact

SEQ ID NO: 35330 - DNA, 25 bp, SARS Virus
gtaagtcctaccgcagtgagcactg

SEQ ID NO: 35331 - DNA, 25 bp, SARS Virus
taagtcctaccagagtgagcactgt

SEQ ID NO: 35332 - DNA, 25 bp, SARS Virus
aagtcctaccacggtgagcactgta

SEQ ID NO: 35333 - DNA, 25 bp, SARS Virus
agtcctaccacagtgagcactgtag

SEQ ID NO: 35334 - DNA, 25 bp, SARS Virus
gtcctaccacagggagcactgtagt

SEQ ID NO: 35335 - DNA, 25 bp, SARS Virus
tcctaccacagtgagcactgtagta

SEQ ID NO: 35336 - DNA, 25 bp, SARS Virus
cctaccacagtgggcactgtagtaa

SEQ ID NO: 35337 - DNA, 25 bp, SARS Virus
ctaccacagtgagcactgtagtaaa

SEQ ID NO: 35338 - DNA, 25 bp, SARS Virus
taccacagtgaggactgtagtaaag

SEQ ID NO: 35339 - DNA, 25 bp, SARS Virus
accacagtgagcgctgtagtaaaga

SEQ ID NO: 35340 - DNA, 25 bp, SARS Virus
ccacagtgagcagtgtagtaaagat

SEQ ID NO: 35341 - DNA, 25 bp, SARS Virus
cacagtgagcacggtagtaaagatg

SEQ ID NO: 35342 - DNA, 25 bp, SARS Virus
acagtgagcactgtagtaaagatga

SEQ ID NO: 35343 - DNA, 25 bp, SARS Virus
cagtgagcactggagtaaagatgac

SEQ ID NO: 35344 - DNA, 25 bp, SARS Virus
agtgagcactgtggtaaagatgact

SEQ ID NO: 35345 - DNA, 25 bp, SARS Virus
gtgagcactgtagtaaagatgacta

SEQ ID NO: 35346 - DNA, 25 bp, SARS Virus
tgagcactgtaggaaagatgactac

SEQ ID NO: 35347 - DNA, 25 bp, SARS Virus
gagcactgtagtgaagatgactact

SEQ ID NO: 35348 - DNA, 25 bp, SARS Virus
agcactgtagtagagatgactacta

SEQ ID NO: 35349 - DNA, 25 bp, SARS Virus
gcactgtagtaaggatgactactaa

SEQ ID NO: 35350 - DNA, 25 bp, SARS Virus
cactgtagtaaagatgactactaac

SEQ ID NO: 35351 - DNA, 25 bp, SARS Virus
actgtagtaaaggtgactactaaca

SEQ ID NO: 35352 - DNA, 25 bp, SARS Virus
ctgtagtaaagaggactactaacaa

SEQ ID NO: 35353 - DNA, 25 bp, SARS Virus
tgtagtaaagatgactactaacaaa

SEQ ID NO: 35354 - DNA, 25 bp, SARS Virus
gtagtaaagatggctactaacaaaa

SEQ ID NO: 35355 - DNA, 25 bp, SARS Virus
tagtaaagatgagtactaacaaaac

SEQ ID NO: 35356 - DNA, 25 bp, SARS Virus
agtaaagatgacgactaacaaaacg

SEQ ID NO: 35357 - DNA, 25 bp, SARS Virus
gtaaagatgactgctaacaaaacgt

SEQ ID NO: 35358 - DNA, 25 bp, SARS Virus
taaagatgactagtaacaaaacgtt

SEQ ID NO: 35359 - DNA, 25 bp, SARS Virus
aaagatgactacgaacaaaacgttt

SEQ ID NO: 35360 - DNA, 25 bp, SARS Virus
aagatgactactgacaaaacgttta

SEQ ID NO: 35361 - DNA, 25 bp, SARS Virus
agatgactactagcaaaacgtttat

SEQ ID NO: 35362 - DNA, 25 bp, SARS Virus
gatgactactaagaaaacgtttatt

SEQ ID NO: 35363 - DNA, 25 bp, SARS Virus
atgactactaacgaaacgtttattt

SEQ ID NO: 35364 - DNA, 25 bp, SARS Virus
tgactactaacagaacgtttatttg

SEQ ID NO: 35365 - DNA, 25 bp, SARS Virus
gactactaacaagacgtttatttgt

SEQ ID NO: 35366 - DNA, 25 bp, SARS Virus
actactaacaaagcgtttatttgta

SEQ ID NO: 35367 - DNA, 25 bp, SARS Virus
ctactaacaaaaggtttatttgtac

SEQ ID NO: 35368 - DNA, 25 bp, SARS Virus
tactaacaaaacgtttatttgtacg

SEQ ID NO: 35369 - DNA, 25 bp, SARS Virus
actaacaaaacggttatttgtacga

SEQ ID NO: 35370 - DNA, 25 bp, SARS Virus
ctaacaaaacgtgtatttgtacgac

SEQ ID NO: 35371 - DNA, 25 bp, SARS Virus
taacaaaacgttgatttgtacgacc

SEQ ID NO: 35372 - DNA, 25 bp, SARS Virus
aacaaaacgtttgtttgtacgacca

SEQ ID NO: 35373 - DNA, 25 bp, SARS Virus
acaaaacgtttagttgtacgaccaa

SEQ ID NO: 35374 - DNA, 25 bp, SARS Virus
caaaacgtttatgtgtacgaccaaa

SEQ ID NO: 35375 - DNA, 25 bp, SARS Virus
aaaacgtttattggtacgaccaaaa

SEQ ID NO: 35376 - DNA, 25 bp, SARS Virus
aaacgtttatttgtacgaccaaaac

SEQ ID NO: 35377 - DNA, 25 bp, SARS Virus
aacgtttatttggacgaccaaaact

SEQ ID NO: 35378 - DNA, 25 bp, SARS Virus
acgtttatttgtgcgaccaaaactg

SEQ ID NO: 35379 - DNA, 25 bp, SARS Virus
cgtttatttgtaggaccaaaactgc

SEQ ID NO: 35380 - DNA, 25 bp, SARS Virus
gtttatttgtacgaccaaaactgcg

SEQ ID NO: 35381 - DNA, 25 bp, SARS Virus
tttatttgtacggccaaaactgcgt

SEQ ID NO: 35382 - DNA, 25 bp, SARS Virus
ttatttgtacgagcaaaactgcgta

SEQ ID NO: 35383 - DNA, 25 bp, SARS Virus
tatttgtacgacgaaaactgcgtac

SEQ ID NO: 35384 - DNA, 25 bp, SARS Virus
atttgtacgaccgaaactgcgtacc

SEQ ID NO: 35385 - DNA, 25 bp, SARS Virus
tttgtacgaccagaactgcgtacca

SEQ ID NO: 35386 - DNA, 25 bp, SARS Virus
ttgtacgaccaagactgcgtaccaa

SEQ ID NO: 35387 - DNA, 25 bp, SARS Virus
tgtacgaccaaagctgcgtaccaaa

SEQ ID NO: 35388 - DNA, 25 bp, SARS Virus
gtacgaccaaaagtgcgtaccaaat

SEQ ID NO: 35389 - DNA, 25 bp, SARS Virus
tacgaccaaaacggcgtaccaaatc

SEQ ID NO: 35390 - DNA, 25 bp, SARS Virus
acgaccaaaactgcgtaccaaatcg

SEQ ID NO: 35391 - DNA, 25 bp, SARS Virus
cgaccaaaactgggtaccaaatcgg

SEQ ID NO: 35392 - DNA, 25 bp, SARS Virus
gaccaaaactgcgtaccaaatcggt

SEQ ID NO: 35393 - DNA, 25 bp, SARS Virus
accaaaactgcggaccaaatcggtc

SEQ ID NO: 35394 - DNA, 25 bp, SARS Virus
ccaaaactgcgtgccaaatcggtcg

SEQ ID NO: 35395 - DNA, 25 bp, SARS Virus
caaaactgcgtagcaaatcggtcgc

SEQ ID NO: 35396 - DNA, 25 bp, SARS Virus
aaaactgcgtacgaaatcggtcgca

SEQ ID NO: 35397 - DNA, 25 bp, SARS Virus
aaactgcgtaccgaatcggtcgcac

SEQ ID NO: 35398 - DNA, 25 bp, SARS Virus
aactgcgtaccagatcggtcgcacc

SEQ ID NO: 35399 - DNA, 25 bp, SARS Virus
actgcgtaccaagtcggtcgcacca

SEQ ID NO: 35400 - DNA, 25 bp, SARS Virus
ctgcgtaccaaagcggtcgcaccac

SEQ ID NO: 35401 - DNA, 25 bp, SARS Virus
tgcgtaccaaatgggtcgcaccacc

SEQ ID NO: 35402 - DNA, 25 bp, SARS Virus
gcgtaccaaatcggtcgcaccacca

SEQ ID NO: 35403 - DNA, 25 bp, SARS Virus
cgtaccaaatcggtcgcaccaccaa

SEQ ID NO: 35404 - DNA, 25 bp, SARS Virus
gtaccaaatcgggcgcaccaccaag

SEQ ID NO: 35405 - DNA, 25 bp, SARS Virus
taccaaatcggtggcaccaccaagt

SEQ ID NO: 35406 - DNA, 25 bp, SARS Virus
accaaatcggtcgcaccaccaagta

SEQ ID NO: 35407 - DNA, 25 bp, SARS Virus
ccaaatcggtcggaccaccaagtat

SEQ ID NO: 35408 - DNA, 25 bp, SARS Virus
caaatcggtcgcgccaccaagtatg

SEQ ID NO: 35409 - DNA, 25 bp, SARS Virus
aaatcggtcgcagcaccaagtatgt

SEQ ID NO: 35410 - DNA, 25 bp, SARS Virus
aatcggtcgcacgaccaagtatgtt

SEQ ID NO: 35411 - DNA, 25 bp, SARS Virus
atcggtcgcaccgccaagtatgttt

SEQ ID NO: 35412 - DNA, 25 bp, SARS Virus
tcggtcgcaccagcaagtatgtttt

SEQ ID NO: 35413 - DNA, 25 bp, SARS Virus
cggtcgcaccacgaagtatgttttt

SEQ ID NO: 35414 - DNA, 25 bp, SARS Virus
ggtcgcaccaccgagtatgttttta

SEQ ID NO: 35415 - DNA, 25 bp, SARS Virus
gtcgcaccaccaggtatgtttttac

SEQ ID NO: 35416 - DNA, 25 bp, SARS Virus
tcgcaccaccaagtatgtttttact

SEQ ID NO: 35417 - DNA, 25 bp, SARS Virus
cgcaccaccaaggatgtttttactg

SEQ ID NO: 35418 - DNA, 25 bp, SARS Virus
gcaccaccaagtgtgtttttactgt

SEQ ID NO: 35419 - DNA, 25 bp, SARS Virus
caccaccaagtaggtttttactgtt

SEQ ID NO: 35420 - DNA, 25 bp, SARS Virus
accaccaagtatgtttttactgttt

SEQ ID NO: 35421 - DNA, 25 bp, SARS Virus
ccaccaagtatggttttactgtttt

SEQ ID NO: 35422 - DNA, 25 bp, SARS Virus
caccaagtatgtgtttactgttttc

SEQ ID NO: 35423 - DNA, 25 bp, SARS Virus
accaagtatgttgttactgttttcg

SEQ ID NO: 35424 - DNA, 25 bp, SARS Virus
ccaagtatgtttgtactgttttcga

SEQ ID NO: 35425 - DNA, 25 bp, SARS Virus
caagtatgttttgactgttttcgac

SEQ ID NO: 35426 - DNA, 25 bp, SARS Virus
aagtatgtttttgctgttttcgacg

SEQ ID NO: 35427 - DNA, 25 bp, SARS Virus
agtatgtttttagtgttttcgacgg

SEQ ID NO: 35428 - DNA, 25 bp, SARS Virus
gtatgtttttacggttttcgacggg

SEQ ID NO: 35429 - DNA, 25 bp, SARS Virus
tatgtttttactgttttcgacggga

SEQ ID NO: 35430 - DNA, 25 bp, SARS Virus
atgtttttactggtttcgacgggac

SEQ ID NO: 35431 - DNA, 25 bp, SARS Virus
tgtttttactgtgttcgacgggaca

SEQ ID NO: 35432 - DNA, 25 bp, SARS Virus
gtttttactgttgtcgacgggacat

SEQ ID NO: 35433 - DNA, 25 bp, SARS Virus
tttttactgtttgcgacgggacatc

SEQ ID NO: 35434 - DNA, 25 bp, SARS Virus
ttttactgttttggacgggacatca

SEQ ID NO: 35435 - DNA, 25 bp, SARS Virus
tttactgttttcgacgggacatcat

SEQ ID NO: 35436 - DNA, 25 bp, SARS Virus
ttactgttttcggcgggacatcatc

SEQ ID NO: 35437 - DNA, 25 bp, SARS Virus
tactgttttcgaggggacatcatcg

SEQ ID NO: 35438 - DNA, 25 bp, SARS Virus
actgttttcgacgggacatcatcga

SEQ ID NO: 35439 - DNA, 25 bp, SARS Virus
ctgttttcgacgggacatcatcgac

SEQ ID NO: 35440 - DNA, 25 bp, SARS Virus
tgttttcgacgggacatcatcgacg

SEQ ID NO: 35441 - DNA, 25 bp, SARS Virus
gttttcgacggggcatcatcgacga

SEQ ID NO: 35442 - DNA, 25 bp, SARS Virus
ttttcgacgggagatcatcgacgat

SEQ ID NO: 35443 - DNA, 25 bp, SARS Virus
tttcgacgggacgtcatcgacgata

SEQ ID NO: 35444 - DNA, 25 bp, SARS Virus
ttcgacgggacagcatcgacgatag

SEQ ID NO: 35445 - DNA, 25 bp, SARS Virus
tcgacgggacatgatcgacgatagt

SEQ ID NO: 35446 - DNA, 25 bp, SARS Virus
cgacgggacatcgtcgacgatagta

SEQ ID NO: 35447 - DNA, 25 bp, SARS Virus
gacgggacatcagcgacgatagtaa

SEQ ID NO: 35448 - DNA, 25 bp, SARS Virus
acgggacatcatggacgatagtaat

SEQ ID NO: 35449 - DNA, 25 bp, SARS Virus
cgggacatcatcgacgatagtaatg

SEQ ID NO: 35450 - DNA, 25 bp, SARS Virus
gggacatcatcggcgatagtaatgt

SEQ ID NO: 35451 - DNA, 25 bp, SARS Virus
ggacatcatcgaggatagtaatgtt

SEQ ID NO: 35452 - DNA, 25 bp, SARS Virus
gacatcatcgacgatagtaatgttc

SEQ ID NO: 35453 - DNA, 25 bp, SARS Virus
acatcatcgacggtagtaatgttct

SEQ ID NO: 35454 - DNA, 25 bp, SARS Virus
catcatcgacgagagtaatgttctc

SEQ ID NO: 35455 - DNA, 25 bp, SARS Virus
atcatcgacgatggtaatgttctct

SEQ ID NO: 35456 - DNA, 25 bp, SARS Virus
tcatcgacgatagtaatgttctctc

SEQ ID NO: 35457 - DNA, 25 bp, SARS Virus
catcgacgataggaatgttctctct

SEQ ID NO: 35458 - DNA, 25 bp, SARS Virus
atcgacgatagtgatgttctctcta

SEQ ID NO: 35459 - DNA, 25 bp, SARS Virus
tcgacgatagtagtgttctctctaa

SEQ ID NO: 35460 - DNA, 25 bp, SARS Virus
cgacgatagtaaggttctctctaac

SEQ ID NO: 35461 - DNA, 25 bp, SARS Virus
gacgatagtaatgttctctctaacc

SEQ ID NO: 35462 - DNA, 25 bp, SARS Virus
acgatagtaatggtctctctaacca

SEQ ID NO: 35463 - DNA, 25 bp, SARS Virus
cgatagtaatgtgctctctaaccaa

SEQ ID NO: 35464 - DNA, 25 bp, SARS Virus
gatagtaatgttgtctctaaccaaa

SEQ ID NO: 35465 - DNA, 25 bp, SARS Virus
atagtaatgttcgctctaaccaaag

SEQ ID NO: 35466 - DNA, 25 bp, SARS Virus
tagtaatgttctgtctaaccaaagt

SEQ ID NO: 35467 - DNA, 25 bp, SARS Virus
agtaatgttctcgctaaccaaagta

SEQ ID NO: 35468 - DNA, 25 bp, SARS Virus
gtaatgttctctgtaaccaaagtat

SEQ ID NO: 35469 - DNA, 25 bp, SARS Virus
taatgttctctcgaaccaaagtatc

SEQ ID NO: 35470 - DNA, 25 bp, SARS Virus
aatgttctctctgaccaaagtatca

SEQ ID NO: 35471 - DNA, 25 bp, SARS Virus
atgttctctctagccaaagtatcac

SEQ ID NO: 35472 - DNA, 25 bp, SARS Virus
tgttctctctaagcaaagtatcacg

SEQ ID NO: 35473 - DNA, 25 bp, SARS Virus
gttctctctaacgaaagtatcacgg

SEQ ID NO: 35474 - DNA, 25 bp, SARS Virus
ttctctctaaccgaagtatcacgga

SEQ ID NO: 35475 - DNA, 25 bp, SARS Virus
tctctctaaccagagtatcacggac

SEQ ID NO: 35476 - DNA, 25 bp, SARS Virus
ctctctaaccaaggtatcacggacc

SEQ ID NO: 35477 - DNA, 25 bp, SARS Virus
tctctaaccaaagtatcacggaccg

SEQ ID NO: 35478 - DNA, 25 bp, SARS Virus
ctctaaccaaaggatcacggaccga

SEQ ID NO: 35479 - DNA, 25 bp, SARS Virus
tctaaccaaagtgtcacggaccgaa

SEQ ID NO: 35480 - DNA, 25 bp, SARS Virus
ctaaccaaagtagcacggaccgaat

SEQ ID NO: 35481 - DNA, 25 bp, SARS Virus
taaccaaagtatgacggaccgaatg

SEQ ID NO: 35482 - DNA, 25 bp, SARS Virus
aaccaaagtatcgcggaccgaatgg

SEQ ID NO: 35483 - DNA, 25 bp, SARS Virus
accaaagtatcagggaccgaatggc

SEQ ID NO: 35484 - DNA, 25 bp, SARS Virus
ccaaagtatcacggaccgaatggcc

SEQ ID NO: 35485 - DNA, 25 bp, SARS Virus
caaagtatcacggaccgaatggccc

SEQ ID NO: 35486 - DNA, 25 bp, SARS Virus
aaagtatcacgggccgaatggccca

SEQ ID NO: 35487 - DNA, 25 bp, SARS Virus
aagtatcacggagcgaatggcccat

SEQ ID NO: 35488 - DNA, 25 bp, SARS Virus
agtatcacggacggaatggcccatg

SEQ ID NO: 35489 - DNA, 25 bp, SARS Virus
gtatcacggaccgaatggcccatga

SEQ ID NO: 35490 - DNA, 25 bp, SARS Virus
tatcacggaccggatggcccatgac

SEQ ID NO: 35491 - DNA, 25 bp, SARS Virus
atcacggaccgagtggcccatgaca

SEQ ID NO: 35492 - DNA, 25 bp, SARS Virus
tcacggaccgaagggcccatgacac

SEQ ID NO: 35493 - DNA, 25 bp, SARS Virus
cacggaccgaatggcccatgacacg

SEQ ID NO: 35494 - DNA, 25 bp, SARS Virus
acggaccgaatggcccatgacacga

SEQ ID NO: 35495 - DNA, 25 bp, SARS Virus
cggaccgaatgggccatgacacgac

SEQ ID NO: 35496 - DNA, 25 bp, SARS Virus
ggaccgaatggcgcatgacacgact

SEQ ID NO: 35497 - DNA, 25 bp, SARS Virus
gaccgaatggccgatgacacgactc

SEQ ID NO: 35498 - DNA, 25 bp, SARS Virus
accgaatggcccgtgacacgactct

SEQ ID NO: 35499 - DNA, 25 bp, SARS Virus
ccgaatggcccaggacacgactctc

SEQ ID NO: 35500 - DNA, 25 bp, SARS Virus
cgaatggcccatgacacgactctcg

SEQ ID NO: 35501 - DNA, 25 bp, SARS Virus
gaatggcccatggcacgactctcgt

SEQ ID NO: 35502 - DNA, 25 bp, SARS Virus
aatggcccatgagacgactctcgtt

SEQ ID NO: 35503 - DNA, 25 bp, SARS Virus
atggcccatgacgcgactctcgtta

SEQ ID NO: 35504 - DNA, 25 bp, SARS Virus
tggcccatgacaggactctcgttag

SEQ ID NO: 35505 - DNA, 25 bp, SARS Virus
ggcccatgacacgactctcgttagt

SEQ ID NO: 35506 - DNA, 25 bp, SARS Virus
gcccatgacacggctctcgttagtt

SEQ ID NO: 35507 - DNA, 25 bp, SARS Virus
cccatgacacgagtctcgttagtta

SEQ ID NO: 35508 - DNA, 25 bp, SARS Virus
ccatgacacgacgctcgttagttac

SEQ ID NO: 35509 - DNA, 25 bp, SARS Virus
catgacacgactgtcgttagttacc

SEQ ID NO: 35510 - DNA, 25 bp, SARS Virus
atgacacgactcgcgttagttacca

SEQ ID NO: 35511 - DNA, 25 bp, SARS Virus
tgacacgactctggttagttaccac

SEQ ID NO: 35512 - DNA, 25 bp, SARS Virus
gacacgactctcgttagttaccact

SEQ ID NO: 35513 - DNA, 25 bp, SARS Virus
acacgactctcggtagttaccactg

SEQ ID NO: 35514 - DNA, 25 bp, SARS Virus
cacgactctcgtgagttaccactga

SEQ ID NO: 35515 - DNA, 25 bp, SARS Virus
acgactctcgttggttaccactgaa

SEQ ID NO: 35516 - DNA, 25 bp, SARS Virus
cgactctcgttagttaccactgaag

SEQ ID NO: 35517 - DNA, 25 bp, SARS Virus
gactctcgttaggtaccactgaaga

SEQ ID NO: 35518 - DNA, 25 bp, SARS Virus
actctcgttagtgaccactgaagaa

SEQ ID NO: 35519 - DNA, 25 bp, SARS Virus
ctctcgttagttgccactgaagaac

SEQ ID NO: 35520 - DNA, 25 bp, SARS Virus
tctcgttagttagcactgaagaacg

SEQ ID NO: 35521 - DNA, 25 bp, SARS Virus
ctcgttagttacgactgaagaacgt

SEQ ID NO: 35522 - DNA, 25 bp, SARS Virus
tcgttagttaccgctgaagaacgta

SEQ ID NO: 35523 - DNA, 25 bp, SARS Virus
cgttagttaccagtgaagaacgtaa

SEQ ID NO: 35524 - DNA, 25 bp, SARS Virus
gttagttaccacggaagaacgtaaa

SEQ ID NO: 35525 - DNA, 25 bp, SARS Virus
ttagttaccactgaagaacgtaaaa

SEQ ID NO: 35526 - DNA, 25 bp, SARS Virus
tagttaccactggagaacgtaaaag

SEQ ID NO: 35527 - DNA, 25 bp, SARS Virus
agttaccactgaggaacgtaaaaga

SEQ ID NO: 35528 - DNA, 25 bp, SARS Virus
gttaccactgaagaacgtaaaagat

SEQ ID NO: 35529 - DNA, 25 bp, SARS Virus
ttaccactgaaggacgtaaaagatg

SEQ ID NO: 35530 - DNA, 25 bp, SARS Virus
taccactgaagagcgtaaaagatgg

SEQ ID NO: 35531 - DNA, 25 bp, SARS Virus
accactgaagaaggtaaaagatgga

SEQ ID NO: 35532 - DNA, 25 bp, SARS Virus
ccactgaagaacgtaaaagatggag

SEQ ID NO: 35533 - DNA, 25 bp, SARS Virus
cactgaagaacggaaaagatggagc

SEQ ID NO: 35534 - DNA, 25 bp, SARS Virus
actgaagaacgtgaaagatggagca

SEQ ID NO: 35535 - DNA, 25 bp, SARS Virus
ctgaagaacgtagaagatggagcac

SEQ ID NO: 35536 - DNA, 25 bp, SARS Virus
tgaagaacgtaagagatggagcaca

SEQ ID NO: 35537 - DNA, 25 bp, SARS Virus
gaagaacgtaaaggatggagcacaa

SEQ ID NO: 35538 - DNA, 25 bp, SARS Virus
aagaacgtaaaagatggagcacaaa

SEQ ID NO: 35539 - DNA, 25 bp, SARS Virus
agaacgtaaaaggtggagcacaaaa

SEQ ID NO: 35540 - DNA, 25 bp, SARS Virus
gaacgtaaaagagggagcacaaaaa

SEQ ID NO: 35541 - DNA, 25 bp, SARS Virus
aacgtaaaagatggagcacaaaaat

SEQ ID NO: 35542 - DNA, 25 bp, SARS Virus
acgtaaaagatggagcacaaaaatc

SEQ ID NO: 35543 - DNA, 25 bp, SARS Virus
cgtaaaagatggggcacaaaaatca

SEQ ID NO: 35544 - DNA, 25 bp, SARS Virus
gtaaaagatggagcacaaaaatcac

SEQ ID NO: 35545 - DNA, 25 bp, SARS Virus
taaaagatggaggacaaaaatcacg

SEQ ID NO: 35546 - DNA, 25 bp, SARS Virus
aaaagatggagcgcaaaaatcacga

SEQ ID NO: 35547 - DNA, 25 bp, SARS Virus
aaagatggagcagaaaaatcacgac

SEQ ID NO: 35548 - DNA, 25 bp, SARS Virus
aagatggagcacgaaaatcacgaca

SEQ ID NO: 35549 - DNA, 25 bp, SARS Virus
agatggagcacagaaatcacgacaa

SEQ ID NO: 35550 - DNA, 25 bp, SARS Virus
gatggagcacaagaatcacgacaac

SEQ ID NO: 35551 - DNA, 25 bp, SARS Virus
atggagcacaaagatcacgacaacc

SEQ ID NO: 35552 - DNA, 25 bp, SARS Virus
tggagcacaaaagtcacgacaaccg

SEQ ID NO: 35553 - DNA, 25 bp, SARS Virus
ggagcacaaaaagcacgacaaccgt

SEQ ID NO: 35554 - DNA, 25 bp, SARS Virus
gagcacaaaaatgacgacaaccgtt

SEQ ID NO: 35555 - DNA, 25 bp, SARS Virus
agcacaaaaatcgcgacaaccgttg

SEQ ID NO: 35556 - DNA, 25 bp, SARS Virus
gcacaaaaatcaggacaaccgttgt

SEQ ID NO: 35557 - DNA, 25 bp, SARS Virus
cacaaaaatcacgacaaccgttgta

SEQ ID NO: 35558 - DNA, 25 bp, SARS Virus
acaaaaatcacggcaaccgttgtaa

SEQ ID NO: 35559 - DNA, 25 bp, SARS Virus
caaaaatcacgagaaccgttgtaaa

SEQ ID NO: 35560 - DNA, 25 bp, SARS Virus
aaaaatcacgacgaccgttgtaaac

SEQ ID NO: 35561 - DNA, 25 bp, SARS Virus
aaaatcacgacagccgttgtaaacg

SEQ ID NO: 35562 - DNA, 25 bp, SARS Virus
aaatcacgacaagcgttgtaaacga

SEQ ID NO: 35563 - DNA, 25 bp, SARS Virus
aatcacgacaacggttgtaaacgat

SEQ ID NO: 35564 - DNA, 25 bp, SARS Virus
atcacgacaaccgttgtaaacgatg

SEQ ID NO: 35565 - DNA, 25 bp, SARS Virus
tcacgacaaccggtgtaaacgatgt

SEQ ID NO: 35566 - DNA, 25 bp, SARS Virus
cacgacaaccgtggtaaacgatgtg

SEQ ID NO: 35567 - DNA, 25 bp, SARS Virus
acgacaaccgttgtaaacgatgtgt

SEQ ID NO: 35568 - DNA, 25 bp, SARS Virus
cgacaaccgttggaaacgatgtgtg

SEQ ID NO: 35569 - DNA, 25 bp, SARS Virus
gacaaccgttgtgaacgatgtgtgg

SEQ ID NO: 35570 - DNA, 25 bp, SARS Virus
acaaccgttgtagacgatgtgtgga

SEQ ID NO: 35571 - DNA, 25 bp, SARS Virus
caaccgttgtaagcgatgtgtggaa

SEQ ID NO: 35572 - DNA, 25 bp, SARS Virus
aaccgttgtaaaggatgtgtggaag

SEQ ID NO: 35573 - DNA, 25 bp, SARS Virus
accgttgtaaacgatgtgtggaagg

SEQ ID NO: 35574 - DNA, 25 bp, SARS Virus
ccgttgtaaacggtgtgtggaaggt

SEQ ID NO: 35575 - DNA, 25 bp, SARS Virus
cgttgtaaacgaggtgtggaaggtt

SEQ ID NO: 35576 - DNA, 25 bp, SARS Virus
gttgtaaacgatgtgtggaaggttt

SEQ ID NO: 35577 - DNA, 25 bp, SARS Virus
ttgtaaacgatgggtggaaggtttg

SEQ ID NO: 35578 - DNA, 25 bp, SARS Virus
tgtaaacgatgtgtggaaggtttga

SEQ ID NO: 35579 - DNA, 25 bp, SARS Virus
gtaaacgatgtggggaaggtttgag

SEQ ID NO: 35580 - DNA, 25 bp, SARS Virus
taaacgatgtgtggaaggtttgagt

SEQ ID NO: 35581 - DNA, 25 bp, SARS Virus
aaacgatgtgtggaaggtttgagta

SEQ ID NO: 35582 - DNA, 25 bp, SARS Virus
aacgatgtgtgggaggtttgagtaa

SEQ ID NO: 35583 - DNA, 25 bp, SARS Virus
acgatgtgtggagggtttgagtaac

SEQ ID NO: 35584 - DNA, 25 bp, SARS Virus
cgatgtgtggaaggtttgagtaact

SEQ ID NO: 35585 - DNA, 25 bp, SARS Virus
gatgtgtggaaggtttgagtaactc

SEQ ID NO: 35586 - DNA, 25 bp, SARS Virus
atgtgtggaagggttgagtaactca

SEQ ID NO: 35587 - DNA, 25 bp, SARS Virus
tgtgtggaaggtgtgagtaactcat

SEQ ID NO: 35588 - DNA, 25 bp, SARS Virus
gtgtggaaggttggagtaactcata

SEQ ID NO: 35589 - DNA, 25 bp, SARS Virus
tgtggaaggtttgagtaactcatat

SEQ ID NO: 35590 - DNA, 25 bp, SARS Virus
gtggaaggtttgggtaactcatatc

SEQ ID NO: 35591 - DNA, 25 bp, SARS Virus
tggaaggtttgagtaactcatatca

SEQ ID NO: 35592 - DNA, 25 bp, SARS Virus
ggaaggtttgaggaactcatatcac

SEQ ID NO: 35593 - DNA, 25 bp, SARS Virus
gaaggtttgagtgactcatatcact

SEQ ID NO: 35594 - DNA, 25 bp, SARS Virus
aaggtttgagtagctcatatcacta

SEQ ID NO: 35595 - DNA, 25 bp, SARS Virus
aggtttgagtaagtcatatcactaa

SEQ ID NO: 35596 - DNA, 25 bp, SARS Virus
ggtttgagtaacgcatatcactaaa

SEQ ID NO: 35597 - DNA, 25 bp, SARS Virus
gtttgagtaactgatatcactaaaa

SEQ ID NO: 35598 - DNA, 25 bp, SARS Virus
tttgagtaactcgtatcactaaaac

SEQ ID NO: 35599 - DNA, 25 bp, SARS Virus
ttgagtaactcagatcactaaaacg

SEQ ID NO: 35600 - DNA, 25 bp, SARS Virus
tgagtaactcatgtcactaaaacga

SEQ ID NO: 35601 - DNA, 25 bp, SARS Virus
gagtaactcatagcactaaaacgat

SEQ ID NO: 35602 - DNA, 25 bp, SARS Virus
agtaactcatatgactaaaacgatg

SEQ ID NO: 35603 - DNA, 25 bp, SARS Virus
gtaactcatatcgctaaaacgatgg

SEQ ID NO: 35604 - DNA, 25 bp, SARS Virus
taactcatatcagtaaaacgatgga

SEQ ID NO: 35605 - DNA, 25 bp, SARS Virus
aactcatatcacgaaaacgatggag

SEQ ID NO: 35606 - DNA, 25 bp, SARS Virus
actcatatcactgaaacgatggaga

SEQ ID NO: 35607 - DNA, 25 bp, SARS Virus
ctcatatcactagaacgatggagac

SEQ ID NO: 35608 - DNA, 25 bp, SARS Virus
tcatatcactaagacgatggagacg

SEQ ID NO: 35609 - DNA, 25 bp, SARS Virus
catatcactaaagcgatggagacga

SEQ ID NO: 35610 - DNA, 25 bp, SARS Virus
atatcactaaaaggatggagacgaa

SEQ ID NO: 35611 - DNA, 25 bp, SARS Virus
tatcactaaaacgatggagacgaac

SEQ ID NO: 35612 - DNA, 25 bp, SARS Virus
atcactaaaacggtggagacgaacg

SEQ ID NO: 35613 - DNA, 25 bp, SARS Virus
tcactaaaacgagggagacgaacgc

SEQ ID NO: 35614 - DNA, 25 bp, SARS Virus
cactaaaacgatggagacgaacgca

SEQ ID NO: 35615 - DNA, 25 bp, SARS Virus
actaaaacgatggagacgaacgcaa

SEQ ID NO: 35616 - DNA, 25 bp, SARS Virus
ctaaaacgatggggacgaacgcaag

SEQ ID NO: 35617 - DNA, 25 bp, SARS Virus
taaaacgatggagacgaacgcaaga

SEQ ID NO: 35618 - DNA, 25 bp, SARS Virus
aaaacgatggaggcgaacgcaagaa

SEQ ID NO: 35619 - DNA, 25 bp, SARS Virus
aaacgatggagaggaacgcaagaac

SEQ ID NO: 35620 - DNA, 25 bp, SARS Virus
aacgatggagacgaacgcaagaacg

SEQ ID NO: 35621 - DNA, 25 bp, SARS Virus
acgatggagacggacgcaagaacga

SEQ ID NO: 35622 - DNA, 25 bp, SARS Virus
cgatggagacgagcgcaagaacgac

SEQ ID NO: 35623 - DNA, 25 bp, SARS Virus
gatggagacgaaggcaagaacgacg

SEQ ID NO: 35624 - DNA, 25 bp, SARS Virus
atggagacgaacgcaagaacgacga

SEQ ID NO: 35625 - DNA, 25 bp, SARS Virus
tggagacgaacggaagaacgacgac

SEQ ID NO: 35626 - DNA, 25 bp, SARS Virus
ggagacgaacgcgagaacgacgact

SEQ ID NO: 35627 - DNA, 25 bp, SARS Virus
gagacgaacgcaggaacgacgactc

SEQ ID NO: 35628 - DNA, 25 bp, SARS Virus
agacgaacgcaagaacgacgactca

SEQ ID NO: 35629 - DNA, 25 bp, SARS Virus
gacgaacgcaaggacgacgactcac

SEQ ID NO: 35630 - DNA, 25 bp, SARS Virus
acgaacgcaagagcgacgactcaca

SEQ ID NO: 35631 - DNA, 25 bp, SARS Virus
cgaacgcaagaaggacgactcacat

SEQ ID NO: 35632 - DNA, 25 bp, SARS Virus
gaacgcaagaacgacgactcacatg

SEQ ID NO: 35633 - DNA, 25 bp, SARS Virus
aacgcaagaacggcgactcacatgt

SEQ ID NO: 35634 - DNA, 25 bp, SARS Virus
acgcaagaacgaggactcacatgtt

SEQ ID NO: 35635 - DNA, 25 bp, SARS Virus
cgcaagaacgacgactcacatgtta

SEQ ID NO: 35636 - DNA, 25 bp, SARS Virus
gcaagaacgacggctcacatgttaa

SEQ ID NO: 35637 - DNA, 25 bp, SARS Virus
caagaacgacgagtcacatgttaaa

SEQ ID NO: 35638 - DNA, 25 bp, SARS Virus
aagaacgacgacgcacatgttaaaa

SEQ ID NO: 35639 - DNA, 25 bp, SARS Virus
agaacgacgactgacatgttaaaaa

SEQ ID NO: 35640 - DNA, 25 bp, SARS Virus
gaacgacgactcgcatgttaaaaat

SEQ ID NO: 35641 - DNA, 25 bp, SARS Virus
aacgacgactcagatgttaaaaatt

SEQ ID NO: 35642 - DNA, 25 bp, SARS Virus
acgacgactcacgtgttaaaaattc

SEQ ID NO: 35643 - DNA, 25 bp, SARS Virus
cgacgactcacaggttaaaaattcc

SEQ ID NO: 35644 - DNA, 25 bp, SARS Virus
gacgactcacatgttaaaaattcct

SEQ ID NO: 35645 - DNA, 25 bp, SARS Virus
acgactcacatggtaaaaattccta

SEQ ID NO: 35646 - DNA, 25 bp, SARS Virus
cgactcacatgtgaaaaattcctac

SEQ ID NO: 35647 - DNA, 25 bp, SARS Virus
gactcacatgttgaaaattcctacg

SEQ ID NO: 35648 - DNA, 25 bp, SARS Virus
actcacatgttagaaattcctacga

SEQ ID NO: 35649 - DNA, 25 bp, SARS Virus
ctcacatgttaagaattcctacgat

SEQ ID NO: 35650 - DNA, 25 bp, SARS Virus
tcacatgttaaagattcctacgata

SEQ ID NO: 35651 - DNA, 25 bp, SARS Virus
cacatgttaaaagttcctacgatac

SEQ ID NO: 35652 - DNA, 25 bp, SARS Virus
acatgttaaaaagtcctacgatacc

SEQ ID NO: 35653 - DNA, 25 bp, SARS Virus
catgttaaaaatgcctacgataccc

SEQ ID NO: 35654 - DNA, 25 bp, SARS Virus
atgttaaaaattgctacgatacccg

SEQ ID NO: 35655 - DNA, 25 bp, SARS Virus
tgttaaaaattcgtacgatacccgt

SEQ ID NO: 35656 - DNA, 25 bp, SARS Virus
gttaaaaattccgacgatacccgtt

SEQ ID NO: 35657 - DNA, 25 bp, SARS Virus
ttaaaaattcctgcgatacccgttt

SEQ ID NO: 35658 - DNA, 25 bp, SARS Virus
taaaaattcctaggatacccgtttg

SEQ ID NO: 35659 - DNA, 25 bp, SARS Virus
aaaaattcctacgatacccgtttgg

SEQ ID NO: 35660 - DNA, 25 bp, SARS Virus
aaaattcctacggtacccgtttgga

SEQ ID NO: 35661 - DNA, 25 bp, SARS Virus
aaattcctacgagacccgtttggac

SEQ ID NO: 35662 - DNA, 25 bp, SARS Virus
aattcctacgatgcccgtttggaca

SEQ ID NO: 35663 - DNA, 25 bp, SARS Virus
attcctacgatagccgtttggacac

SEQ ID NO: 35664 - DNA, 25 bp, SARS Virus
ttcctacgatacgcgtttggacacg

SEQ ID NO: 35665 - DNA, 25 bp, SARS Virus
tcctacgataccggtttggacacgg

SEQ ID NO: 35666 - DNA, 25 bp, SARS Virus
cctacgatacccgtttggacacggt

SEQ ID NO: 35667 - DNA, 25 bp, SARS Virus
ctacgatacccggttggacacggta

SEQ ID NO: 35668 - DNA, 25 bp, SARS Virus
tacgatacccgtgtggacacggtat

SEQ ID NO: 35669 - DNA, 25 bp, SARS Virus
acgatacccgttgggacacggtata

SEQ ID NO: 35670 - DNA, 25 bp, SARS Virus
cgatacccgtttggacacggtataa

SEQ ID NO: 35671 - DNA, 25 bp, SARS Virus
gatacccgtttggacacggtataac

SEQ ID NO: 35672 - DNA, 25 bp, SARS Virus
atacccgtttgggcacggtataaca

SEQ ID NO: 35673 - DNA, 25 bp, SARS Virus
tacccgtttggagacggtataacaa

SEQ ID NO: 35674 - DNA, 25 bp, SARS Virus
acccgtttggacgcggtataacaat

SEQ ID NO: 35675 - DNA, 25 bp, SARS Virus
cccgtttggacagggtataacaata

SEQ ID NO: 35676 - DNA, 25 bp, SARS Virus
ccgtttggacacggtataacaatac

SEQ ID NO: 35677 - DNA, 25 bp, SARS Virus
cgtttggacacggtataacaatact

SEQ ID NO: 35678 - DNA, 25 bp, SARS Virus
gtttggacacgggataacaatactg

SEQ ID NO: 35679 - DNA, 25 bp, SARS Virus
tttggacacggtgtaacaatactgt

SEQ ID NO: 35680 - DNA, 25 bp, SARS Virus
ttggacacggtagaacaatactgtg

SEQ ID NO: 35681 - DNA, 25 bp, SARS Virus
tggacacggtatgacaatactgtga

SEQ ID NO: 35682 - DNA, 25 bp, SARS Virus
ggacacggtatagcaatactgtgat

SEQ ID NO: 35683 - DNA, 25 bp, SARS Virus
gacacggtataagaatactgtgatt

SEQ ID NO: 35684 - DNA, 25 bp, SARS Virus
acacggtataacgatactgtgatta

SEQ ID NO: 35685 - DNA, 25 bp, SARS Virus
cacggtataacagtactgtgattaa

SEQ ID NO: 35686 - DNA, 25 bp, SARS Virus
acggtataacaagactgtgattaaa

SEQ ID NO: 35687 - DNA, 25 bp, SARS Virus
cggtataacaatgctgtgattaaac

SEQ ID NO: 35688 - DNA, 25 bp, SARS Virus
ggtataacaatagtgtgattaaacg

SEQ ID NO: 35689 - DNA, 25 bp, SARS Virus
gtataacaatacggtgattaaacga

SEQ ID NO: 35690 - DNA, 25 bp, SARS Virus
tataacaatactgtgattaaacgat

SEQ ID NO: 35691 - DNA, 25 bp, SARS Virus
ataacaatactgggattaaacgatc

SEQ ID NO: 35692 - DNA, 25 bp, SARS Virus
taacaatactgtgattaaacgatct

SEQ ID NO: 35693 - DNA, 25 bp, SARS Virus
aacaatactgtggttaaacgatctc

SEQ ID NO: 35694 - DNA, 25 bp, SARS Virus
acaatactgtgagtaaacgatctcc

SEQ ID NO: 35695 - DNA, 25 bp, SARS Virus
caatactgtgatgaaacgatctccc

SEQ ID NO: 35696 - DNA, 25 bp, SARS Virus
aatactgtgattgaacgatctccca

SEQ ID NO: 35697 - DNA, 25 bp, SARS Virus
atactgtgattagacgatctcccaa

SEQ ID NO: 35698 - DNA, 25 bp, SARS Virus
tactgtgattaagcgatctcccaag

SEQ ID NO: 35699 - DNA, 25 bp, SARS Virus
actgtgattaaaggatctcccaaga

SEQ ID NO: 35700 - DNA, 25 bp, SARS Virus
ctgtgattaaacgatctcccaagat

SEQ ID NO: 35701 - DNA, 25 bp, SARS Virus
tgtgattaaacggtctcccaagata

SEQ ID NO: 35702 - DNA, 25 bp, SARS Virus
gtgattaaacgagctcccaagataa

SEQ ID NO: 35703 - DNA, 25 bp, SARS Virus
tgattaaacgatgtcccaagataaa

SEQ ID NO: 35704 - DNA, 25 bp, SARS Virus
gattaaacgatcgcccaagataaag

SEQ ID NO: 35705 - DNA, 25 bp, SARS Virus
attaaacgatctgccaagataaaga

SEQ ID NO: 35706 - DNA, 25 bp, SARS Virus
ttaaacgatctcgcaagataaagaa

SEQ ID NO: 35707 - DNA, 25 bp, SARS Virus
taaacgatctccgaagataaagaat

SEQ ID NO: 35708 - DNA, 25 bp, SARS Virus
aaacgatctcccgagataaagaata

SEQ ID NO: 35709 - DNA, 25 bp, SARS Virus
aacgatctcccaggataaagaatat

SEQ ID NO: 35710 - DNA, 25 bp, SARS Virus
acgatctcccaagataaagaatatc

SEQ ID NO: 35711 - DNA, 25 bp, SARS Virus
cgatctcccaaggtaaagaatatca

SEQ ID NO: 35712 - DNA, 25 bp, SARS Virus
gatctcccaagagaaagaatatcac

SEQ ID NO: 35713 - DNA, 25 bp, SARS Virus
atctcccaagatgaagaatatcact

SEQ ID NO: 35714 - DNA, 25 bp, SARS Virus
tctcccaagatagagaatatcactc

SEQ ID NO: 35715 - DNA, 25 bp, SARS Virus
ctcccaagataaggaatatcactcg

SEQ ID NO: 35716 - DNA, 25 bp, SARS Virus
tcccaagataaagaatatcactcga

SEQ ID NO: 35717 - DNA, 25 bp, SARS Virus
cccaagataaaggatatcactcgaa

SEQ ID NO: 35718 - DNA, 25 bp, SARS Virus
ccaagataaagagtatcactcgaag

SEQ ID NO: 35719 - DNA, 25 bp, SARS Virus
caagataaagaagatcactcgaagc

SEQ ID NO: 35720 - DNA, 25 bp, SARS Virus
aagataaagaatgtcactcgaagca

SEQ ID NO: 35721 - DNA, 25 bp, SARS Virus
agataaagaatagcactcgaagcag

SEQ ID NO: 35722 - DNA, 25 bp, SARS Virus
gataaagaatatgactcgaagcagg

SEQ ID NO: 35723 - DNA, 25 bp, SARS Virus
ataaagaatatcgctcgaagcaggt

SEQ ID NO: 35724 - DNA, 25 bp, SARS Virus
taaagaatatcagtcgaagcaggtc

SEQ ID NO: 35725 - DNA, 25 bp, SARS Virus
aaagaatatcacgcgaagcaggtct

SEQ ID NO: 35726 - DNA, 25 bp, SARS Virus
aagaatatcactggaagcaggtctg

SEQ ID NO: 35727 - DNA, 25 bp, SARS Virus
agaatatcactcgaagcaggtctgt

SEQ ID NO: 35728 - DNA, 25 bp, SARS Virus
gaatatcactcggagcaggtctgtg

SEQ ID NO: 35729 - DNA, 25 bp, SARS Virus
aatatcactcgaggcaggtctgtga

SEQ ID NO: 35730 - DNA, 25 bp, SARS Virus
atatcactcgaagcaggtctgtgag

SEQ ID NO: 35731 - DNA, 25 bp, SARS Virus
tatcactcgaaggaggtctgtgagc

SEQ ID NO: 35732 - DNA, 25 bp, SARS Virus
atcactcgaagcgggtctgtgagca

SEQ ID NO: 35733 - DNA, 25 bp, SARS Virus
tcactcgaagcaggtctgtgagcaa

SEQ ID NO: 35734 - DNA, 25 bp, SARS Virus
cactcgaagcaggtctgtgagcaat

SEQ ID NO: 35735 - DNA, 25 bp, SARS Virus
actcgaagcagggctgtgagcaata

SEQ ID NO: 35736 - DNA, 25 bp, SARS Virus
ctcgaagcaggtgtgtgagcaatac

SEQ ID NO: 35737 - DNA, 25 bp, SARS Virus
tcgaagcaggtcggtgagcaataca

SEQ ID NO: 35738 - DNA, 25 bp, SARS Virus
cgaagcaggtctgtgagcaatacac

SEQ ID NO: 35739 - DNA, 25 bp, SARS Virus
gaagcaggtctgggagcaatacacg

SEQ ID NO: 35740 - DNA, 25 bp, SARS Virus
aagcaggtctgtgagcaatacacga

SEQ ID NO: 35741 - DNA, 25 bp, SARS Virus
agcaggtctgtgggcaatacacgaa

SEQ ID NO: 35742 - DNA, 25 bp, SARS Virus
gcaggtctgtgagcaatacacgaat

SEQ ID NO: 35743 - DNA, 25 bp, SARS Virus
caggtctgtgaggaatacacgaata

SEQ ID NO: 35744 - DNA, 25 bp, SARS Virus
aggtctgtgagcgatacacgaatac

SEQ ID NO: 35745 - DNA, 25 bp, SARS Virus
ggtctgtgagcagtacacgaatacc

SEQ ID NO: 35746 - DNA, 25 bp, SARS Virus
gtctgtgagcaagacacgaatacct

SEQ ID NO: 35747 - DNA, 25 bp, SARS Virus
tctgtgagcaatgcacgaataccta

SEQ ID NO: 35748 - DNA, 25 bp, SARS Virus
ctgtgagcaatagacgaatacctac

SEQ ID NO: 35749 - DNA, 25 bp, SARS Virus
tgtgagcaatacgcgaatacctacc

SEQ ID NO: 35750 - DNA, 25 bp, SARS Virus
gtgagcaatacaggaatacctacca

SEQ ID NO: 35751 - DNA, 25 bp, SARS Virus
tgagcaatacacgaatacctaccaa

SEQ ID NO: 35752 - DNA, 25 bp, SARS Virus
gagcaatacacggatacctaccaag

SEQ ID NO: 35753 - DNA, 25 bp, SARS Virus
caatacggtcatttatgtaacagtt

SEQ ID NO: 35754 - DNA, 25 bp, SARS Virus
aatacggtcatgtatgtaacagtta

SEQ ID NO: 35755 - DNA, 25 bp, SARS Virus
atacggtcatgtttgtaacagttag

SEQ ID NO: 35756 - DNA, 25 bp, SARS Virus
tacggtcatgtatgtaacagttagg

SEQ ID NO: 35757 - DNA, 25 bp, SARS Virus
acggtcatgtatttaacagttaggt

SEQ ID NO: 35758 - DNA, 25 bp, SARS Virus
cggtcatgtatgtaacagttaggta

SEQ ID NO: 35759 - DNA, 25 bp, SARS Virus
ggtcatgtatgttacagttaggtac

SEQ ID NO: 35760 - DNA, 25 bp, SARS Virus
gtcatgtatgtatcagttaggtact

SEQ ID NO: 35761 - DNA, 25 bp, SARS Virus
tcatgtatgtaatagttaggtacta

SEQ ID NO: 35762 - DNA, 25 bp, SARS Virus
catgtatgtaactgttaggtactac

SEQ ID NO: 35763 - DNA, 25 bp, SARS Virus
atgtatgtaacatttaggtactacc

SEQ ID NO: 35764 - DNA, 25 bp, SARS Virus
tgtatgtaacagttaggtactacca

SEQ ID NO: 35765 - DNA, 25 bp, SARS Virus
gtatgtaacagttaggtactaccaa

SEQ ID NO: 35766 - DNA, 25 bp, SARS Virus
tatgtaacagtttggtactaccaat

SEQ ID NO: 35767 - DNA, 25 bp, SARS Virus
atgtaacagttatgtactaccaatg

SEQ ID NO: 35768 - DNA, 25 bp, SARS Virus
tgtaacagttagttactaccaatgt

SEQ ID NO: 35769 - DNA, 25 bp, SARS Virus
gtaacagttaggtactaccaatgtg

SEQ ID NO: 35770 - DNA, 25 bp, SARS Virus
taacagttaggttctaccaatgtgt

SEQ ID NO: 35771 - DNA, 25 bp, SARS Virus
aacagttaggtattaccaatgtgtt

SEQ ID NO: 35772 - DNA, 25 bp, SARS Virus
acagttaggtactaccaatgtgttt

SEQ ID NO: 35773 - DNA, 25 bp, SARS Virus
cagttaggtacttccaatgtgttta

SEQ ID NO: 35774 - DNA, 25 bp, SARS Virus
agttaggtactatcaatgtgtttac

SEQ ID NO: 35775 - DNA, 25 bp, SARS Virus
gttaggtactactaatgtgtttact

SEQ ID NO: 35776 - DNA, 25 bp, SARS Virus
ttaggtactacctatgtgtttactt

SEQ ID NO: 35777 - DNA, 25 bp, SARS Virus
taggtactaccattgtgtttacttt

SEQ ID NO: 35778 - DNA, 25 bp, SARS Virus
aggtactaccaatgtgtttacttta

SEQ ID NO: 35779 - DNA, 25 bp, SARS Virus
ggtactaccaatttgtttactttag

SEQ ID NO: 35780 - DNA, 25 bp, SARS Virus
gtactaccaatgtgtttactttagt

SEQ ID NO: 35781 - DNA, 25 bp, SARS Virus
tactaccaatgtttttactttagta

SEQ ID NO: 35782 - DNA, 25 bp, SARS Virus
actaccaatgtgtttactttagtaa

SEQ ID NO: 35783 - DNA, 25 bp, SARS Virus
ctaccaatgtgtttactttagtaac

SEQ ID NO: 35784 - DNA, 25 bp, SARS Virus
taccaatgtgtttactttagtaacc

SEQ ID NO: 35785 - DNA, 25 bp, SARS Virus
accaatgtgttttctttagtaacca

SEQ ID NO: 35786 - DNA, 25 bp, SARS Virus
ccaatgtgtttattttagtaaccaa

SEQ ID NO: 35787 - DNA, 25 bp, SARS Virus
caatgtgtttactttagtaaccaat

SEQ ID NO: 35788 - DNA, 25 bp, SARS Virus
aatgtgtttactttagtaaccaatg

SEQ ID NO: 35789 - DNA, 25 bp, SARS Virus
atgtgtttactttagtaaccaatgt

SEQ ID NO: 35790 - DNA, 25 bp, SARS Virus
tgtgtttacttttgtaaccaatgtt

SEQ ID NO: 35791 - DNA, 25 bp, SARS Virus
gtgtttactttattaaccaatgttt

SEQ ID NO: 35792 - DNA, 25 bp, SARS Virus
tgtttactttagtaaccaatgtttc

SEQ ID NO: 35793 - DNA, 25 bp, SARS Virus
gtttactttagttaccaatgtttcg

SEQ ID NO: 35794 - DNA, 25 bp, SARS Virus
tttactttagtatccaatgtttcgg

SEQ ID NO: 35795 - DNA, 25 bp, SARS Virus
ttactttagtaatcaatgtttcggt

SEQ ID NO: 35796 - DNA, 25 bp, SARS Virus
tactttagtaactaatgtttcggta

SEQ ID NO: 35797 - DNA, 25 bp, SARS Virus
actttagtaacctatgtttcggtaa

SEQ ID NO: 35798 - DNA, 25 bp, SARS Virus
ctttagtaaccattgtttcggtaag

SEQ ID NO: 35799 - DNA, 25 bp, SARS Virus
tttagtaaccaatgtttcggtaagt

SEQ ID NO: 35800 - DNA, 25 bp, SARS Virus
ttagtaaccaatttttcggtaagtc

SEQ ID NO: 35801 - DNA, 25 bp, SARS Virus
tagtaaccaatgtttcggtaagtcc

SEQ ID NO: 35802 - DNA, 25 bp, SARS Virus
agtaaccaatgtttcggtaagtcct

SEQ ID NO: 35803 - DNA, 25 bp, SARS Virus
gtaaccaatgtttcggtaagtccta

SEQ ID NO: 35804 - DNA, 25 bp, SARS Virus
taaccaatgttttggtaagtcctac

SEQ ID NO: 35805 - DNA, 25 bp, SARS Virus
aaccaatgtttctgtaagtcctacc

SEQ ID NO: 35806 - DNA, 25 bp, SARS Virus
accaatgtttcgttaagtcctacca

SEQ ID NO: 35807 - DNA, 25 bp, SARS Virus
ccaatgtttcggtaagtcctaccac

SEQ ID NO: 35808 - DNA, 25 bp, SARS Virus
caatgtttcggttagtcctaccaca

SEQ ID NO: 35809 - DNA, 25 bp, SARS Virus
aatgtttcggtatgtcctaccacag

SEQ ID NO: 35810 - DNA, 25 bp, SARS Virus
atgtttcggtaattcctaccacagt

SEQ ID NO: 35811 - DNA, 25 bp, SARS Virus
tgtttcggtaagtcctaccacagtg

SEQ ID NO: 35812 - DNA, 25 bp, SARS Virus
gtttcggtaagttctaccacagtga

SEQ ID NO: 35813 - DNA, 25 bp, SARS Virus
tttcggtaagtcttaccacagtgag

SEQ ID NO: 35814 - DNA, 25 bp, SARS Virus
ttcggtaagtcctaccacagtgagc

SEQ ID NO: 35815 - DNA, 25 bp, SARS Virus
tcggtaagtccttccacagtgagca

SEQ ID NO: 35816 - DNA, 25 bp, SARS Virus
cggtaagtcctatcacagtgagcac

SEQ ID NO: 35817 - DNA, 25 bp, SARS Virus
ggtaagtcctactacagtgagcact

SEQ ID NO: 35818 - DNA, 25 bp, SARS Virus
gtaagtcctacctcagtgagcactg

SEQ ID NO: 35819 - DNA, 25 bp, SARS Virus
taagtcctaccatagtgagcactgt

SEQ ID NO: 35820 - DNA, 25 bp, SARS Virus
aagtcctaccactgtgagcactgta

SEQ ID NO: 35821 - DNA, 25 bp, SARS Virus
agtcctaccacattgagcactgtag

SEQ ID NO: 35822 - DNA, 25 bp, SARS Virus
gtcctaccacagtgagcactgtagt

SEQ ID NO: 35823 - DNA, 25 bp, SARS Virus
tcctaccacagttagcactgtagta

SEQ ID NO: 35824 - DNA, 25 bp, SARS Virus
cctaccacagtgtgcactgtagtaa

SEQ ID NO: 35825 - DNA, 25 bp, SARS Virus
ctaccacagtgatcactgtagtaaa

SEQ ID NO: 35826 - DNA, 25 bp, SARS Virus
taccacagtgagtactgtagtaaag

SEQ ID NO: 35827 - DNA, 25 bp, SARS Virus
accacagtgagctctgtagtaaaga

SEQ ID NO: 35828 - DNA, 25 bp, SARS Virus
ccacagtgagcattgtagtaaagat

SEQ ID NO: 35829 - DNA, 25 bp, SARS Virus
cacagtgagcactgtagtaaagatg

SEQ ID NO: 35830 - DNA, 25 bp, SARS Virus
acagtgagcactttagtaaagatga

SEQ ID NO: 35831 - DNA, 25 bp, SARS Virus
cagtgagcactgtagtaaagatgac

SEQ ID NO: 35832 - DNA, 25 bp, SARS Virus
agtgagcactgttgtaaagatgact

SEQ ID NO: 35833 - DNA, 25 bp, SARS Virus
gtgagcactgtattaaagatgacta

SEQ ID NO: 35834 - DNA, 25 bp, SARS Virus
tgagcactgtagtaaagatgactac

SEQ ID NO: 35835 - DNA, 25 bp, SARS Virus
gagcactgtagttaagatgactact

SEQ ID NO: 35836 - DNA, 25 bp, SARS Virus
agcactgtagtatagatgactacta

SEQ ID NO: 35837 - DNA, 25 bp, SARS Virus
gcactgtagtaatgatgactactaa

SEQ ID NO: 35838 - DNA, 25 bp, SARS Virus
cactgtagtaaatatgactactaac

SEQ ID NO: 35839 - DNA, 25 bp, SARS Virus
actgtagtaaagttgactactaaca

SEQ ID NO: 35840 - DNA, 25 bp, SARS Virus
ctgtagtaaagatgactactaacaa

SEQ ID NO: 35841 - DNA, 25 bp, SARS Virus
tgtagtaaagattactactaacaaa

SEQ ID NO: 35842 - DNA, 25 bp, SARS Virus
gtagtaaagatgtctactaacaaaa

SEQ ID NO: 35843 - DNA, 25 bp, SARS Virus
tagtaaagatgattactaacaaaac

SEQ ID NO: 35844 - DNA, 25 bp, SARS Virus
agtaaagatgactactaacaaaacg

SEQ ID NO: 35845 - DNA, 25 bp, SARS Virus
gtaaagatgacttctaacaaaacgt

SEQ ID NO: 35846 - DNA, 25 bp, SARS Virus
taaagatgactattaacaaaacgtt

SEQ ID NO: 35847 - DNA, 25 bp, SARS Virus
aaagatgactactaacaaaacgttt

SEQ ID NO: 35848 - DNA, 25 bp, SARS Virus
aagatgactacttacaaaacgttta

SEQ ID NO: 35849 - DNA, 25 bp, SARS Virus
agatgactactatcaaaacgtttat

SEQ ID NO: 35850 - DNA, 25 bp, SARS Virus
gatgactactaataaaacgtttatt

SEQ ID NO: 35851 - DNA, 25 bp, SARS Virus
atgactactaactaaacgtttattt

SEQ ID NO: 35852 - DNA, 25 bp, SARS Virus
tgactactaacataacgtttatttg

SEQ ID NO: 35853 - DNA, 25 bp, SARS Virus
gactactaacaatacgtttatttgt

SEQ ID NO: 35854 - DNA, 25 bp, SARS Virus
actactaacaaatcgtttatttgta

SEQ ID NO: 35855 - DNA, 25 bp, SARS Virus
ctactaacaaaatgtttatttgtac

SEQ ID NO: 35856 - DNA, 25 bp, SARS Virus
tactaacaaaacttttatttgtacg

SEQ ID NO: 35857 - DNA, 25 bp, SARS Virus
actaacaaaacgtttatttgtacga

SEQ ID NO: 35858 - DNA, 25 bp, SARS Virus
ctaacaaaacgtttatttgtacgac

SEQ ID NO: 35859 - DNA, 25 bp, SARS Virus
taacaaaacgtttatttgtacgacc

SEQ ID NO: 35860 - DNA, 25 bp, SARS Virus
aacaaaacgtttttttgtacgacca

SEQ ID NO: 35861 - DNA, 25 bp, SARS Virus
acaaaacgtttatttgtacgaccaa

SEQ ID NO: 35862 - DNA, 25 bp, SARS Virus
caaaacgtttatttgtacgaccaaa

SEQ ID NO: 35863 - DNA, 25 bp, SARS Virus
aaaacgtttatttgtacgaccaaaa

SEQ ID NO: 35864 - DNA, 25 bp, SARS Virus
aaacgtttatttttacgaccaaaac

SEQ ID NO: 35865 - DNA, 25 bp, SARS Virus
aacgtttatttgtacgaccaaaact

SEQ ID NO: 35866 - DNA, 25 bp, SARS Virus
acgtttatttgttcgaccaaaactg

SEQ ID NO: 35867 - DNA, 25 bp, SARS Virus
cgtttatttgtatgaccaaaactgc

SEQ ID NO: 35868 - DNA, 25 bp, SARS Virus
gtttatttgtactaccaaaactgcg

SEQ ID NO: 35869 - DNA, 25 bp, SARS Virus
tttatttgtacgtccaaaactgcgt

SEQ ID NO: 35870 - DNA, 25 bp, SARS Virus
ttatttgtacgatcaaaactgcgta

SEQ ID NO: 35871 - DNA, 25 bp, SARS Virus
tatttgtacgactaaaactgcgtac

SEQ ID NO: 35872 - DNA, 25 bp, SARS Virus
atttgtacgacctaaactgcgtacc

SEQ ID NO: 35873 - DNA, 25 bp, SARS Virus
tttgtacgaccataactgcgtacca

SEQ ID NO: 35874 - DNA, 25 bp, SARS Virus
ttgtacgaccaatactgcgtaccaa

SEQ ID NO: 35875 - DNA, 25 bp, SARS Virus
tgtacgaccaaatctgcgtaccaaa

SEQ ID NO: 35876 - DNA, 25 bp, SARS Virus
gtacgaccaaaattgcgtaccaaat

SEQ ID NO: 35877 - DNA, 25 bp, SARS Virus
tacgaccaaaactgcgtaccaaatc

SEQ ID NO: 35878 - DNA, 25 bp, SARS Virus
acgaccaaaacttcgtaccaaatcg

SEQ ID NO: 35879 - DNA, 25 bp, SARS Virus
cgaccaaaactgtgtaccaaatcgg

SEQ ID NO: 35880 - DNA, 25 bp, SARS Virus
gaccaaaactgcttaccaaatcggt

SEQ ID NO: 35881 - DNA, 25 bp, SARS Virus
accaaaactgcgtaccaaatcggtc

SEQ ID NO: 35882 - DNA, 25 bp, SARS Virus
ccaaaactgcgttccaaatcggtcg

SEQ ID NO: 35883 - DNA, 25 bp, SARS Virus
caaaactgcgtatcaaatcggtcgc

SEQ ID NO: 35884 - DNA, 25 bp, SARS Virus
aaaactgcgtactaaatcggtcgca

SEQ ID NO: 35885 - DNA, 25 bp, SARS Virus
aaactgcgtacctaatcggtcgcac

SEQ ID NO: 35886 - DNA, 25 bp, SARS Virus
aactgcgtaccatatcggtcgcacc

SEQ ID NO: 35887 - DNA, 25 bp, SARS Virus
actgcgtaccaattcggtcgcacca

SEQ ID NO: 35888 - DNA, 25 bp, SARS Virus
ctgcgtaccaaatcggtcgcaccac

SEQ ID NO: 35889 - DNA, 25 bp, SARS Virus
tgcgtaccaaattggtcgcaccacc

SEQ ID NO: 35890 - DNA, 25 bp, SARS Virus
gcgtaccaaatctgtcgcaccacca

SEQ ID NO: 35891 - DNA, 25 bp, SARS Virus
cgtaccaaatcgttcgcaccaccaa

SEQ ID NO: 35892 - DNA, 25 bp, SARS Virus
gtaccaaatcggtcgcaccaccaag

SEQ ID NO: 35893 - DNA, 25 bp, SARS Virus
taccaaatcggttgcaccaccaagt

SEQ ID NO: 35894 - DNA, 25 bp, SARS Virus
accaaatcggtctcaccaccaagta

SEQ ID NO: 35895 - DNA, 25 bp, SARS Virus
ccaaatcggtcgtaccaccaagtat

SEQ ID NO: 35896 - DNA, 25 bp, SARS Virus
caaatcggtcgctccaccaagtatg

SEQ ID NO: 35897 - DNA, 25 bp, SARS Virus
aaatcggtcgcatcaccaagtatgt

SEQ ID NO: 35898 - DNA, 25 bp, SARS Virus
aatcggtcgcactaccaagtatgtt

SEQ ID NO: 35899 - DNA, 25 bp, SARS Virus
atcggtcgcacctccaagtatgttt

SEQ ID NO: 35900 - DNA, 25 bp, SARS Virus
tcggtcgcaccatcaagtatgtttt

SEQ ID NO: 35901 - DNA, 25 bp, SARS Virus
cggtcgcaccactaagtatgttttt

SEQ ID NO: 35902 - DNA, 25 bp, SARS Virus
ggtcgcaccacctagtatgttttta

SEQ ID NO: 35903 - DNA, 25 bp, SARS Virus
gtcgcaccaccatgtatgtttttac

SEQ ID NO: 35904 - DNA, 25 bp, SARS Virus
tcgcaccaccaattatgtttttact

SEQ ID NO: 35905 - DNA, 25 bp, SARS Virus
cgcaccaccaagtatgtttttactg

SEQ ID NO: 35906 - DNA, 25 bp, SARS Virus
gcaccaccaagtttgtttttactgt

SEQ ID NO: 35907 - DNA, 25 bp, SARS Virus
caccaccaagtatgtttttactgtt

SEQ ID NO: 35908 - DNA, 25 bp, SARS Virus
accaccaagtatttttttactgttt

SEQ ID NO: 35909 - DNA, 25 bp, SARS Virus
ccaccaagtatgtttttactgtttt

SEQ ID NO: 35910 - DNA, 25 bp, SARS Virus
caccaagtatgtttttactgttttc

SEQ ID NO: 35911 - DNA, 25 bp, SARS Virus
accaagtatgtttttactgttttcg

SEQ ID NO: 35912 - DNA, 25 bp, SARS Virus
ccaagtatgtttttactgttttcga

SEQ ID NO: 35913 - DNA, 25 bp, SARS Virus
caagtatgtttttactgttttcgac

SEQ ID NO: 35914 - DNA, 25 bp, SARS Virus
aagtatgttttttctgttttcgacg

SEQ ID NO: 35915 - DNA, 25 bp, SARS Virus
agtatgtttttattgttttcgacgg

SEQ ID NO: 35916 - DNA, 25 bp, SARS Virus
gtatgtttttactgttttcgacggg

SEQ ID NO: 35917 - DNA, 25 bp, SARS Virus
tatgtttttacttttttcgacggga

SEQ ID NO: 35918 - DNA, 25 bp, SARS Virus
atgtttttactgttttcgacgggac

SEQ ID NO: 35919 - DNA, 25 bp, SARS Virus
tgtttttactgttttcgacgggaca

SEQ ID NO: 35920 - DNA, 25 bp, SARS Virus
gtttttactgttttcgacgggacat

SEQ ID NO: 35921 - DNA, 25 bp, SARS Virus
tttttactgttttcgacgggacatc

SEQ ID NO: 35922 - DNA, 25 bp, SARS Virus
ttttactgtttttgacgggacatca

SEQ ID NO: 35923 - DNA, 25 bp, SARS Virus
tttactgttttctacgggacatcat

SEQ ID NO: 35924 - DNA, 25 bp, SARS Virus
ttactgttttcgtcgggacatcatc

SEQ ID NO: 35925 - DNA, 25 bp, SARS Virus
tactgttttcgatgggacatcatcg

SEQ ID NO: 35926 - DNA, 25 bp, SARS Virus
actgttttcgactggacatcatcga

SEQ ID NO: 35927 - DNA, 25 bp, SARS Virus
ctgttttcgacgtgacatcatcgac

SEQ ID NO: 35928 - DNA, 25 bp, SARS Virus
tgttttcgacggtacatcatcgacg

SEQ ID NO: 35929 - DNA, 25 bp, SARS Virus
gttttcgacgggtcatcatcgacga

SEQ ID NO: 35930 - DNA, 25 bp, SARS Virus
ttttcgacgggatatcatcgacgat

SEQ ID NO: 35931 - DNA, 25 bp, SARS Virus
tttcgacgggacttcatcgacgata

SEQ ID NO: 35932 - DNA, 25 bp, SARS Virus
ttcgacgggacatcatcgacgatag

SEQ ID NO: 35933 - DNA, 25 bp, SARS Virus
tcgacgggacattatcgacgatagt

SEQ ID NO: 35934 - DNA, 25 bp, SARS Virus
cgacgggacatcttcgacgatagta

SEQ ID NO: 35935 - DNA, 25 bp, SARS Virus
gacgggacatcatcgacgatagtaa

SEQ ID NO: 35936 - DNA, 25 bp, SARS Virus
acgggacatcattgacgatagtaat

SEQ ID NO: 35937 - DNA, 25 bp, SARS Virus
cgggacatcatctacgatagtaatg

SEQ ID NO: 35938 - DNA, 25 bp, SARS Virus
gggacatcatcgtcgatagtaatgt

SEQ ID NO: 35939 - DNA, 25 bp, SARS Virus
ggacatcatcgatgatagtaatgtt

SEQ ID NO: 35940 - DNA, 25 bp, SARS Virus
gacatcatcgactatagtaatgttc

SEQ ID NO: 35941 - DNA, 25 bp, SARS Virus
acatcatcgacgttagtaatgttct

SEQ ID NO: 35942 - DNA, 25 bp, SARS Virus
catcatcgacgatagtaatgttctc

SEQ ID NO: 35943 - DNA, 25 bp, SARS Virus
atcatcgacgattgtaatgttctct

SEQ ID NO: 35944 - DNA, 25 bp, SARS Virus
tcatcgacgatattaatgttctctc

SEQ ID NO: 35945 - DNA, 25 bp, SARS Virus
catcgacgatagtaatgttctctct

SEQ ID NO: 35946 - DNA, 25 bp, SARS Virus
atcgacgatagttatgttctctcta

SEQ ID NO: 35947 - DNA, 25 bp, SARS Virus
tcgacgatagtattgttctctctaa

SEQ ID NO: 35948 - DNA, 25 bp, SARS Virus
cgacgatagtaatgttctctctaac

SEQ ID NO: 35949 - DNA, 25 bp, SARS Virus
gacgatagtaattttctctctaacc

SEQ ID NO: 35950 - DNA, 25 bp, SARS Virus
acgatagtaatgttctctctaacca

SEQ ID NO: 35951 - DNA, 25 bp, SARS Virus
cgatagtaatgttctctctaaccaa

SEQ ID NO: 35952 - DNA, 25 bp, SARS Virus
gatagtaatgttttctctaaccaaa

SEQ ID NO: 35953 - DNA, 25 bp, SARS Virus
atagtaatgttctctctaaccaaag

SEQ ID NO: 35954 - DNA, 25 bp, SARS Virus
tagtaatgttctttctaaccaaagt

SEQ ID NO: 35955 - DNA, 25 bp, SARS Virus
agtaatgttctctctaaccaaagta

SEQ ID NO: 35956 - DNA, 25 bp, SARS Virus
gtaatgttctctttaaccaaagtat

SEQ ID NO: 35957 - DNA, 25 bp, SARS Virus
taatgttctctctaaccaaagtatc

SEQ ID NO: 35958 - DNA, 25 bp, SARS Virus
aatgttctctcttaccaaagtatca

SEQ ID NO: 35959 - DNA, 25 bp, SARS Virus
atgttctctctatccaaagtatcac

SEQ ID NO: 35960 - DNA, 25 bp, SARS Virus
tgttctctctaatcaaagtatcacg

SEQ ID NO: 35961 - DNA, 25 bp, SARS Virus
gttctctctaactaaagtatcacgg

SEQ ID NO: 35962 - DNA, 25 bp, SARS Virus
ttctctctaacctaagtatcacgga

SEQ ID NO: 35963 - DNA, 25 bp, SARS Virus
tctctctaaccatagtatcacggac

SEQ ID NO: 35964 - DNA, 25 bp, SARS Virus
ctctctaaccaatgtatcacggacc

SEQ ID NO: 35965 - DNA, 25 bp, SARS Virus
tctctaaccaaattatcacggaccg

SEQ ID NO: 35966 - DNA, 25 bp, SARS Virus
ctctaaccaaagtatcacggaccga

SEQ ID NO: 35967 - DNA, 25 bp, SARS Virus
tctaaccaaagtttcacggaccgaa

SEQ ID NO: 35968 - DNA, 25 bp, SARS Virus
ctaaccaaagtatcacggaccgaat

SEQ ID NO: 35969 - DNA, 25 bp, SARS Virus
taaccaaagtattacggaccgaatg

SEQ ID NO: 35970 - DNA, 25 bp, SARS Virus
aaccaaagtatctcggaccgaatgg

SEQ ID NO: 35971 - DNA, 25 bp, SARS Virus
accaaagtatcatggaccgaatggc

SEQ ID NO: 35972 - DNA, 25 bp, SARS Virus
ccaaagtatcactgaccgaatggcc

SEQ ID NO: 35973 - DNA, 25 bp, SARS Virus
caaagtatcacgtaccgaatggccc

SEQ ID NO: 35974 - DNA, 25 bp, SARS Virus
aaagtatcacggtccgaatggccca

SEQ ID NO: 35975 - DNA, 25 bp, SARS Virus
aagtatcacggatcgaatggcccat

SEQ ID NO: 35976 - DNA, 25 bp, SARS Virus
agtatcacggactgaatggcccatg

SEQ ID NO: 35977 - DNA, 25 bp, SARS Virus
gtatcacggacctaatggcccatga

SEQ ID NO: 35978 - DNA, 25 bp, SARS Virus
tatcacggaccgtatggcccatgac

SEQ ID NO: 35979 - DNA, 25 bp, SARS Virus
atcacggaccgattggcccatgaca

SEQ ID NO: 35980 - DNA, 25 bp, SARS Virus
tcacggaccgaatggcccatgacac

SEQ ID NO: 35981 - DNA, 25 bp, SARS Virus
cacggaccgaattgcccatgacacg

SEQ ID NO: 35982 - DNA, 25 bp, SARS Virus
acggaccgaatgtcccatgacacga

SEQ ID NO: 35983 - DNA, 25 bp, SARS Virus
cggaccgaatggtccatgacacgac

SEQ ID NO: 35984 - DNA, 25 bp, SARS Virus
ggaccgaatggctcatgacacgact

SEQ ID NO: 35985 - DNA, 25 bp, SARS Virus
gaccgaatggcctatgacacgactc

SEQ ID NO: 35986 - DNA, 25 bp, SARS Virus
accgaatggcccttgacacgactct

SEQ ID NO: 35987 - DNA, 25 bp, SARS Virus
ccgaatggcccatgacacgactctc

SEQ ID NO: 35988 - DNA, 25 bp, SARS Virus
cgaatggcccattacacgactctcg

SEQ ID NO: 35989 - DNA, 25 bp, SARS Virus
gaatggcccatgtcacgactctcgt

SEQ ID NO: 35990 - DNA, 25 bp, SARS Virus
aatggcccatgatacgactctcgtt

SEQ ID NO: 35991 - DNA, 25 bp, SARS Virus
atggcccatgactcgactctcgtta

SEQ ID NO: 35992 - DNA, 25 bp, SARS Virus
tggcccatgacatgactctcgttag

SEQ ID NO: 35993 - DNA, 25 bp, SARS Virus
ggcccatgacactactctcgttagt

SEQ ID NO: 35994 - DNA, 25 bp, SARS Virus
gcccatgacacgtctctcgttagtt

SEQ ID NO: 35995 - DNA, 25 bp, SARS Virus
cccatgacacgattctcgttagtta

SEQ ID NO: 35996 - DNA, 25 bp, SARS Virus
ccatgacacgactctcgttagttac

SEQ ID NO: 35997 - DNA, 25 bp, SARS Virus
catgacacgactttcgttagttacc

SEQ ID NO: 35998 - DNA, 25 bp, SARS Virus
atgacacgactctcgttagttacca

SEQ ID NO: 35999 - DNA, 25 bp, SARS Virus
tgacacgactcttgttagttaccac

SEQ ID NO: 36000 - DNA, 25 bp, SARS Virus
gacacgactctctttagttaccact

SEQ ID NO: 36001 - DNA, 25 bp, SARS Virus
acacgactctcgttagttaccactg

SEQ ID NO: 36002 - DNA, 25 bp, SARS Virus
cacgactctcgttagttaccactga

SEQ ID NO: 36003 - DNA, 25 bp, SARS Virus
acgactctcgtttgttaccactgaa

SEQ ID NO: 36004 - DNA, 25 bp, SARS Virus
cgactctcgttatttaccactgaag

SEQ ID NO: 36005 - DNA, 25 bp, SARS Virus
gactctcgttagttaccactgaaga

SEQ ID NO: 36006 - DNA, 25 bp, SARS Virus
actctcgttagttaccactgaagaa

SEQ ID NO: 36007 - DNA, 25 bp, SARS Virus
ctctcgttagtttccactgaagaac

SEQ ID NO: 36008 - DNA, 25 bp, SARS Virus
tctcgttagttatcactgaagaacg

SEQ ID NO: 36009 - DNA, 25 bp, SARS Virus
ctcgttagttactactgaagaacgt

SEQ ID NO: 36010 - DNA, 25 bp, SARS Virus
tcgttagttacctctgaagaacgta

SEQ ID NO: 36011 - DNA, 25 bp, SARS Virus
cgttagttaccattgaagaacgtaa

SEQ ID NO: 36012 - DNA, 25 bp, SARS Virus
gttagttaccactgaagaacgtaaa

SEQ ID NO: 36013 - DNA, 25 bp, SARS Virus
ttagttaccacttaagaacgtaaaa

SEQ ID NO: 36014 - DNA, 25 bp, SARS Virus
tagttaccactgtagaacgtaaaag

SEQ ID NO: 36015 - DNA, 25 bp, SARS Virus
agttaccactgatgaacgtaaaaga

SEQ ID NO: 36016 - DNA, 25 bp, SARS Virus
gttaccactgaataacgtaaaagat

SEQ ID NO: 36017 - DNA, 25 bp, SARS Virus
ttaccactgaagtacgtaaaagatg

SEQ ID NO: 36018 - DNA, 25 bp, SARS Virus
taccactgaagatcgtaaaagatgg

SEQ ID NO: 36019 - DNA, 25 bp, SARS Virus
accactgaagaatgtaaaagatgga

SEQ ID NO: 36020 - DNA, 25 bp, SARS Virus
ccactgaagaacttaaaagatggag

SEQ ID NO: 36021 - DNA, 25 bp, SARS Virus
cactgaagaacgtaaaagatggagc

SEQ ID NO: 36022 - DNA, 25 bp, SARS Virus
actgaagaacgttaaagatggagca

SEQ ID NO: 36023 - DNA, 25 bp, SARS Virus
ctgaagaacgtataagatggagcac

SEQ ID NO: 36024 - DNA, 25 bp, SARS Virus
tgaagaacgtaatagatggagcaca

SEQ ID NO: 36025 - DNA, 25 bp, SARS Virus
gaagaacgtaaatgatggagcacaa

SEQ ID NO: 36026 - DNA, 25 bp, SARS Virus
aagaacgtaaaatatggagcacaaa

SEQ ID NO: 36027 - DNA, 25 bp, SARS Virus
agaacgtaaaagttggagcacaaaa

SEQ ID NO: 36028 - DNA, 25 bp, SARS Virus
gaacgtaaaagatggagcacaaaaa

SEQ ID NO: 36029 - DNA, 25 bp, SARS Virus
aacgtaaaagattgagcacaaaaat

SEQ ID NO: 36030 - DNA, 25 bp, SARS Virus
acgtaaaagatgtagcacaaaaatc

SEQ ID NO: 36031 - DNA, 25 bp, SARS Virus
cgtaaaagatggtgcacaaaaatca

SEQ ID NO: 36032 - DNA, 25 bp, SARS Virus
gtaaaagatggatcacaaaaatcac

SEQ ID NO: 36033 - DNA, 25 bp, SARS Virus
taaaagatggagtacaaaaatcacg

SEQ ID NO: 36034 - DNA, 25 bp, SARS Virus
aaaagatggagctcaaaaatcacga

SEQ ID NO: 36035 - DNA, 25 bp, SARS Virus
aaagatggagcataaaaatcacgac

SEQ ID NO: 36036 - DNA, 25 bp, SARS Virus
aagatggagcactaaaatcacgaca

SEQ ID NO: 36037 - DNA, 25 bp, SARS Virus
agatggagcacataaatcacgacaa

SEQ ID NO: 36038 - DNA, 25 bp, SARS Virus
gatggagcacaataatcacgacaac

SEQ ID NO: 36039 - DNA, 25 bp, SARS Virus
atggagcacaaatatcacgacaacc

SEQ ID NO: 36040 - DNA, 25 bp, SARS Virus
tggagcacaaaattcacgacaaccg

SEQ ID NO: 36041 - DNA, 25 bp, SARS Virus
ggagcacaaaaatcacgacaaccgt

SEQ ID NO: 36042 - DNA, 25 bp, SARS Virus
gagcacaaaaattacgacaaccgtt

SEQ ID NO: 36043 - DNA, 25 bp, SARS Virus
agcacaaaaatctcgacaaccgttg

SEQ ID NO: 36044 - DNA, 25 bp, SARS Virus
gcacaaaaatcatgacaaccgttgt

SEQ ID NO: 36045 - DNA, 25 bp, SARS Virus
cacaaaaatcactacaaccgttgta

SEQ ID NO: 36046 - DNA, 25 bp, SARS Virus
acaaaaatcacgtcaaccgttgtaa

SEQ ID NO: 36047 - DNA, 25 bp, SARS Virus
caaaaatcacgataaccgttgtaaa

SEQ ID NO: 36048 - DNA, 25 bp, SARS Virus
aaaaatcacgactaccgttgtaaac

SEQ ID NO: 36049 - DNA, 25 bp, SARS Virus
aaaatcacgacatccgttgtaaacg

SEQ ID NO: 36050 - DNA, 25 bp, SARS Virus
aaatcacgacaatcgttgtaaacga

SEQ ID NO: 36051 - DNA, 25 bp, SARS Virus
aatcacgacaactgttgtaaacgat

SEQ ID NO: 36052 - DNA, 25 bp, SARS Virus
atcacgacaacctttgtaaacgatg

SEQ ID NO: 36053 - DNA, 25 bp, SARS Virus
tcacgacaaccgttgtaaacgatgt

SEQ ID NO: 36054 - DNA, 25 bp, SARS Virus
cacgacaaccgttgtaaacgatgtg

SEQ ID NO: 36055 - DNA, 25 bp, SARS Virus
acgacaaccgttttaaacgatgtgt

SEQ ID NO: 36056 - DNA, 25 bp, SARS Virus
cgacaaccgttgtaaacgatgtgtg

SEQ ID NO: 36057 - DNA, 25 bp, SARS Virus
gacaaccgttgttaacgatgtgtgg

SEQ ID NO: 36058 - DNA, 25 bp, SARS Virus
acaaccgttgtatacgatgtgtgga

SEQ ID NO: 36059 - DNA, 25 bp, SARS Virus
caaccgttgtaatcgatgtgtggaa

SEQ ID NO: 36060 - DNA, 25 bp, SARS Virus
aaccgttgtaaatgatgtgtggaag

SEQ ID NO: 36061 - DNA, 25 bp, SARS Virus
accgttgtaaactatgtgtggaagg

SEQ ID NO: 36062 - DNA, 25 bp, SARS Virus
ccgttgtaaacgttgtgtggaaggt

SEQ ID NO: 36063 - DNA, 25 bp, SARS Virus
cgttgtaaacgatgtgtggaaggtt

SEQ ID NO: 36064 - DNA, 25 bp, SARS Virus
gttgtaaacgatttgtggaaggttt

SEQ ID NO: 36065 - DNA, 25 bp, SARS Virus
ttgtaaacgatgtgtggaaggtttg

SEQ ID NO: 36066 - DNA, 25 bp, SARS Virus
tgtaaacgatgtttggaaggtttga

SEQ ID NO: 36067 - DNA, 25 bp, SARS Virus
gtaaacgatgtgtggaaggtttgag

SEQ ID NO: 36068 - DNA, 25 bp, SARS Virus
taaacgatgtgttgaaggtttgagt

SEQ ID NO: 36069 - DNA, 25 bp, SARS Virus
aaacgatgtgtgtaaggtttgagta

SEQ ID NO: 36070 - DNA, 25 bp, SARS Virus
aacgatgtgtggtaggtttgagtaa

SEQ ID NO: 36071 - DNA, 25 bp, SARS Virus
acgatgtgtggatggtttgagtaac

SEQ ID NO: 36072 - DNA, 25 bp, SARS Virus
cgatgtgtggaatgtttgagtaact

SEQ ID NO: 36073 - DNA, 25 bp, SARS Virus
gatgtgtggaagttttgagtaactc

SEQ ID NO: 36074 - DNA, 25 bp, SARS Virus
atgtgtggaaggtttgagtaactca

SEQ ID NO: 36075 - DNA, 25 bp, SARS Virus
tgtgtggaaggtttgagtaactcat

SEQ ID NO: 36076 - DNA, 25 bp, SARS Virus
gtgtggaaggtttgagtaactcata

SEQ ID NO: 36077 - DNA, 25 bp, SARS Virus
tgtggaaggttttagtaactcatat

SEQ ID NO: 36078 - DNA, 25 bp, SARS Virus
gtggaaggtttgtgtaactcatatc

SEQ ID NO: 36079 - DNA, 25 bp, SARS Virus
tggaaggtttgattaactcatatca

SEQ ID NO: 36080 - DNA, 25 bp, SARS Virus
ggaaggtttgagtaactcatatcac

SEQ ID NO: 36081 - DNA, 25 bp, SARS Virus
gaaggtttgagttactcatatcact

SEQ ID NO: 36082 - DNA, 25 bp, SARS Virus
aaggtttgagtatctcatatcacta

SEQ ID NO: 36083 - DNA, 25 bp, SARS Virus
aggtttgagtaattcatatcactaa

SEQ ID NO: 36084 - DNA, 25 bp, SARS Virus
ggtttgagtaactcatatcactaaa

SEQ ID NO: 36085 - DNA, 25 bp, SARS Virus
gtttgagtaacttatatcactaaaa

SEQ ID NO: 36086 - DNA, 25 bp, SARS Virus
tttgagtaactcttatcactaaaac

SEQ ID NO: 36087 - DNA, 25 bp, SARS Virus
ttgagtaactcatatcactaaaacg

SEQ ID NO: 36088 - DNA, 25 bp, SARS Virus
tgagtaactcatttcactaaaacga

SEQ ID NO: 36089 - DNA, 25 bp, SARS Virus
gagtaactcatatcactaaaacgat

SEQ ID NO: 36090 - DNA, 25 bp, SARS Virus
agtaactcatattactaaaacgatg

SEQ ID NO: 36091 - DNA, 25 bp, SARS Virus
gtaactcatatctctaaaacgatgg

SEQ ID NO: 36092 - DNA, 25 bp, SARS Virus
taactcatatcattaaaacgatgga

SEQ ID NO: 36093 - DNA, 25 bp, SARS Virus
aactcatatcactaaaacgatggag

SEQ ID NO: 36094 - DNA, 25 bp, SARS Virus
actcatatcacttaaacgatggaga

SEQ ID NO: 36095 - DNA, 25 bp, SARS Virus
ctcatatcactataacgatggagac

SEQ ID NO: 36096 - DNA, 25 bp, SARS Virus
tcatatcactaatacgatggagacg

SEQ ID NO: 36097 - DNA, 25 bp, SARS Virus
catatcactaaatcgatggagacga

SEQ ID NO: 36098 - DNA, 25 bp, SARS Virus
atatcactaaaatgatggagacgaa

SEQ ID NO: 36099 - DNA, 25 bp, SARS Virus
tatcactaaaactatggagacgaac

SEQ ID NO: 36100 - DNA, 25 bp, SARS Virus
atcactaaaacgttggagacgaacg

SEQ ID NO: 36101 - DNA, 25 bp, SARS Virus
tcactaaaacgatggagacgaacgc

SEQ ID NO: 36102 - DNA, 25 bp, SARS Virus
cactaaaacgattgagacgaacgca

SEQ ID NO: 36103 - DNA, 25 bp, SARS Virus
actaaaacgatgtagacgaacgcaa

SEQ ID NO: 36104 - DNA, 25 bp, SARS Virus
ctaaaacgatggtgacgaacgcaag

SEQ ID NO: 36105 - DNA, 25 bp, SARS Virus
taaaacgatggatacgaacgcaaga

SEQ ID NO: 36106 - DNA, 25 bp, SARS Virus
aaaacgatggagtcgaacgcaagaa

SEQ ID NO: 36107 - DNA, 25 bp, SARS Virus
aaacgatggagatgaacgcaagaac

SEQ ID NO: 36108 - DNA, 25 bp, SARS Virus
aacgatggagactaacgcaagaacg

SEQ ID NO: 36109 - DNA, 25 bp, SARS Virus
acgatggagacgtacgcaagaacga

SEQ ID NO: 36110 - DNA, 25 bp, SARS Virus
cgatggagacgatcgcaagaacgac

SEQ ID NO: 36111 - DNA, 25 bp, SARS Virus
gatggagacgaatgcaagaacgacg

SEQ ID NO: 36112 - DNA, 25 bp, SARS Virus
atggagacgaactcaagaacgacga

SEQ ID NO: 36113 - DNA, 25 bp, SARS Virus
tggagacgaacgtaagaacgacgac

SEQ ID NO: 36114 - DNA, 25 bp, SARS Virus
ggagacgaacgctagaacgacgact

SEQ ID NO: 36115 - DNA, 25 bp, SARS Virus
gagacgaacgcatgaacgacgactc

SEQ ID NO: 36116 - DNA, 25 bp, SARS Virus
agacgaacgcaataacgacgactca

SEQ ID NO: 36117 - DNA, 25 bp, SARS Virus
gacgaacgcaagtacgacgactcac

SEQ ID NO: 36118 - DNA, 25 bp, SARS Virus
acgaacgcaagatcgacgactcaca

SEQ ID NO: 36119 - DNA, 25 bp, SARS Virus
cgaacgcaagaatgacgactcacat

SEQ ID NO: 36120 - DNA, 25 bp, SARS Virus
gaacgcaagaactacgactcacatg

SEQ ID NO: 36121 - DNA, 25 bp, SARS Virus
aacgcaagaacgtcgactcacatgt

SEQ ID NO: 36122 - DNA, 25 bp, SARS Virus
acgcaagaacgatgactcacatgtt

SEQ ID NO: 36123 - DNA, 25 bp, SARS Virus
cgcaagaacgactactcacatgtta

SEQ ID NO: 36124 - DNA, 25 bp, SARS Virus
gcaagaacgacgtctcacatgttaa

SEQ ID NO: 36125 - DNA, 25 bp, SARS Virus
caagaacgacgattcacatgttaaa

SEQ ID NO: 36126 - DNA, 25 bp, SARS Virus
aagaacgacgactcacatgttaaaa

SEQ ID NO: 36127 - DNA, 25 bp, SARS Virus
agaacgacgacttacatgttaaaaa

SEQ ID NO: 36128 - DNA, 25 bp, SARS Virus
gaacgacgactctcatgttaaaaat

SEQ ID NO: 36129 - DNA, 25 bp, SARS Virus
aacgacgactcatatgttaaaaatt

SEQ ID NO: 36130 - DNA, 25 bp, SARS Virus
acgacgactcacttgttaaaaattc

SEQ ID NO: 36131 - DNA, 25 bp, SARS Virus
cgacgactcacatgttaaaaattcc

SEQ ID NO: 36132 - DNA, 25 bp, SARS Virus
gacgactcacattttaaaaattcct

SEQ ID NO: 36133 - DNA, 25 bp, SARS Virus
acgactcacatgttaaaaattccta

SEQ ID NO: 36134 - DNA, 25 bp, SARS Virus
cgactcacatgttaaaaattcctac

SEQ ID NO: 36135 - DNA, 25 bp, SARS Virus
gactcacatgtttaaaattcctacg

SEQ ID NO: 36136 - DNA, 25 bp, SARS Virus
actcacatgttataaattcctacga

SEQ ID NO: 36137 - DNA, 25 bp, SARS Virus
ctcacatgttaataattcctacgat

SEQ ID NO: 36138 - DNA, 25 bp, SARS Virus
tcacatgttaaatattcctacgata

SEQ ID NO: 36139 - DNA, 25 bp, SARS Virus
cacatgttaaaatttcctacgatac

SEQ ID NO: 36140 - DNA, 25 bp, SARS Virus
acatgttaaaaattcctacgatacc

SEQ ID NO: 36141 - DNA, 25 bp, SARS Virus
catgttaaaaattcctacgataccc

SEQ ID NO: 36142 - DNA, 25 bp, SARS Virus
atgttaaaaatttctacgatacccg

SEQ ID NO: 36143 - DNA, 25 bp, SARS Virus
tgttaaaaattcttacgatacccgt

SEQ ID NO: 36144 - DNA, 25 bp, SARS Virus
gttaaaaattcctacgatacccgtt

SEQ ID NO: 36145 - DNA, 25 bp, SARS Virus
ttaaaaattccttcgatacccgttt

SEQ ID NO: 36146 - DNA, 25 bp, SARS Virus
taaaaattcctatgatacccgtttg

SEQ ID NO: 36147 - DNA, 25 bp, SARS Virus
aaaaattcctactatacccgtttgg

SEQ ID NO: 36148 - DNA, 25 bp, SARS Virus
aaaattcctacgttacccgtttgga

SEQ ID NO: 36149 - DNA, 25 bp, SARS Virus
aaattcctacgatacccgtttggac

SEQ ID NO: 36150 - DNA, 25 bp, SARS Virus
aattcctacgattcccgtttggaca

SEQ ID NO: 36151 - DNA, 25 bp, SARS Virus
attcctacgatatccgtttggacac

SEQ ID NO: 36152 - DNA, 25 bp, SARS Virus
ttcctacgatactcgtttggacacg

SEQ ID NO: 36153 - DNA, 25 bp, SARS Virus
tcctacgatacctgtttggacacgg

SEQ ID NO: 36154 - DNA, 25 bp, SARS Virus
cctacgatacccttttggacacggt

SEQ ID NO: 36155 - DNA, 25 bp, SARS Virus
ctacgatacccgtttggacacggta

SEQ ID NO: 36156 - DNA, 25 bp, SARS Virus
tacgatacccgtttggacacggtat

SEQ ID NO: 36157 - DNA, 25 bp, SARS Virus
acgatacccgtttggacacggtata

SEQ ID NO: 36158 - DNA, 25 bp, SARS Virus
cgatacccgttttgacacggtataa

SEQ ID NO: 36159 - DNA, 25 bp, SARS Virus
gatacccgtttgtacacggtataac

SEQ ID NO: 36160 - DNA, 25 bp, SARS Virus
atacccgtttggtcacggtataaca

SEQ ID NO: 36161 - DNA, 25 bp, SARS Virus
tacccgtttggatacggtataacaa

SEQ ID NO: 36162 - DNA, 25 bp, SARS Virus
acccgtttggactcggtataacaat

SEQ ID NO: 36163 - DNA, 25 bp, SARS Virus
cccgtttggacatggtataacaata

SEQ ID NO: 36164 - DNA, 25 bp, SARS Virus
ccgtttggacactgtataacaatac

SEQ ID NO: 36165 - DNA, 25 bp, SARS Virus
cgtttggacacgttataacaatact

SEQ ID NO: 36166 - DNA, 25 bp, SARS Virus
gtttggacacggtataacaatactg

SEQ ID NO: 36167 - DNA, 25 bp, SARS Virus
tttggacacggtttaacaatactgt

SEQ ID NO: 36168 - DNA, 25 bp, SARS Virus
ttggacacggtataacaatactgtg

SEQ ID NO: 36169 - DNA, 25 bp, SARS Virus
tggacacggtattacaatactgtga

SEQ ID NO: 36170 - DNA, 25 bp, SARS Virus
ggacacggtatatcaatactgtgat

SEQ ID NO: 36171 - DNA, 25 bp, SARS Virus
gacacggtataataatactgtgatt

SEQ ID NO: 36172 - DNA, 25 bp, SARS Virus
acacggtataactatactgtgatta

SEQ ID NO: 36173 - DNA, 25 bp, SARS Virus
cacggtataacattactgtgattaa

SEQ ID NO: 36174 - DNA, 25 bp, SARS Virus
acggtataacaatactgtgattaaa

SEQ ID NO: 36175 - DNA, 25 bp, SARS Virus
cggtataacaattctgtgattaaac

SEQ ID NO: 36176 - DNA, 25 bp, SARS Virus
ggtataacaatattgtgattaaacg

SEQ ID NO: 36177 - DNA, 25 bp, SARS Virus
gtataacaatactgtgattaaacga

SEQ ID NO: 36178 - DNA, 25 bp, SARS Virus
tataacaatactttgattaaacgat

SEQ ID NO: 36179 - DNA, 25 bp, SARS Virus
ataacaatactgtgattaaacgatc

SEQ ID NO: 36180 - DNA, 25 bp, SARS Virus
taacaatactgttattaaacgatct

SEQ ID NO: 36181 - DNA, 25 bp, SARS Virus
aacaatactgtgtttaaacgatctc

SEQ ID NO: 36182 - DNA, 25 bp, SARS Virus
acaatactgtgattaaacgatctcc

SEQ ID NO: 36183 - DNA, 25 bp, SARS Virus
caatactgtgattaaacgatctccc

SEQ ID NO: 36184 - DNA, 25 bp, SARS Virus
aatactgtgatttaacgatctccca

SEQ ID NO: 36185 - DNA, 25 bp, SARS Virus
atactgtgattatacgatctcccaa

SEQ ID NO: 36186 - DNA, 25 bp, SARS Virus
tactgtgattaatcgatctcccaag

SEQ ID NO: 36187 - DNA, 25 bp, SARS Virus
actgtgattaaatgatctcccaaga

SEQ ID NO: 36188 - DNA, 25 bp, SARS Virus
ctgtgattaaactatctcccaagat

SEQ ID NO: 36189 - DNA, 25 bp, SARS Virus
tgtgattaaacgttctcccaagata

SEQ ID NO: 36190 - DNA, 25 bp, SARS Virus
gtgattaaacgatctcccaagataa

SEQ ID NO: 36191 - DNA, 25 bp, SARS Virus
tgattaaacgatttcccaagataaa

SEQ ID NO: 36192 - DNA, 25 bp, SARS Virus
gattaaacgatctcccaagataaag

SEQ ID NO: 36193 - DNA, 25 bp, SARS Virus
attaaacgatcttccaagataaaga

SEQ ID NO: 36194 - DNA, 25 bp, SARS Virus
ttaaacgatctctcaagataaagaa

SEQ ID NO: 36195 - DNA, 25 bp, SARS Virus
taaacgatctcctaagataaagaat

SEQ ID NO: 36196 - DNA, 25 bp, SARS Virus
aaacgatctccctagataaagaata

SEQ ID NO: 36197 - DNA, 25 bp, SARS Virus
aacgatctcccatgataaagaatat

SEQ ID NO: 36198 - DNA, 25 bp, SARS Virus
acgatctcccaatataaagaatatc

SEQ ID NO: 36199 - DNA, 25 bp, SARS Virus
cgatctcccaagttaaagaatatca

SEQ ID NO: 36200 - DNA, 25 bp, SARS Virus
gatctcccaagataaagaatatcac

SEQ ID NO: 36201 - DNA, 25 bp, SARS Virus
atctcccaagattaagaatatcact

SEQ ID NO: 36202 - DNA, 25 bp, SARS Virus
tctcccaagatatagaatatcactc

SEQ ID NO: 36203 - DNA, 25 bp, SARS Virus
ctcccaagataatgaatatcactcg

SEQ ID NO: 36204 - DNA, 25 bp, SARS Virus
tcccaagataaataatatcactcga

SEQ ID NO: 36205 - DNA, 25 bp, SARS Virus
cccaagataaagtatatcactcgaa

SEQ ID NO: 36206 - DNA, 25 bp, SARS Virus
ccaagataaagattatcactcgaag

SEQ ID NO: 36207 - DNA, 25 bp, SARS Virus
caagataaagaatatcactcgaagc

SEQ ID NO: 36208 - DNA, 25 bp, SARS Virus
aagataaagaatttcactcgaagca

SEQ ID NO: 36209 - DNA, 25 bp, SARS Virus
agataaagaatatcactcgaagcag

SEQ ID NO: 36210 - DNA, 25 bp, SARS Virus
gataaagaatattactcgaagcagg

SEQ ID NO: 36211 - DNA, 25 bp, SARS Virus
ataaagaatatctctcgaagcaggt

SEQ ID NO: 36212 - DNA, 25 bp, SARS Virus
taaagaatatcattcgaagcaggtc

SEQ ID NO: 36213 - DNA, 25 bp, SARS Virus
aaagaatatcactcgaagcaggtct

SEQ ID NO: 36214 - DNA, 25 bp, SARS Virus
aagaatatcacttgaagcaggtctg

SEQ ID NO: 36215 - DNA, 25 bp, SARS Virus
agaatatcactctaagcaggtctgt

SEQ ID NO: 36216 - DNA, 25 bp, SARS Virus
gaatatcactcgtagcaggtctgtg

SEQ ID NO: 36217 - DNA, 25 bp, SARS Virus
aatatcactcgatgcaggtctgtga

SEQ ID NO: 36218 - DNA, 25 bp, SARS Virus
atatcactcgaatcaggtctgtgag

SEQ ID NO: 36219 - DNA, 25 bp, SARS Virus
tatcactcgaagtaggtctgtgagc

SEQ ID NO: 36220 - DNA, 25 bp, SARS Virus
atcactcgaagctggtctgtgagca

SEQ ID NO: 36221 - DNA, 25 bp, SARS Virus
tcactcgaagcatgtctgtgagcaa

SEQ ID NO: 36222 - DNA, 25 bp, SARS Virus
cactcgaagcagttctgtgagcaat

SEQ ID NO: 36223 - DNA, 25 bp, SARS Virus
actcgaagcaggtctgtgagcaata

SEQ ID NO: 36224 - DNA, 25 bp, SARS Virus
ctcgaagcaggtttgtgagcaatac

SEQ ID NO: 36225 - DNA, 25 bp, SARS Virus
tcgaagcaggtctgtgagcaataca

SEQ ID NO: 36226 - DNA, 25 bp, SARS Virus
cgaagcaggtctttgagcaatacac

SEQ ID NO: 36227 - DNA, 25 bp, SARS Virus
gaagcaggtctgtgagcaatacacg

SEQ ID NO: 36228 - DNA, 25 bp, SARS Virus
aagcaggtctgttagcaatacacga

SEQ ID NO: 36229 - DNA, 25 bp, SARS Virus
agcaggtctgtgtgcaatacacgaa

SEQ ID NO: 36230 - DNA, 25 bp, SARS Virus
gcaggtctgtgatcaatacacgaat

SEQ ID NO: 36231 - DNA, 25 bp, SARS Virus
caggtctgtgagtaatacacgaata

SEQ ID NO: 36232 - DNA, 25 bp, SARS Virus
aggtctgtgagctatacacgaatac

SEQ ID NO: 36233 - DNA, 25 bp, SARS Virus
ggtctgtgagcattacacgaatacc

SEQ ID NO: 36234 - DNA, 25 bp, SARS Virus
gtctgtgagcaatacacgaatacct

SEQ ID NO: 36235 - DNA, 25 bp, SARS Virus
tctgtgagcaattcacgaataccta

SEQ ID NO: 36236 - DNA, 25 bp, SARS Virus
ctgtgagcaatatacgaatacctac

SEQ ID NO: 36237 - DNA, 25 bp, SARS Virus
tgtgagcaatactcgaatacctacc

SEQ ID NO: 36238 - DNA, 25 bp, SARS Virus
gtgagcaatacatgaatacctacca

SEQ ID NO: 36239 - DNA, 25 bp, SARS Virus
tgagcaatacactaatacctaccaa

SEQ ID NO: 36240 - DNA, 25 bp, SARS Virus
gagcaatacacgtatacctaccaag

SEQ ID NO: 36241 - DNA, 25 bp, SARS Virus
agcaatacacgaatacctaccaagg

SEQ ID NO: 36242 - DNA, 25 bp, SARS Virus
gcaatacacgaaaacctaccaaggt

SEQ ID NO: 36243 - DNA, 25 bp, SARS Virus
caatacacgaatacctaccaaggta

SEQ ID NO: 36244 - DNA, 25 bp, SARS Virus
aatacacgaataactaccaaggtag

SEQ ID NO: 36245 - DNA, 25 bp, SARS Virus
atacacgaatacataccaaggtagt

SEQ ID NO: 36246 - DNA, 25 bp, SARS Virus
tacacgaataccaaccaaggtagta

SEQ ID NO: 36247 - DNA, 25 bp, SARS Virus
acacgaatacctaccaaggtagtat

SEQ ID NO: 36248 - DNA, 25 bp, SARS Virus
cacgaatacctaacaaggtagtatg

SEQ ID NO: 36249 - DNA, 25 bp, SARS Virus
acgaatacctacaaaggtagtatgt

SEQ ID NO: 36250 - DNA, 25 bp, SARS Virus
cgaatacctaccaaggtagtatgtc

SEQ ID NO: 36251 - DNA, 25 bp, SARS Virus
gaatacctaccaaggtagtatgtca

SEQ ID NO: 36252 - DNA, 25 bp, SARS Virus
aatacctaccaaagtagtatgtcaa

SEQ ID NO: 36253 - DNA, 25 bp, SARS Virus
atacctaccaagatagtatgtcaaa

SEQ ID NO: 36254 - DNA, 25 bp, SARS Virus
tacctaccaaggaagtatgtcaaag

SEQ ID NO: 36255 - DNA, 25 bp, SARS Virus
acctaccaaggtagtatgtcaaagg

SEQ ID NO: 36256 - DNA, 25 bp, SARS Virus
cctaccaaggtaatatgtcaaagga

SEQ ID NO: 36257 - DNA, 25 bp, SARS Virus
ctaccaaggtagaatgtcaaaggat

SEQ ID NO: 36258 - DNA, 25 bp, SARS Virus
taccaaggtagtatgtcaaaggatt

SEQ ID NO: 36259 - DNA, 25 bp, SARS Virus
accaaggtagtaagtcaaaggattg

SEQ ID NO: 36260 - DNA, 25 bp, SARS Virus
ccaaggtagtatatcaaaggattgt

SEQ ID NO: 36261 - DNA, 25 bp, SARS Virus
caaggtagtatgacaaaggattgtg

SEQ ID NO: 36262 - DNA, 25 bp, SARS Virus
aaggtagtatgtaaaaggattgtga

SEQ ID NO: 36263 - DNA, 25 bp, SARS Virus
aggtagtatgtcaaaggattgtgaa

SEQ ID NO: 36264 - DNA, 25 bp, SARS Virus
ggtagtatgtcaaaggattgtgaat

SEQ ID NO: 36265 - DNA, 25 bp, SARS Virus
gtagtatgtcaaaggattgtgaatg

SEQ ID NO: 36266 - DNA, 25 bp, SARS Virus
tagtatgtcaaaagattgtgaatgg

SEQ ID NO: 36267 - DNA, 25 bp, SARS Virus
agtatgtcaaagaattgtgaatgga

SEQ ID NO: 36268 - DNA, 25 bp, SARS Virus
gtatgtcaaaggattgtgaatggac

SEQ ID NO: 36269 - DNA, 25 bp, SARS Virus
tatgtcaaaggaatgtgaatggacc

SEQ ID NO: 36270 - DNA, 25 bp, SARS Virus
atgtcaaaggatagtgaatggacct

SEQ ID NO: 36271 - DNA, 25 bp, SARS Virus
tgtcaaaggattatgaatggacctc

SEQ ID NO: 36272 - DNA, 25 bp, SARS Virus
gtcaaaggattgagaatggacctcc

SEQ ID NO: 36273 - DNA, 25 bp, SARS Virus
tcaaaggattgtaaatggacctccc

SEQ ID NO: 36274 - DNA, 25 bp, SARS Virus
caaaggattgtgaatggacctccca

SEQ ID NO: 36275 - DNA, 25 bp, SARS Virus
aaaggattgtgaatggacctcccaa

SEQ ID NO: 36276 - DNA, 25 bp, SARS Virus
aaggattgtgaaaggacctcccaag

SEQ ID NO: 36277 - DNA, 25 bp, SARS Virus
aggattgtgaatagacctcccaaga

SEQ ID NO: 36278 - DNA, 25 bp, SARS Virus
ggattgtgaatgaacctcccaagac

SEQ ID NO: 36279 - DNA, 25 bp, SARS Virus
gattgtgaatggacctcccaagaca

SEQ ID NO: 36280 - DNA, 25 bp, SARS Virus
attgtgaatggaactcccaagacaa

SEQ ID NO: 36281 - DNA, 25 bp, SARS Virus
ttgtgaatggacatcccaagacaat

SEQ ID NO: 36282 - DNA, 25 bp, SARS Virus
tgtgaatggaccacccaagacaatc

SEQ ID NO: 36283 - DNA, 25 bp, SARS Virus
gtgaatggacctaccaagacaatct

SEQ ID NO: 36284 - DNA, 25 bp, SARS Virus
tgaatggacctcacaagacaatctc

SEQ ID NO: 36285 - DNA, 25 bp, SARS Virus
gaatggacctccaaagacaatctca

SEQ ID NO: 36286 - DNA, 25 bp, SARS Virus
aatggacctcccaagacaatctcat

SEQ ID NO: 36287 - DNA, 25 bp, SARS Virus
atggacctcccaagacaatctcatc

SEQ ID NO: 36288 - DNA, 25 bp, SARS Virus
tggacctcccaaaacaatctcatca

SEQ ID NO: 36289 - DNA, 25 bp, SARS Virus
ggacctcccaagacaatctcatcat

SEQ ID NO: 36290 - DNA, 25 bp, SARS Virus
gacctcccaagaaaatctcatcatt

SEQ ID NO: 36291 - DNA, 25 bp, SARS Virus
acctcccaagacaatctcatcattg

SEQ ID NO: 36292 - DNA, 25 bp, SARS Virus
cctcccaagacaatctcatcattgt

SEQ ID NO: 36293 - DNA, 25 bp, SARS Virus
ctcccaagacaaactcatcattgtt

SEQ ID NO: 36294 - DNA, 25 bp, SARS Virus
tcccaagacaatatcatcattgttg

SEQ ID NO: 36295 - DNA, 25 bp, SARS Virus
cccaagacaatcacatcattgttga

SEQ ID NO: 36296 - DNA, 25 bp, SARS Virus
ccaagacaatctaatcattgttgaa

SEQ ID NO: 36297 - DNA, 25 bp, SARS Virus
caagacaatctcatcattgttgaaa

SEQ ID NO: 36298 - DNA, 25 bp, SARS Virus
aagacaatctcaacattgttgaaaa

SEQ ID NO: 36299 - DNA, 25 bp, SARS Virus
agacaatctcataattgttgaaaac

SEQ ID NO: 36300 - DNA, 25 bp, SARS Virus
gacaatctcatcattgttgaaaact

SEQ ID NO: 36301 - DNA, 25 bp, SARS Virus
acaatctcatcaatgttgaaaacta

SEQ ID NO: 36302 - DNA, 25 bp, SARS Virus
caatctcatcatagttgaaaactac

SEQ ID NO: 36303 - DNA, 25 bp, SARS Virus
aatctcatcattattgaaaactacg

SEQ ID NO: 36304 - DNA, 25 bp, SARS Virus
atctcatcattgatgaaaactacga

SEQ ID NO: 36305 - DNA, 25 bp, SARS Virus
tctcatcattgtagaaaactacgac

SEQ ID NO: 36306 - DNA, 25 bp, SARS Virus
ctcatcattgttaaaaactacgact

SEQ ID NO: 36307 - DNA, 25 bp, SARS Virus
tcatcattgttgaaaactacgactc

SEQ ID NO: 36308 - DNA, 25 bp, SARS Virus
catcattgttgaaaactacgactca

SEQ ID NO: 36309 - DNA, 25 bp, SARS Virus
atcattgttgaaaactacgactcat

SEQ ID NO: 36310 - DNA, 25 bp, SARS Virus
tcattgttgaaaactacgactcatg

SEQ ID NO: 36311 - DNA, 25 bp, SARS Virus
cattgttgaaaaatacgactcatga

SEQ ID NO: 36312 - DNA, 25 bp, SARS Virus
attgttgaaaacaacgactcatgac

SEQ ID NO: 36313 - DNA, 25 bp, SARS Virus
ttgttgaaaactacgactcatgaca

SEQ ID NO: 36314 - DNA, 25 bp, SARS Virus
tgttgaaaactaagactcatgacat

SEQ ID NO: 36315 - DNA, 25 bp, SARS Virus
gttgaaaactacaactcatgacatc

SEQ ID NO: 36316 - DNA, 25 bp, SARS Virus
ttgaaaactacgactcatgacatct

SEQ ID NO: 36317 - DNA, 25 bp, SARS Virus
tgaaaactacgaatcatgacatctg

SEQ ID NO: 36318 - DNA, 25 bp, SARS Virus
gaaaactacgacacatgacatctgt

SEQ ID NO: 36319 - DNA, 25 bp, SARS Virus
aaaactacgactaatgacatctgta

SEQ ID NO: 36320 - DNA, 25 bp, SARS Virus
aaactacgactcatgacatctgtac

SEQ ID NO: 36321 - DNA, 25 bp, SARS Virus
aactacgactcaagacatctgtacc

SEQ ID NO: 36322 - DNA, 25 bp, SARS Virus
actacgactcataacatctgtacca

SEQ ID NO: 36323 - DNA, 25 bp, SARS Virus
ctacgactcatgacatctgtaccat

SEQ ID NO: 36324 - DNA, 25 bp, SARS Virus
tacgactcatgaaatctgtaccatg

SEQ ID NO: 36325 - DNA, 25 bp, SARS Virus
acgactcatgacatctgtaccatgt

SEQ ID NO: 36326 - DNA, 25 bp, SARS Virus
cgactcatgacaactgtaccatgta

SEQ ID NO: 36327 - DNA, 25 bp, SARS Virus
gactcatgacatatgtaccatgtac

SEQ ID NO: 36328 - DNA, 25 bp, SARS Virus
actcatgacatcagtaccatgtacg

SEQ ID NO: 36329 - DNA, 25 bp, SARS Virus
ctcatgacatctataccatgtacgc

SEQ ID NO: 36330 - DNA, 25 bp, SARS Virus
tcatgacatctgaaccatgtacgct

SEQ ID NO: 36331 - DNA, 25 bp, SARS Virus
catgacatctgtaccatgtacgctt

SEQ ID NO: 36332 - DNA, 25 bp, SARS Virus
atgacatctgtaacatgtacgcttt

SEQ ID NO: 36333 - DNA, 25 bp, SARS Virus
tgacatctgtacaatgtacgctttc

SEQ ID NO: 36334 - DNA, 25 bp, SARS Virus
gacatctgtaccatgtacgctttcc

SEQ ID NO: 36335 - DNA, 25 bp, SARS Virus
acatctgtaccaagtacgctttcca

SEQ ID NO: 36336 - DNA, 25 bp, SARS Virus
catctgtaccatatacgctttccag

SEQ ID NO: 36337 - DNA, 25 bp, SARS Virus
atctgtaccatgaacgctttccagt

SEQ ID NO: 36338 - DNA, 25 bp, SARS Virus
tctgtaccatgtacgctttccagtc

SEQ ID NO: 36339 - DNA, 25 bp, SARS Virus
ctgtaccatgtaagctttccagtct

SEQ ID NO: 36340 - DNA, 25 bp, SARS Virus
tgtaccatgtacactttccagtctt

SEQ ID NO: 36341 - DNA, 25 bp, SARS Virus
gtaccatgtacgatttccagtcttc

SEQ ID NO: 36342 - DNA, 25 bp, SARS Virus
taccatgtacgcattccagtcttca

SEQ ID NO: 36343 - DNA, 25 bp, SARS Virus
accatgtacgctatccagtcttcat

SEQ ID NO: 36344 - DNA, 25 bp, SARS Virus
ccatgtacgcttaccagtcttcatc

SEQ ID NO: 36345 - DNA, 25 bp, SARS Virus
catgtacgctttacagtcttcatcc

SEQ ID NO: 36346 - DNA, 25 bp, SARS Virus
atgtacgctttcaagtcttcatcca

SEQ ID NO: 36347 - DNA, 25 bp, SARS Virus
tgtacgctttccagtcttcatccat

SEQ ID NO: 36348 - DNA, 25 bp, SARS Virus
gtacgctttccaatcttcatccata

SEQ ID NO: 36349 - DNA, 25 bp, SARS Virus
tacgctttccagacttcatccataa

SEQ ID NO: 36350 - DNA, 25 bp, SARS Virus
acgctttccagtattcatccataaa

SEQ ID NO: 36351 - DNA, 25 bp, SARS Virus
cgctttccagtcatcatccataaac

SEQ ID NO: 36352 - DNA, 25 bp, SARS Virus
gctttccagtctacatccataaacg

SEQ ID NO: 36353 - DNA, 25 bp, SARS Virus
ctttccagtcttaatccataaacgg

SEQ ID NO: 36354 - DNA, 25 bp, SARS Virus
tttccagtcttcatccataaacgga

SEQ ID NO: 36355 - DNA, 25 bp, SARS Virus
ttccagtcttcaaccataaacggat

SEQ ID NO: 36356 - DNA, 25 bp, SARS Virus
tccagtcttcatacataaacggata

SEQ ID NO: 36357 - DNA, 25 bp, SARS Virus
ccagtcttcatcaataaacggatag

SEQ ID NO: 36358 - DNA, 25 bp, SARS Virus
cagtcttcatccataaacggataga

SEQ ID NO: 36359 - DNA, 25 bp, SARS Virus
agtcttcatccaaaaacggatagat

SEQ ID NO: 36360 - DNA, 25 bp, SARS Virus
gtcttcatccataaacggatagatg

SEQ ID NO: 36361 - DNA, 25 bp, SARS Virus
tcttcatccataaacggatagatgg

SEQ ID NO: 36362 - DNA, 25 bp, SARS Virus
cttcatccataaacggatagatggt

SEQ ID NO: 36363 - DNA, 25 bp, SARS Virus
ttcatccataaaaggatagatggtc

SEQ ID NO: 36364 - DNA, 25 bp, SARS Virus
tcatccataaacagatagatggtca

SEQ ID NO: 36365 - DNA, 25 bp, SARS Virus
catccataaacgaatagatggtcac

SEQ ID NO: 36366 - DNA, 25 bp, SARS Virus
atccataaacggatagatggtcacc

SEQ ID NO: 36367 - DNA, 25 bp, SARS Virus
tccataaacggaaagatggtcacca

SEQ ID NO: 36368 - DNA, 25 bp, SARS Virus
ccataaacggatagatggtcaccat

SEQ ID NO: 36369 - DNA, 25 bp, SARS Virus
cataaacggataaatggtcaccatc

SEQ ID NO: 36370 - DNA, 25 bp, SARS Virus
ataaacggatagatggtcaccatct

SEQ ID NO: 36371 - DNA, 25 bp, SARS Virus
taaacggatagaaggtcaccatcta

SEQ ID NO: 36372 - DNA, 25 bp, SARS Virus
aaacggatagatagtcaccatctac

SEQ ID NO: 36373 - DNA, 25 bp, SARS Virus
aacggatagatgatcaccatctacc

SEQ ID NO: 36374 - DNA, 25 bp, SARS Virus
acggatagatggacaccatctaccc

SEQ ID NO: 36375 - DNA, 25 bp, SARS Virus
cggatagatggtaaccatctaccca

SEQ ID NO: 36376 - DNA, 25 bp, SARS Virus
ggatagatggtcaccatctacccaa

SEQ ID NO: 36377 - DNA, 25 bp, SARS Virus
gatagatggtcaacatctacccaag

SEQ ID NO: 36378 - DNA, 25 bp, SARS Virus
atagatggtcacaatctacccaaga

SEQ ID NO: 36379 - DNA, 25 bp, SARS Virus
tagatggtcaccatctacccaagaa

SEQ ID NO: 36380 - DNA, 25 bp, SARS Virus
agatggtcaccaactacccaagaat

SEQ ID NO: 36381 - DNA, 25 bp, SARS Virus
gatggtcaccatatacccaagaatt

SEQ ID NO: 36382 - DNA, 25 bp, SARS Virus
atggtcaccatcaacccaagaatta

SEQ ID NO: 36383 - DNA, 25 bp, SARS Virus
tggtcaccatctacccaagaattat

SEQ ID NO: 36384 - DNA, 25 bp, SARS Virus
ggtcaccatctaaccaagaattatt

SEQ ID NO: 36385 - DNA, 25 bp, SARS Virus
gtcaccatctacacaagaattatta

SEQ ID NO: 36386 - DNA, 25 bp, SARS Virus
tcaccatctaccaaagaattattac

SEQ ID NO: 36387 - DNA, 25 bp, SARS Virus
caccatctacccaagaattattact

SEQ ID NO: 36388 - DNA, 25 bp, SARS Virus
accatctacccaagaattattactc

SEQ ID NO: 36389 - DNA, 25 bp, SARS Virus
ccatctacccaaaaattattactcg

SEQ ID NO: 36390 - DNA, 25 bp, SARS Virus
catctacccaagaattattactcgt

SEQ ID NO: 36391 - DNA, 25 bp, SARS Virus
atctacccaagaattattactcgta

SEQ ID NO: 36392 - DNA, 25 bp, SARS Virus
tctacccaagaaatattactcgtaa

SEQ ID NO: 36393 - DNA, 25 bp, SARS Virus
ctacccaagaataattactcgtaat

SEQ ID NO: 36394 - DNA, 25 bp, SARS Virus
tacccaagaattattactcgtaatg

SEQ ID NO: 36395 - DNA, 25 bp, SARS Virus
acccaagaattaatactcgtaatgt

SEQ ID NO: 36396 - DNA, 25 bp, SARS Virus
cccaagaattataactcgtaatgtc

SEQ ID NO: 36397 - DNA, 25 bp, SARS Virus
ccaagaattattactcgtaatgtct

SEQ ID NO: 36398 - DNA, 25 bp, SARS Virus
caagaattattaatcgtaatgtctc

SEQ ID NO: 36399 - DNA, 25 bp, SARS Virus
aagaattattacacgtaatgtctcg

SEQ ID NO: 36400 - DNA, 25 bp, SARS Virus
agaattattactagtaatgtctcga

SEQ ID NO: 36401 - DNA, 25 bp, SARS Virus
gaattattactcataatgtctcgag

SEQ ID NO: 36402 - DNA, 25 bp, SARS Virus
aattattactcgaaatgtctcgaga

SEQ ID NO: 36403 - DNA, 25 bp, SARS Virus
attattactcgtaatgtctcgagat

SEQ ID NO: 36404 - DNA, 25 bp, SARS Virus
ttattactcgtaatgtctcgagata

SEQ ID NO: 36405 - DNA, 25 bp, SARS Virus
tattactcgtaaagtctcgagatag

SEQ ID NO: 36406 - DNA, 25 bp, SARS Virus
attactcgtaatatctcgagatagt

SEQ ID NO: 36407 - DNA, 25 bp, SARS Virus
ttactcgtaatgactcgagatagtc

SEQ ID NO: 36408 - DNA, 25 bp, SARS Virus
tactcgtaatgtatcgagatagtcc

SEQ ID NO: 36409 - DNA, 25 bp, SARS Virus
actcgtaatgtcacgagatagtcct

SEQ ID NO: 36410 - DNA, 25 bp, SARS Virus
ctcgtaatgtctagagatagtcctc

SEQ ID NO: 36411 - DNA, 25 bp, SARS Virus
tcgtaatgtctcaagatagtcctca

SEQ ID NO: 36412 - DNA, 25 bp, SARS Virus
cgtaatgtctcgagatagtcctcaa

SEQ ID NO: 36413 - DNA, 25 bp, SARS Virus
gtaatgtctcgaaatagtcctcaaa

SEQ ID NO: 36414 - DNA, 25 bp, SARS Virus
taatgtctcgagatagtcctcaaaa

SEQ ID NO: 36415 - DNA, 25 bp, SARS Virus
aatgtctcgagaaagtcctcaaaag

SEQ ID NO: 36416 - DNA, 25 bp, SARS Virus
atgtctcgagatagtcctcaaaaga

SEQ ID NO: 36417 - DNA, 25 bp, SARS Virus
tgtctcgagataatcctcaaaagac

SEQ ID NO: 36418 - DNA, 25 bp, SARS Virus
gtctcgagatagacctcaaaagaca

SEQ ID NO: 36419 - DNA, 25 bp, SARS Virus
tctcgagatagtactcaaaagacac

SEQ ID NO: 36420 - DNA, 25 bp, SARS Virus
ctcgagatagtcatcaaaagacacc

SEQ ID NO: 36421 - DNA, 25 bp, SARS Virus
tcgagatagtccacaaaagacacca

SEQ ID NO: 36422 - DNA, 25 bp, SARS Virus
cgagatagtcctaaaaagacaccac

SEQ ID NO: 36423 - DNA, 25 bp, SARS Virus
gagatagtcctcaaaagacaccaca

SEQ ID NO: 36424 - DNA, 25 bp, SARS Virus
agatagtcctcaaaagacaccacaa

SEQ ID NO: 36425 - DNA, 25 bp, SARS Virus
gatagtcctcaaaagacaccacaac

SEQ ID NO: 36426 - DNA, 25 bp, SARS Virus
atagtcctcaaaagacaccacaact

SEQ ID NO: 36427 - DNA, 25 bp, SARS Virus
tagtcctcaaaaaacaccacaacta

SEQ ID NO: 36428 - DNA, 25 bp, SARS Virus
agtcctcaaaagacaccacaactac

SEQ ID NO: 36429 - DNA, 25 bp, SARS Virus
gtcctcaaaagaaaccacaactacg

SEQ ID NO: 36430 - DNA, 25 bp, SARS Virus
tcctcaaaagacaccacaactacgc

SEQ ID NO: 36431 - DNA, 25 bp, SARS Virus
cctcaaaagacaacacaactacgct

SEQ ID NO: 36432 - DNA, 25 bp, SARS Virus
ctcaaaagacacaacaactacgcta

SEQ ID NO: 36433 - DNA, 25 bp, SARS Virus
tcaaaagacaccacaactacgctac

SEQ ID NO: 36434 - DNA, 25 bp, SARS Virus
caaaagacaccaaaactacgctact

SEQ ID NO: 36435 - DNA, 25 bp, SARS Virus
aaaagacaccacaactacgctactt

SEQ ID NO: 36436 - DNA, 25 bp, SARS Virus
aaagacaccacaactacgctactta

SEQ ID NO: 36437 - DNA, 25 bp, SARS Virus
aagacaccacaaatacgctacttag

SEQ ID NO: 36438 - DNA, 25 bp, SARS Virus
agacaccacaacaacgctacttaga

SEQ ID NO: 36439 - DNA, 25 bp, SARS Virus
gacaccacaactacgctacttagag

SEQ ID NO: 36440 - DNA, 25 bp, SARS Virus
acaccacaactaagctacttagagt

SEQ ID NO: 36441 - DNA, 25 bp, SARS Virus
caccacaactacactacttagagta

SEQ ID NO: 36442 - DNA, 25 bp, SARS Virus
accacaactacgatacttagagtat

SEQ ID NO: 36443 - DNA, 25 bp, SARS Virus
ccacaactacgcaacttagagtatc

SEQ ID NO: 36444 - DNA, 25 bp, SARS Virus
cacaactacgctacttagagtatcg

SEQ ID NO: 36445 - DNA, 25 bp, SARS Virus
acaactacgctaattagagtatcga

SEQ ID NO: 36446 - DNA, 25 bp, SARS Virus
caactacgctacatagagtatcgat

SEQ ID NO: 36447 - DNA, 25 bp, SARS Virus
aactacgctactaagagtatcgatt

SEQ ID NO: 36448 - DNA, 25 bp, SARS Virus
actacgctacttagagtatcgattg

SEQ ID NO: 36449 - DNA, 25 bp, SARS Virus
ctacgctacttaaagtatcgattgt

SEQ ID NO: 36450 - DNA, 25 bp, SARS Virus
tacgctacttagagtatcgattgta

SEQ ID NO: 36451 - DNA, 25 bp, SARS Virus
acgctacttagaatatcgattgtag

SEQ ID NO: 36452 - DNA, 25 bp, SARS Virus
cgctacttagagaatcgattgtaga

SEQ ID NO: 36453 - DNA, 25 bp, SARS Virus
gctacttagagtatcgattgtagaa

SEQ ID NO: 36454 - DNA, 25 bp, SARS Virus
ctacttagagtaacgattgtagaaa

SEQ ID NO: 36455 - DNA, 25 bp, SARS Virus
tacttagagtatagattgtagaaat

SEQ ID NO: 36456 - DNA, 25 bp, SARS Virus
acttagagtatcaattgtagaaatg

SEQ ID NO: 36457 - DNA, 25 bp, SARS Virus
cttagagtatcgattgtagaaatga

SEQ ID NO: 36458 - DNA, 25 bp, SARS Virus
ttagagtatcgaatgtagaaatgag

SEQ ID NO: 36459 - DNA, 25 bp, SARS Virus
tagagtatcgatagtagaaatgagg

SEQ ID NO: 36460 - DNA, 25 bp, SARS Virus
agagtatcgattatagaaatgagga

SEQ ID NO: 36461 - DNA, 25 bp, SARS Virus
gagtatcgattgaagaaatgaggag

SEQ ID NO: 36462 - DNA, 25 bp, SARS Virus
agtatcgattgtagaaatgaggaga

SEQ ID NO: 36463 - DNA, 25 bp, SARS Virus
gtatcgattgtaaaaatgaggagaa

SEQ ID NO: 36464 - DNA, 25 bp, SARS Virus
tatcgattgtagaaatgaggagaac

SEQ ID NO: 36465 - DNA, 25 bp, SARS Virus
atcgattgtagaaatgaggagaaca

SEQ ID NO: 36466 - DNA, 25 bp, SARS Virus
tcgattgtagaaatgaggagaacac

SEQ ID NO: 36467 - DNA, 25 bp, SARS Virus
cgattgtagaaaagaggagaacacg

SEQ ID NO: 36468 - DNA, 25 bp, SARS Virus
gattgtagaaataaggagaacacgt

SEQ ID NO: 36469 - DNA, 25 bp, SARS Virus
attgtagaaatgaggagaacacgtt

SEQ ID NO: 36470 - DNA, 25 bp, SARS Virus
ttgtagaaatgaagagaacacgttg

SEQ ID NO: 36471 - DNA, 25 bp, SARS Virus
tgtagaaatgagaagaacacgttgg

SEQ ID NO: 36472 - DNA, 25 bp, SARS Virus
gtagaaatgaggagaacacgttgga

SEQ ID NO: 36473 - DNA, 25 bp, SARS Virus
tagaaatgaggaaaacacgttggac

SEQ ID NO: 36474 - DNA, 25 bp, SARS Virus
agaaatgaggagaacacgttggaca

SEQ ID NO: 36475 - DNA, 25 bp, SARS Virus
gaaatgaggagaacacgttggacac

SEQ ID NO: 36476 - DNA, 25 bp, SARS Virus
aaatgaggagaaaacgttggacacc

SEQ ID NO: 36477 - DNA, 25 bp, SARS Virus
aatgaggagaacacgttggacaccc

SEQ ID NO: 36478 - DNA, 25 bp, SARS Virus
atgaggagaacaagttggacaccca

SEQ ID NO: 36479 - DNA, 25 bp, SARS Virus
tgaggagaacacattggacacccac

SEQ ID NO: 36480 - DNA, 25 bp, SARS Virus
gaggagaacacgatggacacccacg

SEQ ID NO: 36481 - DNA, 25 bp, SARS Virus
aggagaacacgtaggacacccacga

SEQ ID NO: 36482 - DNA, 25 bp, SARS Virus
ggagaacacgttagacacccacgaa

SEQ ID NO: 36483 - DNA, 25 bp, SARS Virus
gagaacacgttgaacacccacgaaa

SEQ ID NO: 36484 - DNA, 25 bp, SARS Virus
agaacacgttggacacccacgaaat

SEQ ID NO: 36485 - DNA, 25 bp, SARS Virus
gaacacgttggaaacccacgaaatc

SEQ ID NO: 36486 - DNA, 25 bp, SARS Virus
aacacgttggacacccacgaaatct

SEQ ID NO: 36487 - DNA, 25 bp, SARS Virus
acacgttggacaaccacgaaatcta

SEQ ID NO: 36488 - DNA, 25 bp, SARS Virus
cacgttggacacacacgaaatctac

SEQ ID NO: 36489 - DNA, 25 bp, SARS Virus
acgttggacaccaacgaaatctaca

SEQ ID NO: 36490 - DNA, 25 bp, SARS Virus
cgttggacacccacgaaatctacac

SEQ ID NO: 36491 - DNA, 25 bp, SARS Virus
gttggacacccaagaaatctacaca

SEQ ID NO: 36492 - DNA, 25 bp, SARS Virus
ttggacacccacaaaatctacacag

SEQ ID NO: 36493 - DNA, 25 bp, SARS Virus
tggacacccacgaaatctacacaga

SEQ ID NO: 36494 - DNA, 25 bp, SARS Virus
ggacacccacgaaatctacacagac

SEQ ID NO: 36495 - DNA, 25 bp, SARS Virus
gacacccacgaaatctacacagacg

SEQ ID NO: 36496 - DNA, 25 bp, SARS Virus
acacccacgaaaactacacagacga

SEQ ID NO: 36497 - DNA, 25 bp, SARS Virus
cacccacgaaatatacacagacgaa

SEQ ID NO: 36498 - DNA, 25 bp, SARS Virus
acccacgaaatcaacacagacgaag

SEQ ID NO: 36499 - DNA, 25 bp, SARS Virus
cccacgaaatctacacagacgaagt

SEQ ID NO: 36500 - DNA, 25 bp, SARS Virus
ccacgaaatctaaacagacgaagtc

SEQ ID NO: 36501 - DNA, 25 bp, SARS Virus
cacgaaatctacacagacgaagtca

SEQ ID NO: 36502 - DNA, 25 bp, SARS Virus
acgaaatctacaaagacgaagtcat

SEQ ID NO: 36503 - DNA, 25 bp, SARS Virus
cgaaatctacacagacgaagtcatc

SEQ ID NO: 36504 - DNA, 25 bp, SARS Virus
gaaatctacacaaacgaagtcatca

SEQ ID NO: 36505 - DNA, 25 bp, SARS Virus
aaatctacacagacgaagtcatcac

SEQ ID NO: 36506 - DNA, 25 bp, SARS Virus
aatctacacagaagaagtcatcacc

SEQ ID NO: 36507 - DNA, 25 bp, SARS Virus
atctacacagacaaagtcatcaccg

SEQ ID NO: 36508 - DNA, 25 bp, SARS Virus
tctacacagacgaagtcatcaccga

SEQ ID NO: 36509 - DNA, 25 bp, SARS Virus
ctacacagacgaagtcatcaccgac

SEQ ID NO: 36510 - DNA, 25 bp, SARS Virus
tacacagacgaaatcatcaccgacc

SEQ ID NO: 36511 - DNA, 25 bp, SARS Virus
acacagacgaagacatcaccgacca

SEQ ID NO: 36512 - DNA, 25 bp, SARS Virus
cacagacgaagtaatcaccgaccac

SEQ ID NO: 36513 - DNA, 25 bp, SARS Virus
acagacgaagtcatcaccgaccacc

SEQ ID NO: 36514 - DNA, 25 bp, SARS Virus
cagacgaagtcaacaccgaccacca

SEQ ID NO: 36515 - DNA, 25 bp, SARS Virus
agacgaagtcataaccgaccaccat

SEQ ID NO: 36516 - DNA, 25 bp, SARS Virus
gacgaagtcatcaccgaccaccata

SEQ ID NO: 36517 - DNA, 25 bp, SARS Virus
acgaagtcatcaacgaccaccataa

SEQ ID NO: 36518 - DNA, 25 bp, SARS Virus
cgaagtcatcacagaccaccataat

SEQ ID NO: 36519 - DNA, 25 bp, SARS Virus
gaagtcatcaccaaccaccataata

SEQ ID NO: 36520 - DNA, 25 bp, SARS Virus
aagtcatcaccgaccaccataataa

SEQ ID NO: 36521 - DNA, 25 bp, SARS Virus
agtcatcaccgaacaccataataac

SEQ ID NO: 36522 - DNA, 25 bp, SARS Virus
gtcatcaccgacaaccataataacg

SEQ ID NO: 36523 - DNA, 25 bp, SARS Virus
tcatcaccgaccaccataataacgg

SEQ ID NO: 36524 - DNA, 25 bp, SARS Virus
catcaccgaccaacataataacggt

SEQ ID NO: 36525 - DNA, 25 bp, SARS Virus
atcaccgaccacaataataacggta

SEQ ID NO: 36526 - DNA, 25 bp, SARS Virus
tcaccgaccaccataataacggtat

SEQ ID NO: 36527 - DNA, 25 bp, SARS Virus
caccgaccaccaaaataacggtata

SEQ ID NO: 36528 - DNA, 25 bp, SARS Virus
accgaccaccataataacggtataa

SEQ ID NO: 36529 - DNA, 25 bp, SARS Virus
ccgaccaccataataacggtataac

SEQ ID NO: 36530 - DNA, 25 bp, SARS Virus
cgaccaccataaaaacggtataacc

SEQ ID NO: 36531 - DNA, 25 bp, SARS Virus
gaccaccataataacggtataacca

SEQ ID NO: 36532 - DNA, 25 bp, SARS Virus
accaccataataacggtataaccac

SEQ ID NO: 36533 - DNA, 25 bp, SARS Virus
ccaccataataaaggtataaccact

SEQ ID NO: 36534 - DNA, 25 bp, SARS Virus
caccataataacagtataaccactg

SEQ ID NO: 36535 - DNA, 25 bp, SARS Virus
accataataacgatataaccactga

SEQ ID NO: 36536 - DNA, 25 bp, SARS Virus
ccataataacggaataaccactgaa

SEQ ID NO: 36537 - DNA, 25 bp, SARS Virus
cataataacggtataaccactgaac

SEQ ID NO: 36538 - DNA, 25 bp, SARS Virus
ataataacggtaaaaccactgaaca

SEQ ID NO: 36539 - DNA, 25 bp, SARS Virus
taataacggtataaccactgaacac

SEQ ID NO: 36540 - DNA, 25 bp, SARS Virus
aataacggtataaccactgaacacg

SEQ ID NO: 36541 - DNA, 25 bp, SARS Virus
ataacggtataaacactgaacacga

SEQ ID NO: 36542 - DNA, 25 bp, SARS Virus
taacggtataacaactgaacacgac

SEQ ID NO: 36543 - DNA, 25 bp, SARS Virus
aacggtataaccactgaacacgacg

SEQ ID NO: 36544 - DNA, 25 bp, SARS Virus
acggtataaccaatgaacacgacgg

SEQ ID NO: 36545 - DNA, 25 bp, SARS Virus
cggtataaccacagaacacgacgga

SEQ ID NO: 36546 - DNA, 25 bp, SARS Virus
ggtataaccactaaacacgacggat

SEQ ID NO: 36547 - DNA, 25 bp, SARS Virus
gtataaccactgaacacgacggatg

SEQ ID NO: 36548 - DNA, 25 bp, SARS Virus
tataaccactgaacacgacggatga

SEQ ID NO: 36549 - DNA, 25 bp, SARS Virus
ataaccactgaaaacgacggatgat

SEQ ID NO: 36550 - DNA, 25 bp, SARS Virus
taaccactgaacacgacggatgatg

SEQ ID NO: 36551 - DNA, 25 bp, SARS Virus
aaccactgaacaagacggatgatga

SEQ ID NO: 36552 - DNA, 25 bp, SARS Virus
accactgaacacaacggatgatgaa

SEQ ID NO: 36553 - DNA, 25 bp, SARS Virus
ccactgaacacgacggatgatgaaa

SEQ ID NO: 36554 - DNA, 25 bp, SARS Virus
cactgaacacgaaggatgatgaaat

SEQ ID NO: 36555 - DNA, 25 bp, SARS Virus
actgaacacgacagatgatgaaata

SEQ ID NO: 36556 - DNA, 25 bp, SARS Virus
ctgaacacgacgaatgatgaaatac

SEQ ID NO: 36557 - DNA, 25 bp, SARS Virus
tgaacacgacggatgatgaaatact

SEQ ID NO: 36558 - DNA, 25 bp, SARS Virus
gaacacgacggaagatgaaatactt

SEQ ID NO: 36559 - DNA, 25 bp, SARS Virus
aacacgacggataatgaaatacttt

SEQ ID NO: 36560 - DNA, 25 bp, SARS Virus
acacgacggatgatgaaatacttta

SEQ ID NO: 36561 - DNA, 25 bp, SARS Virus
cacgacggatgaagaaatactttaa

SEQ ID NO: 36562 - DNA, 25 bp, SARS Virus
acgacggatgataaaatactttaag

SEQ ID NO: 36563 - DNA, 25 bp, SARS Virus
cgacggatgatgaaatactttaagt

SEQ ID NO: 36564 - DNA, 25 bp, SARS Virus
gacggatgatgaaatactttaagtc

SEQ ID NO: 36565 - DNA, 25 bp, SARS Virus
acggatgatgaaatactttaagtct

SEQ ID NO: 36566 - DNA, 25 bp, SARS Virus
cggatgatgaaaaactttaagtctg

SEQ ID NO: 36567 - DNA, 25 bp, SARS Virus
ggatgatgaaatactttaagtctgc

SEQ ID NO: 36568 - DNA, 25 bp, SARS Virus
gatgatgaaataatttaagtctgca

SEQ ID NO: 36569 - DNA, 25 bp, SARS Virus
atgatgaaatacattaagtctgcac

SEQ ID NO: 36570 - DNA, 25 bp, SARS Virus
tgatgaaatactataagtctgcaca

SEQ ID NO: 36571 - DNA, 25 bp, SARS Virus
gatgaaatacttaaagtctgcacaa

SEQ ID NO: 36572 - DNA, 25 bp, SARS Virus
atgaaatactttaagtctgcacaaa

SEQ ID NO: 36573 - DNA, 25 bp, SARS Virus
tgaaatactttaagtctgcacaaaa

SEQ ID NO: 36574 - DNA, 25 bp, SARS Virus
gaaatactttaaatctgcacaaaaa

SEQ ID NO: 36575 - DNA, 25 bp, SARS Virus
aaatactttaagactgcacaaaaac

SEQ ID NO: 36576 - DNA, 25 bp, SARS Virus
aatactttaagtatgcacaaaaacc

SEQ ID NO: 36577 - DNA, 25 bp, SARS Virus
atactttaagtcagcacaaaaacca

SEQ ID NO: 36578 - DNA, 25 bp, SARS Virus
tactttaagtctacacaaaaaccac

SEQ ID NO: 36579 - DNA, 25 bp, SARS Virus
actttaagtctgaacaaaaaccact

SEQ ID NO: 36580 - DNA, 25 bp, SARS Virus
ctttaagtctgcacaaaaaccactc

SEQ ID NO: 36581 - DNA, 25 bp, SARS Virus
tttaagtctgcaaaaaaaccactca

SEQ ID NO: 36582 - DNA, 25 bp, SARS Virus
ttaagtctgcacaaaaaccactcat

SEQ ID NO: 36583 - DNA, 25 bp, SARS Virus
taagtctgcacaaaaaccactcatg

SEQ ID NO: 36584 - DNA, 25 bp, SARS Virus
aagtctgcacaaaaaccactcatgt

SEQ ID NO: 36585 - DNA, 25 bp, SARS Virus
agtctgcacaaaaaccactcatgtt

SEQ ID NO: 36586 - DNA, 25 bp, SARS Virus
gtctgcacaaaaaccactcatgttg

SEQ ID NO: 36587 - DNA, 25 bp, SARS Virus
tctgcacaaaaaacactcatgttgg

SEQ ID NO: 36588 - DNA, 25 bp, SARS Virus
ctgcacaaaaacaactcatgttggt

SEQ ID NO: 36589 - DNA, 25 bp, SARS Virus
tgcacaaaaaccactcatgttggta

SEQ ID NO: 36590 - DNA, 25 bp, SARS Virus
gcacaaaaaccaatcatgttggtac

SEQ ID NO: 36591 - DNA, 25 bp, SARS Virus
cacaaaaaccacacatgttggtaca

SEQ ID NO: 36592 - DNA, 25 bp, SARS Virus
acaaaaaccactaatgttggtacaa

SEQ ID NO: 36593 - DNA, 25 bp, SARS Virus
caaaaaccactcatgttggtacaac

SEQ ID NO: 36594 - DNA, 25 bp, SARS Virus
aaaaaccactcaagttggtacaaca

SEQ ID NO: 36595 - DNA, 25 bp, SARS Virus
aaaaccactcatattggtacaacaa

SEQ ID NO: 36596 - DNA, 25 bp, SARS Virus
aaaccactcatgatggtacaacaac

SEQ ID NO: 36597 - DNA, 25 bp, SARS Virus
aaccactcatgtaggtacaacaacg

SEQ ID NO: 36598 - DNA, 25 bp, SARS Virus
accactcatgttagtacaacaacga

SEQ ID NO: 36599 - DNA, 25 bp, SARS Virus
ccactcatgttgatacaacaacgac

SEQ ID NO: 36600 - DNA, 25 bp, SARS Virus
cactcatgttggaacaacaacgacg

SEQ ID NO: 36601 - DNA, 25 bp, SARS Virus
actcatgttggtacaacaacgacga

SEQ ID NO: 36602 - DNA, 25 bp, SARS Virus
ctcatgttggtaaaacaacgacgat

SEQ ID NO: 36603 - DNA, 25 bp, SARS Virus
tcatgttggtacaacaacgacgatt

SEQ ID NO: 36604 - DNA, 25 bp, SARS Virus
catgttggtacaacaacgacgatta

SEQ ID NO: 36605 - DNA, 25 bp, SARS Virus
atgttggtacaaaaacgacgattac

SEQ ID NO: 36606 - DNA, 25 bp, SARS Virus
tgttggtacaacaacgacgattacg

SEQ ID NO: 36607 - DNA, 25 bp, SARS Virus
gttggtacaacaacgacgattacgt

SEQ ID NO: 36608 - DNA, 25 bp, SARS Virus
ttggtacaacaaagacgattacgtg

SEQ ID NO: 36609 - DNA, 25 bp, SARS Virus
tggtacaacaacaacgattacgtga

SEQ ID NO: 36610 - DNA, 25 bp, SARS Virus
ggtacaacaacgacgattacgtgaa

SEQ ID NO: 36611 - DNA, 25 bp, SARS Virus
gtacaacaacgaagattacgtgaaa

SEQ ID NO: 36612 - DNA, 25 bp, SARS Virus
tacaacaacgacaattacgtgaaaa

SEQ ID NO: 36613 - DNA, 25 bp, SARS Virus
acaacaacgacgattacgtgaaaac

SEQ ID NO: 36614 - DNA, 25 bp, SARS Virus
caacaacgacgaatacgtgaaaaca

SEQ ID NO: 36615 - DNA, 25 bp, SARS Virus
aacaacgacgataacgtgaaaacaa

SEQ ID NO: 36616 - DNA, 25 bp, SARS Virus
acaacgacgattacgtgaaaacaaa

SEQ ID NO: 36617 - DNA, 25 bp, SARS Virus
caacgacgattaagtgaaaacaaaa

SEQ ID NO: 36618 - DNA, 25 bp, SARS Virus
aacgacgattacatgaaaacaaaaa

SEQ ID NO: 36619 - DNA, 25 bp, SARS Virus
acgacgattacgagaaaacaaaaac

SEQ ID NO: 36620 - DNA, 25 bp, SARS Virus
cgacgattacgtaaaaacaaaaact

SEQ ID NO: 36621 - DNA, 25 bp, SARS Virus
gacgattacgtgaaaacaaaaacta

SEQ ID NO: 36622 - DNA, 25 bp, SARS Virus
acgattacgtgaaaacaaaaactac

SEQ ID NO: 36623 - DNA, 25 bp, SARS Virus
cgattacgtgaaaacaaaaactaca

SEQ ID NO: 36624 - DNA, 25 bp, SARS Virus
gattacgtgaaaacaaaaactacag

SEQ ID NO: 36625 - DNA, 25 bp, SARS Virus
attacgtgaaaaaaaaaactacaga

SEQ ID NO: 36626 - DNA, 25 bp, SARS Virus
ttacgtgaaaacaaaaactacagaa

SEQ ID NO: 36627 - DNA, 25 bp, SARS Virus
tacgtgaaaacaaaaactacagaaa

SEQ ID NO: 36628 - DNA, 25 bp, SARS Virus
acgtgaaaacaaaaactacagaaag

SEQ ID NO: 36629 - DNA, 25 bp, SARS Virus
cgtgaaaacaaaaactacagaaagt

SEQ ID NO: 36630 - DNA, 25 bp, SARS Virus
gtgaaaacaaaaactacagaaagtg

SEQ ID NO: 36631 - DNA, 25 bp, SARS Virus
tgaaaacaaaaaatacagaaagtga

SEQ ID NO: 36632 - DNA, 25 bp, SARS Virus
gaaaacaaaaacaacagaaagtgat

SEQ ID NO: 36633 - DNA, 25 bp, SARS Virus
aaaacaaaaactacagaaagtgata

SEQ ID NO: 36634 - DNA, 25 bp, SARS Virus
aaacaaaaactaaagaaagtgatat

SEQ ID NO: 36635 - DNA, 25 bp, SARS Virus
aacaaaaactacagaaagtgatatg

SEQ ID NO: 36636 - DNA, 25 bp, SARS Virus
acaaaaactacaaaaagtgatatga

SEQ ID NO: 36637 - DNA, 25 bp, SARS Virus
caaaaactacagaaagtgatatgag

SEQ ID NO: 36638 - DNA, 25 bp, SARS Virus
aaaaactacagaaagtgatatgaga

SEQ ID NO: 36639 - DNA, 25 bp, SARS Virus
aaaactacagaaagtgatatgagac

SEQ ID NO: 36640 - DNA, 25 bp, SARS Virus
aaactacagaaaatgatatgagaca

SEQ ID NO: 36641 - DNA, 25 bp, SARS Virus
aactacagaaagagatatgagacag

SEQ ID NO: 36642 - DNA, 25 bp, SARS Virus
actacagaaagtaatatgagacaga

SEQ ID NO: 36643 - DNA, 25 bp, SARS Virus
ctacagaaagtgatatgagacagac

SEQ ID NO: 36644 - DNA, 25 bp, SARS Virus
tacagaaagtgaaatgagacagacc

SEQ ID NO: 36645 - DNA, 25 bp, SARS Virus
acagaaagtgatatgagacagacca

SEQ ID NO: 36646 - DNA, 25 bp, SARS Virus
cagaaagtgataagagacagaccat

SEQ ID NO: 36647 - DNA, 25 bp, SARS Virus
agaaagtgatataagacagaccatg

SEQ ID NO: 36648 - DNA, 25 bp, SARS Virus
gaaagtgatatgagacagaccatgg

SEQ ID NO: 36649 - DNA, 25 bp, SARS Virus
aaagtgatatgaaacagaccatggt

SEQ ID NO: 36650 - DNA, 25 bp, SARS Virus
aagtgatatgagacagaccatggtc

SEQ ID NO: 36651 - DNA, 25 bp, SARS Virus
agtgatatgagaaagaccatggtcg

SEQ ID NO: 36652 - DNA, 25 bp, SARS Virus
gtgatatgagacagaccatggtcga

SEQ ID NO: 36653 - DNA, 25 bp, SARS Virus
tgatatgagacaaaccatggtcgaa

SEQ ID NO: 36654 - DNA, 25 bp, SARS Virus
gatatgagacagaccatggtcgaat

SEQ ID NO: 36655 - DNA, 25 bp, SARS Virus
atatgagacagaacatggtcgaatg

SEQ ID NO: 36656 - DNA, 25 bp, SARS Virus
tatgagacagacaatggtcgaatgt

SEQ ID NO: 36657 - DNA, 25 bp, SARS Virus
atgagacagaccatggtcgaatgtc

SEQ ID NO: 36658 - DNA, 25 bp, SARS Virus
tgagacagaccaaggtcgaatgtcg

SEQ ID NO: 36659 - DNA, 25 bp, SARS Virus
gagacagaccatagtcgaatgtcga

SEQ ID NO: 36660 - DNA, 25 bp, SARS Virus
agacagaccatgatcgaatgtcgaa

SEQ ID NO: 36661 - DNA, 25 bp, SARS Virus
gacagaccatggacgaatgtcgaaa

SEQ ID NO: 36662 - DNA, 25 bp, SARS Virus
acagaccatggtagaatgtcgaaag

SEQ ID NO: 36663 - DNA, 25 bp, SARS Virus
cagaccatggtcaaatgtcgaaaga

SEQ ID NO: 36664 - DNA, 25 bp, SARS Virus
agaccatggtcgaatgtcgaaagac

SEQ ID NO: 36665 - DNA, 25 bp, SARS Virus
gaccatggtcgaatgtcgaaagacg

SEQ ID NO: 36666 - DNA, 25 bp, SARS Virus
accatggtcgaaagtcgaaagacgg

SEQ ID NO: 36667 - DNA, 25 bp, SARS Virus
ccatggtcgaatatcgaaagacggc

SEQ ID NO: 36668 - DNA, 25 bp, SARS Virus
catggtcgaatgacgaaagacggcc

SEQ ID NO: 36669 - DNA, 25 bp, SARS Virus
atggtcgaatgtagaaagacggccc

SEQ ID NO: 36670 - DNA, 25 bp, SARS Virus
tggtcgaatgtcaaaagacggccct

SEQ ID NO: 36671 - DNA, 25 bp, SARS Virus
ggtcgaatgtcgaaagacggccctc

SEQ ID NO: 36672 - DNA, 25 bp, SARS Virus
gtcgaatgtcgaaagacggccctca

SEQ ID NO: 36673 - DNA, 25 bp, SARS Virus
tcgaatgtcgaaagacggccctcag

SEQ ID NO: 36674 - DNA, 25 bp, SARS Virus
cgaatgtcgaaaaacggccctcaga

SEQ ID NO: 36675 - DNA, 25 bp, SARS Virus
gaatgtcgaaagacggccctcagat

SEQ ID NO: 36676 - DNA, 25 bp, SARS Virus
aatgtcgaaagaaggccctcagatg

SEQ ID NO: 36677 - DNA, 25 bp, SARS Virus
atgtcgaaagacagccctcagatga

SEQ ID NO: 36678 - DNA, 25 bp, SARS Virus
tgtcgaaagacgaccctcagatgag

SEQ ID NO: 36679 - DNA, 25 bp, SARS Virus
gtcgaaagacggacctcagatgagt

SEQ ID NO: 36680 - DNA, 25 bp, SARS Virus
tcgaaagacggcactcagatgagtc

SEQ ID NO: 36681 - DNA, 25 bp, SARS Virus
cgaaagacggccatcagatgagtca

SEQ ID NO: 36682 - DNA, 25 bp, SARS Virus
gaaagacggcccacagatgagtcag

SEQ ID NO: 36683 - DNA, 25 bp, SARS Virus
aaagacggccctaagatgagtcaga

SEQ ID NO: 36684 - DNA, 25 bp, SARS Virus
aagacggccctcagatgagtcagaa

SEQ ID NO: 36685 - DNA, 25 bp, SARS Virus
agacggccctcaaatgagtcagaaa

SEQ ID NO: 36686 - DNA, 25 bp, SARS Virus
gacggccctcagatgagtcagaaaa

SEQ ID NO: 36687 - DNA, 25 bp, SARS Virus
acggccctcagaagagtcagaaaat

SEQ ID NO: 36688 - DNA, 25 bp, SARS Virus
cggccctcagataagtcagaaaatg

SEQ ID NO: 36689 - DNA, 25 bp, SARS Virus
ggccctcagatgagtcagaaaatga

SEQ ID NO: 36690 - DNA, 25 bp, SARS Virus
gccctcagatgaatcagaaaatgaa

SEQ ID NO: 36691 - DNA, 25 bp, SARS Virus
ccctcagatgagacagaaaatgaac

SEQ ID NO: 36692 - DNA, 25 bp, SARS Virus
cctcagatgagtaagaaaatgaaca

SEQ ID NO: 36693 - DNA, 25 bp, SARS Virus
ctcagatgagtcagaaaatgaacat

SEQ ID NO: 36694 - DNA, 25 bp, SARS Virus
tcagatgagtcaaaaaatgaacatg

SEQ ID NO: 36695 - DNA, 25 bp, SARS Virus
cagatgagtcagaaaatgaacatga

SEQ ID NO: 36696 - DNA, 25 bp, SARS Virus
agatgagtcagaaaatgaacatgaa

SEQ ID NO: 36697 - DNA, 25 bp, SARS Virus
gatgagtcagaaaatgaacatgaac

SEQ ID NO: 36698 - DNA, 25 bp, SARS Virus
atgagtcagaaaatgaacatgaact

SEQ ID NO: 36699 - DNA, 25 bp, SARS Virus
tgagtcagaaaaagaacatgaactg

SEQ ID NO: 36700 - DNA, 25 bp, SARS Virus
gagtcagaaaataaacatgaactgt

SEQ ID NO: 36701 - DNA, 25 bp, SARS Virus
agtcagaaaatgaacatgaactgta

SEQ ID NO: 36702 - DNA, 25 bp, SARS Virus
gtcagaaaatgaacatgaactgtaa

SEQ ID NO: 36703 - DNA, 25 bp, SARS Virus
tcagaaaatgaaaatgaactgtaag

SEQ ID NO: 36704 - DNA, 25 bp, SARS Virus
cagaaaatgaacatgaactgtaaga

SEQ ID NO: 36705 - DNA, 25 bp, SARS Virus
agaaaatgaacaagaactgtaagat

SEQ ID NO: 36706 - DNA, 25 bp, SARS Virus
gaaaatgaacataaactgtaagata

SEQ ID NO: 36707 - DNA, 25 bp, SARS Virus
aaaatgaacatgaactgtaagataa

SEQ ID NO: 36708 - DNA, 25 bp, SARS Virus
aaatgaacatgaactgtaagataaa

SEQ ID NO: 36709 - DNA, 25 bp, SARS Virus
aatgaacatgaaatgtaagataaag

SEQ ID NO: 36710 - DNA, 25 bp, SARS Virus
atgaacatgaacagtaagataaagt

SEQ ID NO: 36711 - DNA, 25 bp, SARS Virus
tgaacatgaactataagataaagtg

SEQ ID NO: 36712 - DNA, 25 bp, SARS Virus
gaacatgaactgaaagataaagtgg

SEQ ID NO: 36713 - DNA, 25 bp, SARS Virus
aacatgaactgtaagataaagtggt

SEQ ID NO: 36714 - DNA, 25 bp, SARS Virus
acatgaactgtaagataaagtggtt

SEQ ID NO: 36715 - DNA, 25 bp, SARS Virus
catgaactgtaaaataaagtggtta

SEQ ID NO: 36716 - DNA, 25 bp, SARS Virus
atgaactgtaagataaagtggttac

SEQ ID NO: 36717 - DNA, 25 bp, SARS Virus
tgaactgtaagaaaaagtggttact

SEQ ID NO: 36718 - DNA, 25 bp, SARS Virus
gaactgtaagataaagtggttacta

SEQ ID NO: 36719 - DNA, 25 bp, SARS Virus
aactgtaagataaagtggttactac

SEQ ID NO: 36720 - DNA, 25 bp, SARS Virus
actgtaagataaagtggttactaca

SEQ ID NO: 36721 - DNA, 25 bp, SARS Virus
ctgtaagataaaatggttactacaa

SEQ ID NO: 36722 - DNA, 25 bp, SARS Virus
tgtaagataaagaggttactacaaa

SEQ ID NO: 36723 - DNA, 25 bp, SARS Virus
gtaagataaagtagttactacaaag

SEQ ID NO: 36724 - DNA, 25 bp, SARS Virus
taagataaagtgattactacaaagt

SEQ ID NO: 36725 - DNA, 25 bp, SARS Virus
aagataaagtggatactacaaagta

SEQ ID NO: 36726 - DNA, 25 bp, SARS Virus
agataaagtggtaactacaaagtaa

SEQ ID NO: 36727 - DNA, 25 bp, SARS Virus
gataaagtggttactacaaagtaag

SEQ ID NO: 36728 - DNA, 25 bp, SARS Virus
ataaagtggttaatacaaagtaaga

SEQ ID NO: 36729 - DNA, 25 bp, SARS Virus
agcaatacacgactacctaccaagg

SEQ ID NO: 36730 - DNA, 25 bp, SARS Virus
gcaatacacgaacacctaccaaggt

SEQ ID NO: 36731 - DNA, 25 bp, SARS Virus
caatacacgaatccctaccaaggta

SEQ ID NO: 36732 - DNA, 25 bp, SARS Virus
aatacacgaatacctaccaaggtag

SEQ ID NO: 36733 - DNA, 25 bp, SARS Virus
atacacgaatacctaccaaggtagt

SEQ ID NO: 36734 - DNA, 25 bp, SARS Virus
tacacgaatacccaccaaggtagta

SEQ ID NO: 36735 - DNA, 25 bp, SARS Virus
acacgaatacctcccaaggtagtat

SEQ ID NO: 36736 - DNA, 25 bp, SARS Virus
cacgaatacctaccaaggtagtatg

SEQ ID NO: 36737 - DNA, 25 bp, SARS Virus
acgaatacctaccaaggtagtatgt

SEQ ID NO: 36738 - DNA, 25 bp, SARS Virus
cgaatacctacccaggtagtatgtc

SEQ ID NO: 36739 - DNA, 25 bp, SARS Virus
gaatacctaccacggtagtatgtca

SEQ ID NO: 36740 - DNA, 25 bp, SARS Virus
aatacctaccaacgtagtatgtcaa

SEQ ID NO: 36741 - DNA, 25 bp, SARS Virus
atacctaccaagctagtatgtcaaa

SEQ ID NO: 36742 - DNA, 25 bp, SARS Virus
tacctaccaaggcagtatgtcaaag

SEQ ID NO: 36743 - DNA, 25 bp, SARS Virus
acctaccaaggtcgtatgtcaaagg

SEQ ID NO: 36744 - DNA, 25 bp, SARS Virus
cctaccaaggtactatgtcaaagga

SEQ ID NO: 36745 - DNA, 25 bp, SARS Virus
ctaccaaggtagcatgtcaaaggat

SEQ ID NO: 36746 - DNA, 25 bp, SARS Virus
taccaaggtagtctgtcaaaggatt

SEQ ID NO: 36747 - DNA, 25 bp, SARS Virus
accaaggtagtacgtcaaaggattg

SEQ ID NO: 36748 - DNA, 25 bp, SARS Virus
ccaaggtagtatctcaaaggattgt

SEQ ID NO: 36749 - DNA, 25 bp, SARS Virus
caaggtagtatgccaaaggattgtg

SEQ ID NO: 36750 - DNA, 25 bp, SARS Virus
aaggtagtatgtcaaaggattgtga

SEQ ID NO: 36751 - DNA, 25 bp, SARS Virus
aggtagtatgtccaaggattgtgaa

SEQ ID NO: 36752 - DNA, 25 bp, SARS Virus
ggtagtatgtcacaggattgtgaat

SEQ ID NO: 36753 - DNA, 25 bp, SARS Virus
gtagtatgtcaacggattgtgaatg

SEQ ID NO: 36754 - DNA, 25 bp, SARS Virus
tagtatgtcaaacgattgtgaatgg

SEQ ID NO: 36755 - DNA, 25 bp, SARS Virus
agtatgtcaaagcattgtgaatgga

SEQ ID NO: 36756 - DNA, 25 bp, SARS Virus
gtatgtcaaaggcttgtgaatggac

SEQ ID NO: 36757 - DNA, 25 bp, SARS Virus
tatgtcaaaggactgtgaatggacc

SEQ ID NO: 36758 - DNA, 25 bp, SARS Virus
atgtcaaaggatcgtgaatggacct

SEQ ID NO: 36759 - DNA, 25 bp, SARS Virus
tgtcaaaggattctgaatggacctc

SEQ ID NO: 36760 - DNA, 25 bp, SARS Virus
gtcaaaggattgcgaatggacctcc

SEQ ID NO: 36761 - DNA, 25 bp, SARS Virus
tcaaaggattgtcaatggacctccc

SEQ ID NO: 36762 - DNA, 25 bp, SARS Virus
caaaggattgtgcatggacctccca

SEQ ID NO: 36763 - DNA, 25 bp, SARS Virus
aaaggattgtgactggacctcccaa

SEQ ID NO: 36764 - DNA, 25 bp, SARS Virus
aaggattgtgaacggacctcccaag

SEQ ID NO: 36765 - DNA, 25 bp, SARS Virus
aggattgtgaatcgacctcccaaga

SEQ ID NO: 36766 - DNA, 25 bp, SARS Virus
ggattgtgaatgcacctcccaagac

SEQ ID NO: 36767 - DNA, 25 bp, SARS Virus
gattgtgaatggccctcccaagaca

SEQ ID NO: 36768 - DNA, 25 bp, SARS Virus
attgtgaatggacctcccaagacaa

SEQ ID NO: 36769 - DNA, 25 bp, SARS Virus
ttgtgaatggacctcccaagacaat

SEQ ID NO: 36770 - DNA, 25 bp, SARS Virus
tgtgaatggaccccccaagacaatc

SEQ ID NO: 36771 - DNA, 25 bp, SARS Virus
gtgaatggacctcccaagacaatct

SEQ ID NO: 36772 - DNA, 25 bp, SARS Virus
tgaatggacctcccaagacaatctc

SEQ ID NO: 36773 - DNA, 25 bp, SARS Virus
gaatggacctcccaagacaatctca

SEQ ID NO: 36774 - DNA, 25 bp, SARS Virus
aatggacctccccagacaatctcat

SEQ ID NO: 36775 - DNA, 25 bp, SARS Virus
atggacctcccacgacaatctcatc

SEQ ID NO: 36776 - DNA, 25 bp, SARS Virus
tggacctcccaacacaatctcatca

SEQ ID NO: 36777 - DNA, 25 bp, SARS Virus
ggacctcccaagccaatctcatcat

SEQ ID NO: 36778 - DNA, 25 bp, SARS Virus
gacctcccaagacaatctcatcatt

SEQ ID NO: 36779 - DNA, 25 bp, SARS Virus
acctcccaagaccatctcatcattg

SEQ ID NO: 36780 - DNA, 25 bp, SARS Virus
cctcccaagacactctcatcattgt

SEQ ID NO: 36781 - DNA, 25 bp, SARS Virus
ctcccaagacaacctcatcattgtt

SEQ ID NO: 36782 - DNA, 25 bp, SARS Virus
tcccaagacaatctcatcattgttg

SEQ ID NO: 36783 - DNA, 25 bp, SARS Virus
cccaagacaatcccatcattgttga

SEQ ID NO: 36784 - DNA, 25 bp, SARS Virus
ccaagacaatctcatcattgttgaa

SEQ ID NO: 36785 - DNA, 25 bp, SARS Virus
caagacaatctcctcattgttgaaa

SEQ ID NO: 36786 - DNA, 25 bp, SARS Virus
aagacaatctcaccattgttgaaaa

SEQ ID NO: 36787 - DNA, 25 bp, SARS Virus
agacaatctcatcattgttgaaaac

SEQ ID NO: 36788 - DNA, 25 bp, SARS Virus
gacaatctcatccttgttgaaaact

SEQ ID NO: 36789 - DNA, 25 bp, SARS Virus
acaatctcatcactgttgaaaacta

SEQ ID NO: 36790 - DNA, 25 bp, SARS Virus
caatctcatcatcgttgaaaactac

SEQ ID NO: 36791 - DNA, 25 bp, SARS Virus
aatctcatcattcttgaaaactacg

SEQ ID NO: 36792 - DNA, 25 bp, SARS Virus
atctcatcattgctgaaaactacga

SEQ ID NO: 36793 - DNA, 25 bp, SARS Virus
tctcatcattgtcgaaaactacgac

SEQ ID NO: 36794 - DNA, 25 bp, SARS Virus
ctcatcattgttcaaaactacgact

SEQ ID NO: 36795 - DNA, 25 bp, SARS Virus
tcatcattgttgcaaactacgactc

SEQ ID NO: 36796 - DNA, 25 bp, SARS Virus
catcattgttgacaactacgactca

SEQ ID NO: 36797 - DNA, 25 bp, SARS Virus
atcattgttgaacactacgactcat

SEQ ID NO: 36798 - DNA, 25 bp, SARS Virus
tcattgttgaaacctacgactcatg

SEQ ID NO: 36799 - DNA, 25 bp, SARS Virus
cattgttgaaaactacgactcatga

SEQ ID NO: 36800 - DNA, 25 bp, SARS Virus
attgttgaaaaccacgactcatgac

SEQ ID NO: 36801 - DNA, 25 bp, SARS Virus
ttgttgaaaactccgactcatgaca

SEQ ID NO: 36802 - DNA, 25 bp, SARS Virus
tgttgaaaactacgactcatgacat

SEQ ID NO: 36803 - DNA, 25 bp, SARS Virus
gttgaaaactaccactcatgacatc

SEQ ID NO: 36804 - DNA, 25 bp, SARS Virus
ttgaaaactacgcctcatgacatct

SEQ ID NO: 36805 - DNA, 25 bp, SARS Virus
tgaaaactacgactcatgacatctg

SEQ ID NO: 36806 - DNA, 25 bp, SARS Virus
gaaaactacgacccatgacatctgt

SEQ ID NO: 36807 - DNA, 25 bp, SARS Virus
aaaactacgactcatgacatctgta

SEQ ID NO: 36808 - DNA, 25 bp, SARS Virus
aaactacgactcctgacatctgtac

SEQ ID NO: 36809 - DNA, 25 bp, SARS Virus
aactacgactcacgacatctgtacc

SEQ ID NO: 36810 - DNA, 25 bp, SARS Virus
actacgactcatcacatctgtacca

SEQ ID NO: 36811 - DNA, 25 bp, SARS Virus
ctacgactcatgccatctgtaccat

SEQ ID NO: 36812 - DNA, 25 bp, SARS Virus
tacgactcatgacatctgtaccatg

SEQ ID NO: 36813 - DNA, 25 bp, SARS Virus
acgactcatgacctctgtaccatgt

SEQ ID NO: 36814 - DNA, 25 bp, SARS Virus
cgactcatgacacctgtaccatgta

SEQ ID NO: 36815 - DNA, 25 bp, SARS Virus
gactcatgacatctgtaccatgtac

SEQ ID NO: 36816 - DNA, 25 bp, SARS Virus
actcatgacatccgtaccatgtacg

SEQ ID NO: 36817 - DNA, 25 bp, SARS Virus
ctcatgacatctctaccatgtacgc

SEQ ID NO: 36818 - DNA, 25 bp, SARS Virus
tcatgacatctgcaccatgtacgct

SEQ ID NO: 36819 - DNA, 25 bp, SARS Virus
catgacatctgtcccatgtacgctt

SEQ ID NO: 36820 - DNA, 25 bp, SARS Virus
atgacatctgtaccatgtacgcttt

SEQ ID NO: 36821 - DNA, 25 bp, SARS Virus
tgacatctgtaccatgtacgctttc

SEQ ID NO: 36822 - DNA, 25 bp, SARS Virus
gacatctgtaccctgtacgctttcc

SEQ ID NO: 36823 - DNA, 25 bp, SARS Virus
acatctgtaccacgtacgctttcca

SEQ ID NO: 36824 - DNA, 25 bp, SARS Virus
catctgtaccatctacgctttccag

SEQ ID NO: 36825 - DNA, 25 bp, SARS Virus
atctgtaccatgcacgctttccagt

SEQ ID NO: 36826 - DNA, 25 bp, SARS Virus
tctgtaccatgtccgctttccagtc

SEQ ID NO: 36827 - DNA, 25 bp, SARS Virus
ctgtaccatgtacgctttccagtct

SEQ ID NO: 36828 - DNA, 25 bp, SARS Virus
tgtaccatgtaccctttccagtctt

SEQ ID NO: 36829 - DNA, 25 bp, SARS Virus
gtaccatgtacgctttccagtcttc

SEQ ID NO: 36830 - DNA, 25 bp, SARS Virus
taccatgtacgccttccagtcttca

SEQ ID NO: 36831 - DNA, 25 bp, SARS Virus
accatgtacgctctccagtcttcat

SEQ ID NO: 36832 - DNA, 25 bp, SARS Virus
ccatgtacgcttcccagtcttcatc

SEQ ID NO: 36833 - DNA, 25 bp, SARS Virus
catgtacgctttccagtcttcatcc

SEQ ID NO: 36834 - DNA, 25 bp, SARS Virus
atgtacgctttccagtcttcatcca

SEQ ID NO: 36835 - DNA, 25 bp, SARS Virus
tgtacgctttcccgtcttcatccat

SEQ ID NO: 36836 - DNA, 25 bp, SARS Virus
gtacgctttccactcttcatccata

SEQ ID NO: 36837 - DNA, 25 bp, SARS Virus
tacgctttccagccttcatccataa

SEQ ID NO: 36838 - DNA, 25 bp, SARS Virus
acgctttccagtcttcatccataaa

SEQ ID NO: 36839 - DNA, 25 bp, SARS Virus
cgctttccagtcctcatccataaac

SEQ ID NO: 36840 - DNA, 25 bp, SARS Virus
gctttccagtctccatccataaacg

SEQ ID NO: 36841 - DNA, 25 bp, SARS Virus
ctttccagtcttcatccataaacgg

SEQ ID NO: 36842 - DNA, 25 bp, SARS Virus
tttccagtcttcctccataaacgga

SEQ ID NO: 36843 - DNA, 25 bp, SARS Virus
ttccagtcttcacccataaacggat

SEQ ID NO: 36844 - DNA, 25 bp, SARS Virus
tccagtcttcatccataaacggata

SEQ ID NO: 36845 - DNA, 25 bp, SARS Virus
ccagtcttcatccataaacggatag

SEQ ID NO: 36846 - DNA, 25 bp, SARS Virus
cagtcttcatccctaaacggataga

SEQ ID NO: 36847 - DNA, 25 bp, SARS Virus
agtcttcatccacaaacggatagat

SEQ ID NO: 36848 - DNA, 25 bp, SARS Virus
gtcttcatccatcaacggatagatg

SEQ ID NO: 36849 - DNA, 25 bp, SARS Virus
tcttcatccatacacggatagatgg

SEQ ID NO: 36850 - DNA, 25 bp, SARS Virus
cttcatccataaccggatagatggt

SEQ ID NO: 36851 - DNA, 25 bp, SARS Virus
ttcatccataaacggatagatggtc

SEQ ID NO: 36852 - DNA, 25 bp, SARS Virus
tcatccataaaccgatagatggtca

SEQ ID NO: 36853 - DNA, 25 bp, SARS Virus
catccataaacgcatagatggtcac

SEQ ID NO: 36854 - DNA, 25 bp, SARS Virus
atccataaacggctagatggtcacc

SEQ ID NO: 36855 - DNA, 25 bp, SARS Virus
tccataaacggacagatggtcacca

SEQ ID NO: 36856 - DNA, 25 bp, SARS Virus
ccataaacggatcgatggtcaccat

SEQ ID NO: 36857 - DNA, 25 bp, SARS Virus
cataaacggatacatggtcaccatc

SEQ ID NO: 36858 - DNA, 25 bp, SARS Virus
ataaacggatagctggtcaccatct

SEQ ID NO: 36859 - DNA, 25 bp, SARS Virus
taaacggatagacggtcaccatcta

SEQ ID NO: 36860 - DNA, 25 bp, SARS Virus
aaacggatagatcgtcaccatctac

SEQ ID NO: 36861 - DNA, 25 bp, SARS Virus
aacggatagatgctcaccatctacc

SEQ ID NO: 36862 - DNA, 25 bp, SARS Virus
acggatagatggccaccatctaccc

SEQ ID NO: 36863 - DNA, 25 bp, SARS Virus
cggatagatggtcaccatctaccca

SEQ ID NO: 36864 - DNA, 25 bp, SARS Virus
ggatagatggtccccatctacccaa

SEQ ID NO: 36865 - DNA, 25 bp, SARS Virus
gatagatggtcaccatctacccaag

SEQ ID NO: 36866 - DNA, 25 bp, SARS Virus
atagatggtcaccatctacccaaga

SEQ ID NO: 36867 - DNA, 25 bp, SARS Virus
tagatggtcaccctctacccaagaa

SEQ ID NO: 36868 - DNA, 25 bp, SARS Virus
agatggtcaccacctacccaagaat

SEQ ID NO: 36869 - DNA, 25 bp, SARS Virus
gatggtcaccatctacccaagaatt

SEQ ID NO: 36870 - DNA, 25 bp, SARS Virus
atggtcaccatccacccaagaatta

SEQ ID NO: 36871 - DNA, 25 bp, SARS Virus
tggtcaccatctccccaagaattat

SEQ ID NO: 36872 - DNA, 25 bp, SARS Virus
ggtcaccatctacccaagaattatt

SEQ ID NO: 36873 - DNA, 25 bp, SARS Virus
gtcaccatctacccaagaattatta

SEQ ID NO: 36874 - DNA, 25 bp, SARS Virus
tcaccatctacccaagaattattac

SEQ ID NO: 36875 - DNA, 25 bp, SARS Virus
caccatctaccccagaattattact

SEQ ID NO: 36876 - DNA, 25 bp, SARS Virus
accatctacccacgaattattactc

SEQ ID NO: 36877 - DNA, 25 bp, SARS Virus
ccatctacccaacaattattactcg

SEQ ID NO: 36878 - DNA, 25 bp, SARS Virus
catctacccaagcattattactcgt

SEQ ID NO: 36879 - DNA, 25 bp, SARS Virus
atctacccaagacttattactcgta

SEQ ID NO: 36880 - DNA, 25 bp, SARS Virus
tctacccaagaactattactcgtaa

SEQ ID NO: 36881 - DNA, 25 bp, SARS Virus
ctacccaagaatcattactcgtaat

SEQ ID NO: 36882 - DNA, 25 bp, SARS Virus
tacccaagaattcttactcgtaatg

SEQ ID NO: 36883 - DNA, 25 bp, SARS Virus
acccaagaattactactcgtaatgt

SEQ ID NO: 36884 - DNA, 25 bp, SARS Virus
cccaagaattatcactcgtaatgtc

SEQ ID NO: 36885 - DNA, 25 bp, SARS Virus
ccaagaattattcctcgtaatgtct

SEQ ID NO: 36886 - DNA, 25 bp, SARS Virus
caagaattattactcgtaatgtctc

SEQ ID NO: 36887 - DNA, 25 bp, SARS Virus
aagaattattacccgtaatgtctcg

SEQ ID NO: 36888 - DNA, 25 bp, SARS Virus
agaattattactcgtaatgtctcga

SEQ ID NO: 36889 - DNA, 25 bp, SARS Virus
gaattattactcctaatgtctcgag

SEQ ID NO: 36890 - DNA, 25 bp, SARS Virus
aattattactcgcaatgtctcgaga

SEQ ID NO: 36891 - DNA, 25 bp, SARS Virus
attattactcgtcatgtctcgagat

SEQ ID NO: 36892 - DNA, 25 bp, SARS Virus
ttattactcgtactgtctcgagata

SEQ ID NO: 36893 - DNA, 25 bp, SARS Virus
tattactcgtaacgtctcgagatag

SEQ ID NO: 36894 - DNA, 25 bp, SARS Virus
attactcgtaatctctcgagatagt

SEQ ID NO: 36895 - DNA, 25 bp, SARS Virus
ttactcgtaatgcctcgagatagtc

SEQ ID NO: 36896 - DNA, 25 bp, SARS Virus
tactcgtaatgtctcgagatagtcc

SEQ ID NO: 36897 - DNA, 25 bp, SARS Virus
actcgtaatgtcccgagatagtcct

SEQ ID NO: 36898 - DNA, 25 bp, SARS Virus
ctcgtaatgtctcgagatagtcctc

SEQ ID NO: 36899 - DNA, 25 bp, SARS Virus
tcgtaatgtctccagatagtcctca

SEQ ID NO: 36900 - DNA, 25 bp, SARS Virus
cgtaatgtctcgcgatagtcctcaa

SEQ ID NO: 36901 - DNA, 25 bp, SARS Virus
gtaatgtctcgacatagtcctcaaa

SEQ ID NO: 36902 - DNA, 25 bp, SARS Virus
taatgtctcgagctagtcctcaaaa

SEQ ID NO: 36903 - DNA, 25 bp, SARS Virus
aatgtctcgagacagtcctcaaaag

SEQ ID NO: 36904 - DNA, 25 bp, SARS Virus
atgtctcgagatcgtcctcaaaaga

SEQ ID NO: 36905 - DNA, 25 bp, SARS Virus
tgtctcgagatactcctcaaaagac

SEQ ID NO: 36906 - DNA, 25 bp, SARS Virus
gtctcgagatagccctcaaaagaca

SEQ ID NO: 36907 - DNA, 25 bp, SARS Virus
tctcgagatagtcctcaaaagacac

SEQ ID NO: 36908 - DNA, 25 bp, SARS Virus
ctcgagatagtcctcaaaagacacc

SEQ ID NO: 36909 - DNA, 25 bp, SARS Virus
tcgagatagtccccaaaagacacca

SEQ ID NO: 36910 - DNA, 25 bp, SARS Virus
cgagatagtcctcaaaagacaccac

SEQ ID NO: 36911 - DNA, 25 bp, SARS Virus
gagatagtcctccaaagacaccaca

SEQ ID NO: 36912 - DNA, 25 bp, SARS Virus
agatagtcctcacaagacaccacaa

SEQ ID NO: 36913 - DNA, 25 bp, SARS Virus
gatagtcctcaacagacaccacaac

SEQ ID NO: 36914 - DNA, 25 bp, SARS Virus
atagtcctcaaacgacaccacaact

SEQ ID NO: 36915 - DNA, 25 bp, SARS Virus
tagtcctcaaaacacaccacaacta

SEQ ID NO: 36916 - DNA, 25 bp, SARS Virus
agtcctcaaaagccaccacaactac

SEQ ID NO: 36917 - DNA, 25 bp, SARS Virus
gtcctcaaaagacaccacaactacg

SEQ ID NO: 36918 - DNA, 25 bp, SARS Virus
tcctcaaaagaccccacaactacgc

SEQ ID NO: 36919 - DNA, 25 bp, SARS Virus
cctcaaaagacaccacaactacgct

SEQ ID NO: 36920 - DNA, 25 bp, SARS Virus
ctcaaaagacaccacaactacgcta

SEQ ID NO: 36921 - DNA, 25 bp, SARS Virus
tcaaaagacaccccaactacgctac

SEQ ID NO: 36922 - DNA, 25 bp, SARS Virus
caaaagacaccacaactacgctact

SEQ ID NO: 36923 - DNA, 25 bp, SARS Virus
aaaagacaccaccactacgctactt

SEQ ID NO: 36924 - DNA, 25 bp, SARS Virus
aaagacaccacacctacgctactta

SEQ ID NO: 36925 - DNA, 25 bp, SARS Virus
aagacaccacaactacgctacttag

SEQ ID NO: 36926 - DNA, 25 bp, SARS Virus
agacaccacaaccacgctacttaga

SEQ ID NO: 36927 - DNA, 25 bp, SARS Virus
gacaccacaactccgctacttagag

SEQ ID NO: 36928 - DNA, 25 bp, SARS Virus
acaccacaactacgctacttagagt

SEQ ID NO: 36929 - DNA, 25 bp, SARS Virus
caccacaactaccctacttagagta

SEQ ID NO: 36930 - DNA, 25 bp, SARS Virus
accacaactacgctacttagagtat

SEQ ID NO: 36931 - DNA, 25 bp, SARS Virus
ccacaactacgccacttagagtatc

SEQ ID NO: 36932 - DNA, 25 bp, SARS Virus
cacaactacgctccttagagtatcg

SEQ ID NO: 36933 - DNA, 25 bp, SARS Virus
acaactacgctacttagagtatcga

SEQ ID NO: 36934 - DNA, 25 bp, SARS Virus
caactacgctacctagagtatcgat

SEQ ID NO: 36935 - DNA, 25 bp, SARS Virus
aactacgctactcagagtatcgatt

SEQ ID NO: 36936 - DNA, 25 bp, SARS Virus
actacgctacttcgagtatcgattg

SEQ ID NO: 36937 - DNA, 25 bp, SARS Virus
ctacgctacttacagtatcgattgt

SEQ ID NO: 36938 - DNA, 25 bp, SARS Virus
tacgctacttagcgtatcgattgta

SEQ ID NO: 36939 - DNA, 25 bp, SARS Virus
acgctacttagactatcgattgtag

SEQ ID NO: 36940 - DNA, 25 bp, SARS Virus
cgctacttagagcatcgattgtaga

SEQ ID NO: 36941 - DNA, 25 bp, SARS Virus
gctacttagagtctcgattgtagaa

SEQ ID NO: 36942 - DNA, 25 bp, SARS Virus
ctacttagagtaccgattgtagaaa

SEQ ID NO: 36943 - DNA, 25 bp, SARS Virus
tacttagagtatcgattgtagaaat

SEQ ID NO: 36944 - DNA, 25 bp, SARS Virus
acttagagtatccattgtagaaatg

SEQ ID NO: 36945 - DNA, 25 bp, SARS Virus
cttagagtatcgcttgtagaaatga

SEQ ID NO: 36946 - DNA, 25 bp, SARS Virus
ttagagtatcgactgtagaaatgag

SEQ ID NO: 36947 - DNA, 25 bp, SARS Virus
tagagtatcgatcgtagaaatgagg

SEQ ID NO: 36948 - DNA, 25 bp, SARS Virus
agagtatcgattctagaaatgagga

SEQ ID NO: 36949 - DNA, 25 bp, SARS Virus
gagtatcgattgcagaaatgaggag

SEQ ID NO: 36950 - DNA, 25 bp, SARS Virus
agtatcgattgtcgaaatgaggaga

SEQ ID NO: 36951 - DNA, 25 bp, SARS Virus
gtatcgattgtacaaatgaggagaa

SEQ ID NO: 36952 - DNA, 25 bp, SARS Virus
tatcgattgtagcaatgaggagaac

SEQ ID NO: 36953 - DNA, 25 bp, SARS Virus
atcgattgtagacatgaggagaaca

SEQ ID NO: 36954 - DNA, 25 bp, SARS Virus
tcgattgtagaactgaggagaacac

SEQ ID NO: 36955 - DNA, 25 bp, SARS Virus
cgattgtagaaacgaggagaacacg

SEQ ID NO: 36956 - DNA, 25 bp, SARS Virus
gattgtagaaatcaggagaacacgt

SEQ ID NO: 36957 - DNA, 25 bp, SARS Virus
attgtagaaatgcggagaacacgtt

SEQ ID NO: 36958 - DNA, 25 bp, SARS Virus
ttgtagaaatgacgagaacacgttg

SEQ ID NO: 36959 - DNA, 25 bp, SARS Virus
tgtagaaatgagcagaacacgttgg

SEQ ID NO: 36960 - DNA, 25 bp, SARS Virus
gtagaaatgaggcgaacacgttgga

SEQ ID NO: 36961 - DNA, 25 bp, SARS Virus
tagaaatgaggacaacacgttggac

SEQ ID NO: 36962 - DNA, 25 bp, SARS Virus
agaaatgaggagcacacgttggaca

SEQ ID NO: 36963 - DNA, 25 bp, SARS Virus
gaaatgaggagaccacgttggacac

SEQ ID NO: 36964 - DNA, 25 bp, SARS Virus
aaatgaggagaacacgttggacacc

SEQ ID NO: 36965 - DNA, 25 bp, SARS Virus
aatgaggagaacccgttggacaccc

SEQ ID NO: 36966 - DNA, 25 bp, SARS Virus
atgaggagaacacgttggacaccca

SEQ ID NO: 36967 - DNA, 25 bp, SARS Virus
tgaggagaacaccttggacacccac

SEQ ID NO: 36968 - DNA, 25 bp, SARS Virus
gaggagaacacgctggacacccacg

SEQ ID NO: 36969 - DNA, 25 bp, SARS Virus
aggagaacacgtcggacacccacga

SEQ ID NO: 36970 - DNA, 25 bp, SARS Virus
ggagaacacgttcgacacccacgaa

SEQ ID NO: 36971 - DNA, 25 bp, SARS Virus
gagaacacgttgcacacccacgaaa

SEQ ID NO: 36972 - DNA, 25 bp, SARS Virus
agaacacgttggccacccacgaaat

SEQ ID NO: 36973 - DNA, 25 bp, SARS Virus
gaacacgttggacacccacgaaatc

SEQ ID NO: 36974 - DNA, 25 bp, SARS Virus
aacacgttggacccccacgaaatct

SEQ ID NO: 36975 - DNA, 25 bp, SARS Virus
acacgttggacacccacgaaatcta

SEQ ID NO: 36976 - DNA, 25 bp, SARS Virus
cacgttggacacccacgaaatctac

SEQ ID NO: 36977 - DNA, 25 bp, SARS Virus
acgttggacacccacgaaatctaca

SEQ ID NO: 36978 - DNA, 25 bp, SARS Virus
cgttggacacccccgaaatctacac

SEQ ID NO: 36979 - DNA, 25 bp, SARS Virus
gttggacacccacgaaatctacaca

SEQ ID NO: 36980 - DNA, 25 bp, SARS Virus
ttggacacccaccaaatctacacag

SEQ ID NO: 36981 - DNA, 25 bp, SARS Virus
tggacacccacgcaatctacacaga

SEQ ID NO: 36982 - DNA, 25 bp, SARS Virus
ggacacccacgacatctacacagac

SEQ ID NO: 36983 - DNA, 25 bp, SARS Virus
gacacccacgaactctacacagacg

SEQ ID NO: 36984 - DNA, 25 bp, SARS Virus
acacccacgaaacctacacagacga

SEQ ID NO: 36985 - DNA, 25 bp, SARS Virus
cacccacgaaatctacacagacgaa

SEQ ID NO: 36986 - DNA, 25 bp, SARS Virus
acccacgaaatccacacagacgaag

SEQ ID NO: 36987 - DNA, 25 bp, SARS Virus
cccacgaaatctccacagacgaagt

SEQ ID NO: 36988 - DNA, 25 bp, SARS Virus
ccacgaaatctacacagacgaagtc

SEQ ID NO: 36989 - DNA, 25 bp, SARS Virus
cacgaaatctacccagacgaagtca

SEQ ID NO: 36990 - DNA, 25 bp, SARS Virus
acgaaatctacacagacgaagtcat

SEQ ID NO: 36991 - DNA, 25 bp, SARS Virus
cgaaatctacaccgacgaagtcatc

SEQ ID NO: 36992 - DNA, 25 bp, SARS Virus
gaaatctacacacacgaagtcatca

SEQ ID NO: 36993 - DNA, 25 bp, SARS Virus
aaatctacacagccgaagtcatcac

SEQ ID NO: 36994 - DNA, 25 bp, SARS Virus
aatctacacagacgaagtcatcacc

SEQ ID NO: 36995 - DNA, 25 bp, SARS Virus
atctacacagaccaagtcatcaccg

SEQ ID NO: 36996 - DNA, 25 bp, SARS Virus
tctacacagacgcagtcatcaccga

SEQ ID NO: 36997 - DNA, 25 bp, SARS Virus
ctacacagacgacgtcatcaccgac

SEQ ID NO: 36998 - DNA, 25 bp, SARS Virus
tacacagacgaactcatcaccgacc

SEQ ID NO: 36999 - DNA, 25 bp, SARS Virus
acacagacgaagccatcaccgacca

SEQ ID NO: 37000 - DNA, 25 bp, SARS Virus
cacagacgaagtcatcaccgaccac

SEQ ID NO: 37001 - DNA, 25 bp, SARS Virus
acagacgaagtcctcaccgaccacc

SEQ ID NO: 37002 - DNA, 25 bp, SARS Virus
cagacgaagtcaccaccgaccacca

SEQ ID NO: 37003 - DNA, 25 bp, SARS Virus
agacgaagtcatcaccgaccaccat

SEQ ID NO: 37004 - DNA, 25 bp, SARS Virus
gacgaagtcatccccgaccaccata

SEQ ID NO: 37005 - DNA, 25 bp, SARS Virus
acgaagtcatcaccgaccaccataa

SEQ ID NO: 37006 - DNA, 25 bp, SARS Virus
cgaagtcatcaccgaccaccataat

SEQ ID NO: 37007 - DNA, 25 bp, SARS Virus
gaagtcatcacccaccaccataata

SEQ ID NO: 37008 - DNA, 25 bp, SARS Virus
aagtcatcaccgcccaccataataa

SEQ ID NO: 37009 - DNA, 25 bp, SARS Virus
agtcatcaccgaccaccataataac

SEQ ID NO: 37010 - DNA, 25 bp, SARS Virus
gtcatcaccgaccaccataataacg

SEQ ID NO: 37011 - DNA, 25 bp, SARS Virus
tcatcaccgacccccataataacgg

SEQ ID NO: 37012 - DNA, 25 bp, SARS Virus
catcaccgaccaccataataacggt

SEQ ID NO: 37013 - DNA, 25 bp, SARS Virus
atcaccgaccaccataataacggta

SEQ ID NO: 37014 - DNA, 25 bp, SARS Virus
tcaccgaccaccctaataacggtat

SEQ ID NO: 37015 - DNA, 25 bp, SARS Virus
caccgaccaccacaataacggtata

SEQ ID NO: 37016 - DNA, 25 bp, SARS Virus
accgaccaccatcataacggtataa

SEQ ID NO: 37017 - DNA, 25 bp, SARS Virus
ccgaccaccatactaacggtataac

SEQ ID NO: 37018 - DNA, 25 bp, SARS Virus
cgaccaccataacaacggtataacc

SEQ ID NO: 37019 - DNA, 25 bp, SARS Virus
gaccaccataatcacggtataacca

SEQ ID NO: 37020 - DNA, 25 bp, SARS Virus
accaccataataccggtataaccac

SEQ ID NO: 37021 - DNA, 25 bp, SARS Virus
ccaccataataacggtataaccact

SEQ ID NO: 37022 - DNA, 25 bp, SARS Virus
caccataataaccgtataaccactg

SEQ ID NO: 37023 - DNA, 25 bp, SARS Virus
accataataacgctataaccactga

SEQ ID NO: 37024 - DNA, 25 bp, SARS Virus
ccataataacggcataaccactgaa

SEQ ID NO: 37025 - DNA, 25 bp, SARS Virus
cataataacggtctaaccactgaac

SEQ ID NO: 37026 - DNA, 25 bp, SARS Virus
ataataacggtacaaccactgaaca

SEQ ID NO: 37027 - DNA, 25 bp, SARS Virus
taataacggtatcaccactgaacac

SEQ ID NO: 37028 - DNA, 25 bp, SARS Virus
aataacggtatacccactgaacacg

SEQ ID NO: 37029 - DNA, 25 bp, SARS Virus
ataacggtataaccactgaacacga

SEQ ID NO: 37030 - DNA, 25 bp, SARS Virus
taacggtataaccactgaacacgac

SEQ ID NO: 37031 - DNA, 25 bp, SARS Virus
aacggtataacccctgaacacgacg

SEQ ID NO: 37032 - DNA, 25 bp, SARS Virus
acggtataaccactgaacacgacgg

SEQ ID NO: 37033 - DNA, 25 bp, SARS Virus
cggtataaccaccgaacacgacgga

SEQ ID NO: 37034 - DNA, 25 bp, SARS Virus
ggtataaccactcaacacgacggat

SEQ ID NO: 37035 - DNA, 25 bp, SARS Virus
gtataaccactgcacacgacggatg

SEQ ID NO: 37036 - DNA, 25 bp, SARS Virus
tataaccactgaccacgacggatga

SEQ ID NO: 37037 - DNA, 25 bp, SARS Virus
ataaccactgaacacgacggatgat

SEQ ID NO: 37038 - DNA, 25 bp, SARS Virus
taaccactgaacccgacggatgatg

SEQ ID NO: 37039 - DNA, 25 bp, SARS Virus
aaccactgaacacgacggatgatga

SEQ ID NO: 37040 - DNA, 25 bp, SARS Virus
accactgaacaccacggatgatgaa

SEQ ID NO: 37041 - DNA, 25 bp, SARS Virus
ccactgaacacgccggatgatgaaa

SEQ ID NO: 37042 - DNA, 25 bp, SARS Virus
cactgaacacgacggatgatgaaat

SEQ ID NO: 37043 - DNA, 25 bp, SARS Virus
actgaacacgaccgatgatgaaata

SEQ ID NO: 37044 - DNA, 25 bp, SARS Virus
ctgaacacgacgcatgatgaaatac

SEQ ID NO: 37045 - DNA, 25 bp, SARS Virus
tgaacacgacggctgatgaaatact

SEQ ID NO: 37046 - DNA, 25 bp, SARS Virus
gaacacgacggacgatgaaatactt

SEQ ID NO: 37047 - DNA, 25 bp, SARS Virus
aacacgacggatcatgaaatacttt

SEQ ID NO: 37048 - DNA, 25 bp, SARS Virus
acacgacggatgctgaaatacttta

SEQ ID NO: 37049 - DNA, 25 bp, SARS Virus
cacgacggatgacgaaatactttaa

SEQ ID NO: 37050 - DNA, 25 bp, SARS Virus
acgacggatgatcaaatactttaag

SEQ ID NO: 37051 - DNA, 25 bp, SARS Virus
cgacggatgatgcaatactttaagt

SEQ ID NO: 37052 - DNA, 25 bp, SARS Virus
gacggatgatgacatactttaagtc

SEQ ID NO: 37053 - DNA, 25 bp, SARS Virus
acggatgatgaactactttaagtct

SEQ ID NO: 37054 - DNA, 25 bp, SARS Virus
cggatgatgaaacactttaagtctg

SEQ ID NO: 37055 - DNA, 25 bp, SARS Virus
ggatgatgaaatcctttaagtctgc

SEQ ID NO: 37056 - DNA, 25 bp, SARS Virus
gatgatgaaatactttaagtctgca

SEQ ID NO: 37057 - DNA, 25 bp, SARS Virus
atgatgaaataccttaagtctgcac

SEQ ID NO: 37058 - DNA, 25 bp, SARS Virus
tgatgaaatactctaagtctgcaca

SEQ ID NO: 37059 - DNA, 25 bp, SARS Virus
gatgaaatacttcaagtctgcacaa

SEQ ID NO: 37060 - DNA, 25 bp, SARS Virus
atgaaatactttcagtctgcacaaa

SEQ ID NO: 37061 - DNA, 25 bp, SARS Virus
tgaaatactttacgtctgcacaaaa

SEQ ID NO: 37062 - DNA, 25 bp, SARS Virus
gaaatactttaactctgcacaaaaa

SEQ ID NO: 37063 - DNA, 25 bp, SARS Virus
aaatactttaagcctgcacaaaaac

SEQ ID NO: 37064 - DNA, 25 bp, SARS Virus
aatactttaagtctgcacaaaaacc

SEQ ID NO: 37065 - DNA, 25 bp, SARS Virus
atactttaagtccgcacaaaaacca

SEQ ID NO: 37066 - DNA, 25 bp, SARS Virus
tactttaagtctccacaaaaaccac

SEQ ID NO: 37067 - DNA, 25 bp, SARS Virus
actttaagtctgcacaaaaaccact

SEQ ID NO: 37068 - DNA, 25 bp, SARS Virus
ctttaagtctgcccaaaaaccactc

SEQ ID NO: 37069 - DNA, 25 bp, SARS Virus
tttaagtctgcacaaaaaccactca

SEQ ID NO: 37070 - DNA, 25 bp, SARS Virus
ttaagtctgcaccaaaaccactcat

SEQ ID NO: 37071 - DNA, 25 bp, SARS Virus
taagtctgcacacaaaccactcatg

SEQ ID NO: 37072 - DNA, 25 bp, SARS Virus
aagtctgcacaacaaccactcatgt

SEQ ID NO: 37073 - DNA, 25 bp, SARS Virus
agtctgcacaaacaccactcatgtt

SEQ ID NO: 37074 - DNA, 25 bp, SARS Virus
gtctgcacaaaacccactcatgttg

SEQ ID NO: 37075 - DNA, 25 bp, SARS Virus
tctgcacaaaaaccactcatgttgg

SEQ ID NO: 37076 - DNA, 25 bp, SARS Virus
ctgcacaaaaaccactcatgttggt

SEQ ID NO: 37077 - DNA, 25 bp, SARS Virus
tgcacaaaaacccctcatgttggta

SEQ ID NO: 37078 - DNA, 25 bp, SARS Virus
gcacaaaaaccactcatgttggtac

SEQ ID NO: 37079 - DNA, 25 bp, SARS Virus
cacaaaaaccacccatgttggtaca

SEQ ID NO: 37080 - DNA, 25 bp, SARS Virus
acaaaaaccactcatgttggtacaa

SEQ ID NO: 37081 - DNA, 25 bp, SARS Virus
caaaaaccactcctgttggtacaac

SEQ ID NO: 37082 - DNA, 25 bp, SARS Virus
aaaaaccactcacgttggtacaaca

SEQ ID NO: 37083 - DNA, 25 bp, SARS Virus
aaaaccactcatcttggtacaacaa

SEQ ID NO: 37084 - DNA, 25 bp, SARS Virus
aaaccactcatgctggtacaacaac

SEQ ID NO: 37085 - DNA, 25 bp, SARS Virus
aaccactcatgtcggtacaacaacg

SEQ ID NO: 37086 - DNA, 25 bp, SARS Virus
accactcatgttcgtacaacaacga

SEQ ID NO: 37087 - DNA, 25 bp, SARS Virus
ccactcatgttgctacaacaacgac

SEQ ID NO: 37088 - DNA, 25 bp, SARS Virus
cactcatgttggcacaacaacgacg

SEQ ID NO: 37089 - DNA, 25 bp, SARS Virus
actcatgttggtccaacaacgacga

SEQ ID NO: 37090 - DNA, 25 bp, SARS Virus
ctcatgttggtacaacaacgacgat

SEQ ID NO: 37091 - DNA, 25 bp, SARS Virus
tcatgttggtaccacaacgacgatt

SEQ ID NO: 37092 - DNA, 25 bp, SARS Virus
catgttggtacaccaacgacgatta

SEQ ID NO: 37093 - DNA, 25 bp, SARS Virus
atgttggtacaacaacgacgattac

SEQ ID NO: 37094 - DNA, 25 bp, SARS Virus
tgttggtacaaccacgacgattacg

SEQ ID NO: 37095 - DNA, 25 bp, SARS Virus
gttggtacaacaccgacgattacgt

SEQ ID NO: 37096 - DNA, 25 bp, SARS Virus
ttggtacaacaacgacgattacgtg

SEQ ID NO: 37097 - DNA, 25 bp, SARS Virus
tggtacaacaaccacgattacgtga

SEQ ID NO: 37098 - DNA, 25 bp, SARS Virus
ggtacaacaacgccgattacgtgaa

SEQ ID NO: 37099 - DNA, 25 bp, SARS Virus
gtacaacaacgacgattacgtgaaa

SEQ ID NO: 37100 - DNA, 25 bp, SARS Virus
tacaacaacgaccattacgtgaaaa

SEQ ID NO: 37101 - DNA, 25 bp, SARS Virus
acaacaacgacgcttacgtgaaaac

SEQ ID NO: 37102 - DNA, 25 bp, SARS Virus
caacaacgacgactacgtgaaaaca

SEQ ID NO: 37103 - DNA, 25 bp, SARS Virus
aacaacgacgatcacgtgaaaacaa

SEQ ID NO: 37104 - DNA, 25 bp, SARS Virus
acaacgacgattccgtgaaaacaaa

SEQ ID NO: 37105 - DNA, 25 bp, SARS Virus
caacgacgattacgtgaaaacaaaa

SEQ ID NO: 37106 - DNA, 25 bp, SARS Virus
aacgacgattacctgaaaacaaaaa

SEQ ID NO: 37107 - DNA, 25 bp, SARS Virus
acgacgattacgcgaaaacaaaaac

SEQ ID NO: 37108 - DNA, 25 bp, SARS Virus
cgacgattacgtcaaaacaaaaact

SEQ ID NO: 37109 - DNA, 25 bp, SARS Virus
gacgattacgtgcaaacaaaaacta

SEQ ID NO: 37110 - DNA, 25 bp, SARS Virus
acgattacgtgacaacaaaaactac

SEQ ID NO: 37111 - DNA, 25 bp, SARS Virus
cgattacgtgaacacaaaaactaca

SEQ ID NO: 37112 - DNA, 25 bp, SARS Virus
gattacgtgaaaccaaaaactacag

SEQ ID NO: 37113 - DNA, 25 bp, SARS Virus
attacgtgaaaacaaaaactacaga

SEQ ID NO: 37114 - DNA, 25 bp, SARS Virus
ttacgtgaaaaccaaaactacagaa

SEQ ID NO: 37115 - DNA, 25 bp, SARS Virus
tacgtgaaaacacaaactacagaaa

SEQ ID NO: 37116 - DNA, 25 bp, SARS Virus
acgtgaaaacaacaactacagaaag

SEQ ID NO: 37117 - DNA, 25 bp, SARS Virus
cgtgaaaacaaacactacagaaagt

SEQ ID NO: 37118 - DNA, 25 bp, SARS Virus
gtgaaaacaaaacctacagaaagtg

SEQ ID NO: 37119 - DNA, 25 bp, SARS Virus
tgaaaacaaaaactacagaaagtga

SEQ ID NO: 37120 - DNA, 25 bp, SARS Virus
gaaaacaaaaaccacagaaagtgat

SEQ ID NO: 37121 - DNA, 25 bp, SARS Virus
aaaacaaaaactccagaaagtgata

SEQ ID NO: 37122 - DNA, 25 bp, SARS Virus
aaacaaaaactacagaaagtgatat

SEQ ID NO: 37123 - DNA, 25 bp, SARS Virus
aacaaaaactaccgaaagtgatatg

SEQ ID NO: 37124 - DNA, 25 bp, SARS Virus
acaaaaactacacaaagtgatatga

SEQ ID NO: 37125 - DNA, 25 bp, SARS Virus
caaaaactacagcaagtgatatgag

SEQ ID NO: 37126 - DNA, 25 bp, SARS Virus
aaaaactacagacagtgatatgaga

SEQ ID NO: 37127 - DNA, 25 bp, SARS Virus
aaaactacagaacgtgatatgagac

SEQ ID NO: 37128 - DNA, 25 bp, SARS Virus
aaactacagaaactgatatgagaca

SEQ ID NO: 37129 - DNA, 25 bp, SARS Virus
aactacagaaagcgatatgagacag

SEQ ID NO: 37130 - DNA, 25 bp, SARS Virus
actacagaaagtcatatgagacaga

SEQ ID NO: 37131 - DNA, 25 bp, SARS Virus
ctacagaaagtgctatgagacagac

SEQ ID NO: 37132 - DNA, 25 bp, SARS Virus
tacagaaagtgacatgagacagacc

SEQ ID NO: 37133 - DNA, 25 bp, SARS Virus
acagaaagtgatctgagacagacca

SEQ ID NO: 37134 - DNA, 25 bp, SARS Virus
cagaaagtgatacgagacagaccat

SEQ ID NO: 37135 - DNA, 25 bp, SARS Virus
agaaagtgatatcagacagaccatg

SEQ ID NO: 37136 - DNA, 25 bp, SARS Virus
gaaagtgatatgcgacagaccatgg

SEQ ID NO: 37137 - DNA, 25 bp, SARS Virus
aaagtgatatgacacagaccatggt

SEQ ID NO: 37138 - DNA, 25 bp, SARS Virus
aagtgatatgagccagaccatggtc

SEQ ID NO: 37139 - DNA, 25 bp, SARS Virus
agtgatatgagacagaccatggtcg

SEQ ID NO: 37140 - DNA, 25 bp, SARS Virus
gtgatatgagaccgaccatggtcga

SEQ ID NO: 37141 - DNA, 25 bp, SARS Virus
tgatatgagacacaccatggtcgaa

SEQ ID NO: 37142 - DNA, 25 bp, SARS Virus
gatatgagacagcccatggtcgaat

SEQ ID NO: 37143 - DNA, 25 bp, SARS Virus
atatgagacagaccatggtcgaatg

SEQ ID NO: 37144 - DNA, 25 bp, SARS Virus
tatgagacagaccatggtcgaatgt

SEQ ID NO: 37145 - DNA, 25 bp, SARS Virus
atgagacagaccctggtcgaatgtc

SEQ ID NO: 37146 - DNA, 25 bp, SARS Virus
tgagacagaccacggtcgaatgtcg

SEQ ID NO: 37147 - DNA, 25 bp, SARS Virus
gagacagaccatcgtcgaatgtcga

SEQ ID NO: 37148 - DNA, 25 bp, SARS Virus
agacagaccatgctcgaatgtcgaa

SEQ ID NO: 37149 - DNA, 25 bp, SARS Virus
gacagaccatggccgaatgtcgaaa

SEQ ID NO: 37150 - DNA, 25 bp, SARS Virus
acagaccatggtcgaatgtcgaaag

SEQ ID NO: 37151 - DNA, 25 bp, SARS Virus
cagaccatggtccaatgtcgaaaga

SEQ ID NO: 37152 - DNA, 25 bp, SARS Virus
agaccatggtcgcatgtcgaaagac

SEQ ID NO: 37153 - DNA, 25 bp, SARS Virus
gaccatggtcgactgtcgaaagacg

SEQ ID NO: 37154 - DNA, 25 bp, SARS Virus
accatggtcgaacgtcgaaagacgg

SEQ ID NO: 37155 - DNA, 25 bp, SARS Virus
ccatggtcgaatctcgaaagacggc

SEQ ID NO: 37156 - DNA, 25 bp, SARS Virus
catggtcgaatgccgaaagacggcc

SEQ ID NO: 37157 - DNA, 25 bp, SARS Virus
atggtcgaatgtcgaaagacggccc

SEQ ID NO: 37158 - DNA, 25 bp, SARS Virus
tggtcgaatgtccaaagacggccct

SEQ ID NO: 37159 - DNA, 25 bp, SARS Virus
ggtcgaatgtcgcaagacggccctc

SEQ ID NO: 37160 - DNA, 25 bp, SARS Virus
gtcgaatgtcgacagacggccctca

SEQ ID NO: 37161 - DNA, 25 bp, SARS Virus
tcgaatgtcgaacgacggccctcag

SEQ ID NO: 37162 - DNA, 25 bp, SARS Virus
cgaatgtcgaaacacggccctcaga

SEQ ID NO: 37163 - DNA, 25 bp, SARS Virus
gaatgtcgaaagccggccctcagat

SEQ ID NO: 37164 - DNA, 25 bp, SARS Virus
aatgtcgaaagacggccctcagatg

SEQ ID NO: 37165 - DNA, 25 bp, SARS Virus
atgtcgaaagaccgccctcagatga

SEQ ID NO: 37166 - DNA, 25 bp, SARS Virus
tgtcgaaagacgcccctcagatgag

SEQ ID NO: 37167 - DNA, 25 bp, SARS Virus
gtcgaaagacggccctcagatgagt

SEQ ID NO: 37168 - DNA, 25 bp, SARS Virus
tcgaaagacggccctcagatgagtc

SEQ ID NO: 37169 - DNA, 25 bp, SARS Virus
cgaaagacggccctcagatgagtca

SEQ ID NO: 37170 - DNA, 25 bp, SARS Virus
gaaagacggcccccagatgagtcag

SEQ ID NO: 37171 - DNA, 25 bp, SARS Virus
aaagacggccctcagatgagtcaga

SEQ ID NO: 37172 - DNA, 25 bp, SARS Virus
aagacggccctccgatgagtcagaa

SEQ ID NO: 37173 - DNA, 25 bp, SARS Virus
agacggccctcacatgagtcagaaa

SEQ ID NO: 37174 - DNA, 25 bp, SARS Virus
gacggccctcagctgagtcagaaaa

SEQ ID NO: 37175 - DNA, 25 bp, SARS Virus
acggccctcagacgagtcagaaaat

SEQ ID NO: 37176 - DNA, 25 bp, SARS Virus
cggccctcagatcagtcagaaaatg

SEQ ID NO: 37177 - DNA, 25 bp, SARS Virus
ggccctcagatgcgtcagaaaatga

SEQ ID NO: 37178 - DNA, 25 bp, SARS Virus
gccctcagatgactcagaaaatgaa

SEQ ID NO: 37179 - DNA, 25 bp, SARS Virus
ccctcagatgagccagaaaatgaac

SEQ ID NO: 37180 - DNA, 25 bp, SARS Virus
cctcagatgagtcagaaaatgaaca

SEQ ID NO: 37181 - DNA, 25 bp, SARS Virus
ctcagatgagtccgaaaatgaacat

SEQ ID NO: 37182 - DNA, 25 bp, SARS Virus
tcagatgagtcacaaaatgaacatg

SEQ ID NO: 37183 - DNA, 25 bp, SARS Virus
cagatgagtcagcaaatgaacatga

SEQ ID NO: 37184 - DNA, 25 bp, SARS Virus
agatgagtcagacaatgaacatgaa

SEQ ID NO: 37185 - DNA, 25 bp, SARS Virus
gatgagtcagaacatgaacatgaac

SEQ ID NO: 37186 - DNA, 25 bp, SARS Virus
atgagtcagaaactgaacatgaact

SEQ ID NO: 37187 - DNA, 25 bp, SARS Virus
tgagtcagaaaacgaacatgaactg

SEQ ID NO: 37188 - DNA, 25 bp, SARS Virus
gagtcagaaaatcaacatgaactgt

SEQ ID NO: 37189 - DNA, 25 bp, SARS Virus
agtcagaaaatgcacatgaactgta

SEQ ID NO: 37190 - DNA, 25 bp, SARS Virus
gtcagaaaatgaccatgaactgtaa

SEQ ID NO: 37191 - DNA, 25 bp, SARS Virus
tcagaaaatgaacatgaactgtaag

SEQ ID NO: 37192 - DNA, 25 bp, SARS Virus
cagaaaatgaacctgaactgtaaga

SEQ ID NO: 37193 - DNA, 25 bp, SARS Virus
agaaaatgaacacgaactgtaagat

SEQ ID NO: 37194 - DNA, 25 bp, SARS Virus
gaaaatgaacatcaactgtaagata

SEQ ID NO: 37195 - DNA, 25 bp, SARS Virus
aaaatgaacatgcactgtaagataa

SEQ ID NO: 37196 - DNA, 25 bp, SARS Virus
aaatgaacatgacctgtaagataaa

SEQ ID NO: 37197 - DNA, 25 bp, SARS Virus
aatgaacatgaactgtaagataaag

SEQ ID NO: 37198 - DNA, 25 bp, SARS Virus
atgaacatgaaccgtaagataaagt

SEQ ID NO: 37199 - DNA, 25 bp, SARS Virus
tgaacatgaactctaagataaagtg

SEQ ID NO: 37200 - DNA, 25 bp, SARS Virus
gaacatgaactgcaagataaagtgg

SEQ ID NO: 37201 - DNA, 25 bp, SARS Virus
aacatgaactgtcagataaagtggt

SEQ ID NO: 37202 - DNA, 25 bp, SARS Virus
acatgaactgtacgataaagtggtt

SEQ ID NO: 37203 - DNA, 25 bp, SARS Virus
catgaactgtaacataaagtggtta

SEQ ID NO: 37204 - DNA, 25 bp, SARS Virus
atgaactgtaagctaaagtggttac

SEQ ID NO: 37205 - DNA, 25 bp, SARS Virus
tgaactgtaagacaaagtggttact

SEQ ID NO: 37206 - DNA, 25 bp, SARS Virus
gaactgtaagatcaagtggttacta

SEQ ID NO: 37207 - DNA, 25 bp, SARS Virus
aactgtaagatacagtggttactac

SEQ ID NO: 37208 - DNA, 25 bp, SARS Virus
actgtaagataacgtggttactaca

SEQ ID NO: 37209 - DNA, 25 bp, SARS Virus
ctgtaagataaactggttactacaa

SEQ ID NO: 37210 - DNA, 25 bp, SARS Virus
tgtaagataaagcggttactacaaa

SEQ ID NO: 37211 - DNA, 25 bp, SARS Virus
gtaagataaagtcgttactacaaag

SEQ ID NO: 37212 - DNA, 25 bp, SARS Virus
taagataaagtgcttactacaaagt

SEQ ID NO: 37213 - DNA, 25 bp, SARS Virus
aagataaagtggctactacaaagta

SEQ ID NO: 37214 - DNA, 25 bp, SARS Virus
agataaagtggtcactacaaagtaa

SEQ ID NO: 37215 - DNA, 25 bp, SARS Virus
gataaagtggttcctacaaagtaag

SEQ ID NO: 37216 - DNA, 25 bp, SARS Virus
ataaagtggttactacaaagtaaga

SEQ ID NO: 37217 - DNA, 25 bp, SARS Virus
agcaatacacgagtacctaccaagg

SEQ ID NO: 37218 - DNA, 25 bp, SARS Virus
gcaatacacgaagacctaccaaggt

SEQ ID NO: 37219 - DNA, 25 bp, SARS Virus
caatacacgaatgcctaccaaggta

SEQ ID NO: 37220 - DNA, 25 bp, SARS Virus
aatacacgaatagctaccaaggtag

SEQ ID NO: 37221 - DNA, 25 bp, SARS Virus
atacacgaatacgtaccaaggtagt

SEQ ID NO: 37222 - DNA, 25 bp, SARS Virus
tacacgaataccgaccaaggtagta

SEQ ID NO: 37223 - DNA, 25 bp, SARS Virus
acacgaatacctgccaaggtagtat

SEQ ID NO: 37224 - DNA, 25 bp, SARS Virus
cacgaatacctagcaaggtagtatg

SEQ ID NO: 37225 - DNA, 25 bp, SARS Virus
acgaatacctacgaaggtagtatgt

SEQ ID NO: 37226 - DNA, 25 bp, SARS Virus
cgaatacctaccgaggtagtatgtc

SEQ ID NO: 37227 - DNA, 25 bp, SARS Virus
gaatacctaccagggtagtatgtca

SEQ ID NO: 37228 - DNA, 25 bp, SARS Virus
aatacctaccaaggtagtatgtcaa

SEQ ID NO: 37229 - DNA, 25 bp, SARS Virus
atacctaccaaggtagtatgtcaaa

SEQ ID NO: 37230 - DNA, 25 bp, SARS Virus
tacctaccaagggagtatgtcaaag

SEQ ID NO: 37231 - DNA, 25 bp, SARS Virus
acctaccaaggtggtatgtcaaagg

SEQ ID NO: 37232 - DNA, 25 bp, SARS Virus
cctaccaaggtagtatgtcaaagga

SEQ ID NO: 37233 - DNA, 25 bp, SARS Virus
ctaccaaggtaggatgtcaaaggat

SEQ ID NO: 37234 - DNA, 25 bp, SARS Virus
taccaaggtagtgtgtcaaaggatt

SEQ ID NO: 37235 - DNA, 25 bp, SARS Virus
accaaggtagtaggtcaaaggattg

SEQ ID NO: 37236 - DNA, 25 bp, SARS Virus
ccaaggtagtatgtcaaaggattgt

SEQ ID NO: 37237 - DNA, 25 bp, SARS Virus
caaggtagtatggcaaaggattgtg

SEQ ID NO: 37238 - DNA, 25 bp, SARS Virus
aaggtagtatgtgaaaggattgtga

SEQ ID NO: 37239 - DNA, 25 bp, SARS Virus
aggtagtatgtcgaaggattgtgaa

SEQ ID NO: 37240 - DNA, 25 bp, SARS Virus
ggtagtatgtcagaggattgtgaat

SEQ ID NO: 37241 - DNA, 25 bp, SARS Virus
gtagtatgtcaagggattgtgaatg

SEQ ID NO: 37242 - DNA, 25 bp, SARS Virus
tagtatgtcaaaggattgtgaatgg

SEQ ID NO: 37243 - DNA, 25 bp, SARS Virus
agtatgtcaaaggattgtgaatgga

SEQ ID NO: 37244 - DNA, 25 bp, SARS Virus
gtatgtcaaagggttgtgaatggac

SEQ ID NO: 37245 - DNA, 25 bp, SARS Virus
tatgtcaaaggagtgtgaatggacc

SEQ ID NO: 37246 - DNA, 25 bp, SARS Virus
atgtcaaaggatggtgaatggacct

SEQ ID NO: 37247 - DNA, 25 bp, SARS Virus
tgtcaaaggattgtgaatggacctc

SEQ ID NO: 37248 - DNA, 25 bp, SARS Virus
gtcaaaggattgggaatggacctcc

SEQ ID NO: 37249 - DNA, 25 bp, SARS Virus
tcaaaggattgtgaatggacctccc

SEQ ID NO: 37250 - DNA, 25 bp, SARS Virus
caaaggattgtggatggacctccca

SEQ ID NO: 37251 - DNA, 25 bp, SARS Virus
aaaggattgtgagtggacctcccaa

SEQ ID NO: 37252 - DNA, 25 bp, SARS Virus
aaggattgtgaagggacctcccaag

SEQ ID NO: 37253 - DNA, 25 bp, SARS Virus
aggattgtgaatggacctcccaaga

SEQ ID NO: 37254 - DNA, 25 bp, SARS Virus
ggattgtgaatggacctcccaagac

SEQ ID NO: 37255 - DNA, 25 bp, SARS Virus
gattgtgaatgggcctcccaagaca

SEQ ID NO: 37256 - DNA, 25 bp, SARS Virus
attgtgaatggagctcccaagacaa

SEQ ID NO: 37257 - DNA, 25 bp, SARS Virus
ttgtgaatggacgtcccaagacaat

SEQ ID NO: 37258 - DNA, 25 bp, SARS Virus
tgtgaatggaccgcccaagacaatc

SEQ ID NO: 37259 - DNA, 25 bp, SARS Virus
gtgaatggacctgccaagacaatct

SEQ ID NO: 37260 - DNA, 25 bp, SARS Virus
tgaatggacctcgcaagacaatctc

SEQ ID NO: 37261 - DNA, 25 bp, SARS Virus
gaatggacctccgaagacaatctca

SEQ ID NO: 37262 - DNA, 25 bp, SARS Virus
aatggacctcccgagacaatctcat

SEQ ID NO: 37263 - DNA, 25 bp, SARS Virus
atggacctcccaggacaatctcatc

SEQ ID NO: 37264 - DNA, 25 bp, SARS Virus
tggacctcccaagacaatctcatca

SEQ ID NO: 37265 - DNA, 25 bp, SARS Virus
ggacctcccaaggcaatctcatcat

SEQ ID NO: 37266 - DNA, 25 bp, SARS Virus
gacctcccaagagaatctcatcatt

SEQ ID NO: 37267 - DNA, 25 bp, SARS Virus
acctcccaagacgatctcatcattg

SEQ ID NO: 37268 - DNA, 25 bp, SARS Virus
cctcccaagacagtctcatcattgt

SEQ ID NO: 37269 - DNA, 25 bp, SARS Virus
ctcccaagacaagctcatcattgtt

SEQ ID NO: 37270 - DNA, 25 bp, SARS Virus
tcccaagacaatgtcatcattgttg

SEQ ID NO: 37271 - DNA, 25 bp, SARS Virus
cccaagacaatcgcatcattgttga

SEQ ID NO: 37272 - DNA, 25 bp, SARS Virus
ccaagacaatctgatcattgttgaa

SEQ ID NO: 37273 - DNA, 25 bp, SARS Virus
caagacaatctcgtcattgttgaaa

SEQ ID NO: 37274 - DNA, 25 bp, SARS Virus
aagacaatctcagcattgttgaaaa

SEQ ID NO: 37275 - DNA, 25 bp, SARS Virus
agacaatctcatgattgttgaaaac

SEQ ID NO: 37276 - DNA, 25 bp, SARS Virus
gacaatctcatcgttgttgaaaact

SEQ ID NO: 37277 - DNA, 25 bp, SARS Virus
acaatctcatcagtgttgaaaacta

SEQ ID NO: 37278 - DNA, 25 bp, SARS Virus
caatctcatcatggttgaaaactac

SEQ ID NO: 37279 - DNA, 25 bp, SARS Virus
aatctcatcattgttgaaaactacg

SEQ ID NO: 37280 - DNA, 25 bp, SARS Virus
atctcatcattggtgaaaactacga

SEQ ID NO: 37281 - DNA, 25 bp, SARS Virus
tctcatcattgtggaaaactacgac

SEQ ID NO: 37282 - DNA, 25 bp, SARS Virus
ctcatcattgttgaaaactacgact

SEQ ID NO: 37283 - DNA, 25 bp, SARS Virus
tcatcattgttggaaactacgactc

SEQ ID NO: 37284 - DNA, 25 bp, SARS Virus
catcattgttgagaactacgactca

SEQ ID NO: 37285 - DNA, 25 bp, SARS Virus
atcattgttgaagactacgactcat

SEQ ID NO: 37286 - DNA, 25 bp, SARS Virus
tcattgttgaaagctacgactcatg

SEQ ID NO: 37287 - DNA, 25 bp, SARS Virus
cattgttgaaaagtacgactcatga

SEQ ID NO: 37288 - DNA, 25 bp, SARS Virus
attgttgaaaacgacgactcatgac

SEQ ID NO: 37289 - DNA, 25 bp, SARS Virus
ttgttgaaaactgcgactcatgaca

SEQ ID NO: 37290 - DNA, 25 bp, SARS Virus
tgttgaaaactaggactcatgacat

SEQ ID NO: 37291 - DNA, 25 bp, SARS Virus
gttgaaaactacgactcatgacatc

SEQ ID NO: 37292 - DNA, 25 bp, SARS Virus
ttgaaaactacggctcatgacatct

SEQ ID NO: 37293 - DNA, 25 bp, SARS Virus
tgaaaactacgagtcatgacatctg

SEQ ID NO: 37294 - DNA, 25 bp, SARS Virus
gaaaactacgacgcatgacatctgt

SEQ ID NO: 37295 - DNA, 25 bp, SARS Virus
aaaactacgactgatgacatctgta

SEQ ID NO: 37296 - DNA, 25 bp, SARS Virus
aaactacgactcgtgacatctgtac

SEQ ID NO: 37297 - DNA, 25 bp, SARS Virus
aactacgactcaggacatctgtacc

SEQ ID NO: 37298 - DNA, 25 bp, SARS Virus
actacgactcatgacatctgtacca

SEQ ID NO: 37299 - DNA, 25 bp, SARS Virus
ctacgactcatggcatctgtaccat

SEQ ID NO: 37300 - DNA, 25 bp, SARS Virus
tacgactcatgagatctgtaccatg

SEQ ID NO: 37301 - DNA, 25 bp, SARS Virus
acgactcatgacgtctgtaccatgt

SEQ ID NO: 37302 - DNA, 25 bp, SARS Virus
cgactcatgacagctgtaccatgta

SEQ ID NO: 37303 - DNA, 25 bp, SARS Virus
gactcatgacatgtgtaccatgtac

SEQ ID NO: 37304 - DNA, 25 bp, SARS Virus
actcatgacatcggtaccatgtacg

SEQ ID NO: 37305 - DNA, 25 bp, SARS Virus
ctcatgacatctgtaccatgtacgc

SEQ ID NO: 37306 - DNA, 25 bp, SARS Virus
tcatgacatctggaccatgtacgct

SEQ ID NO: 37307 - DNA, 25 bp, SARS Virus
catgacatctgtgccatgtacgctt

SEQ ID NO: 37308 - DNA, 25 bp, SARS Virus
atgacatctgtagcatgtacgcttt

SEQ ID NO: 37309 - DNA, 25 bp, SARS Virus
tgacatctgtacgatgtacgctttc

SEQ ID NO: 37310 - DNA, 25 bp, SARS Virus
gacatctgtaccgtgtacgctttcc

SEQ ID NO: 37311 - DNA, 25 bp, SARS Virus
acatctgtaccaggtacgctttcca

SEQ ID NO: 37312 - DNA, 25 bp, SARS Virus
catctgtaccatgtacgctttccag

SEQ ID NO: 37313 - DNA, 25 bp, SARS Virus
atctgtaccatggacgctttccagt

SEQ ID NO: 37314 - DNA, 25 bp, SARS Virus
tctgtaccatgtgcgctttccagtc

SEQ ID NO: 37315 - DNA, 25 bp, SARS Virus
ctgtaccatgtaggctttccagtct

SEQ ID NO: 37316 - DNA, 25 bp, SARS Virus
tgtaccatgtacgctttccagtctt

SEQ ID NO: 37317 - DNA, 25 bp, SARS Virus
gtaccatgtacggtttccagtcttc

SEQ ID NO: 37318 - DNA, 25 bp, SARS Virus
taccatgtacgcgttccagtcttca

SEQ ID NO: 37319 - DNA, 25 bp, SARS Virus
accatgtacgctgtccagtcttcat

SEQ ID NO: 37320 - DNA, 25 bp, SARS Virus
ccatgtacgcttgccagtcttcatc

SEQ ID NO: 37321 - DNA, 25 bp, SARS Virus
catgtacgctttgcagtcttcatcc

SEQ ID NO: 37322 - DNA, 25 bp, SARS Virus
atgtacgctttcgagtcttcatcca

SEQ ID NO: 37323 - DNA, 25 bp, SARS Virus
tgtacgctttccggtcttcatccat

SEQ ID NO: 37324 - DNA, 25 bp, SARS Virus
gtacgctttccagtcttcatccata

SEQ ID NO: 37325 - DNA, 25 bp, SARS Virus
tacgctttccaggcttcatccataa

SEQ ID NO: 37326 - DNA, 25 bp, SARS Virus
acgctttccagtgttcatccataaa

SEQ ID NO: 37327 - DNA, 25 bp, SARS Virus
cgctttccagtcgtcatccataaac

SEQ ID NO: 37328 - DNA, 25 bp, SARS Virus
gctttccagtctgcatccataaacg

SEQ ID NO: 37329 - DNA, 25 bp, SARS Virus
ctttccagtcttgatccataaacgg

SEQ ID NO: 37330 - DNA, 25 bp, SARS Virus
tttccagtcttcgtccataaacgga

SEQ ID NO: 37331 - DNA, 25 bp, SARS Virus
ttccagtcttcagccataaacggat

SEQ ID NO: 37332 - DNA, 25 bp, SARS Virus
tccagtcttcatgcataaacggata

SEQ ID NO: 37333 - DNA, 25 bp, SARS Virus
ccagtcttcatcgataaacggatag

SEQ ID NO: 37334 - DNA, 25 bp, SARS Virus
cagtcttcatccgtaaacggataga

SEQ ID NO: 37335 - DNA, 25 bp, SARS Virus
agtcttcatccagaaacggatagat

SEQ ID NO: 37336 - DNA, 25 bp, SARS Virus
gtcttcatccatgaacggatagatg

SEQ ID NO: 37337 - DNA, 25 bp, SARS Virus
tcttcatccatagacggatagatgg

SEQ ID NO: 37338 - DNA, 25 bp, SARS Virus
cttcatccataagcggatagatggt

SEQ ID NO: 37339 - DNA, 25 bp, SARS Virus
ttcatccataaagggatagatggtc

SEQ ID NO: 37340 - DNA, 25 bp, SARS Virus
tcatccataaacggatagatggtca

SEQ ID NO: 37341 - DNA, 25 bp, SARS Virus
catccataaacggatagatggtcac

SEQ ID NO: 37342 - DNA, 25 bp, SARS Virus
atccataaacgggtagatggtcacc

SEQ ID NO: 37343 - DNA, 25 bp, SARS Virus
tccataaacggagagatggtcacca

SEQ ID NO: 37344 - DNA, 25 bp, SARS Virus
ccataaacggatggatggtcaccat

SEQ ID NO: 37345 - DNA, 25 bp, SARS Virus
cataaacggatagatggtcaccatc

SEQ ID NO: 37346 - DNA, 25 bp, SARS Virus
ataaacggataggtggtcaccatct

SEQ ID NO: 37347 - DNA, 25 bp, SARS Virus
taaacggatagagggtcaccatcta

SEQ ID NO: 37348 - DNA, 25 bp, SARS Virus
aaacggatagatggtcaccatctac

SEQ ID NO: 37349 - DNA, 25 bp, SARS Virus
aacggatagatggtcaccatctacc

SEQ ID NO: 37350 - DNA, 25 bp, SARS Virus
acggatagatgggcaccatctaccc

SEQ ID NO: 37351 - DNA, 25 bp, SARS Virus
cggatagatggtgaccatctaccca

SEQ ID NO: 37352 - DNA, 25 bp, SARS Virus
ggatagatggtcgccatctacccaa

SEQ ID NO: 37353 - DNA, 25 bp, SARS Virus
gatagatggtcagcatctacccaag

SEQ ID NO: 37354 - DNA, 25 bp, SARS Virus
atagatggtcacgatctacccaaga

SEQ ID NO: 37355 - DNA, 25 bp, SARS Virus
tagatggtcaccgtctacccaagaa

SEQ ID NO: 37356 - DNA, 25 bp, SARS Virus
agatggtcaccagctacccaagaat

SEQ ID NO: 37357 - DNA, 25 bp, SARS Virus
gatggtcaccatgtacccaagaatt

SEQ ID NO: 37358 - DNA, 25 bp, SARS Virus
atggtcaccatcgacccaagaatta

SEQ ID NO: 37359 - DNA, 25 bp, SARS Virus
tggtcaccatctgcccaagaattat

SEQ ID NO: 37360 - DNA, 25 bp, SARS Virus
ggtcaccatctagccaagaattatt

SEQ ID NO: 37361 - DNA, 25 bp, SARS Virus
gtcaccatctacgcaagaattatta

SEQ ID NO: 37362 - DNA, 25 bp, SARS Virus
tcaccatctaccgaagaattattac

SEQ ID NO: 37363 - DNA, 25 bp, SARS Virus
caccatctacccgagaattattact

SEQ ID NO: 37364 - DNA, 25 bp, SARS Virus
accatctacccaggaattattactc

SEQ ID NO: 37365 - DNA, 25 bp, SARS Virus
ccatctacccaagaattattactcg

SEQ ID NO: 37366 - DNA, 25 bp, SARS Virus
catctacccaaggattattactcgt

SEQ ID NO: 37367 - DNA, 25 bp, SARS Virus
atctacccaagagttattactcgta

SEQ ID NO: 37368 - DNA, 25 bp, SARS Virus
tctacccaagaagtattactcgtaa

SEQ ID NO: 37369 - DNA, 25 bp, SARS Virus
ctacccaagaatgattactcgtaat

SEQ ID NO: 37370 - DNA, 25 bp, SARS Virus
tacccaagaattgttactcgtaatg

SEQ ID NO: 37371 - DNA, 25 bp, SARS Virus
acccaagaattagtactcgtaatgt

SEQ ID NO: 37372 - DNA, 25 bp, SARS Virus
cccaagaattatgactcgtaatgtc

SEQ ID NO: 37373 - DNA, 25 bp, SARS Virus
ccaagaattattgctcgtaatgtct

SEQ ID NO: 37374 - DNA, 25 bp, SARS Virus
caagaattattagtcgtaatgtctc

SEQ ID NO: 37375 - DNA, 25 bp, SARS Virus
aagaattattacgcgtaatgtctcg

SEQ ID NO: 37376 - DNA, 25 bp, SARS Virus
agaattattactggtaatgtctcga

SEQ ID NO: 37377 - DNA, 25 bp, SARS Virus
gaattattactcgtaatgtctcgag

SEQ ID NO: 37378 - DNA, 25 bp, SARS Virus
aattattactcggaatgtctcgaga

SEQ ID NO: 37379 - DNA, 25 bp, SARS Virus
attattactcgtgatgtctcgagat

SEQ ID NO: 37380 - DNA, 25 bp, SARS Virus
ttattactcgtagtgtctcgagata

SEQ ID NO: 37381 - DNA, 25 bp, SARS Virus
tattactcgtaaggtctcgagatag

SEQ ID NO: 37382 - DNA, 25 bp, SARS Virus
attactcgtaatgtctcgagatagt

SEQ ID NO: 37383 - DNA, 25 bp, SARS Virus
ttactcgtaatggctcgagatagtc

SEQ ID NO: 37384 - DNA, 25 bp, SARS Virus
tactcgtaatgtgtcgagatagtcc

SEQ ID NO: 37385 - DNA, 25 bp, SARS Virus
actcgtaatgtcgcgagatagtcct

SEQ ID NO: 37386 - DNA, 25 bp, SARS Virus
ctcgtaatgtctggagatagtcctc

SEQ ID NO: 37387 - DNA, 25 bp, SARS Virus
tcgtaatgtctcgagatagtcctca

SEQ ID NO: 37388 - DNA, 25 bp, SARS Virus
cgtaatgtctcgggatagtcctcaa

SEQ ID NO: 37389 - DNA, 25 bp, SARS Virus
gtaatgtctcgagatagtcctcaaa

SEQ ID NO: 37390 - DNA, 25 bp, SARS Virus
taatgtctcgaggtagtcctcaaaa

SEQ ID NO: 37391 - DNA, 25 bp, SARS Virus
aatgtctcgagagagtcctcaaaag

SEQ ID NO: 37392 - DNA, 25 bp, SARS Virus
atgtctcgagatggtcctcaaaaga

SEQ ID NO: 37393 - DNA, 25 bp, SARS Virus
tgtctcgagatagtcctcaaaagac

SEQ ID NO: 37394 - DNA, 25 bp, SARS Virus
gtctcgagataggcctcaaaagaca

SEQ ID NO: 37395 - DNA, 25 bp, SARS Virus
tctcgagatagtgctcaaaagacac

SEQ ID NO: 37396 - DNA, 25 bp, SARS Virus
ctcgagatagtcgtcaaaagacacc

SEQ ID NO: 37397 - DNA, 25 bp, SARS Virus
tcgagatagtccgcaaaagacacca

SEQ ID NO: 37398 - DNA, 25 bp, SARS Virus
cgagatagtcctgaaaagacaccac

SEQ ID NO: 37399 - DNA, 25 bp, SARS Virus
gagatagtcctcgaaagacaccaca

SEQ ID NO: 37400 - DNA, 25 bp, SARS Virus
agatagtcctcagaagacaccacaa

SEQ ID NO: 37401 - DNA, 25 bp, SARS Virus
gatagtcctcaagagacaccacaac

SEQ ID NO: 37402 - DNA, 25 bp, SARS Virus
atagtcctcaaaggacaccacaact

SEQ ID NO: 37403 - DNA, 25 bp, SARS Virus
tagtcctcaaaagacaccacaacta

SEQ ID NO: 37404 - DNA, 25 bp, SARS Virus
agtcctcaaaaggcaccacaactac

SEQ ID NO: 37405 - DNA, 25 bp, SARS Virus
gtcctcaaaagagaccacaactacg

SEQ ID NO: 37406 - DNA, 25 bp, SARS Virus
tcctcaaaagacgccacaactacgc

SEQ ID NO: 37407 - DNA, 25 bp, SARS Virus
cctcaaaagacagcacaactacgct

SEQ ID NO: 37408 - DNA, 25 bp, SARS Virus
ctcaaaagacacgacaactacgcta

SEQ ID NO: 37409 - DNA, 25 bp, SARS Virus
tcaaaagacaccgcaactacgctac

SEQ ID NO: 37410 - DNA, 25 bp, SARS Virus
caaaagacaccagaactacgctact

SEQ ID NO: 37411 - DNA, 25 bp, SARS Virus
aaaagacaccacgactacgctactt

SEQ ID NO: 37412 - DNA, 25 bp, SARS Virus
aaagacaccacagctacgctactta

SEQ ID NO: 37413 - DNA, 25 bp, SARS Virus
aagacaccacaagtacgctacttag

SEQ ID NO: 37414 - DNA, 25 bp, SARS Virus
agacaccacaacgacgctacttaga

SEQ ID NO: 37415 - DNA, 25 bp, SARS Virus
gacaccacaactgcgctacttagag

SEQ ID NO: 37416 - DNA, 25 bp, SARS Virus
acaccacaactaggctacttagagt

SEQ ID NO: 37417 - DNA, 25 bp, SARS Virus
caccacaactacgctacttagagta

SEQ ID NO: 37418 - DNA, 25 bp, SARS Virus
accacaactacggtacttagagtat

SEQ ID NO: 37419 - DNA, 25 bp, SARS Virus
ccacaactacgcgacttagagtatc

SEQ ID NO: 37420 - DNA, 25 bp, SARS Virus
cacaactacgctgcttagagtatcg

SEQ ID NO: 37421 - DNA, 25 bp, SARS Virus
acaactacgctagttagagtatcga

SEQ ID NO: 37422 - DNA, 25 bp, SARS Virus
caactacgctacgtagagtatcgat

SEQ ID NO: 37423 - DNA, 25 bp, SARS Virus
aactacgctactgagagtatcgatt

SEQ ID NO: 37424 - DNA, 25 bp, SARS Virus
actacgctacttggagtatcgattg

SEQ ID NO: 37425 - DNA, 25 bp, SARS Virus
ctacgctacttagagtatcgattgt

SEQ ID NO: 37426 - DNA, 25 bp, SARS Virus
tacgctacttagggtatcgattgta

SEQ ID NO: 37427 - DNA, 25 bp, SARS Virus
acgctacttagagtatcgattgtag

SEQ ID NO: 37428 - DNA, 25 bp, SARS Virus
cgctacttagaggatcgattgtaga

SEQ ID NO: 37429 - DNA, 25 bp, SARS Virus
gctacttagagtgtcgattgtagaa

SEQ ID NO: 37430 - DNA, 25 bp, SARS Virus
ctacttagagtagcgattgtagaaa

SEQ ID NO: 37431 - DNA, 25 bp, SARS Virus
tacttagagtatggattgtagaaat

SEQ ID NO: 37432 - DNA, 25 bp, SARS Virus
acttagagtatcgattgtagaaatg

SEQ ID NO: 37433 - DNA, 25 bp, SARS Virus
cttagagtatcggttgtagaaatga

SEQ ID NO: 37434 - DNA, 25 bp, SARS Virus
ttagagtatcgagtgtagaaatgag

SEQ ID NO: 37435 - DNA, 25 bp, SARS Virus
tagagtatcgatggtagaaatgagg

SEQ ID NO: 37436 - DNA, 25 bp, SARS Virus
agagtatcgattgtagaaatgagga

SEQ ID NO: 37437 - DNA, 25 bp, SARS Virus
gagtatcgattggagaaatgaggag

SEQ ID NO: 37438 - DNA, 25 bp, SARS Virus
agtatcgattgtggaaatgaggaga

SEQ ID NO: 37439 - DNA, 25 bp, SARS Virus
gtatcgattgtagaaatgaggagaa

SEQ ID NO: 37440 - DNA, 25 bp, SARS Virus
tatcgattgtaggaatgaggagaac

SEQ ID NO: 37441 - DNA, 25 bp, SARS Virus
atcgattgtagagatgaggagaaca

SEQ ID NO: 37442 - DNA, 25 bp, SARS Virus
tcgattgtagaagtgaggagaacac

SEQ ID NO: 37443 - DNA, 25 bp, SARS Virus
cgattgtagaaaggaggagaacacg

SEQ ID NO: 37444 - DNA, 25 bp, SARS Virus
gattgtagaaatgaggagaacacgt

SEQ ID NO: 37445 - DNA, 25 bp, SARS Virus
attgtagaaatggggagaacacgtt

SEQ ID NO: 37446 - DNA, 25 bp, SARS Virus
ttgtagaaatgaggagaacacgttg

SEQ ID NO: 37447 - DNA, 25 bp, SARS Virus
tgtagaaatgaggagaacacgttgg

SEQ ID NO: 37448 - DNA, 25 bp, SARS Virus
gtagaaatgaggggaacacgttgga

SEQ ID NO: 37449 - DNA, 25 bp, SARS Virus
tagaaatgaggagaacacgttggac

SEQ ID NO: 37450 - DNA, 25 bp, SARS Virus
agaaatgaggaggacacgttggaca

SEQ ID NO: 37451 - DNA, 25 bp, SARS Virus
gaaatgaggagagcacgttggacac

SEQ ID NO: 37452 - DNA, 25 bp, SARS Virus
aaatgaggagaagacgttggacacc

SEQ ID NO: 37453 - DNA, 25 bp, SARS Virus
aatgaggagaacgcgttggacaccc

SEQ ID NO: 37454 - DNA, 25 bp, SARS Virus
atgaggagaacaggttggacaccca

SEQ ID NO: 37455 - DNA, 25 bp, SARS Virus
tgaggagaacacgttggacacccac

SEQ ID NO: 37456 - DNA, 25 bp, SARS Virus
gaggagaacacggtggacacccacg

SEQ ID NO: 37457 - DNA, 25 bp, SARS Virus
aggagaacacgtgggacacccacga

SEQ ID NO: 37458 - DNA, 25 bp, SARS Virus
ggagaacacgttggacacccacgaa

SEQ ID NO: 37459 - DNA, 25 bp, SARS Virus
gagaacacgttggacacccacgaaa

SEQ ID NO: 37460 - DNA, 25 bp, SARS Virus
agaacacgttgggcacccacgaaat

SEQ ID NO: 37461 - DNA, 25 bp, SARS Virus
gaacacgttggagacccacgaaatc

SEQ ID NO: 37462 - DNA, 25 bp, SARS Virus
aacacgttggacgcccacgaaatct

SEQ ID NO: 37463 - DNA, 25 bp, SARS Virus
acacgttggacagccacgaaatcta

SEQ ID NO: 37464 - DNA, 25 bp, SARS Virus
cacgttggacacgcacgaaatctac

SEQ ID NO: 37465 - DNA, 25 bp, SARS Virus
acgttggacaccgacgaaatctaca

SEQ ID NO: 37466 - DNA, 25 bp, SARS Virus
cgttggacacccgcgaaatctacac

SEQ ID NO: 37467 - DNA, 25 bp, SARS Virus
gttggacacccaggaaatctacaca

SEQ ID NO: 37468 - DNA, 25 bp, SARS Virus
ttggacacccacgaaatctacacag

SEQ ID NO: 37469 - DNA, 25 bp, SARS Virus
tggacacccacggaatctacacaga

SEQ ID NO: 37470 - DNA, 25 bp, SARS Virus
ggacacccacgagatctacacagac

SEQ ID NO: 37471 - DNA, 25 bp, SARS Virus
gacacccacgaagtctacacagacg

SEQ ID NO: 37472 - DNA, 25 bp, SARS Virus
acacccacgaaagctacacagacga

SEQ ID NO: 37473 - DNA, 25 bp, SARS Virus
cacccacgaaatgtacacagacgaa

SEQ ID NO: 37474 - DNA, 25 bp, SARS Virus
acccacgaaatcgacacagacgaag

SEQ ID NO: 37475 - DNA, 25 bp, SARS Virus
cccacgaaatctgcacagacgaagt

SEQ ID NO: 37476 - DNA, 25 bp, SARS Virus
ccacgaaatctagacagacgaagtc

SEQ ID NO: 37477 - DNA, 25 bp, SARS Virus
cacgaaatctacgcagacgaagtca

SEQ ID NO: 37478 - DNA, 25 bp, SARS Virus
acgaaatctacagagacgaagtcat

SEQ ID NO: 37479 - DNA, 25 bp, SARS Virus
cgaaatctacacggacgaagtcatc

SEQ ID NO: 37480 - DNA, 25 bp, SARS Virus
gaaatctacacagacgaagtcatca

SEQ ID NO: 37481 - DNA, 25 bp, SARS Virus
aaatctacacaggcgaagtcatcac

SEQ ID NO: 37482 - DNA, 25 bp, SARS Virus
aatctacacagaggaagtcatcacc

SEQ ID NO: 37483 - DNA, 25 bp, SARS Virus
atctacacagacgaagtcatcaccg

SEQ ID NO: 37484 - DNA, 25 bp, SARS Virus
tctacacagacggagtcatcaccga

SEQ ID NO: 37485 - DNA, 25 bp, SARS Virus
ctacacagacgaggtcatcaccgac

SEQ ID NO: 37486 - DNA, 25 bp, SARS Virus
tacacagacgaagtcatcaccgacc

SEQ ID NO: 37487 - DNA, 25 bp, SARS Virus
acacagacgaaggcatcaccgacca

SEQ ID NO: 37488 - DNA, 25 bp, SARS Virus
cacagacgaagtgatcaccgaccac

SEQ ID NO: 37489 - DNA, 25 bp, SARS Virus
acagacgaagtcgtcaccgaccacc

SEQ ID NO: 37490 - DNA, 25 bp, SARS Virus
cagacgaagtcagcaccgaccacca

SEQ ID NO: 37491 - DNA, 25 bp, SARS Virus
agacgaagtcatgaccgaccaccat

SEQ ID NO: 37492 - DNA, 25 bp, SARS Virus
gacgaagtcatcgccgaccaccata

SEQ ID NO: 37493 - DNA, 25 bp, SARS Virus
acgaagtcatcagcgaccaccataa

SEQ ID NO: 37494 - DNA, 25 bp, SARS Virus
cgaagtcatcacggaccaccataat

SEQ ID NO: 37495 - DNA, 25 bp, SARS Virus
gaagtcatcaccgaccaccataata

SEQ ID NO: 37496 - DNA, 25 bp, SARS Virus
aagtcatcaccggccaccataataa

SEQ ID NO: 37497 - DNA, 25 bp, SARS Virus
agtcatcaccgagcaccataataac

SEQ ID NO: 37498 - DNA, 25 bp, SARS Virus
gtcatcaccgacgaccataataacg

SEQ ID NO: 37499 - DNA, 25 bp, SARS Virus
tcatcaccgaccgccataataacgg

SEQ ID NO: 37500 - DNA, 25 bp, SARS Virus
catcaccgaccagcataataacggt

SEQ ID NO: 37501 - DNA, 25 bp, SARS Virus
atcaccgaccacgataataacggta

SEQ ID NO: 37502 - DNA, 25 bp, SARS Virus
tcaccgaccaccgtaataacggtat

SEQ ID NO: 37503 - DNA, 25 bp, SARS Virus
caccgaccaccagaataacggtata

SEQ ID NO: 37504 - DNA, 25 bp, SARS Virus
accgaccaccatgataacggtataa

SEQ ID NO: 37505 - DNA, 25 bp, SARS Virus
ccgaccaccatagtaacggtataac

SEQ ID NO: 37506 - DNA, 25 bp, SARS Virus
cgaccaccataagaacggtataacc

SEQ ID NO: 37507 - DNA, 25 bp, SARS Virus
gaccaccataatgacggtataacca

SEQ ID NO: 37508 - DNA, 25 bp, SARS Virus
accaccataatagcggtataaccac

SEQ ID NO: 37509 - DNA, 25 bp, SARS Virus
ccaccataataagggtataaccact

SEQ ID NO: 37510 - DNA, 25 bp, SARS Virus
caccataataacggtataaccactg

SEQ ID NO: 37511 - DNA, 25 bp, SARS Virus
accataataacggtataaccactga

SEQ ID NO: 37512 - DNA, 25 bp, SARS Virus
ccataataacgggataaccactgaa

SEQ ID NO: 37513 - DNA, 25 bp, SARS Virus
cataataacggtgtaaccactgaac

SEQ ID NO: 37514 - DNA, 25 bp, SARS Virus
ataataacggtagaaccactgaaca

SEQ ID NO: 37515 - DNA, 25 bp, SARS Virus
taataacggtatgaccactgaacac

SEQ ID NO: 37516 - DNA, 25 bp, SARS Virus
aataacggtatagccactgaacacg

SEQ ID NO: 37517 - DNA, 25 bp, SARS Virus
ataacggtataagcactgaacacga

SEQ ID NO: 37518 - DNA, 25 bp, SARS Virus
taacggtataacgactgaacacgac

SEQ ID NO: 37519 - DNA, 25 bp, SARS Virus
aacggtataaccgctgaacacgacg

SEQ ID NO: 37520 - DNA, 25 bp, SARS Virus
acggtataaccagtgaacacgacgg

SEQ ID NO: 37521 - DNA, 25 bp, SARS Virus
cggtataaccacggaacacgacgga

SEQ ID NO: 37522 - DNA, 25 bp, SARS Virus
ggtataaccactgaacacgacggat

SEQ ID NO: 37523 - DNA, 25 bp, SARS Virus
gtataaccactggacacgacggatg

SEQ ID NO: 37524 - DNA, 25 bp, SARS Virus
tataaccactgagcacgacggatga

SEQ ID NO: 37525 - DNA, 25 bp, SARS Virus
ataaccactgaagacgacggatgat

SEQ ID NO: 37526 - DNA, 25 bp, SARS Virus
taaccactgaacgcgacggatgatg

SEQ ID NO: 37527 - DNA, 25 bp, SARS Virus
aaccactgaacaggacggatgatga

SEQ ID NO: 37528 - DNA, 25 bp, SARS Virus
accactgaacacgacggatgatgaa

SEQ ID NO: 37529 - DNA, 25 bp, SARS Virus
ccactgaacacggcggatgatgaaa

SEQ ID NO: 37530 - DNA, 25 bp, SARS Virus
cactgaacacgagggatgatgaaat

SEQ ID NO: 37531 - DNA, 25 bp, SARS Virus
actgaacacgacggatgatgaaata

SEQ ID NO: 37532 - DNA, 25 bp, SARS Virus
ctgaacacgacggatgatgaaatac

SEQ ID NO: 37533 - DNA, 25 bp, SARS Virus
tgaacacgacgggtgatgaaatact

SEQ ID NO: 37534 - DNA, 25 bp, SARS Virus
gaacacgacggaggatgaaatactt

SEQ ID NO: 37535 - DNA, 25 bp, SARS Virus
aacacgacggatgatgaaatacttt

SEQ ID NO: 37536 - DNA, 25 bp, SARS Virus
acacgacggatggtgaaatacttta

SEQ ID NO: 37537 - DNA, 25 bp, SARS Virus
cacgacggatgaggaaatactttaa

SEQ ID NO: 37538 - DNA, 25 bp, SARS Virus
acgacggatgatgaaatactttaag

SEQ ID NO: 37539 - DNA, 25 bp, SARS Virus
cgacggatgatggaatactttaagt

SEQ ID NO: 37540 - DNA, 25 bp, SARS Virus
gacggatgatgagatactttaagtc

SEQ ID NO: 37541 - DNA, 25 bp, SARS Virus
acggatgatgaagtactttaagtct

SEQ ID NO: 37542 - DNA, 25 bp, SARS Virus
cggatgatgaaagactttaagtctg

SEQ ID NO: 37543 - DNA, 25 bp, SARS Virus
ggatgatgaaatgctttaagtctgc

SEQ ID NO: 37544 - DNA, 25 bp, SARS Virus
gatgatgaaatagtttaagtctgca

SEQ ID NO: 37545 - DNA, 25 bp, SARS Virus
atgatgaaatacgttaagtctgcac

SEQ ID NO: 37546 - DNA, 25 bp, SARS Virus
tgatgaaatactgtaagtctgcaca

SEQ ID NO: 37547 - DNA, 25 bp, SARS Virus
gatgaaatacttgaagtctgcacaa

SEQ ID NO: 37548 - DNA, 25 bp, SARS Virus
atgaaatactttgagtctgcacaaa

SEQ ID NO: 37549 - DNA, 25 bp, SARS Virus
tgaaatactttaggtctgcacaaaa

SEQ ID NO: 37550 - DNA, 25 bp, SARS Virus
gaaatactttaagtctgcacaaaaa

SEQ ID NO: 37551 - DNA, 25 bp, SARS Virus
aaatactttaaggctgcacaaaaac

SEQ ID NO: 37552 - DNA, 25 bp, SARS Virus
aatactttaagtgtgcacaaaaacc

SEQ ID NO: 37553 - DNA, 25 bp, SARS Virus
atactttaagtcggcacaaaaacca

SEQ ID NO: 37554 - DNA, 25 bp, SARS Virus
tactttaagtctgcacaaaaaccac

SEQ ID NO: 37555 - DNA, 25 bp, SARS Virus
actttaagtctggacaaaaaccact

SEQ ID NO: 37556 - DNA, 25 bp, SARS Virus
ctttaagtctgcgcaaaaaccactc

SEQ ID NO: 37557 - DNA, 25 bp, SARS Virus
tttaagtctgcagaaaaaccactca

SEQ ID NO: 37558 - DNA, 25 bp, SARS Virus
ttaagtctgcacgaaaaccactcat

SEQ ID NO: 37559 - DNA, 25 bp, SARS Virus
taagtctgcacagaaaccactcatg

SEQ ID NO: 37560 - DNA, 25 bp, SARS Virus
aagtctgcacaagaaccactcatgt

SEQ ID NO: 37561 - DNA, 25 bp, SARS Virus
agtctgcacaaagaccactcatgtt

SEQ ID NO: 37562 - DNA, 25 bp, SARS Virus
gtctgcacaaaagccactcatgttg

SEQ ID NO: 37563 - DNA, 25 bp, SARS Virus
tctgcacaaaaagcactcatgttgg

SEQ ID NO: 37564 - DNA, 25 bp, SARS Virus
ctgcacaaaaacgactcatgttggt

SEQ ID NO: 37565 - DNA, 25 bp, SARS Virus
tgcacaaaaaccgctcatgttggta

SEQ ID NO: 37566 - DNA, 25 bp, SARS Virus
gcacaaaaaccagtcatgttggtac

SEQ ID NO: 37567 - DNA, 25 bp, SARS Virus
cacaaaaaccacgcatgttggtaca

SEQ ID NO: 37568 - DNA, 25 bp, SARS Virus
acaaaaaccactgatgttggtacaa

SEQ ID NO: 37569 - DNA, 25 bp, SARS Virus
caaaaaccactcgtgttggtacaac

SEQ ID NO: 37570 - DNA, 25 bp, SARS Virus
aaaaaccactcaggttggtacaaca

SEQ ID NO: 37571 - DNA, 25 bp, SARS Virus
aaaaccactcatgttggtacaacaa

SEQ ID NO: 37572 - DNA, 25 bp, SARS Virus
aaaccactcatggtggtacaacaac

SEQ ID NO: 37573 - DNA, 25 bp, SARS Virus
aaccactcatgtgggtacaacaacg

SEQ ID NO: 37574 - DNA, 25 bp, SARS Virus
accactcatgttggtacaacaacga

SEQ ID NO: 37575 - DNA, 25 bp, SARS Virus
ccactcatgttggtacaacaacgac

SEQ ID NO: 37576 - DNA, 25 bp, SARS Virus
cactcatgttgggacaacaacgacg

SEQ ID NO: 37577 - DNA, 25 bp, SARS Virus
actcatgttggtgcaacaacgacga

SEQ ID NO: 37578 - DNA, 25 bp, SARS Virus
ctcatgttggtagaacaacgacgat

SEQ ID NO: 37579 - DNA, 25 bp, SARS Virus
tcatgttggtacgacaacgacgatt

SEQ ID NO: 37580 - DNA, 25 bp, SARS Virus
catgttggtacagcaacgacgatta

SEQ ID NO: 37581 - DNA, 25 bp, SARS Virus
atgttggtacaagaacgacgattac

SEQ ID NO: 37582 - DNA, 25 bp, SARS Virus
tgttggtacaacgacgacgattacg

SEQ ID NO: 37583 - DNA, 25 bp, SARS Virus
gttggtacaacagcgacgattacgt

SEQ ID NO: 37584 - DNA, 25 bp, SARS Virus
ttggtacaacaaggacgattacgtg

SEQ ID NO: 37585 - DNA, 25 bp, SARS Virus
tggtacaacaacgacgattacgtga

SEQ ID NO: 37586 - DNA, 25 bp, SARS Virus
ggtacaacaacggcgattacgtgaa

SEQ ID NO: 37587 - DNA, 25 bp, SARS Virus
gtacaacaacgaggattacgtgaaa

SEQ ID NO: 37588 - DNA, 25 bp, SARS Virus
tacaacaacgacgattacgtgaaaa

SEQ ID NO: 37589 - DNA, 25 bp, SARS Virus
acaacaacgacggttacgtgaaaac

SEQ ID NO: 37590 - DNA, 25 bp, SARS Virus
caacaacgacgagtacgtgaaaaca

SEQ ID NO: 37591 - DNA, 25 bp, SARS Virus
aacaacgacgatgacgtgaaaacaa

SEQ ID NO: 37592 - DNA, 25 bp, SARS Virus
acaacgacgattgcgtgaaaacaaa

SEQ ID NO: 37593 - DNA, 25 bp, SARS Virus
caacgacgattaggtgaaaacaaaa

SEQ ID NO: 37594 - DNA, 25 bp, SARS Virus
aacgacgattacgtgaaaacaaaaa

SEQ ID NO: 37595 - DNA, 25 bp, SARS Virus
acgacgattacgggaaaacaaaaac

SEQ ID NO: 37596 - DNA, 25 bp, SARS Virus
cgacgattacgtgaaaacaaaaact

SEQ ID NO: 37597 - DNA, 25 bp, SARS Virus
gacgattacgtggaaacaaaaacta

SEQ ID NO: 37598 - DNA, 25 bp, SARS Virus
acgattacgtgagaacaaaaactac

SEQ ID NO: 37599 - DNA, 25 bp, SARS Virus
cgattacgtgaagacaaaaactaca

SEQ ID NO: 37600 - DNA, 25 bp, SARS Virus
gattacgtgaaagcaaaaactacag

SEQ ID NO: 37601 - DNA, 25 bp, SARS Virus
attacgtgaaaagaaaaactacaga

SEQ ID NO: 37602 - DNA, 25 bp, SARS Virus
ttacgtgaaaacgaaaactacagaa

SEQ ID NO: 37603 - DNA, 25 bp, SARS Virus
tacgtgaaaacagaaactacagaaa

SEQ ID NO: 37604 - DNA, 25 bp, SARS Virus
acgtgaaaacaagaactacagaaag

SEQ ID NO: 37605 - DNA, 25 bp, SARS Virus
cgtgaaaacaaagactacagaaagt

SEQ ID NO: 37606 - DNA, 25 bp, SARS Virus
gtgaaaacaaaagctacagaaagtg

SEQ ID NO: 37607 - DNA, 25 bp, SARS Virus
tgaaaacaaaaagtacagaaagtga

SEQ ID NO: 37608 - DNA, 25 bp, SARS Virus
gaaaacaaaaacgacagaaagtgat

SEQ ID NO: 37609 - DNA, 25 bp, SARS Virus
aaaacaaaaactgcagaaagtgata

SEQ ID NO: 37610 - DNA, 25 bp, SARS Virus
aaacaaaaactagagaaagtgatat

SEQ ID NO: 37611 - DNA, 25 bp, SARS Virus
aacaaaaactacggaaagtgatatg

SEQ ID NO: 37612 - DNA, 25 bp, SARS Virus
acaaaaactacagaaagtgatatga

SEQ ID NO: 37613 - DNA, 25 bp, SARS Virus
caaaaactacaggaagtgatatgag

SEQ ID NO: 37614 - DNA, 25 bp, SARS Virus
aaaaactacagagagtgatatgaga

SEQ ID NO: 37615 - DNA, 25 bp, SARS Virus
aaaactacagaaggtgatatgagac

SEQ ID NO: 37616 - DNA, 25 bp, SARS Virus
aaactacagaaagtgatatgagaca

SEQ ID NO: 37617 - DNA, 25 bp, SARS Virus
aactacagaaagggatatgagacag

SEQ ID NO: 37618 - DNA, 25 bp, SARS Virus
actacagaaagtgatatgagacaga

SEQ ID NO: 37619 - DNA, 25 bp, SARS Virus
ctacagaaagtggtatgagacagac

SEQ ID NO: 37620 - DNA, 25 bp, SARS Virus
tacagaaagtgagatgagacagacc

SEQ ID NO: 37621 - DNA, 25 bp, SARS Virus
acagaaagtgatgtgagacagacca

SEQ ID NO: 37622 - DNA, 25 bp, SARS Virus
cagaaagtgataggagacagaccat

SEQ ID NO: 37623 - DNA, 25 bp, SARS Virus
agaaagtgatatgagacagaccatg

SEQ ID NO: 37624 - DNA, 25 bp, SARS Virus
gaaagtgatatgggacagaccatgg

SEQ ID NO: 37625 - DNA, 25 bp, SARS Virus
aaagtgatatgagacagaccatggt

SEQ ID NO: 37626 - DNA, 25 bp, SARS Virus
aagtgatatgaggcagaccatggtc

SEQ ID NO: 37627 - DNA, 25 bp, SARS Virus
agtgatatgagagagaccatggtcg

SEQ ID NO: 37628 - DNA, 25 bp, SARS Virus
gtgatatgagacggaccatggtcga

SEQ ID NO: 37629 - DNA, 25 bp, SARS Virus
tgatatgagacagaccatggtcgaa

SEQ ID NO: 37630 - DNA, 25 bp, SARS Virus
gatatgagacaggccatggtcgaat

SEQ ID NO: 37631 - DNA, 25 bp, SARS Virus
atatgagacagagcatggtcgaatg

SEQ ID NO: 37632 - DNA, 25 bp, SARS Virus
tatgagacagacgatggtcgaatgt

SEQ ID NO: 37633 - DNA, 25 bp, SARS Virus
atgagacagaccgtggtcgaatgtc

SEQ ID NO: 37634 - DNA, 25 bp, SARS Virus
tgagacagaccagggtcgaatgtcg

SEQ ID NO: 37635 - DNA, 25 bp, SARS Virus
gagacagaccatggtcgaatgtcga

SEQ ID NO: 37636 - DNA, 25 bp, SARS Virus
agacagaccatggtcgaatgtcgaa

SEQ ID NO: 37637 - DNA, 25 bp, SARS Virus
gacagaccatgggcgaatgtcgaaa

SEQ ID NO: 37638 - DNA, 25 bp, SARS Virus
acagaccatggtggaatgtcgaaag

SEQ ID NO: 37639 - DNA, 25 bp, SARS Virus
cagaccatggtcgaatgtcgaaaga

SEQ ID NO: 37640 - DNA, 25 bp, SARS Virus
agaccatggtcggatgtcgaaagac

SEQ ID NO: 37641 - DNA, 25 bp, SARS Virus
gaccatggtcgagtgtcgaaagacg

SEQ ID NO: 37642 - DNA, 25 bp, SARS Virus
accatggtcgaaggtcgaaagacgg

SEQ ID NO: 37643 - DNA, 25 bp, SARS Virus
ccatggtcgaatgtcgaaagacggc

SEQ ID NO: 37644 - DNA, 25 bp, SARS Virus
catggtcgaatggcgaaagacggcc

SEQ ID NO: 37645 - DNA, 25 bp, SARS Virus
atggtcgaatgtggaaagacggccc

SEQ ID NO: 37646 - DNA, 25 bp, SARS Virus
tggtcgaatgtcgaaagacggccct

SEQ ID NO: 37647 - DNA, 25 bp, SARS Virus
ggtcgaatgtcggaagacggccctc

SEQ ID NO: 37648 - DNA, 25 bp, SARS Virus
gtcgaatgtcgagagacggccctca

SEQ ID NO: 37649 - DNA, 25 bp, SARS Virus
tcgaatgtcgaaggacggccctcag

SEQ ID NO: 37650 - DNA, 25 bp, SARS Virus
cgaatgtcgaaagacggccctcaga

SEQ ID NO: 37651 - DNA, 25 bp, SARS Virus
gaatgtcgaaaggcggccctcagat

SEQ ID NO: 37652 - DNA, 25 bp, SARS Virus
aatgtcgaaagagggccctcagatg

SEQ ID NO: 37653 - DNA, 25 bp, SARS Virus
atgtcgaaagacggccctcagatga

SEQ ID NO: 37654 - DNA, 25 bp, SARS Virus
tgtcgaaagacggccctcagatgag

SEQ ID NO: 37655 - DNA, 25 bp, SARS Virus
gtcgaaagacgggcctcagatgagt

SEQ ID NO: 37656 - DNA, 25 bp, SARS Virus
tcgaaagacggcgctcagatgagtc

SEQ ID NO: 37657 - DNA, 25 bp, SARS Virus
cgaaagacggccgtcagatgagtca

SEQ ID NO: 37658 - DNA, 25 bp, SARS Virus
gaaagacggcccgcagatgagtcag

SEQ ID NO: 37659 - DNA, 25 bp, SARS Virus
aaagacggccctgagatgagtcaga

SEQ ID NO: 37660 - DNA, 25 bp, SARS Virus
aagacggccctcggatgagtcagaa

SEQ ID NO: 37661 - DNA, 25 bp, SARS Virus
agacggccctcagatgagtcagaaa

SEQ ID NO: 37662 - DNA, 25 bp, SARS Virus
gacggccctcaggtgagtcagaaaa

SEQ ID NO: 37663 - DNA, 25 bp, SARS Virus
acggccctcagaggagtcagaaaat

SEQ ID NO: 37664 - DNA, 25 bp, SARS Virus
cggccctcagatgagtcagaaaatg

SEQ ID NO: 37665 - DNA, 25 bp, SARS Virus
ggccctcagatgggtcagaaaatga

SEQ ID NO: 37666 - DNA, 25 bp, SARS Virus
gccctcagatgagtcagaaaatgaa

SEQ ID NO: 37667 - DNA, 25 bp, SARS Virus
ccctcagatgaggcagaaaatgaac

SEQ ID NO: 37668 - DNA, 25 bp, SARS Virus
cctcagatgagtgagaaaatgaaca

SEQ ID NO: 37669 - DNA, 25 bp, SARS Virus
ctcagatgagtcggaaaatgaacat

SEQ ID NO: 37670 - DNA, 25 bp, SARS Virus
tcagatgagtcagaaaatgaacatg

SEQ ID NO: 37671 - DNA, 25 bp, SARS Virus
cagatgagtcaggaaatgaacatga

SEQ ID NO: 37672 - DNA, 25 bp, SARS Virus
agatgagtcagagaatgaacatgaa

SEQ ID NO: 37673 - DNA, 25 bp, SARS Virus
gatgagtcagaagatgaacatgaac

SEQ ID NO: 37674 - DNA, 25 bp, SARS Virus
atgagtcagaaagtgaacatgaact

SEQ ID NO: 37675 - DNA, 25 bp, SARS Virus
tgagtcagaaaaggaacatgaactg

SEQ ID NO: 37676 - DNA, 25 bp, SARS Virus
gagtcagaaaatgaacatgaactgt

SEQ ID NO: 37677 - DNA, 25 bp, SARS Virus
agtcagaaaatggacatgaactgta

SEQ ID NO: 37678 - DNA, 25 bp, SARS Virus
gtcagaaaatgagcatgaactgtaa

SEQ ID NO: 37679 - DNA, 25 bp, SARS Virus
tcagaaaatgaagatgaactgtaag

SEQ ID NO: 37680 - DNA, 25 bp, SARS Virus
cagaaaatgaacgtgaactgtaaga

SEQ ID NO: 37681 - DNA, 25 bp, SARS Virus
agaaaatgaacaggaactgtaagat

SEQ ID NO: 37682 - DNA, 25 bp, SARS Virus
gaaaatgaacatgaactgtaagata

SEQ ID NO: 37683 - DNA, 25 bp, SARS Virus
aaaatgaacatggactgtaagataa

SEQ ID NO: 37684 - DNA, 25 bp, SARS Virus
aaatgaacatgagctgtaagataaa

SEQ ID NO: 37685 - DNA, 25 bp, SARS Virus
aatgaacatgaagtgtaagataaag

SEQ ID NO: 37686 - DNA, 25 bp, SARS Virus
atgaacatgaacggtaagataaagt

SEQ ID NO: 37687 - DNA, 25 bp, SARS Virus
tgaacatgaactgtaagataaagtg

SEQ ID NO: 37688 - DNA, 25 bp, SARS Virus
gaacatgaactggaagataaagtgg

SEQ ID NO: 37689 - DNA, 25 bp, SARS Virus
aacatgaactgtgagataaagtggt

SEQ ID NO: 37690 - DNA, 25 bp, SARS Virus
acatgaactgtaggataaagtggtt

SEQ ID NO: 37691 - DNA, 25 bp, SARS Virus
catgaactgtaagataaagtggtta

SEQ ID NO: 37692 - DNA, 25 bp, SARS Virus
atgaactgtaaggtaaagtggttac

SEQ ID NO: 37693 - DNA, 25 bp, SARS Virus
tgaactgtaagagaaagtggttact

SEQ ID NO: 37694 - DNA, 25 bp, SARS Virus
gaactgtaagatgaagtggttacta

SEQ ID NO: 37695 - DNA, 25 bp, SARS Virus
aactgtaagatagagtggttactac

SEQ ID NO: 37696 - DNA, 25 bp, SARS Virus
actgtaagataaggtggttactaca

SEQ ID NO: 37697 - DNA, 25 bp, SARS Virus
ctgtaagataaagtggttactacaa

SEQ ID NO: 37698 - DNA, 25 bp, SARS Virus
tgtaagataaaggggttactacaaa

SEQ ID NO: 37699 - DNA, 25 bp, SARS Virus
gtaagataaagtggttactacaaag

SEQ ID NO: 37700 - DNA, 25 bp, SARS Virus
taagataaagtggttactacaaagt

SEQ ID NO: 37701 - DNA, 25 bp, SARS Virus
aagataaagtgggtactacaaagta

SEQ ID NO: 37702 - DNA, 25 bp, SARS Virus
agataaagtggtgactacaaagtaa

SEQ ID NO: 37703 - DNA, 25 bp, SARS Virus
gataaagtggttgctacaaagtaag

SEQ ID NO: 37704 - DNA, 25 bp, SARS Virus
ataaagtggttagtacaaagtaaga

SEQ ID NO: 37705 - DNA, 25 bp, SARS Virus
agcaatacacgattacctaccaagg

SEQ ID NO: 37706 - DNA, 25 bp, SARS Virus
gcaatacacgaatacctaccaaggt

SEQ ID NO: 37707 - DNA, 25 bp, SARS Virus
caatacacgaattcctaccaaggta

SEQ ID NO: 37708 - DNA, 25 bp, SARS Virus
aatacacgaatatctaccaaggtag

SEQ ID NO: 37709 - DNA, 25 bp, SARS Virus
atacacgaatacttaccaaggtagt

SEQ ID NO: 37710 - DNA, 25 bp, SARS Virus
tacacgaatacctaccaaggtagta

SEQ ID NO: 37711 - DNA, 25 bp, SARS Virus
acacgaataccttccaaggtagtat

SEQ ID NO: 37712 - DNA, 25 bp, SARS Virus
cacgaatacctatcaaggtagtatg

SEQ ID NO: 37713 - DNA, 25 bp, SARS Virus
acgaatacctactaaggtagtatgt

SEQ ID NO: 37714 - DNA, 25 bp, SARS Virus
cgaatacctacctaggtagtatgtc

SEQ ID NO: 37715 - DNA, 25 bp, SARS Virus
gaatacctaccatggtagtatgtca

SEQ ID NO: 37716 - DNA, 25 bp, SARS Virus
aatacctaccaatgtagtatgtcaa

SEQ ID NO: 37717 - DNA, 25 bp, SARS Virus
atacctaccaagttagtatgtcaaa

SEQ ID NO: 37718 - DNA, 25 bp, SARS Virus
tacctaccaaggtagtatgtcaaag

SEQ ID NO: 37719 - DNA, 25 bp, SARS Virus
acctaccaaggttgtatgtcaaagg

SEQ ID NO: 37720 - DNA, 25 bp, SARS Virus
cctaccaaggtattatgtcaaagga

SEQ ID NO: 37721 - DNA, 25 bp, SARS Virus
ctaccaaggtagtatgtcaaaggat

SEQ ID NO: 37722 - DNA, 25 bp, SARS Virus
taccaaggtagtttgtcaaaggatt

SEQ ID NO: 37723 - DNA, 25 bp, SARS Virus
accaaggtagtatgtcaaaggattg

SEQ ID NO: 37724 - DNA, 25 bp, SARS Virus
ccaaggtagtatttcaaaggattgt

SEQ ID NO: 37725 - DNA, 25 bp, SARS Virus
caaggtagtatgtcaaaggattgtg

SEQ ID NO: 37726 - DNA, 25 bp, SARS Virus
aaggtagtatgttaaaggattgtga

SEQ ID NO: 37727 - DNA, 25 bp, SARS Virus
aggtagtatgtctaaggattgtgaa

SEQ ID NO: 37728 - DNA, 25 bp, SARS Virus
ggtagtatgtcataggattgtgaat

SEQ ID NO: 37729 - DNA, 25 bp, SARS Virus
gtagtatgtcaatggattgtgaatg

SEQ ID NO: 37730 - DNA, 25 bp, SARS Virus
tagtatgtcaaatgattgtgaatgg

SEQ ID NO: 37731 - DNA, 25 bp, SARS Virus
agtatgtcaaagtattgtgaatgga

SEQ ID NO: 37732 - DNA, 25 bp, SARS Virus
gtatgtcaaaggtttgtgaatggac

SEQ ID NO: 37733 - DNA, 25 bp, SARS Virus
tatgtcaaaggattgtgaatggacc

SEQ ID NO: 37734 - DNA, 25 bp, SARS Virus
atgtcaaaggattgtgaatggacct

SEQ ID NO: 37735 - DNA, 25 bp, SARS Virus
tgtcaaaggattttgaatggacctc

SEQ ID NO: 37736 - DNA, 25 bp, SARS Virus
gtcaaaggattgtgaatggacctcc

SEQ ID NO: 37737 - DNA, 25 bp, SARS Virus
tcaaaggattgttaatggacctccc

SEQ ID NO: 37738 - DNA, 25 bp, SARS Virus
caaaggattgtgtatggacctccca

SEQ ID NO: 37739 - DNA, 25 bp, SARS Virus
aaaggattgtgattggacctcccaa

SEQ ID NO: 37740 - DNA, 25 bp, SARS Virus
aaggattgtgaatggacctcccaag

SEQ ID NO: 37741 - DNA, 25 bp, SARS Virus
aggattgtgaattgacctcccaaga

SEQ ID NO: 37742 - DNA, 25 bp, SARS Virus
ggattgtgaatgtacctcccaagac

SEQ ID NO: 37743 - DNA, 25 bp, SARS Virus
gattgtgaatggtcctcccaagaca

SEQ ID NO: 37744 - DNA, 25 bp, SARS Virus
attgtgaatggatctcccaagacaa

SEQ ID NO: 37745 - DNA, 25 bp, SARS Virus
ttgtgaatggacttcccaagacaat

SEQ ID NO: 37746 - DNA, 25 bp, SARS Virus
tgtgaatggacctcccaagacaatc

SEQ ID NO: 37747 - DNA, 25 bp, SARS Virus
gtgaatggaccttccaagacaatct

SEQ ID NO: 37748 - DNA, 25 bp, SARS Virus
tgaatggacctctcaagacaatctc

SEQ ID NO: 37749 - DNA, 25 bp, SARS Virus
gaatggacctcctaagacaatctca

SEQ ID NO: 37750 - DNA, 25 bp, SARS Virus
aatggacctccctagacaatctcat

SEQ ID NO: 37751 - DNA, 25 bp, SARS Virus
atggacctcccatgacaatctcatc

SEQ ID NO: 37752 - DNA, 25 bp, SARS Virus
tggacctcccaatacaatctcatca

SEQ ID NO: 37753 - DNA, 25 bp, SARS Virus
ggacctcccaagtcaatctcatcat

SEQ ID NO: 37754 - DNA, 25 bp, SARS Virus
gacctcccaagataatctcatcatt

SEQ ID NO: 37755 - DNA, 25 bp, SARS Virus
acctcccaagactatctcatcattg

SEQ ID NO: 37756 - DNA, 25 bp, SARS Virus
cctcccaagacattctcatcattgt

SEQ ID NO: 37757 - DNA, 25 bp, SARS Virus
ctcccaagacaatctcatcattgtt

SEQ ID NO: 37758 - DNA, 25 bp, SARS Virus
tcccaagacaatttcatcattgttg

SEQ ID NO: 37759 - DNA, 25 bp, SARS Virus
cccaagacaatctcatcattgttga

SEQ ID NO: 37760 - DNA, 25 bp, SARS Virus
ccaagacaatcttatcattgttgaa

SEQ ID NO: 37761 - DNA, 25 bp, SARS Virus
caagacaatctcttcattgttgaaa

SEQ ID NO: 37762 - DNA, 25 bp, SARS Virus
aagacaatctcatcattgttgaaaa

SEQ ID NO: 37763 - DNA, 25 bp, SARS Virus
agacaatctcattattgttgaaaac

SEQ ID NO: 37764 - DNA, 25 bp, SARS Virus
gacaatctcatctttgttgaaaact

SEQ ID NO: 37765 - DNA, 25 bp, SARS Virus
acaatctcatcattgttgaaaacta

SEQ ID NO: 37766 - DNA, 25 bp, SARS Virus
caatctcatcattgttgaaaactac

SEQ ID NO: 37767 - DNA, 25 bp, SARS Virus
aatctcatcatttttgaaaactacg

SEQ ID NO: 37768 - DNA, 25 bp, SARS Virus
atctcatcattgttgaaaactacga

SEQ ID NO: 37769 - DNA, 25 bp, SARS Virus
tctcatcattgttgaaaactacgac

SEQ ID NO: 37770 - DNA, 25 bp, SARS Virus
ctcatcattgtttaaaactacgact

SEQ ID NO: 37771 - DNA, 25 bp, SARS Virus
tcatcattgttgtaaactacgactc

SEQ ID NO: 37772 - DNA, 25 bp, SARS Virus
catcattgttgataactacgactca

SEQ ID NO: 37773 - DNA, 25 bp, SARS Virus
atcattgttgaatactacgactcat

SEQ ID NO: 37774 - DNA, 25 bp, SARS Virus
tcattgttgaaatctacgactcatg

SEQ ID NO: 37775 - DNA, 25 bp, SARS Virus
cattgttgaaaattacgactcatga

SEQ ID NO: 37776 - DNA, 25 bp, SARS Virus
attgttgaaaactacgactcatgac

SEQ ID NO: 37777 - DNA, 25 bp, SARS Virus
ttgttgaaaacttcgactcatgaca

SEQ ID NO: 37778 - DNA, 25 bp, SARS Virus
tgttgaaaactatgactcatgacat

SEQ ID NO: 37779 - DNA, 25 bp, SARS Virus
gttgaaaactactactcatgacatc

SEQ ID NO: 37780 - DNA, 25 bp, SARS Virus
ttgaaaactacgtctcatgacatct

SEQ ID NO: 37781 - DNA, 25 bp, SARS Virus
tgaaaactacgattcatgacatctg

SEQ ID NO: 37782 - DNA, 25 bp, SARS Virus
gaaaactacgactcatgacatctgt

SEQ ID NO: 37783 - DNA, 25 bp, SARS Virus
aaaactacgacttatgacatctgta

SEQ ID NO: 37784 - DNA, 25 bp, SARS Virus
aaactacgactcttgacatctgtac

SEQ ID NO: 37785 - DNA, 25 bp, SARS Virus
aactacgactcatgacatctgtacc

SEQ ID NO: 37786 - DNA, 25 bp, SARS Virus
actacgactcattacatctgtacca

SEQ ID NO: 37787 - DNA, 25 bp, SARS Virus
ctacgactcatgtcatctgtaccat

SEQ ID NO: 37788 - DNA, 25 bp, SARS Virus
tacgactcatgatatctgtaccatg

SEQ ID NO: 37789 - DNA, 25 bp, SARS Virus
acgactcatgacttctgtaccatgt

SEQ ID NO: 37790 - DNA, 25 bp, SARS Virus
cgactcatgacatctgtaccatgta

SEQ ID NO: 37791 - DNA, 25 bp, SARS Virus
gactcatgacatttgtaccatgtac

SEQ ID NO: 37792 - DNA, 25 bp, SARS Virus
actcatgacatctgtaccatgtacg

SEQ ID NO: 37793 - DNA, 25 bp, SARS Virus
ctcatgacatctttaccatgtacgc

SEQ ID NO: 37794 - DNA, 25 bp, SARS Virus
tcatgacatctgtaccatgtacgct

SEQ ID NO: 37795 - DNA, 25 bp, SARS Virus
catgacatctgttccatgtacgctt

SEQ ID NO: 37796 - DNA, 25 bp, SARS Virus
atgacatctgtatcatgtacgcttt

SEQ ID NO: 37797 - DNA, 25 bp, SARS Virus
tgacatctgtactatgtacgctttc

SEQ ID NO: 37798 - DNA, 25 bp, SARS Virus
gacatctgtaccttgtacgctttcc

SEQ ID NO: 37799 - DNA, 25 bp, SARS Virus
acatctgtaccatgtacgctttcca

SEQ ID NO: 37800 - DNA, 25 bp, SARS Virus
catctgtaccatttacgctttccag

SEQ ID NO: 37801 - DNA, 25 bp, SARS Virus
atctgtaccatgtacgctttccagt

SEQ ID NO: 37802 - DNA, 25 bp, SARS Virus
tctgtaccatgttcgctttccagtc

SEQ ID NO: 37803 - DNA, 25 bp, SARS Virus
ctgtaccatgtatgctttccagtct

SEQ ID NO: 37804 - DNA, 25 bp, SARS Virus
tgtaccatgtactctttccagtctt

SEQ ID NO: 37805 - DNA, 25 bp, SARS Virus
gtaccatgtacgttttccagtcttc

SEQ ID NO: 37806 - DNA, 25 bp, SARS Virus
taccatgtacgctttccagtcttca

SEQ ID NO: 37807 - DNA, 25 bp, SARS Virus
accatgtacgctttccagtcttcat

SEQ ID NO: 37808 - DNA, 25 bp, SARS Virus
ccatgtacgctttccagtcttcatc

SEQ ID NO: 37809 - DNA, 25 bp, SARS Virus
catgtacgcttttcagtcttcatcc

SEQ ID NO: 37810 - DNA, 25 bp, SARS Virus
atgtacgctttctagtcttcatcca

SEQ ID NO: 37811 - DNA, 25 bp, SARS Virus
tgtacgctttcctgtcttcatccat

SEQ ID NO: 37812 - DNA, 25 bp, SARS Virus
gtacgctttccattcttcatccata

SEQ ID NO: 37813 - DNA, 25 bp, SARS Virus
tacgctttccagtcttcatccataa

SEQ ID NO: 37814 - DNA, 25 bp, SARS Virus
acgctttccagttttcatccataaa

SEQ ID NO: 37815 - DNA, 25 bp, SARS Virus
cgctttccagtcttcatccataaac

SEQ ID NO: 37816 - DNA, 25 bp, SARS Virus
gctttccagtcttcatccataaacg

SEQ ID NO: 37817 - DNA, 25 bp, SARS Virus
ctttccagtctttatccataaacgg

SEQ ID NO: 37818 - DNA, 25 bp, SARS Virus
tttccagtcttcttccataaacgga

SEQ ID NO: 37819 - DNA, 25 bp, SARS Virus
ttccagtcttcatccataaacggat

SEQ ID NO: 37820 - DNA, 25 bp, SARS Virus
tccagtcttcattcataaacggata

SEQ ID NO: 37821 - DNA, 25 bp, SARS Virus
ccagtcttcatctataaacggatag

SEQ ID NO: 37822 - DNA, 25 bp, SARS Virus
cagtcttcatccttaaacggataga

SEQ ID NO: 37823 - DNA, 25 bp, SARS Virus
agtcttcatccataaacggatagat

SEQ ID NO: 37824 - DNA, 25 bp, SARS Virus
gtcttcatccattaacggatagatg

SEQ ID NO: 37825 - DNA, 25 bp, SARS Virus
tcttcatccatatacggatagatgg

SEQ ID NO: 37826 - DNA, 25 bp, SARS Virus
cttcatccataatcggatagatggt

SEQ ID NO: 37827 - DNA, 25 bp, SARS Virus
ttcatccataaatggatagatggtc

SEQ ID NO: 37828 - DNA, 25 bp, SARS Virus
tcatccataaactgatagatggtca

SEQ ID NO: 37829 - DNA, 25 bp, SARS Virus
catccataaacgtatagatggtcac

SEQ ID NO: 37830 - DNA, 25 bp, SARS Virus
atccataaacggttagatggtcacc

SEQ ID NO: 37831 - DNA, 25 bp, SARS Virus
tccataaacggatagatggtcacca

SEQ ID NO: 37832 - DNA, 25 bp, SARS Virus
ccataaacggattgatggtcaccat

SEQ ID NO: 37833 - DNA, 25 bp, SARS Virus
cataaacggatatatggtcaccatc

SEQ ID NO: 37834 - DNA, 25 bp, SARS Virus
ataaacggatagttggtcaccatct

SEQ ID NO: 37835 - DNA, 25 bp, SARS Virus
taaacggatagatggtcaccatcta

SEQ ID NO: 37836 - DNA, 25 bp, SARS Virus
aaacggatagattgtcaccatctac

SEQ ID NO: 37837 - DNA, 25 bp, SARS Virus
aacggatagatgttcaccatctacc

SEQ ID NO: 37838 - DNA, 25 bp, SARS Virus
acggatagatggtcaccatctaccc

SEQ ID NO: 37839 - DNA, 25 bp, SARS Virus
cggatagatggttaccatctaccca

SEQ ID NO: 37840 - DNA, 25 bp, SARS Virus
ggatagatggtctccatctacccaa

SEQ ID NO: 37841 - DNA, 25 bp, SARS Virus
gatagatggtcatcatctacccaag

SEQ ID NO: 37842 - DNA, 25 bp, SARS Virus
atagatggtcactatctacccaaga

SEQ ID NO: 37843 - DNA, 25 bp, SARS Virus
tagatggtcaccttctacccaagaa

SEQ ID NO: 37844 - DNA, 25 bp, SARS Virus
agatggtcaccatctacccaagaat

SEQ ID NO: 37845 - DNA, 25 bp, SARS Virus
gatggtcaccatttacccaagaatt

SEQ ID NO: 37846 - DNA, 25 bp, SARS Virus
atggtcaccatctacccaagaatta

SEQ ID NO: 37847 - DNA, 25 bp, SARS Virus
tggtcaccatcttcccaagaattat

SEQ ID NO: 37848 - DNA, 25 bp, SARS Virus
ggtcaccatctatccaagaattatt

SEQ ID NO: 37849 - DNA, 25 bp, SARS Virus
gtcaccatctactcaagaattatta

SEQ ID NO: 37850 - DNA, 25 bp, SARS Virus
tcaccatctacctaagaattattac

SEQ ID NO: 37851 - DNA, 25 bp, SARS Virus
caccatctaccctagaattattact

SEQ ID NO: 37852 - DNA, 25 bp, SARS Virus
accatctacccatgaattattactc

SEQ ID NO: 37853 - DNA, 25 bp, SARS Virus
ccatctacccaataattattactcg

SEQ ID NO: 37854 - DNA, 25 bp, SARS Virus
catctacccaagtattattactcgt

SEQ ID NO: 37855 - DNA, 25 bp, SARS Virus
atctacccaagatttattactcgta

SEQ ID NO: 37856 - DNA, 25 bp, SARS Virus
tctacccaagaattattactcgtaa

SEQ ID NO: 37857 - DNA, 25 bp, SARS Virus
ctacccaagaattattactcgtaat

SEQ ID NO: 37858 - DNA, 25 bp, SARS Virus
tacccaagaatttttactcgtaatg

SEQ ID NO: 37859 - DNA, 25 bp, SARS Virus
acccaagaattattactcgtaatgt

SEQ ID NO: 37860 - DNA, 25 bp, SARS Virus
cccaagaattattactcgtaatgtc

SEQ ID NO: 37861 - DNA, 25 bp, SARS Virus
ccaagaattatttctcgtaatgtct

SEQ ID NO: 37862 - DNA, 25 bp, SARS Virus
caagaattattattcgtaatgtctc

SEQ ID NO: 37863 - DNA, 25 bp, SARS Virus
aagaattattactcgtaatgtctcg

SEQ ID NO: 37864 - DNA, 25 bp, SARS Virus
agaattattacttgtaatgtctcga

SEQ ID NO: 37865 - DNA, 25 bp, SARS Virus
gaattattactcttaatgtctcgag

SEQ ID NO: 37866 - DNA, 25 bp, SARS Virus
aattattactcgtaatgtctcgaga

SEQ ID NO: 37867 - DNA, 25 bp, SARS Virus
attattactcgttatgtctcgagat

SEQ ID NO: 37868 - DNA, 25 bp, SARS Virus
ttattactcgtattgtctcgagata

SEQ ID NO: 37869 - DNA, 25 bp, SARS Virus
tattactcgtaatgtctcgagatag

SEQ ID NO: 37870 - DNA, 25 bp, SARS Virus
attactcgtaatttctcgagatagt

SEQ ID NO: 37871 - DNA, 25 bp, SARS Virus
ttactcgtaatgtctcgagatagtc

SEQ ID NO: 37872 - DNA, 25 bp, SARS Virus
tactcgtaatgtttcgagatagtcc

SEQ ID NO: 37873 - DNA, 25 bp, SARS Virus
actcgtaatgtctcgagatagtcct

SEQ ID NO: 37874 - DNA, 25 bp, SARS Virus
ctcgtaatgtcttgagatagtcctc

SEQ ID NO: 37875 - DNA, 25 bp, SARS Virus
tcgtaatgtctctagatagtcctca

SEQ ID NO: 37876 - DNA, 25 bp, SARS Virus
cgtaatgtctcgtgatagtcctcaa

SEQ ID NO: 37877 - DNA, 25 bp, SARS Virus
gtaatgtctcgatatagtcctcaaa

SEQ ID NO: 37878 - DNA, 25 bp, SARS Virus
taatgtctcgagttagtcctcaaaa

SEQ ID NO: 37879 - DNA, 25 bp, SARS Virus
aatgtctcgagatagtcctcaaaag

SEQ ID NO: 37880 - DNA, 25 bp, SARS Virus
atgtctcgagattgtcctcaaaaga

SEQ ID NO: 37881 - DNA, 25 bp, SARS Virus
tgtctcgagatattcctcaaaagac

SEQ ID NO: 37882 - DNA, 25 bp, SARS Virus
gtctcgagatagtcctcaaaagaca

SEQ ID NO: 37883 - DNA, 25 bp, SARS Virus
tctcgagatagttctcaaaagacac

SEQ ID NO: 37884 - DNA, 25 bp, SARS Virus
ctcgagatagtcttcaaaagacacc

SEQ ID NO: 37885 - DNA, 25 bp, SARS Virus
tcgagatagtcctcaaaagacacca

SEQ ID NO: 37886 - DNA, 25 bp, SARS Virus
cgagatagtccttaaaagacaccac

SEQ ID NO: 37887 - DNA, 25 bp, SARS Virus
gagatagtcctctaaagacaccaca

SEQ ID NO: 37888 - DNA, 25 bp, SARS Virus
agatagtcctcataagacaccacaa

SEQ ID NO: 37889 - DNA, 25 bp, SARS Virus
gatagtcctcaatagacaccacaac

SEQ ID NO: 37890 - DNA, 25 bp, SARS Virus
atagtcctcaaatgacaccacaact

SEQ ID NO: 37891 - DNA, 25 bp, SARS Virus
tagtcctcaaaatacaccacaacta

SEQ ID NO: 37892 - DNA, 25 bp, SARS Virus
agtcctcaaaagtcaccacaactac

SEQ ID NO: 37893 - DNA, 25 bp, SARS Virus
gtcctcaaaagataccacaactacg

SEQ ID NO: 37894 - DNA, 25 bp, SARS Virus
tcctcaaaagactccacaactacgc

SEQ ID NO: 37895 - DNA, 25 bp, SARS Virus
cctcaaaagacatcacaactacgct

SEQ ID NO: 37896 - DNA, 25 bp, SARS Virus
ctcaaaagacactacaactacgcta

SEQ ID NO: 37897 - DNA, 25 bp, SARS Virus
tcaaaagacacctcaactacgctac

SEQ ID NO: 37898 - DNA, 25 bp, SARS Virus
caaaagacaccataactacgctact

SEQ ID NO: 37899 - DNA, 25 bp, SARS Virus
aaaagacaccactactacgctactt

SEQ ID NO: 37900 - DNA, 25 bp, SARS Virus
aaagacaccacatctacgctactta

SEQ ID NO: 37901 - DNA, 25 bp, SARS Virus
aagacaccacaattacgctacttag

SEQ ID NO: 37902 - DNA, 25 bp, SARS Virus
agacaccacaactacgctacttaga

SEQ ID NO: 37903 - DNA, 25 bp, SARS Virus
gacaccacaacttcgctacttagag

SEQ ID NO: 37904 - DNA, 25 bp, SARS Virus
acaccacaactatgctacttagagt

SEQ ID NO: 37905 - DNA, 25 bp, SARS Virus
caccacaactactctacttagagta

SEQ ID NO: 37906 - DNA, 25 bp, SARS Virus
accacaactacgttacttagagtat

SEQ ID NO: 37907 - DNA, 25 bp, SARS Virus
ccacaactacgctacttagagtatc

SEQ ID NO: 37908 - DNA, 25 bp, SARS Virus
cacaactacgcttcttagagtatcg

SEQ ID NO: 37909 - DNA, 25 bp, SARS Virus
acaactacgctatttagagtatcga

SEQ ID NO: 37910 - DNA, 25 bp, SARS Virus
caactacgctacttagagtatcgat

SEQ ID NO: 37911 - DNA, 25 bp, SARS Virus
aactacgctacttagagtatcgatt

SEQ ID NO: 37912 - DNA, 25 bp, SARS Virus
actacgctactttgagtatcgattg

SEQ ID NO: 37913 - DNA, 25 bp, SARS Virus
ctacgctacttatagtatcgattgt

SEQ ID NO: 37914 - DNA, 25 bp, SARS Virus
tacgctacttagtgtatcgattgta

SEQ ID NO: 37915 - DNA, 25 bp, SARS Virus
acgctacttagattatcgattgtag

SEQ ID NO: 37916 - DNA, 25 bp, SARS Virus
cgctacttagagtatcgattgtaga

SEQ ID NO: 37917 - DNA, 25 bp, SARS Virus
gctacttagagtttcgattgtagaa

SEQ ID NO: 37918 - DNA, 25 bp, SARS Virus
ctacttagagtatcgattgtagaaa

SEQ ID NO: 37919 - DNA, 25 bp, SARS Virus
tacttagagtattgattgtagaaat

SEQ ID NO: 37920 - DNA, 25 bp, SARS Virus
acttagagtatctattgtagaaatg

SEQ ID NO: 37921 - DNA, 25 bp, SARS Virus
cttagagtatcgtttgtagaaatga

SEQ ID NO: 37922 - DNA, 25 bp, SARS Virus
ttagagtatcgattgtagaaatgag

SEQ ID NO: 37923 - DNA, 25 bp, SARS Virus
tagagtatcgattgtagaaatgagg

SEQ ID NO: 37924 - DNA, 25 bp, SARS Virus
agagtatcgattttagaaatgagga

SEQ ID NO: 37925 - DNA, 25 bp, SARS Virus
gagtatcgattgtagaaatgaggag

SEQ ID NO: 37926 - DNA, 25 bp, SARS Virus
agtatcgattgttgaaatgaggaga

SEQ ID NO: 37927 - DNA, 25 bp, SARS Virus
gtatcgattgtataaatgaggagaa

SEQ ID NO: 37928 - DNA, 25 bp, SARS Virus
tatcgattgtagtaatgaggagaac

SEQ ID NO: 37929 - DNA, 25 bp, SARS Virus
atcgattgtagatatgaggagaaca

SEQ ID NO: 37930 - DNA, 25 bp, SARS Virus
tcgattgtagaattgaggagaacac

SEQ ID NO: 37931 - DNA, 25 bp, SARS Virus
cgattgtagaaatgaggagaacacg

SEQ ID NO: 37932 - DNA, 25 bp, SARS Virus
gattgtagaaattaggagaacacgt

SEQ ID NO: 37933 - DNA, 25 bp, SARS Virus
attgtagaaatgtggagaacacgtt

SEQ ID NO: 37934 - DNA, 25 bp, SARS Virus
ttgtagaaatgatgagaacacgttg

SEQ ID NO: 37935 - DNA, 25 bp, SARS Virus
tgtagaaatgagtagaacacgttgg

SEQ ID NO: 37936 - DNA, 25 bp, SARS Virus
gtagaaatgaggtgaacacgttgga

SEQ ID NO: 37937 - DNA, 25 bp, SARS Virus
tagaaatgaggataacacgttggac

SEQ ID NO: 37938 - DNA, 25 bp, SARS Virus
agaaatgaggagtacacgttggaca

SEQ ID NO: 37939 - DNA, 25 bp, SARS Virus
gaaatgaggagatcacgttggacac

SEQ ID NO: 37940 - DNA, 25 bp, SARS Virus
aaatgaggagaatacgttggacacc

SEQ ID NO: 37941 - DNA, 25 bp, SARS Virus
aatgaggagaactcgttggacaccc

SEQ ID NO: 37942 - DNA, 25 bp, SARS Virus
atgaggagaacatgttggacaccca

SEQ ID NO: 37943 - DNA, 25 bp, SARS Virus
tgaggagaacactttggacacccac

SEQ ID NO: 37944 - DNA, 25 bp, SARS Virus
gaggagaacacgttggacacccacg

SEQ ID NO: 37945 - DNA, 25 bp, SARS Virus
aggagaacacgttggacacccacga

SEQ ID NO: 37946 - DNA, 25 bp, SARS Virus
ggagaacacgtttgacacccacgaa

SEQ ID NO: 37947 - DNA, 25 bp, SARS Virus
gagaacacgttgtacacccacgaaa

SEQ ID NO: 37948 - DNA, 25 bp, SARS Virus
agaacacgttggtcacccacgaaat

SEQ ID NO: 37949 - DNA, 25 bp, SARS Virus
gaacacgttggatacccacgaaatc

SEQ ID NO: 37950 - DNA, 25 bp, SARS Virus
aacacgttggactcccacgaaatct

SEQ ID NO: 37951 - DNA, 25 bp, SARS Virus
acacgttggacatccacgaaatcta

SEQ ID NO: 37952 - DNA, 25 bp, SARS Virus
cacgttggacactcacgaaatctac

SEQ ID NO: 37953 - DNA, 25 bp, SARS Virus
acgttggacacctacgaaatctaca

SEQ ID NO: 37954 - DNA, 25 bp, SARS Virus
cgttggacaccctcgaaatctacac

SEQ ID NO: 37955 - DNA, 25 bp, SARS Virus
gttggacacccatgaaatctacaca

SEQ ID NO: 37956 - DNA, 25 bp, SARS Virus
ttggacacccactaaatctacacag

SEQ ID NO: 37957 - DNA, 25 bp, SARS Virus
tggacacccacgtaatctacacaga

SEQ ID NO: 37958 - DNA, 25 bp, SARS Virus
ggacacccacgatatctacacagac

SEQ ID NO: 37959 - DNA, 25 bp, SARS Virus
gacacccacgaattctacacagacg

SEQ ID NO: 37960 - DNA, 25 bp, SARS Virus
acacccacgaaatctacacagacga

SEQ ID NO: 37961 - DNA, 25 bp, SARS Virus
cacccacgaaatttacacagacgaa

SEQ ID NO: 37962 - DNA, 25 bp, SARS Virus
acccacgaaatctacacagacgaag

SEQ ID NO: 37963 - DNA, 25 bp, SARS Virus
cccacgaaatcttcacagacgaagt

SEQ ID NO: 37964 - DNA, 25 bp, SARS Virus
ccacgaaatctatacagacgaagtc

SEQ ID NO: 37965 - DNA, 25 bp, SARS Virus
cacgaaatctactcagacgaagtca

SEQ ID NO: 37966 - DNA, 25 bp, SARS Virus
acgaaatctacatagacgaagtcat

SEQ ID NO: 37967 - DNA, 25 bp, SARS Virus
cgaaatctacactgacgaagtcatc

SEQ ID NO: 37968 - DNA, 25 bp, SARS Virus
gaaatctacacatacgaagtcatca

SEQ ID NO: 37969 - DNA, 25 bp, SARS Virus
aaatctacacagtcgaagtcatcac

SEQ ID NO: 37970 - DNA, 25 bp, SARS Virus
aatctacacagatgaagtcatcacc

SEQ ID NO: 37971 - DNA, 25 bp, SARS Virus
atctacacagactaagtcatcaccg

SEQ ID NO: 37972 - DNA, 25 bp, SARS Virus
tctacacagacgtagtcatcaccga

SEQ ID NO: 37973 - DNA, 25 bp, SARS Virus
ctacacagacgatgtcatcaccgac

SEQ ID NO: 37974 - DNA, 25 bp, SARS Virus
tacacagacgaattcatcaccgacc

SEQ ID NO: 37975 - DNA, 25 bp, SARS Virus
acacagacgaagtcatcaccgacca

SEQ ID NO: 37976 - DNA, 25 bp, SARS Virus
cacagacgaagttatcaccgaccac

SEQ ID NO: 37977 - DNA, 25 bp, SARS Virus
acagacgaagtcttcaccgaccacc

SEQ ID NO: 37978 - DNA, 25 bp, SARS Virus
cagacgaagtcatcaccgaccacca

SEQ ID NO: 37979 - DNA, 25 bp, SARS Virus
agacgaagtcattaccgaccaccat

SEQ ID NO: 37980 - DNA, 25 bp, SARS Virus
gacgaagtcatctccgaccaccata

SEQ ID NO: 37981 - DNA, 25 bp, SARS Virus
acgaagtcatcatcgaccaccataa

SEQ ID NO: 37982 - DNA, 25 bp, SARS Virus
cgaagtcatcactgaccaccataat

SEQ ID NO: 37983 - DNA, 25 bp, SARS Virus
gaagtcatcacctaccaccataata

SEQ ID NO: 37984 - DNA, 25 bp, SARS Virus
aagtcatcaccgtccaccataataa

SEQ ID NO: 37985 - DNA, 25 bp, SARS Virus
agtcatcaccgatcaccataataac

SEQ ID NO: 37986 - DNA, 25 bp, SARS Virus
gtcatcaccgactaccataataacg

SEQ ID NO: 37987 - DNA, 25 bp, SARS Virus
tcatcaccgacctccataataacgg

SEQ ID NO: 37988 - DNA, 25 bp, SARS Virus
catcaccgaccatcataataacggt

SEQ ID NO: 37989 - DNA, 25 bp, SARS Virus
atcaccgaccactataataacggta

SEQ ID NO: 37990 - DNA, 25 bp, SARS Virus
tcaccgaccaccttaataacggtat

SEQ ID NO: 37991 - DNA, 25 bp, SARS Virus
caccgaccaccataataacggtata

SEQ ID NO: 37992 - DNA, 25 bp, SARS Virus
accgaccaccattataacggtataa

SEQ ID NO: 37993 - DNA, 25 bp, SARS Virus
ccgaccaccatattaacggtataac

SEQ ID NO: 37994 - DNA, 25 bp, SARS Virus
cgaccaccataataacggtataacc

SEQ ID NO: 37995 - DNA, 25 bp, SARS Virus
gaccaccataattacggtataacca

SEQ ID NO: 37996 - DNA, 25 bp, SARS Virus
accaccataatatcggtataaccac

SEQ ID NO: 37997 - DNA, 25 bp, SARS Virus
ccaccataataatggtataaccact

SEQ ID NO: 37998 - DNA, 25 bp, SARS Virus
caccataataactgtataaccactg

SEQ ID NO: 37999 - DNA, 25 bp, SARS Virus
accataataacgttataaccactga

SEQ ID NO: 38000 - DNA, 25 bp, SARS Virus
ccataataacggtataaccactgaa

SEQ ID NO: 38001 - DNA, 25 bp, SARS Virus
cataataacggtttaaccactgaac

SEQ ID NO: 38002 - DNA, 25 bp, SARS Virus
ataataacggtataaccactgaaca

SEQ ID NO: 38003 - DNA, 25 bp, SARS Virus
taataacggtattaccactgaacac

SEQ ID NO: 38004 - DNA, 25 bp, SARS Virus
aataacggtatatccactgaacacg

SEQ ID NO: 38005 - DNA, 25 bp, SARS Virus
ataacggtataatcactgaacacga

SEQ ID NO: 38006 - DNA, 25 bp, SARS Virus
taacggtataactactgaacacgac

SEQ ID NO: 38007 - DNA, 25 bp, SARS Virus
aacggtataacctctgaacacgacg

SEQ ID NO: 38008 - DNA, 25 bp, SARS Virus
acggtataaccattgaacacgacgg

SEQ ID NO: 38009 - DNA, 25 bp, SARS Virus
cggtataaccactgaacacgacgga

SEQ ID NO: 38010 - DNA, 25 bp, SARS Virus
ggtataaccacttaacacgacggat

SEQ ID NO: 38011 - DNA, 25 bp, SARS Virus
gtataaccactgtacacgacggatg

SEQ ID NO: 38012 - DNA, 25 bp, SARS Virus
tataaccactgatcacgacggatga

SEQ ID NO: 38013 - DNA, 25 bp, SARS Virus
ataaccactgaatacgacggatgat

SEQ ID NO: 38014 - DNA, 25 bp, SARS Virus
taaccactgaactcgacggatgatg

SEQ ID NO: 38015 - DNA, 25 bp, SARS Virus
aaccactgaacatgacggatgatga

SEQ ID NO: 38016 - DNA, 25 bp, SARS Virus
accactgaacactacggatgatgaa

SEQ ID NO: 38017 - DNA, 25 bp, SARS Virus
ccactgaacacgtcggatgatgaaa

SEQ ID NO: 38018 - DNA, 25 bp, SARS Virus
cactgaacacgatggatgatgaaat

SEQ ID NO: 38019 - DNA, 25 bp, SARS Virus
actgaacacgactgatgatgaaata

SEQ ID NO: 38020 - DNA, 25 bp, SARS Virus
ctgaacacgacgtatgatgaaatac

SEQ ID NO: 38021 - DNA, 25 bp, SARS Virus
tgaacacgacggttgatgaaatact

SEQ ID NO: 38022 - DNA, 25 bp, SARS Virus
gaacacgacggatgatgaaatactt

SEQ ID NO: 38023 - DNA, 25 bp, SARS Virus
aacacgacggattatgaaatacttt

SEQ ID NO: 38024 - DNA, 25 bp, SARS Virus
acacgacggatgttgaaatacttta

SEQ ID NO: 38025 - DNA, 25 bp, SARS Virus
cacgacggatgatgaaatactttaa

SEQ ID NO: 38026 - DNA, 25 bp, SARS Virus
acgacggatgattaaatactttaag

SEQ ID NO: 38027 - DNA, 25 bp, SARS Virus
cgacggatgatgtaatactttaagt

SEQ ID NO: 38028 - DNA, 25 bp, SARS Virus
gacggatgatgatatactttaagtc

SEQ ID NO: 38029 - DNA, 25 bp, SARS Virus
acggatgatgaattactttaagtct

SEQ ID NO: 38030 - DNA, 25 bp, SARS Virus
cggatgatgaaatactttaagtctg

SEQ ID NO: 38031 - DNA, 25 bp, SARS Virus
ggatgatgaaattctttaagtctgc

SEQ ID NO: 38032 - DNA, 25 bp, SARS Virus
gatgatgaaatattttaagtctgca

SEQ ID NO: 38033 - DNA, 25 bp, SARS Virus
atgatgaaatactttaagtctgcac

SEQ ID NO: 38034 - DNA, 25 bp, SARS Virus
tgatgaaatactttaagtctgcaca

SEQ ID NO: 38035 - DNA, 25 bp, SARS Virus
gatgaaatactttaagtctgcacaa

SEQ ID NO: 38036 - DNA, 25 bp, SARS Virus
atgaaatacttttagtctgcacaaa

SEQ ID NO: 38037 - DNA, 25 bp, SARS Virus
tgaaatactttatgtctgcacaaaa

SEQ ID NO: 38038 - DNA, 25 bp, SARS Virus
gaaatactttaattctgcacaaaaa

SEQ ID NO: 38039 - DNA, 25 bp, SARS Virus
aaatactttaagtctgcacaaaaac

SEQ ID NO: 38040 - DNA, 25 bp, SARS Virus
aatactttaagtttgcacaaaaacc

SEQ ID NO: 38041 - DNA, 25 bp, SARS Virus
atactttaagtctgcacaaaaacca

SEQ ID NO: 38042 - DNA, 25 bp, SARS Virus
tactttaagtcttcacaaaaaccac

SEQ ID NO: 38043 - DNA, 25 bp, SARS Virus
actttaagtctgtacaaaaaccact

SEQ ID NO: 38044 - DNA, 25 bp, SARS Virus
ctttaagtctgctcaaaaaccactc

SEQ ID NO: 38045 - DNA, 25 bp, SARS Virus
tttaagtctgcataaaaaccactca

SEQ ID NO: 38046 - DNA, 25 bp, SARS Virus
ttaagtctgcactaaaaccactcat

SEQ ID NO: 38047 - DNA, 25 bp, SARS Virus
taagtctgcacataaaccactcatg

SEQ ID NO: 38048 - DNA, 25 bp, SARS Virus
aagtctgcacaataaccactcatgt

SEQ ID NO: 38049 - DNA, 25 bp, SARS Virus
agtctgcacaaataccactcatgtt

SEQ ID NO: 38050 - DNA, 25 bp, SARS Virus
gtctgcacaaaatccactcatgttg

SEQ ID NO: 38051 - DNA, 25 bp, SARS Virus
tctgcacaaaaatcactcatgttgg

SEQ ID NO: 38052 - DNA, 25 bp, SARS Virus
ctgcacaaaaactactcatgttggt

SEQ ID NO: 38053 - DNA, 25 bp, SARS Virus
tgcacaaaaacctctcatgttggta

SEQ ID NO: 38054 - DNA, 25 bp, SARS Virus
gcacaaaaaccattcatgttggtac

SEQ ID NO: 38055 - DNA, 25 bp, SARS Virus
cacaaaaaccactcatgttggtaca

SEQ ID NO: 38056 - DNA, 25 bp, SARS Virus
acaaaaaccacttatgttggtacaa

SEQ ID NO: 38057 - DNA, 25 bp, SARS Virus
caaaaaccactcttgttggtacaac

SEQ ID NO: 38058 - DNA, 25 bp, SARS Virus
aaaaaccactcatgttggtacaaca

SEQ ID NO: 38059 - DNA, 25 bp, SARS Virus
aaaaccactcattttggtacaacaa

SEQ ID NO: 38060 - DNA, 25 bp, SARS Virus
aaaccactcatgttggtacaacaac

SEQ ID NO: 38061 - DNA, 25 bp, SARS Virus
aaccactcatgttggtacaacaacg

SEQ ID NO: 38062 - DNA, 25 bp, SARS Virus
accactcatgtttgtacaacaacga

SEQ ID NO: 38063 - DNA, 25 bp, SARS Virus
ccactcatgttgttacaacaacgac

SEQ ID NO: 38064 - DNA, 25 bp, SARS Virus
cactcatgttggtacaacaacgacg

SEQ ID NO: 38065 - DNA, 25 bp, SARS Virus
actcatgttggttcaacaacgacga

SEQ ID NO: 38066 - DNA, 25 bp, SARS Virus
ctcatgttggtataacaacgacgat

SEQ ID NO: 38067 - DNA, 25 bp, SARS Virus
tcatgttggtactacaacgacgatt

SEQ ID NO: 38068 - DNA, 25 bp, SARS Virus
catgttggtacatcaacgacgatta

SEQ ID NO: 38069 - DNA, 25 bp, SARS Virus
atgttggtacaataacgacgattac

SEQ ID NO: 38070 - DNA, 25 bp, SARS Virus
tgttggtacaactacgacgattacg

SEQ ID NO: 38071 - DNA, 25 bp, SARS Virus
gttggtacaacatcgacgattacgt

SEQ ID NO: 38072 - DNA, 25 bp, SARS Virus
ttggtacaacaatgacgattacgtg

SEQ ID NO: 38073 - DNA, 25 bp, SARS Virus
tggtacaacaactacgattacgtga

SEQ ID NO: 38074 - DNA, 25 bp, SARS Virus
ggtacaacaacgtcgattacgtgaa

SEQ ID NO: 38075 - DNA, 25 bp, SARS Virus
gtacaacaacgatgattacgtgaaa

SEQ ID NO: 38076 - DNA, 25 bp, SARS Virus
tacaacaacgactattacgtgaaaa

SEQ ID NO: 38077 - DNA, 25 bp, SARS Virus
acaacaacgacgtttacgtgaaaac

SEQ ID NO: 38078 - DNA, 25 bp, SARS Virus
caacaacgacgattacgtgaaaaca

SEQ ID NO: 38079 - DNA, 25 bp, SARS Virus
aacaacgacgattacgtgaaaacaa

SEQ ID NO: 38080 - DNA, 25 bp, SARS Virus
acaacgacgatttcgtgaaaacaaa

SEQ ID NO: 38081 - DNA, 25 bp, SARS Virus
caacgacgattatgtgaaaacaaaa

SEQ ID NO: 38082 - DNA, 25 bp, SARS Virus
aacgacgattacttgaaaacaaaaa

SEQ ID NO: 38083 - DNA, 25 bp, SARS Virus
acgacgattacgtgaaaacaaaaac

SEQ ID NO: 38084 - DNA, 25 bp, SARS Virus
cgacgattacgttaaaacaaaaact

SEQ ID NO: 38085 - DNA, 25 bp, SARS Virus
gacgattacgtgtaaacaaaaacta

SEQ ID NO: 38086 - DNA, 25 bp, SARS Virus
acgattacgtgataacaaaaactac

SEQ ID NO: 38087 - DNA, 25 bp, SARS Virus
cgattacgtgaatacaaaaactaca

SEQ ID NO: 38088 - DNA, 25 bp, SARS Virus
gattacgtgaaatcaaaaactacag

SEQ ID NO: 38089 - DNA, 25 bp, SARS Virus
attacgtgaaaataaaaactacaga

SEQ ID NO: 38090 - DNA, 25 bp, SARS Virus
ttacgtgaaaactaaaactacagaa

SEQ ID NO: 38091 - DNA, 25 bp, SARS Virus
tacgtgaaaacataaactacagaaa

SEQ ID NO: 38092 - DNA, 25 bp, SARS Virus
acgtgaaaacaataactacagaaag

SEQ ID NO: 38093 - DNA, 25 bp, SARS Virus
cgtgaaaacaaatactacagaaagt

SEQ ID NO: 38094 - DNA, 25 bp, SARS Virus
gtgaaaacaaaatctacagaaagtg

SEQ ID NO: 38095 - DNA, 25 bp, SARS Virus
tgaaaacaaaaattacagaaagtga

SEQ ID NO: 38096 - DNA, 25 bp, SARS Virus
gaaaacaaaaactacagaaagtgat

SEQ ID NO: 38097 - DNA, 25 bp, SARS Virus
aaaacaaaaacttcagaaagtgata

SEQ ID NO: 38098 - DNA, 25 bp, SARS Virus
aaacaaaaactatagaaagtgatat

SEQ ID NO: 38099 - DNA, 25 bp, SARS Virus
aacaaaaactactgaaagtgatatg

SEQ ID NO: 38100 - DNA, 25 bp, SARS Virus
acaaaaactacataaagtgatatga

SEQ ID NO: 38101 - DNA, 25 bp, SARS Virus
caaaaactacagtaagtgatatgag

SEQ ID NO: 38102 - DNA, 25 bp, SARS Virus
aaaaactacagatagtgatatgaga

SEQ ID NO: 38103 - DNA, 25 bp, SARS Virus
aaaactacagaatgtgatatgagac

SEQ ID NO: 38104 - DNA, 25 bp, SARS Virus
aaactacagaaattgatatgagaca

SEQ ID NO: 38105 - DNA, 25 bp, SARS Virus
aactacagaaagtgatatgagacag

SEQ ID NO: 38106 - DNA, 25 bp, SARS Virus
actacagaaagttatatgagacaga

SEQ ID NO: 38107 - DNA, 25 bp, SARS Virus
ctacagaaagtgttatgagacagac

SEQ ID NO: 38108 - DNA, 25 bp, SARS Virus
tacagaaagtgatatgagacagacc

SEQ ID NO: 38109 - DNA, 25 bp, SARS Virus
acagaaagtgatttgagacagacca

SEQ ID NO: 38110 - DNA, 25 bp, SARS Virus
cagaaagtgatatgagacagaccat

SEQ ID NO: 38111 - DNA, 25 bp, SARS Virus
agaaagtgatattagacagaccatg

SEQ ID NO: 38112 - DNA, 25 bp, SARS Virus
gaaagtgatatgtgacagaccatgg

SEQ ID NO: 38113 - DNA, 25 bp, SARS Virus
aaagtgatatgatacagaccatggt

SEQ ID NO: 38114 - DNA, 25 bp, SARS Virus
aagtgatatgagtcagaccatggtc

SEQ ID NO: 38115 - DNA, 25 bp, SARS Virus
agtgatatgagatagaccatggtcg

SEQ ID NO: 38116 - DNA, 25 bp, SARS Virus
gtgatatgagactgaccatggtcga

SEQ ID NO: 38117 - DNA, 25 bp, SARS Virus
tgatatgagacataccatggtcgaa

SEQ ID NO: 38118 - DNA, 25 bp, SARS Virus
gatatgagacagtccatggtcgaat

SEQ ID NO: 38119 - DNA, 25 bp, SARS Virus
atatgagacagatcatggtcgaatg

SEQ ID NO: 38120 - DNA, 25 bp, SARS Virus
tatgagacagactatggtcgaatgt

SEQ ID NO: 38121 - DNA, 25 bp, SARS Virus
atgagacagaccttggtcgaatgtc

SEQ ID NO: 38122 - DNA, 25 bp, SARS Virus
tgagacagaccatggtcgaatgtcg

SEQ ID NO: 38123 - DNA, 25 bp, SARS Virus
gagacagaccattgtcgaatgtcga

SEQ ID NO: 38124 - DNA, 25 bp, SARS Virus
agacagaccatgttcgaatgtcgaa

SEQ ID NO: 38125 - DNA, 25 bp, SARS Virus
gacagaccatggtcgaatgtcgaaa

SEQ ID NO: 38126 - DNA, 25 bp, SARS Virus
acagaccatggttgaatgtcgaaag

SEQ ID NO: 38127 - DNA, 25 bp, SARS Virus
cagaccatggtctaatgtcgaaaga

SEQ ID NO: 38128 - DNA, 25 bp, SARS Virus
agaccatggtcgtatgtcgaaagac

SEQ ID NO: 38129 - DNA, 25 bp, SARS Virus
gaccatggtcgattgtcgaaagacg

SEQ ID NO: 38130 - DNA, 25 bp, SARS Virus
accatggtcgaatgtcgaaagacgg

SEQ ID NO: 38131 - DNA, 25 bp, SARS Virus
ccatggtcgaatttcgaaagacggc

SEQ ID NO: 38132 - DNA, 25 bp, SARS Virus
catggtcgaatgtcgaaagacggcc

SEQ ID NO: 38133 - DNA, 25 bp, SARS Virus
atggtcgaatgttgaaagacggccc

SEQ ID NO: 38134 - DNA, 25 bp, SARS Virus
tggtcgaatgtctaaagacggccct

SEQ ID NO: 38135 - DNA, 25 bp, SARS Virus
ggtcgaatgtcgtaagacggccctc

SEQ ID NO: 38136 - DNA, 25 bp, SARS Virus
gtcgaatgtcgatagacggccctca

SEQ ID NO: 38137 - DNA, 25 bp, SARS Virus
tcgaatgtcgaatgacggccctcag

SEQ ID NO: 38138 - DNA, 25 bp, SARS Virus
cgaatgtcgaaatacggccctcaga

SEQ ID NO: 38139 - DNA, 25 bp, SARS Virus
gaatgtcgaaagtcggccctcagat

SEQ ID NO: 38140 - DNA, 25 bp, SARS Virus
aatgtcgaaagatggccctcagatg

SEQ ID NO: 38141 - DNA, 25 bp, SARS Virus
atgtcgaaagactgccctcagatga

SEQ ID NO: 38142 - DNA, 25 bp, SARS Virus
tgtcgaaagacgtccctcagatgag

SEQ ID NO: 38143 - DNA, 25 bp, SARS Virus
gtcgaaagacggtcctcagatgagt

SEQ ID NO: 38144 - DNA, 25 bp, SARS Virus
tcgaaagacggctctcagatgagtc

SEQ ID NO: 38145 - DNA, 25 bp, SARS Virus
cgaaagacggccttcagatgagtca

SEQ ID NO: 38146 - DNA, 25 bp, SARS Virus
gaaagacggccctcagatgagtcag

SEQ ID NO: 38147 - DNA, 25 bp, SARS Virus
aaagacggcccttagatgagtcaga

SEQ ID NO: 38148 - DNA, 25 bp, SARS Virus
aagacggccctctgatgagtcagaa

SEQ ID NO: 38149 - DNA, 25 bp, SARS Virus
agacggccctcatatgagtcagaaa

SEQ ID NO: 38150 - DNA, 25 bp, SARS Virus
gacggccctcagttgagtcagaaaa

SEQ ID NO: 38151 - DNA, 25 bp, SARS Virus
acggccctcagatgagtcagaaaat

SEQ ID NO: 38152 - DNA, 25 bp, SARS Virus
cggccctcagattagtcagaaaatg

SEQ ID NO: 38153 - DNA, 25 bp, SARS Virus
ggccctcagatgtgtcagaaaatga

SEQ ID NO: 38154 - DNA, 25 bp, SARS Virus
gccctcagatgattcagaaaatgaa

SEQ ID NO: 38155 - DNA, 25 bp, SARS Virus
ccctcagatgagtcagaaaatgaac

SEQ ID NO: 38156 - DNA, 25 bp, SARS Virus
cctcagatgagttagaaaatgaaca

SEQ ID NO: 38157 - DNA, 25 bp, SARS Virus
ctcagatgagtctgaaaatgaacat

SEQ ID NO: 38158 - DNA, 25 bp, SARS Virus
tcagatgagtcataaaatgaacatg

SEQ ID NO: 38159 - DNA, 25 bp, SARS Virus
cagatgagtcagtaaatgaacatga

SEQ ID NO: 38160 - DNA, 25 bp, SARS Virus
agatgagtcagataatgaacatgaa

SEQ ID NO: 38161 - DNA, 25 bp, SARS Virus
gatgagtcagaatatgaacatgaac

SEQ ID NO: 38162 - DNA, 25 bp, SARS Virus
atgagtcagaaattgaacatgaact

SEQ ID NO: 38163 - DNA, 25 bp, SARS Virus
tgagtcagaaaatgaacatgaactg

SEQ ID NO: 38164 - DNA, 25 bp, SARS Virus
gagtcagaaaattaacatgaactgt

SEQ ID NO: 38165 - DNA, 25 bp, SARS Virus
agtcagaaaatgtacatgaactgta

SEQ ID NO: 38166 - DNA, 25 bp, SARS Virus
gtcagaaaatgatcatgaactgtaa

SEQ ID NO: 38167 - DNA, 25 bp, SARS Virus
tcagaaaatgaatatgaactgtaag

SEQ ID NO: 38168 - DNA, 25 bp, SARS Virus
cagaaaatgaacttgaactgtaaga

SEQ ID NO: 38169 - DNA, 25 bp, SARS Virus
agaaaatgaacatgaactgtaagat

SEQ ID NO: 38170 - DNA, 25 bp, SARS Virus
gaaaatgaacattaactgtaagata

SEQ ID NO: 38171 - DNA, 25 bp, SARS Virus
aaaatgaacatgtactgtaagataa

SEQ ID NO: 38172 - DNA, 25 bp, SARS Virus
aaatgaacatgatctgtaagataaa

SEQ ID NO: 38173 - DNA, 25 bp, SARS Virus
aatgaacatgaattgtaagataaag

SEQ ID NO: 38174 - DNA, 25 bp, SARS Virus
atgaacatgaactgtaagataaagt

SEQ ID NO: 38175 - DNA, 25 bp, SARS Virus
tgaacatgaactttaagataaagtg

SEQ ID NO: 38176 - DNA, 25 bp, SARS Virus
gaacatgaactgtaagataaagtgg

SEQ ID NO: 38177 - DNA, 25 bp, SARS Virus
aacatgaactgttagataaagtggt

SEQ ID NO: 38178 - DNA, 25 bp, SARS Virus
acatgaactgtatgataaagtggtt

SEQ ID NO: 38179 - DNA, 25 bp, SARS Virus
catgaactgtaatataaagtggtta

SEQ ID NO: 38180 - DNA, 25 bp, SARS Virus
atgaactgtaagttaaagtggttac

SEQ ID NO: 38181 - DNA, 25 bp, SARS Virus
tgaactgtaagataaagtggttact

SEQ ID NO: 38182 - DNA, 25 bp, SARS Virus
gaactgtaagattaagtggttacta

SEQ ID NO: 38183 - DNA, 25 bp, SARS Virus
aactgtaagatatagtggttactac

SEQ ID NO: 38184 - DNA, 25 bp, SARS Virus
actgtaagataatgtggttactaca

SEQ ID NO: 38185 - DNA, 25 bp, SARS Virus
ctgtaagataaattggttactacaa

SEQ ID NO: 38186 - DNA, 25 bp, SARS Virus
tgtaagataaagtggttactacaaa

SEQ ID NO: 38187 - DNA, 25 bp, SARS Virus
gtaagataaagttgttactacaaag

SEQ ID NO: 38188 - DNA, 25 bp, SARS Virus
taagataaagtgtttactacaaagt

SEQ ID NO: 38189 - DNA, 25 bp, SARS Virus
aagataaagtggttactacaaagta

SEQ ID NO: 38190 - DNA, 25 bp, SARS Virus
agataaagtggttactacaaagtaa

SEQ ID NO: 38191 - DNA, 25 bp, SARS Virus
gataaagtggtttctacaaagtaag

SEQ ID NO: 38192 - DNA, 25 bp, SARS Virus
ataaagtggttattacaaagtaaga

SEQ ID NO: 38193 - DNA, 25 bp, SARS Virus
taaagtggttacaacaaagtaagaa

SEQ ID NO: 38194 - DNA, 25 bp, SARS Virus
aaagtggttactacaaagtaagaac

SEQ ID NO: 38195 - DNA, 25 bp, SARS Virus
aagtggttactaaaaagtaagaacc

SEQ ID NO: 38196 - DNA, 25 bp, SARS Virus
agtggttactacaaagtaagaaccg

SEQ ID NO: 38197 - DNA, 25 bp, SARS Virus
gtggttactacaaagtaagaaccga

SEQ ID NO: 38198 - DNA, 25 bp, SARS Virus
tggttactacaaagtaagaaccgag

SEQ ID NO: 38199 - DNA, 25 bp, SARS Virus
ggttactacaaaataagaaccgagt

SEQ ID NO: 38200 - DNA, 25 bp, SARS Virus
gttactacaaagaaagaaccgagtg

SEQ ID NO: 38201 - DNA, 25 bp, SARS Virus
ttactacaaagtaagaaccgagtgg

SEQ ID NO: 38202 - DNA, 25 bp, SARS Virus
tactacaaagtaagaaccgagtgga

SEQ ID NO: 38203 - DNA, 25 bp, SARS Virus
actacaaagtaaaaaccgagtggaa

SEQ ID NO: 38204 - DNA, 25 bp, SARS Virus
ctacaaagtaagaaccgagtggaag

SEQ ID NO: 38205 - DNA, 25 bp, SARS Virus
tacaaagtaagaaccgagtggaagt

SEQ ID NO: 38206 - DNA, 25 bp, SARS Virus
acaaagtaagaaacgagtggaagtt

SEQ ID NO: 38207 - DNA, 25 bp, SARS Virus
caaagtaagaacagagtggaagtta

SEQ ID NO: 38208 - DNA, 25 bp, SARS Virus
aaagtaagaaccaagtggaagttac

SEQ ID NO: 38209 - DNA, 25 bp, SARS Virus
aagtaagaaccgagtggaagttacc

SEQ ID NO: 38210 - DNA, 25 bp, SARS Virus
agtaagaaccgaatggaagttacca

SEQ ID NO: 38211 - DNA, 25 bp, SARS Virus
gtaagaaccgagaggaagttaccaa

SEQ ID NO: 38212 - DNA, 25 bp, SARS Virus
taagaaccgagtagaagttaccaaa

SEQ ID NO: 38213 - DNA, 25 bp, SARS Virus
aagaaccgagtgaaagttaccaaac

SEQ ID NO: 38214 - DNA, 25 bp, SARS Virus
agaaccgagtggaagttaccaaacg

SEQ ID NO: 38215 - DNA, 25 bp, SARS Virus
gaaccgagtggaagttaccaaacgg

SEQ ID NO: 38216 - DNA, 25 bp, SARS Virus
aaccgagtggaaattaccaaacggt

SEQ ID NO: 38217 - DNA, 25 bp, SARS Virus
accgagtggaagataccaaacggta

SEQ ID NO: 38218 - DNA, 25 bp, SARS Virus
ccgagtggaagtaaccaaacggtac

SEQ ID NO: 38219 - DNA, 25 bp, SARS Virus
cgagtggaagttaccaaacggtaca

SEQ ID NO: 38220 - DNA, 25 bp, SARS Virus
gagtggaagttaacaaacggtacaa

SEQ ID NO: 38221 - DNA, 25 bp, SARS Virus
agtggaagttacaaaacggtacaaa

SEQ ID NO: 38222 - DNA, 25 bp, SARS Virus
gtggaagttaccaaacggtacaaaa

SEQ ID NO: 38223 - DNA, 25 bp, SARS Virus
tggaagttaccaaacggtacaaaag

SEQ ID NO: 38224 - DNA, 25 bp, SARS Virus
ggaagttaccaaacggtacaaaaga

SEQ ID NO: 38225 - DNA, 25 bp, SARS Virus
gaagttaccaaaaggtacaaaagag

SEQ ID NO: 38226 - DNA, 25 bp, SARS Virus
aagttaccaaacagtacaaaagagg

SEQ ID NO: 38227 - DNA, 25 bp, SARS Virus
agttaccaaacgatacaaaagagga

SEQ ID NO: 38228 - DNA, 25 bp, SARS Virus
gttaccaaacggaacaaaagaggat

SEQ ID NO: 38229 - DNA, 25 bp, SARS Virus
ttaccaaacggtacaaaagaggata

SEQ ID NO: 38230 - DNA, 25 bp, SARS Virus
taccaaacggtaaaaaagaggataa

SEQ ID NO: 38231 - DNA, 25 bp, SARS Virus
accaaacggtacaaaagaggataac

SEQ ID NO: 38232 - DNA, 25 bp, SARS Virus
ccaaacggtacaaaagaggataaca

SEQ ID NO: 38233 - DNA, 25 bp, SARS Virus
caaacggtacaaaagaggataacac

SEQ ID NO: 38234 - DNA, 25 bp, SARS Virus
aaacggtacaaaagaggataacacg

SEQ ID NO: 38235 - DNA, 25 bp, SARS Virus
aacggtacaaaaaaggataacacgg

SEQ ID NO: 38236 - DNA, 25 bp, SARS Virus
acggtacaaaagaggataacacgga

SEQ ID NO: 38237 - DNA, 25 bp, SARS Virus
cggtacaaaagaagataacacggaa

SEQ ID NO: 38238 - DNA, 25 bp, SARS Virus
ggtacaaaagagaataacacggaaa

SEQ ID NO: 38239 - DNA, 25 bp, SARS Virus
gtacaaaagaggataacacggaaaa

SEQ ID NO: 38240 - DNA, 25 bp, SARS Virus
tacaaaagaggaaaacacggaaaaa

SEQ ID NO: 38241 - DNA, 25 bp, SARS Virus
acaaaagaggataacacggaaaaac

SEQ ID NO: 38242 - DNA, 25 bp, SARS Virus
caaaagaggataacacggaaaaacc

SEQ ID NO: 38243 - DNA, 25 bp, SARS Virus
aaaagaggataaaacggaaaaacct

SEQ ID NO: 38244 - DNA, 25 bp, SARS Virus
aaagaggataacacggaaaaaccta

SEQ ID NO: 38245 - DNA, 25 bp, SARS Virus
aagaggataacaaggaaaaacctat

SEQ ID NO: 38246 - DNA, 25 bp, SARS Virus
agaggataacacagaaaaacctatt

SEQ ID NO: 38247 - DNA, 25 bp, SARS Virus
gaggataacacgaaaaaacctattg

SEQ ID NO: 38248 - DNA, 25 bp, SARS Virus
aggataacacggaaaaacctattgt

SEQ ID NO: 38249 - DNA, 25 bp, SARS Virus
ggataacacggaaaaacctattgtc

SEQ ID NO: 38250 - DNA, 25 bp, SARS Virus
gataacacggaaaaacctattgtcg

SEQ ID NO: 38251 - DNA, 25 bp, SARS Virus
ataacacggaaaaacctattgtcgt

SEQ ID NO: 38252 - DNA, 25 bp, SARS Virus
taacacggaaaaacctattgtcgtt

SEQ ID NO: 38253 - DNA, 25 bp, SARS Virus
aacacggaaaaaactattgtcgtta

SEQ ID NO: 38254 - DNA, 25 bp, SARS Virus
acacggaaaaacatattgtcgttag

SEQ ID NO: 38255 - DNA, 25 bp, SARS Virus
cacggaaaaaccaattgtcgttaga

SEQ ID NO: 38256 - DNA, 25 bp, SARS Virus
acggaaaaacctattgtcgttagat

SEQ ID NO: 38257 - DNA, 25 bp, SARS Virus
cggaaaaacctaatgtcgttagata

SEQ ID NO: 38258 - DNA, 25 bp, SARS Virus
ggaaaaacctatagtcgttagatac

SEQ ID NO: 38259 - DNA, 25 bp, SARS Virus
gaaaaacctattatcgttagataca

SEQ ID NO: 38260 - DNA, 25 bp, SARS Virus
aaaaacctattgacgttagatacat

SEQ ID NO: 38261 - DNA, 25 bp, SARS Virus
aaaacctattgtagttagatacata

SEQ ID NO: 38262 - DNA, 25 bp, SARS Virus
aaacctattgtcattagatacataa

SEQ ID NO: 38263 - DNA, 25 bp, SARS Virus
aacctattgtcgatagatacataag

SEQ ID NO: 38264 - DNA, 25 bp, SARS Virus
acctattgtcgtaagatacataaga

SEQ ID NO: 38265 - DNA, 25 bp, SARS Virus
cctattgtcgttagatacataagac

SEQ ID NO: 38266 - DNA, 25 bp, SARS Virus
ctattgtcgttaaatacataagaca

SEQ ID NO: 38267 - DNA, 25 bp, SARS Virus
tattgtcgttagatacataagacat

SEQ ID NO: 38268 - DNA, 25 bp, SARS Virus
attgtcgttagaaacataagacata

SEQ ID NO: 38269 - DNA, 25 bp, SARS Virus
ttgtcgttagatacataagacataa

SEQ ID NO: 38270 - DNA, 25 bp, SARS Virus
tgtcgttagataaataagacataaa

SEQ ID NO: 38271 - DNA, 25 bp, SARS Virus
gtcgttagatacataagacataaag

SEQ ID NO: 38272 - DNA, 25 bp, SARS Virus
tcgttagatacaaaagacataaaga

SEQ ID NO: 38273 - DNA, 25 bp, SARS Virus
cgttagatacataagacataaagag

SEQ ID NO: 38274 - DNA, 25 bp, SARS Virus
gttagatacataagacataaagaga

SEQ ID NO: 38275 - DNA, 25 bp, SARS Virus
ttagatacataaaacataaagagac

SEQ ID NO: 38276 - DNA, 25 bp, SARS Virus
tagatacataagacataaagagact

SEQ ID NO: 38277 - DNA, 25 bp, SARS Virus
agatacataagaaataaagagactt

SEQ ID NO: 38278 - DNA, 25 bp, SARS Virus
gatacataagacataaagagacttc

SEQ ID NO: 38279 - DNA, 25 bp, SARS Virus
atacataagacaaaaagagacttcg

SEQ ID NO: 38280 - DNA, 25 bp, SARS Virus
tacataagacataaagagacttcgt

SEQ ID NO: 38281 - DNA, 25 bp, SARS Virus
acataagacataaagagacttcgtg

SEQ ID NO: 38282 - DNA, 25 bp, SARS Virus
cataagacataaagagacttcgtga

SEQ ID NO: 38283 - DNA, 25 bp, SARS Virus
ataagacataaaaagacttcgtgac

SEQ ID NO: 38284 - DNA, 25 bp, SARS Virus
taagacataaagagacttcgtgacg

SEQ ID NO: 38285 - DNA, 25 bp, SARS Virus
aagacataaagaaacttcgtgacgg

SEQ ID NO: 38286 - DNA, 25 bp, SARS Virus
agacataaagagacttcgtgacggt

SEQ ID NO: 38287 - DNA, 25 bp, SARS Virus
gacataaagagaattcgtgacggta

SEQ ID NO: 38288 - DNA, 25 bp, SARS Virus
acataaagagacatcgtgacggtaa

SEQ ID NO: 38289 - DNA, 25 bp, SARS Virus
cataaagagactacgtgacggtaac

SEQ ID NO: 38290 - DNA, 25 bp, SARS Virus
ataaagagacttagtgacggtaacc

SEQ ID NO: 38291 - DNA, 25 bp, SARS Virus
taaagagacttcatgacggtaacca

SEQ ID NO: 38292 - DNA, 25 bp, SARS Virus
aaagagacttcgagacggtaaccaa

SEQ ID NO: 38293 - DNA, 25 bp, SARS Virus
aagagacttcgtaacggtaaccaag

SEQ ID NO: 38294 - DNA, 25 bp, SARS Virus
agagacttcgtgacggtaaccaaga

SEQ ID NO: 38295 - DNA, 25 bp, SARS Virus
gagacttcgtgaaggtaaccaagaa

SEQ ID NO: 38296 - DNA, 25 bp, SARS Virus
agacttcgtgacagtaaccaagaaa

SEQ ID NO: 38297 - DNA, 25 bp, SARS Virus
gacttcgtgacgataaccaagaaat

SEQ ID NO: 38298 - DNA, 25 bp, SARS Virus
acttcgtgacggaaaccaagaaatt

SEQ ID NO: 38299 - DNA, 25 bp, SARS Virus
cttcgtgacggtaaccaagaaattg

SEQ ID NO: 38300 - DNA, 25 bp, SARS Virus
ttcgtgacggtaaccaagaaattgt

SEQ ID NO: 38301 - DNA, 25 bp, SARS Virus
tcgtgacggtaaacaagaaattgtt

SEQ ID NO: 38302 - DNA, 25 bp, SARS Virus
cgtgacggtaacaaagaaattgttg

SEQ ID NO: 38303 - DNA, 25 bp, SARS Virus
gtgacggtaaccaagaaattgttga

SEQ ID NO: 38304 - DNA, 25 bp, SARS Virus
tgacggtaaccaagaaattgttgat

SEQ ID NO: 38305 - DNA, 25 bp, SARS Virus
gacggtaaccaaaaaattgttgata

SEQ ID NO: 38306 - DNA, 25 bp, SARS Virus
acggtaaccaagaaattgttgatag

SEQ ID NO: 38307 - DNA, 25 bp, SARS Virus
cggtaaccaagaaattgttgataga

SEQ ID NO: 38308 - DNA, 25 bp, SARS Virus
ggtaaccaagaaattgttgatagaa

SEQ ID NO: 38309 - DNA, 25 bp, SARS Virus
gtaaccaagaaaatgttgatagaat

SEQ ID NO: 38310 - DNA, 25 bp, SARS Virus
taaccaagaaatagttgatagaatc

SEQ ID NO: 38311 - DNA, 25 bp, SARS Virus
aaccaagaaattattgatagaatcc

SEQ ID NO: 38312 - DNA, 25 bp, SARS Virus
accaagaaattgatgatagaatcct

SEQ ID NO: 38313 - DNA, 25 bp, SARS Virus
ccaagaaattgtagatagaatcctt

SEQ ID NO: 38314 - DNA, 25 bp, SARS Virus
caagaaattgttaatagaatccttt

SEQ ID NO: 38315 - DNA, 25 bp, SARS Virus
aagaaattgttgatagaatcctttt

SEQ ID NO: 38316 - DNA, 25 bp, SARS Virus
agaaattgttgaaagaatccttttc

SEQ ID NO: 38317 - DNA, 25 bp, SARS Virus
gaaattgttgatagaatccttttct

SEQ ID NO: 38318 - DNA, 25 bp, SARS Virus
aaattgttgataaaatccttttctc

SEQ ID NO: 38319 - DNA, 25 bp, SARS Virus
aattgttgatagaatccttttctca

SEQ ID NO: 38320 - DNA, 25 bp, SARS Virus
attgttgatagaatccttttctcag

SEQ ID NO: 38321 - DNA, 25 bp, SARS Virus
ttgttgatagaaaccttttctcagt

SEQ ID NO: 38322 - DNA, 25 bp, SARS Virus
tgttgatagaatacttttctcagta

SEQ ID NO: 38323 - DNA, 25 bp, SARS Virus
gttgatagaatcattttctcagtac

SEQ ID NO: 38324 - DNA, 25 bp, SARS Virus
ttgatagaatccatttctcagtaca

SEQ ID NO: 38325 - DNA, 25 bp, SARS Virus
tgatagaatcctattctcagtacaa

SEQ ID NO: 38326 - DNA, 25 bp, SARS Virus
gatagaatccttatctcagtacaaa

SEQ ID NO: 38327 - DNA, 25 bp, SARS Virus
atagaatcctttactcagtacaaat

SEQ ID NO: 38328 - DNA, 25 bp, SARS Virus
tagaatccttttatcagtacaaatt

SEQ ID NO: 38329 - DNA, 25 bp, SARS Virus
agaatccttttcacagtacaaatta

SEQ ID NO: 38330 - DNA, 25 bp, SARS Virus
gaatccttttctaagtacaaattac

SEQ ID NO: 38331 - DNA, 25 bp, SARS Virus
aatccttttctcagtacaaattacc

SEQ ID NO: 38332 - DNA, 25 bp, SARS Virus
atccttttctcaatacaaattacct

SEQ ID NO: 38333 - DNA, 25 bp, SARS Virus
tccttttctcagaacaaattacctc

SEQ ID NO: 38334 - DNA, 25 bp, SARS Virus
ccttttctcagtacaaattacctca

SEQ ID NO: 38335 - DNA, 25 bp, SARS Virus
cttttctcagtaaaaattacctcaa

SEQ ID NO: 38336 - DNA, 25 bp, SARS Virus
ttttctcagtacaaattacctcaat

SEQ ID NO: 38337 - DNA, 25 bp, SARS Virus
tttctcagtacaaattacctcaatg

SEQ ID NO: 38338 - DNA, 25 bp, SARS Virus
ttctcagtacaaattacctcaatgt

SEQ ID NO: 38339 - DNA, 25 bp, SARS Virus
tctcagtacaaaatacctcaatgta

SEQ ID NO: 38340 - DNA, 25 bp, SARS Virus
ctcagtacaaataacctcaatgtaa

SEQ ID NO: 38341 - DNA, 25 bp, SARS Virus
tcagtacaaattacctcaatgtaaa

SEQ ID NO: 38342 - DNA, 25 bp, SARS Virus
cagtacaaattaactcaatgtaaat

SEQ ID NO: 38343 - DNA, 25 bp, SARS Virus
agtacaaattacatcaatgtaaatc

SEQ ID NO: 38344 - DNA, 25 bp, SARS Virus
gtacaaattaccacaatgtaaatca

SEQ ID NO: 38345 - DNA, 25 bp, SARS Virus
tacaaattacctaaatgtaaatcat

SEQ ID NO: 38346 - DNA, 25 bp, SARS Virus
acaaattacctcaatgtaaatcatg

SEQ ID NO: 38347 - DNA, 25 bp, SARS Virus
caaattacctcaatgtaaatcatgg

SEQ ID NO: 38348 - DNA, 25 bp, SARS Virus
aaattacctcaaagtaaatcatgga

SEQ ID NO: 38349 - DNA, 25 bp, SARS Virus
aattacctcaatataaatcatggaa

SEQ ID NO: 38350 - DNA, 25 bp, SARS Virus
attacctcaatgaaaatcatggaag

SEQ ID NO: 38351 - DNA, 25 bp, SARS Virus
ttacctcaatgtaaatcatggaagc

SEQ ID NO: 38352 - DNA, 25 bp, SARS Virus
tacctcaatgtaaatcatggaagct

SEQ ID NO: 38353 - DNA, 25 bp, SARS Virus
acctcaatgtaaatcatggaagctc

SEQ ID NO: 38354 - DNA, 25 bp, SARS Virus
cctcaatgtaaaacatggaagctcc

SEQ ID NO: 38355 - DNA, 25 bp, SARS Virus
ctcaatgtaaataatggaagctcct

SEQ ID NO: 38356 - DNA, 25 bp, SARS Virus
tcaatgtaaatcatggaagctcctc

SEQ ID NO: 38357 - DNA, 25 bp, SARS Virus
caatgtaaatcaaggaagctcctcc

SEQ ID NO: 38358 - DNA, 25 bp, SARS Virus
aatgtaaatcatagaagctcctccg

SEQ ID NO: 38359 - DNA, 25 bp, SARS Virus
atgtaaatcatgaaagctcctccga

SEQ ID NO: 38360 - DNA, 25 bp, SARS Virus
tgtaaatcatggaagctcctccgac

SEQ ID NO: 38361 - DNA, 25 bp, SARS Virus
gtaaatcatggaagctcctccgacg

SEQ ID NO: 38362 - DNA, 25 bp, SARS Virus
taaatcatggaaactcctccgacga

SEQ ID NO: 38363 - DNA, 25 bp, SARS Virus
aaatcatggaagatcctccgacgaa

SEQ ID NO: 38364 - DNA, 25 bp, SARS Virus
aatcatggaagcacctccgacgaaa

SEQ ID NO: 38365 - DNA, 25 bp, SARS Virus
atcatggaagctactccgacgaaac

SEQ ID NO: 38366 - DNA, 25 bp, SARS Virus
tcatggaagctcatccgacgaaaca

SEQ ID NO: 38367 - DNA, 25 bp, SARS Virus
catggaagctccaccgacgaaacac

SEQ ID NO: 38368 - DNA, 25 bp, SARS Virus
atggaagctcctacgacgaaacaca

SEQ ID NO: 38369 - DNA, 25 bp, SARS Virus
tggaagctcctcagacgaaacacat

SEQ ID NO: 38370 - DNA, 25 bp, SARS Virus
ggaagctcctccaacgaaacacatg

SEQ ID NO: 38371 - DNA, 25 bp, SARS Virus
gaagctcctccgacgaaacacatgg

SEQ ID NO: 38372 - DNA, 25 bp, SARS Virus
aagctcctccgaagaaacacatgga

SEQ ID NO: 38373 - DNA, 25 bp, SARS Virus
agctcctccgacaaaacacatggaa

SEQ ID NO: 38374 - DNA, 25 bp, SARS Virus
gctcctccgacgaaacacatggaaa

SEQ ID NO: 38375 - DNA, 25 bp, SARS Virus
ctcctccgacgaaacacatggaaaa

SEQ ID NO: 38376 - DNA, 25 bp, SARS Virus
tcctccgacgaaacacatggaaaaa

SEQ ID NO: 38377 - DNA, 25 bp, SARS Virus
cctccgacgaaaaacatggaaaaac

SEQ ID NO: 38378 - DNA, 25 bp, SARS Virus
ctccgacgaaacacatggaaaaacg

SEQ ID NO: 38379 - DNA, 25 bp, SARS Virus
tccgacgaaacaaatggaaaaacga

SEQ ID NO: 38380 - DNA, 25 bp, SARS Virus
ccgacgaaacacatggaaaaacgag

SEQ ID NO: 38381 - DNA, 25 bp, SARS Virus
cgacgaaacacaaggaaaaacgagt

SEQ ID NO: 38382 - DNA, 25 bp, SARS Virus
gacgaaacacatagaaaaacgagtt

SEQ ID NO: 38383 - DNA, 25 bp, SARS Virus
acgaaacacatgaaaaaacgagttg

SEQ ID NO: 38384 - DNA, 25 bp, SARS Virus
cgaaacacatggaaaaacgagttgt

SEQ ID NO: 38385 - DNA, 25 bp, SARS Virus
gaaacacatggaaaaacgagttgtt

SEQ ID NO: 38386 - DNA, 25 bp, SARS Virus
aaacacatggaaaaacgagttgttc

SEQ ID NO: 38387 - DNA, 25 bp, SARS Virus
aacacatggaaaaacgagttgttcc

SEQ ID NO: 38388 - DNA, 25 bp, SARS Virus
acacatggaaaaacgagttgttcct

SEQ ID NO: 38389 - DNA, 25 bp, SARS Virus
cacatggaaaaaagagttgttcctt

SEQ ID NO: 38390 - DNA, 25 bp, SARS Virus
acatggaaaaacaagttgttccttt

SEQ ID NO: 38391 - DNA, 25 bp, SARS Virus
catggaaaaacgagttgttccttta

SEQ ID NO: 38392 - DNA, 25 bp, SARS Virus
atggaaaaacgaattgttcctttac

SEQ ID NO: 38393 - DNA, 25 bp, SARS Virus
tggaaaaacgagatgttcctttaca

SEQ ID NO: 38394 - DNA, 25 bp, SARS Virus
ggaaaaacgagtagttcctttacat

SEQ ID NO: 38395 - DNA, 25 bp, SARS Virus
gaaaaacgagttattcctttacatg

SEQ ID NO: 38396 - DNA, 25 bp, SARS Virus
aaaaacgagttgatcctttacatgg

SEQ ID NO: 38397 - DNA, 25 bp, SARS Virus
aaaacgagttgtacctttacatgga

SEQ ID NO: 38398 - DNA, 25 bp, SARS Virus
aaacgagttgttactttacatggat

SEQ ID NO: 38399 - DNA, 25 bp, SARS Virus
aacgagttgttcatttacatggatt

SEQ ID NO: 38400 - DNA, 25 bp, SARS Virus
acgagttgttccattacatggattt

SEQ ID NO: 38401 - DNA, 25 bp, SARS Virus
cgagttgttcctatacatggatttt

SEQ ID NO: 38402 - DNA, 25 bp, SARS Virus
gagttgttccttaacatggatttta

SEQ ID NO: 38403 - DNA, 25 bp, SARS Virus
agttgttcctttacatggattttaa

SEQ ID NO: 38404 - DNA, 25 bp, SARS Virus
gttgttcctttaaatggattttaac

SEQ ID NO: 38405 - DNA, 25 bp, SARS Virus
ttgttcctttacatggattttaacg

SEQ ID NO: 38406 - DNA, 25 bp, SARS Virus
tgttcctttacaaggattttaacgc

SEQ ID NO: 38407 - DNA, 25 bp, SARS Virus
gttcctttacatagattttaacgca

SEQ ID NO: 38408 - DNA, 25 bp, SARS Virus
ttcctttacatgaattttaacgcat

SEQ ID NO: 38409 - DNA, 25 bp, SARS Virus
tcctttacatggattttaacgcatc

SEQ ID NO: 38410 - DNA, 25 bp, SARS Virus
cctttacatggaatttaacgcatcg

SEQ ID NO: 38411 - DNA, 25 bp, SARS Virus
ctttacatggatattaacgcatcgc

SEQ ID NO: 38412 - DNA, 25 bp, SARS Virus
tttacatggattataacgcatcgct

SEQ ID NO: 38413 - DNA, 25 bp, SARS Virus
ttacatggatttaaacgcatcgctc

SEQ ID NO: 38414 - DNA, 25 bp, SARS Virus
tacatggattttaacgcatcgctct

SEQ ID NO: 38415 - DNA, 25 bp, SARS Virus
acatggattttaacgcatcgctctg

SEQ ID NO: 38416 - DNA, 25 bp, SARS Virus
catggattttaaagcatcgctctgt

SEQ ID NO: 38417 - DNA, 25 bp, SARS Virus
atggattttaacacatcgctctgtg

SEQ ID NO: 38418 - DNA, 25 bp, SARS Virus
tggattttaacgaatcgctctgtga

SEQ ID NO: 38419 - DNA, 25 bp, SARS Virus
ggattttaacgcatcgctctgtgac

SEQ ID NO: 38420 - DNA, 25 bp, SARS Virus
gattttaacgcaacgctctgtgaca

SEQ ID NO: 38421 - DNA, 25 bp, SARS Virus
attttaacgcatagctctgtgacaa

SEQ ID NO: 38422 - DNA, 25 bp, SARS Virus
ttttaacgcatcactctgtgacaac

SEQ ID NO: 38423 - DNA, 25 bp, SARS Virus
tttaacgcatcgatctgtgacaacg

SEQ ID NO: 38424 - DNA, 25 bp, SARS Virus
ttaacgcatcgcactgtgacaacgg

SEQ ID NO: 38425 - DNA, 25 bp, SARS Virus
taacgcatcgctatgtgacaacggt

SEQ ID NO: 38426 - DNA, 25 bp, SARS Virus
aacgcatcgctcagtgacaacggtg

SEQ ID NO: 38427 - DNA, 25 bp, SARS Virus
acgcatcgctctatgacaacggtga

SEQ ID NO: 38428 - DNA, 25 bp, SARS Virus
cgcatcgctctgagacaacggtgaa

SEQ ID NO: 38429 - DNA, 25 bp, SARS Virus
gcatcgctctgtaacaacggtgaat

SEQ ID NO: 38430 - DNA, 25 bp, SARS Virus
catcgctctgtgacaacggtgaatg

SEQ ID NO: 38431 - DNA, 25 bp, SARS Virus
atcgctctgtgaaaacggtgaatgt

SEQ ID NO: 38432 - DNA, 25 bp, SARS Virus
tcgctctgtgacaacggtgaatgtg

SEQ ID NO: 38433 - DNA, 25 bp, SARS Virus
cgctctgtgacaacggtgaatgtgt

SEQ ID NO: 38434 - DNA, 25 bp, SARS Virus
gctctgtgacaaaggtgaatgtgtc

SEQ ID NO: 38435 - DNA, 25 bp, SARS Virus
ctctgtgacaacagtgaatgtgtca

SEQ ID NO: 38436 - DNA, 25 bp, SARS Virus
tctgtgacaacgatgaatgtgtcat

SEQ ID NO: 38437 - DNA, 25 bp, SARS Virus
ctgtgacaacggagaatgtgtcata

SEQ ID NO: 38438 - DNA, 25 bp, SARS Virus
tgtgacaacggtaaatgtgtcatat

SEQ ID NO: 38439 - DNA, 25 bp, SARS Virus
gtgacaacggtgaatgtgtcatatt

SEQ ID NO: 38440 - DNA, 25 bp, SARS Virus
tgacaacggtgaatgtgtcatattg

SEQ ID NO: 38441 - DNA, 25 bp, SARS Virus
gacaacggtgaaagtgtcatattgt

SEQ ID NO: 38442 - DNA, 25 bp, SARS Virus
acaacggtgaatatgtcatattgtc

SEQ ID NO: 38443 - DNA, 25 bp, SARS Virus
caacggtgaatgagtcatattgtcc

SEQ ID NO: 38444 - DNA, 25 bp, SARS Virus
aacggtgaatgtatcatattgtcca

SEQ ID NO: 38445 - DNA, 25 bp, SARS Virus
acggtgaatgtgacatattgtccat

SEQ ID NO: 38446 - DNA, 25 bp, SARS Virus
cggtgaatgtgtaatattgtccata

SEQ ID NO: 38447 - DNA, 25 bp, SARS Virus
ggtgaatgtgtcatattgtccatag

SEQ ID NO: 38448 - DNA, 25 bp, SARS Virus
gtgaatgtgtcaaattgtccataga

SEQ ID NO: 38449 - DNA, 25 bp, SARS Virus
tgaatgtgtcatattgtccatagaa

SEQ ID NO: 38450 - DNA, 25 bp, SARS Virus
gaatgtgtcataatgtccatagaac

SEQ ID NO: 38451 - DNA, 25 bp, SARS Virus
aatgtgtcatatagtccatagaacg

SEQ ID NO: 38452 - DNA, 25 bp, SARS Virus
atgtgtcatattatccatagaacga

SEQ ID NO: 38453 - DNA, 25 bp, SARS Virus
tgtgtcatattgaccatagaacgag

SEQ ID NO: 38454 - DNA, 25 bp, SARS Virus
gtgtcatattgtacatagaacgaga

SEQ ID NO: 38455 - DNA, 25 bp, SARS Virus
tgtcatattgtcaatagaacgagat

SEQ ID NO: 38456 - DNA, 25 bp, SARS Virus
gtcatattgtccatagaacgagata

SEQ ID NO: 38457 - DNA, 25 bp, SARS Virus
tcatattgtccaaagaacgagatat

SEQ ID NO: 38458 - DNA, 25 bp, SARS Virus
catattgtccatagaacgagatata

SEQ ID NO: 38459 - DNA, 25 bp, SARS Virus
atattgtccataaaacgagatatat

SEQ ID NO: 38460 - DNA, 25 bp, SARS Virus
tattgtccatagaacgagatatatt

SEQ ID NO: 38461 - DNA, 25 bp, SARS Virus
attgtccatagaacgagatatattg

SEQ ID NO: 38462 - DNA, 25 bp, SARS Virus
ttgtccatagaaagagatatattgt

SEQ ID NO: 38463 - DNA, 25 bp, SARS Virus
tgtccatagaacaagatatattgtt

SEQ ID NO: 38464 - DNA, 25 bp, SARS Virus
gtccatagaacgagatatattgttc

SEQ ID NO: 38465 - DNA, 25 bp, SARS Virus
tccatagaacgaaatatattgttca

SEQ ID NO: 38466 - DNA, 25 bp, SARS Virus
ccatagaacgagatatattgttcat

SEQ ID NO: 38467 - DNA, 25 bp, SARS Virus
catagaacgagaaatattgttcatg

SEQ ID NO: 38468 - DNA, 25 bp, SARS Virus
atagaacgagatatattgttcatgt

SEQ ID NO: 38469 - DNA, 25 bp, SARS Virus
tagaacgagataaattgttcatgtt

SEQ ID NO: 38470 - DNA, 25 bp, SARS Virus
agaacgagatatattgttcatgttc

SEQ ID NO: 38471 - DNA, 25 bp, SARS Virus
gaacgagatataatgttcatgttca

SEQ ID NO: 38472 - DNA, 25 bp, SARS Virus
aacgagatatatagttcatgttcat

SEQ ID NO: 38473 - DNA, 25 bp, SARS Virus
acgagatatattattcatgttcata

SEQ ID NO: 38474 - DNA, 25 bp, SARS Virus
cgagatatattgatcatgttcataa

SEQ ID NO: 38475 - DNA, 25 bp, SARS Virus
gagatatattgtacatgttcataaa

SEQ ID NO: 38476 - DNA, 25 bp, SARS Virus
agatatattgttaatgttcataaag

SEQ ID NO: 38477 - DNA, 25 bp, SARS Virus
gatatattgttcatgttcataaagt

SEQ ID NO: 38478 - DNA, 25 bp, SARS Virus
atatattgttcaagttcataaagtc

SEQ ID NO: 38479 - DNA, 25 bp, SARS Virus
tatattgttcatattcataaagtca

SEQ ID NO: 38480 - DNA, 25 bp, SARS Virus
atattgttcatgatcataaagtcac

SEQ ID NO: 38481 - DNA, 25 bp, SARS Virus
tattgttcatgtacataaagtcacc

SEQ ID NO: 38482 - DNA, 25 bp, SARS Virus
attgttcatgttaataaagtcacct

SEQ ID NO: 38483 - DNA, 25 bp, SARS Virus
ttgttcatgttcataaagtcacctc

SEQ ID NO: 38484 - DNA, 25 bp, SARS Virus
tgttcatgttcaaaaagtcacctcg

SEQ ID NO: 38485 - DNA, 25 bp, SARS Virus
gttcatgttcataaagtcacctcgg

SEQ ID NO: 38486 - DNA, 25 bp, SARS Virus
ttcatgttcataaagtcacctcgga

SEQ ID NO: 38487 - DNA, 25 bp, SARS Virus
tcatgttcataaagtcacctcggaa

SEQ ID NO: 38488 - DNA, 25 bp, SARS Virus
catgttcataaaatcacctcggaat

SEQ ID NO: 38489 - DNA, 25 bp, SARS Virus
atgttcataaagacacctcggaatc

SEQ ID NO: 38490 - DNA, 25 bp, SARS Virus
tgttcataaagtaacctcggaatct

SEQ ID NO: 38491 - DNA, 25 bp, SARS Virus
gttcataaagtcacctcggaatcta

SEQ ID NO: 38492 - DNA, 25 bp, SARS Virus
ttcataaagtcaactcggaatctat

SEQ ID NO: 38493 - DNA, 25 bp, SARS Virus
tcataaagtcacatcggaatctatg

SEQ ID NO: 38494 - DNA, 25 bp, SARS Virus
cataaagtcaccacggaatctatga

SEQ ID NO: 38495 - DNA, 25 bp, SARS Virus
ataaagtcacctaggaatctatgat

SEQ ID NO: 38496 - DNA, 25 bp, SARS Virus
taaagtcacctcagaatctatgatg

SEQ ID NO: 38497 - DNA, 25 bp, SARS Virus
aaagtcacctcgaaatctatgatgg

SEQ ID NO: 38498 - DNA, 25 bp, SARS Virus
aagtcacctcggaatctatgatggt

SEQ ID NO: 38499 - DNA, 25 bp, SARS Virus
agtcacctcggaatctatgatggtc

SEQ ID NO: 38500 - DNA, 25 bp, SARS Virus
gtcacctcggaaactatgatggtcg

SEQ ID NO: 38501 - DNA, 25 bp, SARS Virus
tcacctcggaatatatgatggtcga

SEQ ID NO: 38502 - DNA, 25 bp, SARS Virus
cacctcggaatcaatgatggtcgat

SEQ ID NO: 38503 - DNA, 25 bp, SARS Virus
acctcggaatctatgatggtcgata

SEQ ID NO: 38504 - DNA, 25 bp, SARS Virus
cctcggaatctaagatggtcgatag

SEQ ID NO: 38505 - DNA, 25 bp, SARS Virus
ctcggaatctataatggtcgatagc

SEQ ID NO: 38506 - DNA, 25 bp, SARS Virus
tcggaatctatgatggtcgatagca

SEQ ID NO: 38507 - DNA, 25 bp, SARS Virus
cggaatctatgaaggtcgatagcac

SEQ ID NO: 38508 - DNA, 25 bp, SARS Virus
ggaatctatgatagtcgatagcact

SEQ ID NO: 38509 - DNA, 25 bp, SARS Virus
gaatctatgatgatcgatagcactt

SEQ ID NO: 38510 - DNA, 25 bp, SARS Virus
aatctatgatggacgatagcacttc

SEQ ID NO: 38511 - DNA, 25 bp, SARS Virus
atctatgatggtagatagcacttcg

SEQ ID NO: 38512 - DNA, 25 bp, SARS Virus
tctatgatggtcaatagcacttcgt

SEQ ID NO: 38513 - DNA, 25 bp, SARS Virus
ctatgatggtcgatagcacttcgtc

SEQ ID NO: 38514 - DNA, 25 bp, SARS Virus
tatgatggtcgaaagcacttcgtcg

SEQ ID NO: 38515 - DNA, 25 bp, SARS Virus
atgatggtcgatagcacttcgtcga

SEQ ID NO: 38516 - DNA, 25 bp, SARS Virus
tgatggtcgataacacttcgtcgaa

SEQ ID NO: 38517 - DNA, 25 bp, SARS Virus
gatggtcgatagaacttcgtcgaac

SEQ ID NO: 38518 - DNA, 25 bp, SARS Virus
atggtcgatagcacttcgtcgaacg

SEQ ID NO: 38519 - DNA, 25 bp, SARS Virus
tggtcgatagcaattcgtcgaacga

SEQ ID NO: 38520 - DNA, 25 bp, SARS Virus
ggtcgatagcacatcgtcgaacgac

SEQ ID NO: 38521 - DNA, 25 bp, SARS Virus
gtcgatagcactacgtcgaacgacg

SEQ ID NO: 38522 - DNA, 25 bp, SARS Virus
tcgatagcacttagtcgaacgacgg

SEQ ID NO: 38523 - DNA, 25 bp, SARS Virus
cgatagcacttcatcgaacgacggt

SEQ ID NO: 38524 - DNA, 25 bp, SARS Virus
gatagcacttcgacgaacgacggtg

SEQ ID NO: 38525 - DNA, 25 bp, SARS Virus
atagcacttcgtagaacgacggtga

SEQ ID NO: 38526 - DNA, 25 bp, SARS Virus
tagcacttcgtcaaacgacggtgaa

SEQ ID NO: 38527 - DNA, 25 bp, SARS Virus
agcacttcgtcgaacgacggtgaat

SEQ ID NO: 38528 - DNA, 25 bp, SARS Virus
gcacttcgtcgaacgacggtgaatc

SEQ ID NO: 38529 - DNA, 25 bp, SARS Virus
cacttcgtcgaaagacggtgaatcg

SEQ ID NO: 38530 - DNA, 25 bp, SARS Virus
acttcgtcgaacaacggtgaatcgt

SEQ ID NO: 38531 - DNA, 25 bp, SARS Virus
cttcgtcgaacgacggtgaatcgtt

SEQ ID NO: 38532 - DNA, 25 bp, SARS Virus
ttcgtcgaacgaaggtgaatcgttt

SEQ ID NO: 38533 - DNA, 25 bp, SARS Virus
tcgtcgaacgacagtgaatcgtttc

SEQ ID NO: 38534 - DNA, 25 bp, SARS Virus
cgtcgaacgacgatgaatcgtttcc

SEQ ID NO: 38535 - DNA, 25 bp, SARS Virus
gtcgaacgacggagaatcgtttccg

SEQ ID NO: 38536 - DNA, 25 bp, SARS Virus
tcgaacgacggtaaatcgtttccga

SEQ ID NO: 38537 - DNA, 25 bp, SARS Virus
cgaacgacggtgaatcgtttccgag

SEQ ID NO: 38538 - DNA, 25 bp, SARS Virus
gaacgacggtgaatcgtttccgaga

SEQ ID NO: 38539 - DNA, 25 bp, SARS Virus
aacgacggtgaaacgtttccgagat

SEQ ID NO: 38540 - DNA, 25 bp, SARS Virus
acgacggtgaatagtttccgagatt

SEQ ID NO: 38541 - DNA, 25 bp, SARS Virus
cgacggtgaatcatttccgagattt

SEQ ID NO: 38542 - DNA, 25 bp, SARS Virus
gacggtgaatcgattccgagattta

SEQ ID NO: 38543 - DNA, 25 bp, SARS Virus
acggtgaatcgtatccgagatttac

SEQ ID NO: 38544 - DNA, 25 bp, SARS Virus
cggtgaatcgttaccgagatttact

SEQ ID NO: 38545 - DNA, 25 bp, SARS Virus
ggtgaatcgtttacgagatttactg

SEQ ID NO: 38546 - DNA, 25 bp, SARS Virus
gtgaatcgtttcagagatttactga

SEQ ID NO: 38547 - DNA, 25 bp, SARS Virus
tgaatcgtttccaagatttactgaa

SEQ ID NO: 38548 - DNA, 25 bp, SARS Virus
gaatcgtttccgagatttactgaaa

SEQ ID NO: 38549 - DNA, 25 bp, SARS Virus
aatcgtttccgaaatttactgaaat

SEQ ID NO: 38550 - DNA, 25 bp, SARS Virus
atcgtttccgagatttactgaaatc

SEQ ID NO: 38551 - DNA, 25 bp, SARS Virus
tcgtttccgagaattactgaaatcg

SEQ ID NO: 38552 - DNA, 25 bp, SARS Virus
cgtttccgagatatactgaaatcgt

SEQ ID NO: 38553 - DNA, 25 bp, SARS Virus
gtttccgagattaactgaaatcgtt

SEQ ID NO: 38554 - DNA, 25 bp, SARS Virus
tttccgagatttactgaaatcgttg

SEQ ID NO: 38555 - DNA, 25 bp, SARS Virus
ttccgagatttaatgaaatcgttga

SEQ ID NO: 38556 - DNA, 25 bp, SARS Virus
tccgagatttacagaaatcgttgag

SEQ ID NO: 38557 - DNA, 25 bp, SARS Virus
ccgagatttactaaaatcgttgagt

SEQ ID NO: 38558 - DNA, 25 bp, SARS Virus
cgagatttactgaaatcgttgagtc

SEQ ID NO: 38559 - DNA, 25 bp, SARS Virus
gagatttactgaaatcgttgagtcc

SEQ ID NO: 38560 - DNA, 25 bp, SARS Virus
agatttactgaaatcgttgagtcca

SEQ ID NO: 38561 - DNA, 25 bp, SARS Virus
gatttactgaaaacgttgagtccac

SEQ ID NO: 38562 - DNA, 25 bp, SARS Virus
atttactgaaatagttgagtccacg

SEQ ID NO: 38563 - DNA, 25 bp, SARS Virus
tttactgaaatcattgagtccacga

SEQ ID NO: 38564 - DNA, 25 bp, SARS Virus
ttactgaaatcgatgagtccacgac

SEQ ID NO: 38565 - DNA, 25 bp, SARS Virus
tactgaaatcgtagagtccacgact

SEQ ID NO: 38566 - DNA, 25 bp, SARS Virus
actgaaatcgttaagtccacgacta

SEQ ID NO: 38567 - DNA, 25 bp, SARS Virus
ctgaaatcgttgagtccacgactac

SEQ ID NO: 38568 - DNA, 25 bp, SARS Virus
tgaaatcgttgaatccacgactaca

SEQ ID NO: 38569 - DNA, 25 bp, SARS Virus
gaaatcgttgagaccacgactacaa

SEQ ID NO: 38570 - DNA, 25 bp, SARS Virus
aaatcgttgagtacacgactacaag

SEQ ID NO: 38571 - DNA, 25 bp, SARS Virus
aatcgttgagtcaacgactacaaga

SEQ ID NO: 38572 - DNA, 25 bp, SARS Virus
atcgttgagtccacgactacaagag

SEQ ID NO: 38573 - DNA, 25 bp, SARS Virus
tcgttgagtccaagactacaagaga

SEQ ID NO: 38574 - DNA, 25 bp, SARS Virus
cgttgagtccacaactacaagagat

SEQ ID NO: 38575 - DNA, 25 bp, SARS Virus
gttgagtccacgactacaagagatg

SEQ ID NO: 38576 - DNA, 25 bp, SARS Virus
ttgagtccacgaatacaagagatgg

SEQ ID NO: 38577 - DNA, 25 bp, SARS Virus
tgagtccacgacaacaagagatggt

SEQ ID NO: 38578 - DNA, 25 bp, SARS Virus
gagtccacgactacaagagatggtt

SEQ ID NO: 38579 - DNA, 25 bp, SARS Virus
agtccacgactaaaagagatggttg

SEQ ID NO: 38580 - DNA, 25 bp, SARS Virus
gtccacgactacaagagatggttgg

SEQ ID NO: 38581 - DNA, 25 bp, SARS Virus
tccacgactacaagagatggttggt

SEQ ID NO: 38582 - DNA, 25 bp, SARS Virus
ccacgactacaaaagatggttggtg

SEQ ID NO: 38583 - DNA, 25 bp, SARS Virus
cacgactacaagagatggttggtgg

SEQ ID NO: 38584 - DNA, 25 bp, SARS Virus
acgactacaagaaatggttggtggt

SEQ ID NO: 38585 - DNA, 25 bp, SARS Virus
cgactacaagagatggttggtggtg

SEQ ID NO: 38586 - DNA, 25 bp, SARS Virus
gactacaagagaaggttggtggtgt

SEQ ID NO: 38587 - DNA, 25 bp, SARS Virus
actacaagagatagttggtggtgtc

SEQ ID NO: 38588 - DNA, 25 bp, SARS Virus
ctacaagagatgattggtggtgtct

SEQ ID NO: 38589 - DNA, 25 bp, SARS Virus
tacaagagatggatggtggtgtctg

SEQ ID NO: 38590 - DNA, 25 bp, SARS Virus
acaagagatggtaggtggtgtctgt

SEQ ID NO: 38591 - DNA, 25 bp, SARS Virus
caagagatggttagtggtgtctgta

SEQ ID NO: 38592 - DNA, 25 bp, SARS Virus
aagagatggttgatggtgtctgtag

SEQ ID NO: 38593 - DNA, 25 bp, SARS Virus
agagatggttggaggtgtctgtagt

SEQ ID NO: 38594 - DNA, 25 bp, SARS Virus
gagatggttggtagtgtctgtagtt

SEQ ID NO: 38595 - DNA, 25 bp, SARS Virus
agatggttggtgatgtctgtagtta

SEQ ID NO: 38596 - DNA, 25 bp, SARS Virus
gatggttggtggagtctgtagttag

SEQ ID NO: 38597 - DNA, 25 bp, SARS Virus
atggttggtggtatctgtagttagt

SEQ ID NO: 38598 - DNA, 25 bp, SARS Virus
tggttggtggtgactgtagttagtg

SEQ ID NO: 38599 - DNA, 25 bp, SARS Virus
ggttggtggtgtatgtagttagtga

SEQ ID NO: 38600 - DNA, 25 bp, SARS Virus
gttggtggtgtcagtagttagtgaa

SEQ ID NO: 38601 - DNA, 25 bp, SARS Virus
ttggtggtgtctatagttagtgaag

SEQ ID NO: 38602 - DNA, 25 bp, SARS Virus
tggtggtgtctgaagttagtgaaga

SEQ ID NO: 38603 - DNA, 25 bp, SARS Virus
ggtggtgtctgtagttagtgaagac

SEQ ID NO: 38604 - DNA, 25 bp, SARS Virus
gtggtgtctgtaattagtgaagacg

SEQ ID NO: 38605 - DNA, 25 bp, SARS Virus
tggtgtctgtagatagtgaagacga

SEQ ID NO: 38606 - DNA, 25 bp, SARS Virus
ggtgtctgtagtaagtgaagacgac

SEQ ID NO: 38607 - DNA, 25 bp, SARS Virus
gtgtctgtagttagtgaagacgaca

SEQ ID NO: 38608 - DNA, 25 bp, SARS Virus
tgtctgtagttaatgaagacgacaa

SEQ ID NO: 38609 - DNA, 25 bp, SARS Virus
gtctgtagttagagaagacgacaag

SEQ ID NO: 38610 - DNA, 25 bp, SARS Virus
tctgtagttagtaaagacgacaaga

SEQ ID NO: 38611 - DNA, 25 bp, SARS Virus
ctgtagttagtgaagacgacaagac

SEQ ID NO: 38612 - DNA, 25 bp, SARS Virus
tgtagttagtgaagacgacaagacg

SEQ ID NO: 38613 - DNA, 25 bp, SARS Virus
gtagttagtgaaaacgacaagacgt

SEQ ID NO: 38614 - DNA, 25 bp, SARS Virus
tagttagtgaagacgacaagacgtc

SEQ ID NO: 38615 - DNA, 25 bp, SARS Virus
agttagtgaagaagacaagacgtct

SEQ ID NO: 38616 - DNA, 25 bp, SARS Virus
gttagtgaagacaacaagacgtctc

SEQ ID NO: 38617 - DNA, 25 bp, SARS Virus
ttagtgaagacgacaagacgtctca

SEQ ID NO: 38618 - DNA, 25 bp, SARS Virus
tagtgaagacgaaaagacgtctcac

SEQ ID NO: 38619 - DNA, 25 bp, SARS Virus
agtgaagacgacaagacgtctcacc

SEQ ID NO: 38620 - DNA, 25 bp, SARS Virus
gtgaagacgacaagacgtctcacca

SEQ ID NO: 38621 - DNA, 25 bp, SARS Virus
tgaagacgacaaaacgtctcaccaa

SEQ ID NO: 38622 - DNA, 25 bp, SARS Virus
gaagacgacaagacgtctcaccaaa

SEQ ID NO: 38623 - DNA, 25 bp, SARS Virus
aagacgacaagaagtctcaccaaaa

SEQ ID NO: 38624 - DNA, 25 bp, SARS Virus
agacgacaagacatctcaccaaaat

SEQ ID NO: 38625 - DNA, 25 bp, SARS Virus
gacgacaagacgactcaccaaaatc

SEQ ID NO: 38626 - DNA, 25 bp, SARS Virus
acgacaagacgtatcaccaaaatcc

SEQ ID NO: 38627 - DNA, 25 bp, SARS Virus
cgacaagacgtcacaccaaaatcct

SEQ ID NO: 38628 - DNA, 25 bp, SARS Virus
gacaagacgtctaaccaaaatcctt

SEQ ID NO: 38629 - DNA, 25 bp, SARS Virus
acaagacgtctcaccaaaatccttt

SEQ ID NO: 38630 - DNA, 25 bp, SARS Virus
caagacgtctcaacaaaatcctttt

SEQ ID NO: 38631 - DNA, 25 bp, SARS Virus
aagacgtctcacaaaaatcctttta

SEQ ID NO: 38632 - DNA, 25 bp, SARS Virus
agacgtctcaccaaaatccttttac

SEQ ID NO: 38633 - DNA, 25 bp, SARS Virus
gacgtctcaccaaaatccttttacc

SEQ ID NO: 38634 - DNA, 25 bp, SARS Virus
acgtctcaccaaaatccttttaccg

SEQ ID NO: 38635 - DNA, 25 bp, SARS Virus
cgtctcaccaaaatccttttaccgt

SEQ ID NO: 38636 - DNA, 25 bp, SARS Virus
gtctcaccaaaaaccttttaccgta

SEQ ID NO: 38637 - DNA, 25 bp, SARS Virus
tctcaccaaaatacttttaccgtaa

SEQ ID NO: 38638 - DNA, 25 bp, SARS Virus
ctcaccaaaatcattttaccgtaag

SEQ ID NO: 38639 - DNA, 25 bp, SARS Virus
tcaccaaaatccatttaccgtaagg

SEQ ID NO: 38640 - DNA, 25 bp, SARS Virus
caccaaaatcctattaccgtaaggg

SEQ ID NO: 38641 - DNA, 25 bp, SARS Virus
accaaaatccttataccgtaagggc

SEQ ID NO: 38642 - DNA, 25 bp, SARS Virus
ccaaaatcctttaaccgtaagggca

SEQ ID NO: 38643 - DNA, 25 bp, SARS Virus
caaaatccttttaccgtaagggcag

SEQ ID NO: 38644 - DNA, 25 bp, SARS Virus
aaaatccttttaacgtaagggcagt

SEQ ID NO: 38645 - DNA, 25 bp, SARS Virus
aaatccttttacagtaagggcagtc

SEQ ID NO: 38646 - DNA, 25 bp, SARS Virus
aatccttttaccataagggcagtcc

SEQ ID NO: 38647 - DNA, 25 bp, SARS Virus
atccttttaccgaaagggcagtccg

SEQ ID NO: 38648 - DNA, 25 bp, SARS Virus
tccttttaccgtaagggcagtccgt

SEQ ID NO: 38649 - DNA, 25 bp, SARS Virus
ccttttaccgtaagggcagtccgtt

SEQ ID NO: 38650 - DNA, 25 bp, SARS Virus
cttttaccgtaaaggcagtccgttt

SEQ ID NO: 38651 - DNA, 25 bp, SARS Virus
ttttaccgtaagagcagtccgtttc

SEQ ID NO: 38652 - DNA, 25 bp, SARS Virus
tttaccgtaaggacagtccgtttca

SEQ ID NO: 38653 - DNA, 25 bp, SARS Virus
ttaccgtaagggaagtccgtttcaa

SEQ ID NO: 38654 - DNA, 25 bp, SARS Virus
taccgtaagggcagtccgtttcaac

SEQ ID NO: 38655 - DNA, 25 bp, SARS Virus
accgtaagggcaatccgtttcaact

SEQ ID NO: 38656 - DNA, 25 bp, SARS Virus
ccgtaagggcagaccgtttcaactt

SEQ ID NO: 38657 - DNA, 25 bp, SARS Virus
cgtaagggcagtacgtttcaacttc

SEQ ID NO: 38658 - DNA, 25 bp, SARS Virus
gtaagggcagtcagtttcaacttcc

SEQ ID NO: 38659 - DNA, 25 bp, SARS Virus
taagggcagtccatttcaacttccc

SEQ ID NO: 38660 - DNA, 25 bp, SARS Virus
aagggcagtccgattcaacttccca

SEQ ID NO: 38661 - DNA, 25 bp, SARS Virus
agggcagtccgtatcaacttcccac

SEQ ID NO: 38662 - DNA, 25 bp, SARS Virus
gggcagtccgttacaacttcccacg

SEQ ID NO: 38663 - DNA, 25 bp, SARS Virus
ggcagtccgtttaaacttcccacgt

SEQ ID NO: 38664 - DNA, 25 bp, SARS Virus
gcagtccgtttcaacttcccacgta

SEQ ID NO: 38665 - DNA, 25 bp, SARS Virus
cagtccgtttcaacttcccacgtac

SEQ ID NO: 38666 - DNA, 25 bp, SARS Virus
agtccgtttcaaattcccacgtacc

SEQ ID NO: 38667 - DNA, 25 bp, SARS Virus
gtccgtttcaacatcccacgtacca

SEQ ID NO: 38668 - DNA, 25 bp, SARS Virus
tccgtttcaactacccacgtaccat

SEQ ID NO: 38669 - DNA, 25 bp, SARS Virus
ccgtttcaacttaccacgtaccatg

SEQ ID NO: 38670 - DNA, 25 bp, SARS Virus
cgtttcaacttcacacgtaccatgt

SEQ ID NO: 38671 - DNA, 25 bp, SARS Virus
gtttcaacttccaacgtaccatgtt

SEQ ID NO: 38672 - DNA, 25 bp, SARS Virus
tttcaacttcccacgtaccatgttc

SEQ ID NO: 38673 - DNA, 25 bp, SARS Virus
ttcaacttcccaagtaccatgttca

SEQ ID NO: 38674 - DNA, 25 bp, SARS Virus
tcaacttcccacataccatgttcat

SEQ ID NO: 38675 - DNA, 25 bp, SARS Virus
caacttcccacgaaccatgttcatt

SEQ ID NO: 38676 - DNA, 25 bp, SARS Virus
aacttcccacgtaccatgttcattg

SEQ ID NO: 38677 - DNA, 25 bp, SARS Virus
acttcccacgtaacatgttcattgg

SEQ ID NO: 38678 - DNA, 25 bp, SARS Virus
cttcccacgtacaatgttcattgga

SEQ ID NO: 38679 - DNA, 25 bp, SARS Virus
ttcccacgtaccatgttcattggac

SEQ ID NO: 38680 - DNA, 25 bp, SARS Virus
tcccacgtaccaagttcattggaca

SEQ ID NO: 38681 - DNA, 25 bp, SARS Virus
taaagtggttaccacaaagtaagaa

SEQ ID NO: 38682 - DNA, 25 bp, SARS Virus
aaagtggttactccaaagtaagaac

SEQ ID NO: 38683 - DNA, 25 bp, SARS Virus
aagtggttactacaaagtaagaacc

SEQ ID NO: 38684 - DNA, 25 bp, SARS Virus
agtggttactaccaagtaagaaccg

SEQ ID NO: 38685 - DNA, 25 bp, SARS Virus
gtggttactacacagtaagaaccga

SEQ ID NO: 38686 - DNA, 25 bp, SARS Virus
tggttactacaacgtaagaaccgag

SEQ ID NO: 38687 - DNA, 25 bp, SARS Virus
ggttactacaaactaagaaccgagt

SEQ ID NO: 38688 - DNA, 25 bp, SARS Virus
gttactacaaagcaagaaccgagtg

SEQ ID NO: 38689 - DNA, 25 bp, SARS Virus
ttactacaaagtcagaaccgagtgg

SEQ ID NO: 38690 - DNA, 25 bp, SARS Virus
tactacaaagtacgaaccgagtgga

SEQ ID NO: 38691 - DNA, 25 bp, SARS Virus
actacaaagtaacaaccgagtggaa

SEQ ID NO: 38692 - DNA, 25 bp, SARS Virus
ctacaaagtaagcaccgagtggaag

SEQ ID NO: 38693 - DNA, 25 bp, SARS Virus
tacaaagtaagacccgagtggaagt

SEQ ID NO: 38694 - DNA, 25 bp, SARS Virus
acaaagtaagaaccgagtggaagtt

SEQ ID NO: 38695 - DNA, 25 bp, SARS Virus
caaagtaagaaccgagtggaagtta

SEQ ID NO: 38696 - DNA, 25 bp, SARS Virus
aaagtaagaacccagtggaagttac

SEQ ID NO: 38697 - DNA, 25 bp, SARS Virus
aagtaagaaccgcgtggaagttacc

SEQ ID NO: 38698 - DNA, 25 bp, SARS Virus
agtaagaaccgactggaagttacca

SEQ ID NO: 38699 - DNA, 25 bp, SARS Virus
gtaagaaccgagcggaagttaccaa

SEQ ID NO: 38700 - DNA, 25 bp, SARS Virus
taagaaccgagtcgaagttaccaaa

SEQ ID NO: 38701 - DNA, 25 bp, SARS Virus
aagaaccgagtgcaagttaccaaac

SEQ ID NO: 38702 - DNA, 25 bp, SARS Virus
agaaccgagtggcagttaccaaacg

SEQ ID NO: 38703 - DNA, 25 bp, SARS Virus
gaaccgagtggacgttaccaaacgg

SEQ ID NO: 38704 - DNA, 25 bp, SARS Virus
aaccgagtggaacttaccaaacggt

SEQ ID NO: 38705 - DNA, 25 bp, SARS Virus
accgagtggaagctaccaaacggta

SEQ ID NO: 38706 - DNA, 25 bp, SARS Virus
ccgagtggaagtcaccaaacggtac

SEQ ID NO: 38707 - DNA, 25 bp, SARS Virus
cgagtggaagttcccaaacggtaca

SEQ ID NO: 38708 - DNA, 25 bp, SARS Virus
gagtggaagttaccaaacggtacaa

SEQ ID NO: 38709 - DNA, 25 bp, SARS Virus
agtggaagttaccaaacggtacaaa

SEQ ID NO: 38710 - DNA, 25 bp, SARS Virus
gtggaagttacccaacggtacaaaa

SEQ ID NO: 38711 - DNA, 25 bp, SARS Virus
tggaagttaccacacggtacaaaag

SEQ ID NO: 38712 - DNA, 25 bp, SARS Virus
ggaagttaccaaccggtacaaaaga

SEQ ID NO: 38713 - DNA, 25 bp, SARS Virus
gaagttaccaaacggtacaaaagag

SEQ ID NO: 38714 - DNA, 25 bp, SARS Virus
aagttaccaaaccgtacaaaagagg

SEQ ID NO: 38715 - DNA, 25 bp, SARS Virus
agttaccaaacgctacaaaagagga

SEQ ID NO: 38716 - DNA, 25 bp, SARS Virus
gttaccaaacggcacaaaagaggat

SEQ ID NO: 38717 - DNA, 25 bp, SARS Virus
ttaccaaacggtccaaaagaggata

SEQ ID NO: 38718 - DNA, 25 bp, SARS Virus
taccaaacggtacaaaagaggataa

SEQ ID NO: 38719 - DNA, 25 bp, SARS Virus
accaaacggtaccaaagaggataac

SEQ ID NO: 38720 - DNA, 25 bp, SARS Virus
ccaaacggtacacaagaggataaca

SEQ ID NO: 38721 - DNA, 25 bp, SARS Virus
caaacggtacaacagaggataacac

SEQ ID NO: 38722 - DNA, 25 bp, SARS Virus
aaacggtacaaacgaggataacacg

SEQ ID NO: 38723 - DNA, 25 bp, SARS Virus
aacggtacaaaacaggataacacgg

SEQ ID NO: 38724 - DNA, 25 bp, SARS Virus
acggtacaaaagcggataacacgga

SEQ ID NO: 38725 - DNA, 25 bp, SARS Virus
cggtacaaaagacgataacacggaa

SEQ ID NO: 38726 - DNA, 25 bp, SARS Virus
ggtacaaaagagcataacacggaaa

SEQ ID NO: 38727 - DNA, 25 bp, SARS Virus
gtacaaaagaggctaacacggaaaa

SEQ ID NO: 38728 - DNA, 25 bp, SARS Virus
tacaaaagaggacaacacggaaaaa

SEQ ID NO: 38729 - DNA, 25 bp, SARS Virus
acaaaagaggatcacacggaaaaac

SEQ ID NO: 38730 - DNA, 25 bp, SARS Virus
caaaagaggataccacggaaaaacc

SEQ ID NO: 38731 - DNA, 25 bp, SARS Virus
aaaagaggataacacggaaaaacct

SEQ ID NO: 38732 - DNA, 25 bp, SARS Virus
aaagaggataacccggaaaaaccta

SEQ ID NO: 38733 - DNA, 25 bp, SARS Virus
aagaggataacacggaaaaacctat

SEQ ID NO: 38734 - DNA, 25 bp, SARS Virus
agaggataacaccgaaaaacctatt

SEQ ID NO: 38735 - DNA, 25 bp, SARS Virus
gaggataacacgcaaaaacctattg

SEQ ID NO: 38736 - DNA, 25 bp, SARS Virus
aggataacacggcaaaacctattgt

SEQ ID NO: 38737 - DNA, 25 bp, SARS Virus
ggataacacggacaaacctattgtc

SEQ ID NO: 38738 - DNA, 25 bp, SARS Virus
gataacacggaacaacctattgtcg

SEQ ID NO: 38739 - DNA, 25 bp, SARS Virus
ataacacggaaacacctattgtcgt

SEQ ID NO: 38740 - DNA, 25 bp, SARS Virus
taacacggaaaaccctattgtcgtt

SEQ ID NO: 38741 - DNA, 25 bp, SARS Virus
aacacggaaaaacctattgtcgtta

SEQ ID NO: 38742 - DNA, 25 bp, SARS Virus
acacggaaaaacctattgtcgttag

SEQ ID NO: 38743 - DNA, 25 bp, SARS Virus
cacggaaaaacccattgtcgttaga

SEQ ID NO: 38744 - DNA, 25 bp, SARS Virus
acggaaaaacctcttgtcgttagat

SEQ ID NO: 38745 - DNA, 25 bp, SARS Virus
cggaaaaacctactgtcgttagata

SEQ ID NO: 38746 - DNA, 25 bp, SARS Virus
ggaaaaacctatcgtcgttagatac

SEQ ID NO: 38747 - DNA, 25 bp, SARS Virus
gaaaaacctattctcgttagataca

SEQ ID NO: 38748 - DNA, 25 bp, SARS Virus
aaaaacctattgccgttagatacat

SEQ ID NO: 38749 - DNA, 25 bp, SARS Virus
aaaacctattgtcgttagatacata

SEQ ID NO: 38750 - DNA, 25 bp, SARS Virus
aaacctattgtccttagatacataa

SEQ ID NO: 38751 - DNA, 25 bp, SARS Virus
aacctattgtcgctagatacataag

SEQ ID NO: 38752 - DNA, 25 bp, SARS Virus
acctattgtcgtcagatacataaga

SEQ ID NO: 38753 - DNA, 25 bp, SARS Virus
cctattgtcgttcgatacataagac

SEQ ID NO: 38754 - DNA, 25 bp, SARS Virus
ctattgtcgttacatacataagaca

SEQ ID NO: 38755 - DNA, 25 bp, SARS Virus
tattgtcgttagctacataagacat

SEQ ID NO: 38756 - DNA, 25 bp, SARS Virus
attgtcgttagacacataagacata

SEQ ID NO: 38757 - DNA, 25 bp, SARS Virus
ttgtcgttagatccataagacataa

SEQ ID NO: 38758 - DNA, 25 bp, SARS Virus
tgtcgttagatacataagacataaa

SEQ ID NO: 38759 - DNA, 25 bp, SARS Virus
gtcgttagatacctaagacataaag

SEQ ID NO: 38760 - DNA, 25 bp, SARS Virus
tcgttagatacacaagacataaaga

SEQ ID NO: 38761 - DNA, 25 bp, SARS Virus
cgttagatacatcagacataaagag

SEQ ID NO: 38762 - DNA, 25 bp, SARS Virus
gttagatacatacgacataaagaga

SEQ ID NO: 38763 - DNA, 25 bp, SARS Virus
ttagatacataacacataaagagac

SEQ ID NO: 38764 - DNA, 25 bp, SARS Virus
tagatacataagccataaagagact

SEQ ID NO: 38765 - DNA, 25 bp, SARS Virus
agatacataagacataaagagactt

SEQ ID NO: 38766 - DNA, 25 bp, SARS Virus
gatacataagacctaaagagacttc

SEQ ID NO: 38767 - DNA, 25 bp, SARS Virus
atacataagacacaaagagacttcg

SEQ ID NO: 38768 - DNA, 25 bp, SARS Virus
tacataagacatcaagagacttcgt

SEQ ID NO: 38769 - DNA, 25 bp, SARS Virus
acataagacatacagagacttcgtg

SEQ ID NO: 38770 - DNA, 25 bp, SARS Virus
cataagacataacgagacttcgtga

SEQ ID NO: 38771 - DNA, 25 bp, SARS Virus
ataagacataaacagacttcgtgac

SEQ ID NO: 38772 - DNA, 25 bp, SARS Virus
taagacataaagcgacttcgtgacg

SEQ ID NO: 38773 - DNA, 25 bp, SARS Virus
aagacataaagacacttcgtgacgg

SEQ ID NO: 38774 - DNA, 25 bp, SARS Virus
agacataaagagccttcgtgacggt

SEQ ID NO: 38775 - DNA, 25 bp, SARS Virus
gacataaagagacttcgtgacggta

SEQ ID NO: 38776 - DNA, 25 bp, SARS Virus
acataaagagacctcgtgacggtaa

SEQ ID NO: 38777 - DNA, 25 bp, SARS Virus
cataaagagactccgtgacggtaac

SEQ ID NO: 38778 - DNA, 25 bp, SARS Virus
ataaagagacttcgtgacggtaacc

SEQ ID NO: 38779 - DNA, 25 bp, SARS Virus
taaagagacttcctgacggtaacca

SEQ ID NO: 38780 - DNA, 25 bp, SARS Virus
aaagagacttcgcgacggtaaccaa

SEQ ID NO: 38781 - DNA, 25 bp, SARS Virus
aagagacttcgtcacggtaaccaag

SEQ ID NO: 38782 - DNA, 25 bp, SARS Virus
agagacttcgtgccggtaaccaaga

SEQ ID NO: 38783 - DNA, 25 bp, SARS Virus
gagacttcgtgacggtaaccaagaa

SEQ ID NO: 38784 - DNA, 25 bp, SARS Virus
agacttcgtgaccgtaaccaagaaa

SEQ ID NO: 38785 - DNA, 25 bp, SARS Virus
gacttcgtgacgctaaccaagaaat

SEQ ID NO: 38786 - DNA, 25 bp, SARS Virus
acttcgtgacggcaaccaagaaatt

SEQ ID NO: 38787 - DNA, 25 bp, SARS Virus
cttcgtgacggtcaccaagaaattg

SEQ ID NO: 38788 - DNA, 25 bp, SARS Virus
ttcgtgacggtacccaagaaattgt

SEQ ID NO: 38789 - DNA, 25 bp, SARS Virus
tcgtgacggtaaccaagaaattgtt

SEQ ID NO: 38790 - DNA, 25 bp, SARS Virus
cgtgacggtaaccaagaaattgttg

SEQ ID NO: 38791 - DNA, 25 bp, SARS Virus
gtgacggtaacccagaaattgttga

SEQ ID NO: 38792 - DNA, 25 bp, SARS Virus
tgacggtaaccacgaaattgttgat

SEQ ID NO: 38793 - DNA, 25 bp, SARS Virus
gacggtaaccaacaaattgttgata

SEQ ID NO: 38794 - DNA, 25 bp, SARS Virus
acggtaaccaagcaattgttgatag

SEQ ID NO: 38795 - DNA, 25 bp, SARS Virus
cggtaaccaagacattgttgataga

SEQ ID NO: 38796 - DNA, 25 bp, SARS Virus
ggtaaccaagaacttgttgatagaa

SEQ ID NO: 38797 - DNA, 25 bp, SARS Virus
gtaaccaagaaactgttgatagaat

SEQ ID NO: 38798 - DNA, 25 bp, SARS Virus
taaccaagaaatcgttgatagaatc

SEQ ID NO: 38799 - DNA, 25 bp, SARS Virus
aaccaagaaattcttgatagaatcc

SEQ ID NO: 38800 - DNA, 25 bp, SARS Virus
accaagaaattgctgatagaatcct

SEQ ID NO: 38801 - DNA, 25 bp, SARS Virus
ccaagaaattgtcgatagaatcctt

SEQ ID NO: 38802 - DNA, 25 bp, SARS Virus
caagaaattgttcatagaatccttt

SEQ ID NO: 38803 - DNA, 25 bp, SARS Virus
aagaaattgttgctagaatcctttt

SEQ ID NO: 38804 - DNA, 25 bp, SARS Virus
agaaattgttgacagaatccttttc

SEQ ID NO: 38805 - DNA, 25 bp, SARS Virus
gaaattgttgatcgaatccttttct

SEQ ID NO: 38806 - DNA, 25 bp, SARS Virus
aaattgttgatacaatccttttctc

SEQ ID NO: 38807 - DNA, 25 bp, SARS Virus
aattgttgatagcatccttttctca

SEQ ID NO: 38808 - DNA, 25 bp, SARS Virus
attgttgatagactccttttctcag

SEQ ID NO: 38809 - DNA, 25 bp, SARS Virus
ttgttgatagaacccttttctcagt

SEQ ID NO: 38810 - DNA, 25 bp, SARS Virus
tgttgatagaatccttttctcagta

SEQ ID NO: 38811 - DNA, 25 bp, SARS Virus
gttgatagaatccttttctcagtac

SEQ ID NO: 38812 - DNA, 25 bp, SARS Virus
ttgatagaatccctttctcagtaca

SEQ ID NO: 38813 - DNA, 25 bp, SARS Virus
tgatagaatcctcttctcagtacaa

SEQ ID NO: 38814 - DNA, 25 bp, SARS Virus
gatagaatccttctctcagtacaaa

SEQ ID NO: 38815 - DNA, 25 bp, SARS Virus
atagaatcctttcctcagtacaaat

SEQ ID NO: 38816 - DNA, 25 bp, SARS Virus
tagaatccttttctcagtacaaatt

SEQ ID NO: 38817 - DNA, 25 bp, SARS Virus
agaatccttttcccagtacaaatta

SEQ ID NO: 38818 - DNA, 25 bp, SARS Virus
gaatccttttctcagtacaaattac

SEQ ID NO: 38819 - DNA, 25 bp, SARS Virus
aatccttttctccgtacaaattacc

SEQ ID NO: 38820 - DNA, 25 bp, SARS Virus
atccttttctcactacaaattacct

SEQ ID NO: 38821 - DNA, 25 bp, SARS Virus
tccttttctcagcacaaattacctc

SEQ ID NO: 38822 - DNA, 25 bp, SARS Virus
ccttttctcagtccaaattacctca

SEQ ID NO: 38823 - DNA, 25 bp, SARS Virus
cttttctcagtacaaattacctcaa

SEQ ID NO: 38824 - DNA, 25 bp, SARS Virus
ttttctcagtaccaattacctcaat

SEQ ID NO: 38825 - DNA, 25 bp, SARS Virus
tttctcagtacacattacctcaatg

SEQ ID NO: 38826 - DNA, 25 bp, SARS Virus
ttctcagtacaacttacctcaatgt

SEQ ID NO: 38827 - DNA, 25 bp, SARS Virus
tctcagtacaaactacctcaatgta

SEQ ID NO: 38828 - DNA, 25 bp, SARS Virus
ctcagtacaaatcacctcaatgtaa

SEQ ID NO: 38829 - DNA, 25 bp, SARS Virus
tcagtacaaattccctcaatgtaaa

SEQ ID NO: 38830 - DNA, 25 bp, SARS Virus
cagtacaaattacctcaatgtaaat

SEQ ID NO: 38831 - DNA, 25 bp, SARS Virus
agtacaaattacctcaatgtaaatc

SEQ ID NO: 38832 - DNA, 25 bp, SARS Virus
gtacaaattaccccaatgtaaatca

SEQ ID NO: 38833 - DNA, 25 bp, SARS Virus
tacaaattacctcaatgtaaatcat

SEQ ID NO: 38834 - DNA, 25 bp, SARS Virus
acaaattacctccatgtaaatcatg

SEQ ID NO: 38835 - DNA, 25 bp, SARS Virus
caaattacctcactgtaaatcatgg

SEQ ID NO: 38836 - DNA, 25 bp, SARS Virus
aaattacctcaacgtaaatcatgga

SEQ ID NO: 38837 - DNA, 25 bp, SARS Virus
aattacctcaatctaaatcatggaa

SEQ ID NO: 38838 - DNA, 25 bp, SARS Virus
attacctcaatgcaaatcatggaag

SEQ ID NO: 38839 - DNA, 25 bp, SARS Virus
ttacctcaatgtcaatcatggaagc

SEQ ID NO: 38840 - DNA, 25 bp, SARS Virus
tacctcaatgtacatcatggaagct

SEQ ID NO: 38841 - DNA, 25 bp, SARS Virus
acctcaatgtaactcatggaagctc

SEQ ID NO: 38842 - DNA, 25 bp, SARS Virus
cctcaatgtaaaccatggaagctcc

SEQ ID NO: 38843 - DNA, 25 bp, SARS Virus
ctcaatgtaaatcatggaagctcct

SEQ ID NO: 38844 - DNA, 25 bp, SARS Virus
tcaatgtaaatcctggaagctcctc

SEQ ID NO: 38845 - DNA, 25 bp, SARS Virus
caatgtaaatcacggaagctcctcc

SEQ ID NO: 38846 - DNA, 25 bp, SARS Virus
aatgtaaatcatcgaagctcctccg

SEQ ID NO: 38847 - DNA, 25 bp, SARS Virus
atgtaaatcatgcaagctcctccga

SEQ ID NO: 38848 - DNA, 25 bp, SARS Virus
tgtaaatcatggcagctcctccgac

SEQ ID NO: 38849 - DNA, 25 bp, SARS Virus
gtaaatcatggacgctcctccgacg

SEQ ID NO: 38850 - DNA, 25 bp, SARS Virus
taaatcatggaacctcctccgacga

SEQ ID NO: 38851 - DNA, 25 bp, SARS Virus
aaatcatggaagctcctccgacgaa

SEQ ID NO: 38852 - DNA, 25 bp, SARS Virus
aatcatggaagcccctccgacgaaa

SEQ ID NO: 38853 - DNA, 25 bp, SARS Virus
atcatggaagctcctccgacgaaac

SEQ ID NO: 38854 - DNA, 25 bp, SARS Virus
tcatggaagctcctccgacgaaaca

SEQ ID NO: 38855 - DNA, 25 bp, SARS Virus
catggaagctcccccgacgaaacac

SEQ ID NO: 38856 - DNA, 25 bp, SARS Virus
atggaagctcctccgacgaaacaca

SEQ ID NO: 38857 - DNA, 25 bp, SARS Virus
tggaagctcctccgacgaaacacat

SEQ ID NO: 38858 - DNA, 25 bp, SARS Virus
ggaagctcctcccacgaaacacatg

SEQ ID NO: 38859 - DNA, 25 bp, SARS Virus
gaagctcctccgccgaaacacatgg

SEQ ID NO: 38860 - DNA, 25 bp, SARS Virus
aagctcctccgacgaaacacatgga

SEQ ID NO: 38861 - DNA, 25 bp, SARS Virus
agctcctccgaccaaacacatggaa

SEQ ID NO: 38862 - DNA, 25 bp, SARS Virus
gctcctccgacgcaacacatggaaa

SEQ ID NO: 38863 - DNA, 25 bp, SARS Virus
ctcctccgacgacacacatggaaaa

SEQ ID NO: 38864 - DNA, 25 bp, SARS Virus
tcctccgacgaaccacatggaaaaa

SEQ ID NO: 38865 - DNA, 25 bp, SARS Virus
cctccgacgaaacacatggaaaaac

SEQ ID NO: 38866 - DNA, 25 bp, SARS Virus
ctccgacgaaacccatggaaaaacg

SEQ ID NO: 38867 - DNA, 25 bp, SARS Virus
tccgacgaaacacatggaaaaacga

SEQ ID NO: 38868 - DNA, 25 bp, SARS Virus
ccgacgaaacacctggaaaaacgag

SEQ ID NO: 38869 - DNA, 25 bp, SARS Virus
cgacgaaacacacggaaaaacgagt

SEQ ID NO: 38870 - DNA, 25 bp, SARS Virus
gacgaaacacatcgaaaaacgagtt

SEQ ID NO: 38871 - DNA, 25 bp, SARS Virus
acgaaacacatgcaaaaacgagttg

SEQ ID NO: 38872 - DNA, 25 bp, SARS Virus
cgaaacacatggcaaaacgagttgt

SEQ ID NO: 38873 - DNA, 25 bp, SARS Virus
gaaacacatggacaaacgagttgtt

SEQ ID NO: 38874 - DNA, 25 bp, SARS Virus
aaacacatggaacaacgagttgttc

SEQ ID NO: 38875 - DNA, 25 bp, SARS Virus
aacacatggaaacacgagttgttcc

SEQ ID NO: 38876 - DNA, 25 bp, SARS Virus
acacatggaaaaccgagttgttcct

SEQ ID NO: 38877 - DNA, 25 bp, SARS Virus
cacatggaaaaacgagttgttcctt

SEQ ID NO: 38878 - DNA, 25 bp, SARS Virus
acatggaaaaaccagttgttccttt

SEQ ID NO: 38879 - DNA, 25 bp, SARS Virus
catggaaaaacgcgttgttccttta

SEQ ID NO: 38880 - DNA, 25 bp, SARS Virus
atggaaaaacgacttgttcctttac

SEQ ID NO: 38881 - DNA, 25 bp, SARS Virus
tggaaaaacgagctgttcctttaca

SEQ ID NO: 38882 - DNA, 25 bp, SARS Virus
ggaaaaacgagtcgttcctttacat

SEQ ID NO: 38883 - DNA, 25 bp, SARS Virus
gaaaaacgagttcttcctttacatg

SEQ ID NO: 38884 - DNA, 25 bp, SARS Virus
aaaaacgagttgctcctttacatgg

SEQ ID NO: 38885 - DNA, 25 bp, SARS Virus
aaaacgagttgtccctttacatgga

SEQ ID NO: 38886 - DNA, 25 bp, SARS Virus
aaacgagttgttcctttacatggat

SEQ ID NO: 38887 - DNA, 25 bp, SARS Virus
aacgagttgttcctttacatggatt

SEQ ID NO: 38888 - DNA, 25 bp, SARS Virus
acgagttgttcccttacatggattt

SEQ ID NO: 38889 - DNA, 25 bp, SARS Virus
cgagttgttcctctacatggatttt

SEQ ID NO: 38890 - DNA, 25 bp, SARS Virus
gagttgttccttcacatggatttta

SEQ ID NO: 38891 - DNA, 25 bp, SARS Virus
agttgttcctttccatggattttaa

SEQ ID NO: 38892 - DNA, 25 bp, SARS Virus
gttgttcctttacatggattttaac

SEQ ID NO: 38893 - DNA, 25 bp, SARS Virus
ttgttcctttacctggattttaacg

SEQ ID NO: 38894 - DNA, 25 bp, SARS Virus
tgttcctttacacggattttaacgc

SEQ ID NO: 38895 - DNA, 25 bp, SARS Virus
gttcctttacatcgattttaacgca

SEQ ID NO: 38896 - DNA, 25 bp, SARS Virus
ttcctttacatgcattttaacgcat

SEQ ID NO: 38897 - DNA, 25 bp, SARS Virus
tcctttacatggcttttaacgcatc

SEQ ID NO: 38898 - DNA, 25 bp, SARS Virus
cctttacatggactttaacgcatcg

SEQ ID NO: 38899 - DNA, 25 bp, SARS Virus
ctttacatggatcttaacgcatcgc

SEQ ID NO: 38900 - DNA, 25 bp, SARS Virus
tttacatggattctaacgcatcgct

SEQ ID NO: 38901 - DNA, 25 bp, SARS Virus
ttacatggatttcaacgcatcgctc

SEQ ID NO: 38902 - DNA, 25 bp, SARS Virus
tacatggattttcacgcatcgctct

SEQ ID NO: 38903 - DNA, 25 bp, SARS Virus
acatggattttaccgcatcgctctg

SEQ ID NO: 38904 - DNA, 25 bp, SARS Virus
catggattttaacgcatcgctctgt

SEQ ID NO: 38905 - DNA, 25 bp, SARS Virus
atggattttaacccatcgctctgtg

SEQ ID NO: 38906 - DNA, 25 bp, SARS Virus
tggattttaacgcatcgctctgtga

SEQ ID NO: 38907 - DNA, 25 bp, SARS Virus
ggattttaacgcctcgctctgtgac

SEQ ID NO: 38908 - DNA, 25 bp, SARS Virus
gattttaacgcaccgctctgtgaca

SEQ ID NO: 38909 - DNA, 25 bp, SARS Virus
attttaacgcatcgctctgtgacaa

SEQ ID NO: 38910 - DNA, 25 bp, SARS Virus
ttttaacgcatccctctgtgacaac

SEQ ID NO: 38911 - DNA, 25 bp, SARS Virus
tttaacgcatcgctctgtgacaacg

SEQ ID NO: 38912 - DNA, 25 bp, SARS Virus
ttaacgcatcgccctgtgacaacgg

SEQ ID NO: 38913 - DNA, 25 bp, SARS Virus
taacgcatcgctctgtgacaacggt

SEQ ID NO: 38914 - DNA, 25 bp, SARS Virus
aacgcatcgctccgtgacaacggtg

SEQ ID NO: 38915 - DNA, 25 bp, SARS Virus
acgcatcgctctctgacaacggtga

SEQ ID NO: 38916 - DNA, 25 bp, SARS Virus
cgcatcgctctgcgacaacggtgaa

SEQ ID NO: 38917 - DNA, 25 bp, SARS Virus
gcatcgctctgtcacaacggtgaat

SEQ ID NO: 38918 - DNA, 25 bp, SARS Virus
catcgctctgtgccaacggtgaatg

SEQ ID NO: 38919 - DNA, 25 bp, SARS Virus
atcgctctgtgacaacggtgaatgt

SEQ ID NO: 38920 - DNA, 25 bp, SARS Virus
tcgctctgtgaccacggtgaatgtg

SEQ ID NO: 38921 - DNA, 25 bp, SARS Virus
cgctctgtgacaccggtgaatgtgt

SEQ ID NO: 38922 - DNA, 25 bp, SARS Virus
gctctgtgacaacggtgaatgtgtc

SEQ ID NO: 38923 - DNA, 25 bp, SARS Virus
ctctgtgacaaccgtgaatgtgtca

SEQ ID NO: 38924 - DNA, 25 bp, SARS Virus
tctgtgacaacgctgaatgtgtcat

SEQ ID NO: 38925 - DNA, 25 bp, SARS Virus
ctgtgacaacggcgaatgtgtcata

SEQ ID NO: 38926 - DNA, 25 bp, SARS Virus
tgtgacaacggtcaatgtgtcatat

SEQ ID NO: 38927 - DNA, 25 bp, SARS Virus
gtgacaacggtgcatgtgtcatatt

SEQ ID NO: 38928 - DNA, 25 bp, SARS Virus
tgacaacggtgactgtgtcatattg

SEQ ID NO: 38929 - DNA, 25 bp, SARS Virus
gacaacggtgaacgtgtcatattgt

SEQ ID NO: 38930 - DNA, 25 bp, SARS Virus
acaacggtgaatctgtcatattgtc

SEQ ID NO: 38931 - DNA, 25 bp, SARS Virus
caacggtgaatgcgtcatattgtcc

SEQ ID NO: 38932 - DNA, 25 bp, SARS Virus
aacggtgaatgtctcatattgtcca

SEQ ID NO: 38933 - DNA, 25 bp, SARS Virus
acggtgaatgtgccatattgtccat

SEQ ID NO: 38934 - DNA, 25 bp, SARS Virus
cggtgaatgtgtcatattgtccata

SEQ ID NO: 38935 - DNA, 25 bp, SARS Virus
ggtgaatgtgtcctattgtccatag

SEQ ID NO: 38936 - DNA, 25 bp, SARS Virus
gtgaatgtgtcacattgtccataga

SEQ ID NO: 38937 - DNA, 25 bp, SARS Virus
tgaatgtgtcatcttgtccatagaa

SEQ ID NO: 38938 - DNA, 25 bp, SARS Virus
gaatgtgtcatactgtccatagaac

SEQ ID NO: 38939 - DNA, 25 bp, SARS Virus
aatgtgtcatatcgtccatagaacg

SEQ ID NO: 38940 - DNA, 25 bp, SARS Virus
atgtgtcatattctccatagaacga

SEQ ID NO: 38941 - DNA, 25 bp, SARS Virus
tgtgtcatattgcccatagaacgag

SEQ ID NO: 38942 - DNA, 25 bp, SARS Virus
gtgtcatattgtccatagaacgaga

SEQ ID NO: 38943 - DNA, 25 bp, SARS Virus
tgtcatattgtccatagaacgagat

SEQ ID NO: 38944 - DNA, 25 bp, SARS Virus
gtcatattgtccctagaacgagata

SEQ ID NO: 38945 - DNA, 25 bp, SARS Virus
tcatattgtccacagaacgagatat

SEQ ID NO: 38946 - DNA, 25 bp, SARS Virus
catattgtccatcgaacgagatata

SEQ ID NO: 38947 - DNA, 25 bp, SARS Virus
atattgtccatacaacgagatatat

SEQ ID NO: 38948 - DNA, 25 bp, SARS Virus
tattgtccatagcacgagatatatt

SEQ ID NO: 38949 - DNA, 25 bp, SARS Virus
attgtccatagaccgagatatattg

SEQ ID NO: 38950 - DNA, 25 bp, SARS Virus
ttgtccatagaacgagatatattgt

SEQ ID NO: 38951 - DNA, 25 bp, SARS Virus
tgtccatagaaccagatatattgtt

SEQ ID NO: 38952 - DNA, 25 bp, SARS Virus
gtccatagaacgcgatatattgttc

SEQ ID NO: 38953 - DNA, 25 bp, SARS Virus
tccatagaacgacatatattgttca

SEQ ID NO: 38954 - DNA, 25 bp, SARS Virus
ccatagaacgagctatattgttcat

SEQ ID NO: 38955 - DNA, 25 bp, SARS Virus
catagaacgagacatattgttcatg

SEQ ID NO: 38956 - DNA, 25 bp, SARS Virus
atagaacgagatctattgttcatgt

SEQ ID NO: 38957 - DNA, 25 bp, SARS Virus
tagaacgagatacattgttcatgtt

SEQ ID NO: 38958 - DNA, 25 bp, SARS Virus
agaacgagatatcttgttcatgttc

SEQ ID NO: 38959 - DNA, 25 bp, SARS Virus
gaacgagatatactgttcatgttca

SEQ ID NO: 38960 - DNA, 25 bp, SARS Virus
aacgagatatatcgttcatgttcat

SEQ ID NO: 38961 - DNA, 25 bp, SARS Virus
acgagatatattcttcatgttcata

SEQ ID NO: 38962 - DNA, 25 bp, SARS Virus
cgagatatattgctcatgttcataa

SEQ ID NO: 38963 - DNA, 25 bp, SARS Virus
gagatatattgtccatgttcataaa

SEQ ID NO: 38964 - DNA, 25 bp, SARS Virus
agatatattgttcatgttcataaag

SEQ ID NO: 38965 - DNA, 25 bp, SARS Virus
gatatattgttcctgttcataaagt

SEQ ID NO: 38966 - DNA, 25 bp, SARS Virus
atatattgttcacgttcataaagtc

SEQ ID NO: 38967 - DNA, 25 bp, SARS Virus
tatattgttcatcttcataaagtca

SEQ ID NO: 38968 - DNA, 25 bp, SARS Virus
atattgttcatgctcataaagtcac

SEQ ID NO: 38969 - DNA, 25 bp, SARS Virus
tattgttcatgtccataaagtcacc

SEQ ID NO: 38970 - DNA, 25 bp, SARS Virus
attgttcatgttcataaagtcacct

SEQ ID NO: 38971 - DNA, 25 bp, SARS Virus
ttgttcatgttcctaaagtcacctc

SEQ ID NO: 38972 - DNA, 25 bp, SARS Virus
tgttcatgttcacaaagtcacctcg

SEQ ID NO: 38973 - DNA, 25 bp, SARS Virus
gttcatgttcatcaagtcacctcgg

SEQ ID NO: 38974 - DNA, 25 bp, SARS Virus
ttcatgttcatacagtcacctcgga

SEQ ID NO: 38975 - DNA, 25 bp, SARS Virus
tcatgttcataacgtcacctcggaa

SEQ ID NO: 38976 - DNA, 25 bp, SARS Virus
catgttcataaactcacctcggaat

SEQ ID NO: 38977 - DNA, 25 bp, SARS Virus
atgttcataaagccacctcggaatc

SEQ ID NO: 38978 - DNA, 25 bp, SARS Virus
tgttcataaagtcacctcggaatct

SEQ ID NO: 38979 - DNA, 25 bp, SARS Virus
gttcataaagtcccctcggaatcta

SEQ ID NO: 38980 - DNA, 25 bp, SARS Virus
ttcataaagtcacctcggaatctat

SEQ ID NO: 38981 - DNA, 25 bp, SARS Virus
tcataaagtcacctcggaatctatg

SEQ ID NO: 38982 - DNA, 25 bp, SARS Virus
cataaagtcaccccggaatctatga

SEQ ID NO: 38983 - DNA, 25 bp, SARS Virus
ataaagtcacctcggaatctatgat

SEQ ID NO: 38984 - DNA, 25 bp, SARS Virus
taaagtcacctccgaatctatgatg

SEQ ID NO: 38985 - DNA, 25 bp, SARS Virus
aaagtcacctcgcaatctatgatgg

SEQ ID NO: 38986 - DNA, 25 bp, SARS Virus
aagtcacctcggcatctatgatggt

SEQ ID NO: 38987 - DNA, 25 bp, SARS Virus
agtcacctcggactctatgatggtc

SEQ ID NO: 38988 - DNA, 25 bp, SARS Virus
gtcacctcggaacctatgatggtcg

SEQ ID NO: 38989 - DNA, 25 bp, SARS Virus
tcacctcggaatctatgatggtcga

SEQ ID NO: 38990 - DNA, 25 bp, SARS Virus
cacctcggaatccatgatggtcgat

SEQ ID NO: 38991 - DNA, 25 bp, SARS Virus
acctcggaatctctgatggtcgata

SEQ ID NO: 38992 - DNA, 25 bp, SARS Virus
cctcggaatctacgatggtcgatag

SEQ ID NO: 38993 - DNA, 25 bp, SARS Virus
ctcggaatctatcatggtcgatagc

SEQ ID NO: 38994 - DNA, 25 bp, SARS Virus
tcggaatctatgctggtcgatagca

SEQ ID NO: 38995 - DNA, 25 bp, SARS Virus
cggaatctatgacggtcgatagcac

SEQ ID NO: 38996 - DNA, 25 bp, SARS Virus
ggaatctatgatcgtcgatagcact

SEQ ID NO: 38997 - DNA, 25 bp, SARS Virus
gaatctatgatgctcgatagcactt

SEQ ID NO: 38998 - DNA, 25 bp, SARS Virus
aatctatgatggccgatagcacttc

SEQ ID NO: 38999 - DNA, 25 bp, SARS Virus
atctatgatggtcgatagcacttcg

SEQ ID NO: 39000 - DNA, 25 bp, SARS Virus
tctatgatggtccatagcacttcgt

SEQ ID NO: 39001 - DNA, 25 bp, SARS Virus
ctatgatggtcgctagcacttcgtc

SEQ ID NO: 39002 - DNA, 25 bp, SARS Virus
tatgatggtcgacagcacttcgtcg

SEQ ID NO: 39003 - DNA, 25 bp, SARS Virus
atgatggtcgatcgcacttcgtcga

SEQ ID NO: 39004 - DNA, 25 bp, SARS Virus
tgatggtcgataccacttcgtcgaa

SEQ ID NO: 39005 - DNA, 25 bp, SARS Virus
gatggtcgatagcacttcgtcgaac

SEQ ID NO: 39006 - DNA, 25 bp, SARS Virus
atggtcgatagcccttcgtcgaacg

SEQ ID NO: 39007 - DNA, 25 bp, SARS Virus
tggtcgatagcacttcgtcgaacga

SEQ ID NO: 39008 - DNA, 25 bp, SARS Virus
ggtcgatagcacctcgtcgaacgac

SEQ ID NO: 39009 - DNA, 25 bp, SARS Virus
gtcgatagcactccgtcgaacgacg

SEQ ID NO: 39010 - DNA, 25 bp, SARS Virus
tcgatagcacttcgtcgaacgacgg

SEQ ID NO: 39011 - DNA, 25 bp, SARS Virus
cgatagcacttcctcgaacgacggt

SEQ ID NO: 39012 - DNA, 25 bp, SARS Virus
gatagcacttcgccgaacgacggtg

SEQ ID NO: 39013 - DNA, 25 bp, SARS Virus
atagcacttcgtcgaacgacggtga

SEQ ID NO: 39014 - DNA, 25 bp, SARS Virus
tagcacttcgtccaacgacggtgaa

SEQ ID NO: 39015 - DNA, 25 bp, SARS Virus
agcacttcgtcgcacgacggtgaat

SEQ ID NO: 39016 - DNA, 25 bp, SARS Virus
gcacttcgtcgaccgacggtgaatc

SEQ ID NO: 39017 - DNA, 25 bp, SARS Virus
cacttcgtcgaacgacggtgaatcg

SEQ ID NO: 39018 - DNA, 25 bp, SARS Virus
acttcgtcgaaccacggtgaatcgt

SEQ ID NO: 39019 - DNA, 25 bp, SARS Virus
cttcgtcgaacgccggtgaatcgtt

SEQ ID NO: 39020 - DNA, 25 bp, SARS Virus
ttcgtcgaacgacggtgaatcgttt

SEQ ID NO: 39021 - DNA, 25 bp, SARS Virus
tcgtcgaacgaccgtgaatcgtttc

SEQ ID NO: 39022 - DNA, 25 bp, SARS Virus
cgtcgaacgacgctgaatcgtttcc

SEQ ID NO: 39023 - DNA, 25 bp, SARS Virus
gtcgaacgacggcgaatcgtttccg

SEQ ID NO: 39024 - DNA, 25 bp, SARS Virus
tcgaacgacggtcaatcgtttccga

SEQ ID NO: 39025 - DNA, 25 bp, SARS Virus
cgaacgacggtgcatcgtttccgag

SEQ ID NO: 39026 - DNA, 25 bp, SARS Virus
gaacgacggtgactcgtttccgaga

SEQ ID NO: 39027 - DNA, 25 bp, SARS Virus
aacgacggtgaaccgtttccgagat

SEQ ID NO: 39028 - DNA, 25 bp, SARS Virus
acgacggtgaatcgtttccgagatt

SEQ ID NO: 39029 - DNA, 25 bp, SARS Virus
cgacggtgaatcctttccgagattt

SEQ ID NO: 39030 - DNA, 25 bp, SARS Virus
gacggtgaatcgcttccgagattta

SEQ ID NO: 39031 - DNA, 25 bp, SARS Virus
acggtgaatcgtctccgagatttac

SEQ ID NO: 39032 - DNA, 25 bp, SARS Virus
cggtgaatcgttcccgagatttact

SEQ ID NO: 39033 - DNA, 25 bp, SARS Virus
ggtgaatcgtttccgagatttactg

SEQ ID NO: 39034 - DNA, 25 bp, SARS Virus
gtgaatcgtttccgagatttactga

SEQ ID NO: 39035 - DNA, 25 bp, SARS Virus
tgaatcgtttcccagatttactgaa

SEQ ID NO: 39036 - DNA, 25 bp, SARS Virus
gaatcgtttccgcgatttactgaaa

SEQ ID NO: 39037 - DNA, 25 bp, SARS Virus
aatcgtttccgacatttactgaaat

SEQ ID NO: 39038 - DNA, 25 bp, SARS Virus
atcgtttccgagctttactgaaatc

SEQ ID NO: 39039 - DNA, 25 bp, SARS Virus
tcgtttccgagacttactgaaatcg

SEQ ID NO: 39040 - DNA, 25 bp, SARS Virus
cgtttccgagatctactgaaatcgt

SEQ ID NO: 39041 - DNA, 25 bp, SARS Virus
gtttccgagattcactgaaatcgtt

SEQ ID NO: 39042 - DNA, 25 bp, SARS Virus
tttccgagatttcctgaaatcgttg

SEQ ID NO: 39043 - DNA, 25 bp, SARS Virus
ttccgagatttactgaaatcgttga

SEQ ID NO: 39044 - DNA, 25 bp, SARS Virus
tccgagatttaccgaaatcgttgag

SEQ ID NO: 39045 - DNA, 25 bp, SARS Virus
ccgagatttactcaaatcgttgagt

SEQ ID NO: 39046 - DNA, 25 bp, SARS Virus
cgagatttactgcaatcgttgagtc

SEQ ID NO: 39047 - DNA, 25 bp, SARS Virus
gagatttactgacatcgttgagtcc

SEQ ID NO: 39048 - DNA, 25 bp, SARS Virus
agatttactgaactcgttgagtcca

SEQ ID NO: 39049 - DNA, 25 bp, SARS Virus
gatttactgaaaccgttgagtccac

SEQ ID NO: 39050 - DNA, 25 bp, SARS Virus
atttactgaaatcgttgagtccacg

SEQ ID NO: 39051 - DNA, 25 bp, SARS Virus
tttactgaaatccttgagtccacga

SEQ ID NO: 39052 - DNA, 25 bp, SARS Virus
ttactgaaatcgctgagtccacgac

SEQ ID NO: 39053 - DNA, 25 bp, SARS Virus
tactgaaatcgtcgagtccacgact

SEQ ID NO: 39054 - DNA, 25 bp, SARS Virus
actgaaatcgttcagtccacgacta

SEQ ID NO: 39055 - DNA, 25 bp, SARS Virus
ctgaaatcgttgcgtccacgactac

SEQ ID NO: 39056 - DNA, 25 bp, SARS Virus
tgaaatcgttgactccacgactaca

SEQ ID NO: 39057 - DNA, 25 bp, SARS Virus
gaaatcgttgagcccacgactacaa

SEQ ID NO: 39058 - DNA, 25 bp, SARS Virus
aaatcgttgagtccacgactacaag

SEQ ID NO: 39059 - DNA, 25 bp, SARS Virus
aatcgttgagtccacgactacaaga

SEQ ID NO: 39060 - DNA, 25 bp, SARS Virus
atcgttgagtccccgactacaagag

SEQ ID NO: 39061 - DNA, 25 bp, SARS Virus
tcgttgagtccacgactacaagaga

SEQ ID NO: 39062 - DNA, 25 bp, SARS Virus
cgttgagtccaccactacaagagat

SEQ ID NO: 39063 - DNA, 25 bp, SARS Virus
gttgagtccacgcctacaagagatg

SEQ ID NO: 39064 - DNA, 25 bp, SARS Virus
ttgagtccacgactacaagagatgg

SEQ ID NO: 39065 - DNA, 25 bp, SARS Virus
tgagtccacgaccacaagagatggt

SEQ ID NO: 39066 - DNA, 25 bp, SARS Virus
gagtccacgactccaagagatggtt

SEQ ID NO: 39067 - DNA, 25 bp, SARS Virus
agtccacgactacaagagatggttg

SEQ ID NO: 39068 - DNA, 25 bp, SARS Virus
gtccacgactaccagagatggttgg

SEQ ID NO: 39069 - DNA, 25 bp, SARS Virus
tccacgactacacgagatggttggt

SEQ ID NO: 39070 - DNA, 25 bp, SARS Virus
ccacgactacaacagatggttggtg

SEQ ID NO: 39071 - DNA, 25 bp, SARS Virus
cacgactacaagcgatggttggtgg

SEQ ID NO: 39072 - DNA, 25 bp, SARS Virus
acgactacaagacatggttggtggt

SEQ ID NO: 39073 - DNA, 25 bp, SARS Virus
cgactacaagagctggttggtggtg

SEQ ID NO: 39074 - DNA, 25 bp, SARS Virus
gactacaagagacggttggtggtgt

SEQ ID NO: 39075 - DNA, 25 bp, SARS Virus
actacaagagatcgttggtggtgtc

SEQ ID NO: 39076 - DNA, 25 bp, SARS Virus
ctacaagagatgcttggtggtgtct

SEQ ID NO: 39077 - DNA, 25 bp, SARS Virus
tacaagagatggctggtggtgtctg

SEQ ID NO: 39078 - DNA, 25 bp, SARS Virus
acaagagatggtcggtggtgtctgt

SEQ ID NO: 39079 - DNA, 25 bp, SARS Virus
caagagatggttcgtggtgtctgta

SEQ ID NO: 39080 - DNA, 25 bp, SARS Virus
aagagatggttgctggtgtctgtag

SEQ ID NO: 39081 - DNA, 25 bp, SARS Virus
agagatggttggcggtgtctgtagt

SEQ ID NO: 39082 - DNA, 25 bp, SARS Virus
gagatggttggtcgtgtctgtagtt

SEQ ID NO: 39083 - DNA, 25 bp, SARS Virus
agatggttggtgctgtctgtagtta

SEQ ID NO: 39084 - DNA, 25 bp, SARS Virus
gatggttggtggcgtctgtagttag

SEQ ID NO: 39085 - DNA, 25 bp, SARS Virus
atggttggtggtctctgtagttagt

SEQ ID NO: 39086 - DNA, 25 bp, SARS Virus
tggttggtggtgcctgtagttagtg

SEQ ID NO: 39087 - DNA, 25 bp, SARS Virus
ggttggtggtgtctgtagttagtga

SEQ ID NO: 39088 - DNA, 25 bp, SARS Virus
gttggtggtgtccgtagttagtgaa

SEQ ID NO: 39089 - DNA, 25 bp, SARS Virus
ttggtggtgtctctagttagtgaag

SEQ ID NO: 39090 - DNA, 25 bp, SARS Virus
tggtggtgtctgcagttagtgaaga

SEQ ID NO: 39091 - DNA, 25 bp, SARS Virus
ggtggtgtctgtcgttagtgaagac

SEQ ID NO: 39092 - DNA, 25 bp, SARS Virus
gtggtgtctgtacttagtgaagacg

SEQ ID NO: 39093 - DNA, 25 bp, SARS Virus
tggtgtctgtagctagtgaagacga

SEQ ID NO: 39094 - DNA, 25 bp, SARS Virus
ggtgtctgtagtcagtgaagacgac

SEQ ID NO: 39095 - DNA, 25 bp, SARS Virus
gtgtctgtagttcgtgaagacgaca

SEQ ID NO: 39096 - DNA, 25 bp, SARS Virus
tgtctgtagttactgaagacgacaa

SEQ ID NO: 39097 - DNA, 25 bp, SARS Virus
gtctgtagttagcgaagacgacaag

SEQ ID NO: 39098 - DNA, 25 bp, SARS Virus
tctgtagttagtcaagacgacaaga

SEQ ID NO: 39099 - DNA, 25 bp, SARS Virus
ctgtagttagtgcagacgacaagac

SEQ ID NO: 39100 - DNA, 25 bp, SARS Virus
tgtagttagtgacgacgacaagacg

SEQ ID NO: 39101 - DNA, 25 bp, SARS Virus
gtagttagtgaacacgacaagacgt

SEQ ID NO: 39102 - DNA, 25 bp, SARS Virus
tagttagtgaagccgacaagacgtc

SEQ ID NO: 39103 - DNA, 25 bp, SARS Virus
agttagtgaagacgacaagacgtct

SEQ ID NO: 39104 - DNA, 25 bp, SARS Virus
gttagtgaagaccacaagacgtctc

SEQ ID NO: 39105 - DNA, 25 bp, SARS Virus
ttagtgaagacgccaagacgtctca

SEQ ID NO: 39106 - DNA, 25 bp, SARS Virus
tagtgaagacgacaagacgtctcac

SEQ ID NO: 39107 - DNA, 25 bp, SARS Virus
agtgaagacgaccagacgtctcacc

SEQ ID NO: 39108 - DNA, 25 bp, SARS Virus
gtgaagacgacacgacgtctcacca

SEQ ID NO: 39109 - DNA, 25 bp, SARS Virus
tgaagacgacaacacgtctcaccaa

SEQ ID NO: 39110 - DNA, 25 bp, SARS Virus
gaagacgacaagccgtctcaccaaa

SEQ ID NO: 39111 - DNA, 25 bp, SARS Virus
aagacgacaagacgtctcaccaaaa

SEQ ID NO: 39112 - DNA, 25 bp, SARS Virus
agacgacaagacctctcaccaaaat

SEQ ID NO: 39113 - DNA, 25 bp, SARS Virus
gacgacaagacgcctcaccaaaatc

SEQ ID NO: 39114 - DNA, 25 bp, SARS Virus
acgacaagacgtctcaccaaaatcc

SEQ ID NO: 39115 - DNA, 25 bp, SARS Virus
cgacaagacgtcccaccaaaatcct

SEQ ID NO: 39116 - DNA, 25 bp, SARS Virus
gacaagacgtctcaccaaaatcctt

SEQ ID NO: 39117 - DNA, 25 bp, SARS Virus
acaagacgtctccccaaaatccttt

SEQ ID NO: 39118 - DNA, 25 bp, SARS Virus
caagacgtctcaccaaaatcctttt

SEQ ID NO: 39119 - DNA, 25 bp, SARS Virus
aagacgtctcaccaaaatcctttta

SEQ ID NO: 39120 - DNA, 25 bp, SARS Virus
agacgtctcacccaaatccttttac

SEQ ID NO: 39121 - DNA, 25 bp, SARS Virus
gacgtctcaccacaatccttttacc

SEQ ID NO: 39122 - DNA, 25 bp, SARS Virus
acgtctcaccaacatccttttaccg

SEQ ID NO: 39123 - DNA, 25 bp, SARS Virus
cgtctcaccaaactccttttaccgt

SEQ ID NO: 39124 - DNA, 25 bp, SARS Virus
gtctcaccaaaacccttttaccgta

SEQ ID NO: 39125 - DNA, 25 bp, SARS Virus
tctcaccaaaatccttttaccgtaa

SEQ ID NO: 39126 - DNA, 25 bp, SARS Virus
ctcaccaaaatccttttaccgtaag

SEQ ID NO: 39127 - DNA, 25 bp, SARS Virus
tcaccaaaatccctttaccgtaagg

SEQ ID NO: 39128 - DNA, 25 bp, SARS Virus
caccaaaatcctcttaccgtaaggg

SEQ ID NO: 39129 - DNA, 25 bp, SARS Virus
accaaaatccttctaccgtaagggc

SEQ ID NO: 39130 - DNA, 25 bp, SARS Virus
ccaaaatcctttcaccgtaagggca

SEQ ID NO: 39131 - DNA, 25 bp, SARS Virus
caaaatccttttcccgtaagggcag

SEQ ID NO: 39132 - DNA, 25 bp, SARS Virus
aaaatccttttaccgtaagggcagt

SEQ ID NO: 39133 - DNA, 25 bp, SARS Virus
aaatccttttaccgtaagggcagtc

SEQ ID NO: 39134 - DNA, 25 bp, SARS Virus
aatccttttaccctaagggcagtcc

SEQ ID NO: 39135 - DNA, 25 bp, SARS Virus
atccttttaccgcaagggcagtccg

SEQ ID NO: 39136 - DNA, 25 bp, SARS Virus
tccttttaccgtcagggcagtccgt

SEQ ID NO: 39137 - DNA, 25 bp, SARS Virus
ccttttaccgtacgggcagtccgtt

SEQ ID NO: 39138 - DNA, 25 bp, SARS Virus
cttttaccgtaacggcagtccgttt

SEQ ID NO: 39139 - DNA, 25 bp, SARS Virus
ttttaccgtaagcgcagtccgtttc

SEQ ID NO: 39140 - DNA, 25 bp, SARS Virus
tttaccgtaaggccagtccgtttca

SEQ ID NO: 39141 - DNA, 25 bp, SARS Virus
ttaccgtaagggcagtccgtttcaa

SEQ ID NO: 39142 - DNA, 25 bp, SARS Virus
taccgtaagggccgtccgtttcaac

SEQ ID NO: 39143 - DNA, 25 bp, SARS Virus
accgtaagggcactccgtttcaact

SEQ ID NO: 39144 - DNA, 25 bp, SARS Virus
ccgtaagggcagcccgtttcaactt

SEQ ID NO: 39145 - DNA, 25 bp, SARS Virus
cgtaagggcagtccgtttcaacttc

SEQ ID NO: 39146 - DNA, 25 bp, SARS Virus
gtaagggcagtccgtttcaacttcc

SEQ ID NO: 39147 - DNA, 25 bp, SARS Virus
taagggcagtccctttcaacttccc

SEQ ID NO: 39148 - DNA, 25 bp, SARS Virus
aagggcagtccgcttcaacttccca

SEQ ID NO: 39149 - DNA, 25 bp, SARS Virus
agggcagtccgtctcaacttcccac

SEQ ID NO: 39150 - DNA, 25 bp, SARS Virus
gggcagtccgttccaacttcccacg

SEQ ID NO: 39151 - DNA, 25 bp, SARS Virus
ggcagtccgtttcaacttcccacgt

SEQ ID NO: 39152 - DNA, 25 bp, SARS Virus
gcagtccgtttccacttcccacgta

SEQ ID NO: 39153 - DNA, 25 bp, SARS Virus
cagtccgtttcaccttcccacgtac

SEQ ID NO: 39154 - DNA, 25 bp, SARS Virus
agtccgtttcaacttcccacgtacc

SEQ ID NO: 39155 - DNA, 25 bp, SARS Virus
gtccgtttcaacctcccacgtacca

SEQ ID NO: 39156 - DNA, 25 bp, SARS Virus
tccgtttcaactccccacgtaccat

SEQ ID NO: 39157 - DNA, 25 bp, SARS Virus
ccgtttcaacttcccacgtaccatg

SEQ ID NO: 39158 - DNA, 25 bp, SARS Virus
cgtttcaacttcccacgtaccatgt

SEQ ID NO: 39159 - DNA, 25 bp, SARS Virus
gtttcaacttcccacgtaccatgtt

SEQ ID NO: 39160 - DNA, 25 bp, SARS Virus
tttcaacttcccccgtaccatgttc

SEQ ID NO: 39161 - DNA, 25 bp, SARS Virus
ttcaacttcccacgtaccatgttca

SEQ ID NO: 39162 - DNA, 25 bp, SARS Virus
tcaacttcccacctaccatgttcat

SEQ ID NO: 39163 - DNA, 25 bp, SARS Virus
caacttcccacgcaccatgttcatt

SEQ ID NO: 39164 - DNA, 25 bp, SARS Virus
aacttcccacgtcccatgttcattg

SEQ ID NO: 39165 - DNA, 25 bp, SARS Virus
acttcccacgtaccatgttcattgg

SEQ ID NO: 39166 - DNA, 25 bp, SARS Virus
cttcccacgtaccatgttcattgga

SEQ ID NO: 39167 - DNA, 25 bp, SARS Virus
ttcccacgtaccctgttcattggac

SEQ ID NO: 39168 - DNA, 25 bp, SARS Virus
tcccacgtaccacgttcattggaca

SEQ ID NO: 39169 - DNA, 25 bp, SARS Virus
taaagtggttacgacaaagtaagaa

SEQ ID NO: 39170 - DNA, 25 bp, SARS Virus
aaagtggttactgcaaagtaagaac

SEQ ID NO: 39171 - DNA, 25 bp, SARS Virus
aagtggttactagaaagtaagaacc

SEQ ID NO: 39172 - DNA, 25 bp, SARS Virus
agtggttactacgaagtaagaaccg

SEQ ID NO: 39173 - DNA, 25 bp, SARS Virus
gtggttactacagagtaagaaccga

SEQ ID NO: 39174 - DNA, 25 bp, SARS Virus
tggttactacaaggtaagaaccgag

SEQ ID NO: 39175 - DNA, 25 bp, SARS Virus
ggttactacaaagtaagaaccgagt

SEQ ID NO: 39176 - DNA, 25 bp, SARS Virus
gttactacaaaggaagaaccgagtg

SEQ ID NO: 39177 - DNA, 25 bp, SARS Virus
ttactacaaagtgagaaccgagtgg

SEQ ID NO: 39178 - DNA, 25 bp, SARS Virus
tactacaaagtaggaaccgagtgga

SEQ ID NO: 39179 - DNA, 25 bp, SARS Virus
actacaaagtaagaaccgagtggaa

SEQ ID NO: 39180 - DNA, 25 bp, SARS Virus
ctacaaagtaaggaccgagtggaag

SEQ ID NO: 39181 - DNA, 25 bp, SARS Virus
tacaaagtaagagccgagtggaagt

SEQ ID NO: 39182 - DNA, 25 bp, SARS Virus
acaaagtaagaagcgagtggaagtt

SEQ ID NO: 39183 - DNA, 25 bp, SARS Virus
caaagtaagaacggagtggaagtta

SEQ ID NO: 39184 - DNA, 25 bp, SARS Virus
aaagtaagaaccgagtggaagttac

SEQ ID NO: 39185 - DNA, 25 bp, SARS Virus
aagtaagaaccgggtggaagttacc

SEQ ID NO: 39186 - DNA, 25 bp, SARS Virus
agtaagaaccgagtggaagttacca

SEQ ID NO: 39187 - DNA, 25 bp, SARS Virus
gtaagaaccgaggggaagttaccaa

SEQ ID NO: 39188 - DNA, 25 bp, SARS Virus
taagaaccgagtggaagttaccaaa

SEQ ID NO: 39189 - DNA, 25 bp, SARS Virus
aagaaccgagtggaagttaccaaac

SEQ ID NO: 39190 - DNA, 25 bp, SARS Virus
agaaccgagtgggagttaccaaacg

SEQ ID NO: 39191 - DNA, 25 bp, SARS Virus
gaaccgagtggaggttaccaaacgg

SEQ ID NO: 39192 - DNA, 25 bp, SARS Virus
aaccgagtggaagttaccaaacggt

SEQ ID NO: 39193 - DNA, 25 bp, SARS Virus
accgagtggaaggtaccaaacggta

SEQ ID NO: 39194 - DNA, 25 bp, SARS Virus
ccgagtggaagtgaccaaacggtac

SEQ ID NO: 39195 - DNA, 25 bp, SARS Virus
cgagtggaagttgccaaacggtaca

SEQ ID NO: 39196 - DNA, 25 bp, SARS Virus
gagtggaagttagcaaacggtacaa

SEQ ID NO: 39197 - DNA, 25 bp, SARS Virus
agtggaagttacgaaacggtacaaa

SEQ ID NO: 39198 - DNA, 25 bp, SARS Virus
gtggaagttaccgaacggtacaaaa

SEQ ID NO: 39199 - DNA, 25 bp, SARS Virus
tggaagttaccagacggtacaaaag

SEQ ID NO: 39200 - DNA, 25 bp, SARS Virus
ggaagttaccaagcggtacaaaaga

SEQ ID NO: 39201 - DNA, 25 bp, SARS Virus
gaagttaccaaagggtacaaaagag

SEQ ID NO: 39202 - DNA, 25 bp, SARS Virus
aagttaccaaacggtacaaaagagg

SEQ ID NO: 39203 - DNA, 25 bp, SARS Virus
agttaccaaacggtacaaaagagga

SEQ ID NO: 39204 - DNA, 25 bp, SARS Virus
gttaccaaacgggacaaaagaggat

SEQ ID NO: 39205 - DNA, 25 bp, SARS Virus
ttaccaaacggtgcaaaagaggata

SEQ ID NO: 39206 - DNA, 25 bp, SARS Virus
taccaaacggtagaaaagaggataa

SEQ ID NO: 39207 - DNA, 25 bp, SARS Virus
accaaacggtacgaaagaggataac

SEQ ID NO: 39208 - DNA, 25 bp, SARS Virus
ccaaacggtacagaagaggataaca

SEQ ID NO: 39209 - DNA, 25 bp, SARS Virus
caaacggtacaagagaggataacac

SEQ ID NO: 39210 - DNA, 25 bp, SARS Virus
aaacggtacaaaggaggataacacg

SEQ ID NO: 39211 - DNA, 25 bp, SARS Virus
aacggtacaaaagaggataacacgg

SEQ ID NO: 39212 - DNA, 25 bp, SARS Virus
acggtacaaaaggggataacacgga

SEQ ID NO: 39213 - DNA, 25 bp, SARS Virus
cggtacaaaagaggataacacggaa

SEQ ID NO: 39214 - DNA, 25 bp, SARS Virus
ggtacaaaagaggataacacggaaa

SEQ ID NO: 39215 - DNA, 25 bp, SARS Virus
gtacaaaagagggtaacacggaaaa

SEQ ID NO: 39216 - DNA, 25 bp, SARS Virus
tacaaaagaggagaacacggaaaaa

SEQ ID NO: 39217 - DNA, 25 bp, SARS Virus
acaaaagaggatgacacggaaaaac

SEQ ID NO: 39218 - DNA, 25 bp, SARS Virus
caaaagaggatagcacggaaaaacc

SEQ ID NO: 39219 - DNA, 25 bp, SARS Virus
aaaagaggataagacggaaaaacct

SEQ ID NO: 39220 - DNA, 25 bp, SARS Virus
aaagaggataacgcggaaaaaccta

SEQ ID NO: 39221 - DNA, 25 bp, SARS Virus
aagaggataacagggaaaaacctat

SEQ ID NO: 39222 - DNA, 25 bp, SARS Virus
agaggataacacggaaaaacctatt

SEQ ID NO: 39223 - DNA, 25 bp, SARS Virus
gaggataacacggaaaaacctattg

SEQ ID NO: 39224 - DNA, 25 bp, SARS Virus
aggataacacgggaaaacctattgt

SEQ ID NO: 39225 - DNA, 25 bp, SARS Virus
ggataacacggagaaacctattgtc

SEQ ID NO: 39226 - DNA, 25 bp, SARS Virus
gataacacggaagaacctattgtcg

SEQ ID NO: 39227 - DNA, 25 bp, SARS Virus
ataacacggaaagacctattgtcgt

SEQ ID NO: 39228 - DNA, 25 bp, SARS Virus
taacacggaaaagcctattgtcgtt

SEQ ID NO: 39229 - DNA, 25 bp, SARS Virus
aacacggaaaaagctattgtcgtta

SEQ ID NO: 39230 - DNA, 25 bp, SARS Virus
acacggaaaaacgtattgtcgttag

SEQ ID NO: 39231 - DNA, 25 bp, SARS Virus
cacggaaaaaccgattgtcgttaga

SEQ ID NO: 39232 - DNA, 25 bp, SARS Virus
acggaaaaacctgttgtcgttagat

SEQ ID NO: 39233 - DNA, 25 bp, SARS Virus
cggaaaaacctagtgtcgttagata

SEQ ID NO: 39234 - DNA, 25 bp, SARS Virus
ggaaaaacctatggtcgttagatac

SEQ ID NO: 39235 - DNA, 25 bp, SARS Virus
gaaaaacctattgtcgttagataca

SEQ ID NO: 39236 - DNA, 25 bp, SARS Virus
aaaaacctattggcgttagatacat

SEQ ID NO: 39237 - DNA, 25 bp, SARS Virus
aaaacctattgtggttagatacata

SEQ ID NO: 39238 - DNA, 25 bp, SARS Virus
aaacctattgtcgttagatacataa

SEQ ID NO: 39239 - DNA, 25 bp, SARS Virus
aacctattgtcggtagatacataag

SEQ ID NO: 39240 - DNA, 25 bp, SARS Virus
acctattgtcgtgagatacataaga

SEQ ID NO: 39241 - DNA, 25 bp, SARS Virus
cctattgtcgttggatacataagac

SEQ ID NO: 39242 - DNA, 25 bp, SARS Virus
ctattgtcgttagatacataagaca

SEQ ID NO: 39243 - DNA, 25 bp, SARS Virus
tattgtcgttaggtacataagacat

SEQ ID NO: 39244 - DNA, 25 bp, SARS Virus
attgtcgttagagacataagacata

SEQ ID NO: 39245 - DNA, 25 bp, SARS Virus
ttgtcgttagatgcataagacataa

SEQ ID NO: 39246 - DNA, 25 bp, SARS Virus
tgtcgttagatagataagacataaa

SEQ ID NO: 39247 - DNA, 25 bp, SARS Virus
gtcgttagatacgtaagacataaag

SEQ ID NO: 39248 - DNA, 25 bp, SARS Virus
tcgttagatacagaagacataaaga

SEQ ID NO: 39249 - DNA, 25 bp, SARS Virus
cgttagatacatgagacataaagag

SEQ ID NO: 39250 - DNA, 25 bp, SARS Virus
gttagatacataggacataaagaga

SEQ ID NO: 39251 - DNA, 25 bp, SARS Virus
ttagatacataagacataaagagac

SEQ ID NO: 39252 - DNA, 25 bp, SARS Virus
tagatacataaggcataaagagact

SEQ ID NO: 39253 - DNA, 25 bp, SARS Virus
agatacataagagataaagagactt

SEQ ID NO: 39254 - DNA, 25 bp, SARS Virus
gatacataagacgtaaagagacttc

SEQ ID NO: 39255 - DNA, 25 bp, SARS Virus
atacataagacagaaagagacttcg

SEQ ID NO: 39256 - DNA, 25 bp, SARS Virus
tacataagacatgaagagacttcgt

SEQ ID NO: 39257 - DNA, 25 bp, SARS Virus
acataagacatagagagacttcgtg

SEQ ID NO: 39258 - DNA, 25 bp, SARS Virus
cataagacataaggagacttcgtga

SEQ ID NO: 39259 - DNA, 25 bp, SARS Virus
ataagacataaagagacttcgtgac

SEQ ID NO: 39260 - DNA, 25 bp, SARS Virus
taagacataaagggacttcgtgacg

SEQ ID NO: 39261 - DNA, 25 bp, SARS Virus
aagacataaagagacttcgtgacgg

SEQ ID NO: 39262 - DNA, 25 bp, SARS Virus
agacataaagaggcttcgtgacggt

SEQ ID NO: 39263 - DNA, 25 bp, SARS Virus
gacataaagagagttcgtgacggta

SEQ ID NO: 39264 - DNA, 25 bp, SARS Virus
acataaagagacgtcgtgacggtaa

SEQ ID NO: 39265 - DNA, 25 bp, SARS Virus
cataaagagactgcgtgacggtaac

SEQ ID NO: 39266 - DNA, 25 bp, SARS Virus
ataaagagacttggtgacggtaacc

SEQ ID NO: 39267 - DNA, 25 bp, SARS Virus
taaagagacttcgtgacggtaacca

SEQ ID NO: 39268 - DNA, 25 bp, SARS Virus
aaagagacttcgggacggtaaccaa

SEQ ID NO: 39269 - DNA, 25 bp, SARS Virus
aagagacttcgtgacggtaaccaag

SEQ ID NO: 39270 - DNA, 25 bp, SARS Virus
agagacttcgtggcggtaaccaaga

SEQ ID NO: 39271 - DNA, 25 bp, SARS Virus
gagacttcgtgagggtaaccaagaa

SEQ ID NO: 39272 - DNA, 25 bp, SARS Virus
agacttcgtgacggtaaccaagaaa

SEQ ID NO: 39273 - DNA, 25 bp, SARS Virus
gacttcgtgacggtaaccaagaaat

SEQ ID NO: 39274 - DNA, 25 bp, SARS Virus
acttcgtgacgggaaccaagaaatt

SEQ ID NO: 39275 - DNA, 25 bp, SARS Virus
cttcgtgacggtgaccaagaaattg

SEQ ID NO: 39276 - DNA, 25 bp, SARS Virus
ttcgtgacggtagccaagaaattgt

SEQ ID NO: 39277 - DNA, 25 bp, SARS Virus
tcgtgacggtaagcaagaaattgtt

SEQ ID NO: 39278 - DNA, 25 bp, SARS Virus
cgtgacggtaacgaagaaattgttg

SEQ ID NO: 39279 - DNA, 25 bp, SARS Virus
gtgacggtaaccgagaaattgttga

SEQ ID NO: 39280 - DNA, 25 bp, SARS Virus
tgacggtaaccaggaaattgttgat

SEQ ID NO: 39281 - DNA, 25 bp, SARS Virus
gacggtaaccaagaaattgttgata

SEQ ID NO: 39282 - DNA, 25 bp, SARS Virus
acggtaaccaaggaattgttgatag

SEQ ID NO: 39283 - DNA, 25 bp, SARS Virus
cggtaaccaagagattgttgataga

SEQ ID NO: 39284 - DNA, 25 bp, SARS Virus
ggtaaccaagaagttgttgatagaa

SEQ ID NO: 39285 - DNA, 25 bp, SARS Virus
gtaaccaagaaagtgttgatagaat

SEQ ID NO: 39286 - DNA, 25 bp, SARS Virus
taaccaagaaatggttgatagaatc

SEQ ID NO: 39287 - DNA, 25 bp, SARS Virus
aaccaagaaattgttgatagaatcc

SEQ ID NO: 39288 - DNA, 25 bp, SARS Virus
accaagaaattggtgatagaatcct

SEQ ID NO: 39289 - DNA, 25 bp, SARS Virus
ccaagaaattgtggatagaatcctt

SEQ ID NO: 39290 - DNA, 25 bp, SARS Virus
caagaaattgttgatagaatccttt

SEQ ID NO: 39291 - DNA, 25 bp, SARS Virus
aagaaattgttggtagaatcctttt

SEQ ID NO: 39292 - DNA, 25 bp, SARS Virus
agaaattgttgagagaatccttttc

SEQ ID NO: 39293 - DNA, 25 bp, SARS Virus
gaaattgttgatggaatccttttct

SEQ ID NO: 39294 - DNA, 25 bp, SARS Virus
aaattgttgatagaatccttttctc

SEQ ID NO: 39295 - DNA, 25 bp, SARS Virus
aattgttgataggatccttttctca

SEQ ID NO: 39296 - DNA, 25 bp, SARS Virus
attgttgatagagtccttttctcag

SEQ ID NO: 39297 - DNA, 25 bp, SARS Virus
ttgttgatagaagccttttctcagt

SEQ ID NO: 39298 - DNA, 25 bp, SARS Virus
tgttgatagaatgcttttctcagta

SEQ ID NO: 39299 - DNA, 25 bp, SARS Virus
gttgatagaatcgttttctcagtac

SEQ ID NO: 39300 - DNA, 25 bp, SARS Virus
ttgatagaatccgtttctcagtaca

SEQ ID NO: 39301 - DNA, 25 bp, SARS Virus
tgatagaatcctgttctcagtacaa

SEQ ID NO: 39302 - DNA, 25 bp, SARS Virus
gatagaatccttgtctcagtacaaa

SEQ ID NO: 39303 - DNA, 25 bp, SARS Virus
atagaatcctttgctcagtacaaat

SEQ ID NO: 39304 - DNA, 25 bp, SARS Virus
tagaatccttttgtcagtacaaatt

SEQ ID NO: 39305 - DNA, 25 bp, SARS Virus
agaatccttttcgcagtacaaatta

SEQ ID NO: 39306 - DNA, 25 bp, SARS Virus
gaatccttttctgagtacaaattac

SEQ ID NO: 39307 - DNA, 25 bp, SARS Virus
aatccttttctcggtacaaattacc

SEQ ID NO: 39308 - DNA, 25 bp, SARS Virus
atccttttctcagtacaaattacct

SEQ ID NO: 39309 - DNA, 25 bp, SARS Virus
tccttttctcaggacaaattacctc

SEQ ID NO: 39310 - DNA, 25 bp, SARS Virus
ccttttctcagtgcaaattacctca

SEQ ID NO: 39311 - DNA, 25 bp, SARS Virus
cttttctcagtagaaattacctcaa

SEQ ID NO: 39312 - DNA, 25 bp, SARS Virus
ttttctcagtacgaattacctcaat

SEQ ID NO: 39313 - DNA, 25 bp, SARS Virus
tttctcagtacagattacctcaatg

SEQ ID NO: 39314 - DNA, 25 bp, SARS Virus
ttctcagtacaagttacctcaatgt

SEQ ID NO: 39315 - DNA, 25 bp, SARS Virus
tctcagtacaaagtacctcaatgta

SEQ ID NO: 39316 - DNA, 25 bp, SARS Virus
ctcagtacaaatgacctcaatgtaa

SEQ ID NO: 39317 - DNA, 25 bp, SARS Virus
tcagtacaaattgcctcaatgtaaa

SEQ ID NO: 39318 - DNA, 25 bp, SARS Virus
cagtacaaattagctcaatgtaaat

SEQ ID NO: 39319 - DNA, 25 bp, SARS Virus
agtacaaattacgtcaatgtaaatc

SEQ ID NO: 39320 - DNA, 25 bp, SARS Virus
gtacaaattaccgcaatgtaaatca

SEQ ID NO: 39321 - DNA, 25 bp, SARS Virus
tacaaattacctgaatgtaaatcat

SEQ ID NO: 39322 - DNA, 25 bp, SARS Virus
acaaattacctcgatgtaaatcatg

SEQ ID NO: 39323 - DNA, 25 bp, SARS Virus
caaattacctcagtgtaaatcatgg

SEQ ID NO: 39324 - DNA, 25 bp, SARS Virus
aaattacctcaaggtaaatcatgga

SEQ ID NO: 39325 - DNA, 25 bp, SARS Virus
aattacctcaatgtaaatcatggaa

SEQ ID NO: 39326 - DNA, 25 bp, SARS Virus
attacctcaatggaaatcatggaag

SEQ ID NO: 39327 - DNA, 25 bp, SARS Virus
ttacctcaatgtgaatcatggaagc

SEQ ID NO: 39328 - DNA, 25 bp, SARS Virus
tacctcaatgtagatcatggaagct

SEQ ID NO: 39329 - DNA, 25 bp, SARS Virus
acctcaatgtaagtcatggaagctc

SEQ ID NO: 39330 - DNA, 25 bp, SARS Virus
cctcaatgtaaagcatggaagctcc

SEQ ID NO: 39331 - DNA, 25 bp, SARS Virus
ctcaatgtaaatgatggaagctcct

SEQ ID NO: 39332 - DNA, 25 bp, SARS Virus
tcaatgtaaatcgtggaagctcctc

SEQ ID NO: 39333 - DNA, 25 bp, SARS Virus
caatgtaaatcagggaagctcctcc

SEQ ID NO: 39334 - DNA, 25 bp, SARS Virus
aatgtaaatcatggaagctcctccg

SEQ ID NO: 39335 - DNA, 25 bp, SARS Virus
atgtaaatcatggaagctcctccga

SEQ ID NO: 39336 - DNA, 25 bp, SARS Virus
tgtaaatcatgggagctcctccgac

SEQ ID NO: 39337 - DNA, 25 bp, SARS Virus
gtaaatcatggaggctcctccgacg

SEQ ID NO: 39338 - DNA, 25 bp, SARS Virus
taaatcatggaagctcctccgacga

SEQ ID NO: 39339 - DNA, 25 bp, SARS Virus
aaatcatggaaggtcctccgacgaa

SEQ ID NO: 39340 - DNA, 25 bp, SARS Virus
aatcatggaagcgcctccgacgaaa

SEQ ID NO: 39341 - DNA, 25 bp, SARS Virus
atcatggaagctgctccgacgaaac

SEQ ID NO: 39342 - DNA, 25 bp, SARS Virus
tcatggaagctcgtccgacgaaaca

SEQ ID NO: 39343 - DNA, 25 bp, SARS Virus
catggaagctccgccgacgaaacac

SEQ ID NO: 39344 - DNA, 25 bp, SARS Virus
atggaagctcctgcgacgaaacaca

SEQ ID NO: 39345 - DNA, 25 bp, SARS Virus
tggaagctcctcggacgaaacacat

SEQ ID NO: 39346 - DNA, 25 bp, SARS Virus
ggaagctcctccgacgaaacacatg

SEQ ID NO: 39347 - DNA, 25 bp, SARS Virus
gaagctcctccggcgaaacacatgg

SEQ ID NO: 39348 - DNA, 25 bp, SARS Virus
aagctcctccgaggaaacacatgga

SEQ ID NO: 39349 - DNA, 25 bp, SARS Virus
agctcctccgacgaaacacatggaa

SEQ ID NO: 39350 - DNA, 25 bp, SARS Virus
gctcctccgacggaacacatggaaa

SEQ ID NO: 39351 - DNA, 25 bp, SARS Virus
ctcctccgacgagacacatggaaaa

SEQ ID NO: 39352 - DNA, 25 bp, SARS Virus
tcctccgacgaagcacatggaaaaa

SEQ ID NO: 39353 - DNA, 25 bp, SARS Virus
cctccgacgaaagacatggaaaaac

SEQ ID NO: 39354 - DNA, 25 bp, SARS Virus
ctccgacgaaacgcatggaaaaacg

SEQ ID NO: 39355 - DNA, 25 bp, SARS Virus
tccgacgaaacagatggaaaaacga

SEQ ID NO: 39356 - DNA, 25 bp, SARS Virus
ccgacgaaacacgtggaaaaacgag

SEQ ID NO: 39357 - DNA, 25 bp, SARS Virus
cgacgaaacacagggaaaaacgagt

SEQ ID NO: 39358 - DNA, 25 bp, SARS Virus
gacgaaacacatggaaaaacgagtt

SEQ ID NO: 39359 - DNA, 25 bp, SARS Virus
acgaaacacatggaaaaacgagttg

SEQ ID NO: 39360 - DNA, 25 bp, SARS Virus
cgaaacacatgggaaaacgagttgt

SEQ ID NO: 39361 - DNA, 25 bp, SARS Virus
gaaacacatggagaaacgagttgtt

SEQ ID NO: 39362 - DNA, 25 bp, SARS Virus
aaacacatggaagaacgagttgttc

SEQ ID NO: 39363 - DNA, 25 bp, SARS Virus
aacacatggaaagacgagttgttcc

SEQ ID NO: 39364 - DNA, 25 bp, SARS Virus
acacatggaaaagcgagttgttcct

SEQ ID NO: 39365 - DNA, 25 bp, SARS Virus
cacatggaaaaaggagttgttcctt

SEQ ID NO: 39366 - DNA, 25 bp, SARS Virus
acatggaaaaacgagttgttccttt

SEQ ID NO: 39367 - DNA, 25 bp, SARS Virus
catggaaaaacgggttgttccttta

SEQ ID NO: 39368 - DNA, 25 bp, SARS Virus
atggaaaaacgagttgttcctttac

SEQ ID NO: 39369 - DNA, 25 bp, SARS Virus
tggaaaaacgaggtgttcctttaca

SEQ ID NO: 39370 - DNA, 25 bp, SARS Virus
ggaaaaacgagtggttcctttacat

SEQ ID NO: 39371 - DNA, 25 bp, SARS Virus
gaaaaacgagttgttcctttacatg

SEQ ID NO: 39372 - DNA, 25 bp, SARS Virus
aaaaacgagttggtcctttacatgg

SEQ ID NO: 39373 - DNA, 25 bp, SARS Virus
aaaacgagttgtgcctttacatgga

SEQ ID NO: 39374 - DNA, 25 bp, SARS Virus
aaacgagttgttgctttacatggat

SEQ ID NO: 39375 - DNA, 25 bp, SARS Virus
aacgagttgttcgtttacatggatt

SEQ ID NO: 39376 - DNA, 25 bp, SARS Virus
acgagttgttccgttacatggattt

SEQ ID NO: 39377 - DNA, 25 bp, SARS Virus
cgagttgttcctgtacatggatttt

SEQ ID NO: 39378 - DNA, 25 bp, SARS Virus
gagttgttccttgacatggatttta

SEQ ID NO: 39379 - DNA, 25 bp, SARS Virus
agttgttcctttgcatggattttaa

SEQ ID NO: 39380 - DNA, 25 bp, SARS Virus
gttgttcctttagatggattttaac

SEQ ID NO: 39381 - DNA, 25 bp, SARS Virus
ttgttcctttacgtggattttaacg

SEQ ID NO: 39382 - DNA, 25 bp, SARS Virus
tgttcctttacagggattttaacgc

SEQ ID NO: 39383 - DNA, 25 bp, SARS Virus
gttcctttacatggattttaacgca

SEQ ID NO: 39384 - DNA, 25 bp, SARS Virus
ttcctttacatggattttaacgcat

SEQ ID NO: 39385 - DNA, 25 bp, SARS Virus
tcctttacatgggttttaacgcatc

SEQ ID NO: 39386 - DNA, 25 bp, SARS Virus
cctttacatggagtttaacgcatcg

SEQ ID NO: 39387 - DNA, 25 bp, SARS Virus
ctttacatggatgttaacgcatcgc

SEQ ID NO: 39388 - DNA, 25 bp, SARS Virus
tttacatggattgtaacgcatcgct

SEQ ID NO: 39389 - DNA, 25 bp, SARS Virus
ttacatggatttgaacgcatcgctc

SEQ ID NO: 39390 - DNA, 25 bp, SARS Virus
tacatggattttgacgcatcgctct

SEQ ID NO: 39391 - DNA, 25 bp, SARS Virus
acatggattttagcgcatcgctctg

SEQ ID NO: 39392 - DNA, 25 bp, SARS Virus
catggattttaaggcatcgctctgt

SEQ ID NO: 39393 - DNA, 25 bp, SARS Virus
atggattttaacgcatcgctctgtg

SEQ ID NO: 39394 - DNA, 25 bp, SARS Virus
tggattttaacggatcgctctgtga

SEQ ID NO: 39395 - DNA, 25 bp, SARS Virus
ggattttaacgcgtcgctctgtgac

SEQ ID NO: 39396 - DNA, 25 bp, SARS Virus
gattttaacgcagcgctctgtgaca

SEQ ID NO: 39397 - DNA, 25 bp, SARS Virus
attttaacgcatggctctgtgacaa

SEQ ID NO: 39398 - DNA, 25 bp, SARS Virus
ttttaacgcatcgctctgtgacaac

SEQ ID NO: 39399 - DNA, 25 bp, SARS Virus
tttaacgcatcggtctgtgacaacg

SEQ ID NO: 39400 - DNA, 25 bp, SARS Virus
ttaacgcatcgcgctgtgacaacgg

SEQ ID NO: 39401 - DNA, 25 bp, SARS Virus
taacgcatcgctgtgtgacaacggt

SEQ ID NO: 39402 - DNA, 25 bp, SARS Virus
aacgcatcgctcggtgacaacggtg

SEQ ID NO: 39403 - DNA, 25 bp, SARS Virus
acgcatcgctctgtgacaacggtga

SEQ ID NO: 39404 - DNA, 25 bp, SARS Virus
cgcatcgctctgggacaacggtgaa

SEQ ID NO: 39405 - DNA, 25 bp, SARS Virus
gcatcgctctgtgacaacggtgaat

SEQ ID NO: 39406 - DNA, 25 bp, SARS Virus
catcgctctgtggcaacggtgaatg

SEQ ID NO: 39407 - DNA, 25 bp, SARS Virus
atcgctctgtgagaacggtgaatgt

SEQ ID NO: 39408 - DNA, 25 bp, SARS Virus
tcgctctgtgacgacggtgaatgtg

SEQ ID NO: 39409 - DNA, 25 bp, SARS Virus
cgctctgtgacagcggtgaatgtgt

SEQ ID NO: 39410 - DNA, 25 bp, SARS Virus
gctctgtgacaagggtgaatgtgtc

SEQ ID NO: 39411 - DNA, 25 bp, SARS Virus
ctctgtgacaacggtgaatgtgtca

SEQ ID NO: 39412 - DNA, 25 bp, SARS Virus
tctgtgacaacggtgaatgtgtcat

SEQ ID NO: 39413 - DNA, 25 bp, SARS Virus
ctgtgacaacggggaatgtgtcata

SEQ ID NO: 39414 - DNA, 25 bp, SARS Virus
tgtgacaacggtgaatgtgtcatat

SEQ ID NO: 39415 - DNA, 25 bp, SARS Virus
gtgacaacggtggatgtgtcatatt

SEQ ID NO: 39416 - DNA, 25 bp, SARS Virus
tgacaacggtgagtgtgtcatattg

SEQ ID NO: 39417 - DNA, 25 bp, SARS Virus
gacaacggtgaaggtgtcatattgt

SEQ ID NO: 39418 - DNA, 25 bp, SARS Virus
acaacggtgaatgtgtcatattgtc

SEQ ID NO: 39419 - DNA, 25 bp, SARS Virus
caacggtgaatgggtcatattgtcc

SEQ ID NO: 39420 - DNA, 25 bp, SARS Virus
aacggtgaatgtgtcatattgtcca

SEQ ID NO: 39421 - DNA, 25 bp, SARS Virus
acggtgaatgtggcatattgtccat

SEQ ID NO: 39422 - DNA, 25 bp, SARS Virus
cggtgaatgtgtgatattgtccata

SEQ ID NO: 39423 - DNA, 25 bp, SARS Virus
ggtgaatgtgtcgtattgtccatag

SEQ ID NO: 39424 - DNA, 25 bp, SARS Virus
gtgaatgtgtcagattgtccataga

SEQ ID NO: 39425 - DNA, 25 bp, SARS Virus
tgaatgtgtcatgttgtccatagaa

SEQ ID NO: 39426 - DNA, 25 bp, SARS Virus
gaatgtgtcatagtgtccatagaac

SEQ ID NO: 39427 - DNA, 25 bp, SARS Virus
aatgtgtcatatggtccatagaacg

SEQ ID NO: 39428 - DNA, 25 bp, SARS Virus
atgtgtcatattgtccatagaacga

SEQ ID NO: 39429 - DNA, 25 bp, SARS Virus
tgtgtcatattggccatagaacgag

SEQ ID NO: 39430 - DNA, 25 bp, SARS Virus
gtgtcatattgtgcatagaacgaga

SEQ ID NO: 39431 - DNA, 25 bp, SARS Virus
tgtcatattgtcgatagaacgagat

SEQ ID NO: 39432 - DNA, 25 bp, SARS Virus
gtcatattgtccgtagaacgagata

SEQ ID NO: 39433 - DNA, 25 bp, SARS Virus
tcatattgtccagagaacgagatat

SEQ ID NO: 39434 - DNA, 25 bp, SARS Virus
catattgtccatggaacgagatata

SEQ ID NO: 39435 - DNA, 25 bp, SARS Virus
atattgtccatagaacgagatatat

SEQ ID NO: 39436 - DNA, 25 bp, SARS Virus
tattgtccataggacgagatatatt

SEQ ID NO: 39437 - DNA, 25 bp, SARS Virus
attgtccatagagcgagatatattg

SEQ ID NO: 39438 - DNA, 25 bp, SARS Virus
ttgtccatagaaggagatatattgt

SEQ ID NO: 39439 - DNA, 25 bp, SARS Virus
tgtccatagaacgagatatattgtt

SEQ ID NO: 39440 - DNA, 25 bp, SARS Virus
gtccatagaacgggatatattgttc

SEQ ID NO: 39441 - DNA, 25 bp, SARS Virus
tccatagaacgagatatattgttca

SEQ ID NO: 39442 - DNA, 25 bp, SARS Virus
ccatagaacgaggtatattgttcat

SEQ ID NO: 39443 - DNA, 25 bp, SARS Virus
catagaacgagagatattgttcatg

SEQ ID NO: 39444 - DNA, 25 bp, SARS Virus
atagaacgagatgtattgttcatgt

SEQ ID NO: 39445 - DNA, 25 bp, SARS Virus
tagaacgagatagattgttcatgtt

SEQ ID NO: 39446 - DNA, 25 bp, SARS Virus
agaacgagatatgttgttcatgttc

SEQ ID NO: 39447 - DNA, 25 bp, SARS Virus
gaacgagatatagtgttcatgttca

SEQ ID NO: 39448 - DNA, 25 bp, SARS Virus
aacgagatatatggttcatgttcat

(The sequence listing continues in the following parts.)
